United States Patent Application Publication US 2007/0042381 A1 - sequence listing, part 14

SEQ ID NO: 587413 - RNA, 22 nt, Human
cacaaugcagcauguaaaugca

SEQ ID NO: 587414 - RNA, 22 nt, Human
auucuauagacagaaggucaau

SEQ ID NO: 587415 - RNA, 22 nt, Human
aauuuuauuagaaggcaagggg

SEQ ID NO: 587416 - RNA, 22 nt, Human
cacauguaguaagcaggcaaug

SEQ ID NO: 587417 - RNA, 22 nt, Human
uuuguccuugaaucaauucaca

SEQ ID NO: 587418 - RNA, 22 nt, Human
uggcuuccaaauuaucccuaga

SEQ ID NO: 587419 - RNA, 19 nt, Human
ugcucacucucagucccuc

SEQ ID NO: 587420 - RNA, 20 nt, Human
gugcaauggcucagucucag

SEQ ID NO: 587421 - RNA, 22 nt, Human
caggcagcugaggacuuugcua

SEQ ID NO: 587422 - RNA, 20 nt, Human
acguggccaccaguggcuua

SEQ ID NO: 587423 - RNA, 22 nt, Human
ucugugccaagcuuauaucugu

SEQ ID NO: 587424 - RNA, 22 nt, Human
agucuuuauacagaaauauaug

SEQ ID NO: 587425 - RNA, 22 nt, Human
aagguguucagguuuucccauu

SEQ ID NO: 587426 - RNA, 22 nt, Human
aagcugccacacggugaguacu

SEQ ID NO: 587427 - RNA, 22 nt, Human
uauagaagagacaugugcauag

SEQ ID NO: 587428 - RNA, 22 nt, Human
uuuuucugucucuuacauugca

SEQ ID NO: 587429 - RNA, 22 nt, Human
ucugcaaaaguguucauaaaga

SEQ ID NO: 587430 - RNA, 22 nt, Human
uagggcuguggucaguccucua

SEQ ID NO: 587431 - RNA, 21 nt, Human
cccaggcugaauuaaaaauau

SEQ ID NO: 587432 - RNA, 22 nt, Human
acaguguagugugaugucaaaa

SEQ ID NO: 587433 - RNA, 22 nt, Human
gguagggaugggauuuggaagu

SEQ ID NO: 587434 - RNA, 22 nt, Human
uauguacaguccuuaacuuaaa

SEQ ID NO: 587435 - RNA, 22 nt, Human
cccagggcuguagaauguccaa

SEQ ID NO: 587436 - RNA, 22 nt, Human
aaagagcuggcauuuauagucu

SEQ ID NO: 587437 - RNA, 22 nt, Human
acuggaguccagacccaagagg

SEQ ID NO: 587438 - RNA, 22 nt, Human
uuaaagaggcagguuaaauaau

SEQ ID NO: 587439 - RNA, 22 nt, Human
cuguuaaaauguggucuuaaaa

SEQ ID NO: 587440 - RNA, 23 nt, Human
cugaagagccaacaaaaagcuug

SEQ ID NO: 587441 - RNA, 22 nt, Human
aggaaagcucccaguagggcuc

SEQ ID NO: 587442 - RNA, 22 nt, Human
gugagguccauguuaauggguu

SEQ ID NO: 587443 - RNA, 22 nt, Human
cugggcuacguguugacagcau

SEQ ID NO: 587444 - RNA, 22 nt, Human
gugcaaaaguaaaugugguuuu

SEQ ID NO: 587445 - RNA, 21 nt, Human
ggaaaauucagagugcaauuu

SEQ ID NO: 587446 - RNA, 22 nt, Human
uaacacagugucuaccauuauu

SEQ ID NO: 587447 - RNA, 22 nt, Human
aauuuuaagcauaugacugguu

SEQ ID NO: 587448 - RNA, 22 nt, Human
cuagaaaaauacuuuauuguga

SEQ ID NO: 587449 - RNA, 21 nt, Human
cugucccucuuugcuucccuc

SEQ ID NO: 587450 - RNA, 22 nt, Human
agaaauacuaggaauauucaua

SEQ ID NO: 587451 - RNA, 22 nt, Human
ucacaugcuguguguggagauc

SEQ ID NO: 587452 - RNA, 22 nt, Human
gugugcagaagacacaagacau

SEQ ID NO: 587453 - RNA, 22 nt, Human
ucuuucuugguauucugagcua

SEQ ID NO: 587454 - RNA, 17 nt, Human
ugguggcuggagucagg

SEQ ID NO: 587455 - RNA, 22 nt, Human
agggccaggaucacagccaaga

SEQ ID NO: 587456 - RNA, 19 nt, Human
cacuucacauggugaaagc

SEQ ID NO: 587457 - RNA, 22 nt, Human
gaggcuccucauucaguaugcu

SEQ ID NO: 587458 - RNA, 22 nt, Human
augcagaugggugccaaagucu

SEQ ID NO: 587459 - RNA, 22 nt, Human
cugccucuggccucaggcccag

SEQ ID NO: 587460 - RNA, 22 nt, Human
uagcuaguagauggggaagcug

SEQ ID NO: 587461 - RNA, 23 nt, Human
aaauggccaagguuaaaaauaca

SEQ ID NO: 587462 - RNA, 22 nt, Human
ucagucuuuugcccugaggagu

SEQ ID NO: 587463 - RNA, 22 nt, Human
ccagcuggaacggcagcccagc

SEQ ID NO: 587464 - RNA, 20 nt, Human
aggcaagguagaugucugcu

SEQ ID NO: 587465 - RNA, 22 nt, Human
ucccagaaguccagccaugggc

SEQ ID NO: 587466 - RNA, 22 nt, Human
gcagaggguccugugccagcag

SEQ ID NO: 587467 - RNA, 22 nt, Human
ggugccaggcuguagucagggu

SEQ ID NO: 587468 - RNA, 22 nt, Human
ucugauguugcuucugcagaac

SEQ ID NO: 587469 - RNA, 22 nt, Human
auaguaaauuaucguggagaga

SEQ ID NO: 587470 - RNA, 22 nt, Human
gaccagcugguccuguccuggg

SEQ ID NO: 587471 - RNA, 22 nt, Human
uuuccucagaagugucuacuau

SEQ ID NO: 587472 - RNA, 22 nt, Human
aggaagcucauuuugacauauc

SEQ ID NO: 587473 - RNA, 21 nt, Human
ugaauaaagcugcugucgaua

SEQ ID NO: 587474 - RNA, 22 nt, Human
gcagcucugauugguucagccu

SEQ ID NO: 587475 - RNA, 22 nt, Human
auguguauccaucugucuauuu

SEQ ID NO: 587476 - RNA, 22 nt, Human
aaucacauagccaucucuuuga

SEQ ID NO: 587477 - RNA, 22 nt, Human
acagggcauuuccucuaugugu

SEQ ID NO: 587478 - RNA, 22 nt, Human
uuaaauuauuucuagugaggug

SEQ ID NO: 587479 - RNA, 21 nt, Human
ugcuucucuagaucaacuacu

SEQ ID NO: 587480 - RNA, 22 nt, Human
guucuucagaggggaaagaacc

SEQ ID NO: 587481 - RNA, 22 nt, Human
aaacacagauuucuuuguccca

SEQ ID NO: 587482 - RNA, 22 nt, Human
aaagguaugauacugugacaug

SEQ ID NO: 587483 - RNA, 22 nt, Human
uggaagcacuuggguuuuguug

SEQ ID NO: 587484 - RNA, 22 nt, Human
auauguuucaguauucaaguca

SEQ ID NO: 587485 - RNA, 22 nt, Human
auuuccaaaaccacuuauugcc

SEQ ID NO: 587486 - RNA, 22 nt, Human
ucaagucuugaugagacaaacc

SEQ ID NO: 587487 - RNA, 22 nt, Human
uuuaagacccacagggaaguug

SEQ ID NO: 587488 - RNA, 22 nt, Human
uugagucucugccaaaacacaa

SEQ ID NO: 587489 - RNA, 22 nt, Human
uggggcaguggcuuuucacccu

SEQ ID NO: 587490 - RNA, 22 nt, Human
ucuuuacaucacaauuguaugg

SEQ ID NO: 587491 - RNA, 22 nt, Human
ugggccucaucuucaaugaguc

SEQ ID NO: 587492 - RNA, 22 nt, Human
cuggagugauacucagaaugug

SEQ ID NO: 587493 - RNA, 22 nt, Human
uugaaaacagcguagauucaca

SEQ ID NO: 587494 - RNA, 22 nt, Human
gagugcucgggccucugccugc

SEQ ID NO: 587495 - RNA, 22 nt, Human
ucauugaguugcacuuuuacua

SEQ ID NO: 587496 - RNA, 22 nt, Human
acuuagcauuauguaauuacua

SEQ ID NO: 587497 - RNA, 22 nt, Human
aggcacugcagauuacaggcgc

SEQ ID NO: 587498 - RNA, 22 nt, Human
cuuaaacugggcauucagagaa

SEQ ID NO: 587499 - RNA, 22 nt, Human
cagcuguccaaacacauuaacu

SEQ ID NO: 587500 - RNA, 22 nt, Human
aguuauugaguaucuauaaugu

SEQ ID NO: 587501 - RNA, 22 nt, Human
aauacagaggggucacaauuca

SEQ ID NO: 587502 - RNA, 22 nt, Human
uggugggggaggcugucuagca

SEQ ID NO: 587503 - RNA, 23 nt, Human
agccucagccgguggcagaagug

SEQ ID NO: 587504 - RNA, 22 nt, Human
gagggucuuaccuaagcagggu

SEQ ID NO: 587505 - RNA, 22 nt, Human
acagagacucaugaaagaugac

SEQ ID NO: 587506 - RNA, 22 nt, Human
uuagagauuugucugauaguag

SEQ ID NO: 587507 - RNA, 22 nt, Human
gaacaaacugggucccaaugau

SEQ ID NO: 587508 - RNA, 18 nt, Human
gggcacuggggacuggag

SEQ ID NO: 587509 - RNA, 22 nt, Human
agccuggugauaucagugguuu

SEQ ID NO: 587510 - RNA, 22 nt, Human
guggccagaaucuugaggccuu

SEQ ID NO: 587511 - RNA, 22 nt, Human
auacaaauuauaggccccaucc

SEQ ID NO: 587512 - RNA, 22 nt, Human
ggcuucccaggcgguccccaca

SEQ ID NO: 587513 - RNA, 22 nt, Human
uaagagcugaggcauugggaca

SEQ ID NO: 587514 - RNA, 21 nt, Human
auucagaguaauucaucuuua

SEQ ID NO: 587515 - RNA, 23 nt, Human
agccccucauaucugcuuucucu

SEQ ID NO: 587516 - RNA, 22 nt, Human
gcccagccagagcugugugaug

SEQ ID NO: 587517 - RNA, 22 nt, Human
uugaggccccauggaugagaac

SEQ ID NO: 587518 - RNA, 22 nt, Human
uauuccuaauuugcagggcaug

SEQ ID NO: 587519 - RNA, 18 nt, Human
gucagaggauggggaaau

SEQ ID NO: 587520 - RNA, 22 nt, Human
ugcuuaaaaacaguaugguagu

SEQ ID NO: 587521 - RNA, 22 nt, Human
aauaacaggguugauuugcaau

SEQ ID NO: 587522 - RNA, 22 nt, Human
agccacagcuccuugguggaga

SEQ ID NO: 587523 - RNA, 22 nt, Human
acugaacauccauaagauuuuu

SEQ ID NO: 587524 - RNA, 22 nt, Human
acucagcuuccuacagcuagaa

SEQ ID NO: 587525 - RNA, 23 nt, Human
aaacuacaacgccaggcacugag

SEQ ID NO: 587526 - RNA, 22 nt, Human
cagggugccuguccucagcaaa

SEQ ID NO: 587527 - RNA, 22 nt, Human
ggcugcuggcauugagguaggu

SEQ ID NO: 587528 - RNA, 22 nt, Human
cugggacuugcagagcaggagg

SEQ ID NO: 587529 - RNA, 22 nt, Human
aacccaggaguuggaggcugug

SEQ ID NO: 587530 - RNA, 22 nt, Human
agaucacugguuacuuaaugaa

SEQ ID NO: 587531 - RNA, 22 nt, Human
uuucaagaagcaaauuaaaguc

SEQ ID NO: 587532 - RNA, 16 nt, Human
gcuggaguccuggagc

SEQ ID NO: 587533 - RNA, 22 nt, Human
ugagacagccucugcacucaug

SEQ ID NO: 587534 - RNA, 22 nt, Human
gccacugcacuccagcccaggc

SEQ ID NO: 587535 - RNA, 22 nt, Human
aauaagacacacaacugucaag

SEQ ID NO: 587536 - RNA, 22 nt, Human
ccagccaguauauuccaaagcc

SEQ ID NO: 587537 - RNA, 22 nt, Human
agagucuuccaggcagccugag

SEQ ID NO: 587538 - RNA, 22 nt, Human
uuccaguugucauaaagcuagg

SEQ ID NO: 587539 - RNA, 22 nt, Human
cagauuccggucaucucuccuu

SEQ ID NO: 587540 - RNA, 22 nt, Human
aguguuucaccguauguucuca

SEQ ID NO: 587541 - RNA, 22 nt, Human
ugcucaguccuaccuuggcucc

SEQ ID NO: 587542 - RNA, 22 nt, Human
cucagggaggagcuucugggcc

SEQ ID NO: 587543 - RNA, 22 nt, Human
uaggagcuaaaauauuuuauau

SEQ ID NO: 587544 - RNA, 22 nt, Human
aauucacauccgaccaggucaa

SEQ ID NO: 587545 - RNA, 22 nt, Human
acagugauuauuaguugguggu

SEQ ID NO: 587546 - RNA, 22 nt, Human
aaggcccagcgugaccucagug

SEQ ID NO: 587547 - RNA, 22 nt, Human
cugacucccugauucuggguuu

SEQ ID NO: 587548 - RNA, 22 nt, Human
ucagcucugguucauguggucu

SEQ ID NO: 587549 - RNA, 22 nt, Human
uaaauguuuagucuuauuuggg

SEQ ID NO: 587550 - RNA, 22 nt, Human
gugugcagaacagggagugggu

SEQ ID NO: 587551 - RNA, 22 nt, Human
agcaauaaauguaaagguuaag

SEQ ID NO: 587552 - RNA, 22 nt, Human
uggccagacagagaggcuuugu

SEQ ID NO: 587553 - RNA, 22 nt, Human
ccugccaggagcuggugcugca

SEQ ID NO: 587554 - RNA, 22 nt, Human
gaagagcuauguccagggagca

SEQ ID NO: 587555 - RNA, 22 nt, Human
acaggagcccaggaugggcgga

SEQ ID NO: 587556 - RNA, 22 nt, Human
augcauuuuugaguaugaauga

SEQ ID NO: 587557 - RNA, 22 nt, Human
ugagaaaacucaaagacagauc

SEQ ID NO: 587558 - RNA, 22 nt, Human
aaacugcagccuugaguucagg

SEQ ID NO: 587559 - RNA, 20 nt, Human
caucagaaauccugacccac

SEQ ID NO: 587560 - RNA, 22 nt, Human
ucaaggaggugcuuggcuucac

SEQ ID NO: 587561 - RNA, 22 nt, Human
cagcuuugagaguugcauuuua

SEQ ID NO: 587562 - RNA, 22 nt, Human
ucagaauucuacaauagaucag

SEQ ID NO: 587563 - RNA, 22 nt, Human
gcagagcugggucuguauccaa

SEQ ID NO: 587564 - RNA, 19 nt, Human
agaaucaucuugaagugau

SEQ ID NO: 587565 - RNA, 22 nt, Human
aacaaaacauuugucuuguuuc

SEQ ID NO: 587566 - RNA, 22 nt, Human
ucugcagaaacugugacuaugu

SEQ ID NO: 587567 - RNA, 22 nt, Human
aagcuuuggaagggcaggguug

SEQ ID NO: 587568 - RNA, 22 nt, Human
ucucuggguuuuuguccuguac

SEQ ID NO: 587569 - RNA, 22 nt, Human
ccagagagucgaugggggacac

SEQ ID NO: 587570 - RNA, 22 nt, Human
cuugcaggcagggccuccugga

SEQ ID NO: 587571 - RNA, 23 nt, Human
aaagacugcugagaauuuuagga

SEQ ID NO: 587572 - RNA, 22 nt, Human
ggaggggcugagcaacuuucag

SEQ ID NO: 587573 - RNA, 22 nt, Human
uuuagugauaagaauuaugaaa

SEQ ID NO: 587574 - RNA, 22 nt, Human
aacugcuuuuugaucucaggag

SEQ ID NO: 587575 - RNA, 22 nt, Human
aucacuggagugaaaggcaaac

SEQ ID NO: 587576 - RNA, 22 nt, Human
caaaguuuuaguaaacauauau

SEQ ID NO: 587577 - RNA, 22 nt, Human
ucaagcaggguagcaagcuggu

SEQ ID NO: 587578 - RNA, 22 nt, Human
aagagagaacacagcuugggca

SEQ ID NO: 587579 - RNA, 22 nt, Human
aaagaucuccccuucaaagagu

SEQ ID NO: 587580 - RNA, 18 nt, Human
gggaagccgggaagccgg

SEQ ID NO: 587581 - RNA, 22 nt, Human
augcacauguggcuuuauguau

SEQ ID NO: 587582 - RNA, 22 nt, Human
aggaaagaaguacauucucaug

SEQ ID NO: 587583 - RNA, 22 nt, Human
cacagcugccaugcagucagug

SEQ ID NO: 587584 - RNA, 22 nt, Human
caagcaugucuucuuaagcaau

SEQ ID NO: 587585 - RNA, 22 nt, Human
uugggcuccuguugauccuguc

SEQ ID NO: 587586 - RNA, 22 nt, Human
uaaaaucagccgaccauggugg

SEQ ID NO: 587587 - RNA, 22 nt, Human
ccaggaguuggagguugcagug

SEQ ID NO: 587588 - RNA, 22 nt, Human
aaggggaaguagcaccagaggu

SEQ ID NO: 587589 - RNA, 22 nt, Human
gcugggcaccggagagacccca

SEQ ID NO: 587590 - RNA, 22 nt, Human
gauaucaugggaagguguacuu

SEQ ID NO: 587591 - RNA, 22 nt, Human
uguggcccagaugagugugcua

SEQ ID NO: 587592 - RNA, 22 nt, Human
uggaaagaugaagauguuuaag

SEQ ID NO: 587593 - RNA, 22 nt, Human
uuucuugagcuaggaaccuggg

SEQ ID NO: 587594 - RNA, 22 nt, Human
augccuuugccacagauuagga

SEQ ID NO: 587595 - RNA, 22 nt, Human
cuuauaaaguccaucugaacaa

SEQ ID NO: 587596 - RNA, 22 nt, Human
ggaagaaaugcucuucuaugcg

SEQ ID NO: 587597 - RNA, 19 nt, Human
ugucccagacuccgugucu

SEQ ID NO: 587598 - RNA, 22 nt, Human
uuucuaagaauauugcucuuaa

SEQ ID NO: 587599 - RNA, 22 nt, Human
gaagaaggugcuacacagggca

SEQ ID NO: 587600 - RNA, 22 nt, Human
uugaggucucuacagaagagug

SEQ ID NO: 587601 - RNA, 22 nt, Human
uccuccuccucacagucaccug

SEQ ID NO: 587602 - RNA, 22 nt, Human
ccagagcugcauccagcagguu

SEQ ID NO: 587603 - RNA, 22 nt, Human
caggcccugccuuggcaugugu

SEQ ID NO: 587604 - RNA, 22 nt, Human
ggcacacagcuuggcaggagau

SEQ ID NO: 587605 - RNA, 22 nt, Human
gaguggggucugggcaucaguc

SEQ ID NO: 587606 - RNA, 23 nt, Human
uauuuuccaaaugaugacuacau

SEQ ID NO: 587607 - RNA, 22 nt, Human
cacagaagaaucaugcuguguu

SEQ ID NO: 587608 - RNA, 22 nt, Human
uauaguacauggaaucuucaua

SEQ ID NO: 587609 - RNA, 22 nt, Human
ucucuucuuguguuuuccugcc

SEQ ID NO: 587610 - RNA, 22 nt, Human
ugggccuggaguuuguccagag

SEQ ID NO: 587611 - RNA, 22 nt, Human
uacaggugguaaaaauauuguu

SEQ ID NO: 587612 - RNA, 22 nt, Human
accugaggcuguuagucuaggu

SEQ ID NO: 587613 - RNA, 22 nt, Human
ucagcccuuccuggagcuuuua

SEQ ID NO: 587614 - RNA, 22 nt, Human
gcacccaguuugucucaggguu

SEQ ID NO: 587615 - RNA, 22 nt, Human
augaaugaaugagaguagguca

SEQ ID NO: 587616 - RNA, 22 nt, Human
guagucacaaaccauucauaug

SEQ ID NO: 587617 - RNA, 22 nt, Human
cuagggaaauaaacugaguggu

SEQ ID NO: 587618 - RNA, 22 nt, Human
gggagggccagugcucucuaga

SEQ ID NO: 587619 - RNA, 22 nt, Human
gaggagguggagucaugcagag

SEQ ID NO: 587620 - RNA, 22 nt, Human
agagccuggagguucugcugaa

SEQ ID NO: 587621 - RNA, 22 nt, Human
agagccugggaauuugcauguu

SEQ ID NO: 587622 - RNA, 19 nt, Human
uccugggcugggccagguc

SEQ ID NO: 587623 - RNA, 22 nt, Human
uaagaacauaaauucauacggg

SEQ ID NO: 587624 - RNA, 22 nt, Human
gaggcacugaauacuugagggu

SEQ ID NO: 587625 - RNA, 22 nt, Human
augggaggaagagaagaugucu

SEQ ID NO: 587626 - RNA, 22 nt, Human
uguuauuugggaaaguuguaca

SEQ ID NO: 587627 - RNA, 22 nt, Human
ugugcagcucuagagccaagcc

SEQ ID NO: 587628 - RNA, 22 nt, Human
ccuccagcauuacuggcccaug

SEQ ID NO: 587629 - RNA, 22 nt, Human
uacuagcuaacauucucaccaa

SEQ ID NO: 587630 - RNA, 21 nt, Human
agugggauacuggaagguaga

SEQ ID NO: 587631 - RNA, 22 nt, Human
aggcacugauucucagaguuac

SEQ ID NO: 587632 - RNA, 20 nt, Human
aggaagccaaaggcugucuu

SEQ ID NO: 587633 - RNA, 22 nt, Human
agcugugugcccaugguggagg

SEQ ID NO: 587634 - RNA, 22 nt, Human
ggccuagggcuuggucauggca

SEQ ID NO: 587635 - RNA, 22 nt, Human
cugcuuuaucugagacaaguca

SEQ ID NO: 587636 - RNA, 22 nt, Human
uuacaaagauuauauucaguua

SEQ ID NO: 587637 - RNA, 22 nt, Human
uucagagguuagagcaguggga

SEQ ID NO: 587638 - RNA, 22 nt, Human
cugggcucuucccagauccaga

SEQ ID NO: 587639 - RNA, 22 nt, Human
caguguccucagccagcagcua

SEQ ID NO: 587640 - RNA, 22 nt, Human
auuuccuauggauacaggcaga

SEQ ID NO: 587641 - RNA, 22 nt, Human
uggcuuccagagcugcuccacc

SEQ ID NO: 587642 - RNA, 22 nt, Human
acagccaguaaucuaccccugu

SEQ ID NO: 587643 - RNA, 22 nt, Human
gggcaggugauuuuggcuccau

SEQ ID NO: 587644 - RNA, 22 nt, Human
augaagaaacuguucugggugg

SEQ ID NO: 587645 - RNA, 22 nt, Human
aaguucuauagucuuucuacua

SEQ ID NO: 587646 - RNA, 22 nt, Human
uuuaucugaggaaagcagacaa

SEQ ID NO: 587647 - RNA, 22 nt, Human
aggcucuggaguguggugcugg

SEQ ID NO: 587648 - RNA, 22 nt, Human
acucuggcaagcuuccacuucc

SEQ ID NO: 587649 - RNA, 22 nt, Human
ggcaugggccgaggugccuccu

SEQ ID NO: 587650 - RNA, 22 nt, Human
gccucccuguucuuccacaaua

SEQ ID NO: 587651 - RNA, 22 nt, Human
uggcugagagucauccugugug

SEQ ID NO: 587652 - RNA, 22 nt, Human
ccuggcuguggcggugcucuca

SEQ ID NO: 587653 - RNA, 20 nt, Human
augugaaguaggaagggugu

SEQ ID NO: 587654 - RNA, 22 nt, Human
ucacugauuaugaaaaugaagg

SEQ ID NO: 587655 - RNA, 22 nt, Human
gcacuagucuaggugcuaagau

SEQ ID NO: 587656 - RNA, 22 nt, Human
uaagagaugcuuuucuaaauaa

SEQ ID NO: 587657 - RNA, 22 nt, Human
aggagguggccugagcgugccc

SEQ ID NO: 587658 - RNA, 21 nt, Human
ggaagggguccucccaacagu

SEQ ID NO: 587659 - RNA, 22 nt, Human
cuggaggaccacagaagcuggu

SEQ ID NO: 587660 - RNA, 22 nt, Human
ugggguccucucacuuggaggg

SEQ ID NO: 587661 - RNA, 22 nt, Human
aguguuuaaugccuuuuccagc

SEQ ID NO: 587662 - RNA, 23 nt, Human
gcccugcugggaccuccugcuac

SEQ ID NO: 587663 - RNA, 20 nt, Human
uguuucauaagcuguccuau

SEQ ID NO: 587664 - RNA, 22 nt, Human
ugaggcccucugggcugguccu

SEQ ID NO: 587665 - RNA, 22 nt, Human
cucuggccccaguggccccuug

SEQ ID NO: 587666 - RNA, 22 nt, Human
ugcugggcaucguaggagguac

SEQ ID NO: 587667 - RNA, 22 nt, Human
uucaaacacuggcuuagccaau

SEQ ID NO: 587668 - RNA, 22 nt, Human
ccugggcugcaugauggcauuu

SEQ ID NO: 587669 - RNA, 22 nt, Human
ugggccuccuggaagaaugugg

SEQ ID NO: 587670 - RNA, 22 nt, Human
aagggaaaauaguugaugacca

SEQ ID NO: 587671 - RNA, 22 nt, Human
augcuaaaugcuggggguacau

SEQ ID NO: 587672 - RNA, 22 nt, Human
gagcauggauagaaggugggau

SEQ ID NO: 587673 - RNA, 18 nt, Human
cacauuuaccuggcuccc

SEQ ID NO: 587674 - RNA, 22 nt, Human
acugcucacgcauuacuugagc

SEQ ID NO: 587675 - RNA, 22 nt, Human
uguggcuuuugcuagcuuugca

SEQ ID NO: 587676 - RNA, 22 nt, Human
uagcaaauacaugauguaauuu

SEQ ID NO: 587677 - RNA, 22 nt, Human
acugcaggccuuggugccagca

SEQ ID NO: 587678 - RNA, 22 nt, Human
cugggcuuaggaccuggugcgg

SEQ ID NO: 587679 - RNA, 22 nt, Human
ccaguguuagagacugauacag

SEQ ID NO: 587680 - RNA, 22 nt, Human
agcuuuaaaucaauccagugag

SEQ ID NO: 587681 - RNA, 22 nt, Human
agcuucugcaucuuuucuuccc

SEQ ID NO: 587682 - RNA, 21 nt, Human
aaagcaucacgaacauuuggg

SEQ ID NO: 587683 - RNA, 22 nt, Human
agcugaggaauaauaacaaggu

SEQ ID NO: 587684 - RNA, 22 nt, Human
ccugggugacagagugagaccu

SEQ ID NO: 587685 - RNA, 22 nt, Human
gcaggcaccucguggaguggaa

SEQ ID NO: 587686 - RNA, 22 nt, Human
gaaaggaaauugagggacgcau

SEQ ID NO: 587687 - RNA, 22 nt, Human
uggcuucaguuccuguguuguu

SEQ ID NO: 587688 - RNA, 22 nt, Human
cacugucuucaguuucacugca

SEQ ID NO: 587689 - RNA, 20 nt, Human
gcaagcaugaagaguagaga

SEQ ID NO: 587690 - RNA, 22 nt, Human
aagaauaaguagaugggagaag

SEQ ID NO: 587691 - RNA, 22 nt, Human
auggucugaaugugugcuccaa

SEQ ID NO: 587692 - RNA, 22 nt, Human
uaaaugcuuagauucauagaaa

SEQ ID NO: 587693 - RNA, 22 nt, Human
aacauuucagcaaauaagaaca

SEQ ID NO: 587694 - RNA, 20 nt, Human
ucugaggcugagcccagcgu

SEQ ID NO: 587695 - RNA, 22 nt, Human
gaaagcacaguucaugagacaa

SEQ ID NO: 587696 - RNA, 22 nt, Human
cccugaggauagggcaggaccc

SEQ ID NO: 587697 - RNA, 23 nt, Human
ggcaccaggccauggagcgggag

SEQ ID NO: 587698 - RNA, 22 nt, Human
gggacagaaggaagugagcaca

SEQ ID NO: 587699 - RNA, 22 nt, Human
ucugagaaguccuguauuucua

SEQ ID NO: 587700 - RNA, 22 nt, Human
uguacaguguagucaugagguu

SEQ ID NO: 587701 - RNA, 22 nt, Human
ugguccauguucccagaagaca

SEQ ID NO: 587702 - RNA, 22 nt, Human
ucuggcuuucauuuguuuaaag

SEQ ID NO: 587703 - RNA, 22 nt, Human
ucugaaagucugaaacaguguc

SEQ ID NO: 587704 - RNA, 22 nt, Human
uuuaacaugugaauuuuggaag

SEQ ID NO: 587705 - RNA, 22 nt, Human
gguuuuauuaacuuuaacauca

SEQ ID NO: 587706 - RNA, 22 nt, Human
ccagugcccagucucccugguc

SEQ ID NO: 587707 - RNA, 22 nt, Human
aagauccugcuuuugcuucugu

SEQ ID NO: 587708 - RNA, 22 nt, Human
aauuuuacuaaucugaguguga

SEQ ID NO: 587709 - RNA, 20 nt, Human
gccugggauuauccacuggu

SEQ ID NO: 587710 - RNA, 22 nt, Human
gcuguuucugguucuguuccua

SEQ ID NO: 587711 - RNA, 22 nt, Human
auaguuuucuaugcacuguuau

SEQ ID NO: 587712 - RNA, 22 nt, Human
cugaggccugggggcguggacg

SEQ ID NO: 587713 - RNA, 23 nt, Human
uauugcacacauagaaacauaga

SEQ ID NO: 587714 - RNA, 22 nt, Human
ccagccuucugagcugccugga

SEQ ID NO: 587715 - RNA, 18 nt, Human
ucuguccacccugugcug

SEQ ID NO: 587716 - RNA, 22 nt, Human
cagaggcuaagaguguccaaag

SEQ ID NO: 587717 - RNA, 22 nt, Human
agcaggaggguuuuguagaguc

SEQ ID NO: 587718 - RNA, 20 nt, Human
aggucugauuccagaaucag

SEQ ID NO: 587719 - RNA, 22 nt, Human
cuucaguauccuccacauguua

SEQ ID NO: 587720 - RNA, 22 nt, Human
acagucuggaagcagggggcaa

SEQ ID NO: 587721 - RNA, 22 nt, Human
ucauucucugggaugcaguuug

SEQ ID NO: 587722 - RNA, 22 nt, Human
cuggaaaguacagugugucaca

SEQ ID NO: 587723 - RNA, 22 nt, Human
gaucagaauuuacuuauaauug

SEQ ID NO: 587724 - RNA, 22 nt, Human
acaugucaauuuaguacucuua

SEQ ID NO: 587725 - RNA, 22 nt, Human
uuucuugccagagaaaaagagu

SEQ ID NO: 587726 - RNA, 22 nt, Human
aggggugacacauaucagugca

SEQ ID NO: 587727 - RNA, 22 nt, Human
cuacccuuaaguuucugugggg

SEQ ID NO: 587728 - RNA, 22 nt, Human
aaacagacugaagaguugaagc

SEQ ID NO: 587729 - RNA, 22 nt, Human
cucucuuugauguauaaauaau

SEQ ID NO: 587730 - RNA, 22 nt, Human
cagaggagaauugcgggaucau

SEQ ID NO: 587731 - RNA, 22 nt, Human
uauuguauuaaggauucaagua

SEQ ID NO: 587732 - RNA, 22 nt, Human
ugcuccaggagcacuuuccauu

SEQ ID NO: 587733 - RNA, 23 nt, Human
uggacaggguaacuggugguuuu

SEQ ID NO: 587734 - RNA, 22 nt, Human
uuccugugcuuaauucucacug

SEQ ID NO: 587735 - RNA, 22 nt, Human
cuccugggggacagcggcaggg

SEQ ID NO: 587736 - RNA, 22 nt, Human
ugcaggcaguaggccagcucca

SEQ ID NO: 587737 - RNA, 18 nt, Human
acuccccacaggcucugu

SEQ ID NO: 587738 - RNA, 22 nt, Human
uuguauuuggguaguauagaga

SEQ ID NO: 587739 - RNA, 22 nt, Human
gaggcagcaaaauauaucauaa

SEQ ID NO: 587740 - RNA, 22 nt, Human
guggcuucaccccaguugucuc

SEQ ID NO: 587741 - RNA, 22 nt, Human
acccagucuggagugcagugac

SEQ ID NO: 587742 - RNA, 23 nt, Human
ccagcucccaggucugaggacug

SEQ ID NO: 587743 - RNA, 22 nt, Human
ggacaggccgccucgguggggg

SEQ ID NO: 587744 - RNA, 22 nt, Human
gagagaaaugugcaguuugggc

SEQ ID NO: 587745 - RNA, 22 nt, Human
ucacuuugcccuguaccuuggg

SEQ ID NO: 587746 - RNA, 22 nt, Human
gcaagcuguccuuuugcauggc

SEQ ID NO: 587747 - RNA, 21 nt, Human
uuaaaaugaggaagugguggc

SEQ ID NO: 587748 - RNA, 22 nt, Human
ucagagaauccguaagucacaa

SEQ ID NO: 587749 - RNA, 22 nt, Human
aaggaggacacccaggacuggg

SEQ ID NO: 587750 - RNA, 20 nt, Human
acacauagauaagaagcuga

SEQ ID NO: 587751 - RNA, 22 nt, Human
cugaagaggacgcagcagcaag

SEQ ID NO: 587752 - RNA, 22 nt, Human
ugccuuggugcuucuucaugug

SEQ ID NO: 587753 - RNA, 22 nt, Human
caggcugcagcagcaguggccc

SEQ ID NO: 587754 - RNA, 22 nt, Human
cuguauauggcuuacuuuauau

SEQ ID NO: 587755 - RNA, 22 nt, Human
cagagcaccagugggagacaag

SEQ ID NO: 587756 - RNA, 22 nt, Human
cugccugccuuggccuccagga

SEQ ID NO: 587757 - RNA, 19 nt, Human
acaggggcuagcggaagca

SEQ ID NO: 587758 - RNA, 22 nt, Human
auuuuccuucuaagaggaaggu

SEQ ID NO: 587759 - RNA, 22 nt, Human
ugggcacagggguaggaaugag

SEQ ID NO: 587760 - RNA, 22 nt, Human
uacacugugguaaacucaaagu

SEQ ID NO: 587761 - RNA, 22 nt, Human
gcugaggaagucagguggccca

SEQ ID NO: 587762 - RNA, 22 nt, Human
uuaaauauuuucagcaggguca

SEQ ID NO: 587763 - RNA, 22 nt, Human
uugcucagcacuggagccagcu

SEQ ID NO: 587764 - RNA, 22 nt, Human
aagcagccuggacuugggcugg

SEQ ID NO: 587765 - RNA, 22 nt, Human
acuggaguguuuggaggaugca

SEQ ID NO: 587766 - RNA, 22 nt, Human
uuagcucagaaaauuuaaacuu

SEQ ID NO: 587767 - RNA, 21 nt, Human
cuacccucacucccauuccuc

SEQ ID NO: 587768 - RNA, 22 nt, Human
ugcuggaugcuugauuuugagg

SEQ ID NO: 587769 - RNA, 22 nt, Human
caagucaagcaugcccuuauuu

SEQ ID NO: 587770 - RNA, 22 nt, Human
gcgagaaacuaagugcccuuug

SEQ ID NO: 587771 - RNA, 22 nt, Human
aaagaguucuaugaucuuucca

SEQ ID NO: 587772 - RNA, 22 nt, Human
uugcacuccagcccgagcaaca

SEQ ID NO: 587773 - RNA, 22 nt, Human
cccaggagguagagguugcagu

SEQ ID NO: 587774 - RNA, 22 nt, Human
agagacugcaaugagugguagg

SEQ ID NO: 587775 - RNA, 22 nt, Human
auuaagacugcccauguuuuua

SEQ ID NO: 587776 - RNA, 22 nt, Human
gaacacaagcguaugucuuugu

SEQ ID NO: 587777 - RNA, 22 nt, Human
aacaaugcaguuaaugggaaga

SEQ ID NO: 587778 - RNA, 22 nt, Human
caauguaaauauuuucuaauca

SEQ ID NO: 587779 - RNA, 22 nt, Human
aacagcuuugagcaguucugua

SEQ ID NO: 587780 - RNA, 22 nt, Human
uuacagagggcuucucugaacu

SEQ ID NO: 587781 - RNA, 21 nt, Human
uuccucugcaacugaugcuca

SEQ ID NO: 587782 - RNA, 22 nt, Human
gagaaacacuguuaguuuauua

SEQ ID NO: 587783 - RNA, 22 nt, Human
uagggcuauucugaguaauaau

SEQ ID NO: 587784 - RNA, 22 nt, Human
gcuugguuacugauggaaagga

SEQ ID NO: 587785 - RNA, 22 nt, Human
aggugaguuacaggaggagguc

SEQ ID NO: 587786 - RNA, 20 nt, Human
cacaggccuugugagcagac

SEQ ID NO: 587787 - RNA, 22 nt, Human
guuucgucaggcuuauucuauc

SEQ ID NO: 587788 - RNA, 22 nt, Human
cugccuggggcaucagucaagg

SEQ ID NO: 587789 - RNA, 22 nt, Human
uggcccugcagaacuagccugg

SEQ ID NO: 587790 - RNA, 22 nt, Human
uccuggugucgccuggucaguu

SEQ ID NO: 587791 - RNA, 22 nt, Human
ucucccacgguacaggauaaac

SEQ ID NO: 587792 - RNA, 19 nt, Human
ggaccagguccugggcagc

SEQ ID NO: 587793 - RNA, 22 nt, Human
gcagggaggaagagaugcuucc

SEQ ID NO: 587794 - RNA, 22 nt, Human
acagauauaugauuguguaaau

SEQ ID NO: 587795 - RNA, 22 nt, Human
caggguggaauggaaugcuggc

SEQ ID NO: 587796 - RNA, 22 nt, Human
gaaggccuaggaaggaagccuu

SEQ ID NO: 587797 - RNA, 22 nt, Human
gcccugagccuaugagccucuc

SEQ ID NO: 587798 - RNA, 22 nt, Human
gaugucuucccauguucaugug

SEQ ID NO: 587799 - RNA, 18 nt, Human
ugagaacuaggcauugca

SEQ ID NO: 587800 - RNA, 22 nt, Human
ucugauucauucaugugcacca

SEQ ID NO: 587801 - RNA, 22 nt, Human
ggaggcaucucuguggcugucu

SEQ ID NO: 587802 - RNA, 22 nt, Human
ugggaaauauaauuuagcugug

SEQ ID NO: 587803 - RNA, 22 nt, Human
gcucccagggcagcgcagaaga

SEQ ID NO: 587804 - RNA, 22 nt, Human
ggccaccaguccucuggcaggg

SEQ ID NO: 587805 - RNA, 22 nt, Human
uucauuuguccaaauacuaugu

SEQ ID NO: 587806 - RNA, 22 nt, Human
ggaagggcaaaagagaugaacu

SEQ ID NO: 587807 - RNA, 22 nt, Human
agcaagcagaauucuguccucu

SEQ ID NO: 587808 - RNA, 22 nt, Human
uuuaugauuauuuuaaagcagc

SEQ ID NO: 587809 - RNA, 22 nt, Human
ugucucuuuggguuccucuugg

SEQ ID NO: 587810 - RNA, 22 nt, Human
ccaggcaccaaaguaugcuuua

SEQ ID NO: 587811 - RNA, 22 nt, Human
gcaguccuagggugcucugcag

SEQ ID NO: 587812 - RNA, 22 nt, Human
ugcuggcacgugacugggaagu

SEQ ID NO: 587813 - RNA, 22 nt, Human
auuauuauauagggaaaguccc

SEQ ID NO: 587814 - RNA, 22 nt, Human
agguuucuaugcuguuuaucuu

SEQ ID NO: 587815 - RNA, 22 nt, Human
gauugcuguaguuaaaaugaug

SEQ ID NO: 587816 - RNA, 20 nt, Human
uucucuggauagccagaugu

SEQ ID NO: 587817 - RNA, 22 nt, Human
gugacgugcagguguggccagc

SEQ ID NO: 587818 - RNA, 22 nt, Human
ggagccuggaguuucugauggg

SEQ ID NO: 587819 - RNA, 22 nt, Human
ugggaguggggcauagaaggua

SEQ ID NO: 587820 - RNA, 22 nt, Human
cucuugggagugcucuggagaa

SEQ ID NO: 587821 - RNA, 22 nt, Human
gacuuucucuccucccaggugu

SEQ ID NO: 587822 - RNA, 22 nt, Human
guacauuuaggauucauugaaa

SEQ ID NO: 587823 - RNA, 22 nt, Human
caggguggcacucagcgcaucu

SEQ ID NO: 587824 - RNA, 22 nt, Human
uuagaauuauuguuuccuucua

SEQ ID NO: 587825 - RNA, 19 nt, Human
uggcagggagaguuugaag

SEQ ID NO: 587826 - RNA, 22 nt, Human
ucagaggacagcagcuaaauaa

SEQ ID NO: 587827 - RNA, 22 nt, Human
cugggcugccagguaggcacac

SEQ ID NO: 587828 - RNA, 23 nt, Human
cugaagcaauauccccucacuuc

SEQ ID NO: 587829 - RNA, 22 nt, Human
gggggaaguaauuauaaaccaa

SEQ ID NO: 587830 - RNA, 22 nt, Human
uaacuuuaguguaugagguaag

SEQ ID NO: 587831 - RNA, 22 nt, Human
aggaacaauugauaaacucaca

SEQ ID NO: 587832 - RNA, 22 nt, Human
cugaauaauacagacuagcuuc

SEQ ID NO: 587833 - RNA, 22 nt, Human
augacagaggagugcaggugau

SEQ ID NO: 587834 - RNA, 22 nt, Human
aagcaaggccggaaggaaacuc

SEQ ID NO: 587835 - RNA, 22 nt, Human
ccagagcagggcagcagggcuc

SEQ ID NO: 587836 - RNA, 22 nt, Human
gauacauuuuaucuccuaacag

SEQ ID NO: 587837 - RNA, 22 nt, Human
auuuacagaagcauguaauagc

SEQ ID NO: 587838 - RNA, 22 nt, Human
accuucuggucugccugacagc

SEQ ID NO: 587839 - RNA, 22 nt, Human
ccaauguuuuauacagaaguac

SEQ ID NO: 587840 - RNA, 22 nt, Human
cagagcugcagauugaaggcau

SEQ ID NO: 587841 - RNA, 22 nt, Human
augaaauuugcugcuaaguucc

SEQ ID NO: 587842 - RNA, 17 nt, Human
agugaaauuuacauugc

SEQ ID NO: 587843 - RNA, 22 nt, Human
uggcaguuucaugugauucaac

SEQ ID NO: 587844 - RNA, 22 nt, Human
agauuaacucucagaaaagagg

SEQ ID NO: 587845 - RNA, 22 nt, Human
uggcagcaguagccaccccagc

SEQ ID NO: 587846 - RNA, 22 nt, Human
aaugcuuauaccuaaugaucuu

SEQ ID NO: 587847 - RNA, 22 nt, Human
ugagguggccgaggagcaggac

SEQ ID NO: 587848 - RNA, 22 nt, Human
ggcuccagcccuggcucuucac

SEQ ID NO: 587849 - RNA, 22 nt, Human
auauauuuugaauagccucugu

SEQ ID NO: 587850 - RNA, 22 nt, Human
ugaagagauagaaguacaugcu

SEQ ID NO: 587851 - RNA, 22 nt, Human
agccacagggggugagggacaa

SEQ ID NO: 587852 - RNA, 21 nt, Human
gagcauggcuuacaucagcag

SEQ ID NO: 587853 - RNA, 22 nt, Human
cugagcaggauauucacagcag

SEQ ID NO: 587854 - RNA, 22 nt, Human
ucugagacacucuugugauggg

SEQ ID NO: 587855 - RNA, 22 nt, Human
aggcugaggcuuuccuuggaga

SEQ ID NO: 587856 - RNA, 22 nt, Human
auauuaaugggauuuagucagg

SEQ ID NO: 587857 - RNA, 22 nt, Human
aaaguauuugugauuuuuacca

SEQ ID NO: 587858 - RNA, 22 nt, Human
aggccugggacgggagccguga

SEQ ID NO: 587859 - RNA, 22 nt, Human
aagaaauacaugguuuuugagu

SEQ ID NO: 587860 - RNA, 22 nt, Human
aauguuacaggaccuaagauga

SEQ ID NO: 587861 - RNA, 22 nt, Human
ugggaaggacgugucaguggca

SEQ ID NO: 587862 - RNA, 22 nt, Human
gcaggugguccccguggagugg

SEQ ID NO: 587863 - RNA, 22 nt, Human
cacacagguauauauauguaca

SEQ ID NO: 587864 - RNA, 22 nt, Human
guggaggucccgggcaggagca

SEQ ID NO: 587865 - RNA, 22 nt, Human
uugguaaauuauuucuuccaau

SEQ ID NO: 587866 - RNA, 22 nt, Human
cugccugaguggaggucgaggg

SEQ ID NO: 587867 - RNA, 22 nt, Human
gcuuccugagaaacaaucugau

SEQ ID NO: 587868 - RNA, 22 nt, Human
ucauugccauggcauuugcaga

SEQ ID NO: 587869 - RNA, 22 nt, Human
ucagaagcagauauuucaaaau

SEQ ID NO: 587870 - RNA, 22 nt, Human
ggaaagggaguuuugcuuauga

SEQ ID NO: 587871 - RNA, 19 nt, Human
ggcugagcgccuuggcugc

SEQ ID NO: 587872 - RNA, 22 nt, Human
ggccacugcccuggcuacaccg

SEQ ID NO: 587873 - RNA, 22 nt, Human
uuacaagguaaguuguuaaguc

SEQ ID NO: 587874 - RNA, 22 nt, Human
gaauacaugauacaugaacugc

SEQ ID NO: 587875 - RNA, 22 nt, Human
agcucccagagcucgagaguaa

SEQ ID NO: 587876 - RNA, 23 nt, Human
ugggcccuggagucgccagucug

SEQ ID NO: 587877 - RNA, 22 nt, Human
guuuaugaaugugucagacaua

SEQ ID NO: 587878 - RNA, 22 nt, Human
ucaggguugugguggaauucag

SEQ ID NO: 587879 - RNA, 22 nt, Human
accagcuguuaggcuuggugcu

SEQ ID NO: 587880 - RNA, 22 nt, Human
ucagaagcaagcuucuacuucu

SEQ ID NO: 587881 - RNA, 22 nt, Human
ucuucccccgugcuccagugca

SEQ ID NO: 587882 - RNA, 22 nt, Human
gugaggggccaagaguagggca

SEQ ID NO: 587883 - RNA, 22 nt, Human
auuuaauuaaucauggugaauu

SEQ ID NO: 587884 - RNA, 22 nt, Human
aauagaaaggaggggcucuugu

SEQ ID NO: 587885 - RNA, 22 nt, Human
ggggcagagcauagcuccaauu

SEQ ID NO: 587886 - RNA, 22 nt, Human
ugaaaaacuuuaauccauaaag

SEQ ID NO: 587887 - RNA, 22 nt, Human
ucugagaacaucauuuccuaca

SEQ ID NO: 587888 - RNA, 22 nt, Human
ugcccuggcacacacacagcug

SEQ ID NO: 587889 - RNA, 22 nt, Human
ugcaucagaguuugcugcugcu

SEQ ID NO: 587890 - RNA, 22 nt, Human
ugaggaaacuuacaaggcagaa

SEQ ID NO: 587891 - RNA, 22 nt, Human
aauaugugggugcuaaucaaaa

SEQ ID NO: 587892 - RNA, 22 nt, Human
ggaggggagauguuugggcuca

SEQ ID NO: 587893 - RNA, 22 nt, Human
ucuagaaaaccaauauuacaug

SEQ ID NO: 587894 - RNA, 22 nt, Human
uccacagauuaaaaacauacuu

SEQ ID NO: 587895 - RNA, 22 nt, Human
uucacaagucauuagcugcaua

SEQ ID NO: 587896 - RNA, 22 nt, Human
agccacagucaaccuguccaua

SEQ ID NO: 587897 - RNA, 19 nt, Human
uacccucagggccucauuu

SEQ ID NO: 587898 - RNA, 22 nt, Human
uagcauuauuuccucuuuuugu

SEQ ID NO: 587899 - RNA, 22 nt, Human
ucugugugcccuaaagccugcu

SEQ ID NO: 587900 - RNA, 22 nt, Human
cucccacuccuggcucaccaca

SEQ ID NO: 587901 - RNA, 22 nt, Human
ccagcuccuucugucuguggag

SEQ ID NO: 587902 - RNA, 22 nt, Human
cagccacuucgagcuuccugau

SEQ ID NO: 587903 - RNA, 22 nt, Human
acauucacgcucucaaagcuga

SEQ ID NO: 587904 - RNA, 22 nt, Human
aaaguccugacugcaggggaug

SEQ ID NO: 587905 - RNA, 22 nt, Human
ugaggccagagaguuugcauuu

SEQ ID NO: 587906 - RNA, 22 nt, Human
uucauauuuucugcuugcucac

SEQ ID NO: 587907 - RNA, 22 nt, Human
gaggcaccucgcgggaggaggc

SEQ ID NO: 587908 - RNA, 22 nt, Human
gcugccagggaggugguggagg

SEQ ID NO: 587909 - RNA, 22 nt, Human
uuccuuucucuggacugcagcc

SEQ ID NO: 587910 - RNA, 22 nt, Human
ugcccaccuuuacugugauuua

SEQ ID NO: 587911 - RNA, 22 nt, Human
gcacacagauuaggaaacagaa

SEQ ID NO: 587912 - RNA, 22 nt, Human
aaauccuaaaaguuugacuuaa

SEQ ID NO: 587913 - RNA, 23 nt, Human
aggagacagggaagugccuggcu

SEQ ID NO: 587914 - RNA, 22 nt, Human
ccaggguugcuguauggcacuu

SEQ ID NO: 587915 - RNA, 22 nt, Human
uacuuucaugucuauacauauu

SEQ ID NO: 587916 - RNA, 23 nt, Human
gccagaggaacgcagagcuuucu

SEQ ID NO: 587917 - RNA, 22 nt, Human
ugagauggagccacugcacucu

SEQ ID NO: 587918 - RNA, 22 nt, Human
gcaagcagacauucagguaggu

SEQ ID NO: 587919 - RNA, 18 nt, Human
agcaaauauuaagugcau

SEQ ID NO: 587920 - RNA, 22 nt, Human
caggcugggcugguguuagagu

SEQ ID NO: 587921 - RNA, 19 nt, Human
ggccuggauuuagggcucc

SEQ ID NO: 587922 - RNA, 22 nt, Human
ugucauuuucauccuaaggagc

SEQ ID NO: 587923 - RNA, 22 nt, Human
ucacagaaucucugauaagucu

SEQ ID NO: 587924 - RNA, 22 nt, Human
cccuggcuggaaauuaaguagu

SEQ ID NO: 587925 - RNA, 22 nt, Human
ccugccagggccuuggaagaaa

SEQ ID NO: 587926 - RNA, 22 nt, Human
ugcaggcaggggaugagcagcc

SEQ ID NO: 587927 - RNA, 22 nt, Human
gaggcccaguccugcaagcacg

SEQ ID NO: 587928 - RNA, 22 nt, Human
guccaggucuggacccugagcc

SEQ ID NO: 587929 - RNA, 22 nt, Human
uuauuuauuguguaccuacugu

SEQ ID NO: 587930 - RNA, 22 nt, Human
ugggccaguucuuuacucgucc

SEQ ID NO: 587931 - RNA, 22 nt, Human
auguucaaacuuuuuacacacc

SEQ ID NO: 587932 - RNA, 21 nt, Human
auauuuuuguuuggacuguca

SEQ ID NO: 587933 - RNA, 22 nt, Human
gcaugcaggauagguugagcuc

SEQ ID NO: 587934 - RNA, 22 nt, Human
ugcaguuugcccuuugcucacu

SEQ ID NO: 587935 - RNA, 22 nt, Human
guuuuucuuugugugaagacaa

SEQ ID NO: 587936 - RNA, 21 nt, Human
gccagcugggucuugcaggag

SEQ ID NO: 587937 - RNA, 22 nt, Human
agcagugaugcaugacagccua

SEQ ID NO: 587938 - RNA, 22 nt, Human
cagcacaucuucugaucuuuug

SEQ ID NO: 587939 - RNA, 22 nt, Human
caguuuuauacacugcagcucc

SEQ ID NO: 587940 - RNA, 22 nt, Human
uuccugggcuuuccccucuggu

SEQ ID NO: 587941 - RNA, 22 nt, Human
gccucugggcucugccccuggc

SEQ ID NO: 587942 - RNA, 22 nt, Human
ggggcccagcaccccuccucgc

SEQ ID NO: 587943 - RNA, 22 nt, Human
gccaggcuggcaaaaggaaacc

SEQ ID NO: 587944 - RNA, 22 nt, Human
uauguccugcuacucucucaug

SEQ ID NO: 587945 - RNA, 22 nt, Human
guuuuacaaaugacggcauuca

SEQ ID NO: 587946 - RNA, 22 nt, Human
uccccaggggccugggcacagu

SEQ ID NO: 587947 - RNA, 22 nt, Human
gucagugugagauaaucuugga

SEQ ID NO: 587948 - RNA, 22 nt, Human
gugcaaaagcaguuggauuuuu

SEQ ID NO: 587949 - RNA, 22 nt, Human
uguucaaaucuuuugcuuauuu

SEQ ID NO: 587950 - RNA, 22 nt, Human
caauuucuaacauuccauggau

SEQ ID NO: 587951 - RNA, 22 nt, Human
ggaagaggcugagccagguccc

SEQ ID NO: 587952 - RNA, 22 nt, Human
acuuggccuuauuuccacagaa

SEQ ID NO: 587953 - RNA, 22 nt, Human
ccuuucugguauuuaaccaaag

SEQ ID NO: 587954 - RNA, 22 nt, Human
gguguggggagguucugcuucu

SEQ ID NO: 587955 - RNA, 22 nt, Human
gccuggcccagggcucuuguug

SEQ ID NO: 587956 - RNA, 22 nt, Human
gugcaaaagcaguugugguuuu

SEQ ID NO: 587957 - RNA, 22 nt, Human
guccugguagcuggcuugguca

SEQ ID NO: 587958 - RNA, 22 nt, Human
auuauuguguaaaaugaggcuu

SEQ ID NO: 587959 - RNA, 22 nt, Human
ccaguguucaguaugcauuaag

SEQ ID NO: 587960 - RNA, 22 nt, Human
cuggaagaggggaaaugccaug

SEQ ID NO: 587961 - RNA, 22 nt, Human
uuuccuaagggaugcggcucaa

SEQ ID NO: 587962 - RNA, 22 nt, Human
gcagcccaauggacugagacag

SEQ ID NO: 587963 - RNA, 22 nt, Human
uggagcugggguuugaaucugg

SEQ ID NO: 587964 - RNA, 22 nt, Human
ucauuuaugcaggaauggcaua

SEQ ID NO: 587965 - RNA, 22 nt, Human
ucuuggaaguagaacacagucu

SEQ ID NO: 587966 - RNA, 23 nt, Human
ccagugugguagguccacaggug

SEQ ID NO: 587967 - RNA, 22 nt, Human
aaguuuuucacauugcuguugu

SEQ ID NO: 587968 - RNA, 22 nt, Human
uucaguuuccacuuacauuuaa

SEQ ID NO: 587969 - RNA, 22 nt, Human
acccugagucagacagccugac

SEQ ID NO: 587970 - RNA, 22 nt, Human
uguggcagagagagcuuccuug

SEQ ID NO: 587971 - RNA, 22 nt, Human
cuauuaaauacucuucaaauug

SEQ ID NO: 587972 - RNA, 17 nt, Human
uuauuuuuugggcugag

SEQ ID NO: 587973 - RNA, 22 nt, Human
uauaaguaguuguugaagacuu

SEQ ID NO: 587974 - RNA, 22 nt, Human
ugccugugucacagugauguuu

SEQ ID NO: 587975 - RNA, 22 nt, Human
aaacagcuuucagaaucucuca

SEQ ID NO: 587976 - RNA, 22 nt, Human
agacacauaggaccacacugug

SEQ ID NO: 587977 - RNA, 22 nt, Human
agguccaguuuucaguucucau

SEQ ID NO: 587978 - RNA, 22 nt, Human
uuuuccuggggcuucuggacuc

SEQ ID NO: 587979 - RNA, 22 nt, Human
acauuucugcauguaggguaau

SEQ ID NO: 587980 - RNA, 20 nt, Human
uguugcucucuccugaguuu

SEQ ID NO: 587981 - RNA, 22 nt, Human
cucacaugauggccuuuuucau

SEQ ID NO: 587982 - RNA, 22 nt, Human
uacuaguuucuaccuuacagaa

SEQ ID NO: 587983 - RNA, 22 nt, Human
ugccugucuuaauaucuggaaa

SEQ ID NO: 587984 - RNA, 22 nt, Human
ugugugaaucuauugaauauau

SEQ ID NO: 587985 - RNA, 22 nt, Human
ucaguguuugaacccaggguua

SEQ ID NO: 587986 - RNA, 22 nt, Human
caccaggguacaauuucgcaga

SEQ ID NO: 587987 - RNA, 22 nt, Human
uguauauaagcauuuacuuguu

SEQ ID NO: 587988 - RNA, 21 nt, Human
cugggcucaagcaauccuuuc

SEQ ID NO: 587989 - RNA, 22 nt, Human
gcagggcuguucaggagggugg

SEQ ID NO: 587990 - RNA, 22 nt, Human
uccugcagccauuagaggucaa

SEQ ID NO: 587991 - RNA, 22 nt, Human
gaauuuaagaggaugaaucugu

SEQ ID NO: 587992 - RNA, 22 nt, Human
aguagaaagaaggcacugggcc

SEQ ID NO: 587993 - RNA, 22 nt, Human
cuucagcagaugcaaaaccccu

SEQ ID NO: 587994 - RNA, 22 nt, Human
ucuggagugaaugaaguagugu

SEQ ID NO: 587995 - RNA, 22 nt, Human
ccaggguuggcaagcaaggcuu

SEQ ID NO: 587996 - RNA, 22 nt, Human
augcuuuauacaaaacacuuaa

SEQ ID NO: 587997 - RNA, 22 nt, Human
aaauugcaaaaguacuuuuagg

SEQ ID NO: 587998 - RNA, 19 nt, Human
uggcuucuguuuucauguu

SEQ ID NO: 587999 - RNA, 22 nt, Human
cagucccaucucccagguggcu

SEQ ID NO: 588000 - RNA, 22 nt, Human
guucagcagcagugauuuugug

SEQ ID NO: 588001 - RNA, 22 nt, Human
guuauuguguuuguucagggca

SEQ ID NO: 588002 - RNA, 22 nt, Human
agcuccugaaaauccagacugg

SEQ ID NO: 588003 - RNA, 22 nt, Human
agaauuuguaaaagauaagaca

SEQ ID NO: 588004 - RNA, 22 nt, Human
aucugacaucuacuagaacaga

SEQ ID NO: 588005 - RNA, 19 nt, Human
agguaggcaguggcaugga

SEQ ID NO: 588006 - RNA, 22 nt, Human
agucuccagaaauauagcagug

SEQ ID NO: 588007 - RNA, 22 nt, Human
gcagagguccuagccaggaguc

SEQ ID NO: 588008 - RNA, 22 nt, Human
ccagaggaucaguacuggcugg

SEQ ID NO: 588009 - RNA, 21 nt, Human
gcugccaccgcgugcuccagg

SEQ ID NO: 588010 - RNA, 22 nt, Human
gagagugaggcaucaggggcag

SEQ ID NO: 588011 - RNA, 22 nt, Human
ucauaagugguuuauaugcuug

SEQ ID NO: 588012 - RNA, 22 nt, Human
aaauguguauaugaaacaugau

SEQ ID NO: 588013 - RNA, 22 nt, Human
cccagacucaucccugggagcu

SEQ ID NO: 588014 - RNA, 22 nt, Human
acugauguuaacccucucuucu

SEQ ID NO: 588015 - RNA, 22 nt, Human
acauacuuauguguauaugugu

SEQ ID NO: 588016 - RNA, 21 nt, Human
agacaguaacucuucuacucc

SEQ ID NO: 588017 - RNA, 22 nt, Human
uugcuggcuugaagauagagga

SEQ ID NO: 588018 - RNA, 22 nt, Human
uggugcagagagggaucuaggg

SEQ ID NO: 588019 - RNA, 20 nt, Human
agacaugguagugauucagg

SEQ ID NO: 588020 - RNA, 22 nt, Human
agggcugacaaauggcagugac

SEQ ID NO: 588021 - RNA, 22 nt, Human
gcuuuaaaccucuacucugucc

SEQ ID NO: 588022 - RNA, 22 nt, Human
ugagcuguagcagaugcuguug

SEQ ID NO: 588023 - RNA, 22 nt, Human
ucuuugcaguggugaauaaaga

SEQ ID NO: 588024 - RNA, 22 nt, Human
agagcuuugggacauuugcuag

SEQ ID NO: 588025 - RNA, 22 nt, Human
aguuuauguaaaauuaguaaug

SEQ ID NO: 588026 - RNA, 22 nt, Human
augcugagauaaggcuuuaguc

SEQ ID NO: 588027 - RNA, 20 nt, Human
cuggaugcuaaaacacacac

SEQ ID NO: 588028 - RNA, 22 nt, Human
augugcuuucuuuccaaggggc

SEQ ID NO: 588029 - RNA, 22 nt, Human
cugaaggauuuaguucuuugcu

SEQ ID NO: 588030 - RNA, 22 nt, Human
ucuggccagugaaaugcagaau

SEQ ID NO: 588031 - RNA, 22 nt, Human
uggaggcaucagagugcuuggc

SEQ ID NO: 588032 - RNA, 22 nt, Human
auggauaacccaguucauuucu

SEQ ID NO: 588033 - RNA, 19 nt, Human
gccagugugugguacagug

SEQ ID NO: 588034 - RNA, 22 nt, Human
gaugucuuggucaacuugggcu

SEQ ID NO: 588035 - RNA, 22 nt, Human
ccugggaaguuguggcugcagu

SEQ ID NO: 588036 - RNA, 22 nt, Human
agcaucugcauaaugccuuccc

SEQ ID NO: 588037 - RNA, 22 nt, Human
ugagcagaagcccuccuggacu

SEQ ID NO: 588038 - RNA, 22 nt, Human
accugcaggggugcucucuggg

SEQ ID NO: 588039 - RNA, 22 nt, Human
aauucauccaugaacaauucca

SEQ ID NO: 588040 - RNA, 22 nt, Human
cagugucucaaaacaaguugcu

SEQ ID NO: 588041 - RNA, 22 nt, Human
cuggcagucugguggaaggccu

SEQ ID NO: 588042 - RNA, 22 nt, Human
uguguguguuuauaaaucuaaa

SEQ ID NO: 588043 - RNA, 22 nt, Human
uacauugacuuggauuguuaga

SEQ ID NO: 588044 - RNA, 22 nt, Human
agcugugggauuugggugugcc

SEQ ID NO: 588045 - RNA, 22 nt, Human
aggaaugugaccacuagacucu

SEQ ID NO: 588046 - RNA, 22 nt, Human
agcuaagacuuagugacuuagu

SEQ ID NO: 588047 - RNA, 22 nt, Human
uagagguagauggucagccaau

SEQ ID NO: 588048 - RNA, 22 nt, Human
gcuucugugguugucacgacua

SEQ ID NO: 588049 - RNA, 22 nt, Human
cugccucuccccagaguggccc

SEQ ID NO: 588050 - RNA, 22 nt, Human
uccugggaggcaggaccccuuu

SEQ ID NO: 588051 - RNA, 22 nt, Human
acauucauugagcaacaacaau

SEQ ID NO: 588052 - RNA, 22 nt, Human
gcugaggacaucauggaaggaa

SEQ ID NO: 588053 - RNA, 22 nt, Human
uuaacauacaucaugaacaaug

SEQ ID NO: 588054 - RNA, 22 nt, Human
ggagcugcauuuagggagccuu

SEQ ID NO: 588055 - RNA, 22 nt, Human
cccuuucuccagaacugucuga

SEQ ID NO: 588056 - RNA, 22 nt, Human
gguaaaaugcagauucuuagcc

SEQ ID NO: 588057 - RNA, 22 nt, Human
caccuuugaccuugcagcgcac

SEQ ID NO: 588058 - RNA, 22 nt, Human
agcccagccggauucccaguuc

SEQ ID NO: 588059 - RNA, 22 nt, Human
cuagagaaacagugcucugaac

SEQ ID NO: 588060 - RNA, 22 nt, Human
ucuccuggauggaccuucucuu

SEQ ID NO: 588061 - RNA, 22 nt, Human
gaugcuuaagauguugguggca

SEQ ID NO: 588062 - RNA, 22 nt, Human
ugaggcuggaugggaugccucc

SEQ ID NO: 588063 - RNA, 22 nt, Human
aguucuuuucuagauucuggau

SEQ ID NO: 588064 - RNA, 22 nt, Human
ugagcagaugugccaaacugua

SEQ ID NO: 588065 - RNA, 22 nt, Human
uugcaguuuucugccucauuuc

SEQ ID NO: 588066 - RNA, 22 nt, Human
agccagcugugggcucaggcgg

SEQ ID NO: 588067 - RNA, 22 nt, Human
guuguuuguaaugacaggagac

SEQ ID NO: 588068 - RNA, 22 nt, Human
uuuaauguagcgugaaaugauu

SEQ ID NO: 588069 - RNA, 22 nt, Human
uuuuggaacacagacauuagaa

SEQ ID NO: 588070 - RNA, 22 nt, Human
uaaggaggcgagguggugagca

SEQ ID NO: 588071 - RNA, 22 nt, Human
uucuuuuccuguggcucaucca

SEQ ID NO: 588072 - RNA, 22 nt, Human
cuguuaauggaggacuacagga

SEQ ID NO: 588073 - RNA, 22 nt, Human
uuuugcuuuaagauggagagga

SEQ ID NO: 588074 - RNA, 22 nt, Human
uggcauggccagugcugggagu

SEQ ID NO: 588075 - RNA, 22 nt, Human
gaguaacauaccaaaauucaca

SEQ ID NO: 588076 - RNA, 22 nt, Human
aagaaaacguuuugaggaguuu

SEQ ID NO: 588077 - RNA, 22 nt, Human
gcugggcagugagugaguccuu

SEQ ID NO: 588078 - RNA, 22 nt, Human
gcagcagaguuugggagauggu

SEQ ID NO: 588079 - RNA, 22 nt, Human
ugggggugcccuaugaggaagc

SEQ ID NO: 588080 - RNA, 22 nt, Human
agggccagccgacuuccagccu

SEQ ID NO: 588081 - RNA, 22 nt, Human
cagaagcugaggagugaggcaa

SEQ ID NO: 588082 - RNA, 22 nt, Human
ccaaagaaacccaagcucaggg

SEQ ID NO: 588083 - RNA, 22 nt, Human
cucccuggcacagcgagagguu

SEQ ID NO: 588084 - RNA, 22 nt, Human
aaacugguaaucggcaagugag

SEQ ID NO: 588085 - RNA, 22 nt, Human
cugcagagaccuaggucagguu

SEQ ID NO: 588086 - RNA, 22 nt, Human
caaggaaaacagaugaucaaca

SEQ ID NO: 588087 - RNA, 22 nt, Human
uguguccauucaggcacugacc

SEQ ID NO: 588088 - RNA, 22 nt, Human
gucuccuggaaauaugcccaua

SEQ ID NO: 588089 - RNA, 22 nt, Human
acaaauggaacaaugaagacug

SEQ ID NO: 588090 - RNA, 22 nt, Human
ccacccugugcaggcgugggua

SEQ ID NO: 588091 - RNA, 22 nt, Human
cuguuaagcaacaugaguaagu

SEQ ID NO: 588092 - RNA, 22 nt, Human
ucuauuuaccaaauguaguucc

SEQ ID NO: 588093 - RNA, 22 nt, Human
gauggagucugaagcugggaac

SEQ ID NO: 588094 - RNA, 17 nt, Human
ccugaaggcacuuccag

SEQ ID NO: 588095 - RNA, 22 nt, Human
aaugaagaaauggacaucuuua

SEQ ID NO: 588096 - RNA, 22 nt, Human
ugaucuuuuuggucauuugggu

SEQ ID NO: 588097 - RNA, 18 nt, Human
aggcacagagcauacaua

SEQ ID NO: 588098 - RNA, 22 nt, Human
agcaccagcucaaggugcaccu

SEQ ID NO: 588099 - RNA, 22 nt, Human
uucaguuucguuaucuaugaga

SEQ ID NO: 588100 - RNA, 21 nt, Human
gggagcuggaaacugggugac

SEQ ID NO: 588101 - RNA, 22 nt, Human
aucuggaaaacacaguguagac

SEQ ID NO: 588102 - RNA, 22 nt, Human
acaaauuggguaugagcuaaga

SEQ ID NO: 588103 - RNA, 22 nt, Human
uucucugggaucuggcaaaagg

SEQ ID NO: 588104 - RNA, 22 nt, Human
cugauacauaguagcaugucau

SEQ ID NO: 588105 - RNA, 22 nt, Human
cagagcuggguuugggaaaccu

SEQ ID NO: 588106 - RNA, 22 nt, Human
ggcuccugggcagcugcucccu

SEQ ID NO: 588107 - RNA, 22 nt, Human
auggcacagugggaaaugaccu

SEQ ID NO: 588108 - RNA, 22 nt, Human
ggagugggaacaaugacauggu

SEQ ID NO: 588109 - RNA, 22 nt, Human
ugcugcagaucagcugaguccu

SEQ ID NO: 588110 - RNA, 22 nt, Human
gggggcagaauguacucuuguc

SEQ ID NO: 588111 - RNA, 22 nt, Human
agcuucagauuuaucuuucugu

SEQ ID NO: 588112 - RNA, 19 nt, Human
gccucugcuggggacaggc

SEQ ID NO: 588113 - RNA, 22 nt, Human
gcaaacauucaggaguacagga

SEQ ID NO: 588114 - RNA, 21 nt, Human
uuucuggguggcugcauagug

SEQ ID NO: 588115 - RNA, 22 nt, Human
cagagcuguauuuaucuuucca

SEQ ID NO: 588116 - RNA, 22 nt, Human
ucugcugaauggagccaaccuc

SEQ ID NO: 588117 - RNA, 22 nt, Human
gcaggugggggucggugcaucu

SEQ ID NO: 588118 - RNA, 22 nt, Human
augaguuaggggccugagugga

SEQ ID NO: 588119 - RNA, 22 nt, Human
aggcccuguuaugagccacugu

SEQ ID NO: 588120 - RNA, 22 nt, Human
uuuagcaucgaaguaaauuuag

SEQ ID NO: 588121 - RNA, 22 nt, Human
caaaggcaguuacugaaugaag

SEQ ID NO: 588122 - RNA, 22 nt, Human
gaaaucuacgauuagugaaaau

SEQ ID NO: 588123 - RNA, 22 nt, Human
gagggguggcccuggcguguac

SEQ ID NO: 588124 - RNA, 22 nt, Human
aaccagcugagaaugcuucugc

SEQ ID NO: 588125 - RNA, 22 nt, Human
aauucugaugagucagagaaag

SEQ ID NO: 588126 - RNA, 22 nt, Human
cugcacaggggaugagggcagu

SEQ ID NO: 588127 - RNA, 22 nt, Human
uuaauaaaguaugaauuggaaa

SEQ ID NO: 588128 - RNA, 23 nt, Human
aaaugugagggaaaaucuuucug

SEQ ID NO: 588129 - RNA, 22 nt, Human
augcaaaaguaguugcaguuuu

SEQ ID NO: 588130 - RNA, 22 nt, Human
augcacuacuuggcuuuacuga

SEQ ID NO: 588131 - RNA, 22 nt, Human
agcucaagcuacacacagaguc

SEQ ID NO: 588132 - RNA, 22 nt, Human
gggagcuuaagacaguuccaau

SEQ ID NO: 588133 - RNA, 22 nt, Human
uauuguacaugguuaugcagga

SEQ ID NO: 588134 - RNA, 22 nt, Human
cuuucucugugugguaaagggc

SEQ ID NO: 588135 - RNA, 22 nt, Human
ucaugggguuuggcuggauguc

SEQ ID NO: 588136 - RNA, 22 nt, Human
gagcaguaggagaacccugagc

SEQ ID NO: 588137 - RNA, 22 nt, Human
agcacagauaacauggagugga

SEQ ID NO: 588138 - RNA, 22 nt, Human
ucccucagagaccguggugcag

SEQ ID NO: 588139 - RNA, 22 nt, Human
ugccacaguuucauggauucug

SEQ ID NO: 588140 - RNA, 22 nt, Human
cgaggccacaccugcuucuggg

SEQ ID NO: 588141 - RNA, 22 nt, Human
cuguguagucagguggucccac

SEQ ID NO: 588142 - RNA, 22 nt, Human
uuggcucagugugagggagaug

SEQ ID NO: 588143 - RNA, 22 nt, Human
guagcugucucggucaggaguu

SEQ ID NO: 588144 - RNA, 22 nt, Human
acacuaagguuggagucacagu

SEQ ID NO: 588145 - RNA, 22 nt, Human
gcuggagugcuggagugcagug

SEQ ID NO: 588146 - RNA, 22 nt, Human
uuuucuaucuccuagaacugcc

SEQ ID NO: 588147 - RNA, 22 nt, Human
uuagcaaaguuugccaucuagu

SEQ ID NO: 588148 - RNA, 18 nt, Human
gaggaaacaggcucugug

SEQ ID NO: 588149 - RNA, 21 nt, Human
agagcacagguggacaaugcu

SEQ ID NO: 588150 - RNA, 22 nt, Human
aggcagcuuaagcccuggccca

SEQ ID NO: 588151 - RNA, 22 nt, Human
ugagcuguauauuguuuuaaua

SEQ ID NO: 588152 - RNA, 19 nt, Human
uggcugagcuggacugagg

SEQ ID NO: 588153 - RNA, 22 nt, Human
guuuucuaggauccccuccaag

SEQ ID NO: 588154 - RNA, 22 nt, Human
agcugcccuuuaugaugcugaa

SEQ ID NO: 588155 - RNA, 19 nt, Human
gaacaaacuuaaacuuuuc

SEQ ID NO: 588156 - RNA, 22 nt, Human
aguucuuuugugaacauaugcu

SEQ ID NO: 588157 - RNA, 22 nt, Human
gaggcagagguuguugcaguga

SEQ ID NO: 588158 - RNA, 22 nt, Human
caggacagaccaagaucgugcu

SEQ ID NO: 588159 - RNA, 22 nt, Human
agucucuuaauuuuuucuaagu

SEQ ID NO: 588160 - RNA, 22 nt, Human
aggcuuagaaauucagcugagu

SEQ ID NO: 588161 - RNA, 22 nt, Human
gggcggggggagcuggaaugaa

SEQ ID NO: 588162 - RNA, 22 nt, Human
gacaggcaguuuuccagaucag

SEQ ID NO: 588163 - RNA, 22 nt, Human
auugagaauccauuugagauga

SEQ ID NO: 588164 - RNA, 22 nt, Human
aagaugaaaauuuacugugaug

SEQ ID NO: 588165 - RNA, 22 nt, Human
ccagagcugaugggcccagggu

SEQ ID NO: 588166 - RNA, 22 nt, Human
ugcucugggauucagcagccug

SEQ ID NO: 588167 - RNA, 22 nt, Human
cugggaggacaacuuggagcuc

SEQ ID NO: 588168 - RNA, 22 nt, Human
agcuucugcccguguuugcucu

SEQ ID NO: 588169 - RNA, 22 nt, Human
uucuucaaugugcccuguuuuc

SEQ ID NO: 588170 - RNA, 21 nt, Human
ugaggccucuccugggcuggc

SEQ ID NO: 588171 - RNA, 22 nt, Human
cauggccuugagugacugcacu

SEQ ID NO: 588172 - RNA, 22 nt, Human
aacacuuucuauuauuaugguu

SEQ ID NO: 588173 - RNA, 22 nt, Human
uuagugaaaagaaaaugagugg

SEQ ID NO: 588174 - RNA, 22 nt, Human
cuucacagcaugagcuuuggag

SEQ ID NO: 588175 - RNA, 22 nt, Human
gaagcagcaaguauaggacagg

SEQ ID NO: 588176 - RNA, 22 nt, Human
aaauuucuaagucaagaagaac

SEQ ID NO: 588177 - RNA, 23 nt, Human
ucugagcugucuuuucagcagaa

SEQ ID NO: 588178 - RNA, 22 nt, Human
cucuaaauccacgguauaguug

SEQ ID NO: 588179 - RNA, 22 nt, Human
caggccuggagugcaauggcac

SEQ ID NO: 588180 - RNA, 18 nt, Human
uuggaccugugucagggc

SEQ ID NO: 588181 - RNA, 22 nt, Human
uccuuucccuuuccauccuggc

SEQ ID NO: 588182 - RNA, 22 nt, Human
cuggcucucugagauauugagu

SEQ ID NO: 588183 - RNA, 22 nt, Human
ugggugugcccagauggugucc

SEQ ID NO: 588184 - RNA, 22 nt, Human
ugcaaacaccacagagacaauu

SEQ ID NO: 588185 - RNA, 22 nt, Human
gagcgcgccacaaggagcggcg

SEQ ID NO: 588186 - RNA, 22 nt, Human
cucagggacaaggggagacccc

SEQ ID NO: 588187 - RNA, 23 nt, Human
cagggcccugcucaauuucucca

SEQ ID NO: 588188 - RNA, 22 nt, Human
cccccaaaguuugcacggauaa

SEQ ID NO: 588189 - RNA, 22 nt, Human
gcccaaagccagugugcucucc

SEQ ID NO: 588190 - RNA, 22 nt, Human
augugaaacgcaaugggaucau

SEQ ID NO: 588191 - RNA, 22 nt, Human
uuucaaagggaaguuaugaagu

SEQ ID NO: 588192 - RNA, 22 nt, Human
ugggccucaccuucuuggcagc

SEQ ID NO: 588193 - RNA, 23 nt, Human
ucugagguggcucuugcuuugaa

SEQ ID NO: 588194 - RNA, 22 nt, Human
uugaugagaccauugccgcguc

SEQ ID NO: 588195 - RNA, 22 nt, Human
acaggaauuuccuaauauucga

SEQ ID NO: 588196 - RNA, 22 nt, Human
ggucagccccugcucaaggccg

SEQ ID NO: 588197 - RNA, 22 nt, Human
uaacacuuuggauuaaaauucu

SEQ ID NO: 588198 - RNA, 22 nt, Human
cugagcccaggcgggagcugag

SEQ ID NO: 588199 - RNA, 22 nt, Human
agguaggcccugagugcuguug

SEQ ID NO: 588200 - RNA, 22 nt, Human
agaucacuuugaugcuaccugg

SEQ ID NO: 588201 - RNA, 22 nt, Human
cugagaaacauauuuccaucua

SEQ ID NO: 588202 - RNA, 22 nt, Human
uuacaguacagaaaauaacaga

SEQ ID NO: 588203 - RNA, 22 nt, Human
uauuugcaacauaaaacucuga

SEQ ID NO: 588204 - RNA, 20 nt, Human
gagugggccauggagugaga

SEQ ID NO: 588205 - RNA, 22 nt, Human
uaacagaagaugaaacuucuuu

SEQ ID NO: 588206 - RNA, 22 nt, Human
cagcagcugauggggaagugau

SEQ ID NO: 588207 - RNA, 22 nt, Human
gcggguggaucaugaggucagg

SEQ ID NO: 588208 - RNA, 22 nt, Human
ccuccuggagcauuggugagga

SEQ ID NO: 588209 - RNA, 21 nt, Human
ucaggcaggucccacugaaca

SEQ ID NO: 588210 - RNA, 22 nt, Human
gcuguugcaaucaaggccaugg

SEQ ID NO: 588211 - RNA, 22 nt, Human
ggggccgaccgcgguucaggcc

SEQ ID NO: 588212 - RNA, 22 nt, Human
uauuguccaauaggauguuccu

SEQ ID NO: 588213 - RNA, 22 nt, Human
ccaauauuaugaaagugugaca

SEQ ID NO: 588214 - RNA, 22 nt, Human
auuuucauggcuucugcucagu

SEQ ID NO: 588215 - RNA, 18 nt, Human
uguggcaggggugggaga

SEQ ID NO: 588216 - RNA, 22 nt, Human
caccagcaccagcucugugccu

SEQ ID NO: 588217 - RNA, 21 nt, Human
ccugggagaucagcugccuuc

SEQ ID NO: 588218 - RNA, 16 nt, Human
ggcaccagugaacaca

SEQ ID NO: 588219 - RNA, 22 nt, Human
uaaggaaaguacauguuuugac

SEQ ID NO: 588220 - RNA, 22 nt, Human
ccugcagaaaggguccccagga

SEQ ID NO: 588221 - RNA, 22 nt, Human
ucuuggccacuaccaccuggag

SEQ ID NO: 588222 - RNA, 22 nt, Human
cuggccagcugacagcagggcu

SEQ ID NO: 588223 - RNA, 21 nt, Human
cacagaauauacauuuuaguu

SEQ ID NO: 588224 - RNA, 22 nt, Human
uaccaugucuucaauaagucua

SEQ ID NO: 588225 - RNA, 22 nt, Human
cuggcuuuagguuggagagcug

SEQ ID NO: 588226 - RNA, 22 nt, Human
gcucucugccuuucucaaugac

SEQ ID NO: 588227 - RNA, 22 nt, Human
cugcugucaaaaaucacuccau

SEQ ID NO: 588228 - RNA, 22 nt, Human
ggugacauuaucauuauuuuaa

SEQ ID NO: 588229 - RNA, 22 nt, Human
uccugacucugguguccucuac

SEQ ID NO: 588230 - RNA, 22 nt, Human
aggaaacuucagaguuuugguc

SEQ ID NO: 588231 - RNA, 22 nt, Human
uccuguggaagacaguguuggg

SEQ ID NO: 588232 - RNA, 22 nt, Human
agcuuuggagcugggugaaaga

SEQ ID NO: 588233 - RNA, 22 nt, Human
aaucgguugaacccaggaagug

SEQ ID NO: 588234 - RNA, 22 nt, Human
aacaugaaaaccuccacagcaa

SEQ ID NO: 588235 - RNA, 22 nt, Human
gcuggcuuuguggucucuccuc

SEQ ID NO: 588236 - RNA, 22 nt, Human
gaugucuuacuaacuagccuuu

SEQ ID NO: 588237 - RNA, 22 nt, Human
cugggcuucucccccuggcaga

SEQ ID NO: 588238 - RNA, 22 nt, Human
acuugguguauuagcucucacu

SEQ ID NO: 588239 - RNA, 22 nt, Human
agauggaguuaguaccagaguc

SEQ ID NO: 588240 - RNA, 22 nt, Human
gcccagagggaagaggugucau

SEQ ID NO: 588241 - RNA, 22 nt, Human
cugcuuuaccaaacucuuggau

SEQ ID NO: 588242 - RNA, 22 nt, Human
uuucaaagguuuugucaugucu

SEQ ID NO: 588243 - RNA, 22 nt, Human
uugguacauguuaaggaagagu

SEQ ID NO: 588244 - RNA, 22 nt, Human
cuggguguagcccaguaugagg

SEQ ID NO: 588245 - RNA, 22 nt, Human
uccuggagauaauugcagugaa

SEQ ID NO: 588246 - RNA, 22 nt, Human
cuggagauacugcucuccauau

SEQ ID NO: 588247 - RNA, 22 nt, Human
uuuauauccaucuuugaaguaa

SEQ ID NO: 588248 - RNA, 22 nt, Human
aggacugggugcagagggcauc

SEQ ID NO: 588249 - RNA, 22 nt, Human
ucauuucucccggccaaaaacu

SEQ ID NO: 588250 - RNA, 18 nt, Human
acuucucauuucucugca

SEQ ID NO: 588251 - RNA, 22 nt, Human
cuggagucggcgccccaacaga

SEQ ID NO: 588252 - RNA, 22 nt, Human
guucugucugagcaccacagga

SEQ ID NO: 588253 - RNA, 22 nt, Human
uagccggguguugugucaugca

SEQ ID NO: 588254 - RNA, 22 nt, Human
cugggcuaauuaagcacagcug

SEQ ID NO: 588255 - RNA, 22 nt, Human
aagaguuaaaugaaugaguggg

SEQ ID NO: 588256 - RNA, 22 nt, Human
uaacacauauuucaagaguagu

SEQ ID NO: 588257 - RNA, 22 nt, Human
uugcugauaaaauaaaccaaga

SEQ ID NO: 588258 - RNA, 20 nt, Human
agcccuguuuccuggagaga

SEQ ID NO: 588259 - RNA, 22 nt, Human
uguccccuuuaccuccgcagcc

SEQ ID NO: 588260 - RNA, 21 nt, Human
cacaccaaacaggaacaggga

SEQ ID NO: 588261 - RNA, 22 nt, Human
ggccuuggggaggauggugucc

SEQ ID NO: 588262 - RNA, 22 nt, Human
acccugggaccuggagguggau

SEQ ID NO: 588263 - RNA, 22 nt, Human
ucucuggcuccugccgggucca

SEQ ID NO: 588264 - RNA, 22 nt, Human
guguccuuauaagaagagaugc

SEQ ID NO: 588265 - RNA, 22 nt, Human
auaauuuacaacugcuuuuaau

SEQ ID NO: 588266 - RNA, 22 nt, Human
aacacugaaaugucuuaagauu

SEQ ID NO: 588267 - RNA, 22 nt, Human
cagucacacaaguggacuuggg

SEQ ID NO: 588268 - RNA, 19 nt, Human
uucuccaggcugcagaggg

SEQ ID NO: 588269 - RNA, 22 nt, Human
ccagccuugcaccgagccagcc

SEQ ID NO: 588270 - RNA, 22 nt, Human
cucaggagacaguguccacaug

SEQ ID NO: 588271 - RNA, 22 nt, Human
gcagaggaucaggcucuggaaa

SEQ ID NO: 588272 - RNA, 22 nt, Human
cuuugcagaaauaaacuugaug

SEQ ID NO: 588273 - RNA, 22 nt, Human
cugaacauucuugaacaucugu

SEQ ID NO: 588274 - RNA, 22 nt, Human
cccucaggagaugucagcugga

SEQ ID NO: 588275 - RNA, 22 nt, Human
uuaucacuuaugagcuuuuugc

SEQ ID NO: 588276 - RNA, 22 nt, Human
uccauuuuagaagaaaauccac

SEQ ID NO: 588277 - RNA, 22 nt, Human
ugugggaagauguugcaggaga

SEQ ID NO: 588278 - RNA, 22 nt, Human
guggaguggccuggcccugaga

SEQ ID NO: 588279 - RNA, 22 nt, Human
ugcccagccaguuuaugguaau

SEQ ID NO: 588280 - RNA, 22 nt, Human
uccaggaggugaggggaccaaa

SEQ ID NO: 588281 - RNA, 22 nt, Human
gggcuguaggagcuggaauggg

SEQ ID NO: 588282 - RNA, 17 nt, Human
uggaagcuucauguugg

SEQ ID NO: 588283 - RNA, 22 nt, Human
aagucaauuaguaaacuuggaa

SEQ ID NO: 588284 - RNA, 22 nt, Human
aaacacugauggauauuuuucc

SEQ ID NO: 588285 - RNA, 22 nt, Human
uaccuuugaucuggaauuuuaa

SEQ ID NO: 588286 - RNA, 22 nt, Human
agcugggacucaacugucuggg

SEQ ID NO: 588287 - RNA, 22 nt, Human
ggcaggugugagcuguaaagga

SEQ ID NO: 588288 - RNA, 22 nt, Human
ggguggugagauguagcugaug

SEQ ID NO: 588289 - RNA, 22 nt, Human
uuacuuuaugugauggauuagu

SEQ ID NO: 588290 - RNA, 22 nt, Human
aucuacagcugucugcacagua

SEQ ID NO: 588291 - RNA, 20 nt, Human
uccaaagaaguucacauuua

SEQ ID NO: 588292 - RNA, 22 nt, Human
agggccuggaacuggagaccac

SEQ ID NO: 588293 - RNA, 22 nt, Human
uauaggaaggcagauuuuagcu

SEQ ID NO: 588294 - RNA, 22 nt, Human
gcuggcccagugacccacagug

SEQ ID NO: 588295 - RNA, 22 nt, Human
cauggaucauaaaugugcuaaa

SEQ ID NO: 588296 - RNA, 22 nt, Human
aggcugcuggcaggcguggacg

SEQ ID NO: 588297 - RNA, 22 nt, Human
auggaagaguccccauggauga

SEQ ID NO: 588298 - RNA, 22 nt, Human
cuggagucuccccaggagcgug

SEQ ID NO: 588299 - RNA, 22 nt, Human
ucagaaauaaugaaugaugggg

SEQ ID NO: 588300 - RNA, 22 nt, Human
uaugagguagguauuauacuua

SEQ ID NO: 588301 - RNA, 22 nt, Human
uucuaugucagugugcucugug

SEQ ID NO: 588302 - RNA, 22 nt, Human
aaguuacagucagagguuaaca

SEQ ID NO: 588303 - RNA, 22 nt, Human
ugaaaucuccucuuuauauauc

SEQ ID NO: 588304 - RNA, 21 nt, Human
uucuccaggcaaccauuucag

SEQ ID NO: 588305 - RNA, 22 nt, Human
agccuguggaucccugcacugg

SEQ ID NO: 588306 - RNA, 22 nt, Human
acacugugcuuagaugcugaac

SEQ ID NO: 588307 - RNA, 17 nt, Human
ucugggcuucagugguc

SEQ ID NO: 588308 - RNA, 22 nt, Human
uguucccaagauaagauuauga

SEQ ID NO: 588309 - RNA, 22 nt, Human
ccugccagauccccugagcuga

SEQ ID NO: 588310 - RNA, 22 nt, Human
cuaauuuaaugaaugagucuua

SEQ ID NO: 588311 - RNA, 22 nt, Human
uccuccagagauuugaguuauu

SEQ ID NO: 588312 - RNA, 22 nt, Human
gccagucugcucccacaaguuc

SEQ ID NO: 588313 - RNA, 22 nt, Human
ucugggugcccuuugcucuguu

SEQ ID NO: 588314 - RNA, 22 nt, Human
ugaggcaggaguucaggcugcg

SEQ ID NO: 588315 - RNA, 22 nt, Human
caaguagaacagagcuaccuug

SEQ ID NO: 588316 - RNA, 22 nt, Human
gcagucuccauauacauuuaca

SEQ ID NO: 588317 - RNA, 18 nt, Human
ugaggccagagugggcau

SEQ ID NO: 588318 - RNA, 22 nt, Human
uuuauuugucuugccauuuagu

SEQ ID NO: 588319 - RNA, 22 nt, Human
aacagcagggacuugaauggaa

SEQ ID NO: 588320 - RNA, 22 nt, Human
caucacaguuugucagaaauca

SEQ ID NO: 588321 - RNA, 22 nt, Human
auuaggauuugguauggucaua

SEQ ID NO: 588322 - RNA, 22 nt, Human
ccuuagcaacacuuagcaacug

SEQ ID NO: 588323 - RNA, 22 nt, Human
gagcuucagaauuuaacagacu

SEQ ID NO: 588324 - RNA, 22 nt, Human
aggugggguguuggauguuuau

SEQ ID NO: 588325 - RNA, 22 nt, Human
agauacugaaauccaauggcca

SEQ ID NO: 588326 - RNA, 22 nt, Human
cuggagcucuccagagccccgu

SEQ ID NO: 588327 - RNA, 19 nt, Human
ugccccuuaagaguuucuc

SEQ ID NO: 588328 - RNA, 22 nt, Human
uucacaauuucccuucaucagg

SEQ ID NO: 588329 - RNA, 22 nt, Human
cugcacagggauauggggagcu

SEQ ID NO: 588330 - RNA, 22 nt, Human
aauguggggaagccauggcuga

SEQ ID NO: 588331 - RNA, 22 nt, Human
aaagcagugcugugagaacacu

SEQ ID NO: 588332 - RNA, 22 nt, Human
uggcaagagggaugcaagguuu

SEQ ID NO: 588333 - RNA, 22 nt, Human
gugugcagaggcaggaggugcu

SEQ ID NO: 588334 - RNA, 22 nt, Human
agaggcacccgcgcgcggccau

SEQ ID NO: 588335 - RNA, 22 nt, Human
aaauuugauaagccauuguuac

SEQ ID NO: 588336 - RNA, 22 nt, Human
cuacuuguucacuguaggucgc

SEQ ID NO: 588337 - RNA, 22 nt, Human
aucuacucaguaacugcuuagg

SEQ ID NO: 588338 - RNA, 22 nt, Human
ucugccuggguguggagcagag

SEQ ID NO: 588339 - RNA, 22 nt, Human
cugcuuuaacaaggcugaucag

SEQ ID NO: 588340 - RNA, 22 nt, Human
guacauuuacugaugaaaagua

SEQ ID NO: 588341 - RNA, 22 nt, Human
gaaggcccgcccugagcaaggg

SEQ ID NO: 588342 - RNA, 22 nt, Human
gggcauggcgugugcuggauuc

SEQ ID NO: 588343 - RNA, 22 nt, Human
gaaucuuauuuuuaaaucuucc

SEQ ID NO: 588344 - RNA, 18 nt, Human
cugugcagcaaacugagc

SEQ ID NO: 588345 - RNA, 22 nt, Human
cuguguguuuauaucauuuccu

SEQ ID NO: 588346 - RNA, 22 nt, Human
uacaugaacaaaauagcagaaa

SEQ ID NO: 588347 - RNA, 22 nt, Human
uaauuuugucacagugacaugc

SEQ ID NO: 588348 - RNA, 22 nt, Human
acaggccugugugcacacgagg

SEQ ID NO: 588349 - RNA, 22 nt, Human
acagcagcaauagcagugacau

SEQ ID NO: 588350 - RNA, 22 nt, Human
auugugaauugagaguacuucu

SEQ ID NO: 588351 - RNA, 20 nt, Human
gggggccagcagcagacgcc

SEQ ID NO: 588352 - RNA, 22 nt, Human
agcugguggaagggagcccaaa

SEQ ID NO: 588353 - RNA, 22 nt, Human
uggacacaauguugccuuaggg

SEQ ID NO: 588354 - RNA, 22 nt, Human
ccauuuaacacagaguuuucca

SEQ ID NO: 588355 - RNA, 22 nt, Human
gccaggcucaguagcgauuccu

SEQ ID NO: 588356 - RNA, 22 nt, Human
aaggagaaaugguagaugugca

SEQ ID NO: 588357 - RNA, 22 nt, Human
caggcaccugugugucucaggg

SEQ ID NO: 588358 - RNA, 22 nt, Human
uucagcauagcagcuucaggac

SEQ ID NO: 588359 - RNA, 21 nt, Human
aguugcugcugcugcagguga

SEQ ID NO: 588360 - RNA, 22 nt, Human
auaaagcaagcauaccauuaag

SEQ ID NO: 588361 - RNA, 22 nt, Human
cagggcuucgcuccuggugcac

SEQ ID NO: 588362 - RNA, 22 nt, Human
guggggguuucauuaagacaau

SEQ ID NO: 588363 - RNA, 22 nt, Human
uggcccaggggcucuugguguu

SEQ ID NO: 588364 - RNA, 22 nt, Human
cucugggcaggacgccaggccu

SEQ ID NO: 588365 - RNA, 22 nt, Human
gccagccacaagggaggcuugu

SEQ ID NO: 588366 - RNA, 22 nt, Human
agcccagguugaggcugcagug

SEQ ID NO: 588367 - RNA, 22 nt, Human
acagaauugauggaaaucucag

SEQ ID NO: 588368 - RNA, 22 nt, Human
cugggcauauacgugcaaguca

SEQ ID NO: 588369 - RNA, 22 nt, Human
acugauuucagggaugagaaga

SEQ ID NO: 588370 - RNA, 22 nt, Human
ccaggcuggagugcaauggugc

SEQ ID NO: 588371 - RNA, 22 nt, Human
aggcccuggcacugccugggag

SEQ ID NO: 588372 - RNA, 22 nt, Human
cacugcuuaguugguaaaugug

SEQ ID NO: 588373 - RNA, 22 nt, Human
uuaccauuccaugacaucagga

SEQ ID NO: 588374 - RNA, 20 nt, Human
gucuacacgggcaguguaga

SEQ ID NO: 588375 - RNA, 22 nt, Human
ugggugggagcacccugucugg

SEQ ID NO: 588376 - RNA, 22 nt, Human
uaguuacagugcauagcaagau

SEQ ID NO: 588377 - RNA, 22 nt, Human
caucuaaauuugacuccaagga

SEQ ID NO: 588378 - RNA, 22 nt, Human
aaggaaagaguaugcaccuugu

SEQ ID NO: 588379 - RNA, 22 nt, Human
ugggagagauaggcuucuggac

SEQ ID NO: 588380 - RNA, 22 nt, Human
gagggcugccacguugggcgag

SEQ ID NO: 588381 - RNA, 22 nt, Human
caauaaguaauaggcaucuaau

SEQ ID NO: 588382 - RNA, 22 nt, Human
agcaguuauauuacucucaggu

SEQ ID NO: 588383 - RNA, 22 nt, Human
acagcaggaagcuggagggaaa

SEQ ID NO: 588384 - RNA, 22 nt, Human
agguggguaucaugagagauua

SEQ ID NO: 588385 - RNA, 22 nt, Human
guaguggagucuccuguccugg

SEQ ID NO: 588386 - RNA, 22 nt, Human
ugcugcccacuguauuucucca

SEQ ID NO: 588387 - RNA, 22 nt, Human
aaggcacugaaaaauugugugu

SEQ ID NO: 588388 - RNA, 22 nt, Human
acauaugugucugcacaugccc

SEQ ID NO: 588389 - RNA, 22 nt, Human
ggggcagagaauaaaaaccuaa

SEQ ID NO: 588390 - RNA, 22 nt, Human
cugagcagcaacccagagccuc

SEQ ID NO: 588391 - RNA, 22 nt, Human
gcuggcuccaaaagcaggggcu

SEQ ID NO: 588392 - RNA, 22 nt, Human
gaauuauaggcaaagcagucau

SEQ ID NO: 588393 - RNA, 22 nt, Human
cuggcucuugcgacucagcuug

SEQ ID NO: 588394 - RNA, 22 nt, Human
ccugacaguccuuuucuagugu

SEQ ID NO: 588395 - RNA, 22 nt, Human
gugagcagccucaccugagggu

SEQ ID NO: 588396 - RNA, 22 nt, Human
uauaauuuggggaaaguggugu

SEQ ID NO: 588397 - RNA, 22 nt, Human
gugaaugacuguuuucagcauu

SEQ ID NO: 588398 - RNA, 22 nt, Human
agcuugaguuuuggaugaagug

SEQ ID NO: 588399 - RNA, 21 nt, Human
auggauuuaaacaggccacaa

SEQ ID NO: 588400 - RNA, 22 nt, Human
cuugggcaggggaaacagcugc

SEQ ID NO: 588401 - RNA, 22 nt, Human
gcugagacuggcagcaggaagu

SEQ ID NO: 588402 - RNA, 22 nt, Human
agaucaguaagaggaagaaugg

SEQ ID NO: 588403 - RNA, 22 nt, Human
uagcugacagauacaaucagau

SEQ ID NO: 588404 - RNA, 22 nt, Human
uccaggcugccacagugcaacg

SEQ ID NO: 588405 - RNA, 22 nt, Human
gcaccaggugcagccgggcccc

SEQ ID NO: 588406 - RNA, 22 nt, Human
aauacugagaucccacaaagca

SEQ ID NO: 588407 - RNA, 22 nt, Human
agcugcugggaccccagaucca

SEQ ID NO: 588408 - RNA, 22 nt, Human
ggccccagccucaguccccuga

SEQ ID NO: 588409 - RNA, 22 nt, Human
gugccuggcacacagaaggcaa

SEQ ID NO: 588410 - RNA, 22 nt, Human
uucucuugugccaaguuguugc

SEQ ID NO: 588411 - RNA, 22 nt, Human
acgugcaggaucugguuggcga

SEQ ID NO: 588412 - RNA, 22 nt, Human
cugggcagccucacacaauguu

SEQ ID NO: 588413 - RNA, 22 nt, Human
uccagagggcgauggcuggggg

SEQ ID NO: 588414 - RNA, 22 nt, Human
aguccuuacaccuggaaccuau

SEQ ID NO: 588415 - RNA, 20 nt, Human
ccugucuccucuuaccuggc

SEQ ID NO: 588416 - RNA, 22 nt, Human
uaucuucaauuuauucaaggag

SEQ ID NO: 588417 - RNA, 22 nt, Human
ccugagcugacucuccuuucag

SEQ ID NO: 588418 - RNA, 22 nt, Human
augaggcauagcagggaucgga

SEQ ID NO: 588419 - RNA, 22 nt, Human
ugcuccagcgcugccaccaguu

SEQ ID NO: 588420 - RNA, 16 nt, Human
auuguuuucaauuaga

SEQ ID NO: 588421 - RNA, 22 nt, Human
auuaaauacugcaggcuaagca

SEQ ID NO: 588422 - RNA, 22 nt, Human
aggcccuucuugguggcucagg

SEQ ID NO: 588423 - RNA, 22 nt, Human
ggcucuggaauguguagucagg

SEQ ID NO: 588424 - RNA, 22 nt, Human
cagaagcacuaggaggaaacgu

SEQ ID NO: 588425 - RNA, 22 nt, Human
cauuagguauuuaagcacacag

SEQ ID NO: 588426 - RNA, 22 nt, Human
cagcucccuauggugaggcgac

SEQ ID NO: 588427 - RNA, 22 nt, Human
uacuauaaagucuuaaugaguc

SEQ ID NO: 588428 - RNA, 22 nt, Human
uauugaggugcuuagcuggggg

SEQ ID NO: 588429 - RNA, 22 nt, Human
gaaggccacaagagaaguuaag

SEQ ID NO: 588430 - RNA, 22 nt, Human
ggggccagagaggacccaggug

SEQ ID NO: 588431 - RNA, 22 nt, Human
cagugucuccagaugcuccaau

SEQ ID NO: 588432 - RNA, 22 nt, Human
agggccugcaucaggagcuugg

SEQ ID NO: 588433 - RNA, 22 nt, Human
agacaauuuuugguuuugcaag

SEQ ID NO: 588434 - RNA, 23 nt, Human
ucucccucaugccuaggccuggg

SEQ ID NO: 588435 - RNA, 22 nt, Human
ugaguuaucuaaaauagucaaa

SEQ ID NO: 588436 - RNA, 22 nt, Human
caggccugugaguugaggcccc

SEQ ID NO: 588437 - RNA, 22 nt, Human
caccuuuaaugagcaccagccg

SEQ ID NO: 588438 - RNA, 19 nt, Human
aggcugugaggggaaggaa

SEQ ID NO: 588439 - RNA, 22 nt, Human
uggcuuccacugugugcccccu

SEQ ID NO: 588440 - RNA, 22 nt, Human
aggcuggugauuagaagcagcc

SEQ ID NO: 588441 - RNA, 22 nt, Human
ugaaugaggauccuugaccuua

SEQ ID NO: 588442 - RNA, 22 nt, Human
agacaugccaagaaacccagug

SEQ ID NO: 588443 - RNA, 22 nt, Human
cacuuuauaaaauuggugugag

SEQ ID NO: 588444 - RNA, 22 nt, Human
gaggccugguuugcaugagaau

SEQ ID NO: 588445 - RNA, 22 nt, Human
aaaagcucuuucugcuguagau

SEQ ID NO: 588446 - RNA, 19 nt, Human
cugagcagcggcagcacuu

SEQ ID NO: 588447 - RNA, 22 nt, Human
uauugacagaugcauuauguug

SEQ ID NO: 588448 - RNA, 22 nt, Human
ucaguugcuguguaauguuuuc

SEQ ID NO: 588449 - RNA, 17 nt, Human
aggaaacauuuucuuuc

SEQ ID NO: 588450 - RNA, 17 nt, Human
uucagcaguguuucucc

SEQ ID NO: 588451 - RNA, 22 nt, Human
uggcucuguugugcugagccag

SEQ ID NO: 588452 - RNA, 22 nt, Human
ggugcaggcgguggggcaagua

SEQ ID NO: 588453 - RNA, 22 nt, Human
agagggguuaagugcuaguccg

SEQ ID NO: 588454 - RNA, 22 nt, Human
ugcauuguaggauguuuagcag

SEQ ID NO: 588455 - RNA, 22 nt, Human
guucgcaucuugaucauggacu

SEQ ID NO: 588456 - RNA, 22 nt, Human
agggcugaaguuauggcugagc

SEQ ID NO: 588457 - RNA, 22 nt, Human
cccugcugucaggugcugggag

SEQ ID NO: 588458 - RNA, 22 nt, Human
gguuccccaggcggcccuugga

SEQ ID NO: 588459 - RNA, 22 nt, Human
uggaggugggagggacuguccu

SEQ ID NO: 588460 - RNA, 22 nt, Human
gacauggcuucuaggaagcuuu

SEQ ID NO: 588461 - RNA, 20 nt, Human
agugccagggcaggugagag

SEQ ID NO: 588462 - RNA, 21 nt, Human
gcaggcuggucaaaccucagu

SEQ ID NO: 588463 - RNA, 22 nt, Human
gaucacaugaauggaauagaag

SEQ ID NO: 588464 - RNA, 22 nt, Human
uacugucucugcccuggccagg

SEQ ID NO: 588465 - RNA, 22 nt, Human
cuuuaugaaccuguucagcuug

SEQ ID NO: 588466 - RNA, 22 nt, Human
cuucuuaaauauuuggcugacu

SEQ ID NO: 588467 - RNA, 19 nt, Human
ucaguggagaaaggggaag

SEQ ID NO: 588468 - RNA, 22 nt, Human
gacuguacuugagagaggaacu

SEQ ID NO: 588469 - RNA, 22 nt, Human
cauuuucucaaugaacccucuu

SEQ ID NO: 588470 - RNA, 22 nt, Human
uuguuucagcuguaugcuaugu

SEQ ID NO: 588471 - RNA, 22 nt, Human
caggcugcggccgugugagcau

SEQ ID NO: 588472 - RNA, 22 nt, Human
cagcugaauucuucagacucca

SEQ ID NO: 588473 - RNA, 22 nt, Human
aucuucaucaaguucacagugg

SEQ ID NO: 588474 - RNA, 22 nt, Human
agaggaggccaggcccacaccu

SEQ ID NO: 588475 - RNA, 22 nt, Human
aaggcugaguaaaacagagaac

SEQ ID NO: 588476 - RNA, 22 nt, Human
cacagaggaugcccaagcgauc

SEQ ID NO: 588477 - RNA, 22 nt, Human
gaaaggaacuugugagugggag

SEQ ID NO: 588478 - RNA, 22 nt, Human
gacagagaggcugagcaguaca

SEQ ID NO: 588479 - RNA, 22 nt, Human
ugggcuggugagggaucauuua

SEQ ID NO: 588480 - RNA, 22 nt, Human
aucuuucaguuucauaccaauu

SEQ ID NO: 588481 - RNA, 22 nt, Human
uguuuaaugaagaugguuuuuc

SEQ ID NO: 588482 - RNA, 22 nt, Human
gggccacacagaaccuccuggu

SEQ ID NO: 588483 - RNA, 22 nt, Human
aaggaaaucuuuguaacaucuu

SEQ ID NO: 588484 - RNA, 22 nt, Human
ucuagaaaaacaaaguaucuga

SEQ ID NO: 588485 - RNA, 22 nt, Human
ucagucuccuuuccucuagaca

SEQ ID NO: 588486 - RNA, 22 nt, Human
acuuuggguaagccaggugcua

SEQ ID NO: 588487 - RNA, 22 nt, Human
auccuucuccaaaacuggcucc

SEQ ID NO: 588488 - RNA, 22 nt, Human
gaggccagaaugagucucuggg

SEQ ID NO: 588489 - RNA, 22 nt, Human
uggcauggguggagagagcaca

SEQ ID NO: 588490 - RNA, 22 nt, Human
uuaccacagugccugucuaaug

SEQ ID NO: 588491 - RNA, 22 nt, Human
cauacuuucuuuuucacgcaua

SEQ ID NO: 588492 - RNA, 22 nt, Human
gcagcaguggucuguagaagga

SEQ ID NO: 588493 - RNA, 22 nt, Human
gcagguggggcugcuaccagaa

SEQ ID NO: 588494 - RNA, 22 nt, Human
uuaaggugcuuuauuuagcucu

SEQ ID NO: 588495 - RNA, 19 nt, Human
ccugucugucuucagcuag

SEQ ID NO: 588496 - RNA, 22 nt, Human
cagguugaaaguggaggagcua

SEQ ID NO: 588497 - RNA, 22 nt, Human
uaggccaaaugacuugauguuu

SEQ ID NO: 588498 - RNA, 22 nt, Human
auucucauuugcuggcuauaug

SEQ ID NO: 588499 - RNA, 22 nt, Human
aaagaaggaccuggaggaggau

SEQ ID NO: 588500 - RNA, 22 nt, Human
uacauccaaaugaauuagaauu

SEQ ID NO: 588501 - RNA, 22 nt, Human
aggacuggcccugaggggaggc

SEQ ID NO: 588502 - RNA, 22 nt, Human
guccugguauaauuguuuaaaa

SEQ ID NO: 588503 - RNA, 22 nt, Human
aggguaggaacugaguggaagg

SEQ ID NO: 588504 - RNA, 22 nt, Human
caaagcaaggcucaguuugaac

SEQ ID NO: 588505 - RNA, 22 nt, Human
caguguggugagauuccaggug

SEQ ID NO: 588506 - RNA, 22 nt, Human
uacacaugcucagauuccugug

SEQ ID NO: 588507 - RNA, 22 nt, Human
uuggaaaagugaaacuagaugc

SEQ ID NO: 588508 - RNA, 22 nt, Human
ucugacagggccaaacaugaca

SEQ ID NO: 588509 - RNA, 22 nt, Human
gauguguaacaugcugugacau

SEQ ID NO: 588510 - RNA, 22 nt, Human
ucuguaaucaagauauuugaga

SEQ ID NO: 588511 - RNA, 22 nt, Human
uucauucaucucuaaaaugccu

SEQ ID NO: 588512 - RNA, 22 nt, Human
ccaggcugugguuuagauagag

SEQ ID NO: 588513 - RNA, 22 nt, Human
augaucagcaguuuucaguguu

SEQ ID NO: 588514 - RNA, 22 nt, Human
aagaagcuguagggauuaacuc

SEQ ID NO: 588515 - RNA, 22 nt, Human
caugucagggaagagagucagu

SEQ ID NO: 588516 - RNA, 22 nt, Human
gggaggaaagagaaguggucca

SEQ ID NO: 588517 - RNA, 22 nt, Human
guuaugauugaaauuccaguuu

SEQ ID NO: 588518 - RNA, 22 nt, Human
aaaauaguuaacguucagagua

SEQ ID NO: 588519 - RNA, 22 nt, Human
ggcuuuaaggaguaaaaaugcc

SEQ ID NO: 588520 - RNA, 22 nt, Human
uggaaacugugguauuucuuua

SEQ ID NO: 588521 - RNA, 22 nt, Human
ccucuggcaacuucacagccca

SEQ ID NO: 588522 - RNA, 22 nt, Human
agagcugcaauuucauguggug

SEQ ID NO: 588523 - RNA, 22 nt, Human
accuugaaggcagaggacaccu

SEQ ID NO: 588524 - RNA, 23 nt, Human
gguccacccgagccugcagcuuc

SEQ ID NO: 588525 - RNA, 22 nt, Human
cugggcucaaauccuaucucca

SEQ ID NO: 588526 - RNA, 22 nt, Human
acaagaauuauuucuaguuaac

SEQ ID NO: 588527 - RNA, 18 nt, Human
caaauucucauugauuuc

SEQ ID NO: 588528 - RNA, 22 nt, Human
agcugcuguccuaggcacugua

SEQ ID NO: 588529 - RNA, 22 nt, Human
cacugcagccucgcucuccuga

SEQ ID NO: 588530 - RNA, 22 nt, Human
ggcuccagaaaucauagagcag

SEQ ID NO: 588531 - RNA, 22 nt, Human
uaagaacuuggcagcaagaaau

SEQ ID NO: 588532 - RNA, 22 nt, Human
cuggcuuucugcaaaucuccau

SEQ ID NO: 588533 - RNA, 22 nt, Human
agguuauuaaaguguauuuuug

SEQ ID NO: 588534 - RNA, 22 nt, Human
aagagauguggaaucauuuaca

SEQ ID NO: 588535 - RNA, 22 nt, Human
cuuacauugucuuaguuuucaa

SEQ ID NO: 588536 - RNA, 19 nt, Human
acccagagcccuuugcagg

SEQ ID NO: 588537 - RNA, 22 nt, Human
cucucuggaagggggagcugau

SEQ ID NO: 588538 - RNA, 22 nt, Human
ccaggccugcaucugcugcgca

SEQ ID NO: 588539 - RNA, 22 nt, Human
cccagggguaaggcgcagcgug

SEQ ID NO: 588540 - RNA, 22 nt, Human
auuugcuuguaaauguaugccu

SEQ ID NO: 588541 - RNA, 22 nt, Human
uagggcugccuauggcuagaua

SEQ ID NO: 588542 - RNA, 22 nt, Human
cccugggagaaguugagggcug

SEQ ID NO: 588543 - RNA, 22 nt, Human
uggaaggggccaggcgcggagu

SEQ ID NO: 588544 - RNA, 22 nt, Human
ugcucuggaguggcuugugcac

SEQ ID NO: 588545 - RNA, 22 nt, Human
auuccagauguuacugaaaggc

SEQ ID NO: 588546 - RNA, 21 nt, Human
gccugggauaguggccuccgg

SEQ ID NO: 588547 - RNA, 22 nt, Human
uaucagaaggaagugccuuuaa

SEQ ID NO: 588548 - RNA, 22 nt, Human
aauaauuuuagcucagaguugu

SEQ ID NO: 588549 - RNA, 22 nt, Human
ggaugagguagaugaacaaggg

SEQ ID NO: 588550 - RNA, 22 nt, Human
ugaggucugcagggcugugcau

SEQ ID NO: 588551 - RNA, 22 nt, Human
ucugggcugcugugcagugacc

SEQ ID NO: 588552 - RNA, 22 nt, Human
uuuuccuguuaaaucugggcac

SEQ ID NO: 588553 - RNA, 22 nt, Human
gaaauguaggcauaauuauuuu

SEQ ID NO: 588554 - RNA, 22 nt, Human
aaaaaccuuucccauacuaaga

SEQ ID NO: 588555 - RNA, 22 nt, Human
caguuuauauauaagcacauug

SEQ ID NO: 588556 - RNA, 22 nt, Human
uacauucucuucccauugucuc

SEQ ID NO: 588557 - RNA, 22 nt, Human
ucucccacagccgugcuucaag

SEQ ID NO: 588558 - RNA, 22 nt, Human
acagagacaauauuuguaaagu

SEQ ID NO: 588559 - RNA, 22 nt, Human
caaauagauuguucaauccuga

SEQ ID NO: 588560 - RNA, 22 nt, Human
cucagugguugagagccugggc

SEQ ID NO: 588561 - RNA, 22 nt, Human
acauaguaagugcucaguaaau

SEQ ID NO: 588562 - RNA, 22 nt, Human
ucuaccacuuauuagcucugug

SEQ ID NO: 588563 - RNA, 22 nt, Human
uggugcugccucagaugccuua

SEQ ID NO: 588564 - RNA, 22 nt, Human
aguuagaauagucagauuguag

SEQ ID NO: 588565 - RNA, 22 nt, Human
ucuuggaaucuccauagaguga

SEQ ID NO: 588566 - RNA, 18 nt, Human
cucucuggucuggauccc

SEQ ID NO: 588567 - RNA, 22 nt, Human
uauuucacucaguauaccauag

SEQ ID NO: 588568 - RNA, 22 nt, Human
uauggcagaggagaggcacuag

SEQ ID NO: 588569 - RNA, 22 nt, Human
auggaaaggcuguggaaacuua

SEQ ID NO: 588570 - RNA, 22 nt, Human
gucuggaggaaaagguuaaaug

SEQ ID NO: 588571 - RNA, 22 nt, Human
cacuggugacuucugagcugga

SEQ ID NO: 588572 - RNA, 22 nt, Human
caggcuggacauuagauacaua

SEQ ID NO: 588573 - RNA, 22 nt, Human
ucugcucagguuaccuagcuag

SEQ ID NO: 588574 - RNA, 22 nt, Human
gaagccugguucgcuggccacc

SEQ ID NO: 588575 - RNA, 22 nt, Human
agcugaguuaauucaucacuua

SEQ ID NO: 588576 - RNA, 23 nt, Human
uccugaggguuucccagccuugg

SEQ ID NO: 588577 - RNA, 22 nt, Human
caguccuugauccaauaguggg

SEQ ID NO: 588578 - RNA, 22 nt, Human
agguggagaucagggacuaagg

SEQ ID NO: 588579 - RNA, 22 nt, Human
uccuugaagcuuguaucuaaua

SEQ ID NO: 588580 - RNA, 22 nt, Human
auugaaaauauaauucuaggag

SEQ ID NO: 588581 - RNA, 22 nt, Human
aauuaggcaaauuaauuucucu

SEQ ID NO: 588582 - RNA, 22 nt, Human
cuggggcucucuggaaugcuug

SEQ ID NO: 588583 - RNA, 22 nt, Human
aggcugaggggcgagggacccu

SEQ ID NO: 588584 - RNA, 22 nt, Human
uauuauugaaucaguucuuuga

SEQ ID NO: 588585 - RNA, 22 nt, Human
uagacauuuaucuccaugugga

SEQ ID NO: 588586 - RNA, 22 nt, Human
ugugcaauagaaaguggcaugg

SEQ ID NO: 588587 - RNA, 22 nt, Human
caagguuucgaguucccaacca

SEQ ID NO: 588588 - RNA, 22 nt, Human
agcaugaaaggcgugccaacuu

SEQ ID NO: 588589 - RNA, 22 nt, Human
auacaaauuuauagaugcauuu

SEQ ID NO: 588590 - RNA, 22 nt, Human
ugagcccuaagggucaagcagg

SEQ ID NO: 588591 - RNA, 22 nt, Human
cugaaaggcaguggguagugug

SEQ ID NO: 588592 - RNA, 22 nt, Human
ggggugggcgugcagggacacc

SEQ ID NO: 588593 - RNA, 22 nt, Human
ugacauguuagggaaaugugau

SEQ ID NO: 588594 - RNA, 22 nt, Human
cgcugccuucaucccacgccua

SEQ ID NO: 588595 - RNA, 22 nt, Human
ugcugccagggcucugcccaca

SEQ ID NO: 588596 - RNA, 22 nt, Human
auauauagagcuagauguuaaa

SEQ ID NO: 588597 - RNA, 23 nt, Human
ucggugggcguggaggccgaggc

SEQ ID NO: 588598 - RNA, 22 nt, Human
aaauguauccuacuuccugagu

SEQ ID NO: 588599 - RNA, 22 nt, Human
ggaggcuccuaagcugacuuga

SEQ ID NO: 588600 - RNA, 19 nt, Human
aagcuccagcagauccuuu

SEQ ID NO: 588601 - RNA, 22 nt, Human
aacaugcucuguuucuuggaug

SEQ ID NO: 588602 - RNA, 22 nt, Human
caucauuuuauuaaccaagaaa

SEQ ID NO: 588603 - RNA, 22 nt, Human
ccccagaaguuugcacaagaga

SEQ ID NO: 588604 - RNA, 22 nt, Human
aauguauuuugggaguuucuuu

SEQ ID NO: 588605 - RNA, 22 nt, Human
gaauaacauuuuuuccuuuaca

SEQ ID NO: 588606 - RNA, 22 nt, Human
augacaccauauuagccuagag

SEQ ID NO: 588607 - RNA, 22 nt, Human
auuuuguugagguaauugucaa

SEQ ID NO: 588608 - RNA, 22 nt, Human
gauuucuugauaaguaguguga

SEQ ID NO: 588609 - RNA, 22 nt, Human
agugccuuggguauuuugagua

SEQ ID NO: 588610 - RNA, 22 nt, Human
agagaugucgccuugcccaggg

SEQ ID NO: 588611 - RNA, 22 nt, Human
uagaaagcaaaauccuaccaag

SEQ ID NO: 588612 - RNA, 22 nt, Human
caagcagagacuagauagcugu

SEQ ID NO: 588613 - RNA, 22 nt, Human
ugaaacauugcacuguaugaau

SEQ ID NO: 588614 - RNA, 22 nt, Human
ccugaccagagugagggcuuag

SEQ ID NO: 588615 - RNA, 19 nt, Human
agcuggagauuggagggca

SEQ ID NO: 588616 - RNA, 22 nt, Human
acaagaauaaggauaagagauu

SEQ ID NO: 588617 - RNA, 22 nt, Human
uacagugcgggugcgggccucu

SEQ ID NO: 588618 - RNA, 22 nt, Human
uggugcagucauuggcccaggg

SEQ ID NO: 588619 - RNA, 22 nt, Human
caaagaaggaacuauaauccca

SEQ ID NO: 588620 - RNA, 22 nt, Human
uuuccugccuggaccucugcuu

SEQ ID NO: 588621 - RNA, 22 nt, Human
aaaaauaggucaaccguguaug

SEQ ID NO: 588622 - RNA, 22 nt, Human
uuuguuuacaaaaauaagcagu

SEQ ID NO: 588623 - RNA, 22 nt, Human
cacuaguucacaaaauaggaaa

SEQ ID NO: 588624 - RNA, 22 nt, Human
agcauacaggucugaaacagcu

SEQ ID NO: 588625 - RNA, 22 nt, Human
aagccgggccugagaaaugaca

SEQ ID NO: 588626 - RNA, 22 nt, Human
agcccagggcuaauaggaacca

SEQ ID NO: 588627 - RNA, 22 nt, Human
ccagugugaaaggucauuuauc

SEQ ID NO: 588628 - RNA, 22 nt, Human
uccugggagagugggacuguau

SEQ ID NO: 588629 - RNA, 21 nt, Human
aggcucccagaaaugggcauc

SEQ ID NO: 588630 - RNA, 22 nt, Human
ggagaccaggucagagauggug

SEQ ID NO: 588631 - RNA, 22 nt, Human
guggcccaggcuuggcgcuggc

SEQ ID NO: 588632 - RNA, 22 nt, Human
gaagauuaccugagaccacuug

SEQ ID NO: 588633 - RNA, 22 nt, Human
cccaggaguaagugacauuguu

SEQ ID NO: 588634 - RNA, 22 nt, Human
gggauggcucaaaggagucagg

SEQ ID NO: 588635 - RNA, 22 nt, Human
uagcauuucacugaucuucacu

SEQ ID NO: 588636 - RNA, 18 nt, Human
ugugcaauauuaaccacc

SEQ ID NO: 588637 - RNA, 22 nt, Human
aaaacauguccauacagaaacu

SEQ ID NO: 588638 - RNA, 22 nt, Human
agcaggugguaggcagucagca

SEQ ID NO: 588639 - RNA, 22 nt, Human
uccuuucugugcugucaggucc

SEQ ID NO: 588640 - RNA, 21 nt, Human
aauuugcuaagcaaaggagca

SEQ ID NO: 588641 - RNA, 22 nt, Human
ugagauggaguuuuggggauau

SEQ ID NO: 588642 - RNA, 22 nt, Human
ucuggcuuuuauucaguuggca

SEQ ID NO: 588643 - RNA, 22 nt, Human
ucuccacucugagugccuuuca

SEQ ID NO: 588644 - RNA, 22 nt, Human
ugaauacuauuucauaaugugg

SEQ ID NO: 588645 - RNA, 22 nt, Human
uuugcauuuuagauuuaggccu

SEQ ID NO: 588646 - RNA, 22 nt, Human
ugcugcuguugacggcugucca

SEQ ID NO: 588647 - RNA, 22 nt, Human
uccuccaggauaaaauguguug

SEQ ID NO: 588648 - RNA, 22 nt, Human
cagcugggagcuccauuagaua

SEQ ID NO: 588649 - RNA, 22 nt, Human
cugggaagccacaggguguggg

SEQ ID NO: 588650 - RNA, 23 nt, Human
uuaaaaguggagagagaagcugg

SEQ ID NO: 588651 - RNA, 22 nt, Human
uuucauugucaauaaacuguau

SEQ ID NO: 588652 - RNA, 22 nt, Human
uucucuagguuuuagaugaaga

SEQ ID NO: 588653 - RNA, 22 nt, Human
gagcuguccaagauggucguaa

SEQ ID NO: 588654 - RNA, 22 nt, Human
uagucucuggagacucuagggg

SEQ ID NO: 588655 - RNA, 22 nt, Human
ucacaggacccugaggguggcg

SEQ ID NO: 588656 - RNA, 22 nt, Human
ugcagaguagcuauaccauuuu

SEQ ID NO: 588657 - RNA, 22 nt, Human
cagcccagugcauuuguguacu

SEQ ID NO: 588658 - RNA, 22 nt, Human
cuacugaguccuucagcugcca

SEQ ID NO: 588659 - RNA, 22 nt, Human
gaacacauuucucugacuguag

SEQ ID NO: 588660 - RNA, 22 nt, Human
aacuacagaaucauagaaaaua

SEQ ID NO: 588661 - RNA, 22 nt, Human
uaacugugugaacgugaucauu

SEQ ID NO: 588662 - RNA, 22 nt, Human
gcuuuauuuugugagggauuac

SEQ ID NO: 588663 - RNA, 22 nt, Human
gccuucccucucauccugcugg

SEQ ID NO: 588664 - RNA, 22 nt, Human
uuaauaaguaguaguuauuguu

SEQ ID NO: 588665 - RNA, 22 nt, Human
agaggaaaaugaguuccagaau

SEQ ID NO: 588666 - RNA, 22 nt, Human
cuccagauuccugcuggcagaa

SEQ ID NO: 588667 - RNA, 22 nt, Human
ccaguaaaccaaguguuuacua

SEQ ID NO: 588668 - RNA, 22 nt, Human
caggcacuucugcugcuugucu

SEQ ID NO: 588669 - RNA, 22 nt, Human
uacuuucuuguuccuuucauaa

SEQ ID NO: 588670 - RNA, 22 nt, Human
ugaaaauucucaggcucacccc

SEQ ID NO: 588671 - RNA, 19 nt, Human
uugugugucagucagaguu

SEQ ID NO: 588672 - RNA, 22 nt, Human
cuggagcucuucugagugugcu

SEQ ID NO: 588673 - RNA, 22 nt, Human
cagcccaccuggcacguguguu

SEQ ID NO: 588674 - RNA, 22 nt, Human
auaguuguguggggauucuggu

SEQ ID NO: 588675 - RNA, 22 nt, Human
uuucuugucuuuaguaucuggc

SEQ ID NO: 588676 - RNA, 22 nt, Human
ggcuccagguuuaaggguaugu

SEQ ID NO: 588677 - RNA, 17 nt, Human
gcaguuaaauuaagaug

SEQ ID NO: 588678 - RNA, 22 nt, Human
uacacccacaugccuaggaggg

SEQ ID NO: 588679 - RNA, 22 nt, Human
gaguguaaaaacuuagugagau

SEQ ID NO: 588680 - RNA, 22 nt, Human
cuggagcauccaugcccagggu

SEQ ID NO: 588681 - RNA, 22 nt, Human
gaaucuuagucuccuaacggcu

SEQ ID NO: 588682 - RNA, 22 nt, Human
auugaaagauuuugggcucaug

SEQ ID NO: 588683 - RNA, 22 nt, Human
ccuggcugugcauugccggccc

SEQ ID NO: 588684 - RNA, 22 nt, Human
gucuggaggagggcucugcggc

SEQ ID NO: 588685 - RNA, 22 nt, Human
cuuuucauuguuuguacaugca

SEQ ID NO: 588686 - RNA, 22 nt, Human
ucacauguguggcagugcaagu

SEQ ID NO: 588687 - RNA, 22 nt, Human
ccugagaucagugcauuuggug

SEQ ID NO: 588688 - RNA, 22 nt, Human
gcuucuggaagcugcuucugcc

SEQ ID NO: 588689 - RNA, 19 nt, Human
uaugacaaguacuaguucu

SEQ ID NO: 588690 - RNA, 22 nt, Human
ugagccuggguggucgaggcug

SEQ ID NO: 588691 - RNA, 22 nt, Human
uaacacugauuuguucucaggg

SEQ ID NO: 588692 - RNA, 22 nt, Human
agcugccauccuguucagcacc

SEQ ID NO: 588693 - RNA, 23 nt, Human
uaagaacagacaagcauuuacau

SEQ ID NO: 588694 - RNA, 22 nt, Human
uggcaugggccagggagagcug

SEQ ID NO: 588695 - RNA, 22 nt, Human
uggugaucagucaacugucuuc

SEQ ID NO: 588696 - RNA, 22 nt, Human
ugcaguuuuaucacauauauag

SEQ ID NO: 588697 - RNA, 22 nt, Human
acaucagagggcucacaugauc

SEQ ID NO: 588698 - RNA, 22 nt, Human
gccuugcuaauuucuccucaac

SEQ ID NO: 588699 - RNA, 22 nt, Human
uucaauuuagugauguuguugg

SEQ ID NO: 588700 - RNA, 22 nt, Human
ggaauacuaaaggaagcaauug

SEQ ID NO: 588701 - RNA, 22 nt, Human
cagcucaguuucaauaccaggu

SEQ ID NO: 588702 - RNA, 22 nt, Human
ugaauccuaguugaagauaagg

SEQ ID NO: 588703 - RNA, 22 nt, Human
gcagcccucgcuagcucucccc

SEQ ID NO: 588704 - RNA, 22 nt, Human
uuuauuagugcuuguaucacug

SEQ ID NO: 588705 - RNA, 22 nt, Human
ucauuacagagauauaaucuac

SEQ ID NO: 588706 - RNA, 22 nt, Human
gugauggagucaaggcuagaac

SEQ ID NO: 588707 - RNA, 22 nt, Human
cagucccacaagaucuccacaa

SEQ ID NO: 588708 - RNA, 22 nt, Human
aggcccucacagucuauuguga

SEQ ID NO: 588709 - RNA, 22 nt, Human
cugaagucauacacuguucuga

SEQ ID NO: 588710 - RNA, 22 nt, Human
gugagguccuaauagacaucga

SEQ ID NO: 588711 - RNA, 22 nt, Human
acacagugucagggcaggggcc

SEQ ID NO: 588712 - RNA, 22 nt, Human
agagguauuagauuugcauagg

SEQ ID NO: 588713 - RNA, 22 nt, Human
gcagagcugagcggcugcccgg

SEQ ID NO: 588714 - RNA, 22 nt, Human
ucaggagagaaagaauacaauu

SEQ ID NO: 588715 - RNA, 22 nt, Human
agguagggcuaggcugcgucug

SEQ ID NO: 588716 - RNA, 22 nt, Human
uuucugauauucauuuagaaga

SEQ ID NO: 588717 - RNA, 22 nt, Human
caguucuggaggcuccacaucu

SEQ ID NO: 588718 - RNA, 22 nt, Human
ucaugaguggauuaauauggcu

SEQ ID NO: 588719 - RNA, 22 nt, Human
cugcuuccaugcaauggcaguc

SEQ ID NO: 588720 - RNA, 22 nt, Human
uuccacugauuuugguugaccu

SEQ ID NO: 588721 - RNA, 17 nt, Human
uucaaagcuuaucaagg

SEQ ID NO: 588722 - RNA, 22 nt, Human
ucccagaggcaguugguaacuu

SEQ ID NO: 588723 - RNA, 22 nt, Human
acugagguuucauuuuaucgcu

SEQ ID NO: 588724 - RNA, 22 nt, Human
cuggccagcauuuuugcuuuag

SEQ ID NO: 588725 - RNA, 22 nt, Human
agacucugugcuccuugcuuuc

SEQ ID NO: 588726 - RNA, 22 nt, Human
agucugggugugaaugaacuug

SEQ ID NO: 588727 - RNA, 22 nt, Human
uuugucuuuccccuccucauug

SEQ ID NO: 588728 - RNA, 22 nt, Human
ugacacagaaauuaagcuguca

SEQ ID NO: 588729 - RNA, 22 nt, Human
uucacaggcuuggagguggggg

SEQ ID NO: 588730 - RNA, 22 nt, Human
cucagaaaggguugcugagggc

SEQ ID NO: 588731 - RNA, 22 nt, Human
cacaggagugcugcuauuguug

SEQ ID NO: 588732 - RNA, 22 nt, Human
ccugaaaauauccucuccuuug

SEQ ID NO: 588733 - RNA, 22 nt, Human
guagaacuaggacuucagguau

SEQ ID NO: 588734 - RNA, 21 nt, Human
ucucuacacuuucacuaggcu

SEQ ID NO: 588735 - RNA, 22 nt, Human
acucccagaacaugcucuucuu

SEQ ID NO: 588736 - RNA, 22 nt, Human
gagcccaggaaguggaggcuga

SEQ ID NO: 588737 - RNA, 22 nt, Human
agaaggaagccaggagggugca

SEQ ID NO: 588738 - RNA, 22 nt, Human
ucuacacaagugaguggcacaa

SEQ ID NO: 588739 - RNA, 22 nt, Human
cucuguguucagccuagcagaa

SEQ ID NO: 588740 - RNA, 22 nt, Human
ucccaagugucuuggaccaggg

SEQ ID NO: 588741 - RNA, 22 nt, Human
aggaaacaugaaucugccuuga

SEQ ID NO: 588742 - RNA, 22 nt, Human
ucacuguaugucuuuuuuugau

SEQ ID NO: 588743 - RNA, 22 nt, Human
gcucccacugcagcccugagcc

SEQ ID NO: 588744 - RNA, 22 nt, Human
aaagcaguaguuuucaaauagu

SEQ ID NO: 588745 - RNA, 22 nt, Human
acagcuggaggccccauugucc

SEQ ID NO: 588746 - RNA, 22 nt, Human
agucagagaauguuuucaugga

SEQ ID NO: 588747 - RNA, 22 nt, Human
gaggggcacagcagcuguugca

SEQ ID NO: 588748 - RNA, 22 nt, Human
agggcugagcccaggcauguag

SEQ ID NO: 588749 - RNA, 22 nt, Human
gaggccacagugucugggggcc

SEQ ID NO: 588750 - RNA, 22 nt, Human
acaaugaaagguauucugaacu

SEQ ID NO: 588751 - RNA, 17 nt, Human
agcagggagucaaggga

SEQ ID NO: 588752 - RNA, 22 nt, Human
ucugucacugagcucaggauuc

SEQ ID NO: 588753 - RNA, 22 nt, Human
augaaggauggcuggcugcccu

SEQ ID NO: 588754 - RNA, 22 nt, Human
ugaaaugcaacaguuauuuuug

SEQ ID NO: 588755 - RNA, 22 nt, Human
aagcacagggacucaggaccgg

SEQ ID NO: 588756 - RNA, 22 nt, Human
uguuuacaaggaguuuauauug

SEQ ID NO: 588757 - RNA, 22 nt, Human
cugggacuggaccucugccugg

SEQ ID NO: 588758 - RNA, 22 nt, Human
gucuggagccacccuaagcauu

SEQ ID NO: 588759 - RNA, 22 nt, Human
uuuagcuuugaaggauaugguu

SEQ ID NO: 588760 - RNA, 22 nt, Human
aggaaacuggguaugguuauac

SEQ ID NO: 588761 - RNA, 22 nt, Human
ccugggcuguaccugugcgcgg

SEQ ID NO: 588762 - RNA, 22 nt, Human
ggauggagaugaccauggugac

SEQ ID NO: 588763 - RNA, 20 nt, Human
aaacacagccucucuuuaca

SEQ ID NO: 588764 - RNA, 22 nt, Human
uucaacaaugcacuugaguaua

SEQ ID NO: 588765 - RNA, 22 nt, Human
cagacaggaauucuggcguggu

SEQ ID NO: 588766 - RNA, 22 nt, Human
agcugccagcaucccggaaggg

SEQ ID NO: 588767 - RNA, 21 nt, Human
agcaucugaggcaguuuccua

SEQ ID NO: 588768 - RNA, 22 nt, Human
ccugggagugucagacuugcuu

SEQ ID NO: 588769 - RNA, 22 nt, Human
uaaagcaaugaaaguuuugcag

SEQ ID NO: 588770 - RNA, 23 nt, Human
ggaagcucacguaguccugcacu

SEQ ID NO: 588771 - RNA, 22 nt, Human
uggcugaggagagggcggaagu

SEQ ID NO: 588772 - RNA, 22 nt, Human
augcugacuucucucugcagug

SEQ ID NO: 588773 - RNA, 22 nt, Human
ccucucauagucuguauccuuu

SEQ ID NO: 588774 - RNA, 22 nt, Human
ugggccauuuuuggaagacugg

SEQ ID NO: 588775 - RNA, 22 nt, Human
uaauaaaugaaagugcuggcau

SEQ ID NO: 588776 - RNA, 22 nt, Human
caaagguauucucauuuuggaa

SEQ ID NO: 588777 - RNA, 22 nt, Human
ugcaggagcuuggcucuguccc

SEQ ID NO: 588778 - RNA, 23 nt, Human
uccuaacucaauucagggguguc

SEQ ID NO: 588779 - RNA, 19 nt, Human
cugggacuccugauaccuu

SEQ ID NO: 588780 - RNA, 22 nt, Human
agaaucaacugaaaauugguga

SEQ ID NO: 588781 - RNA, 22 nt, Human
aaucuucauaaaaaucuaguag

SEQ ID NO: 588782 - RNA, 23 nt, Human
acaaugcacuuuaaaugguuccc

SEQ ID NO: 588783 - RNA, 22 nt, Human
cagcgcugggguaggagcaccu

SEQ ID NO: 588784 - RNA, 22 nt, Human
uucagcaccacuuccagagaag

SEQ ID NO: 588785 - RNA, 22 nt, Human
aggccucacauugggcuucaag

SEQ ID NO: 588786 - RNA, 22 nt, Human
ccagcccuucccaacuggccag

SEQ ID NO: 588787 - RNA, 22 nt, Human
guggugaguucaggcuggggug

SEQ ID NO: 588788 - RNA, 22 nt, Human
caggccaauaucacaugcuaug

SEQ ID NO: 588789 - RNA, 22 nt, Human
ucucuguguguuggcuguauau

SEQ ID NO: 588790 - RNA, 22 nt, Human
caggcacacauccgugagagau

SEQ ID NO: 588791 - RNA, 22 nt, Human
aauguacaaaccuucuuuguag

SEQ ID NO: 588792 - RNA, 22 nt, Human
aagcugccagcugagcugaggc

SEQ ID NO: 588793 - RNA, 23 nt, Human
uuucaacaaugcuuagagaaaac

SEQ ID NO: 588794 - RNA, 20 nt, Human
uccugcaguuccuaggaggg

SEQ ID NO: 588795 - RNA, 18 nt, Human
gugagcagagagcaucac

SEQ ID NO: 588796 - RNA, 22 nt, Human
gagauaaugaugcuaacccagu

SEQ ID NO: 588797 - RNA, 22 nt, Human
ugcucagaaacgaggugcagcc

SEQ ID NO: 588798 - RNA, 22 nt, Human
ugcugucccccgugucugggcu

SEQ ID NO: 588799 - RNA, 22 nt, Human
gugaauggggcaggaaggaugg

SEQ ID NO: 588800 - RNA, 22 nt, Human
ccaggcuucccugagaggcugc

SEQ ID NO: 588801 - RNA, 22 nt, Human
uguuucuaucuggaucaauaga

SEQ ID NO: 588802 - RNA, 22 nt, Human
ccagacuguggaguuccuggug

SEQ ID NO: 588803 - RNA, 22 nt, Human
cacaacuuagcagcuugaaaca

SEQ ID NO: 588804 - RNA, 22 nt, Human
ugcucuggggcuccccaccaga

SEQ ID NO: 588805 - RNA, 22 nt, Human
ggcugcugguggaaugguaggc

SEQ ID NO: 588806 - RNA, 22 nt, Human
gccuccugagaagccacaggcu

SEQ ID NO: 588807 - RNA, 22 nt, Human
agacaugcaauaaugugcacuc

SEQ ID NO: 588808 - RNA, 22 nt, Human
uggcauguuucauggcugcaaa

SEQ ID NO: 588809 - RNA, 22 nt, Human
ggaggccaagucacugaccugg

SEQ ID NO: 588810 - RNA, 19 nt, Human
ccugugugggguagagauc

SEQ ID NO: 588811 - RNA, 22 nt, Human
uucuaaaaccaauucugcuucu

SEQ ID NO: 588812 - RNA, 22 nt, Human
aggcuccaccagucaggugcau

SEQ ID NO: 588813 - RNA, 22 nt, Human
cagcuguugucaccucacaucc

SEQ ID NO: 588814 - RNA, 19 nt, Human
ccucuccgcccaccagccc

SEQ ID NO: 588815 - RNA, 22 nt, Human
gacuggagauaaaaccaugagu

SEQ ID NO: 588816 - RNA, 22 nt, Human
auuuuacuaaguggauaucugu

SEQ ID NO: 588817 - RNA, 22 nt, Human
gcuaggagauugagcucugaag

SEQ ID NO: 588818 - RNA, 22 nt, Human
caacuucacugugccucuaguu

SEQ ID NO: 588819 - RNA, 22 nt, Human
ucaugagucugcaaauuaugga

SEQ ID NO: 588820 - RNA, 22 nt, Human
cuuuccuagauggccaucuuuc

SEQ ID NO: 588821 - RNA, 20 nt, Human
cagcaguggaugagaguuuu

SEQ ID NO: 588822 - RNA, 22 nt, Human
aggaaaauuaucaugagagcca

SEQ ID NO: 588823 - RNA, 22 nt, Human
gaacuacaggugcagcaaguga

SEQ ID NO: 588824 - RNA, 22 nt, Human
auugguggugaggacaugccag

SEQ ID NO: 588825 - RNA, 22 nt, Human
ggagagaggcuggccgugauga

SEQ ID NO: 588826 - RNA, 22 nt, Human
gcugccucugcacagcucacuc

SEQ ID NO: 588827 - RNA, 22 nt, Human
caaacauuuguuggaaccccug

SEQ ID NO: 588828 - RNA, 22 nt, Human
aggcugagacugugcauuagug

SEQ ID NO: 588829 - RNA, 23 nt, Human
uaugugcauauguguaagaauac

SEQ ID NO: 588830 - RNA, 19 nt, Human
acauuuagaauguacuugc

SEQ ID NO: 588831 - RNA, 22 nt, Human
uaacauuugcugucuccuaugu

SEQ ID NO: 588832 - RNA, 22 nt, Human
ugguuccucagggcagcuguac

SEQ ID NO: 588833 - RNA, 22 nt, Human
agcugcugcggaaagaugccac

SEQ ID NO: 588834 - RNA, 22 nt, Human
agaacuuuuggagacuuuuagu

SEQ ID NO: 588835 - RNA, 22 nt, Human
ucaggaggcggugcugccuuug

SEQ ID NO: 588836 - RNA, 22 nt, Human
cuucucuaugauguucuaaggu

SEQ ID NO: 588837 - RNA, 22 nt, Human
guggcucacagcaauguuuccu

SEQ ID NO: 588838 - RNA, 22 nt, Human
ucagcacuuuuuaaagcagcau

SEQ ID NO: 588839 - RNA, 20 nt, Human
agaaauauugaguucagagg

SEQ ID NO: 588840 - RNA, 22 nt, Human
cucucccccacagcagccuucu

SEQ ID NO: 588841 - RNA, 22 nt, Human
cacagcuugggcucugacaaua

SEQ ID NO: 588842 - RNA, 23 nt, Human
agacaguggccgagagguacuag

SEQ ID NO: 588843 - RNA, 22 nt, Human
ggcucuggugcccuggcuccca

SEQ ID NO: 588844 - RNA, 22 nt, Human
gugaacaggagaaagugaugga

SEQ ID NO: 588845 - RNA, 22 nt, Human
gaacaaacauuuuuggcaguau

SEQ ID NO: 588846 - RNA, 22 nt, Human
aauaggaaaauauuuaacaaga

SEQ ID NO: 588847 - RNA, 22 nt, Human
acauuaccuggcauuugaucuu

SEQ ID NO: 588848 - RNA, 22 nt, Human
aaguauauacuaaauguuaauc

SEQ ID NO: 588849 - RNA, 22 nt, Human
auguaacaaaugguauacaugu

SEQ ID NO: 588850 - RNA, 22 nt, Human
uauuuaaaaagaggccagcugg

SEQ ID NO: 588851 - RNA, 22 nt, Human
uaucuuuaacuugcaguauuua

SEQ ID NO: 588852 - RNA, 22 nt, Human
aucuugaaugaaugacucuuua

SEQ ID NO: 588853 - RNA, 22 nt, Human
accuguuuaccugcaccuguuu

SEQ ID NO: 588854 - RNA, 22 nt, Human
ugccacuggacccagaacucuu

SEQ ID NO: 588855 - RNA, 19 nt, Human
gaaggcugaaaugaagcac

SEQ ID NO: 588856 - RNA, 19 nt, Human
cccagcuugaccaccugcu

SEQ ID NO: 588857 - RNA, 22 nt, Human
cuuauucagcacuugcucugua

SEQ ID NO: 588858 - RNA, 22 nt, Human
ggcagagacuggguuggcagag

SEQ ID NO: 588859 - RNA, 22 nt, Human
cagugcagguuuagggcugggg

SEQ ID NO: 588860 - RNA, 22 nt, Human
gcugcuuugacagugggaacag

SEQ ID NO: 588861 - RNA, 22 nt, Human
ggagccaguuuagaccucaguu

SEQ ID NO: 588862 - RNA, 22 nt, Human
caaagguuggaaauguuuacca

SEQ ID NO: 588863 - RNA, 22 nt, Human
cucuuucaguucugauagucuc

SEQ ID NO: 588864 - RNA, 22 nt, Human
cugagcagugguucuugagcgc

SEQ ID NO: 588865 - RNA, 22 nt, Human
uccagauagaguccuguuagua

SEQ ID NO: 588866 - RNA, 22 nt, Human
agagcugguuuacucaggaauu

SEQ ID NO: 588867 - RNA, 22 nt, Human
aaaauagcuauggaaugucacu

SEQ ID NO: 588868 - RNA, 22 nt, Human
aucuguuguuuuucaccaccca

SEQ ID NO: 588869 - RNA, 19 nt, Human
auggaaaaugccagacuga

SEQ ID NO: 588870 - RNA, 22 nt, Human
ccaggcuuucccagccucucca

SEQ ID NO: 588871 - RNA, 22 nt, Human
acaugcuacacagagcuccucg

SEQ ID NO: 588872 - RNA, 22 nt, Human
uucaacaugcuuuauuucuaaa

SEQ ID NO: 588873 - RNA, 22 nt, Human
cagacaggaaguucagaagaaa

SEQ ID NO: 588874 - RNA, 22 nt, Human
ugguccugagaauccuguccuc

SEQ ID NO: 588875 - RNA, 22 nt, Human
cuccaggccagggaaguggaca

SEQ ID NO: 588876 - RNA, 22 nt, Human
uccucagcuuuuauuucacuug

SEQ ID NO: 588877 - RNA, 22 nt, Human
ugcugaaaaugcguaucuucca

SEQ ID NO: 588878 - RNA, 22 nt, Human
cugcagggaugugaggcccguu

SEQ ID NO: 588879 - RNA, 22 nt, Human
ugucauuuugucucacugcuau

SEQ ID NO: 588880 - RNA, 22 nt, Human
aggccuggccugggcggcauug

SEQ ID NO: 588881 - RNA, 22 nt, Human
guccuguuuguauuugcuggaa

SEQ ID NO: 588882 - RNA, 22 nt, Human
acacaguaugaaaagucuaguu

SEQ ID NO: 588883 - RNA, 22 nt, Human
ucagaugccaacugaacaacag

SEQ ID NO: 588884 - RNA, 22 nt, Human
cucuuucugauucgcugggacc

SEQ ID NO: 588885 - RNA, 22 nt, Human
aucccagauggaggcuggucac

SEQ ID NO: 588886 - RNA, 22 nt, Human
gagcucagaggcgucuuugucc

SEQ ID NO: 588887 - RNA, 22 nt, Human
ucauaaaacacaccagguaguu

SEQ ID NO: 588888 - RNA, 22 nt, Human
augcuguuaagauaauggguuc

SEQ ID NO: 588889 - RNA, 22 nt, Human
ccagggcuggguuugucggugu

SEQ ID NO: 588890 - RNA, 22 nt, Human
gaggcaccagacauggccucau

SEQ ID NO: 588891 - RNA, 22 nt, Human
agcacauauucaguucauacaa

SEQ ID NO: 588892 - RNA, 22 nt, Human
ugucaguguauacauacaguau

SEQ ID NO: 588893 - RNA, 22 nt, Human
uaauacuugucauaaaggcauu

SEQ ID NO: 588894 - RNA, 22 nt, Human
agcacacaucacuucugcucau

SEQ ID NO: 588895 - RNA, 22 nt, Human
caccugccugcaggggcuccac

SEQ ID NO: 588896 - RNA, 22 nt, Human
caaaggaaauacuaaucuggaa

SEQ ID NO: 588897 - RNA, 22 nt, Human
acacagggcugcgccugacccc

SEQ ID NO: 588898 - RNA, 22 nt, Human
caucuacaugcuugccacugcu

SEQ ID NO: 588899 - RNA, 22 nt, Human
gcacugggaaugagggcagcuu

SEQ ID NO: 588900 - RNA, 22 nt, Human
aggguggcugaguagauggaag

SEQ ID NO: 588901 - RNA, 20 nt, Human
agggucugcuggguaggaca

SEQ ID NO: 588902 - RNA, 22 nt, Human
ugcauuuaagaaaacaugaguc

SEQ ID NO: 588903 - RNA, 22 nt, Human
ucugggaacucugucauuuccc

SEQ ID NO: 588904 - RNA, 18 nt, Human
cagugaggaugaaggguu

SEQ ID NO: 588905 - RNA, 22 nt, Human
cagggccaugaggcacaggguc

SEQ ID NO: 588906 - RNA, 22 nt, Human
cccugcucuuagugccugugug

SEQ ID NO: 588907 - RNA, 20 nt, Human
aaagagaagccucaccuugu

SEQ ID NO: 588908 - RNA, 22 nt, Human
uauugacagagggucagaagag

SEQ ID NO: 588909 - RNA, 22 nt, Human
acacuguaugaaaacaggaaau

SEQ ID NO: 588910 - RNA, 22 nt, Human
aacugucuaaggagaauaugaa

SEQ ID NO: 588911 - RNA, 22 nt, Human
uagauacuuauaaucuuccaag

SEQ ID NO: 588912 - RNA, 22 nt, Human
gccaggcauguccucugcagaa

SEQ ID NO: 588913 - RNA, 22 nt, Human
ggcacacagauggagcacuagc

SEQ ID NO: 588914 - RNA, 22 nt, Human
aaacagcugggagguagaggcg

SEQ ID NO: 588915 - RNA, 18 nt, Human
ucuugccugcacccucuc

SEQ ID NO: 588916 - RNA, 22 nt, Human
gagugugguaugcucugaggcu

SEQ ID NO: 588917 - RNA, 22 nt, Human
cagucccagaagagccugggag

SEQ ID NO: 588918 - RNA, 22 nt, Human
acugcuuuuagaaaucuauaga

SEQ ID NO: 588919 - RNA, 22 nt, Human
uggcucaugccuguaaucuuag

SEQ ID NO: 588920 - RNA, 22 nt, Human
ugggcacauaguuuuaugguca

SEQ ID NO: 588921 - RNA, 22 nt, Human
augcaguaaauguuaagaaaaa

SEQ ID NO: 588922 - RNA, 22 nt, Human
acaggugguagaguggaaagag

SEQ ID NO: 588923 - RNA, 22 nt, Human
ugcccugugugugcaagcacug

SEQ ID NO: 588924 - RNA, 22 nt, Human
uggcugccuucccugcuggagg

SEQ ID NO: 588925 - RNA, 22 nt, Human
aggcugucucagccugcuugca

SEQ ID NO: 588926 - RNA, 22 nt, Human
uggccuggcagagcaaggccug

SEQ ID NO: 588927 - RNA, 22 nt, Human
aaugcuuucaaaaaugugcagu

SEQ ID NO: 588928 - RNA, 22 nt, Human
cauaacauuauuuucugaagau

SEQ ID NO: 588929 - RNA, 22 nt, Human
gccacagguacuaugggagaga

SEQ ID NO: 588930 - RNA, 22 nt, Human
uuuccuucucagggagcuucaa

SEQ ID NO: 588931 - RNA, 22 nt, Human
agccagaggccagccugccuca

SEQ ID NO: 588932 - RNA, 22 nt, Human
uggcucaggggucuggcucugu

SEQ ID NO: 588933 - RNA, 19 nt, Human
cauuuuaagcauccccagu

SEQ ID NO: 588934 - RNA, 23 nt, Human
agaggccaacuucuugccccucc

SEQ ID NO: 588935 - RNA, 22 nt, Human
aguccucugcugugcgucuuug

SEQ ID NO: 588936 - RNA, 22 nt, Human
ggagggggaauucagccccagc

SEQ ID NO: 588937 - RNA, 22 nt, Human
uuauugcacuauugauuuucua

SEQ ID NO: 588938 - RNA, 22 nt, Human
uuaauuuauacauaaucacagg

SEQ ID NO: 588939 - RNA, 22 nt, Human
aauuuuccauccaaaguaacau

SEQ ID NO: 588940 - RNA, 22 nt, Human
ugggauagaaauuuagaacaag

SEQ ID NO: 588941 - RNA, 22 nt, Human
acaauucaagaugagauucagg

SEQ ID NO: 588942 - RNA, 22 nt, Human
auguaauuuauguuauccauaa

SEQ ID NO: 588943 - RNA, 22 nt, Human
aagcuauacaaugcacaaauga

SEQ ID NO: 588944 - RNA, 22 nt, Human
uaggggagcucgggugcaaucg

SEQ ID NO: 588945 - RNA, 22 nt, Human
aggcgugggaggaucugaggcc

SEQ ID NO: 588946 - RNA, 23 nt, Human
agcugggcaaggauccgggcucc

SEQ ID NO: 588947 - RNA, 22 nt, Human
agugccaggagcaaggagcucc

SEQ ID NO: 588948 - RNA, 22 nt, Human
ccagggggcuuggugaggccau

SEQ ID NO: 588949 - RNA, 22 nt, Human
cuuuaaugagucuuucugcugu

SEQ ID NO: 588950 - RNA, 22 nt, Human
aagaugauagaucugucaaugu

SEQ ID NO: 588951 - RNA, 22 nt, Human
aagacagcucaggacagauuca

SEQ ID NO: 588952 - RNA, 22 nt, Human
ggcaggugccuucugugcuagc

SEQ ID NO: 588953 - RNA, 22 nt, Human
ccacuuugagaagcugaugaaa

SEQ ID NO: 588954 - RNA, 21 nt, Human
cuggaagaagcagcaggauuc

SEQ ID NO: 588955 - RNA, 19 nt, Human
uugucuuagcugcauaaga

SEQ ID NO: 588956 - RNA, 22 nt, Human
ucaggacauuugucagcaggag

SEQ ID NO: 588957 - RNA, 22 nt, Human
uugaaugaguguuuuacucaug

SEQ ID NO: 588958 - RNA, 22 nt, Human
cugcccugcuugaugacagcga

SEQ ID NO: 588959 - RNA, 17 nt, Human
aguggcaggcagauggg

SEQ ID NO: 588960 - RNA, 22 nt, Human
guuauugagacauagaguuaug

SEQ ID NO: 588961 - RNA, 19 nt, Human
aggagaagacucucucccc

SEQ ID NO: 588962 - RNA, 22 nt, Human
ccacucaggccuccugcucucc

SEQ ID NO: 588963 - RNA, 22 nt, Human
uagguagguaaacaggacuaau

SEQ ID NO: 588964 - RNA, 22 nt, Human
agacuguaauuuguggccuccu

SEQ ID NO: 588965 - RNA, 22 nt, Human
agaaaacucuacaucuguaugu

SEQ ID NO: 588966 - RNA, 22 nt, Human
acagcuuuuuacuaauagauug

SEQ ID NO: 588967 - RNA, 22 nt, Human
gcugcagggggugggcgucucc

SEQ ID NO: 588968 - RNA, 17 nt, Human
uagagcugguucaggag

SEQ ID NO: 588969 - RNA, 22 nt, Human
ucugccuguugcuagaauguca

SEQ ID NO: 588970 - RNA, 22 nt, Human
aaauagcauuguauuuagcuga

SEQ ID NO: 588971 - RNA, 22 nt, Human
gcuggguggaucggaggcucug

SEQ ID NO: 588972 - RNA, 22 nt, Human
gucagucauauuguacagauau

SEQ ID NO: 588973 - RNA, 22 nt, Human
aaguuacuaugacucuucuuuu

SEQ ID NO: 588974 - RNA, 22 nt, Human
acaggugagggagcuuugugcc

SEQ ID NO: 588975 - RNA, 22 nt, Human
cugggucccacagccugcuggg

SEQ ID NO: 588976 - RNA, 22 nt, Human
cucucccagucaggcucaggau

SEQ ID NO: 588977 - RNA, 22 nt, Human
ucuuccuggcauugaugcugca

SEQ ID NO: 588978 - RNA, 22 nt, Human
cagcagccuaggguuccaucau

SEQ ID NO: 588979 - RNA, 22 nt, Human
guggauggacaugggcaagagg

SEQ ID NO: 588980 - RNA, 22 nt, Human
aagaugcacaauguggcaauua

SEQ ID NO: 588981 - RNA, 22 nt, Human
uuggcaauuaguuauaucugca

SEQ ID NO: 588982 - RNA, 22 nt, Human
uuucaaagacagccauauuugu

SEQ ID NO: 588983 - RNA, 23 nt, Human
cucccuggaguuucuggaagaug

SEQ ID NO: 588984 - RNA, 22 nt, Human
aggagcuggccacuaggaugca

SEQ ID NO: 588985 - RNA, 22 nt, Human
uccuuauaaaugaggcccuggg

SEQ ID NO: 588986 - RNA, 22 nt, Human
auggaaaaggcugauuucauua

SEQ ID NO: 588987 - RNA, 22 nt, Human
acauaagugcacaauaaauauu

SEQ ID NO: 588988 - RNA, 22 nt, Human
aaugucauugagcuccaauccu

SEQ ID NO: 588989 - RNA, 22 nt, Human
uuauaacacugccuugucacca

SEQ ID NO: 588990 - RNA, 22 nt, Human
uguuugcuuacuuguaugcugc

SEQ ID NO: 588991 - RNA, 22 nt, Human
acugucaucuuguaagcaaugu

SEQ ID NO: 588992 - RNA, 22 nt, Human
aguguggucgggagcgcggggc

SEQ ID NO: 588993 - RNA, 22 nt, Human
cacugggcuuuguaguuagcau

SEQ ID NO: 588994 - RNA, 22 nt, Human
accaggagccauagagucaggc

SEQ ID NO: 588995 - RNA, 22 nt, Human
gugaaauauuuaacguccaggu

SEQ ID NO: 588996 - RNA, 20 nt, Human
agaaauacaugcaugcauga

SEQ ID NO: 588997 - RNA, 22 nt, Human
uuugaaaauuuaagugcuacac

SEQ ID NO: 588998 - RNA, 22 nt, Human
uuccucagccagcacuuagggg

SEQ ID NO: 588999 - RNA, 23 nt, Human
guuuucaacacaauaaauguaac

SEQ ID NO: 589000 - RNA, 18 nt, Human
aggcaggcuggagugacu

SEQ ID NO: 589001 - RNA, 22 nt, Human
uggggcugucccgguuuggcga

SEQ ID NO: 589002 - RNA, 21 nt, Human
ugaaugagcaucuggacuuuu

SEQ ID NO: 589003 - RNA, 22 nt, Human
ccuuuuucugaguuguagcuuc

SEQ ID NO: 589004 - RNA, 22 nt, Human
gacaauaagaacagauacugug

SEQ ID NO: 589005 - RNA, 23 nt, Human
agccuggcaccugcagaucggag

SEQ ID NO: 589006 - RNA, 22 nt, Human
uuucaagagcaggaaaaagguc

SEQ ID NO: 589007 - RNA, 22 nt, Human
ggcagugaaugaaacagaggcu

SEQ ID NO: 589008 - RNA, 22 nt, Human
uuuuucaagacaaccugcaugu

SEQ ID NO: 589009 - RNA, 22 nt, Human
agaagccacaggccucgucugg

SEQ ID NO: 589010 - RNA, 22 nt, Human
caguccuggggaccaggcugag

SEQ ID NO: 589011 - RNA, 22 nt, Human
cccuggagucagguuggccugg

SEQ ID NO: 589012 - RNA, 22 nt, Human
ccaggcuggagugcaguagugu

SEQ ID NO: 589013 - RNA, 22 nt, Human
ccagcacugcucucagacugag

SEQ ID NO: 589014 - RNA, 22 nt, Human
ggggaagagcauugcacggugu

SEQ ID NO: 589015 - RNA, 22 nt, Human
uauuuccacccucaguaaggaa

SEQ ID NO: 589016 - RNA, 22 nt, Human
ugaggcagcaauugauuauuca

SEQ ID NO: 589017 - RNA, 22 nt, Human
aaacagcuuguuucaggaaagu

SEQ ID NO: 589018 - RNA, 22 nt, Human
gugggcaaggucccugccagcu

SEQ ID NO: 589019 - RNA, 22 nt, Human
caaguuaaauuugcauuucaga

SEQ ID NO: 589020 - RNA, 22 nt, Human
ggagaaagcuguaguggaaugu

SEQ ID NO: 589021 - RNA, 22 nt, Human
cuggcccagagagcagagcuua

SEQ ID NO: 589022 - RNA, 22 nt, Human
cagugaaauaguggacaucaaa

SEQ ID NO: 589023 - RNA, 22 nt, Human
uccaggcacagaguuggucagu

SEQ ID NO: 589024 - RNA, 22 nt, Human
auagugaaaaugcugucagcau

SEQ ID NO: 589025 - RNA, 22 nt, Human
gccuucaguaguauccucauga

SEQ ID NO: 589026 - RNA, 22 nt, Human
aaagaguugaggcaguuaucca

SEQ ID NO: 589027 - RNA, 22 nt, Human
ggagcaggcucugugguuucca

SEQ ID NO: 589028 - RNA, 22 nt, Human
aaggcugacguuuguguuuauu

SEQ ID NO: 589029 - RNA, 22 nt, Human
augaggagaccaaggccugaug

SEQ ID NO: 589030 - RNA, 19 nt, Human
ucccucagucugccaggcc

SEQ ID NO: 589031 - RNA, 22 nt, Human
ggugggaaggggccagugugcg

SEQ ID NO: 589032 - RNA, 22 nt, Human
aguacaaaggcccuugauuacu

SEQ ID NO: 589033 - RNA, 22 nt, Human
acagaugcucugaugucugggu

SEQ ID NO: 589034 - RNA, 22 nt, Human
ugccauagcaaugguaagcuga

SEQ ID NO: 589035 - RNA, 22 nt, Human
ugccuggguguaaagggccaac

SEQ ID NO: 589036 - RNA, 22 nt, Human
ccuuugcauucuagauguuuag

SEQ ID NO: 589037 - RNA, 22 nt, Human
cagcuggcugcaugaugccaaa

SEQ ID NO: 589038 - RNA, 22 nt, Human
aauagucucucccacaccaucc

SEQ ID NO: 589039 - RNA, 22 nt, Human
uuucauguuacauuuaaaaugu

SEQ ID NO: 589040 - RNA, 22 nt, Human
agaggccaccacugucagggac

SEQ ID NO: 589041 - RNA, 22 nt, Human
gcucagaaauggcagauggaga

SEQ ID NO: 589042 - RNA, 22 nt, Human
acauaaaggugacuaacaucuu

SEQ ID NO: 589043 - RNA, 22 nt, Human
guccuuggagguguggaaucug

SEQ ID NO: 589044 - RNA, 22 nt, Human
cuucucuggcagaugugugucc

SEQ ID NO: 589045 - RNA, 18 nt, Human
ucacagugcucuugccua

SEQ ID NO: 589046 - RNA, 22 nt, Human
acacugugcaugcauauacaca

SEQ ID NO: 589047 - RNA, 20 nt, Human
cuuuuucuccagcucugagc

SEQ ID NO: 589048 - RNA, 22 nt, Human
cacaugcuccauacagaauggg

SEQ ID NO: 589049 - RNA, 22 nt, Human
cucuuaaagaauguuccagcug

SEQ ID NO: 589050 - RNA, 22 nt, Human
ugugcucuugucugugacuaac

SEQ ID NO: 589051 - RNA, 20 nt, Human
aggagcugaauuagaggguu

SEQ ID NO: 589052 - RNA, 22 nt, Human
aggaccugacuggcuccugcuu

SEQ ID NO: 589053 - RNA, 22 nt, Human
acccugccgugggcugcuugug

SEQ ID NO: 589054 - RNA, 22 nt, Human
uaugcaguguacgauguuuagu

SEQ ID NO: 589055 - RNA, 22 nt, Human
gguuuuauuaccccuuaaacac

SEQ ID NO: 589056 - RNA, 22 nt, Human
ccagccuggguguuagaagaca

SEQ ID NO: 589057 - RNA, 19 nt, Human
acccucucagugccugagg

SEQ ID NO: 589058 - RNA, 22 nt, Human
acugaugaaagguaagacucca

SEQ ID NO: 589059 - RNA, 22 nt, Human
ucagccagcauuaccccugacu

SEQ ID NO: 589060 - RNA, 22 nt, Human
gcacacaggggaguucucagaa

SEQ ID NO: 589061 - RNA, 22 nt, Human
gccaggugagaggacugaggcu

SEQ ID NO: 589062 - RNA, 22 nt, Human
auauuuaacuggucccaauaua

SEQ ID NO: 589063 - RNA, 22 nt, Human
ucccugggucauucucuggcac

SEQ ID NO: 589064 - RNA, 20 nt, Human
ucuguuauugcauguacaua

SEQ ID NO: 589065 - RNA, 16 nt, Human
ggagagugucugcaaa

SEQ ID NO: 589066 - RNA, 22 nt, Human
ugccugccaugcagaaagcuga

SEQ ID NO: 589067 - RNA, 19 nt, Human
uuugucucugaauaauauu

SEQ ID NO: 589068 - RNA, 22 nt, Human
ucagaaucugaaaagcgcuugg

SEQ ID NO: 589069 - RNA, 22 nt, Human
auuagcuuuaaaccacagcagu

SEQ ID NO: 589070 - RNA, 23 nt, Human
cauggggagcagugcuccugacc

SEQ ID NO: 589071 - RNA, 22 nt, Human
ggcagugagucccggagaggcc

SEQ ID NO: 589072 - RNA, 22 nt, Human
uggcucagaacuacuucuaguu

SEQ ID NO: 589073 - RNA, 22 nt, Human
auguguucugaggcagaugacu

SEQ ID NO: 589074 - RNA, 22 nt, Human
ccacacagauaaguguuuucua

SEQ ID NO: 589075 - RNA, 22 nt, Human
caguuucugggaggaaaggaag

SEQ ID NO: 589076 - RNA, 22 nt, Human
ucaggcugcuguacugugaaug

SEQ ID NO: 589077 - RNA, 22 nt, Human
ggcaccagggcaagggucuuuc

SEQ ID NO: 589078 - RNA, 22 nt, Human
cccuccaggcacugcccucuuc

SEQ ID NO: 589079 - RNA, 22 nt, Human
ccuggucagguaacugggcuga

SEQ ID NO: 589080 - RNA, 22 nt, Human
gugcugccggcauagcagugaa

SEQ ID NO: 589081 - RNA, 22 nt, Human
uggcuuccuggacagaugcggu

SEQ ID NO: 589082 - RNA, 22 nt, Human
gucugcugcagucguggcucua

SEQ ID NO: 589083 - RNA, 22 nt, Human
uccaguuuugaauccugcuucu

SEQ ID NO: 589084 - RNA, 22 nt, Human
ccccaugaaguagggucucuga

SEQ ID NO: 589085 - RNA, 22 nt, Human
gcagaggaggacccaggaauua

SEQ ID NO: 589086 - RNA, 22 nt, Human
guggggggagcugcaagcugga

SEQ ID NO: 589087 - RNA, 20 nt, Human
cagcauagcggcucacaucc

SEQ ID NO: 589088 - RNA, 18 nt, Human
ggucaggggcggagagaa

SEQ ID NO: 589089 - RNA, 22 nt, Human
ugaugaccgccaacguuuaggu

SEQ ID NO: 589090 - RNA, 22 nt, Human
auucagcauaaucaguagcuug

SEQ ID NO: 589091 - RNA, 22 nt, Human
uccagcagguuggucaggugca

SEQ ID NO: 589092 - RNA, 22 nt, Human
ugccaggcuuuggucaaaggcu

SEQ ID NO: 589093 - RNA, 22 nt, Human
aggggaggagcuuuucuugccu

SEQ ID NO: 589094 - RNA, 22 nt, Human
ugcagaaguauuccaggcccca

SEQ ID NO: 589095 - RNA, 22 nt, Human
agaagugagugugacucagcag

SEQ ID NO: 589096 - RNA, 22 nt, Human
ucugaaaugaacucuugaacuu

SEQ ID NO: 589097 - RNA, 22 nt, Human
gauugcugcaaucaacaaguau

SEQ ID NO: 589098 - RNA, 22 nt, Human
ucuauguagugccagcuaguau

SEQ ID NO: 589099 - RNA, 20 nt, Human
ccuaguuuucugagcgugac

SEQ ID NO: 589100 - RNA, 18 nt, Human
ucuccuggguaggggccu

SEQ ID NO: 589101 - RNA, 22 nt, Human
agaauaaacugcuuuagggcag

SEQ ID NO: 589102 - RNA, 22 nt, Human
agcagagugugaaggcagggcu

SEQ ID NO: 589103 - RNA, 22 nt, Human
uggcuuucucccccagcuucuc

SEQ ID NO: 589104 - RNA, 17 nt, Human
uugggagagaaagguau

SEQ ID NO: 589105 - RNA, 22 nt, Human
aaacaugaauagauauuaaaca

SEQ ID NO: 589106 - RNA, 22 nt, Human
ucagucccaagguccugaggug

SEQ ID NO: 589107 - RNA, 22 nt, Human
ucuccaggacugagcuccagcc

SEQ ID NO: 589108 - RNA, 22 nt, Human
ucuacauaaaaauucagaaggc

SEQ ID NO: 589109 - RNA, 22 nt, Human
gagaggaguagacacuuugguu

SEQ ID NO: 589110 - RNA, 22 nt, Human
agucaggauaugccuugugggc

SEQ ID NO: 589111 - RNA, 22 nt, Human
uuuccuaagguagugauaauuu

SEQ ID NO: 589112 - RNA, 22 nt, Human
gccaacuggcugaucucaaagc

SEQ ID NO: 589113 - RNA, 22 nt, Human
cagaaguaagauuacugugagu

SEQ ID NO: 589114 - RNA, 22 nt, Human
ucagggaacaauguuauggcuu

SEQ ID NO: 589115 - RNA, 22 nt, Human
cagcuguggcugccacugcucc

SEQ ID NO: 589116 - RNA, 22 nt, Human
agcuggugauguggucccucac

SEQ ID NO: 589117 - RNA, 22 nt, Human
uauuuccugcauggugauguaa

SEQ ID NO: 589118 - RNA, 22 nt, Human
ucucuucuagcuucuugugguu

SEQ ID NO: 589119 - RNA, 22 nt, Human
uugguaaauccccuuacacaaa

SEQ ID NO: 589120 - RNA, 22 nt, Human
cagaggcugggaccucaggcau

SEQ ID NO: 589121 - RNA, 17 nt, Human
ugggggcgccagggucu

SEQ ID NO: 589122 - RNA, 20 nt, Human
ucccucaguccuggcuuugu

SEQ ID NO: 589123 - RNA, 22 nt, Human
gcugagaggcagccagacccuc

SEQ ID NO: 589124 - RNA, 22 nt, Human
agggcccuaaggaaggcacaca

SEQ ID NO: 589125 - RNA, 22 nt, Human
ugaggauuggcaaaacucaggg

SEQ ID NO: 589126 - RNA, 22 nt, Human
aguugucccggucuagccacuu

SEQ ID NO: 589127 - RNA, 22 nt, Human
uaauuauucuagucacauagca

SEQ ID NO: 589128 - RNA, 22 nt, Human
ucuuauaugcacauacauuggg

SEQ ID NO: 589129 - RNA, 22 nt, Human
ggagggcccugggugcagcucu

SEQ ID NO: 589130 - RNA, 22 nt, Human
aacaaugccacauuaaguguau

SEQ ID NO: 589131 - RNA, 22 nt, Human
gagcuguccuaccaggaguccu

SEQ ID NO: 589132 - RNA, 22 nt, Human
cugagcugcucccgcugcagcg

SEQ ID NO: 589133 - RNA, 22 nt, Human
caccucuuugauuugaggcaag

SEQ ID NO: 589134 - RNA, 22 nt, Human
aauuaguaaccuaauuccaucu

SEQ ID NO: 589135 - RNA, 20 nt, Human
guaaaauauggucuuugggu

SEQ ID NO: 589136 - RNA, 22 nt, Human
guccugugucccagagaaagag

SEQ ID NO: 589137 - RNA, 22 nt, Human
ucaguguuauuagaugagguuu

SEQ ID NO: 589138 - RNA, 22 nt, Human
uggagcugguaaacagugacau

SEQ ID NO: 589139 - RNA, 22 nt, Human
auagucuuagaucagauaaagu

SEQ ID NO: 589140 - RNA, 22 nt, Human
cagacagagcucacaagucuuu

SEQ ID NO: 589141 - RNA, 22 nt, Human
cacugcaggucugagauggggg

SEQ ID NO: 589142 - RNA, 22 nt, Human
uuucuuggagcucuuagggucg

SEQ ID NO: 589143 - RNA, 18 nt, Human
ucugggcaaucucaguau

SEQ ID NO: 589144 - RNA, 23 nt, Human
cugcuuccuugcuucauugcugg

SEQ ID NO: 589145 - RNA, 22 nt, Human
aacagaacccgagugugaaucu

SEQ ID NO: 589146 - RNA, 20 nt, Human
uuggcucaugcaacaccuac

SEQ ID NO: 589147 - RNA, 22 nt, Human
aguccaaagcagaugagggcca

SEQ ID NO: 589148 - RNA, 22 nt, Human
aacaagauguuuugauauaugu

SEQ ID NO: 589149 - RNA, 22 nt, Human
aggaaagacuggggccccagaa

SEQ ID NO: 589150 - RNA, 19 nt, Human
uggcugggugccaauggcc

SEQ ID NO: 589151 - RNA, 22 nt, Human
cacaggcaggagguucuccagu

SEQ ID NO: 589152 - RNA, 22 nt, Human
gcccacuccagcuucucccaca

SEQ ID NO: 589153 - RNA, 22 nt, Human
cugagcauuugugcagcuucuc

SEQ ID NO: 589154 - RNA, 22 nt, Human
ggcuccaggugcaugccaggcu

SEQ ID NO: 589155 - RNA, 22 nt, Human
gugcccuggcucacagugucuc

SEQ ID NO: 589156 - RNA, 22 nt, Human
aagauuuaccacuuuauucaag

SEQ ID NO: 589157 - RNA, 22 nt, Human
acacagaaccucauagccucuc

SEQ ID NO: 589158 - RNA, 22 nt, Human
gaggggcuggcuguggucccau

SEQ ID NO: 589159 - RNA, 22 nt, Human
cagucucucuccuugcaggcgu

SEQ ID NO: 589160 - RNA, 22 nt, Human
ccagagggaagaggaagcgcug

SEQ ID NO: 589161 - RNA, 22 nt, Human
ccacagggcacagacaggaagc

SEQ ID NO: 589162 - RNA, 22 nt, Human
gccugggaaaugguggggucag

SEQ ID NO: 589163 - RNA, 22 nt, Human
uccuuauauggcagacagcaga

SEQ ID NO: 589164 - RNA, 19 nt, Human
aucuuacagagcagaguac

SEQ ID NO: 589165 - RNA, 22 nt, Human
cuggagaccucuccugagagug

SEQ ID NO: 589166 - RNA, 22 nt, Human
agagauucugugucaaaacgaa

SEQ ID NO: 589167 - RNA, 22 nt, Human
cagccacuacaauugguuccau

SEQ ID NO: 589168 - RNA, 22 nt, Human
uacaugaaguugucuaaacugg

SEQ ID NO: 589169 - RNA, 22 nt, Human
cucucugggguuccagacgugg

SEQ ID NO: 589170 - RNA, 22 nt, Human
uccuaacuaauuuguagcaaaa

SEQ ID NO: 589171 - RNA, 22 nt, Human
ggcuggacuuucugcugggcuc

SEQ ID NO: 589172 - RNA, 22 nt, Human
acaauuagcugugugucuaucu

SEQ ID NO: 589173 - RNA, 22 nt, Human
ggaagaggcucucauugagggc

SEQ ID NO: 589174 - RNA, 18 nt, Human
cagcugccagcucaugga

SEQ ID NO: 589175 - RNA, 22 nt, Human
cuuuuguugcccuugucgcagg

SEQ ID NO: 589176 - RNA, 22 nt, Human
ucccugcucagcucaccuggca

SEQ ID NO: 589177 - RNA, 22 nt, Human
cugccucucagccugaccgcca

SEQ ID NO: 589178 - RNA, 22 nt, Human
cugggcagaguccggaagaugg

SEQ ID NO: 589179 - RNA, 22 nt, Human
ugccaguugggaaaacagacau

SEQ ID NO: 589180 - RNA, 22 nt, Human
gcucaccuucguccagcagccg

SEQ ID NO: 589181 - RNA, 22 nt, Human
caugugugucuccaccagcugc

SEQ ID NO: 589182 - RNA, 22 nt, Human
caggcagagaggagcauuuaau

SEQ ID NO: 589183 - RNA, 22 nt, Human
aggagaguucacacuggucaga

SEQ ID NO: 589184 - RNA, 22 nt, Human
cuuucucaguguuaauuacuuu

SEQ ID NO: 589185 - RNA, 22 nt, Human
ucccaaggauaagagagucuga

SEQ ID NO: 589186 - RNA, 20 nt, Human
aagauacuccagaaauuaaa

SEQ ID NO: 589187 - RNA, 22 nt, Human
cuuuccuccacucccuaggcuu

SEQ ID NO: 589188 - RNA, 22 nt, Human
ucuggguaugaccuauuuuucc

SEQ ID NO: 589189 - RNA, 22 nt, Human
uuacuuuagaaauagucaucaa

SEQ ID NO: 589190 - RNA, 22 nt, Human
uucuuucucagugggcagauac

SEQ ID NO: 589191 - RNA, 22 nt, Human
ugaguucuucacauuaccuacg

SEQ ID NO: 589192 - RNA, 22 nt, Human
gcucccucugcucaggcacuug

SEQ ID NO: 589193 - RNA, 22 nt, Human
caguucuggaggauagaagucu

SEQ ID NO: 589194 - RNA, 22 nt, Human
uuuccugagccagaguuucauu

SEQ ID NO: 589195 - RNA, 22 nt, Human
cauuagcucagauaccucugag

SEQ ID NO: 589196 - RNA, 22 nt, Human
gcaggagcuuugcuuacugcug

SEQ ID NO: 589197 - RNA, 22 nt, Human
ucccagaagagaugccacuuga

SEQ ID NO: 589198 - RNA, 22 nt, Human
uggcucauucuggggaagucag

SEQ ID NO: 589199 - RNA, 22 nt, Human
cuuaaauuggaugaguuaaguu

SEQ ID NO: 589200 - RNA, 20 nt, Human
agucccagaucaaauuucug

SEQ ID NO: 589201 - RNA, 22 nt, Human
gaagaggaugacaggagccggu

SEQ ID NO: 589202 - RNA, 22 nt, Human
gccaccuggacagcugugcccu

SEQ ID NO: 589203 - RNA, 18 nt, Human
cagaaaguuauuuacucu

SEQ ID NO: 589204 - RNA, 22 nt, Human
augcauaugcaucuguguacau

SEQ ID NO: 589205 - RNA, 22 nt, Human
gacccagcuaaccaggugggga

SEQ ID NO: 589206 - RNA, 22 nt, Human
agaguguguggggcugagguca

SEQ ID NO: 589207 - RNA, 22 nt, Human
ccucagggaggccucuguggcu

SEQ ID NO: 589208 - RNA, 22 nt, Human
uuagcauucucugugugcauaa

SEQ ID NO: 589209 - RNA, 20 nt, Human
caaguguagaaacuaauaag

SEQ ID NO: 589210 - RNA, 23 nt, Human
uugcaaaaugcaauugaguuaga

SEQ ID NO: 589211 - RNA, 23 nt, Human
ccaguggcguaaacuagaggaua

SEQ ID NO: 589212 - RNA, 22 nt, Human
ggagggcaacuuuucaguaggu

SEQ ID NO: 589213 - RNA, 22 nt, Human
gaaaauaggcagaugcauugua

SEQ ID NO: 589214 - RNA, 22 nt, Human
agguaaaauagauaguauuucu

SEQ ID NO: 589215 - RNA, 22 nt, Human
uucacaagugugaaggcagagc

SEQ ID NO: 589216 - RNA, 22 nt, Human
gccucugggggcucagaccugu

SEQ ID NO: 589217 - RNA, 19 nt, Human
ggaaggugacaguggugaa

SEQ ID NO: 589218 - RNA, 22 nt, Human
ucuaguuuucucaaaugacuug

SEQ ID NO: 589219 - RNA, 22 nt, Human
acaucuuuuuucucuaauugug

SEQ ID NO: 589220 - RNA, 18 nt, Human
uaggcugggggcuguagu

SEQ ID NO: 589221 - RNA, 22 nt, Human
gacucagagaucccuggagguc

SEQ ID NO: 589222 - RNA, 22 nt, Human
caaaguuuaaaguagauuucag

SEQ ID NO: 589223 - RNA, 22 nt, Human
accugaggccuccccagcagac

SEQ ID NO: 589224 - RNA, 22 nt, Human
aggagcugcuuuggugcgguuu

SEQ ID NO: 589225 - RNA, 20 nt, Human
accagaggaaagagcaguga

SEQ ID NO: 589226 - RNA, 22 nt, Human
ccaggugugauuuggcaguguc

SEQ ID NO: 589227 - RNA, 22 nt, Human
acauguguggacaugaaucuac

SEQ ID NO: 589228 - RNA, 22 nt, Human
ugggaggacuugugggcuucau

SEQ ID NO: 589229 - RNA, 22 nt, Human
cuacauuaaauuggcuuacuua

SEQ ID NO: 589230 - RNA, 22 nt, Human
gaaggcugucagagaggagggc

SEQ ID NO: 589231 - RNA, 20 nt, Human
cagcaggcuauggggcaccc

SEQ ID NO: 589232 - RNA, 22 nt, Human
ggagugaguacuggaguagcug

SEQ ID NO: 589233 - RNA, 22 nt, Human
gggggaagaaagaacauggcau

SEQ ID NO: 589234 - RNA, 17 nt, Human
ucauuucuaggcacucc

SEQ ID NO: 589235 - RNA, 22 nt, Human
uacuuaaaacugauagaaucuc

SEQ ID NO: 589236 - RNA, 22 nt, Human
ccugggagaacugcuggguugg

SEQ ID NO: 589237 - RNA, 22 nt, Human
gugaaaugaaucuggaaauauu

SEQ ID NO: 589238 - RNA, 22 nt, Human
uuguguuucccuugcauauucc

SEQ ID NO: 589239 - RNA, 22 nt, Human
agcaggaacgaguucaugggga

SEQ ID NO: 589240 - RNA, 22 nt, Human
gcagggcuguaauuugagccug

SEQ ID NO: 589241 - RNA, 22 nt, Human
ucccaggauguuuauggcuggu

SEQ ID NO: 589242 - RNA, 22 nt, Human
cuacaggaaggaucuugcucaa

SEQ ID NO: 589243 - RNA, 22 nt, Human
ccaggugugcucugcaguggau

SEQ ID NO: 589244 - RNA, 22 nt, Human
cuucugugacguaugugaggac

SEQ ID NO: 589245 - RNA, 22 nt, Human
gaugauuuuaguugacuaaacu

SEQ ID NO: 589246 - RNA, 22 nt, Human
gaggagaagcuaagaaacacag

SEQ ID NO: 589247 - RNA, 22 nt, Human
gccugggauuguguaagugaau

SEQ ID NO: 589248 - RNA, 22 nt, Human
caguuuuagcuagagcaaacca

SEQ ID NO: 589249 - RNA, 22 nt, Human
cuuauuuccugacauggaaaga

SEQ ID NO: 589250 - RNA, 22 nt, Human
uggaggccagugaaaguagauu

SEQ ID NO: 589251 - RNA, 22 nt, Human
gugggcaguucaauucugggag

SEQ ID NO: 589252 - RNA, 22 nt, Human
aaaaugagauacaguuugaaag

SEQ ID NO: 589253 - RNA, 22 nt, Human
gaaagcugaaccaggaaccaug

SEQ ID NO: 589254 - RNA, 22 nt, Human
caaaugaaguccaaagggcuua

SEQ ID NO: 589255 - RNA, 22 nt, Human
uacacuguacgcucugcuucaa

SEQ ID NO: 589256 - RNA, 22 nt, Human
aagggcugaaagaccuugggca

SEQ ID NO: 589257 - RNA, 22 nt, Human
uauuugaaaguguacaaaaacu

SEQ ID NO: 589258 - RNA, 22 nt, Human
ucucuaguauaauauagcaaaa

SEQ ID NO: 589259 - RNA, 22 nt, Human
uuucaaaguugggaauuguaau

SEQ ID NO: 589260 - RNA, 22 nt, Human
uuguuuuauucugcaauuuccc

SEQ ID NO: 589261 - RNA, 22 nt, Human
ccagcgacugugaccucagcua

SEQ ID NO: 589262 - RNA, 22 nt, Human
uggccugguuguugcugccguu

SEQ ID NO: 589263 - RNA, 23 nt, Human
ggcugggagcuccgggugcacgu

SEQ ID NO: 589264 - RNA, 22 nt, Human
aggaagcuuggggcagggcuac

SEQ ID NO: 589265 - RNA, 22 nt, Human
uauggaaagggaguuuaauuug

SEQ ID NO: 589266 - RNA, 22 nt, Human
uaauuuuaacugugcuguuugg

SEQ ID NO: 589267 - RNA, 22 nt, Human
agaacagcaguuaugguucauu

SEQ ID NO: 589268 - RNA, 22 nt, Human
uccuugaauugugccacuuacc

SEQ ID NO: 589269 - RNA, 18 nt, Human
cccagcuggugggucagu

SEQ ID NO: 589270 - RNA, 22 nt, Human
aggaauucaagaccagcugggc

SEQ ID NO: 589271 - RNA, 23 nt, Human
cuugggcuagagacuuagcagug

SEQ ID NO: 589272 - RNA, 22 nt, Human
ugcccugguuacacuggagucc

SEQ ID NO: 589273 - RNA, 22 nt, Human
uugagcaaugcugcaaagagau

SEQ ID NO: 589274 - RNA, 22 nt, Human
ucugaaaugcaggcaauuugcu

SEQ ID NO: 589275 - RNA, 22 nt, Human
auucugaaguugcaggagaagc

SEQ ID NO: 589276 - RNA, 22 nt, Human
uuaauuuucucaucugugaaau

SEQ ID NO: 589277 - RNA, 22 nt, Human
ccuggccuggcacucccucugc

SEQ ID NO: 589278 - RNA, 22 nt, Human
agagucuggugcaugauaagca

SEQ ID NO: 589279 - RNA, 22 nt, Human
agucccagccuguaggauuggg

SEQ ID NO: 589280 - RNA, 22 nt, Human
ucaguuucuaaaucuuaccaau

SEQ ID NO: 589281 - RNA, 21 nt, Human
uucaacaaagggaauaaguuu

SEQ ID NO: 589282 - RNA, 22 nt, Human
cugcagcuauauuuucccacag

SEQ ID NO: 589283 - RNA, 22 nt, Human
ucugcucuccauacuuccgcac

SEQ ID NO: 589284 - RNA, 22 nt, Human
uguuucaaagguuauacaguca

SEQ ID NO: 589285 - RNA, 22 nt, Human
ccugagagcauuccacacugaa

SEQ ID NO: 589286 - RNA, 22 nt, Human
gaggcugguuugccuuuuggca

SEQ ID NO: 589287 - RNA, 22 nt, Human
aucaguuauuuuuaagcuauaa

SEQ ID NO: 589288 - RNA, 22 nt, Human
uucaacauuuaucaguuuauca

SEQ ID NO: 589289 - RNA, 22 nt, Human
guucucauaguggaaaauaggu

SEQ ID NO: 589290 - RNA, 22 nt, Human
cauuucauaguugucacaauaa

SEQ ID NO: 589291 - RNA, 19 nt, Human
uaacaaagucugaagucag

SEQ ID NO: 589292 - RNA, 22 nt, Human
cagcagcugcgugcccaggccg

SEQ ID NO: 589293 - RNA, 22 nt, Human
gccuggcucccucugcagcucc

SEQ ID NO: 589294 - RNA, 22 nt, Human
acaggauuacuggauuaugaca

SEQ ID NO: 589295 - RNA, 22 nt, Human
ucagaagcaggagugugcacaa

SEQ ID NO: 589296 - RNA, 22 nt, Human
gcagagcagugcuugcccagcg

SEQ ID NO: 589297 - RNA, 22 nt, Human
auauuucagguuuugcaggccg

SEQ ID NO: 589298 - RNA, 22 nt, Human
ucauugucgcucugcgguguuc

SEQ ID NO: 589299 - RNA, 22 nt, Human
cagcagacuggaguaggcagug

SEQ ID NO: 589300 - RNA, 18 nt, Human
ucagcuggggcugcagcc

SEQ ID NO: 589301 - RNA, 22 nt, Human
aagagguuucaugauuuucuua

SEQ ID NO: 589302 - RNA, 22 nt, Human
uacaaguauggaaugauucuca

SEQ ID NO: 589303 - RNA, 22 nt, Human
gucccucacccagaugcuccca

SEQ ID NO: 589304 - RNA, 22 nt, Human
acacagcuaugggguaggaaac

SEQ ID NO: 589305 - RNA, 22 nt, Human
gugggcagagcaagggaacuca

SEQ ID NO: 589306 - RNA, 22 nt, Human
gugaagcaguugcguggguucc

SEQ ID NO: 589307 - RNA, 20 nt, Human
gugggcagcaggcauacugg

SEQ ID NO: 589308 - RNA, 21 nt, Human
gaguggaacgcucuucacacc

SEQ ID NO: 589309 - RNA, 22 nt, Human
uuuauuuaaagucguguguuaa

SEQ ID NO: 589310 - RNA, 19 nt, Human
ccagagcccgccagauggg

SEQ ID NO: 589311 - RNA, 22 nt, Human
caguuuuaugucgaauguauac

SEQ ID NO: 589312 - RNA, 23 nt, Human
ucuacaaagcugugucaggaccc

SEQ ID NO: 589313 - RNA, 22 nt, Human
uucuuuauguuaaugaaucuau

SEQ ID NO: 589314 - RNA, 22 nt, Human
uguaccaaaaaugugucagacu

SEQ ID NO: 589315 - RNA, 22 nt, Human
ugaagacaguuuuacucaugag

SEQ ID NO: 589316 - RNA, 22 nt, Human
gggcugggcaugguguucccuc

SEQ ID NO: 589317 - RNA, 22 nt, Human
ggagcuguuauggcauaagcau

SEQ ID NO: 589318 - RNA, 22 nt, Human
acugcuuuugaucucuucugua

SEQ ID NO: 589319 - RNA, 18 nt, Human
uuacacuagccuugguuc

SEQ ID NO: 589320 - RNA, 23 nt, Human
uuucucugagaagcaguucucua

SEQ ID NO: 589321 - RNA, 22 nt, Human
auguauaaugcuaauuagcuag

SEQ ID NO: 589322 - RNA, 22 nt, Human
acauuguagacuuuucauaugu

SEQ ID NO: 589323 - RNA, 22 nt, Human
cccagcacaggcaauuccauac

SEQ ID NO: 589324 - RNA, 22 nt, Human
ccuccacucuggccucucaggu

SEQ ID NO: 589325 - RNA, 22 nt, Human
cagaggggauaacagguguaga

SEQ ID NO: 589326 - RNA, 22 nt, Human
cuccaggcccacggccgcggcc

SEQ ID NO: 589327 - RNA, 22 nt, Human
ucuugcuagaaucauuuggaga

SEQ ID NO: 589328 - RNA, 22 nt, Human
uccacaugacuucuaauaacug

SEQ ID NO: 589329 - RNA, 22 nt, Human
aguggcugccaagagcaaugcu

SEQ ID NO: 589330 - RNA, 22 nt, Human
ugcugccacugguagucucauu

SEQ ID NO: 589331 - RNA, 22 nt, Human
ggacacagaccuuucuguucua

SEQ ID NO: 589332 - RNA, 23 nt, Human
ugguggggucuuggagacagcac

SEQ ID NO: 589333 - RNA, 18 nt, Human
ugguuugucaugagaauu

SEQ ID NO: 589334 - RNA, 22 nt, Human
uaagaugacuacuuaccacuga

SEQ ID NO: 589335 - RNA, 22 nt, Human
agcuggugcugaagcucuugag

SEQ ID NO: 589336 - RNA, 22 nt, Human
uuggucaaggacauuacaguuu

SEQ ID NO: 589337 - RNA, 22 nt, Human
ccacccugagccgcaagagcag

SEQ ID NO: 589338 - RNA, 20 nt, Human
cagcaggaaaagugccucag

SEQ ID NO: 589339 - RNA, 22 nt, Human
ucuuucagccacuuaccugucu

SEQ ID NO: 589340 - RNA, 22 nt, Human
aauguuuuauagcucaagcaau

SEQ ID NO: 589341 - RNA, 23 nt, Human
uagagcagggaaaucugucagag

SEQ ID NO: 589342 - RNA, 22 nt, Human
ucuuucugcacuuaguggggcu

SEQ ID NO: 589343 - RNA, 22 nt, Human
guguggccucaacgggaugcaa

SEQ ID NO: 589344 - RNA, 22 nt, Human
acccaggagcaggcugggcagu

SEQ ID NO: 589345 - RNA, 22 nt, Human
acaaugucaccucucauguuuu

SEQ ID NO: 589346 - RNA, 22 nt, Human
gcucaaggcaggcagacaugag

SEQ ID NO: 589347 - RNA, 21 nt, Human
agcugagcccagaagacuggu

SEQ ID NO: 589348 - RNA, 22 nt, Human
agacaggcugcugucugcuagg

SEQ ID NO: 589349 - RNA, 20 nt, Human
acuaugaaguuagcccucca

SEQ ID NO: 589350 - RNA, 22 nt, Human
aauguuuuuuggucugaugaau

SEQ ID NO: 589351 - RNA, 22 nt, Human
uuccacagcccaagcugguggc

SEQ ID NO: 589352 - RNA, 19 nt, Human
gcccaggggcccgaugcug

SEQ ID NO: 589353 - RNA, 22 nt, Human
aucuguuccccuaugcucucua

SEQ ID NO: 589354 - RNA, 22 nt, Human
ggaaaguccuucuaaagccaga

SEQ ID NO: 589355 - RNA, 22 nt, Human
ucacccagauagugagcauagu

SEQ ID NO: 589356 - RNA, 22 nt, Human
gauggccucagugcccaaagga

SEQ ID NO: 589357 - RNA, 22 nt, Human
ccuggcugcauuuugcuggaug

SEQ ID NO: 589358 - RNA, 22 nt, Human
cgcccagggcaggaggccgcuc

SEQ ID NO: 589359 - RNA, 22 nt, Human
cagagguuugaucgaguagguc

SEQ ID NO: 589360 - RNA, 22 nt, Human
cugagcugagccaaaucugucu

SEQ ID NO: 589361 - RNA, 22 nt, Human
gucugaaaguagggcugaucua

SEQ ID NO: 589362 - RNA, 21 nt, Human
cagggcacacagaggauggua

SEQ ID NO: 589363 - RNA, 22 nt, Human
gaguuauauccugagucauauu

SEQ ID NO: 589364 - RNA, 22 nt, Human
ccugucuguccucucaugagcc

SEQ ID NO: 589365 - RNA, 22 nt, Human
aggauucauggugcagacaaag

SEQ ID NO: 589366 - RNA, 22 nt, Human
caguagcacuagauaugugugg

SEQ ID NO: 589367 - RNA, 22 nt, Human
uggcacagagggacccagcagc

SEQ ID NO: 589368 - RNA, 22 nt, Human
auaaaaucuuuaugugcucugc

SEQ ID NO: 589369 - RNA, 22 nt, Human
gcaguccucucauuggccuccu

SEQ ID NO: 589370 - RNA, 22 nt, Human
cacugcuuuaaggcugaguaac

SEQ ID NO: 589371 - RNA, 22 nt, Human
cugucuguacugagaguucugu

SEQ ID NO: 589372 - RNA, 22 nt, Human
uuuuuguucccagagaauuugu

SEQ ID NO: 589373 - RNA, 22 nt, Human
acucacaagugaugugaauggc

SEQ ID NO: 589374 - RNA, 22 nt, Human
agcuccagcggauggucuuaua

SEQ ID NO: 589375 - RNA, 22 nt, Human
uggccugggccggcagauauac

SEQ ID NO: 589376 - RNA, 22 nt, Human
ugcugugagguugagaaggaag

SEQ ID NO: 589377 - RNA, 22 nt, Human
agugugagccuacaggccaaag

SEQ ID NO: 589378 - RNA, 22 nt, Human
gagccuggccuccugccucagc

SEQ ID NO: 589379 - RNA, 22 nt, Human
gccaggcauuauuccgaucccu

SEQ ID NO: 589380 - RNA, 22 nt, Human
aagggcagaauagagaagaugg

SEQ ID NO: 589381 - RNA, 22 nt, Human
agggcugacaguaaaaguauga

SEQ ID NO: 589382 - RNA, 22 nt, Human
aaauagauugcugaggcauuac

SEQ ID NO: 589383 - RNA, 22 nt, Human
aaacauuguaauuuuagcaugg

SEQ ID NO: 589384 - RNA, 22 nt, Human
augucacauggucaccucuagc

SEQ ID NO: 589385 - RNA, 22 nt, Human
aggaaauugggacacagagaaa

SEQ ID NO: 589386 - RNA, 22 nt, Human
ugaacagaucaauagaacugac

SEQ ID NO: 589387 - RNA, 22 nt, Human
acaggugggcuuaagagucggc

SEQ ID NO: 589388 - RNA, 22 nt, Human
cuggaagagcauuugcauaggg

SEQ ID NO: 589389 - RNA, 22 nt, Human
caguccauaugccauaauucuu

SEQ ID NO: 589390 - RNA, 22 nt, Human
uguacagugccaugcaguuugc

SEQ ID NO: 589391 - RNA, 22 nt, Human
auacaguguacuauuuagcagu

SEQ ID NO: 589392 - RNA, 22 nt, Human
gauuucuucucucccaagagga

SEQ ID NO: 589393 - RNA, 22 nt, Human
ucugggcugggcuuaggaaccc

SEQ ID NO: 589394 - RNA, 22 nt, Human
gugugucccuacaacagcuuca

SEQ ID NO: 589395 - RNA, 20 nt, Human
uuuacauuuugaaacaguga

SEQ ID NO: 589396 - RNA, 22 nt, Human
uaaacaaggguuacugagcaug

SEQ ID NO: 589397 - RNA, 22 nt, Human
ggaguagcugcauuccgagcac

SEQ ID NO: 589398 - RNA, 16 nt, Human
uuuuauugugacagcc

SEQ ID NO: 589399 - RNA, 22 nt, Human
agggcucugggguggcagagau

SEQ ID NO: 589400 - RNA, 22 nt, Human
agacacugaauguuuggugguc

SEQ ID NO: 589401 - RNA, 22 nt, Human
aauguacaauaagacaaagagg

SEQ ID NO: 589402 - RNA, 17 nt, Human
ggcaggugacagacacc

SEQ ID NO: 589403 - RNA, 22 nt, Human
gcaaaggcuagagacacaggga

SEQ ID NO: 589404 - RNA, 22 nt, Human
gccuaggaguacagaaugguuu

SEQ ID NO: 589405 - RNA, 22 nt, Human
uucaguuuucuuuagaauguag

SEQ ID NO: 589406 - RNA, 22 nt, Human
cauucuuacacaauauuuuaau

SEQ ID NO: 589407 - RNA, 22 nt, Human
auugacagcaggggcugucacu

SEQ ID NO: 589408 - RNA, 22 nt, Human
gagaggcucugaggacuggggu

SEQ ID NO: 589409 - RNA, 22 nt, Human
uggcaguucuaauugaccauuu

SEQ ID NO: 589410 - RNA, 22 nt, Human
cagcuguugaucucuuaagccu

SEQ ID NO: 589411 - RNA, 22 nt, Human
ggcugagcccccucugcguagg

SEQ ID NO: 589412 - RNA, 22 nt, Human
gagagggagccagccaggaacc

SEQ ID NO: 589413 - RNA, 22 nt, Human
aaaugcauucuguuuucacuag

SEQ ID NO: 589414 - RNA, 22 nt, Human
gggccagguaucgucuuuagua

SEQ ID NO: 589415 - RNA, 22 nt, Human
ugcuggaguggcacuguguggc

SEQ ID NO: 589416 - RNA, 22 nt, Human
ucugaguuuucugagaagcuua

SEQ ID NO: 589417 - RNA, 22 nt, Human
cccagagaagugaagugacuug

SEQ ID NO: 589418 - RNA, 22 nt, Human
gaauguuauguauccagucaca

SEQ ID NO: 589419 - RNA, 22 nt, Human
ucugccuuggcaaccacagcuu

SEQ ID NO: 589420 - RNA, 22 nt, Human
acuuucuaggucucaguccuuu

SEQ ID NO: 589421 - RNA, 22 nt, Human
ucccagcucacauaugguaacu

SEQ ID NO: 589422 - RNA, 22 nt, Human
gguaggggaagacaagugaaaa

SEQ ID NO: 589423 - RNA, 20 nt, Human
caguagcaauaauuagaagc

SEQ ID NO: 589424 - RNA, 22 nt, Human
uacaaagaggcagcuccauuuu

SEQ ID NO: 589425 - RNA, 22 nt, Human
uguccccagagccuguuccugc

SEQ ID NO: 589426 - RNA, 22 nt, Human
cugcagcugucucuacugggca

SEQ ID NO: 589427 - RNA, 22 nt, Human
ugggccugugaugcugggcuau

SEQ ID NO: 589428 - RNA, 21 nt, Human
ugaaagaggauguggucauuc

SEQ ID NO: 589429 - RNA, 22 nt, Human
cauggcauugcauaacggggcu

SEQ ID NO: 589430 - RNA, 22 nt, Human
ccagcuuucauaucaugaggua

SEQ ID NO: 589431 - RNA, 22 nt, Human
gcuuccagaccccagucccuca

SEQ ID NO: 589432 - RNA, 22 nt, Human
ucuucucuccugcuuggcagaa

SEQ ID NO: 589433 - RNA, 22 nt, Human
caguggggaggccaggauagaa

SEQ ID NO: 589434 - RNA, 22 nt, Human
aagguacagaaauuaacaagga

SEQ ID NO: 589435 - RNA, 22 nt, Human
acuaagaccuagauacuagggg

SEQ ID NO: 589436 - RNA, 22 nt, Human
agucucugagguucagaugccu

SEQ ID NO: 589437 - RNA, 22 nt, Human
acagcuggaguguuggugaggu

SEQ ID NO: 589438 - RNA, 17 nt, Human
uuuauaauuggccucuu

SEQ ID NO: 589439 - RNA, 22 nt, Human
ucugauaauggacuucucaucu

SEQ ID NO: 589440 - RNA, 22 nt, Human
cagaggaggcgguauacacugc

SEQ ID NO: 589441 - RNA, 22 nt, Human
auuuuaauaagauucccaagua

SEQ ID NO: 589442 - RNA, 22 nt, Human
gcacaggcacagagggccacug

SEQ ID NO: 589443 - RNA, 22 nt, Human
agcccagugggccgaggcgggg

SEQ ID NO: 589444 - RNA, 22 nt, Human
ggcagacuuuuucucugaaggg

SEQ ID NO: 589445 - RNA, 22 nt, Human
guccugggcccaggggcugccu

SEQ ID NO: 589446 - RNA, 22 nt, Human
agccaggccagacucacacccu

SEQ ID NO: 589447 - RNA, 22 nt, Human
ucacuuuggauuauguaauuuc

SEQ ID NO: 589448 - RNA, 22 nt, Human
aaauuuuagacuccugggucua

SEQ ID NO: 589449 - RNA, 22 nt, Human
ggcagcaguaggagcuaaucuu

SEQ ID NO: 589450 - RNA, 22 nt, Human
ucaguaaaucucuaauuggcau

SEQ ID NO: 589451 - RNA, 22 nt, Human
ugcuuccuugaucauucccaaa

SEQ ID NO: 589452 - RNA, 22 nt, Human
augacaaaauaaauggucucug

SEQ ID NO: 589453 - RNA, 22 nt, Human
acuucuaagcucaaauugguau

SEQ ID NO: 589454 - RNA, 22 nt, Human
uuauagaacgguucugugcaaa

SEQ ID NO: 589455 - RNA, 22 nt, Human
uggcagcuggagggcaauggcc

SEQ ID NO: 589456 - RNA, 22 nt, Human
augaagcagauuuauuacucac

SEQ ID NO: 589457 - RNA, 22 nt, Human
agcagccuugcaggggucgcac

SEQ ID NO: 589458 - RNA, 22 nt, Human
gaggcugacggcaccaucuucu

SEQ ID NO: 589459 - RNA, 21 nt, Human
gggcuccagagauguagcuuc

SEQ ID NO: 589460 - RNA, 22 nt, Human
acagauaauuagcauaaaugcu

SEQ ID NO: 589461 - RNA, 22 nt, Human
ucagcacugauagaagucaaua

SEQ ID NO: 589462 - RNA, 22 nt, Human
agaguuugggugggacagcuug

SEQ ID NO: 589463 - RNA, 22 nt, Human
aggagggugauccgggcugguc

SEQ ID NO: 589464 - RNA, 22 nt, Human
uuuacaagucuguugaucccaa

SEQ ID NO: 589465 - RNA, 22 nt, Human
ccaggcccugccugugguuccu

SEQ ID NO: 589466 - RNA, 22 nt, Human
agaaacuaaagccaagggcucu

SEQ ID NO: 589467 - RNA, 22 nt, Human
auuauuugcuuggcucaucuaa

SEQ ID NO: 589468 - RNA, 22 nt, Human
agacacagaaguugcuguuggg

SEQ ID NO: 589469 - RNA, 22 nt, Human
caggaaccugugcguagggaug

SEQ ID NO: 589470 - RNA, 22 nt, Human
aaaaugauauccugacuuuuau

SEQ ID NO: 589471 - RNA, 22 nt, Human
ggcuucauuucuguccuugauu

SEQ ID NO: 589472 - RNA, 22 nt, Human
gggaggugauggcaagcagcgg

SEQ ID NO: 589473 - RNA, 22 nt, Human
cucuccagccacagaagcugcu

SEQ ID NO: 589474 - RNA, 22 nt, Human
aacaagucuuugguuuuggcua

SEQ ID NO: 589475 - RNA, 18 nt, Human
caagagcugcuccuggcc

SEQ ID NO: 589476 - RNA, 21 nt, Human
gcuggagagccaggcaggggc

SEQ ID NO: 589477 - RNA, 19 nt, Human
gcgaggaagucacuguggc

SEQ ID NO: 589478 - RNA, 22 nt, Human
gauaaaauaacuauggaauacu

SEQ ID NO: 589479 - RNA, 22 nt, Human
ugaucaaagugcuggaauuaca

SEQ ID NO: 589480 - RNA, 22 nt, Human
aacuuccuucuaguucauaugu

SEQ ID NO: 589481 - RNA, 22 nt, Human
gaggagaagcuauuggaaggac

SEQ ID NO: 589482 - RNA, 22 nt, Human
guaaguaauaagugcucaauaa

SEQ ID NO: 589483 - RNA, 22 nt, Human
uuauuguaggccuauuguagaa

SEQ ID NO: 589484 - RNA, 20 nt, Human
acugcuucuuucucugaccu

SEQ ID NO: 589485 - RNA, 22 nt, Human
uuaagagaagaguaucuagaac

SEQ ID NO: 589486 - RNA, 22 nt, Human
acccuccacuuuaucugucuuu

SEQ ID NO: 589487 - RNA, 22 nt, Human
aagacacuggguuaggcacgug

SEQ ID NO: 589488 - RNA, 22 nt, Human
uauuucaacguaugaaaagcug

SEQ ID NO: 589489 - RNA, 22 nt, Human
gugcaccagucacaugggcaga

SEQ ID NO: 589490 - RNA, 17 nt, Human
ugcacaagagacaauag

SEQ ID NO: 589491 - RNA, 22 nt, Human
agcugcaggccucuccugggga

SEQ ID NO: 589492 - RNA, 22 nt, Human
uguggggaggcugcagugcugc

SEQ ID NO: 589493 - RNA, 22 nt, Human
ccuggcagcgugccgagcugcg

SEQ ID NO: 589494 - RNA, 22 nt, Human
gccugagaaggacacagcaggu

SEQ ID NO: 589495 - RNA, 22 nt, Human
agugcaggccccaggccaggcc

SEQ ID NO: 589496 - RNA, 22 nt, Human
uaaaugaaaggguuuaauuuau

SEQ ID NO: 589497 - RNA, 20 nt, Human
uggcaggacuggcuccaccc

SEQ ID NO: 589498 - RNA, 22 nt, Human
caaacugagcaucagaaaguuu

SEQ ID NO: 589499 - RNA, 22 nt, Human
ggccccaguucacuccuggccg

SEQ ID NO: 589500 - RNA, 22 nt, Human
cucuggcuaucuguuucuaugu

SEQ ID NO: 589501 - RNA, 22 nt, Human
uagaaacccaggauuuguauuu

SEQ ID NO: 589502 - RNA, 22 nt, Human
acauguaucugaucugcaauug

SEQ ID NO: 589503 - RNA, 22 nt, Human
uaauguaaagaagauguaggaa

SEQ ID NO: 589504 - RNA, 22 nt, Human
cccagcagccuggauguucuuu

SEQ ID NO: 589505 - RNA, 22 nt, Human
uaaaaguaggaaugaaacgcau

SEQ ID NO: 589506 - RNA, 22 nt, Human
uaaagguuaguagcagggaaac

SEQ ID NO: 589507 - RNA, 17 nt, Human
uccuuggcaaccaguuc

SEQ ID NO: 589508 - RNA, 22 nt, Human
uugugggaucucccuguugcuc

SEQ ID NO: 589509 - RNA, 22 nt, Human
gauaacaugguuaguguuuuua

SEQ ID NO: 589510 - RNA, 21 nt, Human
cugugggaccaagcacuggga

SEQ ID NO: 589511 - RNA, 22 nt, Human
cuguuuucuagggcugagguga

SEQ ID NO: 589512 - RNA, 21 nt, Human
ccaggguccagcugccauggu

SEQ ID NO: 589513 - RNA, 22 nt, Human
acugccugugcacuggucuuuu

SEQ ID NO: 589514 - RNA, 22 nt, Human
aggaagagcuggaccagaggac

SEQ ID NO: 589515 - RNA, 22 nt, Human
gcuuugcuuccuguucuagccu

SEQ ID NO: 589516 - RNA, 22 nt, Human
ggcuggagacaacguccugccc

SEQ ID NO: 589517 - RNA, 23 nt, Human
agguagguuauugcugcuaccug

SEQ ID NO: 589518 - RNA, 22 nt, Human
ggucccaggcucccucuugucc

SEQ ID NO: 589519 - RNA, 22 nt, Human
aagggcaggagaagacggauau

SEQ ID NO: 589520 - RNA, 19 nt, Human
auaaauaaaaagugggaga

SEQ ID NO: 589521 - RNA, 20 nt, Human
uccugguggauacugcuuaa

SEQ ID NO: 589522 - RNA, 22 nt, Human
uagcaaagguagaguuuugaga

SEQ ID NO: 589523 - RNA, 22 nt, Human
ccuguacauuagcugugaauug

SEQ ID NO: 589524 - RNA, 22 nt, Human
gcaguaagauguaagugcuaua

SEQ ID NO: 589525 - RNA, 22 nt, Human
ccaauguuuauuuuccugcugc

SEQ ID NO: 589526 - RNA, 22 nt, Human
cugugacugcagcaccaaguaa

SEQ ID NO: 589527 - RNA, 22 nt, Human
uuucuaagacauuugucaucuu

SEQ ID NO: 589528 - RNA, 22 nt, Human
cccaaccagaaauugacagaca

SEQ ID NO: 589529 - RNA, 22 nt, Human
cccaguaccucuguucccugcu

SEQ ID NO: 589530 - RNA, 22 nt, Human
uuucagaaagcaucaucaaagu

SEQ ID NO: 589531 - RNA, 22 nt, Human
augcuuaacucuguacauaguu

SEQ ID NO: 589532 - RNA, 22 nt, Human
gugacagucaaagacaugacuu

SEQ ID NO: 589533 - RNA, 22 nt, Human
ucugccaugcuaacuucaguau

SEQ ID NO: 589534 - RNA, 22 nt, Human
gaugucuuuuuccaggcucuuu

SEQ ID NO: 589535 - RNA, 22 nt, Human
uuggcucacaaggacgguugcu

SEQ ID NO: 589536 - RNA, 22 nt, Human
aacaugucuuuagagaaacauu

SEQ ID NO: 589537 - RNA, 22 nt, Human
uagccagggagacacuguggag

SEQ ID NO: 589538 - RNA, 22 nt, Human
uggcucuguugagguauggauu

SEQ ID NO: 589539 - RNA, 22 nt, Human
uugcccugucaguagaagugca

SEQ ID NO: 589540 - RNA, 22 nt, Human
gcaguuuuagagcuuuaagaug

SEQ ID NO: 589541 - RNA, 22 nt, Human
uuauagaugccuugaguaaaug

SEQ ID NO: 589542 - RNA, 22 nt, Human
ucaucuguucauacacaugcgu

SEQ ID NO: 589543 - RNA, 22 nt, Human
ggcacacauagaucugcacugg

SEQ ID NO: 589544 - RNA, 22 nt, Human
aguggcagagccaaguagagcc

SEQ ID NO: 589545 - RNA, 22 nt, Human
ugugccuggcauucugggcuuc

SEQ ID NO: 589546 - RNA, 22 nt, Human
uacagcuuuugcagcuguuuug

SEQ ID NO: 589547 - RNA, 22 nt, Human
gagcuuccauccuuacugugug

SEQ ID NO: 589548 - RNA, 19 nt, Human
caggacaguuugccaagaa

SEQ ID NO: 589549 - RNA, 22 nt, Human
gaggcagagacuccaccuucag

SEQ ID NO: 589550 - RNA, 21 nt, Human
ugcuucccugggccacacuga

SEQ ID NO: 589551 - RNA, 21 nt, Human
auaaauucugagaggcucugc

SEQ ID NO: 589552 - RNA, 22 nt, Human
aagcuggcaauuaucaaaacug

SEQ ID NO: 589553 - RNA, 22 nt, Human
caguccuuaaggaaacauuugu

SEQ ID NO: 589554 - RNA, 22 nt, Human
uuagcaauuccagguaaguuau

SEQ ID NO: 589555 - RNA, 17 nt, Human
gguggaaguuucuaguu

SEQ ID NO: 589556 - RNA, 22 nt, Human
uuuacacugugaaacagguauc

SEQ ID NO: 589557 - RNA, 22 nt, Human
ggagacaggguugaaccacgca

SEQ ID NO: 589558 - RNA, 22 nt, Human
aggcuccuuguucaucauccau

SEQ ID NO: 589559 - RNA, 22 nt, Human
uggguccagugcagcugcgcgu

SEQ ID NO: 589560 - RNA, 23 nt, Human
caacuuuuggcuacaugcuuagc

SEQ ID NO: 589561 - RNA, 17 nt, Human
acacaguacuuuuuugc

SEQ ID NO: 589562 - RNA, 22 nt, Human
cucugcaggcacccaggguggg

SEQ ID NO: 589563 - RNA, 22 nt, Human
aguuuuuccguggcuacgauaa

SEQ ID NO: 589564 - RNA, 22 nt, Human
augagguaguauuagaaggaga

SEQ ID NO: 589565 - RNA, 22 nt, Human
aaaugcacugaacacauguugu

SEQ ID NO: 589566 - RNA, 22 nt, Human
auuucauguuaacugaacagaa

SEQ ID NO: 589567 - RNA, 20 nt, Human
uccccagggcaucaggagca

SEQ ID NO: 589568 - RNA, 17 nt, Human
agaguuuuaagaaauuu

SEQ ID NO: 589569 - RNA, 22 nt, Human
aaagcaauagaggguaagacug

SEQ ID NO: 589570 - RNA, 22 nt, Human
gcaggagccacuucagggaugc

SEQ ID NO: 589571 - RNA, 22 nt, Human
caugucuuccuugcacacacac

SEQ ID NO: 589572 - RNA, 22 nt, Human
ucugccucgcuaacagcagcca

SEQ ID NO: 589573 - RNA, 22 nt, Human
gggaaacugcaacucagagagg

SEQ ID NO: 589574 - RNA, 22 nt, Human
aauaaaaugaacugguagaguu

SEQ ID NO: 589575 - RNA, 22 nt, Human
acaggcugaaaguuaaguucug

SEQ ID NO: 589576 - RNA, 22 nt, Human
cagugagggcccccuuccaggu

SEQ ID NO: 589577 - RNA, 22 nt, Human
uuucaauuuccaggcuagaauu

SEQ ID NO: 589578 - RNA, 22 nt, Human
ggcaccaggacaugacucccag

SEQ ID NO: 589579 - RNA, 22 nt, Human
uguuaugaguccucauauacua

SEQ ID NO: 589580 - RNA, 22 nt, Human
gcuuagucaauuauaaauaggc

SEQ ID NO: 589581 - RNA, 22 nt, Human
aaucacauuagugaaacacuga

SEQ ID NO: 589582 - RNA, 22 nt, Human
auuucaugaguuauuauagugg

SEQ ID NO: 589583 - RNA, 20 nt, Human
aggcaguguagagaugagua

SEQ ID NO: 589584 - RNA, 22 nt, Human
cugaggacauugaugaggcaau

SEQ ID NO: 589585 - RNA, 22 nt, Human
uucccagaauuguugggaacug

SEQ ID NO: 589586 - RNA, 22 nt, Human
cuguuuauugagcaaucugcca

SEQ ID NO: 589587 - RNA, 22 nt, Human
agacacaguauaagcacaacaa

SEQ ID NO: 589588 - RNA, 22 nt, Human
caugcuuuuuucuaguauaaau

SEQ ID NO: 589589 - RNA, 22 nt, Human
auacacauguguaugugcaugc

SEQ ID NO: 589590 - RNA, 22 nt, Human
gaucuuggggggaucaccaugg

SEQ ID NO: 589591 - RNA, 22 nt, Human
ugcagugccucggcagugcagc

SEQ ID NO: 589592 - RNA, 22 nt, Human
cgcugggggaacagcgagggug

SEQ ID NO: 589593 - RNA, 22 nt, Human
aauaacagagucuucaagauag

SEQ ID NO: 589594 - RNA, 22 nt, Human
gacagggacgaggcuucaggca

SEQ ID NO: 589595 - RNA, 22 nt, Human
acauuucucuugaugucucuau

SEQ ID NO: 589596 - RNA, 22 nt, Human
cugaggccucuccuuggcuugu

SEQ ID NO: 589597 - RNA, 22 nt, Human
agcugccaggccccugagaacc

SEQ ID NO: 589598 - RNA, 22 nt, Human
guucuucucuuguaauggaauc

SEQ ID NO: 589599 - RNA, 22 nt, Human
agauuucaaugugagcauuagu

SEQ ID NO: 589600 - RNA, 22 nt, Human
cuuguauucuuccacuuaagau

SEQ ID NO: 589601 - RNA, 21 nt, Human
uuaaagcuaugguagugggcu

SEQ ID NO: 589602 - RNA, 22 nt, Human
gagagguagcaguaagaacagg

SEQ ID NO: 589603 - RNA, 22 nt, Human
gcucccugguauugcugccacu

SEQ ID NO: 589604 - RNA, 22 nt, Human
cugagggcaugaacauuccaua

SEQ ID NO: 589605 - RNA, 22 nt, Human
gcuguacauucugcacaggccc

SEQ ID NO: 589606 - RNA, 22 nt, Human
ccagggcugguggcugcagagg

SEQ ID NO: 589607 - RNA, 22 nt, Human
agaauuguaagcaauuugauua

SEQ ID NO: 589608 - RNA, 22 nt, Human
guuacacaggaaaacauuagca

SEQ ID NO: 589609 - RNA, 22 nt, Human
cucccaggggagucaucugcuu

SEQ ID NO: 589610 - RNA, 22 nt, Human
agacacugaaauguauugaaga

SEQ ID NO: 589611 - RNA, 22 nt, Human
ccuuggcuggaauuacucuggg

SEQ ID NO: 589612 - RNA, 19 nt, Human
ucuuuggcuucuggaucag

SEQ ID NO: 589613 - RNA, 22 nt, Human
uaucuaaaggauuuaauuuagu

SEQ ID NO: 589614 - RNA, 22 nt, Human
augcuauuuaccacacaucauu

SEQ ID NO: 589615 - RNA, 22 nt, Human
caugcagggacuagagaacagg

SEQ ID NO: 589616 - RNA, 22 nt, Human
uaauuuuaugacaguguauuuu

SEQ ID NO: 589617 - RNA, 22 nt, Human
uuccugggugguccugguagag

SEQ ID NO: 589618 - RNA, 22 nt, Human
ucugauguaggcuuuucuggga

SEQ ID NO: 589619 - RNA, 22 nt, Human
uggccaggccucuuggugccca

SEQ ID NO: 589620 - RNA, 22 nt, Human
ccaguggaguuuuuauacccag

SEQ ID NO: 589621 - RNA, 22 nt, Human
auaugaagucagacaaacuggg

SEQ ID NO: 589622 - RNA, 22 nt, Human
agaaagggucacugaaagagga

SEQ ID NO: 589623 - RNA, 22 nt, Human
uuugcuuguucaagauuucugu

SEQ ID NO: 589624 - RNA, 21 nt, Human
uguuccuguucucuaggaucc

SEQ ID NO: 589625 - RNA, 22 nt, Human
ccucugccaccucccacgaggc

SEQ ID NO: 589626 - RNA, 22 nt, Human
cuucuucuuuuaauaaaugucu

SEQ ID NO: 589627 - RNA, 22 nt, Human
ugcagcugcuggcccaggugcu

SEQ ID NO: 589628 - RNA, 22 nt, Human
ugacacaaaggaaagcauaauc

SEQ ID NO: 589629 - RNA, 22 nt, Human
cauguaaaacacucagaacagu

SEQ ID NO: 589630 - RNA, 22 nt, Human
gcacaggcaauagauacagcua

SEQ ID NO: 589631 - RNA, 22 nt, Human
ucaaagauagauguugagaaau

SEQ ID NO: 589632 - RNA, 22 nt, Human
uacauucugaaauaaaugguuu

SEQ ID NO: 589633 - RNA, 22 nt, Human
acagggcuggcguugggacaga

SEQ ID NO: 589634 - RNA, 21 nt, Human
gccuggcagguggaagggcuc

SEQ ID NO: 589635 - RNA, 22 nt, Human
cucucuuuuucgugugccgaag

SEQ ID NO: 589636 - RNA, 22 nt, Human
ugcuguagcccugcacagugca

SEQ ID NO: 589637 - RNA, 20 nt, Human
aggcagagcgcacuuuuaga

SEQ ID NO: 589638 - RNA, 22 nt, Human
uucagaguuagacgaaaagcaa

SEQ ID NO: 589639 - RNA, 22 nt, Human
uaaagaacacagggaauagcac

SEQ ID NO: 589640 - RNA, 22 nt, Human
uagccgcuuaauuauuugguga

SEQ ID NO: 589641 - RNA, 22 nt, Human
ugcaggguagaugcaggcugug

SEQ ID NO: 589642 - RNA, 22 nt, Human
cuuccaaguugcucugcugacc

SEQ ID NO: 589643 - RNA, 22 nt, Human
uucuauguguugacaagccuga

SEQ ID NO: 589644 - RNA, 22 nt, Human
caguauuugguaauuggcuacc

SEQ ID NO: 589645 - RNA, 22 nt, Human
caguuuuagggcaaugugaaga

SEQ ID NO: 589646 - RNA, 22 nt, Human
gcugggcuuguggccagcuggg

SEQ ID NO: 589647 - RNA, 22 nt, Human
uccagggcucauucccucugca

SEQ ID NO: 589648 - RNA, 22 nt, Human
aaacuugagccaagggcuuggg

SEQ ID NO: 589649 - RNA, 20 nt, Human
uucagaaauaaggaaugagg

SEQ ID NO: 589650 - RNA, 22 nt, Human
cgggcagcggcguggccauggu

SEQ ID NO: 589651 - RNA, 22 nt, Human
gcacaggcuguuggccuucaga

SEQ ID NO: 589652 - RNA, 22 nt, Human
ugaggcaggagguugagaacug

SEQ ID NO: 589653 - RNA, 22 nt, Human
uccucccaacuuuuccaucuca

SEQ ID NO: 589654 - RNA, 22 nt, Human
uccugucuaaagaccugcaggc

SEQ ID NO: 589655 - RNA, 22 nt, Human
aaauucuuucauggcuaauaag

SEQ ID NO: 589656 - RNA, 22 nt, Human
uagacaggagucaggcuagaau

SEQ ID NO: 589657 - RNA, 22 nt, Human
auuuccuucaguguuuaauacu

SEQ ID NO: 589658 - RNA, 22 nt, Human
cccagcacucagcaggcucaua

SEQ ID NO: 589659 - RNA, 22 nt, Human
uaaauuuuuguuaacagccucu

SEQ ID NO: 589660 - RNA, 22 nt, Human
ugcuuuaaaccauggaugugag

SEQ ID NO: 589661 - RNA, 22 nt, Human
auuguacagguuggaggaagug

SEQ ID NO: 589662 - RNA, 22 nt, Human
aaaaaugugaccacaggguguu

SEQ ID NO: 589663 - RNA, 22 nt, Human
aguguuucucagaagggccuau

SEQ ID NO: 589664 - RNA, 23 nt, Human
aagguguucuguauuuaacucag

SEQ ID NO: 589665 - RNA, 21 nt, Human
ugagaugcuagaaggcaggga

SEQ ID NO: 589666 - RNA, 22 nt, Human
ugacagaaauaguucuuaauuu

SEQ ID NO: 589667 - RNA, 23 nt, Human
cugcauauggagguuagcaacuc

SEQ ID NO: 589668 - RNA, 22 nt, Human
gaggugaguggaucacgagguc

SEQ ID NO: 589669 - RNA, 22 nt, Human
gcugucacucaccaggccugca

SEQ ID NO: 589670 - RNA, 22 nt, Human
aagggugguguaggagaucaaa

SEQ ID NO: 589671 - RNA, 17 nt, Human
ccuuucucuuucaucuc

SEQ ID NO: 589672 - RNA, 22 nt, Human
gcagcuggggccacacuuaggc

SEQ ID NO: 589673 - RNA, 22 nt, Human
uucuucugagagaaaaagcuca

SEQ ID NO: 589674 - RNA, 22 nt, Human
ucaguucuuaguaaugcagucu

SEQ ID NO: 589675 - RNA, 20 nt, Human
ggccauggguugccugaggu

SEQ ID NO: 589676 - RNA, 22 nt, Human
uuugacauugaaagcagaaucg

SEQ ID NO: 589677 - RNA, 22 nt, Human
ugcauagaggauccaguguggu

SEQ ID NO: 589678 - RNA, 22 nt, Human
acaguucaagacaucaguauga

SEQ ID NO: 589679 - RNA, 23 nt, Human
agccucuuuucuccugcccugca

SEQ ID NO: 589680 - RNA, 22 nt, Human
cauuguucaacacugacuugca

SEQ ID NO: 589681 - RNA, 22 nt, Human
aaacacagcauguccuugggga

SEQ ID NO: 589682 - RNA, 22 nt, Human
gcuggcagaagagcugguucaa

SEQ ID NO: 589683 - RNA, 21 nt, Human
cuuguuuugaaaggacuggcc

SEQ ID NO: 589684 - RNA, 22 nt, Human
agggacuauuuacccaucucac

SEQ ID NO: 589685 - RNA, 22 nt, Human
aacuuuguuuuauucacugcug

SEQ ID NO: 589686 - RNA, 22 nt, Human
gggagggccaggcucacccagg

SEQ ID NO: 589687 - RNA, 22 nt, Human
cuucagaagaaaagcagugugu

SEQ ID NO: 589688 - RNA, 22 nt, Human
gauacauuucaaggaggacugg

SEQ ID NO: 589689 - RNA, 22 nt, Human
uuccuuuagugucauauacuuu

SEQ ID NO: 589690 - RNA, 22 nt, Human
uucccauuugugguagugaauu

SEQ ID NO: 589691 - RNA, 22 nt, Human
uacauagaacauguuuaauguc

SEQ ID NO: 589692 - RNA, 22 nt, Human
auagcauuuacuuuucagaaau

SEQ ID NO: 589693 - RNA, 22 nt, Human
cucucccuagguuagcggucag

SEQ ID NO: 589694 - RNA, 22 nt, Human
guggcagcucauguuguuuuaa

SEQ ID NO: 589695 - RNA, 22 nt, Human
agaggccagcagugccuaucug

SEQ ID NO: 589696 - RNA, 22 nt, Human
aagaaacaaccacugcucuccu

SEQ ID NO: 589697 - RNA, 22 nt, Human
aggcugugcacagggcaccugc

SEQ ID NO: 589698 - RNA, 22 nt, Human
gggugccacagagcuuccacuu

SEQ ID NO: 589699 - RNA, 22 nt, Human
ggugaagggugucauggcauuu

SEQ ID NO: 589700 - RNA, 22 nt, Human
aaaccuauuggcaagaauaaua

SEQ ID NO: 589701 - RNA, 22 nt, Human
cagugcuguugggcccagagag

SEQ ID NO: 589702 - RNA, 22 nt, Human
gacacagagauaggccuguguu

SEQ ID NO: 589703 - RNA, 22 nt, Human
caugcuuacuugucucagcaga

SEQ ID NO: 589704 - RNA, 22 nt, Human
gacagcagagcagacuaaugga

SEQ ID NO: 589705 - RNA, 22 nt, Human
gcuucaugaaaaucacugguca

SEQ ID NO: 589706 - RNA, 22 nt, Human
ggaggugcagaguaggguuggu

SEQ ID NO: 589707 - RNA, 22 nt, Human
caagucaaagacuagaacuagu

SEQ ID NO: 589708 - RNA, 22 nt, Human
uaugaagaaguucugugaaaug

SEQ ID NO: 589709 - RNA, 22 nt, Human
ucagagagugcaaaauauagcu

SEQ ID NO: 589710 - RNA, 22 nt, Human
auuagcuuuaaagacuuugauu

SEQ ID NO: 589711 - RNA, 23 nt, Human
ucagcuucauugucuucuauggc

SEQ ID NO: 589712 - RNA, 22 nt, Human
uuuuugugguauauugcaacaa

SEQ ID NO: 589713 - RNA, 21 nt, Human
ucuacauaucaauauguaauu

SEQ ID NO: 589714 - RNA, 22 nt, Human
agcagcugcagagggcuccccc

SEQ ID NO: 589715 - RNA, 22 nt, Human
gggcuccagcagaggcagccgg

SEQ ID NO: 589716 - RNA, 23 nt, Human
aaagcuuaacuggguaauaaagc

SEQ ID NO: 589717 - RNA, 22 nt, Human
gaggugcuuccuuugggcucug

SEQ ID NO: 589718 - RNA, 22 nt, Human
aguucuucccuuuucuauggag

SEQ ID NO: 589719 - RNA, 23 nt, Human
ugggccucuccacccuuuucugu

SEQ ID NO: 589720 - RNA, 22 nt, Human
gguagucauggauagcuaugag

SEQ ID NO: 589721 - RNA, 22 nt, Human
augcaugauccugagcaaccca

SEQ ID NO: 589722 - RNA, 22 nt, Human
gucacacacauuucuuuggugc

SEQ ID NO: 589723 - RNA, 22 nt, Human
gaaauagacacuuucuaugaau

SEQ ID NO: 589724 - RNA, 22 nt, Human
cagcugccccuccagggcuggg

SEQ ID NO: 589725 - RNA, 22 nt, Human
uagaaacagaaaacuguaauag

SEQ ID NO: 589726 - RNA, 22 nt, Human
uagcugccuagacagcuauagc

SEQ ID NO: 589727 - RNA, 22 nt, Human
aauguauaaccauaggaaauuu

SEQ ID NO: 589728 - RNA, 22 nt, Human
ucuuaagcagagaagaaguuga

SEQ ID NO: 589729 - RNA, 22 nt, Human
ugagacaguaucgccccaaggc

SEQ ID NO: 589730 - RNA, 22 nt, Human
uuacaucaugcuuaucccuuuc

SEQ ID NO: 589731 - RNA, 22 nt, Human
gacaguuuaagcaccuaauauu

SEQ ID NO: 589732 - RNA, 22 nt, Human
gcaguggggcaaucauagcuca

SEQ ID NO: 589733 - RNA, 21 nt, Human
cuguccuggucuagaggcaca

SEQ ID NO: 589734 - RNA, 22 nt, Human
agaguuuuauggcuuuaauucu

SEQ ID NO: 589735 - RNA, 21 nt, Human
uuacaaagcuacagauguugc

SEQ ID NO: 589736 - RNA, 19 nt, Human
cuuccuugcuccccaugug

SEQ ID NO: 589737 - RNA, 22 nt, Human
ccagcuccucuugucucuagca

SEQ ID NO: 589738 - RNA, 22 nt, Human
cagcagagaugagauuccuaua

SEQ ID NO: 589739 - RNA, 22 nt, Human
augcuguggaaguuccugaagc

SEQ ID NO: 589740 - RNA, 22 nt, Human
cucuguauagaaaggaaacauu

SEQ ID NO: 589741 - RNA, 21 nt, Human
uuggccugauaucuuggagca

SEQ ID NO: 589742 - RNA, 22 nt, Human
uggugcagauagugguguagua

SEQ ID NO: 589743 - RNA, 22 nt, Human
gagcccagcuugcacauggagc

SEQ ID NO: 589744 - RNA, 23 nt, Human
uagccaggcccagcauggacacc

SEQ ID NO: 589745 - RNA, 22 nt, Human
ugugugccagccuacgaggagc

SEQ ID NO: 589746 - RNA, 22 nt, Human
agaacacugcuaguauaaucac

SEQ ID NO: 589747 - RNA, 22 nt, Human
uguuuucugaugguuaaugagu

SEQ ID NO: 589748 - RNA, 22 nt, Human
cagcugcccugccuugcccuua

SEQ ID NO: 589749 - RNA, 22 nt, Human
agcugcagccgcagcuguggcc

SEQ ID NO: 589750 - RNA, 16 nt, Human
ggguggucuuggagac

SEQ ID NO: 589751 - RNA, 22 nt, Human
ugugaaauucuugaaaugcaca

SEQ ID NO: 589752 - RNA, 20 nt, Human
cugggcucaagugagccucc

SEQ ID NO: 589753 - RNA, 22 nt, Human
cugagcagcaccuucaagaaac

SEQ ID NO: 589754 - RNA, 22 nt, Human
guggccuggaugagcuucgaca

SEQ ID NO: 589755 - RNA, 22 nt, Human
uuauuucauauaauguuaucaa

SEQ ID NO: 589756 - RNA, 22 nt, Human
ccugaagcaaggguaggcaggu

SEQ ID NO: 589757 - RNA, 22 nt, Human
gagcccugagaguugugaggcc

SEQ ID NO: 589758 - RNA, 22 nt, Human
ggcagggguccugguguugacu

SEQ ID NO: 589759 - RNA, 22 nt, Human
gaaaucaaggcuacauucaggu

SEQ ID NO: 589760 - RNA, 22 nt, Human
cagcccugcacgcugccuccgc

SEQ ID NO: 589761 - RNA, 22 nt, Human
aagcacauugccuggcacauag

SEQ ID NO: 589762 - RNA, 22 nt, Human
gcuucugaugucagacuucugg

SEQ ID NO: 589763 - RNA, 22 nt, Human
gcuuucugcucuguaaaauggg

SEQ ID NO: 589764 - RNA, 21 nt, Human
aaaguugauuuagauugguga

SEQ ID NO: 589765 - RNA, 21 nt, Human
uuucaauuugccuugagucau

SEQ ID NO: 589766 - RNA, 22 nt, Human
ucaaauugucaucuugauaaug

SEQ ID NO: 589767 - RNA, 19 nt, Human
ugucuccucaugcaagugu

SEQ ID NO: 589768 - RNA, 22 nt, Human
caggcugcuccaggguaggaaa

SEQ ID NO: 589769 - RNA, 22 nt, Human
aaucgcuugguaauuuuaaaag

SEQ ID NO: 589770 - RNA, 22 nt, Human
auucuaauuaguucuacauguu

SEQ ID NO: 589771 - RNA, 22 nt, Human
agcuaauuagaaauagauuauu

SEQ ID NO: 589772 - RNA, 18 nt, Human
acagugcugucacugcuu

SEQ ID NO: 589773 - RNA, 21 nt, Human
ggcuggacaucccaggagacu

SEQ ID NO: 589774 - RNA, 22 nt, Human
aaguagcaaucucauuaguugg

SEQ ID NO: 589775 - RNA, 21 nt, Human
uucagcaagcacucuggacac

SEQ ID NO: 589776 - RNA, 17 nt, Human
aggaagggcaaguuucu

SEQ ID NO: 589777 - RNA, 22 nt, Human
ucuuuuuauauugacaaaaggu

SEQ ID NO: 589778 - RNA, 22 nt, Human
cuggagccaugucuugacugcu

SEQ ID NO: 589779 - RNA, 22 nt, Human
gggcagcaucaggaggggcuuu

SEQ ID NO: 589780 - RNA, 22 nt, Human
aagacacugggggcugcagcca

SEQ ID NO: 589781 - RNA, 22 nt, Human
cugggcugucccaaccccaucc

SEQ ID NO: 589782 - RNA, 22 nt, Human
uccucuucugccuauaucugcc

SEQ ID NO: 589783 - RNA, 22 nt, Human
aaaugcagcagcuaauugaaaa

SEQ ID NO: 589784 - RNA, 22 nt, Human
gaggagguuccggguggagaag

SEQ ID NO: 589785 - RNA, 22 nt, Human
uaguacuuaucucugucauugu

SEQ ID NO: 589786 - RNA, 19 nt, Human
auauccuugagaaagggaa

SEQ ID NO: 589787 - RNA, 22 nt, Human
acagcagacacaggcacgcugu

SEQ ID NO: 589788 - RNA, 22 nt, Human
ugagaguauuuuggcauuauca

SEQ ID NO: 589789 - RNA, 22 nt, Human
gugcucacugugagacguccug

SEQ ID NO: 589790 - RNA, 22 nt, Human
uagauuuguuuccuucucucca

SEQ ID NO: 589791 - RNA, 22 nt, Human
agaggcugucucauauuuugua

SEQ ID NO: 589792 - RNA, 22 nt, Human
ucauauuuaggccuuuaauuca

SEQ ID NO: 589793 - RNA, 22 nt, Human
agaguguuauuugcucuguauu

SEQ ID NO: 589794 - RNA, 22 nt, Human
ucacaauauuuaucuuccaauu

SEQ ID NO: 589795 - RNA, 22 nt, Human
aggcuguggcaucacaucagga

SEQ ID NO: 589796 - RNA, 22 nt, Human
ccugggaccucgcgggaagcgg

SEQ ID NO: 589797 - RNA, 22 nt, Human
ucuuucugaugggaagggucaa

SEQ ID NO: 589798 - RNA, 22 nt, Human
ucuccuggaagugauuccccug

SEQ ID NO: 589799 - RNA, 22 nt, Human
aggcagcagagguugaggaaag

SEQ ID NO: 589800 - RNA, 22 nt, Human
acagaacugagaauucucuauc

SEQ ID NO: 589801 - RNA, 22 nt, Human
cuugagcacagcggcuucagga

SEQ ID NO: 589802 - RNA, 22 nt, Human
uuucauaaccucaagcuacagu

SEQ ID NO: 589803 - RNA, 22 nt, Human
gcugaggugucaccuugcuggg

SEQ ID NO: 589804 - RNA, 20 nt, Human
uagcaaugaguguuccauuu

SEQ ID NO: 589805 - RNA, 22 nt, Human
aggaggcugaacuagggucugg

SEQ ID NO: 589806 - RNA, 22 nt, Human
uuuucaugugaugugacauuuc

SEQ ID NO: 589807 - RNA, 22 nt, Human
ucugcaacagugcccuguaaau

SEQ ID NO: 589808 - RNA, 22 nt, Human
accaggggugucaacagcauuu

SEQ ID NO: 589809 - RNA, 22 nt, Human
ccaggcugaauauguuccaggg

SEQ ID NO: 589810 - RNA, 22 nt, Human
cuuggaggaugugcggcugccc

SEQ ID NO: 589811 - RNA, 22 nt, Human
uguuuauugcagugcugggcug

SEQ ID NO: 589812 - RNA, 20 nt, Human
cagcagagacccauggggag

SEQ ID NO: 589813 - RNA, 19 nt, Human
uuaggaaaccacuuuccuu

SEQ ID NO: 589814 - RNA, 22 nt, Human
cugagaguauuggcaggcuugg

SEQ ID NO: 589815 - RNA, 22 nt, Human
uggcucugugucucccagcagc

SEQ ID NO: 589816 - RNA, 22 nt, Human
ggaagccaagguggccucuauu

SEQ ID NO: 589817 - RNA, 22 nt, Human
aacuaaaagugugucucuugua

SEQ ID NO: 589818 - RNA, 21 nt, Human
caggaugaugggaagguggug

SEQ ID NO: 589819 - RNA, 22 nt, Human
aggaggaggugggacacaguga

SEQ ID NO: 589820 - RNA, 22 nt, Human
ccagagaggcaaaacuccuucc

SEQ ID NO: 589821 - RNA, 22 nt, Human
uccuggcccacuaugccagcau

SEQ ID NO: 589822 - RNA, 22 nt, Human
uuguguguagacucagccauug

SEQ ID NO: 589823 - RNA, 19 nt, Human
agcaaccugucagagaugc

SEQ ID NO: 589824 - RNA, 22 nt, Human
gggcacuggugcugccaucuug

SEQ ID NO: 589825 - RNA, 22 nt, Human
cugaggccucucuccuuggcuu

SEQ ID NO: 589826 - RNA, 22 nt, Human
aaagccauuacaaaauuucaua

SEQ ID NO: 589827 - RNA, 22 nt, Human
aagcauaacuugcugcacauag

SEQ ID NO: 589828 - RNA, 22 nt, Human
uagaggugacacugagaccaua

SEQ ID NO: 589829 - RNA, 22 nt, Human
caugucuuuguuaugcucacca

SEQ ID NO: 589830 - RNA, 22 nt, Human
aauuagaaucuuauuuggggaa

SEQ ID NO: 589831 - RNA, 21 nt, Human
ccuuggcuggcaucuagcacc

SEQ ID NO: 589832 - RNA, 22 nt, Human
augcauauauacauacacaguc

SEQ ID NO: 589833 - RNA, 22 nt, Human
gaagccacaacuuuuucuuagc

SEQ ID NO: 589834 - RNA, 22 nt, Human
gcugcuuuggggaugaaugaga

SEQ ID NO: 589835 - RNA, 22 nt, Human
ucacuagucaucaacuuccauu

SEQ ID NO: 589836 - RNA, 22 nt, Human
ugcugggauauagcuucuaggg

SEQ ID NO: 589837 - RNA, 22 nt, Human
uagcuuuaaaaaucaucaaagc

SEQ ID NO: 589838 - RNA, 22 nt, Human
uuuucauuguuacuaugagcua

SEQ ID NO: 589839 - RNA, 22 nt, Human
agacacugauguucagcucaau

SEQ ID NO: 589840 - RNA, 22 nt, Human
uguuauuucuuugccauaucuu

SEQ ID NO: 589841 - RNA, 20 nt, Human
agcuccucaucacuggaggu

SEQ ID NO: 589842 - RNA, 22 nt, Human
augaggcagcugacagcuguuc

SEQ ID NO: 589843 - RNA, 22 nt, Human
uggaugcuguaggacacgcucu

SEQ ID NO: 589844 - RNA, 22 nt, Human
accaggaguugggggugggacc

SEQ ID NO: 589845 - RNA, 22 nt, Human
ugagaaaacaguuuguaauaau

SEQ ID NO: 589846 - RNA, 22 nt, Human
ugucagaacucuauugaugucc

SEQ ID NO: 589847 - RNA, 22 nt, Human
cagaaacagacaugacgcagua

SEQ ID NO: 589848 - RNA, 22 nt, Human
aaauucaguuuuaauaaucacu

SEQ ID NO: 589849 - RNA, 22 nt, Human
agagaugggcgggggcuucugc

SEQ ID NO: 589850 - RNA, 22 nt, Human
ggcagagccuucuggagcucgc

SEQ ID NO: 589851 - RNA, 22 nt, Human
acuuguucauugaguacauaug

SEQ ID NO: 589852 - RNA, 22 nt, Human
cuuggaauggggcagaaaaugg

SEQ ID NO: 589853 - RNA, 22 nt, Human
acccuggguauuucccaaacuu

SEQ ID NO: 589854 - RNA, 22 nt, Human
uuauuauagauuaugcaagauu

SEQ ID NO: 589855 - RNA, 22 nt, Human
aacucuuuguggacauuaaauu

SEQ ID NO: 589856 - RNA, 22 nt, Human
uugcagggauuaccuuauuuuu

SEQ ID NO: 589857 - RNA, 22 nt, Human
uuacuuuaagggugucuuauua

SEQ ID NO: 589858 - RNA, 22 nt, Human
uaggcucacauagcacuaagug

SEQ ID NO: 589859 - RNA, 22 nt, Human
cugcaggucucugugugcauuc

SEQ ID NO: 589860 - RNA, 18 nt, Human
gcugcccuagcuccccuc

SEQ ID NO: 589861 - RNA, 22 nt, Human
uacauucaacaugucacuaugu

SEQ ID NO: 589862 - RNA, 22 nt, Human
uugcucugauuagguggaaaca

SEQ ID NO: 589863 - RNA, 22 nt, Human
ugcuucuguucuuucaccuacg

SEQ ID NO: 589864 - RNA, 22 nt, Human
cugggccuagaggaagcugaca

SEQ ID NO: 589865 - RNA, 22 nt, Human
auauacuguagugguuuagagc

SEQ ID NO: 589866 - RNA, 22 nt, Human
aguuauuuaaaaugauuguccu

SEQ ID NO: 589867 - RNA, 22 nt, Human
ccagggcucaggcucccagugg

SEQ ID NO: 589868 - RNA, 22 nt, Human
aauggcagaggcaaagauggua

SEQ ID NO: 589869 - RNA, 21 nt, Human
acaggcucuggggaugcuggg

SEQ ID NO: 589870 - RNA, 18 nt, Human
uggagggcuugcugcagc

SEQ ID NO: 589871 - RNA, 22 nt, Human
agagccagcaacucuagcccug

SEQ ID NO: 589872 - RNA, 22 nt, Human
aaaguucacugaccagcacugg

SEQ ID NO: 589873 - RNA, 22 nt, Human
agagccugcuguguaagucaca

SEQ ID NO: 589874 - RNA, 22 nt, Human
auacacugguuuaugauauugu

SEQ ID NO: 589875 - RNA, 23 nt, Human
gacaaagcacuugaaauguguac

SEQ ID NO: 589876 - RNA, 22 nt, Human
gggaaggaaaguuauuagcaga

SEQ ID NO: 589877 - RNA, 22 nt, Human
ggcguggcagucaggaaaaggu

SEQ ID NO: 589878 - RNA, 21 nt, Human
ucgugcagcagcugaggcuug

SEQ ID NO: 589879 - RNA, 22 nt, Human
cuggucagggcucuuugggagc

SEQ ID NO: 589880 - RNA, 22 nt, Human
ccuucagagguguagauugcgu

SEQ ID NO: 589881 - RNA, 22 nt, Human
uguguuuuacaaauucucuuaa

SEQ ID NO: 589882 - RNA, 22 nt, Human
cuucucuuccuuugucaacuga

SEQ ID NO: 589883 - RNA, 21 nt, Human
cccagagccuagggagggcac

SEQ ID NO: 589884 - RNA, 22 nt, Human
ucuccugaugaugguacuggca

SEQ ID NO: 589885 - RNA, 23 nt, Human
gccaucacguucaaccaaagccu

SEQ ID NO: 589886 - RNA, 22 nt, Human
auauucaucguguagaaauacu

SEQ ID NO: 589887 - RNA, 22 nt, Human
cugcugucuaguaucuuaaaaa

SEQ ID NO: 589888 - RNA, 22 nt, Human
cugcugugaguuuggaggucua

SEQ ID NO: 589889 - RNA, 22 nt, Human
uaggggugaggccaggcaucag

SEQ ID NO: 589890 - RNA, 18 nt, Human
agcagcugucagaaugcc

SEQ ID NO: 589891 - RNA, 22 nt, Human
gguggcaguuacaggggcaaau

SEQ ID NO: 589892 - RNA, 22 nt, Human
aaagccaucaguaaaaugauuu

SEQ ID NO: 589893 - RNA, 22 nt, Human
gagcuuugucccuugggggcuc

SEQ ID NO: 589894 - RNA, 22 nt, Human
agcagcugauggggaaggaguu

SEQ ID NO: 589895 - RNA, 22 nt, Human
cagucuuugaugcauccuagcc

SEQ ID NO: 589896 - RNA, 22 nt, Human
aagaguuaagcaacagauacca

SEQ ID NO: 589897 - RNA, 22 nt, Human
aguggagaauaugcagaaagcc

SEQ ID NO: 589898 - RNA, 21 nt, Human
ugcaagaaucaggaagcugcc

SEQ ID NO: 589899 - RNA, 22 nt, Human
ucugaagauaugagcuuuauga

SEQ ID NO: 589900 - RNA, 22 nt, Human
cacugcccacuccuucguccaa

SEQ ID NO: 589901 - RNA, 22 nt, Human
acuguugaagugccagcuugau

SEQ ID NO: 589902 - RNA, 22 nt, Human
guacauucaugguuccaccagg

SEQ ID NO: 589903 - RNA, 22 nt, Human
ucuacagguggggccuggcaau

SEQ ID NO: 589904 - RNA, 22 nt, Human
uccuccccucagggcaacggau

SEQ ID NO: 589905 - RNA, 22 nt, Human
uuaugaaguuccuguuacagug

SEQ ID NO: 589906 - RNA, 22 nt, Human
uagaaagcuugggguguuuaaa

SEQ ID NO: 589907 - RNA, 22 nt, Human
uccacauuauguuucuccuuuc

SEQ ID NO: 589908 - RNA, 22 nt, Human
uucauucuuugaaucugaggua

SEQ ID NO: 589909 - RNA, 22 nt, Human
gggccccacuggggcugccugc

SEQ ID NO: 589910 - RNA, 22 nt, Human
ucagccuggcaggauggccugg

SEQ ID NO: 589911 - RNA, 22 nt, Human
cugauauucuauuuugcuugcu

SEQ ID NO: 589912 - RNA, 22 nt, Human
guggguggaucaccugagguca

SEQ ID NO: 589913 - RNA, 22 nt, Human
acaggguggggauggugagcuu

SEQ ID NO: 589914 - RNA, 22 nt, Human
caucagcugagggugagcagaa

SEQ ID NO: 589915 - RNA, 22 nt, Human
uuacaucagaaucacccaggaa

SEQ ID NO: 589916 - RNA, 22 nt, Human
uuccugguaguaagacaucugg

SEQ ID NO: 589917 - RNA, 22 nt, Human
gugugccaggaacuggcugcug

SEQ ID NO: 589918 - RNA, 22 nt, Human
ugauuuaaaagaaacauugucu

SEQ ID NO: 589919 - RNA, 22 nt, Human
ucccuccuggccgucaccgcug

SEQ ID NO: 589920 - RNA, 22 nt, Human
cugaauaauuuuauaguugcug

SEQ ID NO: 589921 - RNA, 22 nt, Human
aggcuggguaccugucauaugc

SEQ ID NO: 589922 - RNA, 22 nt, Human
ggagugaguggccuugucacug

SEQ ID NO: 589923 - RNA, 22 nt, Human
cacaguccugccagagggccuu

SEQ ID NO: 589924 - RNA, 22 nt, Human
acuguacacauucgucaagacu

SEQ ID NO: 589925 - RNA, 17 nt, Human
uccuggcucugccacug

SEQ ID NO: 589926 - RNA, 22 nt, Human
ucugucaucucuaaaauagaaa

SEQ ID NO: 589927 - RNA, 22 nt, Human
uaaggcagugagaagaaacagg

SEQ ID NO: 589928 - RNA, 23 nt, Human
aggagcccaaggagagguaacuu

SEQ ID NO: 589929 - RNA, 22 nt, Human
gcaaaauuaaacuuagcaucau

SEQ ID NO: 589930 - RNA, 19 nt, Human
cuggccaggccaggggccc

SEQ ID NO: 589931 - RNA, 22 nt, Human
cugccucagccuucugggugac

SEQ ID NO: 589932 - RNA, 22 nt, Human
acaggcuuuauuauugguuagu

SEQ ID NO: 589933 - RNA, 22 nt, Human
cagcugagcugccagacuacug

SEQ ID NO: 589934 - RNA, 22 nt, Human
gcugggaaguggcagagcugga

SEQ ID NO: 589935 - RNA, 22 nt, Human
ucaauuuaagguacuacuuugg

SEQ ID NO: 589936 - RNA, 22 nt, Human
aguguuucccaguaggaugaaa

SEQ ID NO: 589937 - RNA, 22 nt, Human
ggcuucugaaacuguauugaga

SEQ ID NO: 589938 - RNA, 22 nt, Human
ccagucccaucucugucgcuua

SEQ ID NO: 589939 - RNA, 22 nt, Human
ugugugaacauguuuucauuuc

SEQ ID NO: 589940 - RNA, 22 nt, Human
cucugccugugucgccaccaca

SEQ ID NO: 589941 - RNA, 22 nt, Human
aucugucuaugauauagucugu

SEQ ID NO: 589942 - RNA, 22 nt, Human
uaauaagcguagaagguauauc

SEQ ID NO: 589943 - RNA, 22 nt, Human
gcugagugagguccagagcuug

SEQ ID NO: 589944 - RNA, 22 nt, Human
uagaauugggccuaacuuccau

SEQ ID NO: 589945 - RNA, 22 nt, Human
acccaggcuagagugcaguggu

SEQ ID NO: 589946 - RNA, 22 nt, Human
caugcuuuuugacaacaagcug

SEQ ID NO: 589947 - RNA, 21 nt, Human
ccuauugaauauaggaagauu

SEQ ID NO: 589948 - RNA, 22 nt, Human
agguuucuucuuaggaauaugu

SEQ ID NO: 589949 - RNA, 22 nt, Human
agguaggguuaauggagauaua

SEQ ID NO: 589950 - RNA, 22 nt, Human
aaagaucauucucugguccaga

SEQ ID NO: 589951 - RNA, 22 nt, Human
uaugauaugcacuuuaucagaa

SEQ ID NO: 589952 - RNA, 22 nt, Human
uuggggagaaaugaaaugaagu

SEQ ID NO: 589953 - RNA, 22 nt, Human
ccuggcagcauugguagagauu

SEQ ID NO: 589954 - RNA, 22 nt, Human
agggccuggugaccuggguccu

SEQ ID NO: 589955 - RNA, 22 nt, Human
ucucccacugcaagcccaggcu

SEQ ID NO: 589956 - RNA, 22 nt, Human
auggcccaaaaccuccucccuc

SEQ ID NO: 589957 - RNA, 22 nt, Human
ucaggugggcguuccggugcgg

SEQ ID NO: 589958 - RNA, 22 nt, Human
agugaaauuuguuuagauaggu

SEQ ID NO: 589959 - RNA, 23 nt, Human
gggagccauggguggucauggag

SEQ ID NO: 589960 - RNA, 22 nt, Human
uauauucaaugauuaguaucag

SEQ ID NO: 589961 - RNA, 22 nt, Human
cagucacuggaauagcugagga

SEQ ID NO: 589962 - RNA, 22 nt, Human
cugccagguuggcgcucgcucu

SEQ ID NO: 589963 - RNA, 22 nt, Human
uaaauguaccuucugccuuacu

SEQ ID NO: 589964 - RNA, 22 nt, Human
ggcaggugugagaucgaggcca

SEQ ID NO: 589965 - RNA, 19 nt, Human
uccuccuuacuuccucuug

SEQ ID NO: 589966 - RNA, 22 nt, Human
uggcacagcccagagcucuuga

SEQ ID NO: 589967 - RNA, 22 nt, Human
uggcucugagacacaggcucuc

SEQ ID NO: 589968 - RNA, 22 nt, Human
ggagcuguuaaaugcagaauuu

SEQ ID NO: 589969 - RNA, 22 nt, Human
aauuaugguauguucaacaacu

SEQ ID NO: 589970 - RNA, 22 nt, Human
caagaauaaaauacauguugau

SEQ ID NO: 589971 - RNA, 22 nt, Human
gcuccuggcuccaggcagccaa

SEQ ID NO: 589972 - RNA, 22 nt, Human
cugcugugccucuuuucacgug

SEQ ID NO: 589973 - RNA, 22 nt, Human
uagggaaauauagauuuagggc

SEQ ID NO: 589974 - RNA, 22 nt, Human
gugcaugucggggugcauguca

SEQ ID NO: 589975 - RNA, 22 nt, Human
gccugucugcagggcugucauu

SEQ ID NO: 589976 - RNA, 22 nt, Human
cuacaccuugaucuaacauuuu

SEQ ID NO: 589977 - RNA, 19 nt, Human
cagcugccuuuucuuugca

SEQ ID NO: 589978 - RNA, 15 nt, Human
ccaggcugggugagc

SEQ ID NO: 589979 - RNA, 22 nt, Human
ucaaggagacagaaagcaaugg

SEQ ID NO: 589980 - RNA, 22 nt, Human
gggaaggagguggaccugcccc

SEQ ID NO: 589981 - RNA, 22 nt, Human
cccagaggugaaggagguggga

SEQ ID NO: 589982 - RNA, 21 nt, Human
uuucucauaaaauacucauua

SEQ ID NO: 589983 - RNA, 22 nt, Human
ucagcucuuaacccucuggccu

SEQ ID NO: 589984 - RNA, 22 nt, Human
ugguauaaaagaguaaacuaug

SEQ ID NO: 589985 - RNA, 22 nt, Human
aacuguucuucauuuucaguau

SEQ ID NO: 589986 - RNA, 22 nt, Human
ugccagagaguggcuggguguc

SEQ ID NO: 589987 - RNA, 22 nt, Human
ucccaggaauugaagccagugu

SEQ ID NO: 589988 - RNA, 22 nt, Human
agacagugauguaagcaggagu

SEQ ID NO: 589989 - RNA, 22 nt, Human
gggaggagugaagauucaccug

SEQ ID NO: 589990 - RNA, 23 nt, Human
uggucucacuugguaagaugaag

SEQ ID NO: 589991 - RNA, 22 nt, Human
uuuuugcaccaaccuaauagaa

SEQ ID NO: 589992 - RNA, 22 nt, Human
ccagugcaggugagcaccaggu

SEQ ID NO: 589993 - RNA, 22 nt, Human
agcagagaccugguuuuguuga

SEQ ID NO: 589994 - RNA, 22 nt, Human
ugggggcuagaacccagggauu

SEQ ID NO: 589995 - RNA, 22 nt, Human
ccagcauggcaccugagaugag

SEQ ID NO: 589996 - RNA, 22 nt, Human
gagauuggccuggcuugccaac

SEQ ID NO: 589997 - RNA, 22 nt, Human
uuaagacuaaaugaggucauaa

SEQ ID NO: 589998 - RNA, 22 nt, Human
acaguguuuaaaaaucagaucu

SEQ ID NO: 589999 - RNA, 22 nt, Human
uuucaagacucauugaguauug

SEQ ID NO: 590000 - RNA, 22 nt, Human
ugauuuuuggaucugagcugca

SEQ ID NO: 590001 - RNA, 22 nt, Human
cagagcuguuacuauucaugaa

SEQ ID NO: 590002 - RNA, 22 nt, Human
ugagccugcugucgcuggaccc

SEQ ID NO: 590003 - RNA, 22 nt, Human
uuauugccauccuggaaccuag

SEQ ID NO: 590004 - RNA, 22 nt, Human
gugcugagcacagcugcccagg

SEQ ID NO: 590005 - RNA, 22 nt, Human
uuucuuucucguaaacuuaguu

SEQ ID NO: 590006 - RNA, 22 nt, Human
cucauaaacaauucuuugaggu

SEQ ID NO: 590007 - RNA, 22 nt, Human
gaaaaguucaucauauauucag

SEQ ID NO: 590008 - RNA, 22 nt, Human
cacggguggaaucagggacucc

SEQ ID NO: 590009 - RNA, 22 nt, Human
aguugaauuaugagugucuuug

SEQ ID NO: 590010 - RNA, 21 nt, Human
ccugucuuggacugaggcacc

SEQ ID NO: 590011 - RNA, 22 nt, Human
gccuucagcccugacuggccag

SEQ ID NO: 590012 - RNA, 22 nt, Human
uacuuuguccauuugcaggcag

SEQ ID NO: 590013 - RNA, 22 nt, Human
auacauuagcucauaugauuaa

SEQ ID NO: 590014 - RNA, 17 nt, Human
ccagagcuacugagacu

SEQ ID NO: 590015 - RNA, 22 nt, Human
uuccuaaucacgaacauuauuu

SEQ ID NO: 590016 - RNA, 22 nt, Human
uccucccuaaauccuagacugu

SEQ ID NO: 590017 - RNA, 22 nt, Human
aggccuuaagaacaaaacuauu

SEQ ID NO: 590018 - RNA, 22 nt, Human
ccuggggagagaaagcccagcc

SEQ ID NO: 590019 - RNA, 22 nt, Human
auuuccuaacagaggcaacagu

SEQ ID NO: 590020 - RNA, 22 nt, Human
uugcaagacacuuggaagcaca

SEQ ID NO: 590021 - RNA, 22 nt, Human
uucucugggacaggaacaguuu

SEQ ID NO: 590022 - RNA, 22 nt, Human
agauucaugggucuaaccagug

SEQ ID NO: 590023 - RNA, 22 nt, Human
uagcaaaauguggauguaguug

SEQ ID NO: 590024 - RNA, 22 nt, Human
ugguggcuguugcagaacugag

SEQ ID NO: 590025 - RNA, 21 nt, Human
ccuucucuugcuucagcuuca

SEQ ID NO: 590026 - RNA, 22 nt, Human
auauacuuggagacuaucauug

SEQ ID NO: 590027 - RNA, 22 nt, Human
auguaaguauucaaaauauuuc

SEQ ID NO: 590028 - RNA, 22 nt, Human
cacccagccuucacacaggagu

SEQ ID NO: 590029 - RNA, 22 nt, Human
ggcccagcacagugcuuggggg

SEQ ID NO: 590030 - RNA, 22 nt, Human
ccuggccagcgccggcugcucg

SEQ ID NO: 590031 - RNA, 22 nt, Human
uuauccaacaugacuuaugucc

SEQ ID NO: 590032 - RNA, 22 nt, Human
gugugccucccauuagggugua

SEQ ID NO: 590033 - RNA, 22 nt, Human
uguauugaauuguguuauaucu

SEQ ID NO: 590034 - RNA, 22 nt, Human
cuugcagaggcuguuccagaug

SEQ ID NO: 590035 - RNA, 21 nt, Human
ccagggaagaaaugagggcag

SEQ ID NO: 590036 - RNA, 22 nt, Human
aacacagggacucccaggagaa

SEQ ID NO: 590037 - RNA, 22 nt, Human
cagagccaucccagccuguggu

SEQ ID NO: 590038 - RNA, 22 nt, Human
aagggagacccaccguccugga

SEQ ID NO: 590039 - RNA, 22 nt, Human
uagcuuuguauuaucagcauug

SEQ ID NO: 590040 - RNA, 22 nt, Human
uguguacauauacacaaauaca

SEQ ID NO: 590041 - RNA, 22 nt, Human
auuuuagcaaaugcaagaugga

SEQ ID NO: 590042 - RNA, 22 nt, Human
gcugggcuucaccuccagaguu

SEQ ID NO: 590043 - RNA, 22 nt, Human
ugguaggaaugauuacgacuuu

SEQ ID NO: 590044 - RNA, 22 nt, Human
ucuccaggagaaauaugaagga

SEQ ID NO: 590045 - RNA, 22 nt, Human
gcgcgccucugcccgguguucc

SEQ ID NO: 590046 - RNA, 22 nt, Human
uacaaaugaaccaacuuugaug

SEQ ID NO: 590047 - RNA, 22 nt, Human
uauacaaugaguacauucuggg

SEQ ID NO: 590048 - RNA, 22 nt, Human
agcugagguuaguauaaaugug

SEQ ID NO: 590049 - RNA, 22 nt, Human
uuguaugaucaaaagaaaugua

SEQ ID NO: 590050 - RNA, 22 nt, Human
agguaaggggcucccaaguacc

SEQ ID NO: 590051 - RNA, 22 nt, Human
gauggguggguucugugagagg

SEQ ID NO: 590052 - RNA, 22 nt, Human
gcugucagaaggugaaggguaa

SEQ ID NO: 590053 - RNA, 22 nt, Human
caaaauucugcauuucuaauaa

SEQ ID NO: 590054 - RNA, 22 nt, Human
uucucuggguuaggggaacuau

SEQ ID NO: 590055 - RNA, 22 nt, Human
gcccagcacauugcugaggacc

SEQ ID NO: 590056 - RNA, 22 nt, Human
aaauuguggcgucuguaagagu

SEQ ID NO: 590057 - RNA, 22 nt, Human
ucagggaaauagcagggcugaa

SEQ ID NO: 590058 - RNA, 22 nt, Human
aauuagcagcauauucugcgau

SEQ ID NO: 590059 - RNA, 22 nt, Human
ucuuccaaaugcagcuaaagcu

SEQ ID NO: 590060 - RNA, 22 nt, Human
gauacauugaggguggaggacc

SEQ ID NO: 590061 - RNA, 22 nt, Human
agagccagcauuugacacuggc

SEQ ID NO: 590062 - RNA, 22 nt, Human
uagacacaucuucauccacaau

SEQ ID NO: 590063 - RNA, 20 nt, Human
uccagggcaaacucaucacc

SEQ ID NO: 590064 - RNA, 21 nt, Human
agcaggugcuguuggaggaaa

SEQ ID NO: 590065 - RNA, 22 nt, Human
uggccuggcucacagugagauu

SEQ ID NO: 590066 - RNA, 22 nt, Human
aggcauggauggauccagggcu

SEQ ID NO: 590067 - RNA, 22 nt, Human
ucuggcuuggcuggcaucucug

SEQ ID NO: 590068 - RNA, 17 nt, Human
ugcauuguaggcuagcc

SEQ ID NO: 590069 - RNA, 22 nt, Human
uuuuguguugccauguuaagca

SEQ ID NO: 590070 - RNA, 22 nt, Human
uuuguaugaacugguauguagg

SEQ ID NO: 590071 - RNA, 22 nt, Human
agauaacuuuuggguauucaug

SEQ ID NO: 590072 - RNA, 22 nt, Human
agaugcugugucuguucccuug

SEQ ID NO: 590073 - RNA, 22 nt, Human
gcuuccuggaacaacuguugcu

SEQ ID NO: 590074 - RNA, 22 nt, Human
uucauacuguguuuccaaguuu

SEQ ID NO: 590075 - RNA, 22 nt, Human
ugcaaaaacugcaauugcuuuu

SEQ ID NO: 590076 - RNA, 22 nt, Human
cugcugagaaaagacugaggga

SEQ ID NO: 590077 - RNA, 22 nt, Human
gagaaaugagugauucacuuuu

SEQ ID NO: 590078 - RNA, 21 nt, Human
cuucuuggggagcagcuagac

SEQ ID NO: 590079 - RNA, 22 nt, Human
ugggcuagcagggaagagagac

SEQ ID NO: 590080 - RNA, 22 nt, Human
agucacagggggccccugcaac

SEQ ID NO: 590081 - RNA, 22 nt, Human
aguuauuuuggaaaaugaguca

SEQ ID NO: 590082 - RNA, 19 nt, Human
acagccuguugguggggcu

SEQ ID NO: 590083 - RNA, 22 nt, Human
uuacagguuaagugacacuuaa

SEQ ID NO: 590084 - RNA, 19 nt, Human
cucucuggcggugucugcg

SEQ ID NO: 590085 - RNA, 22 nt, Human
accagcccucaggucagauacu

SEQ ID NO: 590086 - RNA, 22 nt, Human
aaaugcaccuugcugugagacu

SEQ ID NO: 590087 - RNA, 23 nt, Human
aggugccaacugagagcugagag

SEQ ID NO: 590088 - RNA, 22 nt, Human
augcauauaauggccagaacaa

SEQ ID NO: 590089 - RNA, 22 nt, Human
acuguuggcuucugguagugac

SEQ ID NO: 590090 - RNA, 22 nt, Human
uucauucagugagacuaggacg

SEQ ID NO: 590091 - RNA, 23 nt, Human
ugagccuguuaauacuggcucug

SEQ ID NO: 590092 - RNA, 22 nt, Human
gggcugagagcuggaaucugag

SEQ ID NO: 590093 - RNA, 17 nt, Human
acaggcagaucaccuga

SEQ ID NO: 590094 - RNA, 22 nt, Human
cauguaaaccauugugagcauc

SEQ ID NO: 590095 - RNA, 22 nt, Human
cuugaaagaagggucuuuuaau

SEQ ID NO: 590096 - RNA, 20 nt, Human
agagauuuuaguagccacag

SEQ ID NO: 590097 - RNA, 20 nt, Human
uuuuauauguaggguauaug

SEQ ID NO: 590098 - RNA, 22 nt, Human
agugcuguuagguuaauauagu

SEQ ID NO: 590099 - RNA, 22 nt, Human
aauggcugccagggcaggaggu

SEQ ID NO: 590100 - RNA, 22 nt, Human
auguuuuaaauauguguguaaa

SEQ ID NO: 590101 - RNA, 22 nt, Human
caggcaggagccagggauucca

SEQ ID NO: 590102 - RNA, 22 nt, Human
uccuggaggaauaaguuuucca

SEQ ID NO: 590103 - RNA, 23 nt, Human
cccugcaucugucccucaccagu

SEQ ID NO: 590104 - RNA, 19 nt, Human
caguuacagcagcuaagac

SEQ ID NO: 590105 - RNA, 22 nt, Human
agcagcaaggaacagaauggac

SEQ ID NO: 590106 - RNA, 22 nt, Human
gggaaggcagugucugguugaa

SEQ ID NO: 590107 - RNA, 22 nt, Human
ccagggcuuugccaaaguccag

SEQ ID NO: 590108 - RNA, 22 nt, Human
auacagaugcuugcucgugacu

SEQ ID NO: 590109 - RNA, 22 nt, Human
caggcuuuuucugcuguccucu

SEQ ID NO: 590110 - RNA, 22 nt, Human
aguagacagacagaacacagcc

SEQ ID NO: 590111 - RNA, 22 nt, Human
uugguuaaaaucaaauuaauca

SEQ ID NO: 590112 - RNA, 22 nt, Human
ucagugaaaugcauauucuucg

SEQ ID NO: 590113 - RNA, 22 nt, Human
uuuguuaaauauuuauugagug

SEQ ID NO: 590114 - RNA, 22 nt, Human
ugccaggggaccuagggauguc

SEQ ID NO: 590115 - RNA, 22 nt, Human
agugagcauccagagagguggg

SEQ ID NO: 590116 - RNA, 22 nt, Human
acagagcaauucuuggguguuu

SEQ ID NO: 590117 - RNA, 22 nt, Human
ucuuggcugucuuugaaguuag

SEQ ID NO: 590118 - RNA, 22 nt, Human
cagggcuguggcuuugugcugu

SEQ ID NO: 590119 - RNA, 22 nt, Human
cacagcagagggagccauugaa

SEQ ID NO: 590120 - RNA, 22 nt, Human
ucaguguaaguuauguagaugu

SEQ ID NO: 590121 - RNA, 22 nt, Human
acagccagaggagccaggcugg

SEQ ID NO: 590122 - RNA, 22 nt, Human
gggugcaggcagcccaggcagg

SEQ ID NO: 590123 - RNA, 22 nt, Human
acacaguaggccaccaugucau

SEQ ID NO: 590124 - RNA, 22 nt, Human
auguagaaaguuauugucacug

SEQ ID NO: 590125 - RNA, 22 nt, Human
gcccuuaggcaagcagaagccc

SEQ ID NO: 590126 - RNA, 22 nt, Human
ggcugaguucucuugcugaauc

SEQ ID NO: 590127 - RNA, 22 nt, Human
aucucuaauuuaaaaaguaaca

SEQ ID NO: 590128 - RNA, 22 nt, Human
acauuuaaccuuugaggaacug

SEQ ID NO: 590129 - RNA, 21 nt, Human
agcugccuccacuucugaggc

SEQ ID NO: 590130 - RNA, 22 nt, Human
ucuaugucacucuuuggaaaga

SEQ ID NO: 590131 - RNA, 18 nt, Human
cccaggcuuugugggucu

SEQ ID NO: 590132 - RNA, 22 nt, Human
cagaccagaaggaagccgacaa

SEQ ID NO: 590133 - RNA, 22 nt, Human
uggcucugccacuaacuuggua

SEQ ID NO: 590134 - RNA, 22 nt, Human
uuuaauuuguauuucuagaggg

SEQ ID NO: 590135 - RNA, 22 nt, Human
ugccuaacuccaccaggcaggu

SEQ ID NO: 590136 - RNA, 22 nt, Human
gcugagccuagcugucuccugu

SEQ ID NO: 590137 - RNA, 22 nt, Human
uuccucaguuagugccugaggc

SEQ ID NO: 590138 - RNA, 22 nt, Human
aaaguucaugguguuauagaaa

SEQ ID NO: 590139 - RNA, 22 nt, Human
uucagaaugcuauuucugaaau

SEQ ID NO: 590140 - RNA, 22 nt, Human
uauuuauuggacaguguugcug

SEQ ID NO: 590141 - RNA, 22 nt, Human
uccuugaaugaagagaggugac

SEQ ID NO: 590142 - RNA, 22 nt, Human
cucacagauacggcuauuccug

SEQ ID NO: 590143 - RNA, 22 nt, Human
aggauuugaaccuaggcaauca

SEQ ID NO: 590144 - RNA, 22 nt, Human
ggagaugccagaauugcaaauu

SEQ ID NO: 590145 - RNA, 22 nt, Human
gucugucuguuguugagaagca

SEQ ID NO: 590146 - RNA, 22 nt, Human
caaaugcuaacuucuuuccaaa

SEQ ID NO: 590147 - RNA, 22 nt, Human
cucuccuccaggaacucacagu

SEQ ID NO: 590148 - RNA, 21 nt, Human
aacauugauucauuuggcuau

SEQ ID NO: 590149 - RNA, 22 nt, Human
gugcaggaucucagaacaagug

SEQ ID NO: 590150 - RNA, 22 nt, Human
ccugaggaccagcacccaucug

SEQ ID NO: 590151 - RNA, 22 nt, Human
acacaucuauauugcaucugca

SEQ ID NO: 590152 - RNA, 22 nt, Human
uuuacaauugguuuucucuaau

SEQ ID NO: 590153 - RNA, 22 nt, Human
gacacuguuauggugagguaag

SEQ ID NO: 590154 - RNA, 22 nt, Human
gagguaggagguagguauugug

SEQ ID NO: 590155 - RNA, 22 nt, Human
caggucagaggcgcagccccca

SEQ ID NO: 590156 - RNA, 18 nt, Human
gauucugauucuggaggc

SEQ ID NO: 590157 - RNA, 22 nt, Human
caaguuuguguucuaucauucu

SEQ ID NO: 590158 - RNA, 22 nt, Human
cagaagaguagcugaacaaguu

SEQ ID NO: 590159 - RNA, 22 nt, Human
gcucucugccauaugaggauac

SEQ ID NO: 590160 - RNA, 22 nt, Human
uagcuccuccccauccagguuc

SEQ ID NO: 590161 - RNA, 22 nt, Human
auuucaacagaguuugaaggca

SEQ ID NO: 590162 - RNA, 22 nt, Human
auaaaaucagaguuggauugga

SEQ ID NO: 590163 - RNA, 22 nt, Human
aaguucccgaggaccacaguug

SEQ ID NO: 590164 - RNA, 22 nt, Human
aagcagaaguugaucuaccaua

SEQ ID NO: 590165 - RNA, 22 nt, Human
agcagagaggagguggcccugu

SEQ ID NO: 590166 - RNA, 22 nt, Human
cugcacagaggucggucugcca

SEQ ID NO: 590167 - RNA, 22 nt, Human
uccagggagauggcagaggcug

SEQ ID NO: 590168 - RNA, 19 nt, Human
ucguggggaggugggcagc

SEQ ID NO: 590169 - RNA, 22 nt, Human
uggccagaacucagacaugugg

SEQ ID NO: 590170 - RNA, 22 nt, Human
ugaaggugaaugucuaugggga

SEQ ID NO: 590171 - RNA, 22 nt, Human
gaguggggcguggauccagcgu

SEQ ID NO: 590172 - RNA, 22 nt, Human
auuuguaucuucuaauauuauc

SEQ ID NO: 590173 - RNA, 22 nt, Human
ugaagguaaaggaaggaggcuu

SEQ ID NO: 590174 - RNA, 22 nt, Human
caagaauuguacaaacugggug

SEQ ID NO: 590175 - RNA, 22 nt, Human
uuaacaaaaauaucaggcauca

SEQ ID NO: 590176 - RNA, 22 nt, Human
gaguccagcucauugucuggga

SEQ ID NO: 590177 - RNA, 22 nt, Human
ucugccugccgagaacaccuac

SEQ ID NO: 590178 - RNA, 22 nt, Human
augcaguauaaaucauuucugg

SEQ ID NO: 590179 - RNA, 22 nt, Human
ugucauuuucagcuuaugcuuc

SEQ ID NO: 590180 - RNA, 22 nt, Human
gguggcaggcuggcauuggcaa

SEQ ID NO: 590181 - RNA, 22 nt, Human
caggcugucugaauggaggccc

SEQ ID NO: 590182 - RNA, 22 nt, Human
uaguuacacauggguagggaau

SEQ ID NO: 590183 - RNA, 22 nt, Human
aggcuucaggaagucuccuggg

SEQ ID NO: 590184 - RNA, 22 nt, Human
uuuaaacuaacaguacacguug

SEQ ID NO: 590185 - RNA, 22 nt, Human
uccaggaguuugagacugcagu

SEQ ID NO: 590186 - RNA, 22 nt, Human
cuggcucacuagcccugcccug

SEQ ID NO: 590187 - RNA, 22 nt, Human
aaggcacuagcaagcugccugg

SEQ ID NO: 590188 - RNA, 22 nt, Human
auuccuugcacaucagauaguu

SEQ ID NO: 590189 - RNA, 21 nt, Human
agagaagggauuccaggcccu

SEQ ID NO: 590190 - RNA, 20 nt, Human
cccaggcagagcuagcggca

SEQ ID NO: 590191 - RNA, 22 nt, Human
uggcagucuggguuggcaguua

SEQ ID NO: 590192 - RNA, 22 nt, Human
ggaggccaccugaccugcuguu

SEQ ID NO: 590193 - RNA, 22 nt, Human
ucugccagcaccaugauccuuc

SEQ ID NO: 590194 - RNA, 18 nt, Human
uggagcugagggcaaugc

SEQ ID NO: 590195 - RNA, 22 nt, Human
ggggcugagucagugggaagag

SEQ ID NO: 590196 - RNA, 22 nt, Human
uaaacagccuccccuuucacuc

SEQ ID NO: 590197 - RNA, 22 nt, Human
uggcugagugauauuugcaaag

SEQ ID NO: 590198 - RNA, 22 nt, Human
ccuccuggugggcgcuucuggc

SEQ ID NO: 590199 - RNA, 22 nt, Human
cugugcccuuucgcugcacugu

SEQ ID NO: 590200 - RNA, 22 nt, Human
ggcugggagccccacagaguca

SEQ ID NO: 590201 - RNA, 22 nt, Human
uucauucacccaggaaacaucu

SEQ ID NO: 590202 - RNA, 22 nt, Human
acaggagaaaucuggucaaaag

SEQ ID NO: 590203 - RNA, 22 nt, Human
gcagagaguugggcugcgccag

SEQ ID NO: 590204 - RNA, 22 nt, Human
aaucuguuuucugccucuauga

SEQ ID NO: 590205 - RNA, 22 nt, Human
aaaguuucccaaaguaauguga

SEQ ID NO: 590206 - RNA, 22 nt, Human
agggaggucuggcugcccugag

SEQ ID NO: 590207 - RNA, 22 nt, Human
agcucuggagccggaggauuuc

SEQ ID NO: 590208 - RNA, 22 nt, Human
ucauucagagagaauguuccag

SEQ ID NO: 590209 - RNA, 22 nt, Human
gugcugaggauacagcugugaa

SEQ ID NO: 590210 - RNA, 22 nt, Human
agcaggcauagaguagcacuca

SEQ ID NO: 590211 - RNA, 22 nt, Human
acacagagcaaaucaugacaga

SEQ ID NO: 590212 - RNA, 22 nt, Human
uucugaugauggcggcuggagc

SEQ ID NO: 590213 - RNA, 22 nt, Human
cagcagcucagucucucaguag

SEQ ID NO: 590214 - RNA, 21 nt, Human
uuaaugcuaugcagaaaaucu

SEQ ID NO: 590215 - RNA, 22 nt, Human
gcuggucacucugggagcugcu

SEQ ID NO: 590216 - RNA, 19 nt, Human
gcgaggaagucacuguggu

SEQ ID NO: 590217 - RNA, 19 nt, Human
ucucagaauuggcaaucau

SEQ ID NO: 590218 - RNA, 22 nt, Human
ucucacacuauuuauucugcuu

SEQ ID NO: 590219 - RNA, 22 nt, Human
aagaauucacugguagagucaa

SEQ ID NO: 590220 - RNA, 22 nt, Human
gcagggcugacucagccacccu

SEQ ID NO: 590221 - RNA, 22 nt, Human
cugggucuggugucaggcgacg

SEQ ID NO: 590222 - RNA, 22 nt, Human
gugcucuccuggcugcccugac

SEQ ID NO: 590223 - RNA, 20 nt, Human
agaagcugauacugauggaa

SEQ ID NO: 590224 - RNA, 22 nt, Human
uauuucuuuucgugacuuauug

SEQ ID NO: 590225 - RNA, 22 nt, Human
caacagaagguguacuacugaa

SEQ ID NO: 590226 - RNA, 22 nt, Human
agccugggaauuuagaguucgg

SEQ ID NO: 590227 - RNA, 22 nt, Human
cuucacagucacccugcugugu

SEQ ID NO: 590228 - RNA, 22 nt, Human
uauugacaggugccugcagaca

SEQ ID NO: 590229 - RNA, 22 nt, Human
cugagcugcggcaggcaccugg

SEQ ID NO: 590230 - RNA, 20 nt, Human
aauuuuaucuccauccuuug

SEQ ID NO: 590231 - RNA, 22 nt, Human
ggcaggugcuugucgaaggccu

SEQ ID NO: 590232 - RNA, 22 nt, Human
uccagcucaaauucagcuucca

SEQ ID NO: 590233 - RNA, 22 nt, Human
ccagcucaucucagugaaaugc

SEQ ID NO: 590234 - RNA, 22 nt, Human
ggcuggaagguagaagaugagg

SEQ ID NO: 590235 - RNA, 19 nt, Human
ggccauggcgggggucaca

SEQ ID NO: 590236 - RNA, 22 nt, Human
uucugcuuuuauugccagaguu

SEQ ID NO: 590237 - RNA, 22 nt, Human
cugucugccaauaaucuauggc

SEQ ID NO: 590238 - RNA, 21 nt, Human
ccugagggugguugugaagau

SEQ ID NO: 590239 - RNA, 22 nt, Human
aggugggcacagauggagaagu

SEQ ID NO: 590240 - RNA, 22 nt, Human
augaagacuauuugaaggugcc

SEQ ID NO: 590241 - RNA, 22 nt, Human
auuaugcuuaggaaaauaugaa

SEQ ID NO: 590242 - RNA, 22 nt, Human
uugguaaauacuauaaucaaau

SEQ ID NO: 590243 - RNA, 22 nt, Human
gaguuaauucgaauauucuagc

SEQ ID NO: 590244 - RNA, 22 nt, Human
cugugcccuuuguccucgucuc

SEQ ID NO: 590245 - RNA, 22 nt, Human
ggccuggaaggacagcgugaug

SEQ ID NO: 590246 - RNA, 22 nt, Human
ccugugguuuacucuguggcua

SEQ ID NO: 590247 - RNA, 22 nt, Human
aaauuccauuaggaaacuucca

SEQ ID NO: 590248 - RNA, 22 nt, Human
ugcauuucacagacugagaaau

SEQ ID NO: 590249 - RNA, 22 nt, Human
aggcggugcuguggacagugac

SEQ ID NO: 590250 - RNA, 22 nt, Human
ugggccacgucaucucccacaa

SEQ ID NO: 590251 - RNA, 22 nt, Human
cauuuuaagaugaccugguuuc

SEQ ID NO: 590252 - RNA, 22 nt, Human
gcaagauuccgcucuagagccu

SEQ ID NO: 590253 - RNA, 22 nt, Human
auauucauugaacaccuacuac

SEQ ID NO: 590254 - RNA, 22 nt, Human
gcauggaauucccuuaugggcc

SEQ ID NO: 590255 - RNA, 22 nt, Human
aggaucauguggucauuccuga

SEQ ID NO: 590256 - RNA, 22 nt, Human
uuucuagugguuaagauuuaca

SEQ ID NO: 590257 - RNA, 22 nt, Human
aaucaagagcugacuauauuuu

SEQ ID NO: 590258 - RNA, 22 nt, Human
ugcugccuccuuccugccagga

SEQ ID NO: 590259 - RNA, 22 nt, Human
cuuccaguaguaucauucucau

SEQ ID NO: 590260 - RNA, 22 nt, Human
uccaucaggcucgugggcucuc

SEQ ID NO: 590261 - RNA, 22 nt, Human
aucuggaagccagauacucagu

SEQ ID NO: 590262 - RNA, 22 nt, Human
agucagauuuagauguagcaag

SEQ ID NO: 590263 - RNA, 22 nt, Human
ggggagcaggcugggcugucug

SEQ ID NO: 590264 - RNA, 22 nt, Human
uuagaaucuuuagagucucacu

SEQ ID NO: 590265 - RNA, 22 nt, Human
aagcagcuuuugaagagugagg

SEQ ID NO: 590266 - RNA, 22 nt, Human
ugcaggaggauuuuguggagcu

SEQ ID NO: 590267 - RNA, 22 nt, Human
cagugagguggauggauggccu

SEQ ID NO: 590268 - RNA, 22 nt, Human
cccugugggaacuccugaguug

SEQ ID NO: 590269 - RNA, 22 nt, Human
uguguguuaucuuaguucaucu

SEQ ID NO: 590270 - RNA, 22 nt, Human
aaacacaagaggcaggguacag

SEQ ID NO: 590271 - RNA, 22 nt, Human
uucuccaguuucucccuucagu

SEQ ID NO: 590272 - RNA, 22 nt, Human
gcaggcugaguauuacccuagu

SEQ ID NO: 590273 - RNA, 22 nt, Human
gaaggaggugucaguuggacug

SEQ ID NO: 590274 - RNA, 22 nt, Human
ggaaggaaauuggggcaguugu

SEQ ID NO: 590275 - RNA, 22 nt, Human
uaauaucuacuucauagaguuu

SEQ ID NO: 590276 - RNA, 22 nt, Human
agcugccauccgaggugucaga

SEQ ID NO: 590277 - RNA, 22 nt, Human
uucuaccagcuacucacugaua

SEQ ID NO: 590278 - RNA, 22 nt, Human
uauucucagugcuauaaguaga

SEQ ID NO: 590279 - RNA, 23 nt, Human
auauuuccagguuagugagguaa

SEQ ID NO: 590280 - RNA, 21 nt, Human
acuggaagugggucaggaagu

SEQ ID NO: 590281 - RNA, 22 nt, Human
acuuucugccuuacaggagucc

SEQ ID NO: 590282 - RNA, 22 nt, Human
gcugucaccaaagcaggcacug

SEQ ID NO: 590283 - RNA, 22 nt, Human
cuuggcaguuucggaaggauga

SEQ ID NO: 590284 - RNA, 19 nt, Human
agaggcugucaccuguagc

SEQ ID NO: 590285 - RNA, 22 nt, Human
cauuggcacaaguagcuucauc

SEQ ID NO: 590286 - RNA, 22 nt, Human
guacauauggcacaugcuauuu

SEQ ID NO: 590287 - RNA, 22 nt, Human
auacacuugaccuggagugaag

SEQ ID NO: 590288 - RNA, 22 nt, Human
uaaagccacgcuggaaaucagg

SEQ ID NO: 590289 - RNA, 22 nt, Human
uccuucagaggauaaggaagaa

SEQ ID NO: 590290 - RNA, 22 nt, Human
auucucagcuuucaaauagaca

SEQ ID NO: 590291 - RNA, 22 nt, Human
agagaacaugacguaauagugg

SEQ ID NO: 590292 - RNA, 22 nt, Human
uggucagguaccucuggcuguc

SEQ ID NO: 590293 - RNA, 22 nt, Human
uaggcuggaggaagcagugccu

SEQ ID NO: 590294 - RNA, 22 nt, Human
acugcccuuguccuggcacacc

SEQ ID NO: 590295 - RNA, 22 nt, Human
ggccucugguucguggugaccu

SEQ ID NO: 590296 - RNA, 20 nt, Human
ccaauguuuacagauuacuu

SEQ ID NO: 590297 - RNA, 22 nt, Human
uccagcagccugacuucccucu

SEQ ID NO: 590298 - RNA, 22 nt, Human
gcagcagcaggcgcucggccgu

SEQ ID NO: 590299 - RNA, 22 nt, Human
uaguagcaggggguaccucuca

SEQ ID NO: 590300 - RNA, 22 nt, Human
cuccuggcaggcugagugaaau

SEQ ID NO: 590301 - RNA, 22 nt, Human
uucccucccuggcugccauuuc

SEQ ID NO: 590302 - RNA, 22 nt, Human
cuggccaggagguaaccagaug

SEQ ID NO: 590303 - RNA, 18 nt, Human
uucacagauccacaggaa

SEQ ID NO: 590304 - RNA, 22 nt, Human
caggcugccgugggguccaggc

SEQ ID NO: 590305 - RNA, 22 nt, Human
uugaagauucuuuuuguuagua

SEQ ID NO: 590306 - RNA, 22 nt, Human
agcuuacaccccccaagauucu

SEQ ID NO: 590307 - RNA, 22 nt, Human
acugaucuguuuucagauucug

SEQ ID NO: 590308 - RNA, 22 nt, Human
agaggcugucccuugcuauucc

SEQ ID NO: 590309 - RNA, 22 nt, Human
aggcucuguuauucuagagggc

SEQ ID NO: 590310 - RNA, 22 nt, Human
uccaucugcauuugguuucugu

SEQ ID NO: 590311 - RNA, 22 nt, Human
aggaauguggcaaucuucaagu

SEQ ID NO: 590312 - RNA, 22 nt, Human
ugguagggacacuaugcagaaa

SEQ ID NO: 590313 - RNA, 22 nt, Human
acagcacuuggguuuuccuguu

SEQ ID NO: 590314 - RNA, 22 nt, Human
uuagaguuaggauuugucuuua

SEQ ID NO: 590315 - RNA, 22 nt, Human
ugccauuucuuucaauauucuu

SEQ ID NO: 590316 - RNA, 22 nt, Human
cucccagguuccgacgccucuu

SEQ ID NO: 590317 - RNA, 22 nt, Human
gccaaagcuggagguggaggug

SEQ ID NO: 590318 - RNA, 22 nt, Human
aaagguuuuauucugagcucug

SEQ ID NO: 590319 - RNA, 22 nt, Human
aaaaggaggcaaacagccuaga

SEQ ID NO: 590320 - RNA, 23 nt, Human
ucucauuucccuugaucuaucuu

SEQ ID NO: 590321 - RNA, 20 nt, Human
ccucucugcccugcaaggcc

SEQ ID NO: 590322 - RNA, 22 nt, Human
gacuggaaagccuguccucaga

SEQ ID NO: 590323 - RNA, 22 nt, Human
aagagcuggagcugcuacagga

SEQ ID NO: 590324 - RNA, 22 nt, Human
ugaagcagauggucuggucauu

SEQ ID NO: 590325 - RNA, 21 nt, Human
uucugcugugccaugccucug

SEQ ID NO: 590326 - RNA, 18 nt, Human
acauugauggcuuuaagc

SEQ ID NO: 590327 - RNA, 22 nt, Human
agcuucuucugauuugucaguc

SEQ ID NO: 590328 - RNA, 22 nt, Human
aaguaacuuauuugcaaacagg

SEQ ID NO: 590329 - RNA, 22 nt, Human
agggccaguaaauguuuccuca

SEQ ID NO: 590330 - RNA, 22 nt, Human
aaggcugagagucacaguccua

SEQ ID NO: 590331 - RNA, 22 nt, Human
uagcuccuggcugcagggccuc

SEQ ID NO: 590332 - RNA, 22 nt, Human
uaaaaguuuuaguuguacauaa

SEQ ID NO: 590333 - RNA, 22 nt, Human
cacuguacuggguugaaggacg

SEQ ID NO: 590334 - RNA, 23 nt, Human
aaagaccuaggaugagggagacg

SEQ ID NO: 590335 - RNA, 22 nt, Human
ucagaaucucuggaggcuuggc

SEQ ID NO: 590336 - RNA, 22 nt, Human
aagcuuccugcaugggacugcu

SEQ ID NO: 590337 - RNA, 22 nt, Human
acugugugggccgcucacuggg

SEQ ID NO: 590338 - RNA, 22 nt, Human
aauguuuuguaugccucugagc

SEQ ID NO: 590339 - RNA, 22 nt, Human
uauuuucaccuucucuggauau

SEQ ID NO: 590340 - RNA, 22 nt, Human
ccagcccuugcugaaggguggc

SEQ ID NO: 590341 - RNA, 22 nt, Human
ucagccagagggggcaaaggaa

SEQ ID NO: 590342 - RNA, 22 nt, Human
aaaugugcucauuuauaaaagu

SEQ ID NO: 590343 - RNA, 22 nt, Human
uacacuggauuagcuguccuac

SEQ ID NO: 590344 - RNA, 22 nt, Human
uaggccacgaaggagaugauag

SEQ ID NO: 590345 - RNA, 22 nt, Human
aggaccagaggccagagucagc

SEQ ID NO: 590346 - RNA, 22 nt, Human
acuuaaaaccagacagcgucau

SEQ ID NO: 590347 - RNA, 19 nt, Human
agcacagagagucuauagc

SEQ ID NO: 590348 - RNA, 22 nt, Human
ucagguguuagaagaaauuuca

SEQ ID NO: 590349 - RNA, 22 nt, Human
acuuuauuuccuauugcaucca

SEQ ID NO: 590350 - RNA, 22 nt, Human
gggcagcauucugugggcaggu

SEQ ID NO: 590351 - RNA, 20 nt, Human
augucugaaguaauccauuu

SEQ ID NO: 590352 - RNA, 22 nt, Human
cgccaggcuugguagcucaugc

SEQ ID NO: 590353 - RNA, 22 nt, Human
ggcaguguuccagaccuucacc

SEQ ID NO: 590354 - RNA, 21 nt, Human
ugggaugggucugggaccagc

SEQ ID NO: 590355 - RNA, 22 nt, Human
uaauuucaauagcuugcauaau

SEQ ID NO: 590356 - RNA, 22 nt, Human
uccuggguaaacacugaccuuu

SEQ ID NO: 590357 - RNA, 22 nt, Human
augaggccagaccacucugcau

SEQ ID NO: 590358 - RNA, 22 nt, Human
aggagaaguaaggcuagaugau

SEQ ID NO: 590359 - RNA, 22 nt, Human
cugauucuguugaacaccuucc

SEQ ID NO: 590360 - RNA, 22 nt, Human
ugggccacuugaaaguggaugu

SEQ ID NO: 590361 - RNA, 22 nt, Human
cagcacaauuuucaggagucca

SEQ ID NO: 590362 - RNA, 22 nt, Human
ugggaguguucuuggcuugcuu

SEQ ID NO: 590363 - RNA, 22 nt, Human
cuucuuaaugacagauuaaaau

SEQ ID NO: 590364 - RNA, 22 nt, Human
ucagggcaaaagggaaaccauu

SEQ ID NO: 590365 - RNA, 22 nt, Human
gggacagcagaaagaaggcaag

SEQ ID NO: 590366 - RNA, 22 nt, Human
ugugcaucaagagaaaacagug

SEQ ID NO: 590367 - RNA, 22 nt, Human
uccagucuucuugcagcuacau

SEQ ID NO: 590368 - RNA, 22 nt, Human
agcugcccagauaggaggaggc

SEQ ID NO: 590369 - RNA, 22 nt, Human
uugcaaauguuucauaacagua

SEQ ID NO: 590370 - RNA, 22 nt, Human
auacaucucauguaagagauaa

SEQ ID NO: 590371 - RNA, 22 nt, Human
cuggugcacuacagccuggaac

SEQ ID NO: 590372 - RNA, 22 nt, Human
acagagcuucccagccugagca

SEQ ID NO: 590373 - RNA, 22 nt, Human
aacucuauuuacccuacuaaac

SEQ ID NO: 590374 - RNA, 22 nt, Human
ugguggggucaucgucagaugc

SEQ ID NO: 590375 - RNA, 22 nt, Human
ccugggauuugcgccagaccuu

SEQ ID NO: 590376 - RNA, 22 nt, Human
cacugucuauuaauauaacuua

SEQ ID NO: 590377 - RNA, 22 nt, Human
auggcucagcgccuuucugugg

SEQ ID NO: 590378 - RNA, 21 nt, Human
ucagaggcacugagagcaaug

SEQ ID NO: 590379 - RNA, 22 nt, Human
acagugcugucuaucucacuaa

SEQ ID NO: 590380 - RNA, 22 nt, Human
gagcacugauuuauuuuugucu

SEQ ID NO: 590381 - RNA, 22 nt, Human
caaaugcaugagaaauaagagg

SEQ ID NO: 590382 - RNA, 22 nt, Human
gcuuccuucuaccacaucaugc

SEQ ID NO: 590383 - RNA, 22 nt, Human
ccuuagcauggcugugcugugu

SEQ ID NO: 590384 - RNA, 22 nt, Human
cucccucccuacgugagcucac

SEQ ID NO: 590385 - RNA, 22 nt, Human
uucaaacaguguagaauauaug

SEQ ID NO: 590386 - RNA, 22 nt, Human
augucuuuauaaauguauaaug

SEQ ID NO: 590387 - RNA, 22 nt, Human
aucuuauguuguauucaaaauc

SEQ ID NO: 590388 - RNA, 22 nt, Human
uguauaaaccauggacagcuuu

SEQ ID NO: 590389 - RNA, 22 nt, Human
gagggcucuaccaaguaacucu

SEQ ID NO: 590390 - RNA, 22 nt, Human
aagagagggacuuauuaaaguc

SEQ ID NO: 590391 - RNA, 22 nt, Human
cacagcuucaguuucugacuug

SEQ ID NO: 590392 - RNA, 22 nt, Human
acacaaugcauauuuuuccaga

SEQ ID NO: 590393 - RNA, 22 nt, Human
uccucagggcggccuccgucuu

SEQ ID NO: 590394 - RNA, 22 nt, Human
auuuuuccaauuaggauaaaga

SEQ ID NO: 590395 - RNA, 17 nt, Human
ucccaggaacagggaau

SEQ ID NO: 590396 - RNA, 22 nt, Human
cagagggguguagagaucacug

SEQ ID NO: 590397 - RNA, 22 nt, Human
uggcugcugcuuggucuucuuc

SEQ ID NO: 590398 - RNA, 22 nt, Human
ccagagguccccugccaggagg

SEQ ID NO: 590399 - RNA, 22 nt, Human
agggggcccuugcaggugagcg

SEQ ID NO: 590400 - RNA, 22 nt, Human
cccaagcagggugcagaggcau

SEQ ID NO: 590401 - RNA, 15 nt, Human
caggagaggaagguu

SEQ ID NO: 590402 - RNA, 22 nt, Human
caguggagugggacuggucuga

SEQ ID NO: 590403 - RNA, 22 nt, Human
ccucugugccucaguuucaugu

SEQ ID NO: 590404 - RNA, 22 nt, Human
aaucacaucucauucaacagcc

SEQ ID NO: 590405 - RNA, 22 nt, Human
ggcacagggagccgcaguugca

SEQ ID NO: 590406 - RNA, 22 nt, Human
gugagcagcucaggguggucuc

SEQ ID NO: 590407 - RNA, 22 nt, Human
gcugucccgcugacuuccagcu

SEQ ID NO: 590408 - RNA, 22 nt, Human
ccuggguuggagagcaauggug

SEQ ID NO: 590409 - RNA, 22 nt, Human
aauguuuuaaaagagauugaga

SEQ ID NO: 590410 - RNA, 22 nt, Human
aaaguaagaccaagugaucauu

SEQ ID NO: 590411 - RNA, 22 nt, Human
agcaccuguugcacuucauaau

SEQ ID NO: 590412 - RNA, 22 nt, Human
gggcaguggguggcugcagccu

SEQ ID NO: 590413 - RNA, 22 nt, Human
caugcagguuauaugugcuucu

SEQ ID NO: 590414 - RNA, 22 nt, Human
aaguuuacuggggagaucaccu

SEQ ID NO: 590415 - RNA, 22 nt, Human
cauauuguaaaagguugaaucc

SEQ ID NO: 590416 - RNA, 22 nt, Human
cagaaagcuugguacaauaugc

SEQ ID NO: 590417 - RNA, 20 nt, Human
ugagucagcugcaugggugg

SEQ ID NO: 590418 - RNA, 22 nt, Human
ucucugaagagcucagacuagu

SEQ ID NO: 590419 - RNA, 22 nt, Human
cuucuguguuaaaugagucuuu

SEQ ID NO: 590420 - RNA, 22 nt, Human
uguuucauuaguacugacaaua

SEQ ID NO: 590421 - RNA, 18 nt, Human
gugcagauugcggagccc

SEQ ID NO: 590422 - RNA, 22 nt, Human
cugggacuggguccucaggaca

SEQ ID NO: 590423 - RNA, 22 nt, Human
agcugcuaugacaacaccagcc

SEQ ID NO: 590424 - RNA, 22 nt, Human
agguggggaggagugucucuuu

SEQ ID NO: 590425 - RNA, 22 nt, Human
agcaugaaagcauaggacaguc

SEQ ID NO: 590426 - RNA, 22 nt, Human
aauagcauguaaguuuaaaaga

SEQ ID NO: 590427 - RNA, 22 nt, Human
ggugucauccaacaggacaggg

SEQ ID NO: 590428 - RNA, 22 nt, Human
ugcuggaggggguaccacucaa

SEQ ID NO: 590429 - RNA, 22 nt, Human
ugcucccacacuacucggaggc

SEQ ID NO: 590430 - RNA, 22 nt, Human
aaacacaucauucaugucguca

SEQ ID NO: 590431 - RNA, 22 nt, Human
agcagcaggcuuaaggaaaagu

SEQ ID NO: 590432 - RNA, 22 nt, Human
uguacaaggccaucuacaugcu

SEQ ID NO: 590433 - RNA, 22 nt, Human
uauguacauaacaugaaaugca

SEQ ID NO: 590434 - RNA, 22 nt, Human
uuaacaauagaguuucuucagg

SEQ ID NO: 590435 - RNA, 22 nt, Human
aagaauauagauuuuuugaagu

SEQ ID NO: 590436 - RNA, 22 nt, Human
gaggccaggggccuggagauga

SEQ ID NO: 590437 - RNA, 22 nt, Human
aaauuucuugaggcucucuagc

SEQ ID NO: 590438 - RNA, 22 nt, Human
acaguguucacuaagguuagcu

SEQ ID NO: 590439 - RNA, 22 nt, Human
gcaguguucuaaauugggugug

SEQ ID NO: 590440 - RNA, 22 nt, Human
gcugcagggcucucacaggggg

SEQ ID NO: 590441 - RNA, 22 nt, Human
ugaaagacaagguuuuuucaga

SEQ ID NO: 590442 - RNA, 22 nt, Human
uaugucaugggucaaaaugaag

SEQ ID NO: 590443 - RNA, 22 nt, Human
uggaagggagugacagucagag

SEQ ID NO: 590444 - RNA, 22 nt, Human
aggaagcucaaagccaugaugu

SEQ ID NO: 590445 - RNA, 17 nt, Human
gacagcugguuccuggc

SEQ ID NO: 590446 - RNA, 22 nt, Human
ccugccuggagcugagugugga

SEQ ID NO: 590447 - RNA, 19 nt, Human
augauacaggugaaaauug

SEQ ID NO: 590448 - RNA, 22 nt, Human
ugucugaaggccugaccuacau

SEQ ID NO: 590449 - RNA, 22 nt, Human
ggaggacaggggcugcagcaca

SEQ ID NO: 590450 - RNA, 22 nt, Human
aggcuggaaagggaccagagug

SEQ ID NO: 590451 - RNA, 22 nt, Human
aagucuuauuugucauguaugu

SEQ ID NO: 590452 - RNA, 22 nt, Human
uuucucaaauacuguuccagga

SEQ ID NO: 590453 - RNA, 22 nt, Human
acagucugcauaugaccuguag

SEQ ID NO: 590454 - RNA, 22 nt, Human
uaagcaaauaaugcaucaaggg

SEQ ID NO: 590455 - RNA, 22 nt, Human
ugugaagaguagacauguggug

SEQ ID NO: 590456 - RNA, 22 nt, Human
guccugugugacuucccaaaug

SEQ ID NO: 590457 - RNA, 22 nt, Human
ggacaggcugcaucugagcaug

SEQ ID NO: 590458 - RNA, 22 nt, Human
auaaagcaucuagucugucacu

SEQ ID NO: 590459 - RNA, 22 nt, Human
uaaugucuagaucagaccucga

SEQ ID NO: 590460 - RNA, 22 nt, Human
acagcagcacuauugacauuuu

SEQ ID NO: 590461 - RNA, 22 nt, Human
auuuaauuuggagagagaaacc

SEQ ID NO: 590462 - RNA, 22 nt, Human
uucugcagcaugaggcuggagc

SEQ ID NO: 590463 - RNA, 22 nt, Human
cagcaggguagguuguaucagu

SEQ ID NO: 590464 - RNA, 22 nt, Human
gugaggccgcacgccccggagu

SEQ ID NO: 590465 - RNA, 22 nt, Human
augaaacagaguacuuaauaua

SEQ ID NO: 590466 - RNA, 22 nt, Human
agccuuuaacacuucacauuga

SEQ ID NO: 590467 - RNA, 19 nt, Human
gccaggacauccuccugcu

SEQ ID NO: 590468 - RNA, 22 nt, Human
ugagaagcccacacucuuuccu

SEQ ID NO: 590469 - RNA, 22 nt, Human
gguugaauaucuuuauguuggu

SEQ ID NO: 590470 - RNA, 22 nt, Human
acagacugauucauugcucagg

SEQ ID NO: 590471 - RNA, 22 nt, Human
agcuucagcuugcagcugugau

SEQ ID NO: 590472 - RNA, 22 nt, Human
gcucugagugaucagcugggaa

SEQ ID NO: 590473 - RNA, 20 nt, Human
guuuuucucucuugccacua

SEQ ID NO: 590474 - RNA, 22 nt, Human
agaauccugaugaaaaggagag

SEQ ID NO: 590475 - RNA, 22 nt, Human
cuuaggaaaguuucugcuuaug

SEQ ID NO: 590476 - RNA, 22 nt, Human
gcagugcuaaggauucugccuu

SEQ ID NO: 590477 - RNA, 22 nt, Human
ugaguagagaauucagcuaagg

SEQ ID NO: 590478 - RNA, 17 nt, Human
ugcaaacaaucacauau

SEQ ID NO: 590479 - RNA, 22 nt, Human
cagaggaaguuccuugaugaga

SEQ ID NO: 590480 - RNA, 18 nt, Human
auauggaaugccuggcua

SEQ ID NO: 590481 - RNA, 22 nt, Human
aucuacagugcacaggacagcc

SEQ ID NO: 590482 - RNA, 22 nt, Human
aaggagcgcuuagggggcagaa

SEQ ID NO: 590483 - RNA, 21 nt, Human
gcccagagggagccaagccca

SEQ ID NO: 590484 - RNA, 22 nt, Human
aauuuguuacacagcaauauaa

SEQ ID NO: 590485 - RNA, 22 nt, Human
uggcugaggucuggggcuucug

SEQ ID NO: 590486 - RNA, 22 nt, Human
uggaagauaagagauugggaag

SEQ ID NO: 590487 - RNA, 22 nt, Human
agaaaauauucauugagaggcu

SEQ ID NO: 590488 - RNA, 22 nt, Human
agguggggcugggaaagauucc

SEQ ID NO: 590489 - RNA, 22 nt, Human
cuugagaagagauuuauauuug

SEQ ID NO: 590490 - RNA, 22 nt, Human
gagccaggcccguacuugcugu

SEQ ID NO: 590491 - RNA, 22 nt, Human
cccaguccuaaagcagacgcca

SEQ ID NO: 590492 - RNA, 22 nt, Human
uuccuucuuguaaugaucugcc

SEQ ID NO: 590493 - RNA, 21 nt, Human
ccugagugagaccuggcccgu

SEQ ID NO: 590494 - RNA, 18 nt, Human
cacaggcaggugauaggu

SEQ ID NO: 590495 - RNA, 22 nt, Human
gcacccagggcaggaagugagg

SEQ ID NO: 590496 - RNA, 22 nt, Human
aucuaaaaugugguuaguuggu

SEQ ID NO: 590497 - RNA, 22 nt, Human
gaggcagccagagguucucauu

SEQ ID NO: 590498 - RNA, 22 nt, Human
gcccugggcucccugcuccaca

SEQ ID NO: 590499 - RNA, 22 nt, Human
ggcuccaggagaugcugggcag

SEQ ID NO: 590500 - RNA, 21 nt, Human
ugcaguauguauuuguaucca

SEQ ID NO: 590501 - RNA, 22 nt, Human
cuucugggauuuuugaagacuc

SEQ ID NO: 590502 - RNA, 22 nt, Human
acauauguauauguacacaguc

SEQ ID NO: 590503 - RNA, 22 nt, Human
aauacagcagauggagacaaau

SEQ ID NO: 590504 - RNA, 22 nt, Human
gacagggacucccugguuagaa

SEQ ID NO: 590505 - RNA, 22 nt, Human
aagcccagcaucccugcaccag

SEQ ID NO: 590506 - RNA, 22 nt, Human
gcaggcaccgcggcggcagguu

SEQ ID NO: 590507 - RNA, 22 nt, Human
ggugucccaggccagcugugug

SEQ ID NO: 590508 - RNA, 22 nt, Human
agagcagaguggcuguagcuug

SEQ ID NO: 590509 - RNA, 22 nt, Human
auuugcuuaucuccacaguugu

SEQ ID NO: 590510 - RNA, 22 nt, Human
ugccuggcaccccagucugcac

SEQ ID NO: 590511 - RNA, 22 nt, Human
uccagucaagcuugagaauuuc

SEQ ID NO: 590512 - RNA, 22 nt, Human
ccucagaagcucaaggacauug

SEQ ID NO: 590513 - RNA, 23 nt, Human
ugugaaauuugaggucagugcuu

SEQ ID NO: 590514 - RNA, 17 nt, Human
ugcaagaagauuaggaa

SEQ ID NO: 590515 - RNA, 22 nt, Human
uggcuggaauggagcugagccu

SEQ ID NO: 590516 - RNA, 22 nt, Human
uccuggcuccacugagcaggcc

SEQ ID NO: 590517 - RNA, 22 nt, Human
cuguacaaaguagcugcuggga

SEQ ID NO: 590518 - RNA, 22 nt, Human
ucuuucugcagcacaggggcag

SEQ ID NO: 590519 - RNA, 22 nt, Human
cuggccuuguuccuccccaagu

SEQ ID NO: 590520 - RNA, 22 nt, Human
aucucauuuugguuucuacuua

SEQ ID NO: 590521 - RNA, 22 nt, Human
uucuuguauauaaaaaucauuu

SEQ ID NO: 590522 - RNA, 22 nt, Human
ggauaggaauugagaugcuauu

SEQ ID NO: 590523 - RNA, 23 nt, Human
uucuuacaaggcuggcccacuug

SEQ ID NO: 590524 - RNA, 22 nt, Human
gggcuggcucugucuagaaagg

SEQ ID NO: 590525 - RNA, 22 nt, Human
uucacaaugccuuguugauggu

SEQ ID NO: 590526 - RNA, 22 nt, Human
uacauguguucuguuucaaguu

SEQ ID NO: 590527 - RNA, 22 nt, Human
gcuggcuuaauagggaugggcu

SEQ ID NO: 590528 - RNA, 22 nt, Human
uccucugguccugcagcagauc

SEQ ID NO: 590529 - RNA, 22 nt, Human
caguuauuaugaggucauuagg

SEQ ID NO: 590530 - RNA, 22 nt, Human
ugaggcaggaugcuugcacagg

SEQ ID NO: 590531 - RNA, 22 nt, Human
ucauggcuggaagcucaguuag

SEQ ID NO: 590532 - RNA, 23 nt, Human
aaguacauauauuuagauaguga

SEQ ID NO: 590533 - RNA, 22 nt, Human
cacaggaauuagcagccuaaaa

SEQ ID NO: 590534 - RNA, 22 nt, Human
gaaagccauagcccagcuuuac

SEQ ID NO: 590535 - RNA, 22 nt, Human
accucccucgccguccacucug

SEQ ID NO: 590536 - RNA, 22 nt, Human
uagaaagagcauaguauuauaa

SEQ ID NO: 590537 - RNA, 17 nt, Human
gugagggcagaggaugg

SEQ ID NO: 590538 - RNA, 22 nt, Human
cauucacaaagcugauugaugg

SEQ ID NO: 590539 - RNA, 22 nt, Human
agucccagagaggucggggcca

SEQ ID NO: 590540 - RNA, 22 nt, Human
gagcuuuguagcaggaaggaag

SEQ ID NO: 590541 - RNA, 22 nt, Human
gaugacaguucuagcaucugaa

SEQ ID NO: 590542 - RNA, 21 nt, Human
cagaggccucaugcucugugc

SEQ ID NO: 590543 - RNA, 18 nt, Human
ucacugggagaagauauu

SEQ ID NO: 590544 - RNA, 22 nt, Human
agucacagguucuugggauuag

SEQ ID NO: 590545 - RNA, 22 nt, Human
cguaggauacucagugcucauu

SEQ ID NO: 590546 - RNA, 22 nt, Human
uuuccuuccaaaugcccgggag

SEQ ID NO: 590547 - RNA, 22 nt, Human
augaaugagaaagcugaaaucu

SEQ ID NO: 590548 - RNA, 22 nt, Human
ucccagggcagcuguccagaag

SEQ ID NO: 590549 - RNA, 22 nt, Human
acugugugaggcugggugaguc

SEQ ID NO: 590550 - RNA, 20 nt, Human
cugcugugugugccucagcc

SEQ ID NO: 590551 - RNA, 22 nt, Human
uacauucugguggagaaaguaa

SEQ ID NO: 590552 - RNA, 22 nt, Human
ggcaggcaggagcucugucucc

SEQ ID NO: 590553 - RNA, 22 nt, Human
cucugcaaucugagcacuugua

SEQ ID NO: 590554 - RNA, 18 nt, Human
gagaggagccagaauuuu

SEQ ID NO: 590555 - RNA, 22 nt, Human
aauggcaagcugaacucagaag

SEQ ID NO: 590556 - RNA, 22 nt, Human
ccuggagauuauuugguccaau

SEQ ID NO: 590557 - RNA, 22 nt, Human
guaaagcaaaauguagagauug

SEQ ID NO: 590558 - RNA, 22 nt, Human
ggcuggacaugagcuuggcagu

SEQ ID NO: 590559 - RNA, 22 nt, Human
cugaggcacuaacaaggacaag

SEQ ID NO: 590560 - RNA, 22 nt, Human
uaaacagcuacugugucaaagg

SEQ ID NO: 590561 - RNA, 19 nt, Human
aauguuuaagagaaaaagg

SEQ ID NO: 590562 - RNA, 22 nt, Human
ugggccaguuauuucaccucug

SEQ ID NO: 590563 - RNA, 21 nt, Human
ucugcauuuuagcaagaucuc

SEQ ID NO: 590564 - RNA, 22 nt, Human
ccuccugggacucauuagcacc

SEQ ID NO: 590565 - RNA, 22 nt, Human
guggagggugauugccggcugu

SEQ ID NO: 590566 - RNA, 20 nt, Human
ugcagagcuggcuggcuccu

SEQ ID NO: 590567 - RNA, 22 nt, Human
ccaggccagcgcuggcuggagg

SEQ ID NO: 590568 - RNA, 22 nt, Human
uugggcagugauuaguucauga

SEQ ID NO: 590569 - RNA, 22 nt, Human
acaggaacuguuaucucagaug

SEQ ID NO: 590570 - RNA, 22 nt, Human
ggcaguggguggaucucaggga

SEQ ID NO: 590571 - RNA, 22 nt, Human
ucagaagccggaagugcuccuc

SEQ ID NO: 590572 - RNA, 22 nt, Human
cugcuuuauauugagcuugaaa

SEQ ID NO: 590573 - RNA, 22 nt, Human
ucccagcugcugagauagugcu

SEQ ID NO: 590574 - RNA, 22 nt, Human
gaaagguuuaaguaggauuugu

SEQ ID NO: 590575 - RNA, 22 nt, Human
agaaagcacagcggguccauuu

SEQ ID NO: 590576 - RNA, 22 nt, Human
ucugcuuucaaauucacuuagu

SEQ ID NO: 590577 - RNA, 22 nt, Human
cagaaugagauaacccagauug

SEQ ID NO: 590578 - RNA, 22 nt, Human
ccagggcuucaguuagugguga

SEQ ID NO: 590579 - RNA, 22 nt, Human
ugcacuagccacauuucaaaug

SEQ ID NO: 590580 - RNA, 22 nt, Human
gugcaggguagcgacggcagga

SEQ ID NO: 590581 - RNA, 22 nt, Human
caaauagacuuaagcaucugua

SEQ ID NO: 590582 - RNA, 22 nt, Human
ucacccagggacugugauggaa

SEQ ID NO: 590583 - RNA, 22 nt, Human
cacagcuggugacagagcccag

SEQ ID NO: 590584 - RNA, 22 nt, Human
gugugccaccagucaaggugaa

SEQ ID NO: 590585 - RNA, 18 nt, Human
uccaggacucugcguggc

SEQ ID NO: 590586 - RNA, 22 nt, Human
uccuggagagugggcgagcaca

SEQ ID NO: 590587 - RNA, 22 nt, Human
uuguccauuuuauuggauggug

SEQ ID NO: 590588 - RNA, 22 nt, Human
ugaaugaucuccgauuaguccu

SEQ ID NO: 590589 - RNA, 22 nt, Human
gucagcaccucuuuggggagcu

SEQ ID NO: 590590 - RNA, 22 nt, Human
gugauacagguguucuggauau

SEQ ID NO: 590591 - RNA, 22 nt, Human
aggccuggugugccggaugcag

SEQ ID NO: 590592 - RNA, 22 nt, Human
aaaacauucugugaacucucaa

SEQ ID NO: 590593 - RNA, 22 nt, Human
cagggccugccugguuccugga

SEQ ID NO: 590594 - RNA, 22 nt, Human
aagcugaggcuccccugaggga

SEQ ID NO: 590595 - RNA, 22 nt, Human
aaaucagauuauuugauuggca

SEQ ID NO: 590596 - RNA, 22 nt, Human
gaaagagaaccugggccuagau

SEQ ID NO: 590597 - RNA, 22 nt, Human
agggcugagaaugacagggccg

SEQ ID NO: 590598 - RNA, 22 nt, Human
acagugauuggcacugauucag

SEQ ID NO: 590599 - RNA, 22 nt, Human
agcacuagccuguuuugcugug

SEQ ID NO: 590600 - RNA, 23 nt, Human
cacaccaggagccgucugggcca

SEQ ID NO: 590601 - RNA, 22 nt, Human
aacacuaaugggagaacaaccc

SEQ ID NO: 590602 - RNA, 22 nt, Human
uucuugggugugaccagucuga

SEQ ID NO: 590603 - RNA, 22 nt, Human
aaaaucaguacacuuuauuuug

SEQ ID NO: 590604 - RNA, 22 nt, Human
cagugugggugaaauacaaagu

SEQ ID NO: 590605 - RNA, 22 nt, Human
caggagcuggauaggaccacaa

SEQ ID NO: 590606 - RNA, 22 nt, Human
gcugggagccccgagccagcgc

SEQ ID NO: 590607 - RNA, 22 nt, Human
augggcaguuaggaggccagga

SEQ ID NO: 590608 - RNA, 19 nt, Human
acagggcagcaauaggaua

SEQ ID NO: 590609 - RNA, 22 nt, Human
agcaaaguccagucuguguaca

SEQ ID NO: 590610 - RNA, 22 nt, Human
cagggagaaaucuccaggaggu

SEQ ID NO: 590611 - RNA, 21 nt, Human
ugucagcaacaauacuuucuc

SEQ ID NO: 590612 - RNA, 22 nt, Human
acugggccagaucagagcaacu

SEQ ID NO: 590613 - RNA, 22 nt, Human
cagcuucuccagaugacccuca

SEQ ID NO: 590614 - RNA, 22 nt, Human
agaggcuccaccuucucugucc

SEQ ID NO: 590615 - RNA, 22 nt, Human
acagauacucagcucuaugcuu

SEQ ID NO: 590616 - RNA, 22 nt, Human
uuugguaacaguuuuuggcacu

SEQ ID NO: 590617 - RNA, 22 nt, Human
gacacuuuaggauuuaaaaguc

SEQ ID NO: 590618 - RNA, 22 nt, Human
gacagguggggaaacuaaggua

SEQ ID NO: 590619 - RNA, 22 nt, Human
agaaaaguuuucugagacugac

SEQ ID NO: 590620 - RNA, 22 nt, Human
ucacaggcuaaauuuaugcagg

SEQ ID NO: 590621 - RNA, 22 nt, Human
agaaaauuuaaagagacacaca

SEQ ID NO: 590622 - RNA, 20 nt, Human
agcugguccccaagccucuc

SEQ ID NO: 590623 - RNA, 22 nt, Human
ugagcagauuuguucuaggggu

SEQ ID NO: 590624 - RNA, 22 nt, Human
uggcccugcacccagagcaguu

SEQ ID NO: 590625 - RNA, 22 nt, Human
gcuggggagcaagaguagugag

SEQ ID NO: 590626 - RNA, 20 nt, Human
aaaagcagccagagauggua

SEQ ID NO: 590627 - RNA, 22 nt, Human
ucugccuccugcuugucccgac

SEQ ID NO: 590628 - RNA, 22 nt, Human
gugaggauugcucuggagaauu

SEQ ID NO: 590629 - RNA, 22 nt, Human
uuuaugaacuacagauauaacu

SEQ ID NO: 590630 - RNA, 23 nt, Human
ucuuuagaagaacaucagaaaug

SEQ ID NO: 590631 - RNA, 22 nt, Human
uguuuuauuucuccaagaggga

SEQ ID NO: 590632 - RNA, 22 nt, Human
gaauuuaaggaccaagcauuuu

SEQ ID NO: 590633 - RNA, 22 nt, Human
gucuuuagagcuccuggcaucu

SEQ ID NO: 590634 - RNA, 22 nt, Human
acucagcucaggagcuggcugg

SEQ ID NO: 590635 - RNA, 22 nt, Human
agugauggagcuuccucugcua

SEQ ID NO: 590636 - RNA, 21 nt, Human
uaggccacauggguuggagau

SEQ ID NO: 590637 - RNA, 22 nt, Human
gggcccagcgugguuccaucug

SEQ ID NO: 590638 - RNA, 21 nt, Human
ucucccaaggagguccugagg

SEQ ID NO: 590639 - RNA, 22 nt, Human
aggcuccagccaaugggucugu

SEQ ID NO: 590640 - RNA, 22 nt, Human
gcaggagcccuggcauguucuu

SEQ ID NO: 590641 - RNA, 22 nt, Human
cuuggggaugcaaagccagugu

SEQ ID NO: 590642 - RNA, 22 nt, Human
uaagcauggugguaaaagaggu

SEQ ID NO: 590643 - RNA, 22 nt, Human
ugaggugccacccaagagccuu

SEQ ID NO: 590644 - RNA, 21 nt, Human
ucugggaaauugggaaagaag

SEQ ID NO: 590645 - RNA, 22 nt, Human
ggagcaucugaacagggagaag

SEQ ID NO: 590646 - RNA, 22 nt, Human
cuaggaggcgggggcugcagua

SEQ ID NO: 590647 - RNA, 22 nt, Human
augaaacaaggguauuuucucu

SEQ ID NO: 590648 - RNA, 22 nt, Human
auguuaaaugguuuauuauuaa

SEQ ID NO: 590649 - RNA, 22 nt, Human
ggagaaaauugaugaaguuggc

SEQ ID NO: 590650 - RNA, 22 nt, Human
gaguucuauuaugguuagaagu

SEQ ID NO: 590651 - RNA, 22 nt, Human
guaaagcucucauuuaauauca

SEQ ID NO: 590652 - RNA, 22 nt, Human
agaagcaguuauuuuuugcaca

SEQ ID NO: 590653 - RNA, 22 nt, Human
guuuccaggcuuugguaugguu

SEQ ID NO: 590654 - RNA, 22 nt, Human
uggaggcaugacagugucugga

SEQ ID NO: 590655 - RNA, 22 nt, Human
cuuggggaggacgcaguguccu

SEQ ID NO: 590656 - RNA, 22 nt, Human
gaacuuaguagucuacuucuua

SEQ ID NO: 590657 - RNA, 22 nt, Human
uaaggaaggggaaagacauguc

SEQ ID NO: 590658 - RNA, 22 nt, Human
uccuuauaacaacaggagugga

SEQ ID NO: 590659 - RNA, 22 nt, Human
gcgccuauuuucauuaucaagg

SEQ ID NO: 590660 - RNA, 22 nt, Human
cuccauggggaaaugaaggugg

SEQ ID NO: 590661 - RNA, 22 nt, Human
ugccaggcauauggccucuuug

SEQ ID NO: 590662 - RNA, 23 nt, Human
agggccacugggaaggauuacug

SEQ ID NO: 590663 - RNA, 20 nt, Human
gagauggacagaugaagggg

SEQ ID NO: 590664 - RNA, 22 nt, Human
uaaaauuugucccugaguguug

SEQ ID NO: 590665 - RNA, 22 nt, Human
uauuucaugugcaccauaauuc

SEQ ID NO: 590666 - RNA, 22 nt, Human
auuuccaaucucugcauauggg

SEQ ID NO: 590667 - RNA, 22 nt, Human
gagagccaugguggagaugggg

SEQ ID NO: 590668 - RNA, 22 nt, Human
agacuaaaagaaggaagcuacc

SEQ ID NO: 590669 - RNA, 22 nt, Human
acuuccuuuucaaccauacagc

SEQ ID NO: 590670 - RNA, 22 nt, Human
acaaugucaaaauaggaaacau

SEQ ID NO: 590671 - RNA, 22 nt, Human
cagguccugcagggagaguaaa

SEQ ID NO: 590672 - RNA, 23 nt, Human
ucuguacacaucagcaucuccca

SEQ ID NO: 590673 - RNA, 22 nt, Human
gagcuuccauggacgccaucug

SEQ ID NO: 590674 - RNA, 22 nt, Human
aaaguuacccaaucucuaugaa

SEQ ID NO: 590675 - RNA, 22 nt, Human
ccuuagcauuagaagcuguggg

SEQ ID NO: 590676 - RNA, 22 nt, Human
gagauaaagcuaccauguugau

SEQ ID NO: 590677 - RNA, 22 nt, Human
uucuauguggauauagaacugc

SEQ ID NO: 590678 - RNA, 22 nt, Human
cugguugggagguuggcuuuca

SEQ ID NO: 590679 - RNA, 21 nt, Human
cccguggagaaaaggaaugag

SEQ ID NO: 590680 - RNA, 22 nt, Human
acugcuuacaaaaggaaagaau

SEQ ID NO: 590681 - RNA, 22 nt, Human
gaggaggggacaguacuugugc

SEQ ID NO: 590682 - RNA, 20 nt, Human
cagcagccauucuaguagua

SEQ ID NO: 590683 - RNA, 22 nt, Human
ucucugggccucccuuuccaag

SEQ ID NO: 590684 - RNA, 22 nt, Human
cauuccuuaacguggggagucu

SEQ ID NO: 590685 - RNA, 22 nt, Human
ucaguguucuggauuuggggca

SEQ ID NO: 590686 - RNA, 20 nt, Human
ugugucuuccuuucuuuaug

SEQ ID NO: 590687 - RNA, 22 nt, Human
gaggaggggcacuugucuccua

SEQ ID NO: 590688 - RNA, 22 nt, Human
uaguuucuucaccuguaaaaug

SEQ ID NO: 590689 - RNA, 19 nt, Human
ggccagcacagggcucugu

SEQ ID NO: 590690 - RNA, 22 nt, Human
aacaguuuaugagauaugcuau

SEQ ID NO: 590691 - RNA, 22 nt, Human
cuguccugaaagggagauuggg

SEQ ID NO: 590692 - RNA, 22 nt, Human
ugucaucauuugagagaagaaa

SEQ ID NO: 590693 - RNA, 22 nt, Human
acagcagagacacucaggaggc

SEQ ID NO: 590694 - RNA, 22 nt, Human
acaaugaacgcuuuuuaacugu

SEQ ID NO: 590695 - RNA, 18 nt, Human
gaguguggcacugggccc

SEQ ID NO: 590696 - RNA, 22 nt, Human
uggaagaggccagaaaguggga

SEQ ID NO: 590697 - RNA, 22 nt, Human
ucguggagaggccauguggagg

SEQ ID NO: 590698 - RNA, 22 nt, Human
gaccuugugauccagccaccuu

SEQ ID NO: 590699 - RNA, 22 nt, Human
agaauauaguuaccaaauucug

SEQ ID NO: 590700 - RNA, 22 nt, Human
gcagggaagacccggagcagcg

SEQ ID NO: 590701 - RNA, 20 nt, Human
uugagcaaucaguaaaggau

SEQ ID NO: 590702 - RNA, 22 nt, Human
ccugagcaucagcgccuccuua

SEQ ID NO: 590703 - RNA, 20 nt, Human
uuuuccuucugaguauguug

SEQ ID NO: 590704 - RNA, 22 nt, Human
aggcccugcuuuccagagcuca

SEQ ID NO: 590705 - RNA, 22 nt, Human
agggcuuguggucguggcugug

SEQ ID NO: 590706 - RNA, 23 nt, Human
cagggcugggcuugguguuaggc

SEQ ID NO: 590707 - RNA, 22 nt, Human
guguuuguuuagugcagagaga

SEQ ID NO: 590708 - RNA, 22 nt, Human
agcugcagagaaaagaggcugg

SEQ ID NO: 590709 - RNA, 22 nt, Human
agccagggggacgcuuucuggc

SEQ ID NO: 590710 - RNA, 22 nt, Human
gccuuucacagagauuuaaaaa

SEQ ID NO: 590711 - RNA, 22 nt, Human
ucuguucuuaaagcauucuugc

SEQ ID NO: 590712 - RNA, 19 nt, Human
gggcuggagggauagagcc

SEQ ID NO: 590713 - RNA, 22 nt, Human
acugcuagugagaaaauaacca

SEQ ID NO: 590714 - RNA, 22 nt, Human
ccuuucuaagauacugcaacuu

SEQ ID NO: 590715 - RNA, 22 nt, Human
acaaauuucauaggcaaauuuu

SEQ ID NO: 590716 - RNA, 19 nt, Human
acauauguggauauacaug

SEQ ID NO: 590717 - RNA, 23 nt, Human
ucaauaacucggguuaaaauaga

SEQ ID NO: 590718 - RNA, 22 nt, Human
guccaagagucaagaagggggc

SEQ ID NO: 590719 - RNA, 22 nt, Human
gaacacagcagggauaaccacu

SEQ ID NO: 590720 - RNA, 22 nt, Human
ucuggggagggagccacagguc

SEQ ID NO: 590721 - RNA, 22 nt, Human
ugagaugggucaucagguuugg

SEQ ID NO: 590722 - RNA, 22 nt, Human
uuucucugggcacucuccaaac

SEQ ID NO: 590723 - RNA, 22 nt, Human
acauauuggcaaacuggaggca

SEQ ID NO: 590724 - RNA, 22 nt, Human
acagccagggacauacaauggu

SEQ ID NO: 590725 - RNA, 22 nt, Human
caggaaugauauucgaggagau

SEQ ID NO: 590726 - RNA, 22 nt, Human
caugcauuuucuauucacucag

SEQ ID NO: 590727 - RNA, 22 nt, Human
caauguaucaagaagcaucagu

SEQ ID NO: 590728 - RNA, 22 nt, Human
ucuggaaguuagaggaggaaag

SEQ ID NO: 590729 - RNA, 22 nt, Human
auuaggcauauaugcuuuuaau

SEQ ID NO: 590730 - RNA, 16 nt, Human
agaggccacagacaga

SEQ ID NO: 590731 - RNA, 22 nt, Human
uaacuuguguuacauuacucuu

SEQ ID NO: 590732 - RNA, 23 nt, Human
uagacacuccuuugucuguccuu

SEQ ID NO: 590733 - RNA, 22 nt, Human
ccuggaguaccguggccaucca

SEQ ID NO: 590734 - RNA, 22 nt, Human
ucugccuggagaguucuucucu

SEQ ID NO: 590735 - RNA, 22 nt, Human
agggcuggcaagggauugaaau

SEQ ID NO: 590736 - RNA, 22 nt, Human
auucuugggaugggugucacaa

SEQ ID NO: 590737 - RNA, 22 nt, Human
ccacagaguugaugcaauaaga

SEQ ID NO: 590738 - RNA, 22 nt, Human
ucugcaagauggucuuagaggu

SEQ ID NO: 590739 - RNA, 22 nt, Human
ggaaggaggggcaaagcaguuc

SEQ ID NO: 590740 - RNA, 22 nt, Human
uuuugugagcccauaaaugcca

SEQ ID NO: 590741 - RNA, 22 nt, Human
cugaggcuaaccucgagagaca

SEQ ID NO: 590742 - RNA, 22 nt, Human
acaucugacaugaucuucagua

SEQ ID NO: 590743 - RNA, 22 nt, Human
uguggaaaguggucuaagcaca

SEQ ID NO: 590744 - RNA, 22 nt, Human
uacacuauuuuacugauacaaa

SEQ ID NO: 590745 - RNA, 22 nt, Human
gacagcugugcaggagaagggg

SEQ ID NO: 590746 - RNA, 22 nt, Human
ucugcuuucuugcgcagaugug

SEQ ID NO: 590747 - RNA, 22 nt, Human
cuuccuguugucacagucugcg

SEQ ID NO: 590748 - RNA, 22 nt, Human
ugucaaaaccagcaauuuuguu

SEQ ID NO: 590749 - RNA, 22 nt, Human
aagaggcuuauagucuuccugu

SEQ ID NO: 590750 - RNA, 22 nt, Human
uaugagaauaaucugguaaaua

SEQ ID NO: 590751 - RNA, 22 nt, Human
ugggcacuauggcucugugcac

SEQ ID NO: 590752 - RNA, 22 nt, Human
uggagcaggcaucuuucucucu

SEQ ID NO: 590753 - RNA, 22 nt, Human
aguccucuggaguaugccuuau

SEQ ID NO: 590754 - RNA, 22 nt, Human
gagggugggcuccuaucugggu

SEQ ID NO: 590755 - RNA, 22 nt, Human
aauuccaaauguuuucaaucca

SEQ ID NO: 590756 - RNA, 22 nt, Human
gcagggcacacaagaaugauaa

SEQ ID NO: 590757 - RNA, 22 nt, Human
uauuacaagaaagggcaugaau

SEQ ID NO: 590758 - RNA, 22 nt, Human
agaccugggugcccugugcuuu

SEQ ID NO: 590759 - RNA, 22 nt, Human
ggagcuguagaucagcuaaucu

SEQ ID NO: 590760 - RNA, 19 nt, Human
ccaggccaucccaguuccc

SEQ ID NO: 590761 - RNA, 22 nt, Human
uggugcaggaguuggcagggac

SEQ ID NO: 590762 - RNA, 22 nt, Human
agguggagacccagagaaggcg

SEQ ID NO: 590763 - RNA, 22 nt, Human
uuucacauuuguuuuaagaagu

SEQ ID NO: 590764 - RNA, 19 nt, Human
gcuggccacgccccaguug

SEQ ID NO: 590765 - RNA, 22 nt, Human
uaaagcagugguucucaaacuu

SEQ ID NO: 590766 - RNA, 20 nt, Human
cagucccaauccagggccag

SEQ ID NO: 590767 - RNA, 22 nt, Human
uaauuauacaaaaaggcaugca

SEQ ID NO: 590768 - RNA, 22 nt, Human
ucucugugaagcucccguuagg

SEQ ID NO: 590769 - RNA, 22 nt, Human
uuguaugaguaugguguauagg

SEQ ID NO: 590770 - RNA, 22 nt, Human
ccacugucuuuuccaggcugaa

SEQ ID NO: 590771 - RNA, 23 nt, Human
uuuagcuuauaaaugcuuuugaa

SEQ ID NO: 590772 - RNA, 22 nt, Human
acacagaugcauuacacaucua

SEQ ID NO: 590773 - RNA, 20 nt, Human
cagcccuuuauccuccuaug

SEQ ID NO: 590774 - RNA, 22 nt, Human
ucucagcugacugcuuuccucg

SEQ ID NO: 590775 - RNA, 22 nt, Human
ggaggggaugguuugacccugg

SEQ ID NO: 590776 - RNA, 22 nt, Human
uggggcaguuaauaaacauucu

SEQ ID NO: 590777 - RNA, 22 nt, Human
ugaggccaagaaaagcugggug

SEQ ID NO: 590778 - RNA, 22 nt, Human
ucuaguuuugguaugagaugca

SEQ ID NO: 590779 - RNA, 22 nt, Human
uuccuucuuuuacaccauaaau

SEQ ID NO: 590780 - RNA, 22 nt, Human
caggugaaucacuugaguccag

SEQ ID NO: 590781 - RNA, 22 nt, Human
cuagagaacaacauucauaugg

SEQ ID NO: 590782 - RNA, 22 nt, Human
ucagaagacuacuaggacacau

SEQ ID NO: 590783 - RNA, 22 nt, Human
uaagguuuggcugucucuuggu

SEQ ID NO: 590784 - RNA, 22 nt, Human
uagggagaggaagcaggccgcu

SEQ ID NO: 590785 - RNA, 18 nt, Human
ugcugggguagaauccac

SEQ ID NO: 590786 - RNA, 22 nt, Human
cugcauaugagaauaggagaaa

SEQ ID NO: 590787 - RNA, 22 nt, Human
gcuguggccuggcgcagagcug

SEQ ID NO: 590788 - RNA, 20 nt, Human
gcaaggcacagugaggaggg

SEQ ID NO: 590789 - RNA, 22 nt, Human
uuaaagcaaccaucaauuugga

SEQ ID NO: 590790 - RNA, 22 nt, Human
aucuacuccugaauauaucuag

SEQ ID NO: 590791 - RNA, 22 nt, Human
cuuaggaugaguuuuugcguuu

SEQ ID NO: 590792 - RNA, 22 nt, Human
agaagccauguuuaguaggaug

SEQ ID NO: 590793 - RNA, 22 nt, Human
uuuaagaaguuauguuauaaau

SEQ ID NO: 590794 - RNA, 22 nt, Human
cugguccauucucucccugaag

SEQ ID NO: 590795 - RNA, 22 nt, Human
caacauauaauauuugaguucu

SEQ ID NO: 590796 - RNA, 22 nt, Human
gaauauauuucucuuaccuuua

SEQ ID NO: 590797 - RNA, 23 nt, Human
cccuaacuaauucuagggccuaa

SEQ ID NO: 590798 - RNA, 22 nt, Human
gguuggugagugcaggguguua

SEQ ID NO: 590799 - RNA, 22 nt, Human
cuuagcuucacugggucucagu

SEQ ID NO: 590800 - RNA, 22 nt, Human
ugagcuugcuacauagaucaga

SEQ ID NO: 590801 - RNA, 22 nt, Human
acaaugaauuuaauaccuuauu

SEQ ID NO: 590802 - RNA, 22 nt, Human
gcaugugggaacacuuaggcac

SEQ ID NO: 590803 - RNA, 17 nt, Human
ccucacagggaccagac

SEQ ID NO: 590804 - RNA, 22 nt, Human
agcaaauucagaagcagaaugg

SEQ ID NO: 590805 - RNA, 22 nt, Human
acugguggcuuucagacagaaa

SEQ ID NO: 590806 - RNA, 21 nt, Human
agaauucuuaaguauucuaau

SEQ ID NO: 590807 - RNA, 22 nt, Human
guugggaagcagauggaugagc

SEQ ID NO: 590808 - RNA, 22 nt, Human
gagucuccuacuggcuguccuu

SEQ ID NO: 590809 - RNA, 22 nt, Human
uccugccagcccacagacucau

SEQ ID NO: 590810 - RNA, 22 nt, Human
uggggagguucgggaaucuugu

SEQ ID NO: 590811 - RNA, 22 nt, Human
aacaaagaagacugguuauuuu

SEQ ID NO: 590812 - RNA, 22 nt, Human
aauguuacacagguauaaucag

SEQ ID NO: 590813 - RNA, 22 nt, Human
ccagcucucuuugaagcauaaa

SEQ ID NO: 590814 - RNA, 21 nt, Human
agaaaaacacgauauaagccc

SEQ ID NO: 590815 - RNA, 23 nt, Human
gaggagggucgugcuguguuccu

SEQ ID NO: 590816 - RNA, 22 nt, Human
agccuggccacucagggccuga

SEQ ID NO: 590817 - RNA, 22 nt, Human
gccugguggacacugggcauca

SEQ ID NO: 590818 - RNA, 22 nt, Human
auggggagcucaccaccuguuu

SEQ ID NO: 590819 - RNA, 22 nt, Human
acccaggcuagggugcaguggc

SEQ ID NO: 590820 - RNA, 20 nt, Human
gcugcucgcugcagucacuc

SEQ ID NO: 590821 - RNA, 22 nt, Human
uccugaagcucucuuaaggaaa

SEQ ID NO: 590822 - RNA, 22 nt, Human
cuggacagcccucacugugugc

SEQ ID NO: 590823 - RNA, 22 nt, Human
ucggccacgggguuuccuccaa

SEQ ID NO: 590824 - RNA, 22 nt, Human
aaaauacuacugucuucuuccc

SEQ ID NO: 590825 - RNA, 18 nt, Human
cagagcagagguggagcg

SEQ ID NO: 590826 - RNA, 23 nt, Human
uggccuggagagaaaagaugagu

SEQ ID NO: 590827 - RNA, 22 nt, Human
ucucugaaggcuguguugaugg

SEQ ID NO: 590828 - RNA, 22 nt, Human
uucagggacuuagugucaguuu

SEQ ID NO: 590829 - RNA, 22 nt, Human
uagggcagauucgguggaguuu

SEQ ID NO: 590830 - RNA, 22 nt, Human
acaguggaugugauguccaggu

SEQ ID NO: 590831 - RNA, 22 nt, Human
ugcacagcuggcucuccuuuuc

SEQ ID NO: 590832 - RNA, 22 nt, Human
aggcagguuggugagaagacug

SEQ ID NO: 590833 - RNA, 22 nt, Human
cauuucauuccuuugaaagugg

SEQ ID NO: 590834 - RNA, 22 nt, Human
uucugcucaguaguaagagugc

SEQ ID NO: 590835 - RNA, 22 nt, Human
guggcagguuccguagacagca

SEQ ID NO: 590836 - RNA, 22 nt, Human
gaaacauucagucaacaguguu

SEQ ID NO: 590837 - RNA, 22 nt, Human
acucuccuuuugaucuucagaa

SEQ ID NO: 590838 - RNA, 22 nt, Human
acaggccauaaaggcaggcccu

SEQ ID NO: 590839 - RNA, 22 nt, Human
ugugaaacggagucagggaagg

SEQ ID NO: 590840 - RNA, 22 nt, Human
cauguuauuuauccauuaaaca

SEQ ID NO: 590841 - RNA, 22 nt, Human
uuauuaaaaugcggauuuggcu

SEQ ID NO: 590842 - RNA, 22 nt, Human
cuggcuuccaccauggccccug

SEQ ID NO: 590843 - RNA, 22 nt, Human
ucagaggacuaccuucuccagu

SEQ ID NO: 590844 - RNA, 22 nt, Human
cugggcugcuugcugaaggggu

SEQ ID NO: 590845 - RNA, 22 nt, Human
uguuagaagacucuuuuaccua

SEQ ID NO: 590846 - RNA, 22 nt, Human
gcccuccaugagacacagugua

SEQ ID NO: 590847 - RNA, 22 nt, Human
agcucccagaaggcccugcgcc

SEQ ID NO: 590848 - RNA, 22 nt, Human
uccccugcagcgccugcuucua

SEQ ID NO: 590849 - RNA, 22 nt, Human
aggcugaggugugcugugaucg

SEQ ID NO: 590850 - RNA, 22 nt, Human
gaaagccaucuggcugcuggga

SEQ ID NO: 590851 - RNA, 22 nt, Human
caauaauuuacauuggauacca

SEQ ID NO: 590852 - RNA, 22 nt, Human
guagcauucugaguucgcagag

SEQ ID NO: 590853 - RNA, 22 nt, Human
ggcucuggagcacagacgucug

SEQ ID NO: 590854 - RNA, 22 nt, Human
cuguacagaguucugaguguac

SEQ ID NO: 590855 - RNA, 22 nt, Human
caucauuaccaucauuaguagu

SEQ ID NO: 590856 - RNA, 22 nt, Human
caaagaauagugagaagaugua

SEQ ID NO: 590857 - RNA, 22 nt, Human
augggcaggcaagguggcgagu

SEQ ID NO: 590858 - RNA, 22 nt, Human
cauuacaaacauguuaagauuu

SEQ ID NO: 590859 - RNA, 20 nt, Human
ucagugcucaggcaccaggu

SEQ ID NO: 590860 - RNA, 22 nt, Human
ugcuuucugcucuuguccacac

SEQ ID NO: 590861 - RNA, 22 nt, Human
uugcuuuagguauagaauccau

SEQ ID NO: 590862 - RNA, 22 nt, Human
ccuaguuuucauucagcagccu

SEQ ID NO: 590863 - RNA, 22 nt, Human
ugagaagcagcuuacagguguc

SEQ ID NO: 590864 - RNA, 22 nt, Human
agucaggacacagcaugaacau

SEQ ID NO: 590865 - RNA, 22 nt, Human
gggaugguggcuugcaucugua

SEQ ID NO: 590866 - RNA, 22 nt, Human
acccugauauagguccaagagc

SEQ ID NO: 590867 - RNA, 22 nt, Human
ccaggaggcucuugucccuggu

SEQ ID NO: 590868 - RNA, 22 nt, Human
ugcuggagcaucugagagcauc

SEQ ID NO: 590869 - RNA, 22 nt, Human
aggugucuggauggguguccuu

SEQ ID NO: 590870 - RNA, 22 nt, Human
cacaauuuguuuuaucaguauu

SEQ ID NO: 590871 - RNA, 22 nt, Human
ugugaagcuggauccuggagcu

SEQ ID NO: 590872 - RNA, 22 nt, Human
gggccaguagcaccugugugga

SEQ ID NO: 590873 - RNA, 22 nt, Human
aacauauaaacucuuaaguuca

SEQ ID NO: 590874 - RNA, 22 nt, Human
ugaaugaugguguguucuugcc

SEQ ID NO: 590875 - RNA, 20 nt, Human
uuuuuccuucucuacaggca

SEQ ID NO: 590876 - RNA, 22 nt, Human
ugucuucaguaaaauacacuau

SEQ ID NO: 590877 - RNA, 22 nt, Human
ucauuuucaaguuugaacagga

SEQ ID NO: 590878 - RNA, 22 nt, Human
cuugcugucccuugguaugaac

SEQ ID NO: 590879 - RNA, 22 nt, Human
agcuccaggugcaagucauggu

SEQ ID NO: 590880 - RNA, 22 nt, Human
guuuauuauucaacuucauguu

SEQ ID NO: 590881 - RNA, 22 nt, Human
caggcccuggcagggcugaguc

SEQ ID NO: 590882 - RNA, 22 nt, Human
uggaggcaggagacagggcaaa

SEQ ID NO: 590883 - RNA, 19 nt, Human
cuucugcagggugacagug

SEQ ID NO: 590884 - RNA, 22 nt, Human
ugucuuaauuuggaugauguuu

SEQ ID NO: 590885 - RNA, 22 nt, Human
agccuggcccugcugaacucug

SEQ ID NO: 590886 - RNA, 22 nt, Human
ugcugggcuaggguggagcucu

SEQ ID NO: 590887 - RNA, 22 nt, Human
gaggcacaccagggagucuugu

SEQ ID NO: 590888 - RNA, 22 nt, Human
ggugggcaggcgaggcccaggu

SEQ ID NO: 590889 - RNA, 22 nt, Human
uccuucagaggacggcagccag

SEQ ID NO: 590890 - RNA, 22 nt, Human
ucucugugugccuucaucugcc

SEQ ID NO: 590891 - RNA, 22 nt, Human
gauuucuuuagguguaauagug

SEQ ID NO: 590892 - RNA, 22 nt, Human
caggaaggcccaccuguccugu

SEQ ID NO: 590893 - RNA, 22 nt, Human
cugagccaaccacagcaggagc

SEQ ID NO: 590894 - RNA, 22 nt, Human
caaguuuuagcaaguggaaagg

SEQ ID NO: 590895 - RNA, 22 nt, Human
uguggugguaaugagccagaug

SEQ ID NO: 590896 - RNA, 22 nt, Human
gaauuuaaauuuaaaucuacca

SEQ ID NO: 590897 - RNA, 22 nt, Human
cuucccugguguuagcccaaug

SEQ ID NO: 590898 - RNA, 22 nt, Human
gcgagggcacgcgguugaaggc

SEQ ID NO: 590899 - RNA, 22 nt, Human
caugcaggccuauggagcagug

SEQ ID NO: 590900 - RNA, 22 nt, Human
gggacaugaagcaucggaggca

SEQ ID NO: 590901 - RNA, 22 nt, Human
cuaagaaauguugugaaugcca

SEQ ID NO: 590902 - RNA, 22 nt, Human
aggacacagguaagccagugga

SEQ ID NO: 590903 - RNA, 22 nt, Human
uagucacaggaaguuucaaugu

SEQ ID NO: 590904 - RNA, 22 nt, Human
gcagagcugcagcgaggccugg

SEQ ID NO: 590905 - RNA, 22 nt, Human
uuuuaugcaaguuaugauuaaa

SEQ ID NO: 590906 - RNA, 22 nt, Human
ugaagaaaggugugggauacuc

SEQ ID NO: 590907 - RNA, 22 nt, Human
ccagcugugccuaggagcaggg

SEQ ID NO: 590908 - RNA, 22 nt, Human
aguuucuguuaccauauuugac

SEQ ID NO: 590909 - RNA, 22 nt, Human
auuauuaggugcucucugacaa

SEQ ID NO: 590910 - RNA, 22 nt, Human
auagugucagaaaaucauaaga

SEQ ID NO: 590911 - RNA, 22 nt, Human
cucaguuucugacauuaaaauc

SEQ ID NO: 590912 - RNA, 22 nt, Human
ugaccuauuagauuuccuugcc

SEQ ID NO: 590913 - RNA, 22 nt, Human
uagaagaacaugucaaacuaua

SEQ ID NO: 590914 - RNA, 23 nt, Human
cccugcccauugagcaggacguc

SEQ ID NO: 590915 - RNA, 22 nt, Human
ugucuucuaccuugacagcauu

SEQ ID NO: 590916 - RNA, 22 nt, Human
cagucccaaggaggaagcaguc

SEQ ID NO: 590917 - RNA, 22 nt, Human
acagcagcugccuucaggcucu

SEQ ID NO: 590918 - RNA, 22 nt, Human
ccuggcugugugaccuuggcaa

SEQ ID NO: 590919 - RNA, 22 nt, Human
uagaacuaaagaacaacuuuga

SEQ ID NO: 590920 - RNA, 22 nt, Human
uguuuucuauuaccugagauug

SEQ ID NO: 590921 - RNA, 22 nt, Human
gguguccaucaggcugugcuuc

SEQ ID NO: 590922 - RNA, 22 nt, Human
uauugacaauaggcaacugagg

SEQ ID NO: 590923 - RNA, 22 nt, Human
uccagccacucagcagggauug

SEQ ID NO: 590924 - RNA, 21 nt, Human
gucuuuuaagugaagagaggc

SEQ ID NO: 590925 - RNA, 22 nt, Human
agccauuuuccugaaauauaac

SEQ ID NO: 590926 - RNA, 22 nt, Human
auuccaaacuuaccccagagga

SEQ ID NO: 590927 - RNA, 22 nt, Human
gcaacaggcaguuugcucaugu

SEQ ID NO: 590928 - RNA, 22 nt, Human
gugcugagcacaaggcccagag

SEQ ID NO: 590929 - RNA, 22 nt, Human
ggcagagugcucugggcagggg

SEQ ID NO: 590930 - RNA, 22 nt, Human
gcagcagugcgggcagcuacag

SEQ ID NO: 590931 - RNA, 22 nt, Human
ugcugaaagaccguauuuaucu

SEQ ID NO: 590932 - RNA, 22 nt, Human
acagagacaggcagacagucuu

SEQ ID NO: 590933 - RNA, 20 nt, Human
agucuggcaccuauuccugu

SEQ ID NO: 590934 - RNA, 22 nt, Human
agaagccucauccucucuagug

SEQ ID NO: 590935 - RNA, 21 nt, Human
ugggagagggcucagcuaccc

SEQ ID NO: 590936 - RNA, 22 nt, Human
gcuguacaaauuccacaagaga

SEQ ID NO: 590937 - RNA, 22 nt, Human
gcccagcugcacccuggugggu

SEQ ID NO: 590938 - RNA, 19 nt, Human
cagaggcacuuucucuuag

SEQ ID NO: 590939 - RNA, 22 nt, Human
ugcauauugugaaaauguagau

SEQ ID NO: 590940 - RNA, 22 nt, Human
cagcuauugauaaauguugggg

SEQ ID NO: 590941 - RNA, 22 nt, Human
gaccucagcuguggggaugcug

SEQ ID NO: 590942 - RNA, 22 nt, Human
uuccuugaaugagucauggaaa

SEQ ID NO: 590943 - RNA, 21 nt, Human
uaggggcuggggcuccagcug

SEQ ID NO: 590944 - RNA, 20 nt, Human
aaggcagaguggguuggagc

SEQ ID NO: 590945 - RNA, 22 nt, Human
ucugggugacccugggcaaggc

SEQ ID NO: 590946 - RNA, 22 nt, Human
ccugggcauaaaucacuccaag

SEQ ID NO: 590947 - RNA, 22 nt, Human
uggcucaguggcagccgcagcu

SEQ ID NO: 590948 - RNA, 18 nt, Human
uauauuucacacauauuc

SEQ ID NO: 590949 - RNA, 21 nt, Human
ccagcccagccuccuucucuu

SEQ ID NO: 590950 - RNA, 22 nt, Human
cagagcugugauaaauagauau

SEQ ID NO: 590951 - RNA, 22 nt, Human
ucauuucuaucuaugcagcuuc

SEQ ID NO: 590952 - RNA, 22 nt, Human
cugccugcucaccagggcucug

SEQ ID NO: 590953 - RNA, 22 nt, Human
uucuccugcccuuggacuucca

SEQ ID NO: 590954 - RNA, 22 nt, Human
ccacugcuagagaugcaucccc

SEQ ID NO: 590955 - RNA, 22 nt, Human
gaggcaguaauugugggcaaua

SEQ ID NO: 590956 - RNA, 22 nt, Human
ugcuucugaaaugcaggucuuc

SEQ ID NO: 590957 - RNA, 22 nt, Human
ugcuggaguucgacauugcaaa

SEQ ID NO: 590958 - RNA, 22 nt, Human
ccaggguugcagggagccagca

SEQ ID NO: 590959 - RNA, 22 nt, Human
aagaguauagcuuuaggauuga

SEQ ID NO: 590960 - RNA, 22 nt, Human
ccaggggaaacagggagcacuc

SEQ ID NO: 590961 - RNA, 22 nt, Human
gggauccauccgugcagcagag

SEQ ID NO: 590962 - RNA, 22 nt, Human
gucuucaggacccggaauuuug

SEQ ID NO: 590963 - RNA, 21 nt, Human
agguggucugcagcagcugaa

SEQ ID NO: 590964 - RNA, 22 nt, Human
uucccagauuggagggcagggg

SEQ ID NO: 590965 - RNA, 22 nt, Human
guguauaacuaucuaucuagua

SEQ ID NO: 590966 - RNA, 22 nt, Human
cugcauccuaaccuccaugcag

SEQ ID NO: 590967 - RNA, 22 nt, Human
agaaggcacucacacuggcacg

SEQ ID NO: 590968 - RNA, 22 nt, Human
ggagggggaaacuuuggcugcc

SEQ ID NO: 590969 - RNA, 22 nt, Human
aaaguuuacagugcacaugggu

SEQ ID NO: 590970 - RNA, 22 nt, Human
guuccacaaaauguacccaguu

SEQ ID NO: 590971 - RNA, 22 nt, Human
gcugugagggucuagugaggug

SEQ ID NO: 590972 - RNA, 22 nt, Human
aguuucauguagccauauuuac

SEQ ID NO: 590973 - RNA, 22 nt, Human
gaggcugaguagcuuugugcuc

SEQ ID NO: 590974 - RNA, 22 nt, Human
agugggcaugaucuggugucug

SEQ ID NO: 590975 - RNA, 22 nt, Human
ugcuuuaagacacuaaguuuga

SEQ ID NO: 590976 - RNA, 22 nt, Human
uuuacugagugaccuagaauaa

SEQ ID NO: 590977 - RNA, 22 nt, Human
ucaggagagagaaauuggggcu

SEQ ID NO: 590978 - RNA, 22 nt, Human
gcuucagaaguugggcucugac

SEQ ID NO: 590979 - RNA, 22 nt, Human
caggucuguauuaacagagggu

SEQ ID NO: 590980 - RNA, 22 nt, Human
uacauugugauguuucaauaca

SEQ ID NO: 590981 - RNA, 20 nt, Human
agcaagaguguaccuggcca

SEQ ID NO: 590982 - RNA, 22 nt, Human
ucugggagagucacaggcauug

SEQ ID NO: 590983 - RNA, 22 nt, Human
gaaauucaggacaaagacucuu

SEQ ID NO: 590984 - RNA, 22 nt, Human
guggccaggccgacugccaggc

SEQ ID NO: 590985 - RNA, 22 nt, Human
agccacagucuguagccagcuu

SEQ ID NO: 590986 - RNA, 22 nt, Human
gcagcuuuuuggaugucaguua

SEQ ID NO: 590987 - RNA, 22 nt, Human
aaggcacugacugugcagggga

SEQ ID NO: 590988 - RNA, 22 nt, Human
ucccagggacccagccugauac

SEQ ID NO: 590989 - RNA, 17 nt, Human
gcuggcugacccaugcc

SEQ ID NO: 590990 - RNA, 22 nt, Human
uuggcugguaagccaaaugaaa

SEQ ID NO: 590991 - RNA, 22 nt, Human
gcucucuugacagcuugcuguu

SEQ ID NO: 590992 - RNA, 22 nt, Human
aguggcagacacaaugugggca

SEQ ID NO: 590993 - RNA, 22 nt, Human
uggagcaggaagucuauggcug

SEQ ID NO: 590994 - RNA, 22 nt, Human
aagcaaagagauaaccuuuugg

SEQ ID NO: 590995 - RNA, 22 nt, Human
cuuuacaccaagcagaucuuuc

SEQ ID NO: 590996 - RNA, 17 nt, Human
uccagcuccucauuguu

SEQ ID NO: 590997 - RNA, 22 nt, Human
uugggguaaggaaauauggcuu

SEQ ID NO: 590998 - RNA, 22 nt, Human
uugcccugccucccugagguga

SEQ ID NO: 590999 - RNA, 22 nt, Human
gacagggacacagccagugagg

SEQ ID NO: 591000 - RNA, 22 nt, Human
ucuccaggcacuuggcugcuac

SEQ ID NO: 591001 - RNA, 19 nt, Human
uccagcagugcuugaaauc

SEQ ID NO: 591002 - RNA, 22 nt, Human
cuggcucaguucuugguuuuca

SEQ ID NO: 591003 - RNA, 22 nt, Human
ggaaagcucagaucuuguugga

SEQ ID NO: 591004 - RNA, 22 nt, Human
acaguucuaaaucuuggauaau

SEQ ID NO: 591005 - RNA, 22 nt, Human
gaggccugguuuccagcauccu

SEQ ID NO: 591006 - RNA, 22 nt, Human
acccugagggguauagcagaag

SEQ ID NO: 591007 - RNA, 22 nt, Human
uauuagcaguuguaugugucug

SEQ ID NO: 591008 - RNA, 22 nt, Human
gugaggagucugaagcacauaa

SEQ ID NO: 591009 - RNA, 22 nt, Human
ggaggaaauccuuaguaaggca

SEQ ID NO: 591010 - RNA, 22 nt, Human
agagaaaacucauugagguguc

SEQ ID NO: 591011 - RNA, 22 nt, Human
acaaaaagcuccauuacugucc

SEQ ID NO: 591012 - RNA, 22 nt, Human
ucuuugcacacagcgauucuuc

SEQ ID NO: 591013 - RNA, 22 nt, Human
uagugcuuaacacaaagugauu

SEQ ID NO: 591014 - RNA, 22 nt, Human
uuuauauagagauuugugcaug

SEQ ID NO: 591015 - RNA, 23 nt, Human
cagugggcuucuaacugcuccug

SEQ ID NO: 591016 - RNA, 22 nt, Human
gcuguggcugaagaugcaggga

SEQ ID NO: 591017 - RNA, 22 nt, Human
acagcucagacaucacugcucu

SEQ ID NO: 591018 - RNA, 22 nt, Human
gcccagggucuacaaaaauauu

SEQ ID NO: 591019 - RNA, 22 nt, Human
agacagacugguuugaauuggu

SEQ ID NO: 591020 - RNA, 22 nt, Human
guuuaugaaauuucaggcauuu

SEQ ID NO: 591021 - RNA, 22 nt, Human
ucugggaugaagccagaaacuu

SEQ ID NO: 591022 - RNA, 22 nt, Human
uagggcaauauuucccagaaaa

SEQ ID NO: 591023 - RNA, 22 nt, Human
ggagcugugcagugacuacaga

SEQ ID NO: 591024 - RNA, 22 nt, Human
ugagaguuuugacgcuuguaac

SEQ ID NO: 591025 - RNA, 22 nt, Human
ggucugagauauuuguucagcu

SEQ ID NO: 591026 - RNA, 22 nt, Human
cagugcauagauccugaggccu

SEQ ID NO: 591027 - RNA, 23 nt, Human
uucuccugaggaagcagggacug

SEQ ID NO: 591028 - RNA, 22 nt, Human
gcagcaggauggccaauugcca

SEQ ID NO: 591029 - RNA, 22 nt, Human
cucccuggaggcccagaccugg

SEQ ID NO: 591030 - RNA, 22 nt, Human
gcugccacgaucucugcuguag

SEQ ID NO: 591031 - RNA, 22 nt, Human
acuuuuuacaggguguauacca

SEQ ID NO: 591032 - RNA, 22 nt, Human
acugucgauuaugaugagucag

SEQ ID NO: 591033 - RNA, 19 nt, Human
ggccuggcuaucccugcug

SEQ ID NO: 591034 - RNA, 20 nt, Human
gccugcagagaaggucagag

SEQ ID NO: 591035 - RNA, 22 nt, Human
ccuccuggaggcucuagggaaa

SEQ ID NO: 591036 - RNA, 22 nt, Human
ucuauaaaugcagauaugugug

SEQ ID NO: 591037 - RNA, 22 nt, Human
ugcccuggcuccucccacgcug

SEQ ID NO: 591038 - RNA, 22 nt, Human
auuuacaguuuagcauuucaag

SEQ ID NO: 591039 - RNA, 22 nt, Human
agagaaaagaguucaggcuuug

SEQ ID NO: 591040 - RNA, 22 nt, Human
cacaguccuacagagaucagag

SEQ ID NO: 591041 - RNA, 22 nt, Human
ugucuacugcugacacuaacag

SEQ ID NO: 591042 - RNA, 22 nt, Human
ugagauggaaggugaggcagua

SEQ ID NO: 591043 - RNA, 22 nt, Human
gcccaagccggagcugggagag

SEQ ID NO: 591044 - RNA, 16 nt, Human
ucccugggaguggugg

SEQ ID NO: 591045 - RNA, 22 nt, Human
guacaguagagccagguucagu

SEQ ID NO: 591046 - RNA, 22 nt, Human
uugacaaaggaauugaaucucu

SEQ ID NO: 591047 - RNA, 22 nt, Human
uccugugguaugggagugaugu

SEQ ID NO: 591048 - RNA, 22 nt, Human
uuuuugucuauucacugauuca

SEQ ID NO: 591049 - RNA, 22 nt, Human
auaaucaaaguccuaugacauc

SEQ ID NO: 591050 - RNA, 23 nt, Human
gagauggcugguuguccucugaa

SEQ ID NO: 591051 - RNA, 22 nt, Human
gcagacaauuuauuagcagauu

SEQ ID NO: 591052 - RNA, 21 nt, Human
uucagaaguugagggcagguu

SEQ ID NO: 591053 - RNA, 22 nt, Human
aaugcaaugcagcaccuccuug

SEQ ID NO: 591054 - RNA, 22 nt, Human
agagacuuugucuauuuuguuc

SEQ ID NO: 591055 - RNA, 22 nt, Human
gaauaacugcuaucuuucuggc

SEQ ID NO: 591056 - RNA, 22 nt, Human
uucuaguucugaaagccugaca

SEQ ID NO: 591057 - RNA, 22 nt, Human
ucugggaacuauaucugguggu

SEQ ID NO: 591058 - RNA, 22 nt, Human
ccaguucugacacaagcacagu

SEQ ID NO: 591059 - RNA, 22 nt, Human
agaagccaauccuugucucucu

SEQ ID NO: 591060 - RNA, 22 nt, Human
uagcuuuguuagaaugucuuca

SEQ ID NO: 591061 - RNA, 22 nt, Human
cugaaacuauggggaggggagc

SEQ ID NO: 591062 - RNA, 22 nt, Human
acagcacuggucccgcaagccu

SEQ ID NO: 591063 - RNA, 22 nt, Human
ucaaaucuuuaacaugugcaaa

SEQ ID NO: 591064 - RNA, 22 nt, Human
ucuucaugaaugaaucuuugac

SEQ ID NO: 591065 - RNA, 22 nt, Human
uuuaccaaauagauuaugucag

SEQ ID NO: 591066 - RNA, 22 nt, Human
cuuccucugccucccgugcuca

SEQ ID NO: 591067 - RNA, 22 nt, Human
uaaguuuaccacuuucagaauu

SEQ ID NO: 591068 - RNA, 22 nt, Human
gagcaggcucugccuguguguc

SEQ ID NO: 591069 - RNA, 22 nt, Human
gagaaaauagcauguguaguau

SEQ ID NO: 591070 - RNA, 22 nt, Human
ccucuguggucugucuaaugca

SEQ ID NO: 591071 - RNA, 22 nt, Human
ucuccugcuucaacugauggac

SEQ ID NO: 591072 - RNA, 22 nt, Human
uucaagaagcccaaagacuagc

SEQ ID NO: 591073 - RNA, 22 nt, Human
ccuggccagccagggcuggggu

SEQ ID NO: 591074 - RNA, 22 nt, Human
agggaaaucuuucaacacuuca

SEQ ID NO: 591075 - RNA, 22 nt, Human
aaucaucuucaucuuacacaga

SEQ ID NO: 591076 - RNA, 22 nt, Human
uuucauugcagagucugugugc

SEQ ID NO: 591077 - RNA, 22 nt, Human
auuuguacaaauuuauguuagu

SEQ ID NO: 591078 - RNA, 22 nt, Human
uuacaauugagucuauuguaug

SEQ ID NO: 591079 - RNA, 23 nt, Human
ugcuggagacaagugugagaagg

SEQ ID NO: 591080 - RNA, 22 nt, Human
aaacauguaauucugcuuaaga

SEQ ID NO: 591081 - RNA, 22 nt, Human
aaggaagacuugagaagguucc

SEQ ID NO: 591082 - RNA, 22 nt, Human
aguucucuaugaagucuauugu

SEQ ID NO: 591083 - RNA, 22 nt, Human
ucuggcagcucaguucaggucu

SEQ ID NO: 591084 - RNA, 22 nt, Human
ucaguaauuaccuaugacucga

SEQ ID NO: 591085 - RNA, 22 nt, Human
uaucacuacacuucagcuuuaa

SEQ ID NO: 591086 - RNA, 21 nt, Human
uggccaaacuggagcauuuga

SEQ ID NO: 591087 - RNA, 22 nt, Human
ggagccugguauaguguugcau

SEQ ID NO: 591088 - RNA, 22 nt, Human
gaaggaaaacagaucugccuga

SEQ ID NO: 591089 - RNA, 19 nt, Human
ucuucugacuucaagaaac

SEQ ID NO: 591090 - RNA, 22 nt, Human
aaucuuacuuaugauuuuucgg

SEQ ID NO: 591091 - RNA, 22 nt, Human
uugugaaauguuucaaaauagu

SEQ ID NO: 591092 - RNA, 22 nt, Human
uuugacuucuaucuaguaagaa

SEQ ID NO: 591093 - RNA, 22 nt, Human
ccacagcugacaauggauagac

SEQ ID NO: 591094 - RNA, 22 nt, Human
guuacacucuccaggcacuugg

SEQ ID NO: 591095 - RNA, 23 nt, Human
uugcuucugugcaauucaguacu

SEQ ID NO: 591096 - RNA, 21 nt, Human
uucaggugagaucauguugac

SEQ ID NO: 591097 - RNA, 22 nt, Human
guauuuuacuuacgcaugacuu

SEQ ID NO: 591098 - RNA, 22 nt, Human
gagugcagaugccagccccagu

SEQ ID NO: 591099 - RNA, 22 nt, Human
gugucacaugguuuacugcagc

SEQ ID NO: 591100 - RNA, 22 nt, Human
cuuaggaaaguuggcugauuuc

SEQ ID NO: 591101 - RNA, 22 nt, Human
cuggaguucaguggcgugaaca

SEQ ID NO: 591102 - RNA, 22 nt, Human
gcugaggauauagcaggaacaa

SEQ ID NO: 591103 - RNA, 22 nt, Human
ugagcagagcaguaacaggagc

SEQ ID NO: 591104 - RNA, 20 nt, Human
auguuguuuacucauagcau

SEQ ID NO: 591105 - RNA, 18 nt, Human
cucugaaagacacaccag

SEQ ID NO: 591106 - RNA, 22 nt, Human
cacuuaaauguuccuacagcag

SEQ ID NO: 591107 - RNA, 22 nt, Human
cuccucccucuuugccacacau

SEQ ID NO: 591108 - RNA, 19 nt, Human
uugaggggccaggggagau

SEQ ID NO: 591109 - RNA, 22 nt, Human
uauuuauaaucugccaaagaga

SEQ ID NO: 591110 - RNA, 22 nt, Human
acacacugagugccauaggacc

SEQ ID NO: 591111 - RNA, 22 nt, Human
uggagguggugcccagcaauuu

SEQ ID NO: 591112 - RNA, 22 nt, Human
ccuccugggagagcacggaggg

SEQ ID NO: 591113 - RNA, 22 nt, Human
cuggagcucuguguguuccuga

SEQ ID NO: 591114 - RNA, 22 nt, Human
uucacuguacugacugucuuau

SEQ ID NO: 591115 - RNA, 22 nt, Human
gcaggggaguggcaggcccgga

SEQ ID NO: 591116 - RNA, 22 nt, Human
aaauagcuacaugaucucuagg

SEQ ID NO: 591117 - RNA, 22 nt, Human
cugggaagaauccaagggcccu

SEQ ID NO: 591118 - RNA, 22 nt, Human
gaguuacauggacauucucucc

SEQ ID NO: 591119 - RNA, 22 nt, Human
uccuugaagaaugauucuugga

SEQ ID NO: 591120 - RNA, 22 nt, Human
cugagcugugugguccugggca

SEQ ID NO: 591121 - RNA, 22 nt, Human
ugaaugugaugcuaaacauaug

SEQ ID NO: 591122 - RNA, 22 nt, Human
uacagauauagagauuuauaga

SEQ ID NO: 591123 - RNA, 22 nt, Human
gaaugcagauggcugguguaug

SEQ ID NO: 591124 - RNA, 22 nt, Human
aauguugaggauaucagaaaau

SEQ ID NO: 591125 - RNA, 22 nt, Human
gggaagcugcguggucuagggc

SEQ ID NO: 591126 - RNA, 22 nt, Human
gacuaacagucuccgcuugaaa

SEQ ID NO: 591127 - RNA, 17 nt, Human
ugaggcucggugaggag

SEQ ID NO: 591128 - RNA, 22 nt, Human
aggagacaucuaacuguagguu

SEQ ID NO: 591129 - RNA, 22 nt, Human
agcaaggcagucagcuggcugg

SEQ ID NO: 591130 - RNA, 22 nt, Human
auuuacagugugccuacuauau

SEQ ID NO: 591131 - RNA, 22 nt, Human
cccaaggaagacgcuugugaua

SEQ ID NO: 591132 - RNA, 22 nt, Human
accuuucacgguaucagacauc

SEQ ID NO: 591133 - RNA, 22 nt, Human
ugaaauaacuuuugggugaguu

SEQ ID NO: 591134 - RNA, 22 nt, Human
ccugcuuugcugguaccaucag

SEQ ID NO: 591135 - RNA, 22 nt, Human
cuauugaauagcccaaaucauu

SEQ ID NO: 591136 - RNA, 22 nt, Human
gucugaggguugugcuggagga

SEQ ID NO: 591137 - RNA, 22 nt, Human
cagucaaacuuauaggcacauu

SEQ ID NO: 591138 - RNA, 22 nt, Human
ucuugcuaggagcuauggaaga

SEQ ID NO: 591139 - RNA, 22 nt, Human
uuacagaaaagggguuguccuu

SEQ ID NO: 591140 - RNA, 22 nt, Human
cuggcucugucacccuuucucc

SEQ ID NO: 591141 - RNA, 22 nt, Human
cuccuggggcacuuagaagcaa

SEQ ID NO: 591142 - RNA, 22 nt, Human
uucugcauggagaaacugaguc

SEQ ID NO: 591143 - RNA, 22 nt, Human
auuucuugauuccaccagugaa

SEQ ID NO: 591144 - RNA, 22 nt, Human
gugcuuuccauccucccugcug

SEQ ID NO: 591145 - RNA, 22 nt, Human
aaaauucauggcuugggaaaag

SEQ ID NO: 591146 - RNA, 22 nt, Human
uucagcaccuggaauagcaccu

SEQ ID NO: 591147 - RNA, 22 nt, Human
agaauauucaucuguauucuua

SEQ ID NO: 591148 - RNA, 22 nt, Human
agcuguuuccauaaaugagaca

SEQ ID NO: 591149 - RNA, 22 nt, Human
agccaacuuagaagaaauuuga

SEQ ID NO: 591150 - RNA, 22 nt, Human
ugcacacaaaugugaacgugcc

SEQ ID NO: 591151 - RNA, 22 nt, Human
augggcugcuuggcuuccaccc

SEQ ID NO: 591152 - RNA, 22 nt, Human
uccuucuacacugccucugaga

SEQ ID NO: 591153 - RNA, 22 nt, Human
uuucaagucaguagcuaaucau

SEQ ID NO: 591154 - RNA, 22 nt, Human
cuggggaacgcagcgagcagcg

SEQ ID NO: 591155 - RNA, 22 nt, Human
aaggccaacuaggaugagcuag

SEQ ID NO: 591156 - RNA, 22 nt, Human
aggagugggggcgagaaguuaa

SEQ ID NO: 591157 - RNA, 22 nt, Human
uccaauaacaucuaaaaacuua

SEQ ID NO: 591158 - RNA, 22 nt, Human
agcugugugacucuaagcaagu

SEQ ID NO: 591159 - RNA, 22 nt, Human
uccaggacagcggcaggcagau

SEQ ID NO: 591160 - RNA, 22 nt, Human
uucagcuccuuucuuccaccag

SEQ ID NO: 591161 - RNA, 21 nt, Human
ugcugaaucugccauauuuuc

SEQ ID NO: 591162 - RNA, 20 nt, Human
cugcccugcccuggguccug

SEQ ID NO: 591163 - RNA, 22 nt, Human
ggcaggcugcuugggucauguc

SEQ ID NO: 591164 - RNA, 22 nt, Human
augaagauaauagcauugguug

SEQ ID NO: 591165 - RNA, 19 nt, Human
ucccagagucuagagguug

SEQ ID NO: 591166 - RNA, 22 nt, Human
uauccaugccuuugugccuuag

SEQ ID NO: 591167 - RNA, 22 nt, Human
cugaaccaucucuguucuguau

SEQ ID NO: 591168 - RNA, 22 nt, Human
cauaccuuucucaagcacaugu

SEQ ID NO: 591169 - RNA, 22 nt, Human
gcuuccucccugcugcucacua

SEQ ID NO: 591170 - RNA, 22 nt, Human
cacacugacuggaaucaaggau

SEQ ID NO: 591171 - RNA, 22 nt, Human
uucaucaauguguuuaauaaug

SEQ ID NO: 591172 - RNA, 22 nt, Human
agaagugguguguggccgagcu

SEQ ID NO: 591173 - RNA, 22 nt, Human
ccugggagccaagccucugugu

SEQ ID NO: 591174 - RNA, 22 nt, Human
agcaggagauggggcgugaugu

SEQ ID NO: 591175 - RNA, 22 nt, Human
cccuugaauuuucagagagggg

SEQ ID NO: 591176 - RNA, 22 nt, Human
uuguccugugauuucagggccu

SEQ ID NO: 591177 - RNA, 22 nt, Human
uuuaaaaucagaugggaguugg

SEQ ID NO: 591178 - RNA, 22 nt, Human
gacuuuaaaaugcuagaacagg

SEQ ID NO: 591179 - RNA, 22 nt, Human
ucagggagauuuggggacucaa

SEQ ID NO: 591180 - RNA, 18 nt, Human
aaaaugcaggcgacaugg

SEQ ID NO: 591181 - RNA, 17 nt, Human
ccucagcuucuuuccuc

SEQ ID NO: 591182 - RNA, 22 nt, Human
uacuuucuuucugauccuuaug

SEQ ID NO: 591183 - RNA, 22 nt, Human
gccuggaguagcauggcaagcc

SEQ ID NO: 591184 - RNA, 22 nt, Human
gaguagggaugcuggugacucc

SEQ ID NO: 591185 - RNA, 22 nt, Human
auaacgaaggcugaugcgggau

SEQ ID NO: 591186 - RNA, 22 nt, Human
guauuagaagaaauuauaggua

SEQ ID NO: 591187 - RNA, 22 nt, Human
gcagcagggagcagggguguca

SEQ ID NO: 591188 - RNA, 22 nt, Human
acugaggucuaucaugagccag

SEQ ID NO: 591189 - RNA, 22 nt, Human
aagauaauauucauuaacuaga

SEQ ID NO: 591190 - RNA, 22 nt, Human
acagccugacuuuuguugucac

SEQ ID NO: 591191 - RNA, 23 nt, Human
guuuuacaggugagaaaauggag

SEQ ID NO: 591192 - RNA, 22 nt, Human
uuucaaauagaaucuuuccaaa

SEQ ID NO: 591193 - RNA, 22 nt, Human
cucuggguucacugaggcucug

SEQ ID NO: 591194 - RNA, 22 nt, Human
gaggggccuggcacugagcugg

SEQ ID NO: 591195 - RNA, 22 nt, Human
uaaauagagaaucagcuuggag

SEQ ID NO: 591196 - RNA, 22 nt, Human
acaguguuguauuuaguuugau

SEQ ID NO: 591197 - RNA, 22 nt, Human
cauuucaaugccuucaacauag

SEQ ID NO: 591198 - RNA, 22 nt, Human
aaagcaagucucuacaaaguac

SEQ ID NO: 591199 - RNA, 22 nt, Human
cugugaauuuaaagcacacauc

SEQ ID NO: 591200 - RNA, 22 nt, Human
cccagcuccuuggaugggcagg

SEQ ID NO: 591201 - RNA, 22 nt, Human
cccagcaggugccaucacucug

SEQ ID NO: 591202 - RNA, 22 nt, Human
auuucucuuagcaagacauuac

SEQ ID NO: 591203 - RNA, 22 nt, Human
uucucuggagggcugcccggcc

SEQ ID NO: 591204 - RNA, 22 nt, Human
gaaacacauaugaacaguugau

SEQ ID NO: 591205 - RNA, 18 nt, Human
cagaagcaggcagugcag

SEQ ID NO: 591206 - RNA, 22 nt, Human
uggggccugcacaggcugaaug

SEQ ID NO: 591207 - RNA, 22 nt, Human
gcacugggugggagaucugaau

SEQ ID NO: 591208 - RNA, 22 nt, Human
ucuggggaugagugaugucgua

SEQ ID NO: 591209 - RNA, 22 nt, Human
uaguuuaauggucaacuaauga

SEQ ID NO: 591210 - RNA, 22 nt, Human
agugcaaagggaucagauuggg

SEQ ID NO: 591211 - RNA, 22 nt, Human
ucaggagacuuaugucacagug

SEQ ID NO: 591212 - RNA, 22 nt, Human
gcuggagccaagcugcucuugg

SEQ ID NO: 591213 - RNA, 22 nt, Human
agguauaagucucauuucuguu

SEQ ID NO: 591214 - RNA, 22 nt, Human
uccuggagggcucacaggcggc

SEQ ID NO: 591215 - RNA, 22 nt, Human
cccugucucauugaucacuugu

SEQ ID NO: 591216 - RNA, 22 nt, Human
aguugucaccucuauucaaauc

SEQ ID NO: 591217 - RNA, 22 nt, Human
uucagauuuuuuaauagguaau

SEQ ID NO: 591218 - RNA, 22 nt, Human
aggaaaaaagucugugauuaua

SEQ ID NO: 591219 - RNA, 22 nt, Human
cuggcuggguuccaggauucca

SEQ ID NO: 591220 - RNA, 22 nt, Human
caguuuuuagauuaguuggugg

SEQ ID NO: 591221 - RNA, 22 nt, Human
uaugucuuaauccuuccuuagg

SEQ ID NO: 591222 - RNA, 22 nt, Human
ugaaagcaugcuugccaagcuu

SEQ ID NO: 591223 - RNA, 22 nt, Human
ccugagccuggcucaugcacuc

SEQ ID NO: 591224 - RNA, 22 nt, Human
ucucagaaggcaagggcugggg

SEQ ID NO: 591225 - RNA, 22 nt, Human
gagcagugggaaggaacagggu

SEQ ID NO: 591226 - RNA, 22 nt, Human
uuuuccucugagcuuugaauaa

SEQ ID NO: 591227 - RNA, 22 nt, Human
acacagagcuucucaacuggga

SEQ ID NO: 591228 - RNA, 22 nt, Human
cauagagugauguaagguaugu

SEQ ID NO: 591229 - RNA, 22 nt, Human
ggcugcagauuguagucuguua

SEQ ID NO: 591230 - RNA, 22 nt, Human
agcaggcuuucaagagucuucu

SEQ ID NO: 591231 - RNA, 17 nt, Human
uuccuccucaccauguu

SEQ ID NO: 591232 - RNA, 22 nt, Human
guaaaauucuagcaucugaaag

SEQ ID NO: 591233 - RNA, 22 nt, Human
ugggggcugugcacaggcucac

SEQ ID NO: 591234 - RNA, 22 nt, Human
aaaugucuuugaguauuucugc

SEQ ID NO: 591235 - RNA, 22 nt, Human
aagcugagccaguggcaagugc

SEQ ID NO: 591236 - RNA, 22 nt, Human
gccuggagacaaggacaaaggg

SEQ ID NO: 591237 - RNA, 22 nt, Human
uggcugaguuacgaacagagca

SEQ ID NO: 591238 - RNA, 20 nt, Human
gugcaauggcgcaaucucgg

SEQ ID NO: 591239 - RNA, 22 nt, Human
cccauuuguccaaaguauaaaa

SEQ ID NO: 591240 - RNA, 20 nt, Human
ugacucugcaaccgucucuc

SEQ ID NO: 591241 - RNA, 22 nt, Human
auaaaucuauuggacaugugug

SEQ ID NO: 591242 - RNA, 22 nt, Human
ggcugcaggcuucccuccagca

SEQ ID NO: 591243 - RNA, 22 nt, Human
cugagggagggacuuugagacu

SEQ ID NO: 591244 - RNA, 22 nt, Human
accuuaaaggccgaaguaaaga

SEQ ID NO: 591245 - RNA, 22 nt, Human
ucacauuucucagcacugauga

SEQ ID NO: 591246 - RNA, 22 nt, Human
auguagaauuccuucuacuuug

SEQ ID NO: 591247 - RNA, 22 nt, Human
auguacauacugcauuuucaaa

SEQ ID NO: 591248 - RNA, 22 nt, Human
caguuauuuugaggauuaaaug

SEQ ID NO: 591249 - RNA, 19 nt, Human
cccagcucucguggugugc

SEQ ID NO: 591250 - RNA, 22 nt, Human
uuuaagacuuaggaaagaggau

SEQ ID NO: 591251 - RNA, 22 nt, Human
agaagccauugaagcagaccuc

SEQ ID NO: 591252 - RNA, 21 nt, Human
ggggcagagcuaggcccugca

SEQ ID NO: 591253 - RNA, 22 nt, Human
ggggagcagaagcagcaacaac

SEQ ID NO: 591254 - RNA, 22 nt, Human
auggcuggugauacuggaguga

SEQ ID NO: 591255 - RNA, 22 nt, Human
ugucucucugcccccauugcuc

SEQ ID NO: 591256 - RNA, 22 nt, Human
uaggcagagguaugguaaggac

SEQ ID NO: 591257 - RNA, 22 nt, Human
gaagccugguccagagcuccca

SEQ ID NO: 591258 - RNA, 22 nt, Human
aggagauggagcucagugggca

SEQ ID NO: 591259 - RNA, 22 nt, Human
gauauagguucauaguguuaca

SEQ ID NO: 591260 - RNA, 22 nt, Human
aacaaugaggaucuguucugag

SEQ ID NO: 591261 - RNA, 22 nt, Human
uggcuucauggcaagucuuagu

SEQ ID NO: 591262 - RNA, 22 nt, Human
aggcacuguggguguggccgga

SEQ ID NO: 591263 - RNA, 23 nt, Human
ugggccagggaguccgguuucuu

SEQ ID NO: 591264 - RNA, 22 nt, Human
cugagaaaccaggugcucugau

SEQ ID NO: 591265 - RNA, 22 nt, Human
cuggggagugaaauucuuaaau

SEQ ID NO: 591266 - RNA, 22 nt, Human
ugccaggcauuugacagacacu

SEQ ID NO: 591267 - RNA, 22 nt, Human
uuccuucccucaguggcugaag

SEQ ID NO: 591268 - RNA, 22 nt, Human
ccagggugcucuguggcgucgc

SEQ ID NO: 591269 - RNA, 22 nt, Human
gucacacagguugaaaugcagu

SEQ ID NO: 591270 - RNA, 16 nt, Human
cuucacagaggagagu

SEQ ID NO: 591271 - RNA, 23 nt, Human
uagaaugucauucaaugauaugg

SEQ ID NO: 591272 - RNA, 22 nt, Human
ggaaaguggugguggaaagagg

SEQ ID NO: 591273 - RNA, 22 nt, Human
uuacauaccucauagacucagg

SEQ ID NO: 591274 - RNA, 22 nt, Human
agagugcuuaaagcuggcuuug

SEQ ID NO: 591275 - RNA, 22 nt, Human
uauagacuagcagcagaauuua

SEQ ID NO: 591276 - RNA, 22 nt, Human
agaugcugccaggccccucagu

SEQ ID NO: 591277 - RNA, 22 nt, Human
uucuucaauuauuggaaagaaa

SEQ ID NO: 591278 - RNA, 22 nt, Human
cugcuuggguccuggcaugggu

SEQ ID NO: 591279 - RNA, 22 nt, Human
gaugggguuuugccaggcuggu

SEQ ID NO: 591280 - RNA, 22 nt, Human
auagcacaucacuccagugagu

SEQ ID NO: 591281 - RNA, 23 nt, Human
uggcugagauccuacuguuugcu

SEQ ID NO: 591282 - RNA, 22 nt, Human
acccagaggcggagguugcagu

SEQ ID NO: 591283 - RNA, 22 nt, Human
gugcagcaaacuagugcgaggg

SEQ ID NO: 591284 - RNA, 22 nt, Human
agaggcugauggaguagugucu

SEQ ID NO: 591285 - RNA, 22 nt, Human
aagcuucaggcccacccauguc

SEQ ID NO: 591286 - RNA, 22 nt, Human
aaaguacaauauugagauugau

SEQ ID NO: 591287 - RNA, 22 nt, Human
uucaagauggcugcaaauacuu

SEQ ID NO: 591288 - RNA, 21 nt, Human
ggccucagccaccuggcucug

SEQ ID NO: 591289 - RNA, 22 nt, Human
ugucuccugcaggggugugggc

SEQ ID NO: 591290 - RNA, 20 nt, Human
aaguuuucuccaaauacagu

SEQ ID NO: 591291 - RNA, 20 nt, Human
ucuguccaccagccucgccu

SEQ ID NO: 591292 - RNA, 22 nt, Human
uuuuuguucugauuauacuggu

SEQ ID NO: 591293 - RNA, 22 nt, Human
ggcucucuccuuggcuuucaga

SEQ ID NO: 591294 - RNA, 22 nt, Human
augacuuauuacaagucauauu

SEQ ID NO: 591295 - RNA, 17 nt, Human
cccagggaccacugcuu

SEQ ID NO: 591296 - RNA, 22 nt, Human
aaagcagucucagacuuaagca

SEQ ID NO: 591297 - RNA, 22 nt, Human
gcugggagugggcaagaugaga

SEQ ID NO: 591298 - RNA, 18 nt, Human
ucuagaaacccagacucu

SEQ ID NO: 591299 - RNA, 22 nt, Human
uacaagcugacccugaagauga

SEQ ID NO: 591300 - RNA, 22 nt, Human
ucuccuugcuacccaguauguc

SEQ ID NO: 591301 - RNA, 22 nt, Human
uuucuuguaagauguuuauuaa

SEQ ID NO: 591302 - RNA, 22 nt, Human
gcaaauaauauacuuugaucuc

SEQ ID NO: 591303 - RNA, 22 nt, Human
agugcagggccugcccagcagg

SEQ ID NO: 591304 - RNA, 22 nt, Human
ucccaggcgccugguggggagc

SEQ ID NO: 591305 - RNA, 23 nt, Human
gcugaagagcaaaccaggcaaaa

SEQ ID NO: 591306 - RNA, 22 nt, Human
ugcaggugguccuuccucugcu

SEQ ID NO: 591307 - RNA, 19 nt, Human
ugaagguguaugugcuggg

SEQ ID NO: 591308 - RNA, 22 nt, Human
cccagaggaggcaaagcucugu

SEQ ID NO: 591309 - RNA, 22 nt, Human
acauuucuccuugcaggaguca

SEQ ID NO: 591310 - RNA, 22 nt, Human
ucugagccaauuucugugucca

SEQ ID NO: 591311 - RNA, 22 nt, Human
augucccuugucugugaugucu

SEQ ID NO: 591312 - RNA, 22 nt, Human
gaaacagcuagaaagccauugg

SEQ ID NO: 591313 - RNA, 22 nt, Human
gccugccuguuggcugaggugc

SEQ ID NO: 591314 - RNA, 22 nt, Human
agggucugacuccucuggcaag

SEQ ID NO: 591315 - RNA, 22 nt, Human
uuagccaggggagcagcuuguc

SEQ ID NO: 591316 - RNA, 22 nt, Human
cuuguuugauuauugccugagg

SEQ ID NO: 591317 - RNA, 22 nt, Human
cggcagagcuuccugcucagcg

SEQ ID NO: 591318 - RNA, 22 nt, Human
cacauacuuguguguacauaug

SEQ ID NO: 591319 - RNA, 22 nt, Human
agugcugaagacuggcuaggga

SEQ ID NO: 591320 - RNA, 22 nt, Human
gcagaagcugggagaagggauu

SEQ ID NO: 591321 - RNA, 22 nt, Human
agaaaaagucaaggaauuggac

SEQ ID NO: 591322 - RNA, 22 nt, Human
ugacucaguacaucuggaguug

SEQ ID NO: 591323 - RNA, 22 nt, Human
ucugaaauggcagcgggaauga

SEQ ID NO: 591324 - RNA, 22 nt, Human
gcaguaaaaaaggauaugugca

SEQ ID NO: 591325 - RNA, 22 nt, Human
cugaaggagcauagucaguuuu

SEQ ID NO: 591326 - RNA, 22 nt, Human
uccaucucaccugcacucugcg

SEQ ID NO: 591327 - RNA, 22 nt, Human
uggcauuucaguauuuucauaa

SEQ ID NO: 591328 - RNA, 22 nt, Human
uagaaacccugccuuaguagcu

SEQ ID NO: 591329 - RNA, 22 nt, Human
cagcuccuaugaguaugauucc

SEQ ID NO: 591330 - RNA, 22 nt, Human
ucagguggcuuggagggggacg

SEQ ID NO: 591331 - RNA, 22 nt, Human
ugucuggaugucuggagcaucg

SEQ ID NO: 591332 - RNA, 22 nt, Human
cagcugccacuugcucucggcu

SEQ ID NO: 591333 - RNA, 22 nt, Human
cccuccaggccugucauguucc

SEQ ID NO: 591334 - RNA, 22 nt, Human
agaagccaaaggggccagauau

SEQ ID NO: 591335 - RNA, 22 nt, Human
ucaccagggagcuuguccucug

SEQ ID NO: 591336 - RNA, 22 nt, Human
ccagcugugccguguggauagc

SEQ ID NO: 591337 - RNA, 22 nt, Human
ucuugagaaauaauuaaacaug

SEQ ID NO: 591338 - RNA, 22 nt, Human
ccugggagagucuguggucucc

SEQ ID NO: 591339 - RNA, 22 nt, Human
cuggcucauccagguguugcuc

SEQ ID NO: 591340 - RNA, 22 nt, Human
aucugucaggagcaaggacuac

SEQ ID NO: 591341 - RNA, 22 nt, Human
ucugccuucgcugcucccugaa

SEQ ID NO: 591342 - RNA, 22 nt, Human
cacacaggaugaagcagcagaa

SEQ ID NO: 591343 - RNA, 22 nt, Human
uguacauuuagagcucaauaga

SEQ ID NO: 591344 - RNA, 22 nt, Human
gcuucauuacugacagucugug

SEQ ID NO: 591345 - RNA, 22 nt, Human
gagaaagauggaaucuuacagg

SEQ ID NO: 591346 - RNA, 22 nt, Human
agcagccucuguagaggucucc

SEQ ID NO: 591347 - RNA, 22 nt, Human
cugccucuauucacugaggcag

SEQ ID NO: 591348 - RNA, 22 nt, Human
guuuuugucgaguuccuugacc

SEQ ID NO: 591349 - RNA, 22 nt, Human
aaagguuuugguaaggcuuuaa

SEQ ID NO: 591350 - RNA, 22 nt, Human
acaggacuguggaaggaucucu

SEQ ID NO: 591351 - RNA, 22 nt, Human
uuucagaaccaagagagacauc

SEQ ID NO: 591352 - RNA, 22 nt, Human
gcagguggauauugcuacuuga

SEQ ID NO: 591353 - RNA, 22 nt, Human
aggccucuugucuuccucacau

SEQ ID NO: 591354 - RNA, 22 nt, Human
ggucagaggucacaagcuggca

SEQ ID NO: 591355 - RNA, 22 nt, Human
ucccagcugagauugagcaagg

SEQ ID NO: 591356 - RNA, 22 nt, Human
uccuuauaccuuugcuccgcuu

SEQ ID NO: 591357 - RNA, 22 nt, Human
ucagcacucgcuaccuaguaaa

SEQ ID NO: 591358 - RNA, 22 nt, Human
uacacuguguaaaaugcacuuu

SEQ ID NO: 591359 - RNA, 22 nt, Human
aacuuucuccagugccaacuau

SEQ ID NO: 591360 - RNA, 22 nt, Human
ugccacacuccccugcugcagu

SEQ ID NO: 591361 - RNA, 22 nt, Human
cuuuaauuaggaaguauaauga

SEQ ID NO: 591362 - RNA, 22 nt, Human
uguuuuucaaauauugcucugu

SEQ ID NO: 591363 - RNA, 22 nt, Human
acaauagaaggaaacugacaua

SEQ ID NO: 591364 - RNA, 22 nt, Human
auugugcagauaguaauuagga

SEQ ID NO: 591365 - RNA, 18 nt, Human
ggagagugacagagucgu

SEQ ID NO: 591366 - RNA, 22 nt, Human
aagcuaugggggaguuucaacc

SEQ ID NO: 591367 - RNA, 22 nt, Human
ugaaagggaaccugcuggacug

SEQ ID NO: 591368 - RNA, 22 nt, Human
auagccagcauauagcagggag

SEQ ID NO: 591369 - RNA, 22 nt, Human
uggauaaacucacuguaaguug

SEQ ID NO: 591370 - RNA, 18 nt, Human
gaguccaggcucuucacc

SEQ ID NO: 591371 - RNA, 22 nt, Human
aaaacugaaccuugagaucuuu

SEQ ID NO: 591372 - RNA, 22 nt, Human
ggaagaaagacauuuauuuuga

SEQ ID NO: 591373 - RNA, 22 nt, Human
ucucucuuuuuaaucauguaau

SEQ ID NO: 591374 - RNA, 22 nt, Human
acacagagugguuuguagaaua

SEQ ID NO: 591375 - RNA, 22 nt, Human
uccuggcuccagcagcucuucc

SEQ ID NO: 591376 - RNA, 22 nt, Human
uaagaaucaguagauauagauu

SEQ ID NO: 591377 - RNA, 22 nt, Human
agguggcuaugaggaugcaguc

SEQ ID NO: 591378 - RNA, 23 nt, Human
uuugcaaauuggacacaaccaca

SEQ ID NO: 591379 - RNA, 22 nt, Human
acugggauuacaggugggaguc

SEQ ID NO: 591380 - RNA, 22 nt, Human
aucuguacuaauuaauuaaugu

SEQ ID NO: 591381 - RNA, 22 nt, Human
uacauauacugagugauuugcu

SEQ ID NO: 591382 - RNA, 22 nt, Human
uuauuaagugccuacaauaaag

SEQ ID NO: 591383 - RNA, 22 nt, Human
ugcugcauucaggagcacaguu

SEQ ID NO: 591384 - RNA, 22 nt, Human
ugcuauaaguagacauucaaca

SEQ ID NO: 591385 - RNA, 22 nt, Human
cuuggccagacagggagcucca

SEQ ID NO: 591386 - RNA, 22 nt, Human
uucuugaaggggauauaaauag

SEQ ID NO: 591387 - RNA, 22 nt, Human
caggaacaaggccuaugggacu

SEQ ID NO: 591388 - RNA, 22 nt, Human
ucucuguucauggcacuauguc

SEQ ID NO: 591389 - RNA, 22 nt, Human
uauguauauguauacacacaca

SEQ ID NO: 591390 - RNA, 22 nt, Human
cagaguggcgacccccucagcu

SEQ ID NO: 591391 - RNA, 22 nt, Human
acggggcuagagaagguuucuu

SEQ ID NO: 591392 - RNA, 22 nt, Human
uggaugagauuaaagugagguu

SEQ ID NO: 591393 - RNA, 22 nt, Human
gaggcugcuguuagcccugggc

SEQ ID NO: 591394 - RNA, 22 nt, Human
cucaggcugugaugugauggca

SEQ ID NO: 591395 - RNA, 22 nt, Human
aguaguuugggcagugacagau

SEQ ID NO: 591396 - RNA, 22 nt, Human
cagugcugcucucuguaagaga

SEQ ID NO: 591397 - RNA, 22 nt, Human
uuuccuugcacauugguuucca

SEQ ID NO: 591398 - RNA, 22 nt, Human
uaggaaauuggaaacucuucac

SEQ ID NO: 591399 - RNA, 21 nt, Human
acauacauaccuuaccaccuu

SEQ ID NO: 591400 - RNA, 22 nt, Human
auuuacagacccucccacuaag

SEQ ID NO: 591401 - RNA, 22 nt, Human
aggcugugaacucuaugcugaa

SEQ ID NO: 591402 - RNA, 22 nt, Human
caaaguucucggcucaaguccu

SEQ ID NO: 591403 - RNA, 22 nt, Human
ggcuguggggaccaacaggacu

SEQ ID NO: 591404 - RNA, 22 nt, Human
aacacagacauagugauuacag

SEQ ID NO: 591405 - RNA, 22 nt, Human
aagaugcuuauugcuccugcag

SEQ ID NO: 591406 - RNA, 20 nt, Human
ucuggggugaagcccaggaa

SEQ ID NO: 591407 - RNA, 19 nt, Human
gggcucuggccucaguggg

SEQ ID NO: 591408 - RNA, 22 nt, Human
ugaggaguuuuucuagagcuaa

SEQ ID NO: 591409 - RNA, 22 nt, Human
caggccugacccugagcuucac

SEQ ID NO: 591410 - RNA, 23 nt, Human
gggugggccaaauuagguagccu

SEQ ID NO: 591411 - RNA, 22 nt, Human
caggagcccagaguccucagcu

SEQ ID NO: 591412 - RNA, 22 nt, Human
cuuuagaaggguaacggaauua

SEQ ID NO: 591413 - RNA, 22 nt, Human
aggucaagaguaaauuugggua

SEQ ID NO: 591414 - RNA, 22 nt, Human
cugccuggccacaacccagggu

SEQ ID NO: 591415 - RNA, 22 nt, Human
agggcuggcaucucuaaugcug

SEQ ID NO: 591416 - RNA, 20 nt, Human
aggggugaucgggugacacu

SEQ ID NO: 591417 - RNA, 20 nt, Human
cuugaguucagagcugucau

SEQ ID NO: 591418 - RNA, 22 nt, Human
uuguuucaaauauuucagaaua

SEQ ID NO: 591419 - RNA, 17 nt, Human
agcaggcacgucagcac

SEQ ID NO: 591420 - RNA, 22 nt, Human
ccucacagccucaugcccagcc

SEQ ID NO: 591421 - RNA, 22 nt, Human
uuugaauaaacgguuaauguuc

SEQ ID NO: 591422 - RNA, 22 nt, Human
ucagaacagaagcuggcuauaa

SEQ ID NO: 591423 - RNA, 22 nt, Human
cauuugaaauucuuagaacaaa

SEQ ID NO: 591424 - RNA, 22 nt, Human
acuaugauguauuuugcaucua

SEQ ID NO: 591425 - RNA, 22 nt, Human
gggcugggauggcuugaagauu

SEQ ID NO: 591426 - RNA, 22 nt, Human
ugucugcaaaguccagcacagg

SEQ ID NO: 591427 - RNA, 22 nt, Human
ucagucauuguccuuaaaacac

SEQ ID NO: 591428 - RNA, 17 nt, Human
gcaaucucagucuccuu

SEQ ID NO: 591429 - RNA, 22 nt, Human
agucaaaugaguaaauauauaa

SEQ ID NO: 591430 - RNA, 22 nt, Human
uacuuccaggcggacaaagccc

SEQ ID NO: 591431 - RNA, 22 nt, Human
gucuggagagcugagcagaguu

SEQ ID NO: 591432 - RNA, 20 nt, Human
caccucugaaaguuuccagc

SEQ ID NO: 591433 - RNA, 22 nt, Human
aacuuccaacccagaagccuaa

SEQ ID NO: 591434 - RNA, 22 nt, Human
cagagcacugcuuggaggauuu

SEQ ID NO: 591435 - RNA, 22 nt, Human
gcucucugggugugucuagaua

SEQ ID NO: 591436 - RNA, 22 nt, Human
uauuaucauguuaauuaguggg

SEQ ID NO: 591437 - RNA, 22 nt, Human
aagucacaagcauauaugcauu

SEQ ID NO: 591438 - RNA, 22 nt, Human
aagaacauuuuguagaaugaca

SEQ ID NO: 591439 - RNA, 22 nt, Human
ccugagccugcagccgagcaga

SEQ ID NO: 591440 - RNA, 22 nt, Human
aaaggagaaaacauacaggacu

SEQ ID NO: 591441 - RNA, 22 nt, Human
gcuguguccucacacagccuuu

SEQ ID NO: 591442 - RNA, 22 nt, Human
aaggguuggggaagagcaaauu

SEQ ID NO: 591443 - RNA, 22 nt, Human
uucuauugcacacaaauaauua

SEQ ID NO: 591444 - RNA, 22 nt, Human
auaugcuuccaaguuauuccac

SEQ ID NO: 591445 - RNA, 22 nt, Human
acuaguuuuccauaauauagga

SEQ ID NO: 591446 - RNA, 22 nt, Human
uguguccaucugacaggagagg

SEQ ID NO: 591447 - RNA, 22 nt, Human
uccuggcuggaauuucucacuc

SEQ ID NO: 591448 - RNA, 22 nt, Human
uggaacaaucccgguuuagcuc

SEQ ID NO: 591449 - RNA, 22 nt, Human
gaaaucuuuauggaaauaacaa

SEQ ID NO: 591450 - RNA, 19 nt, Human
ugguggaggugcaccugac

SEQ ID NO: 591451 - RNA, 22 nt, Human
uaggccacaaauaagauccugu

SEQ ID NO: 591452 - RNA, 22 nt, Human
cuggaagaacuccaguucugug

SEQ ID NO: 591453 - RNA, 22 nt, Human
guugugcaaccaucaccaccau

SEQ ID NO: 591454 - RNA, 22 nt, Human
accaaaaccugcuacuaaagga

SEQ ID NO: 591455 - RNA, 21 nt, Human
uaagacaguaugaauacuuuc

SEQ ID NO: 591456 - RNA, 20 nt, Human
cagaacaugagcaucgagcc

SEQ ID NO: 591457 - RNA, 22 nt, Human
acagguggccccgagggagugg

SEQ ID NO: 591458 - RNA, 22 nt, Human
cucccugguguccccuccagga

SEQ ID NO: 591459 - RNA, 22 nt, Human
agaugugguaguugaagggaag

SEQ ID NO: 591460 - RNA, 22 nt, Human
cuugccagggacucagucaggg

SEQ ID NO: 591461 - RNA, 22 nt, Human
uccuggguagagaccugaugaa

SEQ ID NO: 591462 - RNA, 21 nt, Human
ugcugcugaucgggguuggcu

SEQ ID NO: 591463 - RNA, 22 nt, Human
ccacagaaaguugucuagagua

SEQ ID NO: 591464 - RNA, 22 nt, Human
ucccuccccacuucugagcuuu

SEQ ID NO: 591465 - RNA, 22 nt, Human
gugcccugguccccagcauaua

SEQ ID NO: 591466 - RNA, 22 nt, Human
caaaugaauuucccugcaaaug

SEQ ID NO: 591467 - RNA, 22 nt, Human
gugagcaauucaaaggcaggaa

SEQ ID NO: 591468 - RNA, 23 nt, Human
cauuucugggagauuuauaaaau

SEQ ID NO: 591469 - RNA, 22 nt, Human
ugagcagagaugacugggcauu

SEQ ID NO: 591470 - RNA, 17 nt, Human
uaaagaucagccaugua

SEQ ID NO: 591471 - RNA, 22 nt, Human
cccuccagagcuugaccugcug

SEQ ID NO: 591472 - RNA, 22 nt, Human
agauuugaaacuugcuucauaa

SEQ ID NO: 591473 - RNA, 22 nt, Human
cuguggcucauaucuguaaucu

SEQ ID NO: 591474 - RNA, 18 nt, Human
accaggaagcuucuuguc

SEQ ID NO: 591475 - RNA, 22 nt, Human
ggcugcaguugugugaaggccg

SEQ ID NO: 591476 - RNA, 22 nt, Human
aaugaagcaagcugcuguguuu

SEQ ID NO: 591477 - RNA, 22 nt, Human
uaauuauuaugacaacaauugc

SEQ ID NO: 591478 - RNA, 22 nt, Human
guucauucaucaaauauuuacu

SEQ ID NO: 591479 - RNA, 22 nt, Human
agacaggcagaggcugcagagg

SEQ ID NO: 591480 - RNA, 22 nt, Human
agaaaucaugucuuauuucuau

SEQ ID NO: 591481 - RNA, 22 nt, Human
agaagcauuauaacaugcaagg

SEQ ID NO: 591482 - RNA, 22 nt, Human
uggaacacugaucauugccuuu

SEQ ID NO: 591483 - RNA, 22 nt, Human
augcuucagugcuaccuucaaa

SEQ ID NO: 591484 - RNA, 22 nt, Human
gugaagaccagggaacgcuggc

SEQ ID NO: 591485 - RNA, 21 nt, Human
ggcugcuggggguuggcacag

SEQ ID NO: 591486 - RNA, 20 nt, Human
gccaugaggggaggugacug

SEQ ID NO: 591487 - RNA, 22 nt, Human
aguggguguagucuuccuccug

SEQ ID NO: 591488 - RNA, 22 nt, Human
auugguaagcaagauggcaaua

SEQ ID NO: 591489 - RNA, 22 nt, Human
cauuuuacugacucuugaauua

SEQ ID NO: 591490 - RNA, 22 nt, Human
aagcucagaguagcucagcguc

SEQ ID NO: 591491 - RNA, 18 nt, Human
cagugucuugguaaaaua

SEQ ID NO: 591492 - RNA, 22 nt, Human
cagagaaagacuugcccuuagu

SEQ ID NO: 591493 - RNA, 22 nt, Human
ccugugucagccccugccucca

SEQ ID NO: 591494 - RNA, 22 nt, Human
ggcaggugacggggaugaguau

SEQ ID NO: 591495 - RNA, 22 nt, Human
caggagagcccggguccgggcu

SEQ ID NO: 591496 - RNA, 20 nt, Human
aggcaguuagaaggagauga

SEQ ID NO: 591497 - RNA, 22 nt, Human
ccucacaguguucgugucagau

SEQ ID NO: 591498 - RNA, 22 nt, Human
acuagggaaaguuauguucaca

SEQ ID NO: 591499 - RNA, 22 nt, Human
caaacauuccgcuucucccagg

SEQ ID NO: 591500 - RNA, 22 nt, Human
ccacaugguccucauuuacucu

SEQ ID NO: 591501 - RNA, 22 nt, Human
aauuagcuucagcuuguggggc

SEQ ID NO: 591502 - RNA, 22 nt, Human
acauuugucuucuuucagauua

SEQ ID NO: 591503 - RNA, 22 nt, Human
uccucccuaacucaugaugagu

SEQ ID NO: 591504 - RNA, 22 nt, Human
cccaggcugguccugaacuccu

SEQ ID NO: 591505 - RNA, 22 nt, Human
gaguccagcucugccucuuacu

SEQ ID NO: 591506 - RNA, 22 nt, Human
acagucugcuugucuccauggu

SEQ ID NO: 591507 - RNA, 22 nt, Human
augaagggugucccugugagca

SEQ ID NO: 591508 - RNA, 22 nt, Human
ugcagaagauggucugagcacc

SEQ ID NO: 591509 - RNA, 22 nt, Human
cucugggcuccuucagcccuuu

SEQ ID NO: 591510 - RNA, 22 nt, Human
uagacauuggccauuccugugg

SEQ ID NO: 591511 - RNA, 22 nt, Human
guguggggagcugcagccacau

SEQ ID NO: 591512 - RNA, 22 nt, Human
guuagaauaaaaggucagagag

SEQ ID NO: 591513 - RNA, 22 nt, Human
agaaggcagaugggacggagca

SEQ ID NO: 591514 - RNA, 22 nt, Human
ggacaggcgcagggccaaggaa

SEQ ID NO: 591515 - RNA, 22 nt, Human
gcagacaggcccaguggaggga

SEQ ID NO: 591516 - RNA, 22 nt, Human
uucuccuuguucccuucaauug

SEQ ID NO: 591517 - RNA, 22 nt, Human
ucuuaucuuauaccuaacagcc

SEQ ID NO: 591518 - RNA, 22 nt, Human
aauucacaauguguagucaugc

SEQ ID NO: 591519 - RNA, 22 nt, Human
cugugcccauaaucugguauuu

SEQ ID NO: 591520 - RNA, 22 nt, Human
gugggcuggacccuccugcucc

SEQ ID NO: 591521 - RNA, 22 nt, Human
cuugccaguguugcagaagcuc

SEQ ID NO: 591522 - RNA, 20 nt, Human
auguaaaauuauaaggcuga

SEQ ID NO: 591523 - RNA, 23 nt, Human
cuuuucauugccuuagcgcagag

SEQ ID NO: 591524 - RNA, 22 nt, Human
gcaguguugagccagcuggggg

SEQ ID NO: 591525 - RNA, 22 nt, Human
uuuuccugccuuugcucaggga

SEQ ID NO: 591526 - RNA, 22 nt, Human
aaaugaacaucaagaauagccu

SEQ ID NO: 591527 - RNA, 18 nt, Human
gauguaaaauaguagcuu

SEQ ID NO: 591528 - RNA, 20 nt, Human
uuacaaagaggcaucgcuuu

SEQ ID NO: 591529 - RNA, 22 nt, Human
augugaaauagcuggauaugaa

SEQ ID NO: 591530 - RNA, 22 nt, Human
agggaggaccaaugugugguua

SEQ ID NO: 591531 - RNA, 22 nt, Human
gcugccugccuugccuggagga

SEQ ID NO: 591532 - RNA, 22 nt, Human
caaaauagauguuaaccuggaa

SEQ ID NO: 591533 - RNA, 23 nt, Human
uuucaaagacuuucccuuagagu

SEQ ID NO: 591534 - RNA, 22 nt, Human
ggcagcaaagucacauggaaaa

SEQ ID NO: 591535 - RNA, 22 nt, Human
acagccagaggugguccugggu

SEQ ID NO: 591536 - RNA, 20 nt, Human
ggcucuggaaucuggugggc

SEQ ID NO: 591537 - RNA, 22 nt, Human
acacagaggcaugacaguggcu

SEQ ID NO: 591538 - RNA, 23 nt, Human
auccccugccuugggugaguccc

SEQ ID NO: 591539 - RNA, 22 nt, Human
ucugaaauacugcagguucucu

SEQ ID NO: 591540 - RNA, 20 nt, Human
ggaaaaaugcaugcucaaga

SEQ ID NO: 591541 - RNA, 22 nt, Human
cagguaggcagccggucucugg

SEQ ID NO: 591542 - RNA, 22 nt, Human
uauauuuaaauccagguugaaa

SEQ ID NO: 591543 - RNA, 22 nt, Human
ugcccuugggauuuagguaagg

SEQ ID NO: 591544 - RNA, 22 nt, Human
ccagaugucccucucagguuug

SEQ ID NO: 591545 - RNA, 22 nt, Human
ugugaaauauuuauauacucaa

SEQ ID NO: 591546 - RNA, 22 nt, Human
uuaaauauuauguugucugcaa

SEQ ID NO: 591547 - RNA, 22 nt, Human
cuacuguccauaaaguauaacu

SEQ ID NO: 591548 - RNA, 22 nt, Human
uagcaauguaagauguuaacac

SEQ ID NO: 591549 - RNA, 22 nt, Human
aagagcugugggugguaguccu

SEQ ID NO: 591550 - RNA, 22 nt, Human
augucacugugaggcagcuguc

SEQ ID NO: 591551 - RNA, 22 nt, Human
auccuucuccagucguauuuuu

SEQ ID NO: 591552 - RNA, 22 nt, Human
ucuccuggcaugugggucaucu

SEQ ID NO: 591553 - RNA, 22 nt, Human
caggggcucugagauugucuaa

SEQ ID NO: 591554 - RNA, 22 nt, Human
aaaugucuaucuggcauauucc

SEQ ID NO: 591555 - RNA, 22 nt, Human
uauguugcaccaaccuaauaau

SEQ ID NO: 591556 - RNA, 22 nt, Human
cugccuuugcccuugacacugu

SEQ ID NO: 591557 - RNA, 22 nt, Human
cagagcagguaucuuuggugaa

SEQ ID NO: 591558 - RNA, 22 nt, Human
guggggugggcugaguuaggcc

SEQ ID NO: 591559 - RNA, 21 nt, Human
uuucugucucugccacuaguu

SEQ ID NO: 591560 - RNA, 22 nt, Human
aaauaagcacuuaacuguauca

SEQ ID NO: 591561 - RNA, 22 nt, Human
acacuaguggaaauugauuugu

SEQ ID NO: 591562 - RNA, 22 nt, Human
uagaaacuagauugauagcgga

SEQ ID NO: 591563 - RNA, 22 nt, Human
gagcacuguacucauuugcacu

SEQ ID NO: 591564 - RNA, 20 nt, Human
ugcccacaucacucaggagu

SEQ ID NO: 591565 - RNA, 22 nt, Human
uuuagaguaaaaacugugaccu

SEQ ID NO: 591566 - RNA, 22 nt, Human
uugcaggguacauucuuagaau

SEQ ID NO: 591567 - RNA, 22 nt, Human
aaauggcugacuaaauuaaauu

SEQ ID NO: 591568 - RNA, 22 nt, Human
cauugcaguaaucuggugaaau

SEQ ID NO: 591569 - RNA, 22 nt, Human
guugggaaggcaagaaguagaa

SEQ ID NO: 591570 - RNA, 22 nt, Human
cuuucccuuagccccauucuau

SEQ ID NO: 591571 - RNA, 19 nt, Human
ggcucucccuugagagagc

SEQ ID NO: 591572 - RNA, 22 nt, Human
aaaagcuuuguuaauagguuug

SEQ ID NO: 591573 - RNA, 22 nt, Human
aggagaaaacaguguuuugccu

SEQ ID NO: 591574 - RNA, 22 nt, Human
ucugggcugugguuccacuccg

SEQ ID NO: 591575 - RNA, 20 nt, Human
gggagaagggcugaugagag

SEQ ID NO: 591576 - RNA, 22 nt, Human
acagcagcuggguucccaccau

SEQ ID NO: 591577 - RNA, 22 nt, Human
gagggccucugcugcuccacau

SEQ ID NO: 591578 - RNA, 22 nt, Human
uuagggaaagcagcauucccuu

SEQ ID NO: 591579 - RNA, 22 nt, Human
aagaagcaggucacagacaggg

SEQ ID NO: 591580 - RNA, 22 nt, Human
uccaggcuggccucgcgugaca

SEQ ID NO: 591581 - RNA, 22 nt, Human
agauggaguggagaugaguaaa

SEQ ID NO: 591582 - RNA, 22 nt, Human
guuucucaacaugcuuucuaac

SEQ ID NO: 591583 - RNA, 18 nt, Human
cuuccugacuagcucugg

SEQ ID NO: 591584 - RNA, 22 nt, Human
ugucugggagggacagggcuac

SEQ ID NO: 591585 - RNA, 22 nt, Human
ucuauuacuacaucagccaggu

SEQ ID NO: 591586 - RNA, 22 nt, Human
ugaaacuuuugagguucuucca

SEQ ID NO: 591587 - RNA, 22 nt, Human
gcacagaggaagcacagacucu

SEQ ID NO: 591588 - RNA, 22 nt, Human
uugaagcauuguggcuuguauu

SEQ ID NO: 591589 - RNA, 22 nt, Human
ucccucuguguugggcaugccu

SEQ ID NO: 591590 - RNA, 19 nt, Human
uggcaucugggcccuccag

SEQ ID NO: 591591 - RNA, 22 nt, Human
uugcugaaagguagcugugugg

SEQ ID NO: 591592 - RNA, 22 nt, Human
uacaaaguuugagaaugcuuuc

SEQ ID NO: 591593 - RNA, 22 nt, Human
cauucagucaugcugguuuuga

SEQ ID NO: 591594 - RNA, 22 nt, Human
aaaagacaggugucugcggccc

SEQ ID NO: 591595 - RNA, 22 nt, Human
uuuuucugccauucaaagagga

SEQ ID NO: 591596 - RNA, 22 nt, Human
augcaguguuuggaagcuuaag

SEQ ID NO: 591597 - RNA, 22 nt, Human
cugugagcuggguggccaggac

SEQ ID NO: 591598 - RNA, 22 nt, Human
ucuugcagaaaauaguauagau

SEQ ID NO: 591599 - RNA, 22 nt, Human
uuugcuuugacugucagcaagu

SEQ ID NO: 591600 - RNA, 22 nt, Human
aaagcuuuuguuuucguaacug

SEQ ID NO: 591601 - RNA, 20 nt, Human
aggccaggaaauguaguucu

SEQ ID NO: 591602 - RNA, 22 nt, Human
guucauaauuugaaggaauagg

SEQ ID NO: 591603 - RNA, 20 nt, Human
gcccaggaucucugaggcau

SEQ ID NO: 591604 - RNA, 22 nt, Human
ccaggccuguguuguguggagg

SEQ ID NO: 591605 - RNA, 22 nt, Human
aagaaugucguugguauuuuaa

SEQ ID NO: 591606 - RNA, 22 nt, Human
ccccagguggauggcucgcaua

SEQ ID NO: 591607 - RNA, 20 nt, Human
aggcugccaggucucacauc

SEQ ID NO: 591608 - RNA, 22 nt, Human
augaggcaugugaggagaaggg

SEQ ID NO: 591609 - RNA, 22 nt, Human
agccacuccuucagcgucugcu

SEQ ID NO: 591610 - RNA, 22 nt, Human
ucccuggguuaccuuucaaggu

SEQ ID NO: 591611 - RNA, 22 nt, Human
uuaucauugucgcagucuaauu

SEQ ID NO: 591612 - RNA, 22 nt, Human
uaggauacaaauucuguaauuu

SEQ ID NO: 591613 - RNA, 22 nt, Human
cagugccagagguacuagugga

SEQ ID NO: 591614 - RNA, 22 nt, Human
cuggcagcauggagccugugcu

SEQ ID NO: 591615 - RNA, 22 nt, Human
uguauuuaagcuuuaccuaaaa

SEQ ID NO: 591616 - RNA, 22 nt, Human
guaaagaaguuuuugaaugcau

SEQ ID NO: 591617 - RNA, 22 nt, Human
caacuacauccacacuuuguua

SEQ ID NO: 591618 - RNA, 22 nt, Human
cagacuugacggcagcugcuuu

SEQ ID NO: 591619 - RNA, 22 nt, Human
cuuauuguguguauuuucuagu

SEQ ID NO: 591620 - RNA, 22 nt, Human
cugucauucuuacauaauguga

SEQ ID NO: 591621 - RNA, 22 nt, Human
gggcaaaggcagaaagcggugu

SEQ ID NO: 591622 - RNA, 22 nt, Human
uggcugugggaugagagccuca

SEQ ID NO: 591623 - RNA, 23 nt, Human
uggaagacuccucucuuggcugc

SEQ ID NO: 591624 - RNA, 22 nt, Human
ugcuucugcaggagcuccugau

SEQ ID NO: 591625 - RNA, 22 nt, Human
ugcucugggcucaauggcagcu

SEQ ID NO: 591626 - RNA, 22 nt, Human
uuaaaaugaauauugauuagca

SEQ ID NO: 591627 - RNA, 21 nt, Human
ggacaccagucacacuggauu

SEQ ID NO: 591628 - RNA, 19 nt, Human
ccaguagagacagcugcag

SEQ ID NO: 591629 - RNA, 22 nt, Human
acuucuguauguccugcauuca

SEQ ID NO: 591630 - RNA, 22 nt, Human
gcagaggugucaccuuccagga

SEQ ID NO: 591631 - RNA, 22 nt, Human
ugcuguggauucagagaugaaa

SEQ ID NO: 591632 - RNA, 22 nt, Human
ucacaguucaacuaguucagau

SEQ ID NO: 591633 - RNA, 20 nt, Human
aucacuggagaaggaaaccu

SEQ ID NO: 591634 - RNA, 22 nt, Human
ugggcaaaugucacuuucuuuu

SEQ ID NO: 591635 - RNA, 22 nt, Human
aucaauguugggccaaagcaaa

SEQ ID NO: 591636 - RNA, 22 nt, Human
augcaaaaguaauugcaauuuu

SEQ ID NO: 591637 - RNA, 22 nt, Human
ggcaggugaggcaugugccugg

SEQ ID NO: 591638 - RNA, 22 nt, Human
ggccugaaauagcucugagguu

SEQ ID NO: 591639 - RNA, 20 nt, Human
caugccugcugguaucuggc

SEQ ID NO: 591640 - RNA, 22 nt, Human
cugaggccccucuugugagcau

SEQ ID NO: 591641 - RNA, 17 nt, Human
gaagguuucucuuaggu

SEQ ID NO: 591642 - RNA, 22 nt, Human
acuuuauguuugauaucuaugg

SEQ ID NO: 591643 - RNA, 22 nt, Human
cacagcugucagcugaccuagg

SEQ ID NO: 591644 - RNA, 22 nt, Human
accccagaggcggaggcugcag

SEQ ID NO: 591645 - RNA, 22 nt, Human
ccugggugaaaucucuccugca

SEQ ID NO: 591646 - RNA, 22 nt, Human
cuucauuaaugucuauaaguuu

SEQ ID NO: 591647 - RNA, 22 nt, Human
cuuaauuuuuguaguagaugga

SEQ ID NO: 591648 - RNA, 22 nt, Human
aagaauguggcauuuauuuaua

SEQ ID NO: 591649 - RNA, 22 nt, Human
gccucaaauguggagcacuauu

SEQ ID NO: 591650 - RNA, 22 nt, Human
caggaccccauauucacugaac

SEQ ID NO: 591651 - RNA, 22 nt, Human
acagaucuacauugucugaccc

SEQ ID NO: 591652 - RNA, 22 nt, Human
uggucaguugugacuagaacac

SEQ ID NO: 591653 - RNA, 22 nt, Human
uggaagaauaggauagaagaac

SEQ ID NO: 591654 - RNA, 22 nt, Human
ggcuccagaggccuuaccugca

SEQ ID NO: 591655 - RNA, 22 nt, Human
gcccacuggcuggagugcuggu

SEQ ID NO: 591656 - RNA, 22 nt, Human
uuaaaacagcgugaaucuggca

SEQ ID NO: 591657 - RNA, 22 nt, Human
uuuccuggaccaacugagauug

SEQ ID NO: 591658 - RNA, 21 nt, Human
gcauggcaggucacuggggca

SEQ ID NO: 591659 - RNA, 22 nt, Human
aggccugccuggagccuggcug

SEQ ID NO: 591660 - RNA, 22 nt, Human
ccugcuggacguggaggagggg

SEQ ID NO: 591661 - RNA, 22 nt, Human
gcauugaucuuuauucugcuuu

SEQ ID NO: 591662 - RNA, 22 nt, Human
cugucuggccggcccagcuucc

SEQ ID NO: 591663 - RNA, 19 nt, Human
gcuguacaguaaggagaca

SEQ ID NO: 591664 - RNA, 22 nt, Human
ugcaaacaacuguuuaaugcug

SEQ ID NO: 591665 - RNA, 22 nt, Human
aggcacugaccugcuuccuuga

SEQ ID NO: 591666 - RNA, 23 nt, Human
agguggagcugugcagccggggc

SEQ ID NO: 591667 - RNA, 22 nt, Human
gagaugggcgagaagguggacu

SEQ ID NO: 591668 - RNA, 22 nt, Human
uuauaaagauuguuauguaucu

SEQ ID NO: 591669 - RNA, 22 nt, Human
ugugaaauuacuuaaaggaaau

SEQ ID NO: 591670 - RNA, 22 nt, Human
gcagguggagcaguagucuggu

SEQ ID NO: 591671 - RNA, 22 nt, Human
ucaggaugacuucaaggaggaa

SEQ ID NO: 591672 - RNA, 22 nt, Human
gcucucugcagccuccuuggag

SEQ ID NO: 591673 - RNA, 22 nt, Human
augggcaguaacaguggcaguc

SEQ ID NO: 591674 - RNA, 22 nt, Human
uggagcuggaauuugagcugga

SEQ ID NO: 591675 - RNA, 22 nt, Human
gcaggaugaacuaacaccugca

SEQ ID NO: 591676 - RNA, 22 nt, Human
gugccugcuaccugacuuguuu

SEQ ID NO: 591677 - RNA, 22 nt, Human
ugggccaguuggugacuacaaa

SEQ ID NO: 591678 - RNA, 22 nt, Human
auuauuguuagugacaggguga

SEQ ID NO: 591679 - RNA, 22 nt, Human
gccuccuggccuuugcuccuca

SEQ ID NO: 591680 - RNA, 22 nt, Human
gacagcuuagugaaaauguaaa

SEQ ID NO: 591681 - RNA, 22 nt, Human
gcagccucugcaguucaggagg

SEQ ID NO: 591682 - RNA, 22 nt, Human
cucucugugguggcugucccau

SEQ ID NO: 591683 - RNA, 22 nt, Human
cagggccucucaucccacgggc

SEQ ID NO: 591684 - RNA, 22 nt, Human
cuucauguucugccuguggaag

SEQ ID NO: 591685 - RNA, 22 nt, Human
agggccagcugcagaauuagca

SEQ ID NO: 591686 - RNA, 22 nt, Human
agacauuuuaacaucuggguuu

SEQ ID NO: 591687 - RNA, 22 nt, Human
uaguggaguagaaaccaaagaa

SEQ ID NO: 591688 - RNA, 22 nt, Human
agagugugucuauggaaggggu

SEQ ID NO: 591689 - RNA, 22 nt, Human
ucaguaaaugguugcuguuauu

SEQ ID NO: 591690 - RNA, 22 nt, Human
ccauuguuuauuuagacuuaau

SEQ ID NO: 591691 - RNA, 22 nt, Human
cuucccaagacuguauugcaag

SEQ ID NO: 591692 - RNA, 23 nt, Human
agucucagcuggaaacauguguc

SEQ ID NO: 591693 - RNA, 22 nt, Human
cagcugccuguauuguccucau

SEQ ID NO: 591694 - RNA, 22 nt, Human
ugcuuccuucccguucuucucc

SEQ ID NO: 591695 - RNA, 22 nt, Human
ugcaaugagaauauauuaacca

SEQ ID NO: 591696 - RNA, 22 nt, Human
ucccaggaaggauucggcauuu

SEQ ID NO: 591697 - RNA, 23 nt, Human
gccuggguuguaacuagugcauc

SEQ ID NO: 591698 - RNA, 22 nt, Human
ccucuggcauagcaaguggccu

SEQ ID NO: 591699 - RNA, 22 nt, Human
gaggguggagcuccagaaucug

SEQ ID NO: 591700 - RNA, 22 nt, Human
uguuugugcugccuggugggca

SEQ ID NO: 591701 - RNA, 22 nt, Human
uagauauaagguccuuagaaca

SEQ ID NO: 591702 - RNA, 18 nt, Human
aauuucuuugacaacuua

SEQ ID NO: 591703 - RNA, 22 nt, Human
gggcgcgcacgccagacagccu

SEQ ID NO: 591704 - RNA, 22 nt, Human
uccucagaugcucuuggacgcc

SEQ ID NO: 591705 - RNA, 22 nt, Human
cacagugucugugcuucagugu

SEQ ID NO: 591706 - RNA, 22 nt, Human
ggugacaguuccggagguacag

SEQ ID NO: 591707 - RNA, 22 nt, Human
cacuguauuauuaggaaugaca

SEQ ID NO: 591708 - RNA, 22 nt, Human
cauauuucagucuaagaugugu

SEQ ID NO: 591709 - RNA, 22 nt, Human
uugcaauagccuuauuuccaaa

SEQ ID NO: 591710 - RNA, 22 nt, Human
uggagcugagagccaggcuggc

SEQ ID NO: 591711 - RNA, 22 nt, Human
agaagggaacucagagaugauu

SEQ ID NO: 591712 - RNA, 22 nt, Human
uaguugaaagggauuauugugg

SEQ ID NO: 591713 - RNA, 22 nt, Human
gugauuuugagaccuauauagu

SEQ ID NO: 591714 - RNA, 22 nt, Human
ucacaaauuucagcucccugaa

SEQ ID NO: 591715 - RNA, 22 nt, Human
uaacacugaaaaugaugcaugu

SEQ ID NO: 591716 - RNA, 22 nt, Human
ccugcagagggacuggcaggaa

SEQ ID NO: 591717 - RNA, 22 nt, Human
cucagcuccaggugugcaucuu

SEQ ID NO: 591718 - RNA, 23 nt, Human
uuguauuuuuaguagagacaggg

SEQ ID NO: 591719 - RNA, 22 nt, Human
cagcccugagagaaccaucuau

SEQ ID NO: 591720 - RNA, 22 nt, Human
gcuggguccuaugcugguagag

SEQ ID NO: 591721 - RNA, 22 nt, Human
auucucuggcuaaaaccugaag

SEQ ID NO: 591722 - RNA, 21 nt, Human
auucugaguugucagucuuca

SEQ ID NO: 591723 - RNA, 20 nt, Human
cagggcacacugcagccucg

SEQ ID NO: 591724 - RNA, 22 nt, Human
uacaucauggcuucaugcugca

SEQ ID NO: 591725 - RNA, 17 nt, Human
uucucuuccuggauagu

SEQ ID NO: 591726 - RNA, 22 nt, Human
aguuuucugaccccugcucuau

SEQ ID NO: 591727 - RNA, 22 nt, Human
ugccagcucccuuuucuccucc

SEQ ID NO: 591728 - RNA, 18 nt, Human
ggugagggagcuggaagc

SEQ ID NO: 591729 - RNA, 22 nt, Human
ccugugugcacacgaggccaug

SEQ ID NO: 591730 - RNA, 22 nt, Human
gaauuaggugcauguuuacaaa

SEQ ID NO: 591731 - RNA, 22 nt, Human
ccugggcagggagaccaggcuc

SEQ ID NO: 591732 - RNA, 22 nt, Human
agcuaggccauuuguucaguga

SEQ ID NO: 591733 - RNA, 22 nt, Human
uagaggggaaaaugcguauuaa

SEQ ID NO: 591734 - RNA, 22 nt, Human
cuguauuuucaugccuacguac

SEQ ID NO: 591735 - RNA, 22 nt, Human
gucccugcaucaccacgggacu

SEQ ID NO: 591736 - RNA, 22 nt, Human
agagccaggcggcugggcaccu

SEQ ID NO: 591737 - RNA, 22 nt, Human
caguuaaucuugccauuauauc

SEQ ID NO: 591738 - RNA, 22 nt, Human
acaauagacccaugacacauac

SEQ ID NO: 591739 - RNA, 22 nt, Human
ucauaggaguagcagugagagg

SEQ ID NO: 591740 - RNA, 22 nt, Human
cugaggccucuguucaccagaa

SEQ ID NO: 591741 - RNA, 22 nt, Human
agccaggucagcucacccugcu

SEQ ID NO: 591742 - RNA, 22 nt, Human
ucucuguagggcugcuugagua

SEQ ID NO: 591743 - RNA, 22 nt, Human
auuaguauucaguuuauaacac

SEQ ID NO: 591744 - RNA, 22 nt, Human
aagagccagugggaaagucuug

SEQ ID NO: 591745 - RNA, 22 nt, Human
auaguaugaauuaaaucaugag

SEQ ID NO: 591746 - RNA, 22 nt, Human
ccugccuggggacaaaggaggg

SEQ ID NO: 591747 - RNA, 22 nt, Human
agcuaaaugcauuucaagacug

SEQ ID NO: 591748 - RNA, 22 nt, Human
gcaccagcugcuggguucuaga

SEQ ID NO: 591749 - RNA, 22 nt, Human
acugggcaaggauaugaugggu

SEQ ID NO: 591750 - RNA, 18 nt, Human
aaugcaauguauuugcag

SEQ ID NO: 591751 - RNA, 21 nt, Human
ccugagguuucuggccucugu

SEQ ID NO: 591752 - RNA, 22 nt, Human
cccacacacauuuaugauagga

SEQ ID NO: 591753 - RNA, 22 nt, Human
cuagucacacaguaaggacggg

SEQ ID NO: 591754 - RNA, 22 nt, Human
guucuauucuccaguuacauau

SEQ ID NO: 591755 - RNA, 19 nt, Human
agcauuaggcaaauuuuga

SEQ ID NO: 591756 - RNA, 22 nt, Human
cugcacagagcagggcagacac

SEQ ID NO: 591757 - RNA, 22 nt, Human
gccagccacuucccagacuggc

SEQ ID NO: 591758 - RNA, 22 nt, Human
uuaugcuuccugauuggacucu

SEQ ID NO: 591759 - RNA, 22 nt, Human
aguuuuauugucccagagguga

SEQ ID NO: 591760 - RNA, 22 nt, Human
ugaggcuccagccaggccagca

SEQ ID NO: 591761 - RNA, 22 nt, Human
cagcagcaaggugaggguggag

SEQ ID NO: 591762 - RNA, 22 nt, Human
aguguuucugugccccaguguu

SEQ ID NO: 591763 - RNA, 22 nt, Human
cagaggacaauagaauggaaag

SEQ ID NO: 591764 - RNA, 22 nt, Human
guucaucacucagagaccuccc

SEQ ID NO: 591765 - RNA, 22 nt, Human
ugaauaauccacagucauucau

SEQ ID NO: 591766 - RNA, 22 nt, Human
cugcccugggauggucugugcg

SEQ ID NO: 591767 - RNA, 22 nt, Human
ugaaacagucuccagacuugga

SEQ ID NO: 591768 - RNA, 22 nt, Human
ugaacaacugcaaaaaucucca

SEQ ID NO: 591769 - RNA, 22 nt, Human
auuuagcaguccuccucacaau

SEQ ID NO: 591770 - RNA, 22 nt, Human
gcuccucccugugcagacccag

SEQ ID NO: 591771 - RNA, 20 nt, Human
guacuucagguguggucuga

SEQ ID NO: 591772 - RNA, 22 nt, Human
ucucugugacauuucugagccu

SEQ ID NO: 591773 - RNA, 22 nt, Human
acugaggcuuaaagagauuagg

SEQ ID NO: 591774 - RNA, 22 nt, Human
agucuccacacuggcagaugcc

SEQ ID NO: 591775 - RNA, 22 nt, Human
uguauuuucuucuggaagcuua

SEQ ID NO: 591776 - RNA, 22 nt, Human
uacuacauacagaauuuagaga

SEQ ID NO: 591777 - RNA, 22 nt, Human
cugggcuggagugcaauggcgc

SEQ ID NO: 591778 - RNA, 22 nt, Human
uuucuauuuacagugcuaggua

SEQ ID NO: 591779 - RNA, 22 nt, Human
uucugagggcuaauguacugua

SEQ ID NO: 591780 - RNA, 23 nt, Human
uagugauuggaaaaacuaguuuu

SEQ ID NO: 591781 - RNA, 22 nt, Human
acaguucuagcuuuuacauuuu

SEQ ID NO: 591782 - RNA, 22 nt, Human
aaaauauggggugagcccagag

SEQ ID NO: 591783 - RNA, 21 nt, Human
ucacacacguuuccaagggca

SEQ ID NO: 591784 - RNA, 19 nt, Human
uccuuugaauaucaguuga

SEQ ID NO: 591785 - RNA, 22 nt, Human
acucuuaugggaacaaggauua

SEQ ID NO: 591786 - RNA, 22 nt, Human
uugcaauugcuauggagagcgu

SEQ ID NO: 591787 - RNA, 22 nt, Human
agccugugugaagcccucagag

SEQ ID NO: 591788 - RNA, 19 nt, Human
ucacccaggcugcuggcuc

SEQ ID NO: 591789 - RNA, 22 nt, Human
cagcucuuuauugaaacaaaaa

SEQ ID NO: 591790 - RNA, 22 nt, Human
uguaggcaucacuuucucuugg

SEQ ID NO: 591791 - RNA, 22 nt, Human
ccugggguauauaggugaauau

SEQ ID NO: 591792 - RNA, 22 nt, Human
ucaugcaaggcugaaacauggu

SEQ ID NO: 591793 - RNA, 22 nt, Human
caggugacuucugaggccuuca

SEQ ID NO: 591794 - RNA, 22 nt, Human
caugcugauucuuccugagcuu

SEQ ID NO: 591795 - RNA, 22 nt, Human
cuuguacauagagaagaagccu

SEQ ID NO: 591796 - RNA, 22 nt, Human
cugagccaaaaagcagagcuug

SEQ ID NO: 591797 - RNA, 21 nt, Human
ugcagagauaucugaagcaga

SEQ ID NO: 591798 - RNA, 22 nt, Human
ugugaagauagcuguuacaucu

SEQ ID NO: 591799 - RNA, 22 nt, Human
cagcaauggcaggcggagagug

SEQ ID NO: 591800 - RNA, 22 nt, Human
ggcugcugagucacgacaguga

SEQ ID NO: 591801 - RNA, 22 nt, Human
cuuuucucuuacauuccacugg

SEQ ID NO: 591802 - RNA, 22 nt, Human
aagauacuucacuugccgaaau

SEQ ID NO: 591803 - RNA, 22 nt, Human
gucucugagcucugagcuggcu

SEQ ID NO: 591804 - RNA, 22 nt, Human
uguauuuucugaggagcauuag

SEQ ID NO: 591805 - RNA, 22 nt, Human
cugagcuucagugcacugggag

SEQ ID NO: 591806 - RNA, 22 nt, Human
caggcagugucccaggaagcca

SEQ ID NO: 591807 - RNA, 22 nt, Human
gcggcggagacagcaggaagcc

SEQ ID NO: 591808 - RNA, 22 nt, Human
aagagcuggauggaaucuggga

SEQ ID NO: 591809 - RNA, 22 nt, Human
gagaggcugauccugcagagaa

SEQ ID NO: 591810 - RNA, 22 nt, Human
uggaacaagacagcauagagcu

SEQ ID NO: 591811 - RNA, 22 nt, Human
ccaggugugccagcagggacug

SEQ ID NO: 591812 - RNA, 22 nt, Human
uucuaccuccuagaaaaucugg

SEQ ID NO: 591813 - RNA, 22 nt, Human
agcuguggcagcagccguggca

SEQ ID NO: 591814 - RNA, 22 nt, Human
auucagggaggaaaggggccuc

SEQ ID NO: 591815 - RNA, 22 nt, Human
acagacuguuugguucaugucu

SEQ ID NO: 591816 - RNA, 22 nt, Human
acagagcaauaacagggagagg

SEQ ID NO: 591817 - RNA, 19 nt, Human
gugcaguucagaguucaau

SEQ ID NO: 591818 - RNA, 22 nt, Human
aaaacacugccugcuugacuga

SEQ ID NO: 591819 - RNA, 22 nt, Human
caggggcagucugugugcgugg

SEQ ID NO: 591820 - RNA, 22 nt, Human
uagugcuuuaaguuuacagaga

SEQ ID NO: 591821 - RNA, 22 nt, Human
acaccuuugccccaagucauag

SEQ ID NO: 591822 - RNA, 22 nt, Human
cuggccuggucuggccucucca

SEQ ID NO: 591823 - RNA, 22 nt, Human
ggggugagugcucagccccgga

SEQ ID NO: 591824 - RNA, 22 nt, Human
ucaguguuuacaugcauccuug

SEQ ID NO: 591825 - RNA, 22 nt, Human
guccuggguccccgcaggucag

SEQ ID NO: 591826 - RNA, 22 nt, Human
uucacagugcugcaccuggcuu

SEQ ID NO: 591827 - RNA, 23 nt, Human
aagcuuccuucacgucuccuggg

SEQ ID NO: 591828 - RNA, 22 nt, Human
cacauuuuuacugccaacuuaa

SEQ ID NO: 591829 - RNA, 23 nt, Human
ucucugaguuguacuuucccuug

SEQ ID NO: 591830 - RNA, 21 nt, Human
augacagaugcugcagaucgu

SEQ ID NO: 591831 - RNA, 22 nt, Human
uagauguuugagaaguuuaugu

SEQ ID NO: 591832 - RNA, 20 nt, Human
uccagcccagguccugccug

SEQ ID NO: 591833 - RNA, 22 nt, Human
aagaacaugauggccaugugca

SEQ ID NO: 591834 - RNA, 22 nt, Human
aaggcaggagcuguaucuuauu

SEQ ID NO: 591835 - RNA, 22 nt, Human
uuucauuaaagucaaaucuggu

SEQ ID NO: 591836 - RNA, 22 nt, Human
acauuuaaauaccuauguuucu

SEQ ID NO: 591837 - RNA, 22 nt, Human
gugcccugagcuuaugcauucu

SEQ ID NO: 591838 - RNA, 22 nt, Human
uuacauucauugaagugauuca

SEQ ID NO: 591839 - RNA, 22 nt, Human
uaauuucacaguucaacgcaca

SEQ ID NO: 591840 - RNA, 22 nt, Human
gauguuaacuuguucugccucu

SEQ ID NO: 591841 - RNA, 22 nt, Human
cuucacaaaauauuucauuaua

SEQ ID NO: 591842 - RNA, 22 nt, Human
agugugggcccccagguuagcc

SEQ ID NO: 591843 - RNA, 22 nt, Human
aaaccaucagauaauucauacu

SEQ ID NO: 591844 - RNA, 22 nt, Human
ucugcucuguggcuucagcuaa

SEQ ID NO: 591845 - RNA, 22 nt, Human
augaagaugguucaacuggccu

SEQ ID NO: 591846 - RNA, 21 nt, Human
uccagcucuuauguucaugaa

SEQ ID NO: 591847 - RNA, 22 nt, Human
ggacaggagugaggcggguucc

SEQ ID NO: 591848 - RNA, 22 nt, Human
uuacagauacauuucuuuuguu

SEQ ID NO: 591849 - RNA, 22 nt, Human
augcauauuucuuggagcaccu

SEQ ID NO: 591850 - RNA, 22 nt, Human
uuguacagggaaguaauacaag

SEQ ID NO: 591851 - RNA, 22 nt, Human
cugcuuccauaaauaaugugcu

SEQ ID NO: 591852 - RNA, 22 nt, Human
aacagacaacuccuguggcuca

SEQ ID NO: 591853 - RNA, 22 nt, Human
cauuucuaagaaggcugcacau

SEQ ID NO: 591854 - RNA, 22 nt, Human
caggagauguaagacuucuguu

SEQ ID NO: 591855 - RNA, 20 nt, Human
uagaggggacaaucauugcc

SEQ ID NO: 591856 - RNA, 22 nt, Human
auuggcuuucuuuugugaaaau

SEQ ID NO: 591857 - RNA, 22 nt, Human
agaacauuugucaaaaagccaa

SEQ ID NO: 591858 - RNA, 22 nt, Human
aagaaaugcacacaacugcugg

SEQ ID NO: 591859 - RNA, 22 nt, Human
ccaggaggcagaaguugcagug

SEQ ID NO: 591860 - RNA, 22 nt, Human
agaugggucucccuuagcaccu

SEQ ID NO: 591861 - RNA, 22 nt, Human
auaauauuugcauuacugugau

SEQ ID NO: 591862 - RNA, 22 nt, Human
cuuuacaauucaagggaacucu

SEQ ID NO: 591863 - RNA, 20 nt, Human
uuaucugucaaucugucuca

SEQ ID NO: 591864 - RNA, 22 nt, Human
gaggaaaauauucagggagguu

SEQ ID NO: 591865 - RNA, 22 nt, Human
uaugucuuuaguaucuuuugga

SEQ ID NO: 591866 - RNA, 22 nt, Human
uagcuuugccacacauguagau

SEQ ID NO: 591867 - RNA, 18 nt, Human
gcaggugccacugcuguu

SEQ ID NO: 591868 - RNA, 20 nt, Human
auuagugcaucuggacaugc

SEQ ID NO: 591869 - RNA, 22 nt, Human
uuaaaugacgggacuggguuuu

SEQ ID NO: 591870 - RNA, 23 nt, Human
uggcuccaggagaagccagaagc

SEQ ID NO: 591871 - RNA, 22 nt, Human
caggggcucuaaugcaugauca

SEQ ID NO: 591872 - RNA, 22 nt, Human
cuccucuggcuuccuggaggca

SEQ ID NO: 591873 - RNA, 22 nt, Human
guccagcaggaugcaagugcca

SEQ ID NO: 591874 - RNA, 20 nt, Human
augauagucagaaaacuagc

SEQ ID NO: 591875 - RNA, 22 nt, Human
uuauggaagugcaaauugugug

SEQ ID NO: 591876 - RNA, 22 nt, Human
gccugccacgcaugcagaguca

SEQ ID NO: 591877 - RNA, 22 nt, Human
aucagaccauccagcguggaug

SEQ ID NO: 591878 - RNA, 22 nt, Human
gagcugggacauggguccucuc

SEQ ID NO: 591879 - RNA, 22 nt, Human
auacauucagcagugcucauga

SEQ ID NO: 591880 - RNA, 22 nt, Human
agagacuggcuucuaaaauggc

SEQ ID NO: 591881 - RNA, 22 nt, Human
agcaguggcugacagacuuacc

SEQ ID NO: 591882 - RNA, 22 nt, Human
acaucuuuguuucuuaguguau

SEQ ID NO: 591883 - RNA, 22 nt, Human
ucaguaaaugaaugaauauaug

SEQ ID NO: 591884 - RNA, 22 nt, Human
uguccccagguccucugccguc

SEQ ID NO: 591885 - RNA, 22 nt, Human
caguaccagucaccacauugau

SEQ ID NO: 591886 - RNA, 22 nt, Human
uuccuaacaagggguauucauc

SEQ ID NO: 591887 - RNA, 22 nt, Human
cuugcugagauaaaugcugucu

SEQ ID NO: 591888 - RNA, 22 nt, Human
uaacauuagguagacauaagcc

SEQ ID NO: 591889 - RNA, 22 nt, Human
auguagcaucuauccugauaaa

SEQ ID NO: 591890 - RNA, 22 nt, Human
ggcugccugaggcagugagaga

SEQ ID NO: 591891 - RNA, 22 nt, Human
agaaagggcuauuuugagguag

SEQ ID NO: 591892 - RNA, 19 nt, Human
ucugggaaugaugccagca

SEQ ID NO: 591893 - RNA, 22 nt, Human
ucugcucuaguugcuuccugcc

SEQ ID NO: 591894 - RNA, 22 nt, Human
ucucuguggcaacuacuuagcu

SEQ ID NO: 591895 - RNA, 22 nt, Human
gggauggacugacgguagcgcg

SEQ ID NO: 591896 - RNA, 22 nt, Human
ccaguucugagaugaauaucca

SEQ ID NO: 591897 - RNA, 22 nt, Human
aagaaucauuguaaaguucugu

SEQ ID NO: 591898 - RNA, 22 nt, Human
uuccugaaucccaaggagagcu

SEQ ID NO: 591899 - RNA, 22 nt, Human
aaggccuuucuagcuuugugcu

SEQ ID NO: 591900 - RNA, 18 nt, Human
ggcacuggugaugcagag

SEQ ID NO: 591901 - RNA, 22 nt, Human
cuggccaggccccuugcagggc

SEQ ID NO: 591902 - RNA, 22 nt, Human
ugggcuggcccaccacaccucg

SEQ ID NO: 591903 - RNA, 19 nt, Human
acucuacaguguguacaac

SEQ ID NO: 591904 - RNA, 22 nt, Human
uuaacaaggugacugcauuaaa

SEQ ID NO: 591905 - RNA, 22 nt, Human
agggcuccaaggaaguguagcu

SEQ ID NO: 591906 - RNA, 22 nt, Human
uugagaaaagcuguguaaggau

SEQ ID NO: 591907 - RNA, 18 nt, Human
uaaugauaagccuugaag

SEQ ID NO: 591908 - RNA, 22 nt, Human
uuuaaggaggggcucacguggg

SEQ ID NO: 591909 - RNA, 22 nt, Human
aacauguagcagaaacgacuaa

SEQ ID NO: 591910 - RNA, 22 nt, Human
gagcaagacucacugcaucuug

SEQ ID NO: 591911 - RNA, 22 nt, Human
uuauauaacucaggugggcuca

SEQ ID NO: 591912 - RNA, 22 nt, Human
uggaaauacuugccauaaaacu

SEQ ID NO: 591913 - RNA, 22 nt, Human
gcuggccauauauuuugcuguu

SEQ ID NO: 591914 - RNA, 22 nt, Human
agaaauagucacauuggaggaa

SEQ ID NO: 591915 - RNA, 22 nt, Human
uguagaagcuagccuggagcca

SEQ ID NO: 591916 - RNA, 22 nt, Human
uguccuuagaagaagugaaaga

SEQ ID NO: 591917 - RNA, 22 nt, Human
uuuauuauucuguucucucuac

SEQ ID NO: 591918 - RNA, 20 nt, Human
aggagaaauucgggacaccu

SEQ ID NO: 591919 - RNA, 22 nt, Human
ggcuguccuuggccaaggcacu

SEQ ID NO: 591920 - RNA, 22 nt, Human
ucagacagucaucagagcuugu

SEQ ID NO: 591921 - RNA, 22 nt, Human
auauucacuggguacuaaaaag

SEQ ID NO: 591922 - RNA, 22 nt, Human
agcaaagaaauggaggcucaga

SEQ ID NO: 591923 - RNA, 22 nt, Human
aaguuuagugaaacucuagggg

SEQ ID NO: 591924 - RNA, 22 nt, Human
auacuuuaacguggcgaaccuu

SEQ ID NO: 591925 - RNA, 22 nt, Human
ucuguccuguuuccuccugaca

SEQ ID NO: 591926 - RNA, 22 nt, Human
ggccuugagcagggagaaacca

SEQ ID NO: 591927 - RNA, 22 nt, Human
aguaaaauuaauggaucagaag

SEQ ID NO: 591928 - RNA, 22 nt, Human
uagugauucgauguggguaagu

SEQ ID NO: 591929 - RNA, 22 nt, Human
uugcugaaaacaggucaucagg

SEQ ID NO: 591930 - RNA, 22 nt, Human
ucacagcaacacuggggcagac

SEQ ID NO: 591931 - RNA, 22 nt, Human
uaaguaaaacauucaagaaguc

SEQ ID NO: 591932 - RNA, 22 nt, Human
uauacaauggcugaaucaucca

SEQ ID NO: 591933 - RNA, 22 nt, Human
aguccaggucucugagucacaa

SEQ ID NO: 591934 - RNA, 22 nt, Human
uugcugaaaguggcaagaagua

SEQ ID NO: 591935 - RNA, 22 nt, Human
guuucuuaaauguagcaggacc

SEQ ID NO: 591936 - RNA, 22 nt, Human
uggagccuuuuguucugggaca

SEQ ID NO: 591937 - RNA, 17 nt, Human
caggcacaugaagccag

SEQ ID NO: 591938 - RNA, 22 nt, Human
uuagcauucuucuggggggcac

SEQ ID NO: 591939 - RNA, 22 nt, Human
ccagccugguucagaauuggcu

SEQ ID NO: 591940 - RNA, 21 nt, Human
uuuagcauuuacauauuucca

SEQ ID NO: 591941 - RNA, 22 nt, Human
gugagcaggauuucauggugua

SEQ ID NO: 591942 - RNA, 22 nt, Human
caggaacaccugcagcuagugg

SEQ ID NO: 591943 - RNA, 22 nt, Human
aagacagcagcaccucucguuu

SEQ ID NO: 591944 - RNA, 22 nt, Human
ugugccugucacccucagagag

SEQ ID NO: 591945 - RNA, 22 nt, Human
aaagacacaugucucuuagauu

SEQ ID NO: 591946 - RNA, 20 nt, Human
auuagcuuggagacaguggc

SEQ ID NO: 591947 - RNA, 22 nt, Human
gaggcuggggucugccuuucug

SEQ ID NO: 591948 - RNA, 22 nt, Human
augaaauuuuaauuauaccucu

SEQ ID NO: 591949 - RNA, 22 nt, Human
aaaagagaaaguggcaggcuuu

SEQ ID NO: 591950 - RNA, 22 nt, Human
agcagcuguggaaaaguaacua

SEQ ID NO: 591951 - RNA, 22 nt, Human
auaguacacauccuacaauguu

SEQ ID NO: 591952 - RNA, 22 nt, Human
aacauaaauuugaaguggcaaa

SEQ ID NO: 591953 - RNA, 23 nt, Human
gaagcagaugucugaguaggcag

SEQ ID NO: 591954 - RNA, 22 nt, Human
aacagcuuuagaggauaauagu

SEQ ID NO: 591955 - RNA, 22 nt, Human
acuccugugggcauggcacccc

SEQ ID NO: 591956 - RNA, 22 nt, Human
ggcacaggaaucugugaagugc

SEQ ID NO: 591957 - RNA, 19 nt, Human
ccuccccuuggaccagcaa

SEQ ID NO: 591958 - RNA, 22 nt, Human
auucuucuaauaugaucguguu

SEQ ID NO: 591959 - RNA, 22 nt, Human
uccaugaggcagggaggcuggc

SEQ ID NO: 591960 - RNA, 22 nt, Human
ucagcucacucugcuuccuggg

SEQ ID NO: 591961 - RNA, 22 nt, Human
gcagaccucaggacaucauuag

SEQ ID NO: 591962 - RNA, 22 nt, Human
caaaucuuuaauugaggaauca

SEQ ID NO: 591963 - RNA, 22 nt, Human
cagcagcaugaauucgagccac

SEQ ID NO: 591964 - RNA, 22 nt, Human
acaguggaggccauaugguccu

SEQ ID NO: 591965 - RNA, 22 nt, Human
cugcccucuagggaugcacugg

SEQ ID NO: 591966 - RNA, 22 nt, Human
cugagggccuucuaugcugagc

SEQ ID NO: 591967 - RNA, 22 nt, Human
caucuuaccccugcuaaugacc

SEQ ID NO: 591968 - RNA, 22 nt, Human
uuacagucaggcaugaauucag

SEQ ID NO: 591969 - RNA, 22 nt, Human
aucuggaauccuuguggacaau

SEQ ID NO: 591970 - RNA, 22 nt, Human
acauuugagaugccuuuuaggu

SEQ ID NO: 591971 - RNA, 22 nt, Human
cuuuggcaacacaugugggaca

SEQ ID NO: 591972 - RNA, 22 nt, Human
ccuggagaccugauggcagcgg

SEQ ID NO: 591973 - RNA, 22 nt, Human
gcugcagggaauguauggauuu

SEQ ID NO: 591974 - RNA, 22 nt, Human
auuuccuuugcaaagacugugc

SEQ ID NO: 591975 - RNA, 22 nt, Human
aaaguauucuugacuguuuuuc

SEQ ID NO: 591976 - RNA, 22 nt, Human
uggcccuuguccugggagaguu

SEQ ID NO: 591977 - RNA, 22 nt, Human
guggagcaugugaggacugagu

SEQ ID NO: 591978 - RNA, 21 nt, Human
ucuucccucaggauguccugc

SEQ ID NO: 591979 - RNA, 22 nt, Human
uccagagccuuucugcuugaca

SEQ ID NO: 591980 - RNA, 22 nt, Human
uccaggagggguaggcaguaug

SEQ ID NO: 591981 - RNA, 22 nt, Human
uaacaaugcaaaaugaauuuag

SEQ ID NO: 591982 - RNA, 22 nt, Human
ccacagugaguucuguacucug

SEQ ID NO: 591983 - RNA, 22 nt, Human
ccaguguucaauacauauuugu

SEQ ID NO: 591984 - RNA, 22 nt, Human
gcccuuagccuuauagccucua

SEQ ID NO: 591985 - RNA, 23 nt, Human
cuucucagaagucugugccagga

SEQ ID NO: 591986 - RNA, 22 nt, Human
ugagauggcugggccccaggag

SEQ ID NO: 591987 - RNA, 22 nt, Human
gucuccuggcuuuugucccagu

SEQ ID NO: 591988 - RNA, 22 nt, Human
agacacuggugaagaaaucagg

SEQ ID NO: 591989 - RNA, 22 nt, Human
ugagguaugguaagguaaaauc

SEQ ID NO: 591990 - RNA, 22 nt, Human
aggcacagaauggcauucagug

SEQ ID NO: 591991 - RNA, 22 nt, Human
cagaauuuagcacaauguaugg

SEQ ID NO: 591992 - RNA, 22 nt, Human
uggagauggguuaauggagaga

SEQ ID NO: 591993 - RNA, 22 nt, Human
acagcccguucucuggcacaca

SEQ ID NO: 591994 - RNA, 22 nt, Human
cuguuagugaucaaagggagag

SEQ ID NO: 591995 - RNA, 22 nt, Human
uaaaucaagaauaucagcuugu

SEQ ID NO: 591996 - RNA, 21 nt, Human
cagagccuguguugacaguug

SEQ ID NO: 591997 - RNA, 22 nt, Human
ugaagccaccgaaccagaagag

SEQ ID NO: 591998 - RNA, 22 nt, Human
aagcuggauguaggaucccccu

SEQ ID NO: 591999 - RNA, 22 nt, Human
ucugggcagagggucuuaguca

SEQ ID NO: 592000 - RNA, 22 nt, Human
cugcagggaacugaggcccaga

SEQ ID NO: 592001 - RNA, 22 nt, Human
ccaggaguuugaggcugcagug

SEQ ID NO: 592002 - RNA, 22 nt, Human
uguaaugagucacuuaccuuaa

SEQ ID NO: 592003 - RNA, 22 nt, Human
aaucuguauuguuaacaaguaa

SEQ ID NO: 592004 - RNA, 17 nt, Human
uccugugggugcagcag

SEQ ID NO: 592005 - RNA, 22 nt, Human
uguguuuauaguguaucuucca

SEQ ID NO: 592006 - RNA, 18 nt, Human
gcuccuggaccaggucac

SEQ ID NO: 592007 - RNA, 22 nt, Human
gaaagguuguaacaagacucuu

SEQ ID NO: 592008 - RNA, 18 nt, Human
ugcagccuguagucuugu

SEQ ID NO: 592009 - RNA, 22 nt, Human
gccucagggauaggaugagcau

SEQ ID NO: 592010 - RNA, 22 nt, Human
aauuucagcucaaacuuguguu

SEQ ID NO: 592011 - RNA, 22 nt, Human
aacauaauguggccaaagucac

SEQ ID NO: 592012 - RNA, 22 nt, Human
uccugcagugugucuccugcac

SEQ ID NO: 592013 - RNA, 22 nt, Human
cuccccagcauucugacuuccu

SEQ ID NO: 592014 - RNA, 22 nt, Human
auuuuccucugguuuccccaga

SEQ ID NO: 592015 - RNA, 22 nt, Human
guuaugaaauaaauauagauca

SEQ ID NO: 592016 - RNA, 22 nt, Human
uaagacacauuggaguagauga

SEQ ID NO: 592017 - RNA, 22 nt, Human
aauuccaacagacaaaguuaga

SEQ ID NO: 592018 - RNA, 22 nt, Human
acuguaaaacugcuuuggaaac

SEQ ID NO: 592019 - RNA, 22 nt, Human
gagugugggucucagcuuuaag

SEQ ID NO: 592020 - RNA, 20 nt, Human
uccagcuccguguucuuccu

SEQ ID NO: 592021 - RNA, 22 nt, Human
gggacgggcacggagggcccuc

SEQ ID NO: 592022 - RNA, 22 nt, Human
acaggcaggagcuccccauucc

SEQ ID NO: 592023 - RNA, 21 nt, Human
aaaugaaugugguagugcaag

SEQ ID NO: 592024 - RNA, 22 nt, Human
cuuccugcauugugccagaguu

SEQ ID NO: 592025 - RNA, 22 nt, Human
ggcuucaggggcccagucagca

SEQ ID NO: 592026 - RNA, 22 nt, Human
aaugagacacgugaagcagaug

SEQ ID NO: 592027 - RNA, 22 nt, Human
guuuucugauuagcaaaucuga

SEQ ID NO: 592028 - RNA, 22 nt, Human
uggucucuucuuccaagauggc

SEQ ID NO: 592029 - RNA, 22 nt, Human
aaaguucucuaugguguaaaaa

SEQ ID NO: 592030 - RNA, 22 nt, Human
uaacauuguuaugaaucagguc

SEQ ID NO: 592031 - RNA, 22 nt, Human
agaugaagacucaggagcaggu

SEQ ID NO: 592032 - RNA, 22 nt, Human
gagcuggugaucagcuggagga

SEQ ID NO: 592033 - RNA, 22 nt, Human
cagagcuugaauguccaugguu

SEQ ID NO: 592034 - RNA, 19 nt, Human
auauagcauuauucaauuu

SEQ ID NO: 592035 - RNA, 22 nt, Human
ucacucucuaagcaugacagac

SEQ ID NO: 592036 - RNA, 22 nt, Human
caucaucaaaagugacagagaa

SEQ ID NO: 592037 - RNA, 22 nt, Human
ugccugaauucaauuccuggcu

SEQ ID NO: 592038 - RNA, 22 nt, Human
ugcugccagccaggccauggag

SEQ ID NO: 592039 - RNA, 18 nt, Human
acacuuccugguggugug

SEQ ID NO: 592040 - RNA, 22 nt, Human
aagacuguaugagacaauauaa

SEQ ID NO: 592041 - RNA, 22 nt, Human
uacauucagagaaaguuuccau

SEQ ID NO: 592042 - RNA, 22 nt, Human
agggcagagaucugagugggca

SEQ ID NO: 592043 - RNA, 22 nt, Human
aauguuuuagauuacugcuggg

SEQ ID NO: 592044 - RNA, 22 nt, Human
ucuugcaggcggcucagcaacc

SEQ ID NO: 592045 - RNA, 22 nt, Human
cacacaucaaccuagacauugu

SEQ ID NO: 592046 - RNA, 22 nt, Human
aguccccucuaacccaacuuua

SEQ ID NO: 592047 - RNA, 22 nt, Human
ugccagggagcccugcugacca

SEQ ID NO: 592048 - RNA, 23 nt, Human
ucugggcugagacuuggaagguc

SEQ ID NO: 592049 - RNA, 22 nt, Human
uucuuucuuagcaaucuauggu

SEQ ID NO: 592050 - RNA, 22 nt, Human
ucagaaauuuaggcuggacuug

SEQ ID NO: 592051 - RNA, 22 nt, Human
uuuuaaguuggauugcuaagua

SEQ ID NO: 592052 - RNA, 22 nt, Human
uaaaacuucucauuuuuauggu

SEQ ID NO: 592053 - RNA, 22 nt, Human
ugacagacagcuucucauuuua

SEQ ID NO: 592054 - RNA, 22 nt, Human
cugagaucccaggcaggguggc

SEQ ID NO: 592055 - RNA, 18 nt, Human
cauugacaguauaucuuu

SEQ ID NO: 592056 - RNA, 22 nt, Human
cugaggccgucugggucugcag

SEQ ID NO: 592057 - RNA, 22 nt, Human
uuauuauugugaccugagaaug

SEQ ID NO: 592058 - RNA, 22 nt, Human
gcugccuguccugaggaguccg

SEQ ID NO: 592059 - RNA, 22 nt, Human
uccugcaggcuugaguccucag

SEQ ID NO: 592060 - RNA, 22 nt, Human
uucuuuaaaauagugagaaaga

SEQ ID NO: 592061 - RNA, 22 nt, Human
aacucacuuuguggcuucugaa

SEQ ID NO: 592062 - RNA, 22 nt, Human
uagagcugggcagugcucugag

SEQ ID NO: 592063 - RNA, 22 nt, Human
gcagaugcugagauuuauuucu

SEQ ID NO: 592064 - RNA, 22 nt, Human
auucuucacuguuucagaauga

SEQ ID NO: 592065 - RNA, 22 nt, Human
uggcccugaggggcugugcccc

SEQ ID NO: 592066 - RNA, 22 nt, Human
aaacuacaucucauggaugagg

SEQ ID NO: 592067 - RNA, 22 nt, Human
cacagugcaugaugggcagaag

SEQ ID NO: 592068 - RNA, 22 nt, Human
gggcagcagagcccugccgagu

SEQ ID NO: 592069 - RNA, 22 nt, Human
ucugcagaagaauuaaggacag

SEQ ID NO: 592070 - RNA, 19 nt, Human
acacugaucagaucagcag

SEQ ID NO: 592071 - RNA, 22 nt, Human
gccagggugugcagggacagga

SEQ ID NO: 592072 - RNA, 20 nt, Human
cagauggcacgucagggcau

SEQ ID NO: 592073 - RNA, 22 nt, Human
auucucauaggagcgugaaccu

SEQ ID NO: 592074 - RNA, 22 nt, Human
ugagcccaggaguuggaggcug

SEQ ID NO: 592075 - RNA, 22 nt, Human
ggaggccaggguggguggaucg

SEQ ID NO: 592076 - RNA, 22 nt, Human
aacaaugcacuaucguaagugg

SEQ ID NO: 592077 - RNA, 22 nt, Human
aaauauaccaguugccugcauc

SEQ ID NO: 592078 - RNA, 22 nt, Human
aaauagcugaaaguuccuagau

SEQ ID NO: 592079 - RNA, 21 nt, Human
ucacguggucacaugagcuuu

SEQ ID NO: 592080 - RNA, 22 nt, Human
uggcagggugggcuucagcccc

SEQ ID NO: 592081 - RNA, 19 nt, Human
aaaguuuuauucucauuug

SEQ ID NO: 592082 - RNA, 22 nt, Human
caaauacugaguuuauuuucaa

SEQ ID NO: 592083 - RNA, 22 nt, Human
agggcgacaauggagagcguuu

SEQ ID NO: 592084 - RNA, 22 nt, Human
uuucacaacguuguggugagag

SEQ ID NO: 592085 - RNA, 22 nt, Human
cagggcugaacugagcuuguga

SEQ ID NO: 592086 - RNA, 22 nt, Human
uauaaauuaaugugcccaugag

SEQ ID NO: 592087 - RNA, 22 nt, Human
ucacaagauauuucaguccuuu

SEQ ID NO: 592088 - RNA, 22 nt, Human
aggugucugugaugggagcgau

SEQ ID NO: 592089 - RNA, 22 nt, Human
aauacuuuccuauauaaggugc

SEQ ID NO: 592090 - RNA, 22 nt, Human
uggguaggaccagaaaugcacu

SEQ ID NO: 592091 - RNA, 22 nt, Human
ugcaggaguuaagugcucuccu

SEQ ID NO: 592092 - RNA, 22 nt, Human
agcaccaguuucgucgugacaa

SEQ ID NO: 592093 - RNA, 22 nt, Human
cugacagauuagaugugcauau

SEQ ID NO: 592094 - RNA, 22 nt, Human
uccaggcaaagugcugggcugc

SEQ ID NO: 592095 - RNA, 22 nt, Human
ugaggcucuaugugguagauua

SEQ ID NO: 592096 - RNA, 22 nt, Human
uuugaagacagaucaauauaag

SEQ ID NO: 592097 - RNA, 22 nt, Human
uccuugaauccuagcauccuau

SEQ ID NO: 592098 - RNA, 21 nt, Human
gcagcuggucucagagcuugc

SEQ ID NO: 592099 - RNA, 22 nt, Human
uacugugacagaguacuuaaac

SEQ ID NO: 592100 - RNA, 18 nt, Human
augcaguugguacucuca

SEQ ID NO: 592101 - RNA, 22 nt, Human
acaugcacggcaccaucuucug

SEQ ID NO: 592102 - RNA, 22 nt, Human
gcagggccagggcucaggcugu

SEQ ID NO: 592103 - RNA, 22 nt, Human
ggaagccuaaagcccaggucuc

SEQ ID NO: 592104 - RNA, 22 nt, Human
aagaggaagucuccauggagag

SEQ ID NO: 592105 - RNA, 19 nt, Human
uauuauuuguagcaaggcc

SEQ ID NO: 592106 - RNA, 22 nt, Human
caauaaagaagauuuuugcaau

SEQ ID NO: 592107 - RNA, 22 nt, Human
auucaguuucaaucauuguagu

SEQ ID NO: 592108 - RNA, 22 nt, Human
acacagauuucacuggaauaga

SEQ ID NO: 592109 - RNA, 18 nt, Human
aagugacuggcaggccaa

SEQ ID NO: 592110 - RNA, 22 nt, Human
auuggaaauacaguagaaaaau

SEQ ID NO: 592111 - RNA, 19 nt, Human
agaagcugugaaaugaagg

SEQ ID NO: 592112 - RNA, 22 nt, Human
ugagguggugcuaaucucugcu

SEQ ID NO: 592113 - RNA, 20 nt, Human
gaaucuuacuacauucucuc

SEQ ID NO: 592114 - RNA, 22 nt, Human
gacccuggcugccgcggucugg

SEQ ID NO: 592115 - RNA, 22 nt, Human
uaggccacagaugagacauaag

SEQ ID NO: 592116 - RNA, 20 nt, Human
cauauauaccuagaagugga

SEQ ID NO: 592117 - RNA, 22 nt, Human
ccgcgccacccauucccacuga

SEQ ID NO: 592118 - RNA, 22 nt, Human
aagugaauuucauuccaauucu

SEQ ID NO: 592119 - RNA, 22 nt, Human
caggcaugcuucugucugggca

SEQ ID NO: 592120 - RNA, 22 nt, Human
caggaaggaccguccagaucag

SEQ ID NO: 592121 - RNA, 22 nt, Human
gcugccuuaugucuauuaguau

SEQ ID NO: 592122 - RNA, 18 nt, Human
uagagggggccugggcau

SEQ ID NO: 592123 - RNA, 22 nt, Human
gcuuuaaugcuucguggggcca

SEQ ID NO: 592124 - RNA, 22 nt, Human
gcacuaguucuacugccagcaa

SEQ ID NO: 592125 - RNA, 19 nt, Human
ggacauuugaguuguuuau

SEQ ID NO: 592126 - RNA, 22 nt, Human
gacugcuugagaaggaacaaau

SEQ ID NO: 592127 - RNA, 22 nt, Human
caagguuuuggaagauuuucgu

SEQ ID NO: 592128 - RNA, 22 nt, Human
uccagggagagccgcugcucca

SEQ ID NO: 592129 - RNA, 22 nt, Human
acaggcuuuuuuagaaugacau

SEQ ID NO: 592130 - RNA, 22 nt, Human
gccuaacuuggcuuuguucacc

SEQ ID NO: 592131 - RNA, 22 nt, Human
augagguaagcacugggcccaa

SEQ ID NO: 592132 - RNA, 22 nt, Human
caugcuuucuguccaaauguua

SEQ ID NO: 592133 - RNA, 22 nt, Human
cugcagggguguccuguauugg

SEQ ID NO: 592134 - RNA, 22 nt, Human
ucuuuacaagucacauuuucug

SEQ ID NO: 592135 - RNA, 23 nt, Human
ucucugguuaggggagauuggug

SEQ ID NO: 592136 - RNA, 19 nt, Human
augggcuauggugcuguuu

SEQ ID NO: 592137 - RNA, 22 nt, Human
uauguuuaaauguauguguaug

SEQ ID NO: 592138 - RNA, 19 nt, Human
auaacuacauuggcucagu

SEQ ID NO: 592139 - RNA, 20 nt, Human
cgcuccagucgcuggugugu

SEQ ID NO: 592140 - RNA, 22 nt, Human
cagguccuggcaucaggcaggu

SEQ ID NO: 592141 - RNA, 22 nt, Human
caugaauuuauauuauuaguga

SEQ ID NO: 592142 - RNA, 22 nt, Human
acaggcacaccuuccugcaggc

SEQ ID NO: 592143 - RNA, 22 nt, Human
gaauuugcaggugugcugugua

SEQ ID NO: 592144 - RNA, 22 nt, Human
cugugccugccuuguucacuga

SEQ ID NO: 592145 - RNA, 22 nt, Human
acagugucugacacauuguagc

SEQ ID NO: 592146 - RNA, 22 nt, Human
caggcuggagugcaauggugcu

SEQ ID NO: 592147 - RNA, 22 nt, Human
cuaguucugccauucaguguca

SEQ ID NO: 592148 - RNA, 22 nt, Human
uccauuuucuaaguaucacuua

SEQ ID NO: 592149 - RNA, 22 nt, Human
ugccugagguggucugcaaaug

SEQ ID NO: 592150 - RNA, 22 nt, Human
acccaggaaaacauggugcaga

SEQ ID NO: 592151 - RNA, 22 nt, Human
augagguagcuuggcccagggg

SEQ ID NO: 592152 - RNA, 22 nt, Human
cuccuguauguugggcuucaca

SEQ ID NO: 592153 - RNA, 22 nt, Human
uagcaauguguugacuugguca

SEQ ID NO: 592154 - RNA, 22 nt, Human
ugccaggcaggacccuagaacc

SEQ ID NO: 592155 - RNA, 22 nt, Human
cacaggcucuucucacuugauu

SEQ ID NO: 592156 - RNA, 22 nt, Human
uuuguucaugccuauauucuca

SEQ ID NO: 592157 - RNA, 22 nt, Human
gucuccaguuacagcagccagg

SEQ ID NO: 592158 - RNA, 22 nt, Human
uggcacuguggauuucacaagu

SEQ ID NO: 592159 - RNA, 22 nt, Human
uuauaugaguaucauaucacuu

SEQ ID NO: 592160 - RNA, 22 nt, Human
uuuccucugacugcuccccugc

SEQ ID NO: 592161 - RNA, 22 nt, Human
uccugagggcugcagucauagg

SEQ ID NO: 592162 - RNA, 22 nt, Human
uccuucagcuuguuagagugac

SEQ ID NO: 592163 - RNA, 22 nt, Human
cuguguggccucaagccagccu

SEQ ID NO: 592164 - RNA, 22 nt, Human
uggcuggaaacaggagauucag

SEQ ID NO: 592165 - RNA, 22 nt, Human
ucucuuccaguaagagucuuua

SEQ ID NO: 592166 - RNA, 22 nt, Human
auaauguugaugauugucuuug

SEQ ID NO: 592167 - RNA, 22 nt, Human
acaguagucucaggaauaggca

SEQ ID NO: 592168 - RNA, 21 nt, Human
agcagacagcccaagaaaauc

SEQ ID NO: 592169 - RNA, 22 nt, Human
uguugccuggggaagcucugau

SEQ ID NO: 592170 - RNA, 22 nt, Human
uaggccacagagaggagauuuc

SEQ ID NO: 592171 - RNA, 22 nt, Human
aggcacugggaauaugcugagg

SEQ ID NO: 592172 - RNA, 22 nt, Human
gauaaaauucuuauuuuacccg

SEQ ID NO: 592173 - RNA, 20 nt, Human
agguccacugaggcugccuc

SEQ ID NO: 592174 - RNA, 22 nt, Human
gggcacugaguggaugaugcag

SEQ ID NO: 592175 - RNA, 22 nt, Human
cuggcccuguggaggcaggaac

SEQ ID NO: 592176 - RNA, 20 nt, Human
agagccuggaaaaagacauc

SEQ ID NO: 592177 - RNA, 20 nt, Human
gcugaagauucccaugcaag

SEQ ID NO: 592178 - RNA, 23 nt, Human
agcuccaggugauuguaaugugu

SEQ ID NO: 592179 - RNA, 22 nt, Human
uaaaugcaguacaaauuguucu

SEQ ID NO: 592180 - RNA, 19 nt, Human
cugcucagagcagcuccag

SEQ ID NO: 592181 - RNA, 19 nt, Human
agcuaagacaagggacauc

SEQ ID NO: 592182 - RNA, 22 nt, Human
acucccacuccagaguagaagc

SEQ ID NO: 592183 - RNA, 22 nt, Human
ucucugcucugugccucaguuu

SEQ ID NO: 592184 - RNA, 22 nt, Human
ugaggggaacugaugcccauug

SEQ ID NO: 592185 - RNA, 22 nt, Human
uaagacagggagggcucucagc

SEQ ID NO: 592186 - RNA, 22 nt, Human
acauuugggacccucucuucac

SEQ ID NO: 592187 - RNA, 22 nt, Human
gucuccugcccccggugcuugg

SEQ ID NO: 592188 - RNA, 23 nt, Human
agcaauaagaagggauacaugug

SEQ ID NO: 592189 - RNA, 22 nt, Human
agcuguuuaaaugacuuacuuu

SEQ ID NO: 592190 - RNA, 22 nt, Human
uccagcccucagccaaguggaa

SEQ ID NO: 592191 - RNA, 23 nt, Human
cuguagcuaaaagcugggauuug

SEQ ID NO: 592192 - RNA, 22 nt, Human
gauuuacagguuagguccugua

SEQ ID NO: 592193 - RNA, 22 nt, Human
gcaguccuuaggagaggaagua

SEQ ID NO: 592194 - RNA, 22 nt, Human
agcauuccacacugaagucugc

SEQ ID NO: 592195 - RNA, 22 nt, Human
agggcagaaauauugauacugu

SEQ ID NO: 592196 - RNA, 22 nt, Human
ggcagggaaacagcugauccca

SEQ ID NO: 592197 - RNA, 22 nt, Human
accuuucguccugguuccuccg

SEQ ID NO: 592198 - RNA, 22 nt, Human
ucucuccuguguucugauguuu

SEQ ID NO: 592199 - RNA, 22 nt, Human
gggaggagggugcuggcuaaac

SEQ ID NO: 592200 - RNA, 22 nt, Human
aucaagaacuuauuuuggaaau

SEQ ID NO: 592201 - RNA, 22 nt, Human
gcaaagaaaugucagugagagg

SEQ ID NO: 592202 - RNA, 22 nt, Human
uuuuauugucuguauugccuau

SEQ ID NO: 592203 - RNA, 19 nt, Human
aagagcagggaaagaauug

SEQ ID NO: 592204 - RNA, 22 nt, Human
aacaggcaaacugugggauccc

SEQ ID NO: 592205 - RNA, 23 nt, Human
gugcaugugucuuuacaguagca

SEQ ID NO: 592206 - RNA, 22 nt, Human
ucuacuuuucccuauacaguuu

SEQ ID NO: 592207 - RNA, 22 nt, Human
auggaaauaucuuuagagcuua

SEQ ID NO: 592208 - RNA, 22 nt, Human
ucccugggguaucgcugaggca

SEQ ID NO: 592209 - RNA, 22 nt, Human
ugagucacacauuucuucauac

SEQ ID NO: 592210 - RNA, 22 nt, Human
uucuuucucuccacaaggcuug

SEQ ID NO: 592211 - RNA, 22 nt, Human
ugcagggcagcuagggagcuuu

SEQ ID NO: 592212 - RNA, 22 nt, Human
cugggugauuccuguccaggca

SEQ ID NO: 592213 - RNA, 22 nt, Human
ccaggcuguaagagugauguug

SEQ ID NO: 592214 - RNA, 22 nt, Human
uaaagugaaguucagaauggcu

SEQ ID NO: 592215 - RNA, 22 nt, Human
ggcaauuacguauuagucaugu

SEQ ID NO: 592216 - RNA, 22 nt, Human
uggcugagagaagacggggaag

SEQ ID NO: 592217 - RNA, 22 nt, Human
agucacuuccagacaccugccu

SEQ ID NO: 592218 - RNA, 22 nt, Human
aaaguguugauaugugacaucc

SEQ ID NO: 592219 - RNA, 22 nt, Human
ggcacagcaccuuuucacauug

SEQ ID NO: 592220 - RNA, 20 nt, Human
agccugccagcuggcccaga

SEQ ID NO: 592221 - RNA, 22 nt, Human
aguuucucuuaaucuaguaucu

SEQ ID NO: 592222 - RNA, 22 nt, Human
agugaaauacugucguuuuuag

SEQ ID NO: 592223 - RNA, 22 nt, Human
aagucaaucacaugcacacuga

SEQ ID NO: 592224 - RNA, 22 nt, Human
ccagcacucugucccagcuucc

SEQ ID NO: 592225 - RNA, 22 nt, Human
cauguguuuugucauuucaaua

SEQ ID NO: 592226 - RNA, 22 nt, Human
cauaacuguuaagauaauuuuu

SEQ ID NO: 592227 - RNA, 22 nt, Human
gaagccaguacugugcucugca

SEQ ID NO: 592228 - RNA, 22 nt, Human
ggccucagaaauagaguaaaau

SEQ ID NO: 592229 - RNA, 22 nt, Human
cugggcaccuuugcagcaggcu

SEQ ID NO: 592230 - RNA, 22 nt, Human
auaugaaaagaagucaccauug

SEQ ID NO: 592231 - RNA, 18 nt, Human
auauguuaauuagguagg

SEQ ID NO: 592232 - RNA, 22 nt, Human
acucugggccccagguggagcu

SEQ ID NO: 592233 - RNA, 22 nt, Human
acuguaaccaguguggugagag

SEQ ID NO: 592234 - RNA, 22 nt, Human
gugggacucuucuuuggcagug

SEQ ID NO: 592235 - RNA, 22 nt, Human
ccuucgagauuuaaacacugau

SEQ ID NO: 592236 - RNA, 22 nt, Human
cacaggaggaggugcccgggcc

SEQ ID NO: 592237 - RNA, 22 nt, Human
cuucagggugacgcaggcugca

SEQ ID NO: 592238 - RNA, 21 nt, Human
aauggaaguuuaaagguaucc

SEQ ID NO: 592239 - RNA, 22 nt, Human
cagcaagaaaauucacaugcuc

SEQ ID NO: 592240 - RNA, 22 nt, Human
agcagccuggacuuggaugugg

SEQ ID NO: 592241 - RNA, 22 nt, Human
gccugggagagggauagugcag

SEQ ID NO: 592242 - RNA, 22 nt, Human
accuuagcuguuaaaacuaagu

SEQ ID NO: 592243 - RNA, 22 nt, Human
gggcuagaaguuagcuagagaa

SEQ ID NO: 592244 - RNA, 22 nt, Human
ggcugcagggcagcuggugugg

SEQ ID NO: 592245 - RNA, 22 nt, Human
aaaucagaaaauauggagagga

SEQ ID NO: 592246 - RNA, 22 nt, Human
aagauaaacucuugauuucuga

SEQ ID NO: 592247 - RNA, 22 nt, Human
auucugcagguggaggauggca

SEQ ID NO: 592248 - RNA, 22 nt, Human
aggaacaacugauucagucaac

SEQ ID NO: 592249 - RNA, 22 nt, Human
cagagcugcgcuuuuuccuggu

SEQ ID NO: 592250 - RNA, 21 nt, Human
aguguccuugaucuugccuug

SEQ ID NO: 592251 - RNA, 22 nt, Human
uggagagugguuugggggacau

SEQ ID NO: 592252 - RNA, 22 nt, Human
uggcaguccagacccuggacuc

SEQ ID NO: 592253 - RNA, 22 nt, Human
uuucacaaacugaggagacaau

SEQ ID NO: 592254 - RNA, 21 nt, Human
aguuuccucaacugcagaagg

SEQ ID NO: 592255 - RNA, 22 nt, Human
ucagggcacauucugcaguggc

SEQ ID NO: 592256 - RNA, 22 nt, Human
guauuagcugccuuggagcuaa

SEQ ID NO: 592257 - RNA, 22 nt, Human
uggcugagaaugggaugaugcc

SEQ ID NO: 592258 - RNA, 22 nt, Human
agcugucuuucugccuccugau

SEQ ID NO: 592259 - RNA, 22 nt, Human
agcugagccagcagcaacagga

SEQ ID NO: 592260 - RNA, 22 nt, Human
agggaccucuucuugcagcuga

SEQ ID NO: 592261 - RNA, 22 nt, Human
caaaugaauauuuccauggguu

SEQ ID NO: 592262 - RNA, 22 nt, Human
gaaggagagagacaucgucccu

SEQ ID NO: 592263 - RNA, 22 nt, Human
ucuuaaagcuuacuucaauugu

SEQ ID NO: 592264 - RNA, 22 nt, Human
aguugcagccuucaggagaccc

SEQ ID NO: 592265 - RNA, 22 nt, Human
ugaggugggcuuguggauuugc

SEQ ID NO: 592266 - RNA, 21 nt, Human
uguaaguuucaucugaauugg

SEQ ID NO: 592267 - RNA, 19 nt, Human
ugggcagugccagggcuua

SEQ ID NO: 592268 - RNA, 22 nt, Human
ugugguagucucagggcaguau

SEQ ID NO: 592269 - RNA, 22 nt, Human
cagcuguuacucugaguaaaug

SEQ ID NO: 592270 - RNA, 22 nt, Human
cugugcaguaggucagggcugg

SEQ ID NO: 592271 - RNA, 22 nt, Human
aagaguuucugauucaguaggu

SEQ ID NO: 592272 - RNA, 22 nt, Human
guccacugcugugugcuucacc

SEQ ID NO: 592273 - RNA, 22 nt, Human
auagcaagcguucccaagccac

SEQ ID NO: 592274 - RNA, 22 nt, Human
ucuggaguggagcugaucauuu

SEQ ID NO: 592275 - RNA, 21 nt, Human
ugcaggaaagugcugcgaccc

SEQ ID NO: 592276 - RNA, 23 nt, Human
cuucagcagaaacauaaauucuc

SEQ ID NO: 592277 - RNA, 22 nt, Human
auggucaaagauaaagugaucu

SEQ ID NO: 592278 - RNA, 22 nt, Human
caguggcauacuuggcugauau

SEQ ID NO: 592279 - RNA, 22 nt, Human
auuauuagacuuauaugguagu

SEQ ID NO: 592280 - RNA, 22 nt, Human
gcugagaguccaggaaaacauc

SEQ ID NO: 592281 - RNA, 22 nt, Human
agugcuggauuacaggcgugag

SEQ ID NO: 592282 - RNA, 22 nt, Human
ugggccuggacaucuguauuuu

SEQ ID NO: 592283 - RNA, 22 nt, Human
gcccucagcaggaaagaucaac

SEQ ID NO: 592284 - RNA, 22 nt, Human
acagaaaaguuuacuuuugcuc

SEQ ID NO: 592285 - RNA, 22 nt, Human
uucugcauacacugaauguagu

SEQ ID NO: 592286 - RNA, 22 nt, Human
cauagcaaggugcuuuccacau

SEQ ID NO: 592287 - RNA, 22 nt, Human
uuguccuggagguuaauagagu

SEQ ID NO: 592288 - RNA, 22 nt, Human
aaagccaaaugaaagaugguuc

SEQ ID NO: 592289 - RNA, 22 nt, Human
ugggagcaguugcaucuccagu

SEQ ID NO: 592290 - RNA, 22 nt, Human
accagggcacaggagucugaag

SEQ ID NO: 592291 - RNA, 22 nt, Human
uuuuauauggcacauugguugg

SEQ ID NO: 592292 - RNA, 22 nt, Human
aggaccagccuccaggucucuu

SEQ ID NO: 592293 - RNA, 22 nt, Human
uggucucugagccuuccugugg

SEQ ID NO: 592294 - RNA, 22 nt, Human
aguuucucuagagucuuugaaa

SEQ ID NO: 592295 - RNA, 22 nt, Human
caggggccaaggguccagaccu

SEQ ID NO: 592296 - RNA, 22 nt, Human
gauuucucaauccuaguacuau

SEQ ID NO: 592297 - RNA, 20 nt, Human
ugcugagguugacaugccca

SEQ ID NO: 592298 - RNA, 22 nt, Human
uucugcagcccaacaguaguuu

SEQ ID NO: 592299 - RNA, 22 nt, Human
aaaguguuuuugagcuguaguu

SEQ ID NO: 592300 - RNA, 22 nt, Human
cucuagcuuuugauaccagugu

SEQ ID NO: 592301 - RNA, 22 nt, Human
ucaguaaauaacucagaugcuc

SEQ ID NO: 592302 - RNA, 22 nt, Human
uggggccagcggggaggacuca

SEQ ID NO: 592303 - RNA, 22 nt, Human
ccuguccuccaagagcacaucu

SEQ ID NO: 592304 - RNA, 21 nt, Human
uaggcagaggagcagguaucu

SEQ ID NO: 592305 - RNA, 18 nt, Human
cuggcuuucuuauccauc

SEQ ID NO: 592306 - RNA, 22 nt, Human
cagagccagcaguggggacagg

SEQ ID NO: 592307 - RNA, 22 nt, Human
cagcuauuauuuucucuaaauu

SEQ ID NO: 592308 - RNA, 22 nt, Human
uauaggaaaggaguggucacaa

SEQ ID NO: 592309 - RNA, 22 nt, Human
cugucuggauauaccuuggcca

SEQ ID NO: 592310 - RNA, 22 nt, Human
aauauuugaacagucacugagu

SEQ ID NO: 592311 - RNA, 22 nt, Human
ggagcuggcccucugaguuugu

SEQ ID NO: 592312 - RNA, 17 nt, Human
ggagacagggucuuuaa

SEQ ID NO: 592313 - RNA, 22 nt, Human
ugaaaugcuguagagacuguau

SEQ ID NO: 592314 - RNA, 22 nt, Human
agaaagggagcguggaucaauu

SEQ ID NO: 592315 - RNA, 22 nt, Human
auucaucuguacuucaauaucu

SEQ ID NO: 592316 - RNA, 20 nt, Human
uccagggcaacuagagugug

SEQ ID NO: 592317 - RNA, 22 nt, Human
aggcuggagagugcaguggcgu

SEQ ID NO: 592318 - RNA, 19 nt, Human
cugaagucuuuucagcugg

SEQ ID NO: 592319 - RNA, 22 nt, Human
gggugagggaugagccuucuuc

SEQ ID NO: 592320 - RNA, 22 nt, Human
gaggcagagucacaaagagucu

SEQ ID NO: 592321 - RNA, 22 nt, Human
caugagaaguggccuucaaaaa

SEQ ID NO: 592322 - RNA, 22 nt, Human
ggcugagacuagagugaggcau

SEQ ID NO: 592323 - RNA, 22 nt, Human
gggggaagacugggcuagugau

SEQ ID NO: 592324 - RNA, 22 nt, Human
uaguccuugguaaaauucuaug

SEQ ID NO: 592325 - RNA, 22 nt, Human
acacauguucaagaauguucag

SEQ ID NO: 592326 - RNA, 22 nt, Human
cacccugcucugcugugcggcc

SEQ ID NO: 592327 - RNA, 22 nt, Human
uucaaauuaccacauuugcuua

SEQ ID NO: 592328 - RNA, 22 nt, Human
uguuaacagccagauuugguga

SEQ ID NO: 592329 - RNA, 22 nt, Human
guaaauuucccgggccauuuaa

SEQ ID NO: 592330 - RNA, 22 nt, Human
gaccuccguguacaccucccag

SEQ ID NO: 592331 - RNA, 18 nt, Human
caggagcaggaguugaac

SEQ ID NO: 592332 - RNA, 22 nt, Human
uaagaggcaaaagauacucaga

SEQ ID NO: 592333 - RNA, 22 nt, Human
ugcuuaaaaugaugauuauuuu

SEQ ID NO: 592334 - RNA, 22 nt, Human
cauucauucagcaacuguuauu

SEQ ID NO: 592335 - RNA, 19 nt, Human
cccugcccuggugacuggg

SEQ ID NO: 592336 - RNA, 22 nt, Human
ugcugagggcagaugaauuaga

SEQ ID NO: 592337 - RNA, 22 nt, Human
acaggcagauuaaggguaggca

SEQ ID NO: 592338 - RNA, 22 nt, Human
cagccagaucaaacucagaugu

SEQ ID NO: 592339 - RNA, 22 nt, Human
gagcacaggcuuugguggacac

SEQ ID NO: 592340 - RNA, 22 nt, Human
ccugaggucaugcauuuccaac

SEQ ID NO: 592341 - RNA, 22 nt, Human
augacagaaggccucccugaca

SEQ ID NO: 592342 - RNA, 22 nt, Human
accagaggaagggaaucucaag

SEQ ID NO: 592343 - RNA, 21 nt, Human
ggcagcacuaccugaagcaua

SEQ ID NO: 592344 - RNA, 22 nt, Human
aacaauuaucauauacauugca

SEQ ID NO: 592345 - RNA, 22 nt, Human
cacaugcauaccuauguguaua

SEQ ID NO: 592346 - RNA, 22 nt, Human
ccagggccaagagaccucgagg

SEQ ID NO: 592347 - RNA, 22 nt, Human
ugcagugguugagagcccagac

SEQ ID NO: 592348 - RNA, 22 nt, Human
aauuucacuggaaaagauaauu

SEQ ID NO: 592349 - RNA, 22 nt, Human
uccaggacuagcauuucugaua

SEQ ID NO: 592350 - RNA, 22 nt, Human
agaguuugaaguuaucuuugac

SEQ ID NO: 592351 - RNA, 22 nt, Human
agaguuuguguccuuuaucagg

SEQ ID NO: 592352 - RNA, 22 nt, Human
ugagcugucuaugguccugucu

SEQ ID NO: 592353 - RNA, 22 nt, Human
aagccacuuucagcugucucag

SEQ ID NO: 592354 - RNA, 22 nt, Human
aagaagguguggaaagaugcuc

SEQ ID NO: 592355 - RNA, 22 nt, Human
uugugaauggugccgcaauaaa

SEQ ID NO: 592356 - RNA, 22 nt, Human
agggccagaguacaucagggcu

SEQ ID NO: 592357 - RNA, 22 nt, Human
augucuuucaaauucugccuag

SEQ ID NO: 592358 - RNA, 22 nt, Human
agcuggaggaguuucuccuagc

SEQ ID NO: 592359 - RNA, 22 nt, Human
gagacuuagagcuccuugaggg

SEQ ID NO: 592360 - RNA, 22 nt, Human
aggcugaggagggauguugcuu

SEQ ID NO: 592361 - RNA, 22 nt, Human
aaggccaggccagaugacaguc

SEQ ID NO: 592362 - RNA, 22 nt, Human
agauauaauaauuuacaagugu

SEQ ID NO: 592363 - RNA, 22 nt, Human
uucucuggccauagcuggcuag

SEQ ID NO: 592364 - RNA, 22 nt, Human
uucaugcuuuuaccgcuguuaa

SEQ ID NO: 592365 - RNA, 22 nt, Human
gagccaccuucaacucaggaau

SEQ ID NO: 592366 - RNA, 22 nt, Human
uggagcaggacugcugcccuca

SEQ ID NO: 592367 - RNA, 22 nt, Human
caucaguguggcaguucacugu

SEQ ID NO: 592368 - RNA, 22 nt, Human
gcuuccuaaaugcacagggcag

SEQ ID NO: 592369 - RNA, 22 nt, Human
acagagcauauaaagugcuuug

SEQ ID NO: 592370 - RNA, 22 nt, Human
acugucucucuagcaguucagg

SEQ ID NO: 592371 - RNA, 22 nt, Human
acacaucaugccaaguuucacc

SEQ ID NO: 592372 - RNA, 22 nt, Human
gagcucccaggccccagcaagg

SEQ ID NO: 592373 - RNA, 22 nt, Human
cagugccaugucugagccccua

SEQ ID NO: 592374 - RNA, 22 nt, Human
ccucaggcuagcuacugucccu

SEQ ID NO: 592375 - RNA, 18 nt, Human
uuuuucugauaaaacaag

SEQ ID NO: 592376 - RNA, 23 nt, Human
ucuggcuccauccuuggggaucc

SEQ ID NO: 592377 - RNA, 19 nt, Human
cagagccuucagugacucc

SEQ ID NO: 592378 - RNA, 22 nt, Human
aagucugagagaaacucucuca

SEQ ID NO: 592379 - RNA, 22 nt, Human
cuucccacagaauucaaucagu

SEQ ID NO: 592380 - RNA, 22 nt, Human
agggcccaccuuggugcugagg

SEQ ID NO: 592381 - RNA, 22 nt, Human
gaggggagacagggaaaucagu

SEQ ID NO: 592382 - RNA, 22 nt, Human
accugagccuagggagguugag

SEQ ID NO: 592383 - RNA, 22 nt, Human
cauuauauuacagcacuguuaa

SEQ ID NO: 592384 - RNA, 20 nt, Human
uucaugguguauuucuuucu

SEQ ID NO: 592385 - RNA, 19 nt, Human
uucccagagccaugaguga

SEQ ID NO: 592386 - RNA, 18 nt, Human
auuucucuggggugauuc

SEQ ID NO: 592387 - RNA, 22 nt, Human
aauggcaaggaaaccguuacca

SEQ ID NO: 592388 - RNA, 19 nt, Human
cugaaacacagagagggcu

SEQ ID NO: 592389 - RNA, 22 nt, Human
gaguguggaucccagaagcaga

SEQ ID NO: 592390 - RNA, 22 nt, Human
agcagggcuugccgcuuguccu

SEQ ID NO: 592391 - RNA, 22 nt, Human
uuggcucagcaucuuggugcca

SEQ ID NO: 592392 - RNA, 22 nt, Human
gagggagaaggacuaucaggcu

SEQ ID NO: 592393 - RNA, 22 nt, Human
auacaguaagugucccugaaac

SEQ ID NO: 592394 - RNA, 22 nt, Human
gaaauaauucugugucugaaca

SEQ ID NO: 592395 - RNA, 22 nt, Human
agugucuuugacacauucaaag

SEQ ID NO: 592396 - RNA, 22 nt, Human
aaagaggggacuguuaauucca

SEQ ID NO: 592397 - RNA, 22 nt, Human
gccacagcuuagaucacagccu

SEQ ID NO: 592398 - RNA, 21 nt, Human
ccugagccuguuuauccagaa

SEQ ID NO: 592399 - RNA, 17 nt, Human
auuuguaacuagcucuu

SEQ ID NO: 592400 - RNA, 22 nt, Human
acagugagauccaagggcaggc

SEQ ID NO: 592401 - RNA, 22 nt, Human
uagcaaugcucuaugaugaaaa

SEQ ID NO: 592402 - RNA, 22 nt, Human
cugugagggccagagucagggc

SEQ ID NO: 592403 - RNA, 22 nt, Human
gagggcugauguugccaccuca

SEQ ID NO: 592404 - RNA, 22 nt, Human
uggcugccuuucaccucaucuc

SEQ ID NO: 592405 - RNA, 22 nt, Human
agccccuguacccugagugcuu

SEQ ID NO: 592406 - RNA, 22 nt, Human
uuugcaauuugugcugcaaaug

SEQ ID NO: 592407 - RNA, 22 nt, Human
gaagggaaggaaagaaccagca

SEQ ID NO: 592408 - RNA, 22 nt, Human
acagaggggucacagccugaag

SEQ ID NO: 592409 - RNA, 20 nt, Human
gggaguggugguagccugug

SEQ ID NO: 592410 - RNA, 22 nt, Human
uuggaggggccacugcagagcu

SEQ ID NO: 592411 - RNA, 22 nt, Human
acagagcauuugggacagagag

SEQ ID NO: 592412 - RNA, 22 nt, Human
cuaauuauguuguuauaaucaa

SEQ ID NO: 592413 - RNA, 22 nt, Human
auuuugaaauacuugaaggaaa

SEQ ID NO: 592414 - RNA, 22 nt, Human
cugcagggauugcuucuguaua

SEQ ID NO: 592415 - RNA, 22 nt, Human
agcugccuguccuaggccauca

SEQ ID NO: 592416 - RNA, 22 nt, Human
uccugccuuagagcaaggaaaa

SEQ ID NO: 592417 - RNA, 19 nt, Human
agcugcagaccagaagugc

SEQ ID NO: 592418 - RNA, 22 nt, Human
uaucagaagacuuacaguaucg

SEQ ID NO: 592419 - RNA, 22 nt, Human
uguuuuaagggucaacugucac

SEQ ID NO: 592420 - RNA, 22 nt, Human
uccaccagccaggcccaggcug

SEQ ID NO: 592421 - RNA, 23 nt, Human
uuggaacacaguaaaugcacaau

SEQ ID NO: 592422 - RNA, 23 nt, Human
aaauauucuuuuuuaguaagugc

SEQ ID NO: 592423 - RNA, 22 nt, Human
agugaaaaccuaaucaugcagu

SEQ ID NO: 592424 - RNA, 22 nt, Human
ccaaggcuguggggcugugcag

SEQ ID NO: 592425 - RNA, 22 nt, Human
aggcaguuguagagagggcucu

SEQ ID NO: 592426 - RNA, 22 nt, Human
ugcugccaccccucaccagagc

SEQ ID NO: 592427 - RNA, 22 nt, Human
uuuucaucucugcuuuguaccu

SEQ ID NO: 592428 - RNA, 22 nt, Human
uccugggccuguacuccauccg

SEQ ID NO: 592429 - RNA, 22 nt, Human
gaauacaagccugccaccugga

SEQ ID NO: 592430 - RNA, 22 nt, Human
acuccagaggcagcugugcuga

SEQ ID NO: 592431 - RNA, 22 nt, Human
agccuggagaagauguguauug

SEQ ID NO: 592432 - RNA, 22 nt, Human
caccagggcucugagcucugaa

SEQ ID NO: 592433 - RNA, 22 nt, Human
cuggagaaacaucaggcauagg

SEQ ID NO: 592434 - RNA, 22 nt, Human
gaugauauuuugacuggagaau

SEQ ID NO: 592435 - RNA, 22 nt, Human
gugucccagcagcacauuggcu

SEQ ID NO: 592436 - RNA, 22 nt, Human
cauuccaaguauauacaugaua

SEQ ID NO: 592437 - RNA, 22 nt, Human
auauuucacguagguuguuuuc

SEQ ID NO: 592438 - RNA, 22 nt, Human
cgggcuggcugcagcugcugga

SEQ ID NO: 592439 - RNA, 22 nt, Human
ccuuucugacagugaugggggg

SEQ ID NO: 592440 - RNA, 22 nt, Human
uguuuucuggguggaagguacu

SEQ ID NO: 592441 - RNA, 20 nt, Human
uggauucuggagcugcccuc

SEQ ID NO: 592442 - RNA, 22 nt, Human
guggcccugucccaggccuccu

SEQ ID NO: 592443 - RNA, 22 nt, Human
ugagguagguugaaagauagau

SEQ ID NO: 592444 - RNA, 22 nt, Human
uucucaguuucacugauaacag

SEQ ID NO: 592445 - RNA, 22 nt, Human
cauauucaagggguaaggcaaa

SEQ ID NO: 592446 - RNA, 22 nt, Human
ggucagggggaucugugaggua

SEQ ID NO: 592447 - RNA, 22 nt, Human
auuugcaugcuucuauugugaa

SEQ ID NO: 592448 - RNA, 18 nt, Human
cgauguguaugugauuug

SEQ ID NO: 592449 - RNA, 22 nt, Human
aacaaugaccacacaauguacu

SEQ ID NO: 592450 - RNA, 22 nt, Human
uuuugaaagggugauuuggcuu

SEQ ID NO: 592451 - RNA, 22 nt, Human
ucaauagcaaucaagccuucca

SEQ ID NO: 592452 - RNA, 22 nt, Human
cugccuucaucucugagcuggg

SEQ ID NO: 592453 - RNA, 22 nt, Human
aggccagauauugugcuaccca

SEQ ID NO: 592454 - RNA, 22 nt, Human
ggacugaggacaugugaggcau

SEQ ID NO: 592455 - RNA, 22 nt, Human
gauaugaaguggcauugugaag

SEQ ID NO: 592456 - RNA, 22 nt, Human
uugcugauggagggaaugcuca

SEQ ID NO: 592457 - RNA, 22 nt, Human
aauucaaagacuagaauuuugc

SEQ ID NO: 592458 - RNA, 22 nt, Human
uuuauuagauuaucaaagaggu

SEQ ID NO: 592459 - RNA, 22 nt, Human
gucccucugugucccugcaguc

SEQ ID NO: 592460 - RNA, 22 nt, Human
gcugagcagguuugaugcuuuu

SEQ ID NO: 592461 - RNA, 22 nt, Human
cagggagcuauuaggguuagug

SEQ ID NO: 592462 - RNA, 22 nt, Human
aaacagcuuguaagguguaauu

SEQ ID NO: 592463 - RNA, 22 nt, Human
agugacauuauuuuguguacua

SEQ ID NO: 592464 - RNA, 22 nt, Human
cuugaaaaauaugccuugcuuc

SEQ ID NO: 592465 - RNA, 22 nt, Human
ggugggagagcucugucuccag

SEQ ID NO: 592466 - RNA, 22 nt, Human
gcagggcucugcuguaguccua

SEQ ID NO: 592467 - RNA, 22 nt, Human
cauguaguccuaaugcugguga

SEQ ID NO: 592468 - RNA, 22 nt, Human
cagcagccucaaguuuauuuuc

SEQ ID NO: 592469 - RNA, 22 nt, Human
ggccucucauguccugggcuuc

SEQ ID NO: 592470 - RNA, 22 nt, Human
agcacugugauuuauaacauuu

SEQ ID NO: 592471 - RNA, 22 nt, Human
aaacugaaacaucaucauguug

SEQ ID NO: 592472 - RNA, 22 nt, Human
caucugcuguuccuuggacuca

SEQ ID NO: 592473 - RNA, 22 nt, Human
ugcaggagcagagauggcugga

SEQ ID NO: 592474 - RNA, 22 nt, Human
ccccacagcuuguggagagaau

SEQ ID NO: 592475 - RNA, 22 nt, Human
aaaugcaggaaauuaugcuuuu

SEQ ID NO: 592476 - RNA, 22 nt, Human
uacaaugcugugcauguaaugg

SEQ ID NO: 592477 - RNA, 22 nt, Human
acaaaucuguuuuauagacuuu

SEQ ID NO: 592478 - RNA, 22 nt, Human
cuggagagaauguucauugcag

SEQ ID NO: 592479 - RNA, 22 nt, Human
uaggcugacuuguuucauaaag

SEQ ID NO: 592480 - RNA, 22 nt, Human
acaauguaggaguaugacagua

SEQ ID NO: 592481 - RNA, 22 nt, Human
uuauucaccaguguaaaacacu

SEQ ID NO: 592482 - RNA, 22 nt, Human
aggccacaagaacuaccccauc

SEQ ID NO: 592483 - RNA, 22 nt, Human
ucccagauuccugcucuuauau

SEQ ID NO: 592484 - RNA, 22 nt, Human
aaagaaauaccuuucucagcuu

SEQ ID NO: 592485 - RNA, 22 nt, Human
caaggcagaauucagacucagg

SEQ ID NO: 592486 - RNA, 22 nt, Human
agggccuggaacugugggcagg

SEQ ID NO: 592487 - RNA, 22 nt, Human
acaguguaugauauuucacagu

SEQ ID NO: 592488 - RNA, 22 nt, Human
aagccacucacaauaacugucc

SEQ ID NO: 592489 - RNA, 22 nt, Human
gagacacacacaggagguggca

SEQ ID NO: 592490 - RNA, 22 nt, Human
gggaggcgccgaggguagcuaa

SEQ ID NO: 592491 - RNA, 22 nt, Human
aagucacaaagugcuguacaug

SEQ ID NO: 592492 - RNA, 22 nt, Human
gccugccccuuccugggcaggg

SEQ ID NO: 592493 - RNA, 22 nt, Human
uacaacaugugguccuuuauga

SEQ ID NO: 592494 - RNA, 22 nt, Human
ugggccuguugccugaguccau

SEQ ID NO: 592495 - RNA, 22 nt, Human
cugugucucuccuuacaagacu

SEQ ID NO: 592496 - RNA, 22 nt, Human
acagaagugaguggcaagaacu

SEQ ID NO: 592497 - RNA, 22 nt, Human
aauaaugugugcugcagucuua

SEQ ID NO: 592498 - RNA, 22 nt, Human
gucuaugauauuuuguuauagc

SEQ ID NO: 592499 - RNA, 22 nt, Human
caguuucuuggaugccaauuuc

SEQ ID NO: 592500 - RNA, 23 nt, Human
ucugagaagguuucagccagacu

SEQ ID NO: 592501 - RNA, 22 nt, Human
aguaacaagugccaacguuaga

SEQ ID NO: 592502 - RNA, 22 nt, Human
uggcacaggaucucagcggcca

SEQ ID NO: 592503 - RNA, 22 nt, Human
uauugucacgucuuaauucuag

SEQ ID NO: 592504 - RNA, 22 nt, Human
gagcuuugcauuauucagaagc

SEQ ID NO: 592505 - RNA, 22 nt, Human
auggauaauggugauaguugca

SEQ ID NO: 592506 - RNA, 22 nt, Human
agcuuugaaaauccaaauuaca

SEQ ID NO: 592507 - RNA, 22 nt, Human
ccuuccucauccauuucucuug

SEQ ID NO: 592508 - RNA, 22 nt, Human
ugucauuuuagugcaucacuca

SEQ ID NO: 592509 - RNA, 22 nt, Human
acaaugaagauaauguugcagu

SEQ ID NO: 592510 - RNA, 22 nt, Human
guuuauugauaaaagcuggaca

SEQ ID NO: 592511 - RNA, 22 nt, Human
accauguuggccaagcuggucu

SEQ ID NO: 592512 - RNA, 23 nt, Human
cuucuggcucuauaucagaauuc

SEQ ID NO: 592513 - RNA, 23 nt, Human
uggcagcagaucuuaaagugacc

SEQ ID NO: 592514 - RNA, 22 nt, Human
uugaagcaaggcgaaucuugug

SEQ ID NO: 592515 - RNA, 22 nt, Human
cugcuagcccgccggccagcga

SEQ ID NO: 592516 - RNA, 22 nt, Human
guuugaaaaaagcaguauguaa

SEQ ID NO: 592517 - RNA, 22 nt, Human
uauuggaccacagacuuuaagg

SEQ ID NO: 592518 - RNA, 22 nt, Human
aucuggggucagacagcccugg

SEQ ID NO: 592519 - RNA, 22 nt, Human
acauuguugagccucuuguuca

SEQ ID NO: 592520 - RNA, 22 nt, Human
agauucagaaaauucucuguuc

SEQ ID NO: 592521 - RNA, 22 nt, Human
agccaagguaucaugagaggca

SEQ ID NO: 592522 - RNA, 22 nt, Human
cagugccacaggaauggccaau

SEQ ID NO: 592523 - RNA, 23 nt, Human
ccaggaagaggccauccacaguc

SEQ ID NO: 592524 - RNA, 23 nt, Human
cagaccuggcagucauccucaac

SEQ ID NO: 592525 - RNA, 22 nt, Human
gggagaaguggaaaucucauua

SEQ ID NO: 592526 - RNA, 22 nt, Human
agaugcugccucuccucacaag

SEQ ID NO: 592527 - RNA, 22 nt, Human
uuuuuauaacucuuuugugaca

SEQ ID NO: 592528 - RNA, 19 nt, Human
ucugaauuauuuauguacc

SEQ ID NO: 592529 - RNA, 22 nt, Human
ucagaaucuuucuagagucuag

SEQ ID NO: 592530 - RNA, 22 nt, Human
uuagcaaauaucuugaaacagg

SEQ ID NO: 592531 - RNA, 22 nt, Human
agcugcuuccucuuugauguca

SEQ ID NO: 592532 - RNA, 22 nt, Human
uguuuuuaaauaaugauagaaa

SEQ ID NO: 592533 - RNA, 22 nt, Human
acacugcuaaacaguaaagaug

SEQ ID NO: 592534 - RNA, 23 nt, Human
cagaaauaaacugguuuguagau

SEQ ID NO: 592535 - RNA, 22 nt, Human
gcuggaguccagugguaugauc

SEQ ID NO: 592536 - RNA, 22 nt, Human
agaguuugugggcuuuuccucc

SEQ ID NO: 592537 - RNA, 22 nt, Human
auuggcaguuagugacgaggcu

SEQ ID NO: 592538 - RNA, 22 nt, Human
ucugaagaggcucuugauaaga

SEQ ID NO: 592539 - RNA, 22 nt, Human
guaaucucagcuacuugggagg

SEQ ID NO: 592540 - RNA, 22 nt, Human
ggcagcaguuacaaaugugcag

SEQ ID NO: 592541 - RNA, 22 nt, Human
uuuauguuccucuugagcuuuc

SEQ ID NO: 592542 - RNA, 22 nt, Human
ccucucaucauuaucgcuuugu

SEQ ID NO: 592543 - RNA, 22 nt, Human
ucuuuugugaggacaagguacg

SEQ ID NO: 592544 - RNA, 22 nt, Human
uuugaugaguuuaauaacagcc

SEQ ID NO: 592545 - RNA, 21 nt, Human
auaaagacaaacacuauuugg

SEQ ID NO: 592546 - RNA, 22 nt, Human
uuuauaaaauagacugggucua

SEQ ID NO: 592547 - RNA, 21 nt, Human
ccaggcugggagggcaguucc

SEQ ID NO: 592548 - RNA, 22 nt, Human
cagcucucacacccuccuccca

SEQ ID NO: 592549 - RNA, 22 nt, Human
agcuucauggaaccugaggcua

SEQ ID NO: 592550 - RNA, 22 nt, Human
agugcuaaaggaucacaggguc

SEQ ID NO: 592551 - RNA, 22 nt, Human
agagccaggaaguggcgugggg

SEQ ID NO: 592552 - RNA, 22 nt, Human
agcugcuucaaaaugggcuccu

SEQ ID NO: 592553 - RNA, 22 nt, Human
gaggugccuggcgaugucucug

SEQ ID NO: 592554 - RNA, 22 nt, Human
gaaaucuuuucaucucauuuga

SEQ ID NO: 592555 - RNA, 22 nt, Human
cucagccugugaagagcagagg

SEQ ID NO: 592556 - RNA, 22 nt, Human
ucuuuuauagugaauuuucuug

SEQ ID NO: 592557 - RNA, 17 nt, Human
ucuguucaugcauaccu

SEQ ID NO: 592558 - RNA, 22 nt, Human
uuguaaaugaccuuuucuaauu

SEQ ID NO: 592559 - RNA, 22 nt, Human
ucaaauaaggagucaugaccau

SEQ ID NO: 592560 - RNA, 20 nt, Human
caaaagcaaugaaguuauga

SEQ ID NO: 592561 - RNA, 22 nt, Human
uaugaaacauucauacaaauaa

SEQ ID NO: 592562 - RNA, 22 nt, Human
gcuuccagacgaucauguaaga

SEQ ID NO: 592563 - RNA, 22 nt, Human
ccaggcuccucaugaucuuguu

SEQ ID NO: 592564 - RNA, 23 nt, Human
cuucagugugggacugcagcgug

SEQ ID NO: 592565 - RNA, 22 nt, Human
gcuggagugaugccugugucuc

SEQ ID NO: 592566 - RNA, 22 nt, Human
uggaaaacaaagcucucauuau

SEQ ID NO: 592567 - RNA, 22 nt, Human
caagaggcuaaacugggcuauu

SEQ ID NO: 592568 - RNA, 22 nt, Human
auucauuuagguauucacuuac

SEQ ID NO: 592569 - RNA, 22 nt, Human
gcugccuucccggaaugucauc

SEQ ID NO: 592570 - RNA, 22 nt, Human
cacagacagugucccuuuguug

SEQ ID NO: 592571 - RNA, 22 nt, Human
guccagcugaucuugacccagc

SEQ ID NO: 592572 - RNA, 22 nt, Human
cuguauuauuuucuuagcucug

SEQ ID NO: 592573 - RNA, 21 nt, Human
cucuuuauauaguaaagauau

SEQ ID NO: 592574 - RNA, 22 nt, Human
agcaccaggaaagaaggggcca

SEQ ID NO: 592575 - RNA, 22 nt, Human
ugugaauauccauuuguuucag

SEQ ID NO: 592576 - RNA, 22 nt, Human
ucucugugaguggaaggcaccc

SEQ ID NO: 592577 - RNA, 22 nt, Human
auuggcuuaguuggcaauuguu

SEQ ID NO: 592578 - RNA, 22 nt, Human
cauuucuccgccgagaucacug

SEQ ID NO: 592579 - RNA, 22 nt, Human
ucuuugcaugcauuuucccuua

SEQ ID NO: 592580 - RNA, 22 nt, Human
cagacuuuugggaggucugugg

SEQ ID NO: 592581 - RNA, 22 nt, Human
agggucucuggagagcugagga

SEQ ID NO: 592582 - RNA, 22 nt, Human
uccugggauuaagguggugauu

SEQ ID NO: 592583 - RNA, 22 nt, Human
uucucccacuccgugcuucagu

SEQ ID NO: 592584 - RNA, 22 nt, Human
agccugagugcuuaggacuguu

SEQ ID NO: 592585 - RNA, 22 nt, Human
ucacugggcccugaggugggac

SEQ ID NO: 592586 - RNA, 22 nt, Human
gcacuagucaagugaacaauuu

SEQ ID NO: 592587 - RNA, 22 nt, Human
cagcacuaauccugcaauuucu

SEQ ID NO: 592588 - RNA, 22 nt, Human
acacacagaaggaagccccacu

SEQ ID NO: 592589 - RNA, 22 nt, Human
guccucugggcagcugccccac

SEQ ID NO: 592590 - RNA, 22 nt, Human
ugucuguuauugguguauaaga

SEQ ID NO: 592591 - RNA, 22 nt, Human
uugcaggguugaccaauaggcu

SEQ ID NO: 592592 - RNA, 22 nt, Human
uggccaagaugcgaccucucag

SEQ ID NO: 592593 - RNA, 22 nt, Human
uucucuuugacauuauucaggu

SEQ ID NO: 592594 - RNA, 22 nt, Human
gcugcagacuucucaucucauu

SEQ ID NO: 592595 - RNA, 22 nt, Human
ggcugcugacuucauccagcuu

SEQ ID NO: 592596 - RNA, 22 nt, Human
agcugcagcacuccaguagccg

SEQ ID NO: 592597 - RNA, 20 nt, Human
cgaggccaaggggcugggcc

SEQ ID NO: 592598 - RNA, 22 nt, Human
aacccagccguguagcugccgc

SEQ ID NO: 592599 - RNA, 22 nt, Human
aaaaacuguaauuacuuuugca

SEQ ID NO: 592600 - RNA, 22 nt, Human
caaguuuugcauaguucuguau

SEQ ID NO: 592601 - RNA, 21 nt, Human
gcuggcucucugacgugcuuu

SEQ ID NO: 592602 - RNA, 19 nt, Human
cagaggcaccagguauaga

SEQ ID NO: 592603 - RNA, 22 nt, Human
ccaggcaucacgggcauguggc

SEQ ID NO: 592604 - RNA, 22 nt, Human
aagaauguucauuaaacuguug

SEQ ID NO: 592605 - RNA, 22 nt, Human
aacagggacaaggauagagaaa

SEQ ID NO: 592606 - RNA, 19 nt, Human
ccacacagugugcaauuua

SEQ ID NO: 592607 - RNA, 22 nt, Human
uaaagcagugugguuguguccc

SEQ ID NO: 592608 - RNA, 22 nt, Human
cccaggucugugccagcucuga

SEQ ID NO: 592609 - RNA, 22 nt, Human
uuagugcuucuguccaaauaua

SEQ ID NO: 592610 - RNA, 22 nt, Human
auaaucuguggaugguuuugag

SEQ ID NO: 592611 - RNA, 22 nt, Human
acagcagcuugucuguucuuua

SEQ ID NO: 592612 - RNA, 22 nt, Human
agcaggcuaaucuugcugaaca

SEQ ID NO: 592613 - RNA, 22 nt, Human
agucuucugcucugucacuaac

SEQ ID NO: 592614 - RNA, 17 nt, Human
uuuucuccugcccauuc

SEQ ID NO: 592615 - RNA, 22 nt, Human
cucugaaaaugugguggggaaa

SEQ ID NO: 592616 - RNA, 22 nt, Human
ccuggguagacuuugaagcauu

SEQ ID NO: 592617 - RNA, 20 nt, Human
cccuggagagaagcuccacg

SEQ ID NO: 592618 - RNA, 22 nt, Human
cuacagaagaaacuaucacuau

SEQ ID NO: 592619 - RNA, 22 nt, Human
ggcaggugaccuggccucccag

SEQ ID NO: 592620 - RNA, 22 nt, Human
ggaggaagcccucggugcccca

SEQ ID NO: 592621 - RNA, 22 nt, Human
cucccuggaggugagcuggcac

SEQ ID NO: 592622 - RNA, 19 nt, Human
ugcugcuguccuugcaggg

SEQ ID NO: 592623 - RNA, 22 nt, Human
aaagcagugcaccuuaauugau

SEQ ID NO: 592624 - RNA, 22 nt, Human
auagucacugccuuccauuugu

SEQ ID NO: 592625 - RNA, 23 nt, Human
ucccagggaaggugagcgaggcu

SEQ ID NO: 592626 - RNA, 22 nt, Human
gcagggcuauuggaaggagaug

SEQ ID NO: 592627 - RNA, 20 nt, Human
uuuccuaagugguuugcuga

SEQ ID NO: 592628 - RNA, 22 nt, Human
acaucccacagaaacauacaua

SEQ ID NO: 592629 - RNA, 22 nt, Human
ggguccagaguugaagagguua

SEQ ID NO: 592630 - RNA, 22 nt, Human
aacaucauuauguccauuaaug

SEQ ID NO: 592631 - RNA, 22 nt, Human
caguuucuacgaaggucaaccc

SEQ ID NO: 592632 - RNA, 23 nt, Human
ugucuaugagaaguucaggcuag

SEQ ID NO: 592633 - RNA, 20 nt, Human
cuguggcucaugcaucugcc

SEQ ID NO: 592634 - RNA, 22 nt, Human
uggcacagaccuuaucuucucu

SEQ ID NO: 592635 - RNA, 19 nt, Human
uuaugaauagcuucaucca

SEQ ID NO: 592636 - RNA, 22 nt, Human
cuggcccucggaguccagcugc

SEQ ID NO: 592637 - RNA, 22 nt, Human
uggaagcagugauucuugucug

SEQ ID NO: 592638 - RNA, 23 nt, Human
uacauucuguauuuuuauagagu

SEQ ID NO: 592639 - RNA, 22 nt, Human
uaaagacagauggaccagccau

SEQ ID NO: 592640 - RNA, 18 nt, Human
caauuucaauggucugaa

SEQ ID NO: 592641 - RNA, 22 nt, Human
caggggcucccugggugccagu

SEQ ID NO: 592642 - RNA, 22 nt, Human
ccacuggcauccagcugccauc

SEQ ID NO: 592643 - RNA, 22 nt, Human
gcaccuggacagugacccuagc

SEQ ID NO: 592644 - RNA, 19 nt, Human
uuuacagggaauggagacc

SEQ ID NO: 592645 - RNA, 22 nt, Human
accucccagcucugagcuuggg

SEQ ID NO: 592646 - RNA, 22 nt, Human
cugggagauugcuagagaugca

SEQ ID NO: 592647 - RNA, 22 nt, Human
gggcagauggggcacaggcuga

SEQ ID NO: 592648 - RNA, 21 nt, Human
ugcuccagggcagcuuccagc

SEQ ID NO: 592649 - RNA, 22 nt, Human
aguagggagaccggaggccgcc

SEQ ID NO: 592650 - RNA, 22 nt, Human
uccugccaccugcacagcuccc

SEQ ID NO: 592651 - RNA, 22 nt, Human
gucugaaauggaggugggaacu

SEQ ID NO: 592652 - RNA, 22 nt, Human
uucacacagaaucugaggagcu

SEQ ID NO: 592653 - RNA, 22 nt, Human
ugcagagcagcaacugcgugcg

SEQ ID NO: 592654 - RNA, 22 nt, Human
gcagcugaagcugcaguuccag

SEQ ID NO: 592655 - RNA, 22 nt, Human
ggggugagaucaaggaagcccu

SEQ ID NO: 592656 - RNA, 22 nt, Human
uguuagauuccugaugaauuua

SEQ ID NO: 592657 - RNA, 23 nt, Human
ugcuggcugaaacagccaaagga

SEQ ID NO: 592658 - RNA, 22 nt, Human
ucccagggacucucugccuucc

SEQ ID NO: 592659 - RNA, 21 nt, Human
ucacaggcucagggagagagu

SEQ ID NO: 592660 - RNA, 22 nt, Human
gagaugcuugucugucuuauca

SEQ ID NO: 592661 - RNA, 22 nt, Human
aaauuauuacaagcuaguuggc

SEQ ID NO: 592662 - RNA, 22 nt, Human
uggcugugccucuuuccaggcc

SEQ ID NO: 592663 - RNA, 20 nt, Human
cuuccaccagggccgcugau

SEQ ID NO: 592664 - RNA, 22 nt, Human
aacuacaguaguuugcccuucu

SEQ ID NO: 592665 - RNA, 22 nt, Human
cacagaggacuguagcggggag

SEQ ID NO: 592666 - RNA, 22 nt, Human
ggccugagucacaucaggagag

SEQ ID NO: 592667 - RNA, 22 nt, Human
ucaggcucugagcugaugcuaa

SEQ ID NO: 592668 - RNA, 22 nt, Human
ggcucaggccagaccacgacuc

SEQ ID NO: 592669 - RNA, 22 nt, Human
uugugaaaucguguuuggaagc

SEQ ID NO: 592670 - RNA, 20 nt, Human
aacauugaaagucuagaaga

SEQ ID NO: 592671 - RNA, 22 nt, Human
uuuaguguaagcauaaagaaca

SEQ ID NO: 592672 - RNA, 22 nt, Human
agcaugcugguuacguguagca

SEQ ID NO: 592673 - RNA, 22 nt, Human
uacagaaaucacaucgcuuuga

SEQ ID NO: 592674 - RNA, 22 nt, Human
ugccagggugucaggagagcua

SEQ ID NO: 592675 - RNA, 20 nt, Human
ccagaagguaggauggaaca

SEQ ID NO: 592676 - RNA, 22 nt, Human
gccagcagcccagaaggacuuu

SEQ ID NO: 592677 - RNA, 22 nt, Human
agagccugucugccuuucuacc

SEQ ID NO: 592678 - RNA, 22 nt, Human
aacaugaaaguugcuaagugca

SEQ ID NO: 592679 - RNA, 22 nt, Human
ucugauaggugguagaaggagg

SEQ ID NO: 592680 - RNA, 22 nt, Human
aaacugaggcucccgagggugu

SEQ ID NO: 592681 - RNA, 22 nt, Human
uugagaauguguuuugcuaagu

SEQ ID NO: 592682 - RNA, 22 nt, Human
uagugugguaucuucuauggaa

SEQ ID NO: 592683 - RNA, 22 nt, Human
aaagaagggacagacugccucu

SEQ ID NO: 592684 - RNA, 22 nt, Human
uaaaaaacauuacucuguccug

SEQ ID NO: 592685 - RNA, 22 nt, Human
ugucagcagcugguuugcuguu

SEQ ID NO: 592686 - RNA, 22 nt, Human
caucaaugugcagagaugaacg

SEQ ID NO: 592687 - RNA, 20 nt, Human
cuaagaggaggacuagguuu

SEQ ID NO: 592688 - RNA, 22 nt, Human
aaauggcaaucagcagaagcua

SEQ ID NO: 592689 - RNA, 22 nt, Human
aacuacagcucuugucuuucug

SEQ ID NO: 592690 - RNA, 22 nt, Human
aucaagaauugggagcuauuga

SEQ ID NO: 592691 - RNA, 22 nt, Human
cauuucuauggcaaugggaaaa

SEQ ID NO: 592692 - RNA, 22 nt, Human
acagcagaucuggcuacagguu

SEQ ID NO: 592693 - RNA, 22 nt, Human
ugugugccugagccgugccugg

SEQ ID NO: 592694 - RNA, 22 nt, Human
ggcuccugggaugggacugagc

SEQ ID NO: 592695 - RNA, 22 nt, Human
aaagauuugaaauuaggcauca

SEQ ID NO: 592696 - RNA, 22 nt, Human
ccuggaucccgauggcugugag

SEQ ID NO: 592697 - RNA, 22 nt, Human
caugcagucaauaaacaugugu

SEQ ID NO: 592698 - RNA, 22 nt, Human
gcaggagagucugugccagguu

SEQ ID NO: 592699 - RNA, 22 nt, Human
cccccaccguguuccugcucgg

SEQ ID NO: 592700 - RNA, 22 nt, Human
uucagaacaaccaugguuagau

SEQ ID NO: 592701 - RNA, 22 nt, Human
uucaacaaguaguacacacagu

SEQ ID NO: 592702 - RNA, 22 nt, Human
cacagagaggcuugucuccaag

SEQ ID NO: 592703 - RNA, 22 nt, Human
cacaugaugguggaagccauag

SEQ ID NO: 592704 - RNA, 22 nt, Human
ccuggcaccuucacagacuacu

SEQ ID NO: 592705 - RNA, 22 nt, Human
ccugaggcccuggcugugcuga

SEQ ID NO: 592706 - RNA, 22 nt, Human
uaguuacauaaaguggacuguu

SEQ ID NO: 592707 - RNA, 22 nt, Human
uguauaaauuuaaauuccugcu

SEQ ID NO: 592708 - RNA, 22 nt, Human
auuaauuuuaccuuuguaaaca

SEQ ID NO: 592709 - RNA, 22 nt, Human
gugcugggugcugcagacaggu

SEQ ID NO: 592710 - RNA, 21 nt, Human
aauaaaacaguuggugucaau

SEQ ID NO: 592711 - RNA, 22 nt, Human
ucagugcuuuugucacaugguc

SEQ ID NO: 592712 - RNA, 22 nt, Human
ggccaggcugguuccuugaccu

SEQ ID NO: 592713 - RNA, 22 nt, Human
cccugcagaucuaggguccuuc

SEQ ID NO: 592714 - RNA, 22 nt, Human
cuuauuauaaaauccuguuuga

SEQ ID NO: 592715 - RNA, 22 nt, Human
acuggccuaucagcaugagucu

SEQ ID NO: 592716 - RNA, 22 nt, Human
ugucucugagaugacucccacc

SEQ ID NO: 592717 - RNA, 22 nt, Human
ucuucuguuuuagauugcauac

SEQ ID NO: 592718 - RNA, 22 nt, Human
cucugggaugaggccuaggcac

SEQ ID NO: 592719 - RNA, 22 nt, Human
ggccugagcagacagcaugaug

SEQ ID NO: 592720 - RNA, 22 nt, Human
aaaugccaggauuauuagaggc

SEQ ID NO: 592721 - RNA, 22 nt, Human
ucagaaagguucuauguuuuac

SEQ ID NO: 592722 - RNA, 22 nt, Human
aaugggaagucacuacuguuac

SEQ ID NO: 592723 - RNA, 22 nt, Human
acacuuugggcuggauaauuau

SEQ ID NO: 592724 - RNA, 22 nt, Human
guuuauaauccaacucugcucc

SEQ ID NO: 592725 - RNA, 22 nt, Human
accagagaaugugcaucucuaa

SEQ ID NO: 592726 - RNA, 22 nt, Human
gcccagcuggcuuccagcacau

SEQ ID NO: 592727 - RNA, 22 nt, Human
uagcacaaagagucuuucagag

SEQ ID NO: 592728 - RNA, 22 nt, Human
auuguuuuccaaagaugcugcu

SEQ ID NO: 592729 - RNA, 22 nt, Human
cuggcagugugacccuggacag

SEQ ID NO: 592730 - RNA, 22 nt, Human
ucacccaggguguuuggugucu

SEQ ID NO: 592731 - RNA, 22 nt, Human
augcugaaggugaauugacaau

SEQ ID NO: 592732 - RNA, 22 nt, Human
gaaggggacuggcagcugcaga

SEQ ID NO: 592733 - RNA, 22 nt, Human
uacaacagacaggaauaagauu

SEQ ID NO: 592734 - RNA, 22 nt, Human
cccaggcugcaugaguccaugg

SEQ ID NO: 592735 - RNA, 23 nt, Human
acucacaaagcaggaucauguug

SEQ ID NO: 592736 - RNA, 22 nt, Human
gagauuuucagcuugacuggga

SEQ ID NO: 592737 - RNA, 22 nt, Human
gcugaggccucagaaggcugag

SEQ ID NO: 592738 - RNA, 20 nt, Human
uguauucuucuccuuccucc

SEQ ID NO: 592739 - RNA, 22 nt, Human
aaacaaguuuguagacuagcca

SEQ ID NO: 592740 - RNA, 22 nt, Human
cugagguggggccugggcauca

SEQ ID NO: 592741 - RNA, 22 nt, Human
uuaacaaauauuucccaugccc

SEQ ID NO: 592742 - RNA, 22 nt, Human
uuuuccuucuagagcagauuuc

SEQ ID NO: 592743 - RNA, 22 nt, Human
uuguuaaaaugcauauucuggu

SEQ ID NO: 592744 - RNA, 21 nt, Human
gacaggugauucagagcaggg

SEQ ID NO: 592745 - RNA, 22 nt, Human
augcaguuaguauacuuccagu

SEQ ID NO: 592746 - RNA, 22 nt, Human
accugcaggcacaggugugcgc

SEQ ID NO: 592747 - RNA, 22 nt, Human
gggcugagcacauacugacagc

SEQ ID NO: 592748 - RNA, 22 nt, Human
ccagcugguuaaaauagagaaa

SEQ ID NO: 592749 - RNA, 22 nt, Human
accaggguugagucagcugcgu

SEQ ID NO: 592750 - RNA, 22 nt, Human
ggggugugaguagagcugggga

SEQ ID NO: 592751 - RNA, 22 nt, Human
uccaggagcauccaggugaagc

SEQ ID NO: 592752 - RNA, 17 nt, Human
ucagggaaugagguugu

SEQ ID NO: 592753 - RNA, 22 nt, Human
cucuuuucaaaccuguuuaugg

SEQ ID NO: 592754 - RNA, 22 nt, Human
aaauacagauagauuuaaccca

SEQ ID NO: 592755 - RNA, 22 nt, Human
uccacaugaccauugugcuccu

SEQ ID NO: 592756 - RNA, 22 nt, Human
cuggaugcugagagguaccaag

SEQ ID NO: 592757 - RNA, 22 nt, Human
ucuccagggagguagcccagug

SEQ ID NO: 592758 - RNA, 22 nt, Human
uaucuguuggcuccuaguugua

SEQ ID NO: 592759 - RNA, 22 nt, Human
ggcuugagacccgggagccaga

SEQ ID NO: 592760 - RNA, 22 nt, Human
uccaggcugacgcagcuauuua

SEQ ID NO: 592761 - RNA, 22 nt, Human
agcaggagcugugggaagaugg

SEQ ID NO: 592762 - RNA, 22 nt, Human
aucucagggcuggagcccugga

SEQ ID NO: 592763 - RNA, 22 nt, Human
ggggaugguagaccggugacgu

SEQ ID NO: 592764 - RNA, 22 nt, Human
ucuuuuaaccuaacuagcuugg

SEQ ID NO: 592765 - RNA, 22 nt, Human
aggaggccaggcccucaagccu

SEQ ID NO: 592766 - RNA, 22 nt, Human
uccaggggacacuguuucucca

SEQ ID NO: 592767 - RNA, 22 nt, Human
acuguuaauucaaucaacaggu

SEQ ID NO: 592768 - RNA, 22 nt, Human
cauggcaacaacucuuuauucc

SEQ ID NO: 592769 - RNA, 22 nt, Human
cagcugcuguuacugcuuauua

SEQ ID NO: 592770 - RNA, 23 nt, Human
uccuccagaggcccuccuuggcc

SEQ ID NO: 592771 - RNA, 22 nt, Human
ucugcccacaguccaauaguug

SEQ ID NO: 592772 - RNA, 22 nt, Human
aaaguucagauuagacucaaga

SEQ ID NO: 592773 - RNA, 22 nt, Human
aggcuggcccuacuggcugccu

SEQ ID NO: 592774 - RNA, 22 nt, Human
ucaauuuauguggcuauucauu

SEQ ID NO: 592775 - RNA, 22 nt, Human
auucauuugcuauuguguaugg

SEQ ID NO: 592776 - RNA, 22 nt, Human
gcgaggaggggugcugggcccc

SEQ ID NO: 592777 - RNA, 22 nt, Human
cagagugaaaacugagcucaaa

SEQ ID NO: 592778 - RNA, 22 nt, Human
cagcuccugaggacugcuggga

SEQ ID NO: 592779 - RNA, 22 nt, Human
uuaaaagucugaugauuuacau

SEQ ID NO: 592780 - RNA, 22 nt, Human
uacaugucuacaugcauuuuug

SEQ ID NO: 592781 - RNA, 22 nt, Human
cugagcagccccaccagccauu

SEQ ID NO: 592782 - RNA, 22 nt, Human
acuuucuguuagaugaauggau

SEQ ID NO: 592783 - RNA, 22 nt, Human
uuguccugucaggcugggggcu

SEQ ID NO: 592784 - RNA, 22 nt, Human
uugauacauagcacaguuuagg

SEQ ID NO: 592785 - RNA, 22 nt, Human
ccaggccucaccugcccaccua

SEQ ID NO: 592786 - RNA, 22 nt, Human
gcugcaggagauuuugagaguc

SEQ ID NO: 592787 - RNA, 22 nt, Human
acuaaagucaucaaagaacuuu

SEQ ID NO: 592788 - RNA, 16 nt, Human
uggggaagcucgugag

SEQ ID NO: 592789 - RNA, 22 nt, Human
cgaggccaauguguuuuaugaa

SEQ ID NO: 592790 - RNA, 20 nt, Human
ccugggaaggcagccccagc

SEQ ID NO: 592791 - RNA, 19 nt, Human
aaagcagugcauccucuuu

SEQ ID NO: 592792 - RNA, 22 nt, Human
gcacuuuauaguagaaagagca

SEQ ID NO: 592793 - RNA, 18 nt, Human
ccagggaugcaugguccc

SEQ ID NO: 592794 - RNA, 22 nt, Human
ugccugcuuucugggcugccau

SEQ ID NO: 592795 - RNA, 22 nt, Human
aaaaggacaagcuuuggaguua

SEQ ID NO: 592796 - RNA, 22 nt, Human
ucaugcaacaacacauucuggc

SEQ ID NO: 592797 - RNA, 22 nt, Human
uguucagaacaaagguaaauga

SEQ ID NO: 592798 - RNA, 22 nt, Human
uuuuugugugagcaggguguua

SEQ ID NO: 592799 - RNA, 22 nt, Human
ccagagccucuuaugaagaucg

SEQ ID NO: 592800 - RNA, 22 nt, Human
uuuuucuuaaauguggguuggc

SEQ ID NO: 592801 - RNA, 22 nt, Human
guauucugggccgauuacaaaa

SEQ ID NO: 592802 - RNA, 22 nt, Human
gagguagcgaguggacagugca

SEQ ID NO: 592803 - RNA, 22 nt, Human
uguauguauacacauagauacg

SEQ ID NO: 592804 - RNA, 19 nt, Human
ugccugucaguagaucuca

SEQ ID NO: 592805 - RNA, 22 nt, Human
ugaggcacugggagagcacacu

SEQ ID NO: 592806 - RNA, 22 nt, Human
cugcagagcagccaguccccca

SEQ ID NO: 592807 - RNA, 22 nt, Human
cagagugaaauaggggaucaag

SEQ ID NO: 592808 - RNA, 22 nt, Human
ugaggcugaaacuggcgauaga

SEQ ID NO: 592809 - RNA, 22 nt, Human
acuaaagaagccaaaguuuucu

SEQ ID NO: 592810 - RNA, 22 nt, Human
uucuggaggagaaagggugggc

SEQ ID NO: 592811 - RNA, 22 nt, Human
gcacuggggucauagccuccag

SEQ ID NO: 592812 - RNA, 22 nt, Human
agccaggggagucagcugcugg

SEQ ID NO: 592813 - RNA, 17 nt, Human
acacagccagguucucc

SEQ ID NO: 592814 - RNA, 22 nt, Human
acuuaaagaggcuacuuuuggu

SEQ ID NO: 592815 - RNA, 22 nt, Human
aagcccuuggcgcacaccgggc

SEQ ID NO: 592816 - RNA, 22 nt, Human
uuacuugauuugaaaaucauag

SEQ ID NO: 592817 - RNA, 22 nt, Human
gagguaggcagggugacuuggc

SEQ ID NO: 592818 - RNA, 22 nt, Human
uacuguuuuuuagacucauggu

SEQ ID NO: 592819 - RNA, 22 nt, Human
cuuaucuuacuuccccuucaug

SEQ ID NO: 592820 - RNA, 22 nt, Human
aagcugccauagaacgagaggu

SEQ ID NO: 592821 - RNA, 22 nt, Human
aaaguccuugcaguuuccucuu

SEQ ID NO: 592822 - RNA, 22 nt, Human
cauuucuaccaaaugugacugg

SEQ ID NO: 592823 - RNA, 22 nt, Human
uuauaacuuuggauaugacaag

SEQ ID NO: 592824 - RNA, 22 nt, Human
aaauucucuaaagaaaacauga

SEQ ID NO: 592825 - RNA, 22 nt, Human
uucuuucuuuguaguccugaac

SEQ ID NO: 592826 - RNA, 22 nt, Human
agcagugagugggaggaccaug

SEQ ID NO: 592827 - RNA, 22 nt, Human
ucuaguuuuagcuugaguugca

SEQ ID NO: 592828 - RNA, 22 nt, Human
cuuuccuggcuggcaguugugg

SEQ ID NO: 592829 - RNA, 22 nt, Human
ccagagagcuacaaggcauaaa

SEQ ID NO: 592830 - RNA, 22 nt, Human
aacauugaacuuggcacaccca

SEQ ID NO: 592831 - RNA, 22 nt, Human
gcaugguggagucugagcaggg

SEQ ID NO: 592832 - RNA, 22 nt, Human
ugaaggaaaugacggcagaaga

SEQ ID NO: 592833 - RNA, 22 nt, Human
uacacagauuuaaaagcaggga

SEQ ID NO: 592834 - RNA, 22 nt, Human
aacuuucaggcaaugaauauuu

SEQ ID NO: 592835 - RNA, 22 nt, Human
ugucccagacauaaguggacau

SEQ ID NO: 592836 - RNA, 21 nt, Human
ucugauguguuuaaugguggg

SEQ ID NO: 592837 - RNA, 20 nt, Human
aggccugagagaugacuggg

SEQ ID NO: 592838 - RNA, 23 nt, Human
uggauaaagcugugcugcauagg

SEQ ID NO: 592839 - RNA, 22 nt, Human
ugcucacugaacucuugcuguc

SEQ ID NO: 592840 - RNA, 22 nt, Human
ggcaggugcuaagagagguaaa

SEQ ID NO: 592841 - RNA, 22 nt, Human
cugugugugagaagcagguuga

SEQ ID NO: 592842 - RNA, 22 nt, Human
uuuguguuuucccauacuauug

SEQ ID NO: 592843 - RNA, 22 nt, Human
augcaaaagacuauuuguugcu

SEQ ID NO: 592844 - RNA, 22 nt, Human
aggcaagggggcgccaccuucc

SEQ ID NO: 592845 - RNA, 22 nt, Human
cgcgcugcagacagcggaggcc

SEQ ID NO: 592846 - RNA, 22 nt, Human
cagagccagucagucagaaacu

SEQ ID NO: 592847 - RNA, 22 nt, Human
aaucacaggcauagauugcucc

SEQ ID NO: 592848 - RNA, 22 nt, Human
uguuuucagaugcagggacaca

SEQ ID NO: 592849 - RNA, 22 nt, Human
ucuucaugccaaaugaguuuug

SEQ ID NO: 592850 - RNA, 20 nt, Human
ccugggguacacuggcaugu

SEQ ID NO: 592851 - RNA, 22 nt, Human
augcaguuuaaggcacaauuag

SEQ ID NO: 592852 - RNA, 22 nt, Human
cagggccuccuaaggcaucuaa

SEQ ID NO: 592853 - RNA, 18 nt, Human
aggugcagccucugaggc

SEQ ID NO: 592854 - RNA, 22 nt, Human
cagagagggagcaguagucucu

SEQ ID NO: 592855 - RNA, 22 nt, Human
uguauacauucucuuggguuug

SEQ ID NO: 592856 - RNA, 22 nt, Human
cccacguugaaccgcuuacaga

SEQ ID NO: 592857 - RNA, 23 nt, Human
cuuuuaacuagaguaucagcugc

SEQ ID NO: 592858 - RNA, 22 nt, Human
augcaguggcagcuccuggugu

SEQ ID NO: 592859 - RNA, 22 nt, Human
ugcaaacaggcauuucacaaac

SEQ ID NO: 592860 - RNA, 22 nt, Human
ucccacuggacgucugugcugg

SEQ ID NO: 592861 - RNA, 22 nt, Human
uaaaaugacuuccuccaacauc

SEQ ID NO: 592862 - RNA, 22 nt, Human
gaucacauaauuuggaaacagc

SEQ ID NO: 592863 - RNA, 20 nt, Human
ucagguagaucuuugagguc

SEQ ID NO: 592864 - RNA, 22 nt, Human
uagacauuugucaagaaugacu

SEQ ID NO: 592865 - RNA, 22 nt, Human
ccaguucuaaacauaaagcuaa

SEQ ID NO: 592866 - RNA, 22 nt, Human
uauugaauuagacccuaaaaug

SEQ ID NO: 592867 - RNA, 22 nt, Human
acccaggagccgugagagguua

SEQ ID NO: 592868 - RNA, 22 nt, Human
cacaaaguggguggaaaacuaa

SEQ ID NO: 592869 - RNA, 22 nt, Human
cugaggugugaaaugguggcaa

SEQ ID NO: 592870 - RNA, 22 nt, Human
gcugcccugccucagacuccuc

SEQ ID NO: 592871 - RNA, 23 nt, Human
uggccagguagaggagguaguga

SEQ ID NO: 592872 - RNA, 22 nt, Human
gagugcaguuggggugagggga

SEQ ID NO: 592873 - RNA, 22 nt, Human
gguagcagggcugugagucaga

SEQ ID NO: 592874 - RNA, 22 nt, Human
gaaauguacuuuaaagccaucc

SEQ ID NO: 592875 - RNA, 19 nt, Human
uggcuuccugacucucauc

SEQ ID NO: 592876 - RNA, 22 nt, Human
ccagggugaggaggcucccacg

SEQ ID NO: 592877 - RNA, 22 nt, Human
ccuggcagacugugagggcagg

SEQ ID NO: 592878 - RNA, 22 nt, Human
uaguggagaguuguuuugugca

SEQ ID NO: 592879 - RNA, 22 nt, Human
uugcugaagaaaaaauauguua

SEQ ID NO: 592880 - RNA, 22 nt, Human
aacuuacaaggaugauagcugc

SEQ ID NO: 592881 - RNA, 22 nt, Human
ugucuuucugcaccaccucaca

SEQ ID NO: 592882 - RNA, 22 nt, Human
cuugaagacaauggcagauucc

SEQ ID NO: 592883 - RNA, 22 nt, Human
ugagaauauuguuuuagugagg

SEQ ID NO: 592884 - RNA, 22 nt, Human
gagccuggagcuggaacgaagc

SEQ ID NO: 592885 - RNA, 22 nt, Human
ucacuggcaacuugugcucccu

SEQ ID NO: 592886 - RNA, 22 nt, Human
guggugaagccccaucucugcu

SEQ ID NO: 592887 - RNA, 22 nt, Human
uuccugggauuauugucaagca

SEQ ID NO: 592888 - RNA, 23 nt, Human
agccaguuguagccacagaacuc

SEQ ID NO: 592889 - RNA, 22 nt, Human
caggagcccugguggguggaca

SEQ ID NO: 592890 - RNA, 22 nt, Human
uugggaggucauaaaucuguuc

SEQ ID NO: 592891 - RNA, 22 nt, Human
agcugaagaaaugggaagcauu

SEQ ID NO: 592892 - RNA, 23 nt, Human
acacagaagaagacccaaggaag

SEQ ID NO: 592893 - RNA, 22 nt, Human
uugggcagucuggcugcagagu

SEQ ID NO: 592894 - RNA, 22 nt, Human
uccagaggggcagcccugugcu

SEQ ID NO: 592895 - RNA, 22 nt, Human
uggcaggcagagagcggccuuu

SEQ ID NO: 592896 - RNA, 22 nt, Human
uguggcaggcauucugaggcug

SEQ ID NO: 592897 - RNA, 22 nt, Human
aacuagaaccacuuguauuucc

SEQ ID NO: 592898 - RNA, 22 nt, Human
gcugugagggcuucugaggcau

SEQ ID NO: 592899 - RNA, 22 nt, Human
gaccuggaagaacugaggccuu

SEQ ID NO: 592900 - RNA, 22 nt, Human
ccagagaguaaacauuuuccgg

SEQ ID NO: 592901 - RNA, 22 nt, Human
aagagcuggaguuugcagcccu

SEQ ID NO: 592902 - RNA, 22 nt, Human
auuguacuacaccauaguacug

SEQ ID NO: 592903 - RNA, 22 nt, Human
ccucuggcagccagccaguugu

SEQ ID NO: 592904 - RNA, 22 nt, Human
ccaggcucuaucccuccuucuu

SEQ ID NO: 592905 - RNA, 22 nt, Human
aauucacaguucugcaccuuac

SEQ ID NO: 592906 - RNA, 22 nt, Human
cugaggcaccuacagucucggg

SEQ ID NO: 592907 - RNA, 18 nt, Human
ugacucacccugucagug

SEQ ID NO: 592908 - RNA, 22 nt, Human
agauauauuuaagguaauaagu

SEQ ID NO: 592909 - RNA, 22 nt, Human
acuuucuccagaaaaccaagga

SEQ ID NO: 592910 - RNA, 22 nt, Human
gaggagugccagccguggaguc

SEQ ID NO: 592911 - RNA, 22 nt, Human
gacccuggcuggagcuggccug

SEQ ID NO: 592912 - RNA, 22 nt, Human
ugagcuggagucuguggcuccu

SEQ ID NO: 592913 - RNA, 19 nt, Human
acaggcagaauugggugug

SEQ ID NO: 592914 - RNA, 22 nt, Human
aauuuucugccuagcaaaaacu

SEQ ID NO: 592915 - RNA, 20 nt, Human
accagguggcugaugacacc

SEQ ID NO: 592916 - RNA, 22 nt, Human
ugcuuuaaaauggacuguuuug

SEQ ID NO: 592917 - RNA, 22 nt, Human
ccaggccuuucuucuuggucug

SEQ ID NO: 592918 - RNA, 22 nt, Human
gaaggagacccugaagaugcug

SEQ ID NO: 592919 - RNA, 22 nt, Human
gccugucaauuuuguguacaau

SEQ ID NO: 592920 - RNA, 22 nt, Human
ccagaaacagaugacaagcccu

SEQ ID NO: 592921 - RNA, 22 nt, Human
aacccaggagacagguugcagu

SEQ ID NO: 592922 - RNA, 22 nt, Human
ucccagcagucagagcuaugug

SEQ ID NO: 592923 - RNA, 22 nt, Human
agggccugucagcgguguccug

SEQ ID NO: 592924 - RNA, 22 nt, Human
uuggcugaaugaggucaccuuu

SEQ ID NO: 592925 - RNA, 22 nt, Human
auuuuguuuccuuuggaguaga

SEQ ID NO: 592926 - RNA, 22 nt, Human
gcugaaguugccuauuuuaaua

SEQ ID NO: 592927 - RNA, 22 nt, Human
gcugcuucagggacgugccagc

SEQ ID NO: 592928 - RNA, 22 nt, Human
agcugagcauuugauccaccuc

SEQ ID NO: 592929 - RNA, 22 nt, Human
gugcccacgaggccaggcuggu

SEQ ID NO: 592930 - RNA, 22 nt, Human
uccaguugcccaucucucuucu

SEQ ID NO: 592931 - RNA, 17 nt, Human
ggugagaccucccacuc

SEQ ID NO: 592932 - RNA, 22 nt, Human
gcaccugcaggaugagccaggg

SEQ ID NO: 592933 - RNA, 22 nt, Human
agucccagcccaguccuguaag

SEQ ID NO: 592934 - RNA, 22 nt, Human
uuuaggaaguuucagauaggaa

SEQ ID NO: 592935 - RNA, 17 nt, Human
acagucugccugacagu

SEQ ID NO: 592936 - RNA, 22 nt, Human
acuuuucugcagaugaucucuu

SEQ ID NO: 592937 - RNA, 22 nt, Human
ugcuucaaggacacugacuuuu

SEQ ID NO: 592938 - RNA, 22 nt, Human
aaaaugcaugagaaugugcucg

SEQ ID NO: 592939 - RNA, 22 nt, Human
uuugacagugaugauauauaca

SEQ ID NO: 592940 - RNA, 18 nt, Human
gggcagcacagcagccuc

SEQ ID NO: 592941 - RNA, 22 nt, Human
cagcaggcagccauuucacugu

SEQ ID NO: 592942 - RNA, 22 nt, Human
ucuggagugcccugcucugccc

SEQ ID NO: 592943 - RNA, 22 nt, Human
augggcugacccagucguggca

SEQ ID NO: 592944 - RNA, 22 nt, Human
agggccugaggcugacggggag

SEQ ID NO: 592945 - RNA, 19 nt, Human
ucauaaaaaugguaaccca

SEQ ID NO: 592946 - RNA, 22 nt, Human
aguugguucacuccuucaugcc

SEQ ID NO: 592947 - RNA, 22 nt, Human
gccuggagugguccugcugccc

SEQ ID NO: 592948 - RNA, 23 nt, Human
ucuuuacauacugaugaguucuc

SEQ ID NO: 592949 - RNA, 22 nt, Human
gagcuuccuuuuucugcaugac

SEQ ID NO: 592950 - RNA, 22 nt, Human
gacaggcuuccuaagugccaga

SEQ ID NO: 592951 - RNA, 22 nt, Human
ucugcugugauucuacuagugu

SEQ ID NO: 592952 - RNA, 22 nt, Human
uauaggugaauaaaugaguuua

SEQ ID NO: 592953 - RNA, 22 nt, Human
cugucugugccucuucucccag

SEQ ID NO: 592954 - RNA, 22 nt, Human
uuagauacgcaggcaguuuuaa

SEQ ID NO: 592955 - RNA, 22 nt, Human
aaaauuuccaccaucuuugugu

SEQ ID NO: 592956 - RNA, 22 nt, Human
uuugcagcaaggagagagcauu

SEQ ID NO: 592957 - RNA, 22 nt, Human
auaaaaaugagggcgguagcua

SEQ ID NO: 592958 - RNA, 22 nt, Human
uuacauuuggcuauguccucua

SEQ ID NO: 592959 - RNA, 22 nt, Human
cucaccaggaacagcugcggag

SEQ ID NO: 592960 - RNA, 22 nt, Human
ggggaagaaccgggauucccau

SEQ ID NO: 592961 - RNA, 22 nt, Human
agagcugucacauagagccaga

SEQ ID NO: 592962 - RNA, 22 nt, Human
caguggccaugguggcaggggu

SEQ ID NO: 592963 - RNA, 22 nt, Human
gcauggcagugaggauggugcu

SEQ ID NO: 592964 - RNA, 21 nt, Human
cuuuucuguguuccucccugu

SEQ ID NO: 592965 - RNA, 22 nt, Human
aaggguugaagauaaauaaggu

SEQ ID NO: 592966 - RNA, 22 nt, Human
gaguuauagauggacuauuauu

SEQ ID NO: 592967 - RNA, 22 nt, Human
uagggggcuuugcugcuugaca

SEQ ID NO: 592968 - RNA, 22 nt, Human
uuccucagaaaauacuguccaa

SEQ ID NO: 592969 - RNA, 22 nt, Human
uucugcugaagucacugggagc

SEQ ID NO: 592970 - RNA, 22 nt, Human
uaagaguaagugauuaagaaga

SEQ ID NO: 592971 - RNA, 22 nt, Human
uuugagguuagcuagcagauca

SEQ ID NO: 592972 - RNA, 22 nt, Human
augcaguuuuaaaucauuucag

SEQ ID NO: 592973 - RNA, 22 nt, Human
agcucaggcaacucugggcccc

SEQ ID NO: 592974 - RNA, 23 nt, Human
ggcuugagcuggaacagcuuggu

SEQ ID NO: 592975 - RNA, 22 nt, Human
aauaucuuggcccaacuccaga

SEQ ID NO: 592976 - RNA, 22 nt, Human
uguuaaggguaaacagcaguaa

SEQ ID NO: 592977 - RNA, 22 nt, Human
gagaggugaaauaguuguccgg

SEQ ID NO: 592978 - RNA, 22 nt, Human
ggaaggggugggugagccucag

SEQ ID NO: 592979 - RNA, 22 nt, Human
auuaaggaauguaggcaagaag

SEQ ID NO: 592980 - RNA, 22 nt, Human
uagggcugugucuccaggacca

SEQ ID NO: 592981 - RNA, 21 nt, Human
gcagagccggggcgagaaggc

SEQ ID NO: 592982 - RNA, 22 nt, Human
ugccugggacuguacuaaauuu

SEQ ID NO: 592983 - RNA, 22 nt, Human
uaggcugcucaccaggcucaga

SEQ ID NO: 592984 - RNA, 22 nt, Human
cucagccaggugggggucggga

SEQ ID NO: 592985 - RNA, 22 nt, Human
aaaagacaucuauuucaggcag

SEQ ID NO: 592986 - RNA, 22 nt, Human
ucuggggacggggcccagcaau

SEQ ID NO: 592987 - RNA, 22 nt, Human
gcugcugcuugaaggcucggag

SEQ ID NO: 592988 - RNA, 22 nt, Human
uacauucuggaaaggcacagac

SEQ ID NO: 592989 - RNA, 22 nt, Human
ccuuugugguggcccagugugg

SEQ ID NO: 592990 - RNA, 22 nt, Human
ugacaaacccugcaaauagcuc

SEQ ID NO: 592991 - RNA, 22 nt, Human
uagcuggucuuuaagcauguaa

SEQ ID NO: 592992 - RNA, 20 nt, Human
ucugagguaugauagggucu

SEQ ID NO: 592993 - RNA, 22 nt, Human
cuguggcacucaagaagccucc

SEQ ID NO: 592994 - RNA, 22 nt, Human
gcucugggcugcccucuggaca

SEQ ID NO: 592995 - RNA, 22 nt, Human
ugcuucaggagaugucaccaug

SEQ ID NO: 592996 - RNA, 22 nt, Human
aucuggggagguaucuguaguc

SEQ ID NO: 592997 - RNA, 22 nt, Human
cuuccuucugaagcauagaagc

SEQ ID NO: 592998 - RNA, 22 nt, Human
cugggccacuccagaugcccac

SEQ ID NO: 592999 - RNA, 22 nt, Human
ucucuguaucccagaaccaaaa

SEQ ID NO: 593000 - RNA, 23 nt, Human
gcagugcuuggcacagcuggguc

SEQ ID NO: 593001 - RNA, 22 nt, Human
accagagacugcauuucucuga

SEQ ID NO: 593002 - RNA, 22 nt, Human
cuuggaacuuaguaauaugaca

SEQ ID NO: 593003 - RNA, 22 nt, Human
ucauuuacuggauccauaagca

SEQ ID NO: 593004 - RNA, 22 nt, Human
cagcugguguccagggaagugg

SEQ ID NO: 593005 - RNA, 23 nt, Human
ugacacauuuccuuuccacugca

SEQ ID NO: 593006 - RNA, 22 nt, Human
ugaaaugagcauuuauucuuua

SEQ ID NO: 593007 - RNA, 22 nt, Human
ugcugccaggucuugcugucca

SEQ ID NO: 593008 - RNA, 22 nt, Human
aagaggagggcagauucaaggc

SEQ ID NO: 593009 - RNA, 22 nt, Human
uggcaguuuacagaguucugaa

SEQ ID NO: 593010 - RNA, 22 nt, Human
uuucaacauaccucaguguaug

SEQ ID NO: 593011 - RNA, 22 nt, Human
ucauuauccuaguaucuugaau

SEQ ID NO: 593012 - RNA, 22 nt, Human
uagcuuaucccacagugcccag

SEQ ID NO: 593013 - RNA, 22 nt, Human
agaagccauagucugggaggca

SEQ ID NO: 593014 - RNA, 22 nt, Human
uuggaagacaaugcugauucuc

SEQ ID NO: 593015 - RNA, 22 nt, Human
agaaaccugugugcugugauga

SEQ ID NO: 593016 - RNA, 22 nt, Human
ugcagucuuccagcugcacaaa

SEQ ID NO: 593017 - RNA, 22 nt, Human
uugcaguuugcuuuuaauggga

SEQ ID NO: 593018 - RNA, 22 nt, Human
agugauggggcccugcacugau

SEQ ID NO: 593019 - RNA, 22 nt, Human
gcagggagggccuuucaugaca

SEQ ID NO: 593020 - RNA, 20 nt, Human
cccaggugucugaagcucug

SEQ ID NO: 593021 - RNA, 22 nt, Human
ccugggaagaccggcagugggg

SEQ ID NO: 593022 - RNA, 18 nt, Human
aggaagcaggaggaaggc

SEQ ID NO: 593023 - RNA, 22 nt, Human
agacaguguguguauauauggu

SEQ ID NO: 593024 - RNA, 22 nt, Human
cacagguguaugaauaugucca

SEQ ID NO: 593025 - RNA, 22 nt, Human
ugagcauggugggugcagagca

SEQ ID NO: 593026 - RNA, 22 nt, Human
uguuuauuacaguucuuggaau

SEQ ID NO: 593027 - RNA, 22 nt, Human
agaaggaaggcugagugcugau

SEQ ID NO: 593028 - RNA, 22 nt, Human
auuuuacuuugugaauauugac

SEQ ID NO: 593029 - RNA, 22 nt, Human
uccucaggucaaagcaggagaa

SEQ ID NO: 593030 - RNA, 22 nt, Human
cucugcucaccagccaugugau

SEQ ID NO: 593031 - RNA, 22 nt, Human
auacaaaggaacacaggcaugu

SEQ ID NO: 593032 - RNA, 22 nt, Human
uguacaaaguuaaaccuauaua

SEQ ID NO: 593033 - RNA, 22 nt, Human
aauuagaagcuguuagcaaaau

SEQ ID NO: 593034 - RNA, 23 nt, Human
aggcugcagaagaauagggucau

SEQ ID NO: 593035 - RNA, 22 nt, Human
agagaccuuccugacuccagag

SEQ ID NO: 593036 - RNA, 22 nt, Human
cuggccagccucccagguaccc

SEQ ID NO: 593037 - RNA, 18 nt, Human
ccuggcuuuucuacuugc

SEQ ID NO: 593038 - RNA, 22 nt, Human
aacuuuucauaagggcaaauuu

SEQ ID NO: 593039 - RNA, 22 nt, Human
cuuacaaauacacuuaggagag

SEQ ID NO: 593040 - RNA, 22 nt, Human
augauauacuuccuagaacagu

SEQ ID NO: 593041 - RNA, 22 nt, Human
acaguguucuugauauuacagu

SEQ ID NO: 593042 - RNA, 19 nt, Human
guuuuguuugcagaacuua

SEQ ID NO: 593043 - RNA, 22 nt, Human
uuagcauuguacauuugugcuu

SEQ ID NO: 593044 - RNA, 21 nt, Human
uggcucugagccucauggcug

SEQ ID NO: 593045 - RNA, 22 nt, Human
gccagagacacuuggagguaga

SEQ ID NO: 593046 - RNA, 22 nt, Human
ugagugggaccugcguguguca

SEQ ID NO: 593047 - RNA, 17 nt, Human
aauguccuuggaccaca

SEQ ID NO: 593048 - RNA, 22 nt, Human
gauggcagucaaccaggugagg

SEQ ID NO: 593049 - RNA, 22 nt, Human
ggaggacucaggucuggccaug

SEQ ID NO: 593050 - RNA, 22 nt, Human
auggcuugucuaugagugcucu

SEQ ID NO: 593051 - RNA, 22 nt, Human
gagcugggaggacugggaacuu

SEQ ID NO: 593052 - RNA, 22 nt, Human
guuauaaaaugcacaguuguuu

SEQ ID NO: 593053 - RNA, 17 nt, Human
ggaaaagaagaguagga

SEQ ID NO: 593054 - RNA, 22 nt, Human
cuuccuuccacaccuucagaau

SEQ ID NO: 593055 - RNA, 22 nt, Human
uccugagagcagcugcuuugga

SEQ ID NO: 593056 - RNA, 21 nt, Human
guuauuuuaagugagcuuugc

SEQ ID NO: 593057 - RNA, 22 nt, Human
aggcacaggaggugguaagaag

SEQ ID NO: 593058 - RNA, 22 nt, Human
uaggucuguaaaugagagagac

SEQ ID NO: 593059 - RNA, 21 nt, Human
ugguggagugugcugagcaug

SEQ ID NO: 593060 - RNA, 22 nt, Human
gcuggagguuucaccugaguuu

SEQ ID NO: 593061 - RNA, 22 nt, Human
cuucuugagcauggguaguacu

SEQ ID NO: 593062 - RNA, 20 nt, Human
uuuuagcacuuguuauggug

SEQ ID NO: 593063 - RNA, 22 nt, Human
agaaacaucgcuuaguccucau

SEQ ID NO: 593064 - RNA, 19 nt, Human
cuuaugcagcugagcuugg

SEQ ID NO: 593065 - RNA, 18 nt, Human
gcucuuucugucuccagc

SEQ ID NO: 593066 - RNA, 22 nt, Human
acuaagaccuaaaauugugaau

SEQ ID NO: 593067 - RNA, 22 nt, Human
aaggcucuuggagugaaugcag

SEQ ID NO: 593068 - RNA, 22 nt, Human
auacaugugccgcguuggugug

SEQ ID NO: 593069 - RNA, 22 nt, Human
cauuuccugucuggaggucaaa

SEQ ID NO: 593070 - RNA, 22 nt, Human
cuuaaagaugucaaggcuguuu

SEQ ID NO: 593071 - RNA, 22 nt, Human
guuuucuggcaguuauuccuua

SEQ ID NO: 593072 - RNA, 22 nt, Human
gagaaacaacacuugaugccuu

SEQ ID NO: 593073 - RNA, 22 nt, Human
aguuuuauaaaggcaccucagu

SEQ ID NO: 593074 - RNA, 23 nt, Human
gcugccuccuacaaaagcccagc

SEQ ID NO: 593075 - RNA, 22 nt, Human
ucacuuugcaaauggcacggga

SEQ ID NO: 593076 - RNA, 22 nt, Human
agagaaggguguagccugggcc

SEQ ID NO: 593077 - RNA, 22 nt, Human
cuuucacaagauuugagaugcu

SEQ ID NO: 593078 - RNA, 22 nt, Human
cuuuguccauugauucguucaa

SEQ ID NO: 593079 - RNA, 17 nt, Human
ucugagaaaggagaauc

SEQ ID NO: 593080 - RNA, 22 nt, Human
aaugcauucucgguuugugugu

SEQ ID NO: 593081 - RNA, 22 nt, Human
ccagagcuaaacacacaggcug

SEQ ID NO: 593082 - RNA, 22 nt, Human
uccaggcaaaaggaacugcuug

SEQ ID NO: 593083 - RNA, 22 nt, Human
cccagcucucgcacuuacuagc

SEQ ID NO: 593084 - RNA, 22 nt, Human
agguggcuucuggccaggugug

SEQ ID NO: 593085 - RNA, 22 nt, Human
caguccuugcucugggaugaug

SEQ ID NO: 593086 - RNA, 21 nt, Human
ggagauggguaucgccugggc

SEQ ID NO: 593087 - RNA, 22 nt, Human
agccaaggagugcagguggcuu

SEQ ID NO: 593088 - RNA, 22 nt, Human
ccagcagagggcgcuucacacc

SEQ ID NO: 593089 - RNA, 22 nt, Human
aguaacaugcuaauuugauuau

SEQ ID NO: 593090 - RNA, 20 nt, Human
agcacuagguguggcaggug

SEQ ID NO: 593091 - RNA, 22 nt, Human
ugaaaauuaagcagaugaauga

SEQ ID NO: 593092 - RNA, 22 nt, Human
auggaaauccaagucaccguag

SEQ ID NO: 593093 - RNA, 22 nt, Human
cugugccucccuuuacuuugag

SEQ ID NO: 593094 - RNA, 22 nt, Human
ucuuaacauauuauuuuagcac

SEQ ID NO: 593095 - RNA, 22 nt, Human
aaacugucaccuaauguauuuu

SEQ ID NO: 593096 - RNA, 22 nt, Human
aggauucuguaaucugugaaau

SEQ ID NO: 593097 - RNA, 22 nt, Human
ccugggcuuccacgagcagagg

SEQ ID NO: 593098 - RNA, 22 nt, Human
ugcugaaaacucaaccauugug

SEQ ID NO: 593099 - RNA, 19 nt, Human
ggcuggcaagugacagugu

SEQ ID NO: 593100 - RNA, 22 nt, Human
aaggugucggguuagcucagcc

SEQ ID NO: 593101 - RNA, 23 nt, Human
ugaagugaaauuucacaagggac

SEQ ID NO: 593102 - RNA, 19 nt, Human
uggaggccaggacacaggu

SEQ ID NO: 593103 - RNA, 22 nt, Human
gccaguguuuauagcagugagg

SEQ ID NO: 593104 - RNA, 22 nt, Human
agugaccaacaaugcugagaag

SEQ ID NO: 593105 - RNA, 22 nt, Human
cuuuacugccaugcauuuauaa

SEQ ID NO: 593106 - RNA, 22 nt, Human
ggaggccaucuggcuggaggcu

SEQ ID NO: 593107 - RNA, 22 nt, Human
ugcauucugacuuaguuaauau

SEQ ID NO: 593108 - RNA, 22 nt, Human
cugggcuuagcagcuccugguc

SEQ ID NO: 593109 - RNA, 22 nt, Human
auugucauuggcuucuaugucu

SEQ ID NO: 593110 - RNA, 21 nt, Human
agcaccuucaauucuauuguc

SEQ ID NO: 593111 - RNA, 19 nt, Human
ggcagaagguguaggggga

SEQ ID NO: 593112 - RNA, 22 nt, Human
gcaaggcagcgcggaguagcua

SEQ ID NO: 593113 - RNA, 22 nt, Human
uguaggaaaaacaaugaucugc

SEQ ID NO: 593114 - RNA, 22 nt, Human
cucaagaaggaugagcuauugc

SEQ ID NO: 593115 - RNA, 21 nt, Human
gccacugcacuccagccuggg

SEQ ID NO: 593116 - RNA, 22 nt, Human
acaugcuacagugaaggaggaa

SEQ ID NO: 593117 - RNA, 22 nt, Human
uacagaaaaacaucuggagccg

SEQ ID NO: 593118 - RNA, 22 nt, Human
auucgcgggccuggaggguggg

SEQ ID NO: 593119 - RNA, 22 nt, Human
cugauucuuucuucuugccagg

SEQ ID NO: 593120 - RNA, 22 nt, Human
uaagcaaugagauaaucauggg

SEQ ID NO: 593121 - RNA, 22 nt, Human
uuacaauuacuugaucucagcu

SEQ ID NO: 593122 - RNA, 21 nt, Human
cgggcuggccgggcccucacc

SEQ ID NO: 593123 - RNA, 22 nt, Human
ucuuugcaguucugauuaaaua

SEQ ID NO: 593124 - RNA, 22 nt, Human
caggcuaaagcuuugagcaugu

SEQ ID NO: 593125 - RNA, 22 nt, Human
uugcuuuacaaaaauugauggu

SEQ ID NO: 593126 - RNA, 22 nt, Human
uccugaagaaggcagauauuug

SEQ ID NO: 593127 - RNA, 22 nt, Human
cagugggauugggauuggaacc

SEQ ID NO: 593128 - RNA, 22 nt, Human
ccagcucccgcaggcugcacag

SEQ ID NO: 593129 - RNA, 22 nt, Human
agggcucagggcacgucaucca

SEQ ID NO: 593130 - RNA, 22 nt, Human
aaugauugcaaacauugagaac

SEQ ID NO: 593131 - RNA, 22 nt, Human
uuuccuuucuagaagccuaaau

SEQ ID NO: 593132 - RNA, 22 nt, Human
aggcauuuuguucaagaugaca

SEQ ID NO: 593133 - RNA, 22 nt, Human
acaugaaaguuauucugaguug

SEQ ID NO: 593134 - RNA, 22 nt, Human
ugcagcugauuaaagggcagac

SEQ ID NO: 593135 - RNA, 22 nt, Human
ucaugcaaagccaauuccagcu

SEQ ID NO: 593136 - RNA, 22 nt, Human
auuuaugacaaccaaagaguga

SEQ ID NO: 593137 - RNA, 22 nt, Human
uuccugggggcagcagucuuga

SEQ ID NO: 593138 - RNA, 22 nt, Human
agcaaacaguuucuggggaucu

SEQ ID NO: 593139 - RNA, 22 nt, Human
uggcugcccccucccguggaca

SEQ ID NO: 593140 - RNA, 22 nt, Human
uccagcccuccugggaucacag

SEQ ID NO: 593141 - RNA, 22 nt, Human
guccagagggcugcaggaugcu

SEQ ID NO: 593142 - RNA, 22 nt, Human
ccaguguuccagagagcugaug

SEQ ID NO: 593143 - RNA, 23 nt, Human
gggcauggaguguagguggaagg

SEQ ID NO: 593144 - RNA, 22 nt, Human
gccugggaagacuaagugggag

SEQ ID NO: 593145 - RNA, 22 nt, Human
uaauauguguuacugacuuuuu

SEQ ID NO: 593146 - RNA, 22 nt, Human
cugggguggaggagcuccccug

SEQ ID NO: 593147 - RNA, 22 nt, Human
agaaguuugguccuauaaacuc

SEQ ID NO: 593148 - RNA, 22 nt, Human
uauaaaauucucaguuuggggu

SEQ ID NO: 593149 - RNA, 22 nt, Human
guccugugcccagacccucugu

SEQ ID NO: 593150 - RNA, 22 nt, Human
acaggcagcaaaaucagccuca

SEQ ID NO: 593151 - RNA, 22 nt, Human
uuuccucugucaugacagcuga

SEQ ID NO: 593152 - RNA, 21 nt, Human
uggagacucugguucuuugug

SEQ ID NO: 593153 - RNA, 18 nt, Human
uacuuuauucccccucca

SEQ ID NO: 593154 - RNA, 22 nt, Human
caggggccuguccuggcuucug

SEQ ID NO: 593155 - RNA, 23 nt, Human
ccugagaucuguaagggaccuug

SEQ ID NO: 593156 - RNA, 22 nt, Human
accacaggacccaugagucagu

SEQ ID NO: 593157 - RNA, 22 nt, Human
uuagugucuggcuauauuuaaa

SEQ ID NO: 593158 - RNA, 18 nt, Human
aggucugaggaagagccu

SEQ ID NO: 593159 - RNA, 22 nt, Human
acugucaccaucagagcgggaa

SEQ ID NO: 593160 - RNA, 22 nt, Human
ucagugcuugacagcucuggga

SEQ ID NO: 593161 - RNA, 20 nt, Human
uggaugcugcacguagaugg

SEQ ID NO: 593162 - RNA, 22 nt, Human
aagcagaaagaacaacugagug

SEQ ID NO: 593163 - RNA, 22 nt, Human
uggagugcaauaguaauaaggu

SEQ ID NO: 593164 - RNA, 22 nt, Human
gcaggcagucaucuuucauauu

SEQ ID NO: 593165 - RNA, 22 nt, Human
gcccuuacaggguggucagcca

SEQ ID NO: 593166 - RNA, 22 nt, Human
aggcugcugccuuggagagugu

SEQ ID NO: 593167 - RNA, 18 nt, Human
gugccaggaggcgcagcc

SEQ ID NO: 593168 - RNA, 22 nt, Human
gggacuggccaggguuuggaau

SEQ ID NO: 593169 - RNA, 22 nt, Human
gcuucuguuaacuuauguuccc

SEQ ID NO: 593170 - RNA, 22 nt, Human
acacagauaaugcucauauagg

SEQ ID NO: 593171 - RNA, 22 nt, Human
uacagugcacauuucuuaggaa

SEQ ID NO: 593172 - RNA, 22 nt, Human
gcugcucucauagauggcuuca

SEQ ID NO: 593173 - RNA, 22 nt, Human
caguuaaacgggccaugugagu

SEQ ID NO: 593174 - RNA, 20 nt, Human
gccacaguuuucucacugca

SEQ ID NO: 593175 - RNA, 22 nt, Human
cagugcagccaaggacaggcac

SEQ ID NO: 593176 - RNA, 22 nt, Human
ggcuucagaggggagguagugc

SEQ ID NO: 593177 - RNA, 22 nt, Human
aguguggagcaucgagggcaga

SEQ ID NO: 593178 - RNA, 19 nt, Human
accugcaguaauaauuccu

SEQ ID NO: 593179 - RNA, 22 nt, Human
uggagcaggacggggaguggua

SEQ ID NO: 593180 - RNA, 22 nt, Human
ucccaggaaugucugaaaguga

SEQ ID NO: 593181 - RNA, 22 nt, Human
gucugcccuuggcucagccaua

SEQ ID NO: 593182 - RNA, 22 nt, Human
ucacugcagguuuuucaggagg

SEQ ID NO: 593183 - RNA, 20 nt, Human
uguucacaguaguugcugcu

SEQ ID NO: 593184 - RNA, 22 nt, Human
aagaguauuugguauagaacac

SEQ ID NO: 593185 - RNA, 22 nt, Human
acuguacaaccucugccccugu

SEQ ID NO: 593186 - RNA, 22 nt, Human
cagcagccuacaaugcacagaa

SEQ ID NO: 593187 - RNA, 22 nt, Human
uuuaugacuucuaaucugaagc

SEQ ID NO: 593188 - RNA, 22 nt, Human
uggaaacucuaccucucuaaga

SEQ ID NO: 593189 - RNA, 22 nt, Human
auuacaaaagaagggagaaggu

SEQ ID NO: 593190 - RNA, 22 nt, Human
gagagcugucagcguagcaccg

SEQ ID NO: 593191 - RNA, 22 nt, Human
ggaggggccggcugccugccac

SEQ ID NO: 593192 - RNA, 19 nt, Human
uguuuuguuaaagcagucc

SEQ ID NO: 593193 - RNA, 22 nt, Human
agcccucucuauggcccucuug

SEQ ID NO: 593194 - RNA, 22 nt, Human
uaucaguagauaaacggauugc

SEQ ID NO: 593195 - RNA, 22 nt, Human
agaaaccaucuuuauauaucug

SEQ ID NO: 593196 - RNA, 22 nt, Human
uggcccugcuggccaaaggcua

SEQ ID NO: 593197 - RNA, 22 nt, Human
acucucugguguagaaagaccu

SEQ ID NO: 593198 - RNA, 22 nt, Human
cuggggaugggaccuggcauaa

SEQ ID NO: 593199 - RNA, 22 nt, Human
agugaggcaaagugagaggcag

SEQ ID NO: 593200 - RNA, 22 nt, Human
ugaaacauuugaugaucuuugg

SEQ ID NO: 593201 - RNA, 22 nt, Human
ugcuuaaacccugaucaugugu

SEQ ID NO: 593202 - RNA, 21 nt, Human
ggaguccaaaaauuagccaug

SEQ ID NO: 593203 - RNA, 22 nt, Human
acauuucauuugcaguauggau

SEQ ID NO: 593204 - RNA, 22 nt, Human
ggggauggaauguaguagugau

SEQ ID NO: 593205 - RNA, 22 nt, Human
uccaauaaccacaaucagauag

SEQ ID NO: 593206 - RNA, 22 nt, Human
auuagcuuuggauucagaagau

SEQ ID NO: 593207 - RNA, 22 nt, Human
ucuucgcuuacuguguaaggag

SEQ ID NO: 593208 - RNA, 22 nt, Human
agaggccaaagaaucuacaaga

SEQ ID NO: 593209 - RNA, 22 nt, Human
guguuauuagagcauuaauuuu

SEQ ID NO: 593210 - RNA, 22 nt, Human
uauugaccagacugacacacau

SEQ ID NO: 593211 - RNA, 22 nt, Human
uuuccugugcuuaacaaauauu

SEQ ID NO: 593212 - RNA, 22 nt, Human
gagggccaggcggagacaggcg

SEQ ID NO: 593213 - RNA, 22 nt, Human
acccaggggcgaagcuggccac

SEQ ID NO: 593214 - RNA, 22 nt, Human
aggcagagcuggguuuugaaau

SEQ ID NO: 593215 - RNA, 22 nt, Human
aucugcuuccugggcuccauga

SEQ ID NO: 593216 - RNA, 22 nt, Human
uaaauguuuuguggguugaguu

SEQ ID NO: 593217 - RNA, 22 nt, Human
gccagguguccucacagugagg

SEQ ID NO: 593218 - RNA, 20 nt, Human
agacccuguguccuguggcc

SEQ ID NO: 593219 - RNA, 22 nt, Human
guuucucugucuguuacauugg

SEQ ID NO: 593220 - RNA, 22 nt, Human
uccagggcugacuugggagagg

SEQ ID NO: 593221 - RNA, 22 nt, Human
gacagcaguuuuucucuagggu

SEQ ID NO: 593222 - RNA, 22 nt, Human
ugaucugguccuacugugggca

SEQ ID NO: 593223 - RNA, 22 nt, Human
uucagcacccucugaggcaucc

SEQ ID NO: 593224 - RNA, 19 nt, Human
auacaagacuagcauuuac

SEQ ID NO: 593225 - RNA, 22 nt, Human
aggcccugggagcagagaugca

SEQ ID NO: 593226 - RNA, 22 nt, Human
cagcuguucagcaacucgcaga

SEQ ID NO: 593227 - RNA, 22 nt, Human
cuuagcagauaaaaaccuucag

SEQ ID NO: 593228 - RNA, 22 nt, Human
cagcagugugcaggugugcugg

SEQ ID NO: 593229 - RNA, 22 nt, Human
acuucuugggacccuggcaccg

SEQ ID NO: 593230 - RNA, 22 nt, Human
ccagggcuuuaucugccuuuga

SEQ ID NO: 593231 - RNA, 22 nt, Human
ucuacaaauaaauuacuaugua

SEQ ID NO: 593232 - RNA, 22 nt, Human
ggagcacccugcucagccaagc

SEQ ID NO: 593233 - RNA, 22 nt, Human
acaugauuuuaguaucauaaua

SEQ ID NO: 593234 - RNA, 22 nt, Human
uaaaaucauucuggugucagua

SEQ ID NO: 593235 - RNA, 22 nt, Human
auggcauucacauuuccagaga

SEQ ID NO: 593236 - RNA, 22 nt, Human
uggcagguagucagaggcgaca

SEQ ID NO: 593237 - RNA, 22 nt, Human
caacagcuggaggcuuggcccg

SEQ ID NO: 593238 - RNA, 23 nt, Human
acagugaaacacgcaguaagagu

SEQ ID NO: 593239 - RNA, 22 nt, Human
cuccaguggugauggggaagaa

SEQ ID NO: 593240 - RNA, 22 nt, Human
uaaagcauguguuagaagugca

SEQ ID NO: 593241 - RNA, 22 nt, Human
uaacauuacggacaucugucag

SEQ ID NO: 593242 - RNA, 20 nt, Human
aaacagcuaaaccagcucuc

SEQ ID NO: 593243 - RNA, 22 nt, Human
caggaguguugauugcucagga

SEQ ID NO: 593244 - RNA, 22 nt, Human
cuguccccgcgaguccagagcu

SEQ ID NO: 593245 - RNA, 22 nt, Human
uccagcuucuugacuugguggu

SEQ ID NO: 593246 - RNA, 22 nt, Human
cuuguauacaguguacacauug

SEQ ID NO: 593247 - RNA, 21 nt, Human
gugcggaugccgucauuguca

SEQ ID NO: 593248 - RNA, 22 nt, Human
uuauuuauucauucugucuguc

SEQ ID NO: 593249 - RNA, 22 nt, Human
ucuggagaaucugucagugugg

SEQ ID NO: 593250 - RNA, 22 nt, Human
cugagcagugcuuugcaguggg

SEQ ID NO: 593251 - RNA, 22 nt, Human
aaaaugagcauauugauccuuu

SEQ ID NO: 593252 - RNA, 22 nt, Human
acagccuggacuggcucucugc

SEQ ID NO: 593253 - RNA, 21 nt, Human
ccaggggcaaauugucguuuc

SEQ ID NO: 593254 - RNA, 21 nt, Human
gagugcagcaagguagagucu

SEQ ID NO: 593255 - RNA, 22 nt, Human
aagucucuuuggguacuuuauu

SEQ ID NO: 593256 - RNA, 22 nt, Human
acuguauauacagcucaaggaa

SEQ ID NO: 593257 - RNA, 22 nt, Human
uccaggcuagguuuacaggaca

SEQ ID NO: 593258 - RNA, 22 nt, Human
ucuggagaagcagugagaguca

SEQ ID NO: 593259 - RNA, 22 nt, Human
acagggaagcucaggggcucug

SEQ ID NO: 593260 - RNA, 22 nt, Human
caggaacacaaguucagggaug

SEQ ID NO: 593261 - RNA, 22 nt, Human
ucucccaggcuggagugcagug

SEQ ID NO: 593262 - RNA, 23 nt, Human
cauguacacacagcuguacagug

SEQ ID NO: 593263 - RNA, 22 nt, Human
auaaacuugagucucagaguau

SEQ ID NO: 593264 - RNA, 22 nt, Human
gcccagaaguugaggcugcagu

SEQ ID NO: 593265 - RNA, 22 nt, Human
ugcugggcuugaaagcugcuaa

SEQ ID NO: 593266 - RNA, 23 nt, Human
agacauuuuaauaaggacuuuuu

SEQ ID NO: 593267 - RNA, 23 nt, Human
auaugucaugcaccagcacuuua

SEQ ID NO: 593268 - RNA, 22 nt, Human
cuucucuggcuccucagcgccc

SEQ ID NO: 593269 - RNA, 22 nt, Human
gcagaagcccggucagcgcacg

SEQ ID NO: 593270 - RNA, 20 nt, Human
aaccaacagaaucaugucuc

SEQ ID NO: 593271 - RNA, 22 nt, Human
agaucggcuuugcagaccucau

SEQ ID NO: 593272 - RNA, 22 nt, Human
gcuggaguuggcaaggcaugua

SEQ ID NO: 593273 - RNA, 22 nt, Human
guucaaauucuaugaaauaugu

SEQ ID NO: 593274 - RNA, 22 nt, Human
gcccugcccuguugaaacuaga

SEQ ID NO: 593275 - RNA, 22 nt, Human
cagaugaagaucauagaauagu

SEQ ID NO: 593276 - RNA, 22 nt, Human
cagaggcaggaagaugggcagu

SEQ ID NO: 593277 - RNA, 22 nt, Human
aagcacaucucaaacuucaucu

SEQ ID NO: 593278 - RNA, 21 nt, Human
uguguuuuaaugauauucugu

SEQ ID NO: 593279 - RNA, 22 nt, Human
ugcagagggacagccacagcuc

SEQ ID NO: 593280 - RNA, 22 nt, Human
aaaugguaguagcauuccauau

SEQ ID NO: 593281 - RNA, 22 nt, Human
auccuuccagaguuauucucaa

SEQ ID NO: 593282 - RNA, 22 nt, Human
gacaggcaauuaccagcgccca

SEQ ID NO: 593283 - RNA, 22 nt, Human
gcuuauuuucaccuucucucag

SEQ ID NO: 593284 - RNA, 22 nt, Human
acucuuuacuuaaacucuaagu

SEQ ID NO: 593285 - RNA, 22 nt, Human
ggauggagguucucagaugcuc

SEQ ID NO: 593286 - RNA, 22 nt, Human
cccugcagagaccacugaccuu

SEQ ID NO: 593287 - RNA, 22 nt, Human
ccaguguucauaauuuuacacu

SEQ ID NO: 593288 - RNA, 22 nt, Human
ugccauccaacaguuccaucuu

SEQ ID NO: 593289 - RNA, 19 nt, Human
ccuggagucgcgcugccuc

SEQ ID NO: 593290 - RNA, 22 nt, Human
ucacagcauucgcaauggacag

SEQ ID NO: 593291 - RNA, 22 nt, Human
ucccagagacagagccuccucc

SEQ ID NO: 593292 - RNA, 22 nt, Human
ugaaacauuaggaaaucauuau

SEQ ID NO: 593293 - RNA, 22 nt, Human
cccuggcagagggggcaggugc

SEQ ID NO: 593294 - RNA, 22 nt, Human
aguguuguaugggaugacugcu

SEQ ID NO: 593295 - RNA, 23 nt, Human
aggaauggcuagaagugugaccc

SEQ ID NO: 593296 - RNA, 22 nt, Human
ggaaagaggauaguggguaggu

SEQ ID NO: 593297 - RNA, 22 nt, Human
ggcgcuggccacgguggcucug

SEQ ID NO: 593298 - RNA, 22 nt, Human
agcaggguuccaggaguugcag

SEQ ID NO: 593299 - RNA, 20 nt, Human
ugacauagcucuuggggugc

SEQ ID NO: 593300 - RNA, 21 nt, Human
ugcuggcugaaaggcacagag

SEQ ID NO: 593301 - RNA, 22 nt, Human
uacacagaagccagaaggccug

SEQ ID NO: 593302 - RNA, 22 nt, Human
cuugucuugcacacgguugcca

SEQ ID NO: 593303 - RNA, 22 nt, Human
gucccagggaugcagacaugag

SEQ ID NO: 593304 - RNA, 22 nt, Human
auucugaauucugagccuuuca

SEQ ID NO: 593305 - RNA, 23 nt, Human
agaugaaagcuucccaucacagu

SEQ ID NO: 593306 - RNA, 22 nt, Human
uauugaguuacagaaaauacuu

SEQ ID NO: 593307 - RNA, 22 nt, Human
ugucugugaccucuuuggagcc

SEQ ID NO: 593308 - RNA, 22 nt, Human
auguguguaaacaaguauaauu

SEQ ID NO: 593309 - RNA, 22 nt, Human
aacagaaucuuggguucuuuuc

SEQ ID NO: 593310 - RNA, 22 nt, Human
ggugugggggcagcucugauau

SEQ ID NO: 593311 - RNA, 22 nt, Human
uugguagaaugaacauucauug

SEQ ID NO: 593312 - RNA, 22 nt, Human
gcccagaaagacugccuaacag

SEQ ID NO: 593313 - RNA, 22 nt, Human
uguaucuuucuguacuuuuaug

SEQ ID NO: 593314 - RNA, 22 nt, Human
guugggguaccuugaggcuggg

SEQ ID NO: 593315 - RNA, 22 nt, Human
guaagcauucauugucuguaua

SEQ ID NO: 593316 - RNA, 22 nt, Human
auccugggccucagaggugugu

SEQ ID NO: 593317 - RNA, 22 nt, Human
gcacuaguguucuucaguaaua

SEQ ID NO: 593318 - RNA, 22 nt, Human
agcaggugacagggcuguggug

SEQ ID NO: 593319 - RNA, 22 nt, Human
uacagaaagaccucucgggaaa

SEQ ID NO: 593320 - RNA, 22 nt, Human
uauaauuuaucaugucacaguu

SEQ ID NO: 593321 - RNA, 22 nt, Human
ccaggcucugagccucacucuu

SEQ ID NO: 593322 - RNA, 22 nt, Human
uagaauacuagugaagucaucg

SEQ ID NO: 593323 - RNA, 22 nt, Human
uugcauaauagcuacccacuca

SEQ ID NO: 593324 - RNA, 22 nt, Human
gcaaaggcuucuuuuauucucc

SEQ ID NO: 593325 - RNA, 22 nt, Human
agagguauuagguaauucagua

SEQ ID NO: 593326 - RNA, 22 nt, Human
auucagagauuguuauucagac

SEQ ID NO: 593327 - RNA, 22 nt, Human
cuccaaaggauaaaagcagagu

SEQ ID NO: 593328 - RNA, 22 nt, Human
ucaguccuauccaaacuauaua

SEQ ID NO: 593329 - RNA, 22 nt, Human
ucauuguuacuguuuaguugcc

SEQ ID NO: 593330 - RNA, 22 nt, Human
ucugaauguuaggaaacuuucu

SEQ ID NO: 593331 - RNA, 22 nt, Human
gaacauuuggauuuguaaauuu

SEQ ID NO: 593332 - RNA, 23 nt, Human
gggaccaggcccuuccugguuug

SEQ ID NO: 593333 - RNA, 23 nt, Human
uccagccaaaucuggcugacagu

SEQ ID NO: 593334 - RNA, 22 nt, Human
ugcugaaagucccaaaucucau

SEQ ID NO: 593335 - RNA, 22 nt, Human
gaaggaagucauuagugcagac

SEQ ID NO: 593336 - RNA, 22 nt, Human
ugcuccagcaacaggcuuagcu

SEQ ID NO: 593337 - RNA, 22 nt, Human
agauacuauggaauuuuaugag

SEQ ID NO: 593338 - RNA, 22 nt, Human
acugccugcuccuggcuccaca

SEQ ID NO: 593339 - RNA, 22 nt, Human
aaggcaggaugcggacccaucu

SEQ ID NO: 593340 - RNA, 22 nt, Human
ggaaacuaaagagguguuuuug

SEQ ID NO: 593341 - RNA, 21 nt, Human
uucucagagucuauuacaguu

SEQ ID NO: 593342 - RNA, 22 nt, Human
acaguucccgucuugcacagcu

SEQ ID NO: 593343 - RNA, 22 nt, Human
augugagggaaaucagucagaa

SEQ ID NO: 593344 - RNA, 22 nt, Human
ugagaugaauaacuccugcuaa

SEQ ID NO: 593345 - RNA, 22 nt, Human
uaugaggcacuucauuagcugg

SEQ ID NO: 593346 - RNA, 22 nt, Human
cacagcuucuuccauuccacuc

SEQ ID NO: 593347 - RNA, 22 nt, Human
uggagcuugggacucuugguag

SEQ ID NO: 593348 - RNA, 22 nt, Human
augaagacuaaugugaauggga

SEQ ID NO: 593349 - RNA, 22 nt, Human
uuagaguuuucuguuccucuaa

SEQ ID NO: 593350 - RNA, 22 nt, Human
auacaagaucacuccagaaaau

SEQ ID NO: 593351 - RNA, 21 nt, Human
ggguauaaaaugguaucucau

SEQ ID NO: 593352 - RNA, 22 nt, Human
agagcuguuuggacaucugagu

SEQ ID NO: 593353 - RNA, 22 nt, Human
agcagcucccuccucagccacc

SEQ ID NO: 593354 - RNA, 22 nt, Human
gcuggcugaguucugucgucug

SEQ ID NO: 593355 - RNA, 22 nt, Human
uucccugaagaccucaugugac

SEQ ID NO: 593356 - RNA, 22 nt, Human
caggccagugugcuucccaggc

SEQ ID NO: 593357 - RNA, 22 nt, Human
agcuccagggaaagaguggauc

SEQ ID NO: 593358 - RNA, 22 nt, Human
ugggacuuaauaugcccuugau

SEQ ID NO: 593359 - RNA, 22 nt, Human
agaggauuuuaaaagcauaugu

SEQ ID NO: 593360 - RNA, 22 nt, Human
agagggggugucagcacugcag

SEQ ID NO: 593361 - RNA, 22 nt, Human
caggugacccucaguguggacu

SEQ ID NO: 593362 - RNA, 22 nt, Human
ucuuggcuguaccauugacuag

SEQ ID NO: 593363 - RNA, 22 nt, Human
caucacauguaggcagcaucac

SEQ ID NO: 593364 - RNA, 22 nt, Human
cugaguguuuucagccacggcc

SEQ ID NO: 593365 - RNA, 21 nt, Human
ugcauaaagaaauacaaauac

SEQ ID NO: 593366 - RNA, 22 nt, Human
uuucacauaaauauuaugccua

SEQ ID NO: 593367 - RNA, 22 nt, Human
ugggcacagaauagauggccca

SEQ ID NO: 593368 - RNA, 22 nt, Human
gucugcuggugccuggccugcg

SEQ ID NO: 593369 - RNA, 20 nt, Human
ccuucucuggaauugccucc

SEQ ID NO: 593370 - RNA, 22 nt, Human
cagcagaggaaagcaaaucuaa

SEQ ID NO: 593371 - RNA, 22 nt, Human
acauuucacuguucacagcagg

SEQ ID NO: 593372 - RNA, 22 nt, Human
gggcuccacgcacgcgagaggu

SEQ ID NO: 593373 - RNA, 18 nt, Human
uuguuuuaagacucuguc

SEQ ID NO: 593374 - RNA, 21 nt, Human
gggcacugaaagggaauagca

SEQ ID NO: 593375 - RNA, 20 nt, Human
gugggcagaugugugcaugg

SEQ ID NO: 593376 - RNA, 22 nt, Human
uuccuggugaccucacugguag

SEQ ID NO: 593377 - RNA, 22 nt, Human
acuuuuugcuggucucuuccau

SEQ ID NO: 593378 - RNA, 20 nt, Human
acauaugugugcauaucuuu

SEQ ID NO: 593379 - RNA, 22 nt, Human
ugacucuguaccugucugccuu

SEQ ID NO: 593380 - RNA, 22 nt, Human
agaaaaguuuaaaucuuggcac

SEQ ID NO: 593381 - RNA, 22 nt, Human
gggaagcagcauugugcuggcu

SEQ ID NO: 593382 - RNA, 22 nt, Human
uaauuuaauccaaguguuacau

SEQ ID NO: 593383 - RNA, 22 nt, Human
uucugugugucucagcaagcug

SEQ ID NO: 593384 - RNA, 22 nt, Human
cagcaaagcaggcuccuagaac

SEQ ID NO: 593385 - RNA, 22 nt, Human
aguaauagagauuuuaaugucc

SEQ ID NO: 593386 - RNA, 22 nt, Human
uaaagacauaggaucagggaga

SEQ ID NO: 593387 - RNA, 22 nt, Human
gaguguggugaacaggagcacc

SEQ ID NO: 593388 - RNA, 18 nt, Human
cagcauuagcagcuucca

SEQ ID NO: 593389 - RNA, 18 nt, Human
agcagaauucuaggguuc

SEQ ID NO: 593390 - RNA, 22 nt, Human
accaugucauuuauuggccaaa

SEQ ID NO: 593391 - RNA, 22 nt, Human
agagcugaauucaagugcuggc

SEQ ID NO: 593392 - RNA, 22 nt, Human
ugucacauguuuaauguggacu

SEQ ID NO: 593393 - RNA, 22 nt, Human
acaguguuuaaaauaauaugcu

SEQ ID NO: 593394 - RNA, 22 nt, Human
cuugaaauccagauuucagagg

SEQ ID NO: 593395 - RNA, 22 nt, Human
aaguuacauuuuggucuaauug

SEQ ID NO: 593396 - RNA, 21 nt, Human
aggaggagagcuuggccuacc

SEQ ID NO: 593397 - RNA, 22 nt, Human
uugagagugccaagcauccucc

SEQ ID NO: 593398 - RNA, 22 nt, Human
gguuauuuugguugucuaaggc

SEQ ID NO: 593399 - RNA, 22 nt, Human
uauguacaaucagcaguucaua

SEQ ID NO: 593400 - RNA, 22 nt, Human
ugcuccaggagcaaccuuugag

SEQ ID NO: 593401 - RNA, 22 nt, Human
ucugaggcuauguucaggcuaa

SEQ ID NO: 593402 - RNA, 22 nt, Human
gaaggcugagcagacaggccaa

SEQ ID NO: 593403 - RNA, 22 nt, Human
uggugcaguccaaagggagcag

SEQ ID NO: 593404 - RNA, 22 nt, Human
guggguggaucaugaggucagg

SEQ ID NO: 593405 - RNA, 22 nt, Human
ucaggaugaagucagagggguc

SEQ ID NO: 593406 - RNA, 22 nt, Human
gcccaggaguucaagucuagug

SEQ ID NO: 593407 - RNA, 23 nt, Human
uuucaguuccagaaaaggggagc

SEQ ID NO: 593408 - RNA, 22 nt, Human
gaggagaaagcagugauuugug

SEQ ID NO: 593409 - RNA, 22 nt, Human
guuuugugaggcacccacaggu

SEQ ID NO: 593410 - RNA, 22 nt, Human
caccugcucccucaguuccagc

SEQ ID NO: 593411 - RNA, 20 nt, Human
ugauauuucuggaaguggag

SEQ ID NO: 593412 - RNA, 22 nt, Human
agcccugggcaccugugagggg

SEQ ID NO: 593413 - RNA, 22 nt, Human
ugucaccaugcgaggcuaauuu

SEQ ID NO: 593414 - RNA, 22 nt, Human
caauagcagcuucugaaugcaa

SEQ ID NO: 593415 - RNA, 22 nt, Human
ugagguaggugguaagagauac

SEQ ID NO: 593416 - RNA, 21 nt, Human
uggauaaaggcacuuuucauc

SEQ ID NO: 593417 - RNA, 22 nt, Human
uuuagugcuuugcuauucaugg

SEQ ID NO: 593418 - RNA, 22 nt, Human
gcagagccuugcgucaugugcc

SEQ ID NO: 593419 - RNA, 22 nt, Human
uacagguggaucacuaguauag

SEQ ID NO: 593420 - RNA, 18 nt, Human
ucucuucuuggcagucaa

SEQ ID NO: 593421 - RNA, 22 nt, Human
uagucacacaauuguguacauu

SEQ ID NO: 593422 - RNA, 22 nt, Human
acaagauuuggcugaaacucca

SEQ ID NO: 593423 - RNA, 22 nt, Human
accccaggaaguggaggucaug

SEQ ID NO: 593424 - RNA, 22 nt, Human
gucuuucuucagagcuuggacu

SEQ ID NO: 593425 - RNA, 22 nt, Human
cccaggagaauauaauguucuu

SEQ ID NO: 593426 - RNA, 20 nt, Human
gugccuggagaagaggcugu

SEQ ID NO: 593427 - RNA, 22 nt, Human
aggcuggcggugacugcucuga

SEQ ID NO: 593428 - RNA, 22 nt, Human
ggcagccuugagggaggccugg

SEQ ID NO: 593429 - RNA, 22 nt, Human
caagaggcaaauugucuagaag

SEQ ID NO: 593430 - RNA, 22 nt, Human
uccuuugguuguagacaggaau

SEQ ID NO: 593431 - RNA, 22 nt, Human
ccuccuggccugugcagagccc

SEQ ID NO: 593432 - RNA, 22 nt, Human
cuuggacccacucccagaauug

SEQ ID NO: 593433 - RNA, 22 nt, Human
ccuggagcacauggcaggaggc

SEQ ID NO: 593434 - RNA, 22 nt, Human
aaagggcagaguucacuagaaa

SEQ ID NO: 593435 - RNA, 19 nt, Human
uggagaggaaaugcugcuc

SEQ ID NO: 593436 - RNA, 22 nt, Human
gcuguucacggaggaggauggg

SEQ ID NO: 593437 - RNA, 22 nt, Human
gauguuaaagguugguaaguca

SEQ ID NO: 593438 - RNA, 22 nt, Human
guuuuucuagaaaucuccuccu

SEQ ID NO: 593439 - RNA, 22 nt, Human
ucaggcugaaucauccuagcuu

SEQ ID NO: 593440 - RNA, 22 nt, Human
gcagagguggcaucugggcucu

SEQ ID NO: 593441 - RNA, 22 nt, Human
uuugguaauguuucauugcaga

SEQ ID NO: 593442 - RNA, 22 nt, Human
cccagcucucugcucuuagccu

SEQ ID NO: 593443 - RNA, 22 nt, Human
ucugcucuguacugcacuggcc

SEQ ID NO: 593444 - RNA, 22 nt, Human
cccugguucagguuucucugaa

SEQ ID NO: 593445 - RNA, 22 nt, Human
aaauugugcucacacugauauu

SEQ ID NO: 593446 - RNA, 22 nt, Human
agcagccuauucuucucuugga

SEQ ID NO: 593447 - RNA, 22 nt, Human
gcccaaagagcuuugaucucag

SEQ ID NO: 593448 - RNA, 22 nt, Human
ccuacaguuauauucuugauug

SEQ ID NO: 593449 - RNA, 22 nt, Human
cuggggcuguaggaggacuuau

SEQ ID NO: 593450 - RNA, 22 nt, Human
cacagcagucuuucacuaaaua

SEQ ID NO: 593451 - RNA, 22 nt, Human
ucuugucacuacuguuaugcau

SEQ ID NO: 593452 - RNA, 22 nt, Human
cucaaaagacuuaaacauaaga

SEQ ID NO: 593453 - RNA, 22 nt, Human
cuguguuugacaggcggucucc

SEQ ID NO: 593454 - RNA, 22 nt, Human
uaccaugauguuugaguuacua

SEQ ID NO: 593455 - RNA, 22 nt, Human
augccuggacugacaugcacug

SEQ ID NO: 593456 - RNA, 22 nt, Human
ucaaugacugguccaagguggc

SEQ ID NO: 593457 - RNA, 22 nt, Human
uggcuuggugagcagaguguag

SEQ ID NO: 593458 - RNA, 22 nt, Human
uaaauguuguaaguacaucuaa

SEQ ID NO: 593459 - RNA, 22 nt, Human
agggugugcuguugggucuuuc

SEQ ID NO: 593460 - RNA, 22 nt, Human
aucuuugacugccauucuugac

SEQ ID NO: 593461 - RNA, 22 nt, Human
uucuucuuuaucucaguauccu

SEQ ID NO: 593462 - RNA, 22 nt, Human
gcaguguucagugaagcaggag

SEQ ID NO: 593463 - RNA, 22 nt, Human
acacacaugcaugcuugccauu

SEQ ID NO: 593464 - RNA, 22 nt, Human
auucugcauguagguuugcuca

SEQ ID NO: 593465 - RNA, 22 nt, Human
acagugcuaaugaugccaagau

SEQ ID NO: 593466 - RNA, 22 nt, Human
gcagagugagccgaggcugcuc

SEQ ID NO: 593467 - RNA, 22 nt, Human
aagaguuuaccagugcugcuuc

SEQ ID NO: 593468 - RNA, 22 nt, Human
guguauaaugcuuugaagauua

SEQ ID NO: 593469 - RNA, 22 nt, Human
ggugaaauuccuuguggaaagu

SEQ ID NO: 593470 - RNA, 22 nt, Human
ccaggcuggucugaauuucuag

SEQ ID NO: 593471 - RNA, 22 nt, Human
cuugccuguggcuaguuggcuc

SEQ ID NO: 593472 - RNA, 22 nt, Human
uguauaagccuagugaaauuuc

SEQ ID NO: 593473 - RNA, 22 nt, Human
cccuuucuucuugacugaaaac

SEQ ID NO: 593474 - RNA, 22 nt, Human
uuaauagauuugauuuuaaagg

SEQ ID NO: 593475 - RNA, 22 nt, Human
uccugcagcucugagaagcauc

SEQ ID NO: 593476 - RNA, 22 nt, Human
uugcgcgcggcuaggucucggu

SEQ ID NO: 593477 - RNA, 23 nt, Human
ggcagcugggcagcacucauggg

SEQ ID NO: 593478 - RNA, 22 nt, Human
caaggccugccucuggcagaaa

SEQ ID NO: 593479 - RNA, 22 nt, Human
uacaaagugaaauaauucugag

SEQ ID NO: 593480 - RNA, 22 nt, Human
cagaccuggaaaacaggcuugc

SEQ ID NO: 593481 - RNA, 22 nt, Human
aggcaccucuuaggcugcuacu

SEQ ID NO: 593482 - RNA, 22 nt, Human
cagucaacagagagcccgucag

SEQ ID NO: 593483 - RNA, 22 nt, Human
uuacagaaaauguguuuuaacu

SEQ ID NO: 593484 - RNA, 22 nt, Human
uccuccaggcaccucacuggcu

SEQ ID NO: 593485 - RNA, 22 nt, Human
acugcuucuccaaugaauuaga

SEQ ID NO: 593486 - RNA, 22 nt, Human
auauacacauguguauacauuu

SEQ ID NO: 593487 - RNA, 22 nt, Human
ugcugggcccccagugaccuuc

SEQ ID NO: 593488 - RNA, 22 nt, Human
gugugggaauggcggucgugca

SEQ ID NO: 593489 - RNA, 22 nt, Human
agagggcccauguugggcugcu

SEQ ID NO: 593490 - RNA, 18 nt, Human
agagaugggaguuggaaa

SEQ ID NO: 593491 - RNA, 22 nt, Human
guuuguaauuacugcagcaugg

SEQ ID NO: 593492 - RNA, 22 nt, Human
gcaagaguuuuuucucucuuga

SEQ ID NO: 593493 - RNA, 22 nt, Human
ccugugugguagccagcggugc

SEQ ID NO: 593494 - RNA, 22 nt, Human
cagcuguuugggcauggccaga

SEQ ID NO: 593495 - RNA, 22 nt, Human
guauuuccauuagugugugcac

SEQ ID NO: 593496 - RNA, 19 nt, Human
caggacagacuucaaagcc

SEQ ID NO: 593497 - RNA, 22 nt, Human
uguuacauuucucuuucuugga

SEQ ID NO: 593498 - RNA, 22 nt, Human
ucacaguuaauuguuggaaugu

SEQ ID NO: 593499 - RNA, 19 nt, Human
aguuauugaucuauucagg

SEQ ID NO: 593500 - RNA, 22 nt, Human
cugagcugcuuugcuuuugggg

SEQ ID NO: 593501 - RNA, 20 nt, Human
aagagcugacucacaguggu

SEQ ID NO: 593502 - RNA, 21 nt, Human
augggcagaggcagagaggcu

SEQ ID NO: 593503 - RNA, 22 nt, Human
uuucuaaguaagauuaacuucu

SEQ ID NO: 593504 - RNA, 22 nt, Human
ggaguggcuauuugugcugguu

SEQ ID NO: 593505 - RNA, 22 nt, Human
uggacaaauagcaugacacuug

SEQ ID NO: 593506 - RNA, 22 nt, Human
cucccuggggcuccuccuauuu

SEQ ID NO: 593507 - RNA, 22 nt, Human
gcagggaagaucuuggagcugc

SEQ ID NO: 593508 - RNA, 22 nt, Human
guuuuuucaugaguaguuaucu

SEQ ID NO: 593509 - RNA, 22 nt, Human
aguuuuauaucuuccauugguu

SEQ ID NO: 593510 - RNA, 22 nt, Human
ccugagcuggaagagcuugugc

SEQ ID NO: 593511 - RNA, 22 nt, Human
gcuagcuuuauaaugcugggcg

SEQ ID NO: 593512 - RNA, 22 nt, Human
uagcccagcucaaaugaccggu

SEQ ID NO: 593513 - RNA, 22 nt, Human
gaggccuggcugggaggaggug

SEQ ID NO: 593514 - RNA, 22 nt, Human
ucugcagagggagugcuggguc

SEQ ID NO: 593515 - RNA, 22 nt, Human
ugggaggcagguaggugaugau

SEQ ID NO: 593516 - RNA, 22 nt, Human
cacugguuggcugagauccaua

SEQ ID NO: 593517 - RNA, 22 nt, Human
cucaggacccgguccagguggg

SEQ ID NO: 593518 - RNA, 22 nt, Human
ucucugugugugugacagcauu

SEQ ID NO: 593519 - RNA, 19 nt, Human
gcuggagucacuuuugaga

SEQ ID NO: 593520 - RNA, 22 nt, Human
ggcugaaggaugaaagcugcag

SEQ ID NO: 593521 - RNA, 22 nt, Human
ccugagguuauccaucuaccug

SEQ ID NO: 593522 - RNA, 22 nt, Human
cauggaacuguauaaaggcacu

SEQ ID NO: 593523 - RNA, 22 nt, Human
aguggcaguggggcagggcccu

SEQ ID NO: 593524 - RNA, 22 nt, Human
aggaggaauacaauccagcagc

SEQ ID NO: 593525 - RNA, 23 nt, Human
uggucucagccugugagagcuga

SEQ ID NO: 593526 - RNA, 22 nt, Human
aggcaagugcauuagaagagca

SEQ ID NO: 593527 - RNA, 17 nt, Human
gcuccaggcgugaguga

SEQ ID NO: 593528 - RNA, 21 nt, Human
uuucauugaaugagauaaggu

SEQ ID NO: 593529 - RNA, 22 nt, Human
aauggguuucugucccagcucu

SEQ ID NO: 593530 - RNA, 22 nt, Human
ggguuggggcccagcagucugc

SEQ ID NO: 593531 - RNA, 22 nt, Human
uuuaauugcauuuaaagaugga

SEQ ID NO: 593532 - RNA, 22 nt, Human
uccagggcaggugcugggcucu

SEQ ID NO: 593533 - RNA, 22 nt, Human
ucacugcaaucucugccuucca

SEQ ID NO: 593534 - RNA, 20 nt, Human
uguccccuagaucccagcuc

SEQ ID NO: 593535 - RNA, 22 nt, Human
agcagagucugugugcacuuua

SEQ ID NO: 593536 - RNA, 21 nt, Human
agucccaggggugagugaugu

SEQ ID NO: 593537 - RNA, 22 nt, Human
guguuuuaucagacaaaguaua

SEQ ID NO: 593538 - RNA, 22 nt, Human
cuggcaguuugccaggagcucg

SEQ ID NO: 593539 - RNA, 22 nt, Human
uagaaacagaauaugagugaga

SEQ ID NO: 593540 - RNA, 22 nt, Human
ccuggccucgugcucacggcuc

SEQ ID NO: 593541 - RNA, 22 nt, Human
gcugaugugaugucagaagagg

SEQ ID NO: 593542 - RNA, 22 nt, Human
cagacaggcaggugcugcuuug

SEQ ID NO: 593543 - RNA, 22 nt, Human
acauuuuaauaugcuuagugug

SEQ ID NO: 593544 - RNA, 22 nt, Human
agacugggguucuggcaaggag

SEQ ID NO: 593545 - RNA, 21 nt, Human
gcucccuggcugugugaccug

SEQ ID NO: 593546 - RNA, 22 nt, Human
gagggggcgugcaaggcuccgc

SEQ ID NO: 593547 - RNA, 22 nt, Human
gcccugcucuggucucugcccg

SEQ ID NO: 593548 - RNA, 22 nt, Human
ucuacagccauuuugagcagug

SEQ ID NO: 593549 - RNA, 22 nt, Human
cauucucaauaguagaugagua

SEQ ID NO: 593550 - RNA, 22 nt, Human
ucaauuuccccuauugauagac

SEQ ID NO: 593551 - RNA, 18 nt, Human
uggagcaggaagccuggc

SEQ ID NO: 593552 - RNA, 22 nt, Human
gaguugaucauuauuugguuuc

SEQ ID NO: 593553 - RNA, 22 nt, Human
auugagaagaaaaucuaauaua

SEQ ID NO: 593554 - RNA, 22 nt, Human
aacauucuacuguacugcauug

SEQ ID NO: 593555 - RNA, 22 nt, Human
gagccuggauugucaccgacuu

SEQ ID NO: 593556 - RNA, 22 nt, Human
cacacagacagcucucugaaga

SEQ ID NO: 593557 - RNA, 22 nt, Human
agacagacuugaaaauguucuu

SEQ ID NO: 593558 - RNA, 22 nt, Human
agagggcuggacgcagguugga

SEQ ID NO: 593559 - RNA, 22 nt, Human
aaagcagucacuccagugugau

SEQ ID NO: 593560 - RNA, 22 nt, Human
augugcuucauucuacaugaca

SEQ ID NO: 593561 - RNA, 22 nt, Human
aaaugggccuggaaagaggaug

SEQ ID NO: 593562 - RNA, 21 nt, Human
aucuuaaaaggucuuaacuuu

SEQ ID NO: 593563 - RNA, 22 nt, Human
cugugccuucugccuggaacau

SEQ ID NO: 593564 - RNA, 22 nt, Human
augaggcaggagugcaguggca

SEQ ID NO: 593565 - RNA, 22 nt, Human
ugagaaaaguacauggagaagc

SEQ ID NO: 593566 - RNA, 22 nt, Human
aaaugcuuagagguguucaaau

SEQ ID NO: 593567 - RNA, 22 nt, Human
ggaggguccccagcagcaugaa

SEQ ID NO: 593568 - RNA, 22 nt, Human
cugcagggcccaaggucaacgg

SEQ ID NO: 593569 - RNA, 22 nt, Human
auuugcuuggucuucucuccgu

SEQ ID NO: 593570 - RNA, 22 nt, Human
guuuaauuuuagguugucaagc

SEQ ID NO: 593571 - RNA, 22 nt, Human
aagucagcacuccaggaagcca

SEQ ID NO: 593572 - RNA, 22 nt, Human
ccuggcucuguccucgcgcaaa

SEQ ID NO: 593573 - RNA, 22 nt, Human
gacuggaaucccaggcucugug

SEQ ID NO: 593574 - RNA, 22 nt, Human
aaaaaccauugucuucagucuc

SEQ ID NO: 593575 - RNA, 20 nt, Human
ugcccagcaagagugcaguu

SEQ ID NO: 593576 - RNA, 22 nt, Human
aacuacagaaaagguaagcucu

SEQ ID NO: 593577 - RNA, 22 nt, Human
aagcacagagaugggcacgccu

SEQ ID NO: 593578 - RNA, 22 nt, Human
ucaguggaacugucugggugag

SEQ ID NO: 593579 - RNA, 22 nt, Human
ucucaagcuuguugguauguuu

SEQ ID NO: 593580 - RNA, 22 nt, Human
cuaccuucaaguuccucccucu

SEQ ID NO: 593581 - RNA, 22 nt, Human
uguuaucucagacugaguuacu

SEQ ID NO: 593582 - RNA, 19 nt, Human
cucuggagaacaauagugc

SEQ ID NO: 593583 - RNA, 22 nt, Human
agcugggaggugggcagugaga

SEQ ID NO: 593584 - RNA, 22 nt, Human
ugcaggugucuccagggcaggu

SEQ ID NO: 593585 - RNA, 22 nt, Human
cuggugcacguggcugcagucg

SEQ ID NO: 593586 - RNA, 22 nt, Human
caaagugcuggaauuacaggug

SEQ ID NO: 593587 - RNA, 22 nt, Human
cuucagccucguuacuccugcg

SEQ ID NO: 593588 - RNA, 22 nt, Human
aacaagauagagcucuugccuu

SEQ ID NO: 593589 - RNA, 22 nt, Human
ggcccuuccucuugugcuggca

SEQ ID NO: 593590 - RNA, 22 nt, Human
aguguuucuggcaaaugaaagu

SEQ ID NO: 593591 - RNA, 22 nt, Human
agcccuggggcuggugcuuacc

SEQ ID NO: 593592 - RNA, 22 nt, Human
aauauccagguagaugucuucu

SEQ ID NO: 593593 - RNA, 23 nt, Human
ucuaaaauucaucauuuacguuc

SEQ ID NO: 593594 - RNA, 22 nt, Human
cuggagcugguauagggacaaa

SEQ ID NO: 593595 - RNA, 22 nt, Human
ugccucuuggagccuuuccucu

SEQ ID NO: 593596 - RNA, 22 nt, Human
aaaguacauguuuggccauuug

SEQ ID NO: 593597 - RNA, 22 nt, Human
caguggcuucucaugucauuca

SEQ ID NO: 593598 - RNA, 22 nt, Human
augggagugugcuugaggaguu

SEQ ID NO: 593599 - RNA, 19 nt, Human
ucauggaagaaaugugaua

SEQ ID NO: 593600 - RNA, 22 nt, Human
ugucuggggaacugugcaucca

SEQ ID NO: 593601 - RNA, 22 nt, Human
ugggauggagccugaguauagu

SEQ ID NO: 593602 - RNA, 22 nt, Human
cagcuuugcccuuugcccaauc

SEQ ID NO: 593603 - RNA, 20 nt, Human
uaaugucaaagucacaaggu

SEQ ID NO: 593604 - RNA, 22 nt, Human
agugguccugcaaacccgugug

SEQ ID NO: 593605 - RNA, 22 nt, Human
ucuggaguuacugcuggcuuug

SEQ ID NO: 593606 - RNA, 22 nt, Human
uucuuauucuugaaauguggga

SEQ ID NO: 593607 - RNA, 22 nt, Human
ccaaagagagaccuuucuucuc

SEQ ID NO: 593608 - RNA, 22 nt, Human
cagccacucucagacaguccca

SEQ ID NO: 593609 - RNA, 23 nt, Human
uucaaagcuuaagcucuuuccac

SEQ ID NO: 593610 - RNA, 19 nt, Human
ucacagcaucugucugaac

SEQ ID NO: 593611 - RNA, 22 nt, Human
aggaagggcuguuucuccaaga

SEQ ID NO: 593612 - RNA, 22 nt, Human
uugaagcaggaaaauuucuauu

SEQ ID NO: 593613 - RNA, 19 nt, Human
gcccucaggcagcuccauc

SEQ ID NO: 593614 - RNA, 22 nt, Human
acuggaguuuuaaaggaacuug

SEQ ID NO: 593615 - RNA, 22 nt, Human
caguuuuacccaagcuuauuuu

SEQ ID NO: 593616 - RNA, 22 nt, Human
aguguuucaagaagcaggaagu

SEQ ID NO: 593617 - RNA, 22 nt, Human
uggcaaggcugugggggcagag

SEQ ID NO: 593618 - RNA, 21 nt, Human
gggggaagaggaguugcuagu

SEQ ID NO: 593619 - RNA, 22 nt, Human
aggcagcagcuugcugguugcc

SEQ ID NO: 593620 - RNA, 20 nt, Human
agaagaggauacaaccaggc

SEQ ID NO: 593621 - RNA, 19 nt, Human
ucuacaaaguggcaucagg

SEQ ID NO: 593622 - RNA, 22 nt, Human
acaagcaugugguaaaaagacc

SEQ ID NO: 593623 - RNA, 22 nt, Human
ggaaauguaaucacagaggguu

SEQ ID NO: 593624 - RNA, 22 nt, Human
ugccucaguuucuccauaugaa

SEQ ID NO: 593625 - RNA, 22 nt, Human
gcugagagcaaggacaaagcau

SEQ ID NO: 593626 - RNA, 22 nt, Human
agaagccaacagggcaggagag

SEQ ID NO: 593627 - RNA, 22 nt, Human
uagggaaaagacuucacuguuu

SEQ ID NO: 593628 - RNA, 20 nt, Human
auugugcagcccuuggcaga

SEQ ID NO: 593629 - RNA, 22 nt, Human
agcuucagguggucuuguuucu

SEQ ID NO: 593630 - RNA, 22 nt, Human
cugcaaaaguaauugcagguuu

SEQ ID NO: 593631 - RNA, 22 nt, Human
ccaggagcccugccacaauggu

SEQ ID NO: 593632 - RNA, 22 nt, Human
cacacauuccaaaaucaagggu

SEQ ID NO: 593633 - RNA, 22 nt, Human
caaagaaucacucaucuuuagc

SEQ ID NO: 593634 - RNA, 22 nt, Human
ucuguugcuuucuuccugugug

SEQ ID NO: 593635 - RNA, 22 nt, Human
gacagucuggccuaaaggguua

SEQ ID NO: 593636 - RNA, 22 nt, Human
aggaagcgugggucuggcugga

SEQ ID NO: 593637 - RNA, 22 nt, Human
gccucccuggcccacagcagcg

SEQ ID NO: 593638 - RNA, 22 nt, Human
agggagcaugggugaagcaggc

SEQ ID NO: 593639 - RNA, 22 nt, Human
gacaggccuagauucacugcug

SEQ ID NO: 593640 - RNA, 22 nt, Human
caguuuuaaauuuugaaugucu

SEQ ID NO: 593641 - RNA, 20 nt, Human
ggcaguuaaggcacagucau

SEQ ID NO: 593642 - RNA, 22 nt, Human
gaagugugcacaucuuacaagu

SEQ ID NO: 593643 - RNA, 22 nt, Human
uugggcugaucuguggaagaag

SEQ ID NO: 593644 - RNA, 22 nt, Human
augauauuauucuagcccagag

SEQ ID NO: 593645 - RNA, 22 nt, Human
auggaaaucgaugucuaaguua

SEQ ID NO: 593646 - RNA, 22 nt, Human
ccugucauacuaacguaguggg

SEQ ID NO: 593647 - RNA, 22 nt, Human
ugaacauuaguugaguaaaguc

SEQ ID NO: 593648 - RNA, 22 nt, Human
uggugggagugagggcaugcca

SEQ ID NO: 593649 - RNA, 22 nt, Human
agaaguaggcagggcuguauca

SEQ ID NO: 593650 - RNA, 22 nt, Human
uaaaucucugcuccucuugggu

SEQ ID NO: 593651 - RNA, 22 nt, Human
ucucuaauucaaccagacacuu

SEQ ID NO: 593652 - RNA, 22 nt, Human
uuggaauuaauauuuguauaca

SEQ ID NO: 593653 - RNA, 22 nt, Human
cccaggucgucagcaguguggu

SEQ ID NO: 593654 - RNA, 18 nt, Human
gcagagcagaagcucaag

SEQ ID NO: 593655 - RNA, 18 nt, Human
uccugggaacuugcuagc

SEQ ID NO: 593656 - RNA, 22 nt, Human
gcuuacaaucauuucaguuuag

SEQ ID NO: 593657 - RNA, 22 nt, Human
cuggcagcagagcucaacauag

SEQ ID NO: 593658 - RNA, 22 nt, Human
cauugaaauauggaaacugaug

SEQ ID NO: 593659 - RNA, 22 nt, Human
uagggcugcagaacaauggccu

SEQ ID NO: 593660 - RNA, 20 nt, Human
gagggcaggcacccauuuca

SEQ ID NO: 593661 - RNA, 22 nt, Human
ggaggugguuugauuucuauau

SEQ ID NO: 593662 - RNA, 22 nt, Human
ccaggggccugugaaggugccc

SEQ ID NO: 593663 - RNA, 22 nt, Human
gaaauuuauuaucuacaucauu

SEQ ID NO: 593664 - RNA, 22 nt, Human
ggcuccagaaacuucaguccau

SEQ ID NO: 593665 - RNA, 22 nt, Human
uccuccagcccucuaggaaaau

SEQ ID NO: 593666 - RNA, 22 nt, Human
ccugcccuucuuuccccagcau

SEQ ID NO: 593667 - RNA, 22 nt, Human
aggcuaagugggugucagggcc

SEQ ID NO: 593668 - RNA, 22 nt, Human
agauuaugcuggcugcuacaag

SEQ ID NO: 593669 - RNA, 22 nt, Human
agcagcucgggcuacagagggg

SEQ ID NO: 593670 - RNA, 18 nt, Human
cugccugcucuccagcuu

SEQ ID NO: 593671 - RNA, 22 nt, Human
gguggcagcgucuaucugacau

SEQ ID NO: 593672 - RNA, 23 nt, Human
acagucguagguauccuuuuccu

SEQ ID NO: 593673 - RNA, 22 nt, Human
augcauauucuuagccccuccu

SEQ ID NO: 593674 - RNA, 22 nt, Human
uugcagggaaauagaaauaaac

SEQ ID NO: 593675 - RNA, 22 nt, Human
gagcuggaggaccaggacuggg

SEQ ID NO: 593676 - RNA, 22 nt, Human
cagcaguacuucucagagguau

SEQ ID NO: 593677 - RNA, 22 nt, Human
uuucuaguaaaagcuaauuacc

SEQ ID NO: 593678 - RNA, 22 nt, Human
cacaggaaaugauucugcagca

SEQ ID NO: 593679 - RNA, 22 nt, Human
uagagcauuuagaggggcagga

SEQ ID NO: 593680 - RNA, 22 nt, Human
uuuugugaauaguuuaucuaag

SEQ ID NO: 593681 - RNA, 22 nt, Human
uauacacaccuccaaagcagga

SEQ ID NO: 593682 - RNA, 22 nt, Human
ugucccagguccuagaugacca

SEQ ID NO: 593683 - RNA, 22 nt, Human
gcccaaagucacucagcuagga

SEQ ID NO: 593684 - RNA, 22 nt, Human
caguccuuagauuuuacugcca

SEQ ID NO: 593685 - RNA, 22 nt, Human
ugaauaaaguauguccugggaa

SEQ ID NO: 593686 - RNA, 22 nt, Human
agcagccagaaauccagaggug

SEQ ID NO: 593687 - RNA, 23 nt, Human
gaggccuggcccugccacaucuc

SEQ ID NO: 593688 - RNA, 22 nt, Human
aacaguuugccugaaauguauu

SEQ ID NO: 593689 - RNA, 22 nt, Human
uacaauauguggccuuuuguga

SEQ ID NO: 593690 - RNA, 22 nt, Human
ccagauaucacugccguguugu

SEQ ID NO: 593691 - RNA, 22 nt, Human
acaaaugaacauauaagcuuga

SEQ ID NO: 593692 - RNA, 22 nt, Human
gguguggguccuugugcuugcu

SEQ ID NO: 593693 - RNA, 22 nt, Human
ccugagcucugcacuuuuuaga

SEQ ID NO: 593694 - RNA, 22 nt, Human
cuggggcuggugaggcaggcuc

SEQ ID NO: 593695 - RNA, 22 nt, Human
ucaggaacacaggggcccaugc

SEQ ID NO: 593696 - RNA, 19 nt, Human
uccaggcugagagucagcu

SEQ ID NO: 593697 - RNA, 22 nt, Human
cuuauuguccugacucauggcc

SEQ ID NO: 593698 - RNA, 22 nt, Human
acaggcugagcguccaucuuca

SEQ ID NO: 593699 - RNA, 22 nt, Human
ucucucagaaagcccaugucug

SEQ ID NO: 593700 - RNA, 22 nt, Human
cccuuccuccucgccugucaga

SEQ ID NO: 593701 - RNA, 21 nt, Human
auuagcuucaaaagcuugucu

SEQ ID NO: 593702 - RNA, 22 nt, Human
uuauguuaugaauggaugaucu

SEQ ID NO: 593703 - RNA, 22 nt, Human
auacacauuugcuagagauggg

SEQ ID NO: 593704 - RNA, 18 nt, Human
gcaguaggcgcgcaggac

SEQ ID NO: 593705 - RNA, 22 nt, Human
aagccauuuguuguccuucagg

SEQ ID NO: 593706 - RNA, 20 nt, Human
ucugucucugagcuagacuu

SEQ ID NO: 593707 - RNA, 22 nt, Human
guuuuaugagaccucaggaaua

SEQ ID NO: 593708 - RNA, 22 nt, Human
guguggcaaggugagaaguggg

SEQ ID NO: 593709 - RNA, 22 nt, Human
gagauaauaauaguaccuaucu

SEQ ID NO: 593710 - RNA, 22 nt, Human
uuucugaccugcaacaguuuac

SEQ ID NO: 593711 - RNA, 22 nt, Human
ugaggcuugauuugcccgagag

SEQ ID NO: 593712 - RNA, 22 nt, Human
auuucagggugucuuccaacug

SEQ ID NO: 593713 - RNA, 21 nt, Human
aggugcagagccagggaccag

SEQ ID NO: 593714 - RNA, 22 nt, Human
gggcucaggaguuugaggcugc

SEQ ID NO: 593715 - RNA, 22 nt, Human
aaggaaaggaugagcaugcauu

SEQ ID NO: 593716 - RNA, 22 nt, Human
cugccaggggccucacaggcca

SEQ ID NO: 593717 - RNA, 22 nt, Human
agauaacauuuauugaauguaa

SEQ ID NO: 593718 - RNA, 22 nt, Human
ugacagggacaguggagaugga

SEQ ID NO: 593719 - RNA, 22 nt, Human
agcaacaggaccauggagccca

SEQ ID NO: 593720 - RNA, 22 nt, Human
uacuuauugguucagaaguuua

SEQ ID NO: 593721 - RNA, 22 nt, Human
ggaagaaaaugggcaacaggug

SEQ ID NO: 593722 - RNA, 22 nt, Human
auguuuuuaaauagacuuacag

SEQ ID NO: 593723 - RNA, 22 nt, Human
ccuuggcuugugggcugcagcc

SEQ ID NO: 593724 - RNA, 22 nt, Human
aagaguuagcucaauaacuuga

SEQ ID NO: 593725 - RNA, 22 nt, Human
cagaggaaaugggaaggagaua

SEQ ID NO: 593726 - RNA, 22 nt, Human
cuuguccagauguuuguuaggu

SEQ ID NO: 593727 - RNA, 19 nt, Human
guuaucaaggggcuacuuu

SEQ ID NO: 593728 - RNA, 22 nt, Human
gacagcuuaggaaguuucuauu

SEQ ID NO: 593729 - RNA, 22 nt, Human
agaauuagccggauucuuguuu

SEQ ID NO: 593730 - RNA, 22 nt, Human
cagagccagcuguccuuggcau

SEQ ID NO: 593731 - RNA, 22 nt, Human
ucaggagcagcaugggugagag

SEQ ID NO: 593732 - RNA, 22 nt, Human
ugaggcaggagaauggcgggaa

SEQ ID NO: 593733 - RNA, 21 nt, Human
uggcugcacuguggcuuucau

SEQ ID NO: 593734 - RNA, 22 nt, Human
aucugacaaguuguguguauag

SEQ ID NO: 593735 - RNA, 22 nt, Human
cagcagcucaggcugcuuccca

SEQ ID NO: 593736 - RNA, 22 nt, Human
uuugugcagugguuaagaccau

SEQ ID NO: 593737 - RNA, 22 nt, Human
gcaugcaggagagaaagacggc

SEQ ID NO: 593738 - RNA, 22 nt, Human
guggggagcagccuuagccccu

SEQ ID NO: 593739 - RNA, 22 nt, Human
cuguauaugugcauacacacac

SEQ ID NO: 593740 - RNA, 22 nt, Human
uguuuucucuugaaaagcaguc

SEQ ID NO: 593741 - RNA, 22 nt, Human
uggcugaguguuccaaggagca

SEQ ID NO: 593742 - RNA, 22 nt, Human
gcagaagcuguucgaaggccgc

SEQ ID NO: 593743 - RNA, 22 nt, Human
gcugucugcugugcacugagca

SEQ ID NO: 593744 - RNA, 22 nt, Human
aggugacaucccggcagcagag

SEQ ID NO: 593745 - RNA, 22 nt, Human
uucucagaaaagcaagcuuucu

SEQ ID NO: 593746 - RNA, 23 nt, Human
gagagcugacugucaagacuguu

SEQ ID NO: 593747 - RNA, 22 nt, Human
uggccuggaaccuggcagggac

SEQ ID NO: 593748 - RNA, 21 nt, Human
ugacauuuaguagcauuguca

SEQ ID NO: 593749 - RNA, 22 nt, Human
aucugacaucucccucugacau

SEQ ID NO: 593750 - RNA, 22 nt, Human
guccugggaggggcugguccug

SEQ ID NO: 593751 - RNA, 20 nt, Human
cuggggagccucgcgguggc

SEQ ID NO: 593752 - RNA, 22 nt, Human
uaccucaaguuccaggaaagcg

SEQ ID NO: 593753 - RNA, 22 nt, Human
agcugcagcuguuuucugagug

SEQ ID NO: 593754 - RNA, 18 nt, Human
ucuguggcagcagugcac

SEQ ID NO: 593755 - RNA, 22 nt, Human
gggggcaguaaccucaaagugu

SEQ ID NO: 593756 - RNA, 22 nt, Human
aggggccauguaaguguaucac

SEQ ID NO: 593757 - RNA, 22 nt, Human
cuaaacaugcaagagcuucugg

SEQ ID NO: 593758 - RNA, 22 nt, Human
aggcagccuuuagacagucugc

SEQ ID NO: 593759 - RNA, 18 nt, Human
uacaugcauaaaugaagc

SEQ ID NO: 593760 - RNA, 22 nt, Human
ucuauaucuuggcugcugugaa

SEQ ID NO: 593761 - RNA, 22 nt, Human
uggaucaucuuaagaagugauu

SEQ ID NO: 593762 - RNA, 22 nt, Human
uacaagaaggauggagcccacu

SEQ ID NO: 593763 - RNA, 22 nt, Human
caggcagagcaacugguccaga

SEQ ID NO: 593764 - RNA, 22 nt, Human
gggguacuggcuggagccccac

SEQ ID NO: 593765 - RNA, 22 nt, Human
ggcagaggugaaguucacaagg

SEQ ID NO: 593766 - RNA, 22 nt, Human
gccgaagacgcugggcgugggc

SEQ ID NO: 593767 - RNA, 22 nt, Human
gccagcugaggccgugcaggcu

SEQ ID NO: 593768 - RNA, 22 nt, Human
ggguccaggucuucaggcagag

SEQ ID NO: 593769 - RNA, 22 nt, Human
gagaugaagaggcccuuggagu

SEQ ID NO: 593770 - RNA, 22 nt, Human
uucagcagucguccaggaaaag

SEQ ID NO: 593771 - RNA, 22 nt, Human
auuacaaucgagagaaacaaau

SEQ ID NO: 593772 - RNA, 22 nt, Human
aggggccuggacauggacgcgc

SEQ ID NO: 593773 - RNA, 22 nt, Human
ucacaagacaagacaaauugca

SEQ ID NO: 593774 - RNA, 21 nt, Human
uaaagcuagaaccuuagcuuu

SEQ ID NO: 593775 - RNA, 22 nt, Human
agucagugaaggcauugcucaa

SEQ ID NO: 593776 - RNA, 22 nt, Human
ugucuuuuggagcaucuuucuu

SEQ ID NO: 593777 - RNA, 22 nt, Human
uaccaggcagcugcacagaggc

SEQ ID NO: 593778 - RNA, 20 nt, Human
ccagacagcaccugccuggu

SEQ ID NO: 593779 - RNA, 22 nt, Human
cagcuguuaugagguguacaug

SEQ ID NO: 593780 - RNA, 22 nt, Human
uagagaaaaccacuggugagcu

SEQ ID NO: 593781 - RNA, 22 nt, Human
ccaggagagcucucguucagug

SEQ ID NO: 593782 - RNA, 19 nt, Human
ucugaacaaugcaguuccc

SEQ ID NO: 593783 - RNA, 22 nt, Human
uagcacaguauuucucaacugg

SEQ ID NO: 593784 - RNA, 22 nt, Human
aaaauuuuacugguguuuccuu

SEQ ID NO: 593785 - RNA, 22 nt, Human
gugugggcugcagaggcacagc

SEQ ID NO: 593786 - RNA, 22 nt, Human
agcacagagauuauuuacaaga

SEQ ID NO: 593787 - RNA, 19 nt, Human
ugacugccucaggggugga

SEQ ID NO: 593788 - RNA, 22 nt, Human
aagaagcauucuuucauugguu

SEQ ID NO: 593789 - RNA, 17 nt, Human
ggaaagguagaguaauc

SEQ ID NO: 593790 - RNA, 22 nt, Human
ggacauuuaguuucauugggca

SEQ ID NO: 593791 - RNA, 22 nt, Human
auguccaauuucugaggcugcu

SEQ ID NO: 593792 - RNA, 22 nt, Human
uaaacaagaaacauuuucuguu

SEQ ID NO: 593793 - RNA, 22 nt, Human
auuugcuuguucaccaguacuu

SEQ ID NO: 593794 - RNA, 22 nt, Human
aacacugagcuauuacggugga

SEQ ID NO: 593795 - RNA, 22 nt, Human
ugcaggugagugcaggggcuca

SEQ ID NO: 593796 - RNA, 22 nt, Human
ugccugccucuggcagcccugc

SEQ ID NO: 593797 - RNA, 22 nt, Human
gccagcucuguggcuguacuug

SEQ ID NO: 593798 - RNA, 22 nt, Human
gcuggagugaguauguguaguc

SEQ ID NO: 593799 - RNA, 22 nt, Human
aggcagcaaagaaaugaugcug

SEQ ID NO: 593800 - RNA, 22 nt, Human
ugaggggagaagcagcagccug

SEQ ID NO: 593801 - RNA, 22 nt, Human
cugcugggcagaggcugcauga

SEQ ID NO: 593802 - RNA, 22 nt, Human
uccuagagccuccagagggaga

SEQ ID NO: 593803 - RNA, 22 nt, Human
uggcaugauaggaggugcagaa

SEQ ID NO: 593804 - RNA, 22 nt, Human
gacaguauccagguggugaaga

SEQ ID NO: 593805 - RNA, 21 nt, Human
ccagagccugagaggauuaug

SEQ ID NO: 593806 - RNA, 22 nt, Human
cuaggccauauuuugagaacug

SEQ ID NO: 593807 - RNA, 22 nt, Human
agguggggaguauauguaauug

SEQ ID NO: 593808 - RNA, 22 nt, Human
uuaguuuucucaucuaucucac

SEQ ID NO: 593809 - RNA, 22 nt, Human
ugaaaccauucucagguacacu

SEQ ID NO: 593810 - RNA, 22 nt, Human
uccgaguugaaguaggauagcg

SEQ ID NO: 593811 - RNA, 22 nt, Human
ggcuguguccuguaugauuauu

SEQ ID NO: 593812 - RNA, 22 nt, Human
aaauggugaaguguaauuuagc

SEQ ID NO: 593813 - RNA, 22 nt, Human
ccaggagggaccgcggcauccc

SEQ ID NO: 593814 - RNA, 23 nt, Human
ccuggguuucagagcugcuuuuc

SEQ ID NO: 593815 - RNA, 22 nt, Human
auugucuucuggucuuaucuuu

SEQ ID NO: 593816 - RNA, 22 nt, Human
cacaguauucacugggcagauu

SEQ ID NO: 593817 - RNA, 22 nt, Human
ucuuuugucgguguaucaugga

SEQ ID NO: 593818 - RNA, 20 nt, Human
acccugaggcuccccagccu

SEQ ID NO: 593819 - RNA, 22 nt, Human
gaaggaggcguuagcccuagga

SEQ ID NO: 593820 - RNA, 22 nt, Human
cagaggaagggugcugcgaaag

SEQ ID NO: 593821 - RNA, 21 nt, Human
ggagaaggacaauguugagua

SEQ ID NO: 593822 - RNA, 23 nt, Human
cuccuggaggguccggcccugcc

SEQ ID NO: 593823 - RNA, 22 nt, Human
agcaggagaacacuguggcucu

SEQ ID NO: 593824 - RNA, 22 nt, Human
augaagcaucucacaaucuagu

SEQ ID NO: 593825 - RNA, 22 nt, Human
ggcucuggggaagcucucuuca

SEQ ID NO: 593826 - RNA, 22 nt, Human
uuaaauuccagccucauaauag

SEQ ID NO: 593827 - RNA, 22 nt, Human
gagggagggacuagcauucucu

SEQ ID NO: 593828 - RNA, 19 nt, Human
caucauuaucaguucacug

SEQ ID NO: 593829 - RNA, 23 nt, Human
ugacagaccuucccagacaguca

SEQ ID NO: 593830 - RNA, 22 nt, Human
gucagcaaaaaauuuaugugag

SEQ ID NO: 593831 - RNA, 22 nt, Human
cuggcuaaagagcaagaagaug

SEQ ID NO: 593832 - RNA, 22 nt, Human
agacucugauucccucauguca

SEQ ID NO: 593833 - RNA, 20 nt, Human
aauguauauuuuaugccagg

SEQ ID NO: 593834 - RNA, 22 nt, Human
gcacacaguacuauaugcuaca

SEQ ID NO: 593835 - RNA, 18 nt, Human
guucaaggucaagagaga

SEQ ID NO: 593836 - RNA, 22 nt, Human
gggucuggagauccgggugaag

SEQ ID NO: 593837 - RNA, 22 nt, Human
cauaauuagagaauucauguua

SEQ ID NO: 593838 - RNA, 22 nt, Human
uuggggaguuaaugccaaagau

SEQ ID NO: 593839 - RNA, 20 nt, Human
aagaaacuugaaaguacaag

SEQ ID NO: 593840 - RNA, 21 nt, Human
ugucuccuguuggcacauggc

SEQ ID NO: 593841 - RNA, 22 nt, Human
cuacagcuggccuuggaaaacu

SEQ ID NO: 593842 - RNA, 22 nt, Human
uucaagaaagaguggcuauucc

SEQ ID NO: 593843 - RNA, 22 nt, Human
acuggaaaauucaaaugggguc

SEQ ID NO: 593844 - RNA, 22 nt, Human
acuguacaugcaucuugucuau

SEQ ID NO: 593845 - RNA, 22 nt, Human
cuugugcaauugacauugaauc

SEQ ID NO: 593846 - RNA, 22 nt, Human
gcuggcuuugcacugggugcau

SEQ ID NO: 593847 - RNA, 22 nt, Human
augggcagcugcagcaguggug

SEQ ID NO: 593848 - RNA, 22 nt, Human
ugagagggcccagagcacacca

SEQ ID NO: 593849 - RNA, 22 nt, Human
uuguuucucuggucuugaguga

SEQ ID NO: 593850 - RNA, 22 nt, Human
uggcagaguaggauggcccugu

SEQ ID NO: 593851 - RNA, 22 nt, Human
uagaaacaaaaucugaugacuc

SEQ ID NO: 593852 - RNA, 22 nt, Human
uggggcuguccuuagucugaga

SEQ ID NO: 593853 - RNA, 22 nt, Human
uucaagaaucuuccugaccacu

SEQ ID NO: 593854 - RNA, 22 nt, Human
gugcaaaaguaacugugguuuu

SEQ ID NO: 593855 - RNA, 22 nt, Human
uuucuuuuccaauaucccuacu

SEQ ID NO: 593856 - RNA, 22 nt, Human
gcagagaacccagcagauuggc

SEQ ID NO: 593857 - RNA, 22 nt, Human
ccucaggcugcucacacuuguc

SEQ ID NO: 593858 - RNA, 23 nt, Human
aaugggugcaacuauccaugaca

SEQ ID NO: 593859 - RNA, 20 nt, Human
augccucuaauuuugcaaac

SEQ ID NO: 593860 - RNA, 22 nt, Human
ugugaauauuuccuucuuugga

SEQ ID NO: 593861 - RNA, 22 nt, Human
auuguuaaaaagguggaaaugc

SEQ ID NO: 593862 - RNA, 22 nt, Human
agacuuuauaguuuuuggcuau

SEQ ID NO: 593863 - RNA, 22 nt, Human
ucuggagggcccacauccacaa

SEQ ID NO: 593864 - RNA, 19 nt, Human
cccaacuggauccaucaua

SEQ ID NO: 593865 - RNA, 22 nt, Human
uuuacagauguggaaagugagc

SEQ ID NO: 593866 - RNA, 22 nt, Human
ccauggcaauggucagucuauu

SEQ ID NO: 593867 - RNA, 23 nt, Human
uuauaaauauuuucagguguguu

SEQ ID NO: 593868 - RNA, 22 nt, Human
gcacugugacccagagcaggug

SEQ ID NO: 593869 - RNA, 22 nt, Human
cuuauuuugcugaugacccagg

SEQ ID NO: 593870 - RNA, 22 nt, Human
ccacugcuaacuugcugcagcu

SEQ ID NO: 593871 - RNA, 20 nt, Human
cacugcccuccagccugagc

SEQ ID NO: 593872 - RNA, 18 nt, Human
cauaauuuucuuucuuua

SEQ ID NO: 593873 - RNA, 19 nt, Human
ggauaagguuggagugauc

SEQ ID NO: 593874 - RNA, 22 nt, Human
ccucccugggugcugggauugc

SEQ ID NO: 593875 - RNA, 22 nt, Human
uguccaggugugucuaaagaga

SEQ ID NO: 593876 - RNA, 22 nt, Human
cauuugaugacucaacucauaa

SEQ ID NO: 593877 - RNA, 22 nt, Human
caugggcugcugacaggggcuc

SEQ ID NO: 593878 - RNA, 22 nt, Human
uuuuauguugcuauaauaggua

SEQ ID NO: 593879 - RNA, 22 nt, Human
gcauccagagguagccacugug

SEQ ID NO: 593880 - RNA, 22 nt, Human
aguguuggaccgagguggagcc

SEQ ID NO: 593881 - RNA, 22 nt, Human
ugggcacuguagcuggugcugg

SEQ ID NO: 593882 - RNA, 22 nt, Human
gcccauggucagggaggcaggg

SEQ ID NO: 593883 - RNA, 22 nt, Human
uaagacaugagacucagccagu

SEQ ID NO: 593884 - RNA, 22 nt, Human
aaagcuuaggauagggaauaua

SEQ ID NO: 593885 - RNA, 22 nt, Human
cuguguuuuuggucugaucuau

SEQ ID NO: 593886 - RNA, 17 nt, Human
gggaaguggagaaagcu

SEQ ID NO: 593887 - RNA, 22 nt, Human
gaagagcugcacacuggggacu

SEQ ID NO: 593888 - RNA, 22 nt, Human
caggugagaggcgguccugcau

SEQ ID NO: 593889 - RNA, 22 nt, Human
guuuuccugaaacugauggugu

SEQ ID NO: 593890 - RNA, 22 nt, Human
acuccuggggauccauuccuuu

SEQ ID NO: 593891 - RNA, 22 nt, Human
cgccccagaugcaagacaaaga

SEQ ID NO: 593892 - RNA, 22 nt, Human
agaugcauguuuaugucuuucc

SEQ ID NO: 593893 - RNA, 22 nt, Human
uucacugaauuaauuuccuucu

SEQ ID NO: 593894 - RNA, 22 nt, Human
gccuggagccucagcaaggagg

SEQ ID NO: 593895 - RNA, 22 nt, Human
uuucucuuucaaucugcaguac

SEQ ID NO: 593896 - RNA, 22 nt, Human
ucugaggcccugcaggcagugu

SEQ ID NO: 593897 - RNA, 22 nt, Human
cucuuuguagccuuugcauauu

SEQ ID NO: 593898 - RNA, 22 nt, Human
agauuuuaguuuggggaggugc

SEQ ID NO: 593899 - RNA, 22 nt, Human
ucagcugccuuucccaugcuag

SEQ ID NO: 593900 - RNA, 22 nt, Human
augcagguauauuuuauuaaag

SEQ ID NO: 593901 - RNA, 22 nt, Human
acacuucagcuccacaaacauu

SEQ ID NO: 593902 - RNA, 22 nt, Human
uucauuaauucauucagugacu

SEQ ID NO: 593903 - RNA, 22 nt, Human
acagccuguuugaucuggugcu

SEQ ID NO: 593904 - RNA, 22 nt, Human
gagaagggcuugggagucaaca

SEQ ID NO: 593905 - RNA, 22 nt, Human
ggguccugcgugggcccaggac

SEQ ID NO: 593906 - RNA, 20 nt, Human
uacauucaaaacaaacucug

SEQ ID NO: 593907 - RNA, 22 nt, Human
agcuucagugucaggcccgugg

SEQ ID NO: 593908 - RNA, 22 nt, Human
caugcaaacacguaaacauuca

SEQ ID NO: 593909 - RNA, 22 nt, Human
gcccacuuucugccagcucacc

SEQ ID NO: 593910 - RNA, 22 nt, Human
cugcugacaaaauaaaaugcuc

SEQ ID NO: 593911 - RNA, 22 nt, Human
ugaguuauggagaauaaaguca

SEQ ID NO: 593912 - RNA, 22 nt, Human
gcacuggagauacagagaugaa

SEQ ID NO: 593913 - RNA, 22 nt, Human
aguaaacacugucuuuauauau

SEQ ID NO: 593914 - RNA, 22 nt, Human
uuuuaaugggcgacuauuaugg

SEQ ID NO: 593915 - RNA, 22 nt, Human
agccugugagggaugcugcagu

SEQ ID NO: 593916 - RNA, 22 nt, Human
acaucacacgccuuccaggagg

SEQ ID NO: 593917 - RNA, 21 nt, Human
auauuucagauuuccguaauc

SEQ ID NO: 593918 - RNA, 22 nt, Human
cagcagagggagccauugaaau

SEQ ID NO: 593919 - RNA, 22 nt, Human
ugcaggcuguaaucugaggcua

SEQ ID NO: 593920 - RNA, 22 nt, Human
uccuuaaaggacuagaagucaa

SEQ ID NO: 593921 - RNA, 22 nt, Human
gaacagcagcuuccugggaauu

SEQ ID NO: 593922 - RNA, 22 nt, Human
uugacaaaggcugagaggaaaa

SEQ ID NO: 593923 - RNA, 22 nt, Human
ggguggagugugaaaucuggcu

SEQ ID NO: 593924 - RNA, 22 nt, Human
ucagguggccaaaugggagcgc

SEQ ID NO: 593925 - RNA, 22 nt, Human
cuuccucucuugcccauaagag

SEQ ID NO: 593926 - RNA, 22 nt, Human
cugcuuuaauggaaaguguuuu

SEQ ID NO: 593927 - RNA, 22 nt, Human
gcccagccccuggguggacgug

SEQ ID NO: 593928 - RNA, 22 nt, Human
ggggagaauuaccaaaagcgcu

SEQ ID NO: 593929 - RNA, 22 nt, Human
gaggcaggcagauugcuugagg

SEQ ID NO: 593930 - RNA, 22 nt, Human
ccugcccagggucaccacagag

SEQ ID NO: 593931 - RNA, 22 nt, Human
uggcucagcgcggccuggucuu

SEQ ID NO: 593932 - RNA, 22 nt, Human
aaagaguuuacaaauuagguaa

SEQ ID NO: 593933 - RNA, 23 nt, Human
uuuuccagaaucgacucuguaga

SEQ ID NO: 593934 - RNA, 22 nt, Human
ggcugcccucggggucgcaggc

SEQ ID NO: 593935 - RNA, 22 nt, Human
agcuccugcagacuccugcuca

SEQ ID NO: 593936 - RNA, 22 nt, Human
uagcacuacuuagguacagcca

SEQ ID NO: 593937 - RNA, 22 nt, Human
caguggucugugcuucuguaca

SEQ ID NO: 593938 - RNA, 22 nt, Human
agagacaaugccaaugcacacg

SEQ ID NO: 593939 - RNA, 22 nt, Human
aguaggauaagagccuguccaa

SEQ ID NO: 593940 - RNA, 22 nt, Human
uucuuucuguccauaaugagac

SEQ ID NO: 593941 - RNA, 22 nt, Human
gacauaaaauucaauaauuugu

SEQ ID NO: 593942 - RNA, 22 nt, Human
gugaaaaaucaucaugacuuga

SEQ ID NO: 593943 - RNA, 22 nt, Human
aauaguuuuauaggugggauua

SEQ ID NO: 593944 - RNA, 22 nt, Human
gcauauuuucacaagcucuugg

SEQ ID NO: 593945 - RNA, 22 nt, Human
ugaagccagcuuuggaagacac

SEQ ID NO: 593946 - RNA, 22 nt, Human
gugggcagauacauuugauaug

SEQ ID NO: 593947 - RNA, 22 nt, Human
aggcuagauagagggucaucuu

SEQ ID NO: 593948 - RNA, 21 nt, Human
aagaaagauaauuaaggaccc

SEQ ID NO: 593949 - RNA, 22 nt, Human
ucacacaugaguaaauacaggg

SEQ ID NO: 593950 - RNA, 22 nt, Human
cuugccuacuugucaaccagca

SEQ ID NO: 593951 - RNA, 22 nt, Human
ugcauguuucuguauguuaaug

SEQ ID NO: 593952 - RNA, 22 nt, Human
cuugcugucuugcauuuagagc

SEQ ID NO: 593953 - RNA, 22 nt, Human
uuucuucuuucccagugauggg

SEQ ID NO: 593954 - RNA, 22 nt, Human
ucucuuaggagaaauucauaaa

SEQ ID NO: 593955 - RNA, 22 nt, Human
aggguggccaugagggagagau

SEQ ID NO: 593956 - RNA, 22 nt, Human
ggcagaggaggggugaauuugc

SEQ ID NO: 593957 - RNA, 22 nt, Human
cucggcagguggagguuguagu

SEQ ID NO: 593958 - RNA, 20 nt, Human
agcagcuguguuuucauccu

SEQ ID NO: 593959 - RNA, 22 nt, Human
ggugcagaggagccagcugggg

SEQ ID NO: 593960 - RNA, 22 nt, Human
ggcucuggucagugaggggccu

SEQ ID NO: 593961 - RNA, 22 nt, Human
caggugggagccacagcguaca

SEQ ID NO: 593962 - RNA, 22 nt, Human
aaaucacuaaguuauagugugg

SEQ ID NO: 593963 - RNA, 19 nt, Human
ugagugggccccugcagac

SEQ ID NO: 593964 - RNA, 23 nt, Human
auuacaugagcaaauauagcuau

SEQ ID NO: 593965 - RNA, 22 nt, Human
aggagcuggguuccuuuggugg

SEQ ID NO: 593966 - RNA, 22 nt, Human
ucagaggugguaaaggacagca

SEQ ID NO: 593967 - RNA, 22 nt, Human
aaguuacaguuaggggugauga

SEQ ID NO: 593968 - RNA, 22 nt, Human
ucaguguuggcauucagaaaug

SEQ ID NO: 593969 - RNA, 22 nt, Human
gcuggcuugucccaggacaaag

SEQ ID NO: 593970 - RNA, 22 nt, Human
ucaagagaaggggaaauagacu

SEQ ID NO: 593971 - RNA, 22 nt, Human
ugagaauuuucaguuucacuuu

SEQ ID NO: 593972 - RNA, 22 nt, Human
ugcauuccacauaaagcgauaa

SEQ ID NO: 593973 - RNA, 22 nt, Human
caguaugagaguugaaucaagg

SEQ ID NO: 593974 - RNA, 22 nt, Human
ccugggaaggugaggcccugga

SEQ ID NO: 593975 - RNA, 22 nt, Human
ugggacagugugccuugcuccu

SEQ ID NO: 593976 - RNA, 22 nt, Human
aggucagacagggugucuuucu

SEQ ID NO: 593977 - RNA, 22 nt, Human
aagcucuuuccacuaaaccacu

SEQ ID NO: 593978 - RNA, 22 nt, Human
ucuuccaggagggugggcaaac

SEQ ID NO: 593979 - RNA, 22 nt, Human
acauucuaacauuguacagaua

SEQ ID NO: 593980 - RNA, 22 nt, Human
aagcagcugugugacauaaucu

SEQ ID NO: 593981 - RNA, 22 nt, Human
ugguuaaaaugcagauucagua

SEQ ID NO: 593982 - RNA, 22 nt, Human
ugcagaacagggccaugucacc

SEQ ID NO: 593983 - RNA, 22 nt, Human
caaggcugcuggcuucugagcu

SEQ ID NO: 593984 - RNA, 22 nt, Human
uuuuucuugugcuggaucuaau

SEQ ID NO: 593985 - RNA, 22 nt, Human
cacaggaaugaacagggaaaga

SEQ ID NO: 593986 - RNA, 22 nt, Human
agaggccaagccagacugugca

SEQ ID NO: 593987 - RNA, 22 nt, Human
uucaaugauuuuuagggaucau

SEQ ID NO: 593988 - RNA, 18 nt, Human
acacacacaccuguguau

SEQ ID NO: 593989 - RNA, 22 nt, Human
auggcacugaccucccuuguaa

SEQ ID NO: 593990 - RNA, 22 nt, Human
ucuggaaaagcgauaaaccauu

SEQ ID NO: 593991 - RNA, 22 nt, Human
ugcuucuguuucauugaucuua

SEQ ID NO: 593992 - RNA, 22 nt, Human
ggcuucagugagcugagcucac

SEQ ID NO: 593993 - RNA, 22 nt, Human
auucuuauuauaguaaaacagu

SEQ ID NO: 593994 - RNA, 22 nt, Human
acagcuggagugaggauggagu

SEQ ID NO: 593995 - RNA, 22 nt, Human
uacugucauuagcauuaacuuu

SEQ ID NO: 593996 - RNA, 22 nt, Human
auacguaaguugaacaucagaa

SEQ ID NO: 593997 - RNA, 20 nt, Human
cagaaagaagguagauuuuu

SEQ ID NO: 593998 - RNA, 22 nt, Human
uguguucuggaaagcucacuga

SEQ ID NO: 593999 - RNA, 22 nt, Human
ugggauagggcuauugcucaca

SEQ ID NO: 594000 - RNA, 22 nt, Human
cuucaagauccauagauauugc

SEQ ID NO: 594001 - RNA, 22 nt, Human
ggcugggacgaugaggauuagu

SEQ ID NO: 594002 - RNA, 22 nt, Human
aguuuuauuccaaugugcagca

SEQ ID NO: 594003 - RNA, 22 nt, Human
cuccaggaccagggcuccugga

SEQ ID NO: 594004 - RNA, 22 nt, Human
aaucagaauuuguccccugagu

SEQ ID NO: 594005 - RNA, 22 nt, Human
cccaggcucacuguccgcuucc

SEQ ID NO: 594006 - RNA, 22 nt, Human
ccugcucugguuuagucagucu

SEQ ID NO: 594007 - RNA, 22 nt, Human
gggggcuggacuuucccacaca

SEQ ID NO: 594008 - RNA, 22 nt, Human
uaaggagggggaaugauuggca

SEQ ID NO: 594009 - RNA, 22 nt, Human
aaagcacauaguagaaggauuu

SEQ ID NO: 594010 - RNA, 22 nt, Human
auguguguguauauacacacau

SEQ ID NO: 594011 - RNA, 22 nt, Human
ugcugccuggagccuuuuguuu

SEQ ID NO: 594012 - RNA, 22 nt, Human
ugugugaagcacauguucaagg

SEQ ID NO: 594013 - RNA, 22 nt, Human
ggcugagaggacgucgggcuca

SEQ ID NO: 594014 - RNA, 22 nt, Human
acaaugcucauauuuaugccaa

SEQ ID NO: 594015 - RNA, 22 nt, Human
gcaccugggguacacagcuaca

SEQ ID NO: 594016 - RNA, 22 nt, Human
cuggugucugauucuccccuga

SEQ ID NO: 594017 - RNA, 22 nt, Human
ccuuuuucccuggagggacagc

SEQ ID NO: 594018 - RNA, 22 nt, Human
ggaaguguuuccuugggcagca

SEQ ID NO: 594019 - RNA, 22 nt, Human
uaauguagggguguaacacaca

SEQ ID NO: 594020 - RNA, 22 nt, Human
ucucugugucucauguuccuau

SEQ ID NO: 594021 - RNA, 21 nt, Human
uauuuauuaauuuguaaggcu

SEQ ID NO: 594022 - RNA, 22 nt, Human
gcagagccagaauggccaggac

SEQ ID NO: 594023 - RNA, 22 nt, Human
ugucuccauagaagagacugca

SEQ ID NO: 594024 - RNA, 22 nt, Human
ggagggcucaauugacuccuga

SEQ ID NO: 594025 - RNA, 21 nt, Human
ucucugugucuuuaagcugga

SEQ ID NO: 594026 - RNA, 22 nt, Human
uuagaaaggagcuuauuucuuu

SEQ ID NO: 594027 - RNA, 22 nt, Human
agagccccugguggagugagaa

SEQ ID NO: 594028 - RNA, 22 nt, Human
ucaaaacaaucauuggaugugc

SEQ ID NO: 594029 - RNA, 22 nt, Human
cucucagauggagugugaaugg

SEQ ID NO: 594030 - RNA, 22 nt, Human
cuuuggcuugcccuggcaguac

SEQ ID NO: 594031 - RNA, 22 nt, Human
agcacaugacuuuuagucgagu

SEQ ID NO: 594032 - RNA, 22 nt, Human
agagaugaagggcauuccccag

SEQ ID NO: 594033 - RNA, 22 nt, Human
ugucugagcaccugugcugaac

SEQ ID NO: 594034 - RNA, 22 nt, Human
ccagcagcagcguccaaggaga

SEQ ID NO: 594035 - RNA, 19 nt, Human
acauuuaaauucagaucuc

SEQ ID NO: 594036 - RNA, 22 nt, Human
cugcccaccgugugcacgugcg

SEQ ID NO: 594037 - RNA, 22 nt, Human
guuuauuagaguuuucugucug

SEQ ID NO: 594038 - RNA, 22 nt, Human
uaaguuaguccuuuuuaaaagu

SEQ ID NO: 594039 - RNA, 22 nt, Human
uuucaaaauuuugcagugguaa

SEQ ID NO: 594040 - RNA, 17 nt, Human
gcuuccugugcugggga

SEQ ID NO: 594041 - RNA, 22 nt, Human
cugaaugauaaucuuuugcugg

SEQ ID NO: 594042 - RNA, 22 nt, Human
ugagaguucucucuucaggugg

SEQ ID NO: 594043 - RNA, 22 nt, Human
uuuuaauacugcuauuguagga

SEQ ID NO: 594044 - RNA, 22 nt, Human
ugucuccuugcuuuucccugua

SEQ ID NO: 594045 - RNA, 19 nt, Human
cuccuucccugguuucugu

SEQ ID NO: 594046 - RNA, 22 nt, Human
gucuuuauauuuacuaaagaau

SEQ ID NO: 594047 - RNA, 19 nt, Human
ucugcccaguugucugccc

SEQ ID NO: 594048 - RNA, 22 nt, Human
ugugacuucuuuuugaguucaa

SEQ ID NO: 594049 - RNA, 22 nt, Human
agguuagaauguaagaguuuca

SEQ ID NO: 594050 - RNA, 22 nt, Human
ccagcagggcagugcccuggac

SEQ ID NO: 594051 - RNA, 22 nt, Human
gaggacaaagcccaggugcugg

SEQ ID NO: 594052 - RNA, 22 nt, Human
ugucacauaggcaaaauguuuu

SEQ ID NO: 594053 - RNA, 22 nt, Human
accauucugucucuuuacaaau

SEQ ID NO: 594054 - RNA, 23 nt, Human
ucucaaauaugaucugggucauc

SEQ ID NO: 594055 - RNA, 22 nt, Human
ugacaguugagcauguaagaga

SEQ ID NO: 594056 - RNA, 22 nt, Human
uuugugcauggguauggccaau

SEQ ID NO: 594057 - RNA, 22 nt, Human
agggcuccgggccaccggccug

SEQ ID NO: 594058 - RNA, 22 nt, Human
ggaacauuuuuuaaggcagaaa

SEQ ID NO: 594059 - RNA, 22 nt, Human
cagagaaagaagcccauucauu

SEQ ID NO: 594060 - RNA, 21 nt, Human
uucaaaaugguguguuugucu

SEQ ID NO: 594061 - RNA, 22 nt, Human
augccauugcuuuaaaauuaag

SEQ ID NO: 594062 - RNA, 22 nt, Human
aggcaugacuuuggcugaagaa

SEQ ID NO: 594063 - RNA, 22 nt, Human
caugcagugguaaaaagucagg

SEQ ID NO: 594064 - RNA, 17 nt, Human
gcugagugcagggaguc

SEQ ID NO: 594065 - RNA, 22 nt, Human
agaccagggucccacagagucu

SEQ ID NO: 594066 - RNA, 22 nt, Human
ucacaggagucauaauuacagu

SEQ ID NO: 594067 - RNA, 22 nt, Human
acucucccacguucgacucuaa

SEQ ID NO: 594068 - RNA, 22 nt, Human
aaagaggaaccaagagcacgug

SEQ ID NO: 594069 - RNA, 22 nt, Human
ccucucagccggacugucaggc

SEQ ID NO: 594070 - RNA, 18 nt, Human
ggguccugugggagacag

SEQ ID NO: 594071 - RNA, 22 nt, Human
guaaaacaagcuuuaugguucc

SEQ ID NO: 594072 - RNA, 22 nt, Human
aaucagcaggcuucuaaauuuu

SEQ ID NO: 594073 - RNA, 22 nt, Human
auuaaagcuauccagucaugaa

SEQ ID NO: 594074 - RNA, 22 nt, Human
uuuaauuagcaagccagagagc

SEQ ID NO: 594075 - RNA, 22 nt, Human
ccaaggcacacucugcaagguu

SEQ ID NO: 594076 - RNA, 22 nt, Human
cagugcagucaaggaagaacca

SEQ ID NO: 594077 - RNA, 22 nt, Human
cacaaugucugguaggccacuu

SEQ ID NO: 594078 - RNA, 22 nt, Human
cucaaaauccauaaaaucaggu

SEQ ID NO: 594079 - RNA, 22 nt, Human
agcaagcugucaagagagcuga

SEQ ID NO: 594080 - RNA, 22 nt, Human
acauggaauguguacuaaguua

SEQ ID NO: 594081 - RNA, 22 nt, Human
ugaggaaugcugagcagaggaa

SEQ ID NO: 594082 - RNA, 22 nt, Human
acaagauuuaaugcaacccaag

SEQ ID NO: 594083 - RNA, 22 nt, Human
gcuguacauucuguggguuugg

SEQ ID NO: 594084 - RNA, 22 nt, Human
guuagcaugauuccugcucauu

SEQ ID NO: 594085 - RNA, 22 nt, Human
uagacauuauguauuaaguucu

SEQ ID NO: 594086 - RNA, 22 nt, Human
ggaagcaggaggcugggguaaa

SEQ ID NO: 594087 - RNA, 22 nt, Human
ucacaguacugugacuauugac

SEQ ID NO: 594088 - RNA, 22 nt, Human
gucaaguuuauccgcucauuca

SEQ ID NO: 594089 - RNA, 22 nt, Human
uccccaggacuaaguugcaauc

SEQ ID NO: 594090 - RNA, 22 nt, Human
ccccagcccacaagcauauuaa

SEQ ID NO: 594091 - RNA, 22 nt, Human
ugugccugacuaggugaaucaa

SEQ ID NO: 594092 - RNA, 22 nt, Human
uuacaauaguuccuucuuuugu

SEQ ID NO: 594093 - RNA, 22 nt, Human
acuuccaggaggugucacugaa

SEQ ID NO: 594094 - RNA, 22 nt, Human
aaugucauuuuuaaaugugaga

SEQ ID NO: 594095 - RNA, 22 nt, Human
augcuuaaugaggguauauaug

SEQ ID NO: 594096 - RNA, 22 nt, Human
guuuuguucaugaacauugggu

SEQ ID NO: 594097 - RNA, 22 nt, Human
acuuuuuuauaaggaagaagau

SEQ ID NO: 594098 - RNA, 22 nt, Human
auuaaagacagcagauggaugg

SEQ ID NO: 594099 - RNA, 22 nt, Human
cccagcuugcccaggacugagg

SEQ ID NO: 594100 - RNA, 22 nt, Human
ugggccacucuucccugggucu

SEQ ID NO: 594101 - RNA, 22 nt, Human
caucuuuaguuauugaauauag

SEQ ID NO: 594102 - RNA, 22 nt, Human
cagcuuugagcagccaguggca

SEQ ID NO: 594103 - RNA, 22 nt, Human
uccagggacagcgcuggagcua

SEQ ID NO: 594104 - RNA, 22 nt, Human
acaguauauauagucuaaaagc

SEQ ID NO: 594105 - RNA, 22 nt, Human
cuuuucuuguauuggaugcccc

SEQ ID NO: 594106 - RNA, 22 nt, Human
cagucccaguuugagacucugg

SEQ ID NO: 594107 - RNA, 22 nt, Human
gcgggggcggcgcagaccucag

SEQ ID NO: 594108 - RNA, 22 nt, Human
cuccagugcccuccuugggggc

SEQ ID NO: 594109 - RNA, 22 nt, Human
cuuguagaauugaaauggucuc

SEQ ID NO: 594110 - RNA, 22 nt, Human
ucacugcucgauaacaugauua

SEQ ID NO: 594111 - RNA, 22 nt, Human
ucagaacaguucuuaauauugc

SEQ ID NO: 594112 - RNA, 22 nt, Human
cugaagcaauugagagauguuu

SEQ ID NO: 594113 - RNA, 20 nt, Human
ugcugcugccuccgccucug

SEQ ID NO: 594114 - RNA, 22 nt, Human
gcugggcaaugccagagaggag

SEQ ID NO: 594115 - RNA, 22 nt, Human
cccaggcuggauuucgguggca

SEQ ID NO: 594116 - RNA, 22 nt, Human
gaguaaaaguuggauuacaaag

SEQ ID NO: 594117 - RNA, 22 nt, Human
cagaucugagccaagcucgaug

SEQ ID NO: 594118 - RNA, 22 nt, Human
ccugggaagagcugacaggagg

SEQ ID NO: 594119 - RNA, 22 nt, Human
ugcugugguucccagaguggau

SEQ ID NO: 594120 - RNA, 22 nt, Human
gcucaugggcccagagcagccc

SEQ ID NO: 594121 - RNA, 22 nt, Human
gugagcaggauaggggcucccu

SEQ ID NO: 594122 - RNA, 22 nt, Human
gagaaaagcgaaggaccuggag

SEQ ID NO: 594123 - RNA, 22 nt, Human
gagguggauguugcagugagcu

SEQ ID NO: 594124 - RNA, 22 nt, Human
aaaugucagaagcuuuacuucu

SEQ ID NO: 594125 - RNA, 22 nt, Human
gcaguccucguaaaggucgaag

SEQ ID NO: 594126 - RNA, 22 nt, Human
agacuacagaauggcauuguuu

SEQ ID NO: 594127 - RNA, 22 nt, Human
uuuaaauuauaguuaaugucug

SEQ ID NO: 594128 - RNA, 22 nt, Human
cacaugaauugaugccaagugc

SEQ ID NO: 594129 - RNA, 22 nt, Human
gcuggggagaauuggguuaucu

SEQ ID NO: 594130 - RNA, 22 nt, Human
ucauggaauagagcaguggcaa

SEQ ID NO: 594131 - RNA, 22 nt, Human
uucuuauguucacauaauucca

SEQ ID NO: 594132 - RNA, 22 nt, Human
cuggagccccagacagggagag

SEQ ID NO: 594133 - RNA, 22 nt, Human
gugaaugauagcuucucuuugg

SEQ ID NO: 594134 - RNA, 23 nt, Human
acacugucucauggauagacugc

SEQ ID NO: 594135 - RNA, 21 nt, Human
gcuuucuguggacucugcacc

SEQ ID NO: 594136 - RNA, 22 nt, Human
uauuuccaagcugaauccaaug

SEQ ID NO: 594137 - RNA, 22 nt, Human
uugcugauucuguauuuaaggu

SEQ ID NO: 594138 - RNA, 22 nt, Human
cugugaucauucuugauuuaag

SEQ ID NO: 594139 - RNA, 22 nt, Human
gacaugucggauagaaugaguu

SEQ ID NO: 594140 - RNA, 22 nt, Human
cccaggagagagacuugaaucu

SEQ ID NO: 594141 - RNA, 22 nt, Human
aaugcuuuugcugucauugcuu

SEQ ID NO: 594142 - RNA, 22 nt, Human
aaaaaccuuucauugcaaaugu

SEQ ID NO: 594143 - RNA, 22 nt, Human
ggguggcuccuaugggcauagc

SEQ ID NO: 594144 - RNA, 22 nt, Human
uacccaaggcccuuucaauuuc

SEQ ID NO: 594145 - RNA, 22 nt, Human
aacauagaauuguuauauuuuc

SEQ ID NO: 594146 - RNA, 22 nt, Human
aaaggucuugucuugacagagu

SEQ ID NO: 594147 - RNA, 22 nt, Human
cucugaguuucauuucccuccu

SEQ ID NO: 594148 - RNA, 22 nt, Human
uaggugugggcucaggaaugug

SEQ ID NO: 594149 - RNA, 22 nt, Human
aguugcugcuucucucuagaga

SEQ ID NO: 594150 - RNA, 22 nt, Human
gaaauaauuuagaagguauucc

SEQ ID NO: 594151 - RNA, 22 nt, Human
ugcuaaauaacuuacauagugg

SEQ ID NO: 594152 - RNA, 22 nt, Human
uugaaauauggauugaccuuga

SEQ ID NO: 594153 - RNA, 22 nt, Human
uugacuuuucuuggucacauga

SEQ ID NO: 594154 - RNA, 22 nt, Human
gugcaggagcucccgcaguggu

SEQ ID NO: 594155 - RNA, 22 nt, Human
caggagugucuccacacagcaa

SEQ ID NO: 594156 - RNA, 23 nt, Human
uggcaucuuggcaucuugcugcu

SEQ ID NO: 594157 - RNA, 23 nt, Human
accaggagccaagaucucccugg

SEQ ID NO: 594158 - RNA, 22 nt, Human
ggaggaugagcuacgaggagcu

SEQ ID NO: 594159 - RNA, 22 nt, Human
aagauacauuuucuucagagaa

SEQ ID NO: 594160 - RNA, 22 nt, Human
uugaagcauuugcuauagcauu

SEQ ID NO: 594161 - RNA, 22 nt, Human
gcuggggagcuagaccucagca

SEQ ID NO: 594162 - RNA, 20 nt, Human
aaacgagccaucauucuggu

SEQ ID NO: 594163 - RNA, 22 nt, Human
agccucugcuggcccuggcacu

SEQ ID NO: 594164 - RNA, 22 nt, Human
uauuauauuuaguaauguggag

SEQ ID NO: 594165 - RNA, 22 nt, Human
acaguuauuuucccagcauuua

SEQ ID NO: 594166 - RNA, 22 nt, Human
uucugaggaggagcaaaaacuc

SEQ ID NO: 594167 - RNA, 22 nt, Human
ugguuugucuaaaugaguaaua

SEQ ID NO: 594168 - RNA, 22 nt, Human
uuguacagguuccuagggugga

SEQ ID NO: 594169 - RNA, 22 nt, Human
gcugcuuugcaguagaguaaua

SEQ ID NO: 594170 - RNA, 23 nt, Human
ucaguuuguauaauccauaugca

SEQ ID NO: 594171 - RNA, 22 nt, Human
caggaaugaucugcugagugau

SEQ ID NO: 594172 - RNA, 20 nt, Human
agcaggugacggggccugcu

SEQ ID NO: 594173 - RNA, 18 nt, Human
auccugggagcagacagc

SEQ ID NO: 594174 - RNA, 22 nt, Human
ccaccccugggugcagggagcg

SEQ ID NO: 594175 - RNA, 22 nt, Human
gggugggguguaucggauccua

SEQ ID NO: 594176 - RNA, 22 nt, Human
gccagccugugcuuggccaggc

SEQ ID NO: 594177 - RNA, 22 nt, Human
aaaggauaagguuaucaauuuu

SEQ ID NO: 594178 - RNA, 22 nt, Human
caaugucagagaagcucauauc

SEQ ID NO: 594179 - RNA, 22 nt, Human
ucaguguugaauuuuuugcaaa

SEQ ID NO: 594180 - RNA, 22 nt, Human
agacuuuagauacgucuucuuc

SEQ ID NO: 594181 - RNA, 22 nt, Human
uagcaccauacccggcagcucg

SEQ ID NO: 594182 - RNA, 21 nt, Human
ugagaaguaugucuucagcca

SEQ ID NO: 594183 - RNA, 22 nt, Human
uguccuuuacugauugcuucug

SEQ ID NO: 594184 - RNA, 22 nt, Human
ugcugagcgcauccggcggccg

SEQ ID NO: 594185 - RNA, 22 nt, Human
uguacacacacguguguaucua

SEQ ID NO: 594186 - RNA, 22 nt, Human
ucccuccuuuaucaaaaagaga

SEQ ID NO: 594187 - RNA, 22 nt, Human
ugaaagguagcuggccucauag

SEQ ID NO: 594188 - RNA, 22 nt, Human
cucuuuggucgcaucauccauu

SEQ ID NO: 594189 - RNA, 22 nt, Human
ccaggcugcuuuauuacucugu

SEQ ID NO: 594190 - RNA, 22 nt, Human
caggaaaauggaaucaccugua

SEQ ID NO: 594191 - RNA, 22 nt, Human
uuaaagcuggcguuacaguuug

SEQ ID NO: 594192 - RNA, 22 nt, Human
aaaugucagaggaacauauuga

SEQ ID NO: 594193 - RNA, 22 nt, Human
uaugugcaugcugacuugagga

SEQ ID NO: 594194 - RNA, 22 nt, Human
cuucacagccaacaugggcaca

SEQ ID NO: 594195 - RNA, 22 nt, Human
ucacagcuguuuuguccauuaa

SEQ ID NO: 594196 - RNA, 22 nt, Human
agcagggcagugaucagaaagg

SEQ ID NO: 594197 - RNA, 22 nt, Human
uccuccagugguacuggccaau

SEQ ID NO: 594198 - RNA, 22 nt, Human
ccuuggugcucugcugggaugg

SEQ ID NO: 594199 - RNA, 22 nt, Human
augaggcagucuggccugaggg

SEQ ID NO: 594200 - RNA, 22 nt, Human
acucauuugcaugaugugcuau

SEQ ID NO: 594201 - RNA, 22 nt, Human
ccucucuguaagggucccuccc

SEQ ID NO: 594202 - RNA, 22 nt, Human
aacuguaaggcuuagaacagca

SEQ ID NO: 594203 - RNA, 22 nt, Human
ggccggccuuugcgagcauucu

SEQ ID NO: 594204 - RNA, 22 nt, Human
gcugggcccagaucccaggauc

SEQ ID NO: 594205 - RNA, 22 nt, Human
uagugugucccuggggaguguu

SEQ ID NO: 594206 - RNA, 22 nt, Human
aaacaucuucucuugauucuuu

SEQ ID NO: 594207 - RNA, 22 nt, Human
ugaagaauguugcagugagcau

SEQ ID NO: 594208 - RNA, 22 nt, Human
aguuagaauauaauuauguuaa

SEQ ID NO: 594209 - RNA, 22 nt, Human
cagacagggcccugugauggua

SEQ ID NO: 594210 - RNA, 22 nt, Human
aagggaggggauguaagccugg

SEQ ID NO: 594211 - RNA, 22 nt, Human
uauuuuguauuuaugcaagaaa

SEQ ID NO: 594212 - RNA, 22 nt, Human
gugaacagacuguucucuacag

SEQ ID NO: 594213 - RNA, 22 nt, Human
ggccuggaagaggacagagaaa

SEQ ID NO: 594214 - RNA, 22 nt, Human
aaacuguaaagcaggugaguag

SEQ ID NO: 594215 - RNA, 22 nt, Human
ugcugcccguaccugugcacuu

SEQ ID NO: 594216 - RNA, 22 nt, Human
gcugcagcuuuaggauccagug

SEQ ID NO: 594217 - RNA, 22 nt, Human
ucugguccccauuccagguggg

SEQ ID NO: 594218 - RNA, 22 nt, Human
gaggugaguggggucuccaggg

SEQ ID NO: 594219 - RNA, 22 nt, Human
aguucuuauugaauagaaauca

SEQ ID NO: 594220 - RNA, 22 nt, Human
ugcccuggggagcccagccagg

SEQ ID NO: 594221 - RNA, 22 nt, Human
auugaagcauggagaugaggca

SEQ ID NO: 594222 - RNA, 21 nt, Human
uucuagaaaaguaugggacug

SEQ ID NO: 594223 - RNA, 22 nt, Human
uagggaugacgaaaggacagag

SEQ ID NO: 594224 - RNA, 22 nt, Human
acacaguaccccaaggcugggc

SEQ ID NO: 594225 - RNA, 22 nt, Human
aggcccaaaagaaaccacuggg

SEQ ID NO: 594226 - RNA, 22 nt, Human
cccagcauccucagggagcggg

SEQ ID NO: 594227 - RNA, 17 nt, Human
uacuagaauagagacag

SEQ ID NO: 594228 - RNA, 22 nt, Human
agagccucugucauggagagaa

SEQ ID NO: 594229 - RNA, 22 nt, Human
agagcuguauccccuuaccagu

SEQ ID NO: 594230 - RNA, 22 nt, Human
uaacauuucggugacaguggga

SEQ ID NO: 594231 - RNA, 22 nt, Human
caagucugucugcuccugugug

SEQ ID NO: 594232 - RNA, 22 nt, Human
ugaagguguaugcuguggguca

SEQ ID NO: 594233 - RNA, 21 nt, Human
aggcaucuaaagagaguagac

SEQ ID NO: 594234 - RNA, 22 nt, Human
aaaucagagugguuggucaucc

SEQ ID NO: 594235 - RNA, 21 nt, Human
uaguuucuacccaguuaaugg

SEQ ID NO: 594236 - RNA, 22 nt, Human
gaacagugccagcacacaauaa

SEQ ID NO: 594237 - RNA, 22 nt, Human
auuuauugaacacugacuaugu

SEQ ID NO: 594238 - RNA, 22 nt, Human
acaaugaaaaaauuuacugugg

SEQ ID NO: 594239 - RNA, 22 nt, Human
ucugaggaguugggccagugcu

SEQ ID NO: 594240 - RNA, 22 nt, Human
ggacacaguggaagacagcuug

SEQ ID NO: 594241 - RNA, 22 nt, Human
acuguauuggaaauauagcaaa

SEQ ID NO: 594242 - RNA, 19 nt, Human
gcaggcuugggucucccca

SEQ ID NO: 594243 - RNA, 22 nt, Human
agaacaauugccccaaagcuug

SEQ ID NO: 594244 - RNA, 22 nt, Human
ucuccuggcccugucgccaucu

SEQ ID NO: 594245 - RNA, 22 nt, Human
agagagcuguccugggacaccc

SEQ ID NO: 594246 - RNA, 22 nt, Human
uugauuuauagaauguucaagc

SEQ ID NO: 594247 - RNA, 22 nt, Human
acagagaccagcaucuucugcc

SEQ ID NO: 594248 - RNA, 17 nt, Human
ucuucucuuccagucuu

SEQ ID NO: 594249 - RNA, 22 nt, Human
uuccauuuggcacuucacugag

SEQ ID NO: 594250 - RNA, 22 nt, Human
ucugaagaauaggauguugugu

SEQ ID NO: 594251 - RNA, 18 nt, Human
aguaggcacugugggguu

SEQ ID NO: 594252 - RNA, 22 nt, Human
aagacuugaccagguugaaggc

SEQ ID NO: 594253 - RNA, 22 nt, Human
acgggugguaaugagaaaagga

SEQ ID NO: 594254 - RNA, 22 nt, Human
auaaagauuuuuaggcauuucu

SEQ ID NO: 594255 - RNA, 22 nt, Human
ugccaguguggaacuaggaaga

SEQ ID NO: 594256 - RNA, 19 nt, Human
uaugucccuuucccccauu

SEQ ID NO: 594257 - RNA, 21 nt, Human
caguccugcaaauaauucuuu

SEQ ID NO: 594258 - RNA, 22 nt, Human
aucucagaucuacagaucuaca

SEQ ID NO: 594259 - RNA, 22 nt, Human
ugugagcacuauggcuaggcuc

SEQ ID NO: 594260 - RNA, 22 nt, Human
uggggagugaugccucggauaa

SEQ ID NO: 594261 - RNA, 22 nt, Human
ucucacucauuuccuaggucuu

SEQ ID NO: 594262 - RNA, 22 nt, Human
uggcugggagcuggaacugggc

SEQ ID NO: 594263 - RNA, 23 nt, Human
ggcuccuggauucaaauccugcc

SEQ ID NO: 594264 - RNA, 22 nt, Human
augggaggcaaagaucgcagaa

SEQ ID NO: 594265 - RNA, 22 nt, Human
ggaugugaaucugggcugagac

SEQ ID NO: 594266 - RNA, 22 nt, Human
uccagcucaucugucuccauua

SEQ ID NO: 594267 - RNA, 22 nt, Human
cagccacuggugccaggcuguu

SEQ ID NO: 594268 - RNA, 22 nt, Human
acacaccaugauuuauuuaccc

SEQ ID NO: 594269 - RNA, 22 nt, Human
aaaaaugaauucuucaguggca

SEQ ID NO: 594270 - RNA, 22 nt, Human
uucaagauccagcacaacagug

SEQ ID NO: 594271 - RNA, 22 nt, Human
uggagcagugguccuggagaug

SEQ ID NO: 594272 - RNA, 22 nt, Human
auagaaaggucuuuggcagaca

SEQ ID NO: 594273 - RNA, 20 nt, Human
ggcaggacccgguagggagc

SEQ ID NO: 594274 - RNA, 22 nt, Human
uuacagguguggaaauugagua

SEQ ID NO: 594275 - RNA, 22 nt, Human
aauaacagugccaugaaauuga

SEQ ID NO: 594276 - RNA, 22 nt, Human
gguggcugcuuccucaagagga

SEQ ID NO: 594277 - RNA, 23 nt, Human
cccagcugcagacaagggagggu

SEQ ID NO: 594278 - RNA, 22 nt, Human
uuguguuuucuuauggcauaaa

SEQ ID NO: 594279 - RNA, 22 nt, Human
uggagacucugcaucugugaca

SEQ ID NO: 594280 - RNA, 22 nt, Human
ugacauuuaucaaagaaauggu

SEQ ID NO: 594281 - RNA, 22 nt, Human
uccucuucugcccaucagaggc

SEQ ID NO: 594282 - RNA, 22 nt, Human
gcuuucuguagguaguuacugu

SEQ ID NO: 594283 - RNA, 22 nt, Human
gcugggagaggcccugaaguga

SEQ ID NO: 594284 - RNA, 22 nt, Human
ugcaauaacccaguaucuguga

SEQ ID NO: 594285 - RNA, 23 nt, Human
agcuaacagaucgacaaaguaua

SEQ ID NO: 594286 - RNA, 22 nt, Human
gccagaggggcucgaaggcgcg

SEQ ID NO: 594287 - RNA, 22 nt, Human
ucccaucacuagcaucugcacc

SEQ ID NO: 594288 - RNA, 22 nt, Human
gaaucagacuacaaaugacccc

SEQ ID NO: 594289 - RNA, 22 nt, Human
aaaauugagagucuugugcaag

SEQ ID NO: 594290 - RNA, 22 nt, Human
ugacacagauuagagacauacc

SEQ ID NO: 594291 - RNA, 22 nt, Human
agggauggaucuuggcccugga

SEQ ID NO: 594292 - RNA, 22 nt, Human
acacaggcauagccauacaugu

SEQ ID NO: 594293 - RNA, 22 nt, Human
auaugacauaaaaucauuuuug

SEQ ID NO: 594294 - RNA, 22 nt, Human
ugcauaaaacaugauuucugcu

SEQ ID NO: 594295 - RNA, 19 nt, Human
cugaaaaacauucucagga

SEQ ID NO: 594296 - RNA, 23 nt, Human
ccacagagcugccaauuccugug

SEQ ID NO: 594297 - RNA, 22 nt, Human
accagggcccgggagagcucuc

SEQ ID NO: 594298 - RNA, 22 nt, Human
ggacauuuagaacagaguauuu

SEQ ID NO: 594299 - RNA, 19 nt, Human
cauauuuuugggcuggcau

SEQ ID NO: 594300 - RNA, 22 nt, Human
aggggugaaggcccgauaggag

SEQ ID NO: 594301 - RNA, 22 nt, Human
ggccagcuggaugugggugacg

SEQ ID NO: 594302 - RNA, 22 nt, Human
caugcaguugaagcacagagag

SEQ ID NO: 594303 - RNA, 22 nt, Human
augaggucauccuggaguaagg

SEQ ID NO: 594304 - RNA, 22 nt, Human
ucuuguuuggauuuugggcagu

SEQ ID NO: 594305 - RNA, 22 nt, Human
aaccagcuccagccuccauuca

SEQ ID NO: 594306 - RNA, 22 nt, Human
gccuuccaccuaggccucugcu

SEQ ID NO: 594307 - RNA, 22 nt, Human
aaaacacaagaagcaggguaca

SEQ ID NO: 594308 - RNA, 22 nt, Human
gagcucaguguagucauggcuu

SEQ ID NO: 594309 - RNA, 20 nt, Human
cuugccaguucccuggcaga

SEQ ID NO: 594310 - RNA, 22 nt, Human
agaguucugaauuuuauucucu

SEQ ID NO: 594311 - RNA, 22 nt, Human
ggagaggagcuauugggggcuc

SEQ ID NO: 594312 - RNA, 22 nt, Human
ccucugugugaugcgcaaagua

SEQ ID NO: 594313 - RNA, 22 nt, Human
gugcugagcacaccuuggagca

SEQ ID NO: 594314 - RNA, 22 nt, Human
ugggauaguagcugagagacaa

SEQ ID NO: 594315 - RNA, 22 nt, Human
gccucugauggaggccagcgcu

SEQ ID NO: 594316 - RNA, 22 nt, Human
cacacaugaaguugcugagcua

SEQ ID NO: 594317 - RNA, 22 nt, Human
ggcacagagcuccagccuuggc

SEQ ID NO: 594318 - RNA, 22 nt, Human
aagaaagcugaauauucugugu

SEQ ID NO: 594319 - RNA, 22 nt, Human
uguuuaagcugaugagguaucg

SEQ ID NO: 594320 - RNA, 22 nt, Human
cacugcuucagucagagaaauu

SEQ ID NO: 594321 - RNA, 22 nt, Human
uuacaugguaaacacucuuuua

SEQ ID NO: 594322 - RNA, 22 nt, Human
uccuugaaugaauguucucucc

SEQ ID NO: 594323 - RNA, 22 nt, Human
uggagagcgugcuuagcacucu

SEQ ID NO: 594324 - RNA, 22 nt, Human
uagcaaagcccuugcuguguaa

SEQ ID NO: 594325 - RNA, 22 nt, Human
guauuucccugaguucugugag

SEQ ID NO: 594326 - RNA, 22 nt, Human
cuggggagugaagguaauuaca

SEQ ID NO: 594327 - RNA, 22 nt, Human
ggaggugggauuaggaccuaaa

SEQ ID NO: 594328 - RNA, 22 nt, Human
uuccuagggcagagccgcuggg

SEQ ID NO: 594329 - RNA, 22 nt, Human
cugcugggcuccucaugugacu

SEQ ID NO: 594330 - RNA, 22 nt, Human
cguuuucuucacuuugcaaguu

SEQ ID NO: 594331 - RNA, 22 nt, Human
uaaaugcucagaccuuauucca

SEQ ID NO: 594332 - RNA, 22 nt, Human
agggcccaguggagagcugagc

SEQ ID NO: 594333 - RNA, 22 nt, Human
gcucacugccauucucuagaug

SEQ ID NO: 594334 - RNA, 22 nt, Human
ucugaaauuguuaguaaaaaug

SEQ ID NO: 594335 - RNA, 22 nt, Human
cacugcucgcugcagcauggcc

SEQ ID NO: 594336 - RNA, 22 nt, Human
cagaaauaucaccuggacucua

SEQ ID NO: 594337 - RNA, 22 nt, Human
aaaguguuaugagaacuaagug

SEQ ID NO: 594338 - RNA, 22 nt, Human
gaguccaggcuguugcucaucu

SEQ ID NO: 594339 - RNA, 23 nt, Human
ccaggcucuuucaccugcuauuc

SEQ ID NO: 594340 - RNA, 22 nt, Human
aucaagaauguucauucuucua

SEQ ID NO: 594341 - RNA, 22 nt, Human
gcaugcacacacuuucucacua

SEQ ID NO: 594342 - RNA, 22 nt, Human
gcagcccugcaggcagcuccag

SEQ ID NO: 594343 - RNA, 22 nt, Human
gaggccagaagugccucgggcu

SEQ ID NO: 594344 - RNA, 22 nt, Human
gaggggccuggcgaggacaugu

SEQ ID NO: 594345 - RNA, 22 nt, Human
gucuuucuaugcauagagcaga

SEQ ID NO: 594346 - RNA, 20 nt, Human
cugaagagacuggaggggca

SEQ ID NO: 594347 - RNA, 22 nt, Human
uaauuauagcauuggaguggcc

SEQ ID NO: 594348 - RNA, 22 nt, Human
aucccacaccccuacaacauau

SEQ ID NO: 594349 - RNA, 22 nt, Human
ugcccaccuaacaguguuugga

SEQ ID NO: 594350 - RNA, 22 nt, Human
ccuaaguaaguugacuuucaga

SEQ ID NO: 594351 - RNA, 22 nt, Human
ucuccuggaagaauaccacacu

SEQ ID NO: 594352 - RNA, 22 nt, Human
uugcagaauacuuauucuguau

SEQ ID NO: 594353 - RNA, 22 nt, Human
acaagcaucagguucagcaaua

SEQ ID NO: 594354 - RNA, 22 nt, Human
ugucccagucaaggcugucauc

SEQ ID NO: 594355 - RNA, 22 nt, Human
caggucuggguugauggccugg

SEQ ID NO: 594356 - RNA, 22 nt, Human
uccucacagaguggcaggcaau

SEQ ID NO: 594357 - RNA, 22 nt, Human
ucagaaaagaccacauuauucu

SEQ ID NO: 594358 - RNA, 22 nt, Human
ccuuucucuaucgacccaucgc

SEQ ID NO: 594359 - RNA, 20 nt, Human
auaacaaggcucugcaagcu

SEQ ID NO: 594360 - RNA, 22 nt, Human
gggggcugaggcuguucugagg

SEQ ID NO: 594361 - RNA, 22 nt, Human
cuggacaggcuggggacugcaa

SEQ ID NO: 594362 - RNA, 22 nt, Human
aaguuguuguugagguggguaa

SEQ ID NO: 594363 - RNA, 22 nt, Human
cagguaaagcuucaaaucacuu

SEQ ID NO: 594364 - RNA, 22 nt, Human
ccugcccagcuucaccucaggc

SEQ ID NO: 594365 - RNA, 22 nt, Human
ugggacuucaaugcaaugaggu

SEQ ID NO: 594366 - RNA, 22 nt, Human
ggcugcugcuguguaggccugu

SEQ ID NO: 594367 - RNA, 22 nt, Human
cugaaaauguuacacaggaaga

SEQ ID NO: 594368 - RNA, 22 nt, Human
agcugggaagaguuuucugcag

SEQ ID NO: 594369 - RNA, 22 nt, Human
cauuauggcagccaggauauug

SEQ ID NO: 594370 - RNA, 22 nt, Human
aauucaacagucaguuaucuca

SEQ ID NO: 594371 - RNA, 22 nt, Human
ugaacagacugaccucugaccu

SEQ ID NO: 594372 - RNA, 22 nt, Human
aaugcaccuuggcagggauuca

SEQ ID NO: 594373 - RNA, 21 nt, Human
gcuugguuuugguuacuugcc

SEQ ID NO: 594374 - RNA, 21 nt, Human
cagaggcugagagggcaaucu

SEQ ID NO: 594375 - RNA, 18 nt, Human
ugaggaaggggaaguauu

SEQ ID NO: 594376 - RNA, 22 nt, Human
cucaggcugucuaauggauuag

SEQ ID NO: 594377 - RNA, 21 nt, Human
ccagggauguugaacugaaag

SEQ ID NO: 594378 - RNA, 22 nt, Human
uuagaaucagguguuauaauca

SEQ ID NO: 594379 - RNA, 22 nt, Human
aauuugaugaguuuguaagucu

SEQ ID NO: 594380 - RNA, 22 nt, Human
uccauauacaacuuaaucuuua

SEQ ID NO: 594381 - RNA, 22 nt, Human
ucggagcuguagaugaaacccu

SEQ ID NO: 594382 - RNA, 22 nt, Human
uuuaagguggacaucuaaguca

SEQ ID NO: 594383 - RNA, 21 nt, Human
ucacugaagccuaagauguuu

SEQ ID NO: 594384 - RNA, 22 nt, Human
aggggagccagggcugcgaguu

SEQ ID NO: 594385 - RNA, 22 nt, Human
uccagaaaaaguaauuuauuug

SEQ ID NO: 594386 - RNA, 22 nt, Human
gcucuccugugcagaugcugcu

SEQ ID NO: 594387 - RNA, 22 nt, Human
gaaccaugagaaauugcuauuu

SEQ ID NO: 594388 - RNA, 22 nt, Human
cugggcucagugucucacuccu

SEQ ID NO: 594389 - RNA, 22 nt, Human
uaaaagagaauggauaacagag

SEQ ID NO: 594390 - RNA, 21 nt, Human
cugauaauuguuaaauuauuu

SEQ ID NO: 594391 - RNA, 22 nt, Human
gaaguuauuuuaccuguuaaag

SEQ ID NO: 594392 - RNA, 22 nt, Human
agcuucuugacggauguucugg

SEQ ID NO: 594393 - RNA, 22 nt, Human
cuucugggcauucagcugcaca

SEQ ID NO: 594394 - RNA, 21 nt, Human
ucauggaaguaacaaacauau

SEQ ID NO: 594395 - RNA, 22 nt, Human
gggagcaggagccugccugcca

SEQ ID NO: 594396 - RNA, 22 nt, Human
auuuucuucucucccuggcugc

SEQ ID NO: 594397 - RNA, 22 nt, Human
aaagagaaacuuagaagccuga

SEQ ID NO: 594398 - RNA, 22 nt, Human
ggaggaagagguuguucucuca

SEQ ID NO: 594399 - RNA, 22 nt, Human
auguuuuacccuuugcacaaac

SEQ ID NO: 594400 - RNA, 22 nt, Human
acuacagucccucauauguugg

SEQ ID NO: 594401 - RNA, 22 nt, Human
gaagacaucauggagaggauag

SEQ ID NO: 594402 - RNA, 22 nt, Human
uggcuggauuauuggcuaguac

SEQ ID NO: 594403 - RNA, 22 nt, Human
agccagccgggggaccacagug

SEQ ID NO: 594404 - RNA, 22 nt, Human
agcuggguguguaucagauaaa

SEQ ID NO: 594405 - RNA, 22 nt, Human
uucugaaaccuucaguaugaag

SEQ ID NO: 594406 - RNA, 22 nt, Human
ugcuccagccuaugcucuccgg

SEQ ID NO: 594407 - RNA, 22 nt, Human
aggaaacuccccuacaucucaa

SEQ ID NO: 594408 - RNA, 22 nt, Human
ccuuggauuuugugcccacgcc

SEQ ID NO: 594409 - RNA, 22 nt, Human
acucagaagauauaaugacuca

SEQ ID NO: 594410 - RNA, 22 nt, Human
gagcuuuggggaagaauacaga

SEQ ID NO: 594411 - RNA, 22 nt, Human
uuugucaccaguggcuuuggua

SEQ ID NO: 594412 - RNA, 21 nt, Human
aacuacaguuguuccuucauu

SEQ ID NO: 594413 - RNA, 22 nt, Human
caggcccugggcaggaucagcc

SEQ ID NO: 594414 - RNA, 19 nt, Human
gucucuggauuucaggucc

SEQ ID NO: 594415 - RNA, 22 nt, Human
auauauuuuuugagacagaguc

SEQ ID NO: 594416 - RNA, 22 nt, Human
cugcagcuuucgcuccaucagc

SEQ ID NO: 594417 - RNA, 22 nt, Human
augggaggcagcagagcccagc

SEQ ID NO: 594418 - RNA, 22 nt, Human
gcugaggugaggcuggaaagga

SEQ ID NO: 594419 - RNA, 22 nt, Human
uacagcuugaugagagcgcgag

SEQ ID NO: 594420 - RNA, 23 nt, Human
aaaguugauuugcaguuuaagag

SEQ ID NO: 594421 - RNA, 22 nt, Human
cagcucugaugaaauguaccag

SEQ ID NO: 594422 - RNA, 22 nt, Human
aaauuuuguauucuaguucuag

SEQ ID NO: 594423 - RNA, 22 nt, Human
ggaggguuagcaaaggcacaga

SEQ ID NO: 594424 - RNA, 22 nt, Human
aggcuggucuguuggcauuuuu

SEQ ID NO: 594425 - RNA, 22 nt, Human
cuccugagcucugaggaagcuu

SEQ ID NO: 594426 - RNA, 22 nt, Human
uggggugacagugcagugguca

SEQ ID NO: 594427 - RNA, 22 nt, Human
guggcuauauuugaggauacgu

SEQ ID NO: 594428 - RNA, 22 nt, Human
gggcacagucuaaaguugggcc

SEQ ID NO: 594429 - RNA, 22 nt, Human
auuguuaauguugcacuaaggu

SEQ ID NO: 594430 - RNA, 22 nt, Human
auucugcaacuguuguuggugg

SEQ ID NO: 594431 - RNA, 19 nt, Human
agacacuggauggaaaaug

SEQ ID NO: 594432 - RNA, 22 nt, Human
gaagccuuugccuaaaacauua

SEQ ID NO: 594433 - RNA, 22 nt, Human
cugggcacugcagcaggcauca

SEQ ID NO: 594434 - RNA, 19 nt, Human
gcauuucaggcauguuugc

SEQ ID NO: 594435 - RNA, 22 nt, Human
ggaacauuuaaauucuuauuug

SEQ ID NO: 594436 - RNA, 22 nt, Human
gcuuuugugagauuaagcuacu

SEQ ID NO: 594437 - RNA, 22 nt, Human
cuguguuuugagauauuauuaa

SEQ ID NO: 594438 - RNA, 22 nt, Human
acaucucagaacugaguaaccg

SEQ ID NO: 594439 - RNA, 22 nt, Human
aggcuguccucucuugcucagu

SEQ ID NO: 594440 - RNA, 22 nt, Human
ugaaugaugcauuuguuuccca

SEQ ID NO: 594441 - RNA, 22 nt, Human
gaagcugagcugaggcauguug

SEQ ID NO: 594442 - RNA, 22 nt, Human
uacauacauauucauacaggug

SEQ ID NO: 594443 - RNA, 22 nt, Human
gugggagcugcggaggccuggg

SEQ ID NO: 594444 - RNA, 22 nt, Human
gugcugugcgcuuuuucuguau

SEQ ID NO: 594445 - RNA, 23 nt, Human
gagguacagcaccagugaauagg

SEQ ID NO: 594446 - RNA, 22 nt, Human
cugguuggugccacaugguggc

SEQ ID NO: 594447 - RNA, 22 nt, Human
auacaugaucacuguauuauaa

SEQ ID NO: 594448 - RNA, 22 nt, Human
ccuuagcaaauuggcaucuucu

SEQ ID NO: 594449 - RNA, 22 nt, Human
aacacaguuucugcauugguag

SEQ ID NO: 594450 - RNA, 22 nt, Human
agcagaugagccucaugacugg

SEQ ID NO: 594451 - RNA, 22 nt, Human
agggcugguauguccaugaaag

SEQ ID NO: 594452 - RNA, 22 nt, Human
aggcuaggguaacagauguggc

SEQ ID NO: 594453 - RNA, 22 nt, Human
cccugggacccgcugcagaggc

SEQ ID NO: 594454 - RNA, 22 nt, Human
gauucugagcugguguuuuacg

SEQ ID NO: 594455 - RNA, 22 nt, Human
cagggagggacaauugucaccu

SEQ ID NO: 594456 - RNA, 19 nt, Human
cccaggaagcggagguugc

SEQ ID NO: 594457 - RNA, 22 nt, Human
ugagauggagucuugcucuguu

SEQ ID NO: 594458 - RNA, 23 nt, Human
uggcucagggucucuuaugaagu

SEQ ID NO: 594459 - RNA, 22 nt, Human
agcacuuugagcagaugaagga

SEQ ID NO: 594460 - RNA, 22 nt, Human
agaaaugacacacaugagacau

SEQ ID NO: 594461 - RNA, 22 nt, Human
uucaacauuugauacaagucag

SEQ ID NO: 594462 - RNA, 22 nt, Human
acaguuuaugguguuuuauaua

SEQ ID NO: 594463 - RNA, 18 nt, Human
gacaccagccucugcccc

SEQ ID NO: 594464 - RNA, 22 nt, Human
ugcuucacaagaauucaggacc

SEQ ID NO: 594465 - RNA, 22 nt, Human
cccagaggguggagguugcagu

SEQ ID NO: 594466 - RNA, 22 nt, Human
agaagccauucucaguuccuga

SEQ ID NO: 594467 - RNA, 22 nt, Human
gguggggcuaggaccucaggau

SEQ ID NO: 594468 - RNA, 23 nt, Human
cuccccaguguccucaugcaucu

SEQ ID NO: 594469 - RNA, 22 nt, Human
ugggggcagccaggcugucaag

SEQ ID NO: 594470 - RNA, 22 nt, Human
aucugaaauagucuuaucugag

SEQ ID NO: 594471 - RNA, 22 nt, Human
uaguccagccuuggguguagcc

SEQ ID NO: 594472 - RNA, 22 nt, Human
ugcaggcucucugcugccagau

SEQ ID NO: 594473 - RNA, 22 nt, Human
cuggcugcaguagcaagagacu

SEQ ID NO: 594474 - RNA, 22 nt, Human
ucuguuuucauuugucuugaga

SEQ ID NO: 594475 - RNA, 22 nt, Human
aagcuuugcaaugcuucauuau

SEQ ID NO: 594476 - RNA, 22 nt, Human
cuggauguuuugcuaaggacuc

SEQ ID NO: 594477 - RNA, 22 nt, Human
caccagcuacucggguuuccug

SEQ ID NO: 594478 - RNA, 22 nt, Human
acaugcuuuaucggauugacac

SEQ ID NO: 594479 - RNA, 22 nt, Human
ugggccuguggcuuggcucuag

SEQ ID NO: 594480 - RNA, 22 nt, Human
cagcagccuggccccuccucgg

SEQ ID NO: 594481 - RNA, 22 nt, Human
ugcugcuuuuaguuggauagaa

SEQ ID NO: 594482 - RNA, 22 nt, Human
caggcagagacccucuccuaaa

SEQ ID NO: 594483 - RNA, 22 nt, Human
ggucuggaccauggacgccggg

SEQ ID NO: 594484 - RNA, 22 nt, Human
ugaggcuguucuaccagggcca

SEQ ID NO: 594485 - RNA, 22 nt, Human
ugaauguuugaugagaaauaga

SEQ ID NO: 594486 - RNA, 22 nt, Human
ugccccuucuacccgucucugu

SEQ ID NO: 594487 - RNA, 22 nt, Human
uaugcuuuaacccucuuauauu

SEQ ID NO: 594488 - RNA, 22 nt, Human
cauggcuuuccaguccuccacu

SEQ ID NO: 594489 - RNA, 22 nt, Human
gccuggagaggaagccggugga

SEQ ID NO: 594490 - RNA, 22 nt, Human
ggagaggcuuccagagucgugc

SEQ ID NO: 594491 - RNA, 22 nt, Human
aaguacaacgcauacagagaaa

SEQ ID NO: 594492 - RNA, 22 nt, Human
ucuccagguucagucgauggaa

SEQ ID NO: 594493 - RNA, 22 nt, Human
uggacaggauagugcaguacgc

SEQ ID NO: 594494 - RNA, 22 nt, Human
ucugcagacuugauaaccacug

SEQ ID NO: 594495 - RNA, 22 nt, Human
uuuuuauacuuugcucaagauu

SEQ ID NO: 594496 - RNA, 22 nt, Human
uaguagaauccaaaccaacagu

SEQ ID NO: 594497 - RNA, 22 nt, Human
aaaauauguauaacucuucugc

SEQ ID NO: 594498 - RNA, 22 nt, Human
cgcugcagaagcguguucagga

SEQ ID NO: 594499 - RNA, 23 nt, Human
acuugauuauuguugauagauuc

SEQ ID NO: 594500 - RNA, 22 nt, Human
cuggaggagagucugaaugaca

SEQ ID NO: 594501 - RNA, 22 nt, Human
uccccuccucuccugauauggg

SEQ ID NO: 594502 - RNA, 22 nt, Human
ucugaaagcccuaguuuguaau

SEQ ID NO: 594503 - RNA, 19 nt, Human
ucccaggaagcaaauguca

SEQ ID NO: 594504 - RNA, 22 nt, Human
acagaggucauggagaguucuc

SEQ ID NO: 594505 - RNA, 19 nt, Human
auccaggucauguaguucu

SEQ ID NO: 594506 - RNA, 22 nt, Human
ucccugugggaugaggacucug

SEQ ID NO: 594507 - RNA, 22 nt, Human
uugugucuaaauaaggagaccu

SEQ ID NO: 594508 - RNA, 22 nt, Human
gccacaggucggcuagaggguc

SEQ ID NO: 594509 - RNA, 23 nt, Human
ccaagacuguuaggaguggggag

SEQ ID NO: 594510 - RNA, 22 nt, Human
gcugugugccaggggaaggcug

SEQ ID NO: 594511 - RNA, 22 nt, Human
gacuuuaucuuguccuuccugc

SEQ ID NO: 594512 - RNA, 22 nt, Human
guggucagagaugacagugggu

SEQ ID NO: 594513 - RNA, 21 nt, Human
ucucuguauccauggguucca

SEQ ID NO: 594514 - RNA, 22 nt, Human
cugagcgcgggaccugaggcug

SEQ ID NO: 594515 - RNA, 22 nt, Human
aaauauaguaaaugcauaguuc

SEQ ID NO: 594516 - RNA, 22 nt, Human
cuuggaggaaaggcagggagac

SEQ ID NO: 594517 - RNA, 22 nt, Human
ucugggaacagccuggcugugu

SEQ ID NO: 594518 - RNA, 22 nt, Human
accagcucuggacaggcauuuc

SEQ ID NO: 594519 - RNA, 22 nt, Human
uggaacaaauuuuggggaccuu

SEQ ID NO: 594520 - RNA, 22 nt, Human
agaaugcauuuuguguagcuau

SEQ ID NO: 594521 - RNA, 22 nt, Human
aguguccccuacagaggcauuc

SEQ ID NO: 594522 - RNA, 22 nt, Human
augacaaaauucacagguguga

SEQ ID NO: 594523 - RNA, 22 nt, Human
agcugggcaaaaugugagguug

SEQ ID NO: 594524 - RNA, 22 nt, Human
cuuguauuaggaagaaugcuuu

SEQ ID NO: 594525 - RNA, 22 nt, Human
cuggggcucacuccagcccugg

SEQ ID NO: 594526 - RNA, 22 nt, Human
uuuuaugauugagcuggcuaca

SEQ ID NO: 594527 - RNA, 22 nt, Human
ugacauuuuaucaauaucacag

SEQ ID NO: 594528 - RNA, 22 nt, Human
uccaggcaucuguauuuuuuaa

SEQ ID NO: 594529 - RNA, 22 nt, Human
agaucaaagccaugagagauuu

SEQ ID NO: 594530 - RNA, 22 nt, Human
cccugggauugccuuggccuug

SEQ ID NO: 594531 - RNA, 22 nt, Human
ggggcagaaguagugccccuga

SEQ ID NO: 594532 - RNA, 22 nt, Human
auagaauucuuugaaauuuaug

SEQ ID NO: 594533 - RNA, 22 nt, Human
uggcucauucuuuagaauauac

SEQ ID NO: 594534 - RNA, 18 nt, Human
gagcugggagaaggaagg

SEQ ID NO: 594535 - RNA, 22 nt, Human
ucaggggacuuaggagagaagu

SEQ ID NO: 594536 - RNA, 22 nt, Human
acagagcaugauggaagaucga

SEQ ID NO: 594537 - RNA, 22 nt, Human
agggcugacagugaggagucaa

SEQ ID NO: 594538 - RNA, 22 nt, Human
ugcugaauaauaagauuacuca

SEQ ID NO: 594539 - RNA, 22 nt, Human
gccugccugcugucaucugccu

SEQ ID NO: 594540 - RNA, 22 nt, Human
cagguggcuucucccuaggcca

SEQ ID NO: 594541 - RNA, 22 nt, Human
cacagcaggugcuuaaugauua

SEQ ID NO: 594542 - RNA, 22 nt, Human
auacugaauuagguaaagcaua

SEQ ID NO: 594543 - RNA, 22 nt, Human
uaagcaguuuuucuuguauuaa

SEQ ID NO: 594544 - RNA, 22 nt, Human
ugcagguggcuccagggacugc

SEQ ID NO: 594545 - RNA, 22 nt, Human
gugucacaagagcccaggaaac

SEQ ID NO: 594546 - RNA, 22 nt, Human
uugcaggguccuguggcucucc

SEQ ID NO: 594547 - RNA, 22 nt, Human
ccaagcauuucuagccagucac

SEQ ID NO: 594548 - RNA, 22 nt, Human
ugcuggaggccugacuguguuu

SEQ ID NO: 594549 - RNA, 22 nt, Human
ucugcagaaggaaucagcugag

SEQ ID NO: 594550 - RNA, 21 nt, Human
ccauaauuuuguuucagaagu

SEQ ID NO: 594551 - RNA, 23 nt, Human
ucugagguccaccaguuugcaga

SEQ ID NO: 594552 - RNA, 22 nt, Human
auaaucugacaaagacuuaagc

SEQ ID NO: 594553 - RNA, 20 nt, Human
cucaguuuccucauggcuca

SEQ ID NO: 594554 - RNA, 22 nt, Human
cucuuacauucuuuuacuagca

SEQ ID NO: 594555 - RNA, 22 nt, Human
ucagaaagcuuuuacuuaaaca

SEQ ID NO: 594556 - RNA, 22 nt, Human
caggccaggcugcauuugcccc

SEQ ID NO: 594557 - RNA, 22 nt, Human
uaagcauauuccagucaugucc

SEQ ID NO: 594558 - RNA, 22 nt, Human
gggcuuggcacaugggcucagc

SEQ ID NO: 594559 - RNA, 22 nt, Human
cagcucuggcuuuggggagcuu

SEQ ID NO: 594560 - RNA, 22 nt, Human
cuugcugugugccaucagggcu

SEQ ID NO: 594561 - RNA, 22 nt, Human
cacccauuaaccaaagagugaa

SEQ ID NO: 594562 - RNA, 22 nt, Human
uuaccuuguaaaacauauuccu

SEQ ID NO: 594563 - RNA, 22 nt, Human
gcagagaagaugcccaggcuuc

SEQ ID NO: 594564 - RNA, 22 nt, Human
gaauaauugugaugcuugaagu

SEQ ID NO: 594565 - RNA, 22 nt, Human
uccaggcagggcagccaucaag

SEQ ID NO: 594566 - RNA, 22 nt, Human
ucagaaucgguggggccaggaa

SEQ ID NO: 594567 - RNA, 22 nt, Human
ucuucuggaugagagcggaggc

SEQ ID NO: 594568 - RNA, 22 nt, Human
aaauggcauagaggugaaggua

SEQ ID NO: 594569 - RNA, 22 nt, Human
cagacaguggacuugauaaagg

SEQ ID NO: 594570 - RNA, 22 nt, Human
cagaaaauaaaguuucuacgca

SEQ ID NO: 594571 - RNA, 22 nt, Human
uggcucagaagaaaagguaaac

SEQ ID NO: 594572 - RNA, 22 nt, Human
ucacugcuuucaaaaauuauug

SEQ ID NO: 594573 - RNA, 22 nt, Human
ucagugauuucuggggugaggg

SEQ ID NO: 594574 - RNA, 22 nt, Human
agcaccaggcaguauaucaaag

SEQ ID NO: 594575 - RNA, 22 nt, Human
uuugucuucccccuuuaaucag

SEQ ID NO: 594576 - RNA, 22 nt, Human
cccagcauuucugggcugcacu

SEQ ID NO: 594577 - RNA, 22 nt, Human
gaauacacgaaggcaagagucc

SEQ ID NO: 594578 - RNA, 22 nt, Human
cucuccagucauauucucaguc

SEQ ID NO: 594579 - RNA, 22 nt, Human
ccaggugucuguggccagcccu

SEQ ID NO: 594580 - RNA, 22 nt, Human
gaaacaaucaucaugugauuug

SEQ ID NO: 594581 - RNA, 18 nt, Human
agcugaggggacugaaga

SEQ ID NO: 594582 - RNA, 22 nt, Human
uaggcuggggguaggaauugag

SEQ ID NO: 594583 - RNA, 22 nt, Human
acagagcaguaagaacacagcu

SEQ ID NO: 594584 - RNA, 22 nt, Human
cugcccacaguucucugccaug

SEQ ID NO: 594585 - RNA, 22 nt, Human
uuucauuacguguuugacuugu

SEQ ID NO: 594586 - RNA, 22 nt, Human
ugcaggugugggcaggggagca

SEQ ID NO: 594587 - RNA, 22 nt, Human
ugcagcuguuacggacccuguc

SEQ ID NO: 594588 - RNA, 22 nt, Human
gaggagaaauuuggggaccuga

SEQ ID NO: 594589 - RNA, 22 nt, Human
uaaauguauaggcacuaaaccu

SEQ ID NO: 594590 - RNA, 22 nt, Human
caaagguuaugaaccacuugua

SEQ ID NO: 594591 - RNA, 23 nt, Human
aaaugucuucuagcucuugagaa

SEQ ID NO: 594592 - RNA, 22 nt, Human
agccaaaacaugugaguuuuga

SEQ ID NO: 594593 - RNA, 22 nt, Human
acuuacaagcuagggaagcuug

SEQ ID NO: 594594 - RNA, 17 nt, Human
cgugagcagcaggugcc

SEQ ID NO: 594595 - RNA, 22 nt, Human
ugccagcacuucuggcugucug

SEQ ID NO: 594596 - RNA, 22 nt, Human
cacugaaaucgaaaaauguagg

SEQ ID NO: 594597 - RNA, 22 nt, Human
uguuuagaucucauucuuccca

SEQ ID NO: 594598 - RNA, 22 nt, Human
cagaggccccauuggcugugcg

SEQ ID NO: 594599 - RNA, 20 nt, Human
ccugggcuccaggagccccg

SEQ ID NO: 594600 - RNA, 22 nt, Human
uuugcuauaaaagggucacacg

SEQ ID NO: 594601 - RNA, 22 nt, Human
gcacagagacaguccugagauc

SEQ ID NO: 594602 - RNA, 23 nt, Human
ugcucccaggugacgcugcuguu

SEQ ID NO: 594603 - RNA, 22 nt, Human
ucagccucagguguucagauuu

SEQ ID NO: 594604 - RNA, 22 nt, Human
gugcugagugcagagugcagag

SEQ ID NO: 594605 - RNA, 22 nt, Human
gugugcagugagcaaaagaucu

SEQ ID NO: 594606 - RNA, 22 nt, Human
aggccuggcuuugguuugcuga

SEQ ID NO: 594607 - RNA, 22 nt, Human
gcauuagaaacuauugcugcaa

SEQ ID NO: 594608 - RNA, 22 nt, Human
acuuuggggaacuuuucuccuc

SEQ ID NO: 594609 - RNA, 22 nt, Human
aaauacuggcaagugcuaauuc

SEQ ID NO: 594610 - RNA, 22 nt, Human
uacaagaaacuacaugaaugca

SEQ ID NO: 594611 - RNA, 22 nt, Human
cagcugcugcccuuggcugcag

SEQ ID NO: 594612 - RNA, 20 nt, Human
augaggccagcagggcucag

SEQ ID NO: 594613 - RNA, 22 nt, Human
caucuuucaguuuauaagucug

SEQ ID NO: 594614 - RNA, 22 nt, Human
aggcaugugacccuggacucag

SEQ ID NO: 594615 - RNA, 22 nt, Human
caccuugagggggaaaauaauc

SEQ ID NO: 594616 - RNA, 22 nt, Human
aaugaugaguucuaauagaccc

SEQ ID NO: 594617 - RNA, 22 nt, Human
agcuguuuuuccagucucugga

SEQ ID NO: 594618 - RNA, 22 nt, Human
uggaacacagugauugauagcg

SEQ ID NO: 594619 - RNA, 22 nt, Human
ggaaggcucuguuccuugacuu

SEQ ID NO: 594620 - RNA, 22 nt, Human
caaugcauacuucgaaauuuca

SEQ ID NO: 594621 - RNA, 22 nt, Human
uaguauaucuuuaguacauagu

SEQ ID NO: 594622 - RNA, 22 nt, Human
ggcacagagaggcccuggaagg

SEQ ID NO: 594623 - RNA, 22 nt, Human
ugucaguggucauaguagaaaa

SEQ ID NO: 594624 - RNA, 22 nt, Human
uacauuaucuuguuaucuuuca

SEQ ID NO: 594625 - RNA, 22 nt, Human
cuacucugaauugaagugauau

SEQ ID NO: 594626 - RNA, 22 nt, Human
ucuguuuuguaccagauacagc

SEQ ID NO: 594627 - RNA, 22 nt, Human
ucugauaaaugccaucuuuuug

SEQ ID NO: 594628 - RNA, 22 nt, Human
auuguauaagucuauuuacaau

SEQ ID NO: 594629 - RNA, 22 nt, Human
cugugugcaacuugcaguuuug

SEQ ID NO: 594630 - RNA, 22 nt, Human
acuguucugccaagaucaacgu

SEQ ID NO: 594631 - RNA, 20 nt, Human
cagugcuuccuccuuucuuu

SEQ ID NO: 594632 - RNA, 22 nt, Human
ucuuuacuggaauggaacuuuc

SEQ ID NO: 594633 - RNA, 20 nt, Human
ugcuccaggaacacuggccg

SEQ ID NO: 594634 - RNA, 22 nt, Human
aguuauuuacuccuuugucucu

SEQ ID NO: 594635 - RNA, 22 nt, Human
agcuucauaauuccuugacuca

SEQ ID NO: 594636 - RNA, 22 nt, Human
uguuucaaaauaacaagagggu

SEQ ID NO: 594637 - RNA, 22 nt, Human
gauacuuucucauuuacccaag

SEQ ID NO: 594638 - RNA, 22 nt, Human
gggucuggacggcugcaggaag

SEQ ID NO: 594639 - RNA, 22 nt, Human
acacagagguggccacucuuuu

SEQ ID NO: 594640 - RNA, 22 nt, Human
uguguucaagauuaguucuagu

SEQ ID NO: 594641 - RNA, 22 nt, Human
auacauguaacugcauuguaau

SEQ ID NO: 594642 - RNA, 22 nt, Human
cuggagcuggcccaggcuggcc

SEQ ID NO: 594643 - RNA, 22 nt, Human
gcuguucagggcacucaugggc

SEQ ID NO: 594644 - RNA, 22 nt, Human
aauaaagaauggaugagaucgu

SEQ ID NO: 594645 - RNA, 22 nt, Human
ccacuaguuuaauaccuuccuu

SEQ ID NO: 594646 - RNA, 22 nt, Human
cucugaaagacaagcucucauu

SEQ ID NO: 594647 - RNA, 22 nt, Human
cagcucugguccagggagggca

SEQ ID NO: 594648 - RNA, 22 nt, Human
cagcccuggcuagggcgagggc

SEQ ID NO: 594649 - RNA, 22 nt, Human
aggggaauggguagacuguuga

SEQ ID NO: 594650 - RNA, 22 nt, Human
ggcagcauuuagagcacagugu

SEQ ID NO: 594651 - RNA, 22 nt, Human
caccagcuaauuaaaacagcag

SEQ ID NO: 594652 - RNA, 22 nt, Human
acagcagcuaaccccugggcca

SEQ ID NO: 594653 - RNA, 22 nt, Human
uccucacagucaacacuuugag

SEQ ID NO: 594654 - RNA, 18 nt, Human
cugccccuucucugagau

SEQ ID NO: 594655 - RNA, 22 nt, Human
cagggagcuggugccagccgac

SEQ ID NO: 594656 - RNA, 22 nt, Human
agcauuaauaagaaauggcucc

SEQ ID NO: 594657 - RNA, 22 nt, Human
ucagccuggugauuccucuguc

SEQ ID NO: 594658 - RNA, 22 nt, Human
augggcugggaucugaguguca

SEQ ID NO: 594659 - RNA, 18 nt, Human
gccugccuagagcuugcc

SEQ ID NO: 594660 - RNA, 22 nt, Human
gugccugugcggacucagggaa

SEQ ID NO: 594661 - RNA, 22 nt, Human
aagauacugaugauguaggcua

SEQ ID NO: 594662 - RNA, 22 nt, Human
uucuguggcaguuugggaggug

SEQ ID NO: 594663 - RNA, 22 nt, Human
auugugcaggucaguuauugca

SEQ ID NO: 594664 - RNA, 22 nt, Human
auugucagcucgaaaugcauca

SEQ ID NO: 594665 - RNA, 22 nt, Human
gccuggggcaugcagcugauac

SEQ ID NO: 594666 - RNA, 22 nt, Human
cagaagagaugaaauaguauua

SEQ ID NO: 594667 - RNA, 22 nt, Human
cccagagggaagggaaugaggu

SEQ ID NO: 594668 - RNA, 22 nt, Human
cuccaugaauuugagcuuugug

SEQ ID NO: 594669 - RNA, 22 nt, Human
ugggaagggccugcccuuccuc

SEQ ID NO: 594670 - RNA, 22 nt, Human
gucuggaguggggccugagaau

SEQ ID NO: 594671 - RNA, 22 nt, Human
gggucuggcaugcugagaugga

SEQ ID NO: 594672 - RNA, 22 nt, Human
uacacugucagauuucgauugc

SEQ ID NO: 594673 - RNA, 22 nt, Human
guggggguggaaaggcaaguug

SEQ ID NO: 594674 - RNA, 22 nt, Human
uacauacagagaugcuaguuaa

SEQ ID NO: 594675 - RNA, 22 nt, Human
ccgggccucgggacaccgggua

SEQ ID NO: 594676 - RNA, 22 nt, Human
ccugccagcccgcguucaugcc

SEQ ID NO: 594677 - RNA, 22 nt, Human
uucaaauuugguaugcaagcca

SEQ ID NO: 594678 - RNA, 22 nt, Human
acagacauuuaauaaaugcuga

SEQ ID NO: 594679 - RNA, 22 nt, Human
gagaggucggggacacugcaaa

SEQ ID NO: 594680 - RNA, 22 nt, Human
ugaggcagggagaguggauaug

SEQ ID NO: 594681 - RNA, 22 nt, Human
uacacauaggucugaauaaaaa

SEQ ID NO: 594682 - RNA, 22 nt, Human
uauucacauguacauaugcuca

SEQ ID NO: 594683 - RNA, 20 nt, Human
agcccaggccugugugaguc

SEQ ID NO: 594684 - RNA, 22 nt, Human
cugcuggggucagagcacuggg

SEQ ID NO: 594685 - RNA, 22 nt, Human
ggggcuuuugcacgugggaggc

SEQ ID NO: 594686 - RNA, 22 nt, Human
ccaaggcagaagauggcucuug

SEQ ID NO: 594687 - RNA, 22 nt, Human
uuaaaugugauuucauuuaugu

SEQ ID NO: 594688 - RNA, 22 nt, Human
cccaggcuccugcuguguugac

SEQ ID NO: 594689 - RNA, 22 nt, Human
ggccucuggucaagacaagcau

SEQ ID NO: 594690 - RNA, 22 nt, Human
gccugagagacccauggggcaa

SEQ ID NO: 594691 - RNA, 22 nt, Human
uggaggcaguuuaagucugaga

SEQ ID NO: 594692 - RNA, 22 nt, Human
uggcugaggcuggagugcagug

SEQ ID NO: 594693 - RNA, 22 nt, Human
ucccucucccuauugccuggag

SEQ ID NO: 594694 - RNA, 22 nt, Human
auugcauuugucauuguugagg

SEQ ID NO: 594695 - RNA, 22 nt, Human
uaauguauaacaaauacucauc

SEQ ID NO: 594696 - RNA, 22 nt, Human
gcccaagagagcgaagguuggc

SEQ ID NO: 594697 - RNA, 17 nt, Human
ggccuguguggcugcag

SEQ ID NO: 594698 - RNA, 18 nt, Human
gggcucacacaggucauc

SEQ ID NO: 594699 - RNA, 22 nt, Human
aggccacaagaaaaugcuucau

SEQ ID NO: 594700 - RNA, 17 nt, Human
uauuagcuagcuuccag

SEQ ID NO: 594701 - RNA, 22 nt, Human
aaagaagguagggcuggugacu

SEQ ID NO: 594702 - RNA, 21 nt, Human
agacagagugcagucuacaua

SEQ ID NO: 594703 - RNA, 20 nt, Human
auaaaauaacugccacaaga

SEQ ID NO: 594704 - RNA, 22 nt, Human
gaggcagcucuucugaaugggg

SEQ ID NO: 594705 - RNA, 17 nt, Human
uggagcugcguguguuc

SEQ ID NO: 594706 - RNA, 18 nt, Human
uccagagcuggugcuucu

SEQ ID NO: 594707 - RNA, 22 nt, Human
cuaaggaaaaggauauauaugu

SEQ ID NO: 594708 - RNA, 22 nt, Human
cucugaaauuggcccucagcag

SEQ ID NO: 594709 - RNA, 22 nt, Human
auuuuucucuuuccacugagau

SEQ ID NO: 594710 - RNA, 22 nt, Human
cuccagggagcugcgggagcca

SEQ ID NO: 594711 - RNA, 22 nt, Human
gagggcugaugcuuacuuauuu

SEQ ID NO: 594712 - RNA, 22 nt, Human
cuuagcaugcaguguucugccc

SEQ ID NO: 594713 - RNA, 22 nt, Human
ucuccuggcauuugguugagua

SEQ ID NO: 594714 - RNA, 22 nt, Human
uagacagugagcuaugaguggu

SEQ ID NO: 594715 - RNA, 22 nt, Human
gggaagagggagcuggaaugau

SEQ ID NO: 594716 - RNA, 22 nt, Human
uccauuuucaucucauguauaa

SEQ ID NO: 594717 - RNA, 22 nt, Human
uucaguaucugcaaaaugggga

SEQ ID NO: 594718 - RNA, 22 nt, Human
ucugagguuauugucugccauu

SEQ ID NO: 594719 - RNA, 22 nt, Human
caugcagugaaauugauaucca

SEQ ID NO: 594720 - RNA, 22 nt, Human
gccugguggugugcucaagugg

SEQ ID NO: 594721 - RNA, 22 nt, Human
uccaucuggugagugaggagcc

SEQ ID NO: 594722 - RNA, 22 nt, Human
uauguucaugcuuaugcagaau

SEQ ID NO: 594723 - RNA, 22 nt, Human
acagccccccgcucaguuucca

SEQ ID NO: 594724 - RNA, 22 nt, Human
ugaggggcagagagguguccag

SEQ ID NO: 594725 - RNA, 22 nt, Human
agugcaauagcaaagaacaaca

SEQ ID NO: 594726 - RNA, 22 nt, Human
ucacagccuggucacucugccc

SEQ ID NO: 594727 - RNA, 22 nt, Human
uuuuaugagugucccucugugg

SEQ ID NO: 594728 - RNA, 22 nt, Human
gcaggggaguggaugauggauu

SEQ ID NO: 594729 - RNA, 21 nt, Human
caccuuauagauaaaauuaga

SEQ ID NO: 594730 - RNA, 22 nt, Human
aagaauaaauuaagauacuuag

SEQ ID NO: 594731 - RNA, 22 nt, Human
cccagcucucucaguucugcuu

SEQ ID NO: 594732 - RNA, 22 nt, Human
aguuccagugugagagaacaug

SEQ ID NO: 594733 - RNA, 22 nt, Human
cccagggcuuuucucacuagac

SEQ ID NO: 594734 - RNA, 22 nt, Human
acauuguucuacuucuaguuag

SEQ ID NO: 594735 - RNA, 22 nt, Human
agccccacacucucucugagaa

SEQ ID NO: 594736 - RNA, 22 nt, Human
uggcagagagacucuccuugau

SEQ ID NO: 594737 - RNA, 22 nt, Human
ggggggugacaaguagagguug

SEQ ID NO: 594738 - RNA, 22 nt, Human
acaguggagcucagaugaaaau

SEQ ID NO: 594739 - RNA, 22 nt, Human
aggcagcagucaugaggaaaga

SEQ ID NO: 594740 - RNA, 22 nt, Human
aggacagcauaugggaaccagu

SEQ ID NO: 594741 - RNA, 17 nt, Human
agcuucugcccuuucuu

SEQ ID NO: 594742 - RNA, 22 nt, Human
gcugaggagcgagaacucugcu

SEQ ID NO: 594743 - RNA, 22 nt, Human
aacaguuucuauguuagugguu

SEQ ID NO: 594744 - RNA, 22 nt, Human
uuacauaaaaguucacguaggc

SEQ ID NO: 594745 - RNA, 22 nt, Human
gucacugccucuuaacuuuuuc

SEQ ID NO: 594746 - RNA, 22 nt, Human
ugagggguugugagaaauguag

SEQ ID NO: 594747 - RNA, 22 nt, Human
cagcucugcuuccuuguacagg

SEQ ID NO: 594748 - RNA, 22 nt, Human
ugaggcucagagcaccugcucc

SEQ ID NO: 594749 - RNA, 22 nt, Human
uuucaaagaguuguaaauuacu

SEQ ID NO: 594750 - RNA, 22 nt, Human
gguggcauucagaagagcuggc

SEQ ID NO: 594751 - RNA, 21 nt, Human
ucauuuauugagaaaugacug

SEQ ID NO: 594752 - RNA, 22 nt, Human
aaacauuagacaccauaugcuc

SEQ ID NO: 594753 - RNA, 22 nt, Human
agcugaggcauggacaggcugc

SEQ ID NO: 594754 - RNA, 22 nt, Human
ccagaagcagagccugaggcag

SEQ ID NO: 594755 - RNA, 22 nt, Human
ggcagagcuuguuccuucuguu

SEQ ID NO: 594756 - RNA, 18 nt, Human
auccugggccagucuuuc

SEQ ID NO: 594757 - RNA, 21 nt, Human
uggcagaguugaguaguuaug

SEQ ID NO: 594758 - RNA, 22 nt, Human
guuguugaucacaugcauaucu

SEQ ID NO: 594759 - RNA, 22 nt, Human
ggucacugagcuguaauucugu

SEQ ID NO: 594760 - RNA, 22 nt, Human
uaacacuguccaaagaauucca

SEQ ID NO: 594761 - RNA, 22 nt, Human
guuuacauguaauguguuauug

SEQ ID NO: 594762 - RNA, 22 nt, Human
acacuuggagcaacacuuaugg

SEQ ID NO: 594763 - RNA, 22 nt, Human
guaguaaagcagguuuugcugu

SEQ ID NO: 594764 - RNA, 22 nt, Human
ugaggugguccaaagacuguuu

SEQ ID NO: 594765 - RNA, 22 nt, Human
uggaaggcaggaccugccuugg

SEQ ID NO: 594766 - RNA, 23 nt, Human
uacauuguggauggaguccuggg

SEQ ID NO: 594767 - RNA, 22 nt, Human
gcuuccugucccucagccauga

SEQ ID NO: 594768 - RNA, 22 nt, Human
gauugucugugaucaugagcaa

SEQ ID NO: 594769 - RNA, 22 nt, Human
ucagcucuacacacaccugugu

SEQ ID NO: 594770 - RNA, 18 nt, Human
uggcaggggcaguacgcc

SEQ ID NO: 594771 - RNA, 22 nt, Human
caugcaguauucaggacaguuc

SEQ ID NO: 594772 - RNA, 22 nt, Human
cagacacuaggugacagagugc

SEQ ID NO: 594773 - RNA, 22 nt, Human
ugaggccaugcccgugccggcc

SEQ ID NO: 594774 - RNA, 22 nt, Human
agcugucugucuccugaggaga

SEQ ID NO: 594775 - RNA, 22 nt, Human
gaacaauagugguaacaaagcc

SEQ ID NO: 594776 - RNA, 22 nt, Human
ucccugggagaugaugaugagg

SEQ ID NO: 594777 - RNA, 22 nt, Human
gugcugagaacaaaaguggaca

SEQ ID NO: 594778 - RNA, 22 nt, Human
uggagagucucaaggcaggaaa

SEQ ID NO: 594779 - RNA, 22 nt, Human
cagauggcugccaagaugggcu

SEQ ID NO: 594780 - RNA, 22 nt, Human
gccagcaaagcaaguugucagc

SEQ ID NO: 594781 - RNA, 22 nt, Human
ugaaggcauaaaucuugggaac

SEQ ID NO: 594782 - RNA, 22 nt, Human
uaguacagagacacuggaggaa

SEQ ID NO: 594783 - RNA, 22 nt, Human
cuuuucuggaaucaucucuaac

SEQ ID NO: 594784 - RNA, 22 nt, Human
uuccagucaaguaagaauaucu

SEQ ID NO: 594785 - RNA, 22 nt, Human
cugagcugguguuucaggguca

SEQ ID NO: 594786 - RNA, 22 nt, Human
uuuauuaagaugcgaaugcuga

SEQ ID NO: 594787 - RNA, 20 nt, Human
cuccaaggcuugcaggaggc

SEQ ID NO: 594788 - RNA, 22 nt, Human
acacacagguaaaggagccugg

SEQ ID NO: 594789 - RNA, 22 nt, Human
cucugggcuuguugaccugcac

SEQ ID NO: 594790 - RNA, 22 nt, Human
cuggguagggcaaggaacuggc

SEQ ID NO: 594791 - RNA, 22 nt, Human
acagagacuaagcuuuucauca

SEQ ID NO: 594792 - RNA, 18 nt, Human
ugcucuggucucacuugg

SEQ ID NO: 594793 - RNA, 22 nt, Human
cacccaggcagguggcugagaa

SEQ ID NO: 594794 - RNA, 23 nt, Human
uguaacaauuucauauacaugca

SEQ ID NO: 594795 - RNA, 22 nt, Human
ucaggcugauuucuuuugaggg

SEQ ID NO: 594796 - RNA, 22 nt, Human
gagaaaccgauucugcauguca

SEQ ID NO: 594797 - RNA, 22 nt, Human
caggccuccacuccacgcagac

SEQ ID NO: 594798 - RNA, 22 nt, Human
ccagggugggguccaggaacca

SEQ ID NO: 594799 - RNA, 22 nt, Human
uacaaugcuguuuguuucuacu

SEQ ID NO: 594800 - RNA, 22 nt, Human
uuaagacaguguauuuguuuuc

SEQ ID NO: 594801 - RNA, 22 nt, Human
cuaaauuaucaugagaauuaug

SEQ ID NO: 594802 - RNA, 22 nt, Human
ugccugggcucaccgccucuuu

SEQ ID NO: 594803 - RNA, 22 nt, Human
acaguguuuuagaaaagcuuga

SEQ ID NO: 594804 - RNA, 22 nt, Human
uuuuuuguuggguagaacggaa

SEQ ID NO: 594805 - RNA, 22 nt, Human
gcuguguaucagaugccacggg

SEQ ID NO: 594806 - RNA, 22 nt, Human
agagcccugcaguucuucagga

SEQ ID NO: 594807 - RNA, 22 nt, Human
aagaaaagaaaccugaggcuuu

SEQ ID NO: 594808 - RNA, 22 nt, Human
ggagaaggcacacccaccucug

SEQ ID NO: 594809 - RNA, 22 nt, Human
ggccagcugcucagugucucug

SEQ ID NO: 594810 - RNA, 22 nt, Human
agugcaggagccuggccagagc

SEQ ID NO: 594811 - RNA, 23 nt, Human
ugggcaucuccucugugccaggc

SEQ ID NO: 594812 - RNA, 23 nt, Human
ucucccugagguuguuagcauua

SEQ ID NO: 594813 - RNA, 22 nt, Human
uucucagaggagucgggagcug

SEQ ID NO: 594814 - RNA, 22 nt, Human
acuggagugaguaucgaugaac

SEQ ID NO: 594815 - RNA, 22 nt, Human
cugcucuguucccccaucaucu

SEQ ID NO: 594816 - RNA, 22 nt, Human
ccaggcuguaaacaccuucaaa

SEQ ID NO: 594817 - RNA, 22 nt, Human
uaaccuacaugagaacuuuaaa

SEQ ID NO: 594818 - RNA, 22 nt, Human
agugggggcuggcucugucugu

SEQ ID NO: 594819 - RNA, 22 nt, Human
uucuauguucuaagucucaagg

SEQ ID NO: 594820 - RNA, 22 nt, Human
gcauugauucugaagugaaaug

SEQ ID NO: 594821 - RNA, 22 nt, Human
aucagaaaggugggcaagcaga

SEQ ID NO: 594822 - RNA, 22 nt, Human
cauguuuucuaggcuuucacaa

SEQ ID NO: 594823 - RNA, 22 nt, Human
uuucacauguggaaugccaggu

SEQ ID NO: 594824 - RNA, 22 nt, Human
aggcaaggugcucuugcucuau

SEQ ID NO: 594825 - RNA, 22 nt, Human
cuguauaaccccaugcgacugu

SEQ ID NO: 594826 - RNA, 22 nt, Human
ggggcugggauuugaacccagg

SEQ ID NO: 594827 - RNA, 22 nt, Human
gaggggcuguggagcucucugg

SEQ ID NO: 594828 - RNA, 22 nt, Human
ccuccagccuuccugaagagcc

SEQ ID NO: 594829 - RNA, 22 nt, Human
ucagaaauacaaaacacuuacu

SEQ ID NO: 594830 - RNA, 22 nt, Human
aaugaugagaacuggaguaauu

SEQ ID NO: 594831 - RNA, 22 nt, Human
uguuuuaugagccauauaaccu

SEQ ID NO: 594832 - RNA, 22 nt, Human
ggcuccucucuggccgcucccg

SEQ ID NO: 594833 - RNA, 22 nt, Human
acagggcucccagcaggucugu

SEQ ID NO: 594834 - RNA, 22 nt, Human
gggaaggcaccaugguguucca

SEQ ID NO: 594835 - RNA, 22 nt, Human
cagacacugcagcagucuccca

SEQ ID NO: 594836 - RNA, 22 nt, Human
uucaacaaacuguucacgaaug

SEQ ID NO: 594837 - RNA, 22 nt, Human
cuucugagcagaccuccugggg

SEQ ID NO: 594838 - RNA, 22 nt, Human
cccagaggcugaguugggagca

SEQ ID NO: 594839 - RNA, 22 nt, Human
ggaggccaauuuucuaacugca

SEQ ID NO: 594840 - RNA, 22 nt, Human
aggcucugagucuggugucugc

SEQ ID NO: 594841 - RNA, 22 nt, Human
acauacauauguuuaaaugcau

SEQ ID NO: 594842 - RNA, 22 nt, Human
ucagaggauagaaauacuuauu

SEQ ID NO: 594843 - RNA, 23 nt, Human
agguucucuuaucaucucugccc

SEQ ID NO: 594844 - RNA, 22 nt, Human
gauaauuuugguuccagguugg

SEQ ID NO: 594845 - RNA, 20 nt, Human
cugagguagggcagaucacc

SEQ ID NO: 594846 - RNA, 22 nt, Human
auacaguauuaccuguucagga

SEQ ID NO: 594847 - RNA, 22 nt, Human
ucuggggagugccuaaguggaa

SEQ ID NO: 594848 - RNA, 22 nt, Human
uccaggagguaugaguggcccc

SEQ ID NO: 594849 - RNA, 22 nt, Human
aggugggcauagcuagaauauu

SEQ ID NO: 594850 - RNA, 22 nt, Human
agaucaguuagauagcuugaug

SEQ ID NO: 594851 - RNA, 22 nt, Human
auauaauuguucugaaguguuu

SEQ ID NO: 594852 - RNA, 22 nt, Human
uuccucuguaugcuuugcugcu

SEQ ID NO: 594853 - RNA, 22 nt, Human
aggcaguggagcuggaauaggc

SEQ ID NO: 594854 - RNA, 22 nt, Human
ugaaaugauaucugauaacaaa

SEQ ID NO: 594855 - RNA, 22 nt, Human
gcucacuuaauuucaugcuaca

SEQ ID NO: 594856 - RNA, 23 nt, Human
uggacaggacccccuucggaccc

SEQ ID NO: 594857 - RNA, 22 nt, Human
ugcccaggcuucacccucagag

SEQ ID NO: 594858 - RNA, 22 nt, Human
guuuccacuugagaggacuccu

SEQ ID NO: 594859 - RNA, 22 nt, Human
acucuuauucccucagaaauau

SEQ ID NO: 594860 - RNA, 22 nt, Human
agguggcagaggacuccuccug

SEQ ID NO: 594861 - RNA, 22 nt, Human
uuaaacacacugagauuuaugu

SEQ ID NO: 594862 - RNA, 22 nt, Human
uuccugaagucaaagaucuaaa

SEQ ID NO: 594863 - RNA, 22 nt, Human
guccuggauugaacauaggcag

SEQ ID NO: 594864 - RNA, 22 nt, Human
aaauuucuaagcagccacuucc

SEQ ID NO: 594865 - RNA, 22 nt, Human
guuuguuuguagggaagccgug

SEQ ID NO: 594866 - RNA, 22 nt, Human
ccugguguugugaaguagccgu

SEQ ID NO: 594867 - RNA, 22 nt, Human
cuacccaggcuuagagggcugg

SEQ ID NO: 594868 - RNA, 22 nt, Human
uacugucuggguucccaagcaa

SEQ ID NO: 594869 - RNA, 16 nt, Human
ucuuccuuuugauuuu

SEQ ID NO: 594870 - RNA, 22 nt, Human
ggaagacagaagccuacagcuu

SEQ ID NO: 594871 - RNA, 20 nt, Human
agcugccccugggcacugcc

SEQ ID NO: 594872 - RNA, 22 nt, Human
accuugaaagcugguuguuagg

SEQ ID NO: 594873 - RNA, 22 nt, Human
cagagggcacucggagugacau

SEQ ID NO: 594874 - RNA, 22 nt, Human
auuaaggaagccuauucucucc

SEQ ID NO: 594875 - RNA, 22 nt, Human
agguuucuuuaugcugcuagaa

SEQ ID NO: 594876 - RNA, 22 nt, Human
gcucugugccagggcugggcca

SEQ ID NO: 594877 - RNA, 22 nt, Human
uggcacugaccccaggccugug

SEQ ID NO: 594878 - RNA, 21 nt, Human
gggcgaggccugauguggcuc

SEQ ID NO: 594879 - RNA, 22 nt, Human
cccuggaggaccccaauguggc

SEQ ID NO: 594880 - RNA, 22 nt, Human
aacacugucagccuuugaugga

SEQ ID NO: 594881 - RNA, 22 nt, Human
cccagagauguccugagugaua

SEQ ID NO: 594882 - RNA, 22 nt, Human
cagcugucuaaguugagcagga

SEQ ID NO: 594883 - RNA, 22 nt, Human
gacauuuauuagaaaacuauca

SEQ ID NO: 594884 - RNA, 17 nt, Human
aggcaccucuuccugcu

SEQ ID NO: 594885 - RNA, 22 nt, Human
agagcugaggauccagcugagc

SEQ ID NO: 594886 - RNA, 22 nt, Human
caguggaggccuugggaccuuu

SEQ ID NO: 594887 - RNA, 22 nt, Human
gcacccagaggucagcagugcu

SEQ ID NO: 594888 - RNA, 22 nt, Human
uucuccuggagugcuuguuggg

SEQ ID NO: 594889 - RNA, 22 nt, Human
acacagaugauguuccaggaac

SEQ ID NO: 594890 - RNA, 22 nt, Human
cauuaaauuccuuguucucaaa

SEQ ID NO: 594891 - RNA, 20 nt, Human
ccagcauguacacaugugga

SEQ ID NO: 594892 - RNA, 22 nt, Human
uuacauuuugggguaaggauaa

SEQ ID NO: 594893 - RNA, 22 nt, Human
gcuaauucacaguaggaaauuu

SEQ ID NO: 594894 - RNA, 22 nt, Human
ucuccaaggagcuccugugccg

SEQ ID NO: 594895 - RNA, 22 nt, Human
gcuuucugccugggcuccauuu

SEQ ID NO: 594896 - RNA, 22 nt, Human
aagugaccucaugguuucuccu

SEQ ID NO: 594897 - RNA, 22 nt, Human
cugucauuuuuuuagaacaccu

SEQ ID NO: 594898 - RNA, 22 nt, Human
acaguggaaagaacauggauuu

SEQ ID NO: 594899 - RNA, 22 nt, Human
cuucuuucuuuugaucacaggu

SEQ ID NO: 594900 - RNA, 22 nt, Human
gccggggcuggggagagacaug

SEQ ID NO: 594901 - RNA, 22 nt, Human
gccuggaggaauguagcugagg

SEQ ID NO: 594902 - RNA, 22 nt, Human
agaaccuuucuuuagaaauuca

SEQ ID NO: 594903 - RNA, 23 nt, Human
aaauuauugcucuucaauugccu

SEQ ID NO: 594904 - RNA, 22 nt, Human
cuuauaguaugauguugagaau

SEQ ID NO: 594905 - RNA, 22 nt, Human
agccagagauugagaugcaggc

SEQ ID NO: 594906 - RNA, 22 nt, Human
uccuggagaaacucagagaucu

SEQ ID NO: 594907 - RNA, 22 nt, Human
guaaauauaaaugcuagcugcc

SEQ ID NO: 594908 - RNA, 22 nt, Human
agaguuuguugaauuuacuugg

SEQ ID NO: 594909 - RNA, 21 nt, Human
acuuggccaggcccccaccug

SEQ ID NO: 594910 - RNA, 22 nt, Human
uucaguauuugaaaccauaggc

SEQ ID NO: 594911 - RNA, 22 nt, Human
agacccugcauuuuccaggguu

SEQ ID NO: 594912 - RNA, 22 nt, Human
uaagaauagucccuagaugugu

SEQ ID NO: 594913 - RNA, 23 nt, Human
ugggccuggccucccaguccagc

SEQ ID NO: 594914 - RNA, 22 nt, Human
agcguguggagaacuaagcaga

SEQ ID NO: 594915 - RNA, 22 nt, Human
cugcaguugacucccuguuugc

SEQ ID NO: 594916 - RNA, 21 nt, Human
auggacaauugagugucuguc

SEQ ID NO: 594917 - RNA, 22 nt, Human
ugcugccuuagcagccaggcaa

SEQ ID NO: 594918 - RNA, 22 nt, Human
gaugggaggaaccugggucccu

SEQ ID NO: 594919 - RNA, 22 nt, Human
gcugugagcacugcugggugga

SEQ ID NO: 594920 - RNA, 22 nt, Human
uugcuuuucccugucucugauu

SEQ ID NO: 594921 - RNA, 18 nt, Human
ucugucucuguccuugcu

SEQ ID NO: 594922 - RNA, 20 nt, Human
agcuggagaagggcccuucc

SEQ ID NO: 594923 - RNA, 22 nt, Human
cugcugcaggaugggcacucug

SEQ ID NO: 594924 - RNA, 22 nt, Human
uauauuaccugccugaucuaua

SEQ ID NO: 594925 - RNA, 22 nt, Human
gaacaaugaaagacauaaacuc

SEQ ID NO: 594926 - RNA, 18 nt, Human
uccugguggagaaguggu

SEQ ID NO: 594927 - RNA, 22 nt, Human
augucucucucugagugccaga

SEQ ID NO: 594928 - RNA, 22 nt, Human
aaauggcaauuuaguuuauuua

SEQ ID NO: 594929 - RNA, 22 nt, Human
uacaagaugacaggugcaugau

SEQ ID NO: 594930 - RNA, 22 nt, Human
ucauuuuuagcgcgcaaaaguu

SEQ ID NO: 594931 - RNA, 22 nt, Human
ccccuggggaucagcuggaauu

SEQ ID NO: 594932 - RNA, 20 nt, Human
aagucccuaagucucuggcc

SEQ ID NO: 594933 - RNA, 22 nt, Human
agagccugaggccaggaaaaug

SEQ ID NO: 594934 - RNA, 22 nt, Human
cucccagggccaucgagucacu

SEQ ID NO: 594935 - RNA, 22 nt, Human
auugugcagcagugguaccugg

SEQ ID NO: 594936 - RNA, 22 nt, Human
gcagcaagaauaauuuggguag

SEQ ID NO: 594937 - RNA, 22 nt, Human
agucuucuugaucuuuucagug

SEQ ID NO: 594938 - RNA, 22 nt, Human
gagaauuugcuggcuucauugu

SEQ ID NO: 594939 - RNA, 22 nt, Human
ggaagcugccaguccaccagcu

SEQ ID NO: 594940 - RNA, 22 nt, Human
cuaauuuucccaaggccuucua

SEQ ID NO: 594941 - RNA, 22 nt, Human
gggacaucuuucuagucagggu

SEQ ID NO: 594942 - RNA, 22 nt, Human
gcugggcagccccuacagagag

SEQ ID NO: 594943 - RNA, 22 nt, Human
uagagcuuggggauuuaguagu

SEQ ID NO: 594944 - RNA, 22 nt, Human
caggcauggagaggcagagacu

SEQ ID NO: 594945 - RNA, 22 nt, Human
aaucuguuugaugcuugugaua

SEQ ID NO: 594946 - RNA, 22 nt, Human
cuccacagccccuccaguggca

SEQ ID NO: 594947 - RNA, 22 nt, Human
uacaugaauuugagucagagga

SEQ ID NO: 594948 - RNA, 20 nt, Human
ugccaggcugcacgccugcc

SEQ ID NO: 594949 - RNA, 23 nt, Human
aauauuccugccauuaaugacuc

SEQ ID NO: 594950 - RNA, 22 nt, Human
cauugcuuaucuaguucacaua

SEQ ID NO: 594951 - RNA, 21 nt, Human
cucuucaguggugagcucuuc

SEQ ID NO: 594952 - RNA, 21 nt, Human
aaagaaaucucccauugguag

SEQ ID NO: 594953 - RNA, 22 nt, Human
cuuguauugcaaacuggccagg

SEQ ID NO: 594954 - RNA, 22 nt, Human
uucuccucagcaaggcagcuuu

SEQ ID NO: 594955 - RNA, 22 nt, Human
guuuucuaccagggaagagagu

SEQ ID NO: 594956 - RNA, 22 nt, Human
uucugagguccaugcaguacug

SEQ ID NO: 594957 - RNA, 22 nt, Human
uacacauauguguguauaugug

SEQ ID NO: 594958 - RNA, 22 nt, Human
uggcuuccugcauggauccucu

SEQ ID NO: 594959 - RNA, 18 nt, Human
aggugcccuccuuacacu

SEQ ID NO: 594960 - RNA, 22 nt, Human
uuacaagaucuuugaaggcaag

SEQ ID NO: 594961 - RNA, 22 nt, Human
uccugagagcagaguccaggug

SEQ ID NO: 594962 - RNA, 22 nt, Human
uuuacuucauuuccagugagga

SEQ ID NO: 594963 - RNA, 21 nt, Human
agagcugguagguagguaggu

SEQ ID NO: 594964 - RNA, 22 nt, Human
agagaugggaaggcagacuuca

SEQ ID NO: 594965 - RNA, 22 nt, Human
ugcugggcccagggagccucug

SEQ ID NO: 594966 - RNA, 22 nt, Human
ucuguccauucagccauccauc

SEQ ID NO: 594967 - RNA, 22 nt, Human
ucaguguuuaccguauguuguu

SEQ ID NO: 594968 - RNA, 22 nt, Human
aggccagcuguuacuagagcca

SEQ ID NO: 594969 - RNA, 22 nt, Human
caucagaauagcucuguggaua

SEQ ID NO: 594970 - RNA, 22 nt, Human
gguggggauuccugaucacugu

SEQ ID NO: 594971 - RNA, 22 nt, Human
uugaaaggaauacagaggccua

SEQ ID NO: 594972 - RNA, 22 nt, Human
ucacaguguuggaaucagagcu

SEQ ID NO: 594973 - RNA, 22 nt, Human
gcaguaaaggugacaauauagg

SEQ ID NO: 594974 - RNA, 22 nt, Human
aauguuuugcauuaguuuucua

SEQ ID NO: 594975 - RNA, 22 nt, Human
ggcugcuguuucagagacuguu

SEQ ID NO: 594976 - RNA, 22 nt, Human
ugacauugguugcaagguacuc

SEQ ID NO: 594977 - RNA, 22 nt, Human
agauacauugaguuuccuccug

SEQ ID NO: 594978 - RNA, 22 nt, Human
uacuguuuccugaagcagaugc

SEQ ID NO: 594979 - RNA, 23 nt, Human
agcugaggugcagauccaaagaa

SEQ ID NO: 594980 - RNA, 22 nt, Human
uggagcugauacagcuggcuuu

SEQ ID NO: 594981 - RNA, 22 nt, Human
aauaucaucucucuuuucugca

SEQ ID NO: 594982 - RNA, 22 nt, Human
agcaggggcuccuccacagcca

SEQ ID NO: 594983 - RNA, 22 nt, Human
uccugggugugauauucauaga

SEQ ID NO: 594984 - RNA, 22 nt, Human
aguguaggguggucagagcaga

SEQ ID NO: 594985 - RNA, 22 nt, Human
auagaauucguguuuguaauuc

SEQ ID NO: 594986 - RNA, 22 nt, Human
uuuuagcacacuuucuuuagcg

SEQ ID NO: 594987 - RNA, 22 nt, Human
uuugaauauacuucaaacaaag

SEQ ID NO: 594988 - RNA, 22 nt, Human
uacaguggggagcucaggagag

SEQ ID NO: 594989 - RNA, 19 nt, Human
ggcuucgaggcuggggaag

SEQ ID NO: 594990 - RNA, 22 nt, Human
cuuuucuagagccgcagcccua

SEQ ID NO: 594991 - RNA, 22 nt, Human
acagaauuaaugaaaauuacaa

SEQ ID NO: 594992 - RNA, 22 nt, Human
uccuggccucacaguccugggu

SEQ ID NO: 594993 - RNA, 22 nt, Human
gaggccuggguuggaggugcau

SEQ ID NO: 594994 - RNA, 22 nt, Human
gcucccagcuggagccucaaca

SEQ ID NO: 594995 - RNA, 22 nt, Human
gagagcccuacaaggcguuuug

SEQ ID NO: 594996 - RNA, 21 nt, Human
acagaugggaugagcacacug

SEQ ID NO: 594997 - RNA, 22 nt, Human
acagugcagugugaugaguauu

SEQ ID NO: 594998 - RNA, 22 nt, Human
auuuucaaaacaucugcugugu

SEQ ID NO: 594999 - RNA, 22 nt, Human
auaauguacaacugcuuuuaau

SEQ ID NO: 595000 - RNA, 22 nt, Human
ugcugcaggccuuggcugggaa

SEQ ID NO: 595001 - RNA, 22 nt, Human
caucauuaccuuguaaccaaua

SEQ ID NO: 595002 - RNA, 22 nt, Human
gaaggcuguggcuggucucagu

SEQ ID NO: 595003 - RNA, 22 nt, Human
gggaagaagacauggugaaggc

SEQ ID NO: 595004 - RNA, 22 nt, Human
acauuucuauagugcaucuguu

SEQ ID NO: 595005 - RNA, 22 nt, Human
ggaaagagggacccagcuuggu

SEQ ID NO: 595006 - RNA, 22 nt, Human
uuaauuaugagaaagggaaaag

SEQ ID NO: 595007 - RNA, 22 nt, Human
gauaugcacauucaaaaauugc

SEQ ID NO: 595008 - RNA, 22 nt, Human
uuccuagaaugguuagaaaaua

SEQ ID NO: 595009 - RNA, 22 nt, Human
ucccugggaccggcagcucaca

SEQ ID NO: 595010 - RNA, 22 nt, Human
ccucagggacuccaugcugcag

SEQ ID NO: 595011 - RNA, 22 nt, Human
uaggaauuaugaugcuaucaag

SEQ ID NO: 595012 - RNA, 22 nt, Human
uccuucaguuaaagaucucaca

SEQ ID NO: 595013 - RNA, 22 nt, Human
aaaccugaaguacguuacauaa

SEQ ID NO: 595014 - RNA, 22 nt, Human
cuggcucucgcugggaguacuu

SEQ ID NO: 595015 - RNA, 22 nt, Human
acagagacugggagcaagaggc

SEQ ID NO: 595016 - RNA, 23 nt, Human
cuacagguuaauuuucaguggaa

SEQ ID NO: 595017 - RNA, 22 nt, Human
ccaggacacugcuucacagcag

SEQ ID NO: 595018 - RNA, 22 nt, Human
caguuucucucaauaagcaucg

SEQ ID NO: 595019 - RNA, 22 nt, Human
ugucccaguuuugcagguuaga

SEQ ID NO: 595020 - RNA, 22 nt, Human
gcugcccuguccggcucuccug

SEQ ID NO: 595021 - RNA, 22 nt, Human
aauagugaacaggaacaugcuu

SEQ ID NO: 595022 - RNA, 22 nt, Human
ggugagugccuggccuggccac

SEQ ID NO: 595023 - RNA, 22 nt, Human
agcagaugggagauggagcugc

SEQ ID NO: 595024 - RNA, 22 nt, Human
ggggaagaaaucuggguucuuc

SEQ ID NO: 595025 - RNA, 22 nt, Human
aaauuccauuaugauaauuucg

SEQ ID NO: 595026 - RNA, 22 nt, Human
ugcggcaggagaagguguuaug

SEQ ID NO: 595027 - RNA, 22 nt, Human
guauacauagaugaugaacaag

SEQ ID NO: 595028 - RNA, 22 nt, Human
acaggcagcgucauugcugcuc

SEQ ID NO: 595029 - RNA, 22 nt, Human
gaugcugauuauuucuugcuag

SEQ ID NO: 595030 - RNA, 18 nt, Human
gagagcccagcagguggu

SEQ ID NO: 595031 - RNA, 22 nt, Human
ucucuggggaaaaggcugauac

SEQ ID NO: 595032 - RNA, 22 nt, Human
ggaugcugggagacagcaggca

SEQ ID NO: 595033 - RNA, 22 nt, Human
uguagaaguaggagucaucuca

SEQ ID NO: 595034 - RNA, 22 nt, Human
ucagagccaaucauggugcauu

SEQ ID NO: 595035 - RNA, 22 nt, Human
augauuuuuucuaacacagucg

SEQ ID NO: 595036 - RNA, 22 nt, Human
gaggagacggggugccuggagc

SEQ ID NO: 595037 - RNA, 22 nt, Human
gccauccucugagcacuaggca

SEQ ID NO: 595038 - RNA, 22 nt, Human
uggaaagguguaaagcagaacc

SEQ ID NO: 595039 - RNA, 23 nt, Human
agcugaggcagaggggcauucuc

SEQ ID NO: 595040 - RNA, 22 nt, Human
auuuuucucucacacuuaccag

SEQ ID NO: 595041 - RNA, 22 nt, Human
ugcagccuuggcaaccagggac

SEQ ID NO: 595042 - RNA, 22 nt, Human
cugggcauuuuucucuguuaca

SEQ ID NO: 595043 - RNA, 22 nt, Human
ugggcucagccuucauguggcc

SEQ ID NO: 595044 - RNA, 22 nt, Human
ugcuucaaguugaaauauucuu

SEQ ID NO: 595045 - RNA, 22 nt, Human
cuugaaaauaagaaagacuuuc

SEQ ID NO: 595046 - RNA, 22 nt, Human
agaaacaucauuggaacacaag

SEQ ID NO: 595047 - RNA, 22 nt, Human
guuuuuguccauggaggcaaac

SEQ ID NO: 595048 - RNA, 22 nt, Human
gaggccacauuacuuggugggu

SEQ ID NO: 595049 - RNA, 22 nt, Human
uccagaguacggaagagucauc

SEQ ID NO: 595050 - RNA, 22 nt, Human
ugcacacacucguguauaugag

SEQ ID NO: 595051 - RNA, 22 nt, Human
cagcuuugaccuaaaguaggaa

SEQ ID NO: 595052 - RNA, 22 nt, Human
acugagaacuugccaaggacug

SEQ ID NO: 595053 - RNA, 22 nt, Human
ugagccaggaguuugaggcugu

SEQ ID NO: 595054 - RNA, 23 nt, Human
agagcuuucuaaaauguaaaucu

SEQ ID NO: 595055 - RNA, 22 nt, Human
acaguguuccuuuguugugacu

SEQ ID NO: 595056 - RNA, 22 nt, Human
cuaaggguugaaacagcaagaa

SEQ ID NO: 595057 - RNA, 21 nt, Human
agcaaaggcaggagagguuuc

SEQ ID NO: 595058 - RNA, 22 nt, Human
uccucugacucacagccugggg

SEQ ID NO: 595059 - RNA, 22 nt, Human
uccugguguccuggucugcuag

SEQ ID NO: 595060 - RNA, 22 nt, Human
aggcugaggcgggaggaucacu

SEQ ID NO: 595061 - RNA, 21 nt, Human
cacaccaggcaugucuugagc

SEQ ID NO: 595062 - RNA, 22 nt, Human
ugguggucauagcagaggccgu

SEQ ID NO: 595063 - RNA, 22 nt, Human
auuuccaccggcucaggaaguu

SEQ ID NO: 595064 - RNA, 22 nt, Human
cagggggcuguggcuguccagu

SEQ ID NO: 595065 - RNA, 22 nt, Human
cagcacaugcucaucagggaag

SEQ ID NO: 595066 - RNA, 22 nt, Human
gugcagggcagguguccuucca

SEQ ID NO: 595067 - RNA, 22 nt, Human
gaacaaacacaucccagcagug

SEQ ID NO: 595068 - RNA, 22 nt, Human
cugcagaugggcgauggggccu

SEQ ID NO: 595069 - RNA, 22 nt, Human
auguaaguuuaagcacaacaag

SEQ ID NO: 595070 - RNA, 22 nt, Human
agcgcgcucuaggacaccgcgg

SEQ ID NO: 595071 - RNA, 22 nt, Human
ugcugcaggcaauagaaaaccu

SEQ ID NO: 595072 - RNA, 22 nt, Human
uuauuauugugguugcauuauc

SEQ ID NO: 595073 - RNA, 22 nt, Human
auucucaaaacauaacuucacu

SEQ ID NO: 595074 - RNA, 18 nt, Human
ucaaaauauuucugugga

SEQ ID NO: 595075 - RNA, 22 nt, Human
cagagagggcggcccuggcuuc

SEQ ID NO: 595076 - RNA, 22 nt, Human
aaaguuuucugccuucauuaga

SEQ ID NO: 595077 - RNA, 22 nt, Human
ugcauauuuguaugauguuuag

SEQ ID NO: 595078 - RNA, 22 nt, Human
gaaauauuucucuugagccccu

SEQ ID NO: 595079 - RNA, 22 nt, Human
ugcauuguuuagaacucuuugg

SEQ ID NO: 595080 - RNA, 22 nt, Human
gcccagcuccauucuuggugag

SEQ ID NO: 595081 - RNA, 22 nt, Human
guggcauggagaaggaggcagu

SEQ ID NO: 595082 - RNA, 22 nt, Human
cuggccucauagccaagcugug

SEQ ID NO: 595083 - RNA, 23 nt, Human
agcauuagagaugccagcccugu

SEQ ID NO: 595084 - RNA, 22 nt, Human
cagcuuggcuuccgcuuuacug

SEQ ID NO: 595085 - RNA, 23 nt, Human
cuccuggugcugcuaucaggggu

SEQ ID NO: 595086 - RNA, 22 nt, Human
uuuuauucaaauaguucacacu

SEQ ID NO: 595087 - RNA, 22 nt, Human
uuuauugacuucagugagucuu

SEQ ID NO: 595088 - RNA, 20 nt, Human
caucaacaccuugucagccu

SEQ ID NO: 595089 - RNA, 22 nt, Human
gcuggagucuggaggugugcca

SEQ ID NO: 595090 - RNA, 20 nt, Human
gcucugggagggaugugaug

SEQ ID NO: 595091 - RNA, 22 nt, Human
gaaagguuuggcuuuucaguag

SEQ ID NO: 595092 - RNA, 22 nt, Human
ucagacaguuugcagugugccu

SEQ ID NO: 595093 - RNA, 22 nt, Human
gcugggagcaaagccaugcaua

SEQ ID NO: 595094 - RNA, 18 nt, Human
uccagggcuuccuccucu

SEQ ID NO: 595095 - RNA, 22 nt, Human
aaaaauuuaugguucuucucug

SEQ ID NO: 595096 - RNA, 21 nt, Human
auuuuguacauagaauuuguc

SEQ ID NO: 595097 - RNA, 22 nt, Human
ccagggcaugggaagaacugaa

SEQ ID NO: 595098 - RNA, 22 nt, Human
agguaggggguuugggaacugc

SEQ ID NO: 595099 - RNA, 22 nt, Human
gggcaggugccagcucccuguc

SEQ ID NO: 595100 - RNA, 22 nt, Human
acagagaaagugggcugaagau

SEQ ID NO: 595101 - RNA, 22 nt, Human
ggcaggcuggcuuuguuccagg

SEQ ID NO: 595102 - RNA, 18 nt, Human
uuuacucauaggccugac

SEQ ID NO: 595103 - RNA, 22 nt, Human
aagcaguguucccagcuggccc

SEQ ID NO: 595104 - RNA, 22 nt, Human
aggcacuggucuaccccuuagu

SEQ ID NO: 595105 - RNA, 22 nt, Human
caagggugguauugggagcaua

SEQ ID NO: 595106 - RNA, 22 nt, Human
auuauuucagucagacacuggc

SEQ ID NO: 595107 - RNA, 22 nt, Human
ucuggagucuggugguuauggu

SEQ ID NO: 595108 - RNA, 22 nt, Human
ggucucugagugaggaccuggg

SEQ ID NO: 595109 - RNA, 22 nt, Human
cuggaagugggguuggcuugaa

SEQ ID NO: 595110 - RNA, 22 nt, Human
gugacaggccacugcggcucug

SEQ ID NO: 595111 - RNA, 22 nt, Human
aaucacuuugcacucuuauuug

SEQ ID NO: 595112 - RNA, 22 nt, Human
gucaguaggaaccuagggucaa

SEQ ID NO: 595113 - RNA, 17 nt, Human
ucuuuccugccaugcuc

SEQ ID NO: 595114 - RNA, 22 nt, Human
cacugugcuccuuccuuagcac

SEQ ID NO: 595115 - RNA, 22 nt, Human
aggcccugcauuguacugaggg

SEQ ID NO: 595116 - RNA, 22 nt, Human
gcagaagcacaggugacgggcc

SEQ ID NO: 595117 - RNA, 22 nt, Human
aaagcacauuacaagcucaguc

SEQ ID NO: 595118 - RNA, 22 nt, Human
uguggggacugaguggaggcuu

SEQ ID NO: 595119 - RNA, 22 nt, Human
aaauguuccauuauuguguaau

SEQ ID NO: 595120 - RNA, 22 nt, Human
acaggcucuggggcaggauggc

SEQ ID NO: 595121 - RNA, 22 nt, Human
agggcagcugugagccacugug

SEQ ID NO: 595122 - RNA, 22 nt, Human
agagaaaagccaucccagccaa

SEQ ID NO: 595123 - RNA, 22 nt, Human
gucuuauuuaaggacaagaaga

SEQ ID NO: 595124 - RNA, 22 nt, Human
ugucacuuggagaagcugaucc

SEQ ID NO: 595125 - RNA, 22 nt, Human
gcagagucaggauuccauccca

SEQ ID NO: 595126 - RNA, 22 nt, Human
cuguccugaaguuuucaugaga

SEQ ID NO: 595127 - RNA, 22 nt, Human
gcauggcauuaacaagauggaa

SEQ ID NO: 595128 - RNA, 20 nt, Human
aaaguguaagcauauaauua

SEQ ID NO: 595129 - RNA, 22 nt, Human
cccagcccugaccuauuggaaa

SEQ ID NO: 595130 - RNA, 22 nt, Human
aggcugccaaagcuucugucuc

SEQ ID NO: 595131 - RNA, 22 nt, Human
uucccagaccuguaggaucaga

SEQ ID NO: 595132 - RNA, 22 nt, Human
gcagcaaucuucacagugucau

SEQ ID NO: 595133 - RNA, 22 nt, Human
cacaaggagguccugaggaagc

SEQ ID NO: 595134 - RNA, 22 nt, Human
uccuggccuuagcgaggcgguc

SEQ ID NO: 595135 - RNA, 22 nt, Human
gcccagccuccaagcuccaagg

SEQ ID NO: 595136 - RNA, 22 nt, Human
ggccugccucacagucagcacc

SEQ ID NO: 595137 - RNA, 22 nt, Human
ggcaggcuguucaccugcuuuu

SEQ ID NO: 595138 - RNA, 21 nt, Human
cucaaaauucuuucuguugga

SEQ ID NO: 595139 - RNA, 22 nt, Human
caggauugagcaaauggauuau

SEQ ID NO: 595140 - RNA, 22 nt, Human
ucagaauaaguuaugaaaugaa

SEQ ID NO: 595141 - RNA, 22 nt, Human
caguggauuagccagagcugga

SEQ ID NO: 595142 - RNA, 22 nt, Human
agucacaugcauuuucuucaau

SEQ ID NO: 595143 - RNA, 22 nt, Human
gggggcaguaaggauauggaaa

SEQ ID NO: 595144 - RNA, 22 nt, Human
uaguggaggguguagcugcugg

SEQ ID NO: 595145 - RNA, 22 nt, Human
cacugcuaugaugaugauauuu

SEQ ID NO: 595146 - RNA, 19 nt, Human
uacuuuuucaggacagagu

SEQ ID NO: 595147 - RNA, 22 nt, Human
auaagacacgccccacucacuc

SEQ ID NO: 595148 - RNA, 22 nt, Human
uuuaaggauguaaaggaagaag

SEQ ID NO: 595149 - RNA, 22 nt, Human
uguauucucucaauauuucaua

SEQ ID NO: 595150 - RNA, 22 nt, Human
ugcauguguuucccagcaagcu

SEQ ID NO: 595151 - RNA, 18 nt, Human
cccucuugcacaaagcaa

SEQ ID NO: 595152 - RNA, 22 nt, Human
auacuaagcucauuacauuuug

SEQ ID NO: 595153 - RNA, 22 nt, Human
ggcagcuggguuggccagaaac

SEQ ID NO: 595154 - RNA, 22 nt, Human
ggcaccaggcugggcauaggcc

SEQ ID NO: 595155 - RNA, 22 nt, Human
cuggucaggggauggggcucag

SEQ ID NO: 595156 - RNA, 22 nt, Human
uccagcucacagauagcguggg

SEQ ID NO: 595157 - RNA, 22 nt, Human
aaagcaauaguaaugguaauag

SEQ ID NO: 595158 - RNA, 22 nt, Human
ucuucagguuaacuugucuuuu

SEQ ID NO: 595159 - RNA, 22 nt, Human
agacaggagagggaacugccgg

SEQ ID NO: 595160 - RNA, 22 nt, Human
augcuucagauuugggguauua

SEQ ID NO: 595161 - RNA, 22 nt, Human
uccuugaacagagggccugggu

SEQ ID NO: 595162 - RNA, 22 nt, Human
uacaaagauaaaaucucaccau

SEQ ID NO: 595163 - RNA, 22 nt, Human
agcuggcaccaaauauaguaaa

SEQ ID NO: 595164 - RNA, 22 nt, Human
uccugccugcaaucccagcacu

SEQ ID NO: 595165 - RNA, 22 nt, Human
agcacagauggauguauucauu

SEQ ID NO: 595166 - RNA, 21 nt, Human
auggccacuauggugcagcag

SEQ ID NO: 595167 - RNA, 22 nt, Human
ucucagaaggguggugcuggag

SEQ ID NO: 595168 - RNA, 22 nt, Human
ccaggcauugugagugggcagg

SEQ ID NO: 595169 - RNA, 22 nt, Human
ugugcccaucccucuggagugu

SEQ ID NO: 595170 - RNA, 22 nt, Human
ugccugucucugacugccauua

SEQ ID NO: 595171 - RNA, 22 nt, Human
auuuaauggguagacauuguua

SEQ ID NO: 595172 - RNA, 22 nt, Human
gcagcuaccacccaggaaggac

SEQ ID NO: 595173 - RNA, 22 nt, Human
ucaagagacaggacguguuuca

SEQ ID NO: 595174 - RNA, 22 nt, Human
cugagaauguuuucugauugau

SEQ ID NO: 595175 - RNA, 22 nt, Human
uggagaauucuauguugagggg

SEQ ID NO: 595176 - RNA, 22 nt, Human
aagcacaugagcuauucaugcu

SEQ ID NO: 595177 - RNA, 22 nt, Human
aggagcugcuuaaaugguuggu

SEQ ID NO: 595178 - RNA, 22 nt, Human
uauaggaaauuuaucuccuggg

SEQ ID NO: 595179 - RNA, 22 nt, Human
aacagaauaguugauguacagu

SEQ ID NO: 595180 - RNA, 19 nt, Human
guuuugcaggcagagggga

SEQ ID NO: 595181 - RNA, 22 nt, Human
cuggaacaaguggccuugcaag

SEQ ID NO: 595182 - RNA, 22 nt, Human
agccacuggccugggcagcucu

SEQ ID NO: 595183 - RNA, 22 nt, Human
cccagagguuccuuagggacca

SEQ ID NO: 595184 - RNA, 19 nt, Human
uaacuuguagauaugaagu

SEQ ID NO: 595185 - RNA, 22 nt, Human
cugcuccuggucauccuccacu

SEQ ID NO: 595186 - RNA, 22 nt, Human
auuuucugaguccagaauuuac

SEQ ID NO: 595187 - RNA, 22 nt, Human
ugggcacuggaagccugcugug

SEQ ID NO: 595188 - RNA, 22 nt, Human
aggugggcccagugggcuccag

SEQ ID NO: 595189 - RNA, 17 nt, Human
augaggucauuaagaua

SEQ ID NO: 595190 - RNA, 22 nt, Human
aaagaacaauguggaaucuccu

SEQ ID NO: 595191 - RNA, 22 nt, Human
uccagaggcuccaaagggagau

SEQ ID NO: 595192 - RNA, 22 nt, Human
acagaauuaacauuugaugaau

SEQ ID NO: 595193 - RNA, 22 nt, Human
gagacaaaaguuggagugcaag

SEQ ID NO: 595194 - RNA, 22 nt, Human
ucuacauuuucacaaggucucc

SEQ ID NO: 595195 - RNA, 22 nt, Human
uuuuugugauaugacacuguau

SEQ ID NO: 595196 - RNA, 22 nt, Human
uauguacuaacuuucauucuag

SEQ ID NO: 595197 - RNA, 22 nt, Human
uaauuuuuccacguacacuggg

SEQ ID NO: 595198 - RNA, 22 nt, Human
cugaggagauccccccagaagu

SEQ ID NO: 595199 - RNA, 22 nt, Human
cauuagcaggcacuaagaaggu

SEQ ID NO: 595200 - RNA, 17 nt, Human
aagacagaagccaugag

SEQ ID NO: 595201 - RNA, 22 nt, Human
ggcuccugaggaccaggcacag

SEQ ID NO: 595202 - RNA, 22 nt, Human
caggugcucugcugcagguaag

SEQ ID NO: 595203 - RNA, 22 nt, Human
cagcuaccaugguuuguuccag

SEQ ID NO: 595204 - RNA, 22 nt, Human
uguuuacauaguagcugcccug

SEQ ID NO: 595205 - RNA, 22 nt, Human
uccacuucuauugggucuuggu

SEQ ID NO: 595206 - RNA, 22 nt, Human
ccucaggcccugucccugcgcc

SEQ ID NO: 595207 - RNA, 22 nt, Human
ugacuugucucuuugggagaca

SEQ ID NO: 595208 - RNA, 22 nt, Human
uuggucagcacugauguuucag

SEQ ID NO: 595209 - RNA, 18 nt, Human
uccagcucugccacuuac

SEQ ID NO: 595210 - RNA, 22 nt, Human
cccugccagaugugcuucaguu

SEQ ID NO: 595211 - RNA, 22 nt, Human
cuauaauuaugcucaaaaugua

SEQ ID NO: 595212 - RNA, 22 nt, Human
uguuacuuaucucacgugaugc

SEQ ID NO: 595213 - RNA, 22 nt, Human
gugcuuuuaauucuggugagua

SEQ ID NO: 595214 - RNA, 22 nt, Human
cuuuucuuauguggacguaccu

SEQ ID NO: 595215 - RNA, 19 nt, Human
aaggcagaaguuggauaug

SEQ ID NO: 595216 - RNA, 22 nt, Human
gcuccccaggcugguccccucg

SEQ ID NO: 595217 - RNA, 22 nt, Human
acuccacaccacgggggccgcc

SEQ ID NO: 595218 - RNA, 21 nt, Human
agcagcagaucuggugagggc

SEQ ID NO: 595219 - RNA, 22 nt, Human
ggagucaccaaguaggagucuu

SEQ ID NO: 595220 - RNA, 22 nt, Human
acuuauuuauucauucagcuca

SEQ ID NO: 595221 - RNA, 22 nt, Human
aaggcaaugacugauuuagaau

SEQ ID NO: 595222 - RNA, 22 nt, Human
cuggguuuagggucuccccuug

SEQ ID NO: 595223 - RNA, 22 nt, Human
ccaucuccaguuuauucuuccu

SEQ ID NO: 595224 - RNA, 22 nt, Human
uauguuuuuaagagaaugcauu

SEQ ID NO: 595225 - RNA, 22 nt, Human
aguuuauuucuccauuuaccua

SEQ ID NO: 595226 - RNA, 22 nt, Human
aguccccuggcaggagggacgu

SEQ ID NO: 595227 - RNA, 23 nt, Human
agggugagcaagcuauggagacc

SEQ ID NO: 595228 - RNA, 22 nt, Human
ugucaaugaagauaugaauaau

SEQ ID NO: 595229 - RNA, 22 nt, Human
ugaggccaaugacccugggcag

SEQ ID NO: 595230 - RNA, 22 nt, Human
ugaaacauaaaguuaucuucag

SEQ ID NO: 595231 - RNA, 22 nt, Human
ugguguggggauaagcacucug

SEQ ID NO: 595232 - RNA, 22 nt, Human
uuguguaaaugucugucuuucu

SEQ ID NO: 595233 - RNA, 22 nt, Human
cgucaucacggcaagcaucucc

SEQ ID NO: 595234 - RNA, 22 nt, Human
uugaggucuggcaguagcguug

SEQ ID NO: 595235 - RNA, 22 nt, Human
cgcugccaggauccccugccgg

SEQ ID NO: 595236 - RNA, 22 nt, Human
uuauugacucccagcuuuucca

SEQ ID NO: 595237 - RNA, 22 nt, Human
aaagguuugaggugggaagagg

SEQ ID NO: 595238 - RNA, 22 nt, Human
ugaggcagaaaauagcaguuca

SEQ ID NO: 595239 - RNA, 22 nt, Human
acauacauggugcuuucuuggu

SEQ ID NO: 595240 - RNA, 22 nt, Human
gaaaagaacugcaugggauuaa

SEQ ID NO: 595241 - RNA, 22 nt, Human
acauuucagaaucacacagcuu

SEQ ID NO: 595242 - RNA, 22 nt, Human
agccccagccccucucucacaa

SEQ ID NO: 595243 - RNA, 22 nt, Human
uauaauuuuaagugguaaauua

SEQ ID NO: 595244 - RNA, 22 nt, Human
gguggcagucuuaagagaucuu

SEQ ID NO: 595245 - RNA, 22 nt, Human
gaggggaguaaagucauguuac

SEQ ID NO: 595246 - RNA, 22 nt, Human
agggaagaagcugguaguaggu

SEQ ID NO: 595247 - RNA, 22 nt, Human
uguuaauuucuuuagaagugga

SEQ ID NO: 595248 - RNA, 22 nt, Human
uuuacacuccuggaaaugauau

SEQ ID NO: 595249 - RNA, 22 nt, Human
cccauucauccucgcuuccuuc

SEQ ID NO: 595250 - RNA, 22 nt, Human
agcagugaguaacacagaccag

SEQ ID NO: 595251 - RNA, 22 nt, Human
aaauuaacuaucacuuuuguga

SEQ ID NO: 595252 - RNA, 22 nt, Human
cuauaaaucuacccagcauugg

SEQ ID NO: 595253 - RNA, 22 nt, Human
cuggcugguuacuauuucuggu

SEQ ID NO: 595254 - RNA, 22 nt, Human
uuccuggaaauuaugcucaccu

SEQ ID NO: 595255 - RNA, 22 nt, Human
auuauggacaucaaauaacucu

SEQ ID NO: 595256 - RNA, 22 nt, Human
gacacaggauuccuggcucugc

SEQ ID NO: 595257 - RNA, 22 nt, Human
uaauccaggguauucuaguuuc

SEQ ID NO: 595258 - RNA, 22 nt, Human
uuucuuguuucauggugucuca

SEQ ID NO: 595259 - RNA, 22 nt, Human
ccuggccagggucugggcugcu

SEQ ID NO: 595260 - RNA, 22 nt, Human
ccauccuggccuugcuguccac

SEQ ID NO: 595261 - RNA, 22 nt, Human
gaacagcuucuugggagcuggg

SEQ ID NO: 595262 - RNA, 22 nt, Human
ccuggugcuuaccagagcuuuu

SEQ ID NO: 595263 - RNA, 22 nt, Human
aaacugagaccgaaagggguag

SEQ ID NO: 595264 - RNA, 22 nt, Human
cuuaggaaauauauacuaaacu

SEQ ID NO: 595265 - RNA, 22 nt, Human
cagcuguuacugaaguaaaaug

SEQ ID NO: 595266 - RNA, 22 nt, Human
ccucacacaguuaucucuucau

SEQ ID NO: 595267 - RNA, 22 nt, Human
aaggcagccucugccagccggg

SEQ ID NO: 595268 - RNA, 22 nt, Human
uuggcucaccugucuacccaga

SEQ ID NO: 595269 - RNA, 22 nt, Human
accugagcaugccaggagagug

SEQ ID NO: 595270 - RNA, 22 nt, Human
cugcuuauggagaugaguaaga

SEQ ID NO: 595271 - RNA, 22 nt, Human
cuuuuguucuacagcuggggaa

SEQ ID NO: 595272 - RNA, 22 nt, Human
uccaggcuggcucuucaaaauu

SEQ ID NO: 595273 - RNA, 22 nt, Human
cuaguucuccugaaauguuugg

SEQ ID NO: 595274 - RNA, 18 nt, Human
gcaaggcucaggccaggc

SEQ ID NO: 595275 - RNA, 22 nt, Human
agguagggaagaaggcaugaaa

SEQ ID NO: 595276 - RNA, 22 nt, Human
cacauguccuggcgcugagccc

SEQ ID NO: 595277 - RNA, 22 nt, Human
ugugaaauguggauguuaauag

SEQ ID NO: 595278 - RNA, 22 nt, Human
cucugggaaagauugugcaggc

SEQ ID NO: 595279 - RNA, 22 nt, Human
auuggagaagaacaugaauuag

SEQ ID NO: 595280 - RNA, 22 nt, Human
caggugggagcgaggagcuacu

SEQ ID NO: 595281 - RNA, 22 nt, Human
cauccugaagaagccgcacugu

SEQ ID NO: 595282 - RNA, 22 nt, Human
uggccagaguccagugagccuu

SEQ ID NO: 595283 - RNA, 19 nt, Human
gggcagaauggcaucucag

SEQ ID NO: 595284 - RNA, 22 nt, Human
caugcuuaauuggagcauucau

SEQ ID NO: 595285 - RNA, 22 nt, Human
cagacaugauguaagcagaggc

SEQ ID NO: 595286 - RNA, 22 nt, Human
aaggcagguauugaugccacag

SEQ ID NO: 595287 - RNA, 22 nt, Human
aggaaaaaccuguuaaugguag

SEQ ID NO: 595288 - RNA, 22 nt, Human
uggcuucuuuguagaaauugaa

SEQ ID NO: 595289 - RNA, 22 nt, Human
cucaguaaggaugcuucagcgg

SEQ ID NO: 595290 - RNA, 22 nt, Human
cagcugaguggacccuagaggc

SEQ ID NO: 595291 - RNA, 21 nt, Human
cagaaguaaggguaacuucuc

SEQ ID NO: 595292 - RNA, 22 nt, Human
uugcauuuugguuguaaauaug

SEQ ID NO: 595293 - RNA, 22 nt, Human
cccagcuugcgggcggcaggag

SEQ ID NO: 595294 - RNA, 22 nt, Human
ucagaacagugccuggcacuaa

SEQ ID NO: 595295 - RNA, 22 nt, Human
cugcuuuaagaaugaguguaag

SEQ ID NO: 595296 - RNA, 19 nt, Human
ucaugucucucaucuguga

SEQ ID NO: 595297 - RNA, 22 nt, Human
gcagggcuggguccugucucau

SEQ ID NO: 595298 - RNA, 22 nt, Human
acauuucucuuagaguuggacu

SEQ ID NO: 595299 - RNA, 22 nt, Human
cugaggccggagcacugaagag

SEQ ID NO: 595300 - RNA, 22 nt, Human
ucagggcacugucaccugauau

SEQ ID NO: 595301 - RNA, 22 nt, Human
uggaugcuauggaguauuuaga

SEQ ID NO: 595302 - RNA, 22 nt, Human
ccucugugggccgggccugcug

SEQ ID NO: 595303 - RNA, 22 nt, Human
aggagcugaagucucugcacuc

SEQ ID NO: 595304 - RNA, 22 nt, Human
gguaaaaaucacaaauacuuua

SEQ ID NO: 595305 - RNA, 22 nt, Human
cagugugccugaaucaaguguu

SEQ ID NO: 595306 - RNA, 22 nt, Human
cugugucccuugucccagagcc

SEQ ID NO: 595307 - RNA, 22 nt, Human
uagggugguuagaaggaguaug

SEQ ID NO: 595308 - RNA, 22 nt, Human
ugaaauguucuggaguuucugu

SEQ ID NO: 595309 - RNA, 20 nt, Human
aaauuacugccacacauuuc

SEQ ID NO: 595310 - RNA, 22 nt, Human
aguggcagaagccaagucugca

SEQ ID NO: 595311 - RNA, 20 nt, Human
uaccacuuauuugaauaauu

SEQ ID NO: 595312 - RNA, 22 nt, Human
gcucucugguuccagucaggaa

SEQ ID NO: 595313 - RNA, 22 nt, Human
gagcaauggaagauagauaaca

SEQ ID NO: 595314 - RNA, 22 nt, Human
ugagaauuacaaaugagucaca

SEQ ID NO: 595315 - RNA, 22 nt, Human
uuugucuuauccaaucucucag

SEQ ID NO: 595316 - RNA, 22 nt, Human
uagggacaaagagcugaggccu

SEQ ID NO: 595317 - RNA, 23 nt, Human
ucucuguacagaugaggacacac

SEQ ID NO: 595318 - RNA, 22 nt, Human
uaaaugagauguacauaacuca

SEQ ID NO: 595319 - RNA, 22 nt, Human
aucuggagugggacacagaaau

SEQ ID NO: 595320 - RNA, 22 nt, Human
uuaagucaauaucaaucucagc

SEQ ID NO: 595321 - RNA, 22 nt, Human
ugggugcuucgucagcucugag

SEQ ID NO: 595322 - RNA, 22 nt, Human
gauucauaccguuucuucucca

SEQ ID NO: 595323 - RNA, 22 nt, Human
uggcugcuuaaaauugcugcaa

SEQ ID NO: 595324 - RNA, 21 nt, Human
agcugcuguggccagaaucca

SEQ ID NO: 595325 - RNA, 22 nt, Human
uaauuauaaacugcaguaggua

SEQ ID NO: 595326 - RNA, 22 nt, Human
augaggcaaagguggagguggg

SEQ ID NO: 595327 - RNA, 22 nt, Human
cuucaugcugauauccucgaug

SEQ ID NO: 595328 - RNA, 22 nt, Human
ugggggaacuguugcgcgcggg

SEQ ID NO: 595329 - RNA, 22 nt, Human
ccugugccauccugagcauccc

SEQ ID NO: 595330 - RNA, 22 nt, Human
ggugggaugccucuggagaagu

SEQ ID NO: 595331 - RNA, 22 nt, Human
uauaguaaaauuuucauuuaug

SEQ ID NO: 595332 - RNA, 20 nt, Human
aggaggccugcagauaguuc

SEQ ID NO: 595333 - RNA, 22 nt, Human
cugccccuggugauggacgcca

SEQ ID NO: 595334 - RNA, 22 nt, Human
auuucaguguuuuaagaguuca

SEQ ID NO: 595335 - RNA, 22 nt, Human
acaggcuguugggguccagggu

SEQ ID NO: 595336 - RNA, 22 nt, Human
agagggcaaguguaguccagua

SEQ ID NO: 595337 - RNA, 22 nt, Human
aucagaaguugugcaugcaugg

SEQ ID NO: 595338 - RNA, 22 nt, Human
ugaaccagagucuccagugguu

SEQ ID NO: 595339 - RNA, 22 nt, Human
cacugaguucccugacauuuca

SEQ ID NO: 595340 - RNA, 22 nt, Human
ucaugcaagaauaauaggaagg

SEQ ID NO: 595341 - RNA, 22 nt, Human
agaguuuguauuuuucagugaa

SEQ ID NO: 595342 - RNA, 22 nt, Human
uuauggaauacuuaugcugcag

SEQ ID NO: 595343 - RNA, 22 nt, Human
cgaugggggcaguguuacauug

SEQ ID NO: 595344 - RNA, 22 nt, Human
gauuugucuauauucaaauaug

SEQ ID NO: 595345 - RNA, 22 nt, Human
uucaaaauuguucuaagcucug

SEQ ID NO: 595346 - RNA, 22 nt, Human
ugaagccaaggaugccuuucuc

SEQ ID NO: 595347 - RNA, 22 nt, Human
cugccuccaggcucaccuugac

SEQ ID NO: 595348 - RNA, 22 nt, Human
ggcaugaguggcagugggcagu

SEQ ID NO: 595349 - RNA, 22 nt, Human
cuccucccacggucucaggaag

SEQ ID NO: 595350 - RNA, 19 nt, Human
uuuauucaccuuuaccuug

SEQ ID NO: 595351 - RNA, 22 nt, Human
gcagccucugaugauggccgua

SEQ ID NO: 595352 - RNA, 22 nt, Human
agcucuccaucuaucugugaug

SEQ ID NO: 595353 - RNA, 22 nt, Human
ucugggcucuuaguguacccuc

SEQ ID NO: 595354 - RNA, 22 nt, Human
uguuacauuggaguuguuuaga

SEQ ID NO: 595355 - RNA, 22 nt, Human
uagcagaaccagucagugagcc

SEQ ID NO: 595356 - RNA, 22 nt, Human
ucuccugggaggacaaggaagg

SEQ ID NO: 595357 - RNA, 22 nt, Human
gaaaggagaggguuaaggagcu

SEQ ID NO: 595358 - RNA, 22 nt, Human
agcaggggcaggguuuugugcu

SEQ ID NO: 595359 - RNA, 16 nt, Human
uucucugggguugugc

SEQ ID NO: 595360 - RNA, 19 nt, Human
caggaacauggagggaggg

SEQ ID NO: 595361 - RNA, 22 nt, Human
ccucugcccuuuuccuguauca

SEQ ID NO: 595362 - RNA, 22 nt, Human
uuccugaugcacacagucauuu

SEQ ID NO: 595363 - RNA, 22 nt, Human
uugaagacacagacauauagag

SEQ ID NO: 595364 - RNA, 22 nt, Human
ggacuggacucucaggcucaca

SEQ ID NO: 595365 - RNA, 22 nt, Human
ucuguccuccacacuguaaguu

SEQ ID NO: 595366 - RNA, 22 nt, Human
ucauuucuccgaccugcugucc

SEQ ID NO: 595367 - RNA, 22 nt, Human
uauggaaaguguuuucuucugu

SEQ ID NO: 595368 - RNA, 22 nt, Human
ugcagcccuuccuuccucuggg

SEQ ID NO: 595369 - RNA, 18 nt, Human
guuuugaauugucuuaca

SEQ ID NO: 595370 - RNA, 22 nt, Human
ugggagcaguucagguguggcu

SEQ ID NO: 595371 - RNA, 22 nt, Human
aauuagaagggaguuauugaua

SEQ ID NO: 595372 - RNA, 22 nt, Human
guggaaggaauuaacagacuag

SEQ ID NO: 595373 - RNA, 22 nt, Human
agcuuccuguugagagagggag

SEQ ID NO: 595374 - RNA, 22 nt, Human
agucacagaaacccaggugugg

SEQ ID NO: 595375 - RNA, 22 nt, Human
augucugagucugcuccaguug

SEQ ID NO: 595376 - RNA, 22 nt, Human
uacaauagggcuuuuguuuaug

SEQ ID NO: 595377 - RNA, 22 nt, Human
ucugaaauuccuuccagacuuu

SEQ ID NO: 595378 - RNA, 22 nt, Human
cacugcaaccuccagcucucag

SEQ ID NO: 595379 - RNA, 17 nt, Human
accaccucucaccagca

SEQ ID NO: 595380 - RNA, 22 nt, Human
ugguggcugcucccugccuuga

SEQ ID NO: 595381 - RNA, 22 nt, Human
gcugaagagagaugcguccagc

SEQ ID NO: 595382 - RNA, 19 nt, Human
agccagaacuaguguuucu

SEQ ID NO: 595383 - RNA, 22 nt, Human
uauugcagacaaaaugagcuac

SEQ ID NO: 595384 - RNA, 22 nt, Human
gaccuucaguguguuucucaca

SEQ ID NO: 595385 - RNA, 22 nt, Human
uugcagaugaagaaagugguag

SEQ ID NO: 595386 - RNA, 22 nt, Human
cagcuuugaaacauggcucuag

SEQ ID NO: 595387 - RNA, 22 nt, Human
agcugggcugaugacucauguu

SEQ ID NO: 595388 - RNA, 22 nt, Human
ugugaaauugaaugcccauugc

SEQ ID NO: 595389 - RNA, 22 nt, Human
agcagagcagaaugugaaggug

SEQ ID NO: 595390 - RNA, 22 nt, Human
aucauucagucucugggacagu

SEQ ID NO: 595391 - RNA, 22 nt, Human
ucccugagacucuggaguguaa

SEQ ID NO: 595392 - RNA, 22 nt, Human
cuagggagacucgcaggacuca

SEQ ID NO: 595393 - RNA, 22 nt, Human
auaauuaucucagacacuuguu

SEQ ID NO: 595394 - RNA, 22 nt, Human
ucuucuguggcucucaccaccc

SEQ ID NO: 595395 - RNA, 22 nt, Human
uggaccaugagcugcagguguu

SEQ ID NO: 595396 - RNA, 22 nt, Human
cugacucagcagcugaugaucc

SEQ ID NO: 595397 - RNA, 22 nt, Human
uaaagacaauuucgagcuguag

SEQ ID NO: 595398 - RNA, 22 nt, Human
guuguuuuauaggcucaugccu

SEQ ID NO: 595399 - RNA, 22 nt, Human
uuuucuuggaguggcuguccuu

SEQ ID NO: 595400 - RNA, 21 nt, Human
guguuggcauauggugguuga

SEQ ID NO: 595401 - RNA, 22 nt, Human
ccaguggcuacagggggguuga

SEQ ID NO: 595402 - RNA, 22 nt, Human
gcaguguuaccucuucaguggg

SEQ ID NO: 595403 - RNA, 22 nt, Human
accuuauuuugaaauagauugu

SEQ ID NO: 595404 - RNA, 22 nt, Human
aaagcagagcagggcacuuaug

SEQ ID NO: 595405 - RNA, 22 nt, Human
uccugggugaaagaacaggcag

SEQ ID NO: 595406 - RNA, 22 nt, Human
gcuuagaaagugauugauacau

SEQ ID NO: 595407 - RNA, 22 nt, Human
ggaggcugcugccucacguggg

SEQ ID NO: 595408 - RNA, 21 nt, Human
aggucccagguuugggcagca

SEQ ID NO: 595409 - RNA, 22 nt, Human
acuuccagcugcccugugugcu

SEQ ID NO: 595410 - RNA, 22 nt, Human
uccuuaggcaauuugggagagu

SEQ ID NO: 595411 - RNA, 22 nt, Human
caggaaauggcugaauaaauuc

SEQ ID NO: 595412 - RNA, 22 nt, Human
ugccugcccugaaaacugccca

SEQ ID NO: 595413 - RNA, 22 nt, Human
acagagauguggaugagggauu

SEQ ID NO: 595414 - RNA, 20 nt, Human
ccagucccugagcaccaggg

SEQ ID NO: 595415 - RNA, 22 nt, Human
ugggaagcugcauuuuaacaag

SEQ ID NO: 595416 - RNA, 22 nt, Human
aauuaagaaaauguuuuaugau

SEQ ID NO: 595417 - RNA, 22 nt, Human
accagagggagacuuccucuuc

SEQ ID NO: 595418 - RNA, 22 nt, Human
gaggaugguaugaggcaagcaa

SEQ ID NO: 595419 - RNA, 22 nt, Human
gaccucagugaauggucaugua

SEQ ID NO: 595420 - RNA, 22 nt, Human
uggaaagcaguucuuagaaucg

SEQ ID NO: 595421 - RNA, 22 nt, Human
ccugggcucuauccugacccag

SEQ ID NO: 595422 - RNA, 22 nt, Human
gauguagagggaagauuuuaaa

SEQ ID NO: 595423 - RNA, 22 nt, Human
agcagcaccuguccucgcugcu

SEQ ID NO: 595424 - RNA, 22 nt, Human
uccaggcuggacaugaggcggg

SEQ ID NO: 595425 - RNA, 20 nt, Human
cccaggaguuugcucuuacu

SEQ ID NO: 595426 - RNA, 22 nt, Human
acugcccuguaacugccaggua

SEQ ID NO: 595427 - RNA, 22 nt, Human
aggccuggguguucaccagaag

SEQ ID NO: 595428 - RNA, 22 nt, Human
ugggccuccugcccuggccuag

SEQ ID NO: 595429 - RNA, 22 nt, Human
gcugccugcucggcuccuggga

SEQ ID NO: 595430 - RNA, 21 nt, Human
ucaagacagcauauuuaagaa

SEQ ID NO: 595431 - RNA, 22 nt, Human
aaagacuacacgggaaagagcu

SEQ ID NO: 595432 - RNA, 22 nt, Human
acugccacguuccaggcuuagc

SEQ ID NO: 595433 - RNA, 22 nt, Human
aguaaacaguaucuuuaguguc

SEQ ID NO: 595434 - RNA, 22 nt, Human
caaguuuuagaaauaucuggau

SEQ ID NO: 595435 - RNA, 22 nt, Human
ugcacacauuaaggauacacag

SEQ ID NO: 595436 - RNA, 22 nt, Human
agcugugucauccuggaaaaug

SEQ ID NO: 595437 - RNA, 22 nt, Human
cugguggagagugggcucugga

SEQ ID NO: 595438 - RNA, 19 nt, Human
uguagcaguuuaaaacaac

SEQ ID NO: 595439 - RNA, 22 nt, Human
aggcaccugagguggccagccu

SEQ ID NO: 595440 - RNA, 22 nt, Human
ccugaccacccuuggacaaggu

SEQ ID NO: 595441 - RNA, 22 nt, Human
auuuccuucaucagccuauccu

SEQ ID NO: 595442 - RNA, 22 nt, Human
cagaccaguagggcucauccca

SEQ ID NO: 595443 - RNA, 22 nt, Human
ccugggaguggcacucacagca

SEQ ID NO: 595444 - RNA, 22 nt, Human
aaaugaugcucacagauuagug

SEQ ID NO: 595445 - RNA, 22 nt, Human
cuucucuucccagggacacagg

SEQ ID NO: 595446 - RNA, 22 nt, Human
ucucagggaguugaggcugccu

SEQ ID NO: 595447 - RNA, 22 nt, Human
ucccuucuggcagcagugugag

SEQ ID NO: 595448 - RNA, 22 nt, Human
ugcugaauucuaccauccauuu

SEQ ID NO: 595449 - RNA, 22 nt, Human
aggcuguguuuaagugguaaug

SEQ ID NO: 595450 - RNA, 22 nt, Human
ugaguaucaauuacauaguugu

SEQ ID NO: 595451 - RNA, 22 nt, Human
auguuauggcucaaacauuugg

SEQ ID NO: 595452 - RNA, 22 nt, Human
uucuaguguccuuggacuugcu

SEQ ID NO: 595453 - RNA, 22 nt, Human
agccacagugggcuaccagcuc

SEQ ID NO: 595454 - RNA, 22 nt, Human
ugagguagguaccauuaucacu

SEQ ID NO: 595455 - RNA, 22 nt, Human
auacacacaaucagguuuugua

SEQ ID NO: 595456 - RNA, 22 nt, Human
cuggcccccacaccugucaggg

SEQ ID NO: 595457 - RNA, 22 nt, Human
ugggcagaaaucaguaucagau

SEQ ID NO: 595458 - RNA, 22 nt, Human
gagcccagggugaaauagcagc

SEQ ID NO: 595459 - RNA, 22 nt, Human
ucugcccacagccuccugucca

SEQ ID NO: 595460 - RNA, 22 nt, Human
agauuucacaugcugcucuauu

SEQ ID NO: 595461 - RNA, 22 nt, Human
ccagguggaaggucugugcucu

SEQ ID NO: 595462 - RNA, 23 nt, Human
ugagcagcuaaaggugaugcggg

SEQ ID NO: 595463 - RNA, 23 nt, Human
agguccuggacauaugugcauca

SEQ ID NO: 595464 - RNA, 22 nt, Human
cugagcccauugggugcuguua

SEQ ID NO: 595465 - RNA, 22 nt, Human
uaaagucaucuuuacaucuuug

SEQ ID NO: 595466 - RNA, 22 nt, Human
ggguggagagaaagaaacguga

SEQ ID NO: 595467 - RNA, 22 nt, Human
uuuuaauuuuagcccuucuggu

SEQ ID NO: 595468 - RNA, 18 nt, Human
gagguagauaagauuuuc

SEQ ID NO: 595469 - RNA, 22 nt, Human
uuucaguucuguacaaguccag

SEQ ID NO: 595470 - RNA, 22 nt, Human
ugagcuggaggacaggagggua

SEQ ID NO: 595471 - RNA, 22 nt, Human
cuaguucuagaucccugaggaa

SEQ ID NO: 595472 - RNA, 22 nt, Human
ugggaugagaagugcgaggguu

SEQ ID NO: 595473 - RNA, 22 nt, Human
guaaauuauuucaagaucaucu

SEQ ID NO: 595474 - RNA, 21 nt, Human
uucucuccauaugcccagccc

SEQ ID NO: 595475 - RNA, 22 nt, Human
ugggggugguucuugccuccag

SEQ ID NO: 595476 - RNA, 22 nt, Human
ugugacuuuucacaggcugguc

SEQ ID NO: 595477 - RNA, 21 nt, Human
cacugcagccuugaccugggc

SEQ ID NO: 595478 - RNA, 22 nt, Human
caucucuccacggcagcucucg

SEQ ID NO: 595479 - RNA, 22 nt, Human
gcaguggggaaugcuggggaga

SEQ ID NO: 595480 - RNA, 22 nt, Human
ucagugugauuaggcuaucuga

SEQ ID NO: 595481 - RNA, 22 nt, Human
aagugguguguuggaagaaauc

SEQ ID NO: 595482 - RNA, 21 nt, Human
ggcaugagggcagugagcaga

SEQ ID NO: 595483 - RNA, 22 nt, Human
caggacagacagaaugccuaac

SEQ ID NO: 595484 - RNA, 22 nt, Human
uuucauugaacuaaagaaucug

SEQ ID NO: 595485 - RNA, 22 nt, Human
auagugauugaaaacauucugu

SEQ ID NO: 595486 - RNA, 22 nt, Human
uaucaucacuguaauccguuga

SEQ ID NO: 595487 - RNA, 22 nt, Human
uaaaacuuugaaggugcucagu

SEQ ID NO: 595488 - RNA, 22 nt, Human
agagcuggcugguagcccugau

SEQ ID NO: 595489 - RNA, 22 nt, Human
uguagaaaauuggagcauucau

SEQ ID NO: 595490 - RNA, 19 nt, Human
cuggaaugagaacaugccc

SEQ ID NO: 595491 - RNA, 22 nt, Human
ucagggaaugaugcacacaguu

SEQ ID NO: 595492 - RNA, 22 nt, Human
aaccuuugaggggagcucuuuc

SEQ ID NO: 595493 - RNA, 22 nt, Human
cuucuacacaucccucuugcuu

SEQ ID NO: 595494 - RNA, 22 nt, Human
gggcccagcccucugcucacug

SEQ ID NO: 595495 - RNA, 17 nt, Human
aauugucagcaguagcu

SEQ ID NO: 595496 - RNA, 22 nt, Human
cuggcugcuuguagacucgacu

SEQ ID NO: 595497 - RNA, 21 nt, Human
cuguggaagggaacuagaggg

SEQ ID NO: 595498 - RNA, 22 nt, Human
uguacacaaugauaaauuauua

SEQ ID NO: 595499 - RNA, 22 nt, Human
aaaugcacacaccaggaaacua

SEQ ID NO: 595500 - RNA, 22 nt, Human
cugcagaaagcugagaugauua

SEQ ID NO: 595501 - RNA, 22 nt, Human
uuucuugaaguccuaacccuca

SEQ ID NO: 595502 - RNA, 18 nt, Human
gcacucugacugcagagc

SEQ ID NO: 595503 - RNA, 22 nt, Human
gagaacacuaaugguuucuuaa

SEQ ID NO: 595504 - RNA, 22 nt, Human
ggagaagggacagacucagcuu

SEQ ID NO: 595505 - RNA, 22 nt, Human
cauagcgguauuccacgugguu

SEQ ID NO: 595506 - RNA, 20 nt, Human
uuggccaaaucuuagucaug

SEQ ID NO: 595507 - RNA, 23 nt, Human
agggcugaugccauugcagcucu

SEQ ID NO: 595508 - RNA, 22 nt, Human
ugcagaaccaguccucagaccc

SEQ ID NO: 595509 - RNA, 22 nt, Human
ucauaaugaccccagaguccgc

SEQ ID NO: 595510 - RNA, 22 nt, Human
ggccuggacaccugaggucuua

SEQ ID NO: 595511 - RNA, 22 nt, Human
uaucuagauggauuuuagugaa

SEQ ID NO: 595512 - RNA, 22 nt, Human
ccagcuggugggucuuucucug

SEQ ID NO: 595513 - RNA, 22 nt, Human
gaguccuucuggcuggcaggau

SEQ ID NO: 595514 - RNA, 22 nt, Human
aacaucuuugauaaacuuagug

SEQ ID NO: 595515 - RNA, 23 nt, Human
cagugcagggcaacucagacucc

SEQ ID NO: 595516 - RNA, 22 nt, Human
ggcugcccucgucuacugccca

SEQ ID NO: 595517 - RNA, 22 nt, Human
agcucccaggcagucaugagga

SEQ ID NO: 595518 - RNA, 17 nt, Human
uggcuucccugggccac

SEQ ID NO: 595519 - RNA, 22 nt, Human
gggggcuguccugugcauugua

SEQ ID NO: 595520 - RNA, 22 nt, Human
acaguggaagcaugaugcuauc

SEQ ID NO: 595521 - RNA, 22 nt, Human
ugggccaggugcagugcuuuag

SEQ ID NO: 595522 - RNA, 21 nt, Human
aggaggaacccguggcugggc

SEQ ID NO: 595523 - RNA, 20 nt, Human
gcuugcuuugucugaugggc

SEQ ID NO: 595524 - RNA, 22 nt, Human
agucuggccuugccuugucgag

SEQ ID NO: 595525 - RNA, 22 nt, Human
uuucaaagaccauuaacuauca

SEQ ID NO: 595526 - RNA, 18 nt, Human
gucacagcagagaacugc

SEQ ID NO: 595527 - RNA, 21 nt, Human
uuuaugcagauaaugcuauuu

SEQ ID NO: 595528 - RNA, 22 nt, Human
ugccucaggcaccuggcagguu

SEQ ID NO: 595529 - RNA, 22 nt, Human
gaauguuagagauucuuagguu

SEQ ID NO: 595530 - RNA, 22 nt, Human
agugucuuugucucucaagcac

SEQ ID NO: 595531 - RNA, 22 nt, Human
gagcaaugcccuucaccagccc

SEQ ID NO: 595532 - RNA, 22 nt, Human
cugagcuuccaguuccuccagg

SEQ ID NO: 595533 - RNA, 22 nt, Human
ugaaagaguuugacaugauucu

SEQ ID NO: 595534 - RNA, 20 nt, Human
guccugggagccacagcaca

SEQ ID NO: 595535 - RNA, 22 nt, Human
aggggccauuguucugcccgcu

SEQ ID NO: 595536 - RNA, 22 nt, Human
guaacaaaggauaacuugguuu

SEQ ID NO: 595537 - RNA, 22 nt, Human
gcucuguguccacagcuggaaa

SEQ ID NO: 595538 - RNA, 22 nt, Human
augagguacuaguauauacgua

SEQ ID NO: 595539 - RNA, 21 nt, Human
aguggggucucuguggaggcc

SEQ ID NO: 595540 - RNA, 22 nt, Human
ucugggauuuuugacacugaag

SEQ ID NO: 595541 - RNA, 22 nt, Human
cucuggcugucccgaugagcag

SEQ ID NO: 595542 - RNA, 22 nt, Human
uccaccagcuucuucaccagcu

SEQ ID NO: 595543 - RNA, 22 nt, Human
caguauuuguucccuaucaaug

SEQ ID NO: 595544 - RNA, 22 nt, Human
ccugccugaaggucagccaccc

SEQ ID NO: 595545 - RNA, 22 nt, Human
guccucugagggggcugcacgc

SEQ ID NO: 595546 - RNA, 22 nt, Human
agugacuggugugaaguuaaau

SEQ ID NO: 595547 - RNA, 22 nt, Human
gaaagaaucaacuaugucucug

SEQ ID NO: 595548 - RNA, 22 nt, Human
gugcaauaaauaaauagauugu

SEQ ID NO: 595549 - RNA, 22 nt, Human
ugggcaagucacuucugucuuu

SEQ ID NO: 595550 - RNA, 22 nt, Human
ugugccugaguuggcugaguac

SEQ ID NO: 595551 - RNA, 17 nt, Human
cugaggcccagggccca

SEQ ID NO: 595552 - RNA, 22 nt, Human
ugguaagaacccaucagagaag

SEQ ID NO: 595553 - RNA, 22 nt, Human
caggcacuuugcugggggcgca

SEQ ID NO: 595554 - RNA, 22 nt, Human
cucagggaggccucugcugguu

SEQ ID NO: 595555 - RNA, 22 nt, Human
aggucacaggcuuugaaaucaa

SEQ ID NO: 595556 - RNA, 22 nt, Human
uaaugucuguguuucagugcag

SEQ ID NO: 595557 - RNA, 19 nt, Human
aaaugugaugguacaauuc

SEQ ID NO: 595558 - RNA, 22 nt, Human
gacacagaguauuuuaaguacu

SEQ ID NO: 595559 - RNA, 22 nt, Human
uaaaagacauauaacuguagga

SEQ ID NO: 595560 - RNA, 22 nt, Human
acucugccccgaguucugggaa

SEQ ID NO: 595561 - RNA, 22 nt, Human
auuguucaaagugcuuugcaug

SEQ ID NO: 595562 - RNA, 20 nt, Human
cagcccuugauuuacaaucc

SEQ ID NO: 595563 - RNA, 22 nt, Human
gagaggcuugugugaagaacaa

SEQ ID NO: 595564 - RNA, 23 nt, Human
uuucuguuggguauauauccaag

SEQ ID NO: 595565 - RNA, 19 nt, Human
gagguggguccccgcagcc

SEQ ID NO: 595566 - RNA, 22 nt, Human
acauugcaauuagguaccuaug

SEQ ID NO: 595567 - RNA, 22 nt, Human
auagaauaugacuuuuagaucc

SEQ ID NO: 595568 - RNA, 22 nt, Human
cugcacaguggacagugaagau

SEQ ID NO: 595569 - RNA, 22 nt, Human
cuguaaaacugcuuaaguaugc

SEQ ID NO: 595570 - RNA, 20 nt, Human
ccagaggcugacagacuuug

SEQ ID NO: 595571 - RNA, 22 nt, Human
uccagggccuuaccucuucaga

SEQ ID NO: 595572 - RNA, 22 nt, Human
guggccagucccgaugcuuguu

SEQ ID NO: 595573 - RNA, 19 nt, Human
caucacauggucugaugaa

SEQ ID NO: 595574 - RNA, 20 nt, Human
auguccucagccacugcccu

SEQ ID NO: 595575 - RNA, 22 nt, Human
uuacagaugggguugcaauaaa

SEQ ID NO: 595576 - RNA, 22 nt, Human
ugcagguaaauuuguggaggau

SEQ ID NO: 595577 - RNA, 22 nt, Human
cagcugcccaagccccagaugu

SEQ ID NO: 595578 - RNA, 22 nt, Human
ggccaggcgaugaccccuccac

SEQ ID NO: 595579 - RNA, 22 nt, Human
ugcagguacuugacaacuuggg

SEQ ID NO: 595580 - RNA, 22 nt, Human
ucauaaauugauuaugugcuuu

SEQ ID NO: 595581 - RNA, 22 nt, Human
ccagucuguucucaccucugag

SEQ ID NO: 595582 - RNA, 22 nt, Human
agaucaagcacugugcaaaaau

SEQ ID NO: 595583 - RNA, 22 nt, Human
gugaagcagggaaggaaaggau

SEQ ID NO: 595584 - RNA, 21 nt, Human
uccuccuggccaggcggcccc

SEQ ID NO: 595585 - RNA, 22 nt, Human
gugcuuccucugccaacacucu

SEQ ID NO: 595586 - RNA, 22 nt, Human
gucuccagggacacacuagccg

SEQ ID NO: 595587 - RNA, 22 nt, Human
gccuggagcucggcugagggcg

SEQ ID NO: 595588 - RNA, 22 nt, Human
aaugcuuuagcagugauuagug

SEQ ID NO: 595589 - RNA, 22 nt, Human
ugagcuuacgugggaacagacu

SEQ ID NO: 595590 - RNA, 22 nt, Human
cugaggaagagguaccauuugu

SEQ ID NO: 595591 - RNA, 22 nt, Human
cuuggaacaaauuaaacaauac

SEQ ID NO: 595592 - RNA, 22 nt, Human
aggcucuuugagacuaccugga

SEQ ID NO: 595593 - RNA, 22 nt, Human
ucagugucacaggaugcuaugc

SEQ ID NO: 595594 - RNA, 19 nt, Human
caagauuuguucacacaug

SEQ ID NO: 595595 - RNA, 22 nt, Human
uccugggaaguggcuggcugag

SEQ ID NO: 595596 - RNA, 22 nt, Human
uuaauuacaaaacacauagguu

SEQ ID NO: 595597 - RNA, 22 nt, Human
ccauuucauugccuguaaagug

SEQ ID NO: 595598 - RNA, 22 nt, Human
aauuuggugucuuaguuucccu

SEQ ID NO: 595599 - RNA, 22 nt, Human
gugaacaucagauuacaugaga

SEQ ID NO: 595600 - RNA, 22 nt, Human
uaccaggucugugcagguguca

SEQ ID NO: 595601 - RNA, 22 nt, Human
ugguaggagggaaaugcggguu

SEQ ID NO: 595602 - RNA, 22 nt, Human
auuguuuuguuucccagugacu

SEQ ID NO: 595603 - RNA, 22 nt, Human
aauaauacaugagauuaauguu

SEQ ID NO: 595604 - RNA, 22 nt, Human
ccaguucuuucugugugcaaca

SEQ ID NO: 595605 - RNA, 22 nt, Human
uucugccugauguagucauacc

SEQ ID NO: 595606 - RNA, 22 nt, Human
ggaggcuugaugaucuuggaua

SEQ ID NO: 595607 - RNA, 22 nt, Human
cugcccuguaucuucucccaau

SEQ ID NO: 595608 - RNA, 22 nt, Human
cugggcccugaagacagucagg

SEQ ID NO: 595609 - RNA, 22 nt, Human
gagaagaacuugggcaaaguca

SEQ ID NO: 595610 - RNA, 22 nt, Human
acugggaagagagaauucuguc

SEQ ID NO: 595611 - RNA, 22 nt, Human
ccaggugccuccagucacagug

SEQ ID NO: 595612 - RNA, 22 nt, Human
ucugauaagacagcugauuuga

SEQ ID NO: 595613 - RNA, 22 nt, Human
agagauggagagcacuggggcu

SEQ ID NO: 595614 - RNA, 22 nt, Human
acagaggccccgugggagagcc

SEQ ID NO: 595615 - RNA, 22 nt, Human
aagcaccugcaguugacaaaaa

SEQ ID NO: 595616 - RNA, 22 nt, Human
ugcuuuaaaguauuucucgcaa

SEQ ID NO: 595617 - RNA, 22 nt, Human
ucucugggagcaauuguuugcu

SEQ ID NO: 595618 - RNA, 22 nt, Human
gccuguccuggaugcucugcaa

SEQ ID NO: 595619 - RNA, 22 nt, Human
agcagggcuggggcacgagcca

SEQ ID NO: 595620 - RNA, 22 nt, Human
ccucucucagcuugcugcaacu

SEQ ID NO: 595621 - RNA, 22 nt, Human
aaauagcagccuuuaguuaaca

SEQ ID NO: 595622 - RNA, 23 nt, Human
uccaggcugggacuucaacuggc

SEQ ID NO: 595623 - RNA, 22 nt, Human
gcccaggauggagaauaguggu

SEQ ID NO: 595624 - RNA, 21 nt, Human
ggcugcagggagcccuggggu

SEQ ID NO: 595625 - RNA, 22 nt, Human
gaagagcuaaaggcacaggcuu

SEQ ID NO: 595626 - RNA, 22 nt, Human
gagcuuaggccagggacaggga

SEQ ID NO: 595627 - RNA, 22 nt, Human
aaugcaaacuucuuguuacuug

SEQ ID NO: 595628 - RNA, 22 nt, Human
ggagggggaagaagcuaaagac

SEQ ID NO: 595629 - RNA, 19 nt, Human
gaggcgaggcgugcaggag

SEQ ID NO: 595630 - RNA, 22 nt, Human
gacccuggagccgucugaggca

SEQ ID NO: 595631 - RNA, 20 nt, Human
cucucuccaucucaguggcc

SEQ ID NO: 595632 - RNA, 22 nt, Human
ucagaagagcuggugcugccug

SEQ ID NO: 595633 - RNA, 17 nt, Human
aggugcagaggcagagc

SEQ ID NO: 595634 - RNA, 22 nt, Human
ugggcacagagucccaucugcc

SEQ ID NO: 595635 - RNA, 22 nt, Human
guggcugcagcggcuguggaga

SEQ ID NO: 595636 - RNA, 22 nt, Human
agccugagcugccugccgccuc

SEQ ID NO: 595637 - RNA, 22 nt, Human
gcugaagcugcagcaggaggaa

SEQ ID NO: 595638 - RNA, 22 nt, Human
uagcuaguguuuggagauggau

SEQ ID NO: 595639 - RNA, 22 nt, Human
ugagaagauugggcagagugga

SEQ ID NO: 595640 - RNA, 22 nt, Human
ucagcuggagaugagaaccgaa

SEQ ID NO: 595641 - RNA, 17 nt, Human
cucagagcaggacagaa

SEQ ID NO: 595642 - RNA, 22 nt, Human
guuacauuacuugugcaguugu

SEQ ID NO: 595643 - RNA, 22 nt, Human
guuagcaugacuuagaaucagg

SEQ ID NO: 595644 - RNA, 22 nt, Human
cuggagcuaggaaguccaagau

SEQ ID NO: 595645 - RNA, 22 nt, Human
ccacucccuuccgguccagggc

SEQ ID NO: 595646 - RNA, 22 nt, Human
ucaucugaccacuuuaucucuc

SEQ ID NO: 595647 - RNA, 22 nt, Human
uggcuucugcuuucaguggagg

SEQ ID NO: 595648 - RNA, 19 nt, Human
gaguccugugcuccuuguu

SEQ ID NO: 595649 - RNA, 22 nt, Human
gagcagaacuacucacauaucg

SEQ ID NO: 595650 - RNA, 22 nt, Human
agaucuuuagugaagcuaaauc

SEQ ID NO: 595651 - RNA, 22 nt, Human
cuuuaugaaggaacaaugcucc

SEQ ID NO: 595652 - RNA, 19 nt, Human
ccauggcaaugaucugaug

SEQ ID NO: 595653 - RNA, 22 nt, Human
cuacaguagagaggauguagaa

SEQ ID NO: 595654 - RNA, 22 nt, Human
guucucucaaacuuuguguuug

SEQ ID NO: 595655 - RNA, 22 nt, Human
aaaucagagaauauauuuagaa

SEQ ID NO: 595656 - RNA, 22 nt, Human
ggcugagggccagggcuagucu

SEQ ID NO: 595657 - RNA, 22 nt, Human
aacuucagagcugugugguuug

SEQ ID NO: 595658 - RNA, 22 nt, Human
ugcagaagaaaacagcugugug

SEQ ID NO: 595659 - RNA, 22 nt, Human
auuuaagauugcguauucaugu

SEQ ID NO: 595660 - RNA, 22 nt, Human
gaaauuuacaacuuucucaugg

SEQ ID NO: 595661 - RNA, 22 nt, Human
ggucugagcuugagcccaugcu

SEQ ID NO: 595662 - RNA, 22 nt, Human
ggagccagugcccucuggugga

SEQ ID NO: 595663 - RNA, 22 nt, Human
aaaucucagcccuuauuuuaga

SEQ ID NO: 595664 - RNA, 22 nt, Human
uccaguucuaggucacucucug

SEQ ID NO: 595665 - RNA, 22 nt, Human
cagguggccaguacucaaggau

SEQ ID NO: 595666 - RNA, 22 nt, Human
uuuuaugugcuggacuggcagu

SEQ ID NO: 595667 - RNA, 22 nt, Human
gggcauggugagggauaugaag

SEQ ID NO: 595668 - RNA, 22 nt, Human
ucccaggcugggggccugaagu

SEQ ID NO: 595669 - RNA, 22 nt, Human
cagcagcuucuguugaucagaa

SEQ ID NO: 595670 - RNA, 22 nt, Human
cugaggcuggggaagggaagug

SEQ ID NO: 595671 - RNA, 22 nt, Human
uucccuggcaugaguguaagau

SEQ ID NO: 595672 - RNA, 22 nt, Human
agaggggcccgguucuccgucu

SEQ ID NO: 595673 - RNA, 22 nt, Human
aaggccaguggauaaaaccucu

SEQ ID NO: 595674 - RNA, 22 nt, Human
uucuacaugguugcucagaggg

SEQ ID NO: 595675 - RNA, 22 nt, Human
ggcuaggcaggcucagagccua

SEQ ID NO: 595676 - RNA, 22 nt, Human
ucccugcagccccugagccuuc

SEQ ID NO: 595677 - RNA, 22 nt, Human
uguggggacccaugccaugggc

SEQ ID NO: 595678 - RNA, 22 nt, Human
ucuggaugaaagggcuauauau

SEQ ID NO: 595679 - RNA, 22 nt, Human
ccuggcaggcaagaggaaggga

SEQ ID NO: 595680 - RNA, 21 nt, Human
ugaaugaucugguugccuuuu

SEQ ID NO: 595681 - RNA, 22 nt, Human
agcaguaagacuuuuuucugug

SEQ ID NO: 595682 - RNA, 22 nt, Human
auuuccacauaagggaaauaag

SEQ ID NO: 595683 - RNA, 22 nt, Human
ggagccagagggaugcaguuga

SEQ ID NO: 595684 - RNA, 20 nt, Human
gcugaggggucuauggcaua

SEQ ID NO: 595685 - RNA, 22 nt, Human
uccuggggcucugagcgagaca

SEQ ID NO: 595686 - RNA, 22 nt, Human
aaaaagacuuccaacucaggag

SEQ ID NO: 595687 - RNA, 22 nt, Human
ggaggaguguggggcacucugc

SEQ ID NO: 595688 - RNA, 22 nt, Human
augaagauuuauaauugccuuu

SEQ ID NO: 595689 - RNA, 22 nt, Human
gcugccuccugaaagcgcucug

SEQ ID NO: 595690 - RNA, 22 nt, Human
aguaacagagcauggguucaga

SEQ ID NO: 595691 - RNA, 22 nt, Human
gacaaugcauugugauugugac

SEQ ID NO: 595692 - RNA, 22 nt, Human
gggcuaggcuuggccagcacug

SEQ ID NO: 595693 - RNA, 23 nt, Human
uuuaccagaauagcaggggagag

SEQ ID NO: 595694 - RNA, 23 nt, Human
agagggugcaacauggggaucua

SEQ ID NO: 595695 - RNA, 22 nt, Human
uaauucuucaggccuuuugucu

SEQ ID NO: 595696 - RNA, 22 nt, Human
ugaagcaguuacuggguguuaa

SEQ ID NO: 595697 - RNA, 19 nt, Human
cuggcuucaagcaguccuc

SEQ ID NO: 595698 - RNA, 22 nt, Human
ucuuuauaaaagucauuauguc

SEQ ID NO: 595699 - RNA, 22 nt, Human
uccaugagggacacuggaugcu

SEQ ID NO: 595700 - RNA, 22 nt, Human
ucaacugguucuugaauguaua

SEQ ID NO: 595701 - RNA, 22 nt, Human
gguucuccuugagugucccagg

SEQ ID NO: 595702 - RNA, 19 nt, Human
uucucauuccuuuccacuu

SEQ ID NO: 595703 - RNA, 22 nt, Human
aaugggaagccagaagacaagg

SEQ ID NO: 595704 - RNA, 22 nt, Human
uugaagagucuagauugguuau

SEQ ID NO: 595705 - RNA, 22 nt, Human
uacaaaggaggugcauagaaca

SEQ ID NO: 595706 - RNA, 22 nt, Human
uugcagggaccugcagaaagcu

SEQ ID NO: 595707 - RNA, 21 nt, Human
ggccucugucauccugggaag

SEQ ID NO: 595708 - RNA, 22 nt, Human
uuuauuaauguagcauccaugg

SEQ ID NO: 595709 - RNA, 22 nt, Human
ugucaaguuguuaaguucuggg

SEQ ID NO: 595710 - RNA, 22 nt, Human
gaagaacugacaaacuagauca

SEQ ID NO: 595711 - RNA, 20 nt, Human
ggccuuggaauagcacagcu

SEQ ID NO: 595712 - RNA, 20 nt, Human
gcuccaggucagagaggacg

SEQ ID NO: 595713 - RNA, 22 nt, Human
cagaggaagagauacaagcccu

SEQ ID NO: 595714 - RNA, 22 nt, Human
ggacauuucauaagaccauucu

SEQ ID NO: 595715 - RNA, 22 nt, Human
uggcccugcccucuucaucuuu

SEQ ID NO: 595716 - RNA, 20 nt, Human
gcugaggauuccuggccccu

SEQ ID NO: 595717 - RNA, 22 nt, Human
ucagccucucugaguccagacc

SEQ ID NO: 595718 - RNA, 22 nt, Human
ucugauguugugacaucacuuc

SEQ ID NO: 595719 - RNA, 22 nt, Human
ccugggugucaugggcagcugg

SEQ ID NO: 595720 - RNA, 22 nt, Human
uaggaagccuaaauuaaguggu

SEQ ID NO: 595721 - RNA, 22 nt, Human
uuauugucaaaaacaggacacu

SEQ ID NO: 595722 - RNA, 22 nt, Human
cagcagagcuuauuaacuaaaa

SEQ ID NO: 595723 - RNA, 22 nt, Human
auucuuggcccguccucacgca

SEQ ID NO: 595724 - RNA, 22 nt, Human
ccugaggucuagagucagggug

SEQ ID NO: 595725 - RNA, 22 nt, Human
ucuccagggacugaggcuggag

SEQ ID NO: 595726 - RNA, 22 nt, Human
ugggccucuguuuccucaucug

SEQ ID NO: 595727 - RNA, 22 nt, Human
ucacucagguucaugucuuugu

SEQ ID NO: 595728 - RNA, 18 nt, Human
uguagagccagguuugcc

SEQ ID NO: 595729 - RNA, 22 nt, Human
augacaaaagaagacaugaggu

SEQ ID NO: 595730 - RNA, 22 nt, Human
ucucugugugggagaucuuuuu

SEQ ID NO: 595731 - RNA, 22 nt, Human
uggacaggugcacacagcagcc

SEQ ID NO: 595732 - RNA, 22 nt, Human
aauguucagugccuuuaaacau

SEQ ID NO: 595733 - RNA, 22 nt, Human
uugaaaguuaggauuuagcugg

SEQ ID NO: 595734 - RNA, 22 nt, Human
cucuuauuuuauggcauuugug

SEQ ID NO: 595735 - RNA, 22 nt, Human
ucucucauagagaaaaauauau

SEQ ID NO: 595736 - RNA, 22 nt, Human
cagucucucuuguagugcagcu

SEQ ID NO: 595737 - RNA, 22 nt, Human
aggacagggauucaaacuccca

SEQ ID NO: 595738 - RNA, 22 nt, Human
aaugucauuuaggauuauguuu

SEQ ID NO: 595739 - RNA, 21 nt, Human
ugcaggcugugcgcuccugcc

SEQ ID NO: 595740 - RNA, 23 nt, Human
ugccagggcccugugugcaaugc

SEQ ID NO: 595741 - RNA, 22 nt, Human
gacugggccaaggucagcagcu

SEQ ID NO: 595742 - RNA, 22 nt, Human
ugacaauggggcacauggaaag

SEQ ID NO: 595743 - RNA, 22 nt, Human
agccagcuaccggggcuccugg

SEQ ID NO: 595744 - RNA, 22 nt, Human
uugcagggcaggaccauggaca

SEQ ID NO: 595745 - RNA, 22 nt, Human
cagagcagugaggaguugugua

SEQ ID NO: 595746 - RNA, 22 nt, Human
gugacauuucgugacgugagaa

SEQ ID NO: 595747 - RNA, 22 nt, Human
aggugccaauuuucagugaaca

SEQ ID NO: 595748 - RNA, 22 nt, Human
augggcugaggugggauagaag

SEQ ID NO: 595749 - RNA, 22 nt, Human
gcaaagaaugcagauuugccuc

SEQ ID NO: 595750 - RNA, 22 nt, Human
uuuuuaccuggaggauaaaugu

SEQ ID NO: 595751 - RNA, 22 nt, Human
aauaaauguuuguuggauguuu

SEQ ID NO: 595752 - RNA, 22 nt, Human
cugccuccuggcugauggguag

SEQ ID NO: 595753 - RNA, 19 nt, Human
cuuugcaggggauggguga

SEQ ID NO: 595754 - RNA, 22 nt, Human
cagggcuggguuaaaagcaggg

SEQ ID NO: 595755 - RNA, 22 nt, Human
aauuauggaauuuuuagagaag

SEQ ID NO: 595756 - RNA, 22 nt, Human
uuuuaugaagauaauuuucuga

SEQ ID NO: 595757 - RNA, 22 nt, Human
uucauaugcagauuaacaaaua

SEQ ID NO: 595758 - RNA, 18 nt, Human
agcuguuguugacucugu

SEQ ID NO: 595759 - RNA, 22 nt, Human
acugcagccuuugggcucauaa

SEQ ID NO: 595760 - RNA, 22 nt, Human
caguuucuuaucuucaaaauug

SEQ ID NO: 595761 - RNA, 17 nt, Human
gcaggcacugcugccug

SEQ ID NO: 595762 - RNA, 22 nt, Human
guuuccuauaacucaggcacca

SEQ ID NO: 595763 - RNA, 20 nt, Human
gguagcagcugcugucaucc

SEQ ID NO: 595764 - RNA, 22 nt, Human
auuagaaugacagaaaugaggc

SEQ ID NO: 595765 - RNA, 22 nt, Human
uuccccugucacagugguucuc

SEQ ID NO: 595766 - RNA, 21 nt, Human
guggcccugguguggcugcac

SEQ ID NO: 595767 - RNA, 21 nt, Human
ggcuccugcuuugugaggggc

SEQ ID NO: 595768 - RNA, 22 nt, Human
agggcugacacaccuuauccuc

SEQ ID NO: 595769 - RNA, 22 nt, Human
ugcccauguuucucuguauccc

SEQ ID NO: 595770 - RNA, 22 nt, Human
auaaaaaggacagauguggucu

SEQ ID NO: 595771 - RNA, 22 nt, Human
uccaagagaauacuggagagua

SEQ ID NO: 595772 - RNA, 22 nt, Human
caaaggcaacauauacuuguuu

SEQ ID NO: 595773 - RNA, 22 nt, Human
agagguggccaugggcgcugga

SEQ ID NO: 595774 - RNA, 22 nt, Human
auugugcaaauauuaucuguag

SEQ ID NO: 595775 - RNA, 22 nt, Human
gcugucucaugggugcuagucc

SEQ ID NO: 595776 - RNA, 22 nt, Human
augcaguuagcaguagcucccc

SEQ ID NO: 595777 - RNA, 22 nt, Human
ugaaagguuauuuaggucugcu

SEQ ID NO: 595778 - RNA, 22 nt, Human
cagcucagacgcaggucgagca

SEQ ID NO: 595779 - RNA, 22 nt, Human
ccauccugcauugcuauucaga

SEQ ID NO: 595780 - RNA, 22 nt, Human
ucuggaguaugugugaacggug

SEQ ID NO: 595781 - RNA, 22 nt, Human
uuauuugauuaguaaaccugua

SEQ ID NO: 595782 - RNA, 22 nt, Human
auggaagguccuacagagcgca

SEQ ID NO: 595783 - RNA, 22 nt, Human
cuucaggauuaauuuggggccu

SEQ ID NO: 595784 - RNA, 22 nt, Human
ugauguuuaauacuaugcuuuu

SEQ ID NO: 595785 - RNA, 21 nt, Human
uuacuaaacaaaacaugcagg

SEQ ID NO: 595786 - RNA, 22 nt, Human
aaagguuuucuaggguugaggg

SEQ ID NO: 595787 - RNA, 22 nt, Human
ggggcagcuaccggaaguaggg

SEQ ID NO: 595788 - RNA, 22 nt, Human
cagaauaaagguacaauugagu

SEQ ID NO: 595789 - RNA, 22 nt, Human
cugagggugcuauucuugccuu

SEQ ID NO: 595790 - RNA, 22 nt, Human
acauucuugaagugaaguuuau

SEQ ID NO: 595791 - RNA, 22 nt, Human
auuagcuuugguggaaaggagu

SEQ ID NO: 595792 - RNA, 15 nt, Human
cccaggaguucgaga

SEQ ID NO: 595793 - RNA, 22 nt, Human
uugauacaggccuucuagauga

SEQ ID NO: 595794 - RNA, 22 nt, Human
caucuuuaauuugugacaacua

SEQ ID NO: 595795 - RNA, 20 nt, Human
agauggguuaaagcuauggg

SEQ ID NO: 595796 - RNA, 22 nt, Human
uuugcuuaaaguucuuucuggu

SEQ ID NO: 595797 - RNA, 22 nt, Human
caguaacauuucaagguagagg

SEQ ID NO: 595798 - RNA, 22 nt, Human
gaaagaggaaggagauguauua

SEQ ID NO: 595799 - RNA, 22 nt, Human
ggccugaggcgucccagcugug

SEQ ID NO: 595800 - RNA, 22 nt, Human
uucugugaaucuuuuuucccac

SEQ ID NO: 595801 - RNA, 22 nt, Human
agucugaguaucucugagccag

SEQ ID NO: 595802 - RNA, 19 nt, Human
guggcucauguagugggcc

SEQ ID NO: 595803 - RNA, 22 nt, Human
auuauuguacuuucaauaaggu

SEQ ID NO: 595804 - RNA, 22 nt, Human
aagcuuugggcagaagaggauu

SEQ ID NO: 595805 - RNA, 22 nt, Human
aaaguccuuuuugccaugcaag

SEQ ID NO: 595806 - RNA, 22 nt, Human
acuuucucccacccacccgucu

SEQ ID NO: 595807 - RNA, 22 nt, Human
ucuucuuccucauuuauacaua

SEQ ID NO: 595808 - RNA, 22 nt, Human
gacaacugccccauuuuaaaug

SEQ ID NO: 595809 - RNA, 22 nt, Human
augcaagauguauagaagacuu

SEQ ID NO: 595810 - RNA, 22 nt, Human
ucugggcaugucugugaacacg

SEQ ID NO: 595811 - RNA, 21 nt, Human
gcuggcuuccugagggcugag

SEQ ID NO: 595812 - RNA, 22 nt, Human
cuccugucccggggaccgccga

SEQ ID NO: 595813 - RNA, 20 nt, Human
guuuuucuugggcgagcuau

SEQ ID NO: 595814 - RNA, 22 nt, Human
ccaggcacuuguuugccaggca

SEQ ID NO: 595815 - RNA, 22 nt, Human
uucucagagugaccaagucuuu

SEQ ID NO: 595816 - RNA, 22 nt, Human
ucuuuagugaccaucucauucu

SEQ ID NO: 595817 - RNA, 22 nt, Human
gauuuucauuauagcuaguuuc

SEQ ID NO: 595818 - RNA, 22 nt, Human
cuugauauuuuaaacauacagu

SEQ ID NO: 595819 - RNA, 22 nt, Human
ccagaacacaguggaagaauau

SEQ ID NO: 595820 - RNA, 22 nt, Human
acacagugugugcagucggacg

SEQ ID NO: 595821 - RNA, 22 nt, Human
uucuuauuuuccugaggaagaa

SEQ ID NO: 595822 - RNA, 20 nt, Human
cugaaaggagucgggauguc

SEQ ID NO: 595823 - RNA, 22 nt, Human
gccagccacuucagcuauggcu

SEQ ID NO: 595824 - RNA, 22 nt, Human
gugaacuauuggguaucauaaa

SEQ ID NO: 595825 - RNA, 18 nt, Human
uuccuucugauguauaug

SEQ ID NO: 595826 - RNA, 22 nt, Human
caugcauguuuacuacagugac

SEQ ID NO: 595827 - RNA, 22 nt, Human
uuuauucuagcucagaauaguu

SEQ ID NO: 595828 - RNA, 22 nt, Human
gagagaagggggauaugagccu

SEQ ID NO: 595829 - RNA, 22 nt, Human
agcucaggucauuccagggaug

SEQ ID NO: 595830 - RNA, 21 nt, Human
uuggaauuugggagcuaugug

SEQ ID NO: 595831 - RNA, 22 nt, Human
ggccugugucugugccuguccu

SEQ ID NO: 595832 - RNA, 22 nt, Human
uacaaucaggauaauaauagug

SEQ ID NO: 595833 - RNA, 19 nt, Human
uucuggacagcagaaacca

SEQ ID NO: 595834 - RNA, 22 nt, Human
guaguaaagcggaaagggugau

SEQ ID NO: 595835 - RNA, 22 nt, Human
gcagggcuuagaaaugguggcu

SEQ ID NO: 595836 - RNA, 22 nt, Human
gcuggccaaaguguaccuggag

SEQ ID NO: 595837 - RNA, 22 nt, Human
ucuuacaagaaauaagccaaug

SEQ ID NO: 595838 - RNA, 22 nt, Human
cagagcccauggcacaugugga

SEQ ID NO: 595839 - RNA, 22 nt, Human
uugcaguugcauaugccccuac

SEQ ID NO: 595840 - RNA, 22 nt, Human
agggcccacaguuccuauggcc

SEQ ID NO: 595841 - RNA, 22 nt, Human
cuucuccuuauaugucccguuc

SEQ ID NO: 595842 - RNA, 22 nt, Human
gugagguccucccugcugggag

SEQ ID NO: 595843 - RNA, 22 nt, Human
ggcaacaacuggacauagcugg

SEQ ID NO: 595844 - RNA, 22 nt, Human
uagagaaauaagcuuugccuug

SEQ ID NO: 595845 - RNA, 22 nt, Human
caguggguaggaaaggcucuuc

SEQ ID NO: 595846 - RNA, 22 nt, Human
ggucucuguuuggggcuggcaa

SEQ ID NO: 595847 - RNA, 22 nt, Human
ucagcacuuugaagcagaagga

SEQ ID NO: 595848 - RNA, 22 nt, Human
ggcagcaaggccucgggugagc

SEQ ID NO: 595849 - RNA, 22 nt, Human
cugccagcagaggccagcgcug

SEQ ID NO: 595850 - RNA, 22 nt, Human
auguacugacuguacuuuuaaa

SEQ ID NO: 595851 - RNA, 22 nt, Human
aguaaggcauuuuucauguuua

SEQ ID NO: 595852 - RNA, 22 nt, Human
ugcugggauuacagucaugagc

SEQ ID NO: 595853 - RNA, 22 nt, Human
uauuuccauguuagaacuaagu

SEQ ID NO: 595854 - RNA, 22 nt, Human
auauuuucacugaaccaaagua

SEQ ID NO: 595855 - RNA, 22 nt, Human
agagcugagcaccaagcauggu

SEQ ID NO: 595856 - RNA, 22 nt, Human
cacugcccuggggguugccauc

SEQ ID NO: 595857 - RNA, 23 nt, Human
aagcugaacuuguuugcugggag

SEQ ID NO: 595858 - RNA, 22 nt, Human
ggcaggcagaggcugagacagg

SEQ ID NO: 595859 - RNA, 22 nt, Human
ggagcuggcuacagagaacucc

SEQ ID NO: 595860 - RNA, 22 nt, Human
agcagcacacgggagaaagaca

SEQ ID NO: 595861 - RNA, 22 nt, Human
auguuuucaaaguaaacuugua

SEQ ID NO: 595862 - RNA, 22 nt, Human
uuuccaauaaagugucauuguu

SEQ ID NO: 595863 - RNA, 22 nt, Human
uggcuggagugggagaaguuua

SEQ ID NO: 595864 - RNA, 22 nt, Human
cauggccaaggaugcucaacca

SEQ ID NO: 595865 - RNA, 22 nt, Human
auugucgucaauggacacauag

SEQ ID NO: 595866 - RNA, 22 nt, Human
caaggcaggucugaggagguug

SEQ ID NO: 595867 - RNA, 21 nt, Human
cuggagucuggggguggcagu

SEQ ID NO: 595868 - RNA, 20 nt, Human
uccaguggccugaaucugga

SEQ ID NO: 595869 - RNA, 22 nt, Human
agagcagacauccuugucuugu

SEQ ID NO: 595870 - RNA, 22 nt, Human
augggcuaaacuuagaggauau

SEQ ID NO: 595871 - RNA, 22 nt, Human
uuuucaauuuugaggcaguggu

SEQ ID NO: 595872 - RNA, 22 nt, Human
ucaucuugcugccauugcuuua

SEQ ID NO: 595873 - RNA, 22 nt, Human
cagggcugugcccaucuucccc

SEQ ID NO: 595874 - RNA, 22 nt, Human
guacauuucauuuaaaugaugu

SEQ ID NO: 595875 - RNA, 22 nt, Human
ccagcugcccacuauguguucu

SEQ ID NO: 595876 - RNA, 22 nt, Human
cagguguacacauuguguuuau

SEQ ID NO: 595877 - RNA, 22 nt, Human
ggccagggccuggggacugucc

SEQ ID NO: 595878 - RNA, 22 nt, Human
acugagaaagaccacauggaga

SEQ ID NO: 595879 - RNA, 22 nt, Human
uuucccaaguguaaacauggca

SEQ ID NO: 595880 - RNA, 22 nt, Human
aaugucauuuaaaauaauucug

SEQ ID NO: 595881 - RNA, 22 nt, Human
gagcuuuggugccaaguauuug

SEQ ID NO: 595882 - RNA, 22 nt, Human
agggugguggcgaugaggacau

SEQ ID NO: 595883 - RNA, 18 nt, Human
acacaguggaugccuggu

SEQ ID NO: 595884 - RNA, 22 nt, Human
ugugucaggagauagcaaaggg

SEQ ID NO: 595885 - RNA, 17 nt, Human
agagcucuucacuguga

SEQ ID NO: 595886 - RNA, 22 nt, Human
acuuuaaaacugaucaucagag

SEQ ID NO: 595887 - RNA, 22 nt, Human
agcagagaagacacaggcuuca

SEQ ID NO: 595888 - RNA, 22 nt, Human
gggcuggaagugcauugaugcu

SEQ ID NO: 595889 - RNA, 23 nt, Human
acauacauggagauaaagugaug

SEQ ID NO: 595890 - RNA, 22 nt, Human
aaugacucugcugcagagacac

SEQ ID NO: 595891 - RNA, 22 nt, Human
auucucuguuuccaagaugaaa

SEQ ID NO: 595892 - RNA, 22 nt, Human
cuuucucuugagcaagagcugu

SEQ ID NO: 595893 - RNA, 22 nt, Human
caagagcucaccggagagcauu

SEQ ID NO: 595894 - RNA, 22 nt, Human
gaggggagaggcuuauggauca

SEQ ID NO: 595895 - RNA, 22 nt, Human
caauaagauguauugagcagag

SEQ ID NO: 595896 - RNA, 22 nt, Human
ucugccugcuaacuccugcacc

SEQ ID NO: 595897 - RNA, 20 nt, Human
guguuucaugugauacaaug

SEQ ID NO: 595898 - RNA, 22 nt, Human
gccuggcuugccagcccuggcg

SEQ ID NO: 595899 - RNA, 22 nt, Human
gcaguguugcuaggugcgguga

SEQ ID NO: 595900 - RNA, 23 nt, Human
agcuuugugaaagcagacauggg

SEQ ID NO: 595901 - RNA, 22 nt, Human
uagggacacugcucaugaguuc

SEQ ID NO: 595902 - RNA, 22 nt, Human
cccagggguucuagaccagcuu

SEQ ID NO: 595903 - RNA, 22 nt, Human
accugccuaguugguucugccc

SEQ ID NO: 595904 - RNA, 22 nt, Human
acaacuguuggaggaacacagg

SEQ ID NO: 595905 - RNA, 20 nt, Human
acacauauagcagcauaaac

SEQ ID NO: 595906 - RNA, 22 nt, Human
cccucucuuagaagaaacacag

SEQ ID NO: 595907 - RNA, 22 nt, Human
uccugggaggcugugccuggcu

SEQ ID NO: 595908 - RNA, 22 nt, Human
gaggcuccagcgacaccuaggc

SEQ ID NO: 595909 - RNA, 22 nt, Human
aacuaacagucauuaaaagaac

SEQ ID NO: 595910 - RNA, 22 nt, Human
cugucaaugacaguuauuuggg

SEQ ID NO: 595911 - RNA, 22 nt, Human
gcugccugaagugucuacacug

SEQ ID NO: 595912 - RNA, 22 nt, Human
uuuuacauugggaaaugccucu

SEQ ID NO: 595913 - RNA, 22 nt, Human
ugcacagagagaugagacacgu

SEQ ID NO: 595914 - RNA, 22 nt, Human
cgcugggcgccgaccugcuggc

SEQ ID NO: 595915 - RNA, 22 nt, Human
ucaugaaaauagaucagaaauu

SEQ ID NO: 595916 - RNA, 22 nt, Human
uccaggcuccccugcgugcucc

SEQ ID NO: 595917 - RNA, 22 nt, Human
ccagcugcugacaugggcaggu

SEQ ID NO: 595918 - RNA, 22 nt, Human
agcuccagagucugaacuauuc

SEQ ID NO: 595919 - RNA, 22 nt, Human
uguacaguauauuucaaagcca

SEQ ID NO: 595920 - RNA, 22 nt, Human
agcugguaaguggcagagauuc

SEQ ID NO: 595921 - RNA, 22 nt, Human
gcugagagaaaagugagguucu

SEQ ID NO: 595922 - RNA, 22 nt, Human
acucucccugcuauccacuucc

SEQ ID NO: 595923 - RNA, 22 nt, Human
uaaaguuuauuugaacaucucu

SEQ ID NO: 595924 - RNA, 22 nt, Human
ggcaccuggagguuuacuggau

SEQ ID NO: 595925 - RNA, 22 nt, Human
agcugaaguucaguccagagaa

SEQ ID NO: 595926 - RNA, 22 nt, Human
uuucuaaguaucuugcaguuuu

SEQ ID NO: 595927 - RNA, 22 nt, Human
uaaaggaacagaggacucauuu

SEQ ID NO: 595928 - RNA, 22 nt, Human
augcaaauaaacagucuaguug

SEQ ID NO: 595929 - RNA, 22 nt, Human
cagaguggagauguguguggaa

SEQ ID NO: 595930 - RNA, 22 nt, Human
uuugauuuucagcaauaguggc

SEQ ID NO: 595931 - RNA, 22 nt, Human
ugagauggaguucugcucuugu

SEQ ID NO: 595932 - RNA, 22 nt, Human
uuggaucaaauuucaugcuguc

SEQ ID NO: 595933 - RNA, 21 nt, Human
ggccacaagcggaggagccgc

SEQ ID NO: 595934 - RNA, 22 nt, Human
ccccaggagaaaucuuaaacua

SEQ ID NO: 595935 - RNA, 22 nt, Human
agcucccugcacgacccugccc

SEQ ID NO: 595936 - RNA, 22 nt, Human
acugccuguuuggcauggcccc

SEQ ID NO: 595937 - RNA, 22 nt, Human
uuguaacaaagacacuccaaaa

SEQ ID NO: 595938 - RNA, 23 nt, Human
agugcaugcuugacuuagcaagc

SEQ ID NO: 595939 - RNA, 22 nt, Human
uggguuggaagcaggaggcacc

SEQ ID NO: 595940 - RNA, 22 nt, Human
caggagcuacucagguuggguu

SEQ ID NO: 595941 - RNA, 22 nt, Human
gauuaaaaauaacccaugcuga

SEQ ID NO: 595942 - RNA, 22 nt, Human
ucugcugagucagaccucuggg

SEQ ID NO: 595943 - RNA, 22 nt, Human
agcugccacauggugucacugu

SEQ ID NO: 595944 - RNA, 22 nt, Human
gaggcugggaaguccaauauca

SEQ ID NO: 595945 - RNA, 22 nt, Human
uccuggauucugcccugaaggc

SEQ ID NO: 595946 - RNA, 22 nt, Human
cagucuuauccugaaaacaaca

SEQ ID NO: 595947 - RNA, 22 nt, Human
aaaguucuggggguguuucugg

SEQ ID NO: 595948 - RNA, 22 nt, Human
cuuuucuuacucccgcaaggca

SEQ ID NO: 595949 - RNA, 22 nt, Human
uauuaucagagcuauuuggaau

SEQ ID NO: 595950 - RNA, 22 nt, Human
agcugccaucugaagaacugca

SEQ ID NO: 595951 - RNA, 22 nt, Human
ugacagggucagagcugagcug

SEQ ID NO: 595952 - RNA, 22 nt, Human
ucucacacaacauguuacuuug

SEQ ID NO: 595953 - RNA, 21 nt, Human
ugccagcauguaggcuaguug

SEQ ID NO: 595954 - RNA, 21 nt, Human
uuucccucauuguguuggcac

SEQ ID NO: 595955 - RNA, 22 nt, Human
ccucuggccaucccccauuaag

SEQ ID NO: 595956 - RNA, 22 nt, Human
gcuuuuauugucuuuacgacga

SEQ ID NO: 595957 - RNA, 22 nt, Human
cauuuaugauaguaauaugaaa

SEQ ID NO: 595958 - RNA, 22 nt, Human
auuaaaguugaaauugaacuga

SEQ ID NO: 595959 - RNA, 22 nt, Human
cuggcuuucauucauucaggcc

SEQ ID NO: 595960 - RNA, 22 nt, Human
gcuaggcuucaaaaucucccug

SEQ ID NO: 595961 - RNA, 21 nt, Human
ugcauauauaagugcauacac

SEQ ID NO: 595962 - RNA, 22 nt, Human
cagaugaacugugacugaaaau

SEQ ID NO: 595963 - RNA, 22 nt, Human
gaggcaguuugccaugccagga

SEQ ID NO: 595964 - RNA, 22 nt, Human
uuucuauaugaggagcuaaagu

SEQ ID NO: 595965 - RNA, 22 nt, Human
uaacagagauagaaauguaaag

SEQ ID NO: 595966 - RNA, 22 nt, Human
acauaugcucaucugcauuccc

SEQ ID NO: 595967 - RNA, 22 nt, Human
gugugcagggcugccugugccg

SEQ ID NO: 595968 - RNA, 22 nt, Human
uuauuaugguauuucuuugcag

SEQ ID NO: 595969 - RNA, 22 nt, Human
auuuuaaggcuuauuuaaaggc

SEQ ID NO: 595970 - RNA, 22 nt, Human
ucuugcacuucaugaauauguu

SEQ ID NO: 595971 - RNA, 22 nt, Human
cucugugccucaguuuucuucu

SEQ ID NO: 595972 - RNA, 22 nt, Human
guugugaauagugccgcaauaa

SEQ ID NO: 595973 - RNA, 22 nt, Human
gacauggauacuugauaagggg

SEQ ID NO: 595974 - RNA, 22 nt, Human
cuuuccuuaauaagcagguaua

SEQ ID NO: 595975 - RNA, 22 nt, Human
acauugcaauaauaauucucuu

SEQ ID NO: 595976 - RNA, 22 nt, Human
cugggccucaaucucagaguuu

SEQ ID NO: 595977 - RNA, 22 nt, Human
aaagagcaagcugagauuugaa

SEQ ID NO: 595978 - RNA, 22 nt, Human
caaucuauaaauaucaguuucc

SEQ ID NO: 595979 - RNA, 19 nt, Human
ucaguuuuagucaucaguu

SEQ ID NO: 595980 - RNA, 17 nt, Human
cuuguuuuccacuggga

SEQ ID NO: 595981 - RNA, 22 nt, Human
aaauaguucagcuuguaaaccc

SEQ ID NO: 595982 - RNA, 22 nt, Human
cuuuguuagcagccaauuuguu

SEQ ID NO: 595983 - RNA, 22 nt, Human
gggccagccuacugcuagaccc

SEQ ID NO: 595984 - RNA, 20 nt, Human
uggggaguugagcacgagca

SEQ ID NO: 595985 - RNA, 22 nt, Human
cuccaggccaagauuaaguaau

SEQ ID NO: 595986 - RNA, 22 nt, Human
gcugugugcuaggauauguuuu

SEQ ID NO: 595987 - RNA, 22 nt, Human
uggggccacacugaucucccag

SEQ ID NO: 595988 - RNA, 22 nt, Human
aggcuaggccuugcccuggaac

SEQ ID NO: 595989 - RNA, 22 nt, Human
aagcacauacauaauaaagucc

SEQ ID NO: 595990 - RNA, 18 nt, Human
ugagcagaguaaggcuuu

SEQ ID NO: 595991 - RNA, 22 nt, Human
aaaagcagaucuccaaagucua

SEQ ID NO: 595992 - RNA, 22 nt, Human
uguuuucaugguuaugugucua

SEQ ID NO: 595993 - RNA, 22 nt, Human
uucuuacagaguuuacagagcc

SEQ ID NO: 595994 - RNA, 19 nt, Human
cccaggaggcggagguugc

SEQ ID NO: 595995 - RNA, 22 nt, Human
gcgugggcuggacugggaugaa

SEQ ID NO: 595996 - RNA, 22 nt, Human
aaagaugucaguuugaaauaac

SEQ ID NO: 595997 - RNA, 22 nt, Human
agcuguguguuuccacugagcu

SEQ ID NO: 595998 - RNA, 22 nt, Human
ugguuucuuuccacucuccacc

SEQ ID NO: 595999 - RNA, 23 nt, Human
aauaaugucuugugcucucacuu

SEQ ID NO: 596000 - RNA, 22 nt, Human
cauguaaagaauuucacacaag

SEQ ID NO: 596001 - RNA, 22 nt, Human
agagauugcuagcuggcuuuaa

SEQ ID NO: 596002 - RNA, 22 nt, Human
cugugagugacccuggucagca

SEQ ID NO: 596003 - RNA, 22 nt, Human
ucauaaaugcagugucauaaau

SEQ ID NO: 596004 - RNA, 23 nt, Human
gcagccaagagaccagggcaggc

SEQ ID NO: 596005 - RNA, 22 nt, Human
gaggggcugggguugacuccaa

SEQ ID NO: 596006 - RNA, 20 nt, Human
uagauguuuccugucauaaa

SEQ ID NO: 596007 - RNA, 22 nt, Human
uccagggcuugacagggugccu

SEQ ID NO: 596008 - RNA, 22 nt, Human
uuuaaugauagucuuacgaaaa

SEQ ID NO: 596009 - RNA, 22 nt, Human
uguauuuugugaggaucacucu

SEQ ID NO: 596010 - RNA, 21 nt, Human
ggccugaguauaggacaggcc

SEQ ID NO: 596011 - RNA, 22 nt, Human
guuuccagagugagggcacuug

SEQ ID NO: 596012 - RNA, 22 nt, Human
ucauuucaguggcacagaagau

SEQ ID NO: 596013 - RNA, 22 nt, Human
cuccagcucgcgagcucugcuc

SEQ ID NO: 596014 - RNA, 22 nt, Human
cugaggucuagacaccccaggg

SEQ ID NO: 596015 - RNA, 22 nt, Human
auaguuuuauagauauugugua

SEQ ID NO: 596016 - RNA, 22 nt, Human
gaugcuaaaauaauuauuuuga

SEQ ID NO: 596017 - RNA, 22 nt, Human
gcaggcugaguugggaaaccaa

SEQ ID NO: 596018 - RNA, 22 nt, Human
ggcaagagugaggagugucucu

SEQ ID NO: 596019 - RNA, 22 nt, Human
uagaauguggagguaacagacu

SEQ ID NO: 596020 - RNA, 19 nt, Human
uucuuacaacacccuggga

SEQ ID NO: 596021 - RNA, 22 nt, Human
ugcuggcuuuuugguccuugcu

SEQ ID NO: 596022 - RNA, 22 nt, Human
augugugugaugggcgccgcca

SEQ ID NO: 596023 - RNA, 22 nt, Human
augauguuaccaguacuuagag

SEQ ID NO: 596024 - RNA, 22 nt, Human
uuuacaggaagcugaaaaacau

SEQ ID NO: 596025 - RNA, 22 nt, Human
ucuucucccaucuccaggcagg

SEQ ID NO: 596026 - RNA, 22 nt, Human
auguggaaugaacaaaggaggc

SEQ ID NO: 596027 - RNA, 22 nt, Human
uggcuucugcauauuuuuagag

SEQ ID NO: 596028 - RNA, 22 nt, Human
gggaaaggaucagugggaggcu

SEQ ID NO: 596029 - RNA, 22 nt, Human
gauaauuucuccaucucaaggu

SEQ ID NO: 596030 - RNA, 22 nt, Human
gcagagauuaugccauggaaag

SEQ ID NO: 596031 - RNA, 22 nt, Human
ggccagcagaccucagggacuc

SEQ ID NO: 596032 - RNA, 22 nt, Human
ucuguggcccaagugauggcug

SEQ ID NO: 596033 - RNA, 20 nt, Human
aagggcagagggaacagacu

SEQ ID NO: 596034 - RNA, 22 nt, Human
uucuagcagagggcaucugcug

SEQ ID NO: 596035 - RNA, 22 nt, Human
ggaggccaaggcgggcggauca

SEQ ID NO: 596036 - RNA, 22 nt, Human
cuaggguggauuugugcagagu

SEQ ID NO: 596037 - RNA, 22 nt, Human
aagauucuagaggaacuucuua

SEQ ID NO: 596038 - RNA, 22 nt, Human
ucauguuuggaguuugcucacu

SEQ ID NO: 596039 - RNA, 22 nt, Human
uacuugcuuggauuucaccaga

SEQ ID NO: 596040 - RNA, 22 nt, Human
uuaacagguuauauuguacagg

SEQ ID NO: 596041 - RNA, 18 nt, Human
acacagguuauucucucc

SEQ ID NO: 596042 - RNA, 22 nt, Human
cuccagccucaucuccuggcug

SEQ ID NO: 596043 - RNA, 21 nt, Human
ucuccuggguccaacccaugc

SEQ ID NO: 596044 - RNA, 22 nt, Human
gcccccagaagggccacagauu

SEQ ID NO: 596045 - RNA, 22 nt, Human
cacagagauggucuggcaggug

SEQ ID NO: 596046 - RNA, 23 nt, Human
gcagauggccccagagugcugcc

SEQ ID NO: 596047 - RNA, 22 nt, Human
uuuucauuuacauuagggaaga

SEQ ID NO: 596048 - RNA, 22 nt, Human
aggagugaguguccucagcaga

SEQ ID NO: 596049 - RNA, 22 nt, Human
acuuucugugguuaccagggag

SEQ ID NO: 596050 - RNA, 22 nt, Human
cuguggcaggaagggacuagca

SEQ ID NO: 596051 - RNA, 20 nt, Human
ccagagcugauggcugcccg

SEQ ID NO: 596052 - RNA, 22 nt, Human
aguugaauauacuugcuguugc

SEQ ID NO: 596053 - RNA, 22 nt, Human
caguccuuccuugccccuuggg

SEQ ID NO: 596054 - RNA, 22 nt, Human
auuauuuccuugcuuugaggaa

SEQ ID NO: 596055 - RNA, 22 nt, Human
aauucauuaagaaagagcuaaa

SEQ ID NO: 596056 - RNA, 22 nt, Human
acuuccuugucaggugcaucau

SEQ ID NO: 596057 - RNA, 22 nt, Human
guuggcagaaagcuuucgaucg

SEQ ID NO: 596058 - RNA, 22 nt, Human
gugaaggacuagcauggagggc

SEQ ID NO: 596059 - RNA, 22 nt, Human
ugccaggguccugagggccuug

SEQ ID NO: 596060 - RNA, 22 nt, Human
uuggaggaaauugcuuuugugg

SEQ ID NO: 596061 - RNA, 22 nt, Human
ccuuagcuggagugguggaaug

SEQ ID NO: 596062 - RNA, 22 nt, Human
caguggagaggcaugcuuggca

SEQ ID NO: 596063 - RNA, 22 nt, Human
ugagagcuugaguaucacuggc

SEQ ID NO: 596064 - RNA, 22 nt, Human
cacagcccccuugacacucugg

SEQ ID NO: 596065 - RNA, 21 nt, Human
auuucauggugcuuuuaagaa

SEQ ID NO: 596066 - RNA, 22 nt, Human
cccagccucagcuuuacuucca

SEQ ID NO: 596067 - RNA, 22 nt, Human
ccucucagcgauuccucuugga

SEQ ID NO: 596068 - RNA, 22 nt, Human
gaguccaggcaucccucccaua

SEQ ID NO: 596069 - RNA, 22 nt, Human
acauuucugagcagggagcugu

SEQ ID NO: 596070 - RNA, 22 nt, Human
cccuggagcuagucugagcaga

SEQ ID NO: 596071 - RNA, 22 nt, Human
cuaaagagaguucaagacuccu

SEQ ID NO: 596072 - RNA, 22 nt, Human
ugacuucaaaggcucuacuccu

SEQ ID NO: 596073 - RNA, 22 nt, Human
aaguuauuuccucgugacugaa

SEQ ID NO: 596074 - RNA, 22 nt, Human
uagaaacagauguuuuugaaga

SEQ ID NO: 596075 - RNA, 21 nt, Human
ccagagagagggaaguggguu

SEQ ID NO: 596076 - RNA, 17 nt, Human
ucagucucuguccugga

SEQ ID NO: 596077 - RNA, 22 nt, Human
auugaaagauaggcuacugugg

SEQ ID NO: 596078 - RNA, 22 nt, Human
aggcugugacagggucauggag

SEQ ID NO: 596079 - RNA, 22 nt, Human
uucaaaacagcuagauauugga

SEQ ID NO: 596080 - RNA, 22 nt, Human
ggccugagcuugggcagcguau

SEQ ID NO: 596081 - RNA, 22 nt, Human
uuaucuacguauuuaaacucuu

SEQ ID NO: 596082 - RNA, 22 nt, Human
uuucuacaguacugauuucaua

SEQ ID NO: 596083 - RNA, 22 nt, Human
caugauuuugucuuguguuaau

SEQ ID NO: 596084 - RNA, 22 nt, Human
agggcucuguccccagaggccc

SEQ ID NO: 596085 - RNA, 22 nt, Human
gaagagcugucagaaaagcuaa

SEQ ID NO: 596086 - RNA, 22 nt, Human
uggcccugugugcaggcugcac

SEQ ID NO: 596087 - RNA, 22 nt, Human
aaaugcaugagaaaguauucug

SEQ ID NO: 596088 - RNA, 22 nt, Human
agugaaagguugagaauauucu

SEQ ID NO: 596089 - RNA, 22 nt, Human
ucuucugugagaauucaagcaa

SEQ ID NO: 596090 - RNA, 22 nt, Human
cugagccaguagucagggacaa

SEQ ID NO: 596091 - RNA, 17 nt, Human
ugcaggcuccugucccu

SEQ ID NO: 596092 - RNA, 22 nt, Human
cuuugcuugacacugugauugu

SEQ ID NO: 596093 - RNA, 22 nt, Human
cucugaaacuccagccccaggu

SEQ ID NO: 596094 - RNA, 22 nt, Human
cauggauagaugaaugcuuaaa

SEQ ID NO: 596095 - RNA, 22 nt, Human
ucucugagcaugccauauugcu

SEQ ID NO: 596096 - RNA, 22 nt, Human
uggaaggggagcuggaaagggg

SEQ ID NO: 596097 - RNA, 22 nt, Human
ucuggaguugagagugugcgag

SEQ ID NO: 596098 - RNA, 22 nt, Human
gagccaggaggcagagacugca

SEQ ID NO: 596099 - RNA, 22 nt, Human
aaacaugcuggauuuagaauau

SEQ ID NO: 596100 - RNA, 18 nt, Human
gaggaaacaaggcagagg

SEQ ID NO: 596101 - RNA, 22 nt, Human
ggcugccugggagcccuccucu

SEQ ID NO: 596102 - RNA, 22 nt, Human
gaggagaggggcucccaagagc

SEQ ID NO: 596103 - RNA, 22 nt, Human
gggcuucucuuuagugagcuga

SEQ ID NO: 596104 - RNA, 22 nt, Human
gggcgagggcgaaagcgagagc

SEQ ID NO: 596105 - RNA, 22 nt, Human
uagacaggaaacauuaggaugg

SEQ ID NO: 596106 - RNA, 22 nt, Human
gaggucccccauggcugugacu

SEQ ID NO: 596107 - RNA, 22 nt, Human
gaauuuugcuuuuaugucaagu

SEQ ID NO: 596108 - RNA, 22 nt, Human
guuguuuugcaggauccuuaca

SEQ ID NO: 596109 - RNA, 22 nt, Human
uuacaggugagaaaacugaggc

SEQ ID NO: 596110 - RNA, 22 nt, Human
cuggggcuucaaugcuucggug

SEQ ID NO: 596111 - RNA, 19 nt, Human
cucugggcugcaucuuggu

SEQ ID NO: 596112 - RNA, 22 nt, Human
uuccacaggacuaaaugucauc

SEQ ID NO: 596113 - RNA, 22 nt, Human
ugguggcaauguccuggagaag

SEQ ID NO: 596114 - RNA, 22 nt, Human
ugcucugggcaacagccucccu

SEQ ID NO: 596115 - RNA, 22 nt, Human
agggugcagaaggagccuagga

SEQ ID NO: 596116 - RNA, 22 nt, Human
ggugagaggcagugcuguggaa

SEQ ID NO: 596117 - RNA, 22 nt, Human
augcagauuuaauuaguauagg

SEQ ID NO: 596118 - RNA, 22 nt, Human
cccugccucugaagcugcucag

SEQ ID NO: 596119 - RNA, 22 nt, Human
uuccuccuacgcuuaucacuuu

SEQ ID NO: 596120 - RNA, 22 nt, Human
gauuuuaauuauaggagguccu

SEQ ID NO: 596121 - RNA, 22 nt, Human
ugucauuuauucucuuauucua

SEQ ID NO: 596122 - RNA, 22 nt, Human
agcuguguuuccagaugguagc

SEQ ID NO: 596123 - RNA, 23 nt, Human
aggagccaugaguuggauauguu

SEQ ID NO: 596124 - RNA, 22 nt, Human
agccaggaaugcaugcucugcu

SEQ ID NO: 596125 - RNA, 22 nt, Human
uuucuagagugggcaugucuua

SEQ ID NO: 596126 - RNA, 22 nt, Human
agucaaagaugaccgaguuccu

SEQ ID NO: 596127 - RNA, 22 nt, Human
aacauguugaguugaaaguagc

SEQ ID NO: 596128 - RNA, 22 nt, Human
cuggagccccaggcugugcaga

SEQ ID NO: 596129 - RNA, 22 nt, Human
agauguggccggcuagggagag

SEQ ID NO: 596130 - RNA, 20 nt, Human
ggaaggggcaaaguguguga

SEQ ID NO: 596131 - RNA, 16 nt, Human
cuugucuguugcucau

SEQ ID NO: 596132 - RNA, 22 nt, Human
agugacauuugcaccagcugcu

SEQ ID NO: 596133 - RNA, 22 nt, Human
gggagaaaugucuggccugcug

SEQ ID NO: 596134 - RNA, 22 nt, Human
uacauuuucuaggggaccaaga

SEQ ID NO: 596135 - RNA, 22 nt, Human
ugccaggcugcccuccagucug

SEQ ID NO: 596136 - RNA, 22 nt, Human
cucugcaacuucuagcaguguc

SEQ ID NO: 596137 - RNA, 22 nt, Human
guuuauuaacugucaagugauu

SEQ ID NO: 596138 - RNA, 22 nt, Human
uccagcccugcuuccugccuca

SEQ ID NO: 596139 - RNA, 16 nt, Human
augaggcauaggcugc

SEQ ID NO: 596140 - RNA, 22 nt, Human
aggcauguauaugugcacaugu

SEQ ID NO: 596141 - RNA, 22 nt, Human
gcagugaaacaauaggaucaaa

SEQ ID NO: 596142 - RNA, 22 nt, Human
uuacuguagaagagaaugauuc

SEQ ID NO: 596143 - RNA, 22 nt, Human
ugaggaaguugaucucaucagu

SEQ ID NO: 596144 - RNA, 22 nt, Human
acauuucauguuuuccagagca

SEQ ID NO: 596145 - RNA, 22 nt, Human
cagaaugaguagcaucuucacc

SEQ ID NO: 596146 - RNA, 22 nt, Human
augcuuuauguucuggcauuuu

SEQ ID NO: 596147 - RNA, 22 nt, Human
cugggccuggacgggcagaucu

SEQ ID NO: 596148 - RNA, 22 nt, Human
aagacauuuuagagauagggaa

SEQ ID NO: 596149 - RNA, 22 nt, Human
gccagcagccacagaagucacu

SEQ ID NO: 596150 - RNA, 22 nt, Human
auuuaugacuggugaauagaac

SEQ ID NO: 596151 - RNA, 22 nt, Human
aaaaagagaaaugcucuagucc

SEQ ID NO: 596152 - RNA, 22 nt, Human
ucugaggcccaguucaacucuu

SEQ ID NO: 596153 - RNA, 22 nt, Human
uguauacauuuaacuagauaga

SEQ ID NO: 596154 - RNA, 22 nt, Human
ugucccagauacuggacauaga

SEQ ID NO: 596155 - RNA, 22 nt, Human
ugagaugcuaaagggcugcuca

SEQ ID NO: 596156 - RNA, 22 nt, Human
cauuucuacagcuucuucagaa

SEQ ID NO: 596157 - RNA, 22 nt, Human
ucucaagagggaggcaaucaug

SEQ ID NO: 596158 - RNA, 22 nt, Human
aaauagauuuaacauccauccc

SEQ ID NO: 596159 - RNA, 22 nt, Human
ucucucagaggaagaggcagug

SEQ ID NO: 596160 - RNA, 22 nt, Human
uagaugaaauuuguguguaugc

SEQ ID NO: 596161 - RNA, 22 nt, Human
augugaaaaauuucuuauuaca

SEQ ID NO: 596162 - RNA, 22 nt, Human
ggugccaggcucccagcucagg

SEQ ID NO: 596163 - RNA, 22 nt, Human
gacaaugcagaaguacuuguuc

SEQ ID NO: 596164 - RNA, 22 nt, Human
aagcacauuuggaaaacaugga

SEQ ID NO: 596165 - RNA, 22 nt, Human
gggcagaggcucuggcccaucc

SEQ ID NO: 596166 - RNA, 22 nt, Human
agugaaauuccuggucuuuguu

SEQ ID NO: 596167 - RNA, 22 nt, Human
ugccuguguaugugcaugcaca

SEQ ID NO: 596168 - RNA, 23 nt, Human
uggaaacauucugaauguccauc

SEQ ID NO: 596169 - RNA, 22 nt, Human
uaagguuuaacgcccugucucg

SEQ ID NO: 596170 - RNA, 22 nt, Human
ccacuuugcaagauauucagag

SEQ ID NO: 596171 - RNA, 22 nt, Human
gccaagccuguagacacaagcu

SEQ ID NO: 596172 - RNA, 22 nt, Human
ccugggauuuccugagcacucu

SEQ ID NO: 596173 - RNA, 22 nt, Human
ugagcccagagaucugagcuau

SEQ ID NO: 596174 - RNA, 19 nt, Human
uuuaccuucuugagagcag

SEQ ID NO: 596175 - RNA, 18 nt, Human
ggccagagggaggguccc

SEQ ID NO: 596176 - RNA, 22 nt, Human
gacacuuuaggccaccaugcaa

SEQ ID NO: 596177 - RNA, 22 nt, Human
guuuucucaucuccucaauggu

SEQ ID NO: 596178 - RNA, 22 nt, Human
cuacaucagaacauuuacccua

SEQ ID NO: 596179 - RNA, 22 nt, Human
ccuggcagcaggugggcccgug

SEQ ID NO: 596180 - RNA, 18 nt, Human
gauggaaaguguaugagu

SEQ ID NO: 596181 - RNA, 22 nt, Human
agcuccaguuacuuaccuagag

SEQ ID NO: 596182 - RNA, 22 nt, Human
cccugcagcauucucuaacugg

SEQ ID NO: 596183 - RNA, 22 nt, Human
cugagggcaccgacagagugga

SEQ ID NO: 596184 - RNA, 22 nt, Human
uguguaaauggcaucucucagc

SEQ ID NO: 596185 - RNA, 22 nt, Human
aggugcuguuggcagcgggcag

SEQ ID NO: 596186 - RNA, 22 nt, Human
ucugaggucuaugacuuugcuu

SEQ ID NO: 596187 - RNA, 22 nt, Human
aucaaaguucguaacugauaac

SEQ ID NO: 596188 - RNA, 21 nt, Human
gcugcugugggccagggaggc

SEQ ID NO: 596189 - RNA, 17 nt, Human
auuucacuuagcaugag

SEQ ID NO: 596190 - RNA, 22 nt, Human
ccagggcaacgcugucucagag

SEQ ID NO: 596191 - RNA, 22 nt, Human
ucaggcuacacucuuuucaugg

SEQ ID NO: 596192 - RNA, 22 nt, Human
uuuauugaguaucuacuaugug

SEQ ID NO: 596193 - RNA, 23 nt, Human
aggcagagccaaggucaaaaccc

SEQ ID NO: 596194 - RNA, 22 nt, Human
caggcugaggcaguaggguuug

SEQ ID NO: 596195 - RNA, 22 nt, Human
gagcuggggcggauacucagcu

SEQ ID NO: 596196 - RNA, 21 nt, Human
gggaaauuaggauugcucauc

SEQ ID NO: 596197 - RNA, 20 nt, Human
ugcuugucaugcacucaggc

SEQ ID NO: 596198 - RNA, 22 nt, Human
ccaggggcuggugcugagcugg

SEQ ID NO: 596199 - RNA, 22 nt, Human
agaugcuuuccugauauuuaug

SEQ ID NO: 596200 - RNA, 22 nt, Human
uuugcugaguuuucuccuaaga

SEQ ID NO: 596201 - RNA, 22 nt, Human
ucucucugaguugagcaggagu

SEQ ID NO: 596202 - RNA, 19 nt, Human
uucucagagcuugcagcac

SEQ ID NO: 596203 - RNA, 22 nt, Human
gcugucacucuccggccuuccc

SEQ ID NO: 596204 - RNA, 22 nt, Human
uggcacagacagaucaggaguc

SEQ ID NO: 596205 - RNA, 22 nt, Human
uccucacauggugagccacaca

SEQ ID NO: 596206 - RNA, 22 nt, Human
uucugaugcaugggucucuguu

SEQ ID NO: 596207 - RNA, 22 nt, Human
ggaggccaugaggcucuaggug

SEQ ID NO: 596208 - RNA, 23 nt, Human
ucagagaaugguaugcuuuuccu

SEQ ID NO: 596209 - RNA, 16 nt, Human
ggugggaggugaggug

SEQ ID NO: 596210 - RNA, 22 nt, Human
cagaacacauuuucagagucaa

SEQ ID NO: 596211 - RNA, 20 nt, Human
ccugggcucaaagcauccuc

SEQ ID NO: 596212 - RNA, 22 nt, Human
gaggcaccagccccgcuagccu

SEQ ID NO: 596213 - RNA, 22 nt, Human
acgggccuucucuucaggcgag

SEQ ID NO: 596214 - RNA, 22 nt, Human
cagggccccagggaugucugcu

SEQ ID NO: 596215 - RNA, 22 nt, Human
agccagggaagaggccuaccuc

SEQ ID NO: 596216 - RNA, 22 nt, Human
caaauagacaagauggcaggaa

SEQ ID NO: 596217 - RNA, 18 nt, Human
aguguuuauuuaggugaa

SEQ ID NO: 596218 - RNA, 22 nt, Human
uugaagaucuuugcauugcagg

SEQ ID NO: 596219 - RNA, 22 nt, Human
uggcuucauuauuguuuuuccu

SEQ ID NO: 596220 - RNA, 22 nt, Human
cccugcaggcucagacuggagu

SEQ ID NO: 596221 - RNA, 22 nt, Human
cuggucaaaaauuaugcuuacu

SEQ ID NO: 596222 - RNA, 22 nt, Human
agugcucugaucuccuuggguu

SEQ ID NO: 596223 - RNA, 22 nt, Human
ggucuccugaggcugccacacc

SEQ ID NO: 596224 - RNA, 19 nt, Human
agugugagacuccaucuca

SEQ ID NO: 596225 - RNA, 22 nt, Human
cuucucucggugcaucccucac

SEQ ID NO: 596226 - RNA, 22 nt, Human
ggcggcacgcaggcugcugucg

SEQ ID NO: 596227 - RNA, 22 nt, Human
caguuucugagguuccagguuu

SEQ ID NO: 596228 - RNA, 22 nt, Human
agauggcugauggcaggagcca

SEQ ID NO: 596229 - RNA, 22 nt, Human
cuccagagaguccagcucuggg

SEQ ID NO: 596230 - RNA, 22 nt, Human
cugccagggaggcugggaaguu

SEQ ID NO: 596231 - RNA, 22 nt, Human
uuugugcagauaggagacaauc

SEQ ID NO: 596232 - RNA, 22 nt, Human
cugagccccucugaccucagag

SEQ ID NO: 596233 - RNA, 22 nt, Human
gacuuuauuauaguggcaauag

SEQ ID NO: 596234 - RNA, 22 nt, Human
ugggcaggagagaagcuaaaga

SEQ ID NO: 596235 - RNA, 22 nt, Human
accagaguaauguguggaaauu

SEQ ID NO: 596236 - RNA, 22 nt, Human
gcacccagauauugccuugacc

SEQ ID NO: 596237 - RNA, 22 nt, Human
augaggcaucuaacauugcaaa

SEQ ID NO: 596238 - RNA, 22 nt, Human
cucaggaggaggaaguucauug

SEQ ID NO: 596239 - RNA, 22 nt, Human
augauacaccuaggagugggag

SEQ ID NO: 596240 - RNA, 22 nt, Human
ucugagaaggguaggcuccauu

SEQ ID NO: 596241 - RNA, 22 nt, Human
uucugucaugcucauguaauug

SEQ ID NO: 596242 - RNA, 22 nt, Human
gugaacuuccagaugauaaaca

SEQ ID NO: 596243 - RNA, 22 nt, Human
cccaggugggcaccucgaggaa

SEQ ID NO: 596244 - RNA, 22 nt, Human
cucuggagugcagccugguggc

SEQ ID NO: 596245 - RNA, 19 nt, Human
uacauuuguguacacuugu

SEQ ID NO: 596246 - RNA, 22 nt, Human
caggcuugauuauucagacaau

SEQ ID NO: 596247 - RNA, 17 nt, Human
ucauuucaguaaaucca

SEQ ID NO: 596248 - RNA, 22 nt, Human
gagaggcugugugccauuguug

SEQ ID NO: 596249 - RNA, 22 nt, Human
cacccacauuccaucacucugc

SEQ ID NO: 596250 - RNA, 22 nt, Human
gagaggcuccaugaccccggca

SEQ ID NO: 596251 - RNA, 19 nt, Human
uuugaugagaauuuaagca

SEQ ID NO: 596252 - RNA, 22 nt, Human
uugugcagaguugccuuuauuu

SEQ ID NO: 596253 - RNA, 22 nt, Human
cagguggguguaugaaugcaaa

SEQ ID NO: 596254 - RNA, 20 nt, Human
agggcagcuugaggagccgg

SEQ ID NO: 596255 - RNA, 22 nt, Human
uguguacaggacagaaaggagg

SEQ ID NO: 596256 - RNA, 22 nt, Human
gacugagggacagggcagugga

SEQ ID NO: 596257 - RNA, 22 nt, Human
ccuguguggccaggcuggaguc

SEQ ID NO: 596258 - RNA, 22 nt, Human
ucagcacuuuuacucucuuugc

SEQ ID NO: 596259 - RNA, 22 nt, Human
ucacccagcgggcgcacacucg

SEQ ID NO: 596260 - RNA, 22 nt, Human
ccuagaggcugcaaggagaggc

SEQ ID NO: 596261 - RNA, 22 nt, Human
gcugcaugacagacaggccugg

SEQ ID NO: 596262 - RNA, 16 nt, Human
uggcugagagaggguu

SEQ ID NO: 596263 - RNA, 22 nt, Human
auguuucugaguguauauacau

SEQ ID NO: 596264 - RNA, 22 nt, Human
ggcugcagcggauuggggauug

SEQ ID NO: 596265 - RNA, 17 nt, Human
gacugagguaaggugag

SEQ ID NO: 596266 - RNA, 21 nt, Human
gaacccagcagcagugcucug

SEQ ID NO: 596267 - RNA, 22 nt, Human
auacugugugugcucaaggaau

SEQ ID NO: 596268 - RNA, 22 nt, Human
ucacacacauaaucuaagauua

SEQ ID NO: 596269 - RNA, 22 nt, Human
agagauggccuuaggugggaau

SEQ ID NO: 596270 - RNA, 20 nt, Human
acuuuacagagaagacugac

SEQ ID NO: 596271 - RNA, 22 nt, Human
gaggggcaguugauugugcuau

SEQ ID NO: 596272 - RNA, 22 nt, Human
gaaggcuggaaggcaaguagga

SEQ ID NO: 596273 - RNA, 22 nt, Human
cccagggaagggcuaccugagg

SEQ ID NO: 596274 - RNA, 22 nt, Human
gugcuccaacauuagugugcuu

SEQ ID NO: 596275 - RNA, 22 nt, Human
auuugcuuucagguauaaaagg

SEQ ID NO: 596276 - RNA, 22 nt, Human
uaauaauuaacagugauggguc

SEQ ID NO: 596277 - RNA, 22 nt, Human
gggugggaucuguggagccuca

SEQ ID NO: 596278 - RNA, 18 nt, Human
ucuuuaaguugucagagu

SEQ ID NO: 596279 - RNA, 22 nt, Human
uucucuccaguccuggauucug

SEQ ID NO: 596280 - RNA, 22 nt, Human
uaacuacauuucacugcaauua

SEQ ID NO: 596281 - RNA, 22 nt, Human
augcugagacuggagcagcugg

SEQ ID NO: 596282 - RNA, 22 nt, Human
gaaaucuuccuucagugaagaa

SEQ ID NO: 596283 - RNA, 22 nt, Human
aggcauuuucacugaugucauc

SEQ ID NO: 596284 - RNA, 22 nt, Human
aauuaugguggaucccaguggg

SEQ ID NO: 596285 - RNA, 22 nt, Human
ggccucugcaacuggcuguggc

SEQ ID NO: 596286 - RNA, 20 nt, Human
uugaggcaugucuagaagua

SEQ ID NO: 596287 - RNA, 22 nt, Human
uuucacagaaagaagcuaguuu

SEQ ID NO: 596288 - RNA, 22 nt, Human
cuuugugcaaacccuagaauca

SEQ ID NO: 596289 - RNA, 22 nt, Human
agaaaucaauaucuauauguug

SEQ ID NO: 596290 - RNA, 22 nt, Human
acaagcagagauuaaauguuuu

SEQ ID NO: 596291 - RNA, 21 nt, Human
gagagggcauuauaggaagug

SEQ ID NO: 596292 - RNA, 22 nt, Human
uggcagagugcagaagaggcau

SEQ ID NO: 596293 - RNA, 22 nt, Human
cauagaaacugagacaaggauu

SEQ ID NO: 596294 - RNA, 20 nt, Human
aaguuucugguuuauaucuu

SEQ ID NO: 596295 - RNA, 22 nt, Human
gugacaggauagucagcuuugu

SEQ ID NO: 596296 - RNA, 22 nt, Human
uaaguguugaucugagugcuaa

SEQ ID NO: 596297 - RNA, 22 nt, Human
caggcagaagaaguggaaggac

SEQ ID NO: 596298 - RNA, 19 nt, Human
ucccucccuguaaucucac

SEQ ID NO: 596299 - RNA, 22 nt, Human
aaacauuccauuucuauguaag

SEQ ID NO: 596300 - RNA, 22 nt, Human
cagaggccucacuuccagccag

SEQ ID NO: 596301 - RNA, 20 nt, Human
cuacacaggguucgcugggc

SEQ ID NO: 596302 - RNA, 22 nt, Human
auuccuuggcauucuggacuug

SEQ ID NO: 596303 - RNA, 22 nt, Human
aguuuuucugcuggucucacua

SEQ ID NO: 596304 - RNA, 22 nt, Human
ucagaacauugacauucuuauu

SEQ ID NO: 596305 - RNA, 23 nt, Human
gcaagugaggcgucagcagucaa

SEQ ID NO: 596306 - RNA, 22 nt, Human
gcaguguuaggaauaaaaauga

SEQ ID NO: 596307 - RNA, 22 nt, Human
caguccaguccaauccucaaug

SEQ ID NO: 596308 - RNA, 22 nt, Human
auccuuggcagcucagaccuac

SEQ ID NO: 596309 - RNA, 16 nt, Human
uagggcugggaaggag

SEQ ID NO: 596310 - RNA, 22 nt, Human
cugccuggcauggagaagagaa

SEQ ID NO: 596311 - RNA, 22 nt, Human
gggaugagaguagggugugaaa

SEQ ID NO: 596312 - RNA, 21 nt, Human
ucaguaaaaaaacuaccuaga

SEQ ID NO: 596313 - RNA, 22 nt, Human
ugcuggagaucauuaauguuca

SEQ ID NO: 596314 - RNA, 22 nt, Human
auaaauaucacuguugucccuc

SEQ ID NO: 596315 - RNA, 22 nt, Human
ccaagugauacacccgccucgg

SEQ ID NO: 596316 - RNA, 22 nt, Human
uagaaagacuguccagauuuca

SEQ ID NO: 596317 - RNA, 22 nt, Human
ccaggcagccaagugugugugu

SEQ ID NO: 596318 - RNA, 22 nt, Human
ugagauggggagggcugcagaa

SEQ ID NO: 596319 - RNA, 22 nt, Human
acccugagucacugucugucug

SEQ ID NO: 596320 - RNA, 22 nt, Human
aaagaucacacuguggggcagu

SEQ ID NO: 596321 - RNA, 22 nt, Human
aguguuucuaaguagaugugaa

SEQ ID NO: 596322 - RNA, 22 nt, Human
aaauguguuccuuugcuacaga

SEQ ID NO: 596323 - RNA, 22 nt, Human
ugagccagaguggagugugccu

SEQ ID NO: 596324 - RNA, 22 nt, Human
cagccccuuguccgguagccac

SEQ ID NO: 596325 - RNA, 22 nt, Human
aagcauauuuuaauuagccaca

SEQ ID NO: 596326 - RNA, 22 nt, Human
agggugggcuagacucuucccc

SEQ ID NO: 596327 - RNA, 22 nt, Human
uggaagagggagcuggguggcc

SEQ ID NO: 596328 - RNA, 22 nt, Human
uccaggcuggagugcaguggcg

SEQ ID NO: 596329 - RNA, 22 nt, Human
uuuccuccuagccuccagccgc

SEQ ID NO: 596330 - RNA, 22 nt, Human
aaagccaugaauguuauagagg

SEQ ID NO: 596331 - RNA, 20 nt, Human
uuugagaccagucugcccaa

SEQ ID NO: 596332 - RNA, 22 nt, Human
aagcauauauuuuauauguugu

SEQ ID NO: 596333 - RNA, 22 nt, Human
aucagaaggggagguaaagaag

SEQ ID NO: 596334 - RNA, 22 nt, Human
ucugucacuuuuauuuacugaa

SEQ ID NO: 596335 - RNA, 22 nt, Human
ugcucuucggggccacugcuug

SEQ ID NO: 596336 - RNA, 22 nt, Human
acaauguuuuuguucaaagagu

SEQ ID NO: 596337 - RNA, 22 nt, Human
aagcacuaggucacacaaguua

SEQ ID NO: 596338 - RNA, 22 nt, Human
gcacagaaaugucuacacaugu

SEQ ID NO: 596339 - RNA, 22 nt, Human
aaauugaaugauuaagugguga

SEQ ID NO: 596340 - RNA, 22 nt, Human
ugagcugucugaauggugagga

SEQ ID NO: 596341 - RNA, 22 nt, Human
ugggccaguccugccuaaggug

SEQ ID NO: 596342 - RNA, 22 nt, Human
ggagccugugggaugagaugug

SEQ ID NO: 596343 - RNA, 22 nt, Human
aggugggguucagucucagccg

SEQ ID NO: 596344 - RNA, 22 nt, Human
cuuucucuguguuucacaugcu

SEQ ID NO: 596345 - RNA, 22 nt, Human
gugagguccugagaggcuugug

SEQ ID NO: 596346 - RNA, 21 nt, Human
uuuauucucagauacagggag

SEQ ID NO: 596347 - RNA, 22 nt, Human
caaguaaagaaucacauuucuu

SEQ ID NO: 596348 - RNA, 20 nt, Human
ugagaagcuccugucuccuc

SEQ ID NO: 596349 - RNA, 22 nt, Human
ucagaggacgcacuaggguugu

SEQ ID NO: 596350 - RNA, 22 nt, Human
gcugaagauuuuugcuagcccc

SEQ ID NO: 596351 - RNA, 22 nt, Human
gcccaggaggcagagguugugg

SEQ ID NO: 596352 - RNA, 22 nt, Human
gccagccccuuagggcucuccc

SEQ ID NO: 596353 - RNA, 22 nt, Human
ccuuacaaugcaguuuacuuag

SEQ ID NO: 596354 - RNA, 22 nt, Human
cugaggccccucucuugagcuu

SEQ ID NO: 596355 - RNA, 22 nt, Human
agcugggaggcuccucugugac

SEQ ID NO: 596356 - RNA, 22 nt, Human
ggcugaguggagguagcccugu

SEQ ID NO: 596357 - RNA, 22 nt, Human
uucugaaaauugggucauacuu

SEQ ID NO: 596358 - RNA, 22 nt, Human
uccugggaguaauugagucaug

SEQ ID NO: 596359 - RNA, 22 nt, Human
auacaaagcuaaauaugguuuc

SEQ ID NO: 596360 - RNA, 22 nt, Human
cggcuggguucggcugcaggcc

SEQ ID NO: 596361 - RNA, 22 nt, Human
gaaguucacauagcuggcaggu

SEQ ID NO: 596362 - RNA, 22 nt, Human
uagggcugcugcagaugacagg

SEQ ID NO: 596363 - RNA, 22 nt, Human
ucucugcuaagauugugucuag

SEQ ID NO: 596364 - RNA, 22 nt, Human
caggacaguuugcuuugcccug

SEQ ID NO: 596365 - RNA, 22 nt, Human
gggagcaggacauaauagcaau

SEQ ID NO: 596366 - RNA, 22 nt, Human
aucauuguaaauaaugcugcca

SEQ ID NO: 596367 - RNA, 22 nt, Human
guucaaauuuuggcuguacugc

SEQ ID NO: 596368 - RNA, 22 nt, Human
caaguuuucuggguucagagca

SEQ ID NO: 596369 - RNA, 22 nt, Human
gacagcuggcaguggaaaggug

SEQ ID NO: 596370 - RNA, 22 nt, Human
acucugaaccagagaucauacc

SEQ ID NO: 596371 - RNA, 22 nt, Human
cccuggaggagcuuagagcuug

SEQ ID NO: 596372 - RNA, 22 nt, Human
ggugugugaggagucacuuagu

SEQ ID NO: 596373 - RNA, 22 nt, Human
ugguccuguguucuuccugccu

SEQ ID NO: 596374 - RNA, 22 nt, Human
caggaacaggcugaugggcagg

SEQ ID NO: 596375 - RNA, 22 nt, Human
augauucuaggcauugaagaua

SEQ ID NO: 596376 - RNA, 22 nt, Human
agcuuugggccacuggcuggau

SEQ ID NO: 596377 - RNA, 22 nt, Human
acauuguuucugaccaugauga

SEQ ID NO: 596378 - RNA, 22 nt, Human
gaccucaggcuucuguaauuaa

SEQ ID NO: 596379 - RNA, 22 nt, Human
ucagguggcugguugcuggcua

SEQ ID NO: 596380 - RNA, 22 nt, Human
uuccuugagaaaggcacaaguu

SEQ ID NO: 596381 - RNA, 22 nt, Human
guuucugagcacuuuuauugca

SEQ ID NO: 596382 - RNA, 22 nt, Human
ccaggucucgggucugcucgug

SEQ ID NO: 596383 - RNA, 22 nt, Human
uuacacuaagcuacuucuauau

SEQ ID NO: 596384 - RNA, 22 nt, Human
ucaggccacuucacaggugauu

SEQ ID NO: 596385 - RNA, 22 nt, Human
ugccuggaugugcuggccucac

SEQ ID NO: 596386 - RNA, 22 nt, Human
auucuagacaucugcaguuguu

SEQ ID NO: 596387 - RNA, 22 nt, Human
gaaacuagauguauuagagauu

SEQ ID NO: 596388 - RNA, 22 nt, Human
uuacagaagaguaacuuggcaa

SEQ ID NO: 596389 - RNA, 22 nt, Human
gcauguggccuucaggcuggaa

SEQ ID NO: 596390 - RNA, 22 nt, Human
gcacacaugcaugugugcaucc

SEQ ID NO: 596391 - RNA, 22 nt, Human
cacaggaaguggucagugccag

SEQ ID NO: 596392 - RNA, 22 nt, Human
gcugucagugaggugagacaug

SEQ ID NO: 596393 - RNA, 22 nt, Human
aaagcaauuacaaaagggauaa

SEQ ID NO: 596394 - RNA, 22 nt, Human
ccuucucuacuccugaugcaug

SEQ ID NO: 596395 - RNA, 22 nt, Human
gugcagcugugugagagcucca

SEQ ID NO: 596396 - RNA, 22 nt, Human
uggcugccgacuggcucuuggc

SEQ ID NO: 596397 - RNA, 20 nt, Human
uuguuucugcuauuuucuaa

SEQ ID NO: 596398 - RNA, 22 nt, Human
acaagcauaagugagaugaaua

SEQ ID NO: 596399 - RNA, 22 nt, Human
agucccuggauugucucuguca

SEQ ID NO: 596400 - RNA, 22 nt, Human
ugaggugguucaagagccuugu

SEQ ID NO: 596401 - RNA, 22 nt, Human
uccuucagccaugggcucucca

SEQ ID NO: 596402 - RNA, 23 nt, Human
aagaacuuugguccugcagaguc

SEQ ID NO: 596403 - RNA, 22 nt, Human
cagaagugaaugugauaaacca

SEQ ID NO: 596404 - RNA, 21 nt, Human
guuauugaccuccaggcuggc

SEQ ID NO: 596405 - RNA, 22 nt, Human
acacuguuccacacuaagaagg

SEQ ID NO: 596406 - RNA, 22 nt, Human
guguauaacccaaauaugcugc

SEQ ID NO: 596407 - RNA, 22 nt, Human
ccaggcccuugcaagucccacc

SEQ ID NO: 596408 - RNA, 19 nt, Human
cuguggccuccaggaggga

SEQ ID NO: 596409 - RNA, 22 nt, Human
ugguuuuagaugccuuuacugc

SEQ ID NO: 596410 - RNA, 22 nt, Human
cuaguguuuauuaaucaugagg

SEQ ID NO: 596411 - RNA, 22 nt, Human
auuuagcaccuccaucucaaca

SEQ ID NO: 596412 - RNA, 22 nt, Human
cacuguugaagauacuuccucu

SEQ ID NO: 596413 - RNA, 22 nt, Human
agcugcccuggcggagcugcuc

SEQ ID NO: 596414 - RNA, 21 nt, Human
cccaggaguccuauuuaaaug

SEQ ID NO: 596415 - RNA, 22 nt, Human
aacaggcaacaguugacucuga

SEQ ID NO: 596416 - RNA, 22 nt, Human
acauucugggugauguucuuca

SEQ ID NO: 596417 - RNA, 22 nt, Human
agggggagcuuggcuacuccug

SEQ ID NO: 596418 - RNA, 22 nt, Human
agcagguggccuccugucuguc

SEQ ID NO: 596419 - RNA, 22 nt, Human
auggagggaaaaguggagagcc

SEQ ID NO: 596420 - RNA, 22 nt, Human
ucaccaggcuggaaugcagugg

SEQ ID NO: 596421 - RNA, 20 nt, Human
gcuucagaaccugggugcug

SEQ ID NO: 596422 - RNA, 22 nt, Human
ugcagugguguccagguguacu

SEQ ID NO: 596423 - RNA, 22 nt, Human
aggcaccuugagagcaggagcu

SEQ ID NO: 596424 - RNA, 22 nt, Human
ucacauucucagcaucuauaca

SEQ ID NO: 596425 - RNA, 22 nt, Human
aggaaacugggccucagguuag

SEQ ID NO: 596426 - RNA, 22 nt, Human
uauauauaugcacacacaccua

SEQ ID NO: 596427 - RNA, 22 nt, Human
caugcaguguguaucuacuuaa

SEQ ID NO: 596428 - RNA, 20 nt, Human
acaugcaguggucauuucag

SEQ ID NO: 596429 - RNA, 22 nt, Human
acauccucggggaaaggcacug

SEQ ID NO: 596430 - RNA, 22 nt, Human
ucuccaggugaaacuugcaggg

SEQ ID NO: 596431 - RNA, 20 nt, Human
ucauaaagaggaaauaaaua

SEQ ID NO: 596432 - RNA, 22 nt, Human
cagcuguugucucucacauauu

SEQ ID NO: 596433 - RNA, 22 nt, Human
ucacagagagugacuuguugcu

SEQ ID NO: 596434 - RNA, 22 nt, Human
uuaagauagaacccaguagucu

SEQ ID NO: 596435 - RNA, 22 nt, Human
cccugggcucagagcagguagc

SEQ ID NO: 596436 - RNA, 20 nt, Human
agcauacaucauaagaaacc

SEQ ID NO: 596437 - RNA, 22 nt, Human
gugccuuugagaaguuucucug

SEQ ID NO: 596438 - RNA, 22 nt, Human
agggcuccuaugccccauggac

SEQ ID NO: 596439 - RNA, 22 nt, Human
agcuuccugacuggugcucuua

SEQ ID NO: 596440 - RNA, 22 nt, Human
gcugugagaaacagggaguguc

SEQ ID NO: 596441 - RNA, 22 nt, Human
ucuggagauaagacagacagau

SEQ ID NO: 596442 - RNA, 22 nt, Human
gccucaguguccuccuccaugu

SEQ ID NO: 596443 - RNA, 22 nt, Human
gcgacgcucgggcuccgaugcc

SEQ ID NO: 596444 - RNA, 22 nt, Human
ggcugagaguggaucccaggga

SEQ ID NO: 596445 - RNA, 22 nt, Human
aggaggggcaaugauagucugg

SEQ ID NO: 596446 - RNA, 22 nt, Human
agacaguggaucgggaugcacu

SEQ ID NO: 596447 - RNA, 22 nt, Human
uagcuuugcaaaggaaguuuua

SEQ ID NO: 596448 - RNA, 22 nt, Human
ggcacugacugugcagcgcacc

SEQ ID NO: 596449 - RNA, 22 nt, Human
acuuucaagcaagaacacuuug

SEQ ID NO: 596450 - RNA, 22 nt, Human
uuucaacaucaccuagcaguuc

SEQ ID NO: 596451 - RNA, 22 nt, Human
uauuuguugaguuguuaugucu

SEQ ID NO: 596452 - RNA, 22 nt, Human
guggggaguguucugugauugg

SEQ ID NO: 596453 - RNA, 22 nt, Human
caagggaguuacugagggcggg

SEQ ID NO: 596454 - RNA, 22 nt, Human
ggcacugggugagggucacugg

SEQ ID NO: 596455 - RNA, 22 nt, Human
agagugcuuaguagugacaugg

SEQ ID NO: 596456 - RNA, 19 nt, Human
uucauucuuucuacuuacc

SEQ ID NO: 596457 - RNA, 18 nt, Human
ucucucagggaaacagaa

SEQ ID NO: 596458 - RNA, 22 nt, Human
ccagcuucaugggcaugcacca

SEQ ID NO: 596459 - RNA, 22 nt, Human
cuagucucuggaggucagggcu

SEQ ID NO: 596460 - RNA, 22 nt, Human
acaucuucacugguuucuggaa

SEQ ID NO: 596461 - RNA, 22 nt, Human
uuauggaaaauacaauuauaag

SEQ ID NO: 596462 - RNA, 22 nt, Human
uggggaugaaacccaggcaucu

SEQ ID NO: 596463 - RNA, 22 nt, Human
gaggcugcugagagcccuguuu

SEQ ID NO: 596464 - RNA, 22 nt, Human
agcaugcuuggcauuugucaga

SEQ ID NO: 596465 - RNA, 22 nt, Human
uaguuacaaaccaacaggcagc

SEQ ID NO: 596466 - RNA, 22 nt, Human
ugcaguucuaucacccaccccg

SEQ ID NO: 596467 - RNA, 22 nt, Human
ccagucccaggcagaaauccag

SEQ ID NO: 596468 - RNA, 22 nt, Human
gaaggcugcgaggggagugccg

SEQ ID NO: 596469 - RNA, 22 nt, Human
gcaugugucuccccaguggagg

SEQ ID NO: 596470 - RNA, 22 nt, Human
cacaguguuccagagcaguggu

SEQ ID NO: 596471 - RNA, 18 nt, Human
ccacuuugcagccuggcc

SEQ ID NO: 596472 - RNA, 22 nt, Human
cacuacagggguccacagcuga

SEQ ID NO: 596473 - RNA, 22 nt, Human
agauauuuguaucuugcuauug

SEQ ID NO: 596474 - RNA, 21 nt, Human
cacacagugaucuauccacau

SEQ ID NO: 596475 - RNA, 22 nt, Human
cacaguuucugaacacuuugca

SEQ ID NO: 596476 - RNA, 22 nt, Human
uaaacagagugcuaguucacgg

SEQ ID NO: 596477 - RNA, 22 nt, Human
acauacaucaaguaucacaaga

SEQ ID NO: 596478 - RNA, 22 nt, Human
cagaggaacguuuggauugauu

SEQ ID NO: 596479 - RNA, 22 nt, Human
cugaaggaagcagguggccugu

SEQ ID NO: 596480 - RNA, 22 nt, Human
ccaagcuucuuuccuacuacag

SEQ ID NO: 596481 - RNA, 22 nt, Human
uuucaaauaccauaaaccuaau

SEQ ID NO: 596482 - RNA, 22 nt, Human
aagcaaggcaaccuauguccag

SEQ ID NO: 596483 - RNA, 22 nt, Human
ugaaggagcugauguaaggggu

SEQ ID NO: 596484 - RNA, 22 nt, Human
ugcuuagacgucaaguacagcc

SEQ ID NO: 596485 - RNA, 22 nt, Human
cagcaucccucaggggccucug

SEQ ID NO: 596486 - RNA, 22 nt, Human
auugagaaaauucgagcaaguu

SEQ ID NO: 596487 - RNA, 22 nt, Human
gaguccaguuagugaggcuggg

SEQ ID NO: 596488 - RNA, 22 nt, Human
uagggcagaguccaggaugggc

SEQ ID NO: 596489 - RNA, 22 nt, Human
acagucucuccacacugcaggg

SEQ ID NO: 596490 - RNA, 19 nt, Human
augcuuuauguuauuucuu

SEQ ID NO: 596491 - RNA, 22 nt, Human
ugugccaagacuauauugugcu

SEQ ID NO: 596492 - RNA, 22 nt, Human
guuuccacgucucaguuccaaa

SEQ ID NO: 596493 - RNA, 22 nt, Human
gugcaguugauaguuuuaguga

SEQ ID NO: 596494 - RNA, 22 nt, Human
gcuggugagcaaaggagaagga

SEQ ID NO: 596495 - RNA, 22 nt, Human
gacccuggaguuaguccugugu

SEQ ID NO: 596496 - RNA, 22 nt, Human
uuccuggugagauuucguucug

SEQ ID NO: 596497 - RNA, 22 nt, Human
ugugugugcacaugcauauaca

SEQ ID NO: 596498 - RNA, 19 nt, Human
cccaggagcaguauugaug

SEQ ID NO: 596499 - RNA, 19 nt, Human
cccagagcauccugaacuu

SEQ ID NO: 596500 - RNA, 22 nt, Human
acacauagaaaauaaauaguua

SEQ ID NO: 596501 - RNA, 22 nt, Human
ggaagcuguugugagugcagca

SEQ ID NO: 596502 - RNA, 22 nt, Human
cugaugcuauaagccacagugg

SEQ ID NO: 596503 - RNA, 22 nt, Human
aguucuagaagacuuuuccauu

SEQ ID NO: 596504 - RNA, 22 nt, Human
gaaugagacuaugcgaguguga

SEQ ID NO: 596505 - RNA, 22 nt, Human
aggugcuggcgccccaggagac

SEQ ID NO: 596506 - RNA, 22 nt, Human
uuuuccuggagauggaguuguu

SEQ ID NO: 596507 - RNA, 22 nt, Human
acuuccagccccugucagcaaa

SEQ ID NO: 596508 - RNA, 22 nt, Human
cagagggcccccuggccacagu

SEQ ID NO: 596509 - RNA, 22 nt, Human
aaugcuuugagggaagaugaaa

SEQ ID NO: 596510 - RNA, 17 nt, Human
cagucacaggucuuuuc

SEQ ID NO: 596511 - RNA, 22 nt, Human
uacauacaugguggaaugguua

SEQ ID NO: 596512 - RNA, 22 nt, Human
gcuuaaacccaggaaguugugg

SEQ ID NO: 596513 - RNA, 22 nt, Human
uacagcuuaaaagaugcauuua

SEQ ID NO: 596514 - RNA, 22 nt, Human
ugaaggcauugaugaaggaauc

SEQ ID NO: 596515 - RNA, 22 nt, Human
cugcaagccaagcugagagccu

SEQ ID NO: 596516 - RNA, 22 nt, Human
aggcccuguaagguguggagau

SEQ ID NO: 596517 - RNA, 22 nt, Human
acagaacugcaggaggaaaagc

SEQ ID NO: 596518 - RNA, 22 nt, Human
uguggucuccccagugccagcu

SEQ ID NO: 596519 - RNA, 22 nt, Human
ucugagcugggcacagaaggcg

SEQ ID NO: 596520 - RNA, 22 nt, Human
gggauggaggguagagcaagug

SEQ ID NO: 596521 - RNA, 22 nt, Human
cucuccaucugugugaccuccc

SEQ ID NO: 596522 - RNA, 22 nt, Human
gggcccuggacguggcggcaga

SEQ ID NO: 596523 - RNA, 22 nt, Human
uacaggcauguagcauggugau

SEQ ID NO: 596524 - RNA, 21 nt, Human
ugggcacugagggugcugcuc

SEQ ID NO: 596525 - RNA, 20 nt, Human
ccaggcuggcaaaugggggc

SEQ ID NO: 596526 - RNA, 22 nt, Human
acauagcuuaaaugagaagaua

SEQ ID NO: 596527 - RNA, 22 nt, Human
cuggguggcgucuggggccagu

SEQ ID NO: 596528 - RNA, 22 nt, Human
aagucucuuuaccucuccaggc

SEQ ID NO: 596529 - RNA, 22 nt, Human
acaggucagauaaaggcuggug

SEQ ID NO: 596530 - RNA, 22 nt, Human
cuugggaguagaggcaggagca

SEQ ID NO: 596531 - RNA, 22 nt, Human
ggccucagaccggagcuggcca

SEQ ID NO: 596532 - RNA, 22 nt, Human
cugaggccuguguuggggcagu

SEQ ID NO: 596533 - RNA, 22 nt, Human
uaaacaucugaauccugcuucc

SEQ ID NO: 596534 - RNA, 22 nt, Human
ucucuucuaauuaggguccaug

SEQ ID NO: 596535 - RNA, 22 nt, Human
agugcagauuuuuagucagcuu

SEQ ID NO: 596536 - RNA, 22 nt, Human
aaucacaugaaaacuguguguu

SEQ ID NO: 596537 - RNA, 19 nt, Human
agcuccuguucagcagcuc

SEQ ID NO: 596538 - RNA, 22 nt, Human
auuuauugaagcuuauuacguu

SEQ ID NO: 596539 - RNA, 22 nt, Human
acuucacagguuuucauaaaac

SEQ ID NO: 596540 - RNA, 22 nt, Human
gccuucaguaacugagacggaa

SEQ ID NO: 596541 - RNA, 22 nt, Human
cuagagaaaaugauagcaggaa

SEQ ID NO: 596542 - RNA, 22 nt, Human
ggucccagcuggucacugucag

SEQ ID NO: 596543 - RNA, 22 nt, Human
aguaggaggcgggagcaugaag

SEQ ID NO: 596544 - RNA, 23 nt, Human
uuaugcuuuggcacucuuguuag

SEQ ID NO: 596545 - RNA, 22 nt, Human
gggucugggcaggcgcuuccuc

SEQ ID NO: 596546 - RNA, 22 nt, Human
ugagaggauauuuugggaggau

SEQ ID NO: 596547 - RNA, 22 nt, Human
aaauguuuugcucccauguggu

SEQ ID NO: 596548 - RNA, 22 nt, Human
cagcugugggccugacguggca

SEQ ID NO: 596549 - RNA, 22 nt, Human
auguguguguuuaauccucaaa

SEQ ID NO: 596550 - RNA, 22 nt, Human
ucuguaaaacuucuuuguaaau

SEQ ID NO: 596551 - RNA, 22 nt, Human
uuagaucuuaggcaaauguguu

SEQ ID NO: 596552 - RNA, 22 nt, Human
ugggagcacucuuugggaagca

SEQ ID NO: 596553 - RNA, 22 nt, Human
aaggccacgucuccuuccagag

SEQ ID NO: 596554 - RNA, 22 nt, Human
cagagcuggagcuugaauggag

SEQ ID NO: 596555 - RNA, 22 nt, Human
gaaacccugagagguggucugg

SEQ ID NO: 596556 - RNA, 22 nt, Human
aggcaaaagaaugucauaaaug

SEQ ID NO: 596557 - RNA, 22 nt, Human
acacuaguagaauaguguuugc

SEQ ID NO: 596558 - RNA, 22 nt, Human
aggagcugcauggauaccuggu

SEQ ID NO: 596559 - RNA, 22 nt, Human
uaacaaugggaaggacugauga

SEQ ID NO: 596560 - RNA, 22 nt, Human
gcagauggcagcccaggcuggg

SEQ ID NO: 596561 - RNA, 20 nt, Human
uauuucugggcaaccauuua

SEQ ID NO: 596562 - RNA, 22 nt, Human
ucccuggguucccguggaagug

SEQ ID NO: 596563 - RNA, 22 nt, Human
aaaauauuuuagggccaggaga

SEQ ID NO: 596564 - RNA, 22 nt, Human
uagggaugauggagccuaugua

SEQ ID NO: 596565 - RNA, 22 nt, Human
cuagcacagcccauucagucua

SEQ ID NO: 596566 - RNA, 22 nt, Human
guuauuauuucucuccuugcua

SEQ ID NO: 596567 - RNA, 22 nt, Human
cuguggcacauguggcaaggcc

SEQ ID NO: 596568 - RNA, 22 nt, Human
gagagcuguguucauucuacca

SEQ ID NO: 596569 - RNA, 22 nt, Human
caugaguucaaaaugccugccu

SEQ ID NO: 596570 - RNA, 22 nt, Human
uccugaagagcccugcucugug

SEQ ID NO: 596571 - RNA, 22 nt, Human
agggucagugaugagggagccc

SEQ ID NO: 596572 - RNA, 22 nt, Human
aguucuauaauuaaaaugaagg

SEQ ID NO: 596573 - RNA, 21 nt, Human
gcuucuguaucuagcaggaac

SEQ ID NO: 596574 - RNA, 22 nt, Human
cuagaacaaauuaggaggcaua

SEQ ID NO: 596575 - RNA, 16 nt, Human
uggagcaggcaggaug

SEQ ID NO: 596576 - RNA, 22 nt, Human
cugggccagggaggugucugua

SEQ ID NO: 596577 - RNA, 22 nt, Human
aauuagcuuauguguacuuuuc

SEQ ID NO: 596578 - RNA, 22 nt, Human
aaggcagcaggauuuggugacu

SEQ ID NO: 596579 - RNA, 22 nt, Human
ucagggaagacuucuuagagga

SEQ ID NO: 596580 - RNA, 22 nt, Human
ucucugagcuuaagguguuuca

SEQ ID NO: 596581 - RNA, 22 nt, Human
aaacuguaagagaauaaacuac

SEQ ID NO: 596582 - RNA, 22 nt, Human
cugagccagcgggcucacuuuu

SEQ ID NO: 596583 - RNA, 22 nt, Human
uugcagggcaaauggucagaua

SEQ ID NO: 596584 - RNA, 22 nt, Human
agcucccagcagagcuggccac

SEQ ID NO: 596585 - RNA, 22 nt, Human
gucaagcagaagauaauuuaaa

SEQ ID NO: 596586 - RNA, 22 nt, Human
aaggcugaggagggccugcagg

SEQ ID NO: 596587 - RNA, 22 nt, Human
ugcuggagacauagcaggcagc

SEQ ID NO: 596588 - RNA, 22 nt, Human
uaccucucuaaacccagggaca

SEQ ID NO: 596589 - RNA, 22 nt, Human
gaagcagaacccacuccccaac

SEQ ID NO: 596590 - RNA, 22 nt, Human
agggcccaggacagcaucaggg

SEQ ID NO: 596591 - RNA, 22 nt, Human
ucucagucagccuugauguccc

SEQ ID NO: 596592 - RNA, 22 nt, Human
agcccccagucuaaacuguugg

SEQ ID NO: 596593 - RNA, 22 nt, Human
ccccagaaggggacagagggua

SEQ ID NO: 596594 - RNA, 22 nt, Human
cauccagcuccugggggccacc

SEQ ID NO: 596595 - RNA, 22 nt, Human
cugcuucuaagaaccugcagcu

SEQ ID NO: 596596 - RNA, 22 nt, Human
cacagcagacagggaggcggcu

SEQ ID NO: 596597 - RNA, 22 nt, Human
uauacuuuccugcaacuuugau

SEQ ID NO: 596598 - RNA, 22 nt, Human
ugaggcccggguggaggaaugc

SEQ ID NO: 596599 - RNA, 22 nt, Human
gaagcaguagcaacugugucuu

SEQ ID NO: 596600 - RNA, 22 nt, Human
ucuauuuucuugccaaaacugc

SEQ ID NO: 596601 - RNA, 22 nt, Human
aggcucuguuugcugugguacc

SEQ ID NO: 596602 - RNA, 23 nt, Human
gcuaggugcuuccacacgugcug

SEQ ID NO: 596603 - RNA, 22 nt, Human
cagggagcugacaaccaaggag

SEQ ID NO: 596604 - RNA, 22 nt, Human
gccugcuuugugccugaucuuu

SEQ ID NO: 596605 - RNA, 22 nt, Human
agaaacuauccugaguagcaaa

SEQ ID NO: 596606 - RNA, 22 nt, Human
uaggacuuggugacucucaaug

SEQ ID NO: 596607 - RNA, 22 nt, Human
aauauuuguuaguguuuuaaug

SEQ ID NO: 596608 - RNA, 22 nt, Human
auuuguaccaucugguauacag

SEQ ID NO: 596609 - RNA, 19 nt, Human
ccugggagucagcugaagg

SEQ ID NO: 596610 - RNA, 22 nt, Human
agcaggaaagaaaaaucugugu

SEQ ID NO: 596611 - RNA, 22 nt, Human
aaauuuuaguaaggaaguugag

SEQ ID NO: 596612 - RNA, 23 nt, Human
ggcuucagugagagucccugcug

SEQ ID NO: 596613 - RNA, 22 nt, Human
cagcagcuuugccaagucagcc

SEQ ID NO: 596614 - RNA, 19 nt, Human
cacaguccuauguuuauca

SEQ ID NO: 596615 - RNA, 22 nt, Human
ucaagaauagcugcaaacaggg

SEQ ID NO: 596616 - RNA, 22 nt, Human
ugaggccuggacucugcaugga

SEQ ID NO: 596617 - RNA, 22 nt, Human
ggcccagcucuauugaauuaca

SEQ ID NO: 596618 - RNA, 22 nt, Human
gggcacugaaugccaagcuagg

SEQ ID NO: 596619 - RNA, 22 nt, Human
caaaugcuacuaauaggcaagu

SEQ ID NO: 596620 - RNA, 22 nt, Human
ggguaugauagggaggugaaau

SEQ ID NO: 596621 - RNA, 22 nt, Human
uagagcuguaucaaagagccuu

SEQ ID NO: 596622 - RNA, 22 nt, Human
caugccuguaaucccagcucuu

SEQ ID NO: 596623 - RNA, 22 nt, Human
aagugucugcuggcucuacccu

SEQ ID NO: 596624 - RNA, 22 nt, Human
aggcucugaguagagcugccag

SEQ ID NO: 596625 - RNA, 22 nt, Human
acugggaagacaagaaagauag

SEQ ID NO: 596626 - RNA, 22 nt, Human
ucccagaggacuguuggugcua

SEQ ID NO: 596627 - RNA, 22 nt, Human
ugcauuuaguuaugagaaaaac

SEQ ID NO: 596628 - RNA, 22 nt, Human
gaguuauuucagaaggaaagau

SEQ ID NO: 596629 - RNA, 21 nt, Human
aauggcuuauacagaaguaag

SEQ ID NO: 596630 - RNA, 22 nt, Human
acaguguucaaaccacuaggcu

SEQ ID NO: 596631 - RNA, 22 nt, Human
ucuguucuaagcauucuaugug

SEQ ID NO: 596632 - RNA, 22 nt, Human
aaacuggguuguggucaguggu

SEQ ID NO: 596633 - RNA, 22 nt, Human
ccuuuacaguaugguuguauca

SEQ ID NO: 596634 - RNA, 23 nt, Human
cugacucaucccaccaccuccuc

SEQ ID NO: 596635 - RNA, 22 nt, Human
cugaagcaaaugaaacagcucu

SEQ ID NO: 596636 - RNA, 22 nt, Human
caucuacaggagaaugucacug

SEQ ID NO: 596637 - RNA, 22 nt, Human
augaagucucuuuuucaugaga

SEQ ID NO: 596638 - RNA, 22 nt, Human
gugggcagccuccuuuauuuuc

SEQ ID NO: 596639 - RNA, 22 nt, Human
caggcgagggcccugaggagcc

SEQ ID NO: 596640 - RNA, 22 nt, Human
agcugauuccacuuuuucccca

SEQ ID NO: 596641 - RNA, 22 nt, Human
gaggcugagacucugaauuuuu

SEQ ID NO: 596642 - RNA, 23 nt, Human
uccugagaugagacagugcugcc

SEQ ID NO: 596643 - RNA, 22 nt, Human
uggcuaggcuccaagagcugga

SEQ ID NO: 596644 - RNA, 22 nt, Human
acacacaugguauuguucagaa

SEQ ID NO: 596645 - RNA, 22 nt, Human
gugcaaaagcaauugcaguuuu

SEQ ID NO: 596646 - RNA, 22 nt, Human
auuaaacaauguaaaguucuug

SEQ ID NO: 596647 - RNA, 22 nt, Human
gagcacagggaauagacagaua

SEQ ID NO: 596648 - RNA, 22 nt, Human
uaauggagauuuagcacuuacg

SEQ ID NO: 596649 - RNA, 22 nt, Human
ugccaggcgugguggugcgcac

SEQ ID NO: 596650 - RNA, 22 nt, Human
gauggguacucguuggacugag

SEQ ID NO: 596651 - RNA, 22 nt, Human
ugugucugaacaugcuuuguaa

SEQ ID NO: 596652 - RNA, 22 nt, Human
agauggcuccaguguccagagg

SEQ ID NO: 596653 - RNA, 22 nt, Human
auuugauuagcuguguaauuuu

SEQ ID NO: 596654 - RNA, 22 nt, Human
auuauucaaauucccacuauac

SEQ ID NO: 596655 - RNA, 22 nt, Human
uuucaacucaugcuaaaggaag

SEQ ID NO: 596656 - RNA, 22 nt, Human
auuucagaauguccuaauuuag

SEQ ID NO: 596657 - RNA, 22 nt, Human
cacauuuaucuguucuuucuag

SEQ ID NO: 596658 - RNA, 21 nt, Human
uccaggaguggcugggcaggg

SEQ ID NO: 596659 - RNA, 22 nt, Human
ugcccaggcuccucgcagccuu

SEQ ID NO: 596660 - RNA, 20 nt, Human
gccuggcacccggggcuggc

SEQ ID NO: 596661 - RNA, 22 nt, Human
agggcagcacaaggcauggacu

SEQ ID NO: 596662 - RNA, 22 nt, Human
uggcugcugagaaggcagcugu

SEQ ID NO: 596663 - RNA, 22 nt, Human
agaaagcagucccuuccgaccg

SEQ ID NO: 596664 - RNA, 22 nt, Human
aaugcaguuucauuuguagaau

SEQ ID NO: 596665 - RNA, 22 nt, Human
gccugucugcgucacgcuuauu

SEQ ID NO: 596666 - RNA, 22 nt, Human
uuguggaagcccuaugagagac

SEQ ID NO: 596667 - RNA, 22 nt, Human
cugaggaggggccugagugaga

SEQ ID NO: 596668 - RNA, 22 nt, Human
uucaauuucauaauaucuagcu

SEQ ID NO: 596669 - RNA, 22 nt, Human
cauggcaauaaaccuacacagu

SEQ ID NO: 596670 - RNA, 22 nt, Human
cuuucuaguugacagcaugcca

SEQ ID NO: 596671 - RNA, 22 nt, Human
uggcucagcaagacauugaccu

SEQ ID NO: 596672 - RNA, 22 nt, Human
gugcucugaucugucugacauc

SEQ ID NO: 596673 - RNA, 22 nt, Human
augggaggcaggcucagaaccg

SEQ ID NO: 596674 - RNA, 23 nt, Human
uggccaggcauaaaggugggugg

SEQ ID NO: 596675 - RNA, 23 nt, Human
gggaagcuccauggaggugcugg

SEQ ID NO: 596676 - RNA, 19 nt, Human
uccaggaggcugccauuga

SEQ ID NO: 596677 - RNA, 20 nt, Human
agaagcauucaaagaaaacu

SEQ ID NO: 596678 - RNA, 22 nt, Human
aggaaggggagaaguuaaagcu

SEQ ID NO: 596679 - RNA, 23 nt, Human
cugcuguguuggucucgauggga

SEQ ID NO: 596680 - RNA, 22 nt, Human
aggcugagggcuccugagggca

SEQ ID NO: 596681 - RNA, 22 nt, Human
uucaauucugaugaaggcaaua

SEQ ID NO: 596682 - RNA, 22 nt, Human
ugccagggccauagggagucua

SEQ ID NO: 596683 - RNA, 22 nt, Human
aggcucugucaggcggagcagc

SEQ ID NO: 596684 - RNA, 22 nt, Human
aaaguuacuaucacaaugaaau

SEQ ID NO: 596685 - RNA, 22 nt, Human
agguaucaacagcagagucuga

SEQ ID NO: 596686 - RNA, 22 nt, Human
cacauguuuggcaugucaccaa

SEQ ID NO: 596687 - RNA, 22 nt, Human
ucuuuauacaaacugggaaaca

SEQ ID NO: 596688 - RNA, 22 nt, Human
aguccauacauugagaauaaca

SEQ ID NO: 596689 - RNA, 22 nt, Human
gauggcagcagcagccagggau

SEQ ID NO: 596690 - RNA, 22 nt, Human
cagaaggcuuuguggaguagac

SEQ ID NO: 596691 - RNA, 22 nt, Human
ggagauaguccaggugaaggga

SEQ ID NO: 596692 - RNA, 22 nt, Human
acugugugcccugacgccaggg

SEQ ID NO: 596693 - RNA, 22 nt, Human
caggccaacugcauggugacca

SEQ ID NO: 596694 - RNA, 22 nt, Human
ugcucaguccuccugcagugcc

SEQ ID NO: 596695 - RNA, 22 nt, Human
ucugcaacauuccucuccccac

SEQ ID NO: 596696 - RNA, 19 nt, Human
gcucagagucccccugcgg

SEQ ID NO: 596697 - RNA, 22 nt, Human
cuucccugauaagagccucaga

SEQ ID NO: 596698 - RNA, 22 nt, Human
aaacuccugcauacucagaagc

SEQ ID NO: 596699 - RNA, 22 nt, Human
cuggagucuucagcuugcugcc

SEQ ID NO: 596700 - RNA, 19 nt, Human
uucuggucuggaaucaagg

SEQ ID NO: 596701 - RNA, 22 nt, Human
cugcugucauagccaucccucc

SEQ ID NO: 596702 - RNA, 22 nt, Human
gacaacugagcagaggaaauga

SEQ ID NO: 596703 - RNA, 22 nt, Human
ugacagggggcagagguggcug

SEQ ID NO: 596704 - RNA, 22 nt, Human
caaaguuuggcucucaugacau

SEQ ID NO: 596705 - RNA, 22 nt, Human
auguacauaaaauguauaauga

SEQ ID NO: 596706 - RNA, 23 nt, Human
cuguggcccugcuucaugcagcc

SEQ ID NO: 596707 - RNA, 22 nt, Human
aucacaaaggguuuucucugag

SEQ ID NO: 596708 - RNA, 20 nt, Human
uacuuugaucugauaagcaa

SEQ ID NO: 596709 - RNA, 22 nt, Human
cagaggcaggauaagaacugcg

SEQ ID NO: 596710 - RNA, 22 nt, Human
gagaggccauggggugggaugc

SEQ ID NO: 596711 - RNA, 22 nt, Human
uuggaucauggaaugucugcuu

SEQ ID NO: 596712 - RNA, 22 nt, Human
agcagccuuugaucaucuggga

SEQ ID NO: 596713 - RNA, 22 nt, Human
ucaguggaguauggaugaaguc

SEQ ID NO: 596714 - RNA, 22 nt, Human
aaguuugguccuucuaagaaga

SEQ ID NO: 596715 - RNA, 22 nt, Human
aagauucuacaguagguacauu

SEQ ID NO: 596716 - RNA, 22 nt, Human
aggcugcuucaauggauaagau

SEQ ID NO: 596717 - RNA, 22 nt, Human
ugggagcagcuuugcgagggag

SEQ ID NO: 596718 - RNA, 22 nt, Human
gcuuucuggagccugggggaac

SEQ ID NO: 596719 - RNA, 22 nt, Human
uugauucugggcucauuucuuu

SEQ ID NO: 596720 - RNA, 19 nt, Human
ugcccccagcaccucccug

SEQ ID NO: 596721 - RNA, 20 nt, Human
agccaggccucaaguuaagu

SEQ ID NO: 596722 - RNA, 22 nt, Human
auuaaauuggaucugcauaguu

SEQ ID NO: 596723 - RNA, 22 nt, Human
cacuuaaaucuguugagaaaaa

SEQ ID NO: 596724 - RNA, 17 nt, Human
agcagcuggguugaucu

SEQ ID NO: 596725 - RNA, 22 nt, Human
uuuauagaugucuguauuauaa

SEQ ID NO: 596726 - RNA, 22 nt, Human
cagagcugcucaugguggccag

SEQ ID NO: 596727 - RNA, 22 nt, Human
uucugugugccagaguugugcu

SEQ ID NO: 596728 - RNA, 22 nt, Human
caccagcuuugcccacugccca

SEQ ID NO: 596729 - RNA, 22 nt, Human
ugagcaggauucgccucuugca

SEQ ID NO: 596730 - RNA, 22 nt, Human
gauuuccucacuaacauccauc

SEQ ID NO: 596731 - RNA, 22 nt, Human
uuauaggaaaaguucuagaaaa

SEQ ID NO: 596732 - RNA, 22 nt, Human
uuguuaucaaugaaucaaaacu

SEQ ID NO: 596733 - RNA, 22 nt, Human
auucuugcaguauacaacuacu

SEQ ID NO: 596734 - RNA, 22 nt, Human
acagccagguaaaggcauggca

SEQ ID NO: 596735 - RNA, 22 nt, Human
uaagcaaucuaaaagccuuacc

SEQ ID NO: 596736 - RNA, 22 nt, Human
gagaagcaaucgugacaucucc

SEQ ID NO: 596737 - RNA, 22 nt, Human
ccugugccugccugugaguucu

SEQ ID NO: 596738 - RNA, 22 nt, Human
caucacaugccuaucaugagcu

SEQ ID NO: 596739 - RNA, 22 nt, Human
ugagccguggucucugagggug

SEQ ID NO: 596740 - RNA, 22 nt, Human
aaaugcugaguguuuagagauc

SEQ ID NO: 596741 - RNA, 22 nt, Human
cugcagccuaggugcagcuggg

SEQ ID NO: 596742 - RNA, 22 nt, Human
ucugcacauggcgcugguccug

SEQ ID NO: 596743 - RNA, 22 nt, Human
auauaaagagcuuaguauagug

SEQ ID NO: 596744 - RNA, 17 nt, Human
auccuucuguucuuucu

SEQ ID NO: 596745 - RNA, 22 nt, Human
uccugccucuccaugcuaacua

SEQ ID NO: 596746 - RNA, 22 nt, Human
ggccagucugggccacggucgg

SEQ ID NO: 596747 - RNA, 22 nt, Human
ucacauuugcuaucccacuccu

SEQ ID NO: 596748 - RNA, 22 nt, Human
cugaggccagaacccgacccug

SEQ ID NO: 596749 - RNA, 22 nt, Human
cuuuucuucucacggcugucag

SEQ ID NO: 596750 - RNA, 22 nt, Human
ccuggagcaucaggaggaaggg

SEQ ID NO: 596751 - RNA, 22 nt, Human
ugagguagggaguuuguuguug

SEQ ID NO: 596752 - RNA, 22 nt, Human
uccuugagccucccagacucag

SEQ ID NO: 596753 - RNA, 22 nt, Human
auauaccucauucuuugagugc

SEQ ID NO: 596754 - RNA, 22 nt, Human
gcaguguugugauccaggucuu

SEQ ID NO: 596755 - RNA, 22 nt, Human
gggggccuuguuaguggaugga

SEQ ID NO: 596756 - RNA, 22 nt, Human
uccccagggucccugcuuccau

SEQ ID NO: 596757 - RNA, 22 nt, Human
agugcugacucugggcacagug

SEQ ID NO: 596758 - RNA, 22 nt, Human
cacaugaccacucuuuacuucu

SEQ ID NO: 596759 - RNA, 22 nt, Human
cagcaaaggggaugcguccuaa

SEQ ID NO: 596760 - RNA, 22 nt, Human
guugcugauggcaagauuccag

SEQ ID NO: 596761 - RNA, 22 nt, Human
uguuucaugauugcugucauuu

SEQ ID NO: 596762 - RNA, 22 nt, Human
uucucagagcucacuguaguaa

SEQ ID NO: 596763 - RNA, 22 nt, Human
ucaauaaaauuguuuuccuauc

SEQ ID NO: 596764 - RNA, 22 nt, Human
gguguauaccuacacauuuuug

SEQ ID NO: 596765 - RNA, 22 nt, Human
gggcuggaugggagccuuggcc

SEQ ID NO: 596766 - RNA, 21 nt, Human
uccuccuguagaggguccugg

SEQ ID NO: 596767 - RNA, 22 nt, Human
acaugcuuugcacuuacaucau

SEQ ID NO: 596768 - RNA, 22 nt, Human
gcaguacuuuaucacauggaau

SEQ ID NO: 596769 - RNA, 22 nt, Human
ucucuucuugauuuucacugga

SEQ ID NO: 596770 - RNA, 22 nt, Human
uggccugccugggagcagcagg

SEQ ID NO: 596771 - RNA, 22 nt, Human
ucucuucugaaaccugucuuua

SEQ ID NO: 596772 - RNA, 22 nt, Human
acagggcuccuagguggugugc

SEQ ID NO: 596773 - RNA, 22 nt, Human
uucucuggaacugaaacaagau

SEQ ID NO: 596774 - RNA, 22 nt, Human
ugagugaaauucugguaaagga

SEQ ID NO: 596775 - RNA, 22 nt, Human
uucuuacauuagucugugcuuu

SEQ ID NO: 596776 - RNA, 22 nt, Human
agaaggccaauagggugcacug

SEQ ID NO: 596777 - RNA, 22 nt, Human
ugaggaagcaaaggcuugugug

SEQ ID NO: 596778 - RNA, 22 nt, Human
cagaauuauaguugcuuuuuaa

SEQ ID NO: 596779 - RNA, 21 nt, Human
agggccagaucaccaaggagc

SEQ ID NO: 596780 - RNA, 22 nt, Human
cucuccaggacuuuggcccaau

SEQ ID NO: 596781 - RNA, 22 nt, Human
cagcugccugcaacacaagcuu

SEQ ID NO: 596782 - RNA, 19 nt, Human
gcuggggccugaccagaca

SEQ ID NO: 596783 - RNA, 22 nt, Human
cuagaaaucucuguuuacauca

SEQ ID NO: 596784 - RNA, 22 nt, Human
caucuuuagggaccauuauucu

SEQ ID NO: 596785 - RNA, 22 nt, Human
cauaucauuugcuuauaaaucu

SEQ ID NO: 596786 - RNA, 21 nt, Human
gggccuugagugugcgguggg

SEQ ID NO: 596787 - RNA, 22 nt, Human
aaucagaaauugagggucuggu

SEQ ID NO: 596788 - RNA, 22 nt, Human
agggagccuuccuggcuguggu

SEQ ID NO: 596789 - RNA, 22 nt, Human
uccugcagagacagaggccuca

SEQ ID NO: 596790 - RNA, 22 nt, Human
ucccugggccuaucuuagcucc

SEQ ID NO: 596791 - RNA, 22 nt, Human
gaauucuagucacacacauuca

SEQ ID NO: 596792 - RNA, 22 nt, Human
gaacuguuuuuaaguccuaaga

SEQ ID NO: 596793 - RNA, 22 nt, Human
ccaggcagcucugauuuauguc

SEQ ID NO: 596794 - RNA, 22 nt, Human
cuccagugggggugagccuaga

SEQ ID NO: 596795 - RNA, 22 nt, Human
gcuccuggagagauugagaaag

SEQ ID NO: 596796 - RNA, 22 nt, Human
ccucaagucaauucugucucgc

SEQ ID NO: 596797 - RNA, 22 nt, Human
uaagcauaagauacaugagaca

SEQ ID NO: 596798 - RNA, 22 nt, Human
cgccucagccguggucaucuuc

SEQ ID NO: 596799 - RNA, 22 nt, Human
aggcaccucagcugagccuggg

SEQ ID NO: 596800 - RNA, 16 nt, Human
agaggcuguaauggaa

SEQ ID NO: 596801 - RNA, 22 nt, Human
uuacuugaaaugugauaagaga

SEQ ID NO: 596802 - RNA, 23 nt, Human
ucacuagucaagugccuuugagu

SEQ ID NO: 596803 - RNA, 22 nt, Human
cugggcagcuguaucagggagu

SEQ ID NO: 596804 - RNA, 22 nt, Human
gggcugagccauuugaaccuug

SEQ ID NO: 596805 - RNA, 22 nt, Human
uucagcacugacugagugguua

SEQ ID NO: 596806 - RNA, 22 nt, Human
ugaggccagcuucagcagugga

SEQ ID NO: 596807 - RNA, 22 nt, Human
gccucuccucuuaauaccauua

SEQ ID NO: 596808 - RNA, 22 nt, Human
aucugccuggcuccaggugagc

SEQ ID NO: 596809 - RNA, 22 nt, Human
aaaaccaggcguuuccuauuau

SEQ ID NO: 596810 - RNA, 22 nt, Human
aguuuuaucuguaagcuguuca

SEQ ID NO: 596811 - RNA, 22 nt, Human
agggacacuugcuuucaggccc

SEQ ID NO: 596812 - RNA, 19 nt, Human
ucaugcaaucagugaacug

SEQ ID NO: 596813 - RNA, 22 nt, Human
ucaaaaguuucacauagagaua

SEQ ID NO: 596814 - RNA, 22 nt, Human
uuucccaguucccugcucuaua

SEQ ID NO: 596815 - RNA, 22 nt, Human
gucuuauuuucugucuacuaaa

SEQ ID NO: 596816 - RNA, 22 nt, Human
ugcccuuacacauggaaaggga

SEQ ID NO: 596817 - RNA, 22 nt, Human
cuguggcucaaaaucccaugau

SEQ ID NO: 596818 - RNA, 22 nt, Human
ggaggccacgguuuagcaccga

SEQ ID NO: 596819 - RNA, 22 nt, Human
auaccuguguauccacaagcgu

SEQ ID NO: 596820 - RNA, 22 nt, Human
uuguguccugauuugacacaau

SEQ ID NO: 596821 - RNA, 22 nt, Human
uggcaaccgcauggccugcuuc

SEQ ID NO: 596822 - RNA, 22 nt, Human
gagagggguuugccauccuaug

SEQ ID NO: 596823 - RNA, 17 nt, Human
uuucuagauuauccucu

SEQ ID NO: 596824 - RNA, 22 nt, Human
aauaccagagacaguguuuacc

SEQ ID NO: 596825 - RNA, 22 nt, Human
ugugacugaagugucuagaccu

SEQ ID NO: 596826 - RNA, 17 nt, Human
gagagcugcugcuuccg

SEQ ID NO: 596827 - RNA, 22 nt, Human
gccagaggcccaaggacagcug

SEQ ID NO: 596828 - RNA, 21 nt, Human
gaguccuuccaauguccucag

SEQ ID NO: 596829 - RNA, 22 nt, Human
aucuuaugagacccauaaagau

SEQ ID NO: 596830 - RNA, 22 nt, Human
uuagcauucugccuccuauauc

SEQ ID NO: 596831 - RNA, 22 nt, Human
ucagccagggcagagcagguga

SEQ ID NO: 596832 - RNA, 22 nt, Human
augagacuaccuguaauguggc

SEQ ID NO: 596833 - RNA, 23 nt, Human
uucuggauguucuagucugagag

SEQ ID NO: 596834 - RNA, 22 nt, Human
gcucccagggacacuggccacu

SEQ ID NO: 596835 - RNA, 22 nt, Human
ucccuggguccugcuugcucuc

SEQ ID NO: 596836 - RNA, 22 nt, Human
cugaagcugggcacuuccuuuu

SEQ ID NO: 596837 - RNA, 22 nt, Human
gcugagguccagcauucgccua

SEQ ID NO: 596838 - RNA, 22 nt, Human
ggggaacaccgggcagaggcgc

SEQ ID NO: 596839 - RNA, 22 nt, Human
uuugacagcagauaaaauaaaa

SEQ ID NO: 596840 - RNA, 22 nt, Human
acauauuuugaaagcuuucuaa

SEQ ID NO: 596841 - RNA, 18 nt, Human
ugacauuuccagagugua

SEQ ID NO: 596842 - RNA, 22 nt, Human
cucaggagagucuuauaucucc

SEQ ID NO: 596843 - RNA, 21 nt, Human
cagaggccuaucacagacucc

SEQ ID NO: 596844 - RNA, 22 nt, Human
uccaggcugggcugaagggugc

SEQ ID NO: 596845 - RNA, 22 nt, Human
uagagguacuccccucaaaguu

SEQ ID NO: 596846 - RNA, 21 nt, Human
aguacaaaaauuccuuucuca

SEQ ID NO: 596847 - RNA, 22 nt, Human
ggacccagcucugagacccugc

SEQ ID NO: 596848 - RNA, 22 nt, Human
cuggcucugagcccaccuccag

SEQ ID NO: 596849 - RNA, 22 nt, Human
gcuggaaaaggaggcaaaauau

SEQ ID NO: 596850 - RNA, 20 nt, Human
aguuagugaguaauugagcu

SEQ ID NO: 596851 - RNA, 22 nt, Human
ugcccuuaggaaggcucaccaa

SEQ ID NO: 596852 - RNA, 15 nt, Human
uaccagcugauccgu

SEQ ID NO: 596853 - RNA, 22 nt, Human
uugaggcccggcaggccgagcg

SEQ ID NO: 596854 - RNA, 22 nt, Human
guaggccagugugaaaccuggu

SEQ ID NO: 596855 - RNA, 22 nt, Human
cuucucucccuggcacucagac

SEQ ID NO: 596856 - RNA, 22 nt, Human
gcuuucugaagcaguguuucuc

SEQ ID NO: 596857 - RNA, 22 nt, Human
uguacaauguggccaguguuaa

SEQ ID NO: 596858 - RNA, 22 nt, Human
ggcugcagaggcgaucugaggu

SEQ ID NO: 596859 - RNA, 22 nt, Human
ucaguguguuacuuucuccuau

SEQ ID NO: 596860 - RNA, 22 nt, Human
cauuuaaagguuguggguaaaa

SEQ ID NO: 596861 - RNA, 22 nt, Human
acauucuucagcuuugucaggc

SEQ ID NO: 596862 - RNA, 22 nt, Human
uaaaggcaguaauuccugaguu

SEQ ID NO: 596863 - RNA, 22 nt, Human
auuucacaaaccauccugauuu

SEQ ID NO: 596864 - RNA, 22 nt, Human
ucagcuuggacagcuugguuga

SEQ ID NO: 596865 - RNA, 22 nt, Human
gaaaacacuuugaucugaaagu

SEQ ID NO: 596866 - RNA, 22 nt, Human
agcagguguuggcugggccauc

SEQ ID NO: 596867 - RNA, 22 nt, Human
cagaaauggagcccaggaaucu

SEQ ID NO: 596868 - RNA, 22 nt, Human
auacagaucccacagcauguga

SEQ ID NO: 596869 - RNA, 22 nt, Human
agcaccaggcaccaaagggccu

SEQ ID NO: 596870 - RNA, 22 nt, Human
gcagugugucucuuggcuuccu

SEQ ID NO: 596871 - RNA, 22 nt, Human
cagcucuguaaauuccuucauc

SEQ ID NO: 596872 - RNA, 22 nt, Human
uccuuauaucuucagagaagca

SEQ ID NO: 596873 - RNA, 22 nt, Human
gccuggagaauuaaaaggaagg

SEQ ID NO: 596874 - RNA, 22 nt, Human
acugggcaugaugagucaccua

SEQ ID NO: 596875 - RNA, 22 nt, Human
uaugcuaauuguuagucacaug

SEQ ID NO: 596876 - RNA, 22 nt, Human
ugaggcagauauuuauuggguu

SEQ ID NO: 596877 - RNA, 22 nt, Human
uccugggcuucacagacucugu

SEQ ID NO: 596878 - RNA, 22 nt, Human
auccugggcagugugucacucu

SEQ ID NO: 596879 - RNA, 22 nt, Human
uacacugucuuagaaaggggca

SEQ ID NO: 596880 - RNA, 22 nt, Human
ugggcacaggggaauggaugaa

SEQ ID NO: 596881 - RNA, 22 nt, Human
auacagugccccuuuucacaug

SEQ ID NO: 596882 - RNA, 22 nt, Human
gcacauggacaauggaggugca

SEQ ID NO: 596883 - RNA, 22 nt, Human
guuuguuuuaagauaggaugga

SEQ ID NO: 596884 - RNA, 22 nt, Human
gaggugggagggcagucccuaa

SEQ ID NO: 596885 - RNA, 22 nt, Human
ugcaggagcccuugggcucugg

SEQ ID NO: 596886 - RNA, 22 nt, Human
acagggcuauauuccucagagu

SEQ ID NO: 596887 - RNA, 22 nt, Human
uacaguucuuugaaggaucuag

SEQ ID NO: 596888 - RNA, 23 nt, Human
acagacaacacugaugagagaaa

SEQ ID NO: 596889 - RNA, 22 nt, Human
aggcagcagggccacuggcuga

SEQ ID NO: 596890 - RNA, 22 nt, Human
uggaagggaacagguggguguu

SEQ ID NO: 596891 - RNA, 22 nt, Human
caguagcacucugucagugaag

SEQ ID NO: 596892 - RNA, 18 nt, Human
ggaugugauuuugguuuu

SEQ ID NO: 596893 - RNA, 22 nt, Human
aggagcugugaaugggaggggu

SEQ ID NO: 596894 - RNA, 22 nt, Human
agguguccggcugcauaaucuu

SEQ ID NO: 596895 - RNA, 22 nt, Human
uuauuuguggcauaugagacga

SEQ ID NO: 596896 - RNA, 22 nt, Human
uucaacugggcggaucugagaa

SEQ ID NO: 596897 - RNA, 22 nt, Human
aauguugcagagugauugucca

SEQ ID NO: 596898 - RNA, 22 nt, Human
acauuucucccugcaugccugc

SEQ ID NO: 596899 - RNA, 22 nt, Human
ucugggagggagccucagaauc

SEQ ID NO: 596900 - RNA, 22 nt, Human
agauaauuaugucaauuucuug

SEQ ID NO: 596901 - RNA, 22 nt, Human
augaggccuuucuucacccuuu

SEQ ID NO: 596902 - RNA, 22 nt, Human
cugggacugccauucacagcca

SEQ ID NO: 596903 - RNA, 22 nt, Human
gggaagggagggaccucagucu

SEQ ID NO: 596904 - RNA, 22 nt, Human
aggcuguguuuccccuggagcu

SEQ ID NO: 596905 - RNA, 22 nt, Human
cuggugcacauucgcucucaua

SEQ ID NO: 596906 - RNA, 21 nt, Human
uccugugaggaccugucagug

SEQ ID NO: 596907 - RNA, 22 nt, Human
uccugggucccgcacaucuguc

SEQ ID NO: 596908 - RNA, 22 nt, Human
gagccagagauccaggauggcu

SEQ ID NO: 596909 - RNA, 19 nt, Human
acuguguggaagugugauu

SEQ ID NO: 596910 - RNA, 22 nt, Human
cugccuuuuaaagccaguguua

SEQ ID NO: 596911 - RNA, 22 nt, Human
uaugcuaagauaaacagaguua

SEQ ID NO: 596912 - RNA, 23 nt, Human
ugugggcgcauuguaaggguagc

SEQ ID NO: 596913 - RNA, 22 nt, Human
gcaagcaguuguggcuucugag

SEQ ID NO: 596914 - RNA, 22 nt, Human
ucaguguucuuauuuaauuagg

SEQ ID NO: 596915 - RNA, 22 nt, Human
ccugagaggcccucucacuguc

SEQ ID NO: 596916 - RNA, 22 nt, Human
cuccugguuccugucuuaaaua

SEQ ID NO: 596917 - RNA, 22 nt, Human
uuagcacaggcaacuccacaua

SEQ ID NO: 596918 - RNA, 16 nt, Human
gcuccugggcccucga

SEQ ID NO: 596919 - RNA, 22 nt, Human
uuccauauuguacucuuuggag

SEQ ID NO: 596920 - RNA, 22 nt, Human
uccauucuuuugcugucuuccu

SEQ ID NO: 596921 - RNA, 22 nt, Human
agaacaggaggaagccagcucc

SEQ ID NO: 596922 - RNA, 22 nt, Human
gaguugaacauaugcaaucucu

SEQ ID NO: 596923 - RNA, 22 nt, Human
guacauuuuacuuuguuugaau

SEQ ID NO: 596924 - RNA, 22 nt, Human
gcaugggcaagaggacuggggg

SEQ ID NO: 596925 - RNA, 22 nt, Human
ucuuaaugcuagccaauagaga

SEQ ID NO: 596926 - RNA, 22 nt, Human
aaggcugguuccaucccuggug

SEQ ID NO: 596927 - RNA, 22 nt, Human
gaaggcugaguggguacggagg

SEQ ID NO: 596928 - RNA, 22 nt, Human
ucugaacaagggcaccuuccag

SEQ ID NO: 596929 - RNA, 22 nt, Human
caguuucuucaucugcagaauc

SEQ ID NO: 596930 - RNA, 22 nt, Human
uguaaauucuauacacuuaaaa

SEQ ID NO: 596931 - RNA, 22 nt, Human
caaugucaaggagaccaaaacg

SEQ ID NO: 596932 - RNA, 22 nt, Human
caagaugaaacuacagggagga

SEQ ID NO: 596933 - RNA, 22 nt, Human
ggcugggcugcugggucagagc

SEQ ID NO: 596934 - RNA, 19 nt, Human
ugcuuccucaccaucuccc

SEQ ID NO: 596935 - RNA, 22 nt, Human
ugugaucugccuuggaucugca

SEQ ID NO: 596936 - RNA, 22 nt, Human
ucauacauucagcagauauuug

SEQ ID NO: 596937 - RNA, 22 nt, Human
cacagggccuggggcagcugcu

SEQ ID NO: 596938 - RNA, 22 nt, Human
gccugggugucgaucacuagug

SEQ ID NO: 596939 - RNA, 20 nt, Human
agaaggcaggagacaaaagg

SEQ ID NO: 596940 - RNA, 22 nt, Human
aggggcucugagugggccagga

SEQ ID NO: 596941 - RNA, 22 nt, Human
cugagaggcggagcuugcagug

SEQ ID NO: 596942 - RNA, 22 nt, Human
cucucuggauauuuguaugcug

SEQ ID NO: 596943 - RNA, 22 nt, Human
ggaaggagucuuuaacacccau

SEQ ID NO: 596944 - RNA, 22 nt, Human
uuuaccauuauuaaaauuaagu

SEQ ID NO: 596945 - RNA, 22 nt, Human
uauugacaauuugugaaacuau

SEQ ID NO: 596946 - RNA, 22 nt, Human
ucagggaccaccacucacccag

SEQ ID NO: 596947 - RNA, 22 nt, Human
cagugaggaagcugucuggacc

SEQ ID NO: 596948 - RNA, 22 nt, Human
cugcccugggaguaccuguccu

SEQ ID NO: 596949 - RNA, 22 nt, Human
ggggauggugggaaggcaaucu

SEQ ID NO: 596950 - RNA, 22 nt, Human
acauacaugguucucagcccuu

SEQ ID NO: 596951 - RNA, 18 nt, Human
guccacagauucuucacu

SEQ ID NO: 596952 - RNA, 22 nt, Human
auauauuugagaauauucauga

SEQ ID NO: 596953 - RNA, 22 nt, Human
caugugucaaaugauguagcug

SEQ ID NO: 596954 - RNA, 22 nt, Human
auacaucauuucccaucaaucg

SEQ ID NO: 596955 - RNA, 22 nt, Human
aggugccuaucuggucucugca

SEQ ID NO: 596956 - RNA, 22 nt, Human
aggagcagauugguaagaucau

SEQ ID NO: 596957 - RNA, 19 nt, Human
ucugucacuggggguauuc

SEQ ID NO: 596958 - RNA, 22 nt, Human
augacaugauucuuucuuucau

SEQ ID NO: 596959 - RNA, 18 nt, Human
uugcuuuguaagcuugca

SEQ ID NO: 596960 - RNA, 20 nt, Human
gagcugugcucucaggagcc

SEQ ID NO: 596961 - RNA, 22 nt, Human
aaacaguuucauuuucaugacc

SEQ ID NO: 596962 - RNA, 22 nt, Human
ugguccagaugccuuggcuuua

SEQ ID NO: 596963 - RNA, 21 nt, Human
acuucccaggaccuacucaga

SEQ ID NO: 596964 - RNA, 22 nt, Human
agggggaggcugugcugcgucu

SEQ ID NO: 596965 - RNA, 20 nt, Human
acauguacuaaugaauacag

SEQ ID NO: 596966 - RNA, 22 nt, Human
aaagcaaugcccguucauuauc

SEQ ID NO: 596967 - RNA, 23 nt, Human
aagaauaaaugacauuaaaggug

SEQ ID NO: 596968 - RNA, 22 nt, Human
gcuggagugcaguugcacaguc

SEQ ID NO: 596969 - RNA, 22 nt, Human
cccucccaagcacucugacaua

SEQ ID NO: 596970 - RNA, 22 nt, Human
gagggugguggcuuaaggugcu

SEQ ID NO: 596971 - RNA, 22 nt, Human
gaucuuuauacuguaauaauga

SEQ ID NO: 596972 - RNA, 22 nt, Human
uggcagggaguugcaggauuuc

SEQ ID NO: 596973 - RNA, 22 nt, Human
ucucagaguuuagagcugagcc

SEQ ID NO: 596974 - RNA, 22 nt, Human
cugggcacauuuugacuagugu

SEQ ID NO: 596975 - RNA, 22 nt, Human
caauuucauuaauagauauaga

SEQ ID NO: 596976 - RNA, 22 nt, Human
ccuggaccaaacacuggccugg

SEQ ID NO: 596977 - RNA, 22 nt, Human
ucaggcugagaaaaucuggacc

SEQ ID NO: 596978 - RNA, 22 nt, Human
agcccaaggcuucccugcuggc

SEQ ID NO: 596979 - RNA, 22 nt, Human
acacuucagcaguaugcuuggg

SEQ ID NO: 596980 - RNA, 22 nt, Human
cuggcugaggcagagccugggg

SEQ ID NO: 596981 - RNA, 22 nt, Human
uauguguagugugaucccaaug

SEQ ID NO: 596982 - RNA, 22 nt, Human
cagcccuuguuucuaaagcugc

SEQ ID NO: 596983 - RNA, 22 nt, Human
cucaaagagccagguaaucacc

SEQ ID NO: 596984 - RNA, 22 nt, Human
aagaacuuuaaagcacuuauga

SEQ ID NO: 596985 - RNA, 22 nt, Human
gauuucugggcuuuauuucaga

SEQ ID NO: 596986 - RNA, 17 nt, Human
aggcaaugacugugguu

SEQ ID NO: 596987 - RNA, 22 nt, Human
ucagaagcaaacaucacucuag

SEQ ID NO: 596988 - RNA, 22 nt, Human
aaagcaugguuaaagacagugg

SEQ ID NO: 596989 - RNA, 22 nt, Human
ucugggcacugcugagccugua

SEQ ID NO: 596990 - RNA, 22 nt, Human
gagcuuugccuaaaacuagaau

SEQ ID NO: 596991 - RNA, 22 nt, Human
augcacaagcaagagauaaugg

SEQ ID NO: 596992 - RNA, 22 nt, Human
gggggccagucaucucccaaga

SEQ ID NO: 596993 - RNA, 22 nt, Human
caggaaugacccaacaguuuca

SEQ ID NO: 596994 - RNA, 22 nt, Human
auuguuaaaguaauaaccaugg

SEQ ID NO: 596995 - RNA, 22 nt, Human
gucagcacuuuuccgaggcaga

SEQ ID NO: 596996 - RNA, 22 nt, Human
ggcccccaggguggguguagac

SEQ ID NO: 596997 - RNA, 22 nt, Human
gaauuuaucuacguuaaguaug

SEQ ID NO: 596998 - RNA, 23 nt, Human
ugaagguauuaccugagaugcuc

SEQ ID NO: 596999 - RNA, 22 nt, Human
ccaugcccuugucaucuccagg

SEQ ID NO: 597000 - RNA, 22 nt, Human
agguggcaaggggcgccucucu

SEQ ID NO: 597001 - RNA, 22 nt, Human
auauggaaugguaaucuacaau

SEQ ID NO: 597002 - RNA, 22 nt, Human
aggcugucugaccccagagccc

SEQ ID NO: 597003 - RNA, 22 nt, Human
gaggcagcugaaggagugacag

SEQ ID NO: 597004 - RNA, 22 nt, Human
auugaaaauaaggccagaaaca

SEQ ID NO: 597005 - RNA, 22 nt, Human
cagcacaguuucccccaugagc

SEQ ID NO: 597006 - RNA, 22 nt, Human
ugcuuauugcuuucaagacugu

SEQ ID NO: 597007 - RNA, 22 nt, Human
ccuuccagugacuaaggaggaa

SEQ ID NO: 597008 - RNA, 22 nt, Human
uucuccugaguucccaggucua

SEQ ID NO: 597009 - RNA, 22 nt, Human
cauuuguacagaacagcuuuau

SEQ ID NO: 597010 - RNA, 22 nt, Human
cugggagagaagcgaagcuggg

SEQ ID NO: 597011 - RNA, 22 nt, Human
cccgucccuuuugcccgcuggu

SEQ ID NO: 597012 - RNA, 22 nt, Human
acaaauggacucucaucuuuug

SEQ ID NO: 597013 - RNA, 22 nt, Human
gauuuguuucaaguuagcaucu

SEQ ID NO: 597014 - RNA, 22 nt, Human
aaacaauuuccaccucuccuga

SEQ ID NO: 597015 - RNA, 22 nt, Human
acaauuacucaacuuugcugcu

SEQ ID NO: 597016 - RNA, 19 nt, Human
agugccuugcucucuaggu

SEQ ID NO: 597017 - RNA, 17 nt, Human
ggcuggaggggacccgg

SEQ ID NO: 597018 - RNA, 22 nt, Human
caguaaaugguacguauauuuu

SEQ ID NO: 597019 - RNA, 22 nt, Human
ugagcagagacgggggccucca

SEQ ID NO: 597020 - RNA, 22 nt, Human
uccucagaaaccccugugaggu

SEQ ID NO: 597021 - RNA, 22 nt, Human
caugcaguuucucuaugcguag

SEQ ID NO: 597022 - RNA, 22 nt, Human
auaaaacuuauuagaauugugu

SEQ ID NO: 597023 - RNA, 22 nt, Human
ggaagccaguugcuuggugugg

SEQ ID NO: 597024 - RNA, 22 nt, Human
ucuauaaaacucaagagcaauu

SEQ ID NO: 597025 - RNA, 22 nt, Human
acacagauauuuugaauacaua

SEQ ID NO: 597026 - RNA, 22 nt, Human
cauguguguccaugugacuaag

SEQ ID NO: 597027 - RNA, 22 nt, Human
uccaaagacuugcuguauguaa

SEQ ID NO: 597028 - RNA, 22 nt, Human
guuccugggccugcauucacca

SEQ ID NO: 597029 - RNA, 22 nt, Human
cagcuuugcaggcuggucagug

SEQ ID NO: 597030 - RNA, 22 nt, Human
cagcugcuuacuagcuguguga

SEQ ID NO: 597031 - RNA, 22 nt, Human
aaacucuaguaaaauguauuca

SEQ ID NO: 597032 - RNA, 22 nt, Human
cucucccuugggugggcuuugg

SEQ ID NO: 597033 - RNA, 22 nt, Human
ugcuuucacauguaugcacaaa

SEQ ID NO: 597034 - RNA, 22 nt, Human
ucacaguauucaugaacaugga

SEQ ID NO: 597035 - RNA, 22 nt, Human
uccuggugguuugaaaacugaa

SEQ ID NO: 597036 - RNA, 22 nt, Human
acaguaaaaagccuuagaauuu

SEQ ID NO: 597037 - RNA, 22 nt, Human
ucaaaagaaacaccauguuccu

SEQ ID NO: 597038 - RNA, 21 nt, Human
ugguaggauccaggaaucugc

SEQ ID NO: 597039 - RNA, 22 nt, Human
cucugcccgcggaugccacguc

SEQ ID NO: 597040 - RNA, 22 nt, Human
agcaucuguuaagugccuucaa

SEQ ID NO: 597041 - RNA, 22 nt, Human
aggaggccgauuucagaggucg

SEQ ID NO: 597042 - RNA, 22 nt, Human
uggggcagccacauagacaaca

SEQ ID NO: 597043 - RNA, 18 nt, Human
uucucugguggauguuau

SEQ ID NO: 597044 - RNA, 22 nt, Human
auagauauuagcaaaauuuuau

SEQ ID NO: 597045 - RNA, 22 nt, Human
caggaacaacucccagcaucuc

SEQ ID NO: 597046 - RNA, 22 nt, Human
aggcugcaggucugggucaugu

SEQ ID NO: 597047 - RNA, 22 nt, Human
aauuauauguuaaucuucaauu

SEQ ID NO: 597048 - RNA, 22 nt, Human
ggagaggacauggcucccacag

SEQ ID NO: 597049 - RNA, 22 nt, Human
gcaggcaguuugcuuuucccuc

SEQ ID NO: 597050 - RNA, 22 nt, Human
gguugguaacucccugugcagu

SEQ ID NO: 597051 - RNA, 22 nt, Human
ucugggagagcacguggcugac

SEQ ID NO: 597052 - RNA, 22 nt, Human
gaaauaauacagugcucuucuc

SEQ ID NO: 597053 - RNA, 20 nt, Human
gaugaaaucacugggcagcc

SEQ ID NO: 597054 - RNA, 22 nt, Human
gagauggagucuuuuucuguca

SEQ ID NO: 597055 - RNA, 22 nt, Human
aguguuaaugguguauauuagg

SEQ ID NO: 597056 - RNA, 17 nt, Human
uggcaucuuuugcucau

SEQ ID NO: 597057 - RNA, 21 nt, Human
cagaggucauccugaggacaa

SEQ ID NO: 597058 - RNA, 22 nt, Human
accaucuuaaggggacuucuua

SEQ ID NO: 597059 - RNA, 22 nt, Human
ugugccugucccgcauucuggu

SEQ ID NO: 597060 - RNA, 22 nt, Human
ugggccuguugggguugaguua

SEQ ID NO: 597061 - RNA, 22 nt, Human
gcaguggccacauggaggagga

SEQ ID NO: 597062 - RNA, 22 nt, Human
acggcaggcucagagcuggaau

SEQ ID NO: 597063 - RNA, 22 nt, Human
uacaaaggagacucuguauuua

SEQ ID NO: 597064 - RNA, 21 nt, Human
ucacuuauaauguauuugcug

SEQ ID NO: 597065 - RNA, 22 nt, Human
ucugugcuggacugauuucaua

SEQ ID NO: 597066 - RNA, 22 nt, Human
gcucccagcaauugaggcagcc

SEQ ID NO: 597067 - RNA, 22 nt, Human
aacaguaucuuuuaucagaaau

SEQ ID NO: 597068 - RNA, 22 nt, Human
cagaggaagcuggguguggagu

SEQ ID NO: 597069 - RNA, 20 nt, Human
auggaggaagggcaagagaa

SEQ ID NO: 597070 - RNA, 22 nt, Human
caguagcaugcuuaucuuuuga

SEQ ID NO: 597071 - RNA, 22 nt, Human
ccaguccagugccaugcauggc

SEQ ID NO: 597072 - RNA, 22 nt, Human
ucgucugugaaauugggauaag

SEQ ID NO: 597073 - RNA, 22 nt, Human
gacuuuauccugccugaccacg

SEQ ID NO: 597074 - RNA, 22 nt, Human
uggcacugccuggcagggcccc

SEQ ID NO: 597075 - RNA, 22 nt, Human
cugucgccugguccucucugga

SEQ ID NO: 597076 - RNA, 19 nt, Human
uccuucagucagaucuggg

SEQ ID NO: 597077 - RNA, 22 nt, Human
ucccaagcuuagggcucucagu

SEQ ID NO: 597078 - RNA, 22 nt, Human
ucuguccagaacguacaucuug

SEQ ID NO: 597079 - RNA, 21 nt, Human
cugaggcagcacagcuaguca

SEQ ID NO: 597080 - RNA, 22 nt, Human
uuuaacagaugcuaugucuacc

SEQ ID NO: 597081 - RNA, 22 nt, Human
gccuggagcagacgugucccgg

SEQ ID NO: 597082 - RNA, 22 nt, Human
cccacaggcuagggguagggca

SEQ ID NO: 597083 - RNA, 22 nt, Human
cucuucaaaagucuaauccuua

SEQ ID NO: 597084 - RNA, 19 nt, Human
gcuaggcuggccuugaggg

SEQ ID NO: 597085 - RNA, 22 nt, Human
cuggugaauauuggaggcauug

SEQ ID NO: 597086 - RNA, 22 nt, Human
uccagcuccugaguucacugcu

SEQ ID NO: 597087 - RNA, 22 nt, Human
ggagcugcuuugaucugaagaa

SEQ ID NO: 597088 - RNA, 22 nt, Human
uguggggcucccuggcagccug

SEQ ID NO: 597089 - RNA, 18 nt, Human
gucaccuggaucagauua

SEQ ID NO: 597090 - RNA, 22 nt, Human
uccuugaauauaauaacaguag

SEQ ID NO: 597091 - RNA, 22 nt, Human
cagaggcauacucccagucuug

SEQ ID NO: 597092 - RNA, 22 nt, Human
cugggaggauacacaagaucag

SEQ ID NO: 597093 - RNA, 22 nt, Human
cuggcagcuuccuuugcaucug

SEQ ID NO: 597094 - RNA, 22 nt, Human
ccaguuuuuccagugcuuucug

SEQ ID NO: 597095 - RNA, 23 nt, Human
ccuagauucaaagcuuauaauuc

SEQ ID NO: 597096 - RNA, 22 nt, Human
augggaauauaauuuuagcaac

SEQ ID NO: 597097 - RNA, 22 nt, Human
cagggccucgaagccucugggc

SEQ ID NO: 597098 - RNA, 22 nt, Human
aggaaacauccuuaucuauucu

SEQ ID NO: 597099 - RNA, 22 nt, Human
uccagcucuaaggcugauagcc

SEQ ID NO: 597100 - RNA, 22 nt, Human
uguguguguaaaagcauuuaua

SEQ ID NO: 597101 - RNA, 22 nt, Human
ucagaaaauaacuguuaguuug

SEQ ID NO: 597102 - RNA, 22 nt, Human
uuauugugucuugguuuaucuu

SEQ ID NO: 597103 - RNA, 22 nt, Human
aacuguacgauaauaaauuugu

SEQ ID NO: 597104 - RNA, 22 nt, Human
gauaauguggauuuauugugau

SEQ ID NO: 597105 - RNA, 19 nt, Human
ugagagugaggaaggcuuc

SEQ ID NO: 597106 - RNA, 22 nt, Human
gacauaaaguucuugcuugaau

SEQ ID NO: 597107 - RNA, 22 nt, Human
cuuucccacgcaguggaugaga

SEQ ID NO: 597108 - RNA, 22 nt, Human
auagcauuauuuacaauuagua

SEQ ID NO: 597109 - RNA, 21 nt, Human
aguaacauuuuguuguuuaca

SEQ ID NO: 597110 - RNA, 22 nt, Human
gcuacacaauagcguucacuua

SEQ ID NO: 597111 - RNA, 22 nt, Human
ucucaguguguugagaggucug

SEQ ID NO: 597112 - RNA, 22 nt, Human
aaagaucaaguaggcauggccu

SEQ ID NO: 597113 - RNA, 22 nt, Human
guacaggcagcaaacaccauaa

SEQ ID NO: 597114 - RNA, 22 nt, Human
ugugcagaguugaagacaggag

SEQ ID NO: 597115 - RNA, 22 nt, Human
gcccaaggucacacacaggaag

SEQ ID NO: 597116 - RNA, 22 nt, Human
uuucuacauucaaaaacuacca

SEQ ID NO: 597117 - RNA, 22 nt, Human
cugucugcuagaacaucuauac

SEQ ID NO: 597118 - RNA, 22 nt, Human
aggcuggcuuugguagcauggu

SEQ ID NO: 597119 - RNA, 22 nt, Human
auauuauaaguuauuucaaguu

SEQ ID NO: 597120 - RNA, 22 nt, Human
gaggcugaggguuagagaguca

SEQ ID NO: 597121 - RNA, 22 nt, Human
gaggcaggguguugauuacaga

SEQ ID NO: 597122 - RNA, 23 nt, Human
gaacccagcucugccacuugcca

SEQ ID NO: 597123 - RNA, 22 nt, Human
cuggaggagcauggacuggagu

SEQ ID NO: 597124 - RNA, 22 nt, Human
uugauuucaaaauauaugcuug

SEQ ID NO: 597125 - RNA, 19 nt, Human
gggucccaaaagaugugcu

SEQ ID NO: 597126 - RNA, 22 nt, Human
cacagcuuaugccacugauugg

SEQ ID NO: 597127 - RNA, 22 nt, Human
ucacuaugcccagaauacaguu

SEQ ID NO: 597128 - RNA, 22 nt, Human
cagcuauuuguaggaaaacugu

SEQ ID NO: 597129 - RNA, 22 nt, Human
ugccaggcauguaguagacuug

SEQ ID NO: 597130 - RNA, 22 nt, Human
ucuggccccuggucucuggugu

SEQ ID NO: 597131 - RNA, 22 nt, Human
caauauauaaugaguacuuucc

SEQ ID NO: 597132 - RNA, 22 nt, Human
guacauucagcuuagcacuucu

SEQ ID NO: 597133 - RNA, 22 nt, Human
agcaggcugccuuccaaagccu

SEQ ID NO: 597134 - RNA, 22 nt, Human
auuucucuuccuccuaggguug

SEQ ID NO: 597135 - RNA, 19 nt, Human
gggcacagccuccccccag

SEQ ID NO: 597136 - RNA, 22 nt, Human
guaggcagucucucaggugauc

SEQ ID NO: 597137 - RNA, 21 nt, Human
agcuuacauuaccauuguugc

SEQ ID NO: 597138 - RNA, 22 nt, Human
ggugcugguucaggguggcugu

SEQ ID NO: 597139 - RNA, 22 nt, Human
ugacaucauuaguaacauagcu

SEQ ID NO: 597140 - RNA, 22 nt, Human
gagaccuggaggauguggaugg

SEQ ID NO: 597141 - RNA, 22 nt, Human
uacauugaaagucauuuaaucc

SEQ ID NO: 597142 - RNA, 22 nt, Human
gucagaaaccagucaaacaaga

SEQ ID NO: 597143 - RNA, 22 nt, Human
cugagguaugugggacuagccu

SEQ ID NO: 597144 - RNA, 22 nt, Human
ucugugugggauaguuugagga

SEQ ID NO: 597145 - RNA, 23 nt, Human
auuuuuugucuuuguaacuagau

SEQ ID NO: 597146 - RNA, 23 nt, Human
ucucaguuccagaggcuacaagu

SEQ ID NO: 597147 - RNA, 22 nt, Human
ugcaggugguuuggacacugcu

SEQ ID NO: 597148 - RNA, 22 nt, Human
augcagaagcagaacuuacaca

SEQ ID NO: 597149 - RNA, 22 nt, Human
uggcagcauguuauguaaggaa

SEQ ID NO: 597150 - RNA, 22 nt, Human
aguggagaagaggauggucucc

SEQ ID NO: 597151 - RNA, 22 nt, Human
aucuucuucaaggaucuggagc

SEQ ID NO: 597152 - RNA, 23 nt, Human
gaguggggagaaauugguuaaac

SEQ ID NO: 597153 - RNA, 22 nt, Human
uuacuuugaugaucaaugagcg

SEQ ID NO: 597154 - RNA, 22 nt, Human
auguccaagucacagauuuuca

SEQ ID NO: 597155 - RNA, 22 nt, Human
uaaaugacauucuuaagucuug

SEQ ID NO: 597156 - RNA, 22 nt, Human
gggcuccagccaggugucccca

SEQ ID NO: 597157 - RNA, 22 nt, Human
uugcugauaccaugaauguuaa

SEQ ID NO: 597158 - RNA, 22 nt, Human
ucacuucccucuucagcuccca

SEQ ID NO: 597159 - RNA, 22 nt, Human
cugcaggagcaaagccucugcu

SEQ ID NO: 597160 - RNA, 22 nt, Human
augaaguucucaauaaucaugu

SEQ ID NO: 597161 - RNA, 22 nt, Human
uuucucuugcgauaugcuacac

SEQ ID NO: 597162 - RNA, 22 nt, Human
gucuggagggaagagaugucag

SEQ ID NO: 597163 - RNA, 22 nt, Human
uacuuacacagcuguagaaggu

SEQ ID NO: 597164 - RNA, 22 nt, Human
uuuuauugucucccaguucugg

SEQ ID NO: 597165 - RNA, 22 nt, Human
cccaggcuccuacuguauucug

SEQ ID NO: 597166 - RNA, 22 nt, Human
ugcccagccaauuuguuauguu

SEQ ID NO: 597167 - RNA, 22 nt, Human
cuggguucuauuuuuggcuuca

SEQ ID NO: 597168 - RNA, 22 nt, Human
ugcuugcuggaggcagacagaa

SEQ ID NO: 597169 - RNA, 22 nt, Human
aaagacaugacacauuggagag

SEQ ID NO: 597170 - RNA, 22 nt, Human
uccuaguucugguucugucacu

SEQ ID NO: 597171 - RNA, 22 nt, Human
ugcccuccuccugagcccaugu

SEQ ID NO: 597172 - RNA, 22 nt, Human
uguaguagcauucacgaagugu

SEQ ID NO: 597173 - RNA, 22 nt, Human
caauuucuggaacuaauucuga

SEQ ID NO: 597174 - RNA, 23 nt, Human
ugggggugcacgggccacaucuu

SEQ ID NO: 597175 - RNA, 22 nt, Human
agcuguggaguaggggguugga

SEQ ID NO: 597176 - RNA, 22 nt, Human
aaguuacaguuauuauuuaaaa

SEQ ID NO: 597177 - RNA, 22 nt, Human
ggaauaaaaauuguuuacugua

SEQ ID NO: 597178 - RNA, 22 nt, Human
cuguuuucccuggaguucagca

SEQ ID NO: 597179 - RNA, 22 nt, Human
uauaauuuuucuguggccaguu

SEQ ID NO: 597180 - RNA, 20 nt, Human
uggagagccucuggacugug

SEQ ID NO: 597181 - RNA, 22 nt, Human
gggaugaauugagucagaaggg

SEQ ID NO: 597182 - RNA, 22 nt, Human
cucuuuaagcuccuaacagcca

SEQ ID NO: 597183 - RNA, 22 nt, Human
gaggcacagucccgaggcaagg

SEQ ID NO: 597184 - RNA, 22 nt, Human
guuaacaaauguaaagcaauua

SEQ ID NO: 597185 - RNA, 22 nt, Human
acccaugugcucuuuuguaccc

SEQ ID NO: 597186 - RNA, 22 nt, Human
gugaaggaguuaucagugguua

SEQ ID NO: 597187 - RNA, 22 nt, Human
ugaucuuugguaguacgauaau

SEQ ID NO: 597188 - RNA, 22 nt, Human
aagaaauauugggccuuauaaa

SEQ ID NO: 597189 - RNA, 22 nt, Human
gcuggcagagacaagaagacua

SEQ ID NO: 597190 - RNA, 22 nt, Human
uggggaaggcggagcuugcagc

SEQ ID NO: 597191 - RNA, 22 nt, Human
ggaagaugcccaacccagcuuu

SEQ ID NO: 597192 - RNA, 18 nt, Human
cuggucucccuucgcuuu

SEQ ID NO: 597193 - RNA, 22 nt, Human
uagagcuggccgggacagcugg

SEQ ID NO: 597194 - RNA, 22 nt, Human
cugggcaggagggcucuaugga

SEQ ID NO: 597195 - RNA, 22 nt, Human
gccuggccgcuccgagcuccgc

SEQ ID NO: 597196 - RNA, 22 nt, Human
cagcacagcacagcggugacuc

SEQ ID NO: 597197 - RNA, 22 nt, Human
aaauaugacuagaaugccaggu

SEQ ID NO: 597198 - RNA, 22 nt, Human
ugaagcaggugaauggaugucg

SEQ ID NO: 597199 - RNA, 22 nt, Human
gggugggagucuggcccucaaa

SEQ ID NO: 597200 - RNA, 22 nt, Human
uccuccagugucuggggccuug

SEQ ID NO: 597201 - RNA, 22 nt, Human
gaggcugcuuugaugacaggag

SEQ ID NO: 597202 - RNA, 22 nt, Human
auuguaaaaguauucuaagauu

SEQ ID NO: 597203 - RNA, 22 nt, Human
uuucucuuaaugucucugugcu

SEQ ID NO: 597204 - RNA, 22 nt, Human
ucauuucaguccucugugugag

SEQ ID NO: 597205 - RNA, 22 nt, Human
gcagucucucaggauuuaagcu

SEQ ID NO: 597206 - RNA, 22 nt, Human
auggaaauacacaagagguuuc

SEQ ID NO: 597207 - RNA, 22 nt, Human
agggcaucuaguucccucucuu

SEQ ID NO: 597208 - RNA, 22 nt, Human
gaaaggcaguacagcugagccu

SEQ ID NO: 597209 - RNA, 22 nt, Human
uugcuuuauuggguuuacugcc

SEQ ID NO: 597210 - RNA, 22 nt, Human
uccagcucugcugugcgccggu

SEQ ID NO: 597211 - RNA, 22 nt, Human
uuucuuccuuaccuuacuagag

SEQ ID NO: 597212 - RNA, 22 nt, Human
aaggccagacaggaccacaucu

SEQ ID NO: 597213 - RNA, 19 nt, Human
cugggacaaugaaagcauc

SEQ ID NO: 597214 - RNA, 22 nt, Human
cagggccacuguagaugaggag

SEQ ID NO: 597215 - RNA, 16 nt, Human
aaggcugauuuucccu

SEQ ID NO: 597216 - RNA, 22 nt, Human
agcugcugccgguggccacccu

SEQ ID NO: 597217 - RNA, 22 nt, Human
ucccagggacugggcuaggcuu

SEQ ID NO: 597218 - RNA, 22 nt, Human
agagauucauguuuacuguagg

SEQ ID NO: 597219 - RNA, 22 nt, Human
ggcugcagcccucgccuagcca

SEQ ID NO: 597220 - RNA, 22 nt, Human
ggucucgagccaggcagcugca

SEQ ID NO: 597221 - RNA, 22 nt, Human
auacaaaguauuaauccuggau

SEQ ID NO: 597222 - RNA, 22 nt, Human
ucugaagcuggaggaagcuuug

SEQ ID NO: 597223 - RNA, 22 nt, Human
uuuguguuaaauguuaaauuca

SEQ ID NO: 597224 - RNA, 22 nt, Human
ugcaguccuggugaggggacau

SEQ ID NO: 597225 - RNA, 22 nt, Human
guaggcagguggaggagugaag

SEQ ID NO: 597226 - RNA, 22 nt, Human
agacuaaauaguuacagguagg

SEQ ID NO: 597227 - RNA, 22 nt, Human
aguggggacuuaugccagcauu

SEQ ID NO: 597228 - RNA, 22 nt, Human
ggcugggcaaacaagacucuuc

SEQ ID NO: 597229 - RNA, 22 nt, Human
uuuauuaugauggacaccuucg

SEQ ID NO: 597230 - RNA, 22 nt, Human
aaaagagaguugccagucugua

SEQ ID NO: 597231 - RNA, 22 nt, Human
cggcugcugccugagucgcugu

SEQ ID NO: 597232 - RNA, 22 nt, Human
uggcuuccagaacugagcaaca

SEQ ID NO: 597233 - RNA, 19 nt, Human
uccugcagaccagaccugu

SEQ ID NO: 597234 - RNA, 19 nt, Human
cugcuucaggcgccuugcc

SEQ ID NO: 597235 - RNA, 19 nt, Human
gcugccaggacaguuacug

SEQ ID NO: 597236 - RNA, 22 nt, Human
ucagaggcucaucugccuugca

SEQ ID NO: 597237 - RNA, 22 nt, Human
agaagauuuagguugacgcuau

SEQ ID NO: 597238 - RNA, 22 nt, Human
aaggcccuuccaccaguccucg

SEQ ID NO: 597239 - RNA, 22 nt, Human
uuucugccagguuucuggauga

SEQ ID NO: 597240 - RNA, 22 nt, Human
gcugggagacagacuuggaacc

SEQ ID NO: 597241 - RNA, 22 nt, Human
uaguuacagaucuaggacuguu

SEQ ID NO: 597242 - RNA, 18 nt, Human
uuccaugauuccuuucac

SEQ ID NO: 597243 - RNA, 22 nt, Human
cagagacacuuaacaggaaugg

SEQ ID NO: 597244 - RNA, 22 nt, Human
uacacccacauugagcauggga

SEQ ID NO: 597245 - RNA, 22 nt, Human
gccugcccacggggcuggcaua

SEQ ID NO: 597246 - RNA, 22 nt, Human
gaagaacuuuagggcagaauuu

SEQ ID NO: 597247 - RNA, 22 nt, Human
agugcagugguuaggagccagg

SEQ ID NO: 597248 - RNA, 16 nt, Human
accuccagucaagggu

SEQ ID NO: 597249 - RNA, 22 nt, Human
uucauuuaauuuguguauuaac

SEQ ID NO: 597250 - RNA, 22 nt, Human
gaggccacgguuuuccuugggg

SEQ ID NO: 597251 - RNA, 22 nt, Human
agcagccuggucucucgccaau

SEQ ID NO: 597252 - RNA, 22 nt, Human
cagagcuguugcggggcuuggc

SEQ ID NO: 597253 - RNA, 22 nt, Human
uacuuuuaugugaugaaaucug

SEQ ID NO: 597254 - RNA, 22 nt, Human
guuuuucucugaaauaguugac

SEQ ID NO: 597255 - RNA, 22 nt, Human
gcaggugguuaaggucccaugu

SEQ ID NO: 597256 - RNA, 22 nt, Human
aaauggcaguagaaaagaaucc

SEQ ID NO: 597257 - RNA, 22 nt, Human
ucugaggaaagagagugggaug

SEQ ID NO: 597258 - RNA, 22 nt, Human
uccuccagggggaucuucagcc

SEQ ID NO: 597259 - RNA, 22 nt, Human
uguacaaagccagaacucccaa

SEQ ID NO: 597260 - RNA, 22 nt, Human
acugucugcuggccccugguua

SEQ ID NO: 597261 - RNA, 22 nt, Human
gcugcagagacagcugccgaug

SEQ ID NO: 597262 - RNA, 22 nt, Human
aagcacagugggcagagcagcc

SEQ ID NO: 597263 - RNA, 22 nt, Human
uauuuccaccuauuauuuucug

SEQ ID NO: 597264 - RNA, 22 nt, Human
guggggagggagaugcugaagu

SEQ ID NO: 597265 - RNA, 22 nt, Human
ugcccugucgcucacucccacc

SEQ ID NO: 597266 - RNA, 22 nt, Human
ggugggugagcccugggagcug

SEQ ID NO: 597267 - RNA, 22 nt, Human
cugccugcucuauccaggccug

SEQ ID NO: 597268 - RNA, 22 nt, Human
ugugaggcgaggccagugagcu

SEQ ID NO: 597269 - RNA, 22 nt, Human
gccugugcuuaacugacgugag

SEQ ID NO: 597270 - RNA, 22 nt, Human
caagguuuugcuuguaagggaa

SEQ ID NO: 597271 - RNA, 22 nt, Human
acagcacaaucugagucccaga

SEQ ID NO: 597272 - RNA, 22 nt, Human
uguacuuccccaaugacagcac

SEQ ID NO: 597273 - RNA, 22 nt, Human
caugcacagugauaucugaaga

SEQ ID NO: 597274 - RNA, 22 nt, Human
aaacacuaauaacaguggcugg

SEQ ID NO: 597275 - RNA, 22 nt, Human
cuuaauguggaccugguuucua

SEQ ID NO: 597276 - RNA, 22 nt, Human
uacagugcuagaaccugcugua

SEQ ID NO: 597277 - RNA, 22 nt, Human
cacacuuucagguccucuuugc

SEQ ID NO: 597278 - RNA, 23 nt, Human
ccauucaucucagucauugcuuu

SEQ ID NO: 597279 - RNA, 18 nt, Human
ggaaggaguggaccccag

SEQ ID NO: 597280 - RNA, 22 nt, Human
ugagcccagagcccuuguaggg

SEQ ID NO: 597281 - RNA, 22 nt, Human
auucugagaaaugcauugucag

SEQ ID NO: 597282 - RNA, 22 nt, Human
ugggcagaaggaagagccaccu

SEQ ID NO: 597283 - RNA, 22 nt, Human
uacacacagaggccaugggauu

SEQ ID NO: 597284 - RNA, 22 nt, Human
cucuuuacugcuacuacaaaga

SEQ ID NO: 597285 - RNA, 21 nt, Human
gcagagaaugaacuuuggcuu

SEQ ID NO: 597286 - RNA, 22 nt, Human
gaguccuugucauaauucagug

SEQ ID NO: 597287 - RNA, 22 nt, Human
cccauuuguauagagccuuaua

SEQ ID NO: 597288 - RNA, 22 nt, Human
gcuguggccuccagcacucccc

SEQ ID NO: 597289 - RNA, 22 nt, Human
ucacaggacagccuuccacccg

SEQ ID NO: 597290 - RNA, 22 nt, Human
agugcuuuguggagaauuugua

SEQ ID NO: 597291 - RNA, 22 nt, Human
uaugcauagguaucuauacuca

SEQ ID NO: 597292 - RNA, 19 nt, Human
ccuuugaaucaggacacuu

SEQ ID NO: 597293 - RNA, 22 nt, Human
aggaaacuaauuaguagaauaa

SEQ ID NO: 597294 - RNA, 20 nt, Human
uucucuagccuuccccuggg

SEQ ID NO: 597295 - RNA, 19 nt, Human
gcuggcagauguggccgug

SEQ ID NO: 597296 - RNA, 22 nt, Human
acaggaguuuaagaaauauuuc

SEQ ID NO: 597297 - RNA, 22 nt, Human
uccagcucugauucucacuagc

SEQ ID NO: 597298 - RNA, 22 nt, Human
ucugaggcuucagacuguacug

SEQ ID NO: 597299 - RNA, 22 nt, Human
agcugucagugcugugccugua

SEQ ID NO: 597300 - RNA, 23 nt, Human
cccuggagcuagucugagcagag

SEQ ID NO: 597301 - RNA, 22 nt, Human
accaugccaguggcagccagac

SEQ ID NO: 597302 - RNA, 22 nt, Human
agcuuccugaugcaagagggcu

SEQ ID NO: 597303 - RNA, 23 nt, Human
ucugaagaugcuguuuccaguga

SEQ ID NO: 597304 - RNA, 23 nt, Human
ccccucugguggcucagcuccug

SEQ ID NO: 597305 - RNA, 21 nt, Human
uuuuauugaugaauggccacu

SEQ ID NO: 597306 - RNA, 22 nt, Human
cucacagcagcucugcgagaua

SEQ ID NO: 597307 - RNA, 22 nt, Human
gugcaguugaagcauggggaga

SEQ ID NO: 597308 - RNA, 22 nt, Human
uauuugaagggagaaagugcca

SEQ ID NO: 597309 - RNA, 22 nt, Human
cugagccagagggagucggguc

SEQ ID NO: 597310 - RNA, 22 nt, Human
acccaggacuuggcaaccucau

SEQ ID NO: 597311 - RNA, 22 nt, Human
aggagccaggaaaccugcucug

SEQ ID NO: 597312 - RNA, 19 nt, Human
aggccugggguuuugcacu

SEQ ID NO: 597313 - RNA, 22 nt, Human
ugauuucuucuaauuuccauca

SEQ ID NO: 597314 - RNA, 20 nt, Human
auauuucagguagugugccc

SEQ ID NO: 597315 - RNA, 22 nt, Human
ugcugggccaaagcaggguuuu

SEQ ID NO: 597316 - RNA, 22 nt, Human
gguggagcuggaccaggagagg

SEQ ID NO: 597317 - RNA, 22 nt, Human
gagcaacacuccacauugcuag

SEQ ID NO: 597318 - RNA, 22 nt, Human
augaagacaggucucaucacca

SEQ ID NO: 597319 - RNA, 22 nt, Human
ucugagguuacugcuuuguaga

SEQ ID NO: 597320 - RNA, 22 nt, Human
auggaaauguuccauauauuga

SEQ ID NO: 597321 - RNA, 22 nt, Human
ugccuggcaacuguggugggcu

SEQ ID NO: 597322 - RNA, 22 nt, Human
ugcacacaguucucaggaaaga

SEQ ID NO: 597323 - RNA, 22 nt, Human
gggcugaaaggccgccucagau

SEQ ID NO: 597324 - RNA, 22 nt, Human
ggaggggaacuaaucccgugac

SEQ ID NO: 597325 - RNA, 22 nt, Human
uccaggaguccuggguggcccc

SEQ ID NO: 597326 - RNA, 22 nt, Human
uucuuucuuggggaacacacuc

SEQ ID NO: 597327 - RNA, 22 nt, Human
uuauaacaacaguuuacuuuaa

SEQ ID NO: 597328 - RNA, 22 nt, Human
caguuuccugaagagaaagaau

SEQ ID NO: 597329 - RNA, 22 nt, Human
ugagaagauuugcucuucugag

SEQ ID NO: 597330 - RNA, 22 nt, Human
cagcccugucuaugacugauga

SEQ ID NO: 597331 - RNA, 21 nt, Human
ugguuaaaguugugucauccc

SEQ ID NO: 597332 - RNA, 22 nt, Human
cugaaagcaaaguaauucuuaa

SEQ ID NO: 597333 - RNA, 22 nt, Human
ugucauuuaaagcuuuccagau

SEQ ID NO: 597334 - RNA, 22 nt, Human
uauguguacucguuaaauauuu

SEQ ID NO: 597335 - RNA, 22 nt, Human
caggcuguggaucaggagccuu

SEQ ID NO: 597336 - RNA, 22 nt, Human
uucacauucagaaaaagcccgu

SEQ ID NO: 597337 - RNA, 22 nt, Human
agcuauugugugcccagcagga

SEQ ID NO: 597338 - RNA, 22 nt, Human
caucagaagauggcucuggaaa

SEQ ID NO: 597339 - RNA, 22 nt, Human
aacauggaggcagacagacgug

SEQ ID NO: 597340 - RNA, 22 nt, Human
ucuuguuucuguauauaaugac

SEQ ID NO: 597341 - RNA, 22 nt, Human
aggaacugaugagcagccaggg

SEQ ID NO: 597342 - RNA, 22 nt, Human
cagcuccugcagcugcugccgu

SEQ ID NO: 597343 - RNA, 22 nt, Human
aagagcaguguuuuacucagcu

SEQ ID NO: 597344 - RNA, 22 nt, Human
agccugggccuggcuucccgcc

SEQ ID NO: 597345 - RNA, 20 nt, Human
caccaggcgcucugagaaca

SEQ ID NO: 597346 - RNA, 22 nt, Human
uuugaagagccacagugaaauu

SEQ ID NO: 597347 - RNA, 22 nt, Human
uccugaagaacgaagucaugua

SEQ ID NO: 597348 - RNA, 22 nt, Human
ucccagccggugccuggguccc

SEQ ID NO: 597349 - RNA, 22 nt, Human
aaagcaugcuacuuuauauagg

SEQ ID NO: 597350 - RNA, 22 nt, Human
ccaggagauuuuuccauagcac

SEQ ID NO: 597351 - RNA, 22 nt, Human
ugacauuugagagagauauaca

SEQ ID NO: 597352 - RNA, 22 nt, Human
auuguuacuggguuaauuugga

SEQ ID NO: 597353 - RNA, 22 nt, Human
uauugugcauguugaauaacua

SEQ ID NO: 597354 - RNA, 22 nt, Human
agaugguuuugucuuuaugauu

SEQ ID NO: 597355 - RNA, 22 nt, Human
agccugagccccauccagcuga

SEQ ID NO: 597356 - RNA, 22 nt, Human
ccaguggacaauuucugaggaa

SEQ ID NO: 597357 - RNA, 22 nt, Human
aaagggcugucaaauaagcaac

SEQ ID NO: 597358 - RNA, 21 nt, Human
uucugccuuccccuagcuggg

SEQ ID NO: 597359 - RNA, 22 nt, Human
caguauuuucaggauuuggaag

SEQ ID NO: 597360 - RNA, 22 nt, Human
aggacugaugauggugcugaca

SEQ ID NO: 597361 - RNA, 22 nt, Human
ccugcagagccacgugccagcg

SEQ ID NO: 597362 - RNA, 22 nt, Human
uauaaagagucucaaagaaguu

SEQ ID NO: 597363 - RNA, 19 nt, Human
uuaagcuaagauacuagua

SEQ ID NO: 597364 - RNA, 22 nt, Human
gcugcccauugcacguuguggc

SEQ ID NO: 597365 - RNA, 22 nt, Human
ucaaugcaacuuccaccuccca

SEQ ID NO: 597366 - RNA, 22 nt, Human
ugcuuugugauaugcugugucu

SEQ ID NO: 597367 - RNA, 21 nt, Human
gauuuuaaagagacugccaca

SEQ ID NO: 597368 - RNA, 22 nt, Human
ugucuccaaaacaaucucagau

SEQ ID NO: 597369 - RNA, 22 nt, Human
gcaggagaaaugaagauugggu

SEQ ID NO: 597370 - RNA, 22 nt, Human
ucauuuauuugacuuuggagug

SEQ ID NO: 597371 - RNA, 22 nt, Human
auccuggcccucaugaccccuu

SEQ ID NO: 597372 - RNA, 16 nt, Human
uccuaacuggcaguuc

SEQ ID NO: 597373 - RNA, 20 nt, Human
gcuucucagggcuucucuga

SEQ ID NO: 597374 - RNA, 22 nt, Human
uccugccuugccugggacauca

SEQ ID NO: 597375 - RNA, 22 nt, Human
ucugcccaguuugugcucaggu

SEQ ID NO: 597376 - RNA, 22 nt, Human
gugcuuuaaagacaguuaugcu

SEQ ID NO: 597377 - RNA, 20 nt, Human
acacaugcauagagagagag

SEQ ID NO: 597378 - RNA, 22 nt, Human
uacaggauaucacuucauuucu

SEQ ID NO: 597379 - RNA, 23 nt, Human
ggcuccugcuucaugucccaccu

SEQ ID NO: 597380 - RNA, 22 nt, Human
ccugccagcauggcuuaucucc

SEQ ID NO: 597381 - RNA, 22 nt, Human
auuaauuuccaggcacugugcu

SEQ ID NO: 597382 - RNA, 23 nt, Human
uaaagcaaagucaagugcacucc

SEQ ID NO: 597383 - RNA, 22 nt, Human
gagguccagagcagguucagug

SEQ ID NO: 597384 - RNA, 22 nt, Human
aaagcagcaaguauuuguuacu

SEQ ID NO: 597385 - RNA, 22 nt, Human
cagggccuggagcugggccugc

SEQ ID NO: 597386 - RNA, 22 nt, Human
ucagcugcucuguugagcugaa

SEQ ID NO: 597387 - RNA, 22 nt, Human
aagugcugagacuacaggcaug

SEQ ID NO: 597388 - RNA, 22 nt, Human
gacuggagcccccaaggacacc

SEQ ID NO: 597389 - RNA, 20 nt, Human
gcuuucuaugagauggacug

SEQ ID NO: 597390 - RNA, 22 nt, Human
uguccauggagaagcucagggc

SEQ ID NO: 597391 - RNA, 22 nt, Human
ccuuuaaauggauguucaacug

SEQ ID NO: 597392 - RNA, 22 nt, Human
uuagaguucagcaugacuuuga

SEQ ID NO: 597393 - RNA, 22 nt, Human
ucuggagucugagaucugagga

SEQ ID NO: 597394 - RNA, 22 nt, Human
ugccucugggugaccaaggagc

SEQ ID NO: 597395 - RNA, 22 nt, Human
uucuuucugaauacaguugagu

SEQ ID NO: 597396 - RNA, 22 nt, Human
acagagaccuggccuugcuuug

SEQ ID NO: 597397 - RNA, 18 nt, Human
uuuuaauuucaggggugg

SEQ ID NO: 597398 - RNA, 23 nt, Human
agugcuggagaagcuucuggcuu

SEQ ID NO: 597399 - RNA, 22 nt, Human
uccagcagcccgaaggcccauc

SEQ ID NO: 597400 - RNA, 22 nt, Human
caagauucuaguugagguucaa

SEQ ID NO: 597401 - RNA, 22 nt, Human
agagccaguuacaacuguggag

SEQ ID NO: 597402 - RNA, 22 nt, Human
ugggaguagaugaggagugggc

SEQ ID NO: 597403 - RNA, 22 nt, Human
gcugguccacucccuggaggcu

SEQ ID NO: 597404 - RNA, 22 nt, Human
cuguggccagagcgccguugac

SEQ ID NO: 597405 - RNA, 22 nt, Human
caauauauaggaacaacuuagg

SEQ ID NO: 597406 - RNA, 22 nt, Human
cagaguguuucuuugggugggu

SEQ ID NO: 597407 - RNA, 23 nt, Human
caguggagacucaugcuuccuua

SEQ ID NO: 597408 - RNA, 22 nt, Human
cucuggcuuugcucaugcaucc

SEQ ID NO: 597409 - RNA, 22 nt, Human
gaggggcguccugagugggccu

SEQ ID NO: 597410 - RNA, 21 nt, Human
ccagagccugcugagcccccu

SEQ ID NO: 597411 - RNA, 22 nt, Human
acagugcugaucuagacugacc

SEQ ID NO: 597412 - RNA, 22 nt, Human
aaaagucuuggggaaggccagg

SEQ ID NO: 597413 - RNA, 22 nt, Human
aacaaauguguggcaguguggg

SEQ ID NO: 597414 - RNA, 22 nt, Human
uucuauguaguagcagagccaa

SEQ ID NO: 597415 - RNA, 20 nt, Human
ugcugggcaugcaguggaaa

SEQ ID NO: 597416 - RNA, 22 nt, Human
ggaagggguuaggggucccuga

SEQ ID NO: 597417 - RNA, 22 nt, Human
cugcugacucauuuucaacacu

SEQ ID NO: 597418 - RNA, 23 nt, Human
uuugaacauuucuagauuacaua

SEQ ID NO: 597419 - RNA, 22 nt, Human
aaaugguauaaugucauguauu

SEQ ID NO: 597420 - RNA, 22 nt, Human
acuuaaugguuccuaaaaugug

SEQ ID NO: 597421 - RNA, 22 nt, Human
acauuguuccagcgauagagaa

SEQ ID NO: 597422 - RNA, 22 nt, Human
cugggccucacccuagaccaau

SEQ ID NO: 597423 - RNA, 22 nt, Human
ugagcuuacuucuguacacaga

SEQ ID NO: 597424 - RNA, 22 nt, Human
cagcuuugugcaaugcagucuc

SEQ ID NO: 597425 - RNA, 22 nt, Human
ggccagaggccauccuccugcu

SEQ ID NO: 597426 - RNA, 20 nt, Human
cucagcucuucagggcaagu

SEQ ID NO: 597427 - RNA, 22 nt, Human
uuacuuuagggauguuuugcuu

SEQ ID NO: 597428 - RNA, 22 nt, Human
augcuauguaacuggcagauag

SEQ ID NO: 597429 - RNA, 22 nt, Human
ugcuguagggagaaagaguuga

SEQ ID NO: 597430 - RNA, 22 nt, Human
agcacuuaacugacaguacuau

SEQ ID NO: 597431 - RNA, 22 nt, Human
gcaccagggagggugugcuuca

SEQ ID NO: 597432 - RNA, 22 nt, Human
ccacuggcuuuuccuaggucuc

SEQ ID NO: 597433 - RNA, 22 nt, Human
uguacaaauucaguucuagggu

SEQ ID NO: 597434 - RNA, 22 nt, Human
acacagagccagggaauacagu

SEQ ID NO: 597435 - RNA, 22 nt, Human
ugugcacauauacucauauucc

SEQ ID NO: 597436 - RNA, 22 nt, Human
gcugaguugaaagcagaggaua

SEQ ID NO: 597437 - RNA, 22 nt, Human
gaaaggagugcuuuccaggucu

SEQ ID NO: 597438 - RNA, 22 nt, Human
ggcucagguuuaaagugcuuua

SEQ ID NO: 597439 - RNA, 22 nt, Human
gcaggcagagagggguuuccag

SEQ ID NO: 597440 - RNA, 22 nt, Human
aaagagcauggaaaguucagga

SEQ ID NO: 597441 - RNA, 22 nt, Human
uccugaaggagcaguugcuggg

SEQ ID NO: 597442 - RNA, 22 nt, Human
gagggaaagguuaauacaugau

SEQ ID NO: 597443 - RNA, 22 nt, Human
cagcagcuacuuggagcagcag

SEQ ID NO: 597444 - RNA, 22 nt, Human
agagccuggaccugagcuacaa

SEQ ID NO: 597445 - RNA, 22 nt, Human
auagaaaacagauguccuuaaa

SEQ ID NO: 597446 - RNA, 22 nt, Human
agagugggacacgggcgcuguc

SEQ ID NO: 597447 - RNA, 22 nt, Human
accagcuggucaccugggcacu

SEQ ID NO: 597448 - RNA, 22 nt, Human
uguucuugagccuuuagaccua

SEQ ID NO: 597449 - RNA, 22 nt, Human
agauggguugagaacacaugcu

SEQ ID NO: 597450 - RNA, 22 nt, Human
uuauuuccucucuaauagggua

SEQ ID NO: 597451 - RNA, 22 nt, Human
uaaggagguugguggguuggau

SEQ ID NO: 597452 - RNA, 22 nt, Human
uuagggaaauaaaauuaucagu

SEQ ID NO: 597453 - RNA, 20 nt, Human
gcccugugaugucuugaccu

SEQ ID NO: 597454 - RNA, 19 nt, Human
aggcagucauuggaauaua

SEQ ID NO: 597455 - RNA, 22 nt, Human
gaugcugagcuguauggcuggu

SEQ ID NO: 597456 - RNA, 22 nt, Human
cuggccugcagaucccaggguc

SEQ ID NO: 597457 - RNA, 22 nt, Human
gggagggauuaguucugccugg

SEQ ID NO: 597458 - RNA, 19 nt, Human
caggugguaaucugagccu

SEQ ID NO: 597459 - RNA, 22 nt, Human
ucugccuuccccauaaucugau

SEQ ID NO: 597460 - RNA, 22 nt, Human
aguacagaccugucucuuccug

SEQ ID NO: 597461 - RNA, 22 nt, Human
cugggagguggagguugcauug

SEQ ID NO: 597462 - RNA, 22 nt, Human
gggagggaaagcuugaucuguc

SEQ ID NO: 597463 - RNA, 22 nt, Human
aucagcaggugcugguggagac

SEQ ID NO: 597464 - RNA, 22 nt, Human
uucuuucccagaagauauguuu

SEQ ID NO: 597465 - RNA, 21 nt, Human
acagugagaaauaaauggaaa

SEQ ID NO: 597466 - RNA, 22 nt, Human
uucuguuugugaacuggcugag

SEQ ID NO: 597467 - RNA, 22 nt, Human
caagcagagguuuauguauuag

SEQ ID NO: 597468 - RNA, 22 nt, Human
uagcauuucccaaaugcauuug

SEQ ID NO: 597469 - RNA, 22 nt, Human
ucuuuccuguaacugcuguuca

SEQ ID NO: 597470 - RNA, 22 nt, Human
uuucugcuuaggacucugugga

SEQ ID NO: 597471 - RNA, 22 nt, Human
cccuuagccaggaaaucgaccu

SEQ ID NO: 597472 - RNA, 22 nt, Human
gcugccagcucacucuccugag

SEQ ID NO: 597473 - RNA, 22 nt, Human
guggcucacgucugucaucuca

SEQ ID NO: 597474 - RNA, 22 nt, Human
gggcuccaaaauccuguagccu

SEQ ID NO: 597475 - RNA, 22 nt, Human
aagaacauaacagaagcugugu

SEQ ID NO: 597476 - RNA, 22 nt, Human
uggcccugcuuaugucucucuu

SEQ ID NO: 597477 - RNA, 17 nt, Human
ucuccuggcucuaucag

SEQ ID NO: 597478 - RNA, 22 nt, Human
cagagggcuucagguucaggau

SEQ ID NO: 597479 - RNA, 22 nt, Human
ccccagcacucugacucuuacc

SEQ ID NO: 597480 - RNA, 22 nt, Human
caggcagcugggucaccguccc

SEQ ID NO: 597481 - RNA, 22 nt, Human
aguggcaguagaugagcugguu

SEQ ID NO: 597482 - RNA, 22 nt, Human
ggugggcagcucuuggcaggca

SEQ ID NO: 597483 - RNA, 22 nt, Human
gccuccggaguugcagugucuu

SEQ ID NO: 597484 - RNA, 22 nt, Human
uguacaaagguacuuugauguu

SEQ ID NO: 597485 - RNA, 22 nt, Human
cugccuggaaugccagcuucuc

SEQ ID NO: 597486 - RNA, 23 nt, Human
caggcucccggaccaggauccgc

SEQ ID NO: 597487 - RNA, 22 nt, Human
gcugcccauuccacuggauggu

SEQ ID NO: 597488 - RNA, 22 nt, Human
ccaggcugcucacaagcugccc

SEQ ID NO: 597489 - RNA, 22 nt, Human
auugcuuuguacaugccuagca

SEQ ID NO: 597490 - RNA, 17 nt, Human
ggcugcugugcuggugc

SEQ ID NO: 597491 - RNA, 22 nt, Human
gaauuauaaacuagugacuuca

SEQ ID NO: 597492 - RNA, 22 nt, Human
cugcccucuagaggaggacuga

SEQ ID NO: 597493 - RNA, 22 nt, Human
uggguagggacuuagcuggcug

SEQ ID NO: 597494 - RNA, 22 nt, Human
aucucugauuuacagcaucucu

SEQ ID NO: 597495 - RNA, 21 nt, Human
aguuacauguauagauaaagu

SEQ ID NO: 597496 - RNA, 22 nt, Human
uacuuguuaucaucuuuuccuu

SEQ ID NO: 597497 - RNA, 21 nt, Human
gccugggaagagaaagguaag

SEQ ID NO: 597498 - RNA, 22 nt, Human
caggcugcuguccacaaagcau

SEQ ID NO: 597499 - RNA, 22 nt, Human
cuuuacaaacuauaaagugcgg

SEQ ID NO: 597500 - RNA, 22 nt, Human
ccugcccacugcccggucagcc

SEQ ID NO: 597501 - RNA, 22 nt, Human
gccaggcagcugggagggugcc

SEQ ID NO: 597502 - RNA, 22 nt, Human
aggaagcucggagagggcaaau

SEQ ID NO: 597503 - RNA, 22 nt, Human
gccaggcuggugcaaggauauu

SEQ ID NO: 597504 - RNA, 22 nt, Human
aggagccauugcaggauggcag

SEQ ID NO: 597505 - RNA, 22 nt, Human
acauguaugugugcaaacacau

SEQ ID NO: 597506 - RNA, 22 nt, Human
gcccucagaguuccccacagug

SEQ ID NO: 597507 - RNA, 20 nt, Human
ccacaagggaauauuguuga

SEQ ID NO: 597508 - RNA, 22 nt, Human
ucccacugugaauccaaggccu

SEQ ID NO: 597509 - RNA, 22 nt, Human
uagaacagaggguugcccagau

SEQ ID NO: 597510 - RNA, 22 nt, Human
uuugaaagaauuuauguacuuu

SEQ ID NO: 597511 - RNA, 22 nt, Human
ccaggagucuggaugagguguc

SEQ ID NO: 597512 - RNA, 19 nt, Human
ucagaggauuuggcuauga

SEQ ID NO: 597513 - RNA, 22 nt, Human
cagcucccagagugaccagcag

SEQ ID NO: 597514 - RNA, 22 nt, Human
uugcuuuauguguaugacuuga

SEQ ID NO: 597515 - RNA, 22 nt, Human
uuguuuuaacgacucagcuugu

SEQ ID NO: 597516 - RNA, 22 nt, Human
ccugagacaugaaccaggcucc

SEQ ID NO: 597517 - RNA, 22 nt, Human
cuggcugggagcgagcugcuca

SEQ ID NO: 597518 - RNA, 22 nt, Human
uggcuucuugggaugggucauu

SEQ ID NO: 597519 - RNA, 22 nt, Human
cagaaguuuugcucucuugggu

SEQ ID NO: 597520 - RNA, 22 nt, Human
uucauugaagcacaagugaucu

SEQ ID NO: 597521 - RNA, 22 nt, Human
gaagcagucagcagcaccuuug

SEQ ID NO: 597522 - RNA, 22 nt, Human
agacuuaggugagauguuugua

SEQ ID NO: 597523 - RNA, 22 nt, Human
ugcugccaagcccgugcuccug

SEQ ID NO: 597524 - RNA, 21 nt, Human
ugagucucccuuagcccacgc

SEQ ID NO: 597525 - RNA, 22 nt, Human
gauuuaaaguagaccuuuguuu

SEQ ID NO: 597526 - RNA, 22 nt, Human
ugggcccugcccuugucugucc

SEQ ID NO: 597527 - RNA, 23 nt, Human
aaacuugcuauggcugaaaucau

SEQ ID NO: 597528 - RNA, 22 nt, Human
uccagcuccacagccucccugu

SEQ ID NO: 597529 - RNA, 22 nt, Human
uacacaguaaaugguaaauaca

SEQ ID NO: 597530 - RNA, 22 nt, Human
caagagcugcaaauagcgugac

SEQ ID NO: 597531 - RNA, 19 nt, Human
aggcagaggcuuggcuagc

SEQ ID NO: 597532 - RNA, 22 nt, Human
cagaagcaaguagugauucuuu

SEQ ID NO: 597533 - RNA, 22 nt, Human
acacacagaguuuauacaggca

SEQ ID NO: 597534 - RNA, 22 nt, Human
ugaagauuuagaccucuuugcc

SEQ ID NO: 597535 - RNA, 22 nt, Human
ggcagccauacucagaccuggg

SEQ ID NO: 597536 - RNA, 22 nt, Human
agucccagacuccaguuuucug

SEQ ID NO: 597537 - RNA, 22 nt, Human
ugaaggagggaagaaggcucug

SEQ ID NO: 597538 - RNA, 19 nt, Human
uuagggguaugaaguggua

SEQ ID NO: 597539 - RNA, 22 nt, Human
gaagcagagccuaaggcagaca

SEQ ID NO: 597540 - RNA, 22 nt, Human
uuguguguuuguagaaaaucca

SEQ ID NO: 597541 - RNA, 22 nt, Human
ggcugagggucccagacccuaa

SEQ ID NO: 597542 - RNA, 23 nt, Human
agcaccaggaacagugugguccu

SEQ ID NO: 597543 - RNA, 20 nt, Human
agguaggaucggugucauaa

SEQ ID NO: 597544 - RNA, 22 nt, Human
ccuccccacccacggcuggugg

SEQ ID NO: 597545 - RNA, 22 nt, Human
cuugugcaucucuucaugacca

SEQ ID NO: 597546 - RNA, 22 nt, Human
aaacacugaagaccuaucuggu

SEQ ID NO: 597547 - RNA, 22 nt, Human
gaggccuggucuaugagauguu

SEQ ID NO: 597548 - RNA, 22 nt, Human
ugaggccucugaggccuaggcu

SEQ ID NO: 597549 - RNA, 22 nt, Human
ugcuguguucaccaauaugugu

SEQ ID NO: 597550 - RNA, 20 nt, Human
ggggcagguuuuuauggcua

SEQ ID NO: 597551 - RNA, 22 nt, Human
uccuggaguauuucuguggugu

SEQ ID NO: 597552 - RNA, 22 nt, Human
augacaguacuggugacaauac

SEQ ID NO: 597553 - RNA, 22 nt, Human
auaaagaggauguauuuacagc

SEQ ID NO: 597554 - RNA, 22 nt, Human
caggguugcaugcaucuguggg

SEQ ID NO: 597555 - RNA, 22 nt, Human
auuaaggauuauacucuccuuu

SEQ ID NO: 597556 - RNA, 22 nt, Human
ugaaugcuuggagucauaaaau

SEQ ID NO: 597557 - RNA, 22 nt, Human
gucuggaggcacuuucucauga

SEQ ID NO: 597558 - RNA, 21 nt, Human
gguguccagaggaguccccag

SEQ ID NO: 597559 - RNA, 22 nt, Human
ucugggcuuuacacugugcuua

SEQ ID NO: 597560 - RNA, 22 nt, Human
caaugcacauggacaucaggcu

SEQ ID NO: 597561 - RNA, 22 nt, Human
auacauacguacauacguaugu

SEQ ID NO: 597562 - RNA, 22 nt, Human
ugggcaggaugcguugauucuu

SEQ ID NO: 597563 - RNA, 22 nt, Human
uaagcauaacuaaaaaugauuu

SEQ ID NO: 597564 - RNA, 22 nt, Human
agacaaguguggugagagcagu

SEQ ID NO: 597565 - RNA, 22 nt, Human
cugaauggcgaguuaguuaguu

SEQ ID NO: 597566 - RNA, 22 nt, Human
acagcugugacuuagagaaguu

SEQ ID NO: 597567 - RNA, 22 nt, Human
acaggggcaagggcucacggcc

SEQ ID NO: 597568 - RNA, 22 nt, Human
cugggagcggcugucacugguu

SEQ ID NO: 597569 - RNA, 22 nt, Human
auuagcauugcuacucucaaga

SEQ ID NO: 597570 - RNA, 22 nt, Human
ggagccaguauuuaguggucuu

SEQ ID NO: 597571 - RNA, 22 nt, Human
gaggccugaaaggggaccuaug

SEQ ID NO: 597572 - RNA, 19 nt, Human
aggcagcacccaguccuug

SEQ ID NO: 597573 - RNA, 22 nt, Human
acugaggcagaaggguaagugg

SEQ ID NO: 597574 - RNA, 22 nt, Human
ccuccugguaauuagcgaaagg

SEQ ID NO: 597575 - RNA, 22 nt, Human
guaacgaauaaacaagugauaa

SEQ ID NO: 597576 - RNA, 22 nt, Human
accagggcuuacagcaguagcu

SEQ ID NO: 597577 - RNA, 22 nt, Human
cugaggcuuguccucucagcuu

SEQ ID NO: 597578 - RNA, 22 nt, Human
aagggcagccugacucacgguc

SEQ ID NO: 597579 - RNA, 21 nt, Human
auggcuucucaggugcacuga

SEQ ID NO: 597580 - RNA, 22 nt, Human
uuguuacagcagugauuucaga

SEQ ID NO: 597581 - RNA, 22 nt, Human
ggcagcuggggcagugcccugu

SEQ ID NO: 597582 - RNA, 22 nt, Human
auucuaaagcuuguggagcuua

SEQ ID NO: 597583 - RNA, 22 nt, Human
acaggucuggucugggugggac

SEQ ID NO: 597584 - RNA, 19 nt, Human
cagaggccagaagcacagg

SEQ ID NO: 597585 - RNA, 22 nt, Human
ugucccauggacacaacuucuu

SEQ ID NO: 597586 - RNA, 22 nt, Human
uugcauaaaugcuuaaaauuug

SEQ ID NO: 597587 - RNA, 22 nt, Human
cauggcugaacacucagugacu

SEQ ID NO: 597588 - RNA, 18 nt, Human
cuuuuguuuucccuccuc

SEQ ID NO: 597589 - RNA, 18 nt, Human
agccugggcucugccugg

SEQ ID NO: 597590 - RNA, 22 nt, Human
aguuucuugaagacugauguuu

SEQ ID NO: 597591 - RNA, 22 nt, Human
guggagaggaacccagcucugu

SEQ ID NO: 597592 - RNA, 17 nt, Human
acccaggcucuaucuug

SEQ ID NO: 597593 - RNA, 22 nt, Human
uagaggagggcuguucuucagu

SEQ ID NO: 597594 - RNA, 22 nt, Human
acugagaagauucucacucuua

SEQ ID NO: 597595 - RNA, 22 nt, Human
uugauuucuauugaguuccugu

SEQ ID NO: 597596 - RNA, 22 nt, Human
uagggcugcuuuguauucugcu

SEQ ID NO: 597597 - RNA, 18 nt, Human
acaaaggucugcaagacc

SEQ ID NO: 597598 - RNA, 22 nt, Human
agcaggagagcagugcgugguc

SEQ ID NO: 597599 - RNA, 22 nt, Human
gcaguguuuguguucucacaug

SEQ ID NO: 597600 - RNA, 22 nt, Human
aggcugcagugcagguaggauu

SEQ ID NO: 597601 - RNA, 19 nt, Human
uucuccagggacuuaggga

SEQ ID NO: 597602 - RNA, 22 nt, Human
gcugagagugagcacuggauau

SEQ ID NO: 597603 - RNA, 22 nt, Human
accccaggcccagggaagaggc

SEQ ID NO: 597604 - RNA, 22 nt, Human
gcccccagcucucaagcucaaa

SEQ ID NO: 597605 - RNA, 22 nt, Human
cacccagagggcuugcugaaca

SEQ ID NO: 597606 - RNA, 22 nt, Human
gggcugaguuccugccucacuc

SEQ ID NO: 597607 - RNA, 22 nt, Human
caccagcucuccaccagguuuc

SEQ ID NO: 597608 - RNA, 22 nt, Human
ugguuuuagaguauauucaggg

SEQ ID NO: 597609 - RNA, 22 nt, Human
gggccaugagagguucaucaac

SEQ ID NO: 597610 - RNA, 22 nt, Human
uuuauugucuaugaacugcuug

SEQ ID NO: 597611 - RNA, 18 nt, Human
gagcugccauauuuaguu

SEQ ID NO: 597612 - RNA, 22 nt, Human
gcacccagauagcaaggauuag

SEQ ID NO: 597613 - RNA, 22 nt, Human
ccugaggucaugguccaguguu

SEQ ID NO: 597614 - RNA, 22 nt, Human
cucuggccagagccugcgggaa

SEQ ID NO: 597615 - RNA, 22 nt, Human
ugcugaaucccacccuccagug

SEQ ID NO: 597616 - RNA, 21 nt, Human
gcaggcacucuagaggagcug

SEQ ID NO: 597617 - RNA, 22 nt, Human
ggcugcuggaguugggucucuc

SEQ ID NO: 597618 - RNA, 19 nt, Human
ucugaaugggaugaguugg

SEQ ID NO: 597619 - RNA, 22 nt, Human
ggccuuccugcugcuccgggcc

SEQ ID NO: 597620 - RNA, 22 nt, Human
cccagccucugggcucacccaa

SEQ ID NO: 597621 - RNA, 19 nt, Human
gggcauggaugagcuuacc

SEQ ID NO: 597622 - RNA, 22 nt, Human
augcugggaagacaagguggag

SEQ ID NO: 597623 - RNA, 22 nt, Human
aacaggcuggccuugaagcagu

SEQ ID NO: 597624 - RNA, 22 nt, Human
agaguuuguaguggugaaugua

SEQ ID NO: 597625 - RNA, 22 nt, Human
uuagcauuucuggaaucacaag

SEQ ID NO: 597626 - RNA, 22 nt, Human
ccucagagacugcaucuucccu

SEQ ID NO: 597627 - RNA, 18 nt, Human
ucaugagguagaggcugg

SEQ ID NO: 597628 - RNA, 22 nt, Human
gauaacauacuugcauguguau

SEQ ID NO: 597629 - RNA, 20 nt, Human
aagguccaaacucuguguuc

SEQ ID NO: 597630 - RNA, 22 nt, Human
cuccagggaggucugcaggacu

SEQ ID NO: 597631 - RNA, 22 nt, Human
uauguucugucuguacagauuu

SEQ ID NO: 597632 - RNA, 19 nt, Human
cuuugccaaaagaggccau

SEQ ID NO: 597633 - RNA, 22 nt, Human
uuuucuuuaaucugguggggug

SEQ ID NO: 597634 - RNA, 21 nt, Human
aaguaaugugucucuucuacc

SEQ ID NO: 597635 - RNA, 22 nt, Human
auaaacaucuguuucucuucug

SEQ ID NO: 597636 - RNA, 22 nt, Human
cugcauuucacauuuaaacuuu

SEQ ID NO: 597637 - RNA, 22 nt, Human
ggguaggaaauccagagguggc

SEQ ID NO: 597638 - RNA, 22 nt, Human
ugugggcaaaggguagcugggu

SEQ ID NO: 597639 - RNA, 22 nt, Human
uucuaccauugggaaaacagcc

SEQ ID NO: 597640 - RNA, 22 nt, Human
uggaacaacaugcuggaaaauu

SEQ ID NO: 597641 - RNA, 22 nt, Human
caggccugugacaccgugucug

SEQ ID NO: 597642 - RNA, 22 nt, Human
uccuggggaggucgaggcugag

SEQ ID NO: 597643 - RNA, 22 nt, Human
aaugucaugggaauuuauucau

SEQ ID NO: 597644 - RNA, 22 nt, Human
agcagguggauuuagacgggag

SEQ ID NO: 597645 - RNA, 22 nt, Human
gacagagugcagggcuagaaga

SEQ ID NO: 597646 - RNA, 22 nt, Human
gccaggcuccccggaucccugg

SEQ ID NO: 597647 - RNA, 23 nt, Human
gccauggcugccccacaggccuc

SEQ ID NO: 597648 - RNA, 22 nt, Human
uuuccuuccagguuccuaaggc

SEQ ID NO: 597649 - RNA, 22 nt, Human
acugugcagguagaugccuggg

SEQ ID NO: 597650 - RNA, 22 nt, Human
uggcagcuguuaauguuuuguu

SEQ ID NO: 597651 - RNA, 22 nt, Human
cggggaagcgguucuggcggua

SEQ ID NO: 597652 - RNA, 22 nt, Human
cuugugcauaagaagaccugag

SEQ ID NO: 597653 - RNA, 22 nt, Human
caguuucugucuguucuuaucc

SEQ ID NO: 597654 - RNA, 22 nt, Human
augucaaacacaacaccagugg

SEQ ID NO: 597655 - RNA, 22 nt, Human
uaccugaguuauauuaauaauu

SEQ ID NO: 597656 - RNA, 22 nt, Human
aacaggcccugccauuuaucca

SEQ ID NO: 597657 - RNA, 22 nt, Human
cucuggguggucucacugagug

SEQ ID NO: 597658 - RNA, 22 nt, Human
uacauaguauucacauuguuuu

SEQ ID NO: 597659 - RNA, 22 nt, Human
gccaggaguguguggcuauguu

SEQ ID NO: 597660 - RNA, 22 nt, Human
aggugcagcugguggagucugg

SEQ ID NO: 597661 - RNA, 22 nt, Human
ggaagccagaaagugagaauau

SEQ ID NO: 597662 - RNA, 22 nt, Human
cauagcaagaucacauucugua

SEQ ID NO: 597663 - RNA, 22 nt, Human
agcuguggccagaugugagcgg

SEQ ID NO: 597664 - RNA, 22 nt, Human
gagguggcacugugaggagcac

SEQ ID NO: 597665 - RNA, 22 nt, Human
ccuccacugcuucccagcuuug

SEQ ID NO: 597666 - RNA, 22 nt, Human
aguaaagcauugucuucagagu

SEQ ID NO: 597667 - RNA, 22 nt, Human
ucacagugacagccaauguuuu

SEQ ID NO: 597668 - RNA, 22 nt, Human
gaugaggaauuugagguuagaa

SEQ ID NO: 597669 - RNA, 21 nt, Human
aauaaccacuaauauaguggc

SEQ ID NO: 597670 - RNA, 22 nt, Human
aaugcucaaaauguuucaucua

SEQ ID NO: 597671 - RNA, 22 nt, Human
acugcuaaaucuccaucgauua

SEQ ID NO: 597672 - RNA, 22 nt, Human
guuucuuucuauugacugaaca

SEQ ID NO: 597673 - RNA, 20 nt, Human
ucucccaggcucagggaaga

SEQ ID NO: 597674 - RNA, 22 nt, Human
ggggagcugggaggugaguuac

SEQ ID NO: 597675 - RNA, 22 nt, Human
gucaguucauuagcacuuccaa

SEQ ID NO: 597676 - RNA, 22 nt, Human
uuaagauuuguagagaaaaagc

SEQ ID NO: 597677 - RNA, 22 nt, Human
aucucauucucccgugccaugg

SEQ ID NO: 597678 - RNA, 22 nt, Human
ucucugugggcuuuggacuuga

SEQ ID NO: 597679 - RNA, 22 nt, Human
gucauucagagaugcagguaga

SEQ ID NO: 597680 - RNA, 22 nt, Human
ucuaguuaauuccuuugguguu

SEQ ID NO: 597681 - RNA, 22 nt, Human
auaaaaacugacccauccuuug

SEQ ID NO: 597682 - RNA, 22 nt, Human
agcccugguagccugcugccau

SEQ ID NO: 597683 - RNA, 22 nt, Human
uaaaucaguaaggcauauucuc

SEQ ID NO: 597684 - RNA, 22 nt, Human
ggcucuggugugaagcagccuc

SEQ ID NO: 597685 - RNA, 22 nt, Human
cugaggucuauuuugaaacugc

SEQ ID NO: 597686 - RNA, 22 nt, Human
uugcaguugcuguauuuaagga

SEQ ID NO: 597687 - RNA, 20 nt, Human
agagugagacuccaucucag

SEQ ID NO: 597688 - RNA, 22 nt, Human
uugacaaaacaacacagauuuc

SEQ ID NO: 597689 - RNA, 22 nt, Human
uauuaugguuguagguuaacaa

SEQ ID NO: 597690 - RNA, 21 nt, Human
ucuggggaagacaucuaggau

SEQ ID NO: 597691 - RNA, 22 nt, Human
cacauacauacguauguauaca

SEQ ID NO: 597692 - RNA, 22 nt, Human
gguucaguuuacauuaaaaucu

SEQ ID NO: 597693 - RNA, 22 nt, Human
cagugccaugaugcagagcaau

SEQ ID NO: 597694 - RNA, 22 nt, Human
agcaggaaggucugugugaguc

SEQ ID NO: 597695 - RNA, 22 nt, Human
ugacaauggguggacaagauag

SEQ ID NO: 597696 - RNA, 22 nt, Human
gcagaggcaaucagguaugugg

SEQ ID NO: 597697 - RNA, 22 nt, Human
aaugaacacauguggucaguuu

SEQ ID NO: 597698 - RNA, 22 nt, Human
cugggugaauuugaaggaaagg

SEQ ID NO: 597699 - RNA, 22 nt, Human
ggcagagcagccccaggguuug

SEQ ID NO: 597700 - RNA, 22 nt, Human
auaaggaaugauguaucaguuu

SEQ ID NO: 597701 - RNA, 22 nt, Human
auaaaacuuggguaugaucccu

SEQ ID NO: 597702 - RNA, 22 nt, Human
acauucuagaagucuuugcaau

SEQ ID NO: 597703 - RNA, 22 nt, Human
aacagcuuugcuucuggagaca

SEQ ID NO: 597704 - RNA, 22 nt, Human
acaauuuuucaaagaagcuuau

SEQ ID NO: 597705 - RNA, 22 nt, Human
aaauauuugucugaggcgguug

SEQ ID NO: 597706 - RNA, 22 nt, Human
uaucagaaggcacauggagucu

SEQ ID NO: 597707 - RNA, 22 nt, Human
ugugacagccaguaaaguaagc

SEQ ID NO: 597708 - RNA, 22 nt, Human
ccacagagacaggguccuugcu

SEQ ID NO: 597709 - RNA, 22 nt, Human
gcccugagggguggugucugua

SEQ ID NO: 597710 - RNA, 22 nt, Human
ucuucucucauguaggagggaa

SEQ ID NO: 597711 - RNA, 23 nt, Human
aguucucaaaaccagcuugacaa

SEQ ID NO: 597712 - RNA, 22 nt, Human
cuggccugugggcugucuccgg

SEQ ID NO: 597713 - RNA, 22 nt, Human
caggcacuggccagucagcaca

SEQ ID NO: 597714 - RNA, 22 nt, Human
ggcuggucaggaaacuaggcuc

SEQ ID NO: 597715 - RNA, 22 nt, Human
cuggcuggucaucagcaguacg

SEQ ID NO: 597716 - RNA, 22 nt, Human
ucuacugcacuggugucucauc

SEQ ID NO: 597717 - RNA, 22 nt, Human
uagcuuugccaucugucacaua

SEQ ID NO: 597718 - RNA, 22 nt, Human
caaggccaguucaccaagggca

SEQ ID NO: 597719 - RNA, 22 nt, Human
aagaaaacaugaucuaauuuaa

SEQ ID NO: 597720 - RNA, 22 nt, Human
uucuccagaguuucucucacug

SEQ ID NO: 597721 - RNA, 22 nt, Human
aggccacagauacugugaagua

SEQ ID NO: 597722 - RNA, 22 nt, Human
ccuggaugauccaugucaugga

SEQ ID NO: 597723 - RNA, 21 nt, Human
gagcugggcgaggcuccgggg

SEQ ID NO: 597724 - RNA, 22 nt, Human
cugcugacucuuccuggaguga

SEQ ID NO: 597725 - RNA, 22 nt, Human
caggaagagaacauggaggcug

SEQ ID NO: 597726 - RNA, 22 nt, Human
gugcuggggguuucuguagguc

SEQ ID NO: 597727 - RNA, 22 nt, Human
uagcaaagaagauauuauugca

SEQ ID NO: 597728 - RNA, 22 nt, Human
gcugccugcacagagcugcuuu

SEQ ID NO: 597729 - RNA, 20 nt, Human
uaaugccucaugauacuaga

SEQ ID NO: 597730 - RNA, 22 nt, Human
ugguaaaugcuauuccuauauu

SEQ ID NO: 597731 - RNA, 22 nt, Human
gcugcaggcggccgugguggcg

SEQ ID NO: 597732 - RNA, 22 nt, Human
gcaaagaaagccaaggucuaac

SEQ ID NO: 597733 - RNA, 22 nt, Human
uuauagaaugguggauuuucug

SEQ ID NO: 597734 - RNA, 22 nt, Human
gggaaacuguccaguucucccc

SEQ ID NO: 597735 - RNA, 20 nt, Human
acaguggguggggagcacug

SEQ ID NO: 597736 - RNA, 22 nt, Human
aguuuuuccugauuuuacagaa

SEQ ID NO: 597737 - RNA, 22 nt, Human
uuagaauuucugcucacuuuga

SEQ ID NO: 597738 - RNA, 22 nt, Human
ggguaggagaggugucugugug

SEQ ID NO: 597739 - RNA, 22 nt, Human
ccccaaaguguuggauaauuga

SEQ ID NO: 597740 - RNA, 22 nt, Human
acacagauggguagaaaacaga

SEQ ID NO: 597741 - RNA, 23 nt, Human
ccuccugggcacaggccugaugg

SEQ ID NO: 597742 - RNA, 23 nt, Human
accaacaagccucuggagagugg

SEQ ID NO: 597743 - RNA, 22 nt, Human
guuaagaagcuagagaugaaca

SEQ ID NO: 597744 - RNA, 22 nt, Human
agguuagauaguuuauuagaac

SEQ ID NO: 597745 - RNA, 22 nt, Human
gcugcuguuccuccaguggauc

SEQ ID NO: 597746 - RNA, 22 nt, Human
guuaaugccuacauauuaagca

SEQ ID NO: 597747 - RNA, 20 nt, Human
gccugccucagcuagcugag

SEQ ID NO: 597748 - RNA, 22 nt, Human
gaagaugugcaauacaaagaaa

SEQ ID NO: 597749 - RNA, 22 nt, Human
augcauaugugugcacacgugu

SEQ ID NO: 597750 - RNA, 21 nt, Human
ucucuguguacagucucaccc

SEQ ID NO: 597751 - RNA, 22 nt, Human
cuugcuguuauccauauuaucu

SEQ ID NO: 597752 - RNA, 22 nt, Human
agaggagguccuuuucugaugu

SEQ ID NO: 597753 - RNA, 22 nt, Human
gcccuuauaaacaaggcuucag

SEQ ID NO: 597754 - RNA, 22 nt, Human
aaaugcuuguaaauuuuccaug

SEQ ID NO: 597755 - RNA, 20 nt, Human
uuucaguugguuaauggcau

SEQ ID NO: 597756 - RNA, 22 nt, Human
cauucucugaucuucacauacc

SEQ ID NO: 597757 - RNA, 22 nt, Human
ccuccaggaacuugagagacac

SEQ ID NO: 597758 - RNA, 22 nt, Human
ucuuccuucgcccuugcuguuu

SEQ ID NO: 597759 - RNA, 22 nt, Human
uggaggcugguuucugcugagg

SEQ ID NO: 597760 - RNA, 22 nt, Human
cugggcaccaggcaugacaggg

SEQ ID NO: 597761 - RNA, 22 nt, Human
gcagagcuaucuucuggauuug

SEQ ID NO: 597762 - RNA, 22 nt, Human
ucucagguggcccccaugagug

SEQ ID NO: 597763 - RNA, 22 nt, Human
acauugaugaucccacuuacag

SEQ ID NO: 597764 - RNA, 22 nt, Human
guggcagagaacaaggagaggu

SEQ ID NO: 597765 - RNA, 22 nt, Human
ugcacacaaguuggagaaugaa

SEQ ID NO: 597766 - RNA, 22 nt, Human
agauacaugucaagagacuuau

SEQ ID NO: 597767 - RNA, 19 nt, Human
ggcugggucuggcagguuc

SEQ ID NO: 597768 - RNA, 22 nt, Human
agguggaaauggcuuuccuagg

SEQ ID NO: 597769 - RNA, 22 nt, Human
cccugcagagagugcuuuugug

SEQ ID NO: 597770 - RNA, 22 nt, Human
gucugccccacaggcucaguug

SEQ ID NO: 597771 - RNA, 22 nt, Human
agaaaggagaccagcucugccc

SEQ ID NO: 597772 - RNA, 22 nt, Human
ugcuggggguucagaugaguaa

SEQ ID NO: 597773 - RNA, 22 nt, Human
aaauacacguacauguguaaaa

SEQ ID NO: 597774 - RNA, 20 nt, Human
gaggaaaagcugccaggccu

SEQ ID NO: 597775 - RNA, 22 nt, Human
aguccaugguuguaguucucuc

SEQ ID NO: 597776 - RNA, 22 nt, Human
gcaggaugagugaguacauuua

SEQ ID NO: 597777 - RNA, 22 nt, Human
caggaagcaagugauuuucuug

SEQ ID NO: 597778 - RNA, 23 nt, Human
acauguggagagaacagauaucu

SEQ ID NO: 597779 - RNA, 22 nt, Human
aaguuacuuuaccucuuuagcu

SEQ ID NO: 597780 - RNA, 22 nt, Human
uugaggccaaaaaguccuauga

SEQ ID NO: 597781 - RNA, 22 nt, Human
uggcugagggggcaguucagga

SEQ ID NO: 597782 - RNA, 22 nt, Human
gagagggcucuguguggguacu

SEQ ID NO: 597783 - RNA, 22 nt, Human
aggcaaauuauuguaugcaguu

SEQ ID NO: 597784 - RNA, 19 nt, Human
gaggaggaaaacuagugua

SEQ ID NO: 597785 - RNA, 22 nt, Human
uuguuugugcuauuuaauguag

SEQ ID NO: 597786 - RNA, 22 nt, Human
auuacaucaguugacaugugag

SEQ ID NO: 597787 - RNA, 22 nt, Human
auacaucuaugccuuucugaca

SEQ ID NO: 597788 - RNA, 22 nt, Human
agcacaggaccaaggaagcugu

SEQ ID NO: 597789 - RNA, 22 nt, Human
aaacuucaaggauuugcaaauc

SEQ ID NO: 597790 - RNA, 22 nt, Human
caucaaaauuagacauuguuga

SEQ ID NO: 597791 - RNA, 22 nt, Human
ccagagugacgugaagugugaa

SEQ ID NO: 597792 - RNA, 22 nt, Human
aggccagaguuaaggagaacag

SEQ ID NO: 597793 - RNA, 20 nt, Human
ggcaugagaugugagggagg

SEQ ID NO: 597794 - RNA, 18 nt, Human
aauggaaggggugcuguu

SEQ ID NO: 597795 - RNA, 22 nt, Human
agagcugggaccgucuggaagu

SEQ ID NO: 597796 - RNA, 19 nt, Human
agguagcucagacucaaag

SEQ ID NO: 597797 - RNA, 22 nt, Human
ucugaggugucacaaggccagg

SEQ ID NO: 597798 - RNA, 22 nt, Human
aaacagaaauuuccucaugcuc

SEQ ID NO: 597799 - RNA, 22 nt, Human
cugcccugcuuguuuccagugg

SEQ ID NO: 597800 - RNA, 21 nt, Human
ucugagcugaguccucuaggu

SEQ ID NO: 597801 - RNA, 22 nt, Human
agccaggccuuagggagaggca

SEQ ID NO: 597802 - RNA, 22 nt, Human
gcagcccaggcucgcucacugc

SEQ ID NO: 597803 - RNA, 22 nt, Human
guauuauucucagcuuugggau

SEQ ID NO: 597804 - RNA, 22 nt, Human
cauaauuucuguaucagcacca

SEQ ID NO: 597805 - RNA, 22 nt, Human
cuucuucucaaggggcaggugg

SEQ ID NO: 597806 - RNA, 22 nt, Human
ucucugaagcuguuguagucuc

SEQ ID NO: 597807 - RNA, 22 nt, Human
aaaauaacuucuacuauuugca

SEQ ID NO: 597808 - RNA, 22 nt, Human
uggcagcugguacagugggucu

SEQ ID NO: 597809 - RNA, 22 nt, Human
gcugagguggaggaaggagacc

SEQ ID NO: 597810 - RNA, 22 nt, Human
ugccuguuauuguuggcuuagu

SEQ ID NO: 597811 - RNA, 22 nt, Human
uucaaacaacucauuuaugcaa

SEQ ID NO: 597812 - RNA, 18 nt, Human
agcuucccucugagaggg

SEQ ID NO: 597813 - RNA, 22 nt, Human
uucaggaauaauuaucauauga

SEQ ID NO: 597814 - RNA, 22 nt, Human
uagcugaaugccuuggauuuuu

SEQ ID NO: 597815 - RNA, 22 nt, Human
cugcccuguagcuguucuagca

SEQ ID NO: 597816 - RNA, 22 nt, Human
uuguuucuuugaaguuucuaga

SEQ ID NO: 597817 - RNA, 22 nt, Human
uccuggaggcaaaugagcacau

SEQ ID NO: 597818 - RNA, 22 nt, Human
ggaagggaaaauucauucggcu

SEQ ID NO: 597819 - RNA, 22 nt, Human
uacaaugagcuguacaucucca

SEQ ID NO: 597820 - RNA, 22 nt, Human
ggugaguuucaugguuguuuac

SEQ ID NO: 597821 - RNA, 22 nt, Human
gcccaagccgccuuccagagac

SEQ ID NO: 597822 - RNA, 22 nt, Human
augaugcuguuuaucauauacu

SEQ ID NO: 597823 - RNA, 23 nt, Human
cuggaagugcuuuuauagcuuug

SEQ ID NO: 597824 - RNA, 22 nt, Human
uuucucauggaacauagcuccu

SEQ ID NO: 597825 - RNA, 22 nt, Human
acagcuggacaggggagaguuu

SEQ ID NO: 597826 - RNA, 19 nt, Human
ugacaagauaauagccuug

SEQ ID NO: 597827 - RNA, 22 nt, Human
ucagggagagugacccauccac

SEQ ID NO: 597828 - RNA, 22 nt, Human
guggccucuguuggcuccuagg

SEQ ID NO: 597829 - RNA, 22 nt, Human
ugagccuguggggugacaacca

SEQ ID NO: 597830 - RNA, 22 nt, Human
uuucacacuagucagaauacca

SEQ ID NO: 597831 - RNA, 22 nt, Human
gugugaaaguaauugcgguuuu

SEQ ID NO: 597832 - RNA, 22 nt, Human
gcccacucuggagccuguuccc

SEQ ID NO: 597833 - RNA, 22 nt, Human
uggcugagggggcucugcucag

SEQ ID NO: 597834 - RNA, 22 nt, Human
auuuaguuuaggaaaaguaggu

SEQ ID NO: 597835 - RNA, 22 nt, Human
ccagggcuggugggagaugcug

SEQ ID NO: 597836 - RNA, 22 nt, Human
cagacugaguggauuaaacaau

SEQ ID NO: 597837 - RNA, 22 nt, Human
ugcugagggcuguuaaggaagc

SEQ ID NO: 597838 - RNA, 22 nt, Human
ccugccuguaagauggguacaa

SEQ ID NO: 597839 - RNA, 22 nt, Human
gugugagagaagcugccaugga

SEQ ID NO: 597840 - RNA, 22 nt, Human
uggagccagcccaggccccucu

SEQ ID NO: 597841 - RNA, 22 nt, Human
aggggcaguuccaaguuuugug

SEQ ID NO: 597842 - RNA, 22 nt, Human
guuuccuagaucaguguucuua

SEQ ID NO: 597843 - RNA, 18 nt, Human
auugucagaagucaugug

SEQ ID NO: 597844 - RNA, 22 nt, Human
aaagagucuggcguuuuaaugg

SEQ ID NO: 597845 - RNA, 22 nt, Human
gccacucaugggaggugugcaa

SEQ ID NO: 597846 - RNA, 22 nt, Human
cuauugcauuugcaucuucauc

SEQ ID NO: 597847 - RNA, 22 nt, Human
auagauguacguauguaaauca

SEQ ID NO: 597848 - RNA, 22 nt, Human
aagagauugguuauaagagauu

SEQ ID NO: 597849 - RNA, 22 nt, Human
gggcacagcccagugggguccc

SEQ ID NO: 597850 - RNA, 18 nt, Human
ggacacagauagguacag

SEQ ID NO: 597851 - RNA, 22 nt, Human
auguuacacauaggcauaaaug

SEQ ID NO: 597852 - RNA, 22 nt, Human
aauucuauaggcaagcuauuuu

SEQ ID NO: 597853 - RNA, 22 nt, Human
gcuccaggaggcucccgcgucu

SEQ ID NO: 597854 - RNA, 22 nt, Human
gagggccaacuagcaccacuuu

SEQ ID NO: 597855 - RNA, 22 nt, Human
ucagcuuuccugcagcuaaggg

SEQ ID NO: 597856 - RNA, 22 nt, Human
cugcuuuagcuagugcucuuag

SEQ ID NO: 597857 - RNA, 22 nt, Human
cucccuccucaaauaucuuugu

SEQ ID NO: 597858 - RNA, 22 nt, Human
ucuucccagaggaggugccagc

SEQ ID NO: 597859 - RNA, 22 nt, Human
ugaaggagaauuaauaggcauu

SEQ ID NO: 597860 - RNA, 22 nt, Human
ccuuuaggagugaggaccgagc

SEQ ID NO: 597861 - RNA, 22 nt, Human
aggcccaguagucgacggcgcu

SEQ ID NO: 597862 - RNA, 22 nt, Human
gcagaggagaugaagauacuuu

SEQ ID NO: 597863 - RNA, 17 nt, Human
cagacaggcugucaccc

SEQ ID NO: 597864 - RNA, 22 nt, Human
ugguaggauagugacuuauaug

SEQ ID NO: 597865 - RNA, 22 nt, Human
gugggggcuggcucguccugug

SEQ ID NO: 597866 - RNA, 22 nt, Human
aaggggaauagaguggguugug

SEQ ID NO: 597867 - RNA, 20 nt, Human
aaccugaggcaguguuccag

SEQ ID NO: 597868 - RNA, 22 nt, Human
uucuaguuauagaaaaagcauu

SEQ ID NO: 597869 - RNA, 22 nt, Human
uuauguaauuuguuugcucuuc

SEQ ID NO: 597870 - RNA, 22 nt, Human
cacuuuacuaucuauaaaauaa

SEQ ID NO: 597871 - RNA, 22 nt, Human
aagaggaaaugauugacuauau

SEQ ID NO: 597872 - RNA, 22 nt, Human
acugaggucagggguaugugau

SEQ ID NO: 597873 - RNA, 22 nt, Human
cagugggugaugaguccugggg

SEQ ID NO: 597874 - RNA, 22 nt, Human
aacaugcauguuauuuaucagu

SEQ ID NO: 597875 - RNA, 22 nt, Human
aaauauguaaccaaggugaagu

SEQ ID NO: 597876 - RNA, 22 nt, Human
cugccagcucucuggaggcucu

SEQ ID NO: 597877 - RNA, 22 nt, Human
caucaugccccgcuacagugca

SEQ ID NO: 597878 - RNA, 22 nt, Human
uuugaaagccuggcuuuucucu

SEQ ID NO: 597879 - RNA, 22 nt, Human
augcuuaaccuugguguacaau

SEQ ID NO: 597880 - RNA, 22 nt, Human
auuuuguuaucagggcuuugca

SEQ ID NO: 597881 - RNA, 22 nt, Human
gcagaauguaggccuucagugu

SEQ ID NO: 597882 - RNA, 22 nt, Human
acuccaguucucuuguuuauaa

SEQ ID NO: 597883 - RNA, 22 nt, Human
aggccugggcaagaaggggcgu

SEQ ID NO: 597884 - RNA, 22 nt, Human
acugcuuuucagagucugccug

SEQ ID NO: 597885 - RNA, 22 nt, Human
ccuacucugagcgccuccgcau

SEQ ID NO: 597886 - RNA, 22 nt, Human
cacaguguuugauuuaggggcc

SEQ ID NO: 597887 - RNA, 20 nt, Human
gccuggaggcaaugggaaga

SEQ ID NO: 597888 - RNA, 22 nt, Human
ucccacagggcuucucuguaca

SEQ ID NO: 597889 - RNA, 22 nt, Human
ugcugcaggaacuuaagaagcu

SEQ ID NO: 597890 - RNA, 22 nt, Human
agccagcagggcuuagaggaca

SEQ ID NO: 597891 - RNA, 22 nt, Human
uauguuuauacuuugauguacu

SEQ ID NO: 597892 - RNA, 22 nt, Human
cuuuugcagccauuauugcugc

SEQ ID NO: 597893 - RNA, 22 nt, Human
aggcuguggcccuggucuagca

SEQ ID NO: 597894 - RNA, 22 nt, Human
guguuacauauauacccacacc

SEQ ID NO: 597895 - RNA, 17 nt, Human
cauucuguaaucuuucu

SEQ ID NO: 597896 - RNA, 22 nt, Human
caggcagcgcucguggccuggc

SEQ ID NO: 597897 - RNA, 22 nt, Human
cugagcagcuguuacagagugu

SEQ ID NO: 597898 - RNA, 22 nt, Human
gagcagugagugaauguugccu

SEQ ID NO: 597899 - RNA, 22 nt, Human
gggcaagcacagcgagcgugcg

SEQ ID NO: 597900 - RNA, 22 nt, Human
caguggcacccacgggcugggc

SEQ ID NO: 597901 - RNA, 22 nt, Human
ccucuccagcggccucagggcc

SEQ ID NO: 597902 - RNA, 22 nt, Human
cuauacagcagcuuacuaguua

SEQ ID NO: 597903 - RNA, 22 nt, Human
agcaguggcuggauggugugcu

SEQ ID NO: 597904 - RNA, 22 nt, Human
cuggagcuguuuuuucaggaaa

SEQ ID NO: 597905 - RNA, 22 nt, Human
gaagcacugcauuucaagauca

SEQ ID NO: 597906 - RNA, 22 nt, Human
uccuucuuucccccuagucauu

SEQ ID NO: 597907 - RNA, 20 nt, Human
uccaccaggaaggguaggga

SEQ ID NO: 597908 - RNA, 22 nt, Human
cucuuacacagauuccucuagc

SEQ ID NO: 597909 - RNA, 18 nt, Human
gcaaacauucuuccaguc

SEQ ID NO: 597910 - RNA, 23 nt, Human
gcagagguuuuucaguaugguuu

SEQ ID NO: 597911 - RNA, 22 nt, Human
acaggcagguccugucccagcu

SEQ ID NO: 597912 - RNA, 23 nt, Human
gggaaaggauaugauccuagggg

SEQ ID NO: 597913 - RNA, 20 nt, Human
auguagaugaaagcaaaggc

SEQ ID NO: 597914 - RNA, 22 nt, Human
ugcugggcuagaagcugaggcc

SEQ ID NO: 597915 - RNA, 22 nt, Human
gagcugagaucauguacacuag

SEQ ID NO: 597916 - RNA, 22 nt, Human
uucgcauucagcuuugccacug

SEQ ID NO: 597917 - RNA, 22 nt, Human
cagcuauuccaggaguagaauc

SEQ ID NO: 597918 - RNA, 22 nt, Human
uucugggacaucuggacaguuu

SEQ ID NO: 597919 - RNA, 22 nt, Human
ugagcagagucgcuccagagug

SEQ ID NO: 597920 - RNA, 22 nt, Human
uccaaagaaccuggcuacuguc

SEQ ID NO: 597921 - RNA, 22 nt, Human
ccaggccuagccccugagggua

SEQ ID NO: 597922 - RNA, 23 nt, Human
cccagcagagaugaggagggguc

SEQ ID NO: 597923 - RNA, 19 nt, Human
aggcagcauucuggggcuu

SEQ ID NO: 597924 - RNA, 21 nt, Human
uagaaucacuaauaagaugua

SEQ ID NO: 597925 - RNA, 22 nt, Human
acaagaagucacaucuaggagu

SEQ ID NO: 597926 - RNA, 18 nt, Human
acauuucuccuucugacc

SEQ ID NO: 597927 - RNA, 22 nt, Human
aagacaauguuucugauagaua

SEQ ID NO: 597928 - RNA, 22 nt, Human
gccuggaggggccaggguggua

SEQ ID NO: 597929 - RNA, 22 nt, Human
ucucugggaauuuuuuggacau

SEQ ID NO: 597930 - RNA, 22 nt, Human
uggggaagggcacccuggagac

SEQ ID NO: 597931 - RNA, 19 nt, Human
uacaggauccucauacagu

SEQ ID NO: 597932 - RNA, 22 nt, Human
uucacugugaacucauauucag

SEQ ID NO: 597933 - RNA, 19 nt, Human
aggguggcaaaggagggug

SEQ ID NO: 597934 - RNA, 22 nt, Human
gagggcagagacagugauucac

SEQ ID NO: 597935 - RNA, 22 nt, Human
uuucaccucagucuuuuuauau

SEQ ID NO: 597936 - RNA, 22 nt, Human
aaaugauguuauaagaccagga

SEQ ID NO: 597937 - RNA, 22 nt, Human
ugcaggcugcuggcaguagcuu

SEQ ID NO: 597938 - RNA, 22 nt, Human
agccacagcacauuguaagaaa

SEQ ID NO: 597939 - RNA, 22 nt, Human
uguaacaguaagccugugagcu

SEQ ID NO: 597940 - RNA, 22 nt, Human
ccuuggguuccaagucacugaa

SEQ ID NO: 597941 - RNA, 22 nt, Human
aagagaauaucgauagcacucu

SEQ ID NO: 597942 - RNA, 23 nt, Human
agggcugaaugcagagaagcaga

SEQ ID NO: 597943 - RNA, 22 nt, Human
ccaaggcauauggcugaaacca

SEQ ID NO: 597944 - RNA, 22 nt, Human
aucucuggccuuccuuuuccaa

SEQ ID NO: 597945 - RNA, 22 nt, Human
gugccuggcaugcgccggugcu

SEQ ID NO: 597946 - RNA, 22 nt, Human
aauaucugucucuaaugcauau

SEQ ID NO: 597947 - RNA, 22 nt, Human
gccugggagcacaucggggucc

SEQ ID NO: 597948 - RNA, 22 nt, Human
ucuuucuuauuaugcucaaugu

SEQ ID NO: 597949 - RNA, 22 nt, Human
uuucucaaggugucauguauuu

SEQ ID NO: 597950 - RNA, 22 nt, Human
gugaacaaaauagcacauauua

SEQ ID NO: 597951 - RNA, 22 nt, Human
ucagaagccgggcagguuuugg

SEQ ID NO: 597952 - RNA, 22 nt, Human
gacacuggaaauauugaauugg

SEQ ID NO: 597953 - RNA, 22 nt, Human
cuacacaguucugccuaauggc

SEQ ID NO: 597954 - RNA, 22 nt, Human
acaggcugauagaccauaaaua

SEQ ID NO: 597955 - RNA, 22 nt, Human
caggauggccccggggcugugc

SEQ ID NO: 597956 - RNA, 22 nt, Human
ggcagucauuuaaucccugcau

SEQ ID NO: 597957 - RNA, 22 nt, Human
uaacacagacagccacuaguaa

SEQ ID NO: 597958 - RNA, 19 nt, Human
uuuuguguagcugcugguu

SEQ ID NO: 597959 - RNA, 22 nt, Human
cgaggccaugcaugcugaggac

SEQ ID NO: 597960 - RNA, 19 nt, Human
ggagaagcaucuagaaaua

SEQ ID NO: 597961 - RNA, 19 nt, Human
ucucagaauuaagagugcu

SEQ ID NO: 597962 - RNA, 22 nt, Human
ucugcugaggccuucccacucc

SEQ ID NO: 597963 - RNA, 22 nt, Human
uuccuuucccuugcuucugugc

SEQ ID NO: 597964 - RNA, 19 nt, Human
uugaaagauuagcuuucua

SEQ ID NO: 597965 - RNA, 22 nt, Human
auaaagcagguccccagacacu

SEQ ID NO: 597966 - RNA, 22 nt, Human
ccaggguuggaugagucacuua

SEQ ID NO: 597967 - RNA, 22 nt, Human
ugugccuucucaguccugcuca

SEQ ID NO: 597968 - RNA, 22 nt, Human
ugcuucuggaguaacaggguga

SEQ ID NO: 597969 - RNA, 22 nt, Human
aauuagcuuuccgccaucacac

SEQ ID NO: 597970 - RNA, 22 nt, Human
aggcagcguagcaaggcuagua

SEQ ID NO: 597971 - RNA, 22 nt, Human
ucauugaauuugguucaauaug

SEQ ID NO: 597972 - RNA, 22 nt, Human
uuguggcagaccaugagucuaa

SEQ ID NO: 597973 - RNA, 22 nt, Human
ucagaacauuacauuuugagcu

SEQ ID NO: 597974 - RNA, 22 nt, Human
uuguuuuaucuuucuacagacu

SEQ ID NO: 597975 - RNA, 22 nt, Human
uucccuccgaaccucagugcug

SEQ ID NO: 597976 - RNA, 22 nt, Human
aggguuuucauuucugagcauu

SEQ ID NO: 597977 - RNA, 22 nt, Human
agaagccaccagcugaggaaga

SEQ ID NO: 597978 - RNA, 22 nt, Human
uuucaaaguggagaauuagaca

SEQ ID NO: 597979 - RNA, 22 nt, Human
uucacaauuaacuuuauacuua

SEQ ID NO: 597980 - RNA, 22 nt, Human
cuccagcuuuuucccaguuggc

SEQ ID NO: 597981 - RNA, 22 nt, Human
uuauuuauggcacuguuggugg

SEQ ID NO: 597982 - RNA, 16 nt, Human
uguaggauaaccauac

SEQ ID NO: 597983 - RNA, 17 nt, Human
cugcuuugugcaacgcu

SEQ ID NO: 597984 - RNA, 22 nt, Human
cagggugacugcccuggccacu

SEQ ID NO: 597985 - RNA, 23 nt, Human
uccagggcaguggcugggucugc

SEQ ID NO: 597986 - RNA, 22 nt, Human
caggcuggucccagagcauugc

SEQ ID NO: 597987 - RNA, 22 nt, Human
auucaguguuugcagcaacuuu

SEQ ID NO: 597988 - RNA, 22 nt, Human
gauuucaaggaguuuucacagu

SEQ ID NO: 597989 - RNA, 22 nt, Human
cagaaaccucccugaauauuuu

SEQ ID NO: 597990 - RNA, 22 nt, Human
acaauucugaugguuucccagu

SEQ ID NO: 597991 - RNA, 18 nt, Human
uccucucuuuccccaggg

SEQ ID NO: 597992 - RNA, 22 nt, Human
ucaauucugccucuaaauauuu

SEQ ID NO: 597993 - RNA, 21 nt, Human
aguguguguggaaugagaaua

SEQ ID NO: 597994 - RNA, 22 nt, Human
uguguacauaucuauccuagau

SEQ ID NO: 597995 - RNA, 22 nt, Human
uuucauaauauccagagauuuu

SEQ ID NO: 597996 - RNA, 23 nt, Human
ccuucagaagaaguaacaggggc

SEQ ID NO: 597997 - RNA, 22 nt, Human
uccagauggauuuaagaccuaa

SEQ ID NO: 597998 - RNA, 22 nt, Human
acagcaggauuuggcgauguug

SEQ ID NO: 597999 - RNA, 22 nt, Human
ucuucaaguuccaaagugcagg

SEQ ID NO: 598000 - RNA, 23 nt, Human
aaguuguuuuuggccagggaaag

SEQ ID NO: 598001 - RNA, 22 nt, Human
acucugcuuauugcugcaggca

SEQ ID NO: 598002 - RNA, 22 nt, Human
ccugucaguugcugucagggau

SEQ ID NO: 598003 - RNA, 22 nt, Human
ucuucugugaucuauguguuuu

SEQ ID NO: 598004 - RNA, 22 nt, Human
guggggucucucuguaccuccc

SEQ ID NO: 598005 - RNA, 22 nt, Human
aacuguuacauaguuauagauc

SEQ ID NO: 598006 - RNA, 22 nt, Human
gcugcagugagccaagaucgug

SEQ ID NO: 598007 - RNA, 22 nt, Human
ugagcugggaagagcagccaga

SEQ ID NO: 598008 - RNA, 22 nt, Human
uccugaggacccugucaggggc

SEQ ID NO: 598009 - RNA, 22 nt, Human
agggccagcagcuuggccaacc

SEQ ID NO: 598010 - RNA, 22 nt, Human
ucugaggucauaaagcaacuuu

SEQ ID NO: 598011 - RNA, 22 nt, Human
uacagccucgaacuccugcauu

SEQ ID NO: 598012 - RNA, 22 nt, Human
aguacaaaaugcagcaucauca

SEQ ID NO: 598013 - RNA, 22 nt, Human
cacuuuacccuuguuacucaug

SEQ ID NO: 598014 - RNA, 22 nt, Human
augugauucccacugaaucacu

SEQ ID NO: 598015 - RNA, 22 nt, Human
uuacaguuagaaucugaugaaa

SEQ ID NO: 598016 - RNA, 22 nt, Human
cagguaggauggaagggcucaa

SEQ ID NO: 598017 - RNA, 22 nt, Human
cccaggcuagaaaggccaacaa

SEQ ID NO: 598018 - RNA, 22 nt, Human
cucccucucaccggagcccugg

SEQ ID NO: 598019 - RNA, 22 nt, Human
ucaccaggcuccuguuaagaug

SEQ ID NO: 598020 - RNA, 22 nt, Human
uggcuggagucuggugcuagcc

SEQ ID NO: 598021 - RNA, 22 nt, Human
uaagauaauaccaugggccagg

SEQ ID NO: 598022 - RNA, 22 nt, Human
uuuuccuguccaggcaauuauu

SEQ ID NO: 598023 - RNA, 22 nt, Human
uucucucuuacugccaugcugu

SEQ ID NO: 598024 - RNA, 22 nt, Human
gugcauauuuugcacacagaug

SEQ ID NO: 598025 - RNA, 21 nt, Human
ucuguacaucauugagucccc

SEQ ID NO: 598026 - RNA, 22 nt, Human
gacugaggugcccagaggugac

SEQ ID NO: 598027 - RNA, 22 nt, Human
acccagagcagagcuuggcuuc

SEQ ID NO: 598028 - RNA, 22 nt, Human
ugcccuguuaucuuggaagagu

SEQ ID NO: 598029 - RNA, 22 nt, Human
uggcugagaaaaugguuuuagg

SEQ ID NO: 598030 - RNA, 22 nt, Human
gaguuacauucauuguuacgcu

SEQ ID NO: 598031 - RNA, 22 nt, Human
uggcccaaagcagcccagcagg

SEQ ID NO: 598032 - RNA, 22 nt, Human
caguuucugagcccugucauuu

SEQ ID NO: 598033 - RNA, 22 nt, Human
caggcagcugacugucagauau

SEQ ID NO: 598034 - RNA, 22 nt, Human
agaaacagcauuagcaucaauu

SEQ ID NO: 598035 - RNA, 22 nt, Human
uugcacuagacacauuucaagu

SEQ ID NO: 598036 - RNA, 22 nt, Human
uuaaucuuauauguaaagguaa

SEQ ID NO: 598037 - RNA, 22 nt, Human
guccugugcccuggguggcgcu

SEQ ID NO: 598038 - RNA, 22 nt, Human
aaagcaaugaugguagacacgu

SEQ ID NO: 598039 - RNA, 22 nt, Human
cacacaugugugcagcuuagaa

SEQ ID NO: 598040 - RNA, 22 nt, Human
uugaccauaccuccaggcaguu

SEQ ID NO: 598041 - RNA, 22 nt, Human
caaaucacaaugugagacugag

SEQ ID NO: 598042 - RNA, 22 nt, Human
caaguuaauugguauuuugauc

SEQ ID NO: 598043 - RNA, 22 nt, Human
gagcuggugcucuugucaagac

SEQ ID NO: 598044 - RNA, 22 nt, Human
auucaucaacugauagccauag

SEQ ID NO: 598045 - RNA, 22 nt, Human
ucugagucuuggggucccuauu

SEQ ID NO: 598046 - RNA, 22 nt, Human
ccugggcuuucggcggcuuccu

SEQ ID NO: 598047 - RNA, 22 nt, Human
aaauucacucuguuccucaugg

SEQ ID NO: 598048 - RNA, 22 nt, Human
accagcucuucugcucuaguug

SEQ ID NO: 598049 - RNA, 20 nt, Human
cccagagccauagccagaca

SEQ ID NO: 598050 - RNA, 22 nt, Human
uacaagaaugucuuaaaagcuc

SEQ ID NO: 598051 - RNA, 20 nt, Human
ggccacagggugcuggugga

SEQ ID NO: 598052 - RNA, 22 nt, Human
uuaagacuuuucaaaggcaaac

SEQ ID NO: 598053 - RNA, 22 nt, Human
uccaggcuggaaaugucaaacu

SEQ ID NO: 598054 - RNA, 23 nt, Human
gcugagguacauuuacaggaaga

SEQ ID NO: 598055 - RNA, 22 nt, Human
agagacagacacaucgggcugc

SEQ ID NO: 598056 - RNA, 22 nt, Human
ccugggcuuacgaccucugacu

SEQ ID NO: 598057 - RNA, 22 nt, Human
cucugggacaucccuuggccua

SEQ ID NO: 598058 - RNA, 22 nt, Human
agggucugaccaccaguaggga

SEQ ID NO: 598059 - RNA, 22 nt, Human
cccaggcuucccaaucagaagg

SEQ ID NO: 598060 - RNA, 22 nt, Human
uacugugucuuaggauguggaa

SEQ ID NO: 598061 - RNA, 22 nt, Human
ggagaagccacacauugggugu

SEQ ID NO: 598062 - RNA, 22 nt, Human
uccuucaccuuagcccuccuag

SEQ ID NO: 598063 - RNA, 22 nt, Human
cuccauggaaccggggcugcuu

SEQ ID NO: 598064 - RNA, 22 nt, Human
acugugcacacaaaaauagauu

SEQ ID NO: 598065 - RNA, 22 nt, Human
aaacuuuaagacaguccucaag

SEQ ID NO: 598066 - RNA, 22 nt, Human
auaaugcauuuagaauaauuca

SEQ ID NO: 598067 - RNA, 22 nt, Human
uguguuuuaaauggaaauuuga

SEQ ID NO: 598068 - RNA, 22 nt, Human
ucucuguaucagcaccugcugg

SEQ ID NO: 598069 - RNA, 22 nt, Human
cugggcugauuuagucacguuu

SEQ ID NO: 598070 - RNA, 22 nt, Human
agccacagcgaaccucucuucc

SEQ ID NO: 598071 - RNA, 22 nt, Human
cuaauguaucauggcucucagc

SEQ ID NO: 598072 - RNA, 21 nt, Human
cugagggccgcagcugggcuc

SEQ ID NO: 598073 - RNA, 22 nt, Human
uucaaaaguaaucaguauuaga

SEQ ID NO: 598074 - RNA, 22 nt, Human
gcaguccugggauucuguccuu

SEQ ID NO: 598075 - RNA, 22 nt, Human
gcuuuugucauucaaaugcucu

SEQ ID NO: 598076 - RNA, 22 nt, Human
aacauagcuuuacucaaaugac

SEQ ID NO: 598077 - RNA, 22 nt, Human
gggcuggcaggaccugggcuga

SEQ ID NO: 598078 - RNA, 22 nt, Human
augcagcucauuuguuuaaaag

SEQ ID NO: 598079 - RNA, 22 nt, Human
aaacacauuagcccuguggaaa

SEQ ID NO: 598080 - RNA, 22 nt, Human
gaugcgggcccgcuccacugcc

SEQ ID NO: 598081 - RNA, 19 nt, Human
ucaguaacuuuuaagagga

SEQ ID NO: 598082 - RNA, 22 nt, Human
ugucacaaggccaugaaaagaa

SEQ ID NO: 598083 - RNA, 22 nt, Human
auguuugucccugacauccucu

SEQ ID NO: 598084 - RNA, 22 nt, Human
cugagguaauuuuccagauaau

SEQ ID NO: 598085 - RNA, 22 nt, Human
gagggaggggagcuccacccuc

SEQ ID NO: 598086 - RNA, 22 nt, Human
ggggaggaagcucucaguucca

SEQ ID NO: 598087 - RNA, 22 nt, Human
gaggcacugagagugggggaug

SEQ ID NO: 598088 - RNA, 22 nt, Human
uacuguuuucuauaauggcugu

SEQ ID NO: 598089 - RNA, 22 nt, Human
ccugccuggcacauaguacucu

SEQ ID NO: 598090 - RNA, 22 nt, Human
agcaggaaguagucuguaagca

SEQ ID NO: 598091 - RNA, 22 nt, Human
uaaagguuauaaagguuagggg

SEQ ID NO: 598092 - RNA, 22 nt, Human
aaggccagauucacuuuacaau

SEQ ID NO: 598093 - RNA, 22 nt, Human
uaagaggauauuuggccagaag

SEQ ID NO: 598094 - RNA, 22 nt, Human
gcacccaggcacuuuccuuucu

SEQ ID NO: 598095 - RNA, 22 nt, Human
caggucagagguagaugagaug

SEQ ID NO: 598096 - RNA, 22 nt, Human
gccagccaguuugcugauggcu

SEQ ID NO: 598097 - RNA, 22 nt, Human
agccucaguuucaggccuccuc

SEQ ID NO: 598098 - RNA, 22 nt, Human
ggaacacugccuuuuauuuucc

SEQ ID NO: 598099 - RNA, 22 nt, Human
ugucucaagguuacucuaugau

SEQ ID NO: 598100 - RNA, 19 nt, Human
gggguggcuggggcuccag

SEQ ID NO: 598101 - RNA, 22 nt, Human
uaaaugcagcaguuucuguucu

SEQ ID NO: 598102 - RNA, 22 nt, Human
ucacccaggcugguaugcagug

SEQ ID NO: 598103 - RNA, 22 nt, Human
agcaagaugcauuauuucuuau

SEQ ID NO: 598104 - RNA, 22 nt, Human
gagauuagaguuguuucauugu

SEQ ID NO: 598105 - RNA, 22 nt, Human
gcaugcacaguuuuucaccuca

SEQ ID NO: 598106 - RNA, 22 nt, Human
uuuauccauucaccaguugaac

SEQ ID NO: 598107 - RNA, 22 nt, Human
uauuugaugguucuaaaacagc

SEQ ID NO: 598108 - RNA, 22 nt, Human
agucuuaugguuaaauagaugc

SEQ ID NO: 598109 - RNA, 22 nt, Human
uucaauuugugcuaaggcaccg

SEQ ID NO: 598110 - RNA, 22 nt, Human
uagaaucuggaaggggcuauuc

SEQ ID NO: 598111 - RNA, 22 nt, Human
uugcuuauagagaguuucauac

SEQ ID NO: 598112 - RNA, 22 nt, Human
auacuuuagagcuagauugccu

SEQ ID NO: 598113 - RNA, 22 nt, Human
acacaucagccucagcuuuggg

SEQ ID NO: 598114 - RNA, 22 nt, Human
guaggcagaccaguggaugggu

SEQ ID NO: 598115 - RNA, 22 nt, Human
ucauuucagaugcauuuagaau

SEQ ID NO: 598116 - RNA, 22 nt, Human
uaauguuacacugcaugguuca

SEQ ID NO: 598117 - RNA, 22 nt, Human
ucagaaaccagcucucucaauu

SEQ ID NO: 598118 - RNA, 22 nt, Human
gaaaauuucugccacaugugug

SEQ ID NO: 598119 - RNA, 22 nt, Human
acacacuucagauguaauuugu

SEQ ID NO: 598120 - RNA, 22 nt, Human
uucucuguuuuccccucgaugu

SEQ ID NO: 598121 - RNA, 22 nt, Human
cagcugccacaggacuuucuga

SEQ ID NO: 598122 - RNA, 22 nt, Human
gcugagggggaaggaaagcuga

SEQ ID NO: 598123 - RNA, 22 nt, Human
cagacccaggauccaaauguug

SEQ ID NO: 598124 - RNA, 22 nt, Human
ucuguacaugaguugagaauca

SEQ ID NO: 598125 - RNA, 22 nt, Human
cagcuuuagagaaaacauauuu

SEQ ID NO: 598126 - RNA, 22 nt, Human
ugaaauucauuguuuuaugugu

SEQ ID NO: 598127 - RNA, 22 nt, Human
agagcuguagcuuccuagagcc

SEQ ID NO: 598128 - RNA, 22 nt, Human
ccaggagugcagggaugguauc

SEQ ID NO: 598129 - RNA, 22 nt, Human
gccucagcucccagcccaggcu

SEQ ID NO: 598130 - RNA, 22 nt, Human
caaggccagagccagcgauaag

SEQ ID NO: 598131 - RNA, 22 nt, Human
uguuuccuaagugucucugaag

SEQ ID NO: 598132 - RNA, 19 nt, Human
ucccuggcgccucucgggc

SEQ ID NO: 598133 - RNA, 22 nt, Human
gcucucuuuuuccagugguggu

SEQ ID NO: 598134 - RNA, 22 nt, Human
auuaaaagagauaauguguguu

SEQ ID NO: 598135 - RNA, 22 nt, Human
caggcaccaacuuccuggggag

SEQ ID NO: 598136 - RNA, 22 nt, Human
uauguacaugauuucauuugcu

SEQ ID NO: 598137 - RNA, 22 nt, Human
gucccucugcucuagagagcca

SEQ ID NO: 598138 - RNA, 22 nt, Human
gucaucauuuuuagcauauggg

SEQ ID NO: 598139 - RNA, 22 nt, Human
cuuacacuucaucucauccagg

SEQ ID NO: 598140 - RNA, 22 nt, Human
ucuuccagaaugcauucucuuu

SEQ ID NO: 598141 - RNA, 22 nt, Human
ccucagggucugaggagaccgu

SEQ ID NO: 598142 - RNA, 22 nt, Human
ucacagcaccaggaucucucca

SEQ ID NO: 598143 - RNA, 21 nt, Human
aaacugaccuugccugagaca

SEQ ID NO: 598144 - RNA, 19 nt, Human
caguuuguccagaggggac

SEQ ID NO: 598145 - RNA, 22 nt, Human
aguuacaaacacuaucaguucu

SEQ ID NO: 598146 - RNA, 19 nt, Human
ugaggggcucacagucuca

SEQ ID NO: 598147 - RNA, 22 nt, Human
aggccugcugucuugaggccaa

SEQ ID NO: 598148 - RNA, 22 nt, Human
uuguuuucuccacugcaucuua

SEQ ID NO: 598149 - RNA, 22 nt, Human
cagucugggacugagcuccacc

SEQ ID NO: 598150 - RNA, 18 nt, Human
uggcucugcagccagaug

SEQ ID NO: 598151 - RNA, 22 nt, Human
gcagagcuucuguccuucagga

SEQ ID NO: 598152 - RNA, 22 nt, Human
aguuauaaaaggagcacugauu

SEQ ID NO: 598153 - RNA, 22 nt, Human
guugucaucaccguuguuauca

SEQ ID NO: 598154 - RNA, 22 nt, Human
aggguuaauugguguccugagg

SEQ ID NO: 598155 - RNA, 22 nt, Human
caccagcuacagacuacugugu

SEQ ID NO: 598156 - RNA, 22 nt, Human
agcucuggaauaaugaugugau

SEQ ID NO: 598157 - RNA, 22 nt, Human
acacaguaaauauguauugaau

SEQ ID NO: 598158 - RNA, 22 nt, Human
acaaacugaauggguuuucugu

SEQ ID NO: 598159 - RNA, 22 nt, Human
guuuacauguacucauuauacu

SEQ ID NO: 598160 - RNA, 22 nt, Human
cagccuucgacaguuggaguag

SEQ ID NO: 598161 - RNA, 22 nt, Human
uaacagaaaggggacagaaaua

SEQ ID NO: 598162 - RNA, 23 nt, Human
aagcaaugcugagccaguucuga

SEQ ID NO: 598163 - RNA, 17 nt, Human
caguuggagacaagucc

SEQ ID NO: 598164 - RNA, 22 nt, Human
cuuucugaaguuuaaguucuaa

SEQ ID NO: 598165 - RNA, 22 nt, Human
ucuaagacacuguacuuucagu

SEQ ID NO: 598166 - RNA, 22 nt, Human
uuauugcagauggugugagaga

SEQ ID NO: 598167 - RNA, 22 nt, Human
gggguagggcgauugcugcuuu

SEQ ID NO: 598168 - RNA, 22 nt, Human
gccugagcuacuagggagucug

SEQ ID NO: 598169 - RNA, 22 nt, Human
aguggaggcacuaauuggauuu

SEQ ID NO: 598170 - RNA, 22 nt, Human
ggcugaggggcccagaggaaca

SEQ ID NO: 598171 - RNA, 22 nt, Human
gcuguacaguuuacuagguggg

SEQ ID NO: 598172 - RNA, 22 nt, Human
uguauuuaauuguaucaucaca

SEQ ID NO: 598173 - RNA, 22 nt, Human
gcaguaaguuaauagugcuggu

SEQ ID NO: 598174 - RNA, 22 nt, Human
ggaaacuuggaugccagcacuc

SEQ ID NO: 598175 - RNA, 22 nt, Human
agcagagucuucaagggcaggc

SEQ ID NO: 598176 - RNA, 19 nt, Human
aguuaaugagcuuuugauc

SEQ ID NO: 598177 - RNA, 22 nt, Human
uggcucagauuuuuguaggcuu

SEQ ID NO: 598178 - RNA, 22 nt, Human
uucauguguauggaacauuuuu

SEQ ID NO: 598179 - RNA, 20 nt, Human
caaggggaguaguaugggcc

SEQ ID NO: 598180 - RNA, 22 nt, Human
aauguuacgaucaacaacacau

SEQ ID NO: 598181 - RNA, 22 nt, Human
cagagagcacauaggauacuuu

SEQ ID NO: 598182 - RNA, 22 nt, Human
gcagaggagcaagcuggacacc

SEQ ID NO: 598183 - RNA, 22 nt, Human
ggcugagcucaggggcagcagg

SEQ ID NO: 598184 - RNA, 22 nt, Human
cccuccagccauggacccaggu

SEQ ID NO: 598185 - RNA, 22 nt, Human
uccuggugccuggagcucucca

SEQ ID NO: 598186 - RNA, 22 nt, Human
aagaguuucuuuauuaaccuuu

SEQ ID NO: 598187 - RNA, 22 nt, Human
uccugcuggaaguagggaauga

SEQ ID NO: 598188 - RNA, 22 nt, Human
gagugugggcacgggggccuug

SEQ ID NO: 598189 - RNA, 22 nt, Human
uggaacaagaagcaggucgcuu

SEQ ID NO: 598190 - RNA, 22 nt, Human
auggcaccuuccccagagcuca

SEQ ID NO: 598191 - RNA, 22 nt, Human
ucagaggcuugaagcccaagcc

SEQ ID NO: 598192 - RNA, 22 nt, Human
ccucccacauugaggacaugcu

SEQ ID NO: 598193 - RNA, 20 nt, Human
uccuccagaagggcagggug

SEQ ID NO: 598194 - RNA, 22 nt, Human
gaaauguaugucuucccccauu

SEQ ID NO: 598195 - RNA, 22 nt, Human
ucuacccugcggucuuggggca

SEQ ID NO: 598196 - RNA, 22 nt, Human
ggguggagaggcuaaguccagu

SEQ ID NO: 598197 - RNA, 22 nt, Human
cucauggagggagugcucuucc

SEQ ID NO: 598198 - RNA, 22 nt, Human
uuuugccuaagaaucucucuga

SEQ ID NO: 598199 - RNA, 22 nt, Human
augcucauuuuauugagaauga

SEQ ID NO: 598200 - RNA, 22 nt, Human
auggcuuggcaccaucuccuug

SEQ ID NO: 598201 - RNA, 22 nt, Human
uaucuuuagaggaagagaaucu

SEQ ID NO: 598202 - RNA, 22 nt, Human
uaacacuauccagauaugauaa

SEQ ID NO: 598203 - RNA, 22 nt, Human
gagcuggaagucuguggucaga

SEQ ID NO: 598204 - RNA, 22 nt, Human
aguaacaggguauuuguguggg

SEQ ID NO: 598205 - RNA, 22 nt, Human
gggaggcucagugguguccucu

SEQ ID NO: 598206 - RNA, 22 nt, Human
augggagaaacaucaugaggca

SEQ ID NO: 598207 - RNA, 22 nt, Human
gcaguguguggugagggcugcc

SEQ ID NO: 598208 - RNA, 22 nt, Human
gcuucugucuuagcuaccuccc

SEQ ID NO: 598209 - RNA, 22 nt, Human
guguccuguuucccugucuaua

SEQ ID NO: 598210 - RNA, 22 nt, Human
agacacugagcauuuuccuagc

SEQ ID NO: 598211 - RNA, 22 nt, Human
ucucugaguaagugacaguuca

SEQ ID NO: 598212 - RNA, 22 nt, Human
acacuuugcuacauuucauauu

SEQ ID NO: 598213 - RNA, 22 nt, Human
uugucugacuucuuuaguuacu

SEQ ID NO: 598214 - RNA, 22 nt, Human
gccugaccucuucugcccuggg

SEQ ID NO: 598215 - RNA, 22 nt, Human
ucuaggaaagccuuucacaacu

SEQ ID NO: 598216 - RNA, 21 nt, Human
gagaaucaggaaggauugaug

SEQ ID NO: 598217 - RNA, 22 nt, Human
gccuucaggaggguuccagaca

SEQ ID NO: 598218 - RNA, 22 nt, Human
gcguggcuuagagugggguacc

SEQ ID NO: 598219 - RNA, 22 nt, Human
cccugcagaucagugagaacuu

SEQ ID NO: 598220 - RNA, 22 nt, Human
ccagaugggaagaagcaugacu

SEQ ID NO: 598221 - RNA, 22 nt, Human
ugguccauguccuccaucucuc

SEQ ID NO: 598222 - RNA, 22 nt, Human
uucaacaaggcugucaaaaguu

SEQ ID NO: 598223 - RNA, 22 nt, Human
uagacacuuuagaaguaagggu

SEQ ID NO: 598224 - RNA, 22 nt, Human
acacugcagaugaaagcauaag

SEQ ID NO: 598225 - RNA, 22 nt, Human
gucaggaucaaauugaaguuau

SEQ ID NO: 598226 - RNA, 22 nt, Human
agccaggguuagaagauaguca

SEQ ID NO: 598227 - RNA, 16 nt, Human
gcacacacaucaauga

SEQ ID NO: 598228 - RNA, 22 nt, Human
gucaauaauugauagauauugg

SEQ ID NO: 598229 - RNA, 22 nt, Human
caguuuuauugguugaaaucug

SEQ ID NO: 598230 - RNA, 22 nt, Human
ucccagccuuccuuguggugaa

SEQ ID NO: 598231 - RNA, 21 nt, Human
acagaaguggcuuggucucag

SEQ ID NO: 598232 - RNA, 20 nt, Human
agcugcccuuuucacauguu

SEQ ID NO: 598233 - RNA, 21 nt, Human
cccuucuugggucaaaguaua

SEQ ID NO: 598234 - RNA, 22 nt, Human
guccugguccugccuccccaug

SEQ ID NO: 598235 - RNA, 22 nt, Human
ugcuucagaggaaaggcaaaag

SEQ ID NO: 598236 - RNA, 22 nt, Human
uaauauaccaaacuguaauuuu

SEQ ID NO: 598237 - RNA, 22 nt, Human
ucaagguucaaggcuggcuucu

SEQ ID NO: 598238 - RNA, 22 nt, Human
uccaggagugcugguuagagua

SEQ ID NO: 598239 - RNA, 22 nt, Human
cuggcucauuuuagcaucaggu

SEQ ID NO: 598240 - RNA, 22 nt, Human
uggcuccacaggccagggugug

SEQ ID NO: 598241 - RNA, 22 nt, Human
gccugcuuuaagucuguugccu

SEQ ID NO: 598242 - RNA, 23 nt, Human
agagcuuagggaauucacaugag

SEQ ID NO: 598243 - RNA, 22 nt, Human
auacaucuugucagauucaugu

SEQ ID NO: 598244 - RNA, 22 nt, Human
cuccugggagucuuccuggaug

SEQ ID NO: 598245 - RNA, 22 nt, Human
caggagacucagcauccaggau

SEQ ID NO: 598246 - RNA, 22 nt, Human
agaugcagaaaaacuaagugau

SEQ ID NO: 598247 - RNA, 22 nt, Human
acccaggcuggagugcaguggu

SEQ ID NO: 598248 - RNA, 22 nt, Human
gcagggcugggacuuacuggua

SEQ ID NO: 598249 - RNA, 22 nt, Human
cacuuaaaacuccuggaauugu

SEQ ID NO: 598250 - RNA, 21 nt, Human
cagugccagccacaggacgcc

SEQ ID NO: 598251 - RNA, 22 nt, Human
aguuucuuggucacaguuuuca

SEQ ID NO: 598252 - RNA, 23 nt, Human
cugcagccgcguggggacgugga

SEQ ID NO: 598253 - RNA, 22 nt, Human
uucagcagcuuuuaguacauug

SEQ ID NO: 598254 - RNA, 22 nt, Human
cuccuggcacucaguguggaag

SEQ ID NO: 598255 - RNA, 21 nt, Human
uggcacagaaaggaaaguuca

SEQ ID NO: 598256 - RNA, 22 nt, Human
uucuuaaagaggcaaaacacag

SEQ ID NO: 598257 - RNA, 22 nt, Human
cuggcucaggguggucuggguc

SEQ ID NO: 598258 - RNA, 22 nt, Human
gcuacaggagauaaaggccucu

SEQ ID NO: 598259 - RNA, 22 nt, Human
gacaggacuucacuguguugcc

SEQ ID NO: 598260 - RNA, 22 nt, Human
acuccaggcaucugcuucugcu

SEQ ID NO: 598261 - RNA, 22 nt, Human
uauuuaacuggaaacacaauga

SEQ ID NO: 598262 - RNA, 22 nt, Human
auauagaaggugcuauuuacau

SEQ ID NO: 598263 - RNA, 22 nt, Human
ugcaauaaggaguaauaguaaa

SEQ ID NO: 598264 - RNA, 22 nt, Human
uacagcuuugggaaggccccau

SEQ ID NO: 598265 - RNA, 22 nt, Human
gagaagguggaccugaaggagc

SEQ ID NO: 598266 - RNA, 22 nt, Human
ugugucuguuuugcucaccauu

SEQ ID NO: 598267 - RNA, 22 nt, Human
uaguccugaccuugccaccagc

SEQ ID NO: 598268 - RNA, 22 nt, Human
ugaagacagaccaaggagaaug

SEQ ID NO: 598269 - RNA, 22 nt, Human
auaguuugcuuuaauacaacug

SEQ ID NO: 598270 - RNA, 22 nt, Human
acuuagcaauuugauuaaaaga

SEQ ID NO: 598271 - RNA, 21 nt, Human
guacacacagguggaugggcu

SEQ ID NO: 598272 - RNA, 22 nt, Human
uuuaccauacaucaaaauauuu

SEQ ID NO: 598273 - RNA, 21 nt, Human
uuagcaaagcaaacacaugcu

SEQ ID NO: 598274 - RNA, 19 nt, Human
uagucuuuauucuuaauuu

SEQ ID NO: 598275 - RNA, 22 nt, Human
gguugcuggggguggcagagcu

SEQ ID NO: 598276 - RNA, 22 nt, Human
acagugcuuagcacagaguaga

SEQ ID NO: 598277 - RNA, 22 nt, Human
ugucuuuugccaaagaucaguu

SEQ ID NO: 598278 - RNA, 22 nt, Human
ucugugcagucagggcucaguc

SEQ ID NO: 598279 - RNA, 22 nt, Human
acucacagacugcagguuuauu

SEQ ID NO: 598280 - RNA, 22 nt, Human
ucaguggauuguagaaggcuua

SEQ ID NO: 598281 - RNA, 22 nt, Human
aggaauugagauccuagguuuu

SEQ ID NO: 598282 - RNA, 22 nt, Human
gcaggugaaugauggacuagga

SEQ ID NO: 598283 - RNA, 22 nt, Human
ggcagaguugguggagucaguu

SEQ ID NO: 598284 - RNA, 22 nt, Human
agggccaguggguugaaaggca

SEQ ID NO: 598285 - RNA, 22 nt, Human
cacaccagagguuaccugcaaa

SEQ ID NO: 598286 - RNA, 22 nt, Human
ugcaugcagcuggucgggcgcc

SEQ ID NO: 598287 - RNA, 22 nt, Human
gagugaggcuggaaucauggcu

SEQ ID NO: 598288 - RNA, 22 nt, Human
agaccuggagaccugaguggua

SEQ ID NO: 598289 - RNA, 21 nt, Human
ugagguaguguuugucaaguu

SEQ ID NO: 598290 - RNA, 22 nt, Human
ugccuggcaaugccagaagcca

SEQ ID NO: 598291 - RNA, 22 nt, Human
gguagggaaggcucugcgggga

SEQ ID NO: 598292 - RNA, 22 nt, Human
gggagggacacaaagaguuccc

SEQ ID NO: 598293 - RNA, 22 nt, Human
uuuaguguagcauucagaguca

SEQ ID NO: 598294 - RNA, 22 nt, Human
acugcagggcauccuggccaag

SEQ ID NO: 598295 - RNA, 22 nt, Human
gaaauucacuguauuucuuggg

SEQ ID NO: 598296 - RNA, 20 nt, Human
acaguguuagguuuuuccuu

SEQ ID NO: 598297 - RNA, 22 nt, Human
acauuagaugacucuuucuuuc

SEQ ID NO: 598298 - RNA, 22 nt, Human
cuuugccuccuagagcacguuc

SEQ ID NO: 598299 - RNA, 22 nt, Human
cagggcaggaugcugugauuau

SEQ ID NO: 598300 - RNA, 22 nt, Human
auuuaugagcugaaccaugaaa

SEQ ID NO: 598301 - RNA, 22 nt, Human
agcacacaggccaccuccacuu

SEQ ID NO: 598302 - RNA, 22 nt, Human
aucauggaaagguucagcaagc

SEQ ID NO: 598303 - RNA, 22 nt, Human
uggaaagaaaguaaaggcguau

SEQ ID NO: 598304 - RNA, 22 nt, Human
cagcuccccaugguuccugaag

SEQ ID NO: 598305 - RNA, 19 nt, Human
cccugaggcaaaagccuuu

SEQ ID NO: 598306 - RNA, 22 nt, Human
aaaaguuugugcaaacacucag

SEQ ID NO: 598307 - RNA, 19 nt, Human
uggucucugucucuuugca

SEQ ID NO: 598308 - RNA, 20 nt, Human
uuucugcagggagcugggcu

SEQ ID NO: 598309 - RNA, 22 nt, Human
aggaagaaaccuacuagaguuu

SEQ ID NO: 598310 - RNA, 22 nt, Human
ucauuaaucccgggguccaggg

SEQ ID NO: 598311 - RNA, 22 nt, Human
ucuacagagagucauagacuca

SEQ ID NO: 598312 - RNA, 22 nt, Human
uuucuguuuagcauaaaguggc

SEQ ID NO: 598313 - RNA, 22 nt, Human
uagucacaguacaggauaaaga

SEQ ID NO: 598314 - RNA, 22 nt, Human
caaagaaugagugaguacauaa

SEQ ID NO: 598315 - RNA, 22 nt, Human
ugaguuauauauacuggcucug

SEQ ID NO: 598316 - RNA, 22 nt, Human
cucuggguuuugucagcugagg

SEQ ID NO: 598317 - RNA, 22 nt, Human
uaggcacaaaaugaaaauggca

SEQ ID NO: 598318 - RNA, 22 nt, Human
gaacuguauaggagcaguguuu

SEQ ID NO: 598319 - RNA, 22 nt, Human
guggccagaagacugcaaugcu

SEQ ID NO: 598320 - RNA, 22 nt, Human
agacagaccauggcuauucaga

SEQ ID NO: 598321 - RNA, 22 nt, Human
uuucuacauuuguaaccagauu

SEQ ID NO: 598322 - RNA, 22 nt, Human
ucacauuuucauauucucugag

SEQ ID NO: 598323 - RNA, 22 nt, Human
aaauuucaguuggaaugagcuc

SEQ ID NO: 598324 - RNA, 17 nt, Human
gcaucacagauaacacg

SEQ ID NO: 598325 - RNA, 22 nt, Human
gccuggugucuccccaaggaag

SEQ ID NO: 598326 - RNA, 22 nt, Human
ggccagcauggcaagaccaacu

SEQ ID NO: 598327 - RNA, 23 nt, Human
aguucauaauuucuuauuugugu

SEQ ID NO: 598328 - RNA, 17 nt, Human
uggcuucaggcugagca

SEQ ID NO: 598329 - RNA, 22 nt, Human
gugcagguggauuugggcucaa

SEQ ID NO: 598330 - RNA, 22 nt, Human
ccacagugggcacagcaggacu

SEQ ID NO: 598331 - RNA, 22 nt, Human
guagacaagcacaggacucaga

SEQ ID NO: 598332 - RNA, 22 nt, Human
gagugggcaaaagaaaguaggc

SEQ ID NO: 598333 - RNA, 22 nt, Human
gguagcaagcgcuugcccugcg

SEQ ID NO: 598334 - RNA, 22 nt, Human
ggguggggccaggcaauuugca

SEQ ID NO: 598335 - RNA, 22 nt, Human
uauuucuuguuauucucguuga

SEQ ID NO: 598336 - RNA, 22 nt, Human
caugaacaaauucuguuugagg

SEQ ID NO: 598337 - RNA, 22 nt, Human
ggagacagugguagggccuaag

SEQ ID NO: 598338 - RNA, 22 nt, Human
aggcugaaaacgagauggcaau

SEQ ID NO: 598339 - RNA, 22 nt, Human
uuccuaauggcaaaacauguuu

SEQ ID NO: 598340 - RNA, 22 nt, Human
gggugagagucaggcagagauu

SEQ ID NO: 598341 - RNA, 19 nt, Human
cuuuucaagccaucaguuu

SEQ ID NO: 598342 - RNA, 20 nt, Human
ccagcugagccaaggggaga

SEQ ID NO: 598343 - RNA, 22 nt, Human
cuucugagggccuuugcuucca

SEQ ID NO: 598344 - RNA, 22 nt, Human
cuguucugcugcauaaaaacuu

SEQ ID NO: 598345 - RNA, 19 nt, Human
ccacaaaauuauuuuaguu

SEQ ID NO: 598346 - RNA, 22 nt, Human
gcccaggaguucaaggcugcag

SEQ ID NO: 598347 - RNA, 22 nt, Human
uuuucaugucauguccuugagg

SEQ ID NO: 598348 - RNA, 22 nt, Human
ugucauaacuuagugacaaauc

SEQ ID NO: 598349 - RNA, 22 nt, Human
auuuggaaggcguuucucugua

SEQ ID NO: 598350 - RNA, 22 nt, Human
aacuucauggguucaaagcugg

SEQ ID NO: 598351 - RNA, 22 nt, Human
uguggcauacacaugagguggu

SEQ ID NO: 598352 - RNA, 22 nt, Human
gcacacagaaucagugggcaua

SEQ ID NO: 598353 - RNA, 22 nt, Human
cuguggccagucccacaccucc

SEQ ID NO: 598354 - RNA, 22 nt, Human
cagcccuucuuccaaccagcuu

SEQ ID NO: 598355 - RNA, 22 nt, Human
cagcucuggccagaucuauccu

SEQ ID NO: 598356 - RNA, 22 nt, Human
aagggcuguaguuuguugauca

SEQ ID NO: 598357 - RNA, 22 nt, Human
ucuacaaagccauucaggaucu

SEQ ID NO: 598358 - RNA, 18 nt, Human
uccuaacuuagauacucc

SEQ ID NO: 598359 - RNA, 22 nt, Human
agaaaggucacuuagccucagc

SEQ ID NO: 598360 - RNA, 22 nt, Human
agaguguaccaaauauccuaca

SEQ ID NO: 598361 - RNA, 22 nt, Human
caaggcugcugcgggucgcacc

SEQ ID NO: 598362 - RNA, 22 nt, Human
uauccaaaguggcauauuauag

SEQ ID NO: 598363 - RNA, 22 nt, Human
aacuuuauuguuaggggcuaaa

SEQ ID NO: 598364 - RNA, 22 nt, Human
gagguccaggguggggccugag

SEQ ID NO: 598365 - RNA, 22 nt, Human
uguuuccuucugucucuuugga

SEQ ID NO: 598366 - RNA, 22 nt, Human
aagaguuugaccugugccaucc

SEQ ID NO: 598367 - RNA, 22 nt, Human
cuucucuguguagagauucaga

SEQ ID NO: 598368 - RNA, 21 nt, Human
agcugggccucagccugcagu

SEQ ID NO: 598369 - RNA, 22 nt, Human
aagccagauuucacucuuaauu

SEQ ID NO: 598370 - RNA, 22 nt, Human
cagcagugucuccagcaucaca

SEQ ID NO: 598371 - RNA, 22 nt, Human
uucccagagaaggaugaaaaag

SEQ ID NO: 598372 - RNA, 22 nt, Human
cagcucugguuccugggcccag

SEQ ID NO: 598373 - RNA, 22 nt, Human
aagaguuugggcaagucauaaa

SEQ ID NO: 598374 - RNA, 22 nt, Human
uugcugaaaagcuggccuuugu

SEQ ID NO: 598375 - RNA, 22 nt, Human
uccaggagauacacugcaccag

SEQ ID NO: 598376 - RNA, 22 nt, Human
aagagcugcccaaggugaacag

SEQ ID NO: 598377 - RNA, 22 nt, Human
agauauaguuguugagaagaac

SEQ ID NO: 598378 - RNA, 22 nt, Human
cugccugugccaaugcuccuuu

SEQ ID NO: 598379 - RNA, 22 nt, Human
agcaguggugugaggagggcuc

SEQ ID NO: 598380 - RNA, 22 nt, Human
cugggcacuuuggggagccuac

SEQ ID NO: 598381 - RNA, 22 nt, Human
ggagccugacagugcccagcau

SEQ ID NO: 598382 - RNA, 22 nt, Human
uguccuuuguucccugucucug

SEQ ID NO: 598383 - RNA, 22 nt, Human
ugaggccuggagggaggaguuu

SEQ ID NO: 598384 - RNA, 22 nt, Human
uugaaaggguuaaagugguaaa

SEQ ID NO: 598385 - RNA, 22 nt, Human
agcaagcuaacauaggagauug

SEQ ID NO: 598386 - RNA, 17 nt, Human
gagugcagacacaagca

SEQ ID NO: 598387 - RNA, 22 nt, Human
aggcccuggcccccagagauuc

SEQ ID NO: 598388 - RNA, 22 nt, Human
aggagcagaccguaguccugca

SEQ ID NO: 598389 - RNA, 22 nt, Human
cuuggcauguucaucugcuugg

SEQ ID NO: 598390 - RNA, 22 nt, Human
ggaaaauuuccuucaaaaugug

SEQ ID NO: 598391 - RNA, 19 nt, Human
cugggagguguucagagaa

SEQ ID NO: 598392 - RNA, 20 nt, Human
uacaagaauccccaguuguc

SEQ ID NO: 598393 - RNA, 22 nt, Human
cugcuuucuuguugcaucuuaa

SEQ ID NO: 598394 - RNA, 18 nt, Human
cugagggcaacagaggcu

SEQ ID NO: 598395 - RNA, 22 nt, Human
acuguacaaauauugcaaaaua

SEQ ID NO: 598396 - RNA, 22 nt, Human
caucuuuucagaagccauucug

SEQ ID NO: 598397 - RNA, 22 nt, Human
agaggcccucucucuccugaug

SEQ ID NO: 598398 - RNA, 22 nt, Human
cucaggaggugguagaggcccu

SEQ ID NO: 598399 - RNA, 22 nt, Human
auaagcauguuagaauauuuga

SEQ ID NO: 598400 - RNA, 22 nt, Human
gacuacaggccggcaucagaga

SEQ ID NO: 598401 - RNA, 20 nt, Human
gcuaccagaacaaggccauu

SEQ ID NO: 598402 - RNA, 22 nt, Human
gagcuggucgaaaugggcugac

SEQ ID NO: 598403 - RNA, 22 nt, Human
gagagcuguccggcugagcagc

SEQ ID NO: 598404 - RNA, 22 nt, Human
aaggaagauauaucaagcuuaa

SEQ ID NO: 598405 - RNA, 22 nt, Human
ccuggaaacacaugaugaugaa

SEQ ID NO: 598406 - RNA, 22 nt, Human
aaggcaaauguguucuuuuagu

SEQ ID NO: 598407 - RNA, 22 nt, Human
uggaggcaguaacugagcaaca

SEQ ID NO: 598408 - RNA, 22 nt, Human
caggaacagaguggcauugucu

SEQ ID NO: 598409 - RNA, 22 nt, Human
cagaggggcugacacccuuggc

SEQ ID NO: 598410 - RNA, 22 nt, Human
aaaggaggccacauggcuagga

SEQ ID NO: 598411 - RNA, 22 nt, Human
gucuuaaaaucagaggauauag

SEQ ID NO: 598412 - RNA, 22 nt, Human
agggccagggaaacgaucagca

SEQ ID NO: 598413 - RNA, 22 nt, Human
aaggcauguguccucagagaga

SEQ ID NO: 598414 - RNA, 22 nt, Human
guggggaaaggaguggggcuca

SEQ ID NO: 598415 - RNA, 22 nt, Human
aggcugagagcaacgugucaga

SEQ ID NO: 598416 - RNA, 22 nt, Human
cccacacauuuuucacuuaccg

SEQ ID NO: 598417 - RNA, 22 nt, Human
ccugucucuuucaaucugagag

SEQ ID NO: 598418 - RNA, 22 nt, Human
cugcucuggcuguguacuucag

SEQ ID NO: 598419 - RNA, 22 nt, Human
uggaggaaguggacaguugugu

SEQ ID NO: 598420 - RNA, 22 nt, Human
cugaagagaaagggagcucuuc

SEQ ID NO: 598421 - RNA, 22 nt, Human
uuagaguugaguuucuaugaga

SEQ ID NO: 598422 - RNA, 22 nt, Human
aguaccauuauccaguaaagga

SEQ ID NO: 598423 - RNA, 22 nt, Human
aggucagaugggagaugggaug

SEQ ID NO: 598424 - RNA, 22 nt, Human
ucacccagacugucugacucuu

SEQ ID NO: 598425 - RNA, 22 nt, Human
caggcagauuugcugcccucca

SEQ ID NO: 598426 - RNA, 22 nt, Human
augugcuuggacauucuaggaa

SEQ ID NO: 598427 - RNA, 22 nt, Human
uagaugcuacaauuuuguacuc

SEQ ID NO: 598428 - RNA, 22 nt, Human
caacauucaaccaacauuuaug

SEQ ID NO: 598429 - RNA, 22 nt, Human
agagcgcacugucugcaggcaa

SEQ ID NO: 598430 - RNA, 22 nt, Human
aggcuucaguuguaccuucuug

SEQ ID NO: 598431 - RNA, 22 nt, Human
guagaauuuuaauaauggagau

SEQ ID NO: 598432 - RNA, 22 nt, Human
uacuugcuggguguaauuuucu

SEQ ID NO: 598433 - RNA, 18 nt, Human
ugcccagaaaagcaggga

SEQ ID NO: 598434 - RNA, 23 nt, Human
agucagagagugugagacaacug

SEQ ID NO: 598435 - RNA, 22 nt, Human
uugagggaacaugagaaucauc

SEQ ID NO: 598436 - RNA, 22 nt, Human
aauuggcuuugugguuucugca

SEQ ID NO: 598437 - RNA, 19 nt, Human
ccugugcuaggagcugacc

SEQ ID NO: 598438 - RNA, 22 nt, Human
ucacuggggcccacaucaacau

SEQ ID NO: 598439 - RNA, 22 nt, Human
uuagucucuuugcauugccaua

SEQ ID NO: 598440 - RNA, 22 nt, Human
ggcucugguugaccaugauggc

SEQ ID NO: 598441 - RNA, 22 nt, Human
caggcaggagaggaggauuucu

SEQ ID NO: 598442 - RNA, 16 nt, Human
auuuccuugugaguuu

SEQ ID NO: 598443 - RNA, 18 nt, Human
uccaggcuccaggcuaac

SEQ ID NO: 598444 - RNA, 22 nt, Human
ggggcccuuguggcugcaggcc

SEQ ID NO: 598445 - RNA, 22 nt, Human
ucuaacuauacaaagaaaacau

SEQ ID NO: 598446 - RNA, 22 nt, Human
aucuuacaauuacaagacacuc

SEQ ID NO: 598447 - RNA, 22 nt, Human
ccaguguguucccugccucacu

SEQ ID NO: 598448 - RNA, 22 nt, Human
gugcaugaagacucagaaaguc

SEQ ID NO: 598449 - RNA, 22 nt, Human
gaaaaguauguuuauuuugacu

SEQ ID NO: 598450 - RNA, 22 nt, Human
uguggcaguauaagagcuagaa

SEQ ID NO: 598451 - RNA, 22 nt, Human
agggcagauggaacuuccccga

SEQ ID NO: 598452 - RNA, 22 nt, Human
auacuugagguuguauaaauau

SEQ ID NO: 598453 - RNA, 22 nt, Human
cagcaacuccuauauugaaagc

SEQ ID NO: 598454 - RNA, 22 nt, Human
aagggcuguuauguuuuuauac

SEQ ID NO: 598455 - RNA, 22 nt, Human
ucaaauaaugccauucaucauc

SEQ ID NO: 598456 - RNA, 22 nt, Human
cugcacagccugucugggggcc

SEQ ID NO: 598457 - RNA, 22 nt, Human
uguguucacccuagcacuuaac

SEQ ID NO: 598458 - RNA, 22 nt, Human
cagugucuuauuuguagcucag

SEQ ID NO: 598459 - RNA, 22 nt, Human
aaacuugauuuagaacuaaggc

SEQ ID NO: 598460 - RNA, 22 nt, Human
uuugaaagcaccauuugaguag

SEQ ID NO: 598461 - RNA, 22 nt, Human
auaaagcaaauaggacuauugc

SEQ ID NO: 598462 - RNA, 21 nt, Human
ugcaggaaguauggugccuau

SEQ ID NO: 598463 - RNA, 22 nt, Human
augucuaaaagauaaaguuuaa

SEQ ID NO: 598464 - RNA, 22 nt, Human
gcucaggaucagccaccucuuu

SEQ ID NO: 598465 - RNA, 22 nt, Human
uccuggugaggcuagaaguguc

SEQ ID NO: 598466 - RNA, 22 nt, Human
aggccgaaguggaugggcaucu

SEQ ID NO: 598467 - RNA, 23 nt, Human
ggggccugcaccggucugcgcgg

SEQ ID NO: 598468 - RNA, 22 nt, Human
uaccaaagaauauuuuaaauag

SEQ ID NO: 598469 - RNA, 22 nt, Human
ucugagacaggaaguggagggu

SEQ ID NO: 598470 - RNA, 21 nt, Human
aaauucaccuaguaaaacuuc

SEQ ID NO: 598471 - RNA, 22 nt, Human
ccacuggcugucagcaggacuc

SEQ ID NO: 598472 - RNA, 22 nt, Human
auugguaaaauucuucccauuu

SEQ ID NO: 598473 - RNA, 22 nt, Human
ugaagcaggaucguuugcuuca

SEQ ID NO: 598474 - RNA, 22 nt, Human
cagggagcuggcuggcugugcc

SEQ ID NO: 598475 - RNA, 22 nt, Human
gaggcagcagaacauggaagag

SEQ ID NO: 598476 - RNA, 22 nt, Human
aagucauugguagcuugauagg

SEQ ID NO: 598477 - RNA, 22 nt, Human
caggcugagcucuggccugggc

SEQ ID NO: 598478 - RNA, 22 nt, Human
ugggaggaucgcuugagcccag

SEQ ID NO: 598479 - RNA, 22 nt, Human
uuugauagggaaguaagaauga

SEQ ID NO: 598480 - RNA, 22 nt, Human
gaucacaguauuuuagaugugu

SEQ ID NO: 598481 - RNA, 19 nt, Human
uuucuguuugcuucugguu

SEQ ID NO: 598482 - RNA, 22 nt, Human
ugagauggguguccagggagga

SEQ ID NO: 598483 - RNA, 22 nt, Human
gaguuacacagaagucaguuug

SEQ ID NO: 598484 - RNA, 22 nt, Human
ccagggcaggggcuggaguuca

SEQ ID NO: 598485 - RNA, 22 nt, Human
uucucuggcgguguguuuuccu

SEQ ID NO: 598486 - RNA, 22 nt, Human
caggaggcaucauggagcggac

SEQ ID NO: 598487 - RNA, 23 nt, Human
uccccucaggcagccagugcccu

SEQ ID NO: 598488 - RNA, 22 nt, Human
aggcugguguguccugaagccu

SEQ ID NO: 598489 - RNA, 22 nt, Human
uaacugauguucccuuacugua

SEQ ID NO: 598490 - RNA, 22 nt, Human
cccaggcugccacgauuacugc

SEQ ID NO: 598491 - RNA, 21 nt, Human
gugcugaggauacaguaguaa

SEQ ID NO: 598492 - RNA, 22 nt, Human
cuuagcuucucugcaucugugu

SEQ ID NO: 598493 - RNA, 22 nt, Human
augggaguggaggaaaaaaguu

SEQ ID NO: 598494 - RNA, 22 nt, Human
cugcaaaagucauugugguuuu

SEQ ID NO: 598495 - RNA, 22 nt, Human
gcacaaacugcaauuacuuuug

SEQ ID NO: 598496 - RNA, 22 nt, Human
uguuuuauauaagcagagcggu

SEQ ID NO: 598497 - RNA, 22 nt, Human
ggcccugggaugcucagcagug

SEQ ID NO: 598498 - RNA, 22 nt, Human
cagaaauaaacuucucacaucg

SEQ ID NO: 598499 - RNA, 18 nt, Human
aguccuggcucuaccacc

SEQ ID NO: 598500 - RNA, 22 nt, Human
guggccagagauuaaauagagu

SEQ ID NO: 598501 - RNA, 18 nt, Human
uuucacaaccuccagagg

SEQ ID NO: 598502 - RNA, 22 nt, Human
uuggauaaaaauguuuaagugu

SEQ ID NO: 598503 - RNA, 22 nt, Human
uuugugauuaauuuucaaccuc

SEQ ID NO: 598504 - RNA, 22 nt, Human
gccuucccuggcuaggcaagca

SEQ ID NO: 598505 - RNA, 22 nt, Human
gaauuugcuuucgugacagggu

SEQ ID NO: 598506 - RNA, 22 nt, Human
aggacagagggaccagagccca

SEQ ID NO: 598507 - RNA, 22 nt, Human
cauaacuuuaaagacagugugg

SEQ ID NO: 598508 - RNA, 22 nt, Human
caagacaagaucuaagcaugcu

SEQ ID NO: 598509 - RNA, 22 nt, Human
uguaaacagccccauggagagc

SEQ ID NO: 598510 - RNA, 22 nt, Human
uuucuccuccagagagacacag

SEQ ID NO: 598511 - RNA, 22 nt, Human
uccaggggugauuuuugacuug

SEQ ID NO: 598512 - RNA, 22 nt, Human
gcaugcacaccugugcacauuu

SEQ ID NO: 598513 - RNA, 21 nt, Human
uagcaaagccagauguauauu

SEQ ID NO: 598514 - RNA, 23 nt, Human
aguuuuuaauggucauagcugag

SEQ ID NO: 598515 - RNA, 22 nt, Human
aaauucuggccuaucacaguga

SEQ ID NO: 598516 - RNA, 22 nt, Human
cacauucauggaguuugccugu

SEQ ID NO: 598517 - RNA, 22 nt, Human
agccaggccuuuucucaagguu

SEQ ID NO: 598518 - RNA, 22 nt, Human
uucacauuagugguucuauaua

SEQ ID NO: 598519 - RNA, 22 nt, Human
agaacacauagagaaguuuuau

SEQ ID NO: 598520 - RNA, 22 nt, Human
auguacauuuguaguaauauca

SEQ ID NO: 598521 - RNA, 22 nt, Human
cacaggagggagcgggcagcca

SEQ ID NO: 598522 - RNA, 23 nt, Human
agguuugucucagaggcagaguu

SEQ ID NO: 598523 - RNA, 22 nt, Human
auacagaagccuguauuucugg

SEQ ID NO: 598524 - RNA, 22 nt, Human
ccucagagguuuucauucugua

SEQ ID NO: 598525 - RNA, 22 nt, Human
ucaggcccuucucccaggacuc

SEQ ID NO: 598526 - RNA, 22 nt, Human
aaugcaaagugaggugaguggc

SEQ ID NO: 598527 - RNA, 22 nt, Human
cuccagcuuuagcucuccaggg

SEQ ID NO: 598528 - RNA, 22 nt, Human
uuaucuugguguuuuaguaauu

SEQ ID NO: 598529 - RNA, 22 nt, Human
cucaggucgcuauuucucuuac

SEQ ID NO: 598530 - RNA, 22 nt, Human
gacaguguuuguauaauuccug

SEQ ID NO: 598531 - RNA, 22 nt, Human
gccagcccauuaaccccugucc

SEQ ID NO: 598532 - RNA, 22 nt, Human
agcagcuguacuuucaucuguu

SEQ ID NO: 598533 - RNA, 22 nt, Human
cucauuagacagguauacuuua

SEQ ID NO: 598534 - RNA, 22 nt, Human
ugcugagucugaaacagcucag

SEQ ID NO: 598535 - RNA, 22 nt, Human
gaggagcugaggcugaggccuc

SEQ ID NO: 598536 - RNA, 22 nt, Human
ugcucuggacgcugagugguuu

SEQ ID NO: 598537 - RNA, 22 nt, Human
ggggccagcacugugccuuugu

SEQ ID NO: 598538 - RNA, 22 nt, Human
uaaguuuuaagcaaucugauaa

SEQ ID NO: 598539 - RNA, 21 nt, Human
ucugagaacuucugcugcagc

SEQ ID NO: 598540 - RNA, 22 nt, Human
aaaguccuagcgauccacagaa

SEQ ID NO: 598541 - RNA, 19 nt, Human
uuuuccuucuauauguuuc

SEQ ID NO: 598542 - RNA, 21 nt, Human
uucuccagggggagcucucuc

SEQ ID NO: 598543 - RNA, 22 nt, Human
cagaggcuggcggccgccccga

SEQ ID NO: 598544 - RNA, 22 nt, Human
agcccccaggagucuccacgcc

SEQ ID NO: 598545 - RNA, 22 nt, Human
aggggaagagcccuuuacaugg

SEQ ID NO: 598546 - RNA, 22 nt, Human
auugguuaccacuuuaaaucuu

SEQ ID NO: 598547 - RNA, 22 nt, Human
aggcuggagugugcaguggcgc

SEQ ID NO: 598548 - RNA, 22 nt, Human
uccugagaaggcacagcuugca

SEQ ID NO: 598549 - RNA, 19 nt, Human
ugucacugucauggcccag

SEQ ID NO: 598550 - RNA, 22 nt, Human
auguguguauauauagucauuu

SEQ ID NO: 598551 - RNA, 22 nt, Human
aaagagcuugcuugcuuuauau

SEQ ID NO: 598552 - RNA, 20 nt, Human
uuauuucaguugcuagauug

SEQ ID NO: 598553 - RNA, 22 nt, Human
ugccugaacaugaauaguuuau

SEQ ID NO: 598554 - RNA, 22 nt, Human
cugugaaacuggacagcacuug

SEQ ID NO: 598555 - RNA, 22 nt, Human
caggagcuucugcccauggcca

SEQ ID NO: 598556 - RNA, 22 nt, Human
cagaagaggacuggguagcuca

SEQ ID NO: 598557 - RNA, 23 nt, Human
agcuguguggccuugggcaaguu

SEQ ID NO: 598558 - RNA, 22 nt, Human
acugaugugauuucaaauucca

SEQ ID NO: 598559 - RNA, 22 nt, Human
gagaaccucuccacaagucugg

SEQ ID NO: 598560 - RNA, 22 nt, Human
auguguccacaggugugagaga

SEQ ID NO: 598561 - RNA, 22 nt, Human
gacagcagccacagggagaggg

SEQ ID NO: 598562 - RNA, 22 nt, Human
ggcagcaucucuggcagcagcu

SEQ ID NO: 598563 - RNA, 22 nt, Human
uagcugccuuugggcuccugcu

SEQ ID NO: 598564 - RNA, 22 nt, Human
aaauucauuuuucuuagugugc

SEQ ID NO: 598565 - RNA, 22 nt, Human
aaugauaccaaacauguagaua

SEQ ID NO: 598566 - RNA, 22 nt, Human
aaguuacuggcaagggcugcag

SEQ ID NO: 598567 - RNA, 22 nt, Human
auuuaagggauuuggagaccaa

SEQ ID NO: 598568 - RNA, 22 nt, Human
auugucacuuaaaagugcaugu

SEQ ID NO: 598569 - RNA, 22 nt, Human
caguuauaggagccauuguaua

SEQ ID NO: 598570 - RNA, 22 nt, Human
gaacuaaauuugacagacaaca

SEQ ID NO: 598571 - RNA, 18 nt, Human
cagauccaggcagcuauu

SEQ ID NO: 598572 - RNA, 22 nt, Human
ugcucuuaauuccauuagacuu

SEQ ID NO: 598573 - RNA, 22 nt, Human
uuuccuaaggcucauuuuaaaa

SEQ ID NO: 598574 - RNA, 22 nt, Human
uuaccugcaacucccaugguga

SEQ ID NO: 598575 - RNA, 22 nt, Human
ugggcagcagaaccaggccgac

SEQ ID NO: 598576 - RNA, 22 nt, Human
acagccuggccugaguuaaggc

SEQ ID NO: 598577 - RNA, 22 nt, Human
uggcuucuuagaccaguggccu

SEQ ID NO: 598578 - RNA, 20 nt, Human
ucaaggaaugucauuuuguu

SEQ ID NO: 598579 - RNA, 22 nt, Human
guaacauucuagaaacuuaaca

SEQ ID NO: 598580 - RNA, 22 nt, Human
cccagcuccagagccagaaaca

SEQ ID NO: 598581 - RNA, 22 nt, Human
cccaggagaccuagaucuguuu

SEQ ID NO: 598582 - RNA, 22 nt, Human
acaguucagacaaguguuccau

SEQ ID NO: 598583 - RNA, 22 nt, Human
gcacugggaaugcugaugggcu

SEQ ID NO: 598584 - RNA, 22 nt, Human
acagaguagcucaagaagauug

SEQ ID NO: 598585 - RNA, 22 nt, Human
aaugcagugagccauuaaaugg

SEQ ID NO: 598586 - RNA, 22 nt, Human
ugcauauauuugagauuauggc

SEQ ID NO: 598587 - RNA, 22 nt, Human
aaugucuuuugauacaaguuac

SEQ ID NO: 598588 - RNA, 16 nt, Human
agggccagaagcauca

SEQ ID NO: 598589 - RNA, 22 nt, Human
aagcuggggacucagaccccau

SEQ ID NO: 598590 - RNA, 22 nt, Human
acagugaaugcccaagaaaagu

SEQ ID NO: 598591 - RNA, 22 nt, Human
uucaaguacuguagauuucagg

SEQ ID NO: 598592 - RNA, 21 nt, Human
agggccugugcucuccagguc

SEQ ID NO: 598593 - RNA, 22 nt, Human
ggcaugggguguauguggcacg

SEQ ID NO: 598594 - RNA, 22 nt, Human
ggugacagcgggucaagaggag

SEQ ID NO: 598595 - RNA, 22 nt, Human
cccacuucaugggcaggaagga

SEQ ID NO: 598596 - RNA, 18 nt, Human
cccggcuaauuuuuggua

SEQ ID NO: 598597 - RNA, 23 nt, Human
auuuacagcugugugagcaaguu

SEQ ID NO: 598598 - RNA, 22 nt, Human
uaagaggcagcauuccucgccu

SEQ ID NO: 598599 - RNA, 22 nt, Human
agcuucucccuuuccuauuggu

SEQ ID NO: 598600 - RNA, 22 nt, Human
uuugcucuuaugaacaaggugg

SEQ ID NO: 598601 - RNA, 22 nt, Human
cugcuucacccaacuuugggau

SEQ ID NO: 598602 - RNA, 22 nt, Human
ugagcuguguccugggggcagu

SEQ ID NO: 598603 - RNA, 22 nt, Human
guguucuuuugcuucacagaaa

SEQ ID NO: 598604 - RNA, 22 nt, Human
cugagcagaagggugcacgugc

SEQ ID NO: 598605 - RNA, 22 nt, Human
cagaggaaaguauuucuggaag

SEQ ID NO: 598606 - RNA, 22 nt, Human
gcugccuguggcccuucugggu

SEQ ID NO: 598607 - RNA, 22 nt, Human
ugguggcaacauugcuggagug

SEQ ID NO: 598608 - RNA, 22 nt, Human
cauaacugggagauccaagggu

SEQ ID NO: 598609 - RNA, 22 nt, Human
guaauuuaauucucugacuuga

SEQ ID NO: 598610 - RNA, 22 nt, Human
cucugagagugcucagagggua

SEQ ID NO: 598611 - RNA, 22 nt, Human
ggugagcacugcccugggucuc

SEQ ID NO: 598612 - RNA, 21 nt, Human
caugaacaugcuuauccucag

SEQ ID NO: 598613 - RNA, 22 nt, Human
ugggacagugaccccagagguc

SEQ ID NO: 598614 - RNA, 22 nt, Human
ccucugggugacagacucuugg

SEQ ID NO: 598615 - RNA, 22 nt, Human
cugaggcugggcauggggucca

SEQ ID NO: 598616 - RNA, 21 nt, Human
ggagggcagcccagacuggcu

SEQ ID NO: 598617 - RNA, 22 nt, Human
uugggaaacaguauagcuaaca

SEQ ID NO: 598618 - RNA, 22 nt, Human
cuuccucuguguccugggcuuc

SEQ ID NO: 598619 - RNA, 20 nt, Human
gggcuccagcugugauucuu

SEQ ID NO: 598620 - RNA, 22 nt, Human
ucaauagagccuucuuucaggu

SEQ ID NO: 598621 - RNA, 22 nt, Human
gagaagcaaucagcagccaccc

SEQ ID NO: 598622 - RNA, 22 nt, Human
cagcagcugggaaggaggcuga

SEQ ID NO: 598623 - RNA, 22 nt, Human
acuuuguugaagaauauguuag

SEQ ID NO: 598624 - RNA, 19 nt, Human
ugcuagaaauucugugacu

SEQ ID NO: 598625 - RNA, 22 nt, Human
uaggauggucacagagauggac

SEQ ID NO: 598626 - RNA, 22 nt, Human
cuguccuggagggcauaggacg

SEQ ID NO: 598627 - RNA, 22 nt, Human
ucucuguaaaauguggaugaua

SEQ ID NO: 598628 - RNA, 22 nt, Human
cagagcagggguuucccagguu

SEQ ID NO: 598629 - RNA, 22 nt, Human
caggguccggcugccuggcugu

SEQ ID NO: 598630 - RNA, 22 nt, Human
uuucuuuaauucucacagcaau

SEQ ID NO: 598631 - RNA, 22 nt, Human
ggaaacagagggcaccugagcc

SEQ ID NO: 598632 - RNA, 22 nt, Human
ucagaugcuuagugacuacaca

SEQ ID NO: 598633 - RNA, 22 nt, Human
gggugaggcccauuugaggcca

SEQ ID NO: 598634 - RNA, 22 nt, Human
gagcuuugucuccuggagaccc

SEQ ID NO: 598635 - RNA, 22 nt, Human
ugccuggcccugacagcccugg

SEQ ID NO: 598636 - RNA, 22 nt, Human
ccagcagacacacaggcguggg

SEQ ID NO: 598637 - RNA, 19 nt, Human
ccagccucucuuccacccc

SEQ ID NO: 598638 - RNA, 22 nt, Human
uaguggagguggucugugaacu

SEQ ID NO: 598639 - RNA, 22 nt, Human
aucugaggguuugggcaucagc

SEQ ID NO: 598640 - RNA, 22 nt, Human
cagagcccuaguccugauggcc

SEQ ID NO: 598641 - RNA, 22 nt, Human
aagcacugggaggaggcugaga

SEQ ID NO: 598642 - RNA, 22 nt, Human
agcuguggggcaggcagcgagg

SEQ ID NO: 598643 - RNA, 22 nt, Human
cagcaggauaugguggagagag

SEQ ID NO: 598644 - RNA, 23 nt, Human
cuggucagaggcugcuggaaggg

SEQ ID NO: 598645 - RNA, 22 nt, Human
cuucuucuuuugugggugguaa

SEQ ID NO: 598646 - RNA, 22 nt, Human
uuggagguuauuaacacuggcc

SEQ ID NO: 598647 - RNA, 22 nt, Human
aaaagaguguuucaacuuuggc

SEQ ID NO: 598648 - RNA, 20 nt, Human
ugcugccuacuaagcccuca

SEQ ID NO: 598649 - RNA, 22 nt, Human
ccagagagauugcuucuaaaga

SEQ ID NO: 598650 - RNA, 22 nt, Human
gccucagccggcggacgccagg

SEQ ID NO: 598651 - RNA, 22 nt, Human
aucuuugugcuaauguaguucu

SEQ ID NO: 598652 - RNA, 22 nt, Human
uggacaucuuagucaugucaau

SEQ ID NO: 598653 - RNA, 22 nt, Human
cacugguuuugcugauaaggca

SEQ ID NO: 598654 - RNA, 22 nt, Human
acuaaggaauaugacaaacuca

SEQ ID NO: 598655 - RNA, 22 nt, Human
ugcagaagcagagccgguggcc

SEQ ID NO: 598656 - RNA, 22 nt, Human
auguauuucuauguagugaaga

SEQ ID NO: 598657 - RNA, 22 nt, Human
uaggaacaaguuuccuugcugu

SEQ ID NO: 598658 - RNA, 22 nt, Human
aggcaucugaguuugcaagcuu

SEQ ID NO: 598659 - RNA, 22 nt, Human
cagaggcuuggcauuaucaugc

SEQ ID NO: 598660 - RNA, 22 nt, Human
ugacagugagcuugggguacuu

SEQ ID NO: 598661 - RNA, 22 nt, Human
ggcuccagggucucuccuugug

SEQ ID NO: 598662 - RNA, 22 nt, Human
uggggugggcaugcgcuguccu

SEQ ID NO: 598663 - RNA, 22 nt, Human
ucucccccagucucuacagcag

SEQ ID NO: 598664 - RNA, 22 nt, Human
augcuaaagcuuugcuuucauu

SEQ ID NO: 598665 - RNA, 22 nt, Human
ugcuggaggccgagaagcagca

SEQ ID NO: 598666 - RNA, 22 nt, Human
agccuggagcuugaguuaugag

SEQ ID NO: 598667 - RNA, 22 nt, Human
acucuuuagagguacaucucuu

SEQ ID NO: 598668 - RNA, 22 nt, Human
uccucagacacccugcuggcuu

SEQ ID NO: 598669 - RNA, 22 nt, Human
aggcuccagcccaaggcugcag

SEQ ID NO: 598670 - RNA, 22 nt, Human
auugcugacuuuaauauuauau

SEQ ID NO: 598671 - RNA, 22 nt, Human
uaggcugagcuuguagaucgua

SEQ ID NO: 598672 - RNA, 22 nt, Human
agggcagagagaugaaugggau

SEQ ID NO: 598673 - RNA, 22 nt, Human
cauggccacaucuagcugcaag

SEQ ID NO: 598674 - RNA, 22 nt, Human
acauuuugcccuuauuugcuga

SEQ ID NO: 598675 - RNA, 22 nt, Human
ggcucaggacugcagcguagag

SEQ ID NO: 598676 - RNA, 18 nt, Human
ccuucagcucugccagua

SEQ ID NO: 598677 - RNA, 22 nt, Human
guggcccacacagacagcaucu

SEQ ID NO: 598678 - RNA, 22 nt, Human
uggcugaguuucaugcaucaug

SEQ ID NO: 598679 - RNA, 22 nt, Human
ucuccuucgaggcccagcuccc

SEQ ID NO: 598680 - RNA, 22 nt, Human
ccaggaagccucagaugcugag

SEQ ID NO: 598681 - RNA, 19 nt, Human
cuagaguaauaaguacuuu

SEQ ID NO: 598682 - RNA, 22 nt, Human
cagcuucugcucauggaggggu

SEQ ID NO: 598683 - RNA, 22 nt, Human
agaauucuuggugguuagaaua

SEQ ID NO: 598684 - RNA, 23 nt, Human
uaguuauuuucucuguaauuugc

SEQ ID NO: 598685 - RNA, 22 nt, Human
caaggauucucacuagacuaga

SEQ ID NO: 598686 - RNA, 22 nt, Human
gccuggaguggacuuggccccu

SEQ ID NO: 598687 - RNA, 22 nt, Human
acagcaggcaugaaugacacug

SEQ ID NO: 598688 - RNA, 22 nt, Human
ccuggagagcucgggccaggca

SEQ ID NO: 598689 - RNA, 22 nt, Human
aaucagaaccuugggucauaac

SEQ ID NO: 598690 - RNA, 22 nt, Human
ugggggagagaggcauucuuuc

SEQ ID NO: 598691 - RNA, 22 nt, Human
cacagugacuggcacauaguaa

SEQ ID NO: 598692 - RNA, 20 nt, Human
acagagacugagacacuugc

SEQ ID NO: 598693 - RNA, 22 nt, Human
uauuacaauuuacauugcacuu

SEQ ID NO: 598694 - RNA, 22 nt, Human
uuucuucuaagauuucaaacua

SEQ ID NO: 598695 - RNA, 22 nt, Human
gcaagauuuacagacaacuucg

SEQ ID NO: 598696 - RNA, 22 nt, Human
agaggcaacauggggaacagau

SEQ ID NO: 598697 - RNA, 22 nt, Human
cucugccugccacuguucaggc

SEQ ID NO: 598698 - RNA, 22 nt, Human
cuggccagggugcgaucguggu

SEQ ID NO: 598699 - RNA, 22 nt, Human
aacaguuugcuuuaagaggcac

SEQ ID NO: 598700 - RNA, 22 nt, Human
auuguuaaacugaagcauuacu

SEQ ID NO: 598701 - RNA, 22 nt, Human
uuaauuuuaaccuguuuguguc

SEQ ID NO: 598702 - RNA, 22 nt, Human
aaguuugacagaaguuucuaau

SEQ ID NO: 598703 - RNA, 22 nt, Human
uaaugacuugaaggacccaugg

SEQ ID NO: 598704 - RNA, 22 nt, Human
acagagcugggugcccccugga

SEQ ID NO: 598705 - RNA, 22 nt, Human
acugccuguagcucuucaucuc

SEQ ID NO: 598706 - RNA, 18 nt, Human
ugaggcugaggguagagg

SEQ ID NO: 598707 - RNA, 22 nt, Human
cacagcugcccuacuccaugug

SEQ ID NO: 598708 - RNA, 22 nt, Human
aacaaugccaacagcaugcugg

SEQ ID NO: 598709 - RNA, 22 nt, Human
aggggccuccucauuggagugu

SEQ ID NO: 598710 - RNA, 22 nt, Human
aguuucuagccucacuguuuag

SEQ ID NO: 598711 - RNA, 22 nt, Human
gcuucgcugcuagcuaguuggu

SEQ ID NO: 598712 - RNA, 22 nt, Human
ugaguccugcugagcagagagg

SEQ ID NO: 598713 - RNA, 22 nt, Human
uuacaucacuuuacuuaauaau

SEQ ID NO: 598714 - RNA, 22 nt, Human
gucucuggguuaagcagugcau

SEQ ID NO: 598715 - RNA, 22 nt, Human
gcagcaggagaguuuguccugc

SEQ ID NO: 598716 - RNA, 22 nt, Human
cuuucuuugcagugagccagag

SEQ ID NO: 598717 - RNA, 22 nt, Human
gugcuuuuuauaaggcagacug

SEQ ID NO: 598718 - RNA, 22 nt, Human
acugaaaugaaaucuaucaucu

SEQ ID NO: 598719 - RNA, 22 nt, Human
cugggucugggccuccuggagu

SEQ ID NO: 598720 - RNA, 22 nt, Human
uugugcugcugacuuaagauau

SEQ ID NO: 598721 - RNA, 22 nt, Human
uggagcaagcuggagagaacau

SEQ ID NO: 598722 - RNA, 22 nt, Human
gggguggcccuacccucuggaa

SEQ ID NO: 598723 - RNA, 20 nt, Human
aaaagagugcuucaacugcu

SEQ ID NO: 598724 - RNA, 22 nt, Human
gcuguggcggcagcagcuggug

SEQ ID NO: 598725 - RNA, 22 nt, Human
uucucagaggcugcuaagugca

SEQ ID NO: 598726 - RNA, 18 nt, Human
ccagcccugcagcaccug

SEQ ID NO: 598727 - RNA, 22 nt, Human
caugagaaccaggucuguguuu

SEQ ID NO: 598728 - RNA, 22 nt, Human
ugagccugggcuuucucuggag

SEQ ID NO: 598729 - RNA, 22 nt, Human
aucucagaaacauaucuaaucc

SEQ ID NO: 598730 - RNA, 22 nt, Human
ccaucccugggccauguccccu

SEQ ID NO: 598731 - RNA, 22 nt, Human
uugcuaaucauauuucaucacu

SEQ ID NO: 598732 - RNA, 22 nt, Human
aacaguuuguggauagcuugua

SEQ ID NO: 598733 - RNA, 22 nt, Human
ggaacaggaaaggagggaugcu

SEQ ID NO: 598734 - RNA, 20 nt, Human
auguucuucauuuaauguuc

SEQ ID NO: 598735 - RNA, 22 nt, Human
gaagcaguagauuccuacucau

SEQ ID NO: 598736 - RNA, 22 nt, Human
ggcaggacagucccaguucaaa

SEQ ID NO: 598737 - RNA, 21 nt, Human
ggaagcuguguccaugcuccu

SEQ ID NO: 598738 - RNA, 23 nt, Human
cucuggagauccucugccugggu

SEQ ID NO: 598739 - RNA, 22 nt, Human
ugcauuucuuuugaguauaugc

SEQ ID NO: 598740 - RNA, 22 nt, Human
cccugacagauggcaggggagc

SEQ ID NO: 598741 - RNA, 22 nt, Human
acccagagcacagaugcaacgu

SEQ ID NO: 598742 - RNA, 22 nt, Human
ucaguuucuuuacucauagaau

SEQ ID NO: 598743 - RNA, 22 nt, Human
auauuuauaagcaagcaggacu

SEQ ID NO: 598744 - RNA, 22 nt, Human
uuuugauaucaugaugaacaga

SEQ ID NO: 598745 - RNA, 21 nt, Human
ugaaggagaggaccgagugcu

SEQ ID NO: 598746 - RNA, 22 nt, Human
gcagguggugggggagccguuc

SEQ ID NO: 598747 - RNA, 22 nt, Human
ucccaaagcuacucuucugacu

SEQ ID NO: 598748 - RNA, 22 nt, Human
cugcuuuagugugguguuagag

SEQ ID NO: 598749 - RNA, 22 nt, Human
augagguauucguaauauuucc

SEQ ID NO: 598750 - RNA, 22 nt, Human
aucaaaguccaucagaagguag

SEQ ID NO: 598751 - RNA, 22 nt, Human
acuugauuguaugaaguuauuu

SEQ ID NO: 598752 - RNA, 22 nt, Human
aauauuucuccuucguuauagc

SEQ ID NO: 598753 - RNA, 22 nt, Human
ccugccugacagagaagguuca

SEQ ID NO: 598754 - RNA, 22 nt, Human
augcauauuucuugggcuuacc

SEQ ID NO: 598755 - RNA, 22 nt, Human
cccugguguccacuggaggaag

SEQ ID NO: 598756 - RNA, 22 nt, Human
agagggugaaugagauagaaaa

SEQ ID NO: 598757 - RNA, 22 nt, Human
ggguuacugcuucaaaaaauua

SEQ ID NO: 598758 - RNA, 22 nt, Human
aaagguuuauugauucugcucu

SEQ ID NO: 598759 - RNA, 22 nt, Human
auaauacaugguugaucuuuuc

SEQ ID NO: 598760 - RNA, 22 nt, Human
augcccugcucucgggaaggga

SEQ ID NO: 598761 - RNA, 22 nt, Human
uuagcauuuucugggcugaaau

SEQ ID NO: 598762 - RNA, 22 nt, Human
cagauuuaagauauuuguauug

SEQ ID NO: 598763 - RNA, 22 nt, Human
ugagaaaauuacuauaauuguc

SEQ ID NO: 598764 - RNA, 22 nt, Human
cagcuuugauucacugccuagu

SEQ ID NO: 598765 - RNA, 22 nt, Human
cuugugcaagaaaccuggaaug

SEQ ID NO: 598766 - RNA, 22 nt, Human
ugcccaggguggagugcagcgg

SEQ ID NO: 598767 - RNA, 20 nt, Human
gggaggccagccucagagaa

SEQ ID NO: 598768 - RNA, 22 nt, Human
cuucugggccauggccuuccuc

SEQ ID NO: 598769 - RNA, 22 nt, Human
ugugucuccauagccagcuagc

SEQ ID NO: 598770 - RNA, 22 nt, Human
uaaagacaugcaaagucuaauu

SEQ ID NO: 598771 - RNA, 22 nt, Human
cugcccuguccuucccgccggc

SEQ ID NO: 598772 - RNA, 20 nt, Human
ccaggcacugucccaugcag

SEQ ID NO: 598773 - RNA, 22 nt, Human
aaggaggagugggguccuggaa

SEQ ID NO: 598774 - RNA, 23 nt, Human
aaugauuucaugaugauagcagc

SEQ ID NO: 598775 - RNA, 22 nt, Human
gagacuguaagcuccuugagga

SEQ ID NO: 598776 - RNA, 22 nt, Human
agaacacacgucagaguuuccu

SEQ ID NO: 598777 - RNA, 22 nt, Human
uuugggaagaggaaucucugga

SEQ ID NO: 598778 - RNA, 22 nt, Human
cugaggaaggcugggggcaucc

SEQ ID NO: 598779 - RNA, 22 nt, Human
ccugcacagccggaccccugcu

SEQ ID NO: 598780 - RNA, 22 nt, Human
cuggagccagccagggcccucu

SEQ ID NO: 598781 - RNA, 18 nt, Human
ucaggcugcccugugucu

SEQ ID NO: 598782 - RNA, 23 nt, Human
gcuugccugguguguggcugacc

SEQ ID NO: 598783 - RNA, 21 nt, Human
agagggagaguggcccuucca

SEQ ID NO: 598784 - RNA, 22 nt, Human
aauucccauuugcagaaaauca

SEQ ID NO: 598785 - RNA, 20 nt, Human
ggaagccagggugcagggga

SEQ ID NO: 598786 - RNA, 22 nt, Human
ccaggaggaugaggggcauaga

SEQ ID NO: 598787 - RNA, 22 nt, Human
agauucauuguggauauuuucu

SEQ ID NO: 598788 - RNA, 22 nt, Human
gcccagcuuuucacuuccacac

SEQ ID NO: 598789 - RNA, 22 nt, Human
cagaagcaaaugccuugcugag

SEQ ID NO: 598790 - RNA, 21 nt, Human
cuguauuaacuuuugcaccuu

SEQ ID NO: 598791 - RNA, 22 nt, Human
gugccaggugcuaagcugugcu

SEQ ID NO: 598792 - RNA, 22 nt, Human
auuuuauccccacuggauuaca

SEQ ID NO: 598793 - RNA, 22 nt, Human
guggagcauaacacacuagccu

SEQ ID NO: 598794 - RNA, 22 nt, Human
ugaaaugcuuuuacaggauauu

SEQ ID NO: 598795 - RNA, 22 nt, Human
cuucugccccuguagccugagu

SEQ ID NO: 598796 - RNA, 22 nt, Human
cuagggcucgcaagggcuggag

SEQ ID NO: 598797 - RNA, 22 nt, Human
uccuguguugauagagaugguu

SEQ ID NO: 598798 - RNA, 22 nt, Human
ugcuacaaauucguaaucaauu

SEQ ID NO: 598799 - RNA, 22 nt, Human
cuggagggcugcagcgaggcug

SEQ ID NO: 598800 - RNA, 22 nt, Human
gaaauacagaaagggcugaaug

SEQ ID NO: 598801 - RNA, 22 nt, Human
cucugagaaagcugugagcuaa

SEQ ID NO: 598802 - RNA, 22 nt, Human
cagauaaaggcuuacuaguagu

SEQ ID NO: 598803 - RNA, 22 nt, Human
gaggucaggcuugcagcagggu

SEQ ID NO: 598804 - RNA, 22 nt, Human
aaguuacacauuuucauuguaa

SEQ ID NO: 598805 - RNA, 22 nt, Human
agggccagagucuguguagaua

SEQ ID NO: 598806 - RNA, 22 nt, Human
auggucaggcaaggagggcugg

SEQ ID NO: 598807 - RNA, 22 nt, Human
uuuucucuccagguggggugau

SEQ ID NO: 598808 - RNA, 22 nt, Human
gguggcagagacauaggacaua

SEQ ID NO: 598809 - RNA, 22 nt, Human
uccagccucauuucuccugcuu

SEQ ID NO: 598810 - RNA, 22 nt, Human
aggccuuaucuccaaauacagu

SEQ ID NO: 598811 - RNA, 22 nt, Human
gcagaugcugcuccucucuaga

SEQ ID NO: 598812 - RNA, 22 nt, Human
augucccaagauacagcuagag

SEQ ID NO: 598813 - RNA, 22 nt, Human
cugggcacacagugacucugca

SEQ ID NO: 598814 - RNA, 22 nt, Human
ugucaaauaguagaaagauggc

SEQ ID NO: 598815 - RNA, 22 nt, Human
uuccuaacucuggcaccuaguc

SEQ ID NO: 598816 - RNA, 22 nt, Human
accauguuaguuacugggaaug

SEQ ID NO: 598817 - RNA, 22 nt, Human
gaaugauauauuagcagauuuu

SEQ ID NO: 598818 - RNA, 22 nt, Human
ggcuccugggagauagagguca

SEQ ID NO: 598819 - RNA, 18 nt, Human
gaugggagcaagagaaga

SEQ ID NO: 598820 - RNA, 22 nt, Human
uuaaaaccaucagcuguaagau

SEQ ID NO: 598821 - RNA, 20 nt, Human
cagaggaguacauauguuca

SEQ ID NO: 598822 - RNA, 22 nt, Human
agauggguaauugauggcagua

SEQ ID NO: 598823 - RNA, 22 nt, Human
uaaaaucaccaaaagcaggugg

SEQ ID NO: 598824 - RNA, 22 nt, Human
caucauaauaacccagacacag

SEQ ID NO: 598825 - RNA, 22 nt, Human
ucaguguuagacaaguuuggaa

SEQ ID NO: 598826 - RNA, 22 nt, Human
cacacucauuagucauuucucu

SEQ ID NO: 598827 - RNA, 22 nt, Human
aagacuuucccucaucagaacg

SEQ ID NO: 598828 - RNA, 22 nt, Human
uauaaagugugaacugugagua

SEQ ID NO: 598829 - RNA, 22 nt, Human
cccugcccaccacaugcuggga

SEQ ID NO: 598830 - RNA, 22 nt, Human
aagaaacuguugcgugacagcg

SEQ ID NO: 598831 - RNA, 22 nt, Human
uaauuuacaguucgccaugucu

SEQ ID NO: 598832 - RNA, 22 nt, Human
ugagacaggcuuccuucuuggg

SEQ ID NO: 598833 - RNA, 22 nt, Human
agggcccauagaucgucagcuu

SEQ ID NO: 598834 - RNA, 22 nt, Human
gagugcuccgucuuggacaggg

SEQ ID NO: 598835 - RNA, 22 nt, Human
uugacaaagauauauucaugcu

SEQ ID NO: 598836 - RNA, 22 nt, Human
ucucauuuugagucagacacua

SEQ ID NO: 598837 - RNA, 22 nt, Human
aaguuacaguuacagaauggag

SEQ ID NO: 598838 - RNA, 22 nt, Human
ggucagggcucuuccaguggcu

SEQ ID NO: 598839 - RNA, 22 nt, Human
aaagguuuucugacccuuagua

SEQ ID NO: 598840 - RNA, 22 nt, Human
uuauuaugugcuagagaaugua

SEQ ID NO: 598841 - RNA, 22 nt, Human
auuuagcaagaguacaaaauaa

SEQ ID NO: 598842 - RNA, 22 nt, Human
gcaaacaucuuuauuuggcaag

SEQ ID NO: 598843 - RNA, 22 nt, Human
uucuacuuuagcaugcucauuc

SEQ ID NO: 598844 - RNA, 22 nt, Human
ccucugagaccagcucugcacc

SEQ ID NO: 598845 - RNA, 22 nt, Human
ugagcugugcuacgcccuggga

SEQ ID NO: 598846 - RNA, 22 nt, Human
acguaguguguuguggaaagag

SEQ ID NO: 598847 - RNA, 22 nt, Human
ccagccccgggaaccuggccgu

SEQ ID NO: 598848 - RNA, 22 nt, Human
agccagcuguguggucaggcaa

SEQ ID NO: 598849 - RNA, 20 nt, Human
ccauucugggugcagucugg

SEQ ID NO: 598850 - RNA, 22 nt, Human
caggcacugugcuagauccuug

SEQ ID NO: 598851 - RNA, 21 nt, Human
ugaagggcagccucaggcucc

SEQ ID NO: 598852 - RNA, 22 nt, Human
cccaucucagucgugcuaaggg

SEQ ID NO: 598853 - RNA, 22 nt, Human
cagcugccccauaaaucacagu

SEQ ID NO: 598854 - RNA, 22 nt, Human
ccagggcugagacuguauuggg

SEQ ID NO: 598855 - RNA, 22 nt, Human
caaaaguaauugugguuuucac

SEQ ID NO: 598856 - RNA, 22 nt, Human
augacuucugcuuuacagaguu

SEQ ID NO: 598857 - RNA, 22 nt, Human
augcaguaaaauaggagguaau

SEQ ID NO: 598858 - RNA, 22 nt, Human
ugaggcccagccgcccugagag

SEQ ID NO: 598859 - RNA, 22 nt, Human
aaagccacaguucuaugucugc

SEQ ID NO: 598860 - RNA, 22 nt, Human
augaugucccuaggcagguagu

SEQ ID NO: 598861 - RNA, 22 nt, Human
ucccagagaaagucaaggucuu

SEQ ID NO: 598862 - RNA, 22 nt, Human
cuguguccugcgucaagccaau

SEQ ID NO: 598863 - RNA, 22 nt, Human
auagcaguggauguggagaaag

SEQ ID NO: 598864 - RNA, 22 nt, Human
uuugauaugcaaaauuauggac

SEQ ID NO: 598865 - RNA, 22 nt, Human
ggaggugcuggcggccagcucu

SEQ ID NO: 598866 - RNA, 22 nt, Human
uggaauaaugaccacagaaaca

SEQ ID NO: 598867 - RNA, 22 nt, Human
gcugcagggagcuggaaggcuc

SEQ ID NO: 598868 - RNA, 22 nt, Human
ugaaauucaaaacacauuuguc

SEQ ID NO: 598869 - RNA, 22 nt, Human
uggaaugccgggccaggcuccg

SEQ ID NO: 598870 - RNA, 22 nt, Human
uccagucaggcugaauucaagg

SEQ ID NO: 598871 - RNA, 22 nt, Human
aaacacucauguguuacucucc

SEQ ID NO: 598872 - RNA, 22 nt, Human
ccucuggccacaugggacauag

SEQ ID NO: 598873 - RNA, 22 nt, Human
uuccugaucccccaggacaaag

SEQ ID NO: 598874 - RNA, 18 nt, Human
uaauuugcacaguugcaa

SEQ ID NO: 598875 - RNA, 22 nt, Human
uacacuguuuuuggaaagaaga

SEQ ID NO: 598876 - RNA, 22 nt, Human
ugcuggcaugcaugcuguagga

SEQ ID NO: 598877 - RNA, 21 nt, Human
aggcccuggaggucagagaaa

SEQ ID NO: 598878 - RNA, 22 nt, Human
uuuaauuauguuaagccacuga

SEQ ID NO: 598879 - RNA, 22 nt, Human
agaugggcgcccuggacugagg

SEQ ID NO: 598880 - RNA, 22 nt, Human
cugccuuuucaucugagcugga

SEQ ID NO: 598881 - RNA, 22 nt, Human
gagaggagguggcuaugacagc

SEQ ID NO: 598882 - RNA, 21 nt, Human
gcagagcuggaaccaggaccc

SEQ ID NO: 598883 - RNA, 22 nt, Human
acugucuccucaucaugccugg

SEQ ID NO: 598884 - RNA, 21 nt, Human
ggaguuuuucuggaagggacu

SEQ ID NO: 598885 - RNA, 22 nt, Human
acaucauuuucuucaguguuug

SEQ ID NO: 598886 - RNA, 22 nt, Human
gcaaaaacugcaauuacuuuug

SEQ ID NO: 598887 - RNA, 22 nt, Human
acuuacaaucaaccaccuugga

SEQ ID NO: 598888 - RNA, 22 nt, Human
uucacaaacaccagaauggcua

SEQ ID NO: 598889 - RNA, 22 nt, Human
ggcaucuggaucugcuucuccc

SEQ ID NO: 598890 - RNA, 19 nt, Human
acagggcuuggccugacau

SEQ ID NO: 598891 - RNA, 22 nt, Human
cugcuaaaccucucugagagcu

SEQ ID NO: 598892 - RNA, 22 nt, Human
uucugccaaaggcuuuguuuug

SEQ ID NO: 598893 - RNA, 22 nt, Human
cuuauuuaugucugucucuaau

SEQ ID NO: 598894 - RNA, 22 nt, Human
uauuacugagguuuuauggagu

SEQ ID NO: 598895 - RNA, 22 nt, Human
aagggcuguagacaagauugcu

SEQ ID NO: 598896 - RNA, 17 nt, Human
gcuggcuucuccuugcu

SEQ ID NO: 598897 - RNA, 22 nt, Human
aggagccagauucucucacuuu

SEQ ID NO: 598898 - RNA, 22 nt, Human
acucaggaauggggcugggacu

SEQ ID NO: 598899 - RNA, 22 nt, Human
agaagccagaggcaguggguac

SEQ ID NO: 598900 - RNA, 22 nt, Human
gccuggucucuuucaugucagu

SEQ ID NO: 598901 - RNA, 22 nt, Human
gcccagcuuuuugaggcaggca

SEQ ID NO: 598902 - RNA, 22 nt, Human
ggcaggagaauggcgugaacuc

SEQ ID NO: 598903 - RNA, 22 nt, Human
aaaugauaguauggaacuagga

SEQ ID NO: 598904 - RNA, 22 nt, Human
uuuacuaacaccauacaugcug

SEQ ID NO: 598905 - RNA, 22 nt, Human
ugagggcugacaggaggacagc

SEQ ID NO: 598906 - RNA, 22 nt, Human
cugggcuagaaggaccaggaug

SEQ ID NO: 598907 - RNA, 22 nt, Human
ucagcaccaguuauccucaggg

SEQ ID NO: 598908 - RNA, 22 nt, Human
cagacccucgggugaguuggcc

SEQ ID NO: 598909 - RNA, 22 nt, Human
caggugguuguuuggauucuaa

SEQ ID NO: 598910 - RNA, 22 nt, Human
ggcacugagaggcucuuccuaa

SEQ ID NO: 598911 - RNA, 22 nt, Human
ucacccaagaccaucggaagug

SEQ ID NO: 598912 - RNA, 22 nt, Human
caggauggucagaugcauuguc

SEQ ID NO: 598913 - RNA, 22 nt, Human
gggccccaagaaccuccuccug

SEQ ID NO: 598914 - RNA, 22 nt, Human
cuucuuuacuuucuagaaauaa

SEQ ID NO: 598915 - RNA, 22 nt, Human
gcacacagccagcugagggcua

SEQ ID NO: 598916 - RNA, 22 nt, Human
uuucuucccaagcaguuucaga

SEQ ID NO: 598917 - RNA, 22 nt, Human
ucaagagauugaauaauaacug

SEQ ID NO: 598918 - RNA, 22 nt, Human
ucuggcaaaggcaaccacaguu

SEQ ID NO: 598919 - RNA, 22 nt, Human
uccuugaagagugggcggucga

SEQ ID NO: 598920 - RNA, 22 nt, Human
ugggagagcuucaugccuucag

SEQ ID NO: 598921 - RNA, 22 nt, Human
gugggccaggccggagugcaga

SEQ ID NO: 598922 - RNA, 22 nt, Human
gagaggggaccugugugucuag

SEQ ID NO: 598923 - RNA, 22 nt, Human
gagccaggggucagcuccgagg

SEQ ID NO: 598924 - RNA, 22 nt, Human
ccauguuguaucucuuaucggc

SEQ ID NO: 598925 - RNA, 22 nt, Human
uggcagcuauggucuaagggcc

SEQ ID NO: 598926 - RNA, 20 nt, Human
guuuuaugccaguucugugu

SEQ ID NO: 598927 - RNA, 22 nt, Human
cuugggugcucagggaaagcuu

SEQ ID NO: 598928 - RNA, 22 nt, Human
cugcacugaagaaaggagcucu

SEQ ID NO: 598929 - RNA, 22 nt, Human
ccagacaggaacacacaucucc

SEQ ID NO: 598930 - RNA, 22 nt, Human
guggcagcugugggacacuggu

SEQ ID NO: 598931 - RNA, 22 nt, Human
uuucugauauacuguagaaucc

SEQ ID NO: 598932 - RNA, 22 nt, Human
uagcaucaugaucagaacuguu

SEQ ID NO: 598933 - RNA, 22 nt, Human
auugugcaccuacugugugcag

SEQ ID NO: 598934 - RNA, 22 nt, Human
gguggccucgguggugcacagg

SEQ ID NO: 598935 - RNA, 18 nt, Human
cagagcuccuggaugcag

SEQ ID NO: 598936 - RNA, 22 nt, Human
gugcccaggcccaaggcaccac

SEQ ID NO: 598937 - RNA, 22 nt, Human
augagguaucucauuuccugaa

SEQ ID NO: 598938 - RNA, 22 nt, Human
ccagggugugagaaggaaguag

SEQ ID NO: 598939 - RNA, 22 nt, Human
uuuccaauuugguagucaucgg

SEQ ID NO: 598940 - RNA, 22 nt, Human
cccagcuugcaaauggguugcu

SEQ ID NO: 598941 - RNA, 22 nt, Human
gccugggauagaggcaaugcau

SEQ ID NO: 598942 - RNA, 22 nt, Human
ugaguguuguaaccauaugauu

SEQ ID NO: 598943 - RNA, 22 nt, Human
uuccuggucugugccauucaga

SEQ ID NO: 598944 - RNA, 22 nt, Human
cugguggagaugccuggccccu

SEQ ID NO: 598945 - RNA, 22 nt, Human
aaagugauuuaaguaccucagg

SEQ ID NO: 598946 - RNA, 22 nt, Human
gcugcugugugggagacaggcg

SEQ ID NO: 598947 - RNA, 22 nt, Human
accugcuugagccaguaugaga

SEQ ID NO: 598948 - RNA, 22 nt, Human
ugaacauugucacauuccuagc

SEQ ID NO: 598949 - RNA, 22 nt, Human
augcagggauuaaaugacugcc

SEQ ID NO: 598950 - RNA, 21 nt, Human
ccagacuggccuaugugguag

SEQ ID NO: 598951 - RNA, 22 nt, Human
uucucugguuugcuguuucuga

SEQ ID NO: 598952 - RNA, 21 nt, Human
uggcugccuacaugcugcagg

SEQ ID NO: 598953 - RNA, 22 nt, Human
uugcuuuagggcaaauauuuca

SEQ ID NO: 598954 - RNA, 22 nt, Human
agucucugugagcucccaaugg

SEQ ID NO: 598955 - RNA, 22 nt, Human
cacagagaauacugcucuugcu

SEQ ID NO: 598956 - RNA, 22 nt, Human
uucugggccuccuaggacaggc

SEQ ID NO: 598957 - RNA, 22 nt, Human
cacagagacagaucuauuuugc

SEQ ID NO: 598958 - RNA, 22 nt, Human
gagugggcaccgugggcacacu

SEQ ID NO: 598959 - RNA, 22 nt, Human
uagcagggguagauagagugug

SEQ ID NO: 598960 - RNA, 21 nt, Human
gggagggauggaaaugauguu

SEQ ID NO: 598961 - RNA, 22 nt, Human
cugggaguccaggauacagaug

SEQ ID NO: 598962 - RNA, 22 nt, Human
aggggucuauccugagaugguc

SEQ ID NO: 598963 - RNA, 22 nt, Human
cauuucuccugggugauaaauu

SEQ ID NO: 598964 - RNA, 22 nt, Human
uggaaugaaaaguacuucagaa

SEQ ID NO: 598965 - RNA, 22 nt, Human
aacaaaugaccugauuucuucc

SEQ ID NO: 598966 - RNA, 22 nt, Human
gcccaggaguugaaugcagcag

SEQ ID NO: 598967 - RNA, 22 nt, Human
uaacucacuccaaaaaggcauu

SEQ ID NO: 598968 - RNA, 23 nt, Human
ugacaguguauuugacuauaugg

SEQ ID NO: 598969 - RNA, 22 nt, Human
caggguggggaaauagcgcccu

SEQ ID NO: 598970 - RNA, 22 nt, Human
gaacuuuauuccagaagaaagc

SEQ ID NO: 598971 - RNA, 17 nt, Human
ugcuucuguauugcugg

SEQ ID NO: 598972 - RNA, 22 nt, Human
ucaggaaauuaaacacuugaaa

SEQ ID NO: 598973 - RNA, 22 nt, Human
ccccaggacacauggaccaagu

SEQ ID NO: 598974 - RNA, 19 nt, Human
ggcuccuguggcugcagcc

SEQ ID NO: 598975 - RNA, 22 nt, Human
ccaggaacaaagccccauccac

SEQ ID NO: 598976 - RNA, 22 nt, Human
gauuuucauuugcacucuagaa

SEQ ID NO: 598977 - RNA, 22 nt, Human
ccagcagagcucaaacuuccug

SEQ ID NO: 598978 - RNA, 22 nt, Human
aaacauuuuucuucaucauccu

SEQ ID NO: 598979 - RNA, 22 nt, Human
uaaguccauaauggcaguaaau

SEQ ID NO: 598980 - RNA, 22 nt, Human
guacauuucaguuuccuuaaga

SEQ ID NO: 598981 - RNA, 17 nt, Human
caggcagacauguaagc

SEQ ID NO: 598982 - RNA, 22 nt, Human
gaggagcuugaggcuaggagcc

SEQ ID NO: 598983 - RNA, 22 nt, Human
ucugagguucccucaacuaccu

SEQ ID NO: 598984 - RNA, 22 nt, Human
agguagcuauccagacgcugaa

SEQ ID NO: 598985 - RNA, 22 nt, Human
ugcaggaguccaaucaggagac

SEQ ID NO: 598986 - RNA, 22 nt, Human
uuugugcacauugcuuuucuau

SEQ ID NO: 598987 - RNA, 22 nt, Human
agaccuggguucgaguccuaac

SEQ ID NO: 598988 - RNA, 22 nt, Human
caugcagugccucuggauucuu

SEQ ID NO: 598989 - RNA, 19 nt, Human
aucccaaggagcugggacu

SEQ ID NO: 598990 - RNA, 22 nt, Human
uauuuaaaauagugcuccagca

SEQ ID NO: 598991 - RNA, 22 nt, Human
cucucugguuucagcgaagggg

SEQ ID NO: 598992 - RNA, 22 nt, Human
aucuucuggucaaauuuuugca

SEQ ID NO: 598993 - RNA, 22 nt, Human
uuucauguauuucccaaagcuu

SEQ ID NO: 598994 - RNA, 22 nt, Human
gcaggugauucacccugggccu

SEQ ID NO: 598995 - RNA, 22 nt, Human
cacagaauuuucucuuuacaau

SEQ ID NO: 598996 - RNA, 22 nt, Human
uggcauggaccuuggaagaauu

SEQ ID NO: 598997 - RNA, 22 nt, Human
agauuuagugguggaauuuugg

SEQ ID NO: 598998 - RNA, 22 nt, Human
gacacuggauuucuagaaaugu

SEQ ID NO: 598999 - RNA, 21 nt, Human
ucugucucuccacugcccugc

SEQ ID NO: 599000 - RNA, 22 nt, Human
cauuuguuaauuacuauuaucu

SEQ ID NO: 599001 - RNA, 22 nt, Human
uauuugaugaagguaaagucuu

SEQ ID NO: 599002 - RNA, 20 nt, Human
agcucuuaagaagaagauga

SEQ ID NO: 599003 - RNA, 22 nt, Human
ggccagaguugauggcaucuug

SEQ ID NO: 599004 - RNA, 22 nt, Human
uuacaaaguguuaugauaaaca

SEQ ID NO: 599005 - RNA, 22 nt, Human
uaccaagucaucuauucccaug

SEQ ID NO: 599006 - RNA, 22 nt, Human
uccuggcccuguggccugcagu

SEQ ID NO: 599007 - RNA, 22 nt, Human
uucagaaaaaacuucaauaagu

SEQ ID NO: 599008 - RNA, 22 nt, Human
agagugggugaucucuguuguc

SEQ ID NO: 599009 - RNA, 22 nt, Human
aucaauguuuugauagcccaga

SEQ ID NO: 599010 - RNA, 22 nt, Human
gguuuauuaaugugaacuguau

SEQ ID NO: 599011 - RNA, 22 nt, Human
uucauggcaggagucagaagcu

SEQ ID NO: 599012 - RNA, 22 nt, Human
uacaguaaagcugcuaugaauu

SEQ ID NO: 599013 - RNA, 22 nt, Human
uuuguacaugaaugugcaccca

SEQ ID NO: 599014 - RNA, 22 nt, Human
ucuuauuggauaaaaggaaacc

SEQ ID NO: 599015 - RNA, 22 nt, Human
uguuacugauuugauauacagu

SEQ ID NO: 599016 - RNA, 22 nt, Human
uguuugcuuggucaguaaguag

SEQ ID NO: 599017 - RNA, 22 nt, Human
aagcacugugccucauaucuga

SEQ ID NO: 599018 - RNA, 22 nt, Human
guaugaucaacuucauguccua

SEQ ID NO: 599019 - RNA, 22 nt, Human
caggaggaagaacucugcaaca

SEQ ID NO: 599020 - RNA, 22 nt, Human
aaaucaaaagacauguguuuua

SEQ ID NO: 599021 - RNA, 21 nt, Human
agagagaaggccauauggucc

SEQ ID NO: 599022 - RNA, 22 nt, Human
augacaggaggcagcugggcag

SEQ ID NO: 599023 - RNA, 23 nt, Human
ucugggcugagcucgaguguaga

SEQ ID NO: 599024 - RNA, 22 nt, Human
ugcuggagaacugcucuguguu

SEQ ID NO: 599025 - RNA, 20 nt, Human
ugccccaggccugcaccugc

SEQ ID NO: 599026 - RNA, 22 nt, Human
auuucccaggacuagaaauaua

SEQ ID NO: 599027 - RNA, 23 nt, Human
cauccaggagcugagucugacug

SEQ ID NO: 599028 - RNA, 22 nt, Human
guugcugauuaacacuuugagu

SEQ ID NO: 599029 - RNA, 22 nt, Human
ccaggcucaggccugcucguug

SEQ ID NO: 599030 - RNA, 22 nt, Human
ugccagcaguagcaguaggcca

SEQ ID NO: 599031 - RNA, 22 nt, Human
uccuucaguuaucacaguacug

SEQ ID NO: 599032 - RNA, 22 nt, Human
cugcagucagcuuuuaagaucu

SEQ ID NO: 599033 - RNA, 22 nt, Human
agcagggguaacagaaggaaag

SEQ ID NO: 599034 - RNA, 22 nt, Human
agcuggcagucggccuugaugc

SEQ ID NO: 599035 - RNA, 22 nt, Human
aggcagcugaggucuggcgccc

SEQ ID NO: 599036 - RNA, 22 nt, Human
guggcagaaauauucuugcucu

SEQ ID NO: 599037 - RNA, 22 nt, Human
ggguccagcgacagcaggcuca

SEQ ID NO: 599038 - RNA, 22 nt, Human
aaauguuagguuguacugaguc

SEQ ID NO: 599039 - RNA, 22 nt, Human
ugucauuuaugcuucuucagug

SEQ ID NO: 599040 - RNA, 20 nt, Human
ucucuucaggagguccaugu

SEQ ID NO: 599041 - RNA, 22 nt, Human
gcaguaaauugagagucauguu

SEQ ID NO: 599042 - RNA, 20 nt, Human
cagcuuggaugagaggcuga

SEQ ID NO: 599043 - RNA, 22 nt, Human
aguuuauucugcuuggcccucc

SEQ ID NO: 599044 - RNA, 22 nt, Human
uuucuccucuccagagugcagu

SEQ ID NO: 599045 - RNA, 22 nt, Human
acagaauuuacacaucucuaaa

SEQ ID NO: 599046 - RNA, 22 nt, Human
gcacugcagccucagauggugg

SEQ ID NO: 599047 - RNA, 22 nt, Human
aguggcaguggcugggcagagc

SEQ ID NO: 599048 - RNA, 22 nt, Human
ugaagcagagugaaggugaauu

SEQ ID NO: 599049 - RNA, 21 nt, Human
cagaggcaggcucugugugug

SEQ ID NO: 599050 - RNA, 22 nt, Human
agcugguguccuccuggagcug

SEQ ID NO: 599051 - RNA, 22 nt, Human
gcagaggccaucaacuuugcca

SEQ ID NO: 599052 - RNA, 22 nt, Human
cagguagguauggugcagucuu

SEQ ID NO: 599053 - RNA, 22 nt, Human
gcugcagcuguaggacacaauu

SEQ ID NO: 599054 - RNA, 20 nt, Human
ggugcgaggccagagcagac

SEQ ID NO: 599055 - RNA, 22 nt, Human
uuuccugcacccgcugaugcca

SEQ ID NO: 599056 - RNA, 22 nt, Human
aaggcuggucagauguggugaa

SEQ ID NO: 599057 - RNA, 22 nt, Human
gcacaggcuccggaggagagcu

SEQ ID NO: 599058 - RNA, 22 nt, Human
gcuucuccucccgcucccaggc

SEQ ID NO: 599059 - RNA, 23 nt, Human
acagaggcuuaaaugaguggcag

SEQ ID NO: 599060 - RNA, 22 nt, Human
ucccuccauaacagaggugagc

SEQ ID NO: 599061 - RNA, 22 nt, Human
ucugccugagcagagggaggcc

SEQ ID NO: 599062 - RNA, 23 nt, Human
cugggcauggagcuucagaggcu

SEQ ID NO: 599063 - RNA, 22 nt, Human
cuggguggaucgcagccccagg

SEQ ID NO: 599064 - RNA, 22 nt, Human
ccagcuccaggacugggagcug

SEQ ID NO: 599065 - RNA, 22 nt, Human
accugcccuggaggaagauauu

SEQ ID NO: 599066 - RNA, 22 nt, Human
ccacagcaccgcugccaguccc

SEQ ID NO: 599067 - RNA, 22 nt, Human
gugggcagacagugcuuugcag

SEQ ID NO: 599068 - RNA, 20 nt, Human
aaaggcacagcaacagagcu

SEQ ID NO: 599069 - RNA, 22 nt, Human
agaugugggugucaggcaguga

SEQ ID NO: 599070 - RNA, 21 nt, Human
uacuacagucucuuuaucagu

SEQ ID NO: 599071 - RNA, 22 nt, Human
aauucacagcauuugcccaucu

SEQ ID NO: 599072 - RNA, 21 nt, Human
ugcaccugugccccauccuuc

SEQ ID NO: 599073 - RNA, 22 nt, Human
gucagcucauccaucccggugg

SEQ ID NO: 599074 - RNA, 22 nt, Human
agggcugacaguggcguggcgu

SEQ ID NO: 599075 - RNA, 22 nt, Human
gauuuccuaauguggaucucug

SEQ ID NO: 599076 - RNA, 19 nt, Human
aauaagcuuggguaaaacu

SEQ ID NO: 599077 - RNA, 22 nt, Human
cugucucuguugccuguaggug

SEQ ID NO: 599078 - RNA, 22 nt, Human
ggcuccagcuaaugguuucuau

SEQ ID NO: 599079 - RNA, 22 nt, Human
ugaggccaggacccccagcagg

SEQ ID NO: 599080 - RNA, 22 nt, Human
agcugccaaguuucucaguuua

SEQ ID NO: 599081 - RNA, 22 nt, Human
ccaggggggcguagaugcuggg

SEQ ID NO: 599082 - RNA, 22 nt, Human
ucauuauuugcuuuaguuaugu

SEQ ID NO: 599083 - RNA, 18 nt, Human
agggcucucugcuggguu

SEQ ID NO: 599084 - RNA, 22 nt, Human
aggagcagcccacuccuguccu

SEQ ID NO: 599085 - RNA, 22 nt, Human
ccugagaaaccuggugcaauua

SEQ ID NO: 599086 - RNA, 22 nt, Human
gucacccacucccugcugcugu

SEQ ID NO: 599087 - RNA, 22 nt, Human
ugacccucuuccccaugcgcuc

SEQ ID NO: 599088 - RNA, 22 nt, Human
acagcugugaagcaagcacucu

SEQ ID NO: 599089 - RNA, 22 nt, Human
aaugcuguccaauaggaacaua

SEQ ID NO: 599090 - RNA, 23 nt, Human
ggacacugcuauaaaggaucugc

SEQ ID NO: 599091 - RNA, 22 nt, Human
gaaguuuuagucaaaauguaga

SEQ ID NO: 599092 - RNA, 22 nt, Human
uaaagacaauaggaaaguuguu

SEQ ID NO: 599093 - RNA, 22 nt, Human
ugacauaaaccagugagcaaaa

SEQ ID NO: 599094 - RNA, 22 nt, Human
guuuccacuuauaugguaccua

SEQ ID NO: 599095 - RNA, 22 nt, Human
ggcugugcugagggggaagccc

SEQ ID NO: 599096 - RNA, 22 nt, Human
aaauaagaggacagauguuugg

SEQ ID NO: 599097 - RNA, 22 nt, Human
aggaaacuuucuuuugcuucau

SEQ ID NO: 599098 - RNA, 22 nt, Human
uggugcagacaggagccccgcu

SEQ ID NO: 599099 - RNA, 22 nt, Human
ugaaauuaugcauuguuguacc

SEQ ID NO: 599100 - RNA, 22 nt, Human
ggaaaggcuaacagucauggaa

SEQ ID NO: 599101 - RNA, 21 nt, Human
acacaaaccuccucagccugg

SEQ ID NO: 599102 - RNA, 22 nt, Human
uaaauuuacccaaggaacaugu

SEQ ID NO: 599103 - RNA, 22 nt, Human
uugagguaguucuauugugagu

SEQ ID NO: 599104 - RNA, 22 nt, Human
ugcaguucuaaguagacaaguc

SEQ ID NO: 599105 - RNA, 22 nt, Human
ucagcuggcaguucagaggcug

SEQ ID NO: 599106 - RNA, 22 nt, Human
gagguuucuuaucaagaaagcu

SEQ ID NO: 599107 - RNA, 22 nt, Human
ggaacccaugauuaugguuagg

SEQ ID NO: 599108 - RNA, 22 nt, Human
gaggggugggcuggaaguuaua

SEQ ID NO: 599109 - RNA, 22 nt, Human
ggcaagugguagaacaucugag

SEQ ID NO: 599110 - RNA, 22 nt, Human
gagaaaugcaugcaugucauca

SEQ ID NO: 599111 - RNA, 20 nt, Human
uccagcccugcuucucucuu

SEQ ID NO: 599112 - RNA, 22 nt, Human
aaggggggcaccugcaugcccg

SEQ ID NO: 599113 - RNA, 22 nt, Human
gacagcuugccugguacugcaa

SEQ ID NO: 599114 - RNA, 22 nt, Human
cccaggucuaugccagcucuga

SEQ ID NO: 599115 - RNA, 22 nt, Human
agcugagagguggcaagcugua

SEQ ID NO: 599116 - RNA, 22 nt, Human
gacccaggguauccagagcugc

SEQ ID NO: 599117 - RNA, 22 nt, Human
cugugggagcacuggggaccga

SEQ ID NO: 599118 - RNA, 22 nt, Human
cagggagaggcugguggaguaa

SEQ ID NO: 599119 - RNA, 22 nt, Human
agcagcucaaagccugcaagga

SEQ ID NO: 599120 - RNA, 20 nt, Human
uggcucucucuaguaagugg

SEQ ID NO: 599121 - RNA, 22 nt, Human
agcaauaacagaaaacuuuccu

SEQ ID NO: 599122 - RNA, 22 nt, Human
uccacugacaggugaauggaua

SEQ ID NO: 599123 - RNA, 19 nt, Human
gguuggagaagagcggccc

SEQ ID NO: 599124 - RNA, 22 nt, Human
uccugguggauagaagccaagg

SEQ ID NO: 599125 - RNA, 22 nt, Human
ucagaugguacuaauuuaagga

SEQ ID NO: 599126 - RNA, 22 nt, Human
agguguguauaaacauacauau

SEQ ID NO: 599127 - RNA, 22 nt, Human
gacacagggggauguguggacg

SEQ ID NO: 599128 - RNA, 22 nt, Human
ucugaagaacugaguaaacaug

SEQ ID NO: 599129 - RNA, 22 nt, Human
auuccuucuuugagaauaagca

SEQ ID NO: 599130 - RNA, 22 nt, Human
gccuuaauugcagagcaauaua

SEQ ID NO: 599131 - RNA, 22 nt, Human
aaggagcuaugcauaacugauc

SEQ ID NO: 599132 - RNA, 22 nt, Human
gggcccagcacuggcugggauc

SEQ ID NO: 599133 - RNA, 22 nt, Human
aaaauccacaacgcucauuuca

SEQ ID NO: 599134 - RNA, 23 nt, Human
cuggggcuuucaaaucugggcag

SEQ ID NO: 599135 - RNA, 22 nt, Human
uagcuuugaccaacgacugguc

SEQ ID NO: 599136 - RNA, 22 nt, Human
guggcugagcagcagagagcug

SEQ ID NO: 599137 - RNA, 22 nt, Human
ugaauucuggcccucucacuua

SEQ ID NO: 599138 - RNA, 22 nt, Human
uuuccuugggucucuuaguggc

SEQ ID NO: 599139 - RNA, 19 nt, Human
uuuugucuucccuuaguuu

SEQ ID NO: 599140 - RNA, 22 nt, Human
aacauuugcagaggaaagcuau

SEQ ID NO: 599141 - RNA, 22 nt, Human
uugggcugaacccugcagcuga

SEQ ID NO: 599142 - RNA, 22 nt, Human
guuaauguuaucugaagacagu

SEQ ID NO: 599143 - RNA, 22 nt, Human
agccagggcugcgagcagacag

SEQ ID NO: 599144 - RNA, 22 nt, Human
auuguuggguaguuuguucagc

SEQ ID NO: 599145 - RNA, 22 nt, Human
uugaggcacagauuuuaguggc

SEQ ID NO: 599146 - RNA, 22 nt, Human
uuuaauucuggcauaauagcuc

SEQ ID NO: 599147 - RNA, 22 nt, Human
aggccagguuccucaaucuuga

SEQ ID NO: 599148 - RNA, 18 nt, Human
aacaguuuccagauucuc

SEQ ID NO: 599149 - RNA, 22 nt, Human
acagugaauaagacaugugcuu

SEQ ID NO: 599150 - RNA, 22 nt, Human
acagaccucuagauuacauuug

SEQ ID NO: 599151 - RNA, 22 nt, Human
aaggcacugaacuuaaauucug

SEQ ID NO: 599152 - RNA, 19 nt, Human
ccuggguccacucagacua

SEQ ID NO: 599153 - RNA, 22 nt, Human
gacaggcugugauggccgggag

SEQ ID NO: 599154 - RNA, 22 nt, Human
uggcugagcugcagcguggcuu

SEQ ID NO: 599155 - RNA, 22 nt, Human
gagucugaggggagagcugggu

SEQ ID NO: 599156 - RNA, 22 nt, Human
acugggcagcagcucgagccgc

SEQ ID NO: 599157 - RNA, 22 nt, Human
gggccuggcaugcagccccguu

SEQ ID NO: 599158 - RNA, 22 nt, Human
gacaggggucccucugggcugu

SEQ ID NO: 599159 - RNA, 22 nt, Human
auuauuugaguuccucucuacc

SEQ ID NO: 599160 - RNA, 22 nt, Human
cuggaacuccuggggagcuggu

SEQ ID NO: 599161 - RNA, 22 nt, Human
ucugcagcgugcaggcuggugc

SEQ ID NO: 599162 - RNA, 22 nt, Human
ggcucacuuuggggucagcugg

SEQ ID NO: 599163 - RNA, 22 nt, Human
ucucuauuaauugacaauggcu

SEQ ID NO: 599164 - RNA, 22 nt, Human
aggcagggcucauuucuuaggc

SEQ ID NO: 599165 - RNA, 22 nt, Human
uacuuaaaaauuaucaaagugg

SEQ ID NO: 599166 - RNA, 22 nt, Human
gcucugggauuaccagccuuag

SEQ ID NO: 599167 - RNA, 22 nt, Human
cucacaguuuucuguaguccaa

SEQ ID NO: 599168 - RNA, 22 nt, Human
gcugagagugggugcagugcuu

SEQ ID NO: 599169 - RNA, 22 nt, Human
gggaaggacacagccaugacug

SEQ ID NO: 599170 - RNA, 22 nt, Human
ugguauaaguaaucauaauugc

SEQ ID NO: 599171 - RNA, 20 nt, Human
uggccaaguauccaacugga

SEQ ID NO: 599172 - RNA, 16 nt, Human
agcagggcgggaagga

SEQ ID NO: 599173 - RNA, 22 nt, Human
cuggccuucagacucggacuga

SEQ ID NO: 599174 - RNA, 22 nt, Human
uauguuauuuucauacaacaga

SEQ ID NO: 599175 - RNA, 21 nt, Human
cuguucacugugcugugcaaa

SEQ ID NO: 599176 - RNA, 22 nt, Human
gaauuuuaaguguucgccucuu

SEQ ID NO: 599177 - RNA, 22 nt, Human
agccaagcacucaacuccugga

SEQ ID NO: 599178 - RNA, 22 nt, Human
auacaucaccuauauauucaca

SEQ ID NO: 599179 - RNA, 22 nt, Human
gcuguauuuauuuucuaggguu

SEQ ID NO: 599180 - RNA, 22 nt, Human
gugaggggaguaaagccauguu

SEQ ID NO: 599181 - RNA, 22 nt, Human
aauucaaucuaagaaaugauca

SEQ ID NO: 599182 - RNA, 22 nt, Human
aaaguauauaugcacuuuagaa

SEQ ID NO: 599183 - RNA, 22 nt, Human
guggcugcugguacucugggaa

SEQ ID NO: 599184 - RNA, 22 nt, Human
cugaaugaaugguuugucuuau

SEQ ID NO: 599185 - RNA, 21 nt, Human
cuuuuacauucagucaugaug

SEQ ID NO: 599186 - RNA, 22 nt, Human
cuggauguucuucugcaauuau

SEQ ID NO: 599187 - RNA, 22 nt, Human
cacaguaagaaaugaagaggua

SEQ ID NO: 599188 - RNA, 23 nt, Human
agaaaaguucauaccuuuuuaac

SEQ ID NO: 599189 - RNA, 22 nt, Human
uugaguguacuuuagucaucug

SEQ ID NO: 599190 - RNA, 22 nt, Human
gaugccugcauuucaggagagu

SEQ ID NO: 599191 - RNA, 22 nt, Human
gcagggcucauugccaggcauu

SEQ ID NO: 599192 - RNA, 22 nt, Human
aagagguaaugacugcuugagu

SEQ ID NO: 599193 - RNA, 22 nt, Human
gaccucuugcacccuggcucuu

SEQ ID NO: 599194 - RNA, 22 nt, Human
ucagggaaaagucacacugggu

SEQ ID NO: 599195 - RNA, 22 nt, Human
ucaacaauaggauauagcaggu

SEQ ID NO: 599196 - RNA, 21 nt, Human
ucaaaucagguaucacuauug

SEQ ID NO: 599197 - RNA, 22 nt, Human
gcccaggaagugacucagaugu

SEQ ID NO: 599198 - RNA, 22 nt, Human
aauguucaguaucugguccacc

SEQ ID NO: 599199 - RNA, 17 nt, Human
ggaguucugcagucagg

SEQ ID NO: 599200 - RNA, 22 nt, Human
cugaggccguuggugggccuua

SEQ ID NO: 599201 - RNA, 22 nt, Human
guccugugaugaguaccaggug

SEQ ID NO: 599202 - RNA, 22 nt, Human
ggugaggaaagauggugacagu

SEQ ID NO: 599203 - RNA, 22 nt, Human
gcccugucccuuggcuucuagg

SEQ ID NO: 599204 - RNA, 21 nt, Human
agagucugcauuucugacaag

SEQ ID NO: 599205 - RNA, 22 nt, Human
cuauuuuucuguacccuaauuu

SEQ ID NO: 599206 - RNA, 22 nt, Human
uagcccagaaagcaaaugucuc

SEQ ID NO: 599207 - RNA, 22 nt, Human
ccugggcuuucaaaaccagccu

SEQ ID NO: 599208 - RNA, 22 nt, Human
gcccaggauucuuucuuccuua

SEQ ID NO: 599209 - RNA, 22 nt, Human
ucugaauguaucgaauugaggc

SEQ ID NO: 599210 - RNA, 22 nt, Human
cagcagagcugugugggaaggg

SEQ ID NO: 599211 - RNA, 22 nt, Human
ccugcuucagggaugauggcac

SEQ ID NO: 599212 - RNA, 22 nt, Human
gccaaagcagucuugccucugc

SEQ ID NO: 599213 - RNA, 22 nt, Human
agcucuaaauggaauuuugccu

SEQ ID NO: 599214 - RNA, 22 nt, Human
guaaauauucccucgguuccua

SEQ ID NO: 599215 - RNA, 17 nt, Human
cagagucugucugcauc

SEQ ID NO: 599216 - RNA, 22 nt, Human
uaucucuugcaugcuuuuuaga

SEQ ID NO: 599217 - RNA, 22 nt, Human
aagaggcuuucagugaacuugu

SEQ ID NO: 599218 - RNA, 22 nt, Human
cucuuaaaauuaccuuugcaaa

SEQ ID NO: 599219 - RNA, 22 nt, Human
aggcuagacuuuggcgaagcac

SEQ ID NO: 599220 - RNA, 22 nt, Human
uugugucccccuuugagagcca

SEQ ID NO: 599221 - RNA, 22 nt, Human
gcaggagccaggccgagcuggu

SEQ ID NO: 599222 - RNA, 22 nt, Human
gagcuggugugugcccgagcac

SEQ ID NO: 599223 - RNA, 22 nt, Human
uuucuuuaucauagcaucuuug

SEQ ID NO: 599224 - RNA, 22 nt, Human
aggguggcaguuacuggagcaa

SEQ ID NO: 599225 - RNA, 22 nt, Human
uuuuuccuuggaugugucucuc

SEQ ID NO: 599226 - RNA, 22 nt, Human
ggaggugggcuaaggacucucu

SEQ ID NO: 599227 - RNA, 22 nt, Human
uauuagcuucugguuuuguucu

SEQ ID NO: 599228 - RNA, 22 nt, Human
uuuauaauuaucucuacucuua

SEQ ID NO: 599229 - RNA, 22 nt, Human
ccaguguuggaggauggcuugc

SEQ ID NO: 599230 - RNA, 22 nt, Human
aaaaucacacaaguagaugggg

SEQ ID NO: 599231 - RNA, 20 nt, Human
uggcccagcacgacgaggac

SEQ ID NO: 599232 - RNA, 22 nt, Human
agacuaaauaaugauuuacugg

SEQ ID NO: 599233 - RNA, 21 nt, Human
aggcaggauucaaacacagag

SEQ ID NO: 599234 - RNA, 22 nt, Human
gugggggaugcugaguuggaaa

SEQ ID NO: 599235 - RNA, 20 nt, Human
caauuucaucauuuccugug

SEQ ID NO: 599236 - RNA, 21 nt, Human
gccagccuguuuaccuguggu

SEQ ID NO: 599237 - RNA, 22 nt, Human
gccaggcuggucuugaacuccu

SEQ ID NO: 599238 - RNA, 22 nt, Human
ggcagcugugaagugccucaca

SEQ ID NO: 599239 - RNA, 23 nt, Human
ccagggagguugauugguuaccc

SEQ ID NO: 599240 - RNA, 22 nt, Human
gcugcuguguuggccacugcuu

SEQ ID NO: 599241 - RNA, 19 nt, Human
gcugcagaguauucuuggg

SEQ ID NO: 599242 - RNA, 22 nt, Human
acccuuugucaagcacagaaga

SEQ ID NO: 599243 - RNA, 22 nt, Human
uaggccacucuccuuugucuca

SEQ ID NO: 599244 - RNA, 22 nt, Human
acugggcaccaucaugagaugg

SEQ ID NO: 599245 - RNA, 20 nt, Human
auguauauuacuggcuguga

SEQ ID NO: 599246 - RNA, 22 nt, Human
uugcugaaguuaaugcuugcaa

SEQ ID NO: 599247 - RNA, 22 nt, Human
gcagcuggcccugacacgcaga

SEQ ID NO: 599248 - RNA, 22 nt, Human
cacagcuggugcacuagcucug

SEQ ID NO: 599249 - RNA, 22 nt, Human
cagcucaggcucuccaugcucc

SEQ ID NO: 599250 - RNA, 22 nt, Human
gcuggagggguaauaggauggg

SEQ ID NO: 599251 - RNA, 22 nt, Human
guaauaagaaacagcaauuauu

SEQ ID NO: 599252 - RNA, 22 nt, Human
ugggccagggcacccaguccag

SEQ ID NO: 599253 - RNA, 22 nt, Human
aggcuggugccugcagugaauc

SEQ ID NO: 599254 - RNA, 20 nt, Human
gaguccaggggccuguagca

SEQ ID NO: 599255 - RNA, 22 nt, Human
cacccaggcuagagugcagugg

SEQ ID NO: 599256 - RNA, 22 nt, Human
uggcagagcaaaaagauagaau

SEQ ID NO: 599257 - RNA, 22 nt, Human
uuucaauuccaccaaagcgccc

SEQ ID NO: 599258 - RNA, 22 nt, Human
uugagaaugaugagauucuucc

SEQ ID NO: 599259 - RNA, 23 nt, Human
ucuuuccucagcacacaccaaga

SEQ ID NO: 599260 - RNA, 22 nt, Human
uuuaacuuagaagagauauccu

SEQ ID NO: 599261 - RNA, 22 nt, Human
gggcucugguacuuccuggcuc

SEQ ID NO: 599262 - RNA, 22 nt, Human
cccagcaucccagugggcagca

SEQ ID NO: 599263 - RNA, 22 nt, Human
uacgcgaagaaggaccugaugg

SEQ ID NO: 599264 - RNA, 22 nt, Human
uggccacauccuuuccuuguca

SEQ ID NO: 599265 - RNA, 22 nt, Human
gaaaacuauuggccuagaacaa

SEQ ID NO: 599266 - RNA, 17 nt, Human
agcugaaauugcugaag

SEQ ID NO: 599267 - RNA, 22 nt, Human
agauguaagaccuucaugaggg

SEQ ID NO: 599268 - RNA, 22 nt, Human
aauugaacaaguaauagaagag

SEQ ID NO: 599269 - RNA, 22 nt, Human
acccaggaggcaagguugcagu

SEQ ID NO: 599270 - RNA, 22 nt, Human
acaaauuugaauccugacuucu

SEQ ID NO: 599271 - RNA, 22 nt, Human
aaaggcacugaucuuauccagu

SEQ ID NO: 599272 - RNA, 19 nt, Human
ugcagggcugcgccugggg

SEQ ID NO: 599273 - RNA, 22 nt, Human
uuccaucugcuagguaaaugaa

SEQ ID NO: 599274 - RNA, 22 nt, Human
uggaggcugugugcaugagacc

SEQ ID NO: 599275 - RNA, 22 nt, Human
agcucuggggccugucccacau

SEQ ID NO: 599276 - RNA, 22 nt, Human
uuuuucaugagacuagaaguca

SEQ ID NO: 599277 - RNA, 22 nt, Human
ucucugugaauggcgucaccug

SEQ ID NO: 599278 - RNA, 21 nt, Human
acagcagacaggcuuaggacc

SEQ ID NO: 599279 - RNA, 22 nt, Human
cuacaaauauaaaacacagaua

SEQ ID NO: 599280 - RNA, 23 nt, Human
ugccucaguggaaugugagggug

SEQ ID NO: 599281 - RNA, 22 nt, Human
agucaggagcugcugcauugua

SEQ ID NO: 599282 - RNA, 22 nt, Human
gggcuggaccgcgaccccugag

SEQ ID NO: 599283 - RNA, 22 nt, Human
ugcagcugaaccuagagucugu

SEQ ID NO: 599284 - RNA, 22 nt, Human
cggcuggugucgggcacagcaa

SEQ ID NO: 599285 - RNA, 22 nt, Human
gaagauacacagagcugucuuu

SEQ ID NO: 599286 - RNA, 22 nt, Human
ggagaaggguauguguggcgga

SEQ ID NO: 599287 - RNA, 22 nt, Human
gagcagugacuggagcaugaga

SEQ ID NO: 599288 - RNA, 22 nt, Human
uccagcccgggggcaggugacc

SEQ ID NO: 599289 - RNA, 22 nt, Human
uuguccaaggucccacaguuag

SEQ ID NO: 599290 - RNA, 22 nt, Human
auugugcagcacagaucaugac

SEQ ID NO: 599291 - RNA, 22 nt, Human
cagaaggcauagaugaaggccu

SEQ ID NO: 599292 - RNA, 19 nt, Human
uggcagacacaccuucuuc

SEQ ID NO: 599293 - RNA, 19 nt, Human
uggaacaaacugcaaugac

SEQ ID NO: 599294 - RNA, 20 nt, Human
accucccucuguggguggga

SEQ ID NO: 599295 - RNA, 19 nt, Human
ccuggcccugcugcgcggg

SEQ ID NO: 599296 - RNA, 22 nt, Human
acacagaugcuauuuagucucu

SEQ ID NO: 599297 - RNA, 22 nt, Human
uugaucuugugauaguucaacu

SEQ ID NO: 599298 - RNA, 22 nt, Human
aggaagagcauucacaugguag

SEQ ID NO: 599299 - RNA, 22 nt, Human
uagaaacaagggagaggauucu

SEQ ID NO: 599300 - RNA, 22 nt, Human
ccugggcucaagcgaucuuguc

SEQ ID NO: 599301 - RNA, 22 nt, Human
cugagcugggcucucuugaggg

SEQ ID NO: 599302 - RNA, 22 nt, Human
ucacagaauuuuugcuuccagu

SEQ ID NO: 599303 - RNA, 22 nt, Human
ucugaggaagcagcaggaagug

SEQ ID NO: 599304 - RNA, 22 nt, Human
agccaaggcagcuagagcucug

SEQ ID NO: 599305 - RNA, 22 nt, Human
acccuuuagaaggcaucucagu

SEQ ID NO: 599306 - RNA, 22 nt, Human
ugcacgugugagcauucacaug

SEQ ID NO: 599307 - RNA, 22 nt, Human
acaggcuuacaggcugcaagua

SEQ ID NO: 599308 - RNA, 22 nt, Human
cacccucccgucagccccuggg

SEQ ID NO: 599309 - RNA, 18 nt, Human
aggccacacuccagaaca

SEQ ID NO: 599310 - RNA, 23 nt, Human
aauuggacuugcugucaaacuuc

SEQ ID NO: 599311 - RNA, 22 nt, Human
ugcagcucauugcuggggucug

SEQ ID NO: 599312 - RNA, 22 nt, Human
agucccagcuucccccaugcag

SEQ ID NO: 599313 - RNA, 22 nt, Human
cuucaagauauuucuagaauca

SEQ ID NO: 599314 - RNA, 22 nt, Human
uucuucaaccaucuacauaaac

SEQ ID NO: 599315 - RNA, 22 nt, Human
cagccagcugaauguaccauga

SEQ ID NO: 599316 - RNA, 22 nt, Human
agauacauuguucuaagcauug

SEQ ID NO: 599317 - RNA, 22 nt, Human
agcuuuauauuuaaugaauucu

SEQ ID NO: 599318 - RNA, 23 nt, Human
aaauaggaguaucuggaucauga

SEQ ID NO: 599319 - RNA, 22 nt, Human
acuucauugcuaagaacaaggu

SEQ ID NO: 599320 - RNA, 22 nt, Human
gugcaaugugcuucgugccaug

SEQ ID NO: 599321 - RNA, 22 nt, Human
uauucacagcugccgcacucag

SEQ ID NO: 599322 - RNA, 22 nt, Human
ugaugggaaaaugaggccuggg

SEQ ID NO: 599323 - RNA, 22 nt, Human
caguccuuauuccuauauuccu

SEQ ID NO: 599324 - RNA, 20 nt, Human
cccuaggaacgcagcaggag

SEQ ID NO: 599325 - RNA, 22 nt, Human
ugagggcagagcacuggggagc

SEQ ID NO: 599326 - RNA, 22 nt, Human
uguccuuguuccuaauguaaaa

SEQ ID NO: 599327 - RNA, 22 nt, Human
cacuguacugugaauaaggagg

SEQ ID NO: 599328 - RNA, 22 nt, Human
ggguggccuucauagcucaggg

SEQ ID NO: 599329 - RNA, 22 nt, Human
guuagcauuuguuuaauaucag

SEQ ID NO: 599330 - RNA, 22 nt, Human
gugaagcauaugcuucucugcc

SEQ ID NO: 599331 - RNA, 22 nt, Human
cacuuuguuuauugugcaguua

SEQ ID NO: 599332 - RNA, 22 nt, Human
gcugagcucccagcaguaucug

SEQ ID NO: 599333 - RNA, 22 nt, Human
agcuucuucuauuuuggggcca

SEQ ID NO: 599334 - RNA, 22 nt, Human
ucacagagaaaagcuaucacaa

SEQ ID NO: 599335 - RNA, 22 nt, Human
uguuuucugauucucguguggu

SEQ ID NO: 599336 - RNA, 22 nt, Human
cugcugaggcuccggaccaagu

SEQ ID NO: 599337 - RNA, 22 nt, Human
aagagacuauggugucuaugaa

SEQ ID NO: 599338 - RNA, 22 nt, Human
augcaaaauaaggcagaaacau

SEQ ID NO: 599339 - RNA, 22 nt, Human
aacauuucuucugaaacugagu

SEQ ID NO: 599340 - RNA, 22 nt, Human
auaugcuugacucuuucacauc

SEQ ID NO: 599341 - RNA, 22 nt, Human
cuuuccuaguaguuacagaaug

SEQ ID NO: 599342 - RNA, 22 nt, Human
cacaugaaggcuggggucguga

SEQ ID NO: 599343 - RNA, 22 nt, Human
ucugcaggugggccccuagaau

SEQ ID NO: 599344 - RNA, 22 nt, Human
cugcccaggggagugcugucgg

SEQ ID NO: 599345 - RNA, 22 nt, Human
aggaggcugguucaggccauau

SEQ ID NO: 599346 - RNA, 22 nt, Human
agaauaaauguuggacuuagga

SEQ ID NO: 599347 - RNA, 22 nt, Human
uagaagaaaagcacuuagagau

SEQ ID NO: 599348 - RNA, 19 nt, Human
uggaggccucaggaaaaga

SEQ ID NO: 599349 - RNA, 22 nt, Human
uaaugcauguaaugggcugaua

SEQ ID NO: 599350 - RNA, 22 nt, Human
cccaggccagaacuugguugcu

SEQ ID NO: 599351 - RNA, 22 nt, Human
ucccaggauguuggcggcaggu

SEQ ID NO: 599352 - RNA, 22 nt, Human
guuagagggcugccuuuuguuu

SEQ ID NO: 599353 - RNA, 22 nt, Human
aggaauguuuagaaugucagaa

SEQ ID NO: 599354 - RNA, 22 nt, Human
ucuccaggccuuucccaucuua

SEQ ID NO: 599355 - RNA, 22 nt, Human
ucaaguauuuauuucugcuggc

SEQ ID NO: 599356 - RNA, 22 nt, Human
uggcugcugcagacagacagga

SEQ ID NO: 599357 - RNA, 22 nt, Human
ucugauaagugguguauacugu

SEQ ID NO: 599358 - RNA, 22 nt, Human
uaaaguguuguacaaauguaug

SEQ ID NO: 599359 - RNA, 22 nt, Human
aacccauguuggaagcuuauca

SEQ ID NO: 599360 - RNA, 22 nt, Human
acagguggcuuauuggcugauu

SEQ ID NO: 599361 - RNA, 22 nt, Human
uggagcagaggcugagguuggg

SEQ ID NO: 599362 - RNA, 22 nt, Human
aaucacauuaagcccuguucag

SEQ ID NO: 599363 - RNA, 22 nt, Human
auggaaagugcauggaagucau

SEQ ID NO: 599364 - RNA, 22 nt, Human
uuguuuaauaucgugaaguacu

SEQ ID NO: 599365 - RNA, 22 nt, Human
cacuguacagcauuaacaaggc

SEQ ID NO: 599366 - RNA, 22 nt, Human
gcccccagagaaugagguacga

SEQ ID NO: 599367 - RNA, 23 nt, Human
ugggagcucaagggaggcugccc

SEQ ID NO: 599368 - RNA, 22 nt, Human
ugaacgcagguccacauggcuc

SEQ ID NO: 599369 - RNA, 22 nt, Human
ggagcacagccuugccaguacc

SEQ ID NO: 599370 - RNA, 19 nt, Human
aucuacaauuauucucagu

SEQ ID NO: 599371 - RNA, 22 nt, Human
ggguccagcuacaucagggugg

SEQ ID NO: 599372 - RNA, 22 nt, Human
gcugcucugugacagccuccgg

SEQ ID NO: 599373 - RNA, 22 nt, Human
uggucagcuucagaguguucca

SEQ ID NO: 599374 - RNA, 22 nt, Human
agcaacagcccugagguucaug

SEQ ID NO: 599375 - RNA, 22 nt, Human
acaaagcuagagaagagaauug

SEQ ID NO: 599376 - RNA, 22 nt, Human
auaccugaucaaggcaaaaaug

SEQ ID NO: 599377 - RNA, 22 nt, Human
agaggggcaaguaaagagucuu

SEQ ID NO: 599378 - RNA, 22 nt, Human
ggcuuucaacacaggcuuuccu

SEQ ID NO: 599379 - RNA, 22 nt, Human
uaaggccaauuacauauguuca

SEQ ID NO: 599380 - RNA, 22 nt, Human
uaagccacuagucuguuaugaa

SEQ ID NO: 599381 - RNA, 22 nt, Human
acagacauucagcuaagucuau

SEQ ID NO: 599382 - RNA, 22 nt, Human
cuccagagagaaaggaggccgc

SEQ ID NO: 599383 - RNA, 22 nt, Human
cagugccucuuaagugucaccc

SEQ ID NO: 599384 - RNA, 22 nt, Human
ugaggcucaagaaagauuuguu

SEQ ID NO: 599385 - RNA, 22 nt, Human
uugaaagacauuauuuauauau

SEQ ID NO: 599386 - RNA, 17 nt, Human
caggucugaggccaggc

SEQ ID NO: 599387 - RNA, 22 nt, Human
gcagcugcaagcacuucuggca

SEQ ID NO: 599388 - RNA, 22 nt, Human
uauacagauggaaagauacaca

SEQ ID NO: 599389 - RNA, 22 nt, Human
gguccaggaucaaggcaucacc

SEQ ID NO: 599390 - RNA, 22 nt, Human
acugucaugaucgaagauguca

SEQ ID NO: 599391 - RNA, 22 nt, Human
acagccuuggguucucuggggg

SEQ ID NO: 599392 - RNA, 22 nt, Human
uggaaagggacuuaugaguucc

SEQ ID NO: 599393 - RNA, 22 nt, Human
ugaggccucauuuagggagagg

SEQ ID NO: 599394 - RNA, 22 nt, Human
acaacacagcaaaaccccaucu

SEQ ID NO: 599395 - RNA, 22 nt, Human
augcuugaaaaccccaugaaua

SEQ ID NO: 599396 - RNA, 22 nt, Human
aguaaugcuucuagaacuauuu

SEQ ID NO: 599397 - RNA, 22 nt, Human
gcagugcuugaagagguggcca

SEQ ID NO: 599398 - RNA, 22 nt, Human
aggaaacaguugguaaugcaua

SEQ ID NO: 599399 - RNA, 22 nt, Human
cugcagucugacauacgaggac

SEQ ID NO: 599400 - RNA, 22 nt, Human
agcugcagcuuccuaguccagc

SEQ ID NO: 599401 - RNA, 22 nt, Human
gguccuggaaauugacggaaag

SEQ ID NO: 599402 - RNA, 22 nt, Human
aaagugggaacaauggagagug

SEQ ID NO: 599403 - RNA, 22 nt, Human
ccugaggcuggcccuuccaucc

SEQ ID NO: 599404 - RNA, 22 nt, Human
cuacacuuguucgacugcagga

SEQ ID NO: 599405 - RNA, 22 nt, Human
aaaugcugcagcuaguguguuu

SEQ ID NO: 599406 - RNA, 22 nt, Human
agcaacuucuacagauauagca

SEQ ID NO: 599407 - RNA, 22 nt, Human
ugaggacaaucccuaacucaga

SEQ ID NO: 599408 - RNA, 22 nt, Human
uaaugugugucaucaguagagu

SEQ ID NO: 599409 - RNA, 22 nt, Human
cagcccuccuuucacucccagg

SEQ ID NO: 599410 - RNA, 22 nt, Human
ggagaugcuauguaguuugguu

SEQ ID NO: 599411 - RNA, 22 nt, Human
gcugaagagcaaggcugggucu

SEQ ID NO: 599412 - RNA, 22 nt, Human
uagccauugacuuaaagcuuau

SEQ ID NO: 599413 - RNA, 19 nt, Human
ugcugaggaugcaagaucc

SEQ ID NO: 599414 - RNA, 19 nt, Human
uaauaagcaauauggaagu

SEQ ID NO: 599415 - RNA, 22 nt, Human
ccugcucuuauagcuguuucca

SEQ ID NO: 599416 - RNA, 22 nt, Human
cacagccuuacugagauccacu

SEQ ID NO: 599417 - RNA, 19 nt, Human
ucugagguggaacuggggg

SEQ ID NO: 599418 - RNA, 22 nt, Human
agcagagaccauauagcccaga

SEQ ID NO: 599419 - RNA, 22 nt, Human
acugggcaucccauggcagagc

SEQ ID NO: 599420 - RNA, 22 nt, Human
uagcaguguugccguuggcugc

SEQ ID NO: 599421 - RNA, 22 nt, Human
augagaaagaguuguaucuaga

SEQ ID NO: 599422 - RNA, 23 nt, Human
ucugaccauuugacaacauccug

SEQ ID NO: 599423 - RNA, 22 nt, Human
cuuagaauuuugccuacuacaa

SEQ ID NO: 599424 - RNA, 22 nt, Human
cuccagucuaguagagccugcu

SEQ ID NO: 599425 - RNA, 22 nt, Human
uucucugugagggugcuggauu

SEQ ID NO: 599426 - RNA, 22 nt, Human
ccuuucucauuuuaagcauuag

SEQ ID NO: 599427 - RNA, 18 nt, Human
aacaugcauuagaacugc

SEQ ID NO: 599428 - RNA, 22 nt, Human
ugaaauauuuagagaguaaguu

SEQ ID NO: 599429 - RNA, 21 nt, Human
cccaagggaggcaggauaagg

SEQ ID NO: 599430 - RNA, 22 nt, Human
agccaugcaccuuacucuugcu

SEQ ID NO: 599431 - RNA, 23 nt, Human
ggguccagccaauuccaaggaaa

SEQ ID NO: 599432 - RNA, 22 nt, Human
gcuuacaaggguaggaagucua

SEQ ID NO: 599433 - RNA, 20 nt, Human
cuuagcuucuaagguucugg

SEQ ID NO: 599434 - RNA, 21 nt, Human
acagacagggccagugucccc

SEQ ID NO: 599435 - RNA, 22 nt, Human
guaguucugcagugucaccuga

SEQ ID NO: 599436 - RNA, 22 nt, Human
uggguaggggacguggaagaaa

SEQ ID NO: 599437 - RNA, 22 nt, Human
guacauauuaaaggucuauaaa

SEQ ID NO: 599438 - RNA, 22 nt, Human
ggucucagguagggccuaggaa

SEQ ID NO: 599439 - RNA, 22 nt, Human
uuuuucuggauaacuguaucuc

SEQ ID NO: 599440 - RNA, 22 nt, Human
ugggcagcagcaaagccagacu

SEQ ID NO: 599441 - RNA, 22 nt, Human
uguccccugcccagggauggga

SEQ ID NO: 599442 - RNA, 22 nt, Human
gugucccaaagauuagaaauca

SEQ ID NO: 599443 - RNA, 20 nt, Human
gcaauguugguuccugucac

SEQ ID NO: 599444 - RNA, 22 nt, Human
ugcugaggucacggcggccaga

SEQ ID NO: 599445 - RNA, 21 nt, Human
agugugugauaggcaggaaga

SEQ ID NO: 599446 - RNA, 22 nt, Human
agauacacagagguaaagauga

SEQ ID NO: 599447 - RNA, 22 nt, Human
ccuaggcuaauucaguccagua

SEQ ID NO: 599448 - RNA, 22 nt, Human
aagugaaacauguaucucuuua

SEQ ID NO: 599449 - RNA, 22 nt, Human
uauuuuaucugccagaguggag

SEQ ID NO: 599450 - RNA, 22 nt, Human
acucugaggagugacuagaggu

SEQ ID NO: 599451 - RNA, 22 nt, Human
aaacuucagugaaugacuuaug

SEQ ID NO: 599452 - RNA, 22 nt, Human
auucugaucauucaagauguca

SEQ ID NO: 599453 - RNA, 22 nt, Human
ggccucagaggaggugugaguc

SEQ ID NO: 599454 - RNA, 22 nt, Human
cugagcuggucuauggacuugg

SEQ ID NO: 599455 - RNA, 22 nt, Human
agagggaaauccaggagugcuu

SEQ ID NO: 599456 - RNA, 22 nt, Human
ugggguagggaaaagaagucga

SEQ ID NO: 599457 - RNA, 22 nt, Human
acagcuguauccccagagcuca

SEQ ID NO: 599458 - RNA, 22 nt, Human
gagggccuggcacagggaggcu

SEQ ID NO: 599459 - RNA, 22 nt, Human
ugaaggugagcauuugcugauu

SEQ ID NO: 599460 - RNA, 22 nt, Human
ggaguggcagagaggguauacu

SEQ ID NO: 599461 - RNA, 22 nt, Human
gaagucagucaucuccugucuc

SEQ ID NO: 599462 - RNA, 22 nt, Human
uuuaagacucuuguaguacaca

SEQ ID NO: 599463 - RNA, 22 nt, Human
uaacuguugugcgggucucugg

SEQ ID NO: 599464 - RNA, 22 nt, Human
guguuugugagcuaggugacau

SEQ ID NO: 599465 - RNA, 22 nt, Human
aggcuuuguaccuggggucuua

SEQ ID NO: 599466 - RNA, 22 nt, Human
aggcucuggcaacagcuggugu

SEQ ID NO: 599467 - RNA, 22 nt, Human
ugggagcaaaugacugggagau

SEQ ID NO: 599468 - RNA, 22 nt, Human
uucaggaaucaaccaagucauu

SEQ ID NO: 599469 - RNA, 22 nt, Human
cacuguacccauuuaaauaaau

SEQ ID NO: 599470 - RNA, 22 nt, Human
accuuucaaaguggcuaucacu

SEQ ID NO: 599471 - RNA, 22 nt, Human
cagcuucuguuuauugugugcc

SEQ ID NO: 599472 - RNA, 22 nt, Human
gucuccagagguuacauccugu

SEQ ID NO: 599473 - RNA, 22 nt, Human
cagucaggaaugccuccuuccu

SEQ ID NO: 599474 - RNA, 22 nt, Human
cggggccuagcugcacacccuc

SEQ ID NO: 599475 - RNA, 17 nt, Human
gcucuggcacaggauug

SEQ ID NO: 599476 - RNA, 23 nt, Human
ugagaagccauuagagcaggugg

SEQ ID NO: 599477 - RNA, 19 nt, Human
agacucugugugagacuuu

SEQ ID NO: 599478 - RNA, 22 nt, Human
uggcccuguccucauuucaucu

SEQ ID NO: 599479 - RNA, 22 nt, Human
ccugggucacucaggcaggcgg

SEQ ID NO: 599480 - RNA, 22 nt, Human
acaguuuagaaugccacauagu

SEQ ID NO: 599481 - RNA, 22 nt, Human
gaugggcugucugagcgcugug

SEQ ID NO: 599482 - RNA, 22 nt, Human
gcugggcagcaggcucuccggg

SEQ ID NO: 599483 - RNA, 22 nt, Human
ugggacugcucuugcugggguc

SEQ ID NO: 599484 - RNA, 22 nt, Human
uuccaaagcugcuuuauuuagu

SEQ ID NO: 599485 - RNA, 22 nt, Human
aggaucauauaagcuccagcua

SEQ ID NO: 599486 - RNA, 22 nt, Human
uccugccuagcaggugaccuau

SEQ ID NO: 599487 - RNA, 22 nt, Human
uucuucuuuccuauaauuaauu

SEQ ID NO: 599488 - RNA, 22 nt, Human
uggccuugauaacuggggagag

SEQ ID NO: 599489 - RNA, 22 nt, Human
agaaaccuccauuuauucacuc

SEQ ID NO: 599490 - RNA, 22 nt, Human
augaaaacuuuagccucauuag

SEQ ID NO: 599491 - RNA, 22 nt, Human
uacauacagccaaguaugaagu

SEQ ID NO: 599492 - RNA, 22 nt, Human
auuaaauuaaguggcuaauuua

SEQ ID NO: 599493 - RNA, 22 nt, Human
agcacagaugugaguggaggcu

SEQ ID NO: 599494 - RNA, 22 nt, Human
uacacuguagguggcaggcagc

SEQ ID NO: 599495 - RNA, 22 nt, Human
ggggugggguuacucauugugc

SEQ ID NO: 599496 - RNA, 22 nt, Human
uggucccugaucuaaugucuca

SEQ ID NO: 599497 - RNA, 20 nt, Human
cugagcgucuaagaggugag

SEQ ID NO: 599498 - RNA, 18 nt, Human
gcauuuuaaucugaggca

SEQ ID NO: 599499 - RNA, 22 nt, Human
ugggagaaacugucucucccac

SEQ ID NO: 599500 - RNA, 22 nt, Human
aaggcagagggcuggaucagag

SEQ ID NO: 599501 - RNA, 22 nt, Human
gauacacauuuuagcuuugucu

SEQ ID NO: 599502 - RNA, 17 nt, Human
cuggagcuguguaaccu

SEQ ID NO: 599503 - RNA, 22 nt, Human
gcugauaaauaguugauguacc

SEQ ID NO: 599504 - RNA, 22 nt, Human
aggcaggugggagugauuccuu

SEQ ID NO: 599505 - RNA, 22 nt, Human
aguuuucugggaucacuggaau

SEQ ID NO: 599506 - RNA, 22 nt, Human
cagcagugcuucagugugagau

SEQ ID NO: 599507 - RNA, 22 nt, Human
cugcugcugcuaucuacccagg

SEQ ID NO: 599508 - RNA, 22 nt, Human
uguguucuaugguucagggugg

SEQ ID NO: 599509 - RNA, 22 nt, Human
ggcagcagggucuagauugaug

SEQ ID NO: 599510 - RNA, 19 nt, Human
uugagaauuaucugaguca

SEQ ID NO: 599511 - RNA, 22 nt, Human
agagcacaggugcuggagccca

SEQ ID NO: 599512 - RNA, 22 nt, Human
agagcuggggcauaaaugccac

SEQ ID NO: 599513 - RNA, 22 nt, Human
cuuucagggcaacacuucuuuu

SEQ ID NO: 599514 - RNA, 22 nt, Human
cauuacuucucaugcuucaugc

SEQ ID NO: 599515 - RNA, 22 nt, Human
ucugaaauaggcuucuuuuggu

SEQ ID NO: 599516 - RNA, 22 nt, Human
uaacagcaggguuacaggcauu

SEQ ID NO: 599517 - RNA, 22 nt, Human
aaauucagcauccugcacugga

SEQ ID NO: 599518 - RNA, 22 nt, Human
uauggaaagcucuuuuugauug

SEQ ID NO: 599519 - RNA, 20 nt, Human
uucaaaguguaugauaugca

SEQ ID NO: 599520 - RNA, 22 nt, Human
aaacacuuccuguaacaugaca

SEQ ID NO: 599521 - RNA, 22 nt, Human
auuguauaauuguauugccaaa

SEQ ID NO: 599522 - RNA, 22 nt, Human
aagcugccugggaggaagggcu

SEQ ID NO: 599523 - RNA, 22 nt, Human
uauaagaagugaagaagaguua

SEQ ID NO: 599524 - RNA, 22 nt, Human
uucagaggguuuuagggucaga

SEQ ID NO: 599525 - RNA, 22 nt, Human
cccccagaugcgagccauagcc

SEQ ID NO: 599526 - RNA, 22 nt, Human
ccaggcccaggguacugaccaa

SEQ ID NO: 599527 - RNA, 22 nt, Human
uggaagcggacguuguggggug

SEQ ID NO: 599528 - RNA, 22 nt, Human
uacugaauggggcaguaagaaa

SEQ ID NO: 599529 - RNA, 22 nt, Human
aucauuuaaaacaagucucuau

SEQ ID NO: 599530 - RNA, 22 nt, Human
ugucuucaucucagacacaguu

SEQ ID NO: 599531 - RNA, 22 nt, Human
gcuggggcugggcugaggaaga

SEQ ID NO: 599532 - RNA, 22 nt, Human
uccauacccagcuuucucacac

SEQ ID NO: 599533 - RNA, 22 nt, Human
uucucuggccugaggcgaggcc

SEQ ID NO: 599534 - RNA, 22 nt, Human
cccugaggagagcgcuucccga

SEQ ID NO: 599535 - RNA, 22 nt, Human
acagacaaguaguucagacaag

SEQ ID NO: 599536 - RNA, 22 nt, Human
ccuccucuggugcugccaaccc

SEQ ID NO: 599537 - RNA, 22 nt, Human
cagacuuucuggaagcuaaaaa

SEQ ID NO: 599538 - RNA, 22 nt, Human
uucagaaaaagaccauugcaau

SEQ ID NO: 599539 - RNA, 22 nt, Human
gcccagggcugcaaguggacgc

SEQ ID NO: 599540 - RNA, 22 nt, Human
ugacauuuacuauuccugguua

SEQ ID NO: 599541 - RNA, 21 nt, Human
cagcuuugucugucuucgggg

SEQ ID NO: 599542 - RNA, 22 nt, Human
aggggagguggcagaaaugugc

SEQ ID NO: 599543 - RNA, 22 nt, Human
uuccuaugaauaaauauugagc

SEQ ID NO: 599544 - RNA, 21 nt, Human
acaguaaauucccugcaaaga

SEQ ID NO: 599545 - RNA, 22 nt, Human
ccugccucaggacucugcauau

SEQ ID NO: 599546 - RNA, 22 nt, Human
gcuggguauuuuaagaaaggaa

SEQ ID NO: 599547 - RNA, 20 nt, Human
uucuuucaucuacacguugu

SEQ ID NO: 599548 - RNA, 22 nt, Human
uaggcacaagaccaugcaaagg

SEQ ID NO: 599549 - RNA, 22 nt, Human
acugucaccuaaauuuucauug

SEQ ID NO: 599550 - RNA, 22 nt, Human
cagagagagucaaaucuuugcu

SEQ ID NO: 599551 - RNA, 21 nt, Human
gucuuucuaccucuauguggc

SEQ ID NO: 599552 - RNA, 22 nt, Human
acacuggguuaccuguacuauu

SEQ ID NO: 599553 - RNA, 22 nt, Human
aaaaacugcaauuacuuuuguc

SEQ ID NO: 599554 - RNA, 22 nt, Human
uccaagaguucaaggcuacagu

SEQ ID NO: 599555 - RNA, 22 nt, Human
guucaaaucucaggacuucaga

SEQ ID NO: 599556 - RNA, 22 nt, Human
augcgagugaugcagaguggcu

SEQ ID NO: 599557 - RNA, 22 nt, Human
acauuucagauguaaugugaug

SEQ ID NO: 599558 - RNA, 22 nt, Human
aaguuucaugacuugguuauua

SEQ ID NO: 599559 - RNA, 21 nt, Human
ggcagaaguagcauggacggg

SEQ ID NO: 599560 - RNA, 22 nt, Human
aggcccugggcaguucuguagc

SEQ ID NO: 599561 - RNA, 22 nt, Human
cagaaacacuguauuuagggaa

SEQ ID NO: 599562 - RNA, 20 nt, Human
caguugaaauaauuuguuug

SEQ ID NO: 599563 - RNA, 22 nt, Human
guggucagcagcagugggagug

SEQ ID NO: 599564 - RNA, 20 nt, Human
ucaggcuggugggcuuuccc

SEQ ID NO: 599565 - RNA, 22 nt, Human
ggaugcugucuaagcugaggac

SEQ ID NO: 599566 - RNA, 22 nt, Human
aucagaagugauguguguuauu

SEQ ID NO: 599567 - RNA, 22 nt, Human
ccacagccauuccagggaggcu

SEQ ID NO: 599568 - RNA, 22 nt, Human
uauuugauagagauaaaugaua

SEQ ID NO: 599569 - RNA, 22 nt, Human
agggccugugcugaguagacga

SEQ ID NO: 599570 - RNA, 22 nt, Human
auaauaaugaaagccacugugu

SEQ ID NO: 599571 - RNA, 22 nt, Human
acuguauuccuacuagaaucua

SEQ ID NO: 599572 - RNA, 22 nt, Human
ucccuccuggugaugaugcaaa

SEQ ID NO: 599573 - RNA, 22 nt, Human
gguguugggcucacugguccuu

SEQ ID NO: 599574 - RNA, 20 nt, Human
ucugaacaaaauguaauguc

SEQ ID NO: 599575 - RNA, 22 nt, Human
ccucaggcuucgucuuccaccc

SEQ ID NO: 599576 - RNA, 22 nt, Human
aaugcauaaugguuugugacaa

SEQ ID NO: 599577 - RNA, 22 nt, Human
ucccucucuagccuguucagua

SEQ ID NO: 599578 - RNA, 22 nt, Human
aauguguagcauuuaaugcagu

SEQ ID NO: 599579 - RNA, 22 nt, Human
gcuggugcauuagcugcaguuc

SEQ ID NO: 599580 - RNA, 22 nt, Human
ccugccagugccucccacuggu

SEQ ID NO: 599581 - RNA, 22 nt, Human
gcauuuuucuaaucauuggcau

SEQ ID NO: 599582 - RNA, 22 nt, Human
aaauggcaacagaagggaguuc

SEQ ID NO: 599583 - RNA, 22 nt, Human
gagcuagaguuuguaggguaga

SEQ ID NO: 599584 - RNA, 22 nt, Human
accagcugccuuuucuuaguag

SEQ ID NO: 599585 - RNA, 18 nt, Human
gcagcugcaguuguagcu

SEQ ID NO: 599586 - RNA, 22 nt, Human
caaacuugucuaucuaggaauc

SEQ ID NO: 599587 - RNA, 22 nt, Human
uuuauaaacaguaccacggugc

SEQ ID NO: 599588 - RNA, 22 nt, Human
cugaaguucuacaagccucagg

SEQ ID NO: 599589 - RNA, 21 nt, Human
ugccagggauuuacagagccu

SEQ ID NO: 599590 - RNA, 22 nt, Human
gaacacuguuucuucgugaaca

SEQ ID NO: 599591 - RNA, 22 nt, Human
caacuuggcucucuggcuaucc

SEQ ID NO: 599592 - RNA, 22 nt, Human
ggccucugccccagccacaccu

SEQ ID NO: 599593 - RNA, 22 nt, Human
gccaggcuggccagcaccuucu

SEQ ID NO: 599594 - RNA, 22 nt, Human
agcagauggugucaugggaugg

SEQ ID NO: 599595 - RNA, 22 nt, Human
aagggaaaucauauggugcagu

SEQ ID NO: 599596 - RNA, 22 nt, Human
cuggggaggcagggcugccccu

SEQ ID NO: 599597 - RNA, 23 nt, Human
ucaauugaugauguucucuuuug

SEQ ID NO: 599598 - RNA, 20 nt, Human
aggggucuagcagcagugcu

SEQ ID NO: 599599 - RNA, 22 nt, Human
gagaaggauguggcucauagcu

SEQ ID NO: 599600 - RNA, 22 nt, Human
cuucauuuggagaacugugcuu

SEQ ID NO: 599601 - RNA, 22 nt, Human
gagaggcugaaaucacaggagc

SEQ ID NO: 599602 - RNA, 22 nt, Human
guggauggagcuggaagccauu

SEQ ID NO: 599603 - RNA, 22 nt, Human
ucucuggaguauaaccagggau

SEQ ID NO: 599604 - RNA, 22 nt, Human
uuuaaauaggacuccugggggu

SEQ ID NO: 599605 - RNA, 22 nt, Human
gcaggcagaucaccugucagga

SEQ ID NO: 599606 - RNA, 22 nt, Human
uugcagggauaaaacaagugaa

SEQ ID NO: 599607 - RNA, 20 nt, Human
agggaggugcugggccugag

SEQ ID NO: 599608 - RNA, 22 nt, Human
uccugggcgauuuucugaauau

SEQ ID NO: 599609 - RNA, 22 nt, Human
acagcauugcuccaucucaaga

SEQ ID NO: 599610 - RNA, 22 nt, Human
aaugaacacagcccucuacuuu

SEQ ID NO: 599611 - RNA, 22 nt, Human
ucucuucugaccuagccuugga

SEQ ID NO: 599612 - RNA, 22 nt, Human
ucuugacauuguuguuagcagg

SEQ ID NO: 599613 - RNA, 22 nt, Human
gacacugugcuagcugggcuua

SEQ ID NO: 599614 - RNA, 22 nt, Human
guguguccucaguaguggcaug

SEQ ID NO: 599615 - RNA, 22 nt, Human
aagcucugggguacacaucugc

SEQ ID NO: 599616 - RNA, 22 nt, Human
aacaaugcuugccaagugugau

SEQ ID NO: 599617 - RNA, 18 nt, Human
ugcuccaggcccaugggc

SEQ ID NO: 599618 - RNA, 22 nt, Human
gaagauuuucuccuuuaaauga

SEQ ID NO: 599619 - RNA, 22 nt, Human
cucuccugggcugaccguccga

SEQ ID NO: 599620 - RNA, 22 nt, Human
ugcccuggugaagugcucuccu

SEQ ID NO: 599621 - RNA, 23 nt, Human
ugcuggcuguguuauugccaaca

SEQ ID NO: 599622 - RNA, 22 nt, Human
cacacauuaauaucaaaggcuc

SEQ ID NO: 599623 - RNA, 22 nt, Human
uuuaaaaaacuagucugagucu

SEQ ID NO: 599624 - RNA, 22 nt, Human
gucuuauuaugagguuagacuu

SEQ ID NO: 599625 - RNA, 22 nt, Human
cugggucucuuaccaugugacu

SEQ ID NO: 599626 - RNA, 22 nt, Human
auguuauuaaaguacagauucu

SEQ ID NO: 599627 - RNA, 22 nt, Human
gugacaaaggucaagcuuuuga

SEQ ID NO: 599628 - RNA, 22 nt, Human
cccgggagguggagacugcagu

SEQ ID NO: 599629 - RNA, 17 nt, Human
uggcacagaggugcuau

SEQ ID NO: 599630 - RNA, 23 nt, Human
cccuucagcgagggcauuaaggu

SEQ ID NO: 599631 - RNA, 22 nt, Human
guucaagguuuuacagagugua

SEQ ID NO: 599632 - RNA, 22 nt, Human
cagucacauuucgacauaacua

SEQ ID NO: 599633 - RNA, 22 nt, Human
ugaaaacuccaaguuucaucag

SEQ ID NO: 599634 - RNA, 22 nt, Human
agugcuccuuucauugcugccc

SEQ ID NO: 599635 - RNA, 22 nt, Human
ugacaaauacaauaagaucugu

SEQ ID NO: 599636 - RNA, 22 nt, Human
caggcagaguuagagcaacugg

SEQ ID NO: 599637 - RNA, 20 nt, Human
agaauucuuacccuuugaug

SEQ ID NO: 599638 - RNA, 22 nt, Human
auuauuguuuuaauaguagaga

SEQ ID NO: 599639 - RNA, 22 nt, Human
uccaucugucuuucccauccac

SEQ ID NO: 599640 - RNA, 22 nt, Human
aacagucuuacagaaguagcca

SEQ ID NO: 599641 - RNA, 22 nt, Human
uggagaguaaauggcagaauca

SEQ ID NO: 599642 - RNA, 22 nt, Human
gggcugagccacagcuuuuguu

SEQ ID NO: 599643 - RNA, 22 nt, Human
agagcuggaaucagaccucagg

SEQ ID NO: 599644 - RNA, 22 nt, Human
uggcagcagacaaaaggccauu

SEQ ID NO: 599645 - RNA, 22 nt, Human
agcuuccuuggcgcugaggccu

SEQ ID NO: 599646 - RNA, 22 nt, Human
ucagagaacuccacaccuuagg

SEQ ID NO: 599647 - RNA, 20 nt, Human
ccacaguggagacuggagac

SEQ ID NO: 599648 - RNA, 20 nt, Human
acuggaguacccuagagaag

SEQ ID NO: 599649 - RNA, 20 nt, Human
agcaccagugggggcagccc

SEQ ID NO: 599650 - RNA, 18 nt, Human
cccacacagcaguagcuc

SEQ ID NO: 599651 - RNA, 22 nt, Human
gcucccugcacucugcagcccu

SEQ ID NO: 599652 - RNA, 22 nt, Human
ugaaggaagaauaggcaguguu

SEQ ID NO: 599653 - RNA, 22 nt, Human
agccuggaagaaccugaagucu

SEQ ID NO: 599654 - RNA, 21 nt, Human
gcacagugccaggcacacagu

SEQ ID NO: 599655 - RNA, 22 nt, Human
uaccugagcccagugcagcaua

SEQ ID NO: 599656 - RNA, 22 nt, Human
uagcugucagcaaucaaguggu

SEQ ID NO: 599657 - RNA, 22 nt, Human
auugucucuuucaauaacuugu

SEQ ID NO: 599658 - RNA, 22 nt, Human
uacauugcuagaaauguauuuu

SEQ ID NO: 599659 - RNA, 22 nt, Human
uucugaaaggcagguuguuugc

SEQ ID NO: 599660 - RNA, 22 nt, Human
ggguggagcuuggacaccagua

SEQ ID NO: 599661 - RNA, 22 nt, Human
uuaaaccauaguuuaacauaag

SEQ ID NO: 599662 - RNA, 22 nt, Human
caggcugggaacgccacccgcu

SEQ ID NO: 599663 - RNA, 23 nt, Human
aagugcucaguggacagcauugc

SEQ ID NO: 599664 - RNA, 22 nt, Human
cccuuccuggaguacccucugu

SEQ ID NO: 599665 - RNA, 22 nt, Human
aaaguucauugaugacugaggu

SEQ ID NO: 599666 - RNA, 22 nt, Human
uugcauuucacuuucaguaggc

SEQ ID NO: 599667 - RNA, 22 nt, Human
uggaagcggugcuggcccaugg

SEQ ID NO: 599668 - RNA, 22 nt, Human
cauaacauccuugcuacuuuga

SEQ ID NO: 599669 - RNA, 21 nt, Human
aacugcuucccaucuuagggc

SEQ ID NO: 599670 - RNA, 22 nt, Human
uuucagaaccgcuaaaauaaau

SEQ ID NO: 599671 - RNA, 22 nt, Human
agcuugccucuuaaucaccuca

SEQ ID NO: 599672 - RNA, 20 nt, Human
cugcccagccacugagggau

SEQ ID NO: 599673 - RNA, 22 nt, Human
aaucacagaaggcagucuucua

SEQ ID NO: 599674 - RNA, 22 nt, Human
cauggccucaaaggacugcaga

SEQ ID NO: 599675 - RNA, 22 nt, Human
ucccaggaagaucccagggacc

SEQ ID NO: 599676 - RNA, 20 nt, Human
ucugcccaccccggcuccca

SEQ ID NO: 599677 - RNA, 22 nt, Human
aaaaagucauauucuuguuccu

SEQ ID NO: 599678 - RNA, 22 nt, Human
augcuuuacgacaaaaaacuca

SEQ ID NO: 599679 - RNA, 20 nt, Human
gcucccugguagaaauguuu

SEQ ID NO: 599680 - RNA, 22 nt, Human
uggcucuggugcgggcuccugc

SEQ ID NO: 599681 - RNA, 22 nt, Human
agagguauauauucuccauauu

SEQ ID NO: 599682 - RNA, 22 nt, Human
uuauuuaauuuucucacucaga

SEQ ID NO: 599683 - RNA, 18 nt, Human
ggagagugagaucaaaca

SEQ ID NO: 599684 - RNA, 22 nt, Human
ccucugagagaaggccuucagc

SEQ ID NO: 599685 - RNA, 22 nt, Human
uucugucacuuaggaggucaua

SEQ ID NO: 599686 - RNA, 16 nt, Human
cacagugcugcugcuc

SEQ ID NO: 599687 - RNA, 22 nt, Human
caaggacacucccugcugggca

SEQ ID NO: 599688 - RNA, 19 nt, Human
ccagggcuccaagcugagu

SEQ ID NO: 599689 - RNA, 22 nt, Human
uacaaagaguuuggucucuaga

SEQ ID NO: 599690 - RNA, 21 nt, Human
agauucaggacagcagucacu

SEQ ID NO: 599691 - RNA, 22 nt, Human
ucuuaaaccacacaugugcucu

SEQ ID NO: 599692 - RNA, 22 nt, Human
cugagagaaacaugacucagga

SEQ ID NO: 599693 - RNA, 19 nt, Human
agugaacuccauaucaggu

SEQ ID NO: 599694 - RNA, 22 nt, Human
ucuccaggugagggugguuaga

SEQ ID NO: 599695 - RNA, 22 nt, Human
aguggagguuacagcuguacau

SEQ ID NO: 599696 - RNA, 22 nt, Human
cugcuuuacucauaggguuuca

SEQ ID NO: 599697 - RNA, 22 nt, Human
aaggagaguacaggaguuggua

SEQ ID NO: 599698 - RNA, 22 nt, Human
ggaaaggggccuggaucuuuug

SEQ ID NO: 599699 - RNA, 22 nt, Human
aggagacccaaugccagaaaga

SEQ ID NO: 599700 - RNA, 21 nt, Human
uccagggcuuugauucucuca

SEQ ID NO: 599701 - RNA, 20 nt, Human
uggcaggaggcagcagugga

SEQ ID NO: 599702 - RNA, 22 nt, Human
augacauaagugaaaaacauca

SEQ ID NO: 599703 - RNA, 22 nt, Human
ggcaggcuccaagcauccuaug

SEQ ID NO: 599704 - RNA, 22 nt, Human
uaacacugugucugccauaucc

SEQ ID NO: 599705 - RNA, 22 nt, Human
uuucaagcauaacugggaagag

SEQ ID NO: 599706 - RNA, 22 nt, Human
gcaguguugacuaugguaugag

SEQ ID NO: 599707 - RNA, 22 nt, Human
aaacacugucucugguauugaa

SEQ ID NO: 599708 - RNA, 22 nt, Human
aagcuccccgaaacccaccucu

SEQ ID NO: 599709 - RNA, 19 nt, Human
uuacuucaggagugaaauu

SEQ ID NO: 599710 - RNA, 22 nt, Human
cccaggaauuggaggcugcagu

SEQ ID NO: 599711 - RNA, 22 nt, Human
ggcuggcacugaggagagcucu

SEQ ID NO: 599712 - RNA, 22 nt, Human
uaaaugacaacaccugcuuuug

SEQ ID NO: 599713 - RNA, 22 nt, Human
aaaccuuuaccagacuagcaag

SEQ ID NO: 599714 - RNA, 20 nt, Human
agggucaguagcacagagcu

SEQ ID NO: 599715 - RNA, 22 nt, Human
uaguguuccagaagcaaacaag

SEQ ID NO: 599716 - RNA, 22 nt, Human
aagcuguugaaguaauucagcc

SEQ ID NO: 599717 - RNA, 22 nt, Human
aggggcaggugcugcacuuaga

SEQ ID NO: 599718 - RNA, 22 nt, Human
aacaacuugcguucagagaugu

SEQ ID NO: 599719 - RNA, 22 nt, Human
ucucugggacacugggucaguu

SEQ ID NO: 599720 - RNA, 18 nt, Human
agggccagcugugaguag

SEQ ID NO: 599721 - RNA, 22 nt, Human
uucuccuuuuccaguucccagu

SEQ ID NO: 599722 - RNA, 22 nt, Human
ccagucuggcaggagggggaac

SEQ ID NO: 599723 - RNA, 22 nt, Human
ugcacugaauaguagacuguac

SEQ ID NO: 599724 - RNA, 22 nt, Human
ggcuagggagacagagggcaug

SEQ ID NO: 599725 - RNA, 22 nt, Human
gagcgggaggaacggcucgggc

SEQ ID NO: 599726 - RNA, 22 nt, Human
ucauggcagcccuuuacuagag

SEQ ID NO: 599727 - RNA, 22 nt, Human
gcugccucuccugaguugacag

SEQ ID NO: 599728 - RNA, 22 nt, Human
ucagggcuccggaaguggccuc

SEQ ID NO: 599729 - RNA, 22 nt, Human
aaagcaauugugguuuuuguca

SEQ ID NO: 599730 - RNA, 22 nt, Human
accaggacuuuguauucagcuu

SEQ ID NO: 599731 - RNA, 22 nt, Human
cagacuggcugaaggccgagug

SEQ ID NO: 599732 - RNA, 22 nt, Human
cacagcaagagcuaaaugacca

SEQ ID NO: 599733 - RNA, 22 nt, Human
aggugcuuggcucgugcacaca

SEQ ID NO: 599734 - RNA, 22 nt, Human
gcagacagacugcagugauuuu

SEQ ID NO: 599735 - RNA, 22 nt, Human
caaaagcaguucuaucugaguu

SEQ ID NO: 599736 - RNA, 22 nt, Human
ggccucaucacagugcauuagu

SEQ ID NO: 599737 - RNA, 22 nt, Human
gaggccagccccucuugaaggc

SEQ ID NO: 599738 - RNA, 22 nt, Human
aagucucagaaaacuagugugg

SEQ ID NO: 599739 - RNA, 22 nt, Human
gccagagccacuuuugggugau

SEQ ID NO: 599740 - RNA, 22 nt, Human
acccaggguuccugggucccag

SEQ ID NO: 599741 - RNA, 17 nt, Human
agcagcugaagcagcca

SEQ ID NO: 599742 - RNA, 22 nt, Human
aucaggugaugcucugguuccc

SEQ ID NO: 599743 - RNA, 22 nt, Human
auggcucauuuaucuugcagcc

SEQ ID NO: 599744 - RNA, 22 nt, Human
caucuuaaauuaaagcuuaagg

SEQ ID NO: 599745 - RNA, 22 nt, Human
cuuauuucuccauccagaguca

SEQ ID NO: 599746 - RNA, 22 nt, Human
aaguaaauaucuguuuauagca

SEQ ID NO: 599747 - RNA, 22 nt, Human
uuacauaacgguaugaaaaaug

SEQ ID NO: 599748 - RNA, 22 nt, Human
aggccacagguggaagccagag

SEQ ID NO: 599749 - RNA, 22 nt, Human
agagcagcuggggcagagacca

SEQ ID NO: 599750 - RNA, 22 nt, Human
agguaggauagauaggaagacc

SEQ ID NO: 599751 - RNA, 20 nt, Human
auucaugucuuuauaaaagc

SEQ ID NO: 599752 - RNA, 22 nt, Human
gcugagguggcugccuuaguaa

SEQ ID NO: 599753 - RNA, 22 nt, Human
ugagauaacucugauuuauguu

SEQ ID NO: 599754 - RNA, 22 nt, Human
ggaaagccaggugcucuggugu

SEQ ID NO: 599755 - RNA, 22 nt, Human
ugaggcugacaaaagaugaggu

SEQ ID NO: 599756 - RNA, 22 nt, Human
ggcugcuugcuguuucuuggau

SEQ ID NO: 599757 - RNA, 22 nt, Human
ucuccaggaagcccucccugac

SEQ ID NO: 599758 - RNA, 22 nt, Human
cagagcagugggguuggucaga

SEQ ID NO: 599759 - RNA, 22 nt, Human
uaugucuuguguuugcuaaucu

SEQ ID NO: 599760 - RNA, 22 nt, Human
ucugggaugagaucagagacac

SEQ ID NO: 599761 - RNA, 22 nt, Human
acacagcucacaacgugugcau

SEQ ID NO: 599762 - RNA, 22 nt, Human
uggugccuugggccuacagcgc

SEQ ID NO: 599763 - RNA, 22 nt, Human
auguuacaauucaaaaugcugc

SEQ ID NO: 599764 - RNA, 22 nt, Human
cuaaacauguagcuuuuguggu

SEQ ID NO: 599765 - RNA, 22 nt, Human
agguaucugguaagaggcagac

SEQ ID NO: 599766 - RNA, 22 nt, Human
ccauuuaguaaggaagaacagc

SEQ ID NO: 599767 - RNA, 21 nt, Human
acaggcuuuagaaaaugacuc

SEQ ID NO: 599768 - RNA, 22 nt, Human
gugggcaggguugcuuucuccg

SEQ ID NO: 599769 - RNA, 22 nt, Human
gugucccaauguucaggacggc

SEQ ID NO: 599770 - RNA, 22 nt, Human
ugacacauuaaaugcucacaaa

SEQ ID NO: 599771 - RNA, 22 nt, Human
uucuaugugcuggagaauauuu

SEQ ID NO: 599772 - RNA, 19 nt, Human
aaagaucugggauugagac

SEQ ID NO: 599773 - RNA, 22 nt, Human
augcaagucuuaauaguuuagg

SEQ ID NO: 599774 - RNA, 22 nt, Human
ugacauuucuuguugauauaaa

SEQ ID NO: 599775 - RNA, 22 nt, Human
auaaacaagacuggccaacuuu

SEQ ID NO: 599776 - RNA, 22 nt, Human
ugccucugccuccauuguuagu

SEQ ID NO: 599777 - RNA, 22 nt, Human
agcagaugcauuaugauugaaa

SEQ ID NO: 599778 - RNA, 22 nt, Human
gguggcagaauaauugaagguc

SEQ ID NO: 599779 - RNA, 22 nt, Human
uccagggcagggugcgcauggg

SEQ ID NO: 599780 - RNA, 21 nt, Human
aaguuuuauguugccauuugu

SEQ ID NO: 599781 - RNA, 23 nt, Human
agcugaggcugugggugucagag

SEQ ID NO: 599782 - RNA, 21 nt, Human
ugggccaguagaaaggaaggc

SEQ ID NO: 599783 - RNA, 22 nt, Human
cugcagagcaaguucucuguug

SEQ ID NO: 599784 - RNA, 22 nt, Human
agugauggcaucggguccagca

SEQ ID NO: 599785 - RNA, 22 nt, Human
uagaaacauguucuguucuguu

SEQ ID NO: 599786 - RNA, 21 nt, Human
caguuacagccaggacaaggc

SEQ ID NO: 599787 - RNA, 22 nt, Human
aaggaagaagggaaguuacuua

SEQ ID NO: 599788 - RNA, 22 nt, Human
cugccuggcuaaacucaagucg

SEQ ID NO: 599789 - RNA, 22 nt, Human
ugagcugggcugggcugagcug

SEQ ID NO: 599790 - RNA, 22 nt, Human
gcaagggugugaaccaaugaga

SEQ ID NO: 599791 - RNA, 22 nt, Human
cucuaaauccaaauaagugucc

SEQ ID NO: 599792 - RNA, 22 nt, Human
gaacacaacucagaaugcuggu

SEQ ID NO: 599793 - RNA, 18 nt, Human
gugugcaguugcaggggu

SEQ ID NO: 599794 - RNA, 22 nt, Human
cagcacaucuccaagaauuucu

SEQ ID NO: 599795 - RNA, 18 nt, Human
cagacacucugcucugca

SEQ ID NO: 599796 - RNA, 22 nt, Human
uaacuucuuugguuuaaagaga

SEQ ID NO: 599797 - RNA, 22 nt, Human
uuuucaguuugcacugcagugc

SEQ ID NO: 599798 - RNA, 22 nt, Human
agcuuccuugaauucuguagaa

SEQ ID NO: 599799 - RNA, 22 nt, Human
ugcaguggaagagguggagauc

SEQ ID NO: 599800 - RNA, 22 nt, Human
ucuccaggcacuaccuggguaa

SEQ ID NO: 599801 - RNA, 22 nt, Human
guuuacagagacagaaaguagu

SEQ ID NO: 599802 - RNA, 22 nt, Human
uuuucaggugcaguaaucauau

SEQ ID NO: 599803 - RNA, 22 nt, Human
accaucugaguagagagaagua

SEQ ID NO: 599804 - RNA, 22 nt, Human
uuaugcaugagauaaaaauugg

SEQ ID NO: 599805 - RNA, 22 nt, Human
aggggcugggacagagccaagc

SEQ ID NO: 599806 - RNA, 22 nt, Human
gaagccaguguuugaagaauuu

SEQ ID NO: 599807 - RNA, 22 nt, Human
caggaugguggcaugaucagaa

SEQ ID NO: 599808 - RNA, 22 nt, Human
ccccucucccucacuuaucaau

SEQ ID NO: 599809 - RNA, 22 nt, Human
aaacaucaccauuuuaccuaau

SEQ ID NO: 599810 - RNA, 22 nt, Human
auggaaguuggaaccauucaua

SEQ ID NO: 599811 - RNA, 22 nt, Human
acauuucugucuuagggacugu

SEQ ID NO: 599812 - RNA, 22 nt, Human
cagcccccauggggaggucaag

SEQ ID NO: 599813 - RNA, 22 nt, Human
gcagggcuuuuugaaacauggu

SEQ ID NO: 599814 - RNA, 22 nt, Human
uggagagcugguucaaagcaga

SEQ ID NO: 599815 - RNA, 22 nt, Human
gugaagguggggagccucaguu

SEQ ID NO: 599816 - RNA, 22 nt, Human
ugucauugguacaaauugauug

SEQ ID NO: 599817 - RNA, 22 nt, Human
cgugcucuggacucguggcaca

SEQ ID NO: 599818 - RNA, 22 nt, Human
cuggagagaccgaaagaggcug

SEQ ID NO: 599819 - RNA, 22 nt, Human
uuugcacacacaauaacaaaug

SEQ ID NO: 599820 - RNA, 22 nt, Human
ugccagaugcaggagguaaggc

SEQ ID NO: 599821 - RNA, 22 nt, Human
agcuaaggacaguugauuuaga

SEQ ID NO: 599822 - RNA, 22 nt, Human
aguaaacauagaauguucuucc

SEQ ID NO: 599823 - RNA, 22 nt, Human
aggcagaggagaaugaucuucc

SEQ ID NO: 599824 - RNA, 22 nt, Human
auuuccuucggacaguuugggu

SEQ ID NO: 599825 - RNA, 22 nt, Human
ucuuguuaucaggaaaacagua

SEQ ID NO: 599826 - RNA, 22 nt, Human
ucugagguaccagcugguuuau

SEQ ID NO: 599827 - RNA, 22 nt, Human
uauuucuaagagauaucuguac

SEQ ID NO: 599828 - RNA, 22 nt, Human
aggaaacggcaaaacugcuuag

SEQ ID NO: 599829 - RNA, 22 nt, Human
cagcucugacacaguacaaaau

SEQ ID NO: 599830 - RNA, 22 nt, Human
ucacugcagagaccucuaguca

SEQ ID NO: 599831 - RNA, 23 nt, Human
ggcuggcccggggcugcuccuga

SEQ ID NO: 599832 - RNA, 22 nt, Human
uacauucacaguuguucaucuc

SEQ ID NO: 599833 - RNA, 22 nt, Human
ugggcuggcugaacuucaaccu

SEQ ID NO: 599834 - RNA, 22 nt, Human
ccucccuccauugccaucgucu

SEQ ID NO: 599835 - RNA, 22 nt, Human
uugauucuucugaauuugcaga

SEQ ID NO: 599836 - RNA, 22 nt, Human
ugcagagggaaaaggugcuccu

SEQ ID NO: 599837 - RNA, 22 nt, Human
uuagcauucucauuugcauaaa

SEQ ID NO: 599838 - RNA, 22 nt, Human
uacauaaugagcuaguuaaguu

SEQ ID NO: 599839 - RNA, 22 nt, Human
ggccaggcacugugugagauau

SEQ ID NO: 599840 - RNA, 22 nt, Human
caggaaaaugucaauggaaagc

SEQ ID NO: 599841 - RNA, 22 nt, Human
uaaagcauaaugaauaucuaga

SEQ ID NO: 599842 - RNA, 22 nt, Human
acuucucuucauagguggcaau

SEQ ID NO: 599843 - RNA, 22 nt, Human
accagggcggcuugaggaggca

SEQ ID NO: 599844 - RNA, 22 nt, Human
ucacuuuagaggaaacauugag

SEQ ID NO: 599845 - RNA, 22 nt, Human
caguguggguuugggaggagua

SEQ ID NO: 599846 - RNA, 22 nt, Human
uguguacacagauaguaauggc

SEQ ID NO: 599847 - RNA, 23 nt, Human
gccaggcuccggucuguggccac

SEQ ID NO: 599848 - RNA, 22 nt, Human
ucaggcugcuuucaugcuuaga

SEQ ID NO: 599849 - RNA, 22 nt, Human
ugcucuucacaguuucagcauc

SEQ ID NO: 599850 - RNA, 22 nt, Human
cuuguauuccccuaucucuaaa

SEQ ID NO: 599851 - RNA, 22 nt, Human
ccuggcugguggcagcgacaag

SEQ ID NO: 599852 - RNA, 22 nt, Human
ucauucagguugggcaaguguc

SEQ ID NO: 599853 - RNA, 23 nt, Human
cacaggcagaaaucaagacggua

SEQ ID NO: 599854 - RNA, 22 nt, Human
gacagcuguacacuccugguua

SEQ ID NO: 599855 - RNA, 22 nt, Human
uacagcuguugguguuuccucu

SEQ ID NO: 599856 - RNA, 22 nt, Human
ccuugcccgcugccucugaguu

SEQ ID NO: 599857 - RNA, 22 nt, Human
cccugguggggccagacuugcu

SEQ ID NO: 599858 - RNA, 22 nt, Human
accuucugaccaguuaucuuga

SEQ ID NO: 599859 - RNA, 22 nt, Human
caucugccuaaguggcccuguu

SEQ ID NO: 599860 - RNA, 22 nt, Human
guccacauaggaacccagcuuc

SEQ ID NO: 599861 - RNA, 22 nt, Human
cagcagcacucugcgggucccc

SEQ ID NO: 599862 - RNA, 22 nt, Human
agaggcucuggugggaguuggu

SEQ ID NO: 599863 - RNA, 22 nt, Human
uuuacaaggcaguuauuuuccu

SEQ ID NO: 599864 - RNA, 22 nt, Human
acagaguacagacaaaggucag

SEQ ID NO: 599865 - RNA, 22 nt, Human
guuaagaacuuguugaaggucu

SEQ ID NO: 599866 - RNA, 22 nt, Human
uucugguaccgugucagaaacc

SEQ ID NO: 599867 - RNA, 22 nt, Human
cauccaaacucucauuaucugu

SEQ ID NO: 599868 - RNA, 22 nt, Human
ucccuccacaccugcugguacc

SEQ ID NO: 599869 - RNA, 22 nt, Human
caaagaguuuuuucauauaaug

SEQ ID NO: 599870 - RNA, 22 nt, Human
gacaagacaccucucuccaucc

SEQ ID NO: 599871 - RNA, 22 nt, Human
ugggcuccucgucacucgcugu

SEQ ID NO: 599872 - RNA, 22 nt, Human
uggaggagggcuggugucugua

SEQ ID NO: 599873 - RNA, 22 nt, Human
caugcagggagcagaggagaca

SEQ ID NO: 599874 - RNA, 22 nt, Human
cucucuguauguguauauuuau

SEQ ID NO: 599875 - RNA, 22 nt, Human
uacauuguucaugcaugagaaa

SEQ ID NO: 599876 - RNA, 22 nt, Human
agugaaauccuggucaacaggu

SEQ ID NO: 599877 - RNA, 22 nt, Human
cagcggggccugugcuggggag

SEQ ID NO: 599878 - RNA, 19 nt, Human
uccuggugacccugaaauu

SEQ ID NO: 599879 - RNA, 22 nt, Human
ugccugcuuguuuaccuacucc

SEQ ID NO: 599880 - RNA, 22 nt, Human
uaugaccauaagauuacuguua

SEQ ID NO: 599881 - RNA, 20 nt, Human
aaucacaguuaacucuuucu

SEQ ID NO: 599882 - RNA, 22 nt, Human
cauuucaccuuagagaauuauu

SEQ ID NO: 599883 - RNA, 22 nt, Human
acagcugggaaucagcugggga

SEQ ID NO: 599884 - RNA, 22 nt, Human
uggccugacugucaggcuguau

SEQ ID NO: 599885 - RNA, 22 nt, Human
cuggagucucuucuguagcuac

SEQ ID NO: 599886 - RNA, 22 nt, Human
ucuggaguugugcaguggaccu

SEQ ID NO: 599887 - RNA, 22 nt, Human
ugcagggcuuccucuuggaguu

SEQ ID NO: 599888 - RNA, 22 nt, Human
acaggcuucucacagaaaaggg

SEQ ID NO: 599889 - RNA, 22 nt, Human
ugugaaugucuagguuuuaugu

SEQ ID NO: 599890 - RNA, 21 nt, Human
cccugcaggccagggcugagc

SEQ ID NO: 599891 - RNA, 22 nt, Human
ucuccugccacugcuucccauu

SEQ ID NO: 599892 - RNA, 22 nt, Human
auauguguguauuucuuacuag

SEQ ID NO: 599893 - RNA, 22 nt, Human
auucucaauggcuacuuucaua

SEQ ID NO: 599894 - RNA, 22 nt, Human
ccagugugguagguccacaggu

SEQ ID NO: 599895 - RNA, 22 nt, Human
uaggaacaguccuagaaaucug

SEQ ID NO: 599896 - RNA, 22 nt, Human
ccuccuggcccugggccuggaa

SEQ ID NO: 599897 - RNA, 22 nt, Human
uguggacugugcugccacagug

SEQ ID NO: 599898 - RNA, 22 nt, Human
caagagcuuuagaaaugcucau

SEQ ID NO: 599899 - RNA, 22 nt, Human
aauuaauauuuguggaauuaau

SEQ ID NO: 599900 - RNA, 22 nt, Human
caaugucugaccguuuugccca

SEQ ID NO: 599901 - RNA, 23 nt, Human
cucagggauagaaaggaagacag

SEQ ID NO: 599902 - RNA, 22 nt, Human
cagaaaccaaaugggaugggga

SEQ ID NO: 599903 - RNA, 22 nt, Human
agcugggacagacaacuauguu

SEQ ID NO: 599904 - RNA, 22 nt, Human
auaugcuggaguacaggaaaua

SEQ ID NO: 599905 - RNA, 22 nt, Human
aaacaacucggcaacugcuuuu

SEQ ID NO: 599906 - RNA, 22 nt, Human
gcagggcaguaagagcuagagu

SEQ ID NO: 599907 - RNA, 22 nt, Human
gcccagaacagugucacauguc

SEQ ID NO: 599908 - RNA, 22 nt, Human
aauaaugucuuuggcuugacca

SEQ ID NO: 599909 - RNA, 19 nt, Human
gagggcucauuugaacaau

SEQ ID NO: 599910 - RNA, 22 nt, Human
gcagcagcugacagugggugcc

SEQ ID NO: 599911 - RNA, 22 nt, Human
ucuuccuucuuugaugacaagg

SEQ ID NO: 599912 - RNA, 22 nt, Human
acaggagugaaucuggcacuua

SEQ ID NO: 599913 - RNA, 22 nt, Human
ucucugaguauccugaacugcc

SEQ ID NO: 599914 - RNA, 22 nt, Human
cagguccccuccccuaccaggc

SEQ ID NO: 599915 - RNA, 22 nt, Human
agacaacaucuaguuuggugga

SEQ ID NO: 599916 - RNA, 22 nt, Human
ucacauuuuccuugguaucugu

SEQ ID NO: 599917 - RNA, 23 nt, Human
ucugggcaccuuguugacaugau

SEQ ID NO: 599918 - RNA, 22 nt, Human
cugggagcuuguuaggaaugca

SEQ ID NO: 599919 - RNA, 22 nt, Human
cugagaaaagcuuucuuauaca

SEQ ID NO: 599920 - RNA, 22 nt, Human
cagagggaccagaacauacugu

SEQ ID NO: 599921 - RNA, 22 nt, Human
agccccaguccgcugcgggcgg

SEQ ID NO: 599922 - RNA, 22 nt, Human
aggaagaauguuuacauaucaa

SEQ ID NO: 599923 - RNA, 22 nt, Human
gcuaaugacugaguuuuuagca

SEQ ID NO: 599924 - RNA, 22 nt, Human
aucaagcauauauaaaacugca

SEQ ID NO: 599925 - RNA, 21 nt, Human
uggggaggggaccugauuaug

SEQ ID NO: 599926 - RNA, 22 nt, Human
uauuauggggggaacaucacuc

SEQ ID NO: 599927 - RNA, 22 nt, Human
ggugggaaggccacugaagguu

SEQ ID NO: 599928 - RNA, 22 nt, Human
cugaggucaggaguucaagcug

SEQ ID NO: 599929 - RNA, 22 nt, Human
uauuucauucuuuaucaggagc

SEQ ID NO: 599930 - RNA, 22 nt, Human
guggggaggccuaagcaaguug

SEQ ID NO: 599931 - RNA, 22 nt, Human
uugaacauuaacuucagucuau

SEQ ID NO: 599932 - RNA, 22 nt, Human
uccugguggcuuucccugccuu

SEQ ID NO: 599933 - RNA, 20 nt, Human
ucauggcagccacccacagg

SEQ ID NO: 599934 - RNA, 22 nt, Human
gcagccaggggcugugaccugu

SEQ ID NO: 599935 - RNA, 22 nt, Human
gaugugugugcccugggccugc

SEQ ID NO: 599936 - RNA, 22 nt, Human
gugaggucaccggccguugcca

SEQ ID NO: 599937 - RNA, 22 nt, Human
cuguuaaaaagaccaauggauu

SEQ ID NO: 599938 - RNA, 22 nt, Human
acaguacagugcagaggaagau

SEQ ID NO: 599939 - RNA, 22 nt, Human
uaaaugcaaagcuuggcgcuua

SEQ ID NO: 599940 - RNA, 22 nt, Human
cagcuuccccccgggcuugaga

SEQ ID NO: 599941 - RNA, 22 nt, Human
aagaccauaauguaagaugaau

SEQ ID NO: 599942 - RNA, 19 nt, Human
aauauuuuagccucuuccu

SEQ ID NO: 599943 - RNA, 20 nt, Human
agaggccaguuaggagucua

SEQ ID NO: 599944 - RNA, 22 nt, Human
ugccaggccacguagcuucaag

SEQ ID NO: 599945 - RNA, 22 nt, Human
gaacacagucaagggcugcugu

SEQ ID NO: 599946 - RNA, 22 nt, Human
aggcaggucacaugcuuggcga

SEQ ID NO: 599947 - RNA, 22 nt, Human
gcaaacauuccacagaaggaag

SEQ ID NO: 599948 - RNA, 22 nt, Human
agcacagggacaaugccaggug

SEQ ID NO: 599949 - RNA, 22 nt, Human
ggccuggagcagagacuaggga

SEQ ID NO: 599950 - RNA, 22 nt, Human
agcaggugaugugagucuggaa

SEQ ID NO: 599951 - RNA, 20 nt, Human
acuuggaacucauuuuucuu

SEQ ID NO: 599952 - RNA, 23 nt, Human
uucaaaacuggaaaaucagaugc

SEQ ID NO: 599953 - RNA, 22 nt, Human
gagggccagaguccugggguca

SEQ ID NO: 599954 - RNA, 22 nt, Human
aagagagagcauucuucuguua

SEQ ID NO: 599955 - RNA, 20 nt, Human
aggcuuggcuuggcaggaac

SEQ ID NO: 599956 - RNA, 22 nt, Human
uuuuggguggaagcuguuaugg

SEQ ID NO: 599957 - RNA, 22 nt, Human
agcagaacugaugagacuugag

SEQ ID NO: 599958 - RNA, 22 nt, Human
cuaggaaauuuaaaauaugauu

SEQ ID NO: 599959 - RNA, 22 nt, Human
aaaagguaguugccaaauaagg

SEQ ID NO: 599960 - RNA, 22 nt, Human
gccccucuccuugugcaccugc

SEQ ID NO: 599961 - RNA, 22 nt, Human
cuguggaaggacuuagcgauac

SEQ ID NO: 599962 - RNA, 22 nt, Human
cuguuuuaucucaagaguucaa

SEQ ID NO: 599963 - RNA, 22 nt, Human
cccagcucugccaucuacccac

SEQ ID NO: 599964 - RNA, 22 nt, Human
gcagugaagcaguccuuguuga

SEQ ID NO: 599965 - RNA, 22 nt, Human
auggaacaugaauuaauauggu

SEQ ID NO: 599966 - RNA, 19 nt, Human
uucugggaggggcugacug

SEQ ID NO: 599967 - RNA, 22 nt, Human
agggagaaugaccaagguauau

SEQ ID NO: 599968 - RNA, 22 nt, Human
auaccuuuuacucauuauccau

SEQ ID NO: 599969 - RNA, 22 nt, Human
cagugcagacguggagggggca

SEQ ID NO: 599970 - RNA, 22 nt, Human
gggguugguuuaaaugcuugag

SEQ ID NO: 599971 - RNA, 22 nt, Human
acugagaggugauagugacauu

SEQ ID NO: 599972 - RNA, 22 nt, Human
caaacauugcacuuucugcuau

SEQ ID NO: 599973 - RNA, 22 nt, Human
ucucucuugucaccccaucugc

SEQ ID NO: 599974 - RNA, 22 nt, Human
ugaauccagagcuauuucgucc

SEQ ID NO: 599975 - RNA, 22 nt, Human
gaaaugauuuuaguuuaucaug

SEQ ID NO: 599976 - RNA, 22 nt, Human
auaaucauucacauaaggugcu

SEQ ID NO: 599977 - RNA, 22 nt, Human
ugagcccaggaguaugaggcug

SEQ ID NO: 599978 - RNA, 21 nt, Human
acucccugcauaagugauuua

SEQ ID NO: 599979 - RNA, 22 nt, Human
uuuagaggcaucuugcuuuucu

SEQ ID NO: 599980 - RNA, 22 nt, Human
cacccaggcauggguugagaug

SEQ ID NO: 599981 - RNA, 22 nt, Human
caugcugagcacauucuguauu

SEQ ID NO: 599982 - RNA, 22 nt, Human
cagcaucuuucucuucuggagu

SEQ ID NO: 599983 - RNA, 22 nt, Human
ucugaaauaggagccauguaga

SEQ ID NO: 599984 - RNA, 22 nt, Human
gucugucucccugugacugaga

SEQ ID NO: 599985 - RNA, 22 nt, Human
uagaaagcaugcaaguuugaug

SEQ ID NO: 599986 - RNA, 22 nt, Human
auuuuacuacuccaauuaauga

SEQ ID NO: 599987 - RNA, 22 nt, Human
caguugcuggaugugcagcucu

SEQ ID NO: 599988 - RNA, 21 nt, Human
aggcuuggaucuagacaggcc

SEQ ID NO: 599989 - RNA, 22 nt, Human
uuuauccagaaucaggauuuuu

SEQ ID NO: 599990 - RNA, 22 nt, Human
auacauguucguguacauguuc

SEQ ID NO: 599991 - RNA, 22 nt, Human
uaaugaacaugcaucgugugua

SEQ ID NO: 599992 - RNA, 22 nt, Human
caaggcagucccuacucccugc

SEQ ID NO: 599993 - RNA, 22 nt, Human
aaacacacagaaaugaaugagg

SEQ ID NO: 599994 - RNA, 22 nt, Human
ugaggaagccaaacagcuacac

SEQ ID NO: 599995 - RNA, 22 nt, Human
aaagcuuucuagcuauguucua

SEQ ID NO: 599996 - RNA, 18 nt, Human
agcuccugaacucugugg

SEQ ID NO: 599997 - RNA, 22 nt, Human
auaggaaugugauuuauaaaug

SEQ ID NO: 599998 - RNA, 22 nt, Human
gccagcucuugaugggugggua

SEQ ID NO: 599999 - RNA, 22 nt, Human
accuucaggugagcacacagau

SEQ ID NO: 600000 - RNA, 22 nt, Human
aaaacugagguuuccugaagaa

SEQ ID NO: 600001 - RNA, 22 nt, Human
auuugcuuagauucagcacuuu

SEQ ID NO: 600002 - RNA, 22 nt, Human
ugcaggagcugugcggugaggg

SEQ ID NO: 600003 - RNA, 22 nt, Human
ucaggcugccuaucagacugug

SEQ ID NO: 600004 - RNA, 22 nt, Human
gauuucuucauucauuagaugg

SEQ ID NO: 600005 - RNA, 22 nt, Human
uaugaaauugccauuuuuaugg

SEQ ID NO: 600006 - RNA, 22 nt, Human
agccacagcccacaggacucuu

SEQ ID NO: 600007 - RNA, 22 nt, Human
auguuucaggcgaacuaacaug

SEQ ID NO: 600008 - RNA, 22 nt, Human
caagauaauuuauucugaguuu

SEQ ID NO: 600009 - RNA, 22 nt, Human
gcagggcagcugaagcuaggug

SEQ ID NO: 600010 - RNA, 22 nt, Human
uuugaagacuacugggagugaa

SEQ ID NO: 600011 - RNA, 22 nt, Human
uuaugauuuagaaagauucacu

SEQ ID NO: 600012 - RNA, 22 nt, Human
gagggccaggcagcaagaaggc

SEQ ID NO: 600013 - RNA, 22 nt, Human
agauccagauccuuccugguug

SEQ ID NO: 600014 - RNA, 22 nt, Human
cuaauguaaaacagacuugcau

SEQ ID NO: 600015 - RNA, 22 nt, Human
uucuugccauauuucagcccuu

SEQ ID NO: 600016 - RNA, 23 nt, Human
ucagcugcuuccuccugccugcc

SEQ ID NO: 600017 - RNA, 22 nt, Human
aacacuggacaggaggcuaggu

SEQ ID NO: 600018 - RNA, 22 nt, Human
cugccuggccugaucuccacgc

SEQ ID NO: 600019 - RNA, 22 nt, Human
cagccacuguggucuagcugca

SEQ ID NO: 600020 - RNA, 22 nt, Human
uauauuccaguucaucucuuga

SEQ ID NO: 600021 - RNA, 22 nt, Human
cauuuauucagcucagucgguu

SEQ ID NO: 600022 - RNA, 16 nt, Human
uccuggggauacugga

SEQ ID NO: 600023 - RNA, 22 nt, Human
auuccuugggcugccuuauuau

SEQ ID NO: 600024 - RNA, 22 nt, Human
gcuuccugagacaacauugagu

SEQ ID NO: 600025 - RNA, 23 nt, Human
cccaggucaaaauucacaggccu

SEQ ID NO: 600026 - RNA, 22 nt, Human
uggauuaguuaagaaauguuag

SEQ ID NO: 600027 - RNA, 22 nt, Human
uaacaguauagccuaacauuuc

SEQ ID NO: 600028 - RNA, 22 nt, Human
aaucauucuuauuucacagcaa

SEQ ID NO: 600029 - RNA, 22 nt, Human
ccagguccuguuuucaccacag

SEQ ID NO: 600030 - RNA, 23 nt, Human
acuuggaagcagugaacaacuuu

SEQ ID NO: 600031 - RNA, 22 nt, Human
ccagcccuacaguaucaccugu

SEQ ID NO: 600032 - RNA, 22 nt, Human
caccagcuccaccagggcaggu

SEQ ID NO: 600033 - RNA, 22 nt, Human
uuuucauuuuuguagaugcaag

SEQ ID NO: 600034 - RNA, 22 nt, Human
gaggcacagagcccuaggagcu

SEQ ID NO: 600035 - RNA, 22 nt, Human
aaaggcaugauuaauucugugu

SEQ ID NO: 600036 - RNA, 22 nt, Human
cacauccuucagcugagcccag

SEQ ID NO: 600037 - RNA, 22 nt, Human
ccucccaccguaucucaguggc

SEQ ID NO: 600038 - RNA, 23 nt, Human
uggaccugaaccagugccucugu

SEQ ID NO: 600039 - RNA, 22 nt, Human
uuccugggguacuggagaaaau

SEQ ID NO: 600040 - RNA, 21 nt, Human
augugcagcaagcagcaugcu

SEQ ID NO: 600041 - RNA, 22 nt, Human
gggggagcuacaggucccuugg

SEQ ID NO: 600042 - RNA, 22 nt, Human
guccuggugcuggucauugucg

SEQ ID NO: 600043 - RNA, 22 nt, Human
uggaaugcauggcucugugacg

SEQ ID NO: 600044 - RNA, 22 nt, Human
uucucucauucaaauuaaagug

SEQ ID NO: 600045 - RNA, 22 nt, Human
aggcuggcugagcugcagccug

SEQ ID NO: 600046 - RNA, 22 nt, Human
aggcacugacaauucuggacug

SEQ ID NO: 600047 - RNA, 22 nt, Human
cucucuggcccauccuguugcc

SEQ ID NO: 600048 - RNA, 22 nt, Human
caaucuuaguggcuuacaaaga

SEQ ID NO: 600049 - RNA, 22 nt, Human
cuuuacagcuuagugguaugga

SEQ ID NO: 600050 - RNA, 22 nt, Human
acagcagucagugaauauuuaa

SEQ ID NO: 600051 - RNA, 22 nt, Human
gguguguguggauuagcaugcc

SEQ ID NO: 600052 - RNA, 22 nt, Human
ugcagaagacacaagguaacgu

SEQ ID NO: 600053 - RNA, 22 nt, Human
ggcaggaaaacaaugagccagg

SEQ ID NO: 600054 - RNA, 22 nt, Human
aguuucuuuagauagaaaguuc

SEQ ID NO: 600055 - RNA, 22 nt, Human
gcugucccgaaccccugguaau

SEQ ID NO: 600056 - RNA, 22 nt, Human
aguuacagcuggcguggggaaa

SEQ ID NO: 600057 - RNA, 17 nt, Human
ugaggccugcaucagug

SEQ ID NO: 600058 - RNA, 20 nt, Human
gcuuagcaggcauaguagcu

SEQ ID NO: 600059 - RNA, 22 nt, Human
auuauuaugguugcucuuuucc

SEQ ID NO: 600060 - RNA, 22 nt, Human
ggaggccaaggaggagcuugcc

SEQ ID NO: 600061 - RNA, 22 nt, Human
cagaaguuagugucugccagua

SEQ ID NO: 600062 - RNA, 21 nt, Human
cuggaggguagaguugggcug

SEQ ID NO: 600063 - RNA, 22 nt, Human
ugucucugggugauucaguccu

SEQ ID NO: 600064 - RNA, 20 nt, Human
uuucuugucggcuguugcug

SEQ ID NO: 600065 - RNA, 22 nt, Human
cagggccagcgcccaggcccag

SEQ ID NO: 600066 - RNA, 22 nt, Human
agauaaugaauuuauugaaugu

SEQ ID NO: 600067 - RNA, 22 nt, Human
ucugcagaacuuuaugagcaaa

SEQ ID NO: 600068 - RNA, 22 nt, Human
cugggcaguaugaauauucaaa

SEQ ID NO: 600069 - RNA, 22 nt, Human
aaguaacuaaagauauccauuu

SEQ ID NO: 600070 - RNA, 22 nt, Human
ugacugccaugagggugagggc

SEQ ID NO: 600071 - RNA, 22 nt, Human
ucuuuguuauugcuuuaucuau

SEQ ID NO: 600072 - RNA, 22 nt, Human
ggcuccauccaaggccuucuag

SEQ ID NO: 600073 - RNA, 22 nt, Human
cagaggccagggggcucacaaa

SEQ ID NO: 600074 - RNA, 22 nt, Human
uuuccucugagugagcugggag

SEQ ID NO: 600075 - RNA, 22 nt, Human
uucucucuuccaguucccacuu

SEQ ID NO: 600076 - RNA, 20 nt, Human
uccuucugaggugaggagga

SEQ ID NO: 600077 - RNA, 22 nt, Human
uccagagacuugcaugugcuug

SEQ ID NO: 600078 - RNA, 21 nt, Human
cucuugcugaugucuccuuua

SEQ ID NO: 600079 - RNA, 22 nt, Human
gaugaguaauagcuaaugguuc

SEQ ID NO: 600080 - RNA, 22 nt, Human
ggagaagcaggugcuuuggguc

SEQ ID NO: 600081 - RNA, 22 nt, Human
uucaauaugauauuagcugugg

SEQ ID NO: 600082 - RNA, 21 nt, Human
caggcucugcugggugcuggg

SEQ ID NO: 600083 - RNA, 22 nt, Human
accagcuguguccuggcugcag

SEQ ID NO: 600084 - RNA, 23 nt, Human
ucacauaauccuucauccacagg

SEQ ID NO: 600085 - RNA, 22 nt, Human
uucucuuuuugcaucucaaccu

SEQ ID NO: 600086 - RNA, 23 nt, Human
gccagagcugccugcccuugcug

SEQ ID NO: 600087 - RNA, 22 nt, Human
cugccuguuagucuagcaguua

SEQ ID NO: 600088 - RNA, 22 nt, Human
gacuagucauuugcauuccguc

SEQ ID NO: 600089 - RNA, 22 nt, Human
agggagagguugaaaccucagu

SEQ ID NO: 600090 - RNA, 22 nt, Human
ucagagaaggcugagucacggc

SEQ ID NO: 600091 - RNA, 22 nt, Human
cagcccaggccgacaguuccuc

SEQ ID NO: 600092 - RNA, 22 nt, Human
aucaggaagccagucuaaugga

SEQ ID NO: 600093 - RNA, 22 nt, Human
gcaguguuuacauauuagaaac

SEQ ID NO: 600094 - RNA, 22 nt, Human
ccugccugcuuucugcuuugca

SEQ ID NO: 600095 - RNA, 22 nt, Human
cagagcuggcggugagaagaca

SEQ ID NO: 600096 - RNA, 22 nt, Human
auuugcacacagucuccugugg

SEQ ID NO: 600097 - RNA, 22 nt, Human
ugcuaauguccugaccguucug

SEQ ID NO: 600098 - RNA, 22 nt, Human
aaagaggcaaucaauguagcaa

SEQ ID NO: 600099 - RNA, 21 nt, Human
ugauucugcauuucuaacagg

SEQ ID NO: 600100 - RNA, 22 nt, Human
ugccagucagugguuuaaaagu

SEQ ID NO: 600101 - RNA, 22 nt, Human
uaguauuuuagaaaaccaugaa

SEQ ID NO: 600102 - RNA, 21 nt, Human
ggagucugaggaagaaaacug

SEQ ID NO: 600103 - RNA, 19 nt, Human
ggcuggagaaaggaaucag

SEQ ID NO: 600104 - RNA, 22 nt, Human
ggacaggggcguggggauuguu

SEQ ID NO: 600105 - RNA, 22 nt, Human
cagggcuggcucaugaaaaguu

SEQ ID NO: 600106 - RNA, 19 nt, Human
auucuucucuuccugcugu

SEQ ID NO: 600107 - RNA, 22 nt, Human
cuuggcugucauaagguccugg

SEQ ID NO: 600108 - RNA, 22 nt, Human
acaaaguuugugguauuccaag

SEQ ID NO: 600109 - RNA, 21 nt, Human
uagagugucugugugggaauu

SEQ ID NO: 600110 - RNA, 22 nt, Human
guuuauaugaacuucauaccca

SEQ ID NO: 600111 - RNA, 21 nt, Human
gcccccuggacuccucaucca

SEQ ID NO: 600112 - RNA, 20 nt, Human
acuuuaugaguucaauuuug

SEQ ID NO: 600113 - RNA, 22 nt, Human
ccucuauguacacauuuccagc

SEQ ID NO: 600114 - RNA, 21 nt, Human
agcagcugggcaacauggagg

SEQ ID NO: 600115 - RNA, 22 nt, Human
cugcuuuaaaacccucagcugg

SEQ ID NO: 600116 - RNA, 22 nt, Human
cugcccagauuuuaccaccugc

SEQ ID NO: 600117 - RNA, 22 nt, Human
uaguuuuaugaauugguauaau

SEQ ID NO: 600118 - RNA, 22 nt, Human
uuuuccuuuggaagaugcauau

SEQ ID NO: 600119 - RNA, 20 nt, Human
aaaaacaguaaugcugaaga

SEQ ID NO: 600120 - RNA, 22 nt, Human
aaauuagaagugcucaggaaua

SEQ ID NO: 600121 - RNA, 22 nt, Human
uggcagagaaccugggcuuugu

SEQ ID NO: 600122 - RNA, 22 nt, Human
gacagggaaacauugaaguguc

SEQ ID NO: 600123 - RNA, 22 nt, Human
uuguuucagcccagaucuuuac

SEQ ID NO: 600124 - RNA, 22 nt, Human
uugcuucagaaguucugcuugu

SEQ ID NO: 600125 - RNA, 22 nt, Human
uggaaagacauguccuucauua

SEQ ID NO: 600126 - RNA, 22 nt, Human
cacugcuugauugacaugcacg

SEQ ID NO: 600127 - RNA, 22 nt, Human
uccagggcagugacuacagcgg

SEQ ID NO: 600128 - RNA, 22 nt, Human
cugagccagggccacacaugga

SEQ ID NO: 600129 - RNA, 22 nt, Human
gcuggagucuacauucaagaau

SEQ ID NO: 600130 - RNA, 22 nt, Human
uacagaaauacugggggguucu

SEQ ID NO: 600131 - RNA, 22 nt, Human
auguuuuuggcuucaaguuucu

SEQ ID NO: 600132 - RNA, 22 nt, Human
uuauuggaaaagggcuguaauu

SEQ ID NO: 600133 - RNA, 22 nt, Human
cagagggcugcccugaguucgu

SEQ ID NO: 600134 - RNA, 22 nt, Human
aggcugagcugguagugaguac

SEQ ID NO: 600135 - RNA, 22 nt, Human
aauucacaauuauguugggaga

SEQ ID NO: 600136 - RNA, 22 nt, Human
uuaccauaaaguuuaucuuucu

SEQ ID NO: 600137 - RNA, 22 nt, Human
caaauacuuuauauacuucaaa

SEQ ID NO: 600138 - RNA, 22 nt, Human
uuugaaagacagaauauuuuug

SEQ ID NO: 600139 - RNA, 20 nt, Human
gccacugggcaccagcaggg

SEQ ID NO: 600140 - RNA, 18 nt, Human
caggccucuugaucuucc

SEQ ID NO: 600141 - RNA, 22 nt, Human
ucucuuaacugguucagcaauu

SEQ ID NO: 600142 - RNA, 22 nt, Human
agaguaauuucugcugaaaagg

SEQ ID NO: 600143 - RNA, 22 nt, Human
auugcauugcagcuagauuuug

SEQ ID NO: 600144 - RNA, 19 nt, Human
gucagcaccauggacaggg

SEQ ID NO: 600145 - RNA, 22 nt, Human
ucauaauuguauacauuuaugg

SEQ ID NO: 600146 - RNA, 22 nt, Human
cugaggagcagcuggcccgcua

SEQ ID NO: 600147 - RNA, 22 nt, Human
ccagcuuguuugaagcucguca

SEQ ID NO: 600148 - RNA, 22 nt, Human
ugggagaggcugccaucuugca

SEQ ID NO: 600149 - RNA, 22 nt, Human
aaagcaguauauugguaguugu

SEQ ID NO: 600150 - RNA, 22 nt, Human
ucugcuuuauuacacuagccaa

SEQ ID NO: 600151 - RNA, 19 nt, Human
uucuguguuaauuccuuua

SEQ ID NO: 600152 - RNA, 22 nt, Human
gugcagcuuccuggucucagcc

SEQ ID NO: 600153 - RNA, 22 nt, Human
ggcugccagcacugguguagag

SEQ ID NO: 600154 - RNA, 22 nt, Human
gcugagagcggccagcugggaa

SEQ ID NO: 600155 - RNA, 22 nt, Human
cuugagaaaggaacaggaagcu

SEQ ID NO: 600156 - RNA, 22 nt, Human
uagaauaugugguguauacuuu

SEQ ID NO: 600157 - RNA, 22 nt, Human
uaacuacaagggcggucucugu

SEQ ID NO: 600158 - RNA, 22 nt, Human
gcuuucugguucucaaagcacu

SEQ ID NO: 600159 - RNA, 22 nt, Human
cuagucacuguaauaaucugcu

SEQ ID NO: 600160 - RNA, 22 nt, Human
gucaaguuaagauaaggucaug

SEQ ID NO: 600161 - RNA, 22 nt, Human
uaacaauuugcuucauuuguuu

SEQ ID NO: 600162 - RNA, 22 nt, Human
guggagggaaugaaucuucucu

SEQ ID NO: 600163 - RNA, 22 nt, Human
auuuuuucuguaaacuggccuu

SEQ ID NO: 600164 - RNA, 22 nt, Human
cugagcagaccauggcagaggu

SEQ ID NO: 600165 - RNA, 22 nt, Human
ggcccacaccaggggccacagu

SEQ ID NO: 600166 - RNA, 22 nt, Human
ucuugacauucaaucauguaua

SEQ ID NO: 600167 - RNA, 22 nt, Human
ucuuucuuacaaagaaaacggu

SEQ ID NO: 600168 - RNA, 22 nt, Human
agaggccaggcugcagagggau

SEQ ID NO: 600169 - RNA, 22 nt, Human
cagagcucagagcugccaggca

SEQ ID NO: 600170 - RNA, 22 nt, Human
aguuuucugcuaaaccagcuaa

SEQ ID NO: 600171 - RNA, 22 nt, Human
caagcagccccaacaugaggau

SEQ ID NO: 600172 - RNA, 22 nt, Human
guguagauaguuuagauuucaa

SEQ ID NO: 600173 - RNA, 22 nt, Human
aggcacuggguaauuaguagcu

SEQ ID NO: 600174 - RNA, 22 nt, Human
ucuguccaggcuuacuauauau

SEQ ID NO: 600175 - RNA, 19 nt, Human
cacuagucuagaugggaug

SEQ ID NO: 600176 - RNA, 23 nt, Human
ugguggcuugugguggccaccag

SEQ ID NO: 600177 - RNA, 22 nt, Human
aaguccuuggagaauagaaagg

SEQ ID NO: 600178 - RNA, 22 nt, Human
uucuucuccuaaggagaguccu

SEQ ID NO: 600179 - RNA, 22 nt, Human
gcuggagugagggaccauauuu

SEQ ID NO: 600180 - RNA, 22 nt, Human
gaagagaugacaaaggagcaug

SEQ ID NO: 600181 - RNA, 22 nt, Human
aguuuauguuguuuauaagcca

SEQ ID NO: 600182 - RNA, 22 nt, Human
acccugagggaugagaguugca

SEQ ID NO: 600183 - RNA, 22 nt, Human
acuugaauaggugucaaggcca

SEQ ID NO: 600184 - RNA, 22 nt, Human
ugggagcaggaagcaggaagua

SEQ ID NO: 600185 - RNA, 21 nt, Human
ggagauguugugcaggagggu

SEQ ID NO: 600186 - RNA, 22 nt, Human
cugagcucuaaugucagccuug

SEQ ID NO: 600187 - RNA, 22 nt, Human
gcagcagcccagggcucucaga

SEQ ID NO: 600188 - RNA, 22 nt, Human
gagauggggucagcugggacau

SEQ ID NO: 600189 - RNA, 22 nt, Human
acaggccuggaaaggaaggagu

SEQ ID NO: 600190 - RNA, 22 nt, Human
uguuuuguuuaugagagcacag

SEQ ID NO: 600191 - RNA, 21 nt, Human
uccagggaauuucaacuuuua

SEQ ID NO: 600192 - RNA, 22 nt, Human
aggcucuccagagagcugcuuu

SEQ ID NO: 600193 - RNA, 22 nt, Human
aaggauugucuggcuauuuaug

SEQ ID NO: 600194 - RNA, 22 nt, Human
gggcugagggccaauuccuacu

SEQ ID NO: 600195 - RNA, 22 nt, Human
gcuuccaggggcugugggcuga

SEQ ID NO: 600196 - RNA, 22 nt, Human
uccugugggcucucggccucca

SEQ ID NO: 600197 - RNA, 22 nt, Human
aagcauuucaauauaauauuca

SEQ ID NO: 600198 - RNA, 19 nt, Human
caguuacaggcacuguggg

SEQ ID NO: 600199 - RNA, 22 nt, Human
gaugucuucucaacuguagacc

SEQ ID NO: 600200 - RNA, 22 nt, Human
ggagucuguuuuacaugcagga

SEQ ID NO: 600201 - RNA, 22 nt, Human
aaggcuuggaguaagcuuggcu

SEQ ID NO: 600202 - RNA, 22 nt, Human
auuugcuucuagucaguuccau

SEQ ID NO: 600203 - RNA, 22 nt, Human
cuccccauuaugcagucauuau

SEQ ID NO: 600204 - RNA, 22 nt, Human
caaauguuucuugaacaccaac

SEQ ID NO: 600205 - RNA, 22 nt, Human
aggugucauuucucugcaggug

SEQ ID NO: 600206 - RNA, 22 nt, Human
uggcuuucgcuauagagcacgg

SEQ ID NO: 600207 - RNA, 22 nt, Human
gcuugaaaaugacucuugugaa

SEQ ID NO: 600208 - RNA, 21 nt, Human
uccuggccagggcacuaggca

SEQ ID NO: 600209 - RNA, 22 nt, Human
agcugcuuugccaaugcguucc

SEQ ID NO: 600210 - RNA, 21 nt, Human
agaucccugaggagagcaucc

SEQ ID NO: 600211 - RNA, 22 nt, Human
ucuugauugguuguauagcuac

SEQ ID NO: 600212 - RNA, 22 nt, Human
auccugaaaacuuacgaagugg

SEQ ID NO: 600213 - RNA, 22 nt, Human
cggggcaggagucccuguagag

SEQ ID NO: 600214 - RNA, 22 nt, Human
uuggcucauuaaagaugauaau

SEQ ID NO: 600215 - RNA, 22 nt, Human
caggcuugcugcuagagcacuu

SEQ ID NO: 600216 - RNA, 22 nt, Human
aggaaugacagauguccgcacc

SEQ ID NO: 600217 - RNA, 22 nt, Human
ugaacacacaccuauguacaaa

SEQ ID NO: 600218 - RNA, 22 nt, Human
aaagcaauggaugagaaucugu

SEQ ID NO: 600219 - RNA, 22 nt, Human
aguggcuugcucugccucagcc

SEQ ID NO: 600220 - RNA, 22 nt, Human
cuugugcaaauccucgagcaca

SEQ ID NO: 600221 - RNA, 22 nt, Human
acuugccuccauauuuuauugc

SEQ ID NO: 600222 - RNA, 18 nt, Human
aagaggcuguucuguggg

SEQ ID NO: 600223 - RNA, 18 nt, Human
ugacagaaccuggagccu

SEQ ID NO: 600224 - RNA, 22 nt, Human
gagaaggagcucaaauauggcu

SEQ ID NO: 600225 - RNA, 22 nt, Human
gcuggugccuuguuguuguuac

SEQ ID NO: 600226 - RNA, 22 nt, Human
uuauuguagcacuuuggcagug

SEQ ID NO: 600227 - RNA, 22 nt, Human
ccuuccuuugcaucauuucuag

SEQ ID NO: 600228 - RNA, 22 nt, Human
agcccuggggugcagaaccaug

SEQ ID NO: 600229 - RNA, 22 nt, Human
agcaccagcaacuaugggcugc

SEQ ID NO: 600230 - RNA, 22 nt, Human
ucauccuuuugcaugggaaggc

SEQ ID NO: 600231 - RNA, 18 nt, Human
uggaggcagaguucuggc

SEQ ID NO: 600232 - RNA, 22 nt, Human
aaagaagacagacauuucuuuc

SEQ ID NO: 600233 - RNA, 22 nt, Human
agaaauagaggaaagguuugac

SEQ ID NO: 600234 - RNA, 22 nt, Human
gugggcagccccuucaaggcca

SEQ ID NO: 600235 - RNA, 22 nt, Human
caacuacaggaaaagucauuca

SEQ ID NO: 600236 - RNA, 22 nt, Human
caggucccguuccccagagauu

SEQ ID NO: 600237 - RNA, 22 nt, Human
ucugggcuuuaagaacucuguu

SEQ ID NO: 600238 - RNA, 22 nt, Human
aggcugagcugaccugguuugg

SEQ ID NO: 600239 - RNA, 22 nt, Human
cacagucucuguugcugggacc

SEQ ID NO: 600240 - RNA, 22 nt, Human
gagugugggggugcugaggaca

SEQ ID NO: 600241 - RNA, 22 nt, Human
accagcaguuaugaggccagga

SEQ ID NO: 600242 - RNA, 22 nt, Human
ucaggaagaaagaagggagugu

SEQ ID NO: 600243 - RNA, 22 nt, Human
ucucuucacauuccuggcaaac

SEQ ID NO: 600244 - RNA, 22 nt, Human
cucccagguuacaucugagccu

SEQ ID NO: 600245 - RNA, 22 nt, Human
cucucugggcccaguuggcacc

SEQ ID NO: 600246 - RNA, 23 nt, Human
gccuggccaccccagggcugcuu

SEQ ID NO: 600247 - RNA, 22 nt, Human
uuguacaaaugcauauuccugg

SEQ ID NO: 600248 - RNA, 22 nt, Human
uuucuggcagcgggacaggggu

SEQ ID NO: 600249 - RNA, 22 nt, Human
aggaacuggggcuauucacccu

SEQ ID NO: 600250 - RNA, 22 nt, Human
uauuaugaggcuuagggaugac

SEQ ID NO: 600251 - RNA, 22 nt, Human
cuguuuauggagguaaggcauc

SEQ ID NO: 600252 - RNA, 22 nt, Human
gcaguggcagcugaggggguau

SEQ ID NO: 600253 - RNA, 22 nt, Human
ccagaagaccggggagucaggg

SEQ ID NO: 600254 - RNA, 22 nt, Human
agacaacuagaaaacuagacag

SEQ ID NO: 600255 - RNA, 20 nt, Human
aaaguucauguuugcacuuu

SEQ ID NO: 600256 - RNA, 23 nt, Human
ucauuucacagugagcuuccuag

SEQ ID NO: 600257 - RNA, 22 nt, Human
gcucccugaaaagaacaaaguc

SEQ ID NO: 600258 - RNA, 22 nt, Human
auuuucucucaaaccuuaaaau

SEQ ID NO: 600259 - RNA, 22 nt, Human
ucccaaagucaagcugugucuu

SEQ ID NO: 600260 - RNA, 21 nt, Human
uucauaaaccauucucaugca

SEQ ID NO: 600261 - RNA, 22 nt, Human
gccagggggucagcaggcacuu

SEQ ID NO: 600262 - RNA, 22 nt, Human
cagaggccccagaacuagcucu

SEQ ID NO: 600263 - RNA, 22 nt, Human
ggcucuucacacagugauguca

SEQ ID NO: 600264 - RNA, 22 nt, Human
gcaguguguguccccacacugg

SEQ ID NO: 600265 - RNA, 22 nt, Human
ucugccugaaauucacauguaa

SEQ ID NO: 600266 - RNA, 22 nt, Human
ggaggagcccacucaaagggga

SEQ ID NO: 600267 - RNA, 22 nt, Human
ucuguguccugcuagcugucuu

SEQ ID NO: 600268 - RNA, 22 nt, Human
ggagaugcaauguagaaucugg

SEQ ID NO: 600269 - RNA, 22 nt, Human
ccugggccuauccuagaaccaa

SEQ ID NO: 600270 - RNA, 23 nt, Human
ccagcccuccaccagcucuaggc

SEQ ID NO: 600271 - RNA, 22 nt, Human
uggccugggcaugaagcaucgu

SEQ ID NO: 600272 - RNA, 19 nt, Human
ucagcuggcaggccuccuc

SEQ ID NO: 600273 - RNA, 22 nt, Human
cagaggcacaagaaagcaaggc

SEQ ID NO: 600274 - RNA, 22 nt, Human
ucuacagucaaguuauauugcu

SEQ ID NO: 600275 - RNA, 22 nt, Human
aauagcuuggacccauugcuuu

SEQ ID NO: 600276 - RNA, 22 nt, Human
acugagagcguguacaaacuua

SEQ ID NO: 600277 - RNA, 22 nt, Human
ucccaggaauccguccucuaga

SEQ ID NO: 600278 - RNA, 22 nt, Human
cuauggaaaccuaaucaggaga

SEQ ID NO: 600279 - RNA, 22 nt, Human
uagaaacagagcagguggccca

SEQ ID NO: 600280 - RNA, 22 nt, Human
auuauaugugggauagaauuua

SEQ ID NO: 600281 - RNA, 22 nt, Human
ucaaauuaguggaauaauaaug

SEQ ID NO: 600282 - RNA, 22 nt, Human
gacagccaggucugaugaccca

SEQ ID NO: 600283 - RNA, 22 nt, Human
caagcaggguuuaugcauggag

SEQ ID NO: 600284 - RNA, 22 nt, Human
uguauuccaaaaugcugaggau

SEQ ID NO: 600285 - RNA, 22 nt, Human
cagcagcaacaacggaagccuu

SEQ ID NO: 600286 - RNA, 22 nt, Human
agagggcauaaaauagagcacg

SEQ ID NO: 600287 - RNA, 22 nt, Human
ggugugggggcaaguuugagau

SEQ ID NO: 600288 - RNA, 22 nt, Human
gcuggaguacaucuuuggcggc

SEQ ID NO: 600289 - RNA, 22 nt, Human
cugucuccagggcaggugcagg

SEQ ID NO: 600290 - RNA, 22 nt, Human
gaggcagaaguugcagugagca

SEQ ID NO: 600291 - RNA, 22 nt, Human
gacaggcagaccugugcccugg

SEQ ID NO: 600292 - RNA, 22 nt, Human
auucuacaugauagaagggaga

SEQ ID NO: 600293 - RNA, 22 nt, Human
ucagccccacggggucagccaa

SEQ ID NO: 600294 - RNA, 22 nt, Human
uuuucucccgcuggcugcucuu

SEQ ID NO: 600295 - RNA, 22 nt, Human
cccucccaggaguggccagaga

SEQ ID NO: 600296 - RNA, 22 nt, Human
gggcaggaugcaguuucagaga

SEQ ID NO: 600297 - RNA, 22 nt, Human
cagccagugugaccgaggagga

SEQ ID NO: 600298 - RNA, 22 nt, Human
uggccuggaagagaggucgagg

SEQ ID NO: 600299 - RNA, 22 nt, Human
uugauucugauccugucuggag

SEQ ID NO: 600300 - RNA, 20 nt, Human
ugacacaaauugcuuucuca

SEQ ID NO: 600301 - RNA, 22 nt, Human
ugagggagagggcgaaaaugaa

SEQ ID NO: 600302 - RNA, 22 nt, Human
ucaggaacccuggucuccugcu

SEQ ID NO: 600303 - RNA, 19 nt, Human
ggaugagggucaggcauag

SEQ ID NO: 600304 - RNA, 22 nt, Human
uccugccuguuuaccuguacuu

SEQ ID NO: 600305 - RNA, 22 nt, Human
cuccugggcuaugucugcuugg

SEQ ID NO: 600306 - RNA, 22 nt, Human
uaugaauucucuuguguauagu

SEQ ID NO: 600307 - RNA, 22 nt, Human
auuauaaauauuuucuaggggu

SEQ ID NO: 600308 - RNA, 22 nt, Human
gcccagggcgauggucggggcc

SEQ ID NO: 600309 - RNA, 22 nt, Human
uuggcccagggucagcggcgcu

SEQ ID NO: 600310 - RNA, 22 nt, Human
acauuaaaauggagaauuuuga

SEQ ID NO: 600311 - RNA, 20 nt, Human
gccuccacacucaccccuua

SEQ ID NO: 600312 - RNA, 22 nt, Human
agaggggcucaagcaguggucu

SEQ ID NO: 600313 - RNA, 22 nt, Human
cagcucugcugguggugccagg

SEQ ID NO: 600314 - RNA, 22 nt, Human
ggcugaugagcuuagcuagaga

SEQ ID NO: 600315 - RNA, 22 nt, Human
accuccccacaugguagugagu

SEQ ID NO: 600316 - RNA, 22 nt, Human
cccugccuuguuggagccuaug

SEQ ID NO: 600317 - RNA, 22 nt, Human
ugagcagaaaagaaugcugagc

SEQ ID NO: 600318 - RNA, 22 nt, Human
ggcaggcugggagucaucagag

SEQ ID NO: 600319 - RNA, 22 nt, Human
aauuaaaaaaggagagcuugcu

SEQ ID NO: 600320 - RNA, 22 nt, Human
acaguuuaucgauucaccuacc

SEQ ID NO: 600321 - RNA, 22 nt, Human
agacaugguuuauuuuaauggu

SEQ ID NO: 600322 - RNA, 22 nt, Human
ugcugcugcuucuguacagccu

SEQ ID NO: 600323 - RNA, 23 nt, Human
uuaaacuucagugcagaacacuc

SEQ ID NO: 600324 - RNA, 22 nt, Human
guauaaaguauaagcuuguuuu

SEQ ID NO: 600325 - RNA, 22 nt, Human
gacugcuuugacaaaugauacc

SEQ ID NO: 600326 - RNA, 22 nt, Human
agcuggugugccaguuccaguu

SEQ ID NO: 600327 - RNA, 22 nt, Human
ugacuucuagcauuuagcaacc

SEQ ID NO: 600328 - RNA, 22 nt, Human
ggagggguggucgcgaagagca

SEQ ID NO: 600329 - RNA, 22 nt, Human
gcucuggcagcugauauuagga

SEQ ID NO: 600330 - RNA, 18 nt, Human
gcugagcaaauuccuccc

SEQ ID NO: 600331 - RNA, 22 nt, Human
gagagcugggggacuguggaug

SEQ ID NO: 600332 - RNA, 22 nt, Human
uaauacuuaccuugcagagucu

SEQ ID NO: 600333 - RNA, 22 nt, Human
agaauucucuuccauugaaaca

SEQ ID NO: 600334 - RNA, 22 nt, Human
auuuuaugacacgauucuucca

SEQ ID NO: 600335 - RNA, 22 nt, Human
accaaaaauuguggggcugaau

SEQ ID NO: 600336 - RNA, 22 nt, Human
agaaaauaauuucuuggcuggu

SEQ ID NO: 600337 - RNA, 22 nt, Human
cauuuacaauguacagguugug

SEQ ID NO: 600338 - RNA, 22 nt, Human
gcucucuguuauuaagaucuuu

SEQ ID NO: 600339 - RNA, 22 nt, Human
acaguggaauggugggccugca

SEQ ID NO: 600340 - RNA, 22 nt, Human
aagcacaauuuaggacugaaau

SEQ ID NO: 600341 - RNA, 22 nt, Human
gccgggaccaaggccacggagc

SEQ ID NO: 600342 - RNA, 22 nt, Human
agccuggaauuaaggaaaugca

SEQ ID NO: 600343 - RNA, 22 nt, Human
ccuuucuguguugcccuauuug

SEQ ID NO: 600344 - RNA, 22 nt, Human
cugagucauugcagauguggag

SEQ ID NO: 600345 - RNA, 17 nt, Human
ggccuugggcugcucuu

SEQ ID NO: 600346 - RNA, 22 nt, Human
acauuaacaccauaaguguguu

SEQ ID NO: 600347 - RNA, 22 nt, Human
ccaggagacccagggaaggagc

SEQ ID NO: 600348 - RNA, 21 nt, Human
agcagaacagucgagcacugc

SEQ ID NO: 600349 - RNA, 22 nt, Human
auuuacagccuugccaucuaua

SEQ ID NO: 600350 - RNA, 22 nt, Human
ccagggcagccaacccagaugc

SEQ ID NO: 600351 - RNA, 22 nt, Human
cucugccugcccaccgacccau

SEQ ID NO: 600352 - RNA, 22 nt, Human
ccccuucucugcaagccugcuc

SEQ ID NO: 600353 - RNA, 22 nt, Human
uuagcugagauuaagugaacuu

SEQ ID NO: 600354 - RNA, 22 nt, Human
cugggccuggagcccacgagcc

SEQ ID NO: 600355 - RNA, 21 nt, Human
cacaagacacauaggguguuu

SEQ ID NO: 600356 - RNA, 22 nt, Human
gcagccacuaguuuuccuguuu

SEQ ID NO: 600357 - RNA, 22 nt, Human
ugcaggcugccuucacagagcc

SEQ ID NO: 600358 - RNA, 20 nt, Human
ucuguggcagguggcgcuug

SEQ ID NO: 600359 - RNA, 20 nt, Human
ucauuucuugggguuccaag

SEQ ID NO: 600360 - RNA, 22 nt, Human
gauuucuacuugaacuugcuaa

SEQ ID NO: 600361 - RNA, 22 nt, Human
ugugaaaucacaggcuauuuag

SEQ ID NO: 600362 - RNA, 22 nt, Human
cucugucccagacccaccucuc

SEQ ID NO: 600363 - RNA, 22 nt, Human
gaggcccaggucaagcagccac

SEQ ID NO: 600364 - RNA, 21 nt, Human
acagcaagccuuccuuucagg

SEQ ID NO: 600365 - RNA, 19 nt, Human
ccugcugcaccacuuguua

SEQ ID NO: 600366 - RNA, 22 nt, Human
aggacuggcggucgguggggau

SEQ ID NO: 600367 - RNA, 22 nt, Human
gcugggcugagcuagacuuggc

SEQ ID NO: 600368 - RNA, 22 nt, Human
ucaccaaggcauuuucacagca

SEQ ID NO: 600369 - RNA, 22 nt, Human
gaaggcugcugggaaguguggu

SEQ ID NO: 600370 - RNA, 22 nt, Human
cccaggagaucuggaucucguc

SEQ ID NO: 600371 - RNA, 22 nt, Human
ucuuuaauuguggaagagcagc

SEQ ID NO: 600372 - RNA, 22 nt, Human
uaccuggaauuuauauagcuau

SEQ ID NO: 600373 - RNA, 22 nt, Human
uacauggauguuauccuuacug

SEQ ID NO: 600374 - RNA, 22 nt, Human
uccagcuugccuggucuuuugg

SEQ ID NO: 600375 - RNA, 22 nt, Human
cugcaggaggauccugagagug

SEQ ID NO: 600376 - RNA, 22 nt, Human
gcugggugucacggggcucgug

SEQ ID NO: 600377 - RNA, 22 nt, Human
auuuucauuuugcagggugaga

SEQ ID NO: 600378 - RNA, 22 nt, Human
ggaauaaagaaucugguucccc

SEQ ID NO: 600379 - RNA, 22 nt, Human
auaaaaguucaagagaguacag

SEQ ID NO: 600380 - RNA, 22 nt, Human
ucaaccagaguuuuucuuaaua

SEQ ID NO: 600381 - RNA, 22 nt, Human
cagcacccuuuccacugccuug

SEQ ID NO: 600382 - RNA, 22 nt, Human
gugaggucaaagccuuggguau

SEQ ID NO: 600383 - RNA, 22 nt, Human
uuauccaaacuggugaaucauu

SEQ ID NO: 600384 - RNA, 22 nt, Human
uauauggauagugaucauaaga

SEQ ID NO: 600385 - RNA, 22 nt, Human
uucagagccacuucaagucuaa

SEQ ID NO: 600386 - RNA, 22 nt, Human
gugggugcggggagccgaggcg

SEQ ID NO: 600387 - RNA, 23 nt, Human
ggccuaugggcaggcaaggaagc

SEQ ID NO: 600388 - RNA, 22 nt, Human
cagguuucuaguucuaagaaua

SEQ ID NO: 600389 - RNA, 22 nt, Human
gccccagguugccugucccagg

SEQ ID NO: 600390 - RNA, 22 nt, Human
acuguccauaauauuggugaac

SEQ ID NO: 600391 - RNA, 21 nt, Human
gugcucugggcagcagagggc

SEQ ID NO: 600392 - RNA, 22 nt, Human
aaagcaauuuaauggaccauga

SEQ ID NO: 600393 - RNA, 22 nt, Human
ccacccagccagaugcaggaag

SEQ ID NO: 600394 - RNA, 22 nt, Human
acccaggauagagugcugcagu

SEQ ID NO: 600395 - RNA, 22 nt, Human
uuggcccugaggaggcagcugc

SEQ ID NO: 600396 - RNA, 22 nt, Human
gcccccucuuuggagccagcca

SEQ ID NO: 600397 - RNA, 22 nt, Human
uccugccucaggcucuggagua

SEQ ID NO: 600398 - RNA, 22 nt, Human
ggagaaggugcuggucacugug

SEQ ID NO: 600399 - RNA, 18 nt, Human
gaggaacauucaccuccu

SEQ ID NO: 600400 - RNA, 19 nt, Human
aggguccagggagcggcuc

SEQ ID NO: 600401 - RNA, 22 nt, Human
ccacacagggggaugaguuauu

SEQ ID NO: 600402 - RNA, 21 nt, Human
uagggcaggcauuggaagaga

SEQ ID NO: 600403 - RNA, 22 nt, Human
agauuuaaauuugcuacaauuc

SEQ ID NO: 600404 - RNA, 22 nt, Human
ccucugaggugagcccagcugg

SEQ ID NO: 600405 - RNA, 22 nt, Human
aaacaguaaguucuaguauuau

SEQ ID NO: 600406 - RNA, 22 nt, Human
cacagcuuagaaaagaagccau

SEQ ID NO: 600407 - RNA, 22 nt, Human
ggggagcaauugcccccuuaga

SEQ ID NO: 600408 - RNA, 22 nt, Human
ggccuggagucagggaaagcaa

SEQ ID NO: 600409 - RNA, 22 nt, Human
agcuggagcuucaagcagguaa

SEQ ID NO: 600410 - RNA, 22 nt, Human
ugugugcucuaaugccuaguac

SEQ ID NO: 600411 - RNA, 19 nt, Human
gaggcccaugagggugcuc

SEQ ID NO: 600412 - RNA, 22 nt, Human
ucccugcccucagugcacccgg

SEQ ID NO: 600413 - RNA, 19 nt, Human
acccaggguugauguccag

SEQ ID NO: 600414 - RNA, 21 nt, Human
acuuugggcacuuuccugccc

SEQ ID NO: 600415 - RNA, 22 nt, Human
gccugccugcugugugcaaguu

SEQ ID NO: 600416 - RNA, 18 nt, Human
ugggagugggaguggaua

SEQ ID NO: 600417 - RNA, 22 nt, Human
aaugcacaaaggugucuauugc

SEQ ID NO: 600418 - RNA, 22 nt, Human
gaggugaaaguuauucauuuau

SEQ ID NO: 600419 - RNA, 22 nt, Human
caugcuaaccagagacauaaag

SEQ ID NO: 600420 - RNA, 22 nt, Human
gagggaggcaucaugaauccag

SEQ ID NO: 600421 - RNA, 22 nt, Human
guacauuucucccaacacuaaa

SEQ ID NO: 600422 - RNA, 22 nt, Human
ggagacccagguuaggaaguaa

SEQ ID NO: 600423 - RNA, 22 nt, Human
cuguggaguguagaugcugggu

SEQ ID NO: 600424 - RNA, 22 nt, Human
ggcccaaggcccaggucgagcu

SEQ ID NO: 600425 - RNA, 22 nt, Human
caggggaagaugccaagggaga

SEQ ID NO: 600426 - RNA, 22 nt, Human
augcaccugaacuccaucagcu

SEQ ID NO: 600427 - RNA, 22 nt, Human
gacagggaggagcagagcuucu

SEQ ID NO: 600428 - RNA, 22 nt, Human
agcugaggacgugaagggcggc

SEQ ID NO: 600429 - RNA, 22 nt, Human
uguagggagaagagaggcaccu

SEQ ID NO: 600430 - RNA, 22 nt, Human
cuugccugaggaacagagggua

SEQ ID NO: 600431 - RNA, 19 nt, Human
agagccagacagcauagga

SEQ ID NO: 600432 - RNA, 22 nt, Human
gauuuucaugauaaacuuguga

SEQ ID NO: 600433 - RNA, 23 nt, Human
ccagcuccgugagccucgggcuc

SEQ ID NO: 600434 - RNA, 22 nt, Human
uaugcagugagcacuauuuaua

SEQ ID NO: 600435 - RNA, 22 nt, Human
aacuuuacuugaaagaacaugu

SEQ ID NO: 600436 - RNA, 22 nt, Human
augggaggaugcucgggugcuc

SEQ ID NO: 600437 - RNA, 22 nt, Human
ugugugacccccagugaagccu

SEQ ID NO: 600438 - RNA, 22 nt, Human
cuccaggacacuaacccaggcu

SEQ ID NO: 600439 - RNA, 22 nt, Human
gagcuggaggcagugcugaggu

SEQ ID NO: 600440 - RNA, 22 nt, Human
ucacaguaaaagcauggaagag

SEQ ID NO: 600441 - RNA, 22 nt, Human
gugcagagaaaugagaagucga

SEQ ID NO: 600442 - RNA, 22 nt, Human
gacagaggagaagaugcugugg

SEQ ID NO: 600443 - RNA, 22 nt, Human
ugagcuguacuccuccccaggg

SEQ ID NO: 600444 - RNA, 22 nt, Human
cagcugagucugagguucuuug

SEQ ID NO: 600445 - RNA, 22 nt, Human
uaaugaauaaacuugagaguca

SEQ ID NO: 600446 - RNA, 22 nt, Human
aaguguuuccauugugcaggcu

SEQ ID NO: 600447 - RNA, 22 nt, Human
aacuguguccuuagcucucacu

SEQ ID NO: 600448 - RNA, 22 nt, Human
ucucaggaauagaguggcagca

SEQ ID NO: 600449 - RNA, 19 nt, Human
uccagggcuuuauggcuuu

SEQ ID NO: 600450 - RNA, 23 nt, Human
aggcauggcauggaugguggcuc

SEQ ID NO: 600451 - RNA, 22 nt, Human
ugagaacaguuggaagcaguca

SEQ ID NO: 600452 - RNA, 22 nt, Human
ucuacauuccuuuuauaauauc

SEQ ID NO: 600453 - RNA, 22 nt, Human
gggcuggcucccagguguugaa

SEQ ID NO: 600454 - RNA, 22 nt, Human
gcccugccugccgguguggguc

SEQ ID NO: 600455 - RNA, 22 nt, Human
augagggaggcaaggagaugcu

SEQ ID NO: 600456 - RNA, 22 nt, Human
aagugucuuuuagccacuuuua

SEQ ID NO: 600457 - RNA, 22 nt, Human
aauuggcaagcagauuuccacu

SEQ ID NO: 600458 - RNA, 22 nt, Human
cuggcucaccuccgcuccagca

SEQ ID NO: 600459 - RNA, 22 nt, Human
cucccagggucuaggcugcugg

SEQ ID NO: 600460 - RNA, 22 nt, Human
gcuuuucauagauaaaauucua

SEQ ID NO: 600461 - RNA, 22 nt, Human
uuucuuuuacaguguggcuauu

SEQ ID NO: 600462 - RNA, 22 nt, Human
ggcgaggccgggacaggcugga

SEQ ID NO: 600463 - RNA, 22 nt, Human
cagucagggacaccagcuagga

SEQ ID NO: 600464 - RNA, 22 nt, Human
ccuuagaaggcugaauaauucu

SEQ ID NO: 600465 - RNA, 22 nt, Human
ucagcuuugcaaguuagaaaau

SEQ ID NO: 600466 - RNA, 22 nt, Human
gcccacagcucguuccucuccu

SEQ ID NO: 600467 - RNA, 22 nt, Human
uguuugcacauucguuucaaua

SEQ ID NO: 600468 - RNA, 22 nt, Human
ggaaggaacaaacccugugugg

SEQ ID NO: 600469 - RNA, 22 nt, Human
aguccaagaucaaggugucagg

SEQ ID NO: 600470 - RNA, 22 nt, Human
aaacuucagggaauaaaagagu

SEQ ID NO: 600471 - RNA, 22 nt, Human
uacaagaaauuucugcauauau

SEQ ID NO: 600472 - RNA, 22 nt, Human
uuuuguaauuuccugacgacua

SEQ ID NO: 600473 - RNA, 22 nt, Human
gggugaagcuccugcaggggcc

SEQ ID NO: 600474 - RNA, 22 nt, Human
cagauaaauagauagauaaacu

SEQ ID NO: 600475 - RNA, 23 nt, Human
ucccaggaaucugcauuuuuaac

SEQ ID NO: 600476 - RNA, 22 nt, Human
cccuccccacaaagcuucacac

SEQ ID NO: 600477 - RNA, 22 nt, Human
cagccagcugucccaagugccu

SEQ ID NO: 600478 - RNA, 22 nt, Human
uguggcauugaauaaccuugga

SEQ ID NO: 600479 - RNA, 20 nt, Human
ucugugugccaucaccuaac

SEQ ID NO: 600480 - RNA, 22 nt, Human
cucuuaauuaagcugagaucug

SEQ ID NO: 600481 - RNA, 20 nt, Human
gguagcugcugcaguuggua

SEQ ID NO: 600482 - RNA, 23 nt, Human
agcccagcagagaaccuaggucc

SEQ ID NO: 600483 - RNA, 22 nt, Human
gcugaaaaauagugucguguuu

SEQ ID NO: 600484 - RNA, 22 nt, Human
aaaucucacuguagucaaagug

SEQ ID NO: 600485 - RNA, 22 nt, Human
aagaugcuugcaaauuucugaa

SEQ ID NO: 600486 - RNA, 22 nt, Human
cuagcuucaaguccuggcugug

SEQ ID NO: 600487 - RNA, 22 nt, Human
augucaaaucaguuuuaucaga

SEQ ID NO: 600488 - RNA, 19 nt, Human
ucuguggcaccugggaggg

SEQ ID NO: 600489 - RNA, 22 nt, Human
caggagaggaggcuacuucuua

SEQ ID NO: 600490 - RNA, 22 nt, Human
caacagcucagacacgggaccu

SEQ ID NO: 600491 - RNA, 22 nt, Human
gaccagcugauaaggcauauaa

SEQ ID NO: 600492 - RNA, 22 nt, Human
ccaggaagcggugagggcugcc

SEQ ID NO: 600493 - RNA, 22 nt, Human
agcacccuggggaagcacaaag

SEQ ID NO: 600494 - RNA, 22 nt, Human
gaaacagucaacuuucuuuccc

SEQ ID NO: 600495 - RNA, 22 nt, Human
uucaaagugcuguucaaaguag

SEQ ID NO: 600496 - RNA, 22 nt, Human
guuuucaauuauaagauggcuu

SEQ ID NO: 600497 - RNA, 22 nt, Human
gccagcaguccugcugugugcc

SEQ ID NO: 600498 - RNA, 22 nt, Human
ggaagcugugcucucaggccuc

SEQ ID NO: 600499 - RNA, 22 nt, Human
ucaccaggauugggcuguaggc

SEQ ID NO: 600500 - RNA, 22 nt, Human
ugaggccaggcaaaggcgaucu

SEQ ID NO: 600501 - RNA, 22 nt, Human
ccucccuuuuggugucugcaua

SEQ ID NO: 600502 - RNA, 22 nt, Human
caucagcuuuggcgcugagcau

SEQ ID NO: 600503 - RNA, 22 nt, Human
gggcagugggaccaggcaccag

SEQ ID NO: 600504 - RNA, 22 nt, Human
ugucucuuuggccucccauaug

SEQ ID NO: 600505 - RNA, 22 nt, Human
aacauagaagaugguuaauugu

SEQ ID NO: 600506 - RNA, 21 nt, Human
agcucagccgggcacaguggc

SEQ ID NO: 600507 - RNA, 22 nt, Human
ucaggggcccuucccucagcag

SEQ ID NO: 600508 - RNA, 22 nt, Human
cucugggcugccuuuuagcucu

SEQ ID NO: 600509 - RNA, 22 nt, Human
ccuccugggccuugcucuguga

SEQ ID NO: 600510 - RNA, 22 nt, Human
ucaagaguuggucaaauccaaa

SEQ ID NO: 600511 - RNA, 18 nt, Human
uuugaaggauggccugga

SEQ ID NO: 600512 - RNA, 22 nt, Human
acaaugaagggagacacuugcu

SEQ ID NO: 600513 - RNA, 22 nt, Human
uagacauacagugcaguacaua

SEQ ID NO: 600514 - RNA, 22 nt, Human
acuucaaacaauuaacagagaa

SEQ ID NO: 600515 - RNA, 22 nt, Human
aacgucuucucuccaaguaaau

SEQ ID NO: 600516 - RNA, 22 nt, Human
accaggcuggagugcaguggcg

SEQ ID NO: 600517 - RNA, 20 nt, Human
gcugccuuguccugcuuggu

SEQ ID NO: 600518 - RNA, 22 nt, Human
ccaggaagccuuuuucuuugac

SEQ ID NO: 600519 - RNA, 22 nt, Human
cagggagcagcaugggcaaagg

SEQ ID NO: 600520 - RNA, 22 nt, Human
uguucuuuggcuucacagcucu

SEQ ID NO: 600521 - RNA, 22 nt, Human
cauaauuugauaugcuugaugg

SEQ ID NO: 600522 - RNA, 22 nt, Human
ugaguccaagagccagugggaa

SEQ ID NO: 600523 - RNA, 22 nt, Human
caccagguggaaaugucacagc

SEQ ID NO: 600524 - RNA, 22 nt, Human
ucaugcuauuucgaauguaaua

SEQ ID NO: 600525 - RNA, 22 nt, Human
guggaaguagauuugagaaggu

SEQ ID NO: 600526 - RNA, 22 nt, Human
aaugacauggagcaucuuuuca

SEQ ID NO: 600527 - RNA, 22 nt, Human
ggaguggccacgacugggagau

SEQ ID NO: 600528 - RNA, 22 nt, Human
ucuccuuugaaaguuaggacug

SEQ ID NO: 600529 - RNA, 22 nt, Human
cagacuuucaaggagugaaggc

SEQ ID NO: 600530 - RNA, 22 nt, Human
gaggcugcggggaggagccugc

SEQ ID NO: 600531 - RNA, 22 nt, Human
uaaaaugaucucucauguucuu

SEQ ID NO: 600532 - RNA, 22 nt, Human
cccuccagagccuggacauucu

SEQ ID NO: 600533 - RNA, 22 nt, Human
uacauaauuaaucuuuaaguuc

SEQ ID NO: 600534 - RNA, 22 nt, Human
uccuggaagaucucugugagau

SEQ ID NO: 600535 - RNA, 17 nt, Human
gaacagcagaggggaca

SEQ ID NO: 600536 - RNA, 22 nt, Human
uaaguccaccucauucuucagc

SEQ ID NO: 600537 - RNA, 22 nt, Human
ucagagcuuuggagaccaggaa

SEQ ID NO: 600538 - RNA, 22 nt, Human
ggcagaccucuccagccccaca

SEQ ID NO: 600539 - RNA, 22 nt, Human
gugggcuggagcaaugauuuca

SEQ ID NO: 600540 - RNA, 22 nt, Human
acaguggagaagcaaaugcagu

SEQ ID NO: 600541 - RNA, 22 nt, Human
agcuggaggggccagcaggugu

SEQ ID NO: 600542 - RNA, 22 nt, Human
ccucuacagggcauagcccaaa

SEQ ID NO: 600543 - RNA, 22 nt, Human
ucccagggacuggaugaugcag

SEQ ID NO: 600544 - RNA, 22 nt, Human
gcuucuguucaaggauauaagg

SEQ ID NO: 600545 - RNA, 22 nt, Human
ugagcacagcuuucacuagaaa

SEQ ID NO: 600546 - RNA, 22 nt, Human
gacccuccuacuacccuggaaa

SEQ ID NO: 600547 - RNA, 22 nt, Human
aauuugauucccugcaccuguu

SEQ ID NO: 600548 - RNA, 22 nt, Human
uuguuuugcuaaagggucauca

SEQ ID NO: 600549 - RNA, 22 nt, Human
gaaauacaguugggaggaggua

SEQ ID NO: 600550 - RNA, 22 nt, Human
ucuguauugauucuguuaggca

SEQ ID NO: 600551 - RNA, 22 nt, Human
acagguggggaggcugagguuc

SEQ ID NO: 600552 - RNA, 22 nt, Human
augcugaauugaugcgagggag

SEQ ID NO: 600553 - RNA, 22 nt, Human
uauuuugacgauuuuaugcaaa

SEQ ID NO: 600554 - RNA, 22 nt, Human
uggaggcacuaaauggccacaa

SEQ ID NO: 600555 - RNA, 22 nt, Human
ucugucuuagcaucuuugcuca

SEQ ID NO: 600556 - RNA, 19 nt, Human
ucaaguccuaggcccacaa

SEQ ID NO: 600557 - RNA, 22 nt, Human
guggguggaggcgucgagggca

SEQ ID NO: 600558 - RNA, 22 nt, Human
uucuugaauagggauugauaaa

SEQ ID NO: 600559 - RNA, 22 nt, Human
acagcuucgaggaucucauccc

SEQ ID NO: 600560 - RNA, 22 nt, Human
ugcuggcuguauaugugagagu

SEQ ID NO: 600561 - RNA, 22 nt, Human
aaaggucuuaagguuaagcagg

SEQ ID NO: 600562 - RNA, 22 nt, Human
ugagugcucuguaugugccaga

SEQ ID NO: 600563 - RNA, 22 nt, Human
guuaaggaucuugagaugagga

SEQ ID NO: 600564 - RNA, 22 nt, Human
ggccuugauguucuugggagau

SEQ ID NO: 600565 - RNA, 21 nt, Human
aggaggcugucucuuucagcu

SEQ ID NO: 600566 - RNA, 22 nt, Human
ugauuaacugucuauuaaucau

SEQ ID NO: 600567 - RNA, 22 nt, Human
aaacaguuuauaacaugauacu

SEQ ID NO: 600568 - RNA, 22 nt, Human
cauaggaaaagcauucuucuug

SEQ ID NO: 600569 - RNA, 22 nt, Human
gcuggccacacugcugauggag

SEQ ID NO: 600570 - RNA, 22 nt, Human
ugccugaugcaggaguaucaga

SEQ ID NO: 600571 - RNA, 22 nt, Human
uccuggagaauggacaaugcac

SEQ ID NO: 600572 - RNA, 22 nt, Human
acaaagagggaccagugacuug

SEQ ID NO: 600573 - RNA, 22 nt, Human
agcugaaagugcuuugaggacu

SEQ ID NO: 600574 - RNA, 22 nt, Human
ucaggagggugacaggcccugg

SEQ ID NO: 600575 - RNA, 22 nt, Human
agaagugccauacuguggucca

SEQ ID NO: 600576 - RNA, 22 nt, Human
uacaaaugguugaauggaugaa

SEQ ID NO: 600577 - RNA, 22 nt, Human
gcugccuggagcucagccugcc

SEQ ID NO: 600578 - RNA, 22 nt, Human
cacucugcagcugaagggcugg

SEQ ID NO: 600579 - RNA, 22 nt, Human
ugcuuucauucacaaaauagca

SEQ ID NO: 600580 - RNA, 22 nt, Human
cagcugcaguucaaugcuugcu

SEQ ID NO: 600581 - RNA, 22 nt, Human
aggaagcaaaaggcagggucua

SEQ ID NO: 600582 - RNA, 22 nt, Human
uuuccagagcugagaaggcuug

SEQ ID NO: 600583 - RNA, 22 nt, Human
ggagacaauggaggccaaaaga

SEQ ID NO: 600584 - RNA, 22 nt, Human
aggggugauuugggacaggaca

SEQ ID NO: 600585 - RNA, 22 nt, Human
gccaggcugccuuaucucuagc

SEQ ID NO: 600586 - RNA, 22 nt, Human
ucagaacacuuucucuacugac

SEQ ID NO: 600587 - RNA, 22 nt, Human
ugggaaguuguaccuucuguua

SEQ ID NO: 600588 - RNA, 22 nt, Human
cacagcagccagaacauuuuug

SEQ ID NO: 600589 - RNA, 22 nt, Human
agcuacaugaaauugcugauau

SEQ ID NO: 600590 - RNA, 22 nt, Human
gugugcaggugucagugcagcu

SEQ ID NO: 600591 - RNA, 22 nt, Human
auuaacaugaguuggagauagg

SEQ ID NO: 600592 - RNA, 22 nt, Human
uggugacaccccaucucuaaag

SEQ ID NO: 600593 - RNA, 23 nt, Human
ugaggcugauugauuuuugcuca

SEQ ID NO: 600594 - RNA, 22 nt, Human
gugcaaaaguaauugugguuuu

SEQ ID NO: 600595 - RNA, 22 nt, Human
ggcagggagagcaugcugauaa

SEQ ID NO: 600596 - RNA, 22 nt, Human
ccugugccuuaacccuuuaggc

SEQ ID NO: 600597 - RNA, 22 nt, Human
cacagcuuccauuagaaugaga

SEQ ID NO: 600598 - RNA, 22 nt, Human
ggucagaagugcaaaaucaguu

SEQ ID NO: 600599 - RNA, 18 nt, Human
guggaggguucucagaau

SEQ ID NO: 600600 - RNA, 22 nt, Human
auuugcuugugcuaugaaaguu

SEQ ID NO: 600601 - RNA, 21 nt, Human
ugaggauaaguaaagcugaag

SEQ ID NO: 600602 - RNA, 22 nt, Human
cccugcagagggaugggggcag

SEQ ID NO: 600603 - RNA, 22 nt, Human
uuccugaggcucaucggagucg

SEQ ID NO: 600604 - RNA, 22 nt, Human
uaggcugaaaggagaggugaag

SEQ ID NO: 600605 - RNA, 21 nt, Human
aggcugcuggcucaggguccu

SEQ ID NO: 600606 - RNA, 22 nt, Human
uagcuuugugaaguuuacagac

SEQ ID NO: 600607 - RNA, 16 nt, Human
gcagaggaaaggggag

SEQ ID NO: 600608 - RNA, 18 nt, Human
uccucagccucaccuagc

SEQ ID NO: 600609 - RNA, 22 nt, Human
auuuguaauuucuuaucugugu

SEQ ID NO: 600610 - RNA, 22 nt, Human
uagcuguuaaguuguuuggaaa

SEQ ID NO: 600611 - RNA, 22 nt, Human
ugcccuguuccugccuccagcu

SEQ ID NO: 600612 - RNA, 22 nt, Human
ugggccagagaguaagaaaggu

SEQ ID NO: 600613 - RNA, 22 nt, Human
aaugaccagcgccugcagaggg

SEQ ID NO: 600614 - RNA, 22 nt, Human
gagcucaggagcaucagaagaa

SEQ ID NO: 600615 - RNA, 22 nt, Human
cagcuucagcgugacaccagug

SEQ ID NO: 600616 - RNA, 23 nt, Human
uccucccugacuucuacagcaca

SEQ ID NO: 600617 - RNA, 22 nt, Human
ugaggggccgcccaagcacuuc

SEQ ID NO: 600618 - RNA, 22 nt, Human
agcccugggaggccagcuugua

SEQ ID NO: 600619 - RNA, 22 nt, Human
ugccuggguucccaccccaaag

SEQ ID NO: 600620 - RNA, 22 nt, Human
aacacugaagccguuaaaccuu

SEQ ID NO: 600621 - RNA, 22 nt, Human
cugagggucaacuugauuguau

SEQ ID NO: 600622 - RNA, 22 nt, Human
uuuucauaguaauggugcaugu

SEQ ID NO: 600623 - RNA, 22 nt, Human
agcuaaauguugcuuaaaauuu

SEQ ID NO: 600624 - RNA, 22 nt, Human
acauacuaugaauacauguguc

SEQ ID NO: 600625 - RNA, 22 nt, Human
cagaggcuucaagucauucucc

SEQ ID NO: 600626 - RNA, 22 nt, Human
uucuacauugugaaguucuuua

SEQ ID NO: 600627 - RNA, 22 nt, Human
uccucuccagcaaacuggcuau

SEQ ID NO: 600628 - RNA, 22 nt, Human
ugaggcaguucuuacuuguauu

SEQ ID NO: 600629 - RNA, 22 nt, Human
ucagcucugccuguggaggcac

SEQ ID NO: 600630 - RNA, 22 nt, Human
cuuccccaggaccucugcuaaa

SEQ ID NO: 600631 - RNA, 22 nt, Human
cugcaggaaucugugcuaggug

SEQ ID NO: 600632 - RNA, 18 nt, Human
agcugcccugggcuggag

SEQ ID NO: 600633 - RNA, 22 nt, Human
uauuuugacuauuaaaccaaca

SEQ ID NO: 600634 - RNA, 22 nt, Human
uccuggucuacacugcauuggg

SEQ ID NO: 600635 - RNA, 22 nt, Human
auacaguaauuuguaacucauc

SEQ ID NO: 600636 - RNA, 22 nt, Human
cauuguuauagcauuacacacc

SEQ ID NO: 600637 - RNA, 22 nt, Human
agcagggcagguaaggaucaga

SEQ ID NO: 600638 - RNA, 22 nt, Human
cucccguggauguucuucaguc

SEQ ID NO: 600639 - RNA, 22 nt, Human
cugcccagaaucacucacucga

SEQ ID NO: 600640 - RNA, 22 nt, Human
uagaaaagaauuuuauuugaua

SEQ ID NO: 600641 - RNA, 22 nt, Human
cuaggugauccacugcucucuu

SEQ ID NO: 600642 - RNA, 22 nt, Human
ugucauuucacaauaucacuca

SEQ ID NO: 600643 - RNA, 22 nt, Human
ccagcagcugcaaagccugggu

SEQ ID NO: 600644 - RNA, 22 nt, Human
ccauccuggccucgcuguccac

SEQ ID NO: 600645 - RNA, 22 nt, Human
gcugggucuggaugcucaggug

SEQ ID NO: 600646 - RNA, 22 nt, Human
gugcagugacccuggagagcug

SEQ ID NO: 600647 - RNA, 17 nt, Human
ccugcccagagacagau

SEQ ID NO: 600648 - RNA, 22 nt, Human
uaagacaucauuaaacagcaau

SEQ ID NO: 600649 - RNA, 22 nt, Human
aagagagggguugcauggaaau

SEQ ID NO: 600650 - RNA, 22 nt, Human
acacagauuuuacauguuaugc

SEQ ID NO: 600651 - RNA, 22 nt, Human
ugucuuuacuuagaaguucagg

SEQ ID NO: 600652 - RNA, 22 nt, Human
ccuggagcccaaggcagugaga

SEQ ID NO: 600653 - RNA, 22 nt, Human
cugacauuuacugagcacuuac

SEQ ID NO: 600654 - RNA, 22 nt, Human
ucacuuugaauuccuugauuuu

SEQ ID NO: 600655 - RNA, 22 nt, Human
gagugcuggaggugugaguggg

SEQ ID NO: 600656 - RNA, 22 nt, Human
guggacagcuucuaggugccag

SEQ ID NO: 600657 - RNA, 22 nt, Human
gaaagcauaacuaauauuuauu

SEQ ID NO: 600658 - RNA, 21 nt, Human
ggugggcacaggagagcagag

SEQ ID NO: 600659 - RNA, 22 nt, Human
cucuccagucaggaacucugac

SEQ ID NO: 600660 - RNA, 22 nt, Human
agcacagaguugcagagagcgu

SEQ ID NO: 600661 - RNA, 22 nt, Human
uauguacucaucaacuauugaa

SEQ ID NO: 600662 - RNA, 22 nt, Human
uccuggugaggacuccaagaua

SEQ ID NO: 600663 - RNA, 22 nt, Human
cauggccaggcccagggcccag

SEQ ID NO: 600664 - RNA, 22 nt, Human
aauggcuuacccuggauugugu

SEQ ID NO: 600665 - RNA, 18 nt, Human
aggcaggauccuggccuc

SEQ ID NO: 600666 - RNA, 21 nt, Human
uacaagaccggauucgggccc

SEQ ID NO: 600667 - RNA, 22 nt, Human
uggcuucucaguuucauaauga

SEQ ID NO: 600668 - RNA, 22 nt, Human
cuuccucuauguucagguagaa

SEQ ID NO: 600669 - RNA, 21 nt, Human
ucugggggugagccuagaaau

SEQ ID NO: 600670 - RNA, 21 nt, Human
cagaggcagguccugggacgg

SEQ ID NO: 600671 - RNA, 22 nt, Human
ggaggggcauaguucaccauca

SEQ ID NO: 600672 - RNA, 22 nt, Human
uaagauaauaaguaugucuaug

SEQ ID NO: 600673 - RNA, 22 nt, Human
auuguucaauguaauaauuuug

SEQ ID NO: 600674 - RNA, 22 nt, Human
agauauucugccuaacagguuu

SEQ ID NO: 600675 - RNA, 22 nt, Human
ucauccaaggagaccuugcaga

SEQ ID NO: 600676 - RNA, 22 nt, Human
gcucugucauuuugcagacacu

SEQ ID NO: 600677 - RNA, 22 nt, Human
uuguauuugauugucauaucgu

SEQ ID NO: 600678 - RNA, 22 nt, Human
uuggagauaucacaccuucaca

SEQ ID NO: 600679 - RNA, 22 nt, Human
uugcaaaagccgaggcacucca

SEQ ID NO: 600680 - RNA, 22 nt, Human
ggcucauguuucagaaagugga

SEQ ID NO: 600681 - RNA, 21 nt, Human
agagcuggccugccaggcccu

SEQ ID NO: 600682 - RNA, 22 nt, Human
ugucucuucugccuccagcugu

SEQ ID NO: 600683 - RNA, 22 nt, Human
caagauaaaaucagcauuccaa

SEQ ID NO: 600684 - RNA, 22 nt, Human
aggccucagccugccaggccug

SEQ ID NO: 600685 - RNA, 22 nt, Human
auacaucaauuucuuaguuauc

SEQ ID NO: 600686 - RNA, 22 nt, Human
ccacacagucaguuuccaagaa

SEQ ID NO: 600687 - RNA, 22 nt, Human
aaaaccaaguuuuccuuagucu

SEQ ID NO: 600688 - RNA, 22 nt, Human
cagccacugacaggaauggucc

SEQ ID NO: 600689 - RNA, 22 nt, Human
ccucucuccaauuuucaccuca

SEQ ID NO: 600690 - RNA, 22 nt, Human
cuuggaaaguuaucauuuuccu

SEQ ID NO: 600691 - RNA, 22 nt, Human
ucacagaguuaaaaguuucuuu

SEQ ID NO: 600692 - RNA, 22 nt, Human
gauaaagcaaggaugacugaag

SEQ ID NO: 600693 - RNA, 22 nt, Human
guuucuuuuaaaauauguagac

SEQ ID NO: 600694 - RNA, 22 nt, Human
uucuccaggggaggguucucca

SEQ ID NO: 600695 - RNA, 22 nt, Human
auagcaaauauuuuaaugagca

SEQ ID NO: 600696 - RNA, 22 nt, Human
acuauucaagugcucauucaga

SEQ ID NO: 600697 - RNA, 22 nt, Human
ggaaacacaugaucagacaucu

SEQ ID NO: 600698 - RNA, 22 nt, Human
ccucacagcccuccucuagcac

SEQ ID NO: 600699 - RNA, 22 nt, Human
gcuuccagaaugacuaggaugu

SEQ ID NO: 600700 - RNA, 22 nt, Human
aacacagaguauuugaagcauu

SEQ ID NO: 600701 - RNA, 22 nt, Human
augaagcaggcacagcuucagg

SEQ ID NO: 600702 - RNA, 22 nt, Human
uaaauaugcauguauccuuauc

SEQ ID NO: 600703 - RNA, 22 nt, Human
uucuagauagagugcaaauuau

SEQ ID NO: 600704 - RNA, 22 nt, Human
gcucucuggguggugggcaaca

SEQ ID NO: 600705 - RNA, 22 nt, Human
agauuucuguggucauguaaug

SEQ ID NO: 600706 - RNA, 19 nt, Human
ugcuugccugccuuuccca

SEQ ID NO: 600707 - RNA, 22 nt, Human
agucaguggcuccgagccuggu

SEQ ID NO: 600708 - RNA, 22 nt, Human
cuggguccuggugcugaguucu

SEQ ID NO: 600709 - RNA, 22 nt, Human
ucaggccaagguagacaugacu

SEQ ID NO: 600710 - RNA, 22 nt, Human
agggccugucuguagaacugaa

SEQ ID NO: 600711 - RNA, 22 nt, Human
ccucaggccucugccucauugg

SEQ ID NO: 600712 - RNA, 22 nt, Human
ucaaacauaggcacacauucag

SEQ ID NO: 600713 - RNA, 22 nt, Human
agggaaagguagugaggucaca

SEQ ID NO: 600714 - RNA, 22 nt, Human
auguuaaauagccauuuguuug

SEQ ID NO: 600715 - RNA, 22 nt, Human
uggccuggugcucaggcaguag

SEQ ID NO: 600716 - RNA, 22 nt, Human
agcuuugaauccuggcucuguc

SEQ ID NO: 600717 - RNA, 22 nt, Human
gacuucaugacauucaggucag

SEQ ID NO: 600718 - RNA, 22 nt, Human
cuggcaguauuaagagaaguga

SEQ ID NO: 600719 - RNA, 21 nt, Human
aggauuucugucauuucagau

SEQ ID NO: 600720 - RNA, 22 nt, Human
uggcugagagcaauugacucug

SEQ ID NO: 600721 - RNA, 22 nt, Human
cugccguugugaagcucuuaga

SEQ ID NO: 600722 - RNA, 22 nt, Human
gcccaagaucacacuggaaauc

SEQ ID NO: 600723 - RNA, 22 nt, Human
uggucugauggucccaccaccg

SEQ ID NO: 600724 - RNA, 20 nt, Human
uuucauugucagaaucuuau

SEQ ID NO: 600725 - RNA, 22 nt, Human
cugagguccucagagggaaagg

SEQ ID NO: 600726 - RNA, 22 nt, Human
uccucaucucggaaccugccac

SEQ ID NO: 600727 - RNA, 22 nt, Human
cugcccuggccacugugcccag

SEQ ID NO: 600728 - RNA, 22 nt, Human
uauucuccccggaucagggcaa

SEQ ID NO: 600729 - RNA, 22 nt, Human
cuacagaaaaucagccacaggc

SEQ ID NO: 600730 - RNA, 22 nt, Human
cagaggccuauccaguguccau

SEQ ID NO: 600731 - RNA, 22 nt, Human
cauaacauuaagccucuauuuc

SEQ ID NO: 600732 - RNA, 22 nt, Human
cauuuagagaguaaaaauuagc

SEQ ID NO: 600733 - RNA, 18 nt, Human
caguggcauaguugagua

SEQ ID NO: 600734 - RNA, 23 nt, Human
ccaguaaacccuuccucaguguc

SEQ ID NO: 600735 - RNA, 22 nt, Human
agacagagauacuauguuguca

SEQ ID NO: 600736 - RNA, 22 nt, Human
gaacacugacauuuuccugacu

SEQ ID NO: 600737 - RNA, 22 nt, Human
cccagcagauggcuaugugcua

SEQ ID NO: 600738 - RNA, 22 nt, Human
ucauaaaaugcuccugauauug

SEQ ID NO: 600739 - RNA, 22 nt, Human
aggauuuugacuuauucaggga

SEQ ID NO: 600740 - RNA, 22 nt, Human
uuucaauuaggauguuuccaug

SEQ ID NO: 600741 - RNA, 22 nt, Human
ugcaggucuccauuggcagacu

SEQ ID NO: 600742 - RNA, 22 nt, Human
gaguggggcuuuaaaggcucag

SEQ ID NO: 600743 - RNA, 21 nt, Human
aacuauggaggaaauaagucc

SEQ ID NO: 600744 - RNA, 22 nt, Human
cuuagaugaagucacagaaccc

SEQ ID NO: 600745 - RNA, 22 nt, Human
uugcaguuguugccuucccuga

SEQ ID NO: 600746 - RNA, 22 nt, Human
uaggaugguacaaggcaggggu

SEQ ID NO: 600747 - RNA, 22 nt, Human
aagcaaagaguuuaguggguga

SEQ ID NO: 600748 - RNA, 22 nt, Human
augagcugugggauuccagagg

SEQ ID NO: 600749 - RNA, 22 nt, Human
cuuccaggacaccaggguagua

SEQ ID NO: 600750 - RNA, 22 nt, Human
cacaguccagacuccuggaguu

SEQ ID NO: 600751 - RNA, 22 nt, Human
gcuggcuuuugaagucuagcua

SEQ ID NO: 600752 - RNA, 22 nt, Human
auacacuguucacuagaucuuc

SEQ ID NO: 600753 - RNA, 22 nt, Human
uggcucagccauucguguugcc

SEQ ID NO: 600754 - RNA, 19 nt, Human
gcacacccugcaccaccau

SEQ ID NO: 600755 - RNA, 22 nt, Human
uggacaggcaagcaagacauac

SEQ ID NO: 600756 - RNA, 22 nt, Human
aaggagcucccggcagaccagg

SEQ ID NO: 600757 - RNA, 22 nt, Human
acacaauaaauuuauccuuuga

SEQ ID NO: 600758 - RNA, 22 nt, Human
ggagccugugcccaagcccaga

SEQ ID NO: 600759 - RNA, 22 nt, Human
cauugaaaccuaacauaggcug

SEQ ID NO: 600760 - RNA, 22 nt, Human
guuacaaauguaaauucugggg

SEQ ID NO: 600761 - RNA, 22 nt, Human
guucacaagcuggguuucugca

SEQ ID NO: 600762 - RNA, 22 nt, Human
auggaauauagucuuauaucuc

SEQ ID NO: 600763 - RNA, 22 nt, Human
auucuaaugcccuggccccagc

SEQ ID NO: 600764 - RNA, 20 nt, Human
cucucucuccauucccaggg

SEQ ID NO: 600765 - RNA, 22 nt, Human
agaauuuaggaugcaugugaau

SEQ ID NO: 600766 - RNA, 19 nt, Human
acucaagucuaaugaaauc

SEQ ID NO: 600767 - RNA, 22 nt, Human
aagaauaucuguuuuauuuagg

SEQ ID NO: 600768 - RNA, 22 nt, Human
aucauggaagccuaucuugaga

SEQ ID NO: 600769 - RNA, 22 nt, Human
gagcuuugaucgcuaagccuca

SEQ ID NO: 600770 - RNA, 22 nt, Human
gaccagucauuacucaugcccu

SEQ ID NO: 600771 - RNA, 22 nt, Human
cuggaagagugacuuugcauuu

SEQ ID NO: 600772 - RNA, 22 nt, Human
aagcuucaguggacuguagugu

SEQ ID NO: 600773 - RNA, 18 nt, Human
gcuuucugugcagcggag

SEQ ID NO: 600774 - RNA, 22 nt, Human
gagccagaaaagcugccugacu

SEQ ID NO: 600775 - RNA, 22 nt, Human
ucagaggacaagcucccuggug

SEQ ID NO: 600776 - RNA, 22 nt, Human
gccaggcucuugguuauguuuu

SEQ ID NO: 600777 - RNA, 22 nt, Human
ucauuguuaauuguaugaucug

SEQ ID NO: 600778 - RNA, 22 nt, Human
cuggccaggcucucacgugguc

SEQ ID NO: 600779 - RNA, 22 nt, Human
ugcauauuugauugagauaccu

SEQ ID NO: 600780 - RNA, 23 nt, Human
ucauugugacugugccacauaac

SEQ ID NO: 600781 - RNA, 22 nt, Human
ugggccaguccagccccaggga

SEQ ID NO: 600782 - RNA, 23 nt, Human
cuguggcaaguccugcaccugcc

SEQ ID NO: 600783 - RNA, 22 nt, Human
aggacugacuuuugccaugaaa

SEQ ID NO: 600784 - RNA, 22 nt, Human
ugaggcaggacauggacaacug

SEQ ID NO: 600785 - RNA, 22 nt, Human
agcucugggcugacaugcuccc

SEQ ID NO: 600786 - RNA, 22 nt, Human
gagggcuccucacauucucuau

SEQ ID NO: 600787 - RNA, 19 nt, Human
agacagagcucaguggguu

SEQ ID NO: 600788 - RNA, 22 nt, Human
uuuagcuugaaaguuuuggagg

SEQ ID NO: 600789 - RNA, 22 nt, Human
ugauuguaugauugaaauauuu

SEQ ID NO: 600790 - RNA, 22 nt, Human
aagcuguuuuggccuuaguuga

SEQ ID NO: 600791 - RNA, 22 nt, Human
cuuccuugugguccuucucauu

SEQ ID NO: 600792 - RNA, 22 nt, Human
auguucuucuaucuuuauuaaa

SEQ ID NO: 600793 - RNA, 22 nt, Human
guggguggagacugggugcaag

SEQ ID NO: 600794 - RNA, 22 nt, Human
uuccuucuaauuuuacaccuga

SEQ ID NO: 600795 - RNA, 22 nt, Human
gggcucagcuccuuccuuccua

SEQ ID NO: 600796 - RNA, 22 nt, Human
ugcuggcagccaugccuuggaa

SEQ ID NO: 600797 - RNA, 22 nt, Human
gaggauggaggugugagcuaug

SEQ ID NO: 600798 - RNA, 22 nt, Human
gugcaguucuuguaacaugcug

SEQ ID NO: 600799 - RNA, 22 nt, Human
ggagagaggagcccacugcugu

SEQ ID NO: 600800 - RNA, 22 nt, Human
uuccacagucauccugggaauu

SEQ ID NO: 600801 - RNA, 22 nt, Human
uuguauaagaaguuggcagaua

SEQ ID NO: 600802 - RNA, 22 nt, Human
cugagguccuugacugcuugcc

SEQ ID NO: 600803 - RNA, 22 nt, Human
cuccuccuggacacaggcugug

SEQ ID NO: 600804 - RNA, 22 nt, Human
aacccaggaggcagaggcugca

SEQ ID NO: 600805 - RNA, 22 nt, Human
uacaagaagaggcagagcugga

SEQ ID NO: 600806 - RNA, 22 nt, Human
agagggggaaaauagagguguu

SEQ ID NO: 600807 - RNA, 22 nt, Human
cauaauuugugguaguggggga

SEQ ID NO: 600808 - RNA, 22 nt, Human
agaucuuaugaugcacagggca

SEQ ID NO: 600809 - RNA, 22 nt, Human
ucagaagcugguguccuuugaa

SEQ ID NO: 600810 - RNA, 22 nt, Human
agcucccagaguccucugccca

SEQ ID NO: 600811 - RNA, 22 nt, Human
gaauacuuuuguuaggaaaacg

SEQ ID NO: 600812 - RNA, 22 nt, Human
cucuuuuucagccuuaccaaag

SEQ ID NO: 600813 - RNA, 22 nt, Human
uggguagguguggccugaaugu

SEQ ID NO: 600814 - RNA, 22 nt, Human
agccagacauggcuccugcucc

SEQ ID NO: 600815 - RNA, 22 nt, Human
uuacaucauguaacuggauaua

SEQ ID NO: 600816 - RNA, 22 nt, Human
uguuuugucuaaucuaaauucu

SEQ ID NO: 600817 - RNA, 22 nt, Human
cugcagggccauggguucuaua

SEQ ID NO: 600818 - RNA, 22 nt, Human
guacaggacauagacagaguag

SEQ ID NO: 600819 - RNA, 22 nt, Human
uggcuccaggggacacgcagua

SEQ ID NO: 600820 - RNA, 22 nt, Human
uugaaaguuaucuagauucuga

SEQ ID NO: 600821 - RNA, 22 nt, Human
cugggcagaauuuuaggauggc

SEQ ID NO: 600822 - RNA, 22 nt, Human
ggagaggggaacuuguugcuug

SEQ ID NO: 600823 - RNA, 22 nt, Human
ugcaggguguccggaggaucac

SEQ ID NO: 600824 - RNA, 22 nt, Human
ugguggcagagcaagagcugga

SEQ ID NO: 600825 - RNA, 22 nt, Human
aaagcauggcaugaagaacaug

SEQ ID NO: 600826 - RNA, 22 nt, Human
cagugcugcaggcgccugcggu

SEQ ID NO: 600827 - RNA, 22 nt, Human
gagaggugaauguggaugccac

SEQ ID NO: 600828 - RNA, 22 nt, Human
guuuagcaauaaaaacacauga

SEQ ID NO: 600829 - RNA, 21 nt, Human
aaagauguuucuuuuccucac

SEQ ID NO: 600830 - RNA, 22 nt, Human
agugggggcagagccucucucg

SEQ ID NO: 600831 - RNA, 16 nt, Human
uaacauuuuuaaaagg

SEQ ID NO: 600832 - RNA, 22 nt, Human
aaaggcucauacagaaaauaca

SEQ ID NO: 600833 - RNA, 22 nt, Human
uuaucaugggaccugaauuuua

SEQ ID NO: 600834 - RNA, 22 nt, Human
ggaggccaaggcagguggauca

SEQ ID NO: 600835 - RNA, 22 nt, Human
cagccagaggcugcgaggggcc

SEQ ID NO: 600836 - RNA, 22 nt, Human
uccugggguccugacugcuucc

SEQ ID NO: 600837 - RNA, 22 nt, Human
agcuggugaggguugaggggua

SEQ ID NO: 600838 - RNA, 22 nt, Human
uuccuucuuccuuuaguaacca

SEQ ID NO: 600839 - RNA, 22 nt, Human
gccuggagacagcagaggcggc

SEQ ID NO: 600840 - RNA, 22 nt, Human
cuuacauuuaaucaugugucau

SEQ ID NO: 600841 - RNA, 23 nt, Human
uucauguggaccuagaggccugu

SEQ ID NO: 600842 - RNA, 22 nt, Human
guccugggaacuggacagcuaa

SEQ ID NO: 600843 - RNA, 22 nt, Human
auuucuuuucaagagggugcuu

SEQ ID NO: 600844 - RNA, 22 nt, Human
ugaggccauggaacuagcuugg

SEQ ID NO: 600845 - RNA, 22 nt, Human
gcuugcuuauuugcccuucucc

SEQ ID NO: 600846 - RNA, 22 nt, Human
cugaagaugucugagaugcuca

SEQ ID NO: 600847 - RNA, 22 nt, Human
uggcaggaaccuuaaccacaaa

SEQ ID NO: 600848 - RNA, 22 nt, Human
auguaaaagauuauuuuccugu

SEQ ID NO: 600849 - RNA, 21 nt, Human
cccagggaagccgcagucacc

SEQ ID NO: 600850 - RNA, 22 nt, Human
agagauuggggaugaaucuuuc

SEQ ID NO: 600851 - RNA, 22 nt, Human
ucccagagacaucauuucuccg

SEQ ID NO: 600852 - RNA, 22 nt, Human
agggcugcuuugcuaaauaugg

SEQ ID NO: 600853 - RNA, 22 nt, Human
gggacaggcaaagguaugcuuc

SEQ ID NO: 600854 - RNA, 22 nt, Human
acacuucucccaucuccuguug

SEQ ID NO: 600855 - RNA, 22 nt, Human
cacugguugccucuuucuguuc

SEQ ID NO: 600856 - RNA, 22 nt, Human
ucagagaauguccuucuucauu

SEQ ID NO: 600857 - RNA, 22 nt, Human
acagcagcgucaacuuaaaauu

SEQ ID NO: 600858 - RNA, 22 nt, Human
auaugaguuucccacuucugga

SEQ ID NO: 600859 - RNA, 22 nt, Human
aaaauugagaguuauagauggu

SEQ ID NO: 600860 - RNA, 22 nt, Human
uacagaguggugagaucuuuug

SEQ ID NO: 600861 - RNA, 22 nt, Human
ugucugugaccucuuaggcaag

SEQ ID NO: 600862 - RNA, 22 nt, Human
uagacauuucugguuauugaca

SEQ ID NO: 600863 - RNA, 22 nt, Human
aucauucagccuaagcaaguac

SEQ ID NO: 600864 - RNA, 22 nt, Human
acaguaaggguaaauaagaaca

SEQ ID NO: 600865 - RNA, 22 nt, Human
guacacaggcagcccagugcug

SEQ ID NO: 600866 - RNA, 22 nt, Human
augaagucuagcaagcauugaa

SEQ ID NO: 600867 - RNA, 22 nt, Human
cugagagaugauauagcuuaau

SEQ ID NO: 600868 - RNA, 22 nt, Human
gcucuggccagacccucagugg

SEQ ID NO: 600869 - RNA, 22 nt, Human
cuguagagaaagcauggaagcu

SEQ ID NO: 600870 - RNA, 22 nt, Human
ucugagguuaauccugcugcau

SEQ ID NO: 600871 - RNA, 22 nt, Human
acauugaugaaaagguaucauu

SEQ ID NO: 600872 - RNA, 22 nt, Human
ggggggcagcuguccuggccau

SEQ ID NO: 600873 - RNA, 22 nt, Human
cagaaauauuuauugagugaca

SEQ ID NO: 600874 - RNA, 22 nt, Human
uuucuggaaagcaagauacauu

SEQ ID NO: 600875 - RNA, 22 nt, Human
caugcuuuucaaucuaucuuaa

SEQ ID NO: 600876 - RNA, 22 nt, Human
acagucucuguugcugcuguuu

SEQ ID NO: 600877 - RNA, 22 nt, Human
ggaauauagccaguaacaguca

SEQ ID NO: 600878 - RNA, 22 nt, Human
auaugaaaguaagcaugugugu

SEQ ID NO: 600879 - RNA, 22 nt, Human
ucuguaaagauguuuauaccuu

SEQ ID NO: 600880 - RNA, 22 nt, Human
gccuggagaaaggaagguggga

SEQ ID NO: 600881 - RNA, 22 nt, Human
acauugaucagccucccaugca

SEQ ID NO: 600882 - RNA, 22 nt, Human
ccagggcuucagagguuuuggc

SEQ ID NO: 600883 - RNA, 22 nt, Human
ugggaaugggccuagaaggcug

SEQ ID NO: 600884 - RNA, 22 nt, Human
gugugugugccugcacacacac

SEQ ID NO: 600885 - RNA, 22 nt, Human
ggaugcugacuuuggagcaugg

SEQ ID NO: 600886 - RNA, 22 nt, Human
uccuuagccagggcagcucaaa

SEQ ID NO: 600887 - RNA, 22 nt, Human
cagugcuggcuguuaggacagu

SEQ ID NO: 600888 - RNA, 22 nt, Human
acuggcacuauguuggagaaau

SEQ ID NO: 600889 - RNA, 22 nt, Human
augaaauucaucugagaaugcu

SEQ ID NO: 600890 - RNA, 22 nt, Human
gcugcaggcagaaucucccaau

SEQ ID NO: 600891 - RNA, 22 nt, Human
uuugugcaggugugucagaucg

SEQ ID NO: 600892 - RNA, 22 nt, Human
auccuguggcuccagggagccg

SEQ ID NO: 600893 - RNA, 22 nt, Human
gccaggcuggaaagaacagaca

SEQ ID NO: 600894 - RNA, 22 nt, Human
ugaggcagcuuuuucugugugu

SEQ ID NO: 600895 - RNA, 22 nt, Human
aggcagggucuugcuauguugc

SEQ ID NO: 600896 - RNA, 22 nt, Human
ucaaagcaucagucaauuuagg

SEQ ID NO: 600897 - RNA, 20 nt, Human
gacaugucuuucucacacaa

SEQ ID NO: 600898 - RNA, 20 nt, Human
aggguggggacguucugacu

SEQ ID NO: 600899 - RNA, 22 nt, Human
gaaauauuguacuggagauguu

SEQ ID NO: 600900 - RNA, 22 nt, Human
caagagacuuauguggaaaccu

SEQ ID NO: 600901 - RNA, 22 nt, Human
gggaaaggauuuacaguuugau

SEQ ID NO: 600902 - RNA, 22 nt, Human
uagaggggaaucugccuccucu

SEQ ID NO: 600903 - RNA, 22 nt, Human
caugaauauuuaguauuuacuu

SEQ ID NO: 600904 - RNA, 20 nt, Human
gcccaagcgccggccgcaga

SEQ ID NO: 600905 - RNA, 22 nt, Human
ugcaggaauuuuuugcagaaag

SEQ ID NO: 600906 - RNA, 22 nt, Human
gcugggucagaaucucccugug

SEQ ID NO: 600907 - RNA, 22 nt, Human
agagaaggucacuaaggaccca

SEQ ID NO: 600908 - RNA, 22 nt, Human
uuauuuauguuaacagucgaga

SEQ ID NO: 600909 - RNA, 22 nt, Human
gggaaggagccugcuugcuaga

SEQ ID NO: 600910 - RNA, 22 nt, Human
guggcagcuguguugcaguuuu

SEQ ID NO: 600911 - RNA, 22 nt, Human
gaagcaauuaaguuugugaucu

SEQ ID NO: 600912 - RNA, 22 nt, Human
aauaagugaugaugagucacuc

SEQ ID NO: 600913 - RNA, 22 nt, Human
aguacaaugucugacacaguag

SEQ ID NO: 600914 - RNA, 20 nt, Human
aggcacuggauuucuuauau

SEQ ID NO: 600915 - RNA, 22 nt, Human
caaucagauaugugacauauuu

SEQ ID NO: 600916 - RNA, 22 nt, Human
cgggagcacgggaggcggagcu

SEQ ID NO: 600917 - RNA, 22 nt, Human
cuucugggagagcuuuugcuuc

SEQ ID NO: 600918 - RNA, 22 nt, Human
cugcagguugagcagccagguu

SEQ ID NO: 600919 - RNA, 22 nt, Human
ugugcccauuacacagaggcau

SEQ ID NO: 600920 - RNA, 22 nt, Human
cccuccaugagugugcugcugg

SEQ ID NO: 600921 - RNA, 22 nt, Human
aucugcuugaaacuucuuauac

SEQ ID NO: 600922 - RNA, 21 nt, Human
uauacaguaauuaagugguau

SEQ ID NO: 600923 - RNA, 22 nt, Human
agaauguguuauuagagaagga

SEQ ID NO: 600924 - RNA, 22 nt, Human
gaguuauuuguagggauuauau

SEQ ID NO: 600925 - RNA, 22 nt, Human
ugaagguggaagggugguucug

SEQ ID NO: 600926 - RNA, 22 nt, Human
uagacuauuucuuuugcauagg

SEQ ID NO: 600927 - RNA, 22 nt, Human
acaggcugcugagccauuugcu

SEQ ID NO: 600928 - RNA, 22 nt, Human
uccccaggaaggcccuuccugg

SEQ ID NO: 600929 - RNA, 22 nt, Human
ggcugcagauagccagccacca

SEQ ID NO: 600930 - RNA, 22 nt, Human
uaaaauagccagugccccucug

SEQ ID NO: 600931 - RNA, 22 nt, Human
agccacagcaacaagugcaauu

SEQ ID NO: 600932 - RNA, 18 nt, Human
agagaaagaccaaagcau

SEQ ID NO: 600933 - RNA, 22 nt, Human
caguuucugccaggauguguua

SEQ ID NO: 600934 - RNA, 22 nt, Human
cugggccucauccucagaguuu

SEQ ID NO: 600935 - RNA, 22 nt, Human
aucaacagguauggaugagauu

SEQ ID NO: 600936 - RNA, 22 nt, Human
cuccagccucagaugacgguac

SEQ ID NO: 600937 - RNA, 22 nt, Human
uuacuuuaucuccuagauucca

SEQ ID NO: 600938 - RNA, 22 nt, Human
gcucuuccauuucucuugaacu

SEQ ID NO: 600939 - RNA, 22 nt, Human
gagauggggucuugcuauguug

SEQ ID NO: 600940 - RNA, 22 nt, Human
ucuuuugucaucccuuguacau

SEQ ID NO: 600941 - RNA, 22 nt, Human
ggagggucuaagggagaacuga

SEQ ID NO: 600942 - RNA, 22 nt, Human
ucugcccuuggcucucuuguug

SEQ ID NO: 600943 - RNA, 17 nt, Human
guccugggaggagagag

SEQ ID NO: 600944 - RNA, 22 nt, Human
cuuguacauugauuucugcauu

SEQ ID NO: 600945 - RNA, 22 nt, Human
acacaugcucauaaauaaauag

SEQ ID NO: 600946 - RNA, 22 nt, Human
aguguucacucuguggagccca

SEQ ID NO: 600947 - RNA, 22 nt, Human
gaaauagaucucugggaugcaa

SEQ ID NO: 600948 - RNA, 22 nt, Human
aauuccacagcugcacagaggu

SEQ ID NO: 600949 - RNA, 22 nt, Human
ugggagagaauucuggugacug

SEQ ID NO: 600950 - RNA, 22 nt, Human
agggcugcugaggaagccuugc

SEQ ID NO: 600951 - RNA, 22 nt, Human
caguuucuguuuuaaauagcag

SEQ ID NO: 600952 - RNA, 22 nt, Human
aaagccagagcaagcugucaca

SEQ ID NO: 600953 - RNA, 22 nt, Human
ucugggagguacugggaggugu

SEQ ID NO: 600954 - RNA, 22 nt, Human
agagcuggauggucaagauggc

SEQ ID NO: 600955 - RNA, 21 nt, Human
gccacguuucagucuucucag

SEQ ID NO: 600956 - RNA, 22 nt, Human
auacacagccauuaugaauuag

SEQ ID NO: 600957 - RNA, 22 nt, Human
uccaggagguugagacugcagu

SEQ ID NO: 600958 - RNA, 22 nt, Human
cagacaggcuagccagacucac

SEQ ID NO: 600959 - RNA, 22 nt, Human
ccuccaaguuugacucaggaca

SEQ ID NO: 600960 - RNA, 22 nt, Human
aaguacauggaggauagcugcu

SEQ ID NO: 600961 - RNA, 22 nt, Human
accgcagugacgugggacuucc

SEQ ID NO: 600962 - RNA, 18 nt, Human
aguaaagcuuauuacaug

SEQ ID NO: 600963 - RNA, 22 nt, Human
uugaggucccugccuugccuuc

SEQ ID NO: 600964 - RNA, 22 nt, Human
cuaacgaaauaccucagacuuu

SEQ ID NO: 600965 - RNA, 22 nt, Human
ugcacuacugugauacacagcc

SEQ ID NO: 600966 - RNA, 19 nt, Human
aggcugugagggaggacuc

SEQ ID NO: 600967 - RNA, 22 nt, Human
uguaaggugcucauguauuucu

SEQ ID NO: 600968 - RNA, 22 nt, Human
cagcagggaagcugugcuguuu

SEQ ID NO: 600969 - RNA, 22 nt, Human
uuuauuacaccagguuaacuca

SEQ ID NO: 600970 - RNA, 22 nt, Human
ugagugaauucaaguaaagggc

SEQ ID NO: 600971 - RNA, 22 nt, Human
uguuuucuguguagagaucaca

SEQ ID NO: 600972 - RNA, 22 nt, Human
uggcacauccacagaaucugga

SEQ ID NO: 600973 - RNA, 22 nt, Human
cagaggcuagacugugcuuccu

SEQ ID NO: 600974 - RNA, 22 nt, Human
gagcucagacucgggccugggg

SEQ ID NO: 600975 - RNA, 22 nt, Human
auguaaggagccacaguggggg

SEQ ID NO: 600976 - RNA, 22 nt, Human
gagguuagaggucagugcaguc

SEQ ID NO: 600977 - RNA, 19 nt, Human
cagugauuaauucaucuua

SEQ ID NO: 600978 - RNA, 22 nt, Human
acagauguggaguuugcaugau

SEQ ID NO: 600979 - RNA, 22 nt, Human
uucaagaugucuucacaauagu

SEQ ID NO: 600980 - RNA, 22 nt, Human
uggcugacaauguagcaguaac

SEQ ID NO: 600981 - RNA, 22 nt, Human
caguguucccugaacauauguu

SEQ ID NO: 600982 - RNA, 22 nt, Human
ugcugaauaaauaaagucuauu

SEQ ID NO: 600983 - RNA, 22 nt, Human
uuacacagaaacacuguucaga

SEQ ID NO: 600984 - RNA, 22 nt, Human
gggcagagagcuggaacuccuu

SEQ ID NO: 600985 - RNA, 22 nt, Human
gaaagaagcuuuagauggcuau

SEQ ID NO: 600986 - RNA, 22 nt, Human
cugaggcaggauggccuggcug

SEQ ID NO: 600987 - RNA, 22 nt, Human
agagcugggugaagugccauca

SEQ ID NO: 600988 - RNA, 22 nt, Human
gugcauaugguuacagcaccgc

SEQ ID NO: 600989 - RNA, 22 nt, Human
uacccucucccgguccagcuuu

SEQ ID NO: 600990 - RNA, 22 nt, Human
ccuuggagcggucagcacuggu

SEQ ID NO: 600991 - RNA, 22 nt, Human
ugggccacgugacccuuacccu

SEQ ID NO: 600992 - RNA, 22 nt, Human
cugaggcacugucagcugaggc

SEQ ID NO: 600993 - RNA, 22 nt, Human
ggggaaauuguggcugacagug

SEQ ID NO: 600994 - RNA, 22 nt, Human
ugaugcccccaaaucuggcuca

SEQ ID NO: 600995 - RNA, 22 nt, Human
gacagcagacagaacuaccugc

SEQ ID NO: 600996 - RNA, 22 nt, Human
gcagugaagccagaucugaaau

SEQ ID NO: 600997 - RNA, 23 nt, Human
ugcuccagccucuuugauagugu

SEQ ID NO: 600998 - RNA, 20 nt, Human
agcaagaguaaggacagcga

SEQ ID NO: 600999 - RNA, 22 nt, Human
aagucuuaaccaaauaaauguu

SEQ ID NO: 601000 - RNA, 22 nt, Human
ugggcagggaucucuuuugcaa

SEQ ID NO: 601001 - RNA, 22 nt, Human
acugcugugaucugauguaauu

SEQ ID NO: 601002 - RNA, 22 nt, Human
uucuggccaaggcugccagauu

SEQ ID NO: 601003 - RNA, 22 nt, Human
auuccuugcucucaucaaccuu

SEQ ID NO: 601004 - RNA, 22 nt, Human
aguguguacauuuggugcaguu

SEQ ID NO: 601005 - RNA, 20 nt, Human
auaugcuuaaucucacuaca

SEQ ID NO: 601006 - RNA, 22 nt, Human
cauggcugcgagaagagugggu

SEQ ID NO: 601007 - RNA, 17 nt, Human
uuuuguucaucuucaaa

SEQ ID NO: 601008 - RNA, 22 nt, Human
agccacagugcaagagagaaaa

SEQ ID NO: 601009 - RNA, 22 nt, Human
aaacaauccaggaaccuguuua

SEQ ID NO: 601010 - RNA, 22 nt, Human
gugagguccaguaacuugucca

SEQ ID NO: 601011 - RNA, 19 nt, Human
gccaggccuggaccugcag

SEQ ID NO: 601012 - RNA, 22 nt, Human
aggccaagauuuuggaucagcu

SEQ ID NO: 601013 - RNA, 22 nt, Human
gccuggggggcaugucauaaua

SEQ ID NO: 601014 - RNA, 22 nt, Human
uuguuuuaaccuaguguuuaug

SEQ ID NO: 601015 - RNA, 22 nt, Human
gugaauaacuuucuauguuaau

SEQ ID NO: 601016 - RNA, 22 nt, Human
uuuguucuaacuucugcagaca

SEQ ID NO: 601017 - RNA, 20 nt, Human
ggagcuggcauccagccucu

SEQ ID NO: 601018 - RNA, 22 nt, Human
ucugggaaaugggcagcuucgc

SEQ ID NO: 601019 - RNA, 22 nt, Human
gcucccacaaccuucuugcucc

SEQ ID NO: 601020 - RNA, 22 nt, Human
uggagaugaacauggugauguu

SEQ ID NO: 601021 - RNA, 22 nt, Human
ucucuucuuuggggugggcuca

SEQ ID NO: 601022 - RNA, 22 nt, Human
gguuaggaucagauccuggagg

SEQ ID NO: 601023 - RNA, 22 nt, Human
cccugcuuucaaccuucuagcu

SEQ ID NO: 601024 - RNA, 22 nt, Human
uccucccugaguggggacagcu

SEQ ID NO: 601025 - RNA, 22 nt, Human
ggcuauggcaaagaacucagau

SEQ ID NO: 601026 - RNA, 22 nt, Human
gccuggcuggucacugccuggc

SEQ ID NO: 601027 - RNA, 22 nt, Human
ucacugcucugaaaguacaggg

SEQ ID NO: 601028 - RNA, 22 nt, Human
gcugagcugaggcagggcuggg

SEQ ID NO: 601029 - RNA, 22 nt, Human
gcccuccauggugauccaggcc

SEQ ID NO: 601030 - RNA, 22 nt, Human
gacuucauaauauugagcaugu

SEQ ID NO: 601031 - RNA, 22 nt, Human
ccaggccucuggcugcuuaguc

SEQ ID NO: 601032 - RNA, 22 nt, Human
gugcugaguagaaugaaugccu

SEQ ID NO: 601033 - RNA, 22 nt, Human
uacaugaagaaaauuaagcagu

SEQ ID NO: 601034 - RNA, 22 nt, Human
ugaaaaacacuaauuggaaagc

SEQ ID NO: 601035 - RNA, 22 nt, Human
auacuguaucacuugugaguga

SEQ ID NO: 601036 - RNA, 22 nt, Human
ucuugaggucaucaucugaaac

SEQ ID NO: 601037 - RNA, 22 nt, Human
cuuaaauccaucauuucuaauc

SEQ ID NO: 601038 - RNA, 22 nt, Human
uccccagguccugucggcuccu

SEQ ID NO: 601039 - RNA, 22 nt, Human
aaugaaacuguauauagacugu

SEQ ID NO: 601040 - RNA, 22 nt, Human
ugcuggcucccaggagccgcug

SEQ ID NO: 601041 - RNA, 20 nt, Human
ucaguuaaguugcugaaucu

SEQ ID NO: 601042 - RNA, 22 nt, Human
aggucagcugcugauaggcagc

SEQ ID NO: 601043 - RNA, 22 nt, Human
ugggaauguggcaaggcauaga

SEQ ID NO: 601044 - RNA, 22 nt, Human
auauccuuuacugugucacaga

SEQ ID NO: 601045 - RNA, 22 nt, Human
caaagacacgggaaacaacguu

SEQ ID NO: 601046 - RNA, 22 nt, Human
uucuuucccuuccagcagcucc

SEQ ID NO: 601047 - RNA, 22 nt, Human
uaacacugguauuucauuuagu

SEQ ID NO: 601048 - RNA, 22 nt, Human
gcucugguucucuuagaguagu

SEQ ID NO: 601049 - RNA, 22 nt, Human
caucaagucaucaaagaauuca

SEQ ID NO: 601050 - RNA, 22 nt, Human
gagaccugcagcuguagucugc

SEQ ID NO: 601051 - RNA, 22 nt, Human
ggcugugaacccuggcagugug

SEQ ID NO: 601052 - RNA, 22 nt, Human
uggcccugcuguaucaucugcu

SEQ ID NO: 601053 - RNA, 22 nt, Human
aggagugagcuuuggggucaga

SEQ ID NO: 601054 - RNA, 22 nt, Human
cuguuaaagauaguuaagcuuc

SEQ ID NO: 601055 - RNA, 22 nt, Human
uucuccagacaacagaggguga

SEQ ID NO: 601056 - RNA, 18 nt, Human
agagcagcggcaucacac

SEQ ID NO: 601057 - RNA, 22 nt, Human
cagcaagacaguuuccuaagug

SEQ ID NO: 601058 - RNA, 23 nt, Human
gcccagagaggcucaccaggaau

SEQ ID NO: 601059 - RNA, 22 nt, Human
uuguuaaaacuccauugguuug

SEQ ID NO: 601060 - RNA, 22 nt, Human
gaaagcaguauuuaguucuguu

SEQ ID NO: 601061 - RNA, 22 nt, Human
cagugcuuuuuuaccuuccaac

SEQ ID NO: 601062 - RNA, 22 nt, Human
cagcccugucccugagggaccu

SEQ ID NO: 601063 - RNA, 22 nt, Human
ggacagcguggcugguggaggg

SEQ ID NO: 601064 - RNA, 22 nt, Human
aaggcaguggcuggaaaaccug

SEQ ID NO: 601065 - RNA, 21 nt, Human
guugugguuggggcugcagcu

SEQ ID NO: 601066 - RNA, 22 nt, Human
uuuccaauaaggucaccuuccu

SEQ ID NO: 601067 - RNA, 18 nt, Human
gcuccugguuggaaagaa

SEQ ID NO: 601068 - RNA, 22 nt, Human
aggcucagccccugggaggaga

SEQ ID NO: 601069 - RNA, 22 nt, Human
cagagaaaaaauccugcucuca

SEQ ID NO: 601070 - RNA, 20 nt, Human
cuugaacugauucuauuucc

SEQ ID NO: 601071 - RNA, 22 nt, Human
uugaagacuaauuuagauaaug

SEQ ID NO: 601072 - RNA, 22 nt, Human
uucauucuugucuuuguauagu

SEQ ID NO: 601073 - RNA, 22 nt, Human
agccugccaggcgcugccugga

SEQ ID NO: 601074 - RNA, 22 nt, Human
uagcuuuggauucuuuggggaa

SEQ ID NO: 601075 - RNA, 20 nt, Human
cucuuuacaugucucuuccu

SEQ ID NO: 601076 - RNA, 22 nt, Human
ccagcugaggcagccacacagg

SEQ ID NO: 601077 - RNA, 22 nt, Human
cauaucauaggucuuggauaau

SEQ ID NO: 601078 - RNA, 18 nt, Human
gaagcauauuuguucuuc

SEQ ID NO: 601079 - RNA, 22 nt, Human
uggccacaguguccagcagcag

SEQ ID NO: 601080 - RNA, 23 nt, Human
ugguggcagaaguagcagaugac

SEQ ID NO: 601081 - RNA, 22 nt, Human
cuuaauuuaaaauaguucaggc

SEQ ID NO: 601082 - RNA, 22 nt, Human
ugggggagaguuuagaugauuu

SEQ ID NO: 601083 - RNA, 22 nt, Human
uggcagaaguucacuaguagcu

SEQ ID NO: 601084 - RNA, 22 nt, Human
agcaaauaaagacaauuauguc

SEQ ID NO: 601085 - RNA, 22 nt, Human
ugucuccaugugauaguggccu

SEQ ID NO: 601086 - RNA, 17 nt, Human
aggagucucagaugagc

SEQ ID NO: 601087 - RNA, 22 nt, Human
guuuauaaauucugcuuuuguu

SEQ ID NO: 601088 - RNA, 22 nt, Human
gcuccaggagcucacagcucgc

SEQ ID NO: 601089 - RNA, 22 nt, Human
guuuuucuagacugggaguuug

SEQ ID NO: 601090 - RNA, 22 nt, Human
uauuccugguguuggcuggguc

SEQ ID NO: 601091 - RNA, 22 nt, Human
uagucuuccuggaagaaguguu

SEQ ID NO: 601092 - RNA, 22 nt, Human
guugaaaguagaugcuauuugg

SEQ ID NO: 601093 - RNA, 22 nt, Human
aagagcuggaagugaagauaac

SEQ ID NO: 601094 - RNA, 20 nt, Human
agaaacauuucuugagaacu

SEQ ID NO: 601095 - RNA, 23 nt, Human
gacagggcugacuuggcagcugc

SEQ ID NO: 601096 - RNA, 22 nt, Human
aggccagggccagauuagccac

SEQ ID NO: 601097 - RNA, 22 nt, Human
ccagugcagucccccugaacug

SEQ ID NO: 601098 - RNA, 22 nt, Human
acaaauuuggugagaguaaaua

SEQ ID NO: 601099 - RNA, 22 nt, Human
accagggcagccgagguguguc

SEQ ID NO: 601100 - RNA, 22 nt, Human
uggguuggucagcauaagaugg

SEQ ID NO: 601101 - RNA, 23 nt, Human
agaauuucuaacucuagcucugu

SEQ ID NO: 601102 - RNA, 22 nt, Human
acaaaggugagcagaagacaca

SEQ ID NO: 601103 - RNA, 22 nt, Human
uccugaaggcagauggggauca

SEQ ID NO: 601104 - RNA, 22 nt, Human
auuuucuauguuguaauuguua

SEQ ID NO: 601105 - RNA, 22 nt, Human
cugcuagcccaggaugcaggga

SEQ ID NO: 601106 - RNA, 22 nt, Human
uuagauaauguuauuguaauuu

SEQ ID NO: 601107 - RNA, 22 nt, Human
caggacagugcagguccauccu

SEQ ID NO: 601108 - RNA, 22 nt, Human
uauuuagaugcauuuggauugc

SEQ ID NO: 601109 - RNA, 22 nt, Human
uucuucaaagaugucuguugga

SEQ ID NO: 601110 - RNA, 22 nt, Human
aggcucuggaguuagccaggca

SEQ ID NO: 601111 - RNA, 22 nt, Human
gcuucuauuauuuggagcugag

SEQ ID NO: 601112 - RNA, 22 nt, Human
ugucaauguguacaggagcuca

SEQ ID NO: 601113 - RNA, 22 nt, Human
cuggggucucaauucuagcggg

SEQ ID NO: 601114 - RNA, 22 nt, Human
cacaguguagacuaauaauaga

SEQ ID NO: 601115 - RNA, 22 nt, Human
aggcaggggagcuggaagggua

SEQ ID NO: 601116 - RNA, 22 nt, Human
ugggugggagcgcccugucugg

SEQ ID NO: 601117 - RNA, 19 nt, Human
gcugggagcagacccuccc

SEQ ID NO: 601118 - RNA, 22 nt, Human
gucaaaaugagcuuuguuauug

SEQ ID NO: 601119 - RNA, 22 nt, Human
ggggccaguaggagugauguac

SEQ ID NO: 601120 - RNA, 22 nt, Human
auccacccugugguggcuuucu

SEQ ID NO: 601121 - RNA, 22 nt, Human
gccucagugauaugugggacaa

SEQ ID NO: 601122 - RNA, 18 nt, Human
uggccuggagacaacucu

SEQ ID NO: 601123 - RNA, 22 nt, Human
ccccagagaaagucagcagcau

SEQ ID NO: 601124 - RNA, 22 nt, Human
aaaugaacaguugcauucucug

SEQ ID NO: 601125 - RNA, 21 nt, Human
uuacuuuagaaauugccuuuu

SEQ ID NO: 601126 - RNA, 22 nt, Human
aggcagcuggcaaauucuagag

SEQ ID NO: 601127 - RNA, 19 nt, Human
uccaggggcuccaccuccu

SEQ ID NO: 601128 - RNA, 17 nt, Human
ggccacagagcuugggg

SEQ ID NO: 601129 - RNA, 22 nt, Human
caggcacugcacuaccacuuuu

SEQ ID NO: 601130 - RNA, 22 nt, Human
uuucaagcucuucaguguuauu

SEQ ID NO: 601131 - RNA, 22 nt, Human
gguagugaggugaaagagaggu

SEQ ID NO: 601132 - RNA, 22 nt, Human
ucccagagucagagguggggcc

SEQ ID NO: 601133 - RNA, 22 nt, Human
ccugaguagcuggaauuaaagg

SEQ ID NO: 601134 - RNA, 22 nt, Human
auaauauaauccuacuucccau

SEQ ID NO: 601135 - RNA, 22 nt, Human
uuuucauuagaaugacugagaa

SEQ ID NO: 601136 - RNA, 22 nt, Human
ggguggaggagaacaggcccca

SEQ ID NO: 601137 - RNA, 22 nt, Human
ucucuguggugggaggcugagu

SEQ ID NO: 601138 - RNA, 22 nt, Human
aggagcagaacuguuguggagg

SEQ ID NO: 601139 - RNA, 22 nt, Human
augacaauauagcuuugauuuu

SEQ ID NO: 601140 - RNA, 22 nt, Human
uagcuucccugcuggaucauaa

SEQ ID NO: 601141 - RNA, 22 nt, Human
uagaggagcggcgagcugagcu

SEQ ID NO: 601142 - RNA, 20 nt, Human
ggcagcaaccauaugcuaca

SEQ ID NO: 601143 - RNA, 22 nt, Human
auguguuuugguggaucauuca

SEQ ID NO: 601144 - RNA, 22 nt, Human
agggggcuccuccggugcuucc

SEQ ID NO: 601145 - RNA, 20 nt, Human
aauacuaaacacaaagcagu

SEQ ID NO: 601146 - RNA, 22 nt, Human
uagcacaucuggcgcuuauagg

SEQ ID NO: 601147 - RNA, 22 nt, Human
aaguuccucuucucugcaggga

SEQ ID NO: 601148 - RNA, 22 nt, Human
acagccaggacuuggcccucuu

SEQ ID NO: 601149 - RNA, 22 nt, Human
ggcuucucagcacacuguccac

SEQ ID NO: 601150 - RNA, 22 nt, Human
ugacacaggcagcucccagcac

SEQ ID NO: 601151 - RNA, 22 nt, Human
uccaggcugcaaggccacaggg

SEQ ID NO: 601152 - RNA, 19 nt, Human
uccccagcaccucugaguc

SEQ ID NO: 601153 - RNA, 22 nt, Human
cccagacauaacagcagagagg

SEQ ID NO: 601154 - RNA, 22 nt, Human
uucagacaauaagagucaucuc

SEQ ID NO: 601155 - RNA, 22 nt, Human
agcacuagcuuuaagcauucug

SEQ ID NO: 601156 - RNA, 22 nt, Human
cugccugcaugcugccauagcu

SEQ ID NO: 601157 - RNA, 22 nt, Human
gggccccaguccucccacgugg

SEQ ID NO: 601158 - RNA, 22 nt, Human
ccaggagcuggagggugcagug

SEQ ID NO: 601159 - RNA, 22 nt, Human
auugcugacucaauaauugaag

SEQ ID NO: 601160 - RNA, 22 nt, Human
ugcucagagcucuggugcaggu

SEQ ID NO: 601161 - RNA, 22 nt, Human
cuugcagaugugacuaaauuaa

SEQ ID NO: 601162 - RNA, 22 nt, Human
uggcucaguuucaguccugguu

SEQ ID NO: 601163 - RNA, 22 nt, Human
gcucuggguagccacugccugg

SEQ ID NO: 601164 - RNA, 22 nt, Human
uauuucaagaacuucuauccau

SEQ ID NO: 601165 - RNA, 22 nt, Human
cacaugaacaugcuggaaaagc

SEQ ID NO: 601166 - RNA, 22 nt, Human
gaaaguuuucauauauaccaaa

SEQ ID NO: 601167 - RNA, 22 nt, Human
ggaagaagcagggcauuugaau

SEQ ID NO: 601168 - RNA, 22 nt, Human
uccuucagcuacucaguuucca

SEQ ID NO: 601169 - RNA, 20 nt, Human
uugaaaaugcauugugcagu

SEQ ID NO: 601170 - RNA, 22 nt, Human
gccuuuaugucugaaaaucagc

SEQ ID NO: 601171 - RNA, 22 nt, Human
ugcaguuuaaacuuggcaacuu

SEQ ID NO: 601172 - RNA, 22 nt, Human
uaaaucacaaauuuucucauuu

SEQ ID NO: 601173 - RNA, 22 nt, Human
cucagagaguuaagugaauuac

SEQ ID NO: 601174 - RNA, 22 nt, Human
gagggagggccaggucccaacc

SEQ ID NO: 601175 - RNA, 22 nt, Human
ucuucuuugaaucauagugacc

SEQ ID NO: 601176 - RNA, 22 nt, Human
aucuuuuuacuaacacugcuua

SEQ ID NO: 601177 - RNA, 22 nt, Human
uucuaaaauaaguuuaucuggu

SEQ ID NO: 601178 - RNA, 22 nt, Human
aauacaaucaaauucacuagca

SEQ ID NO: 601179 - RNA, 22 nt, Human
ugccucugugggcagagcugcc

SEQ ID NO: 601180 - RNA, 22 nt, Human
auaaauuaugaauggcccuuuu

SEQ ID NO: 601181 - RNA, 22 nt, Human
aucuuucaucucuauuauuuga

SEQ ID NO: 601182 - RNA, 22 nt, Human
cuugcucacaguaccuggcuug

SEQ ID NO: 601183 - RNA, 22 nt, Human
uuggcuucccagagcuuacgcu

SEQ ID NO: 601184 - RNA, 22 nt, Human
cccaggaggcagauguugcagu

SEQ ID NO: 601185 - RNA, 22 nt, Human
ggcaaggguugaagauaaggua

SEQ ID NO: 601186 - RNA, 22 nt, Human
uugcagggaaacaguuuaggaa

SEQ ID NO: 601187 - RNA, 22 nt, Human
gacagccaucagcacacgcugc

SEQ ID NO: 601188 - RNA, 22 nt, Human
gcagcugcugggaucauuuagg

SEQ ID NO: 601189 - RNA, 22 nt, Human
uagcuuuguccuccacccucag

SEQ ID NO: 601190 - RNA, 22 nt, Human
aacauucagcuggguggagcag

SEQ ID NO: 601191 - RNA, 22 nt, Human
agucaggagauauuuugauaug

SEQ ID NO: 601192 - RNA, 22 nt, Human
agguccagguuccguuucugcg

SEQ ID NO: 601193 - RNA, 22 nt, Human
ucccagggauccuccgggucgc

SEQ ID NO: 601194 - RNA, 22 nt, Human
gagcccagggcaggcaaggcag

SEQ ID NO: 601195 - RNA, 22 nt, Human
uucugaaaugagauauaaggua

SEQ ID NO: 601196 - RNA, 22 nt, Human
agcaggaaggcuuuggggguuc

SEQ ID NO: 601197 - RNA, 22 nt, Human
guacaggucuuaucuccuagga

SEQ ID NO: 601198 - RNA, 22 nt, Human
agcucagaaaugccaguaggua

SEQ ID NO: 601199 - RNA, 23 nt, Human
gacacaggagcacccagcugagc

SEQ ID NO: 601200 - RNA, 22 nt, Human
ccaggcucugcaaaaucaggcu

SEQ ID NO: 601201 - RNA, 22 nt, Human
uucucugaguacguuucagugu

SEQ ID NO: 601202 - RNA, 22 nt, Human
uccaagaaucacugacacagcu

SEQ ID NO: 601203 - RNA, 22 nt, Human
guccugugugagugcaccaccu

SEQ ID NO: 601204 - RNA, 22 nt, Human
uauuaucauuaacuguugaauu

SEQ ID NO: 601205 - RNA, 22 nt, Human
ccaggucuuugacuaauaugcu

SEQ ID NO: 601206 - RNA, 22 nt, Human
uccauauuaacuaaaacuagaa

SEQ ID NO: 601207 - RNA, 23 nt, Human
ucauggaacugggcaaucuugaa

SEQ ID NO: 601208 - RNA, 22 nt, Human
aucacagauugugaauaacuau

SEQ ID NO: 601209 - RNA, 22 nt, Human
aaccugaauuuaauugaaauga

SEQ ID NO: 601210 - RNA, 22 nt, Human
gugugggggcagcucugauaug

SEQ ID NO: 601211 - RNA, 22 nt, Human
gagagcuggguucaaguagcug

SEQ ID NO: 601212 - RNA, 22 nt, Human
gaaaguuuauagguuauauaau

SEQ ID NO: 601213 - RNA, 22 nt, Human
auaaugcugggagaaauuguua

SEQ ID NO: 601214 - RNA, 22 nt, Human
guuguuuuauaauugauugcaa

SEQ ID NO: 601215 - RNA, 22 nt, Human
uuccaguuggcacugcaauuua

SEQ ID NO: 601216 - RNA, 21 nt, Human
uucuacaggaugaaugaaaac

SEQ ID NO: 601217 - RNA, 22 nt, Human
ucaguaaaauaaaacaugggac

SEQ ID NO: 601218 - RNA, 22 nt, Human
cuacauuuuucaccgagccucu

SEQ ID NO: 601219 - RNA, 22 nt, Human
agauugcuuuccaaaagcguug

SEQ ID NO: 601220 - RNA, 22 nt, Human
gcugaggcucaagucauggguc

SEQ ID NO: 601221 - RNA, 22 nt, Human
cuggccccgguuccuaaaaacc

SEQ ID NO: 601222 - RNA, 22 nt, Human
aggcagagcugauguucuguga

SEQ ID NO: 601223 - RNA, 22 nt, Human
uccaggcuaauuuugcauuguu

SEQ ID NO: 601224 - RNA, 22 nt, Human
gcaaacuguuggaguagagucu

SEQ ID NO: 601225 - RNA, 22 nt, Human
gcugggcacugucccauaggcu

SEQ ID NO: 601226 - RNA, 22 nt, Human
auuguauuagcacaauacaauu

SEQ ID NO: 601227 - RNA, 22 nt, Human
cagagcagucuggagauccagc

SEQ ID NO: 601228 - RNA, 22 nt, Human
caggccuggcugcagcucgccu

SEQ ID NO: 601229 - RNA, 19 nt, Human
ggcugcugguuacagaggc

SEQ ID NO: 601230 - RNA, 22 nt, Human
cagauggaacacagaaaggaga

SEQ ID NO: 601231 - RNA, 22 nt, Human
cuggggugagcagaaacagggg

SEQ ID NO: 601232 - RNA, 22 nt, Human
gaggcugggggcugccuuccuc

SEQ ID NO: 601233 - RNA, 17 nt, Human
aaucuguuuacagucag

SEQ ID NO: 601234 - RNA, 22 nt, Human
cagagaacuccaguggcuggcg

SEQ ID NO: 601235 - RNA, 22 nt, Human
aagauucaguugauguguucca

SEQ ID NO: 601236 - RNA, 22 nt, Human
uuagggaaguguuauucucagg

SEQ ID NO: 601237 - RNA, 22 nt, Human
agcugggcagacugcagugguu

SEQ ID NO: 601238 - RNA, 22 nt, Human
ugcaaaguugaggaaggcaugg

SEQ ID NO: 601239 - RNA, 22 nt, Human
guagacagaaagcggaaucaua

SEQ ID NO: 601240 - RNA, 22 nt, Human
gagcagcugagcuggaaugaga

SEQ ID NO: 601241 - RNA, 22 nt, Human
acaggugcaugcuaccaugucu

SEQ ID NO: 601242 - RNA, 22 nt, Human
uccaggcuagagugcaguggcc

SEQ ID NO: 601243 - RNA, 22 nt, Human
ucucugagaucagccacugacu

SEQ ID NO: 601244 - RNA, 22 nt, Human
ccucacaguuuggcuaacugug

SEQ ID NO: 601245 - RNA, 22 nt, Human
ucuugcagcuucaucugcaauu

SEQ ID NO: 601246 - RNA, 18 nt, Human
gaaagccaugcagcagug

SEQ ID NO: 601247 - RNA, 22 nt, Human
cagggagaggccucuguugccc

SEQ ID NO: 601248 - RNA, 22 nt, Human
ucaggagacaaagggugcggag

SEQ ID NO: 601249 - RNA, 23 nt, Human
aaagccaagucagucuacuggaa

SEQ ID NO: 601250 - RNA, 22 nt, Human
cagagcaguggagaguaggucu

SEQ ID NO: 601251 - RNA, 20 nt, Human
cagcucugggaaagaggcca

SEQ ID NO: 601252 - RNA, 22 nt, Human
uggguccauggaacagaggugc

SEQ ID NO: 601253 - RNA, 22 nt, Human
cugcagaggccucgccuccucu

SEQ ID NO: 601254 - RNA, 22 nt, Human
uagagcugcuggacuguaacag

SEQ ID NO: 601255 - RNA, 22 nt, Human
uuuuccuacugauaaacaguua

SEQ ID NO: 601256 - RNA, 22 nt, Human
ggaaggagcauuugccaguuua

SEQ ID NO: 601257 - RNA, 18 nt, Human
cugaggcuuagagagguu

SEQ ID NO: 601258 - RNA, 22 nt, Human
cacagagacaugaugucauugc

SEQ ID NO: 601259 - RNA, 22 nt, Human
cagccugcauuuguaucuguau

SEQ ID NO: 601260 - RNA, 22 nt, Human
acauuuugaaagggaaauuguu

SEQ ID NO: 601261 - RNA, 22 nt, Human
uuuaugacauuacaauaucaag

SEQ ID NO: 601262 - RNA, 22 nt, Human
uggcagagacaaggccgggccu

SEQ ID NO: 601263 - RNA, 22 nt, Human
ggcccagccggcgagucucgcg

SEQ ID NO: 601264 - RNA, 22 nt, Human
uggaaugugguaucaguagaaa

SEQ ID NO: 601265 - RNA, 22 nt, Human
ugagccagagagguugaggcua

SEQ ID NO: 601266 - RNA, 18 nt, Human
uggagccagcucuaggau

SEQ ID NO: 601267 - RNA, 22 nt, Human
augucuuuuaugauuacgggau

SEQ ID NO: 601268 - RNA, 22 nt, Human
auuuuaacccucuuauauauac

SEQ ID NO: 601269 - RNA, 22 nt, Human
uucuuucacucaagaaggaucu

SEQ ID NO: 601270 - RNA, 22 nt, Human
uuaucauaaguaauugaaauaa

SEQ ID NO: 601271 - RNA, 22 nt, Human
uccaccauguaacaagcucugu

SEQ ID NO: 601272 - RNA, 22 nt, Human
uauuaaagggaaguuaugcaug

SEQ ID NO: 601273 - RNA, 22 nt, Human
ucccugagaaagcccaggaggu

SEQ ID NO: 601274 - RNA, 22 nt, Human
ccaggacugcagggggcgagga

SEQ ID NO: 601275 - RNA, 22 nt, Human
gcccagcaaggaccaagggccg

SEQ ID NO: 601276 - RNA, 22 nt, Human
ucugcagaauucgaggaagaaa

SEQ ID NO: 601277 - RNA, 22 nt, Human
uaaggcagauguggaaucaauu

SEQ ID NO: 601278 - RNA, 22 nt, Human
ucaggcugugggcacuggccau

SEQ ID NO: 601279 - RNA, 22 nt, Human
acauuauagcuuugaguuugga

SEQ ID NO: 601280 - RNA, 22 nt, Human
uucuucaaaauccagcaugauu

SEQ ID NO: 601281 - RNA, 22 nt, Human
ucugcugacauuuaugaauaga

SEQ ID NO: 601282 - RNA, 22 nt, Human
caggccugucugcacaugaggc

SEQ ID NO: 601283 - RNA, 22 nt, Human
cacacauuucagaugcuacaau

SEQ ID NO: 601284 - RNA, 22 nt, Human
cuuggggacacagagcccaggg

SEQ ID NO: 601285 - RNA, 22 nt, Human
gccaugggcaaaugcagagcug

SEQ ID NO: 601286 - RNA, 22 nt, Human
uauugaaauccauuacguucuu

SEQ ID NO: 601287 - RNA, 22 nt, Human
ccagaaaauauggcuaagguga

SEQ ID NO: 601288 - RNA, 22 nt, Human
acuuucuucuacuacuuggaga

SEQ ID NO: 601289 - RNA, 22 nt, Human
aggcagaauguuggaaaggaag

SEQ ID NO: 601290 - RNA, 22 nt, Human
cagaagccugccucagaugcac

SEQ ID NO: 601291 - RNA, 22 nt, Human
aagaaauaagacuucucugucc

SEQ ID NO: 601292 - RNA, 19 nt, Human
ucucacaagcaacauuguu

SEQ ID NO: 601293 - RNA, 22 nt, Human
augacaguagguaaaugauagc

SEQ ID NO: 601294 - RNA, 22 nt, Human
ugaggcaggacugagcgggaug

SEQ ID NO: 601295 - RNA, 22 nt, Human
ggcccaaggugccaaggccucc

SEQ ID NO: 601296 - RNA, 22 nt, Human
augcugugagugugccgcagag

SEQ ID NO: 601297 - RNA, 23 nt, Human
uacagcugcagaaucaggcuaag

SEQ ID NO: 601298 - RNA, 22 nt, Human
guccugggcggagggcugcugu

SEQ ID NO: 601299 - RNA, 22 nt, Human
ucuucagcagagaauuaugaug

SEQ ID NO: 601300 - RNA, 22 nt, Human
aaacaguggccaauucuggaga

SEQ ID NO: 601301 - RNA, 19 nt, Human
uccuuucuguuccugagau

SEQ ID NO: 601302 - RNA, 22 nt, Human
cagcuccuauuagacacugaau

SEQ ID NO: 601303 - RNA, 22 nt, Human
acacaaaguuggaugacaaaau

SEQ ID NO: 601304 - RNA, 22 nt, Human
aaagguuuuucagcagggagau

SEQ ID NO: 601305 - RNA, 22 nt, Human
uuacaagacagugugguaaaua

SEQ ID NO: 601306 - RNA, 20 nt, Human
cugcugcccugucagccucu

SEQ ID NO: 601307 - RNA, 22 nt, Human
guucucugccggcaccuacccg

SEQ ID NO: 601308 - RNA, 22 nt, Human
ccauggagcgggugagugagug

SEQ ID NO: 601309 - RNA, 22 nt, Human
uuucugauucucacuuuggcau

SEQ ID NO: 601310 - RNA, 22 nt, Human
acuuucugcaguguuggaaaug

SEQ ID NO: 601311 - RNA, 22 nt, Human
auuagcuucaaagccaucaacc

SEQ ID NO: 601312 - RNA, 22 nt, Human
ucaagacauauuaaaugugcga

SEQ ID NO: 601313 - RNA, 22 nt, Human
cauaauuacugauaugcugauu

SEQ ID NO: 601314 - RNA, 22 nt, Human
ugcugguccuggagcuggguuc

SEQ ID NO: 601315 - RNA, 22 nt, Human
ccacagaguuacaaaacaguca

SEQ ID NO: 601316 - RNA, 22 nt, Human
cuguuggccuuucaucaguaau

SEQ ID NO: 601317 - RNA, 22 nt, Human
cacugugucaguuugguuagac

SEQ ID NO: 601318 - RNA, 22 nt, Human
cucuuaguuuaucuuugacaaa

SEQ ID NO: 601319 - RNA, 22 nt, Human
ugcuugaagccuacauucguca

SEQ ID NO: 601320 - RNA, 22 nt, Human
cugaggcauguuacaggacaua

SEQ ID NO: 601321 - RNA, 22 nt, Human
auuuauuggaugcuuacuuggg

SEQ ID NO: 601322 - RNA, 22 nt, Human
cauuaauauuguucuucuuuag

SEQ ID NO: 601323 - RNA, 22 nt, Human
ucacugaacucucauagagaaa

SEQ ID NO: 601324 - RNA, 22 nt, Human
auguguuuuuauucuggcaugu

SEQ ID NO: 601325 - RNA, 22 nt, Human
uauaggaaauaggucuucugug

SEQ ID NO: 601326 - RNA, 19 nt, Human
auggcagcagcagcucucc

SEQ ID NO: 601327 - RNA, 22 nt, Human
aggcucccaagcacugacccca

SEQ ID NO: 601328 - RNA, 22 nt, Human
acugcagagcuuuucaguugag

SEQ ID NO: 601329 - RNA, 22 nt, Human
ccugaggcuccaccuccagaga

SEQ ID NO: 601330 - RNA, 22 nt, Human
augauugaccaucugcugggcu

SEQ ID NO: 601331 - RNA, 22 nt, Human
aaggcuuguguguucagugagg

SEQ ID NO: 601332 - RNA, 22 nt, Human
uccuuuuuauaguuagagaaac

SEQ ID NO: 601333 - RNA, 22 nt, Human
gggaaacugaauucaggacucu

SEQ ID NO: 601334 - RNA, 22 nt, Human
gugcaaaaggcauugugguuuu

SEQ ID NO: 601335 - RNA, 22 nt, Human
caggaaagccgagugccauagg

SEQ ID NO: 601336 - RNA, 22 nt, Human
auaggccauuugagggccaggu

SEQ ID NO: 601337 - RNA, 22 nt, Human
gcauucuugguaugaaggacag

SEQ ID NO: 601338 - RNA, 22 nt, Human
gcugggaguuugauuugacugg

SEQ ID NO: 601339 - RNA, 22 nt, Human
cuggcucugugggaccuggccu

SEQ ID NO: 601340 - RNA, 22 nt, Human
ugcaauauguugcauuguaugg

SEQ ID NO: 601341 - RNA, 22 nt, Human
uauuaugaggacugguguaagg

SEQ ID NO: 601342 - RNA, 22 nt, Human
uggcagcugugcuucauucuuu

SEQ ID NO: 601343 - RNA, 22 nt, Human
cagaguucaaagccugcuggga

SEQ ID NO: 601344 - RNA, 22 nt, Human
gccugcagccucagagaauuuu

SEQ ID NO: 601345 - RNA, 22 nt, Human
cagcacagggcuugagaggugu

SEQ ID NO: 601346 - RNA, 22 nt, Human
guuuccauggcucuguuaaugg

SEQ ID NO: 601347 - RNA, 22 nt, Human
gagguauggauaucuggagagg

SEQ ID NO: 601348 - RNA, 22 nt, Human
ugggucuguagggcuguccaau

SEQ ID NO: 601349 - RNA, 21 nt, Human
ccugagaucuggaguggcuuu

SEQ ID NO: 601350 - RNA, 22 nt, Human
gaacaguauuuccaggaauccc

SEQ ID NO: 601351 - RNA, 22 nt, Human
ucugaaggucugagaaccagga

SEQ ID NO: 601352 - RNA, 22 nt, Human
uccaggugacagagacaggaua

SEQ ID NO: 601353 - RNA, 20 nt, Human
gcugugccuccagcuggugg

SEQ ID NO: 601354 - RNA, 18 nt, Human
uagcacagagcaggaugu

SEQ ID NO: 601355 - RNA, 22 nt, Human
ucuauacaugugcacacacauc

SEQ ID NO: 601356 - RNA, 22 nt, Human
cugaggcugagacaggugaaau

SEQ ID NO: 601357 - RNA, 21 nt, Human
gagugcaggucugaugccauc

SEQ ID NO: 601358 - RNA, 22 nt, Human
ucuggggaccauggcaucuaaa

SEQ ID NO: 601359 - RNA, 22 nt, Human
ugguggagaccucgcuaacccc

SEQ ID NO: 601360 - RNA, 22 nt, Human
cuccugggaugacucuuucuuu

SEQ ID NO: 601361 - RNA, 22 nt, Human
cucagcucugacaggaggcauc

SEQ ID NO: 601362 - RNA, 18 nt, Human
agccuggaggguugaagu

SEQ ID NO: 601363 - RNA, 22 nt, Human
acucugugugaguagagccugu

SEQ ID NO: 601364 - RNA, 22 nt, Human
caguucuaauuaauaggaguaa

SEQ ID NO: 601365 - RNA, 22 nt, Human
uuuguauuuuucccagcuagcu

SEQ ID NO: 601366 - RNA, 22 nt, Human
ucuucuguccuaagucaaagca

SEQ ID NO: 601367 - RNA, 22 nt, Human
caaaacugucuagagagagaag

SEQ ID NO: 601368 - RNA, 22 nt, Human
gccaguggcccucuggagaagg

SEQ ID NO: 601369 - RNA, 22 nt, Human
uaggcugggccugccuuccagg

SEQ ID NO: 601370 - RNA, 22 nt, Human
agugaagaggaaguggggcaca

SEQ ID NO: 601371 - RNA, 19 nt, Human
cuugugcaguucacgcuca

SEQ ID NO: 601372 - RNA, 22 nt, Human
ucugaaauaagggagaagggaa

SEQ ID NO: 601373 - RNA, 22 nt, Human
cagcucugccucuggggcugag

SEQ ID NO: 601374 - RNA, 19 nt, Human
ggcccaaguacugagugcc

SEQ ID NO: 601375 - RNA, 22 nt, Human
auguuaaaaaccaguacaguug

SEQ ID NO: 601376 - RNA, 22 nt, Human
auaguacagagggcuacugguu

SEQ ID NO: 601377 - RNA, 22 nt, Human
ugggggaagagcuuguuaaagu

SEQ ID NO: 601378 - RNA, 23 nt, Human
acagccaguucaccucuccuugg

SEQ ID NO: 601379 - RNA, 22 nt, Human
uagugaaaccugacagaucaug

SEQ ID NO: 601380 - RNA, 22 nt, Human
gacccagccugguuuuuauagg

SEQ ID NO: 601381 - RNA, 22 nt, Human
aaaaccagacacuguuucuggg

SEQ ID NO: 601382 - RNA, 22 nt, Human
cagggcuuuuuauuagcugccu

SEQ ID NO: 601383 - RNA, 20 nt, Human
cccugugauuggcaaguguc

SEQ ID NO: 601384 - RNA, 22 nt, Human
gccaggaggucagccccucaac

SEQ ID NO: 601385 - RNA, 22 nt, Human
aaaauucucuugaucuugacag

SEQ ID NO: 601386 - RNA, 22 nt, Human
aucauucaagugcucuaaaaug

SEQ ID NO: 601387 - RNA, 22 nt, Human
ugaaaugacagucuuaagcucu

SEQ ID NO: 601388 - RNA, 22 nt, Human
agacaaaugaacaaauauguga

SEQ ID NO: 601389 - RNA, 22 nt, Human
gcagggucuugagaggcagcca

SEQ ID NO: 601390 - RNA, 22 nt, Human
uugaggaaaggaauuuauuuua

SEQ ID NO: 601391 - RNA, 22 nt, Human
aguggggaagagcaugggcccu

SEQ ID NO: 601392 - RNA, 22 nt, Human
ucccagaaucuuuggaagagca

SEQ ID NO: 601393 - RNA, 22 nt, Human
cccagggcccuggacagcuaca

SEQ ID NO: 601394 - RNA, 22 nt, Human
aggcagcagacuguuaaucaga

SEQ ID NO: 601395 - RNA, 22 nt, Human
ccaggacuucgaggcuacagug

SEQ ID NO: 601396 - RNA, 22 nt, Human
caaaauuagggagugagcugga

SEQ ID NO: 601397 - RNA, 22 nt, Human
caugugugaaucuugugaucau

SEQ ID NO: 601398 - RNA, 22 nt, Human
gaggcugcaggcaaugcugccc

SEQ ID NO: 601399 - RNA, 22 nt, Human
ugcauuuuuaacaaggcuaauu

SEQ ID NO: 601400 - RNA, 19 nt, Human
uaccauguugacuuuccug

SEQ ID NO: 601401 - RNA, 22 nt, Human
gagaagccgagucagcugagcc

SEQ ID NO: 601402 - RNA, 22 nt, Human
gacugggaggguucagcugggu

SEQ ID NO: 601403 - RNA, 22 nt, Human
cacuaguccugguuucaugcua

SEQ ID NO: 601404 - RNA, 22 nt, Human
ugcugccaaaugcgagcucugu

SEQ ID NO: 601405 - RNA, 22 nt, Human
cccugcccugggcagaaguggg

SEQ ID NO: 601406 - RNA, 22 nt, Human
aggcaucugccuccucuacccc

SEQ ID NO: 601407 - RNA, 22 nt, Human
gggcugagaauucagcuuuccu

SEQ ID NO: 601408 - RNA, 22 nt, Human
acagguggacacagcagcaguc

SEQ ID NO: 601409 - RNA, 22 nt, Human
uuuguuuucuguaggccuuucc

SEQ ID NO: 601410 - RNA, 22 nt, Human
gauauuuucgcagggagaauuc

SEQ ID NO: 601411 - RNA, 22 nt, Human
gagguuggcgcccugccuggcc

SEQ ID NO: 601412 - RNA, 22 nt, Human
augaaugagugcuagguuuguc

SEQ ID NO: 601413 - RNA, 22 nt, Human
uccccaggaaucaggugguugc

SEQ ID NO: 601414 - RNA, 22 nt, Human
ggucucugucacugaguggccc

SEQ ID NO: 601415 - RNA, 22 nt, Human
agaauacuaggcuucagaaagg

SEQ ID NO: 601416 - RNA, 22 nt, Human
caugcuuaugauuugcuaagcc

SEQ ID NO: 601417 - RNA, 22 nt, Human
uggcuucucugugugagggaga

SEQ ID NO: 601418 - RNA, 22 nt, Human
aauaaacaaauccuuccuuccc

SEQ ID NO: 601419 - RNA, 22 nt, Human
cacaagaaauaagcugccuuuc

SEQ ID NO: 601420 - RNA, 22 nt, Human
agcagcugcagggagggucugc

SEQ ID NO: 601421 - RNA, 22 nt, Human
gugagcagaacagguggcuucu

SEQ ID NO: 601422 - RNA, 22 nt, Human
cuccccauugugaccucaucca

SEQ ID NO: 601423 - RNA, 22 nt, Human
gcacaggccaugggaggacagc

SEQ ID NO: 601424 - RNA, 22 nt, Human
ccucccugggugacgggcuccu

SEQ ID NO: 601425 - RNA, 21 nt, Human
uggguggaagcgggaggccgc

SEQ ID NO: 601426 - RNA, 22 nt, Human
aucuguccugugacagugggag

SEQ ID NO: 601427 - RNA, 23 nt, Human
cucagagguguuuuucacuuacu

SEQ ID NO: 601428 - RNA, 22 nt, Human
aggaaacucaaagugucaggua

SEQ ID NO: 601429 - RNA, 22 nt, Human
uccuccagaaacugaggcagaa

SEQ ID NO: 601430 - RNA, 20 nt, Human
augcuuaaguguucauuauu

SEQ ID NO: 601431 - RNA, 22 nt, Human
ggugggggagacuuggucaaga

SEQ ID NO: 601432 - RNA, 22 nt, Human
ucuggaguuaguuauaaugguu

SEQ ID NO: 601433 - RNA, 21 nt, Human
ucaggcugaugucgauguuag

SEQ ID NO: 601434 - RNA, 22 nt, Human
acuucuucuucagcugggggau

SEQ ID NO: 601435 - RNA, 22 nt, Human
gaacagcuauaaucaucugucc

SEQ ID NO: 601436 - RNA, 22 nt, Human
aagugaagaaauacaugagaau

SEQ ID NO: 601437 - RNA, 22 nt, Human
ccugggcuugguuguugagaac

SEQ ID NO: 601438 - RNA, 22 nt, Human
cucagcuggcaauucuggcucc

SEQ ID NO: 601439 - RNA, 22 nt, Human
cgucacuucuuagucuauuuuc

SEQ ID NO: 601440 - RNA, 22 nt, Human
ucuauaauccuauuucaacugc

SEQ ID NO: 601441 - RNA, 22 nt, Human
agagcuguguuuaguaguuacg

SEQ ID NO: 601442 - RNA, 22 nt, Human
cagcucuucagagugagcaaug

SEQ ID NO: 601443 - RNA, 22 nt, Human
aggucacguccugugaugucau

SEQ ID NO: 601444 - RNA, 22 nt, Human
gggccaggaguggagauauggg

SEQ ID NO: 601445 - RNA, 22 nt, Human
gaugauuuuguuggugauucaa

SEQ ID NO: 601446 - RNA, 22 nt, Human
auucuucuugagucuuggacuc

SEQ ID NO: 601447 - RNA, 22 nt, Human
uugaggaggccuuucagggcuu

SEQ ID NO: 601448 - RNA, 22 nt, Human
caggcauuucgcaaaggcugag

SEQ ID NO: 601449 - RNA, 22 nt, Human
gucugcccuuccucuccacgau

SEQ ID NO: 601450 - RNA, 23 nt, Human
cccaggaguuucacugcaaaggu

SEQ ID NO: 601451 - RNA, 22 nt, Human
cucccucaccaugacccgcugu

SEQ ID NO: 601452 - RNA, 22 nt, Human
aauacugucuuucacagauauu

SEQ ID NO: 601453 - RNA, 22 nt, Human
guuccugaugcuuugaaauuca

SEQ ID NO: 601454 - RNA, 22 nt, Human
ugguaaauauguccauucucuu

SEQ ID NO: 601455 - RNA, 22 nt, Human
gagugcaguaucuucugugucc

SEQ ID NO: 601456 - RNA, 22 nt, Human
uugcugauuuccccuugagugu

SEQ ID NO: 601457 - RNA, 22 nt, Human
aaauauacuagaugaugaccca

SEQ ID NO: 601458 - RNA, 22 nt, Human
caugauauaaaguaguagauaa

SEQ ID NO: 601459 - RNA, 23 nt, Human
agaugaggcuucuccauguuggu

SEQ ID NO: 601460 - RNA, 22 nt, Human
aucuucaacuugaucauuugaa

SEQ ID NO: 601461 - RNA, 21 nt, Human
uccugggggguaggugaguuu

SEQ ID NO: 601462 - RNA, 22 nt, Human
uccagcucagaugcagggauca

SEQ ID NO: 601463 - RNA, 22 nt, Human
uaagauaauccauuauaauguu

SEQ ID NO: 601464 - RNA, 22 nt, Human
cccagggacagaugggcagcua

SEQ ID NO: 601465 - RNA, 22 nt, Human
agagaagacuuacagccacagu

SEQ ID NO: 601466 - RNA, 22 nt, Human
aggaaaaucgagucuggaggca

SEQ ID NO: 601467 - RNA, 22 nt, Human
cugccaggccuggggugcuguc

SEQ ID NO: 601468 - RNA, 22 nt, Human
gcagccuguuguaccagccugu

SEQ ID NO: 601469 - RNA, 21 nt, Human
caaagccaggcaacucucucc

SEQ ID NO: 601470 - RNA, 22 nt, Human
cagcagcucacucagguggcuc

SEQ ID NO: 601471 - RNA, 22 nt, Human
accagaaaggaauaauagaauu

SEQ ID NO: 601472 - RNA, 22 nt, Human
uaaucuacuguuuauaugaaau

SEQ ID NO: 601473 - RNA, 22 nt, Human
auucuucucccuuagggcccag

SEQ ID NO: 601474 - RNA, 22 nt, Human
ccagcagcgauagggugagugc

SEQ ID NO: 601475 - RNA, 20 nt, Human
aagcagaagcugcucucagc

SEQ ID NO: 601476 - RNA, 22 nt, Human
ggcagucaagagggagucugaa

SEQ ID NO: 601477 - RNA, 22 nt, Human
aaacagcuaaguacauucaagg

SEQ ID NO: 601478 - RNA, 22 nt, Human
guggccaggacauugccaggca

SEQ ID NO: 601479 - RNA, 22 nt, Human
ccaggagaugauguuggggauu

SEQ ID NO: 601480 - RNA, 20 nt, Human
ugugcccaauguccagguuc

SEQ ID NO: 601481 - RNA, 19 nt, Human
ccuuccuccccagggccau

SEQ ID NO: 601482 - RNA, 22 nt, Human
aauguguacaugacagauagaa

SEQ ID NO: 601483 - RNA, 22 nt, Human
uucagcuugcugacugcggcag

SEQ ID NO: 601484 - RNA, 22 nt, Human
ucuaccacuaagugugcuuuga

SEQ ID NO: 601485 - RNA, 22 nt, Human
agaggccaucugcucugugggg

SEQ ID NO: 601486 - RNA, 21 nt, Human
cugggcucaugguguuacaga

SEQ ID NO: 601487 - RNA, 22 nt, Human
gacggggcagccagcugguggc

SEQ ID NO: 601488 - RNA, 22 nt, Human
uauaaaugccaggacuuuagau

SEQ ID NO: 601489 - RNA, 22 nt, Human
acugagggagagucuuagguug

SEQ ID NO: 601490 - RNA, 22 nt, Human
agucuacaacgcaagcaacaug

SEQ ID NO: 601491 - RNA, 22 nt, Human
auuucacagcugcuguucaggu

SEQ ID NO: 601492 - RNA, 22 nt, Human
ucugagcuggagcccaucaccu

SEQ ID NO: 601493 - RNA, 22 nt, Human
uuuagaggaggaagaaauuuug

SEQ ID NO: 601494 - RNA, 23 nt, Human
aguguuaaauuucgcaccuaaau

SEQ ID NO: 601495 - RNA, 19 nt, Human
ucagggggcugauaggagg

SEQ ID NO: 601496 - RNA, 22 nt, Human
ggauggccuucuugcucaggaa

SEQ ID NO: 601497 - RNA, 22 nt, Human
agccacagcauguguguaugua

SEQ ID NO: 601498 - RNA, 22 nt, Human
aacuucauguaauuuaaaacag

SEQ ID NO: 601499 - RNA, 22 nt, Human
uccugagauaaaucucauguga

SEQ ID NO: 601500 - RNA, 22 nt, Human
acaacuuuguagcaauuccacg

SEQ ID NO: 601501 - RNA, 22 nt, Human
cuucugaagagguuaucauaga

SEQ ID NO: 601502 - RNA, 22 nt, Human
ccagcacucuauugaauauucu

SEQ ID NO: 601503 - RNA, 22 nt, Human
agggaggaucugcuccuugucu

SEQ ID NO: 601504 - RNA, 22 nt, Human
cagagcagauuucuaaguauug

SEQ ID NO: 601505 - RNA, 22 nt, Human
uggcucagaugcucuuccagug

SEQ ID NO: 601506 - RNA, 22 nt, Human
aaguggaggccgaguucacgca

SEQ ID NO: 601507 - RNA, 22 nt, Human
gagcuggacuuucagauacauc

SEQ ID NO: 601508 - RNA, 22 nt, Human
cugggguggugcaggccucaug

SEQ ID NO: 601509 - RNA, 22 nt, Human
ucacaaagcuuugauaagcaga

SEQ ID NO: 601510 - RNA, 22 nt, Human
uggggccagggaggaccagaca

SEQ ID NO: 601511 - RNA, 22 nt, Human
augcuuuagugucaaguuuggg

SEQ ID NO: 601512 - RNA, 22 nt, Human
ugcuuaaaauaguucauuuuug

SEQ ID NO: 601513 - RNA, 22 nt, Human
acuucuguaaagggaagacagu

SEQ ID NO: 601514 - RNA, 22 nt, Human
auccuucuucugcuagugucua

SEQ ID NO: 601515 - RNA, 22 nt, Human
aauccagcugugucacagguga

SEQ ID NO: 601516 - RNA, 22 nt, Human
uggugcaaaacuaauugcgguu

SEQ ID NO: 601517 - RNA, 22 nt, Human
gcucugggccauccuggccggg

SEQ ID NO: 601518 - RNA, 22 nt, Human
ucucagaauccuugcccaggug

SEQ ID NO: 601519 - RNA, 22 nt, Human
uuguuuucagggugucauucac

SEQ ID NO: 601520 - RNA, 22 nt, Human
ugagguaggugucgagagaggu

SEQ ID NO: 601521 - RNA, 22 nt, Human
ucugccugcaguguggcagggc

SEQ ID NO: 601522 - RNA, 22 nt, Human
aacuuuucauugaaucauguca

SEQ ID NO: 601523 - RNA, 22 nt, Human
accuggagucauuugaggagua

SEQ ID NO: 601524 - RNA, 22 nt, Human
gcacccagaauaaggacaggac

SEQ ID NO: 601525 - RNA, 19 nt, Human
cacauuuugagucugagau

SEQ ID NO: 601526 - RNA, 22 nt, Human
ugggccugggucuuugcugcca

SEQ ID NO: 601527 - RNA, 19 nt, Human
gcuggggaauggauauuga

SEQ ID NO: 601528 - RNA, 22 nt, Human
cggcagagacggcgcuuugaac

SEQ ID NO: 601529 - RNA, 22 nt, Human
caugcuaaaccagaacauagga

SEQ ID NO: 601530 - RNA, 22 nt, Human
cagucccagcugcucagaaggc

SEQ ID NO: 601531 - RNA, 22 nt, Human
ucaaguaacaugaacacacaga

SEQ ID NO: 601532 - RNA, 22 nt, Human
cuuuuaagggauaauaagaugu

SEQ ID NO: 601533 - RNA, 22 nt, Human
gccugaagaacagcugugagga

SEQ ID NO: 601534 - RNA, 22 nt, Human
agggccugggguagcuuacugc

SEQ ID NO: 601535 - RNA, 22 nt, Human
uuccuuaaugaaucaggccauu

SEQ ID NO: 601536 - RNA, 22 nt, Human
cacagaggauuuuuagggcagu

SEQ ID NO: 601537 - RNA, 22 nt, Human
augaggucuggcaaucagaaac

SEQ ID NO: 601538 - RNA, 22 nt, Human
uuuuagauugggaaauguaaag

SEQ ID NO: 601539 - RNA, 22 nt, Human
acuuaaaguaguuuuacugugg

SEQ ID NO: 601540 - RNA, 22 nt, Human
cuuuccucuggcacugucuggu

SEQ ID NO: 601541 - RNA, 22 nt, Human
ccagggcuuaacuuuucaggag

SEQ ID NO: 601542 - RNA, 22 nt, Human
gugccuccaucagugccuccaa

SEQ ID NO: 601543 - RNA, 22 nt, Human
uugaaauauuugggaguguuug

SEQ ID NO: 601544 - RNA, 18 nt, Human
guuaauuuugaaguucau

SEQ ID NO: 601545 - RNA, 22 nt, Human
cccugcagccuugcaugccuuc

SEQ ID NO: 601546 - RNA, 22 nt, Human
cagaccugagguugaguaccag

SEQ ID NO: 601547 - RNA, 22 nt, Human
gcaauguuguguuggcauucua

SEQ ID NO: 601548 - RNA, 18 nt, Human
aguaaauguuaaauauug

SEQ ID NO: 601549 - RNA, 20 nt, Human
uguucugucgucuuucuuca

SEQ ID NO: 601550 - RNA, 22 nt, Human
uacauucauggugacuuguaug

SEQ ID NO: 601551 - RNA, 22 nt, Human
uagcuuugacaguugcaggcag

SEQ ID NO: 601552 - RNA, 22 nt, Human
ugaaggcacuugccuaggggca

SEQ ID NO: 601553 - RNA, 22 nt, Human
acgcagaagggccuggcgugcc

SEQ ID NO: 601554 - RNA, 22 nt, Human
aauaucaguauauuguaucagu

SEQ ID NO: 601555 - RNA, 22 nt, Human
auaaacugaagggaacacugag

SEQ ID NO: 601556 - RNA, 22 nt, Human
uggcuucuuuccacuguccugu

SEQ ID NO: 601557 - RNA, 22 nt, Human
aggauggggucugcagccuggu

SEQ ID NO: 601558 - RNA, 22 nt, Human
agggauggagugcggcccggac

SEQ ID NO: 601559 - RNA, 22 nt, Human
uagaggcugggaauuauuuuca

SEQ ID NO: 601560 - RNA, 22 nt, Human
ucccugggaacaaaggaugaga

SEQ ID NO: 601561 - RNA, 22 nt, Human
cauauacacuuccaccucugug

SEQ ID NO: 601562 - RNA, 22 nt, Human
aauacuuugccaaguucgaaga

SEQ ID NO: 601563 - RNA, 22 nt, Human
gcuucuguggugaggucaccuu

SEQ ID NO: 601564 - RNA, 21 nt, Human
auuugcauuaaaauauuacgc

SEQ ID NO: 601565 - RNA, 22 nt, Human
ugcagccauuuucugccaaugc

SEQ ID NO: 601566 - RNA, 22 nt, Human
uacacauuacauaauacuaucu

SEQ ID NO: 601567 - RNA, 22 nt, Human
acaaacuaaaauucuuuauuga

SEQ ID NO: 601568 - RNA, 22 nt, Human
cauuaaaauaucucaugguguu

SEQ ID NO: 601569 - RNA, 22 nt, Human
uugugcauuucucugagugugu

SEQ ID NO: 601570 - RNA, 22 nt, Human
ccuggguccacccugugaagua

SEQ ID NO: 601571 - RNA, 22 nt, Human
caaguccucugguuucaaauag

SEQ ID NO: 601572 - RNA, 22 nt, Human
augcauauguacuugcauaugu

SEQ ID NO: 601573 - RNA, 22 nt, Human
uacauugcucauuauauugcuu

SEQ ID NO: 601574 - RNA, 22 nt, Human
agguuagauaagaagguugugg

SEQ ID NO: 601575 - RNA, 19 nt, Human
ugagaggcuuaaggcagcu

SEQ ID NO: 601576 - RNA, 22 nt, Human
aaagaggauggaguagucagcu

SEQ ID NO: 601577 - RNA, 22 nt, Human
auuuucuaagccugucagacuu

SEQ ID NO: 601578 - RNA, 22 nt, Human
aguaccaugcuuccugacuggu

SEQ ID NO: 601579 - RNA, 22 nt, Human
uuuagcuuuaccucauagauuu

SEQ ID NO: 601580 - RNA, 22 nt, Human
agagcaagugacagaaacaggg

SEQ ID NO: 601581 - RNA, 22 nt, Human
uugaggucugugauaaaaguca

SEQ ID NO: 601582 - RNA, 22 nt, Human
gaagauuuggauuccaugucac

SEQ ID NO: 601583 - RNA, 22 nt, Human
gugggagaagauuuggucaucu

SEQ ID NO: 601584 - RNA, 22 nt, Human
gccuggagcucuccacuugggg

SEQ ID NO: 601585 - RNA, 19 nt, Human
ggcagccugcacgggcugc

SEQ ID NO: 601586 - RNA, 22 nt, Human
cugcaggcaucuaacugugggc

SEQ ID NO: 601587 - RNA, 21 nt, Human
cagccugcugcuccagggcca

SEQ ID NO: 601588 - RNA, 22 nt, Human
caaauuuuguguguucucuagu

SEQ ID NO: 601589 - RNA, 22 nt, Human
gagaaagauuguccuucagggg

SEQ ID NO: 601590 - RNA, 22 nt, Human
caguggaaaucagagugagagu

SEQ ID NO: 601591 - RNA, 22 nt, Human
uauguacauggagagcaauuga

SEQ ID NO: 601592 - RNA, 20 nt, Human
uuaugcaagcaucaauauug

SEQ ID NO: 601593 - RNA, 22 nt, Human
cagucuuuuguauauuagcaga

SEQ ID NO: 601594 - RNA, 22 nt, Human
ggcacaagguuuaaauaacauc

SEQ ID NO: 601595 - RNA, 22 nt, Human
cucuccacuguccuuugcuggu

SEQ ID NO: 601596 - RNA, 22 nt, Human
gaguuauucuagguccuuugua

SEQ ID NO: 601597 - RNA, 22 nt, Human
auaguucacuaauagcaaaagc

SEQ ID NO: 601598 - RNA, 22 nt, Human
ccagguguucuuugucccuguu

SEQ ID NO: 601599 - RNA, 20 nt, Human
acagaugaggaaaaugaagu

SEQ ID NO: 601600 - RNA, 20 nt, Human
uucuuuguuccuuacauuug

SEQ ID NO: 601601 - RNA, 22 nt, Human
gcagggggauggaguugaaaug

SEQ ID NO: 601602 - RNA, 22 nt, Human
uugcugaagugaagguauguuu

SEQ ID NO: 601603 - RNA, 22 nt, Human
caugugggaagaggccagcugg

SEQ ID NO: 601604 - RNA, 22 nt, Human
uggaaagaauuccuaugguuca

SEQ ID NO: 601605 - RNA, 22 nt, Human
gcagaacauuucacaguaucuu

SEQ ID NO: 601606 - RNA, 22 nt, Human
ccagugugcauuaucauguguc

SEQ ID NO: 601607 - RNA, 22 nt, Human
guuuauuauacaacaaaagcua

SEQ ID NO: 601608 - RNA, 23 nt, Human
agcucugaaauagggaaagagga

SEQ ID NO: 601609 - RNA, 22 nt, Human
guccuggggauacagaagugaa

SEQ ID NO: 601610 - RNA, 20 nt, Human
aaacugucugucaguaucua

SEQ ID NO: 601611 - RNA, 22 nt, Human
acaggcugggcgcuuccugcgg

SEQ ID NO: 601612 - RNA, 22 nt, Human
acagaauucucucugcagaggc

SEQ ID NO: 601613 - RNA, 15 nt, Human
ggaggccaggcugug

SEQ ID NO: 601614 - RNA, 22 nt, Human
uaggcuggaacuuaggcagagg

SEQ ID NO: 601615 - RNA, 22 nt, Human
aaccaacauaggaaugcagaga

SEQ ID NO: 601616 - RNA, 22 nt, Human
uggaacaccuugcuccagaaag

SEQ ID NO: 601617 - RNA, 22 nt, Human
cuuuccugaggaguauggcugu

SEQ ID NO: 601618 - RNA, 22 nt, Human
cauuuugugcuagacacuaugg

SEQ ID NO: 601619 - RNA, 22 nt, Human
gaaacuuucaugaauauaagau

SEQ ID NO: 601620 - RNA, 22 nt, Human
cagcuguugugauccauuuacg

SEQ ID NO: 601621 - RNA, 22 nt, Human
caugcauucagaaucucucaca

SEQ ID NO: 601622 - RNA, 20 nt, Human
aacacugugcgugguaggug

SEQ ID NO: 601623 - RNA, 22 nt, Human
aaauuuucucucuaagacuuaa

SEQ ID NO: 601624 - RNA, 22 nt, Human
aaguggagucccuacaaccagc

SEQ ID NO: 601625 - RNA, 22 nt, Human
cuaccugaaaagguugugguga

SEQ ID NO: 601626 - RNA, 23 nt, Human
ccacugaugcauuuucucucugu

SEQ ID NO: 601627 - RNA, 22 nt, Human
cuuguauuaagcuuagagaggc

SEQ ID NO: 601628 - RNA, 22 nt, Human
cccuggaggcuggaggcaguag

SEQ ID NO: 601629 - RNA, 22 nt, Human
uggccaggcagguagaacggcc

SEQ ID NO: 601630 - RNA, 20 nt, Human
gacaggagaguuagguaggu

SEQ ID NO: 601631 - RNA, 22 nt, Human
uuuuuaugccuacgcugaaaag

SEQ ID NO: 601632 - RNA, 22 nt, Human
agggccugugaauucucccugc

SEQ ID NO: 601633 - RNA, 18 nt, Human
cucagggugaccaaugca

SEQ ID NO: 601634 - RNA, 22 nt, Human
cacagggcagugcugcccacuc

SEQ ID NO: 601635 - RNA, 22 nt, Human
uuccccaggcuggagugcagug

SEQ ID NO: 601636 - RNA, 22 nt, Human
gguggagcuauacgggauggcu

SEQ ID NO: 601637 - RNA, 21 nt, Human
ugaggcuguuguaccagggag

SEQ ID NO: 601638 - RNA, 22 nt, Human
acaaucccacaagaaacacugg

SEQ ID NO: 601639 - RNA, 22 nt, Human
uaacaguauauuuaccaaaccu

SEQ ID NO: 601640 - RNA, 22 nt, Human
aaagagcucuuacucuagugua

SEQ ID NO: 601641 - RNA, 22 nt, Human
ucuggaguuccugcaggcugug

SEQ ID NO: 601642 - RNA, 22 nt, Human
uccuggaacauggauaaagaau

SEQ ID NO: 601643 - RNA, 22 nt, Human
uuuuauaaagagagucaguugg

SEQ ID NO: 601644 - RNA, 21 nt, Human
acugagguuagaugccuugcc

SEQ ID NO: 601645 - RNA, 22 nt, Human
acagcagagccugguacuuacu

SEQ ID NO: 601646 - RNA, 22 nt, Human
ggcugcagguugguuggcagcu

SEQ ID NO: 601647 - RNA, 20 nt, Human
aggcugaguucuaugcacuu

SEQ ID NO: 601648 - RNA, 22 nt, Human
cugugucugaauaacucugugu

SEQ ID NO: 601649 - RNA, 22 nt, Human
ugagaacggauacuaagggcug

SEQ ID NO: 601650 - RNA, 22 nt, Human
gcaggggcugagcaccagcggg

SEQ ID NO: 601651 - RNA, 22 nt, Human
aaggcuaaauucuguacugcau

SEQ ID NO: 601652 - RNA, 21 nt, Human
auucuuggcuuagcucucugg

SEQ ID NO: 601653 - RNA, 22 nt, Human
uauuuucauucugugugacugu

SEQ ID NO: 601654 - RNA, 22 nt, Human
uggcagccacaucucguggauu

SEQ ID NO: 601655 - RNA, 22 nt, Human
ugcagggccaugguggcggcug

SEQ ID NO: 601656 - RNA, 22 nt, Human
guauauaagguaaagcgauugu

SEQ ID NO: 601657 - RNA, 22 nt, Human
cucugcccucgcacaucugcca

SEQ ID NO: 601658 - RNA, 22 nt, Human
acauucuagauauguuauauuu

SEQ ID NO: 601659 - RNA, 22 nt, Human
ugcucccagggacucuggcugg

SEQ ID NO: 601660 - RNA, 22 nt, Human
uauaauauuccuuguuguaggu

SEQ ID NO: 601661 - RNA, 22 nt, Human
aagucguggcaggcuugcacga

SEQ ID NO: 601662 - RNA, 22 nt, Human
uugaccacugaaugguucugaa

SEQ ID NO: 601663 - RNA, 22 nt, Human
uuuacagucugucuagcaaugu

SEQ ID NO: 601664 - RNA, 22 nt, Human
gacacagaaggucacauguuca

SEQ ID NO: 601665 - RNA, 18 nt, Human
uggcaggaaaugcacuuu

SEQ ID NO: 601666 - RNA, 22 nt, Human
ggcuguguuucuguuugacauu

SEQ ID NO: 601667 - RNA, 22 nt, Human
ucaguucuaagugcuuuacaug

SEQ ID NO: 601668 - RNA, 22 nt, Human
cuucuauucacuggucacaguu

SEQ ID NO: 601669 - RNA, 22 nt, Human
uuagccauuugaggucuucauu

SEQ ID NO: 601670 - RNA, 22 nt, Human
gaagacauuaagucuaugucac

SEQ ID NO: 601671 - RNA, 22 nt, Human
guauuagcaagaguugugauuu

SEQ ID NO: 601672 - RNA, 17 nt, Human
aaacuucauucucagga

SEQ ID NO: 601673 - RNA, 22 nt, Human
caugggcuugcucucugagcuc

SEQ ID NO: 601674 - RNA, 22 nt, Human
ggcaccagcaggcaccgaugcc

SEQ ID NO: 601675 - RNA, 23 nt, Human
cuugccuggccucucugcccaga

SEQ ID NO: 601676 - RNA, 22 nt, Human
aaguuucuguucgcuuuaauaa

SEQ ID NO: 601677 - RNA, 22 nt, Human
uggguaggccaggaagcagugu

SEQ ID NO: 601678 - RNA, 22 nt, Human
agggccaccagagcagggcagu

SEQ ID NO: 601679 - RNA, 22 nt, Human
uucauuaaguauaaaauguggu

SEQ ID NO: 601680 - RNA, 23 nt, Human
uugaggacaauuuacaugguguu

SEQ ID NO: 601681 - RNA, 22 nt, Human
gggcccugccccguggcucuga

SEQ ID NO: 601682 - RNA, 22 nt, Human
gccuuucagugccuucuguuca

SEQ ID NO: 601683 - RNA, 22 nt, Human
cugggaguggugacagcucucg

SEQ ID NO: 601684 - RNA, 22 nt, Human
gccuggagggucccucucugga

SEQ ID NO: 601685 - RNA, 22 nt, Human
uucuuuuuaucuucccauaaga

SEQ ID NO: 601686 - RNA, 22 nt, Human
caggcagcaggagcccugcucg

SEQ ID NO: 601687 - RNA, 22 nt, Human
uggcagagaacacggcugaucu

SEQ ID NO: 601688 - RNA, 22 nt, Human
augucuugauauuuuacuguuu

SEQ ID NO: 601689 - RNA, 22 nt, Human
uuauaauucuggcauaggcugu

SEQ ID NO: 601690 - RNA, 22 nt, Human
agcagccagagucugaacauua

SEQ ID NO: 601691 - RNA, 22 nt, Human
gcuucuguggauuggcuggcuu

SEQ ID NO: 601692 - RNA, 22 nt, Human
aguagaaauguaguguagagaa

SEQ ID NO: 601693 - RNA, 22 nt, Human
uuagaaaucaccucugaagauc

SEQ ID NO: 601694 - RNA, 22 nt, Human
gggaggguguucucccaagaac

SEQ ID NO: 601695 - RNA, 20 nt, Human
uccugagaccugggaagguu

SEQ ID NO: 601696 - RNA, 22 nt, Human
uugauucuggugacugauggaa

SEQ ID NO: 601697 - RNA, 22 nt, Human
ucugccuggauuuuggaaagcu

SEQ ID NO: 601698 - RNA, 22 nt, Human
aaacacuggcaauuucaugcac

SEQ ID NO: 601699 - RNA, 22 nt, Human
acaauguaguugucaugagaca

SEQ ID NO: 601700 - RNA, 22 nt, Human
cagcugaagagaggugcugagu

SEQ ID NO: 601701 - RNA, 22 nt, Human
ucccagaguauuagcaauugcu

SEQ ID NO: 601702 - RNA, 22 nt, Human
ggagcaagucccaggcacuagu

SEQ ID NO: 601703 - RNA, 22 nt, Human
ugaaacaaaccaguaauuuugu

SEQ ID NO: 601704 - RNA, 22 nt, Human
cacacaugacccacuuuuaccg

SEQ ID NO: 601705 - RNA, 22 nt, Human
cacuacagaaucaaauacgggc

SEQ ID NO: 601706 - RNA, 22 nt, Human
cuguccugauggugccacuggu

SEQ ID NO: 601707 - RNA, 22 nt, Human
ugagaugaugggauaagagggc

SEQ ID NO: 601708 - RNA, 22 nt, Human
cugcaggcugagcgccugccgg

SEQ ID NO: 601709 - RNA, 22 nt, Human
uucugggcacacaggcccuggu

SEQ ID NO: 601710 - RNA, 22 nt, Human
uagaauuaugccuugcugucca

SEQ ID NO: 601711 - RNA, 22 nt, Human
acuacugaauauuaguucugaa

SEQ ID NO: 601712 - RNA, 22 nt, Human
acaguuuauugcacagguaacc

SEQ ID NO: 601713 - RNA, 22 nt, Human
aggacaugugccuccagggcag

SEQ ID NO: 601714 - RNA, 22 nt, Human
augaaacugggauaacuauagc

SEQ ID NO: 601715 - RNA, 22 nt, Human
agcagugggugguuuuugagca

SEQ ID NO: 601716 - RNA, 22 nt, Human
gcccagggcagggcaagaguga

SEQ ID NO: 601717 - RNA, 22 nt, Human
auggggugcaugcagauuggga

SEQ ID NO: 601718 - RNA, 22 nt, Human
cuucuuggcugcaagucucugu

SEQ ID NO: 601719 - RNA, 22 nt, Human
augacaaacccaggauguaaca

SEQ ID NO: 601720 - RNA, 18 nt, Human
gcagugaagaaagagcuu

SEQ ID NO: 601721 - RNA, 22 nt, Human
agacugggccauuuccccagcu

SEQ ID NO: 601722 - RNA, 22 nt, Human
cuuuuccuauugauucuguuac

SEQ ID NO: 601723 - RNA, 22 nt, Human
aaaggcagaguuguuggaggca

SEQ ID NO: 601724 - RNA, 22 nt, Human
uaacaucaaacauguuuuaaag

SEQ ID NO: 601725 - RNA, 22 nt, Human
uguaggauguaaggcaggcauc

SEQ ID NO: 601726 - RNA, 20 nt, Human
uuacaagguagaggagggaa

SEQ ID NO: 601727 - RNA, 22 nt, Human
ugaacagauggcccagcagagg

SEQ ID NO: 601728 - RNA, 22 nt, Human
uaagauuauacuuaaagagaaa

SEQ ID NO: 601729 - RNA, 22 nt, Human
ucacuaaugagcuaaggaaaag

SEQ ID NO: 601730 - RNA, 22 nt, Human
gcugugugcugggcauggcacu

SEQ ID NO: 601731 - RNA, 20 nt, Human
acugcaagucacuuuuaggg

SEQ ID NO: 601732 - RNA, 22 nt, Human
ucagugcugccauggcagggcc

SEQ ID NO: 601733 - RNA, 22 nt, Human
cagaagugauguugagcuaguc

SEQ ID NO: 601734 - RNA, 22 nt, Human
ggcagggcagcgcugauuaggg

SEQ ID NO: 601735 - RNA, 22 nt, Human
uggcugaguucuccaggaguag

SEQ ID NO: 601736 - RNA, 22 nt, Human
aaugucaaaauaauugauuugu

SEQ ID NO: 601737 - RNA, 17 nt, Human
cucuggggacaguucua

SEQ ID NO: 601738 - RNA, 20 nt, Human
gagugcuuuggcuugcucuc

SEQ ID NO: 601739 - RNA, 22 nt, Human
uuaguauuaggaucauauuuga

SEQ ID NO: 601740 - RNA, 22 nt, Human
aagacauugcugcuuuuaauug

SEQ ID NO: 601741 - RNA, 22 nt, Human
ccaguccuggccaguaacauga

SEQ ID NO: 601742 - RNA, 22 nt, Human
cuuauggaagaaaccucagaga

SEQ ID NO: 601743 - RNA, 22 nt, Human
ucauugucagcucuugacuucu

SEQ ID NO: 601744 - RNA, 19 nt, Human
cccuggggguuucugguac

SEQ ID NO: 601745 - RNA, 22 nt, Human
agccucagcacgcagcucugug

SEQ ID NO: 601746 - RNA, 22 nt, Human
cagugugaggaauuagugucca

SEQ ID NO: 601747 - RNA, 22 nt, Human
uggaagggagcuggaauuugga

SEQ ID NO: 601748 - RNA, 21 nt, Human
uggcugcuggcccucucucca

SEQ ID NO: 601749 - RNA, 22 nt, Human
cacauucacuucucuguccacc

SEQ ID NO: 601750 - RNA, 22 nt, Human
acucucagggacagggucuggg

SEQ ID NO: 601751 - RNA, 22 nt, Human
ugcaggccucacaccuggcacc

SEQ ID NO: 601752 - RNA, 19 nt, Human
aaaaagaggcuauaauauu

SEQ ID NO: 601753 - RNA, 20 nt, Human
ucuccuggucugguccgugc

SEQ ID NO: 601754 - RNA, 22 nt, Human
cauuucucauaauauuagcacu

SEQ ID NO: 601755 - RNA, 22 nt, Human
aauguacaaggguuccaguuuu

SEQ ID NO: 601756 - RNA, 22 nt, Human
cucagggacuuggauccuggcc

SEQ ID NO: 601757 - RNA, 22 nt, Human
ugggcaagggacaggccuggcu

SEQ ID NO: 601758 - RNA, 21 nt, Human
agagagggagaugaaacaucc

SEQ ID NO: 601759 - RNA, 22 nt, Human
gucugcuuuuguuuuacuggua

SEQ ID NO: 601760 - RNA, 23 nt, Human
cucugggcgggcaggucagccuc

SEQ ID NO: 601761 - RNA, 22 nt, Human
uggguagaaacaaggcuggacu

SEQ ID NO: 601762 - RNA, 22 nt, Human
ugauaugcauguaagggagaca

SEQ ID NO: 601763 - RNA, 22 nt, Human
agaaacagaagggaaagcuuuu

SEQ ID NO: 601764 - RNA, 22 nt, Human
cuuuauuguccuucuuaggugg

SEQ ID NO: 601765 - RNA, 22 nt, Human
auuugcuucugcuaaacaacuu

SEQ ID NO: 601766 - RNA, 22 nt, Human
ucagcaagcagggggauguuca

SEQ ID NO: 601767 - RNA, 19 nt, Human
cugcugggugcugagggag

SEQ ID NO: 601768 - RNA, 22 nt, Human
cagguggggcgcccucaggcag

SEQ ID NO: 601769 - RNA, 22 nt, Human
caguguggcuuagggaauaggc

SEQ ID NO: 601770 - RNA, 22 nt, Human
cuacagaguucacaggauuuua

SEQ ID NO: 601771 - RNA, 22 nt, Human
accaacuugcagccaaauuuga

SEQ ID NO: 601772 - RNA, 22 nt, Human
cugaggcuggcguuugaggaag

SEQ ID NO: 601773 - RNA, 22 nt, Human
caggcaccacacuaggggcuga

SEQ ID NO: 601774 - RNA, 22 nt, Human
uuuuugauacucaagaggggua

SEQ ID NO: 601775 - RNA, 22 nt, Human
ucuccacaccagaaggagcuga

SEQ ID NO: 601776 - RNA, 22 nt, Human
aacaguguuuuucuucagcacu

SEQ ID NO: 601777 - RNA, 22 nt, Human
gggagaaggaggacugugcugu

SEQ ID NO: 601778 - RNA, 21 nt, Human
gugguucuagagaaacagaau

SEQ ID NO: 601779 - RNA, 22 nt, Human
auggauaagucaaagaguaucc

SEQ ID NO: 601780 - RNA, 22 nt, Human
gcagcagguccgcaucaucauc

SEQ ID NO: 601781 - RNA, 22 nt, Human
gugcaggggaucagguugcagc

SEQ ID NO: 601782 - RNA, 22 nt, Human
agcagggacauggcaucucucc

SEQ ID NO: 601783 - RNA, 22 nt, Human
augugugugcauuucucucccu

SEQ ID NO: 601784 - RNA, 22 nt, Human
ggaggccagggacccagucagc

SEQ ID NO: 601785 - RNA, 22 nt, Human
cucugggcuuaccugcuuccug

SEQ ID NO: 601786 - RNA, 22 nt, Human
auugauauauuauuucuaacug

SEQ ID NO: 601787 - RNA, 22 nt, Human
ucaggaacauuuaaccacaggg

SEQ ID NO: 601788 - RNA, 22 nt, Human
ucuccugggugcuuuaucagaa

SEQ ID NO: 601789 - RNA, 22 nt, Human
uggguacuccuauuaguucagu

SEQ ID NO: 601790 - RNA, 22 nt, Human
uucuagggaaugggaugaggau

SEQ ID NO: 601791 - RNA, 23 nt, Human
uuauugcaagguaaaauugcuga

SEQ ID NO: 601792 - RNA, 22 nt, Human
cuagucacucagcacugacaaa

SEQ ID NO: 601793 - RNA, 22 nt, Human
auguuuauguugggcuauauuu

SEQ ID NO: 601794 - RNA, 22 nt, Human
uauauuaaagugcuuugcagug

SEQ ID NO: 601795 - RNA, 22 nt, Human
auuagcuugguaugccauaaag

SEQ ID NO: 601796 - RNA, 22 nt, Human
cagcuuuaggacucauaauaaa

SEQ ID NO: 601797 - RNA, 22 nt, Human
acaggcagcacuaaucucuggu

SEQ ID NO: 601798 - RNA, 22 nt, Human
uggagaugaggacauggacguc

SEQ ID NO: 601799 - RNA, 22 nt, Human
ggcccuuccugcucucuuagcu

SEQ ID NO: 601800 - RNA, 21 nt, Human
ggguggccgcaugggugcgug

SEQ ID NO: 601801 - RNA, 22 nt, Human
gaggccugucgcuaggccucug

SEQ ID NO: 601802 - RNA, 22 nt, Human
uucuaacucuguuauguguuuc

SEQ ID NO: 601803 - RNA, 22 nt, Human
gcuuccuagcauuagccauugc

SEQ ID NO: 601804 - RNA, 22 nt, Human
ucugggcugucuacagguuggc

SEQ ID NO: 601805 - RNA, 22 nt, Human
cugcucuccccaggccagucug

SEQ ID NO: 601806 - RNA, 23 nt, Human
agaggcugcaggguauugagaau

SEQ ID NO: 601807 - RNA, 22 nt, Human
gacuguacgucauugaaggcca

SEQ ID NO: 601808 - RNA, 22 nt, Human
agcuccugcucuuugucccuaa

SEQ ID NO: 601809 - RNA, 22 nt, Human
ugacaggauugguugcuucuga

SEQ ID NO: 601810 - RNA, 22 nt, Human
uguguccuuucuuaagagugag

SEQ ID NO: 601811 - RNA, 22 nt, Human
gcuggccagugucccagggauc

SEQ ID NO: 601812 - RNA, 22 nt, Human
guucugcagacuuggaaggugg

SEQ ID NO: 601813 - RNA, 22 nt, Human
ugucauuccuucaauguagaua

SEQ ID NO: 601814 - RNA, 22 nt, Human
gucuccugcuagcaagcaccac

SEQ ID NO: 601815 - RNA, 22 nt, Human
ucuuugcauggacauguguuuu

SEQ ID NO: 601816 - RNA, 22 nt, Human
aucauaaaccacuuuguaaucu

SEQ ID NO: 601817 - RNA, 22 nt, Human
cugucucugauaagcucgaggg

SEQ ID NO: 601818 - RNA, 22 nt, Human
cacaggaagagguauacaauuc

SEQ ID NO: 601819 - RNA, 22 nt, Human
ucuaacuaacuacaguaagagg

SEQ ID NO: 601820 - RNA, 22 nt, Human
ucacaagacugagcuugcuuga

SEQ ID NO: 601821 - RNA, 22 nt, Human
uaguauagauugaagcagauca

SEQ ID NO: 601822 - RNA, 22 nt, Human
uacuuacaugaauucaagagca

SEQ ID NO: 601823 - RNA, 22 nt, Human
uugcugauuuguuucuauucca

SEQ ID NO: 601824 - RNA, 22 nt, Human
uccagccaccaccuugauugcc

SEQ ID NO: 601825 - RNA, 17 nt, Human
cucuccuuccucugagg

SEQ ID NO: 601826 - RNA, 22 nt, Human
guggcagguggagccuccugca

SEQ ID NO: 601827 - RNA, 22 nt, Human
ugaaugagugaguucagaccuc

SEQ ID NO: 601828 - RNA, 22 nt, Human
ccuagggagccugagagcagug

SEQ ID NO: 601829 - RNA, 22 nt, Human
ggcagcagcaagguuggagcug

SEQ ID NO: 601830 - RNA, 23 nt, Human
augaagacccgugguguccccac

SEQ ID NO: 601831 - RNA, 22 nt, Human
uucaguaaggauaauaaacaga

SEQ ID NO: 601832 - RNA, 22 nt, Human
cagggcugaaaucaagguguag

SEQ ID NO: 601833 - RNA, 22 nt, Human
ccaguguuuccccagaagagag

SEQ ID NO: 601834 - RNA, 22 nt, Human
uugaggucaaagaagugagugg

SEQ ID NO: 601835 - RNA, 22 nt, Human
ucuucacaccgggcagcaggaa

SEQ ID NO: 601836 - RNA, 22 nt, Human
ccugcagaagaguccagcucau

SEQ ID NO: 601837 - RNA, 22 nt, Human
cacacauuagagccaaugucag

SEQ ID NO: 601838 - RNA, 22 nt, Human
aaaugcaaggccaugugaagga

SEQ ID NO: 601839 - RNA, 22 nt, Human
agugauaggacauauggauuuu

SEQ ID NO: 601840 - RNA, 22 nt, Human
cuggugggaggcaagguggaag

SEQ ID NO: 601841 - RNA, 19 nt, Human
acuaaaaaugauguuugag

SEQ ID NO: 601842 - RNA, 22 nt, Human
uuuaguagaaauauuugggccu

SEQ ID NO: 601843 - RNA, 22 nt, Human
ucugaccaggcuggcucagggc

SEQ ID NO: 601844 - RNA, 22 nt, Human
acaggugacuugcauuuucaca

SEQ ID NO: 601845 - RNA, 17 nt, Human
ggcaggugcggggccgc

SEQ ID NO: 601846 - RNA, 22 nt, Human
cccucccagaugggcuugaggu

SEQ ID NO: 601847 - RNA, 22 nt, Human
ccagagagagaggucaauggca

SEQ ID NO: 601848 - RNA, 22 nt, Human
cuacuuuaccuccaucagacug

SEQ ID NO: 601849 - RNA, 20 nt, Human
aaacuaaagguguuugguuu

SEQ ID NO: 601850 - RNA, 22 nt, Human
gaaggaagggcuggcugucuug

SEQ ID NO: 601851 - RNA, 22 nt, Human
acaaauauuuacugaauccacu

SEQ ID NO: 601852 - RNA, 22 nt, Human
uggcucaguuuagcagcucagu

SEQ ID NO: 601853 - RNA, 20 nt, Human
caccagucaugagucaauac

SEQ ID NO: 601854 - RNA, 22 nt, Human
guggaggguuugcaaugugcag

SEQ ID NO: 601855 - RNA, 22 nt, Human
uggcaaugagcaggugcucugg

SEQ ID NO: 601856 - RNA, 22 nt, Human
gaacaucaugaagaaaacauau

SEQ ID NO: 601857 - RNA, 21 nt, Human
ugggggagaauugguugcuuu

SEQ ID NO: 601858 - RNA, 22 nt, Human
gagagcugugguuugaccaggc

SEQ ID NO: 601859 - RNA, 22 nt, Human
cucuggguucuggccugcaccc

SEQ ID NO: 601860 - RNA, 23 nt, Human
ugaauuuuggcauauucugaaau

SEQ ID NO: 601861 - RNA, 22 nt, Human
aagggcugagaaguggggcugg

SEQ ID NO: 601862 - RNA, 22 nt, Human
ccaguggaauuaaaaauaagug

SEQ ID NO: 601863 - RNA, 22 nt, Human
gugagcugggugaaugguaggg

SEQ ID NO: 601864 - RNA, 22 nt, Human
aagagguaaccauagcaaccac

SEQ ID NO: 601865 - RNA, 22 nt, Human
ggagggagucagcugauuagaa

SEQ ID NO: 601866 - RNA, 22 nt, Human
cugccuggggaaugugaggauu

SEQ ID NO: 601867 - RNA, 22 nt, Human
ggcagguggacgugcuaaagcu

SEQ ID NO: 601868 - RNA, 22 nt, Human
auugagaaaauaaguauggaua

SEQ ID NO: 601869 - RNA, 22 nt, Human
gaaguggaauuacugggucaua

SEQ ID NO: 601870 - RNA, 22 nt, Human
uuacucugaauguuucuacuga

SEQ ID NO: 601871 - RNA, 22 nt, Human
gaguuauaaccuaguuuaacug

SEQ ID NO: 601872 - RNA, 22 nt, Human
uugacaaguaauacuuaaauua

SEQ ID NO: 601873 - RNA, 22 nt, Human
ccuggugcccccaagccagcug

SEQ ID NO: 601874 - RNA, 22 nt, Human
aggcagagagcaguggccgucu

SEQ ID NO: 601875 - RNA, 22 nt, Human
gguggcagggagugucccuggg

SEQ ID NO: 601876 - RNA, 22 nt, Human
uacuacauuaauaaaacauuca

SEQ ID NO: 601877 - RNA, 22 nt, Human
ggaaaaaugacacauaucucaa

SEQ ID NO: 601878 - RNA, 21 nt, Human
ucauauuucucuugcuauugu

SEQ ID NO: 601879 - RNA, 22 nt, Human
aggggcuccucucugagaguag

SEQ ID NO: 601880 - RNA, 22 nt, Human
uacuguaugauuucauguauau

SEQ ID NO: 601881 - RNA, 22 nt, Human
gcugccuguguggccacucacu

SEQ ID NO: 601882 - RNA, 21 nt, Human
uggagcugccacuuguccucc

SEQ ID NO: 601883 - RNA, 19 nt, Human
uguguucaaacuccaucuc

SEQ ID NO: 601884 - RNA, 22 nt, Human
uacuguuuuugccucuuuagaa

SEQ ID NO: 601885 - RNA, 22 nt, Human
cagggagcagccccuagaagua

SEQ ID NO: 601886 - RNA, 22 nt, Human
gcugcagguuugucuagucugg

SEQ ID NO: 601887 - RNA, 22 nt, Human
ucagaaauguaagcugaugacu

SEQ ID NO: 601888 - RNA, 22 nt, Human
aacagaaggggguauuuacauu

SEQ ID NO: 601889 - RNA, 22 nt, Human
guuacaaaggucauaaaagugu

SEQ ID NO: 601890 - RNA, 22 nt, Human
aggggcuuguggaguugcuggu

SEQ ID NO: 601891 - RNA, 19 nt, Human
aggcuucuacccuguccag

SEQ ID NO: 601892 - RNA, 22 nt, Human
cauaucaaagagaaggauagga

SEQ ID NO: 601893 - RNA, 22 nt, Human
aggauguguguaggcugguuaa

SEQ ID NO: 601894 - RNA, 22 nt, Human
uccugggcuuaagugauccucc

SEQ ID NO: 601895 - RNA, 22 nt, Human
acauacauaugacaacuuuccu

SEQ ID NO: 601896 - RNA, 22 nt, Human
ccaccagcuucagcagccgcgg

SEQ ID NO: 601897 - RNA, 22 nt, Human
gcuggagaguaguaagcaguua

SEQ ID NO: 601898 - RNA, 22 nt, Human
ggggggcuguucuggacaggaa

SEQ ID NO: 601899 - RNA, 22 nt, Human
gucccagggaagaaggcagcac

SEQ ID NO: 601900 - RNA, 22 nt, Human
acaaugaagcuccacugagcuu

SEQ ID NO: 601901 - RNA, 22 nt, Human
gucuccuggccuccaguuucuc

SEQ ID NO: 601902 - RNA, 22 nt, Human
aggugucuuugcggcccgccgc

SEQ ID NO: 601903 - RNA, 22 nt, Human
uugaaguuuaaugguagauucc

SEQ ID NO: 601904 - RNA, 22 nt, Human
aaggacaggcuaaccugacauu

SEQ ID NO: 601905 - RNA, 22 nt, Human
cagcagccauguaccacacuca

SEQ ID NO: 601906 - RNA, 22 nt, Human
auacacauaucagguguauaca

SEQ ID NO: 601907 - RNA, 22 nt, Human
gaggauguaaaauagacaaaau

SEQ ID NO: 601908 - RNA, 22 nt, Human
uaguuauuauuguuacuaucag

SEQ ID NO: 601909 - RNA, 22 nt, Human
aaagacugcaaaaacgcacaga

SEQ ID NO: 601910 - RNA, 22 nt, Human
auauauaauacuugcugugggc

SEQ ID NO: 601911 - RNA, 22 nt, Human
agcucuggaagcccugguaguu

SEQ ID NO: 601912 - RNA, 22 nt, Human
agcuacaguggacaagugaacu

SEQ ID NO: 601913 - RNA, 22 nt, Human
uccuuagccggagcagcucauc

SEQ ID NO: 601914 - RNA, 23 nt, Human
uaucauuucagcucucugccugg

SEQ ID NO: 601915 - RNA, 22 nt, Human
acaucuuuauacuaguccuuga

SEQ ID NO: 601916 - RNA, 22 nt, Human
cauuuauucauuugcuagggcu

SEQ ID NO: 601917 - RNA, 22 nt, Human
uggagguggaguuggaaacuga

SEQ ID NO: 601918 - RNA, 22 nt, Human
uuuaugagccucaaaucugagu

SEQ ID NO: 601919 - RNA, 22 nt, Human
uuggcucaggcuuucauuguaa

SEQ ID NO: 601920 - RNA, 22 nt, Human
uuucugcuaaucuuuuacugag

SEQ ID NO: 601921 - RNA, 23 nt, Human
cccuggagcuagucugagcgggg

SEQ ID NO: 601922 - RNA, 20 nt, Human
auuuguuucuacucucugac

SEQ ID NO: 601923 - RNA, 22 nt, Human
ccaagggaaggauguauaugau

SEQ ID NO: 601924 - RNA, 22 nt, Human
uuagcugaaaaaauucaugcaa

SEQ ID NO: 601925 - RNA, 22 nt, Human
ccacagagcauuagauuucaga

SEQ ID NO: 601926 - RNA, 22 nt, Human
aguccuugaauguuuugaaauc

SEQ ID NO: 601927 - RNA, 22 nt, Human
acucuucaguacaauaauaucu

SEQ ID NO: 601928 - RNA, 22 nt, Human
ucccagccuuaucuccccuggc

SEQ ID NO: 601929 - RNA, 22 nt, Human
cacacaugucucuccaugcucu

SEQ ID NO: 601930 - RNA, 22 nt, Human
auauaauacaaccugcuaagug

SEQ ID NO: 601931 - RNA, 22 nt, Human
gaagcccauuuguacagcacau

SEQ ID NO: 601932 - RNA, 22 nt, Human
cagagagagcaggaaaccuccg

SEQ ID NO: 601933 - RNA, 22 nt, Human
aacaguaucuacgggaacuauu

SEQ ID NO: 601934 - RNA, 22 nt, Human
cccagggaaugacucuggccuu

SEQ ID NO: 601935 - RNA, 22 nt, Human
ccacaugcucaccaagucccug

SEQ ID NO: 601936 - RNA, 22 nt, Human
gggcagcugcagggauggugac

SEQ ID NO: 601937 - RNA, 22 nt, Human
aauuauacauugaacaaucuag

SEQ ID NO: 601938 - RNA, 22 nt, Human
gagcuucccucugcagucccug

SEQ ID NO: 601939 - RNA, 22 nt, Human
ccauggagcaccucacagaggc

SEQ ID NO: 601940 - RNA, 22 nt, Human
aagauuauggcagauaacaauu

SEQ ID NO: 601941 - RNA, 22 nt, Human
ugcauuggguugacauacuaaa

SEQ ID NO: 601942 - RNA, 22 nt, Human
caggcagcucugcuuuuccuaa

SEQ ID NO: 601943 - RNA, 22 nt, Human
ugagaacuugugcuauugcaca

SEQ ID NO: 601944 - RNA, 22 nt, Human
uuguuuuggagaugagcuaaaa

SEQ ID NO: 601945 - RNA, 22 nt, Human
ccacagcuagggcaaucugauu

SEQ ID NO: 601946 - RNA, 22 nt, Human
ucacauuuguuccucugcacuu

SEQ ID NO: 601947 - RNA, 22 nt, Human
acaucugaaagggauugcagaa

SEQ ID NO: 601948 - RNA, 22 nt, Human
uauaaaguuggggcugaaguaa

SEQ ID NO: 601949 - RNA, 22 nt, Human
cuggaguucgacugaguugaau

SEQ ID NO: 601950 - RNA, 22 nt, Human
cuucaagucgccaaaugcugaa

SEQ ID NO: 601951 - RNA, 22 nt, Human
gagcagggccacuucuguaccu

SEQ ID NO: 601952 - RNA, 22 nt, Human
gcaccaggaggcccuucucauc

SEQ ID NO: 601953 - RNA, 22 nt, Human
ucugaaugcacuuaguuaccaa

SEQ ID NO: 601954 - RNA, 22 nt, Human
ccacugggcguuucuguccaau

SEQ ID NO: 601955 - RNA, 22 nt, Human
ggcagagcuugcagugagccga

SEQ ID NO: 601956 - RNA, 22 nt, Human
aaacagcuggucucaaauguuc

SEQ ID NO: 601957 - RNA, 22 nt, Human
cagagucuggacugcaggcucc

SEQ ID NO: 601958 - RNA, 22 nt, Human
cagcaguaauuagugcugcaug

SEQ ID NO: 601959 - RNA, 22 nt, Human
aagcuguugcccugcucuuucu

SEQ ID NO: 601960 - RNA, 22 nt, Human
gccacaggugggcucugggaaa

SEQ ID NO: 601961 - RNA, 22 nt, Human
gugugggacgggugaguggcca

SEQ ID NO: 601962 - RNA, 21 nt, Human
uuugaaagcccuauguuuuca

SEQ ID NO: 601963 - RNA, 22 nt, Human
aggcuggauuuauggggacuuc

SEQ ID NO: 601964 - RNA, 17 nt, Human
ggcuucagggagcuggg

SEQ ID NO: 601965 - RNA, 22 nt, Human
agcagcugaccagugaguccug

SEQ ID NO: 601966 - RNA, 22 nt, Human
cuggggagacgaucgauguucu

SEQ ID NO: 601967 - RNA, 22 nt, Human
guggggcugaguggagccagaa

SEQ ID NO: 601968 - RNA, 20 nt, Human
ugcagaagaacguucugguu

SEQ ID NO: 601969 - RNA, 22 nt, Human
auguguaugagugugcuucuuu

SEQ ID NO: 601970 - RNA, 22 nt, Human
ggccuugauccuccagagcacu

SEQ ID NO: 601971 - RNA, 22 nt, Human
uugaggucauauauauuuggca

SEQ ID NO: 601972 - RNA, 22 nt, Human
cagcagcaacaauagcggucac

SEQ ID NO: 601973 - RNA, 22 nt, Human
caaacauuugacuucucucagg

SEQ ID NO: 601974 - RNA, 22 nt, Human
aucuaaaaggagcucuuuaucu

SEQ ID NO: 601975 - RNA, 22 nt, Human
aucugggagucuuggcucugcu

SEQ ID NO: 601976 - RNA, 22 nt, Human
cuggaguucuaugugcuuguga

SEQ ID NO: 601977 - RNA, 22 nt, Human
ggaggccaugggcagaaucuuu

SEQ ID NO: 601978 - RNA, 22 nt, Human
uugggcaggcuggcagacugcu

SEQ ID NO: 601979 - RNA, 22 nt, Human
uggggccagguggcugcagguc

SEQ ID NO: 601980 - RNA, 22 nt, Human
gcugggcucguucccacacgcg

SEQ ID NO: 601981 - RNA, 22 nt, Human
caucuucaccagagacaagcaa

SEQ ID NO: 601982 - RNA, 20 nt, Human
uuacucaguuccugccaugc

SEQ ID NO: 601983 - RNA, 22 nt, Human
ucagggaccccucugaguggag

SEQ ID NO: 601984 - RNA, 22 nt, Human
ggucccugccugaggcuggccu

SEQ ID NO: 601985 - RNA, 22 nt, Human
caguauguuugggagacaugac

SEQ ID NO: 601986 - RNA, 22 nt, Human
uuugaugaaccuauauaauuug

SEQ ID NO: 601987 - RNA, 22 nt, Human
gaggccaggguaccaucaacau

SEQ ID NO: 601988 - RNA, 22 nt, Human
agggccugcucuaucacucuca

SEQ ID NO: 601989 - RNA, 22 nt, Human
ggagugggcagcacugcccugu

SEQ ID NO: 601990 - RNA, 22 nt, Human
uauucucuccccaaucuugcuu

SEQ ID NO: 601991 - RNA, 21 nt, Human
ucagaaucugugagcuaucuc

SEQ ID NO: 601992 - RNA, 22 nt, Human
cuuguuuucuucugcagucuau

SEQ ID NO: 601993 - RNA, 22 nt, Human
gugguccugccagccaggucca

SEQ ID NO: 601994 - RNA, 22 nt, Human
ugccuagggccuaaccagagcc

SEQ ID NO: 601995 - RNA, 22 nt, Human
gagcugccugaacaagcagcag

SEQ ID NO: 601996 - RNA, 22 nt, Human
uuugucaaagaucagaugcuuu

SEQ ID NO: 601997 - RNA, 22 nt, Human
caggccucuccuuagucuggca

SEQ ID NO: 601998 - RNA, 18 nt, Human
gcuuucuguagaaaaggg

SEQ ID NO: 601999 - RNA, 23 nt, Human
ccugcagcugcuggggcuccacc

SEQ ID NO: 602000 - RNA, 22 nt, Human
uggaggcaggggauacagguca

SEQ ID NO: 602001 - RNA, 22 nt, Human
aauagagagcagcuuugcgguu

SEQ ID NO: 602002 - RNA, 22 nt, Human
uagaugcugaaacauggaggcg

SEQ ID NO: 602003 - RNA, 22 nt, Human
uacuauguucuuccuaaauagu

SEQ ID NO: 602004 - RNA, 22 nt, Human
aaauggcagcccagagguaagg

SEQ ID NO: 602005 - RNA, 22 nt, Human
uggcucagagccuugagagcug

SEQ ID NO: 602006 - RNA, 22 nt, Human
uccagcccagcuccucucagaa

SEQ ID NO: 602007 - RNA, 22 nt, Human
ugaggccagucucaucacaggc

SEQ ID NO: 602008 - RNA, 22 nt, Human
cuuugugcuuugaaugauagcu

SEQ ID NO: 602009 - RNA, 22 nt, Human
uccucccuugacuccugcuuuu

SEQ ID NO: 602010 - RNA, 22 nt, Human
cacccagcacagagggaggcga

SEQ ID NO: 602011 - RNA, 22 nt, Human
agcugggcgcaguggcugguga

SEQ ID NO: 602012 - RNA, 20 nt, Human
uccugggguaagccaugguc

SEQ ID NO: 602013 - RNA, 22 nt, Human
ugaggcagaaauuccuguuuuc

SEQ ID NO: 602014 - RNA, 22 nt, Human
auuugcauaaggaugcuacugu

SEQ ID NO: 602015 - RNA, 22 nt, Human
ccuuccuuucagggcuaugccu

SEQ ID NO: 602016 - RNA, 22 nt, Human
cucacaguuucacaguguagau

SEQ ID NO: 602017 - RNA, 22 nt, Human
ucucugaagauauuuauuauua

SEQ ID NO: 602018 - RNA, 22 nt, Human
uuugguaaaaugaacuagcuuu

SEQ ID NO: 602019 - RNA, 22 nt, Human
ugguaggagauauggucuccga

SEQ ID NO: 602020 - RNA, 22 nt, Human
acagaggccgccucucucacgg

SEQ ID NO: 602021 - RNA, 22 nt, Human
auacuuccugcuucccugaucu

SEQ ID NO: 602022 - RNA, 22 nt, Human
gugcauuuauauuugccuuugg

SEQ ID NO: 602023 - RNA, 22 nt, Human
uguggagguuuaaguaauggga

SEQ ID NO: 602024 - RNA, 22 nt, Human
acauuucucagggaguuuugcu

SEQ ID NO: 602025 - RNA, 22 nt, Human
augcaguuuucaaagacuauuc

SEQ ID NO: 602026 - RNA, 22 nt, Human
caggauggucuucauuuggcuc

SEQ ID NO: 602027 - RNA, 22 nt, Human
cuguuuucuacagucugggucu

SEQ ID NO: 602028 - RNA, 22 nt, Human
cuguuucagaacuucuuaaaaa

SEQ ID NO: 602029 - RNA, 22 nt, Human
uuuugugagaugcguaugaaug

SEQ ID NO: 602030 - RNA, 22 nt, Human
cagcucaaguuucccaggucag

SEQ ID NO: 602031 - RNA, 21 nt, Human
cauuucaaagagcuggaaauc

SEQ ID NO: 602032 - RNA, 22 nt, Human
caguuuauaguuguuaugugug

SEQ ID NO: 602033 - RNA, 22 nt, Human
gcugccucugcgacucugggcg

SEQ ID NO: 602034 - RNA, 22 nt, Human
uguguuucagaaccuucuuuca

SEQ ID NO: 602035 - RNA, 22 nt, Human
ucagcagacuaggcagauuacu

SEQ ID NO: 602036 - RNA, 22 nt, Human
augagcuucccagacaggaugg

SEQ ID NO: 602037 - RNA, 22 nt, Human
ccugagcuggcagugaccugga

SEQ ID NO: 602038 - RNA, 22 nt, Human
cagaagcacauguuuacaugua

SEQ ID NO: 602039 - RNA, 17 nt, Human
ccaggugggaggugggg

SEQ ID NO: 602040 - RNA, 22 nt, Human
uggcuucuugaucuuggacuug

SEQ ID NO: 602041 - RNA, 22 nt, Human
uuagucuucuuccuuauauguu

SEQ ID NO: 602042 - RNA, 22 nt, Human
gcaaaacagucgaugccuccca

SEQ ID NO: 602043 - RNA, 22 nt, Human
agaaacagaaccaggugucauu

SEQ ID NO: 602044 - RNA, 22 nt, Human
cuccugccaccgcgguguccug

SEQ ID NO: 602045 - RNA, 23 nt, Human
aggagccaggugcagcccuugug

SEQ ID NO: 602046 - RNA, 20 nt, Human
ccucacagggcagagagggg

SEQ ID NO: 602047 - RNA, 22 nt, Human
aaagcugcuuuaaacaucuaug

SEQ ID NO: 602048 - RNA, 22 nt, Human
agccaguagaucgggaggaugu

SEQ ID NO: 602049 - RNA, 22 nt, Human
auucuucugccuacuuucaucc

SEQ ID NO: 602050 - RNA, 22 nt, Human
guguguguucaauaaauuuaag

SEQ ID NO: 602051 - RNA, 22 nt, Human
gcugaggaaaccaaugcucaga

SEQ ID NO: 602052 - RNA, 22 nt, Human
uaggggcuuguaauuuaauaga

SEQ ID NO: 602053 - RNA, 22 nt, Human
uaaagcagugcaaaagcguuuu

SEQ ID NO: 602054 - RNA, 22 nt, Human
gccuggagagcacugugcgcuu

SEQ ID NO: 602055 - RNA, 22 nt, Human
cagcaguggccaucuguguggu

SEQ ID NO: 602056 - RNA, 22 nt, Human
uuugcaaauaccaugaaacuug

SEQ ID NO: 602057 - RNA, 22 nt, Human
augcaguuccacaggcgcaugg

SEQ ID NO: 602058 - RNA, 22 nt, Human
gagguaguaagcagaguggggu

SEQ ID NO: 602059 - RNA, 22 nt, Human
ugugugggcgaagacagccuuu

SEQ ID NO: 602060 - RNA, 22 nt, Human
agcuccaggauaagacaggugc

SEQ ID NO: 602061 - RNA, 22 nt, Human
agggccaguucuaccucugaau

SEQ ID NO: 602062 - RNA, 22 nt, Human
ucaguguuuguggcaaauguua

SEQ ID NO: 602063 - RNA, 22 nt, Human
uaaaguuuggcagacaauaaca

SEQ ID NO: 602064 - RNA, 22 nt, Human
cagggccucauccucagagauu

SEQ ID NO: 602065 - RNA, 22 nt, Human
acacaggcaagagugcaggucu

SEQ ID NO: 602066 - RNA, 22 nt, Human
accccagcucugagccacacca

SEQ ID NO: 602067 - RNA, 22 nt, Human
ucugugcucauucagucauuca

SEQ ID NO: 602068 - RNA, 22 nt, Human
ugccugccuaggaagcugugaa

SEQ ID NO: 602069 - RNA, 22 nt, Human
gccaccagcagaaaaggggcca

SEQ ID NO: 602070 - RNA, 22 nt, Human
accugaaaccaacuuguguacu

SEQ ID NO: 602071 - RNA, 22 nt, Human
acagcugggugcugcucagagc

SEQ ID NO: 602072 - RNA, 22 nt, Human
aucuuacagcagcaaggaagua

SEQ ID NO: 602073 - RNA, 22 nt, Human
gaaagcacgauaguagcaaaag

SEQ ID NO: 602074 - RNA, 22 nt, Human
gcaugugucccucagucugugc

SEQ ID NO: 602075 - RNA, 22 nt, Human
uaaagcuagaaggugcuguaca

SEQ ID NO: 602076 - RNA, 22 nt, Human
cacuguguaagaagaugggcuu

SEQ ID NO: 602077 - RNA, 22 nt, Human
cugaaugaggaaaagagugagg

SEQ ID NO: 602078 - RNA, 21 nt, Human
gugaauaugcagcagaggcag

SEQ ID NO: 602079 - RNA, 22 nt, Human
gcuuucugaugagcuuaagaaa

SEQ ID NO: 602080 - RNA, 20 nt, Human
ccagaagcacucuucauguu

SEQ ID NO: 602081 - RNA, 22 nt, Human
aggagccaccuaggagcuguuu

SEQ ID NO: 602082 - RNA, 21 nt, Human
uuacacacugcuucuagaaug

SEQ ID NO: 602083 - RNA, 22 nt, Human
gaaacuuuuaaaccucaugagu

SEQ ID NO: 602084 - RNA, 22 nt, Human
cccaggagccaucugucuuggc

SEQ ID NO: 602085 - RNA, 22 nt, Human
auaaagcuauuccucucuuuuu

SEQ ID NO: 602086 - RNA, 22 nt, Human
cugggagggguagccaauccua

SEQ ID NO: 602087 - RNA, 22 nt, Human
ucuuuguuugccuuuaucaaga

SEQ ID NO: 602088 - RNA, 22 nt, Human
cucugagaggugagaagcagca

SEQ ID NO: 602089 - RNA, 22 nt, Human
ccagcuccugggucuuagucag

SEQ ID NO: 602090 - RNA, 22 nt, Human
ccaggcucaggugcgagagaca

SEQ ID NO: 602091 - RNA, 22 nt, Human
aauagauacuacuuagauguag

SEQ ID NO: 602092 - RNA, 22 nt, Human
aguaugucagagugaaaauggu

SEQ ID NO: 602093 - RNA, 20 nt, Human
cuggguggcaagcaaggggg

SEQ ID NO: 602094 - RNA, 22 nt, Human
gcugacaguuacugcuguaaca

SEQ ID NO: 602095 - RNA, 22 nt, Human
ugagguagaaguugggcugcuu

SEQ ID NO: 602096 - RNA, 22 nt, Human
uggugggcacagugcccaggcu

SEQ ID NO: 602097 - RNA, 22 nt, Human
aauugauggacagagaugaaga

SEQ ID NO: 602098 - RNA, 22 nt, Human
cugaggcucaagggcagguggg

SEQ ID NO: 602099 - RNA, 21 nt, Human
cauaugaaagaaguaucugac

SEQ ID NO: 602100 - RNA, 22 nt, Human
agcaaaagauagauuaacaaga

SEQ ID NO: 602101 - RNA, 22 nt, Human
agcuuucaggauaaugaaaaag

SEQ ID NO: 602102 - RNA, 22 nt, Human
caaggcugcuucagacuaguga

SEQ ID NO: 602103 - RNA, 22 nt, Human
gccagcuccgcaggauggcgcg

SEQ ID NO: 602104 - RNA, 22 nt, Human
ucauuguugacauaccaagagc

SEQ ID NO: 602105 - RNA, 22 nt, Human
ggcuuccuggggccuccugcaa

SEQ ID NO: 602106 - RNA, 22 nt, Human
guuauugcuggauagauacauc

SEQ ID NO: 602107 - RNA, 22 nt, Human
uuggaacaugccgggguccagg

SEQ ID NO: 602108 - RNA, 22 nt, Human
caugcuccagcuccagacaggu

SEQ ID NO: 602109 - RNA, 22 nt, Human
ccugcuuaacauugccaugaca

SEQ ID NO: 602110 - RNA, 22 nt, Human
gggcccuggggccugauuugca

SEQ ID NO: 602111 - RNA, 23 nt, Human
cagaugagguuggcagcaugguc

SEQ ID NO: 602112 - RNA, 22 nt, Human
uccuguauccugauacaauaag

SEQ ID NO: 602113 - RNA, 22 nt, Human
agcuggagaguuuccaggaagg

SEQ ID NO: 602114 - RNA, 22 nt, Human
cuuaauuuaagccuagaaugca

SEQ ID NO: 602115 - RNA, 22 nt, Human
agcugggccugagcuggaagcu

SEQ ID NO: 602116 - RNA, 22 nt, Human
ggcucugaaggagacagcugcu

SEQ ID NO: 602117 - RNA, 21 nt, Human
gcuucagcaaggcuugcuggu

SEQ ID NO: 602118 - RNA, 22 nt, Human
gccugggacugcagauccccag

SEQ ID NO: 602119 - RNA, 22 nt, Human
gccagcuguaggugguggguug

SEQ ID NO: 602120 - RNA, 22 nt, Human
ucagugucuugaccugggugug

SEQ ID NO: 602121 - RNA, 22 nt, Human
caucuccuuuggucuacuucca

SEQ ID NO: 602122 - RNA, 22 nt, Human
accucacaagucucugucagcu

SEQ ID NO: 602123 - RNA, 22 nt, Human
ucucugagacaguagccucugc

SEQ ID NO: 602124 - RNA, 22 nt, Human
agaagaaagauugaagguuccu

SEQ ID NO: 602125 - RNA, 22 nt, Human
cagggcugaagaaauucaaaag

SEQ ID NO: 602126 - RNA, 22 nt, Human
caaacuugguggauuaguacag

SEQ ID NO: 602127 - RNA, 22 nt, Human
ugagagauugcuguauguuuug

SEQ ID NO: 602128 - RNA, 20 nt, Human
uacaaaccuccacacuggug

SEQ ID NO: 602129 - RNA, 21 nt, Human
uuaaggucacuucugagccua

SEQ ID NO: 602130 - RNA, 22 nt, Human
guuguuuucagcaguuuaugac

SEQ ID NO: 602131 - RNA, 22 nt, Human
auuuuuucagauugaguguuaa

SEQ ID NO: 602132 - RNA, 22 nt, Human
aaagacuaagaagaguauuauu

SEQ ID NO: 602133 - RNA, 17 nt, Human
ugagacagggcaggccc

SEQ ID NO: 602134 - RNA, 22 nt, Human
auuagcaugccaagcuuuuaga

SEQ ID NO: 602135 - RNA, 22 nt, Human
aagcacauuguacauuugugcu

SEQ ID NO: 602136 - RNA, 22 nt, Human
ucugggcuuuguaaugggaggu

SEQ ID NO: 602137 - RNA, 22 nt, Human
uguauuuugaguccaaucuccu

SEQ ID NO: 602138 - RNA, 22 nt, Human
gagaaggaguagcugaccuggg

SEQ ID NO: 602139 - RNA, 22 nt, Human
aagagguugucugugaugaguu

SEQ ID NO: 602140 - RNA, 21 nt, Human
uuacaggucauccaagucacc

SEQ ID NO: 602141 - RNA, 22 nt, Human
agaaaguuagcagacucuuggc

SEQ ID NO: 602142 - RNA, 22 nt, Human
aauacgugguuacucuauagag

SEQ ID NO: 602143 - RNA, 22 nt, Human
acaggcagugauuuccucuggu

SEQ ID NO: 602144 - RNA, 22 nt, Human
uuuuccugccugucucuagagg

SEQ ID NO: 602145 - RNA, 22 nt, Human
gugcagcugcccaagccugagc

SEQ ID NO: 602146 - RNA, 20 nt, Human
guggagaggcuggcgggacu

SEQ ID NO: 602147 - RNA, 22 nt, Human
gagacaggauuuaaccaaagcu

SEQ ID NO: 602148 - RNA, 22 nt, Human
ucccagagccaagcuauggaug

SEQ ID NO: 602149 - RNA, 22 nt, Human
agggaaacuagacugccuuucu

SEQ ID NO: 602150 - RNA, 22 nt, Human
aggcccugagcauccgagggca

SEQ ID NO: 602151 - RNA, 22 nt, Human
uacacuaagaacaaagaucugu

SEQ ID NO: 602152 - RNA, 22 nt, Human
agagccagagaccuggguucac

SEQ ID NO: 602153 - RNA, 22 nt, Human
agcugcuuuuauuaggacaaug

SEQ ID NO: 602154 - RNA, 22 nt, Human
cuccacucaacaagcccagugu

SEQ ID NO: 602155 - RNA, 22 nt, Human
cccaggcagccugcagggaagg

SEQ ID NO: 602156 - RNA, 19 nt, Human
gaauuuuaggacuucagca

SEQ ID NO: 602157 - RNA, 21 nt, Human
ucuccaguugacagugucucc

SEQ ID NO: 602158 - RNA, 22 nt, Human
cauaauuaggcaguugaucauu

SEQ ID NO: 602159 - RNA, 22 nt, Human
cacgagggcacacgugggaggg

SEQ ID NO: 602160 - RNA, 22 nt, Human
ggcagcacugcagcuuguuggg

SEQ ID NO: 602161 - RNA, 22 nt, Human
ucuuuaaaguuggagcuugcaa

SEQ ID NO: 602162 - RNA, 22 nt, Human
aggcgcugcaugugaaggaguu

SEQ ID NO: 602163 - RNA, 22 nt, Human
uggcaagaauauuggaccagaa

SEQ ID NO: 602164 - RNA, 22 nt, Human
gugcaggaggaugacaacugca

SEQ ID NO: 602165 - RNA, 22 nt, Human
uggguauauauguugcuacaga

SEQ ID NO: 602166 - RNA, 19 nt, Human
guuguuuuucuuauuaugg

SEQ ID NO: 602167 - RNA, 22 nt, Human
uggcuucuaaaguuucuuuuag

SEQ ID NO: 602168 - RNA, 22 nt, Human
cagguggcagaggucucuggaa

SEQ ID NO: 602169 - RNA, 22 nt, Human
gaagagagagcccugggguccg

SEQ ID NO: 602170 - RNA, 22 nt, Human
gugacauuuuuacugaugagag

SEQ ID NO: 602171 - RNA, 22 nt, Human
ugacaaugacauggacagugau

SEQ ID NO: 602172 - RNA, 22 nt, Human
auauuaguguagguagcuaaua

SEQ ID NO: 602173 - RNA, 22 nt, Human
agaaaggguucucugaggugcu

SEQ ID NO: 602174 - RNA, 22 nt, Human
ggccuugggauguggcugcagc

SEQ ID NO: 602175 - RNA, 22 nt, Human
gccagauuuacagauuugcccu

SEQ ID NO: 602176 - RNA, 22 nt, Human
aaguauacugaagguauccagg

SEQ ID NO: 602177 - RNA, 19 nt, Human
uaagacagauuccuagagu

SEQ ID NO: 602178 - RNA, 22 nt, Human
cccaggagguuggggcuacagu

SEQ ID NO: 602179 - RNA, 22 nt, Human
acauuuuacaguugucuggcua

SEQ ID NO: 602180 - RNA, 22 nt, Human
uuguacaaguauuaugugaaca

SEQ ID NO: 602181 - RNA, 22 nt, Human
gagcagcuguccccaaagcuuc

SEQ ID NO: 602182 - RNA, 19 nt, Human
uucucugugcuagacucug

SEQ ID NO: 602183 - RNA, 20 nt, Human
guauaagauuucacacauua

SEQ ID NO: 602184 - RNA, 22 nt, Human
uuugcuauugugaauagugcca

SEQ ID NO: 602185 - RNA, 22 nt, Human
uaguaaacaggcaagggaccac

SEQ ID NO: 602186 - RNA, 22 nt, Human
ugggccuggacaaggccacuag

SEQ ID NO: 602187 - RNA, 22 nt, Human
agaauaguuuuacuuuucuaug

SEQ ID NO: 602188 - RNA, 23 nt, Human
gcugcagcuguggauguucucag

SEQ ID NO: 602189 - RNA, 22 nt, Human
acccaggcuggagugcaguguc

SEQ ID NO: 602190 - RNA, 22 nt, Human
uaagauuuuuaaaauguccuca

SEQ ID NO: 602191 - RNA, 22 nt, Human
uggcuccacuacuggguguguu

SEQ ID NO: 602192 - RNA, 22 nt, Human
auuuauguaucuguguagauca

SEQ ID NO: 602193 - RNA, 22 nt, Human
ugaaaccccagauuaccacaaa

SEQ ID NO: 602194 - RNA, 22 nt, Human
aggggagcgacauuccgugccg

SEQ ID NO: 602195 - RNA, 22 nt, Human
gccugggagugcacagugaggu

SEQ ID NO: 602196 - RNA, 20 nt, Human
ucucugagcuucucuugggg

SEQ ID NO: 602197 - RNA, 17 nt, Human
agugugugaaauggugg

SEQ ID NO: 602198 - RNA, 22 nt, Human
ugggccugaguuugggaacugg

SEQ ID NO: 602199 - RNA, 22 nt, Human
aggcugccuguuccaaucuccu

SEQ ID NO: 602200 - RNA, 22 nt, Human
cugguccaguggaugcugaggg

SEQ ID NO: 602201 - RNA, 18 nt, Human
uaguggaacugcucuggg

SEQ ID NO: 602202 - RNA, 22 nt, Human
agucaccaacaugguucccagg

SEQ ID NO: 602203 - RNA, 22 nt, Human
ugucacaguuuguacuuuauag

SEQ ID NO: 602204 - RNA, 22 nt, Human
cuggagggauguaggguguauu

SEQ ID NO: 602205 - RNA, 22 nt, Human
cugagcugguucucuugugaaa

SEQ ID NO: 602206 - RNA, 22 nt, Human
gaaauacaggaaugccacacag

SEQ ID NO: 602207 - RNA, 22 nt, Human
gcaggucuagaagcugccucug

SEQ ID NO: 602208 - RNA, 22 nt, Human
cagaguggaguuuuucagcggg

SEQ ID NO: 602209 - RNA, 22 nt, Human
agaggcugagaaacccucuucu

SEQ ID NO: 602210 - RNA, 22 nt, Human
uacaauaugugaacuuuggugu

SEQ ID NO: 602211 - RNA, 22 nt, Human
ugugcccagacugccucaguga

SEQ ID NO: 602212 - RNA, 22 nt, Human
ucacugcuuuguuuacaacuau

SEQ ID NO: 602213 - RNA, 22 nt, Human
guccuggggauuauagaguguu

SEQ ID NO: 602214 - RNA, 17 nt, Human
acagggcagaaacagcu

SEQ ID NO: 602215 - RNA, 23 nt, Human
uaucuguauuuguucacugcugu

SEQ ID NO: 602216 - RNA, 22 nt, Human
ugagaugguucacagagaaggc

SEQ ID NO: 602217 - RNA, 20 nt, Human
ucccucccuccagcucuggg

SEQ ID NO: 602218 - RNA, 22 nt, Human
gcugccuccgccggcuccacag

SEQ ID NO: 602219 - RNA, 23 nt, Human
gagagagauugcuaaaccacucc

SEQ ID NO: 602220 - RNA, 22 nt, Human
gaacauuuccagaaaggaacua

SEQ ID NO: 602221 - RNA, 19 nt, Human
auccuggguccuccagcug

SEQ ID NO: 602222 - RNA, 21 nt, Human
gggguauaccuaugagauagu

SEQ ID NO: 602223 - RNA, 23 nt, Human
gcccucccucccagguggguguu

SEQ ID NO: 602224 - RNA, 22 nt, Human
gggcugagucugcugccuguca

SEQ ID NO: 602225 - RNA, 21 nt, Human
uggugccuucagcugucuuuu

SEQ ID NO: 602226 - RNA, 22 nt, Human
ucaguggauugacaugaaaaag

SEQ ID NO: 602227 - RNA, 22 nt, Human
uggagcagagaugggagcccaa

SEQ ID NO: 602228 - RNA, 22 nt, Human
guuuuuauauccuguggagugu

SEQ ID NO: 602229 - RNA, 22 nt, Human
ucugaggucacagauuucaaga

SEQ ID NO: 602230 - RNA, 21 nt, Human
gccuggcucucacuggccugg

SEQ ID NO: 602231 - RNA, 22 nt, Human
uaaguccaaggguaugaguugg

SEQ ID NO: 602232 - RNA, 22 nt, Human
ggugggcaacauuuggccugag

SEQ ID NO: 602233 - RNA, 22 nt, Human
caaucccaucaccaucugcucu

SEQ ID NO: 602234 - RNA, 22 nt, Human
ucugguuucccaguuccuccgu

SEQ ID NO: 602235 - RNA, 22 nt, Human
acugcagccuugaacucugggc

SEQ ID NO: 602236 - RNA, 21 nt, Human
uuuuuucuugcgugaggccug

SEQ ID NO: 602237 - RNA, 22 nt, Human
cauuuauuaguuaguucgaugu

SEQ ID NO: 602238 - RNA, 22 nt, Human
cuggcuggccggaggcaucccu

SEQ ID NO: 602239 - RNA, 22 nt, Human
cagaacugggcagggagcagag

SEQ ID NO: 602240 - RNA, 22 nt, Human
uucuguaggcauggaacaggga

SEQ ID NO: 602241 - RNA, 22 nt, Human
agacagcugcucgcagagcuau

SEQ ID NO: 602242 - RNA, 22 nt, Human
cugcuuuagacggcuuucgcug

SEQ ID NO: 602243 - RNA, 22 nt, Human
uggaggcauaggccugggcccu

SEQ ID NO: 602244 - RNA, 19 nt, Human
caagacaaagcccaucuuc

SEQ ID NO: 602245 - RNA, 22 nt, Human
uuuuguuuguguccacugcagu

SEQ ID NO: 602246 - RNA, 22 nt, Human
uaguggggccugggaggguucc

SEQ ID NO: 602247 - RNA, 22 nt, Human
aacaggaaacaaguuguuagga

SEQ ID NO: 602248 - RNA, 22 nt, Human
uagaaacauauaggauggcagg

SEQ ID NO: 602249 - RNA, 22 nt, Human
uacuguacugucuuuuuugcug

SEQ ID NO: 602250 - RNA, 22 nt, Human
cgugccuuggucccaaccccca

SEQ ID NO: 602251 - RNA, 22 nt, Human
gcuguacaucacaauuugcugu

SEQ ID NO: 602252 - RNA, 19 nt, Human
ugcugacugggccucaccg

SEQ ID NO: 602253 - RNA, 22 nt, Human
gcugccacauuuucaggacuaa

SEQ ID NO: 602254 - RNA, 22 nt, Human
ccccagccagcaggaccucuga

SEQ ID NO: 602255 - RNA, 22 nt, Human
auuccacagcuacaucaaucua

SEQ ID NO: 602256 - RNA, 22 nt, Human
gggcuucuugccauggggacgg

SEQ ID NO: 602257 - RNA, 22 nt, Human
ucauaaaguuaucaccaaaucc

SEQ ID NO: 602258 - RNA, 22 nt, Human
caucuucagguguuuuccauca

SEQ ID NO: 602259 - RNA, 22 nt, Human
gcaguguuaaugcgaguguuca

SEQ ID NO: 602260 - RNA, 22 nt, Human
agcacaggaacauggagauggg

SEQ ID NO: 602261 - RNA, 22 nt, Human
auuguaagagguuuggcugugu

SEQ ID NO: 602262 - RNA, 22 nt, Human
caggucuguuuccaucagugcu

SEQ ID NO: 602263 - RNA, 22 nt, Human
uuuaauuugaaaugaguaaccc

SEQ ID NO: 602264 - RNA, 22 nt, Human
gacagcaggugcuugggaaagg

SEQ ID NO: 602265 - RNA, 22 nt, Human
uaagaagguaguuuccaaguca

SEQ ID NO: 602266 - RNA, 22 nt, Human
cuagucacgucuuucaguuacc

SEQ ID NO: 602267 - RNA, 22 nt, Human
guuaaauaaccucauguccguu

SEQ ID NO: 602268 - RNA, 23 nt, Human
uucuucucaauuaguugauucag

SEQ ID NO: 602269 - RNA, 22 nt, Human
ugucacuucaggaaugcaggga

SEQ ID NO: 602270 - RNA, 22 nt, Human
acucucucacagcuuggcugau

SEQ ID NO: 602271 - RNA, 22 nt, Human
cagugcugggcagaggagagcg

SEQ ID NO: 602272 - RNA, 22 nt, Human
gaggcucagagggagcaugguc

SEQ ID NO: 602273 - RNA, 22 nt, Human
gacaugugcugucucuuaaauu

SEQ ID NO: 602274 - RNA, 22 nt, Human
agagaacacgugcaucugcaau

SEQ ID NO: 602275 - RNA, 22 nt, Human
aguguuugggggccuuguaaca

SEQ ID NO: 602276 - RNA, 22 nt, Human
aagcaauuguccugucucuaca

SEQ ID NO: 602277 - RNA, 22 nt, Human
cacaccuguaauaccagcuacu

SEQ ID NO: 602278 - RNA, 22 nt, Human
aaagcaguauaaguaacggaag

SEQ ID NO: 602279 - RNA, 22 nt, Human
agauucauuaggagacauucag

SEQ ID NO: 602280 - RNA, 22 nt, Human
cugcacagcugggcaagauaua

SEQ ID NO: 602281 - RNA, 22 nt, Human
augugugugugcgcgcgcagga

SEQ ID NO: 602282 - RNA, 22 nt, Human
uaacauugaguccacuaaacag

SEQ ID NO: 602283 - RNA, 22 nt, Human
aaagcaauagguuaggucaaga

SEQ ID NO: 602284 - RNA, 23 nt, Human
aacugucuugcaagugugauacc

SEQ ID NO: 602285 - RNA, 22 nt, Human
ucugggcuugguuagggcuguu

SEQ ID NO: 602286 - RNA, 22 nt, Human
ucucauugguauauacaugugu

SEQ ID NO: 602287 - RNA, 22 nt, Human
gaggccugaggcugccuggagc

SEQ ID NO: 602288 - RNA, 22 nt, Human
cagagggaucaucuuccugaag

SEQ ID NO: 602289 - RNA, 22 nt, Human
cacugcccuuacaugcccugca

SEQ ID NO: 602290 - RNA, 22 nt, Human
ccugcagacacuuguccagcaa

SEQ ID NO: 602291 - RNA, 22 nt, Human
aguguacaucagaacauaucaa

SEQ ID NO: 602292 - RNA, 22 nt, Human
aaagacuuucaccuagcaaaga

SEQ ID NO: 602293 - RNA, 22 nt, Human
aacaucuuugccaaauugcuau

SEQ ID NO: 602294 - RNA, 22 nt, Human
ccagcagcuuuauuggcucucc

SEQ ID NO: 602295 - RNA, 22 nt, Human
gugggcagugguuugcgcgguc

SEQ ID NO: 602296 - RNA, 22 nt, Human
cauuuacacuucuaaccacaag

SEQ ID NO: 602297 - RNA, 22 nt, Human
cucuuauuccuacaguaacagg

SEQ ID NO: 602298 - RNA, 22 nt, Human
ggcaggugggaacccuccccac

SEQ ID NO: 602299 - RNA, 22 nt, Human
acacaugugucugcaugcagug

SEQ ID NO: 602300 - RNA, 22 nt, Human
ucauggauggccgggaggugau

SEQ ID NO: 602301 - RNA, 22 nt, Human
cugaggccucucuccugggcuu

SEQ ID NO: 602302 - RNA, 22 nt, Human
caaagucuucaguugauucuga

SEQ ID NO: 602303 - RNA, 22 nt, Human
gccuuggccuuccuaggccuga

SEQ ID NO: 602304 - RNA, 22 nt, Human
uugggcagaggccaggaggaug

SEQ ID NO: 602305 - RNA, 22 nt, Human
uucuuuccuugccucagugaag

SEQ ID NO: 602306 - RNA, 22 nt, Human
cugcugacagcccugcuucagg

SEQ ID NO: 602307 - RNA, 22 nt, Human
uuccuuagauccuucaaucacg

SEQ ID NO: 602308 - RNA, 22 nt, Human
gggagaagaaugugucaauugu

SEQ ID NO: 602309 - RNA, 22 nt, Human
uggcacaugguuaaucauaauu

SEQ ID NO: 602310 - RNA, 22 nt, Human
uaccugcagcgggaauccauua

SEQ ID NO: 602311 - RNA, 22 nt, Human
agcucugggguagggcccaaca

SEQ ID NO: 602312 - RNA, 18 nt, Human
uaaucuuacagacaggau

SEQ ID NO: 602313 - RNA, 22 nt, Human
gcccacaguuaaugggggcucu

SEQ ID NO: 602314 - RNA, 22 nt, Human
cugcagccuccugggguacaug

SEQ ID NO: 602315 - RNA, 22 nt, Human
cagccaaaugagucauaaaugu

SEQ ID NO: 602316 - RNA, 22 nt, Human
accauggaccauaguuccuauu

SEQ ID NO: 602317 - RNA, 22 nt, Human
uuuccauauuuaaucaaaauaa

SEQ ID NO: 602318 - RNA, 23 nt, Human
agcuggguggccugcgugaagcu

SEQ ID NO: 602319 - RNA, 22 nt, Human
aggcugaguuucucauucucgc

SEQ ID NO: 602320 - RNA, 22 nt, Human
aucugaaaguuuagaauucuug

SEQ ID NO: 602321 - RNA, 22 nt, Human
uccagcuuauagguagauuuaa

SEQ ID NO: 602322 - RNA, 20 nt, Human
ugggguccuggaggggaucc

SEQ ID NO: 602323 - RNA, 22 nt, Human
uuucagaggugcuuggaaugcu

SEQ ID NO: 602324 - RNA, 22 nt, Human
uugucugaagucacacagaugc

SEQ ID NO: 602325 - RNA, 22 nt, Human
caggcucacuguaaggucagcu

SEQ ID NO: 602326 - RNA, 22 nt, Human
uuggggcaccuccccagcauuu

SEQ ID NO: 602327 - RNA, 22 nt, Human
uaucagcaucuccucaaagaua

SEQ ID NO: 602328 - RNA, 22 nt, Human
acugagguauaauugacauaac

SEQ ID NO: 602329 - RNA, 20 nt, Human
gggcccugggauucagagca

SEQ ID NO: 602330 - RNA, 22 nt, Human
ugcugaaugggauauguugagc

SEQ ID NO: 602331 - RNA, 22 nt, Human
ucuucuuccuccacagggccca

SEQ ID NO: 602332 - RNA, 22 nt, Human
agaaaguacagaugagacacuu

SEQ ID NO: 602333 - RNA, 22 nt, Human
agggccagucguguauuacugu

SEQ ID NO: 602334 - RNA, 22 nt, Human
uucuacauauauuuuucucacu

SEQ ID NO: 602335 - RNA, 22 nt, Human
cagugggaaugaaguggaggcc

SEQ ID NO: 602336 - RNA, 22 nt, Human
uuacuguugguguauccauagc

SEQ ID NO: 602337 - RNA, 23 nt, Human
uagaacaucggugucuuggagca

SEQ ID NO: 602338 - RNA, 22 nt, Human
gacagacauuuccugauccaau

SEQ ID NO: 602339 - RNA, 22 nt, Human
cuccuggcccugagcucccagg

SEQ ID NO: 602340 - RNA, 22 nt, Human
ccaagcaugggguucaguagga

SEQ ID NO: 602341 - RNA, 21 nt, Human
auaauguacaaaaacugucuu

SEQ ID NO: 602342 - RNA, 22 nt, Human
uuucuccuaacucaaauuuaag

SEQ ID NO: 602343 - RNA, 22 nt, Human
aaaaaguauuggccaugguuga

SEQ ID NO: 602344 - RNA, 22 nt, Human
gacuuuauuacuaacccuguga

SEQ ID NO: 602345 - RNA, 22 nt, Human
ugccauauugcaaagugucugc

SEQ ID NO: 602346 - RNA, 22 nt, Human
gaggcacugcugggccccugua

SEQ ID NO: 602347 - RNA, 22 nt, Human
gcagccagaagacucagaacaa

SEQ ID NO: 602348 - RNA, 22 nt, Human
cagggcaguaacgggaacaucu

SEQ ID NO: 602349 - RNA, 22 nt, Human
uccucuggcccagcugccucug

SEQ ID NO: 602350 - RNA, 22 nt, Human
aucugucuuuuauucaugagcu

SEQ ID NO: 602351 - RNA, 21 nt, Human
uccuguaagcuuggguggcuc

SEQ ID NO: 602352 - RNA, 22 nt, Human
ucucuggcccuguuuucuaucu

SEQ ID NO: 602353 - RNA, 22 nt, Human
guuuacaaauauuuuaaauggu

SEQ ID NO: 602354 - RNA, 23 nt, Human
ccugggcauuggcugcagcuucu

SEQ ID NO: 602355 - RNA, 22 nt, Human
ccuggccucagccuagggcuga

SEQ ID NO: 602356 - RNA, 22 nt, Human
ggggcaggagguguucucuuuu

SEQ ID NO: 602357 - RNA, 20 nt, Human
agggcugagaagggacuagc

SEQ ID NO: 602358 - RNA, 22 nt, Human
ucugaaagagaguacauacagu

SEQ ID NO: 602359 - RNA, 22 nt, Human
agagaacagccuccuagagaaa

SEQ ID NO: 602360 - RNA, 22 nt, Human
aggccagggucccacacucgca

SEQ ID NO: 602361 - RNA, 20 nt, Human
ugaaaggugggaauuguggg

SEQ ID NO: 602362 - RNA, 22 nt, Human
aagaaugauuacaaagcaacga

SEQ ID NO: 602363 - RNA, 22 nt, Human
agccagcaggugagugcagccu

SEQ ID NO: 602364 - RNA, 22 nt, Human
ucacauuuauuucaaaguuacu

SEQ ID NO: 602365 - RNA, 22 nt, Human
auuuauuaccucggaguuucug

SEQ ID NO: 602366 - RNA, 22 nt, Human
gggacucugagagccugagggu

SEQ ID NO: 602367 - RNA, 22 nt, Human
agaugagggguagaaaggacuu

SEQ ID NO: 602368 - RNA, 22 nt, Human
uagaaaauguuccacugccauu

SEQ ID NO: 602369 - RNA, 18 nt, Human
uccaggucccaggggaag

SEQ ID NO: 602370 - RNA, 22 nt, Human
uagagguagaguuacauuaguc

SEQ ID NO: 602371 - RNA, 22 nt, Human
acagcaauaggaaauacuugca

SEQ ID NO: 602372 - RNA, 22 nt, Human
uugucugaggguuugagagaau

SEQ ID NO: 602373 - RNA, 22 nt, Human
ugccucugugggccuuccuggc

SEQ ID NO: 602374 - RNA, 22 nt, Human
gcagcuggacccacacggcuua

SEQ ID NO: 602375 - RNA, 23 nt, Human
uccagccucuugcucucacaugc

SEQ ID NO: 602376 - RNA, 22 nt, Human
uugcagggcaucuaugucuggu

SEQ ID NO: 602377 - RNA, 23 nt, Human
aaaugacauaugguuucugaagg

SEQ ID NO: 602378 - RNA, 22 nt, Human
cugcuuuauagggcuuccaugu

SEQ ID NO: 602379 - RNA, 22 nt, Human
auggagggugucagagagcgaa

SEQ ID NO: 602380 - RNA, 22 nt, Human
agaagcugacagaugcagcagg

SEQ ID NO: 602381 - RNA, 21 nt, Human
uggcugaguggaugcaugaau

SEQ ID NO: 602382 - RNA, 22 nt, Human
ccucccacauccuagcucugcu

SEQ ID NO: 602383 - RNA, 22 nt, Human
cucuuuagucuguguggagaag

SEQ ID NO: 602384 - RNA, 21 nt, Human
ugcaaugcauugacagcagca

SEQ ID NO: 602385 - RNA, 22 nt, Human
cugggagagguggugggaagua

SEQ ID NO: 602386 - RNA, 22 nt, Human
uccugggcugugugccacucug

SEQ ID NO: 602387 - RNA, 22 nt, Human
aggauggcuugcaggaggcugu

SEQ ID NO: 602388 - RNA, 22 nt, Human
uugcuaaauuuauuuucgaaca

SEQ ID NO: 602389 - RNA, 22 nt, Human
aacaugcuuugauaaauaaaag

SEQ ID NO: 602390 - RNA, 22 nt, Human
ugguccaguagcagggauacca

SEQ ID NO: 602391 - RNA, 22 nt, Human
ggcucccugggugcuccugcuc

SEQ ID NO: 602392 - RNA, 22 nt, Human
cucucuggacuugaguaucagc

SEQ ID NO: 602393 - RNA, 22 nt, Human
gggcgggguggcucaugccugu

SEQ ID NO: 602394 - RNA, 22 nt, Human
uuuguaccugugggaauacaga

SEQ ID NO: 602395 - RNA, 22 nt, Human
gggccagugagucgggagagcu

SEQ ID NO: 602396 - RNA, 22 nt, Human
auuuccuaauuuaugcaggagu

SEQ ID NO: 602397 - RNA, 22 nt, Human
ucugaggcugucucugggcucc

SEQ ID NO: 602398 - RNA, 23 nt, Human
ugcuccagguacagaacuccagg

SEQ ID NO: 602399 - RNA, 22 nt, Human
ccugggcagccugcucaaggac

SEQ ID NO: 602400 - RNA, 22 nt, Human
agacagugcuaucccaucugug

SEQ ID NO: 602401 - RNA, 22 nt, Human
ggccaugcaggucagagguggg

SEQ ID NO: 602402 - RNA, 22 nt, Human
uuuccuacccuuccaggcagag

SEQ ID NO: 602403 - RNA, 22 nt, Human
aggcugugagcaagaacaccua

SEQ ID NO: 602404 - RNA, 22 nt, Human
gcugcuuuagaauugaaacaga

SEQ ID NO: 602405 - RNA, 22 nt, Human
uuuucaggcugauuuguguuag

SEQ ID NO: 602406 - RNA, 22 nt, Human
ucugaggccuuggcagcuaagg

SEQ ID NO: 602407 - RNA, 22 nt, Human
gauagggcuucacuaggcggag

SEQ ID NO: 602408 - RNA, 22 nt, Human
acauucuaugaagauaauuuua

SEQ ID NO: 602409 - RNA, 22 nt, Human
ccuucucugcagguaguuggcu

SEQ ID NO: 602410 - RNA, 22 nt, Human
ccagguggcccugcccuacucu

SEQ ID NO: 602411 - RNA, 21 nt, Human
cagaucuguagguacuaccau

SEQ ID NO: 602412 - RNA, 22 nt, Human
ugguggcagugagaaggagagg

SEQ ID NO: 602413 - RNA, 22 nt, Human
ggcagguguggugaccagagau

SEQ ID NO: 602414 - RNA, 22 nt, Human
ucugucuuugagaucucagccu

SEQ ID NO: 602415 - RNA, 22 nt, Human
ugaaauguugguaauuuuauau

SEQ ID NO: 602416 - RNA, 22 nt, Human
uuuauuguguugaaacugaauu

SEQ ID NO: 602417 - RNA, 22 nt, Human
uugaaagucacaauggcauuaa

SEQ ID NO: 602418 - RNA, 22 nt, Human
acuuuguugaugaaauaguuuu

SEQ ID NO: 602419 - RNA, 22 nt, Human
uggcagcugcguuguguuucug

SEQ ID NO: 602420 - RNA, 22 nt, Human
aguccagagaggaggcugugug

SEQ ID NO: 602421 - RNA, 22 nt, Human
ucacccaggcuggacugcagug

SEQ ID NO: 602422 - RNA, 22 nt, Human
caggaugugaggaggccauuug

SEQ ID NO: 602423 - RNA, 22 nt, Human
uguaaaauaauucuccauguuu

SEQ ID NO: 602424 - RNA, 22 nt, Human
uugagguaauaaacagccauuc

SEQ ID NO: 602425 - RNA, 22 nt, Human
aaaacuguaucuucuugggacu

SEQ ID NO: 602426 - RNA, 22 nt, Human
uccuggaggcaaaugaagacuc

SEQ ID NO: 602427 - RNA, 22 nt, Human
cagggccagggcuauggugaag

SEQ ID NO: 602428 - RNA, 22 nt, Human
uucaaacuaguuaaaagucaga

SEQ ID NO: 602429 - RNA, 22 nt, Human
aaggccaaaguuuucaggcuaa

SEQ ID NO: 602430 - RNA, 22 nt, Human
gauggcaggcaggugaguagag

SEQ ID NO: 602431 - RNA, 22 nt, Human
aaaaguaauugaugcaaucgua

SEQ ID NO: 602432 - RNA, 22 nt, Human
cucagaaagugacaggggggug

SEQ ID NO: 602433 - RNA, 22 nt, Human
agccaggguaagguacuuagua

SEQ ID NO: 602434 - RNA, 22 nt, Human
aggggcucuaaagaucauggaa

SEQ ID NO: 602435 - RNA, 22 nt, Human
cauuuguucugauuucaaaagg

SEQ ID NO: 602436 - RNA, 22 nt, Human
aaagccagcucugagcugcacc

SEQ ID NO: 602437 - RNA, 22 nt, Human
ucugggcagaagcagugcaaag

SEQ ID NO: 602438 - RNA, 22 nt, Human
ccaggugggcgugucuucaccu

SEQ ID NO: 602439 - RNA, 22 nt, Human
uguuuuuaaaauguccugguua

SEQ ID NO: 602440 - RNA, 22 nt, Human
gucuuauuaaaaugcaguuucu

SEQ ID NO: 602441 - RNA, 19 nt, Human
cccucaggucugagcaguc

SEQ ID NO: 602442 - RNA, 22 nt, Human
cugugaauuaaguauuguuauc

SEQ ID NO: 602443 - RNA, 22 nt, Human
uagcuuuguuuaucaaggggca

SEQ ID NO: 602444 - RNA, 22 nt, Human
ccagaggugaacaggaggcugu

SEQ ID NO: 602445 - RNA, 22 nt, Human
aaauuagaccagggcuccugga

SEQ ID NO: 602446 - RNA, 20 nt, Human
uguccccaccaaaauuucau

SEQ ID NO: 602447 - RNA, 22 nt, Human
agcuggagaugcccagcaccgg

SEQ ID NO: 602448 - RNA, 22 nt, Human
ucucuuaauaaguaaauacuga

SEQ ID NO: 602449 - RNA, 22 nt, Human
aucuuaaacagaggaaugacuu

SEQ ID NO: 602450 - RNA, 22 nt, Human
uuggagugacagaugaggaaac

SEQ ID NO: 602451 - RNA, 22 nt, Human
aaugaaugugauuaacuucaag

SEQ ID NO: 602452 - RNA, 22 nt, Human
aggggcacuucucaggcugugg

SEQ ID NO: 602453 - RNA, 22 nt, Human
acuuagaauuaaauauuuuugg

SEQ ID NO: 602454 - RNA, 22 nt, Human
uacaagaauuucuuucugguug

SEQ ID NO: 602455 - RNA, 22 nt, Human
ggcaccagcacuugggauggcu

SEQ ID NO: 602456 - RNA, 22 nt, Human
uuccccaggggcuccugccuuu

SEQ ID NO: 602457 - RNA, 22 nt, Human
cuccuccagcucucccuggggg

SEQ ID NO: 602458 - RNA, 22 nt, Human
agugugaguuacaaagugugaa

SEQ ID NO: 602459 - RNA, 22 nt, Human
aagaacauugauauugucuaug

SEQ ID NO: 602460 - RNA, 22 nt, Human
ugagcaguaggucugaauagug

SEQ ID NO: 602461 - RNA, 22 nt, Human
gggcucugguccugaacugaag

SEQ ID NO: 602462 - RNA, 22 nt, Human
cuuccucuguguccugggcuug

SEQ ID NO: 602463 - RNA, 22 nt, Human
gcagggcugggugggagacaga

SEQ ID NO: 602464 - RNA, 22 nt, Human
aggaaggcugaucacugcuugu

SEQ ID NO: 602465 - RNA, 22 nt, Human
ugaagacucagaagcuaagaua

SEQ ID NO: 602466 - RNA, 22 nt, Human
gaauagaugaaagugucucuua

SEQ ID NO: 602467 - RNA, 22 nt, Human
agaaagacgugaugaagaagua

SEQ ID NO: 602468 - RNA, 22 nt, Human
caauagauguuuuugcuuacca

SEQ ID NO: 602469 - RNA, 22 nt, Human
ucagugcugaguagcgugcacc

SEQ ID NO: 602470 - RNA, 22 nt, Human
uaggccaacguggaagggucca

SEQ ID NO: 602471 - RNA, 22 nt, Human
gcaggcugugguauguugggca

SEQ ID NO: 602472 - RNA, 22 nt, Human
auuguacuuuuauuacauguag

SEQ ID NO: 602473 - RNA, 22 nt, Human
ccugaggacacacgcugcagga

SEQ ID NO: 602474 - RNA, 22 nt, Human
agaugaauugauguuggacaga

SEQ ID NO: 602475 - RNA, 22 nt, Human
gggcacuguguucagagugcag

SEQ ID NO: 602476 - RNA, 22 nt, Human
augcaaaaacugcacuuacgcu

SEQ ID NO: 602477 - RNA, 22 nt, Human
ggaagccaugagggacaguucu

SEQ ID NO: 602478 - RNA, 20 nt, Human
uucugggaauuggguagcug

SEQ ID NO: 602479 - RNA, 22 nt, Human
uaggcagggauuaggguugauu

SEQ ID NO: 602480 - RNA, 22 nt, Human
gccaaagugcugcucuuuacca

SEQ ID NO: 602481 - RNA, 22 nt, Human
uccucagcuuugguuuacucau

SEQ ID NO: 602482 - RNA, 22 nt, Human
ugccuuuugaagccucacaggu

SEQ ID NO: 602483 - RNA, 20 nt, Human
ucucaggcccccuccuugcu

SEQ ID NO: 602484 - RNA, 22 nt, Human
ggcagcagaacuggcccuguau

SEQ ID NO: 602485 - RNA, 22 nt, Human
auaacugccugaugacucucaa

SEQ ID NO: 602486 - RNA, 22 nt, Human
aggugccugggagcucccugag

SEQ ID NO: 602487 - RNA, 22 nt, Human
aacuugguaccaccuucugaag

SEQ ID NO: 602488 - RNA, 22 nt, Human
aaauuccaccagaaucaguaau

SEQ ID NO: 602489 - RNA, 22 nt, Human
ggagauguagugucacuggacu

SEQ ID NO: 602490 - RNA, 22 nt, Human
gccugccucaaaaucccaguuc

SEQ ID NO: 602491 - RNA, 22 nt, Human
aggcugccucgugagcucgcug

SEQ ID NO: 602492 - RNA, 22 nt, Human
auuuuacuucauuugaaaugcc

SEQ ID NO: 602493 - RNA, 22 nt, Human
guuucucacaaggcugcaaucc

SEQ ID NO: 602494 - RNA, 20 nt, Human
aagauucugauuuguagcgu

SEQ ID NO: 602495 - RNA, 22 nt, Human
cacagagaacugugggagugug

SEQ ID NO: 602496 - RNA, 22 nt, Human
ccaggcucugcgcuggacaugg

SEQ ID NO: 602497 - RNA, 22 nt, Human
aaugcuuccaaaauaccaagcc

SEQ ID NO: 602498 - RNA, 22 nt, Human
aggcugugcauuuuggagggcc

SEQ ID NO: 602499 - RNA, 23 nt, Human
gcuggcuggcaguaaagguuguu

SEQ ID NO: 602500 - RNA, 22 nt, Human
acauacauggauucauggauuc

SEQ ID NO: 602501 - RNA, 22 nt, Human
aggcccuauucaauggggccca

SEQ ID NO: 602502 - RNA, 22 nt, Human
ggcaggaaguagcagucugagc

SEQ ID NO: 602503 - RNA, 18 nt, Human
ggccugcagugaagcaag

SEQ ID NO: 602504 - RNA, 22 nt, Human
caggcaccccaggugagcacug

SEQ ID NO: 602505 - RNA, 18 nt, Human
cuccugggcugcagaugc

SEQ ID NO: 602506 - RNA, 22 nt, Human
ugcuuuaucaaagcuauaguga

SEQ ID NO: 602507 - RNA, 22 nt, Human
gccagagguucaacaacugucu

SEQ ID NO: 602508 - RNA, 22 nt, Human
ugucccagggaaggcccagcac

SEQ ID NO: 602509 - RNA, 22 nt, Human
aggugccagaugcacagcugaa

SEQ ID NO: 602510 - RNA, 22 nt, Human
acaucaugagagacuuaaauug

SEQ ID NO: 602511 - RNA, 18 nt, Human
ucucuuuccucaguggag

SEQ ID NO: 602512 - RNA, 23 nt, Human
ucuguacaauugagaagagaaca

SEQ ID NO: 602513 - RNA, 22 nt, Human
augcugcagcugcaggaucaga

SEQ ID NO: 602514 - RNA, 22 nt, Human
gccagguguaguggccacaccu

SEQ ID NO: 602515 - RNA, 22 nt, Human
aaaaagucugcaaaggagguug

SEQ ID NO: 602516 - RNA, 22 nt, Human
agauuuuauagauaauuuccca

SEQ ID NO: 602517 - RNA, 22 nt, Human
auuucagauucagaaauguagg

SEQ ID NO: 602518 - RNA, 22 nt, Human
gaaaauaguucaucacaaugau

SEQ ID NO: 602519 - RNA, 22 nt, Human
cuucucugacagucuguuucac

SEQ ID NO: 602520 - RNA, 22 nt, Human
uuggcaaugaucucaaucuucu

SEQ ID NO: 602521 - RNA, 22 nt, Human
cuagagaagagguuaagcauga

SEQ ID NO: 602522 - RNA, 22 nt, Human
uuuuaagaacuguucugugcuu

SEQ ID NO: 602523 - RNA, 22 nt, Human
gguggaaggcagcagucucagg

SEQ ID NO: 602524 - RNA, 22 nt, Human
caggguggggcuggcuaucaaa

SEQ ID NO: 602525 - RNA, 22 nt, Human
gcucuccaggucucaugcacug

SEQ ID NO: 602526 - RNA, 22 nt, Human
gcccuucaguuacuccuugaug

SEQ ID NO: 602527 - RNA, 22 nt, Human
uaucuguauccccaucuagcua

SEQ ID NO: 602528 - RNA, 22 nt, Human
auguuuuugagauacaaacaga

SEQ ID NO: 602529 - RNA, 22 nt, Human
agcugagcucaggcugauguaa

SEQ ID NO: 602530 - RNA, 22 nt, Human
cacagcaaagacacucucaacu

SEQ ID NO: 602531 - RNA, 22 nt, Human
aagcagcuuaaauuagagccug

SEQ ID NO: 602532 - RNA, 22 nt, Human
uagaaacacagaucugguguca

SEQ ID NO: 602533 - RNA, 22 nt, Human
gcuggcuucccuaccugcaccu

SEQ ID NO: 602534 - RNA, 22 nt, Human
cuaggccagagagaccucauga

SEQ ID NO: 602535 - RNA, 22 nt, Human
cuugauccuaggauggaaggga

SEQ ID NO: 602536 - RNA, 23 nt, Human
uugacaguaggugguuuucauug

SEQ ID NO: 602537 - RNA, 23 nt, Human
uucauucaaaaggaaaagucaug

SEQ ID NO: 602538 - RNA, 22 nt, Human
gaagccacagagauuguggggg

SEQ ID NO: 602539 - RNA, 22 nt, Human
uggaggagaacucccuggcuac

SEQ ID NO: 602540 - RNA, 22 nt, Human
gcccacaguacgaggcucaggc

SEQ ID NO: 602541 - RNA, 22 nt, Human
augaggcacaucacagccaaug

SEQ ID NO: 602542 - RNA, 22 nt, Human
cuccagcuucccucagcugugg

SEQ ID NO: 602543 - RNA, 22 nt, Human
ccagcucuaaacggcucugugg

SEQ ID NO: 602544 - RNA, 22 nt, Human
cccagcagaaucugaugagggc

SEQ ID NO: 602545 - RNA, 22 nt, Human
aggcggugugcuuugcagagca

SEQ ID NO: 602546 - RNA, 22 nt, Human
auacagcuuacaguucuaaugc

SEQ ID NO: 602547 - RNA, 22 nt, Human
cagaggcuguguaggcagacug

SEQ ID NO: 602548 - RNA, 22 nt, Human
auccuucaaaaggaauagcagg

SEQ ID NO: 602549 - RNA, 22 nt, Human
ugugggaagagcaguggcagca

SEQ ID NO: 602550 - RNA, 22 nt, Human
ugcuuagaaucuggacuuguug

SEQ ID NO: 602551 - RNA, 20 nt, Human
ugguccaggaccuggugucc

SEQ ID NO: 602552 - RNA, 22 nt, Human
cugcaguuggauaaagauacuu

SEQ ID NO: 602553 - RNA, 22 nt, Human
aauuagcugucaaugaggaucu

SEQ ID NO: 602554 - RNA, 22 nt, Human
ugucuucaggaguaaauaucau

SEQ ID NO: 602555 - RNA, 22 nt, Human
ggucccaggcugcgggcuggug

SEQ ID NO: 602556 - RNA, 22 nt, Human
uccucugguuauacuugcaccc

SEQ ID NO: 602557 - RNA, 21 nt, Human
cggaaacucggcucugguucc

SEQ ID NO: 602558 - RNA, 22 nt, Human
ugcugccacauuuaaagagggg

SEQ ID NO: 602559 - RNA, 22 nt, Human
ugaaagaaacagguauauuggg

SEQ ID NO: 602560 - RNA, 22 nt, Human
uggcugagguaacuaugaauaa

SEQ ID NO: 602561 - RNA, 22 nt, Human
agucuccuuaaauauuucccag

SEQ ID NO: 602562 - RNA, 22 nt, Human
gacuuuauuuccuuauuuguga

SEQ ID NO: 602563 - RNA, 22 nt, Human
ccugggcuucugucuagauguu

SEQ ID NO: 602564 - RNA, 22 nt, Human
gucugggcuuagggacauggca

SEQ ID NO: 602565 - RNA, 22 nt, Human
aguguccugugucccagacugu

SEQ ID NO: 602566 - RNA, 22 nt, Human
cacagugugggcauggugccug

SEQ ID NO: 602567 - RNA, 22 nt, Human
cuucugggcagaaguuuugaga

SEQ ID NO: 602568 - RNA, 22 nt, Human
cagaaggcaaggccugccacgc

SEQ ID NO: 602569 - RNA, 22 nt, Human
acugaagagaagcauuuucugc

SEQ ID NO: 602570 - RNA, 22 nt, Human
gcacuuuggaaaauuuugaguu

SEQ ID NO: 602571 - RNA, 22 nt, Human
agaaacugcagcucagagaagu

SEQ ID NO: 602572 - RNA, 22 nt, Human
uccuucuccuccuugagugaca

SEQ ID NO: 602573 - RNA, 22 nt, Human
ggugaggggcuccucugcccgg

SEQ ID NO: 602574 - RNA, 22 nt, Human
gggaaggacauucugggcucag

SEQ ID NO: 602575 - RNA, 22 nt, Human
uagauuuuacuucugucauuac

SEQ ID NO: 602576 - RNA, 22 nt, Human
aguggguacugggcaggcagag

SEQ ID NO: 602577 - RNA, 22 nt, Human
uagguaagauguuaacagcuga

SEQ ID NO: 602578 - RNA, 22 nt, Human
cagcccucagguccucagcagc

SEQ ID NO: 602579 - RNA, 22 nt, Human
cacauuuaaaaaauccacgauc

SEQ ID NO: 602580 - RNA, 22 nt, Human
uauuagaggaaccaagguggag

SEQ ID NO: 602581 - RNA, 22 nt, Human
agaagagcccuuuaagggggaa

SEQ ID NO: 602582 - RNA, 22 nt, Human
aguaaacacgugggguuucuuu

SEQ ID NO: 602583 - RNA, 22 nt, Human
ugcagccugguggucacuggag

SEQ ID NO: 602584 - RNA, 19 nt, Human
cucuccagcuccaguagcu

SEQ ID NO: 602585 - RNA, 22 nt, Human
gagggccacguucagggcucuc

SEQ ID NO: 602586 - RNA, 20 nt, Human
cugugcuccggguuccugga

SEQ ID NO: 602587 - RNA, 22 nt, Human
uacuguuaauguuaaauucagg

SEQ ID NO: 602588 - RNA, 22 nt, Human
auuguuuuauuaaaugagcccu

SEQ ID NO: 602589 - RNA, 22 nt, Human
agaaucaaagagaaauacuuug

SEQ ID NO: 602590 - RNA, 22 nt, Human
uggggaagaauaauguauguac

SEQ ID NO: 602591 - RNA, 22 nt, Human
auucagaaauagaaaauuugau

SEQ ID NO: 602592 - RNA, 18 nt, Human
ucaggcugggccuccuuc

SEQ ID NO: 602593 - RNA, 22 nt, Human
uugagguccagucuccacccac

SEQ ID NO: 602594 - RNA, 22 nt, Human
aucccucugcagcugguuccug

SEQ ID NO: 602595 - RNA, 22 nt, Human
cccaggcuggggcuccuccagc

SEQ ID NO: 602596 - RNA, 22 nt, Human
agaugcuuaaguuuucagugua

SEQ ID NO: 602597 - RNA, 22 nt, Human
acaucuguuugagaaaaagaag

SEQ ID NO: 602598 - RNA, 22 nt, Human
gcagcuggagcaucuucucauc

SEQ ID NO: 602599 - RNA, 22 nt, Human
ucucugucccuaggagccuugc

SEQ ID NO: 602600 - RNA, 22 nt, Human
gggcagcacguuucaggaggau

SEQ ID NO: 602601 - RNA, 22 nt, Human
uguaaggagugugaguuugagu

SEQ ID NO: 602602 - RNA, 19 nt, Human
cauuuucccaucauccuuu

SEQ ID NO: 602603 - RNA, 22 nt, Human
acagcacuuauucagcacagug

SEQ ID NO: 602604 - RNA, 22 nt, Human
caaauagaagguacucagagaa

SEQ ID NO: 602605 - RNA, 22 nt, Human
ugucaccaaguugaugaaugca

SEQ ID NO: 602606 - RNA, 22 nt, Human
cugcuagaauuucuggaaaaga

SEQ ID NO: 602607 - RNA, 22 nt, Human
ggcagcaaccaaccaggcauuu

SEQ ID NO: 602608 - RNA, 22 nt, Human
ucuuucuggucucgccuuauuc

SEQ ID NO: 602609 - RNA, 22 nt, Human
ugcuggcuacugauggcaggcc

SEQ ID NO: 602610 - RNA, 22 nt, Human
cucuggccugcuuccucaggua

SEQ ID NO: 602611 - RNA, 18 nt, Human
acauuucucucugcguga

SEQ ID NO: 602612 - RNA, 22 nt, Human
agccacagucugaugccugaga

SEQ ID NO: 602613 - RNA, 22 nt, Human
uccugaggcuaaagugcagugg

SEQ ID NO: 602614 - RNA, 22 nt, Human
ggccaugcuguugccugcuggu

SEQ ID NO: 602615 - RNA, 22 nt, Human
cuccucacacccacugcaacca

SEQ ID NO: 602616 - RNA, 22 nt, Human
guacaugcagauuauagcuaau

SEQ ID NO: 602617 - RNA, 22 nt, Human
ucaccauuggcaauuauaaaac

SEQ ID NO: 602618 - RNA, 22 nt, Human
agcuccagauuaauuguaggag

SEQ ID NO: 602619 - RNA, 22 nt, Human
cugagaaaggaccucaaacagg

SEQ ID NO: 602620 - RNA, 22 nt, Human
gcuguuucugaguagcuaggcu

SEQ ID NO: 602621 - RNA, 22 nt, Human
ugaaggagcucaggagauaguc

SEQ ID NO: 602622 - RNA, 22 nt, Human
aacaaugauauagggauuggca

SEQ ID NO: 602623 - RNA, 21 nt, Human
aggacaggaacuggcugaaua

SEQ ID NO: 602624 - RNA, 22 nt, Human
uaguaacagcagcuucccugug

SEQ ID NO: 602625 - RNA, 22 nt, Human
uuucacuguuaggaguaugcua

SEQ ID NO: 602626 - RNA, 22 nt, Human
acauagcauguuuggacacaug

SEQ ID NO: 602627 - RNA, 22 nt, Human
ugcaggagagugagucaguagg

SEQ ID NO: 602628 - RNA, 22 nt, Human
cugccuguuuucugauagauuu

SEQ ID NO: 602629 - RNA, 22 nt, Human
acauauaagggaucagugacag

SEQ ID NO: 602630 - RNA, 17 nt, Human
ggacugggcggggcagg

SEQ ID NO: 602631 - RNA, 22 nt, Human
auuugaauggcuuaacacaacg

SEQ ID NO: 602632 - RNA, 22 nt, Human
acauauuaacugcacuacacua

SEQ ID NO: 602633 - RNA, 23 nt, Human
acagagacaaugguuucaucuug

SEQ ID NO: 602634 - RNA, 22 nt, Human
acagccagggcauugucgccga

SEQ ID NO: 602635 - RNA, 22 nt, Human
uuagucacaugcccaucucuga

SEQ ID NO: 602636 - RNA, 22 nt, Human
ugaggccaaaaugacucaaaug

SEQ ID NO: 602637 - RNA, 22 nt, Human
gugcugaauugugcucuuuaca

SEQ ID NO: 602638 - RNA, 22 nt, Human
gucagaggggacaagacacaga

SEQ ID NO: 602639 - RNA, 22 nt, Human
uuauuagcugggcuucagggug

SEQ ID NO: 602640 - RNA, 22 nt, Human
gauuccacagcuucgaggucuu

SEQ ID NO: 602641 - RNA, 22 nt, Human
ccccuuccacagugcuuccuaa

SEQ ID NO: 602642 - RNA, 22 nt, Human
uccauaaaccagaaaaucaaga

SEQ ID NO: 602643 - RNA, 22 nt, Human
ugccugccccacaagggguugc

SEQ ID NO: 602644 - RNA, 21 nt, Human
ucaggguucaaaggaacugau

SEQ ID NO: 602645 - RNA, 22 nt, Human
ggcugccagugagugcagaccg

SEQ ID NO: 602646 - RNA, 22 nt, Human
gagaacauuaauaguuaauuuu

SEQ ID NO: 602647 - RNA, 22 nt, Human
guuguuuucacaaacccaugau

SEQ ID NO: 602648 - RNA, 22 nt, Human
uaacagcacuggcaggcacugu

SEQ ID NO: 602649 - RNA, 22 nt, Human
aaagccacguggccuggggagc

SEQ ID NO: 602650 - RNA, 22 nt, Human
uugggaaggcguggaagcagaa

SEQ ID NO: 602651 - RNA, 20 nt, Human
caacacugcccauuguuugc

SEQ ID NO: 602652 - RNA, 22 nt, Human
auaacagaugugaagugcuaau

SEQ ID NO: 602653 - RNA, 22 nt, Human
gagggacagcuaaagagaaauu

SEQ ID NO: 602654 - RNA, 22 nt, Human
acaguagcuaauauugcauuau

SEQ ID NO: 602655 - RNA, 22 nt, Human
ucaggcagguggcuggcuaugg

SEQ ID NO: 602656 - RNA, 22 nt, Human
acuuggaaagaugcaacacagu

SEQ ID NO: 602657 - RNA, 22 nt, Human
ugcagcauccauauauuauuag

SEQ ID NO: 602658 - RNA, 22 nt, Human
agcugugcugccaaguugcuga

SEQ ID NO: 602659 - RNA, 22 nt, Human
agcuguuuucuucuaggaagac

SEQ ID NO: 602660 - RNA, 22 nt, Human
aucugcuugaaugagcaacagg

SEQ ID NO: 602661 - RNA, 20 nt, Human
gcucagggccugggucugga

SEQ ID NO: 602662 - RNA, 22 nt, Human
guugcugaaggcaugccagaga

SEQ ID NO: 602663 - RNA, 22 nt, Human
gaggggagcaugaucuagauug

SEQ ID NO: 602664 - RNA, 22 nt, Human
aacaguauugguugaacucaag

SEQ ID NO: 602665 - RNA, 22 nt, Human
uuauaucuuuuuacaucucucc

SEQ ID NO: 602666 - RNA, 22 nt, Human
ucucagguaaaaggguaucuac

SEQ ID NO: 602667 - RNA, 18 nt, Human
ucaggcucucuggcuaga

SEQ ID NO: 602668 - RNA, 22 nt, Human
cccaggcagcggggucuccuug

SEQ ID NO: 602669 - RNA, 22 nt, Human
ugauagaaaggaaauuaauugg

SEQ ID NO: 602670 - RNA, 22 nt, Human
gccugcagaacugugaggcaau

SEQ ID NO: 602671 - RNA, 22 nt, Human
acagggagucugaggggauagu

SEQ ID NO: 602672 - RNA, 23 nt, Human
acucagcuuugggagaugacuca

SEQ ID NO: 602673 - RNA, 22 nt, Human
cucagccaugcaacaugcuggg

SEQ ID NO: 602674 - RNA, 22 nt, Human
agcugggaugauaaccucaguc

SEQ ID NO: 602675 - RNA, 22 nt, Human
cacagcuucuccccgcugcggc

SEQ ID NO: 602676 - RNA, 22 nt, Human
cuuuacauaaggauaaaccugg

SEQ ID NO: 602677 - RNA, 22 nt, Human
gccugccuuuguaugacccuga

SEQ ID NO: 602678 - RNA, 22 nt, Human
uauucuacaguguuaguguuag

SEQ ID NO: 602679 - RNA, 22 nt, Human
agggugucagccacggaauggg

SEQ ID NO: 602680 - RNA, 22 nt, Human
aauguguuuaguuaaugaguug

SEQ ID NO: 602681 - RNA, 22 nt, Human
uaaggguucagaaugcaguggu

SEQ ID NO: 602682 - RNA, 22 nt, Human
gcccaggagccuggagaugugu

SEQ ID NO: 602683 - RNA, 22 nt, Human
ucuagaccuggcacugcccugu

SEQ ID NO: 602684 - RNA, 17 nt, Human
ccaggcuccaucacugu

SEQ ID NO: 602685 - RNA, 17 nt, Human
ccagggaggggccgcgc

SEQ ID NO: 602686 - RNA, 22 nt, Human
uccuguguuacccuugcaguga

SEQ ID NO: 602687 - RNA, 22 nt, Human
gccuggcacucacugaagaggc

SEQ ID NO: 602688 - RNA, 22 nt, Human
ccugggugguuccggcaaggag

SEQ ID NO: 602689 - RNA, 22 nt, Human
uugggguaaaaugucguaagag

SEQ ID NO: 602690 - RNA, 22 nt, Human
ucagcucuguuuugaguggaac

SEQ ID NO: 602691 - RNA, 22 nt, Human
gagaggcucagggacuugcuga

SEQ ID NO: 602692 - RNA, 22 nt, Human
cugaugcuugcaacaaagaacc

SEQ ID NO: 602693 - RNA, 22 nt, Human
ggcagaggaaggaugaauucac

SEQ ID NO: 602694 - RNA, 22 nt, Human
uugugauacugagcuuggcauu

SEQ ID NO: 602695 - RNA, 18 nt, Human
ucugagguggacgaggag

SEQ ID NO: 602696 - RNA, 19 nt, Human
guauauuuauauggcugua

SEQ ID NO: 602697 - RNA, 22 nt, Human
auaguguuuuacuuagacuucu

SEQ ID NO: 602698 - RNA, 22 nt, Human
gaacauaacuauugugaauagu

SEQ ID NO: 602699 - RNA, 22 nt, Human
cuccuggcaguuccccuuguca

SEQ ID NO: 602700 - RNA, 22 nt, Human
guccugguagggcucugugucu

SEQ ID NO: 602701 - RNA, 22 nt, Human
gcaggaguguauuugcauguaa

SEQ ID NO: 602702 - RNA, 22 nt, Human
ggcugcuggggacgugggagag

SEQ ID NO: 602703 - RNA, 22 nt, Human
cuccucagucaggucuaggguc

SEQ ID NO: 602704 - RNA, 22 nt, Human
uuccugggagcuagccacaucu

SEQ ID NO: 602705 - RNA, 22 nt, Human
uucugagaaggcuguggacaca

SEQ ID NO: 602706 - RNA, 22 nt, Human
uuccucugaaauggcuuggaaa

SEQ ID NO: 602707 - RNA, 23 nt, Human
ugccagaggcagucacaguggug

SEQ ID NO: 602708 - RNA, 22 nt, Human
uguuccugaaugccuggcuggc

SEQ ID NO: 602709 - RNA, 19 nt, Human
augucucuguagcacauac

SEQ ID NO: 602710 - RNA, 22 nt, Human
cugaggcuuugugugcaugccu

SEQ ID NO: 602711 - RNA, 22 nt, Human
ggucccaggaagugcggcggcg

SEQ ID NO: 602712 - RNA, 21 nt, Human
aguuuucugaguuauaaaaua

SEQ ID NO: 602713 - RNA, 17 nt, Human
uuuaaacuacuacaagg

SEQ ID NO: 602714 - RNA, 22 nt, Human
aaggaggguucccagguccugg

SEQ ID NO: 602715 - RNA, 23 nt, Human
auguuaagugaaauaggccagga

SEQ ID NO: 602716 - RNA, 22 nt, Human
cagcacaggcaggggaacuaua

SEQ ID NO: 602717 - RNA, 22 nt, Human
augcugcagucaggccagauug

SEQ ID NO: 602718 - RNA, 22 nt, Human
guucagcaaguacucaguccac

SEQ ID NO: 602719 - RNA, 22 nt, Human
uggaaaggacaguugcugauag

SEQ ID NO: 602720 - RNA, 22 nt, Human
ccaggcucagcgcgcacgucug

SEQ ID NO: 602721 - RNA, 22 nt, Human
uaaucauauggguaauccaaug

SEQ ID NO: 602722 - RNA, 22 nt, Human
auauucuggguuagauauguuu

SEQ ID NO: 602723 - RNA, 22 nt, Human
agggauggcaaguuaaccugag

SEQ ID NO: 602724 - RNA, 22 nt, Human
agugaaaucagguuuugacugc

SEQ ID NO: 602725 - RNA, 23 nt, Human
uuucacaaugagcauuacagaau

SEQ ID NO: 602726 - RNA, 22 nt, Human
gcaggagugacauggaugugga

SEQ ID NO: 602727 - RNA, 22 nt, Human
aaaacucugcaguuaguuucua

SEQ ID NO: 602728 - RNA, 22 nt, Human
caugcuuugggucagaaaugcc

SEQ ID NO: 602729 - RNA, 22 nt, Human
uacuguauuugauaagugaagu

SEQ ID NO: 602730 - RNA, 22 nt, Human
aagauccuugguucugcuuucc

SEQ ID NO: 602731 - RNA, 22 nt, Human
aaagauuaaaucaaauugguca

SEQ ID NO: 602732 - RNA, 22 nt, Human
agcaaugaccagugaucuugua

SEQ ID NO: 602733 - RNA, 21 nt, Human
agugacagaggaaggugcaua

SEQ ID NO: 602734 - RNA, 20 nt, Human
aguguuucucaacauggggc

SEQ ID NO: 602735 - RNA, 22 nt, Human
aauaaagcaugaggcauuuauc

SEQ ID NO: 602736 - RNA, 22 nt, Human
auggcaggauacccaguccggc

SEQ ID NO: 602737 - RNA, 22 nt, Human
uaagauaaggaacauucuguga

SEQ ID NO: 602738 - RNA, 22 nt, Human
ugugauucucagaagagggaag

SEQ ID NO: 602739 - RNA, 22 nt, Human
acauuuuuggguugaugucuga

SEQ ID NO: 602740 - RNA, 21 nt, Human
aggauuuuguugaaguuucug

SEQ ID NO: 602741 - RNA, 22 nt, Human
agccacaggaaacagagacagc

SEQ ID NO: 602742 - RNA, 22 nt, Human
cagcccaaagccccaggcuaga

SEQ ID NO: 602743 - RNA, 22 nt, Human
aaguuuguuuuagucuaaugau

SEQ ID NO: 602744 - RNA, 22 nt, Human
auaaaugugaauuagagcuuug

SEQ ID NO: 602745 - RNA, 22 nt, Human
aggcuggcgucaggggcuguac

SEQ ID NO: 602746 - RNA, 22 nt, Human
gcaguggcuaagcucgcaugca

SEQ ID NO: 602747 - RNA, 22 nt, Human
aggcuggcgacaucuggcgggc

SEQ ID NO: 602748 - RNA, 22 nt, Human
ucucccuggagcccugaagcau

SEQ ID NO: 602749 - RNA, 22 nt, Human
ugucuuaugcugcauagacuau

SEQ ID NO: 602750 - RNA, 22 nt, Human
uacacuggccaaaugccuuugg

SEQ ID NO: 602751 - RNA, 22 nt, Human
ggcaggcaggagcgugcuuggg

SEQ ID NO: 602752 - RNA, 22 nt, Human
agccaggccagcugucuugagu

SEQ ID NO: 602753 - RNA, 22 nt, Human
uuggaaacgucaccuuuuccuu

SEQ ID NO: 602754 - RNA, 22 nt, Human
uagaaaugauugguugagcucu

SEQ ID NO: 602755 - RNA, 22 nt, Human
cccaggagauaacguucccaag

SEQ ID NO: 602756 - RNA, 22 nt, Human
ugcuucuguuuguuucugucau

SEQ ID NO: 602757 - RNA, 22 nt, Human
aacagcuugcugcaccuuaaua

SEQ ID NO: 602758 - RNA, 22 nt, Human
uggcagugaugcggcaggacau

SEQ ID NO: 602759 - RNA, 22 nt, Human
auugagaaauauaaucuggaaa

SEQ ID NO: 602760 - RNA, 22 nt, Human
cuggagggugagccucaucucu

SEQ ID NO: 602761 - RNA, 22 nt, Human
cuucuguuacuguuagcugaag

SEQ ID NO: 602762 - RNA, 22 nt, Human
uuaaacauuuuugaugaucgau

SEQ ID NO: 602763 - RNA, 22 nt, Human
acaugauuucagggaauucuca

SEQ ID NO: 602764 - RNA, 22 nt, Human
uaauuucaccguugcuagaaau

SEQ ID NO: 602765 - RNA, 20 nt, Human
uauauguguacauacacaca

SEQ ID NO: 602766 - RNA, 22 nt, Human
uugcaaaagcaauugcaguuuu

SEQ ID NO: 602767 - RNA, 21 nt, Human
gaugaagcaaucuuucuguug

SEQ ID NO: 602768 - RNA, 22 nt, Human
cucuuccuuucccuugagggug

SEQ ID NO: 602769 - RNA, 22 nt, Human
ccucugugcuuuguccagccuc

SEQ ID NO: 602770 - RNA, 22 nt, Human
ugagagugaaaugucacauguc

SEQ ID NO: 602771 - RNA, 22 nt, Human
aauauauagaaguacccguugu

SEQ ID NO: 602772 - RNA, 22 nt, Human
aacaugauuuaguauaaugcag

SEQ ID NO: 602773 - RNA, 22 nt, Human
gauggcagcauauugacagcau

SEQ ID NO: 602774 - RNA, 22 nt, Human
agcucugggucacggcugccga

SEQ ID NO: 602775 - RNA, 22 nt, Human
gagcuguguucaugaggagaaa

SEQ ID NO: 602776 - RNA, 22 nt, Human
cccugagcaacaaacugaauac

SEQ ID NO: 602777 - RNA, 22 nt, Human
uaguuaaagagauccacauucc

SEQ ID NO: 602778 - RNA, 23 nt, Human
ucugcagacgcuguucuauuguc

SEQ ID NO: 602779 - RNA, 22 nt, Human
aauucugaggagggaagaggaa

SEQ ID NO: 602780 - RNA, 22 nt, Human
guccccuggcccccagcgucgg

SEQ ID NO: 602781 - RNA, 22 nt, Human
agagcuguucaacguagcaaug

SEQ ID NO: 602782 - RNA, 22 nt, Human
gugcuacagacugaguacacuu

SEQ ID NO: 602783 - RNA, 22 nt, Human
uggaaaaucaggggacauugau

SEQ ID NO: 602784 - RNA, 22 nt, Human
ucaggaauuuuguucuguaucc

SEQ ID NO: 602785 - RNA, 22 nt, Human
uccaccagagccuucccaugcu

SEQ ID NO: 602786 - RNA, 22 nt, Human
ggaggaagugcaguucuacuac

SEQ ID NO: 602787 - RNA, 22 nt, Human
ugcuucucccaaccagggccug

SEQ ID NO: 602788 - RNA, 19 nt, Human
uguguguuuauauauguau

SEQ ID NO: 602789 - RNA, 18 nt, Human
uucaguuucuaguuccuu

SEQ ID NO: 602790 - RNA, 22 nt, Human
uuugugcaagacaugcuaagag

SEQ ID NO: 602791 - RNA, 17 nt, Human
acaggccugcuugcacu

SEQ ID NO: 602792 - RNA, 22 nt, Human
ggcacugcuguaggcagugagg

SEQ ID NO: 602793 - RNA, 22 nt, Human
ucaaagcuuagauaauuucuuu

SEQ ID NO: 602794 - RNA, 22 nt, Human
auuuuguggcagaugcagaacc

SEQ ID NO: 602795 - RNA, 22 nt, Human
gcacugggugugaggcagcguc

SEQ ID NO: 602796 - RNA, 22 nt, Human
ucagggccaucuuuugccucaa

SEQ ID NO: 602797 - RNA, 22 nt, Human
gcuggagagugaggggagcaag

SEQ ID NO: 602798 - RNA, 22 nt, Human
gugcugccugccagcuucuggg

SEQ ID NO: 602799 - RNA, 22 nt, Human
auacaugucaucauauguuugu

SEQ ID NO: 602800 - RNA, 22 nt, Human
cuggcugaggucaccaguagcu

SEQ ID NO: 602801 - RNA, 22 nt, Human
ggcugcaggaugcccagccgug

SEQ ID NO: 602802 - RNA, 22 nt, Human
uuuagagguuagaggcugauag

SEQ ID NO: 602803 - RNA, 22 nt, Human
cuggcagcuuagcacucugguu

SEQ ID NO: 602804 - RNA, 21 nt, Human
cagcucugagauuucuacuag

SEQ ID NO: 602805 - RNA, 22 nt, Human
uucuguucuuuauuuaccauau

SEQ ID NO: 602806 - RNA, 22 nt, Human
uguuaucacuuagacaugcuag

SEQ ID NO: 602807 - RNA, 22 nt, Human
gcucuggcucaaaccaccggcu

SEQ ID NO: 602808 - RNA, 18 nt, Human
accugccuguucuucucu

SEQ ID NO: 602809 - RNA, 22 nt, Human
cuguuuucaaagagagagaaug

SEQ ID NO: 602810 - RNA, 22 nt, Human
agcuaggaaauugaggcugaga

SEQ ID NO: 602811 - RNA, 22 nt, Human
cacaggggcaaacuguagggga

SEQ ID NO: 602812 - RNA, 22 nt, Human
uacuucugccuuagagaacacu

SEQ ID NO: 602813 - RNA, 22 nt, Human
aacacuguaacagcaucauuuu

SEQ ID NO: 602814 - RNA, 22 nt, Human
agcuugccucccccucuuagga

SEQ ID NO: 602815 - RNA, 22 nt, Human
aagccaguguuuuugagaguug

SEQ ID NO: 602816 - RNA, 22 nt, Human
acaaaugauuaucacagaggag

SEQ ID NO: 602817 - RNA, 22 nt, Human
uuagaaaugucacagaucugau

SEQ ID NO: 602818 - RNA, 22 nt, Human
cccaggagagaggccaguuggc

SEQ ID NO: 602819 - RNA, 22 nt, Human
uggguccacaaacaucagauau

SEQ ID NO: 602820 - RNA, 22 nt, Human
uggcagggucuugcuguguugc

SEQ ID NO: 602821 - RNA, 22 nt, Human
cagcagccacuagagggcucac

SEQ ID NO: 602822 - RNA, 22 nt, Human
guauuucaucuugaaaaccagu

SEQ ID NO: 602823 - RNA, 22 nt, Human
uaacaguugguguaauuucuug

SEQ ID NO: 602824 - RNA, 22 nt, Human
uggcagggagccaccggucaug

SEQ ID NO: 602825 - RNA, 22 nt, Human
agccaccaccacugaaagguua

SEQ ID NO: 602826 - RNA, 22 nt, Human
cagcagagaaauuaaacuucug

SEQ ID NO: 602827 - RNA, 22 nt, Human
ucuuuauuuaagucuguuguaa

SEQ ID NO: 602828 - RNA, 22 nt, Human
ugucauuuggacuuugguauua

SEQ ID NO: 602829 - RNA, 22 nt, Human
ccuuuaauuuacaauguuaauu

SEQ ID NO: 602830 - RNA, 23 nt, Human
agacugaggcugccagggucaga

SEQ ID NO: 602831 - RNA, 21 nt, Human
gggugggaggacacagcaggc

SEQ ID NO: 602832 - RNA, 22 nt, Human
uaagagcuguucagguacccau

SEQ ID NO: 602833 - RNA, 22 nt, Human
gagggcugugaaggagcggguu

SEQ ID NO: 602834 - RNA, 23 nt, Human
ccugcucaggcgugugcccugcu

SEQ ID NO: 602835 - RNA, 22 nt, Human
cuggccagcauggcugaaguac

SEQ ID NO: 602836 - RNA, 22 nt, Human
ucgauaauaucuuacaugugcu

SEQ ID NO: 602837 - RNA, 22 nt, Human
gaacaaacagaagaggcggaac

SEQ ID NO: 602838 - RNA, 22 nt, Human
ggcucagcacagggcuggcauc

SEQ ID NO: 602839 - RNA, 22 nt, Human
ggccgugcuccaaagucaucgu

SEQ ID NO: 602840 - RNA, 22 nt, Human
aaggcagcagugcacgacugau

SEQ ID NO: 602841 - RNA, 22 nt, Human
cccagcccacgguccugggugg

SEQ ID NO: 602842 - RNA, 22 nt, Human
uggcauccucucuucugagugc

SEQ ID NO: 602843 - RNA, 22 nt, Human
ccaguggccaugcacgagcagc

SEQ ID NO: 602844 - RNA, 22 nt, Human
ugccagaguuacaugaggguca

SEQ ID NO: 602845 - RNA, 22 nt, Human
cagccugagccuucuguagcaa

SEQ ID NO: 602846 - RNA, 22 nt, Human
ugaaagaaggguggaaaaugua

SEQ ID NO: 602847 - RNA, 22 nt, Human
gcagggacaacugugcaccuga

SEQ ID NO: 602848 - RNA, 23 nt, Human
gguuggcuguacccaggcucccu

SEQ ID NO: 602849 - RNA, 22 nt, Human
gacagugcauuuccuggcaugg

SEQ ID NO: 602850 - RNA, 22 nt, Human
cagcagaaaaugugggugauuu

SEQ ID NO: 602851 - RNA, 22 nt, Human
uccauuuuguagguaugcuaca

SEQ ID NO: 602852 - RNA, 22 nt, Human
uuaccauuuuauaaguuaaagu

SEQ ID NO: 602853 - RNA, 22 nt, Human
ugaggcuaaaggugaccagauu

SEQ ID NO: 602854 - RNA, 22 nt, Human
ccagccaguccagcauuggugu

SEQ ID NO: 602855 - RNA, 22 nt, Human
cucagagccaguuagcaggugc

SEQ ID NO: 602856 - RNA, 22 nt, Human
ccaguccuagaagaggagucga

SEQ ID NO: 602857 - RNA, 22 nt, Human
aucauugaauauaagugcuauu

SEQ ID NO: 602858 - RNA, 22 nt, Human
ggagacagugacuuagagacug

SEQ ID NO: 602859 - RNA, 22 nt, Human
ggcucucugaggaaacccuucc

SEQ ID NO: 602860 - RNA, 22 nt, Human
gccagaagggguggauccaggc

SEQ ID NO: 602861 - RNA, 23 nt, Human
ugccucugccucccuagucugca

SEQ ID NO: 602862 - RNA, 22 nt, Human
auucagcaguuccugcuucagu

SEQ ID NO: 602863 - RNA, 22 nt, Human
ucauaaaaauagacucuaaagu

SEQ ID NO: 602864 - RNA, 22 nt, Human
cucaguuugagggguagguguu

SEQ ID NO: 602865 - RNA, 22 nt, Human
uggcagagucucuccuuuccag

SEQ ID NO: 602866 - RNA, 22 nt, Human
ugauggucaggaugcauggaga

SEQ ID NO: 602867 - RNA, 22 nt, Human
uguggguccuccugugugcccg

SEQ ID NO: 602868 - RNA, 22 nt, Human
guaggugagugggagaagaggc

SEQ ID NO: 602869 - RNA, 20 nt, Human
ucucuucuggggagauaaaa

SEQ ID NO: 602870 - RNA, 22 nt, Human
gagcugaguguccuaggcaugg

SEQ ID NO: 602871 - RNA, 22 nt, Human
ucugaagagucaucuuugggug

SEQ ID NO: 602872 - RNA, 22 nt, Human
aaugacagagauagaagggaug

SEQ ID NO: 602873 - RNA, 22 nt, Human
uccugguggugccagcugcagg

SEQ ID NO: 602874 - RNA, 22 nt, Human
uuccagaggcuucagggaagaa

SEQ ID NO: 602875 - RNA, 22 nt, Human
uagcuccuggugagccuacucu

SEQ ID NO: 602876 - RNA, 22 nt, Human
cugcugggggacacagguccgg

SEQ ID NO: 602877 - RNA, 22 nt, Human
acccagcuggaugcauggaggc

SEQ ID NO: 602878 - RNA, 22 nt, Human
cuggugcaaaaguaauuguggu

SEQ ID NO: 602879 - RNA, 22 nt, Human
agcugaagaccucaaguaagag

SEQ ID NO: 602880 - RNA, 22 nt, Human
uucaucuugauggcuuccuaau

SEQ ID NO: 602881 - RNA, 22 nt, Human
gggagcugagcuggaagagaau

SEQ ID NO: 602882 - RNA, 22 nt, Human
auguuuucuagaguuuaaaauc

SEQ ID NO: 602883 - RNA, 22 nt, Human
cuccagagacacuucucaugau

SEQ ID NO: 602884 - RNA, 22 nt, Human
aucaucuggguuaaugugcuca

SEQ ID NO: 602885 - RNA, 22 nt, Human
ccugccaggcuuugggcuucug

SEQ ID NO: 602886 - RNA, 22 nt, Human
uuuacauugcauuagguauuau

SEQ ID NO: 602887 - RNA, 22 nt, Human
cacugcaguuccccagugcgca

SEQ ID NO: 602888 - RNA, 22 nt, Human
caaauggcaacaagaacacugg

SEQ ID NO: 602889 - RNA, 22 nt, Human
ugagccagauaagggcucacgc

SEQ ID NO: 602890 - RNA, 21 nt, Human
uuccuggggacuuccguggga

SEQ ID NO: 602891 - RNA, 22 nt, Human
aguccuuacucgggggcccaga

SEQ ID NO: 602892 - RNA, 22 nt, Human
gcuccuccaauauggacuccuc

SEQ ID NO: 602893 - RNA, 22 nt, Human
ugcuggaguaacaagacacuca

SEQ ID NO: 602894 - RNA, 22 nt, Human
gcagugaacauaacacagaagg

SEQ ID NO: 602895 - RNA, 22 nt, Human
uugcagucacacucuaaaguag

SEQ ID NO: 602896 - RNA, 22 nt, Human
aagccuuaaauguuucuaauau

SEQ ID NO: 602897 - RNA, 22 nt, Human
ucuuggcugcugccaauuuacu

SEQ ID NO: 602898 - RNA, 22 nt, Human
ugcauguggaccccuggugccu

SEQ ID NO: 602899 - RNA, 22 nt, Human
caagggugaaggcagaggacau

SEQ ID NO: 602900 - RNA, 22 nt, Human
ugcuuccuauccacacaaugcc

SEQ ID NO: 602901 - RNA, 22 nt, Human
aguaguggggccaggguuugaa

SEQ ID NO: 602902 - RNA, 22 nt, Human
uauuuguauguguguacauaua

SEQ ID NO: 602903 - RNA, 22 nt, Human
acagggcaugugcaagagacau

SEQ ID NO: 602904 - RNA, 22 nt, Human
uaguguucuaagaacauccaug

SEQ ID NO: 602905 - RNA, 22 nt, Human
gggcucaggccuggccucucac

SEQ ID NO: 602906 - RNA, 22 nt, Human
caagggcugcuaucagcuacug

SEQ ID NO: 602907 - RNA, 22 nt, Human
uacauacaagauguguuuaaaa

SEQ ID NO: 602908 - RNA, 22 nt, Human
aagaaaguggguaauaugauuu

SEQ ID NO: 602909 - RNA, 22 nt, Human
cauuuauuggcauguaguaggu

SEQ ID NO: 602910 - RNA, 22 nt, Human
ccauuuuucacaagacucacuu

SEQ ID NO: 602911 - RNA, 22 nt, Human
gcacugggagucuguggggguu

SEQ ID NO: 602912 - RNA, 22 nt, Human
augaaggauagggcaaaauuuu

SEQ ID NO: 602913 - RNA, 22 nt, Human
ucuguuaugcauaagcaucagu

SEQ ID NO: 602914 - RNA, 22 nt, Human
acauagcauaaagaaugacucu

SEQ ID NO: 602915 - RNA, 22 nt, Human
aucugucuuccaccacacaucc

SEQ ID NO: 602916 - RNA, 22 nt, Human
aucuggcucacuuagucuagga

SEQ ID NO: 602917 - RNA, 22 nt, Human
ugccugggacaugcuguggacu

SEQ ID NO: 602918 - RNA, 22 nt, Human
gggagggucugagagcugcacc

SEQ ID NO: 602919 - RNA, 22 nt, Human
auauucuuccaaaacaucauuu

SEQ ID NO: 602920 - RNA, 22 nt, Human
cuuuccaacucuagugaaauuu

SEQ ID NO: 602921 - RNA, 22 nt, Human
agcagcccaguuguacugagug

SEQ ID NO: 602922 - RNA, 22 nt, Human
ccaagggcugcugaggugucca

SEQ ID NO: 602923 - RNA, 22 nt, Human
ccuugguccaacccugcacagc

SEQ ID NO: 602924 - RNA, 20 nt, Human
uccagggcccuggcuccucu

SEQ ID NO: 602925 - RNA, 22 nt, Human
ucucugugagaugccuuccuga

SEQ ID NO: 602926 - RNA, 22 nt, Human
uuuuuguggugcagacuaaagc

SEQ ID NO: 602927 - RNA, 23 nt, Human
uuuuccuguggagacaugacugg

SEQ ID NO: 602928 - RNA, 22 nt, Human
agauucgaaaccuuuaggucuu

SEQ ID NO: 602929 - RNA, 22 nt, Human
ugccaggccucaggagucucca

SEQ ID NO: 602930 - RNA, 22 nt, Human
uuacaaagaaaauuaggcauuu

SEQ ID NO: 602931 - RNA, 20 nt, Human
cccagggguuguggugagga

SEQ ID NO: 602932 - RNA, 22 nt, Human
cugucagcuucuccuggccaga

SEQ ID NO: 602933 - RNA, 22 nt, Human
cacauguuuuuggccaucaugg

SEQ ID NO: 602934 - RNA, 22 nt, Human
guuuguaaccagaacagagagu

SEQ ID NO: 602935 - RNA, 22 nt, Human
uuuaagaugguauuuuauaaag

SEQ ID NO: 602936 - RNA, 22 nt, Human
uauuuaagaugugucauaaaga

SEQ ID NO: 602937 - RNA, 22 nt, Human
gugggccacugggaggcaaggg

SEQ ID NO: 602938 - RNA, 23 nt, Human
auuuaaugcugaguugaauguua

SEQ ID NO: 602939 - RNA, 22 nt, Human
cugggaagauggugacagaauu

SEQ ID NO: 602940 - RNA, 22 nt, Human
agacuguagggauagaggucuu

SEQ ID NO: 602941 - RNA, 22 nt, Human
ucaggacacuuggcacaagguc

SEQ ID NO: 602942 - RNA, 22 nt, Human
aaucuucauuuugacaagauuc

SEQ ID NO: 602943 - RNA, 22 nt, Human
agaggaaucugucuagacacaa

SEQ ID NO: 602944 - RNA, 22 nt, Human
aaagagacaccaaagacucuag

SEQ ID NO: 602945 - RNA, 22 nt, Human
ccauggccucgcucuacguggg

SEQ ID NO: 602946 - RNA, 21 nt, Human
ugcagcugacacugguaugcc

SEQ ID NO: 602947 - RNA, 22 nt, Human
gcuugggauaugcugauguaaa

SEQ ID NO: 602948 - RNA, 22 nt, Human
gcaugaaaugagcgaauauaau

SEQ ID NO: 602949 - RNA, 21 nt, Human
aguguguucuuggcauuaccu

SEQ ID NO: 602950 - RNA, 21 nt, Human
gaacauuuggguuguuucuac

SEQ ID NO: 602951 - RNA, 22 nt, Human
caggcuugagggcaggcccagu

SEQ ID NO: 602952 - RNA, 22 nt, Human
gucuucuguucugugaggcuuc

SEQ ID NO: 602953 - RNA, 22 nt, Human
augcacaagaggcuagaaaaga

SEQ ID NO: 602954 - RNA, 22 nt, Human
agcagguguagggcucuuugua

SEQ ID NO: 602955 - RNA, 22 nt, Human
uuaaauagcucuuguagaagaa

SEQ ID NO: 602956 - RNA, 22 nt, Human
aagacauugucauuuuauaauu

SEQ ID NO: 602957 - RNA, 22 nt, Human
acagcaguuuagaggacagcca

SEQ ID NO: 602958 - RNA, 22 nt, Human
ggugaccucaccuggucccacc

SEQ ID NO: 602959 - RNA, 22 nt, Human
agggcccaugugggagcacuug

SEQ ID NO: 602960 - RNA, 22 nt, Human
uacaggguauucaaggguaguu

SEQ ID NO: 602961 - RNA, 22 nt, Human
agauacauagcugugagcacac

SEQ ID NO: 602962 - RNA, 22 nt, Human
ggcuucuccagguacugagcau

SEQ ID NO: 602963 - RNA, 22 nt, Human
caucucaucagugagagucagc

SEQ ID NO: 602964 - RNA, 22 nt, Human
gcuuuaaauggcuugcccaagu

SEQ ID NO: 602965 - RNA, 22 nt, Human
ucaugucucuaugugccuauua

SEQ ID NO: 602966 - RNA, 22 nt, Human
uuuagacaucuauaauugcuaa

SEQ ID NO: 602967 - RNA, 22 nt, Human
gggcagcuagcccucuagccca

SEQ ID NO: 602968 - RNA, 22 nt, Human
agcaggguccugaggugaguca

SEQ ID NO: 602969 - RNA, 22 nt, Human
uauuaugagguauuuggacuuu

SEQ ID NO: 602970 - RNA, 20 nt, Human
uuugcuaugcauaucugacc

SEQ ID NO: 602971 - RNA, 22 nt, Human
gcagauggacuguaugaccuga

SEQ ID NO: 602972 - RNA, 22 nt, Human
acacauguauguuuuguauuug

SEQ ID NO: 602973 - RNA, 22 nt, Human
acaggcagagaacucagccaga

SEQ ID NO: 602974 - RNA, 22 nt, Human
acccccaaacaugaucauggug

SEQ ID NO: 602975 - RNA, 22 nt, Human
ugagccagucucucagaacccu

SEQ ID NO: 602976 - RNA, 22 nt, Human
gcauuuuaaugagguuuaugag

SEQ ID NO: 602977 - RNA, 22 nt, Human
aaauaugaaugauaagaguuau

SEQ ID NO: 602978 - RNA, 22 nt, Human
ugaauaaucuuggguauuaaua

SEQ ID NO: 602979 - RNA, 22 nt, Human
ucuggaguggacccagagcacu

SEQ ID NO: 602980 - RNA, 22 nt, Human
cagucccacuagugccaauacc

SEQ ID NO: 602981 - RNA, 17 nt, Human
uccuucagggccucaca

SEQ ID NO: 602982 - RNA, 20 nt, Human
uaguauuugcauaaggauag

SEQ ID NO: 602983 - RNA, 22 nt, Human
uucacauugugcagauuauggu

SEQ ID NO: 602984 - RNA, 22 nt, Human
ugaagccagucaauguuaaguu

SEQ ID NO: 602985 - RNA, 22 nt, Human
auguaguuagaagauucaaaca

SEQ ID NO: 602986 - RNA, 22 nt, Human
cugcugccauuagggcacagac

SEQ ID NO: 602987 - RNA, 18 nt, Human
gcccugguggagcuggug

SEQ ID NO: 602988 - RNA, 22 nt, Human
uuccucagccaaggcugggauc

SEQ ID NO: 602989 - RNA, 22 nt, Human
uacuuuacaguauuagauaauu

SEQ ID NO: 602990 - RNA, 22 nt, Human
cugggccugggaggccaggucu

SEQ ID NO: 602991 - RNA, 22 nt, Human
ccacuuuguaauguguuauguu

SEQ ID NO: 602992 - RNA, 22 nt, Human
gagcuggucaguuucagggcca

SEQ ID NO: 602993 - RNA, 22 nt, Human
ucuuccucuucugcugagaagu

SEQ ID NO: 602994 - RNA, 22 nt, Human
acuuccuuuugggaaacuguuu

SEQ ID NO: 602995 - RNA, 20 nt, Human
agcuucagcccuaggauugc

SEQ ID NO: 602996 - RNA, 22 nt, Human
acucuuauaguauugguuauua

SEQ ID NO: 602997 - RNA, 22 nt, Human
uuuucuuauggugaagcacaaa

SEQ ID NO: 602998 - RNA, 22 nt, Human
uguguccuucugggagucccag

SEQ ID NO: 602999 - RNA, 22 nt, Human
acaguguauaaaaucuuaaaga

SEQ ID NO: 603000 - RNA, 21 nt, Human
aaaaguuugacaggaaaggga

SEQ ID NO: 603001 - RNA, 22 nt, Human
ucaggcaguagaauugcuugaa

SEQ ID NO: 603002 - RNA, 22 nt, Human
gcuggcuuuaucgucagacucc

SEQ ID NO: 603003 - RNA, 22 nt, Human
aggccuggccuuuauguucaag

SEQ ID NO: 603004 - RNA, 22 nt, Human
gcagcaagucuaguuuguaggc

SEQ ID NO: 603005 - RNA, 22 nt, Human
caucagagguacuuaaugaaug

SEQ ID NO: 603006 - RNA, 22 nt, Human
gaagggcuuggcugggaggcca

SEQ ID NO: 603007 - RNA, 22 nt, Human
cccuugaaggcagggaguccug

SEQ ID NO: 603008 - RNA, 22 nt, Human
caggugacccucucaccugcuu

SEQ ID NO: 603009 - RNA, 22 nt, Human
ucuuagguguaugucauuaggg

SEQ ID NO: 603010 - RNA, 22 nt, Human
cgcagaagagguugucuagucc

SEQ ID NO: 603011 - RNA, 22 nt, Human
ggagauggccacgucacucagu

SEQ ID NO: 603012 - RNA, 22 nt, Human
uuccuuucacguuuuaaugcac

SEQ ID NO: 603013 - RNA, 22 nt, Human
ucccugcagacguccugcgggu

SEQ ID NO: 603014 - RNA, 19 nt, Human
uuccugggguuccauugug

SEQ ID NO: 603015 - RNA, 22 nt, Human
cacaggcuuuucugacauaggc

SEQ ID NO: 603016 - RNA, 22 nt, Human
ccaucacaguccccaucgugau

SEQ ID NO: 603017 - RNA, 22 nt, Human
guacuuuaaaucaauguagauu

SEQ ID NO: 603018 - RNA, 22 nt, Human
aacaugauuggaaaaugcuguc

SEQ ID NO: 603019 - RNA, 22 nt, Human
ucuuucuugugggugcccuuuu

SEQ ID NO: 603020 - RNA, 22 nt, Human
uuacagaaguuucagcguuuua

SEQ ID NO: 603021 - RNA, 22 nt, Human
aacaagaauaagugguuucugg

SEQ ID NO: 603022 - RNA, 22 nt, Human
ucucaugaugccuaugcagggu

SEQ ID NO: 603023 - RNA, 22 nt, Human
gcuggcuuugaucuucccaucu

SEQ ID NO: 603024 - RNA, 22 nt, Human
ugaaagcaaccuguaacaguga

SEQ ID NO: 603025 - RNA, 22 nt, Human
gggugguggcggaggcuccagg

SEQ ID NO: 603026 - RNA, 22 nt, Human
cagaggucugacacugaauggu

SEQ ID NO: 603027 - RNA, 20 nt, Human
ucucccugcccaucucagau

SEQ ID NO: 603028 - RNA, 21 nt, Human
agacacugguuuagcauucau

SEQ ID NO: 603029 - RNA, 19 nt, Human
aauaauguucaugagauug

SEQ ID NO: 603030 - RNA, 18 nt, Human
ccagaggcccgggcaggc

SEQ ID NO: 603031 - RNA, 18 nt, Human
cuuaaacuguccccagua

SEQ ID NO: 603032 - RNA, 22 nt, Human
gcagguggaagcagcagacuca

SEQ ID NO: 603033 - RNA, 22 nt, Human
ugcaggagcccaggaauacuau

SEQ ID NO: 603034 - RNA, 22 nt, Human
uggcccugaaucaaggccagca

SEQ ID NO: 603035 - RNA, 22 nt, Human
agaggggaaggaugugauguga

SEQ ID NO: 603036 - RNA, 22 nt, Human
aacaaacaguuaaguguggaug

SEQ ID NO: 603037 - RNA, 22 nt, Human
gcugggaggaucucucccuguc

SEQ ID NO: 603038 - RNA, 22 nt, Human
aagcuuuguccaaggccaugca

SEQ ID NO: 603039 - RNA, 22 nt, Human
auguuaaauaaucccuuaaagc

SEQ ID NO: 603040 - RNA, 20 nt, Human
cuggccagaacgccuacaca

SEQ ID NO: 603041 - RNA, 21 nt, Human
gggcaggucucugaugucaac

SEQ ID NO: 603042 - RNA, 22 nt, Human
gcacaggcucucuuggggacac

SEQ ID NO: 603043 - RNA, 22 nt, Human
uccuccugccuuugcuucuugu

SEQ ID NO: 603044 - RNA, 22 nt, Human
cagcccacgucagggccacuca

SEQ ID NO: 603045 - RNA, 22 nt, Human
ugugcuuuucucugcuccugga

SEQ ID NO: 603046 - RNA, 22 nt, Human
guggcagagugcgguucugacc

SEQ ID NO: 603047 - RNA, 23 nt, Human
acagacauuccauaauguacacc

SEQ ID NO: 603048 - RNA, 22 nt, Human
auuuacagccuugaaaacagca

SEQ ID NO: 603049 - RNA, 22 nt, Human
acagggugaaugugacauuauc

SEQ ID NO: 603050 - RNA, 22 nt, Human
cucccuggcagccgcacuccug

SEQ ID NO: 603051 - RNA, 22 nt, Human
cuaaagauaaggaaaguauccu

SEQ ID NO: 603052 - RNA, 22 nt, Human
gcugggcucuuaucaccuguac

SEQ ID NO: 603053 - RNA, 21 nt, Human
agccuggguauccuuugagga

SEQ ID NO: 603054 - RNA, 22 nt, Human
uguuacacagcagaauagcaag

SEQ ID NO: 603055 - RNA, 23 nt, Human
uguguucagucaaggaucagagu

SEQ ID NO: 603056 - RNA, 22 nt, Human
uguuugcuauauccuacuucau

SEQ ID NO: 603057 - RNA, 22 nt, Human
uccaggggagacuagacccaca

SEQ ID NO: 603058 - RNA, 18 nt, Human
gccagagggaagcaggug

SEQ ID NO: 603059 - RNA, 22 nt, Human
ucaaugcaaccuccaccucccg

SEQ ID NO: 603060 - RNA, 22 nt, Human
agguauuuuauagauaaguaaa

SEQ ID NO: 603061 - RNA, 22 nt, Human
ggagccuggcaaugcugcgucc

SEQ ID NO: 603062 - RNA, 22 nt, Human
acacagaagaucucuuaaugcu

SEQ ID NO: 603063 - RNA, 22 nt, Human
uguuacaaaugcggaguuugug

SEQ ID NO: 603064 - RNA, 22 nt, Human
aaaguguugggauuacaggcau

SEQ ID NO: 603065 - RNA, 22 nt, Human
uccaggcucagucaagcacuuc

SEQ ID NO: 603066 - RNA, 22 nt, Human
acaggauuucaccauguuggcc

SEQ ID NO: 603067 - RNA, 17 nt, Human
caagagagaugacugga

SEQ ID NO: 603068 - RNA, 22 nt, Human
accugcaguggccacuccuaau

SEQ ID NO: 603069 - RNA, 22 nt, Human
acugugugaaacaucaaugugu

SEQ ID NO: 603070 - RNA, 22 nt, Human
acacagaggaaagugugaaggg

SEQ ID NO: 603071 - RNA, 22 nt, Human
aagguccuguagccacagagcc

SEQ ID NO: 603072 - RNA, 22 nt, Human
acaaagauguuuaaagcauuua

SEQ ID NO: 603073 - RNA, 22 nt, Human
uuugcauuaguuuagauuucaa

SEQ ID NO: 603074 - RNA, 22 nt, Human
uuuaagagccuguacaaauauu

SEQ ID NO: 603075 - RNA, 22 nt, Human
ucacaguaucacacaaggauua

SEQ ID NO: 603076 - RNA, 22 nt, Human
ggcagccaugcacgcugccugg

SEQ ID NO: 603077 - RNA, 22 nt, Human
ugcuggcuguguaccaucucaa

SEQ ID NO: 603078 - RNA, 22 nt, Human
gcacugggggcagcagugaggg

SEQ ID NO: 603079 - RNA, 20 nt, Human
cucagaaaagcuaaggagaa

SEQ ID NO: 603080 - RNA, 22 nt, Human
ccaugcugugacacaguaguua

SEQ ID NO: 603081 - RNA, 22 nt, Human
ggcacugggcaccggcugaggg

SEQ ID NO: 603082 - RNA, 22 nt, Human
aacaaaguguacuuccauacug

SEQ ID NO: 603083 - RNA, 19 nt, Human
uccucaggggcucacagac

SEQ ID NO: 603084 - RNA, 22 nt, Human
gcccuguguauccccugugcuu

SEQ ID NO: 603085 - RNA, 20 nt, Human
aaaggaauauaugaaguaua

SEQ ID NO: 603086 - RNA, 22 nt, Human
acaguccuagcugcaaagaagu

SEQ ID NO: 603087 - RNA, 22 nt, Human
caggccacaaguuggguucaag

SEQ ID NO: 603088 - RNA, 22 nt, Human
agugaaauaugcccauugcugu

SEQ ID NO: 603089 - RNA, 22 nt, Human
ucacacauacucaugugugagu

SEQ ID NO: 603090 - RNA, 22 nt, Human
ugguggcacaagggagagaauc

SEQ ID NO: 603091 - RNA, 22 nt, Human
cucuggggaagcagccagcugg

SEQ ID NO: 603092 - RNA, 21 nt, Human
uucuuucugaaucugaaguau

SEQ ID NO: 603093 - RNA, 22 nt, Human
gccagacacuccccugggcagg

SEQ ID NO: 603094 - RNA, 22 nt, Human
uaauagaauaguggaaacauug

SEQ ID NO: 603095 - RNA, 22 nt, Human
uggcaauuguccacugucugcc

SEQ ID NO: 603096 - RNA, 22 nt, Human
ugggguggauagaaagugaugu

SEQ ID NO: 603097 - RNA, 22 nt, Human
auucuccuuauucugaaaaaag

SEQ ID NO: 603098 - RNA, 20 nt, Human
ucaauuucagguagcauagu

SEQ ID NO: 603099 - RNA, 21 nt, Human
ugcagcagaguaagcagggga

SEQ ID NO: 603100 - RNA, 17 nt, Human
aguuuugauauaauggc

SEQ ID NO: 603101 - RNA, 22 nt, Human
acaguuuauaaaaauaaugagg

SEQ ID NO: 603102 - RNA, 22 nt, Human
agccacaaaggcuugccucgga

SEQ ID NO: 603103 - RNA, 22 nt, Human
ucucagggcucagagcucaggc

SEQ ID NO: 603104 - RNA, 22 nt, Human
aggaggccgcugaugggcuccc

SEQ ID NO: 603105 - RNA, 22 nt, Human
agugggguccucaguaugguuc

SEQ ID NO: 603106 - RNA, 22 nt, Human
gcacagggcaacaggucuguua

SEQ ID NO: 603107 - RNA, 22 nt, Human
ugcaaguaauuccagcuacuga

SEQ ID NO: 603108 - RNA, 22 nt, Human
uagucacaugaucacaggaucg

SEQ ID NO: 603109 - RNA, 23 nt, Human
auuugaaacuuucuuguuuccag

SEQ ID NO: 603110 - RNA, 22 nt, Human
cuccucugucuaccacgagggu

SEQ ID NO: 603111 - RNA, 22 nt, Human
guguuuguucgugacuccaaag

SEQ ID NO: 603112 - RNA, 22 nt, Human
cuaaaauuaucaagauaauucc

SEQ ID NO: 603113 - RNA, 22 nt, Human
cugcucuagguuccugcauaug

SEQ ID NO: 603114 - RNA, 22 nt, Human
aaagguuuuguucaucgauuuu

SEQ ID NO: 603115 - RNA, 22 nt, Human
aaagucaaugauuucuccugga

SEQ ID NO: 603116 - RNA, 22 nt, Human
gagcccugacacugagggaguu

SEQ ID NO: 603117 - RNA, 22 nt, Human
caugcagaugucaugaggcaug

SEQ ID NO: 603118 - RNA, 22 nt, Human
uaucaacauuaauauuuucugg

SEQ ID NO: 603119 - RNA, 22 nt, Human
agugcaaagcagccuguacacc

SEQ ID NO: 603120 - RNA, 22 nt, Human
uaucucuugucuguuuugcaaa

SEQ ID NO: 603121 - RNA, 22 nt, Human
cuccagggagcuuggaaagacc

SEQ ID NO: 603122 - RNA, 22 nt, Human
acuucauucauuuucacgaaug

SEQ ID NO: 603123 - RNA, 22 nt, Human
aaacuugaacccagcucaggcu

SEQ ID NO: 603124 - RNA, 22 nt, Human
gcccugugcgacucuagagguu

SEQ ID NO: 603125 - RNA, 22 nt, Human
ugcugaggcccaggagcacuuu

SEQ ID NO: 603126 - RNA, 22 nt, Human
cuuccugcauggagucugaaug

SEQ ID NO: 603127 - RNA, 22 nt, Human
agcugcagcccuccugcauggc

SEQ ID NO: 603128 - RNA, 22 nt, Human
aaucaaaaccuacagagguaau

SEQ ID NO: 603129 - RNA, 22 nt, Human
ccugcagaggucaggccagaaa

SEQ ID NO: 603130 - RNA, 22 nt, Human
ggcucauguaugaaagggugug

SEQ ID NO: 603131 - RNA, 22 nt, Human
aguauuugaucagaugauagua

SEQ ID NO: 603132 - RNA, 22 nt, Human
aaagacacaaauguagaccaaa

SEQ ID NO: 603133 - RNA, 22 nt, Human
uacauuaaggauauggacauga

SEQ ID NO: 603134 - RNA, 22 nt, Human
auucuuacaaaugaaacugcaa

SEQ ID NO: 603135 - RNA, 22 nt, Human
guuuaauucccacaccugcccu

SEQ ID NO: 603136 - RNA, 22 nt, Human
aauuuacaguugcugaugguac

SEQ ID NO: 603137 - RNA, 22 nt, Human
cagucauuuuauuugaaaauua

SEQ ID NO: 603138 - RNA, 22 nt, Human
acccucccauuuccauguagca

SEQ ID NO: 603139 - RNA, 22 nt, Human
cagcuaggaaaccagagggcag

SEQ ID NO: 603140 - RNA, 22 nt, Human
aaaacagacagccaguguagag

SEQ ID NO: 603141 - RNA, 22 nt, Human
agggcccuuacgcaggcccuuc

SEQ ID NO: 603142 - RNA, 22 nt, Human
uuauuauuuuguguacagcaaa

SEQ ID NO: 603143 - RNA, 19 nt, Human
uaacaggggaaaaugauca

SEQ ID NO: 603144 - RNA, 19 nt, Human
cugcucuccuugacuugga

SEQ ID NO: 603145 - RNA, 23 nt, Human
ugcagcugccucuggcgggccgg

SEQ ID NO: 603146 - RNA, 22 nt, Human
auguguuugguuauaugguauu

SEQ ID NO: 603147 - RNA, 22 nt, Human
caaaaguaauugugguuuuugc

SEQ ID NO: 603148 - RNA, 22 nt, Human
uuuuuuccuucaugacuuaaga

SEQ ID NO: 603149 - RNA, 22 nt, Human
cugcugagcccuggcacaggug

SEQ ID NO: 603150 - RNA, 22 nt, Human
gauggucuuugucucugauaag

SEQ ID NO: 603151 - RNA, 22 nt, Human
augcuaaauccagaagcaguca

SEQ ID NO: 603152 - RNA, 21 nt, Human
aggcagcaucugauuuauaug

SEQ ID NO: 603153 - RNA, 22 nt, Human
gcaguggcaccgcuggcucugg

SEQ ID NO: 603154 - RNA, 22 nt, Human
cacaguuuuaucuuauacugau

SEQ ID NO: 603155 - RNA, 22 nt, Human
uuucaugauuaacuuagugaau

SEQ ID NO: 603156 - RNA, 22 nt, Human
aaaauagauaaugccaggguca

SEQ ID NO: 603157 - RNA, 22 nt, Human
aggaugugagccagccuggccu

SEQ ID NO: 603158 - RNA, 22 nt, Human
gccuggcaggggccugggagug

SEQ ID NO: 603159 - RNA, 22 nt, Human
caggggcuguggcacauggugu

SEQ ID NO: 603160 - RNA, 22 nt, Human
cugcuuuaaucccugccuggaa

SEQ ID NO: 603161 - RNA, 22 nt, Human
agagccugcaucuagccucaga

SEQ ID NO: 603162 - RNA, 22 nt, Human
aauaucaacaguguccuucuaa

SEQ ID NO: 603163 - RNA, 23 nt, Human
acauuucaauacugagggucuga

SEQ ID NO: 603164 - RNA, 22 nt, Human
ccaggccauucccagaguugcu

SEQ ID NO: 603165 - RNA, 22 nt, Human
uuucucucuggcccugauuguc

SEQ ID NO: 603166 - RNA, 22 nt, Human
acucauuuaaacauuuacugaa

SEQ ID NO: 603167 - RNA, 22 nt, Human
ugggaugaauacaaugggauca

SEQ ID NO: 603168 - RNA, 22 nt, Human
aggcuaagauguggucugagca

SEQ ID NO: 603169 - RNA, 20 nt, Human
cccagccccuaccuguugcc

SEQ ID NO: 603170 - RNA, 22 nt, Human
agguguggcuugaagucucuau

SEQ ID NO: 603171 - RNA, 22 nt, Human
uacauguaauuuucauaguaag

SEQ ID NO: 603172 - RNA, 22 nt, Human
uuccuucuauucagcuccaaga

SEQ ID NO: 603173 - RNA, 22 nt, Human
agaguuaaauaagcauuaacuu

SEQ ID NO: 603174 - RNA, 23 nt, Human
ugcugggcagagcuggugcugag

SEQ ID NO: 603175 - RNA, 22 nt, Human
aaguggagagcccuggaggucu

SEQ ID NO: 603176 - RNA, 22 nt, Human
caaaucuauauguugauauucu

SEQ ID NO: 603177 - RNA, 22 nt, Human
ccuucagccuagaacuugagag

SEQ ID NO: 603178 - RNA, 22 nt, Human
ugugugugacucauacuagaac

SEQ ID NO: 603179 - RNA, 22 nt, Human
ugugaauguauaguuuguauau

SEQ ID NO: 603180 - RNA, 21 nt, Human
ugugucacuaacuagaggcua

SEQ ID NO: 603181 - RNA, 19 nt, Human
ccaggccuccugggagguc

SEQ ID NO: 603182 - RNA, 22 nt, Human
uccaguggcaggcggugagguc

SEQ ID NO: 603183 - RNA, 22 nt, Human
acacauauauuugcauauacac

SEQ ID NO: 603184 - RNA, 22 nt, Human
aacaguaaaaaucauuuaguug

SEQ ID NO: 603185 - RNA, 22 nt, Human
acugugcuuucucuggaggcau

SEQ ID NO: 603186 - RNA, 22 nt, Human
ucaaugcacacaggacuuggug

SEQ ID NO: 603187 - RNA, 22 nt, Human
ugucuuuagcccauauagacuu

SEQ ID NO: 603188 - RNA, 22 nt, Human
aggaaacuaacuuaucuuuaua

SEQ ID NO: 603189 - RNA, 20 nt, Human
gaaaggagugucccugugag

SEQ ID NO: 603190 - RNA, 22 nt, Human
ggggaaacugaggcacagacag

SEQ ID NO: 603191 - RNA, 22 nt, Human
aaggagggaaagcagugcuucu

SEQ ID NO: 603192 - RNA, 22 nt, Human
agauccaguuaauagcuucauu

SEQ ID NO: 603193 - RNA, 22 nt, Human
uuucuccugugaggucagaagu

SEQ ID NO: 603194 - RNA, 21 nt, Human
ucauggauuuucucugcuuuu

SEQ ID NO: 603195 - RNA, 22 nt, Human
uacauggguagguuaagucaua

SEQ ID NO: 603196 - RNA, 22 nt, Human
ugaaauguacaagugcuuuuuu

SEQ ID NO: 603197 - RNA, 22 nt, Human
ucugaggccccagcccugcaca

SEQ ID NO: 603198 - RNA, 22 nt, Human
cuauggugauagaaaucagaau

SEQ ID NO: 603199 - RNA, 22 nt, Human
agcaggcaggaaggcagcacug

SEQ ID NO: 603200 - RNA, 22 nt, Human
cuccaucagcuguugguugagg

SEQ ID NO: 603201 - RNA, 22 nt, Human
gcugggcucagaccuagugaac

SEQ ID NO: 603202 - RNA, 22 nt, Human
agcugucuaccugcagaguccu

SEQ ID NO: 603203 - RNA, 22 nt, Human
aaucagaaagaggucauguugc

SEQ ID NO: 603204 - RNA, 22 nt, Human
ccugggaacaguggguuggcuc

SEQ ID NO: 603205 - RNA, 22 nt, Human
aacuaguuuagcuuuuuaagac

SEQ ID NO: 603206 - RNA, 22 nt, Human
uugcuauaaaugguuucauauu

SEQ ID NO: 603207 - RNA, 22 nt, Human
cuccuggcacugucuugaccca

SEQ ID NO: 603208 - RNA, 22 nt, Human
cugcuccuguccagcagggcca

SEQ ID NO: 603209 - RNA, 22 nt, Human
augaggcauucacagaaggcac

SEQ ID NO: 603210 - RNA, 22 nt, Human
agugggcaaaacagcucagagc

SEQ ID NO: 603211 - RNA, 22 nt, Human
ucaguuuauaaauuguauuuag

SEQ ID NO: 603212 - RNA, 22 nt, Human
cuuccuggaugagcaggcugau

SEQ ID NO: 603213 - RNA, 22 nt, Human
uaguuuuuaaguguacaauuuc

SEQ ID NO: 603214 - RNA, 22 nt, Human
cugccugugugugccugcagaa

SEQ ID NO: 603215 - RNA, 22 nt, Human
agcacagguacggagaugcuac

SEQ ID NO: 603216 - RNA, 22 nt, Human
gacggagcugguugcugcggcu

SEQ ID NO: 603217 - RNA, 22 nt, Human
auguuuguugaucauuuaugaa

SEQ ID NO: 603218 - RNA, 22 nt, Human
uugcugagcuuuggcaaggaag

SEQ ID NO: 603219 - RNA, 17 nt, Human
agcaaaaguaucaaagc

SEQ ID NO: 603220 - RNA, 22 nt, Human
aauucacuguuccuucugcuuu

SEQ ID NO: 603221 - RNA, 22 nt, Human
gugaauaaucacccuucuggau

SEQ ID NO: 603222 - RNA, 22 nt, Human
gcaagcaagcagguagagcuga

SEQ ID NO: 603223 - RNA, 22 nt, Human
aaugugaaaccgcacagaauaa

SEQ ID NO: 603224 - RNA, 22 nt, Human
ugugacuuaauccuuggguggg

SEQ ID NO: 603225 - RNA, 22 nt, Human
gcccagaguucaaggcugcagu

SEQ ID NO: 603226 - RNA, 22 nt, Human
gagcugccuacauugccaagag

SEQ ID NO: 603227 - RNA, 22 nt, Human
ccauggcuuacagauggagcau

SEQ ID NO: 603228 - RNA, 22 nt, Human
uuccugagucccggguaaagau

SEQ ID NO: 603229 - RNA, 22 nt, Human
auacuaaaguauagaacuuagu

SEQ ID NO: 603230 - RNA, 22 nt, Human
uaucagcucggaaucuguugaa

SEQ ID NO: 603231 - RNA, 18 nt, Human
cuccagagcugugagaca

SEQ ID NO: 603232 - RNA, 22 nt, Human
ccagagcaugaagggcaaugac

SEQ ID NO: 603233 - RNA, 22 nt, Human
aagagcuguaugccauaugauu

SEQ ID NO: 603234 - RNA, 22 nt, Human
aaagagaaaaugaucuguacau

SEQ ID NO: 603235 - RNA, 20 nt, Human
uacaguucuguagaaguaga

SEQ ID NO: 603236 - RNA, 22 nt, Human
ugagcuggauccaacuccguuu

SEQ ID NO: 603237 - RNA, 22 nt, Human
uggcagcagccauggaaggccc

SEQ ID NO: 603238 - RNA, 22 nt, Human
aaugcagaguaaauauuuaauu

SEQ ID NO: 603239 - RNA, 22 nt, Human
agucucuuuugcgaagaguguu

SEQ ID NO: 603240 - RNA, 22 nt, Human
ccuggaguuuuuugguugacuc

SEQ ID NO: 603241 - RNA, 22 nt, Human
aauaguauuuauuuggaaaaag

SEQ ID NO: 603242 - RNA, 22 nt, Human
agacccccuuuaauggaagugc

SEQ ID NO: 603243 - RNA, 22 nt, Human
ccuggggagaagagcuuccccc

SEQ ID NO: 603244 - RNA, 22 nt, Human
gaguuacauuuggugacacuuc

SEQ ID NO: 603245 - RNA, 22 nt, Human
ucaccucucuggccgucuaccu

SEQ ID NO: 603246 - RNA, 22 nt, Human
ugcaaaugcccauuuauuuucu

SEQ ID NO: 603247 - RNA, 20 nt, Human
uaacaggaagcauuauuuua

SEQ ID NO: 603248 - RNA, 22 nt, Human
guggggaggcauucuucucccu

SEQ ID NO: 603249 - RNA, 22 nt, Human
gugaagcacgcugccgcacugg

SEQ ID NO: 603250 - RNA, 18 nt, Human
gccaggcaggguggggaa

SEQ ID NO: 603251 - RNA, 19 nt, Human
acuguucuaacuugcagcu

SEQ ID NO: 603252 - RNA, 22 nt, Human
uacuauugaaucauugucaauc

SEQ ID NO: 603253 - RNA, 22 nt, Human
uuccuggucccguucuucacug

SEQ ID NO: 603254 - RNA, 22 nt, Human
cuaaacaaugaacaaagcacug

SEQ ID NO: 603255 - RNA, 20 nt, Human
cagggacagcaguggguuuu

SEQ ID NO: 603256 - RNA, 22 nt, Human
aacuccaugguucucagauucu

SEQ ID NO: 603257 - RNA, 22 nt, Human
guugaaauccuaacccccuagu

SEQ ID NO: 603258 - RNA, 22 nt, Human
guuuacauauuuuaauugguga

SEQ ID NO: 603259 - RNA, 22 nt, Human
uugugugugagccuucaccaca

SEQ ID NO: 603260 - RNA, 22 nt, Human
gaagauuaaaugaagugaccug

SEQ ID NO: 603261 - RNA, 22 nt, Human
ucacauuuucuuaggaaacuua

SEQ ID NO: 603262 - RNA, 22 nt, Human
auggaaagccaguguuccauca

SEQ ID NO: 603263 - RNA, 19 nt, Human
auacaguaagguguuugcc

SEQ ID NO: 603264 - RNA, 22 nt, Human
gcuuuuauuucuucacaaaagu

SEQ ID NO: 603265 - RNA, 22 nt, Human
acaguguucugcuuuuuaaucc

SEQ ID NO: 603266 - RNA, 22 nt, Human
gggcacuggaggccaaggagcu

SEQ ID NO: 603267 - RNA, 19 nt, Human
ccacuuugcagauagugag

SEQ ID NO: 603268 - RNA, 22 nt, Human
aggcaucaggaguauagccaga

SEQ ID NO: 603269 - RNA, 22 nt, Human
ggauggcagucugcaugagaaa

SEQ ID NO: 603270 - RNA, 22 nt, Human
agaguggagagaaacaacucug

SEQ ID NO: 603271 - RNA, 22 nt, Human
gugggaugguagguagguaaua

SEQ ID NO: 603272 - RNA, 22 nt, Human
auacauaugaaugauuuggcuc

SEQ ID NO: 603273 - RNA, 23 nt, Human
accagcugcccugaacuuugugc

SEQ ID NO: 603274 - RNA, 22 nt, Human
cuggggccacaacggcgcacgc

SEQ ID NO: 603275 - RNA, 21 nt, Human
acugcaucugaagucccagga

SEQ ID NO: 603276 - RNA, 20 nt, Human
uuggggcauccaccgaaugg

SEQ ID NO: 603277 - RNA, 22 nt, Human
agagccugaggaugucccagcu

SEQ ID NO: 603278 - RNA, 20 nt, Human
uuggcucagauuuuuauggg

SEQ ID NO: 603279 - RNA, 22 nt, Human
agggacagucuacuguucacug

SEQ ID NO: 603280 - RNA, 22 nt, Human
uaauuuaugguauguguguaau

SEQ ID NO: 603281 - RNA, 22 nt, Human
cacuguuauuacuacuauacau

SEQ ID NO: 603282 - RNA, 22 nt, Human
agacacuggcacuggggaagcc

SEQ ID NO: 603283 - RNA, 22 nt, Human
cugcagcuuuggaaaccuguuu

SEQ ID NO: 603284 - RNA, 21 nt, Human
auuauuauuucuguguccagc

SEQ ID NO: 603285 - RNA, 20 nt, Human
agcuccagugcugacgcuuc

SEQ ID NO: 603286 - RNA, 22 nt, Human
ucagaggaacacuguuucaugc

SEQ ID NO: 603287 - RNA, 22 nt, Human
ccuguacauggccaucuuuacc

SEQ ID NO: 603288 - RNA, 22 nt, Human
ugucuccugggcccuggcccug

SEQ ID NO: 603289 - RNA, 19 nt, Human
cuugccuguuccuacagcu

SEQ ID NO: 603290 - RNA, 22 nt, Human
ugguccucagguucucugugcg

SEQ ID NO: 603291 - RNA, 19 nt, Human
gcaggcacagcccugggug

SEQ ID NO: 603292 - RNA, 22 nt, Human
gaugucuuaagcccagaaguuc

SEQ ID NO: 603293 - RNA, 22 nt, Human
uaguuuaggugggguagacaga

SEQ ID NO: 603294 - RNA, 22 nt, Human
uuguuuuccugggauaccaacc

SEQ ID NO: 603295 - RNA, 22 nt, Human
gauucugaucuauaguguuaua

SEQ ID NO: 603296 - RNA, 22 nt, Human
gccaccuccuuauuccaccugu

SEQ ID NO: 603297 - RNA, 22 nt, Human
aaauaacuuucuguguauaguc

SEQ ID NO: 603298 - RNA, 22 nt, Human
gggcacuggcagucggggacgc

SEQ ID NO: 603299 - RNA, 22 nt, Human
cuucacuucacagaugccaaga

SEQ ID NO: 603300 - RNA, 20 nt, Human
accccagccccucuaucuga

SEQ ID NO: 603301 - RNA, 22 nt, Human
aggcagugcucaagacagcagc

SEQ ID NO: 603302 - RNA, 22 nt, Human
guggagggugagcucauguuug

SEQ ID NO: 603303 - RNA, 22 nt, Human
ggccacagcaaugcugugaugu

SEQ ID NO: 603304 - RNA, 22 nt, Human
caggcucccuaagucagcagcc

SEQ ID NO: 603305 - RNA, 22 nt, Human
ugagguagggacuuaaaacugu

SEQ ID NO: 603306 - RNA, 22 nt, Human
ucacaaauauuuuaacaguagg

SEQ ID NO: 603307 - RNA, 22 nt, Human
cuuggagucaauaagaucuaga

SEQ ID NO: 603308 - RNA, 22 nt, Human
gagacagaucucggcuccaugc

SEQ ID NO: 603309 - RNA, 22 nt, Human
cuugcaguuuagguccucugug

SEQ ID NO: 603310 - RNA, 19 nt, Human
ugugagaggcuagcugccc

SEQ ID NO: 603311 - RNA, 22 nt, Human
ugcagaaggaggaggaaaucca

SEQ ID NO: 603312 - RNA, 22 nt, Human
aaaauugucgaacaguaguaac

SEQ ID NO: 603313 - RNA, 22 nt, Human
uucuguuacuugcaaccacagg

SEQ ID NO: 603314 - RNA, 22 nt, Human
uccagcuggggacaugggcuuc

SEQ ID NO: 603315 - RNA, 22 nt, Human
gagagaggccuccauguacuga

SEQ ID NO: 603316 - RNA, 22 nt, Human
uggcacauagcagguacucagu

SEQ ID NO: 603317 - RNA, 22 nt, Human
uugcauauauuucuaaggaggu

SEQ ID NO: 603318 - RNA, 20 nt, Human
aauagcugagggcaagagua

SEQ ID NO: 603319 - RNA, 22 nt, Human
ggcagaagaaaggcuaagucuc

SEQ ID NO: 603320 - RNA, 22 nt, Human
ugaaacaagggaccguccuuuc

SEQ ID NO: 603321 - RNA, 22 nt, Human
ugcccuccacaguggcuccacc

SEQ ID NO: 603322 - RNA, 22 nt, Human
agugggagaaugaauaagggcc

SEQ ID NO: 603323 - RNA, 22 nt, Human
uucauugcauuccagccugggu

SEQ ID NO: 603324 - RNA, 22 nt, Human
uaugaacugugagugugauggg

SEQ ID NO: 603325 - RNA, 22 nt, Human
agugugugccuuuggauaccug

SEQ ID NO: 603326 - RNA, 22 nt, Human
gugcaaaaguaauggcaguuuu

SEQ ID NO: 603327 - RNA, 22 nt, Human
gcccaagcuggacugcaguggc

SEQ ID NO: 603328 - RNA, 22 nt, Human
auuucuacugugagaaacauga

SEQ ID NO: 603329 - RNA, 22 nt, Human
agcaggugaauuccuggaugug

SEQ ID NO: 603330 - RNA, 22 nt, Human
ucaaggcuauuaauucugugag

SEQ ID NO: 603331 - RNA, 22 nt, Human
aaggcucucugauggcagcagu

SEQ ID NO: 603332 - RNA, 22 nt, Human
cuguggucaccaggcuggggcc

SEQ ID NO: 603333 - RNA, 22 nt, Human
uacauagcaaggaaaugacaga

SEQ ID NO: 603334 - RNA, 21 nt, Human
uguggcugccucuggcccugg

SEQ ID NO: 603335 - RNA, 22 nt, Human
uaaagcaggugcucagugacca

SEQ ID NO: 603336 - RNA, 22 nt, Human
aagcagagccugagacagggau

SEQ ID NO: 603337 - RNA, 22 nt, Human
cucaggagcuuccucagcccau

SEQ ID NO: 603338 - RNA, 22 nt, Human
cugcagcaggaggcuccugcag

SEQ ID NO: 603339 - RNA, 22 nt, Human
ucaggcugcaguggcaaaagac

SEQ ID NO: 603340 - RNA, 22 nt, Human
aaauaaguaguuuaguguugug

SEQ ID NO: 603341 - RNA, 22 nt, Human
cagagcuguccaaacccugaca

SEQ ID NO: 603342 - RNA, 20 nt, Human
aggucugaaugucagggcug

SEQ ID NO: 603343 - RNA, 22 nt, Human
uguggcagucucacuggagggc

SEQ ID NO: 603344 - RNA, 20 nt, Human
uucaugggagcaaagaggcc

SEQ ID NO: 603345 - RNA, 22 nt, Human
ugguagcaacaucucaguggcu

SEQ ID NO: 603346 - RNA, 22 nt, Human
gaaggcuuuuuggguaauugua

SEQ ID NO: 603347 - RNA, 22 nt, Human
agcaguuuggcccgagcaguuc

SEQ ID NO: 603348 - RNA, 22 nt, Human
gcaaaaaccacaauuacuuuug

SEQ ID NO: 603349 - RNA, 22 nt, Human
uucuuccuugguuuccuggaua

SEQ ID NO: 603350 - RNA, 22 nt, Human
cugaagccaguuugcugcccuu

SEQ ID NO: 603351 - RNA, 21 nt, Human
gcaggaugcaucuuggugucu

SEQ ID NO: 603352 - RNA, 22 nt, Human
aucagcaaucucguguauuagg

SEQ ID NO: 603353 - RNA, 22 nt, Human
agauggggcagaauggagccau

SEQ ID NO: 603354 - RNA, 22 nt, Human
agggggugcauuugugaaugaa

SEQ ID NO: 603355 - RNA, 23 nt, Human
gccugccugaccugugcaaaguc

SEQ ID NO: 603356 - RNA, 22 nt, Human
agggccagaugaagccacaagc

SEQ ID NO: 603357 - RNA, 22 nt, Human
gcagguagugaucgagggugac

SEQ ID NO: 603358 - RNA, 22 nt, Human
acagugcuggcuacaacccugg

SEQ ID NO: 603359 - RNA, 21 nt, Human
agcagagugcuuugacuuugu

SEQ ID NO: 603360 - RNA, 22 nt, Human
ggugcugacauucagagucugg

SEQ ID NO: 603361 - RNA, 21 nt, Human
ucacuagugccuucugucauu

SEQ ID NO: 603362 - RNA, 23 nt, Human
ccaagcuucuaaugcugcugagc

SEQ ID NO: 603363 - RNA, 22 nt, Human
auuuucugugugcagauaaaua

SEQ ID NO: 603364 - RNA, 18 nt, Human
auuaaggaauucuuuaga

SEQ ID NO: 603365 - RNA, 20 nt, Human
caauagaauguggagauaag

SEQ ID NO: 603366 - RNA, 19 nt, Human
aguagcagaaagugcagug

SEQ ID NO: 603367 - RNA, 22 nt, Human
ugaagcaaacgcuucuguuccu

SEQ ID NO: 603368 - RNA, 22 nt, Human
uucccuuccucacucuacuugu

SEQ ID NO: 603369 - RNA, 21 nt, Human
ugaagggguggcagugugcuu

SEQ ID NO: 603370 - RNA, 22 nt, Human
ugagcaggugagucuagggcag

SEQ ID NO: 603371 - RNA, 22 nt, Human
aaugaacaggugaaugucagau

SEQ ID NO: 603372 - RNA, 22 nt, Human
cuuuccuucucgugguucucac

SEQ ID NO: 603373 - RNA, 22 nt, Human
aggaaacauugauauugggaaa

SEQ ID NO: 603374 - RNA, 22 nt, Human
aaagagaugugccaaauagccu

SEQ ID NO: 603375 - RNA, 22 nt, Human
auauuauagacagagucuucug

SEQ ID NO: 603376 - RNA, 22 nt, Human
acaugggaucaaugaggcaggc

SEQ ID NO: 603377 - RNA, 22 nt, Human
aaacauugagcacuugcuauuu

SEQ ID NO: 603378 - RNA, 22 nt, Human
gguaggaguauuuugcagcagu

SEQ ID NO: 603379 - RNA, 22 nt, Human
agguuggccucagggaggcucu

SEQ ID NO: 603380 - RNA, 23 nt, Human
agccccucauggugucuagacag

SEQ ID NO: 603381 - RNA, 22 nt, Human
cuuuuugucucuguccugauga

SEQ ID NO: 603382 - RNA, 22 nt, Human
cugcccugggugcuggggaucc

SEQ ID NO: 603383 - RNA, 22 nt, Human
gggaugggagagcauuuagaga

SEQ ID NO: 603384 - RNA, 19 nt, Human
uucugcuguuccuaggcug

SEQ ID NO: 603385 - RNA, 22 nt, Human
gccacaggcuccagcaucagua

SEQ ID NO: 603386 - RNA, 22 nt, Human
cuggcccagguggucguugagg

SEQ ID NO: 603387 - RNA, 22 nt, Human
uugcuuuccgucaugugcuaau

SEQ ID NO: 603388 - RNA, 16 nt, Human
ucccaggaggcggaac

SEQ ID NO: 603389 - RNA, 20 nt, Human
aagggagaauaaugauugua

SEQ ID NO: 603390 - RNA, 22 nt, Human
gcuguuccugcuuagaggucgg

SEQ ID NO: 603391 - RNA, 22 nt, Human
uccagguuuucugaaggcagga

SEQ ID NO: 603392 - RNA, 22 nt, Human
acagagcugggaucugaaccca

SEQ ID NO: 603393 - RNA, 22 nt, Human
gcaggaugaaggcagaggcuga

SEQ ID NO: 603394 - RNA, 22 nt, Human
uuuugcuuaaucuagauuuugc

SEQ ID NO: 603395 - RNA, 22 nt, Human
cuuccagugcauagguagauca

SEQ ID NO: 603396 - RNA, 22 nt, Human
agacaaugucaaggugaucauc

SEQ ID NO: 603397 - RNA, 22 nt, Human
uugcaggggaaggagcagagcu

SEQ ID NO: 603398 - RNA, 21 nt, Human
ggcugggucaugcagcuggcc

SEQ ID NO: 603399 - RNA, 22 nt, Human
uucagaaguagcuaagcaguca

SEQ ID NO: 603400 - RNA, 22 nt, Human
ucugcaaacuuaaguugaaaua

SEQ ID NO: 603401 - RNA, 22 nt, Human
gaauguuauugaacuacgagcu

SEQ ID NO: 603402 - RNA, 22 nt, Human
cucuuccuacagucugcuaugc

SEQ ID NO: 603403 - RNA, 18 nt, Human
gcagucucucuggucuuc

SEQ ID NO: 603404 - RNA, 22 nt, Human
ucuuuaauaucugccccagagc

SEQ ID NO: 603405 - RNA, 22 nt, Human
auuguuuccccggaauuauuca

SEQ ID NO: 603406 - RNA, 22 nt, Human
uucucacaguaccuaacaugua

SEQ ID NO: 603407 - RNA, 22 nt, Human
ugcuuaaacauacuauuuauau

SEQ ID NO: 603408 - RNA, 22 nt, Human
gugaagaaggcaauacaaagaa

SEQ ID NO: 603409 - RNA, 22 nt, Human
uaaaucuccuguuuuucaucua

SEQ ID NO: 603410 - RNA, 22 nt, Human
uggccagguugggcuuugcagc

SEQ ID NO: 603411 - RNA, 22 nt, Human
acaggugaccugcucauaugaa

SEQ ID NO: 603412 - RNA, 22 nt, Human
aaugugaacuuugucauguaac

SEQ ID NO: 603413 - RNA, 22 nt, Human
ucaagaauuuuuaaugugacug

SEQ ID NO: 603414 - RNA, 22 nt, Human
uuagcuuaauuaaauaaucagu

SEQ ID NO: 603415 - RNA, 22 nt, Human
ugugccaaucugcugacugucu

SEQ ID NO: 603416 - RNA, 20 nt, Human
gcugaggucauuaugccuca

SEQ ID NO: 603417 - RNA, 22 nt, Human
gcucccacgcaauucuuuucag

SEQ ID NO: 603418 - RNA, 22 nt, Human
cuaaauaaucccucuggucuua

SEQ ID NO: 603419 - RNA, 22 nt, Human
acagggcuugugacaacuuuaa

SEQ ID NO: 603420 - RNA, 22 nt, Human
ugaauaauuccuuuuugucaag

SEQ ID NO: 603421 - RNA, 22 nt, Human
aggccacacaacucuuagagau

SEQ ID NO: 603422 - RNA, 22 nt, Human
uaauggauuaacgucccugucg

SEQ ID NO: 603423 - RNA, 20 nt, Human
cugaacacagaauaagcaca

SEQ ID NO: 603424 - RNA, 22 nt, Human
augaugaaaacugaagguuagg

SEQ ID NO: 603425 - RNA, 22 nt, Human
gcuggcagacugggggcagaac

SEQ ID NO: 603426 - RNA, 22 nt, Human
gagaaagggaacuuacagagug

SEQ ID NO: 603427 - RNA, 22 nt, Human
ucugaaagcauuacaguuuauu

SEQ ID NO: 603428 - RNA, 22 nt, Human
ugaucaguguugguucuaucua

SEQ ID NO: 603429 - RNA, 22 nt, Human
uagcacagagcuuuuaaacuuc

SEQ ID NO: 603430 - RNA, 22 nt, Human
augcaauauagggaagauagau

SEQ ID NO: 603431 - RNA, 22 nt, Human
aaacaguguuuuuaugauuuau

SEQ ID NO: 603432 - RNA, 22 nt, Human
ggccucugccucaucugggcac

SEQ ID NO: 603433 - RNA, 20 nt, Human
aggcuggcacuccuggccag

SEQ ID NO: 603434 - RNA, 22 nt, Human
augagcccagggaauuccuuuc

SEQ ID NO: 603435 - RNA, 22 nt, Human
cccugggaguccacugauguca

SEQ ID NO: 603436 - RNA, 22 nt, Human
uguggggcugugguguucuucu

SEQ ID NO: 603437 - RNA, 19 nt, Human
cucuccaccuaacagguau

SEQ ID NO: 603438 - RNA, 22 nt, Human
caggcagauauguucgcuuuaa

SEQ ID NO: 603439 - RNA, 22 nt, Human
ucuuccuugccuugcuucauca

SEQ ID NO: 603440 - RNA, 22 nt, Human
aggagaaggaagugcaucacua

SEQ ID NO: 603441 - RNA, 22 nt, Human
gcucccagcauugcugcugaau

SEQ ID NO: 603442 - RNA, 18 nt, Human
agagaugguguagaguuu

SEQ ID NO: 603443 - RNA, 22 nt, Human
gcaggcagagaaggaacauuua

SEQ ID NO: 603444 - RNA, 22 nt, Human
ccucugugucagggaagagacu

SEQ ID NO: 603445 - RNA, 22 nt, Human
guuaacaaccaaacagaaguuc

SEQ ID NO: 603446 - RNA, 22 nt, Human
ucaguaaaggcuagguuaugcu

SEQ ID NO: 603447 - RNA, 22 nt, Human
ugaagccaucccucagauggcc

SEQ ID NO: 603448 - RNA, 22 nt, Human
uuccuucuucauuguguuacag

SEQ ID NO: 603449 - RNA, 22 nt, Human
gucccaggcuccauggcagcca

SEQ ID NO: 603450 - RNA, 22 nt, Human
aaaacagaggugccugggccca

SEQ ID NO: 603451 - RNA, 23 nt, Human
uugaggucggcucucugagccug

SEQ ID NO: 603452 - RNA, 22 nt, Human
gcagagugagauaugaacccag

SEQ ID NO: 603453 - RNA, 22 nt, Human
gcuagugagcucuuugucaucu

SEQ ID NO: 603454 - RNA, 22 nt, Human
uggcagcuacagacagagguga

SEQ ID NO: 603455 - RNA, 21 nt, Human
uaagcauaucagauagacucu

SEQ ID NO: 603456 - RNA, 22 nt, Human
agggcugaagggaggugcucau

SEQ ID NO: 603457 - RNA, 22 nt, Human
ugauuccuaggcacucuucucc

SEQ ID NO: 603458 - RNA, 21 nt, Human
ccauaaucuuaggaucaaaau

SEQ ID NO: 603459 - RNA, 22 nt, Human
cauuucugucacguucuuuuau

SEQ ID NO: 603460 - RNA, 22 nt, Human
aaagcaugacucaagaauuacu

SEQ ID NO: 603461 - RNA, 22 nt, Human
ucccagaauccucacucuauca

SEQ ID NO: 603462 - RNA, 22 nt, Human
aguggcuggucuaaggucacag

SEQ ID NO: 603463 - RNA, 22 nt, Human
agccagcaugaagacagaggcc

SEQ ID NO: 603464 - RNA, 22 nt, Human
ugugugugcaggagagcaggug

SEQ ID NO: 603465 - RNA, 22 nt, Human
ugcugagguuucgucugcuugc

SEQ ID NO: 603466 - RNA, 22 nt, Human
caggcugccaaggcuggggagg

SEQ ID NO: 603467 - RNA, 19 nt, Human
uaaaaacugaaggaagcag

SEQ ID NO: 603468 - RNA, 22 nt, Human
uuuuaauucaaagugaauagug

SEQ ID NO: 603469 - RNA, 22 nt, Human
acugggccggugcagaguaguu

SEQ ID NO: 603470 - RNA, 20 nt, Human
uuuccacuguaauguaugau

SEQ ID NO: 603471 - RNA, 22 nt, Human
cuaggcuggagugcauuggcgu

SEQ ID NO: 603472 - RNA, 22 nt, Human
uuccuugaaaguuugaacugac

SEQ ID NO: 603473 - RNA, 22 nt, Human
uuucuuccuauguaucuugcug

SEQ ID NO: 603474 - RNA, 22 nt, Human
aggcacugguccauuuucugca

SEQ ID NO: 603475 - RNA, 22 nt, Human
cucugagaagaguucaaguaaa

SEQ ID NO: 603476 - RNA, 22 nt, Human
aagucugaucauuucuucuaua

SEQ ID NO: 603477 - RNA, 22 nt, Human
augcuaaugagcuaaggagucc

SEQ ID NO: 603478 - RNA, 23 nt, Human
aagcugccagucugaagccuggg

SEQ ID NO: 603479 - RNA, 22 nt, Human
gugcucugaguuugcaugucag

SEQ ID NO: 603480 - RNA, 22 nt, Human
ugcugaaauuagaacauugagg

SEQ ID NO: 603481 - RNA, 22 nt, Human
guagaugagcucacaugaccuu

SEQ ID NO: 603482 - RNA, 22 nt, Human
agccaggcuacuccuugcugac

SEQ ID NO: 603483 - RNA, 22 nt, Human
aauagacuccagggucuauuuu

SEQ ID NO: 603484 - RNA, 22 nt, Human
gcagugugaccgagcuugcuuc

SEQ ID NO: 603485 - RNA, 22 nt, Human
uuguccugaggacuguuaucag

SEQ ID NO: 603486 - RNA, 22 nt, Human
ccugccucccagagguccucua

SEQ ID NO: 603487 - RNA, 22 nt, Human
uguggcaggcaagauguacaga

SEQ ID NO: 603488 - RNA, 22 nt, Human
aaaguguagagugccucaaaau

SEQ ID NO: 603489 - RNA, 22 nt, Human
uuacagauguaggaacugaagu

SEQ ID NO: 603490 - RNA, 22 nt, Human
ugggagaaagaacccugaguga

SEQ ID NO: 603491 - RNA, 22 nt, Human
gccuggugguauccuggcaaga

SEQ ID NO: 603492 - RNA, 18 nt, Human
ugcauuuaguacaucuag

SEQ ID NO: 603493 - RNA, 22 nt, Human
uuuggcagagucauuucagaaa

SEQ ID NO: 603494 - RNA, 22 nt, Human
gggggcaggucuggaacuuuga

SEQ ID NO: 603495 - RNA, 22 nt, Human
cuggugcugggcagggcucagg

SEQ ID NO: 603496 - RNA, 22 nt, Human
acccagccacagcauugaggga

SEQ ID NO: 603497 - RNA, 22 nt, Human
cgcugugugcagacugaaaaug

SEQ ID NO: 603498 - RNA, 22 nt, Human
ggaggccauaguuugggaguca

SEQ ID NO: 603499 - RNA, 22 nt, Human
uucucauggugucuuuauacau

SEQ ID NO: 603500 - RNA, 22 nt, Human
cuggagggacuuucucacggau

SEQ ID NO: 603501 - RNA, 22 nt, Human
cccagggagguagcaggagaaa

SEQ ID NO: 603502 - RNA, 22 nt, Human
acagauaaggcaguuaagaguu

SEQ ID NO: 603503 - RNA, 22 nt, Human
cucccaggcagggcugcccacu

SEQ ID NO: 603504 - RNA, 22 nt, Human
ugccaggcccagcagggcggcc

SEQ ID NO: 603505 - RNA, 22 nt, Human
ucucugaauuguuuaaguuauu

SEQ ID NO: 603506 - RNA, 22 nt, Human
guggacuggcagugaccuuggu

SEQ ID NO: 603507 - RNA, 22 nt, Human
acacaggaaaugguuuaguuuu

SEQ ID NO: 603508 - RNA, 21 nt, Human
acagauuagcacaaugcaggc

SEQ ID NO: 603509 - RNA, 22 nt, Human
uuuuagauuauaagucuaauuc

SEQ ID NO: 603510 - RNA, 22 nt, Human
cauuaauaaacauuucagaaga

SEQ ID NO: 603511 - RNA, 22 nt, Human
gagguagggaagacaaauaugc

SEQ ID NO: 603512 - RNA, 23 nt, Human
ugggauagaauuucauggcugcu

SEQ ID NO: 603513 - RNA, 22 nt, Human
auauuaagaugcuauugguuuu

SEQ ID NO: 603514 - RNA, 22 nt, Human
caucagaacgugagcuccuugu

SEQ ID NO: 603515 - RNA, 22 nt, Human
cuccugagaggaucucuguugu

SEQ ID NO: 603516 - RNA, 22 nt, Human
caguacauuucauaugauucua

SEQ ID NO: 603517 - RNA, 22 nt, Human
gauuaagagaaguuucuuaucg

SEQ ID NO: 603518 - RNA, 22 nt, Human
uaucauuuaacagaaucauugc

SEQ ID NO: 603519 - RNA, 20 nt, Human
gaaauguaucucuugauucu

SEQ ID NO: 603520 - RNA, 22 nt, Human
cugagaauuacucugaugagua

SEQ ID NO: 603521 - RNA, 22 nt, Human
gacagacagggguucuccugga

SEQ ID NO: 603522 - RNA, 22 nt, Human
uuucuucuuaauacuggcugcu

SEQ ID NO: 603523 - RNA, 22 nt, Human
uggcagagagagugcagucgac

SEQ ID NO: 603524 - RNA, 22 nt, Human
ugugaaaucaauuagcugcaga

SEQ ID NO: 603525 - RNA, 22 nt, Human
caucacuacaaauuuaagaaau

SEQ ID NO: 603526 - RNA, 22 nt, Human
ugagaacauuugcagggagagu

SEQ ID NO: 603527 - RNA, 22 nt, Human
aagccaagguuuuggucacagc

SEQ ID NO: 603528 - RNA, 22 nt, Human
agaggggaguccuaaucugauu

SEQ ID NO: 603529 - RNA, 22 nt, Human
ucagcuuucuauguugcuaaac

SEQ ID NO: 603530 - RNA, 22 nt, Human
gaguggcuguguacaugcccag

SEQ ID NO: 603531 - RNA, 18 nt, Human
cugggcucgagagauccu

SEQ ID NO: 603532 - RNA, 22 nt, Human
uccagacauuuuauagcagucu

SEQ ID NO: 603533 - RNA, 22 nt, Human
cccuggagcugcuugcauguug

SEQ ID NO: 603534 - RNA, 22 nt, Human
ucagcagaaguauagaggccau

SEQ ID NO: 603535 - RNA, 22 nt, Human
gggcugagucaucuggggccuc

SEQ ID NO: 603536 - RNA, 22 nt, Human
ucacuuuugaucccuaugcagu

SEQ ID NO: 603537 - RNA, 22 nt, Human
ggagcagaugucuucauggccu

SEQ ID NO: 603538 - RNA, 22 nt, Human
ugcuguaauacuuaagguuaag

SEQ ID NO: 603539 - RNA, 22 nt, Human
cugcaggggaccaaagucugac

SEQ ID NO: 603540 - RNA, 23 nt, Human
uuguucuuggaucuuccugaagc

SEQ ID NO: 603541 - RNA, 22 nt, Human
uucugucaaagacuuuuucagg

SEQ ID NO: 603542 - RNA, 22 nt, Human
gcagcugccuauucagggcuug

SEQ ID NO: 603543 - RNA, 17 nt, Human
gcagccucuugguagug

SEQ ID NO: 603544 - RNA, 22 nt, Human
ucaguuucuucuuuagauaaaa

SEQ ID NO: 603545 - RNA, 22 nt, Human
aaguaaaauucaaucuucacug

SEQ ID NO: 603546 - RNA, 22 nt, Human
aucacauauuuaagaaacaugu

SEQ ID NO: 603547 - RNA, 22 nt, Human
ugacacaggggaaggagucugg

SEQ ID NO: 603548 - RNA, 22 nt, Human
cugcccugcagcuccacggacu

SEQ ID NO: 603549 - RNA, 22 nt, Human
aagacugucugggacaagauga

SEQ ID NO: 603550 - RNA, 22 nt, Human
uaaagcagccagggucuaagcc

SEQ ID NO: 603551 - RNA, 22 nt, Human
augagagguuucgucagaggaa

SEQ ID NO: 603552 - RNA, 21 nt, Human
auggagggaccagggaagcag

SEQ ID NO: 603553 - RNA, 22 nt, Human
aggugagguuugggagguguca

SEQ ID NO: 603554 - RNA, 22 nt, Human
aauggcuuucagcaaggauaga

SEQ ID NO: 603555 - RNA, 22 nt, Human
uaaaacacucagcaccuagcaa

SEQ ID NO: 603556 - RNA, 17 nt, Human
ugaagaugcauggcagc

SEQ ID NO: 603557 - RNA, 22 nt, Human
ccaggagaagcaucugagugua

SEQ ID NO: 603558 - RNA, 22 nt, Human
uggugccaagcaugaggacucu

SEQ ID NO: 603559 - RNA, 20 nt, Human
gcugagguuucuuccuauau

SEQ ID NO: 603560 - RNA, 22 nt, Human
cugggacucagaccaguucugu

SEQ ID NO: 603561 - RNA, 22 nt, Human
acagcaggcaugaagaaauguu

SEQ ID NO: 603562 - RNA, 22 nt, Human
uugguccugcccccuccagguc

SEQ ID NO: 603563 - RNA, 22 nt, Human
uucuuuucuuuaggcauugugu

SEQ ID NO: 603564 - RNA, 20 nt, Human
ugucauucuucuuucacagg

SEQ ID NO: 603565 - RNA, 22 nt, Human
cccaggaggacauuccauaccc

SEQ ID NO: 603566 - RNA, 22 nt, Human
uaauuauaacaguuacaucuua

SEQ ID NO: 603567 - RNA, 21 nt, Human
uaaaucucuguauucuucagu

SEQ ID NO: 603568 - RNA, 22 nt, Human
cuuaggaacacuuacugguacu

SEQ ID NO: 603569 - RNA, 22 nt, Human
uuacuuuagaucauacugugug

SEQ ID NO: 603570 - RNA, 22 nt, Human
cuggcaggcagacuucugcaag

SEQ ID NO: 603571 - RNA, 22 nt, Human
uacagugcgauuuuuaggccuc

SEQ ID NO: 603572 - RNA, 22 nt, Human
uuuuaagaaauguaugacuguc

SEQ ID NO: 603573 - RNA, 21 nt, Human
gcagacugcccugcugucccc

SEQ ID NO: 603574 - RNA, 22 nt, Human
ugccaggcuccggaacgacagu

SEQ ID NO: 603575 - RNA, 22 nt, Human
gggcugacucaaccuugcaaag

SEQ ID NO: 603576 - RNA, 22 nt, Human
cucaugucuucacccauucuaa

SEQ ID NO: 603577 - RNA, 22 nt, Human
ucacuuuggaagauagcacauc

SEQ ID NO: 603578 - RNA, 21 nt, Human
ccugugugucugacugggcua

SEQ ID NO: 603579 - RNA, 22 nt, Human
uaggaaaaauacagaauuauau

SEQ ID NO: 603580 - RNA, 22 nt, Human
auuuuagagaaacaaacguagg

SEQ ID NO: 603581 - RNA, 19 nt, Human
aggcuucaggccacaugcu

SEQ ID NO: 603582 - RNA, 18 nt, Human
uaagaagguggcuccagc

SEQ ID NO: 603583 - RNA, 22 nt, Human
uugcccugaagaacgucccaga

SEQ ID NO: 603584 - RNA, 22 nt, Human
uggcaucuuugucccagaagcu

SEQ ID NO: 603585 - RNA, 22 nt, Human
gaggcaggcccugaaugaguca

SEQ ID NO: 603586 - RNA, 22 nt, Human
uaccagcaucacagcauguugg

SEQ ID NO: 603587 - RNA, 22 nt, Human
auguuucuagagcuuuguccca

SEQ ID NO: 603588 - RNA, 19 nt, Human
caguggagauuggaggagg

SEQ ID NO: 603589 - RNA, 22 nt, Human
uaggaacacagggacuugauga

SEQ ID NO: 603590 - RNA, 22 nt, Human
uuaauugauauaaagaacuuca

SEQ ID NO: 603591 - RNA, 22 nt, Human
acuugucuuuguaaaauagaaa

SEQ ID NO: 603592 - RNA, 22 nt, Human
auaaaugauucagcaggaaaua

SEQ ID NO: 603593 - RNA, 21 nt, Human
ucccugcuuucuggcccaguc

SEQ ID NO: 603594 - RNA, 22 nt, Human
acaaugaacacacaaggaauuc

SEQ ID NO: 603595 - RNA, 22 nt, Human
agagcuguucagcagccagguu

SEQ ID NO: 603596 - RNA, 22 nt, Human
aggcuagaggcuucuggcuuca

SEQ ID NO: 603597 - RNA, 22 nt, Human
ucaaaauuucagcacuagcccu

SEQ ID NO: 603598 - RNA, 22 nt, Human
ccuccagggccccucucacugg

SEQ ID NO: 603599 - RNA, 22 nt, Human
uucacagaagaggucacauuuc

SEQ ID NO: 603600 - RNA, 23 nt, Human
gccugggacucaggaggagcuca

SEQ ID NO: 603601 - RNA, 22 nt, Human
caaugcaaugcaaugcaaugca

SEQ ID NO: 603602 - RNA, 23 nt, Human
ugccacaagaucugugaauaaga

SEQ ID NO: 603603 - RNA, 22 nt, Human
ggcaguggguuccccaaggcac

SEQ ID NO: 603604 - RNA, 22 nt, Human
cacucugacacaugaacuugau

SEQ ID NO: 603605 - RNA, 22 nt, Human
uaucuguucugcuugauuuuga

SEQ ID NO: 603606 - RNA, 22 nt, Human
cuuggguauaaaacuuggcuau

SEQ ID NO: 603607 - RNA, 18 nt, Human
uuauggcugugaaagagu

SEQ ID NO: 603608 - RNA, 22 nt, Human
cuuucuugguccugaagauggc

SEQ ID NO: 603609 - RNA, 22 nt, Human
ccacuggaagaugcugagguca

SEQ ID NO: 603610 - RNA, 22 nt, Human
aggcauggcuuuaggcaggcgu

SEQ ID NO: 603611 - RNA, 23 nt, Human
uccuugggccugcccagaguggu

SEQ ID NO: 603612 - RNA, 22 nt, Human
auuagcuuuauuugaaauagga

SEQ ID NO: 603613 - RNA, 22 nt, Human
cuccucugucuggcccugagcc

SEQ ID NO: 603614 - RNA, 22 nt, Human
aauaauguuuauuuguauucuc

SEQ ID NO: 603615 - RNA, 22 nt, Human
uacuuuauuguaaaugcugaug

SEQ ID NO: 603616 - RNA, 21 nt, Human
cugcaucucauagaacauguc

SEQ ID NO: 603617 - RNA, 22 nt, Human
acaacugucaguaaagaauauu

SEQ ID NO: 603618 - RNA, 23 nt, Human
ucacaguaucucuggagccauag

SEQ ID NO: 603619 - RNA, 22 nt, Human
uuucucuaaauagggaggcuua

SEQ ID NO: 603620 - RNA, 22 nt, Human
ggaggaggcaaguaccagaugc

SEQ ID NO: 603621 - RNA, 22 nt, Human
aucacauugccagugauuaccc

SEQ ID NO: 603622 - RNA, 22 nt, Human
gacauaaaccuugagauauuaa

SEQ ID NO: 603623 - RNA, 22 nt, Human
uuggaagaucuaacagaggcau

SEQ ID NO: 603624 - RNA, 22 nt, Human
ucuucuaugaaucauuggaaca

SEQ ID NO: 603625 - RNA, 22 nt, Human
uguuaauauacuaaaauccacu

SEQ ID NO: 603626 - RNA, 22 nt, Human
uuugaaagaaaccagugaguga

SEQ ID NO: 603627 - RNA, 22 nt, Human
ucaggacagagaucagaacuuc

SEQ ID NO: 603628 - RNA, 22 nt, Human
aguguuuacauugaagcuugua

SEQ ID NO: 603629 - RNA, 22 nt, Human
uaauuauaacaugcuuucuggc

SEQ ID NO: 603630 - RNA, 22 nt, Human
uccugaaaaauuacauguucag

SEQ ID NO: 603631 - RNA, 22 nt, Human
gcugagcugcuguucauccugc

SEQ ID NO: 603632 - RNA, 22 nt, Human
ucacaguguggcaacucacaga

SEQ ID NO: 603633 - RNA, 22 nt, Human
caguagcagggauuauuuuagg

SEQ ID NO: 603634 - RNA, 22 nt, Human
cugugucucauccgccucuggc

SEQ ID NO: 603635 - RNA, 20 nt, Human
uccaagcccuccuuccauuc

SEQ ID NO: 603636 - RNA, 22 nt, Human
gccagcugucuaagagaguaaa

SEQ ID NO: 603637 - RNA, 22 nt, Human
ggcuggguucugagaaagagua

SEQ ID NO: 603638 - RNA, 22 nt, Human
gugcagagagguggagggacuu

SEQ ID NO: 603639 - RNA, 22 nt, Human
agugauaaugugguaauuauuu

SEQ ID NO: 603640 - RNA, 22 nt, Human
agucccagugacuuggccagaa

SEQ ID NO: 603641 - RNA, 22 nt, Human
ucagcugaaguggagaagcaga

SEQ ID NO: 603642 - RNA, 22 nt, Human
cugccaggccuccgcugucccc

SEQ ID NO: 603643 - RNA, 22 nt, Human
gccaccucggcuuucucugcuc

SEQ ID NO: 603644 - RNA, 22 nt, Human
ugaagaaacagaccaagaggau

SEQ ID NO: 603645 - RNA, 22 nt, Human
cugggcugcuguccacuagggu

SEQ ID NO: 603646 - RNA, 22 nt, Human
aggccaaguuacuugggaaagc

SEQ ID NO: 603647 - RNA, 22 nt, Human
ccagccucaucgccugccuguc

SEQ ID NO: 603648 - RNA, 22 nt, Human
caaaguaauuuggagauauaua

SEQ ID NO: 603649 - RNA, 22 nt, Human
ccugugugcugaugacgacaga

SEQ ID NO: 603650 - RNA, 22 nt, Human
uauuuucaucuuguccuuggau

SEQ ID NO: 603651 - RNA, 22 nt, Human
uuauaguauuagguacucaaca

SEQ ID NO: 603652 - RNA, 22 nt, Human
cugaggagucaguuccacucag

SEQ ID NO: 603653 - RNA, 23 nt, Human
ccagggagugcuacuaucaagcc

SEQ ID NO: 603654 - RNA, 22 nt, Human
aaucagaaauucuacaucacaa

SEQ ID NO: 603655 - RNA, 22 nt, Human
gcccagggugcuuagaacccau

SEQ ID NO: 603656 - RNA, 22 nt, Human
gaaggagcuacuaauaagaggg

SEQ ID NO: 603657 - RNA, 22 nt, Human
auuaaggagguaaacuaugguu

SEQ ID NO: 603658 - RNA, 22 nt, Human
cucaggaguaguucagcagcug

SEQ ID NO: 603659 - RNA, 22 nt, Human
uuucaugucauuccauuucaga

SEQ ID NO: 603660 - RNA, 22 nt, Human
agcugcccugggcuggagaugg

SEQ ID NO: 603661 - RNA, 16 nt, Human
gagaagagcccggcag

SEQ ID NO: 603662 - RNA, 22 nt, Human
aaagcuuagaggccaguggagg

SEQ ID NO: 603663 - RNA, 17 nt, Human
gagcagggaugcgguuc

SEQ ID NO: 603664 - RNA, 22 nt, Human
ccaggcucacugacuaccacau

SEQ ID NO: 603665 - RNA, 22 nt, Human
ggucuggauaauuccaguaccu

SEQ ID NO: 603666 - RNA, 22 nt, Human
uaaaugaagaaauggagauugu

SEQ ID NO: 603667 - RNA, 22 nt, Human
cuucuucuggacaggcagcucc

SEQ ID NO: 603668 - RNA, 22 nt, Human
ugcuuuaacauaagauaucuuu

SEQ ID NO: 603669 - RNA, 22 nt, Human
cagaaauguacugacaugcagu

SEQ ID NO: 603670 - RNA, 22 nt, Human
guuuuuauuguguaaauguggg

SEQ ID NO: 603671 - RNA, 22 nt, Human
ugugugcaagugacauuagaaa

SEQ ID NO: 603672 - RNA, 19 nt, Human
gccugggaugggcagaacu

SEQ ID NO: 603673 - RNA, 22 nt, Human
ccuggugcagguguguugccag

SEQ ID NO: 603674 - RNA, 21 nt, Human
gcucucugcaugguggcucag

SEQ ID NO: 603675 - RNA, 20 nt, Human
uccuggccucccuggggcuc

SEQ ID NO: 603676 - RNA, 22 nt, Human
caugugaauuccaaagcuaggu

SEQ ID NO: 603677 - RNA, 22 nt, Human
cugccugcacugccuggcucca

SEQ ID NO: 603678 - RNA, 22 nt, Human
ccagcugcaggggagcagugga

SEQ ID NO: 603679 - RNA, 22 nt, Human
gaugcagaaaguagacaccauc

SEQ ID NO: 603680 - RNA, 22 nt, Human
auguuuuccauugccauggaaa

SEQ ID NO: 603681 - RNA, 22 nt, Human
ccagggcuccauugcucauccu

SEQ ID NO: 603682 - RNA, 22 nt, Human
uaaugccuuucuguacuauaug

SEQ ID NO: 603683 - RNA, 22 nt, Human
agcucucccaccuucuucuuac

SEQ ID NO: 603684 - RNA, 22 nt, Human
gggacaggccccucgcuagcuu

SEQ ID NO: 603685 - RNA, 22 nt, Human
gccaggagagcuccuucagguu

SEQ ID NO: 603686 - RNA, 22 nt, Human
uggcagggaauacagauguuua

SEQ ID NO: 603687 - RNA, 20 nt, Human
gccuguccugagugucaugg

SEQ ID NO: 603688 - RNA, 22 nt, Human
aacagcugucugccuaucucug

SEQ ID NO: 603689 - RNA, 22 nt, Human
gcccaggaaagauagggccuca

SEQ ID NO: 603690 - RNA, 22 nt, Human
acaaauggaagguguucucuuc

SEQ ID NO: 603691 - RNA, 22 nt, Human
gagcaggaaggccagaaggguc

SEQ ID NO: 603692 - RNA, 22 nt, Human
gcagcccagguguagcucuuug

SEQ ID NO: 603693 - RNA, 22 nt, Human
gaugcugauuuuacuguuuucu

SEQ ID NO: 603694 - RNA, 22 nt, Human
auuccuuguauaucuacaugca

SEQ ID NO: 603695 - RNA, 22 nt, Human
ucccaaggccaggcaucuagaa

SEQ ID NO: 603696 - RNA, 22 nt, Human
ugucauuuaguccucugugugu

SEQ ID NO: 603697 - RNA, 22 nt, Human
aacuaaaucuggcauuuagagc

SEQ ID NO: 603698 - RNA, 22 nt, Human
ucuugaaagcauuuucuucauc

SEQ ID NO: 603699 - RNA, 22 nt, Human
cacacaugagucuccccauugg

SEQ ID NO: 603700 - RNA, 19 nt, Human
ccagcagacacagcugccc

SEQ ID NO: 603701 - RNA, 22 nt, Human
cucugagguccuucccagcucu

SEQ ID NO: 603702 - RNA, 21 nt, Human
agcucccuguuuccucacucu

SEQ ID NO: 603703 - RNA, 22 nt, Human
uuuaacagaugaggaggugagg

SEQ ID NO: 603704 - RNA, 22 nt, Human
cugaggccucucccacuccagc

SEQ ID NO: 603705 - RNA, 22 nt, Human
augcagaaggagccaugcuugc

SEQ ID NO: 603706 - RNA, 22 nt, Human
agcucacagaaauccugcagga

SEQ ID NO: 603707 - RNA, 22 nt, Human
agaagaaaugaggccguucugc

SEQ ID NO: 603708 - RNA, 22 nt, Human
gcagaucuuuaacagggucacu

SEQ ID NO: 603709 - RNA, 22 nt, Human
cccugggauaccagacaccaga

SEQ ID NO: 603710 - RNA, 22 nt, Human
cuuuaucuaggguaagaaaacc

SEQ ID NO: 603711 - RNA, 22 nt, Human
cacugcaaccucagacuccugg

SEQ ID NO: 603712 - RNA, 22 nt, Human
ucccagggggaugaacacugcc

SEQ ID NO: 603713 - RNA, 22 nt, Human
aaagucaguuggccagaucacu

SEQ ID NO: 603714 - RNA, 22 nt, Human
guccucaguaagagggccucug

SEQ ID NO: 603715 - RNA, 22 nt, Human
acugagguuguaguaggaauuc

SEQ ID NO: 603716 - RNA, 21 nt, Human
ugagcccuugccucagagccc

SEQ ID NO: 603717 - RNA, 22 nt, Human
gucuccugagacugcagucacc

SEQ ID NO: 603718 - RNA, 22 nt, Human
gaggccagaguuccccgaguca

SEQ ID NO: 603719 - RNA, 22 nt, Human
agaggaaguaaucaggaccugc

SEQ ID NO: 603720 - RNA, 22 nt, Human
uguacaugaauaaaagaucuug

SEQ ID NO: 603721 - RNA, 22 nt, Human
cugagagaugguguguuuauaa

SEQ ID NO: 603722 - RNA, 22 nt, Human
acugauacaucuguggaagugg

SEQ ID NO: 603723 - RNA, 22 nt, Human
aguuuuauguagacaauucauu

SEQ ID NO: 603724 - RNA, 23 nt, Human
auguuuuaugucucuagcugcca

SEQ ID NO: 603725 - RNA, 22 nt, Human
aaguuucaaauguugauuaugc

SEQ ID NO: 603726 - RNA, 22 nt, Human
ugagcugugauuaacucugaga

SEQ ID NO: 603727 - RNA, 22 nt, Human
cauuucuagagucccaagaggu

SEQ ID NO: 603728 - RNA, 22 nt, Human
ucuuuuucuuauucccacacug

SEQ ID NO: 603729 - RNA, 22 nt, Human
cacacaguggaguauuacucag

SEQ ID NO: 603730 - RNA, 22 nt, Human
gagaugcuuuugguccaagagu

SEQ ID NO: 603731 - RNA, 20 nt, Human
gggcagccucgggagugggu

SEQ ID NO: 603732 - RNA, 22 nt, Human
uuccucagagggcgcuggggaa

SEQ ID NO: 603733 - RNA, 22 nt, Human
cagcagcaucaggucugugguu

SEQ ID NO: 603734 - RNA, 23 nt, Human
gcugggcuuacucuuucagugag

SEQ ID NO: 603735 - RNA, 22 nt, Human
acagcagcauaaacugacuaag

SEQ ID NO: 603736 - RNA, 22 nt, Human
ucuauuucgcauauaaguuuug

SEQ ID NO: 603737 - RNA, 22 nt, Human
uauuauggcagcauucaguaug

SEQ ID NO: 603738 - RNA, 22 nt, Human
gaggcugaauggccagaagcca

SEQ ID NO: 603739 - RNA, 22 nt, Human
gccagcugugcuuuuccuaaaa

SEQ ID NO: 603740 - RNA, 22 nt, Human
acaguguuacuugauaguguau

SEQ ID NO: 603741 - RNA, 21 nt, Human
ucauuuuuauugcuaccuugc

SEQ ID NO: 603742 - RNA, 22 nt, Human
acauucaugucccacuucuagc

SEQ ID NO: 603743 - RNA, 20 nt, Human
accuuucaaaugauucagca

SEQ ID NO: 603744 - RNA, 22 nt, Human
auguucuaaucccugcuaugua

SEQ ID NO: 603745 - RNA, 22 nt, Human
gcagaagcagaggagccuauga

SEQ ID NO: 603746 - RNA, 22 nt, Human
caguuacaugcucaugucauca

SEQ ID NO: 603747 - RNA, 22 nt, Human
auugaaaaaugacuauugcuua

SEQ ID NO: 603748 - RNA, 22 nt, Human
cacugcccagcgucuuaggcac

SEQ ID NO: 603749 - RNA, 16 nt, Human
gcaguaaaaugguuag

SEQ ID NO: 603750 - RNA, 22 nt, Human
gacagcagggacauguaggaag

SEQ ID NO: 603751 - RNA, 22 nt, Human
auuaagaucauuguagaagauu

SEQ ID NO: 603752 - RNA, 22 nt, Human
aagcugcccucauucccagugc

SEQ ID NO: 603753 - RNA, 22 nt, Human
aauaugaauuauuguuacaagu

SEQ ID NO: 603754 - RNA, 22 nt, Human
ccugcugggccugagcaaugag

SEQ ID NO: 603755 - RNA, 22 nt, Human
ggaacauacuguguagacuuug

SEQ ID NO: 603756 - RNA, 23 nt, Human
uccuugagugucccccaagaguc

SEQ ID NO: 603757 - RNA, 22 nt, Human
ucuggaguuuuuucugucugug

SEQ ID NO: 603758 - RNA, 22 nt, Human
gcugagagcaaagcaugucuag

SEQ ID NO: 603759 - RNA, 22 nt, Human
ugcuggaggaguuuacuguggc

SEQ ID NO: 603760 - RNA, 22 nt, Human
ugggccugcuggggcauuuuca

SEQ ID NO: 603761 - RNA, 22 nt, Human
cagggcuguaaauuagugcuga

SEQ ID NO: 603762 - RNA, 22 nt, Human
uugacaaaaaccucauuucacc

SEQ ID NO: 603763 - RNA, 22 nt, Human
agggccaaguccaggaccucgg

SEQ ID NO: 603764 - RNA, 20 nt, Human
gccaggagggugugaugagc

SEQ ID NO: 603765 - RNA, 22 nt, Human
agaaaaaucuuggcgcuugucu

SEQ ID NO: 603766 - RNA, 22 nt, Human
aaaaucuugugacuuaggaagg

SEQ ID NO: 603767 - RNA, 22 nt, Human
uuucuauugaucuaauaaacau

SEQ ID NO: 603768 - RNA, 18 nt, Human
uuaucucuggcaugugcc

SEQ ID NO: 603769 - RNA, 22 nt, Human
ucccugggccuccugcuaugca

SEQ ID NO: 603770 - RNA, 22 nt, Human
auuucacagcugucaguguuac

SEQ ID NO: 603771 - RNA, 18 nt, Human
gagcugagaagaggaugc

SEQ ID NO: 603772 - RNA, 22 nt, Human
caggauggugugagugugagga

SEQ ID NO: 603773 - RNA, 22 nt, Human
uugauaaaaugauaucuucuuu

SEQ ID NO: 603774 - RNA, 22 nt, Human
agcugccuguguagaaccaucu

SEQ ID NO: 603775 - RNA, 22 nt, Human
cagcugccacaccucuuucucu

SEQ ID NO: 603776 - RNA, 22 nt, Human
gagguagccacagauagagacu

SEQ ID NO: 603777 - RNA, 23 nt, Human
ggguccagagacaggcaugggug

SEQ ID NO: 603778 - RNA, 22 nt, Human
gagacaggcagcuaguggguca

SEQ ID NO: 603779 - RNA, 22 nt, Human
cugggagaucuccugagggcag

SEQ ID NO: 603780 - RNA, 22 nt, Human
cuagagaauugucuugagaguu

SEQ ID NO: 603781 - RNA, 22 nt, Human
aaaugcaauuguauguacucca

SEQ ID NO: 603782 - RNA, 22 nt, Human
ggguggaguagaaagaugaauu

SEQ ID NO: 603783 - RNA, 22 nt, Human
guguaacuugcuggaaaaacua

SEQ ID NO: 603784 - RNA, 22 nt, Human
caguccuguguuaaacaagagc

SEQ ID NO: 603785 - RNA, 22 nt, Human
gaugauuuugaugcaguaaaga

SEQ ID NO: 603786 - RNA, 22 nt, Human
ucgucaucugaaggcugucaau

SEQ ID NO: 603787 - RNA, 22 nt, Human
cauuauggaagugaagagcucu

SEQ ID NO: 603788 - RNA, 22 nt, Human
cccugcagagccagcccugacc

SEQ ID NO: 603789 - RNA, 22 nt, Human
ggaaaaggccacagggacacau

SEQ ID NO: 603790 - RNA, 18 nt, Human
agcaguguggcaagcaga

SEQ ID NO: 603791 - RNA, 22 nt, Human
uuggccagacacuaccccccuu

SEQ ID NO: 603792 - RNA, 22 nt, Human
ucagugucuucucuuuccuacc

SEQ ID NO: 603793 - RNA, 17 nt, Human
auuuagcaaguagacag

SEQ ID NO: 603794 - RNA, 22 nt, Human
ucugucacaauuugcuuacucu

SEQ ID NO: 603795 - RNA, 22 nt, Human
gccuggaguucagccaaguccc

SEQ ID NO: 603796 - RNA, 19 nt, Human
gacaggacgaagggaaguu

SEQ ID NO: 603797 - RNA, 22 nt, Human
aggagacacugagacuucacca

SEQ ID NO: 603798 - RNA, 22 nt, Human
gcccuugacaguggcagaagca

SEQ ID NO: 603799 - RNA, 18 nt, Human
uuuuccuuccaccuugaa

SEQ ID NO: 603800 - RNA, 22 nt, Human
cauacauauguggaugucauau

SEQ ID NO: 603801 - RNA, 17 nt, Human
uccaggagaggcaaugg

SEQ ID NO: 603802 - RNA, 22 nt, Human
gcuggcuuuauggggcuugugg

SEQ ID NO: 603803 - RNA, 22 nt, Human
uuuuccuuugauucccagaugu

SEQ ID NO: 603804 - RNA, 22 nt, Human
agcaggugaucgcgugugcucc

SEQ ID NO: 603805 - RNA, 22 nt, Human
uugaaugagaaguuauugccau

SEQ ID NO: 603806 - RNA, 22 nt, Human
uggcauuuaguugcguauugca

SEQ ID NO: 603807 - RNA, 23 nt, Human
ucacacagcuggucagguacaga

SEQ ID NO: 603808 - RNA, 22 nt, Human
aauaaucuugacuacugaauca

SEQ ID NO: 603809 - RNA, 22 nt, Human
cuauuuaucuauuucugaauga

SEQ ID NO: 603810 - RNA, 22 nt, Human
cuuguuuucuaaaacaucauuu

SEQ ID NO: 603811 - RNA, 22 nt, Human
uggcuucugagcauugaaacgu

SEQ ID NO: 603812 - RNA, 22 nt, Human
cacugccuccccaggcuccaca

SEQ ID NO: 603813 - RNA, 22 nt, Human
cuucuggguaauucuucuucau

SEQ ID NO: 603814 - RNA, 22 nt, Human
gcugaggauugaagaguugcca

SEQ ID NO: 603815 - RNA, 22 nt, Human
uuccuaacgccaguauuuucau

SEQ ID NO: 603816 - RNA, 21 nt, Human
uuuuaacaaggauuucccuag

SEQ ID NO: 603817 - RNA, 22 nt, Human
cugaggcugggcuugccuucuu

SEQ ID NO: 603818 - RNA, 22 nt, Human
aggaaacagagugaagcuuggg

SEQ ID NO: 603819 - RNA, 22 nt, Human
ggggcagggagguuaucgccga

SEQ ID NO: 603820 - RNA, 22 nt, Human
acacaaacagucuauagcacca

SEQ ID NO: 603821 - RNA, 22 nt, Human
cauuuauucucagauccuuguc

SEQ ID NO: 603822 - RNA, 22 nt, Human
auacaguggcugugagcugggc

SEQ ID NO: 603823 - RNA, 22 nt, Human
gggauaggaaacuuagguacac

SEQ ID NO: 603824 - RNA, 22 nt, Human
cuuauugugucuuugaauaagu

SEQ ID NO: 603825 - RNA, 22 nt, Human
aggcucugugcauccuccccaa

SEQ ID NO: 603826 - RNA, 22 nt, Human
auacuuuuaauuccuucugagu

SEQ ID NO: 603827 - RNA, 22 nt, Human
uucucuggggacuugguuggag

SEQ ID NO: 603828 - RNA, 22 nt, Human
aggaucugugagugcugcagac

SEQ ID NO: 603829 - RNA, 22 nt, Human
gagaggcugguaaagucugaac

SEQ ID NO: 603830 - RNA, 22 nt, Human
uaccaccucaaccucaucugac

SEQ ID NO: 603831 - RNA, 22 nt, Human
gauuaauucaggaucaggaaau

SEQ ID NO: 603832 - RNA, 19 nt, Human
uccaaagaaguucacauuu

SEQ ID NO: 603833 - RNA, 23 nt, Human
gccaggcacaugguggacacgca

SEQ ID NO: 603834 - RNA, 22 nt, Human
agguacuaccagggauuuucag

SEQ ID NO: 603835 - RNA, 22 nt, Human
uacccagcuucaagucaggacu

SEQ ID NO: 603836 - RNA, 22 nt, Human
uugagaggauggauuagacaaa

SEQ ID NO: 603837 - RNA, 22 nt, Human
ucuuccuauggggcugcaggaa

SEQ ID NO: 603838 - RNA, 21 nt, Human
ccugugugugucccuuuaaga

SEQ ID NO: 603839 - RNA, 22 nt, Human
agggcugcaggcaagauauggc

SEQ ID NO: 603840 - RNA, 22 nt, Human
ucaaaucaccaaacucacuggc

SEQ ID NO: 603841 - RNA, 22 nt, Human
acaugauuuuucuuugacucua

SEQ ID NO: 603842 - RNA, 22 nt, Human
cccuggccagcucaugucugag

SEQ ID NO: 603843 - RNA, 22 nt, Human
aggaagggauacauaggauagu

SEQ ID NO: 603844 - RNA, 22 nt, Human
uuaaaauguacaggggaaagug

SEQ ID NO: 603845 - RNA, 22 nt, Human
uugaccuuggcuuuuaaaauau

SEQ ID NO: 603846 - RNA, 22 nt, Human
ugcagaagcagagaguugccaa

SEQ ID NO: 603847 - RNA, 22 nt, Human
gcuucagacugugcuucuguug

SEQ ID NO: 603848 - RNA, 17 nt, Human
gguucaguucugcauuc

SEQ ID NO: 603849 - RNA, 22 nt, Human
uguuuacagcacugcacacugc

SEQ ID NO: 603850 - RNA, 22 nt, Human
aaagagcuuuagaaaucucaga

SEQ ID NO: 603851 - RNA, 22 nt, Human
guuuuccagguaccuugguauu

SEQ ID NO: 603852 - RNA, 22 nt, Human
ucuccuggccuuuagguuaagg

SEQ ID NO: 603853 - RNA, 17 nt, Human
ucacugggccugcuccc

SEQ ID NO: 603854 - RNA, 22 nt, Human
gagccagggcugugagcugagc

SEQ ID NO: 603855 - RNA, 22 nt, Human
aaaugcagauugucauucagga

SEQ ID NO: 603856 - RNA, 22 nt, Human
auuucaguaguccuuacuugua

SEQ ID NO: 603857 - RNA, 22 nt, Human
ucagucuucccuccagugcaac

SEQ ID NO: 603858 - RNA, 22 nt, Human
uggggccacacaucucuuucua

SEQ ID NO: 603859 - RNA, 22 nt, Human
cagucucuggugaguugacagu

SEQ ID NO: 603860 - RNA, 20 nt, Human
gagagcuggggaugaggcug

SEQ ID NO: 603861 - RNA, 19 nt, Human
ucugcaagugucagaggcg

SEQ ID NO: 603862 - RNA, 22 nt, Human
cagccaggcccagaucaugcug

SEQ ID NO: 603863 - RNA, 22 nt, Human
cugccugcuucugagccagagg

SEQ ID NO: 603864 - RNA, 22 nt, Human
caggaaugccaaccagugcaug

SEQ ID NO: 603865 - RNA, 22 nt, Human
acuuuccuuauggauggggaaa

SEQ ID NO: 603866 - RNA, 22 nt, Human
ugcugcugaucauuuauagucu

SEQ ID NO: 603867 - RNA, 22 nt, Human
acuccagggcuccaucccuugu

SEQ ID NO: 603868 - RNA, 22 nt, Human
gaagcuucguggcucuucaaau

SEQ ID NO: 603869 - RNA, 22 nt, Human
ucacuggaaaugcacagcugua

SEQ ID NO: 603870 - RNA, 22 nt, Human
aaacagcuccuuaguuuccauc

SEQ ID NO: 603871 - RNA, 22 nt, Human
acaguguuuuaugagaauuguu

SEQ ID NO: 603872 - RNA, 22 nt, Human
uguagaugagucagggugcacc

SEQ ID NO: 603873 - RNA, 21 nt, Human
ggccuuccccugcagucuccg

SEQ ID NO: 603874 - RNA, 22 nt, Human
uagaaagaaauucagauuggcu

SEQ ID NO: 603875 - RNA, 22 nt, Human
uuuuaguuuggauuucuaaagc

SEQ ID NO: 603876 - RNA, 22 nt, Human
uggagggaacaaaggaguccca

SEQ ID NO: 603877 - RNA, 22 nt, Human
agugcagggggaaagggugucu

SEQ ID NO: 603878 - RNA, 22 nt, Human
gcugagcaggguggggaaaggc

SEQ ID NO: 603879 - RNA, 22 nt, Human
gcuguggcuguacagagaccau

SEQ ID NO: 603880 - RNA, 17 nt, Human
uggcaugaggguguggg

SEQ ID NO: 603881 - RNA, 22 nt, Human
caagugucuauaucagugcuug

SEQ ID NO: 603882 - RNA, 21 nt, Human
cugcugcuggggucugggcag

SEQ ID NO: 603883 - RNA, 22 nt, Human
guuagugcuuauuaaauaguau

SEQ ID NO: 603884 - RNA, 21 nt, Human
aucugaaaugucaaagcagau

SEQ ID NO: 603885 - RNA, 21 nt, Human
uuucacaaaaguaugugacaa

SEQ ID NO: 603886 - RNA, 22 nt, Human
aacugcuugagauauguuuguc

SEQ ID NO: 603887 - RNA, 22 nt, Human
uuuugcagaaugggaagguagu

SEQ ID NO: 603888 - RNA, 22 nt, Human
accugcagguguuuccacacuu

SEQ ID NO: 603889 - RNA, 23 nt, Human
gcaguguuugcuucaucuuaucc

SEQ ID NO: 603890 - RNA, 23 nt, Human
auuuuacaggucaguuccuugaa

SEQ ID NO: 603891 - RNA, 22 nt, Human
caauuuuacucuuccucuucca

SEQ ID NO: 603892 - RNA, 22 nt, Human
uaugagauaauagauguguaaa

SEQ ID NO: 603893 - RNA, 22 nt, Human
aauccuuauauaaugccuucca

SEQ ID NO: 603894 - RNA, 22 nt, Human
auagagugauguaagguaugug

SEQ ID NO: 603895 - RNA, 22 nt, Human
ugaaguauccaucuuguucuag

SEQ ID NO: 603896 - RNA, 22 nt, Human
gcagccaggaaagcuggacccu

SEQ ID NO: 603897 - RNA, 22 nt, Human
ugggcagauguccucugaagug

SEQ ID NO: 603898 - RNA, 22 nt, Human
ugcagugugaccuguagcgagc

SEQ ID NO: 603899 - RNA, 22 nt, Human
aagaggcugaaugagaaaguac

SEQ ID NO: 603900 - RNA, 22 nt, Human
ccuggagugggguccgugcaug

SEQ ID NO: 603901 - RNA, 22 nt, Human
aacacugucuuauacuucaaug

SEQ ID NO: 603902 - RNA, 22 nt, Human
ugcgggucccagggucacaggc

SEQ ID NO: 603903 - RNA, 23 nt, Human
ccaagcuugucccugccugcuuu

SEQ ID NO: 603904 - RNA, 22 nt, Human
caauagcagaccuagaaagcaa

SEQ ID NO: 603905 - RNA, 22 nt, Human
cuggagcccaggccuggugucu

SEQ ID NO: 603906 - RNA, 22 nt, Human
uggacaggugagugacucaggg

SEQ ID NO: 603907 - RNA, 22 nt, Human
aaucagcaaaugcuuacucagg

SEQ ID NO: 603908 - RNA, 22 nt, Human
gagaaggaugaggaaaugguau

SEQ ID NO: 603909 - RNA, 22 nt, Human
agcucucccauagggcaagauc

SEQ ID NO: 603910 - RNA, 22 nt, Human
uaugcaaaugacugguauguuu

SEQ ID NO: 603911 - RNA, 21 nt, Human
ugcagccucugcccagcagug

SEQ ID NO: 603912 - RNA, 22 nt, Human
gaggcaugcagagcuggagcag

SEQ ID NO: 603913 - RNA, 22 nt, Human
gaaaagggcaagagagagggca

SEQ ID NO: 603914 - RNA, 22 nt, Human
ccucuugauugguuggaagcgg

SEQ ID NO: 603915 - RNA, 22 nt, Human
ucugcagggcccuuggcuccug

SEQ ID NO: 603916 - RNA, 22 nt, Human
auuuucucuuuguauaugcuag

SEQ ID NO: 603917 - RNA, 22 nt, Human
acuagaaaauuccuagaaacua

SEQ ID NO: 603918 - RNA, 22 nt, Human
ugaggccagggauuccaucauu

SEQ ID NO: 603919 - RNA, 22 nt, Human
gacaauaaaaugaucuuacagu

SEQ ID NO: 603920 - RNA, 22 nt, Human
ccagggugagugucauggguua

SEQ ID NO: 603921 - RNA, 22 nt, Human
uggacagggcagagaccgaguc

SEQ ID NO: 603922 - RNA, 22 nt, Human
ugguggggauucccucccuggc

SEQ ID NO: 603923 - RNA, 22 nt, Human
cugugucggacgugggcagcag

SEQ ID NO: 603924 - RNA, 22 nt, Human
uccagggcuuggcugggacggu

SEQ ID NO: 603925 - RNA, 22 nt, Human
uucaagacuccaagaaauuagu

SEQ ID NO: 603926 - RNA, 22 nt, Human
uagaggcuacuagaggcaccug

SEQ ID NO: 603927 - RNA, 22 nt, Human
gaauucuaggguaaauauccua

SEQ ID NO: 603928 - RNA, 22 nt, Human
uucaagguaugguagcugguca

SEQ ID NO: 603929 - RNA, 22 nt, Human
gccugcuucucagucagcuugg

SEQ ID NO: 603930 - RNA, 22 nt, Human
gugaggaugcagaugagggccu

SEQ ID NO: 603931 - RNA, 22 nt, Human
cucaguuuccccggccugggcg

SEQ ID NO: 603932 - RNA, 22 nt, Human
caucagagugguggccuggugu

SEQ ID NO: 603933 - RNA, 21 nt, Human
acauucacaggauauuaucau

SEQ ID NO: 603934 - RNA, 22 nt, Human
aguguguagcauuuggcaggca

SEQ ID NO: 603935 - RNA, 22 nt, Human
ccagggaaaaucaacuucuacu

SEQ ID NO: 603936 - RNA, 22 nt, Human
auggaguuuggggucaaauacu

SEQ ID NO: 603937 - RNA, 22 nt, Human
agcagccacagucugggacagg

SEQ ID NO: 603938 - RNA, 22 nt, Human
guggccagccagggugcugaug

SEQ ID NO: 603939 - RNA, 22 nt, Human
agauauucaaccaaacacuaau

SEQ ID NO: 603940 - RNA, 22 nt, Human
cugcugcccuagacccaguccu

SEQ ID NO: 603941 - RNA, 19 nt, Human
ccugggaggcggagguugc

SEQ ID NO: 603942 - RNA, 22 nt, Human
cagagggucaccaggaagugca

SEQ ID NO: 603943 - RNA, 22 nt, Human
aaggcugaggcuggagaauuac

SEQ ID NO: 603944 - RNA, 22 nt, Human
cccaguggagauaggagugugg

SEQ ID NO: 603945 - RNA, 22 nt, Human
uauguucaucuggugcaucagu

SEQ ID NO: 603946 - RNA, 22 nt, Human
ccagagcccgggaccuggacuu

SEQ ID NO: 603947 - RNA, 22 nt, Human
gcaguguuaccuugggcugguu

SEQ ID NO: 603948 - RNA, 22 nt, Human
uguauuuuuagaccuuuagacc

SEQ ID NO: 603949 - RNA, 22 nt, Human
uuuuguuuucuuagaaaccugg

SEQ ID NO: 603950 - RNA, 22 nt, Human
cugcuuuaauuuagacaaggca

SEQ ID NO: 603951 - RNA, 22 nt, Human
ugggaaggggagcuggaaagga

SEQ ID NO: 603952 - RNA, 22 nt, Human
uuccuggggcgacuguaucuga

SEQ ID NO: 603953 - RNA, 18 nt, Human
cugucuuuuuucucucca

SEQ ID NO: 603954 - RNA, 22 nt, Human
cucaggcucuggccauccaagg

SEQ ID NO: 603955 - RNA, 22 nt, Human
gcugccucccagagcccugcag

SEQ ID NO: 603956 - RNA, 22 nt, Human
cuuucauucuuagauauuagug

SEQ ID NO: 603957 - RNA, 18 nt, Human
uggagccauugccaccau

SEQ ID NO: 603958 - RNA, 22 nt, Human
ccagacaguuccuugagguuca

SEQ ID NO: 603959 - RNA, 22 nt, Human
ugguggaccuggcauugaaccu

SEQ ID NO: 603960 - RNA, 22 nt, Human
agggccugagcucuccuccagu

SEQ ID NO: 603961 - RNA, 22 nt, Human
cuuguuuuggaacagagugaau

SEQ ID NO: 603962 - RNA, 22 nt, Human
uucauugugaacacauucugcc

SEQ ID NO: 603963 - RNA, 17 nt, Human
aaggagcugagagaugg

SEQ ID NO: 603964 - RNA, 22 nt, Human
uaguggggaaggaggacaagaa

SEQ ID NO: 603965 - RNA, 22 nt, Human
gagcaggcauucuaguggcuga

SEQ ID NO: 603966 - RNA, 22 nt, Human
ugagagaugaaguuaguuguuc

SEQ ID NO: 603967 - RNA, 22 nt, Human
uagaacuuugccuuagggcaaa

SEQ ID NO: 603968 - RNA, 22 nt, Human
ucccugcuuucuugugagggga

SEQ ID NO: 603969 - RNA, 22 nt, Human
uggaaugaaggagauggccuuu

SEQ ID NO: 603970 - RNA, 19 nt, Human
aagcaauguugugaaucua

SEQ ID NO: 603971 - RNA, 22 nt, Human
agcuggcugggugccagucucc

SEQ ID NO: 603972 - RNA, 19 nt, Human
uccagccccucugugugug

SEQ ID NO: 603973 - RNA, 22 nt, Human
uggcuaugaggagcgcaggugu

SEQ ID NO: 603974 - RNA, 22 nt, Human
ucaugcuaguuaagaacacaau

SEQ ID NO: 603975 - RNA, 22 nt, Human
acacacacaagcagguugugga

SEQ ID NO: 603976 - RNA, 22 nt, Human
gcuggaguccaguggcaugauc

SEQ ID NO: 603977 - RNA, 22 nt, Human
uucaggaagccuuucuuggucu

SEQ ID NO: 603978 - RNA, 22 nt, Human
gcccugaggauuugcauuuccu

SEQ ID NO: 603979 - RNA, 22 nt, Human
agggaauucacuggaacgcccu

SEQ ID NO: 603980 - RNA, 22 nt, Human
ugaauucuggcucuucuguuua

SEQ ID NO: 603981 - RNA, 22 nt, Human
ugugugaggugguucugagaag

SEQ ID NO: 603982 - RNA, 22 nt, Human
uaaaauguguuucuguaugguu

SEQ ID NO: 603983 - RNA, 22 nt, Human
acuggcuuugagggaauagcua

SEQ ID NO: 603984 - RNA, 22 nt, Human
cuuuacuugcuuuguuacaaaa

SEQ ID NO: 603985 - RNA, 22 nt, Human
gagcugaguagaggcugcuccc

SEQ ID NO: 603986 - RNA, 22 nt, Human
ucacagacacuggguuauugca

SEQ ID NO: 603987 - RNA, 22 nt, Human
uugaaaggccuguuuauccagc

SEQ ID NO: 603988 - RNA, 22 nt, Human
caagauggagaagcagcaaggg

SEQ ID NO: 603989 - RNA, 22 nt, Human
uuucccuuugcacucuacaauu

SEQ ID NO: 603990 - RNA, 22 nt, Human
augcuucuuguauuuggcugac

SEQ ID NO: 603991 - RNA, 22 nt, Human
ugaugccuaugaauuguaaugu

SEQ ID NO: 603992 - RNA, 22 nt, Human
uuauucaucagugcauuaauuu

SEQ ID NO: 603993 - RNA, 22 nt, Human
uccuucaaagcuccuagugagc

SEQ ID NO: 603994 - RNA, 22 nt, Human
cuggcucuguggcuuccuucau

SEQ ID NO: 603995 - RNA, 22 nt, Human
agcaccugcuaugugucaggga

SEQ ID NO: 603996 - RNA, 22 nt, Human
cggggaggcuucggauuaaagc

SEQ ID NO: 603997 - RNA, 22 nt, Human
gcaguguuucagugcuuuuucu

SEQ ID NO: 603998 - RNA, 22 nt, Human
uagggcagccacccaggcugcu

SEQ ID NO: 603999 - RNA, 22 nt, Human
gggugguggccagcagugggca

SEQ ID NO: 604000 - RNA, 22 nt, Human
acuuuuaucaaggaagugaucu

SEQ ID NO: 604001 - RNA, 19 nt, Human
gaaggagagcugaguuagg

SEQ ID NO: 604002 - RNA, 22 nt, Human
gggaagucggguugagcacuua

SEQ ID NO: 604003 - RNA, 22 nt, Human
acauuucuuccuaauuaucccu

SEQ ID NO: 604004 - RNA, 22 nt, Human
cacaggagaacccacagauucu

SEQ ID NO: 604005 - RNA, 22 nt, Human
aguucucaggucagcugagucu

SEQ ID NO: 604006 - RNA, 22 nt, Human
auaacacuaaauguauguaaca

SEQ ID NO: 604007 - RNA, 22 nt, Human
uucuaguucccucuggaaugua

SEQ ID NO: 604008 - RNA, 22 nt, Human
ccagcuggucugugcucauguu

SEQ ID NO: 604009 - RNA, 22 nt, Human
accagaggaggaauuaccuucc

SEQ ID NO: 604010 - RNA, 22 nt, Human
cucccaggccaugcucuagcca

SEQ ID NO: 604011 - RNA, 22 nt, Human
uccuaaaggcugcuuuuauauu

SEQ ID NO: 604012 - RNA, 22 nt, Human
aauaauuuccagccaacuggaa

SEQ ID NO: 604013 - RNA, 22 nt, Human
agccuaggucugggucuagcag

SEQ ID NO: 604014 - RNA, 22 nt, Human
agagcagauuucaaauauuggc

SEQ ID NO: 604015 - RNA, 22 nt, Human
uggaaagguaggauuucaagac

SEQ ID NO: 604016 - RNA, 22 nt, Human
ggggcuggcucacuaagagacu

SEQ ID NO: 604017 - RNA, 22 nt, Human
ccugaggucagccauucuugcc

SEQ ID NO: 604018 - RNA, 22 nt, Human
uugcagaagggcacagugauca

SEQ ID NO: 604019 - RNA, 22 nt, Human
ccuggcuggacuggaccguggc

SEQ ID NO: 604020 - RNA, 22 nt, Human
uggauggggcagcuuaggugug

SEQ ID NO: 604021 - RNA, 19 nt, Human
gccugagccagccaugcaa

SEQ ID NO: 604022 - RNA, 22 nt, Human
cccagugccaggcacaggcagc

SEQ ID NO: 604023 - RNA, 22 nt, Human
ugggccaggucugcggucauuu

SEQ ID NO: 604024 - RNA, 22 nt, Human
ugcucaggucguucugccccuu

SEQ ID NO: 604025 - RNA, 22 nt, Human
gcaggcccuccucuagcaaggc

SEQ ID NO: 604026 - RNA, 22 nt, Human
uagagcugauaaugaggccaag

SEQ ID NO: 604027 - RNA, 22 nt, Human
aagaguuucugggucaaggauu

SEQ ID NO: 604028 - RNA, 22 nt, Human
cucugggguuagaucugaugcu

SEQ ID NO: 604029 - RNA, 22 nt, Human
uuauggagcagacagcugguca

SEQ ID NO: 604030 - RNA, 22 nt, Human
acaguaaaauuaagggcaguua

SEQ ID NO: 604031 - RNA, 22 nt, Human
acccaggauaaucuguguaucu

SEQ ID NO: 604032 - RNA, 22 nt, Human
acaaugaauaucaugaaguacu

SEQ ID NO: 604033 - RNA, 22 nt, Human
guaagaggaucaaggcggugca

SEQ ID NO: 604034 - RNA, 22 nt, Human
caggugucuaauucucaccccc

SEQ ID NO: 604035 - RNA, 22 nt, Human
cugugacuuccacuacugauca

SEQ ID NO: 604036 - RNA, 22 nt, Human
aucugacaaggccacauauucu

SEQ ID NO: 604037 - RNA, 22 nt, Human
ugagcagaggagugacguaggu

SEQ ID NO: 604038 - RNA, 22 nt, Human
ugggaagacuccucaggaggcg

SEQ ID NO: 604039 - RNA, 22 nt, Human
auagaauguauuauaguacaga

SEQ ID NO: 604040 - RNA, 20 nt, Human
ugcugaggccugaggccugg

SEQ ID NO: 604041 - RNA, 22 nt, Human
aggggcugccuggcuuggcacu

SEQ ID NO: 604042 - RNA, 22 nt, Human
cuggggcaucugacagauaaau

SEQ ID NO: 604043 - RNA, 18 nt, Human
ccugucugggguccccac

SEQ ID NO: 604044 - RNA, 22 nt, Human
augacaaaaugaaugcagcuag

SEQ ID NO: 604045 - RNA, 22 nt, Human
agggacuggcucucugagcagg

SEQ ID NO: 604046 - RNA, 20 nt, Human
ugccugccccugcuuuuucc

SEQ ID NO: 604047 - RNA, 22 nt, Human
ccugaagggacuccagagagca

SEQ ID NO: 604048 - RNA, 22 nt, Human
cuacauuuguucuauagcuuuu

SEQ ID NO: 604049 - RNA, 18 nt, Human
cccagaggaaugccugga

SEQ ID NO: 604050 - RNA, 19 nt, Human
ccaccccuuugcugggccc

SEQ ID NO: 604051 - RNA, 20 nt, Human
uccucagaagacauuugggg

SEQ ID NO: 604052 - RNA, 22 nt, Human
ugcauauuauaaagagaauuag

SEQ ID NO: 604053 - RNA, 22 nt, Human
uuucauauuauuccuugagucu

SEQ ID NO: 604054 - RNA, 22 nt, Human
aaauguaccuugauaguuuggu

SEQ ID NO: 604055 - RNA, 22 nt, Human
agagcacagugcaggauccccg

SEQ ID NO: 604056 - RNA, 22 nt, Human
ucaggcugaaaggacuccaguu

SEQ ID NO: 604057 - RNA, 22 nt, Human
gauuagcucuagaucugggcua

SEQ ID NO: 604058 - RNA, 22 nt, Human
aauguauucugggaaaauguua

SEQ ID NO: 604059 - RNA, 22 nt, Human
uuggcauugaaguuucauuggu

SEQ ID NO: 604060 - RNA, 22 nt, Human
ucaguucuugggcugcuaggac

SEQ ID NO: 604061 - RNA, 22 nt, Human
aaaugguagguuuucuuaagaa

SEQ ID NO: 604062 - RNA, 22 nt, Human
ccccagcucagugcagggacau

SEQ ID NO: 604063 - RNA, 22 nt, Human
gggccagcaguaucggaggcau

SEQ ID NO: 604064 - RNA, 22 nt, Human
auauaaagaaguggaaaaugag

SEQ ID NO: 604065 - RNA, 22 nt, Human
cagaccagccauuugccucuuc

SEQ ID NO: 604066 - RNA, 22 nt, Human
acagaguaucuaucaggaguau

SEQ ID NO: 604067 - RNA, 22 nt, Human
uaggaaaugcuccauugcauaa

SEQ ID NO: 604068 - RNA, 22 nt, Human
cagcucuguucauagauggugc

SEQ ID NO: 604069 - RNA, 22 nt, Human
uggagguguccaacucgugggu

SEQ ID NO: 604070 - RNA, 22 nt, Human
ugggaagauggagugacaggca

SEQ ID NO: 604071 - RNA, 23 nt, Human
uuucacagaaggauuguagggcc

SEQ ID NO: 604072 - RNA, 22 nt, Human
agcacuguuaugggaugacuua

SEQ ID NO: 604073 - RNA, 22 nt, Human
uguuuuaagagcgcacuuuaua

SEQ ID NO: 604074 - RNA, 22 nt, Human
agagagguuugcuggaagauuc

SEQ ID NO: 604075 - RNA, 22 nt, Human
ugcauuaaaaugugccucucuu

SEQ ID NO: 604076 - RNA, 22 nt, Human
gcccucucggcauagcaggggc

SEQ ID NO: 604077 - RNA, 19 nt, Human
caguccuuuccgcuuucuc

SEQ ID NO: 604078 - RNA, 22 nt, Human
gccuggagcucaugugggcauu

SEQ ID NO: 604079 - RNA, 22 nt, Human
gucuuauuuaaggcuuauacaa

SEQ ID NO: 604080 - RNA, 22 nt, Human
ccuguacaucugcucucauugc

SEQ ID NO: 604081 - RNA, 22 nt, Human
acccuggguucccgcagcacca

SEQ ID NO: 604082 - RNA, 22 nt, Human
aauguuuaauguuagugguaau

SEQ ID NO: 604083 - RNA, 22 nt, Human
gaaaucuuccaauggucacauc

SEQ ID NO: 604084 - RNA, 17 nt, Human
ugucuucugaagagagc

SEQ ID NO: 604085 - RNA, 22 nt, Human
ccagagcugaggagaugggcuu

SEQ ID NO: 604086 - RNA, 22 nt, Human
accaggaggccuggagcacaaa

SEQ ID NO: 604087 - RNA, 22 nt, Human
uucucaugaaacucgcuuccuc

SEQ ID NO: 604088 - RNA, 22 nt, Human
gaagcacugugcugcuaaguug

SEQ ID NO: 604089 - RNA, 22 nt, Human
aaagacugggacugcagcaggc

SEQ ID NO: 604090 - RNA, 22 nt, Human
gugaaauauuuuguuuauguca

SEQ ID NO: 604091 - RNA, 22 nt, Human
acagaacaacaagguggaccag

SEQ ID NO: 604092 - RNA, 22 nt, Human
uuauuauaaugagggauaaaaa

SEQ ID NO: 604093 - RNA, 22 nt, Human
agacagggagggagcgcggcug

SEQ ID NO: 604094 - RNA, 22 nt, Human
cagccagagaggaaggaaugca

SEQ ID NO: 604095 - RNA, 22 nt, Human
aagagagaacucccuucgccag

SEQ ID NO: 604096 - RNA, 19 nt, Human
agucccaggcccgaaagag

SEQ ID NO: 604097 - RNA, 22 nt, Human
aaaguguuuacauugcuauaag

SEQ ID NO: 604098 - RNA, 22 nt, Human
cugcagagaauuguggggcuuc

SEQ ID NO: 604099 - RNA, 22 nt, Human
cugacacacugagcauuugaua

SEQ ID NO: 604100 - RNA, 22 nt, Human
ucugccuguggauacaugcucu

SEQ ID NO: 604101 - RNA, 22 nt, Human
aaugauggauuuagacaagcug

SEQ ID NO: 604102 - RNA, 22 nt, Human
agccccaggcccggacgccucu

SEQ ID NO: 604103 - RNA, 22 nt, Human
agagagcugacuuuggagucag

SEQ ID NO: 604104 - RNA, 22 nt, Human
agcugccccaugagaggcaggu

SEQ ID NO: 604105 - RNA, 22 nt, Human
agccacugugagaggaccaggg

SEQ ID NO: 604106 - RNA, 22 nt, Human
cauaaaguagcagagcaugacu

SEQ ID NO: 604107 - RNA, 20 nt, Human
agaggcuuccuugggaggag

SEQ ID NO: 604108 - RNA, 22 nt, Human
cuguuaucaucaggaggggaua

SEQ ID NO: 604109 - RNA, 18 nt, Human
agggagagaccgcggguc

SEQ ID NO: 604110 - RNA, 22 nt, Human
uuauucacucauuaaagcagga

SEQ ID NO: 604111 - RNA, 18 nt, Human
agcucucccccacaugcc

SEQ ID NO: 604112 - RNA, 22 nt, Human
guuccuaaccagcagagaaaca

SEQ ID NO: 604113 - RNA, 22 nt, Human
ggccugagggugggcucucagu

SEQ ID NO: 604114 - RNA, 18 nt, Human
cucucuuuccacucuuug

SEQ ID NO: 604115 - RNA, 22 nt, Human
uagaaagcguuaaaucuacaga

SEQ ID NO: 604116 - RNA, 22 nt, Human
ggcucaggcuggagugcagugg

SEQ ID NO: 604117 - RNA, 19 nt, Human
aggggcacugucucuagag

SEQ ID NO: 604118 - RNA, 22 nt, Human
acacaggagauauguaauggcu

SEQ ID NO: 604119 - RNA, 22 nt, Human
ucagaagcagaaaauagguggg

SEQ ID NO: 604120 - RNA, 22 nt, Human
uacagaagcugagacacugaga

SEQ ID NO: 604121 - RNA, 22 nt, Human
ucuggaguccagauccauuugg

SEQ ID NO: 604122 - RNA, 22 nt, Human
auuaauuuuucugacagccaca

SEQ ID NO: 604123 - RNA, 22 nt, Human
auaugacagcggauucacauau

SEQ ID NO: 604124 - RNA, 22 nt, Human
aaggcagagauuagcagaauga

SEQ ID NO: 604125 - RNA, 22 nt, Human
gcugucuggcauggcguggcug

SEQ ID NO: 604126 - RNA, 22 nt, Human
augcauuuguaaaauauaaucg

SEQ ID NO: 604127 - RNA, 22 nt, Human
uggcacagacugggccaaggaa

SEQ ID NO: 604128 - RNA, 22 nt, Human
aaaagagaauccuguacagaga

SEQ ID NO: 604129 - RNA, 22 nt, Human
cugaggcaguuuaauuuuugaa

SEQ ID NO: 604130 - RNA, 22 nt, Human
caguccagcucaucaguggcac

SEQ ID NO: 604131 - RNA, 22 nt, Human
ccugaggauuguuggugcuucc

SEQ ID NO: 604132 - RNA, 22 nt, Human
cuuuguuuauauuucuccucga

SEQ ID NO: 604133 - RNA, 22 nt, Human
guacauaaaggaggcucuuugc

SEQ ID NO: 604134 - RNA, 22 nt, Human
gcagagcucaugccugcaccuc

SEQ ID NO: 604135 - RNA, 22 nt, Human
aaauguucuacuuugauaauua

SEQ ID NO: 604136 - RNA, 23 nt, Human
aaagcaaggaauuggcaacagag

SEQ ID NO: 604137 - RNA, 22 nt, Human
gcccucagugaccacugauuca

SEQ ID NO: 604138 - RNA, 22 nt, Human
gaagaaauugaauucaugagcu

SEQ ID NO: 604139 - RNA, 22 nt, Human
gggugggccugucuggccaugu

SEQ ID NO: 604140 - RNA, 22 nt, Human
ucuccaggugacucugauguau

SEQ ID NO: 604141 - RNA, 22 nt, Human
ggcuguaguuaccugaugaaau

SEQ ID NO: 604142 - RNA, 22 nt, Human
uuucuauucuggaucuguggca

SEQ ID NO: 604143 - RNA, 22 nt, Human
uccuguccucugggugccccau

SEQ ID NO: 604144 - RNA, 22 nt, Human
ugggagaagcauggggugcaga

SEQ ID NO: 604145 - RNA, 22 nt, Human
uugggcagcauugcaguucccu

SEQ ID NO: 604146 - RNA, 22 nt, Human
cagcuuccacagacuuggcucg

SEQ ID NO: 604147 - RNA, 22 nt, Human
ugagaggaacaggcaguagguu

SEQ ID NO: 604148 - RNA, 22 nt, Human
cuggugucugcucccucacagc

SEQ ID NO: 604149 - RNA, 22 nt, Human
agccaguuuaagcaggaggggu

SEQ ID NO: 604150 - RNA, 22 nt, Human
aagccacugagauuucacugca

SEQ ID NO: 604151 - RNA, 22 nt, Human
ccuggcugcccauggacccucu

SEQ ID NO: 604152 - RNA, 22 nt, Human
ucugucucaaguucuugcacuc

SEQ ID NO: 604153 - RNA, 22 nt, Human
cuugucugugucggauaaaacu

SEQ ID NO: 604154 - RNA, 22 nt, Human
ugggaagaguuagagacagcug

SEQ ID NO: 604155 - RNA, 22 nt, Human
guuauuaucuugaggaaucugu

SEQ ID NO: 604156 - RNA, 22 nt, Human
uugaggucuguguaggcagcaa

SEQ ID NO: 604157 - RNA, 22 nt, Human
aggcccagcuugaagugggaag

SEQ ID NO: 604158 - RNA, 22 nt, Human
aguuucuauuuucaugucuguu

SEQ ID NO: 604159 - RNA, 22 nt, Human
ucaugcaaucucuuguucagga

SEQ ID NO: 604160 - RNA, 19 nt, Human
uccaauuucuauucauguu

SEQ ID NO: 604161 - RNA, 20 nt, Human
uucauucauuccacaacuuc

SEQ ID NO: 604162 - RNA, 22 nt, Human
uuauuucauugauuucuaagac

SEQ ID NO: 604163 - RNA, 22 nt, Human
aaacagcugcaguacacggccu

SEQ ID NO: 604164 - RNA, 19 nt, Human
agcaggcagguggcccagg

SEQ ID NO: 604165 - RNA, 22 nt, Human
ucugucuccucugaggugccag

SEQ ID NO: 604166 - RNA, 22 nt, Human
cagcauggugccagugagucca

SEQ ID NO: 604167 - RNA, 22 nt, Human
ucaagaaacugugcuacagagu

SEQ ID NO: 604168 - RNA, 22 nt, Human
ugaaggaaugaguauacuguuu

SEQ ID NO: 604169 - RNA, 19 nt, Human
ugaggccagcuggcauuuu

SEQ ID NO: 604170 - RNA, 22 nt, Human
uccugcuggacucugaguacaa

SEQ ID NO: 604171 - RNA, 21 nt, Human
ccuguggucuggagggagcac

SEQ ID NO: 604172 - RNA, 22 nt, Human
gcaagauuucuuuuaggugaag

SEQ ID NO: 604173 - RNA, 22 nt, Human
gaggaagaagcaaaccagcuaa

SEQ ID NO: 604174 - RNA, 22 nt, Human
agacuuuaucccuguuuuucuc

SEQ ID NO: 604175 - RNA, 22 nt, Human
acagaguaggugcucaguaaau

SEQ ID NO: 604176 - RNA, 22 nt, Human
gggaguggauuauguggaccca

SEQ ID NO: 604177 - RNA, 22 nt, Human
gcugcagagggaggggcucgca

SEQ ID NO: 604178 - RNA, 22 nt, Human
ccuggcccuggaauagggcagg

SEQ ID NO: 604179 - RNA, 22 nt, Human
uguugcugacaagagaggagca

SEQ ID NO: 604180 - RNA, 22 nt, Human
augaaagugaagguuuacuaag

SEQ ID NO: 604181 - RNA, 21 nt, Human
uccuugcuauuuuccucagcu

SEQ ID NO: 604182 - RNA, 22 nt, Human
ccuggccacagggcucugcauu

SEQ ID NO: 604183 - RNA, 22 nt, Human
gggagugguugauggugaaaau

SEQ ID NO: 604184 - RNA, 22 nt, Human
ucaauauucuucuuuaguagga

SEQ ID NO: 604185 - RNA, 21 nt, Human
cugcaagacaugcuguucuug

SEQ ID NO: 604186 - RNA, 22 nt, Human
agcuacaacuuuuccaugagca

SEQ ID NO: 604187 - RNA, 22 nt, Human
cacauuuaauccuuuauaagua

SEQ ID NO: 604188 - RNA, 22 nt, Human
ugacaaagugaggucuucagua

SEQ ID NO: 604189 - RNA, 22 nt, Human
uccuccagcuguauccugccug

SEQ ID NO: 604190 - RNA, 22 nt, Human
gagcuuccagagacaucagagu

SEQ ID NO: 604191 - RNA, 20 nt, Human
caggcuccgcaggacuaggg

SEQ ID NO: 604192 - RNA, 22 nt, Human
uagaacuucuuacagcuaaguu

SEQ ID NO: 604193 - RNA, 22 nt, Human
uccugggacucugccucaggcu

SEQ ID NO: 604194 - RNA, 22 nt, Human
gccuggaguuguggugaagcca

SEQ ID NO: 604195 - RNA, 22 nt, Human
caaauuccucagaaucagaaaa

SEQ ID NO: 604196 - RNA, 22 nt, Human
aacauggcucaugagagauuug

SEQ ID NO: 604197 - RNA, 22 nt, Human
ucaucugaccccaucuauucuc

SEQ ID NO: 604198 - RNA, 22 nt, Human
aaacuuuuccugcucuuguccu

SEQ ID NO: 604199 - RNA, 22 nt, Human
cuuugaaaacuuaaauaacagc

SEQ ID NO: 604200 - RNA, 23 nt, Human
agacccagagacuggcucugcuc

SEQ ID NO: 604201 - RNA, 22 nt, Human
ugugagaagggugaggcuuuua

SEQ ID NO: 604202 - RNA, 22 nt, Human
ggcugggaggccgugcugaccu

SEQ ID NO: 604203 - RNA, 22 nt, Human
aagggcugccagggggugccag

SEQ ID NO: 604204 - RNA, 22 nt, Human
cagaagcauuccagcaaauagu

SEQ ID NO: 604205 - RNA, 22 nt, Human
aggcgugguugaggcgagcaua

SEQ ID NO: 604206 - RNA, 22 nt, Human
ugagggcuaaauuguggcaggu

SEQ ID NO: 604207 - RNA, 22 nt, Human
uuauauaaagauaacuuuucuu

SEQ ID NO: 604208 - RNA, 22 nt, Human
aaauuucaagcaaaguagcuau

SEQ ID NO: 604209 - RNA, 22 nt, Human
ugauuucucuuggcaauauguu

SEQ ID NO: 604210 - RNA, 22 nt, Human
aggaugagagauacauggagca

SEQ ID NO: 604211 - RNA, 22 nt, Human
aagcaauguguuugaaaggcca

SEQ ID NO: 604212 - RNA, 22 nt, Human
ggcuguggcagcuggaaguggu

SEQ ID NO: 604213 - RNA, 22 nt, Human
aucaggaaauacuuauuuauaa

SEQ ID NO: 604214 - RNA, 22 nt, Human
augggcuggggaagcucacucc

SEQ ID NO: 604215 - RNA, 22 nt, Human
uuuuggcagauuacuuaauaug

SEQ ID NO: 604216 - RNA, 22 nt, Human
gggcagguguuuccaaggugag

SEQ ID NO: 604217 - RNA, 22 nt, Human
uccuucuauuuguuuauguggc

SEQ ID NO: 604218 - RNA, 23 nt, Human
aauuugguugaugaaagcauugu

SEQ ID NO: 604219 - RNA, 22 nt, Human
cugcaggcccccuuccuggagu

SEQ ID NO: 604220 - RNA, 22 nt, Human
caugaguuuuuuaguucaugca

SEQ ID NO: 604221 - RNA, 22 nt, Human
agggccugggucuguacuccuc

SEQ ID NO: 604222 - RNA, 22 nt, Human
uauuccaacugucauagucaua

SEQ ID NO: 604223 - RNA, 22 nt, Human
auggaacaagaacucagauuua

SEQ ID NO: 604224 - RNA, 22 nt, Human
augccaaguacaggcacugcuc

SEQ ID NO: 604225 - RNA, 22 nt, Human
acauuucaguaaguguuaauuu

SEQ ID NO: 604226 - RNA, 22 nt, Human
ugugucugcccuuaguacaucu

SEQ ID NO: 604227 - RNA, 22 nt, Human
uacaugaauguuucaauauugu

SEQ ID NO: 604228 - RNA, 22 nt, Human
cccacagggcugcugauggcag

SEQ ID NO: 604229 - RNA, 22 nt, Human
gcacccaggcuugggcagcaac

SEQ ID NO: 604230 - RNA, 22 nt, Human
agggaugacucuuggcugauuc

SEQ ID NO: 604231 - RNA, 22 nt, Human
augcaguaaauguucuaguuug

SEQ ID NO: 604232 - RNA, 22 nt, Human
gcaccuuggcuuucuugguggc

SEQ ID NO: 604233 - RNA, 22 nt, Human
guggccagaaccaggagaauga

SEQ ID NO: 604234 - RNA, 22 nt, Human
ggcagccagagggcagcuggau

SEQ ID NO: 604235 - RNA, 22 nt, Human
cagcagagcugggcuuugaauu

SEQ ID NO: 604236 - RNA, 22 nt, Human
acauuucucaucuaguagagua

SEQ ID NO: 604237 - RNA, 22 nt, Human
caggggcugugggcggagccuc

SEQ ID NO: 604238 - RNA, 22 nt, Human
gagaagcaaucaguggccaccc

SEQ ID NO: 604239 - RNA, 22 nt, Human
uaugcuuugguagagaguugug

SEQ ID NO: 604240 - RNA, 22 nt, Human
gggcugagagugacuguucugu

SEQ ID NO: 604241 - RNA, 22 nt, Human
agaauguagucuuggagauuua

SEQ ID NO: 604242 - RNA, 22 nt, Human
aaauacugcugcuauuccuuuu

SEQ ID NO: 604243 - RNA, 22 nt, Human
uuucuccuugugucuccuuuga

SEQ ID NO: 604244 - RNA, 22 nt, Human
ccuguacaagagccaucuggau

SEQ ID NO: 604245 - RNA, 22 nt, Human
ccagggaagucacauugucuag

SEQ ID NO: 604246 - RNA, 22 nt, Human
ucugaguuuaggaccaggcuga

SEQ ID NO: 604247 - RNA, 22 nt, Human
auauacaguauguacugugguu

SEQ ID NO: 604248 - RNA, 22 nt, Human
guacaauagcaguuuucccuuu

SEQ ID NO: 604249 - RNA, 22 nt, Human
gcccacagucuaucaguuugcg

SEQ ID NO: 604250 - RNA, 22 nt, Human
auguuacuuagaauaauucugg

SEQ ID NO: 604251 - RNA, 17 nt, Human
ugagcaguagaagaugc

SEQ ID NO: 604252 - RNA, 22 nt, Human
acaugcauacacguacauaccu

SEQ ID NO: 604253 - RNA, 23 nt, Human
agacaaaagccucagucuuaggc

SEQ ID NO: 604254 - RNA, 22 nt, Human
cucugccaccaugcuuccugac

SEQ ID NO: 604255 - RNA, 22 nt, Human
ucacaguuuccauaggucagca

SEQ ID NO: 604256 - RNA, 22 nt, Human
aguggaaggucaggggacagug

SEQ ID NO: 604257 - RNA, 22 nt, Human
augcauaucacagucuccaugu

SEQ ID NO: 604258 - RNA, 18 nt, Human
aagaggaggaaacccagg

SEQ ID NO: 604259 - RNA, 22 nt, Human
agcugguggauuaugcuguaca

SEQ ID NO: 604260 - RNA, 23 nt, Human
cuuucauugugguuucacagagc

SEQ ID NO: 604261 - RNA, 22 nt, Human
uugggcagguguggcucuccuu

SEQ ID NO: 604262 - RNA, 22 nt, Human
gccacagcuccagucaggugac

SEQ ID NO: 604263 - RNA, 22 nt, Human
ggcccagugcuguucacccagu

SEQ ID NO: 604264 - RNA, 22 nt, Human
ugagguagguggugaaaaauga

SEQ ID NO: 604265 - RNA, 22 nt, Human
uugcugagcaguguuuaauugu

SEQ ID NO: 604266 - RNA, 19 nt, Human
aucauccugggucaugcac

SEQ ID NO: 604267 - RNA, 22 nt, Human
uggguggcacuucuggggucca

SEQ ID NO: 604268 - RNA, 22 nt, Human
cucugugugguccucuguauug

SEQ ID NO: 604269 - RNA, 22 nt, Human
uugauucugauccuuugcuagc

SEQ ID NO: 604270 - RNA, 22 nt, Human
ggcaggugaucuagagucaaua

SEQ ID NO: 604271 - RNA, 22 nt, Human
ccuuccaggagucucugcaggu

SEQ ID NO: 604272 - RNA, 22 nt, Human
aaguuacacagaguuggaggcu

SEQ ID NO: 604273 - RNA, 22 nt, Human
gucauuauaccauuauaauugu

SEQ ID NO: 604274 - RNA, 22 nt, Human
uaguauuuaaucacuuuugucu

SEQ ID NO: 604275 - RNA, 22 nt, Human
uccaugggaagauuuugagugg

SEQ ID NO: 604276 - RNA, 22 nt, Human
cccaggaggaggaaaaagcucg

SEQ ID NO: 604277 - RNA, 22 nt, Human
gcuuuuucaaaugaaagcuggu

SEQ ID NO: 604278 - RNA, 22 nt, Human
gaggccacuuccuacuggagga

SEQ ID NO: 604279 - RNA, 23 nt, Human
auggggcucaacacuuaguagcu

SEQ ID NO: 604280 - RNA, 22 nt, Human
ccucagaagacuuuagggaaga

SEQ ID NO: 604281 - RNA, 22 nt, Human
gagcauggaucaugugcugggu

SEQ ID NO: 604282 - RNA, 22 nt, Human
ugggccuccuuuccauucagag

SEQ ID NO: 604283 - RNA, 22 nt, Human
gccugccuagaauugcagcuuu

SEQ ID NO: 604284 - RNA, 22 nt, Human
gggccugcagguucugagaggc

SEQ ID NO: 604285 - RNA, 22 nt, Human
agagaacauauuuuguaugauu

SEQ ID NO: 604286 - RNA, 22 nt, Human
cugagauggccacugggucuca

SEQ ID NO: 604287 - RNA, 22 nt, Human
caggccacgccccggcguguga

SEQ ID NO: 604288 - RNA, 22 nt, Human
cugggugucaggagacaugaug

SEQ ID NO: 604289 - RNA, 22 nt, Human
cacuuggaggcccccugugccc

SEQ ID NO: 604290 - RNA, 20 nt, Human
gcagucugucacagagcaug

SEQ ID NO: 604291 - RNA, 22 nt, Human
ugcuacauaggauagcucaaau

SEQ ID NO: 604292 - RNA, 22 nt, Human
uuucugccuuaucuuugcugag

SEQ ID NO: 604293 - RNA, 21 nt, Human
guuuguaaggcacuguguucu

SEQ ID NO: 604294 - RNA, 22 nt, Human
aaaggcaguggguauguggauc

SEQ ID NO: 604295 - RNA, 22 nt, Human
gaguggggcgaagucggcgagu

SEQ ID NO: 604296 - RNA, 22 nt, Human
ugucccaguuggguauugaauu

SEQ ID NO: 604297 - RNA, 22 nt, Human
uacaguagaaucuuauagccca

SEQ ID NO: 604298 - RNA, 22 nt, Human
uucccagaggcaaagucuggau

SEQ ID NO: 604299 - RNA, 22 nt, Human
acaggaguggagaggugccucu

SEQ ID NO: 604300 - RNA, 22 nt, Human
cccuccagcucaaagcaaccgg

SEQ ID NO: 604301 - RNA, 22 nt, Human
accagggcacauuccggccaga

SEQ ID NO: 604302 - RNA, 22 nt, Human
aggccuagaggaauggccaggg

SEQ ID NO: 604303 - RNA, 22 nt, Human
ugaggaagugguuguaugguuu

SEQ ID NO: 604304 - RNA, 22 nt, Human
cugccaaggcuggggaggacaa

SEQ ID NO: 604305 - RNA, 22 nt, Human
auuagcuuaggcaugaagagaa

SEQ ID NO: 604306 - RNA, 22 nt, Human
ugccaccaucuggcuguguuga

SEQ ID NO: 604307 - RNA, 22 nt, Human
gguaggcacuggugggaagaga

SEQ ID NO: 604308 - RNA, 22 nt, Human
ucugcugaccuuucucugacac

SEQ ID NO: 604309 - RNA, 22 nt, Human
aucuguaauuuugaaugcaaau

SEQ ID NO: 604310 - RNA, 22 nt, Human
uauuuccuguggauacuuuuag

SEQ ID NO: 604311 - RNA, 22 nt, Human
ucucacagcaggggccaggucu

SEQ ID NO: 604312 - RNA, 22 nt, Human
ccagagagaaaauggagggcca

SEQ ID NO: 604313 - RNA, 22 nt, Human
ucaccacugaacagaccuuugg

SEQ ID NO: 604314 - RNA, 22 nt, Human
aacuguaagacaaaugacuucu

SEQ ID NO: 604315 - RNA, 22 nt, Human
guauacagauacuuagacgugc

SEQ ID NO: 604316 - RNA, 22 nt, Human
ucugucacuauuggccagaaca

SEQ ID NO: 604317 - RNA, 21 nt, Human
aggugccaaggagaagcaggc

SEQ ID NO: 604318 - RNA, 22 nt, Human
uggcaggggaggugcuugcuua

SEQ ID NO: 604319 - RNA, 22 nt, Human
uuaauuacuaagcacaaugcaa

SEQ ID NO: 604320 - RNA, 22 nt, Human
ccucuggggugagugggccacu

SEQ ID NO: 604321 - RNA, 22 nt, Human
agugacaaggccugaagcuccu

SEQ ID NO: 604322 - RNA, 22 nt, Human
acacugagauuuuccugacacc

SEQ ID NO: 604323 - RNA, 22 nt, Human
uccugggagcauggugccguga

SEQ ID NO: 604324 - RNA, 22 nt, Human
caguccugcccaggcugacaga

SEQ ID NO: 604325 - RNA, 22 nt, Human
ugcugaauaagacguggcuugu

SEQ ID NO: 604326 - RNA, 22 nt, Human
guggcagggcaaugcucccucu

SEQ ID NO: 604327 - RNA, 22 nt, Human
cauuugcaagagauaaauguuu

SEQ ID NO: 604328 - RNA, 22 nt, Human
cuucugaucuggauuccuaacu

SEQ ID NO: 604329 - RNA, 21 nt, Human
acagccugucaucucaugguc

SEQ ID NO: 604330 - RNA, 22 nt, Human
augaaauauucuuugguaagaa

SEQ ID NO: 604331 - RNA, 22 nt, Human
gccuguguggaugcgccggugc

SEQ ID NO: 604332 - RNA, 22 nt, Human
agggccuggcgcguggccgccg

SEQ ID NO: 604333 - RNA, 22 nt, Human
ucucccucucagauuuauucac

SEQ ID NO: 604334 - RNA, 22 nt, Human
uguucacauguacaugaauauu

SEQ ID NO: 604335 - RNA, 22 nt, Human
gcacugccaucaaugcaugaca

SEQ ID NO: 604336 - RNA, 22 nt, Human
cgcugcagaugggagcugguug

SEQ ID NO: 604337 - RNA, 22 nt, Human
aauaguguuugaagcaugauag

SEQ ID NO: 604338 - RNA, 22 nt, Human
uuuaccauccucuuuuagaauu

SEQ ID NO: 604339 - RNA, 22 nt, Human
aaauauugguaggaugcuuguu

SEQ ID NO: 604340 - RNA, 22 nt, Human
gccugcagugagugcagaaggu

SEQ ID NO: 604341 - RNA, 22 nt, Human
uccugaagucacaggcucugag

SEQ ID NO: 604342 - RNA, 22 nt, Human
aguucucgagcgucccuguuuc

SEQ ID NO: 604343 - RNA, 19 nt, Human
ugugacaucacugggcagc

SEQ ID NO: 604344 - RNA, 22 nt, Human
ugcugaggaauuugguuuaugu

SEQ ID NO: 604345 - RNA, 22 nt, Human
ucacacacauggauaguauuuu

SEQ ID NO: 604346 - RNA, 22 nt, Human
ggguuaggucccucccuucugg

SEQ ID NO: 604347 - RNA, 22 nt, Human
ugucucugucucccagguugug

SEQ ID NO: 604348 - RNA, 22 nt, Human
uuuccuaaucccaaugacauuu

SEQ ID NO: 604349 - RNA, 22 nt, Human
auucuagaaggcaaagcaaggg

SEQ ID NO: 604350 - RNA, 22 nt, Human
gcugugcugauucauucccugc

SEQ ID NO: 604351 - RNA, 20 nt, Human
cugcuuaaguaagugacaca

SEQ ID NO: 604352 - RNA, 22 nt, Human
acuagucauuuaggugauauua

SEQ ID NO: 604353 - RNA, 22 nt, Human
gagcugggacuuggaauccaca

SEQ ID NO: 604354 - RNA, 22 nt, Human
acugagguagggcacaccuagg

SEQ ID NO: 604355 - RNA, 22 nt, Human
agcugccacagagccuggccag

SEQ ID NO: 604356 - RNA, 22 nt, Human
gggacuggcacagggcugggag

SEQ ID NO: 604357 - RNA, 22 nt, Human
uguaagauaugaguacauguaa

SEQ ID NO: 604358 - RNA, 22 nt, Human
uuacuguagcuugacauauguc

SEQ ID NO: 604359 - RNA, 22 nt, Human
guuggugaugccacacauauuu

SEQ ID NO: 604360 - RNA, 22 nt, Human
gggucagcgauuucaggggcag

SEQ ID NO: 604361 - RNA, 20 nt, Human
ugcaguuugucaagguuccu

SEQ ID NO: 604362 - RNA, 22 nt, Human
cagcggaggacagaugggagcu

SEQ ID NO: 604363 - RNA, 22 nt, Human
aggucugaguauggccugagaa

SEQ ID NO: 604364 - RNA, 22 nt, Human
gggccugggaacuugcauuuag

SEQ ID NO: 604365 - RNA, 22 nt, Human
agggcagagaaauguaguugag

SEQ ID NO: 604366 - RNA, 22 nt, Human
uccuuauagcccaagugaugga

SEQ ID NO: 604367 - RNA, 22 nt, Human
uguaggaguccaaucaggagac

SEQ ID NO: 604368 - RNA, 22 nt, Human
aaauugcauucuugucuugaua

SEQ ID NO: 604369 - RNA, 17 nt, Human
accagccucuccugggg

SEQ ID NO: 604370 - RNA, 22 nt, Human
ggggacgggacuuagcaugagu

SEQ ID NO: 604371 - RNA, 23 nt, Human
ggacacugugcagaugcuagugc

SEQ ID NO: 604372 - RNA, 22 nt, Human
gaugcauguauggagugagggu

SEQ ID NO: 604373 - RNA, 20 nt, Human
agcuguuuacauggauuucu

SEQ ID NO: 604374 - RNA, 22 nt, Human
gcaggccagcugugcagauggg

SEQ ID NO: 604375 - RNA, 22 nt, Human
gaggcugggaaguccaagauca

SEQ ID NO: 604376 - RNA, 22 nt, Human
uuauacauguguuuugagauga

SEQ ID NO: 604377 - RNA, 22 nt, Human
uguuaauggcugaagacauccu

SEQ ID NO: 604378 - RNA, 22 nt, Human
aggaaacagugaacuuggcagg

SEQ ID NO: 604379 - RNA, 20 nt, Human
uggaauaaguuaaguuguuu

SEQ ID NO: 604380 - RNA, 22 nt, Human
ucacauuuucuacuacuguacg

SEQ ID NO: 604381 - RNA, 20 nt, Human
gucuccacuggggguuaacc

SEQ ID NO: 604382 - RNA, 22 nt, Human
cugaggcaugggaaguugggug

SEQ ID NO: 604383 - RNA, 22 nt, Human
uugcaguuuauguuccugcagu

SEQ ID NO: 604384 - RNA, 22 nt, Human
cugggccuuggauugacacugu

SEQ ID NO: 604385 - RNA, 20 nt, Human
cuuucucuaauuuauaagua

SEQ ID NO: 604386 - RNA, 22 nt, Human
gggcugaggcuaccacuggucu

SEQ ID NO: 604387 - RNA, 22 nt, Human
acuucuggugucauacugcauu

SEQ ID NO: 604388 - RNA, 22 nt, Human
cagacacaccaggcccauucug

SEQ ID NO: 604389 - RNA, 22 nt, Human
cuacucugugguguauuugcau

SEQ ID NO: 604390 - RNA, 23 nt, Human
gaggccacauuccccugcuugag

SEQ ID NO: 604391 - RNA, 19 nt, Human
uuuuccuucuccucuuaau

SEQ ID NO: 604392 - RNA, 22 nt, Human
cugagaaaguuuauguuuauuu

SEQ ID NO: 604393 - RNA, 22 nt, Human
gaggcugguaggaaaggaaaca

SEQ ID NO: 604394 - RNA, 22 nt, Human
auaagccugauucacuugucau

SEQ ID NO: 604395 - RNA, 22 nt, Human
uuucuauuggcgucacuguugu

SEQ ID NO: 604396 - RNA, 22 nt, Human
gaagcuuaauuaugaccagcug

SEQ ID NO: 604397 - RNA, 21 nt, Human
acuaugucauuuaagucacug

SEQ ID NO: 604398 - RNA, 22 nt, Human
uuaagagacaggagaaugaugu

SEQ ID NO: 604399 - RNA, 22 nt, Human
cagauggagucccguggaguuc

SEQ ID NO: 604400 - RNA, 22 nt, Human
agcagauguuucagagcaggcu

SEQ ID NO: 604401 - RNA, 22 nt, Human
caggcugaggguuaggccuuag

SEQ ID NO: 604402 - RNA, 22 nt, Human
cccagccagccucuucccauau

SEQ ID NO: 604403 - RNA, 22 nt, Human
gagguacagaguguuccaaugu

SEQ ID NO: 604404 - RNA, 22 nt, Human
agaggcuguuacacucccagau

SEQ ID NO: 604405 - RNA, 21 nt, Human
aggaaaggaaguccccagggu

SEQ ID NO: 604406 - RNA, 22 nt, Human
aggauguguuuugagcugacua

SEQ ID NO: 604407 - RNA, 22 nt, Human
uugauacacaauggaacaaugu

SEQ ID NO: 604408 - RNA, 22 nt, Human
ucucuguacaguacaugccgug

SEQ ID NO: 604409 - RNA, 22 nt, Human
ucugaaauaacugaugccagau

SEQ ID NO: 604410 - RNA, 22 nt, Human
ugggaggaucucuugaggccag

SEQ ID NO: 604411 - RNA, 22 nt, Human
gcacagagccugguaccgagaa

SEQ ID NO: 604412 - RNA, 19 nt, Human
uccucugguaccacccuug

SEQ ID NO: 604413 - RNA, 22 nt, Human
cuguccuaugaguacucacuag

SEQ ID NO: 604414 - RNA, 17 nt, Human
uggggaugguucaugag

SEQ ID NO: 604415 - RNA, 22 nt, Human
acuuugcugcagguuuaaagag

SEQ ID NO: 604416 - RNA, 22 nt, Human
ggcacugagcgggcucugagcg

SEQ ID NO: 604417 - RNA, 22 nt, Human
gaauggaaacugggagauggcc

SEQ ID NO: 604418 - RNA, 22 nt, Human
ugggccaguuggaauggauacu

SEQ ID NO: 604419 - RNA, 23 nt, Human
ucagaggaucaucaaacguuuuc

SEQ ID NO: 604420 - RNA, 22 nt, Human
uugaggucaauucuguuuccug

SEQ ID NO: 604421 - RNA, 22 nt, Human
ugucuuuaagcaaacaguguuu

SEQ ID NO: 604422 - RNA, 22 nt, Human
uaguuuagaauguugcaauaca

SEQ ID NO: 604423 - RNA, 22 nt, Human
ugaagucagggauuccaugaag

SEQ ID NO: 604424 - RNA, 22 nt, Human
agcuggccuucggugucacugg

SEQ ID NO: 604425 - RNA, 22 nt, Human
aagggcugagcacagugagcca

SEQ ID NO: 604426 - RNA, 22 nt, Human
cauuaacaaugacugcuugacu

SEQ ID NO: 604427 - RNA, 21 nt, Human
cauuucuauugaugagaaaag

SEQ ID NO: 604428 - RNA, 22 nt, Human
gccuucugcgcucgugucuccg

SEQ ID NO: 604429 - RNA, 22 nt, Human
gagaggaguaggcugauggugc

SEQ ID NO: 604430 - RNA, 22 nt, Human
uggagcagcaucacuuugagcu

SEQ ID NO: 604431 - RNA, 22 nt, Human
uggaaugugcuagggcuguggc

SEQ ID NO: 604432 - RNA, 22 nt, Human
ccugcccaggagucucucugug

SEQ ID NO: 604433 - RNA, 22 nt, Human
ugcugcuuugauguguaaauca

SEQ ID NO: 604434 - RNA, 22 nt, Human
gggcagguacaagaugcuucuu

SEQ ID NO: 604435 - RNA, 19 nt, Human
cucugccucuggcuguggc

SEQ ID NO: 604436 - RNA, 21 nt, Human
agucugagguggggccuagga

SEQ ID NO: 604437 - RNA, 22 nt, Human
gggcacuggccgcccaucccug

SEQ ID NO: 604438 - RNA, 22 nt, Human
ccugggaugaaagcagcccacu

SEQ ID NO: 604439 - RNA, 22 nt, Human
gagcacccuaccugccacugag

SEQ ID NO: 604440 - RNA, 22 nt, Human
cugcaguguucuggaaugcauu

SEQ ID NO: 604441 - RNA, 16 nt, Human
aggcagagauuuaccc

SEQ ID NO: 604442 - RNA, 22 nt, Human
ggcugccuccugcugggcugga

SEQ ID NO: 604443 - RNA, 22 nt, Human
cuguggcuuucucugccuccuu

SEQ ID NO: 604444 - RNA, 22 nt, Human
auaagcuuuugauucacuucag

SEQ ID NO: 604445 - RNA, 22 nt, Human
ugaagguguuuauaccucagau

SEQ ID NO: 604446 - RNA, 22 nt, Human
aggaaaggccuuugcauuuggu

SEQ ID NO: 604447 - RNA, 22 nt, Human
agagugagggggcacugagacg

SEQ ID NO: 604448 - RNA, 22 nt, Human
gugcauauauaugggagggagc

SEQ ID NO: 604449 - RNA, 18 nt, Human
aggccugggaagcugagg

SEQ ID NO: 604450 - RNA, 22 nt, Human
caguaauuccaagugcuuauac

SEQ ID NO: 604451 - RNA, 22 nt, Human
uguccucacaggaaugaacuuu

SEQ ID NO: 604452 - RNA, 22 nt, Human
cucagcucauuguggauccggu

SEQ ID NO: 604453 - RNA, 22 nt, Human
auuuacagacguggauuagugc

SEQ ID NO: 604454 - RNA, 22 nt, Human
guacaugauuccccauaaaaag

SEQ ID NO: 604455 - RNA, 22 nt, Human
gcugggagaggcagcuuucgga

SEQ ID NO: 604456 - RNA, 22 nt, Human
uguguaacaaucuacacuuagg

SEQ ID NO: 604457 - RNA, 22 nt, Human
gugcuggggagauaggaagaga

SEQ ID NO: 604458 - RNA, 22 nt, Human
ucacugggcaucggagcugaaa

SEQ ID NO: 604459 - RNA, 18 nt, Human
cugggucuccaggcugcc

SEQ ID NO: 604460 - RNA, 22 nt, Human
uaugguaaaugagcauauguuc

SEQ ID NO: 604461 - RNA, 22 nt, Human
uguccuuuaugaaaugguguuu

SEQ ID NO: 604462 - RNA, 22 nt, Human
cauugcuugauagcugaaaauu

SEQ ID NO: 604463 - RNA, 22 nt, Human
gccaggccugcaagugcuggug

SEQ ID NO: 604464 - RNA, 22 nt, Human
aaggaacacuacaaggcuggga

SEQ ID NO: 604465 - RNA, 22 nt, Human
agcugcccagcuaggaagaagg

SEQ ID NO: 604466 - RNA, 22 nt, Human
ggguggcacaggugcagagggu

SEQ ID NO: 604467 - RNA, 22 nt, Human
gcccagugguaaaagcaggccu

SEQ ID NO: 604468 - RNA, 22 nt, Human
aaaaguauuggccaccauuucu

SEQ ID NO: 604469 - RNA, 22 nt, Human
auggcaauguggcuuauuugga

SEQ ID NO: 604470 - RNA, 22 nt, Human
guggcagagagcaagugucuga

SEQ ID NO: 604471 - RNA, 22 nt, Human
gcagagccugggggucugcgga

SEQ ID NO: 604472 - RNA, 22 nt, Human
caguccuuucaauggugaccuu

SEQ ID NO: 604473 - RNA, 22 nt, Human
uuacagaaguauugagagaucc

SEQ ID NO: 604474 - RNA, 22 nt, Human
ucugcccucauugcugccugga

SEQ ID NO: 604475 - RNA, 22 nt, Human
cagauguacaugaagggcaaug

SEQ ID NO: 604476 - RNA, 22 nt, Human
gggguggagcuaaaugucuacu

SEQ ID NO: 604477 - RNA, 22 nt, Human
cagggugcuuccguggagcugu

SEQ ID NO: 604478 - RNA, 22 nt, Human
uuccugggcaggacgagagucu

SEQ ID NO: 604479 - RNA, 22 nt, Human
acuggggccuccuccaugcucu

SEQ ID NO: 604480 - RNA, 20 nt, Human
ggagcugcccugggcuggag

SEQ ID NO: 604481 - RNA, 22 nt, Human
gcugccugccuaguuccacagu

SEQ ID NO: 604482 - RNA, 22 nt, Human
cugugugucauuugucaauccu

SEQ ID NO: 604483 - RNA, 22 nt, Human
caggugugccgggagcaguuug

SEQ ID NO: 604484 - RNA, 23 nt, Human
agcaaugcugggagacucuguaa

SEQ ID NO: 604485 - RNA, 22 nt, Human
ucuaguuuaagaucuguuaguc

SEQ ID NO: 604486 - RNA, 22 nt, Human
uggcagcuuuuuguuucaggcu

SEQ ID NO: 604487 - RNA, 22 nt, Human
uggugccuccagcugcuucucc

SEQ ID NO: 604488 - RNA, 22 nt, Human
cuggauggucccaugagcagcu

SEQ ID NO: 604489 - RNA, 22 nt, Human
uuacuugaaaggaaauuaaggu

SEQ ID NO: 604490 - RNA, 22 nt, Human
cuucuuucccaggcauguuuua

SEQ ID NO: 604491 - RNA, 22 nt, Human
ugaaauaucauuuucaucuccc

SEQ ID NO: 604492 - RNA, 22 nt, Human
agaaacauccugcuuuccauuu

SEQ ID NO: 604493 - RNA, 22 nt, Human
ucuuuucugccacagccugagc

SEQ ID NO: 604494 - RNA, 22 nt, Human
gcucuguggcaggaggucuugu

SEQ ID NO: 604495 - RNA, 22 nt, Human
agagaagggggaaagaucucac

SEQ ID NO: 604496 - RNA, 22 nt, Human
cauagaaaguauuauggaauuu

SEQ ID NO: 604497 - RNA, 22 nt, Human
ugugcuucuugcagcuccugua

SEQ ID NO: 604498 - RNA, 22 nt, Human
aggcagguccccuggaaggcac

SEQ ID NO: 604499 - RNA, 22 nt, Human
caugaauauacauccugauggc

SEQ ID NO: 604500 - RNA, 22 nt, Human
auuccuaaggaaggcuggcaag

SEQ ID NO: 604501 - RNA, 22 nt, Human
ccuggaucagagccagagaagc

SEQ ID NO: 604502 - RNA, 22 nt, Human
agugcuuuauguuguugugcaa

SEQ ID NO: 604503 - RNA, 22 nt, Human
ucagaccauccugcuguuagug

SEQ ID NO: 604504 - RNA, 22 nt, Human
aagaugugaaauugucucuggg

SEQ ID NO: 604505 - RNA, 22 nt, Human
gccugugcauagcagcggacuc

SEQ ID NO: 604506 - RNA, 23 nt, Human
acuccccagucucuucuugccaa

SEQ ID NO: 604507 - RNA, 22 nt, Human
cagagccucucagccccuuggg

SEQ ID NO: 604508 - RNA, 22 nt, Human
ccagggcaaaugagaucauagc

SEQ ID NO: 604509 - RNA, 22 nt, Human
agaugaaagauuuuuauagaga

SEQ ID NO: 604510 - RNA, 22 nt, Human
acagucuggaggcugcuucauu

SEQ ID NO: 604511 - RNA, 22 nt, Human
cuucuuccugcugcagccucca

SEQ ID NO: 604512 - RNA, 22 nt, Human
cauggccugccuccuccuggug

SEQ ID NO: 604513 - RNA, 22 nt, Human
auagagacuauagagcacuuac

SEQ ID NO: 604514 - RNA, 19 nt, Human
augacagaguugauaagug

SEQ ID NO: 604515 - RNA, 22 nt, Human
ggcaggguggcccuccagugag

SEQ ID NO: 604516 - RNA, 22 nt, Human
agcuucuuuaauucagcaugau

SEQ ID NO: 604517 - RNA, 22 nt, Human
acaccaugguucccaaacugug

SEQ ID NO: 604518 - RNA, 22 nt, Human
ugccugggccucugaggaaggc

SEQ ID NO: 604519 - RNA, 22 nt, Human
gggagauggcucagaggccgcg

SEQ ID NO: 604520 - RNA, 22 nt, Human
guucuuuaaguggagaaggaaa

SEQ ID NO: 604521 - RNA, 20 nt, Human
auauuucuuaagaacuuuca

SEQ ID NO: 604522 - RNA, 22 nt, Human
auuaaggaacaaagccuuuuga

SEQ ID NO: 604523 - RNA, 22 nt, Human
gaaggccauugcguccugggau

SEQ ID NO: 604524 - RNA, 22 nt, Human
ccacugagaccuuuuggaggag

SEQ ID NO: 604525 - RNA, 22 nt, Human
aaagacauugaagaaggacuua

SEQ ID NO: 604526 - RNA, 22 nt, Human
aagcagaauuuaauagaaaggu

SEQ ID NO: 604527 - RNA, 23 nt, Human
acagccccaugcagguguguuug

SEQ ID NO: 604528 - RNA, 22 nt, Human
ucugccaguuuauagacaagcc

SEQ ID NO: 604529 - RNA, 22 nt, Human
caggcaccaauagggaucgugg

SEQ ID NO: 604530 - RNA, 22 nt, Human
ggugugggagagauucuuuccu

SEQ ID NO: 604531 - RNA, 22 nt, Human
uagaagcaccacucaucacgug

SEQ ID NO: 604532 - RNA, 22 nt, Human
gggagacacgcugcaggcauaa

SEQ ID NO: 604533 - RNA, 22 nt, Human
gcauguggugggcuggccacuc

SEQ ID NO: 604534 - RNA, 20 nt, Human
gugcugagugaaaugagauu

SEQ ID NO: 604535 - RNA, 22 nt, Human
acacuguagcugagggcaugcg

SEQ ID NO: 604536 - RNA, 22 nt, Human
gcccuuagucagcacuuucacu

SEQ ID NO: 604537 - RNA, 22 nt, Human
cuaggaaaugaauacaguacac

SEQ ID NO: 604538 - RNA, 22 nt, Human
aggagggaauaagaaagaguca

SEQ ID NO: 604539 - RNA, 22 nt, Human
uaucuacauguagguauguaug

SEQ ID NO: 604540 - RNA, 22 nt, Human
ucucauguuuuaccuguccuca

SEQ ID NO: 604541 - RNA, 22 nt, Human
ugaggaaacugaggcacagaug

SEQ ID NO: 604542 - RNA, 22 nt, Human
ugagcagggacuuuggagucug

SEQ ID NO: 604543 - RNA, 22 nt, Human
acaggcugcccgcuccccaccu

SEQ ID NO: 604544 - RNA, 22 nt, Human
agaggaauaaauuucuguagug

SEQ ID NO: 604545 - RNA, 22 nt, Human
ucaguguucagggaccaggucc

SEQ ID NO: 604546 - RNA, 23 nt, Human
uugaggcaaacauguaaguagga

SEQ ID NO: 604547 - RNA, 22 nt, Human
uuucaguuuaugucuugaauua

SEQ ID NO: 604548 - RNA, 22 nt, Human
ggcaccagggacaauccucuuc

SEQ ID NO: 604549 - RNA, 22 nt, Human
ucugaaauagaagugucuuucu

SEQ ID NO: 604550 - RNA, 22 nt, Human
augaacaucggaaaugagacug

SEQ ID NO: 604551 - RNA, 20 nt, Human
uaccuugaaccuccaccugg

SEQ ID NO: 604552 - RNA, 22 nt, Human
aaguuacaguuggaacugugaa

SEQ ID NO: 604553 - RNA, 22 nt, Human
auggccagucuguuggacagca

SEQ ID NO: 604554 - RNA, 22 nt, Human
cuuguuaaaaugcagauuccaa

SEQ ID NO: 604555 - RNA, 22 nt, Human
uuugaggaagaucggagggaaa

SEQ ID NO: 604556 - RNA, 22 nt, Human
uggcugagaccuucccaaauuc

SEQ ID NO: 604557 - RNA, 22 nt, Human
uuccucuguaguugcugaugaa

SEQ ID NO: 604558 - RNA, 22 nt, Human
aggugggcggauucaugagguc

SEQ ID NO: 604559 - RNA, 18 nt, Human
cugaggcccagagagggc

SEQ ID NO: 604560 - RNA, 22 nt, Human
aggugccagugcuguggucccc

SEQ ID NO: 604561 - RNA, 18 nt, Human
gcuccuggagucugacuc

SEQ ID NO: 604562 - RNA, 22 nt, Human
gacuguguccaugugcuggauu

SEQ ID NO: 604563 - RNA, 19 nt, Human
ucugaaguccagggcauac

SEQ ID NO: 604564 - RNA, 22 nt, Human
uaaaggcaugcaggugaaugua

SEQ ID NO: 604565 - RNA, 22 nt, Human
augcauaauguauguauugacu

SEQ ID NO: 604566 - RNA, 22 nt, Human
aaagcuauagggucaagcauuu

SEQ ID NO: 604567 - RNA, 22 nt, Human
ugccagcuuuugacuaucuuag

SEQ ID NO: 604568 - RNA, 22 nt, Human
gcacagggcugccaggcggcuu

SEQ ID NO: 604569 - RNA, 22 nt, Human
cagcaacuuaggcagaacaucu

SEQ ID NO: 604570 - RNA, 23 nt, Human
acagcaagaggaccagaugugag

SEQ ID NO: 604571 - RNA, 22 nt, Human
gcugugugaccugggcaagucu

SEQ ID NO: 604572 - RNA, 22 nt, Human
ugucuccacaggugucagcuca

SEQ ID NO: 604573 - RNA, 22 nt, Human
gguccuugugucucuauggccc

SEQ ID NO: 604574 - RNA, 18 nt, Human
ugagaauguaagaaaugg

SEQ ID NO: 604575 - RNA, 22 nt, Human
aaugaugugaguuuuuauucuc

SEQ ID NO: 604576 - RNA, 22 nt, Human
ucauauaaguuuaaaacuaucu

SEQ ID NO: 604577 - RNA, 18 nt, Human
ugagaggcuauuuuuugc

SEQ ID NO: 604578 - RNA, 22 nt, Human
ucuuccucucuaauugaucaga

SEQ ID NO: 604579 - RNA, 22 nt, Human
aggcccugaagucggccccuca

SEQ ID NO: 604580 - RNA, 22 nt, Human
caugcagugcuuugcgccgggc

SEQ ID NO: 604581 - RNA, 17 nt, Human
cuggagccaagagggcc

SEQ ID NO: 604582 - RNA, 22 nt, Human
ugccaggcacgugagaguggcc

SEQ ID NO: 604583 - RNA, 22 nt, Human
cauucacaauaguugaaaggug

SEQ ID NO: 604584 - RNA, 22 nt, Human
ucaggcugcccguucagggcuc

SEQ ID NO: 604585 - RNA, 19 nt, Human
caaggguugggucugucau

SEQ ID NO: 604586 - RNA, 22 nt, Human
gcucugugaguauuggcccugg

SEQ ID NO: 604587 - RNA, 22 nt, Human
uaguuucauaugcaaaauagua

SEQ ID NO: 604588 - RNA, 18 nt, Human
aguggaaaacaaauacac

SEQ ID NO: 604589 - RNA, 22 nt, Human
uggcagagcuggcugcggauga

SEQ ID NO: 604590 - RNA, 22 nt, Human
uaugcacugguacuauucgugu

SEQ ID NO: 604591 - RNA, 22 nt, Human
ggcugagccacugcgccuggcu

SEQ ID NO: 604592 - RNA, 22 nt, Human
acuugauuuugaaccuuucuac

SEQ ID NO: 604593 - RNA, 19 nt, Human
uccaauuuguauguuuuca

SEQ ID NO: 604594 - RNA, 22 nt, Human
aacacuuuuuaguaaagauuga

SEQ ID NO: 604595 - RNA, 22 nt, Human
uguagggacugaggcuggagag

SEQ ID NO: 604596 - RNA, 22 nt, Human
agaucacaguggcaacucccuu

SEQ ID NO: 604597 - RNA, 22 nt, Human
ucugagguguagcugggcuuca

SEQ ID NO: 604598 - RNA, 22 nt, Human
uucauucuugggaucagagagu

SEQ ID NO: 604599 - RNA, 22 nt, Human
agucaucauuuauaucaagucu

SEQ ID NO: 604600 - RNA, 22 nt, Human
uaggauuccagaacagugcugc

SEQ ID NO: 604601 - RNA, 22 nt, Human
agaggaggcuggguccagauaa

SEQ ID NO: 604602 - RNA, 22 nt, Human
uuuccuuugcccaauacauguc

SEQ ID NO: 604603 - RNA, 22 nt, Human
guauuuuuagguaaggaaagua

SEQ ID NO: 604604 - RNA, 22 nt, Human
agcagaaaauuggaaaugacaa

SEQ ID NO: 604605 - RNA, 22 nt, Human
ugguccaggguguaguacagag

SEQ ID NO: 604606 - RNA, 22 nt, Human
gcaggggcuacucugagcuucc

SEQ ID NO: 604607 - RNA, 22 nt, Human
agacacuguucucacaugcuug

SEQ ID NO: 604608 - RNA, 22 nt, Human
aagaggcuucagauccuucaga

SEQ ID NO: 604609 - RNA, 22 nt, Human
uccagggcagccgcgggugcgc

SEQ ID NO: 604610 - RNA, 22 nt, Human
uaaggcaagagcagggucuuug

SEQ ID NO: 604611 - RNA, 22 nt, Human
gcugaggaggugugguuaggug

SEQ ID NO: 604612 - RNA, 22 nt, Human
cuccaggugcagaaggacucag

SEQ ID NO: 604613 - RNA, 22 nt, Human
gacauuuagaaguuagauucaa

SEQ ID NO: 604614 - RNA, 22 nt, Human
uuagcugacugugugauuuggc

SEQ ID NO: 604615 - RNA, 22 nt, Human
aaagguuuauugcuaugguugu

SEQ ID NO: 604616 - RNA, 22 nt, Human
cccaggaggcagaaguugcagu

SEQ ID NO: 604617 - RNA, 21 nt, Human
ugagucucucagcuucaggua

SEQ ID NO: 604618 - RNA, 22 nt, Human
cuuaggaaugucccuucccaca

SEQ ID NO: 604619 - RNA, 21 nt, Human
agaggcaggcauuaaguacac

SEQ ID NO: 604620 - RNA, 20 nt, Human
ugcaagauggguggggagaa

SEQ ID NO: 604621 - RNA, 22 nt, Human
uccagggaugguaaugagcagu

SEQ ID NO: 604622 - RNA, 22 nt, Human
ccugagcugaacuaagcaguuu

SEQ ID NO: 604623 - RNA, 22 nt, Human
uaaugcaauuuagcaaaguuuu

SEQ ID NO: 604624 - RNA, 22 nt, Human
aacaugcugccuuucuacgagu

SEQ ID NO: 604625 - RNA, 22 nt, Human
ggaagagccuggggugucaggc

SEQ ID NO: 604626 - RNA, 22 nt, Human
ugauacagucagcucacaauug

SEQ ID NO: 604627 - RNA, 18 nt, Human
ucugggcuucccgaggcu

SEQ ID NO: 604628 - RNA, 22 nt, Human
caggaaauaucucaacacuuua

SEQ ID NO: 604629 - RNA, 22 nt, Human
gagaagcagguuuagcagacaa

SEQ ID NO: 604630 - RNA, 17 nt, Human
gagguaggaagugaguc

SEQ ID NO: 604631 - RNA, 22 nt, Human
uucuuucucuguaaaaggaaaa

SEQ ID NO: 604632 - RNA, 22 nt, Human
acaauagaguucucauaggaca

SEQ ID NO: 604633 - RNA, 22 nt, Human
aggagaaagacuggacagccaa

SEQ ID NO: 604634 - RNA, 22 nt, Human
agguaguguagcugagugggau

SEQ ID NO: 604635 - RNA, 22 nt, Human
ugcugggcuggagcugccaggg

SEQ ID NO: 604636 - RNA, 22 nt, Human
aguuucuaccgguacauucagg

SEQ ID NO: 604637 - RNA, 22 nt, Human
aggaauaugagcugcugcagug

SEQ ID NO: 604638 - RNA, 22 nt, Human
caucauaaaauugagauaacug

SEQ ID NO: 604639 - RNA, 22 nt, Human
ugaggccaacuagggagaugga

SEQ ID NO: 604640 - RNA, 22 nt, Human
acucauugaaacuuaagaucua

SEQ ID NO: 604641 - RNA, 22 nt, Human
caggacaggcccuguggggucu

SEQ ID NO: 604642 - RNA, 22 nt, Human
aacacagcuaauuucugucaau

SEQ ID NO: 604643 - RNA, 22 nt, Human
uugaaaauaucacaggagcagc

SEQ ID NO: 604644 - RNA, 22 nt, Human
aggugaaugcucacauucuaau

SEQ ID NO: 604645 - RNA, 22 nt, Human
uggggaggauaugugaguuauu

SEQ ID NO: 604646 - RNA, 22 nt, Human
uucugucuucccacugaggagc

SEQ ID NO: 604647 - RNA, 22 nt, Human
cuggcuggccggagcgaggcgg

SEQ ID NO: 604648 - RNA, 22 nt, Human
gaaucuuaccucucuauuguug

SEQ ID NO: 604649 - RNA, 22 nt, Human
uaauuuacagagauacagucag

SEQ ID NO: 604650 - RNA, 22 nt, Human
cagcaggcaggugggccaaguc

SEQ ID NO: 604651 - RNA, 22 nt, Human
ccagcucugauuuugaccucca

SEQ ID NO: 604652 - RNA, 22 nt, Human
uuacaguugcuacaaaggauaa

SEQ ID NO: 604653 - RNA, 18 nt, Human
ggcagcaagaagggaggg

SEQ ID NO: 604654 - RNA, 22 nt, Human
cauguuuuguguacagaauauu

SEQ ID NO: 604655 - RNA, 22 nt, Human
uacaugcuccacuuucuccugu

SEQ ID NO: 604656 - RNA, 22 nt, Human
cucagcuacgcuuucaccagcu

SEQ ID NO: 604657 - RNA, 22 nt, Human
uuuagacuaauuccuaaagggc

SEQ ID NO: 604658 - RNA, 22 nt, Human
cugcuuugauuagaagaguaca

SEQ ID NO: 604659 - RNA, 19 nt, Human
accaggagacagugagcuu

SEQ ID NO: 604660 - RNA, 22 nt, Human
ggaggcggacacagguaguguu

SEQ ID NO: 604661 - RNA, 22 nt, Human
aagaaagcauuagacaggcauu

SEQ ID NO: 604662 - RNA, 22 nt, Human
ggggcugacgggcauguggcuu

SEQ ID NO: 604663 - RNA, 22 nt, Human
gagaagggauaugccacucucg

SEQ ID NO: 604664 - RNA, 22 nt, Human
gcaggggcugcugggaacucgg

SEQ ID NO: 604665 - RNA, 22 nt, Human
aauuauauugaaguugaauguc

SEQ ID NO: 604666 - RNA, 20 nt, Human
auucugcuuucugauagagc

SEQ ID NO: 604667 - RNA, 22 nt, Human
guccucuguuagaaaugugcuu

SEQ ID NO: 604668 - RNA, 22 nt, Human
gcugagcagguguaaggaaggc

SEQ ID NO: 604669 - RNA, 22 nt, Human
gacacaggaaucaccuuggaug

SEQ ID NO: 604670 - RNA, 22 nt, Human
agguggaguuggcuguaguuca

SEQ ID NO: 604671 - RNA, 22 nt, Human
ccugaggucagcgguucccaca

SEQ ID NO: 604672 - RNA, 22 nt, Human
ucuuccugcuuggugugucugg

SEQ ID NO: 604673 - RNA, 22 nt, Human
cuugagaacaggguuagguaac

SEQ ID NO: 604674 - RNA, 22 nt, Human
ucauucucagacucuuggccuc

SEQ ID NO: 604675 - RNA, 22 nt, Human
gcacagcagcugggggcccugg

SEQ ID NO: 604676 - RNA, 22 nt, Human
uaauuuuguauugccauuguag

SEQ ID NO: 604677 - RNA, 22 nt, Human
ggcccaaaccaaguaccucaaa

SEQ ID NO: 604678 - RNA, 22 nt, Human
cuauugaauuaacuauuaaagu

SEQ ID NO: 604679 - RNA, 22 nt, Human
aaaugguaaugucuuucuguuu

SEQ ID NO: 604680 - RNA, 22 nt, Human
uccuuugacuucuugcagucca

SEQ ID NO: 604681 - RNA, 22 nt, Human
gaagccaggggccugacaggca

SEQ ID NO: 604682 - RNA, 20 nt, Human
aagagucuuuacugagcuaa

SEQ ID NO: 604683 - RNA, 22 nt, Human
cuugggcuuagaagguaaguga

SEQ ID NO: 604684 - RNA, 22 nt, Human
ucugagguggacgauggagccu

SEQ ID NO: 604685 - RNA, 22 nt, Human
uguaaaacaaaauuuguggaga

SEQ ID NO: 604686 - RNA, 22 nt, Human
uggcugcuagccagagcuucag

SEQ ID NO: 604687 - RNA, 22 nt, Human
cugggacacccaaggaaagagc

SEQ ID NO: 604688 - RNA, 22 nt, Human
acuugccccagaauugcugcug

SEQ ID NO: 604689 - RNA, 22 nt, Human
aggcccuggucaggucuggcug

SEQ ID NO: 604690 - RNA, 22 nt, Human
uuucucaaguucagauauuuga

SEQ ID NO: 604691 - RNA, 23 nt, Human
ggauaaaucucagcuucuuccau

SEQ ID NO: 604692 - RNA, 22 nt, Human
aguaaaaauaugcuuguggcua

SEQ ID NO: 604693 - RNA, 22 nt, Human
ugggaagggccgauggagccuc

SEQ ID NO: 604694 - RNA, 22 nt, Human
ccugggcucugaggagggaguc

SEQ ID NO: 604695 - RNA, 22 nt, Human
ugaguccugucuuugucacuua

SEQ ID NO: 604696 - RNA, 22 nt, Human
ugcugaaggcaggggagguggc

SEQ ID NO: 604697 - RNA, 22 nt, Human
auaauaacaccugaauaggaaa

SEQ ID NO: 604698 - RNA, 20 nt, Human
auggaagcugcucuucuccu

SEQ ID NO: 604699 - RNA, 22 nt, Human
ccccaggaagccucagauuugc

SEQ ID NO: 604700 - RNA, 22 nt, Human
augcuuuuaugucacaugguca

SEQ ID NO: 604701 - RNA, 22 nt, Human
cagagggcguccggguuaacuu

SEQ ID NO: 604702 - RNA, 22 nt, Human
uuuauuauucucuggagaaugu

SEQ ID NO: 604703 - RNA, 20 nt, Human
cccugagacaaaggaggggc

SEQ ID NO: 604704 - RNA, 22 nt, Human
cagggggcucaaaggagagugc

SEQ ID NO: 604705 - RNA, 22 nt, Human
cagcuuggaggaggaucuaaga

SEQ ID NO: 604706 - RNA, 22 nt, Human
caaugcuuuuagcuucagcuug

SEQ ID NO: 604707 - RNA, 22 nt, Human
uagaaacaaguuucucuuuggg

SEQ ID NO: 604708 - RNA, 22 nt, Human
gggcaugagagggcagcuggca

SEQ ID NO: 604709 - RNA, 22 nt, Human
gucuuauuaaaaaucuaauccc

SEQ ID NO: 604710 - RNA, 22 nt, Human
cucugagaagccuugaugggga

SEQ ID NO: 604711 - RNA, 22 nt, Human
uacaguucuagucaaaaaucac

SEQ ID NO: 604712 - RNA, 22 nt, Human
cagagcagcagagcuuccaugg

SEQ ID NO: 604713 - RNA, 22 nt, Human
caagagcuggagaggcagucua

SEQ ID NO: 604714 - RNA, 22 nt, Human
ugaggcagugcugggaagccug

SEQ ID NO: 604715 - RNA, 22 nt, Human
caaacauuuugagugguuucug

SEQ ID NO: 604716 - RNA, 22 nt, Human
uagagcagccuucagagcaguu

SEQ ID NO: 604717 - RNA, 22 nt, Human
ucugacaaugaacaaucuauag

SEQ ID NO: 604718 - RNA, 22 nt, Human
uugcuucuuagauauuccucuc

SEQ ID NO: 604719 - RNA, 23 nt, Human
cccagcgcugagcccugcaggca

SEQ ID NO: 604720 - RNA, 23 nt, Human
agcuccagaacauagcacaggaa

SEQ ID NO: 604721 - RNA, 22 nt, Human
gcugggcaagugccuuggguuu

SEQ ID NO: 604722 - RNA, 22 nt, Human
auauagucaaacauauaugugu

SEQ ID NO: 604723 - RNA, 22 nt, Human
uaaagacaaaugacauuacggc

SEQ ID NO: 604724 - RNA, 22 nt, Human
ugagcuucaaaguuggaucuga

SEQ ID NO: 604725 - RNA, 22 nt, Human
cugacuccuuaccauaugcuuu

SEQ ID NO: 604726 - RNA, 22 nt, Human
ccauggcuuuugagucucaaga

SEQ ID NO: 604727 - RNA, 22 nt, Human
gagaagggggcucgaguguccu

SEQ ID NO: 604728 - RNA, 22 nt, Human
guccuggcuuaguucgcuguaa

SEQ ID NO: 604729 - RNA, 22 nt, Human
gcagggguggaggcuguccugu

SEQ ID NO: 604730 - RNA, 22 nt, Human
uugauucuaugagguaagcuau

SEQ ID NO: 604731 - RNA, 19 nt, Human
ccugagauuccuccuuuuc

SEQ ID NO: 604732 - RNA, 22 nt, Human
guuguauucuucaauaucagag

SEQ ID NO: 604733 - RNA, 18 nt, Human
aaguaacagaagagcaca

SEQ ID NO: 604734 - RNA, 22 nt, Human
ccucuguguccuggucauugaa

SEQ ID NO: 604735 - RNA, 21 nt, Human
ucccagagugcuugggacugc

SEQ ID NO: 604736 - RNA, 20 nt, Human
agcugaggcaccugagguua

SEQ ID NO: 604737 - RNA, 22 nt, Human
ugagaaacauaugagagauuug

SEQ ID NO: 604738 - RNA, 22 nt, Human
cagcagcagccccaggaagguu

SEQ ID NO: 604739 - RNA, 21 nt, Human
ugcaggagucugugagucagg

SEQ ID NO: 604740 - RNA, 22 nt, Human
uggaacacaggacuaucagcug

SEQ ID NO: 604741 - RNA, 21 nt, Human
aucacauuggcuguuauuauu

SEQ ID NO: 604742 - RNA, 22 nt, Human
gagcagugaagacagaaguaca

SEQ ID NO: 604743 - RNA, 22 nt, Human
ugagccaggcccagugggguca

SEQ ID NO: 604744 - RNA, 22 nt, Human
gaacuuuaaaacaaaguacagu

SEQ ID NO: 604745 - RNA, 22 nt, Human
ggaaaagaaagggacugauugg

SEQ ID NO: 604746 - RNA, 22 nt, Human
gcaguguuggcaggauggggcu

SEQ ID NO: 604747 - RNA, 22 nt, Human
ucuucuguuaccacagcgauga

SEQ ID NO: 604748 - RNA, 19 nt, Human
ggaaggagagaaaugcaug

SEQ ID NO: 604749 - RNA, 22 nt, Human
aagagacuucuagauuuguuga

SEQ ID NO: 604750 - RNA, 22 nt, Human
ucucagugcagcuugacagaga

SEQ ID NO: 604751 - RNA, 22 nt, Human
aaggccagcuuguagggcuggu

SEQ ID NO: 604752 - RNA, 22 nt, Human
gaggaguggaguugcuggguug

SEQ ID NO: 604753 - RNA, 22 nt, Human
gcagugguccaguucacaccca

SEQ ID NO: 604754 - RNA, 22 nt, Human
cccccaggcucugacacaggag

SEQ ID NO: 604755 - RNA, 22 nt, Human
aaggugguuguaggcuggucug

SEQ ID NO: 604756 - RNA, 22 nt, Human
uacagucucugauaacugucag

SEQ ID NO: 604757 - RNA, 22 nt, Human
gaaucuaugccucauauagacc

SEQ ID NO: 604758 - RNA, 22 nt, Human
augaaagaugauuuaaaguacu

SEQ ID NO: 604759 - RNA, 22 nt, Human
cugccacuagcuuucacaucuu

SEQ ID NO: 604760 - RNA, 22 nt, Human
agugcuguuggauaaugcuguc

SEQ ID NO: 604761 - RNA, 22 nt, Human
gauaauuuuagucugaaaauug

SEQ ID NO: 604762 - RNA, 22 nt, Human
ugccccagacucugcucaccuc

SEQ ID NO: 604763 - RNA, 20 nt, Human
cacaggaaagcuacucaguu

SEQ ID NO: 604764 - RNA, 22 nt, Human
gagagaaaagggggaauugauu

SEQ ID NO: 604765 - RNA, 22 nt, Human
acuacaguaagggaggcagcau

SEQ ID NO: 604766 - RNA, 22 nt, Human
ucacugucccuguccucuuauc

SEQ ID NO: 604767 - RNA, 22 nt, Human
uuacauuuuaguuaaccuguga

SEQ ID NO: 604768 - RNA, 22 nt, Human
uucuuggaugcccucaugccuu

SEQ ID NO: 604769 - RNA, 22 nt, Human
aaaaauagcuucucuugucccu

SEQ ID NO: 604770 - RNA, 22 nt, Human
aacugcuucuuacugcugggca

SEQ ID NO: 604771 - RNA, 22 nt, Human
gcugucacacaugggaucucag

SEQ ID NO: 604772 - RNA, 22 nt, Human
gccaacaggccuugcucugcuc

SEQ ID NO: 604773 - RNA, 22 nt, Human
gcacucuguuucuccugucagc

SEQ ID NO: 604774 - RNA, 22 nt, Human
cuccugguucagagagcugaga

SEQ ID NO: 604775 - RNA, 22 nt, Human
gccagggcaggggagcaucugc

SEQ ID NO: 604776 - RNA, 22 nt, Human
ugcguugcgcuccugcagcagg

SEQ ID NO: 604777 - RNA, 22 nt, Human
augccagccucuaagcacuuua

SEQ ID NO: 604778 - RNA, 22 nt, Human
gaagauuuauaggagccuauua

SEQ ID NO: 604779 - RNA, 22 nt, Human
ccagcugguguuccuuaggacc

SEQ ID NO: 604780 - RNA, 22 nt, Human
gaaggcaagaucucaguggagg

SEQ ID NO: 604781 - RNA, 22 nt, Human
ucaggcuuuuccugccuccuac

SEQ ID NO: 604782 - RNA, 22 nt, Human
gcagggguagugucuuccugag

SEQ ID NO: 604783 - RNA, 22 nt, Human
uguggcaguaaaauugggcaac

SEQ ID NO: 604784 - RNA, 22 nt, Human
gaaggcuguuucugguagugau

SEQ ID NO: 604785 - RNA, 22 nt, Human
ccuggggaaucuugcaggggaa

SEQ ID NO: 604786 - RNA, 22 nt, Human
aacuguaaagguugagugguaa

SEQ ID NO: 604787 - RNA, 22 nt, Human
aagcuguuggcagauagcucug

SEQ ID NO: 604788 - RNA, 22 nt, Human
uugcugaaguaugaaaaagaca

SEQ ID NO: 604789 - RNA, 22 nt, Human
ccucugaguccucccugguugc

SEQ ID NO: 604790 - RNA, 22 nt, Human
cagugaggcucugcugagcggu

SEQ ID NO: 604791 - RNA, 22 nt, Human
aagaguuauauaauguguaguu

SEQ ID NO: 604792 - RNA, 22 nt, Human
agaggccagcccaggccaccga

SEQ ID NO: 604793 - RNA, 16 nt, Human
ugguggggaggacagc

SEQ ID NO: 604794 - RNA, 22 nt, Human
gcugggagcaaguacucaucuu

SEQ ID NO: 604795 - RNA, 22 nt, Human
uuacauuagacccacuuucaug

SEQ ID NO: 604796 - RNA, 22 nt, Human
ugaguuuuuucaacauaugaag

SEQ ID NO: 604797 - RNA, 22 nt, Human
acaguguucugaaaguugaggg

SEQ ID NO: 604798 - RNA, 22 nt, Human
acuggaguugauuacauaaaac

SEQ ID NO: 604799 - RNA, 22 nt, Human
acacugggcuuguuacguugca

SEQ ID NO: 604800 - RNA, 22 nt, Human
cuucuuaaugcauaaacugugu

SEQ ID NO: 604801 - RNA, 20 nt, Human
acuggaguucaugcuaagag

SEQ ID NO: 604802 - RNA, 22 nt, Human
ccacagaccuuggcuuccaccu

SEQ ID NO: 604803 - RNA, 22 nt, Human
cuaguucuaaaucuguugucca

SEQ ID NO: 604804 - RNA, 16 nt, Human
gggagggaguuggugg

SEQ ID NO: 604805 - RNA, 22 nt, Human
aaaguguugggaagaaagugca

SEQ ID NO: 604806 - RNA, 22 nt, Human
cugauggagacuccacugugau

SEQ ID NO: 604807 - RNA, 22 nt, Human
aauuagcuaauuaauuguagcc

SEQ ID NO: 604808 - RNA, 22 nt, Human
ggaaacaaaccacucauggugg

SEQ ID NO: 604809 - RNA, 22 nt, Human
ccucucuguagcagcccccagu

SEQ ID NO: 604810 - RNA, 22 nt, Human
cagggagccccaauuccaugcc

SEQ ID NO: 604811 - RNA, 22 nt, Human
gcucuugucaaaaauuaguuga

SEQ ID NO: 604812 - RNA, 22 nt, Human
agagugaagguugacacuucac

SEQ ID NO: 604813 - RNA, 22 nt, Human
cccaggcuggagugcaauggca

SEQ ID NO: 604814 - RNA, 22 nt, Human
ccaguguucugguguucauuuc

SEQ ID NO: 604815 - RNA, 22 nt, Human
cagcuacagaggccacauggcu

SEQ ID NO: 604816 - RNA, 22 nt, Human
uggcucagaaggcugccuucac

SEQ ID NO: 604817 - RNA, 22 nt, Human
cuguuaaaugagaaagcagacu

SEQ ID NO: 604818 - RNA, 22 nt, Human
cugcagagaugaagaagguggc

SEQ ID NO: 604819 - RNA, 22 nt, Human
uuuucauguuccuuguuaagug

SEQ ID NO: 604820 - RNA, 22 nt, Human
gcugucaguuuuacccacagac

SEQ ID NO: 604821 - RNA, 22 nt, Human
cuccucuguauugauugggacu

SEQ ID NO: 604822 - RNA, 22 nt, Human
agggaggugguuccccagugga

SEQ ID NO: 604823 - RNA, 21 nt, Human
gaagagaguccucauccugag

SEQ ID NO: 604824 - RNA, 22 nt, Human
uacuuacagaaggaagcaauug

SEQ ID NO: 604825 - RNA, 22 nt, Human
gcccuugggagguuccacuggg

SEQ ID NO: 604826 - RNA, 20 nt, Human
agagaugggguaucaccgua

SEQ ID NO: 604827 - RNA, 20 nt, Human
ucagcucugugccugggaug

SEQ ID NO: 604828 - RNA, 22 nt, Human
gagcaggacgugggaaugggaa

SEQ ID NO: 604829 - RNA, 22 nt, Human
gcaaacaugcugagaaauaaga

SEQ ID NO: 604830 - RNA, 22 nt, Human
ugagccaguggaagauggcagu

SEQ ID NO: 604831 - RNA, 22 nt, Human
uucgaguuggcuuuauuaaacu

SEQ ID NO: 604832 - RNA, 22 nt, Human
gccaggaugacuauacaacagc

SEQ ID NO: 604833 - RNA, 22 nt, Human
gaagcaauuuagaaucagaagc

SEQ ID NO: 604834 - RNA, 20 nt, Human
cagaggcauuuucagacucu

SEQ ID NO: 604835 - RNA, 22 nt, Human
gugcaggcauugggcuagccau

SEQ ID NO: 604836 - RNA, 22 nt, Human
ucgaaaaugaagagucaauuaa

SEQ ID NO: 604837 - RNA, 22 nt, Human
ccagcuggaagagugcagaacu

SEQ ID NO: 604838 - RNA, 22 nt, Human
uccugucugucuuuggucccuu

SEQ ID NO: 604839 - RNA, 22 nt, Human
uguaugcuugaguguguauacu

SEQ ID NO: 604840 - RNA, 22 nt, Human
cugccacuuacuaggcauggug

SEQ ID NO: 604841 - RNA, 22 nt, Human
gcuucuauuacuacuuugagau

SEQ ID NO: 604842 - RNA, 22 nt, Human
ugcagccaucuuucuuggagga

SEQ ID NO: 604843 - RNA, 22 nt, Human
ggacaggauaagagacacugcc

SEQ ID NO: 604844 - RNA, 22 nt, Human
ugucacauaauuuaucuguagg

SEQ ID NO: 604845 - RNA, 22 nt, Human
uccaguuguuuguauuaacucu

SEQ ID NO: 604846 - RNA, 22 nt, Human
aggccugcagcaggagcaaacc

SEQ ID NO: 604847 - RNA, 22 nt, Human
guggcagagcaggagacaggac

SEQ ID NO: 604848 - RNA, 22 nt, Human
uguaaagaaauagcauuuguag

SEQ ID NO: 604849 - RNA, 22 nt, Human
uuucaagcagcgugaaaaacga

SEQ ID NO: 604850 - RNA, 21 nt, Human
agccugggaggcggagguugc

SEQ ID NO: 604851 - RNA, 22 nt, Human
ucacacaucucagguguuuaau

SEQ ID NO: 604852 - RNA, 22 nt, Human
ucuccaggcuuaaucucagcuu

SEQ ID NO: 604853 - RNA, 22 nt, Human
aaaguuugucacuuggcuagaa

SEQ ID NO: 604854 - RNA, 22 nt, Human
gaguuuauucaggaaauagcca

SEQ ID NO: 604855 - RNA, 22 nt, Human
cagcucuguguauuuuccccac

SEQ ID NO: 604856 - RNA, 22 nt, Human
gcucccagucugauggaggaga

SEQ ID NO: 604857 - RNA, 22 nt, Human
cacuucauugggaccagggcug

SEQ ID NO: 604858 - RNA, 22 nt, Human
agacaauggaccaagcaccuuc

SEQ ID NO: 604859 - RNA, 22 nt, Human
uugcagagccaugaggcuggcu

SEQ ID NO: 604860 - RNA, 22 nt, Human
agaagagccuggggaccauggc

SEQ ID NO: 604861 - RNA, 22 nt, Human
ugggcuccguugccuggggcag

SEQ ID NO: 604862 - RNA, 22 nt, Human
ccaaggcuucccagagaugcuc

SEQ ID NO: 604863 - RNA, 21 nt, Human
ugguggaccagugcugggaga

SEQ ID NO: 604864 - RNA, 22 nt, Human
aguucagcuucccaggucacug

SEQ ID NO: 604865 - RNA, 22 nt, Human
cucucuguucauugagucaaaa

SEQ ID NO: 604866 - RNA, 22 nt, Human
uagugcuucuacccuaggcagg

SEQ ID NO: 604867 - RNA, 19 nt, Human
ugcugacugagcugcaaaa

SEQ ID NO: 604868 - RNA, 22 nt, Human
cuggaggcugaguugggucucc

SEQ ID NO: 604869 - RNA, 22 nt, Human
aggggucuugaggacuccagca

SEQ ID NO: 604870 - RNA, 22 nt, Human
caccaggaccccacgguggguu

SEQ ID NO: 604871 - RNA, 22 nt, Human
agccaguguuaagugacugguu

SEQ ID NO: 604872 - RNA, 22 nt, Human
ugcacaucuuucagcaucauac

SEQ ID NO: 604873 - RNA, 22 nt, Human
uccugucuuaaugaucucgugc

SEQ ID NO: 604874 - RNA, 22 nt, Human
gcugauguuuaguugauguuac

SEQ ID NO: 604875 - RNA, 22 nt, Human
gauggguagaaguggaagaggu

SEQ ID NO: 604876 - RNA, 22 nt, Human
uguugauuugugggcugcaaaa

SEQ ID NO: 604877 - RNA, 22 nt, Human
uugacaaaaauaacacagcaua

SEQ ID NO: 604878 - RNA, 22 nt, Human
aauugcacuuuagcaaugguga

SEQ ID NO: 604879 - RNA, 22 nt, Human
gagagggugccuggaagccagg

SEQ ID NO: 604880 - RNA, 22 nt, Human
uucagaacugucuguccuuuuc

SEQ ID NO: 604881 - RNA, 18 nt, Human
uggcagugagguaggcau

SEQ ID NO: 604882 - RNA, 20 nt, Human
gaggcugaaguguuuuugcu

SEQ ID NO: 604883 - RNA, 22 nt, Human
aaguguggggucucagagcuga

SEQ ID NO: 604884 - RNA, 22 nt, Human
uucugucucccugauguagagc

SEQ ID NO: 604885 - RNA, 22 nt, Human
ggcugccucaaagcucaagcuc

SEQ ID NO: 604886 - RNA, 22 nt, Human
gaguuauuaauggcugaguuug

SEQ ID NO: 604887 - RNA, 22 nt, Human
gguauacaagagcaauuuaggg

SEQ ID NO: 604888 - RNA, 22 nt, Human
aauuuuaucucuaagcaggcuu

SEQ ID NO: 604889 - RNA, 22 nt, Human
ucugcuguucauucuuuuagcu

SEQ ID NO: 604890 - RNA, 22 nt, Human
ugggacugagaauaugaugggg

SEQ ID NO: 604891 - RNA, 22 nt, Human
ucuggcaggaccaugaagcgua

SEQ ID NO: 604892 - RNA, 22 nt, Human
agucagugaaaacuagaauguu

SEQ ID NO: 604893 - RNA, 22 nt, Human
cacuggauuuccaggaauacuc

SEQ ID NO: 604894 - RNA, 22 nt, Human
uucuaaauuuuggaagaugcag

SEQ ID NO: 604895 - RNA, 22 nt, Human
gcuguaugugaggccacaguga

SEQ ID NO: 604896 - RNA, 22 nt, Human
ccagaagcuucuacacaggaga

SEQ ID NO: 604897 - RNA, 22 nt, Human
aagaacaugaacacaauguuua

SEQ ID NO: 604898 - RNA, 22 nt, Human
aguggcagagguugacugcagu

SEQ ID NO: 604899 - RNA, 18 nt, Human
agaauugcugcuucuucu

SEQ ID NO: 604900 - RNA, 22 nt, Human
acagauaauuuaauuaaugcau

SEQ ID NO: 604901 - RNA, 22 nt, Human
uuugaaugagaauuauugucau

SEQ ID NO: 604902 - RNA, 22 nt, Human
ccugcucagccccagcucaccc

SEQ ID NO: 604903 - RNA, 22 nt, Human
aggcuggaguguagcagugcag

SEQ ID NO: 604904 - RNA, 22 nt, Human
cugugccucaguguccucgagu

SEQ ID NO: 604905 - RNA, 22 nt, Human
aggggaggcagcgauaaaccug

SEQ ID NO: 604906 - RNA, 22 nt, Human
gccagggcugugcagguuuguu

SEQ ID NO: 604907 - RNA, 21 nt, Human
agcaccaguuuuaugccaggc

SEQ ID NO: 604908 - RNA, 22 nt, Human
ugcauaaagugccauaguauua

SEQ ID NO: 604909 - RNA, 22 nt, Human
ugccaaggguaugggcaagaua

SEQ ID NO: 604910 - RNA, 22 nt, Human
aagcaugcaaucugugauaagg

SEQ ID NO: 604911 - RNA, 22 nt, Human
auaagcagggucaaaugccuac

SEQ ID NO: 604912 - RNA, 22 nt, Human
ccugucugcagauaucucaggu

SEQ ID NO: 604913 - RNA, 22 nt, Human
uuucuggguuuaugucacagcu

SEQ ID NO: 604914 - RNA, 22 nt, Human
uauaauuaguaaauggcagauu

SEQ ID NO: 604915 - RNA, 22 nt, Human
gcccaggaggucaaguagcuau

SEQ ID NO: 604916 - RNA, 22 nt, Human
augcuaaacuaugaucauuuuc

SEQ ID NO: 604917 - RNA, 22 nt, Human
accaugggcagaaucuuugcag

SEQ ID NO: 604918 - RNA, 22 nt, Human
uugcagggaaaucagugaggau

SEQ ID NO: 604919 - RNA, 22 nt, Human
aaagccagggacagugugcaug

SEQ ID NO: 604920 - RNA, 20 nt, Human
cucaucucugagccuccugg

SEQ ID NO: 604921 - RNA, 22 nt, Human
ggcauuuaguuuucauauucug

SEQ ID NO: 604922 - RNA, 22 nt, Human
aguucuauuucuaacauguuau

SEQ ID NO: 604923 - RNA, 22 nt, Human
agguugaaauagguuaucuaag

SEQ ID NO: 604924 - RNA, 22 nt, Human
agauaauuugaguaaauuaauu

SEQ ID NO: 604925 - RNA, 23 nt, Human
ggcuccaggccugacgggcgcgg

SEQ ID NO: 604926 - RNA, 22 nt, Human
caaacauucaaguacaagucuu

SEQ ID NO: 604927 - RNA, 22 nt, Human
ucccuagucgcaucuguggaga

SEQ ID NO: 604928 - RNA, 22 nt, Human
uuuguguuguacuucugugcau

SEQ ID NO: 604929 - RNA, 22 nt, Human
auuauuauuguugauguuaggg

SEQ ID NO: 604930 - RNA, 22 nt, Human
gaggccacaguccugaggcauc

SEQ ID NO: 604931 - RNA, 22 nt, Human
gcugggcaccucucccagauug

SEQ ID NO: 604932 - RNA, 22 nt, Human
cagcucugaggaacacuccuuu

SEQ ID NO: 604933 - RNA, 20 nt, Human
guagaaccaugugugcuggg

SEQ ID NO: 604934 - RNA, 22 nt, Human
uagcaucagccacaccuuguac

SEQ ID NO: 604935 - RNA, 22 nt, Human
aguugaagguuggcugauccau

SEQ ID NO: 604936 - RNA, 22 nt, Human
auccucagcaucuagcaugaag

SEQ ID NO: 604937 - RNA, 22 nt, Human
uucuuuuagucauucagggaag

SEQ ID NO: 604938 - RNA, 22 nt, Human
uggcagggugccaguugcgagu

SEQ ID NO: 604939 - RNA, 22 nt, Human
cccugacccaaaacugucagaa

SEQ ID NO: 604940 - RNA, 22 nt, Human
agguaggaguugauggauguuc

SEQ ID NO: 604941 - RNA, 22 nt, Human
acaguguuuauguacagauugu

SEQ ID NO: 604942 - RNA, 22 nt, Human
auaaaaguaggaccaacuuaca

SEQ ID NO: 604943 - RNA, 22 nt, Human
ggugggaggcaggcugcuccca

SEQ ID NO: 604944 - RNA, 22 nt, Human
agcugagcuaguaguuccagug

SEQ ID NO: 604945 - RNA, 22 nt, Human
ucucugugagccagguccuagu

SEQ ID NO: 604946 - RNA, 22 nt, Human
accagagggcaaaccccagugu

SEQ ID NO: 604947 - RNA, 22 nt, Human
gcugccuggauuugcaauccuc

SEQ ID NO: 604948 - RNA, 22 nt, Human
caauuucuuguuaauucucagg

SEQ ID NO: 604949 - RNA, 19 nt, Human
ggugugugcuggggccugu

SEQ ID NO: 604950 - RNA, 22 nt, Human
uuucuuaugugcagagugagua

SEQ ID NO: 604951 - RNA, 18 nt, Human
agcagagcccaugcauuc

SEQ ID NO: 604952 - RNA, 22 nt, Human
augcugaagagugcacaggcua

SEQ ID NO: 604953 - RNA, 22 nt, Human
aucuacaggauuuuacagaguu

SEQ ID NO: 604954 - RNA, 22 nt, Human
ugcaugugugacaaggacaguu

SEQ ID NO: 604955 - RNA, 22 nt, Human
uaguuucuaaacugaacuguca

SEQ ID NO: 604956 - RNA, 22 nt, Human
uagucuuuugagaaguauaucu

SEQ ID NO: 604957 - RNA, 22 nt, Human
ucagagagguuggugauaagaa

SEQ ID NO: 604958 - RNA, 23 nt, Human
aggcuccacucccugggaugugg

SEQ ID NO: 604959 - RNA, 22 nt, Human
ucccuucaauaauucaacauua

SEQ ID NO: 604960 - RNA, 22 nt, Human
auguuucaguucuaaaguuaga

SEQ ID NO: 604961 - RNA, 22 nt, Human
ggguggccuuaggcaagucacu

SEQ ID NO: 604962 - RNA, 22 nt, Human
auagaaacagaugcacuucucu

SEQ ID NO: 604963 - RNA, 22 nt, Human
ggcugccucugaugugcagacg

SEQ ID NO: 604964 - RNA, 22 nt, Human
uggagacugacugccuguauuu

SEQ ID NO: 604965 - RNA, 17 nt, Human
uccuucagugccucugc

SEQ ID NO: 604966 - RNA, 22 nt, Human
ucuuacaagaaggaaaagggag

SEQ ID NO: 604967 - RNA, 22 nt, Human
gaacuuuaauuagcuuuugucu

SEQ ID NO: 604968 - RNA, 22 nt, Human
cugggcugcagcgggagcgacg

SEQ ID NO: 604969 - RNA, 22 nt, Human
ugacacugcaaauauaaauauu

SEQ ID NO: 604970 - RNA, 19 nt, Human
acccucucuguagaaagau

SEQ ID NO: 604971 - RNA, 22 nt, Human
ugggcugcacccucagccucug

SEQ ID NO: 604972 - RNA, 22 nt, Human
uggaaauacaagaaguauguca

SEQ ID NO: 604973 - RNA, 23 nt, Human
ggucccaguggagaggccucacc

SEQ ID NO: 604974 - RNA, 22 nt, Human
ugcccucauuauaagaggcuca

SEQ ID NO: 604975 - RNA, 22 nt, Human
ucccagccacagguguagcccu

SEQ ID NO: 604976 - RNA, 22 nt, Human
ucagcacuguguccagucuccc

SEQ ID NO: 604977 - RNA, 22 nt, Human
uuuaauuuucugggcccagcag

SEQ ID NO: 604978 - RNA, 19 nt, Human
ugcaagcuuuuucuuguua

SEQ ID NO: 604979 - RNA, 22 nt, Human
cagcugcugauggccugacaga

SEQ ID NO: 604980 - RNA, 23 nt, Human
gcuucugccauuugcuagcugug

SEQ ID NO: 604981 - RNA, 22 nt, Human
aaacuguaggagggaaaggaag

SEQ ID NO: 604982 - RNA, 22 nt, Human
ugucaucucacugauauagaug

SEQ ID NO: 604983 - RNA, 22 nt, Human
aaaauuuucagcuugacuugau

SEQ ID NO: 604984 - RNA, 18 nt, Human
ucacuggguguauguggc

SEQ ID NO: 604985 - RNA, 20 nt, Human
uacauauuauaucagcugca

SEQ ID NO: 604986 - RNA, 22 nt, Human
auucugcacauccaagaacagg

SEQ ID NO: 604987 - RNA, 22 nt, Human
cucuccagggcaugaguuccac

SEQ ID NO: 604988 - RNA, 22 nt, Human
cacugcccucacugugguucuc

SEQ ID NO: 604989 - RNA, 22 nt, Human
gccucucugggcugccgaggcu

SEQ ID NO: 604990 - RNA, 22 nt, Human
uuuacacauuauuuucagugug

SEQ ID NO: 604991 - RNA, 22 nt, Human
ugaaggaaagagggaacauccc

SEQ ID NO: 604992 - RNA, 22 nt, Human
ccaggugguucaggucaccaua

SEQ ID NO: 604993 - RNA, 22 nt, Human
ucucaaauuuauacagaguuca

SEQ ID NO: 604994 - RNA, 20 nt, Human
gagccuuccccucaccacug

SEQ ID NO: 604995 - RNA, 22 nt, Human
uaugucaaaguuaagaaauagg

SEQ ID NO: 604996 - RNA, 21 nt, Human
uagcagaaacaguucaggcca

SEQ ID NO: 604997 - RNA, 20 nt, Human
uccuaacuauaaaguggcuc

SEQ ID NO: 604998 - RNA, 19 nt, Human
ccagcagcuuugauucucu

SEQ ID NO: 604999 - RNA, 22 nt, Human
gaggcugcccacaccugcgccg

SEQ ID NO: 605000 - RNA, 20 nt, Human
ggccucaguguccuuguuug

SEQ ID NO: 605001 - RNA, 20 nt, Human
ucuggcaggugaacgagcug

SEQ ID NO: 605002 - RNA, 22 nt, Human
uuccuucuccagaacuucuagg

SEQ ID NO: 605003 - RNA, 22 nt, Human
acagacagaggcuccaugagga

SEQ ID NO: 605004 - RNA, 22 nt, Human
agcagcaacugcuagaguggca

SEQ ID NO: 605005 - RNA, 22 nt, Human
ucugaaaucuguaagcacuagc

SEQ ID NO: 605006 - RNA, 22 nt, Human
uggcagcuagcuguuuucaugc

SEQ ID NO: 605007 - RNA, 22 nt, Human
uuauggagugcuuaccugccag

SEQ ID NO: 605008 - RNA, 22 nt, Human
gcaggauugggcugaaggagug

SEQ ID NO: 605009 - RNA, 22 nt, Human
uuccuaaccucuagcugcauau

SEQ ID NO: 605010 - RNA, 18 nt, Human
gcugagguggugucagag

SEQ ID NO: 605011 - RNA, 22 nt, Human
gggcacugagaauuuuccacuu

SEQ ID NO: 605012 - RNA, 19 nt, Human
acagagggcaacugagaaa

SEQ ID NO: 605013 - RNA, 22 nt, Human
ccugggugacccgugagcgucc

SEQ ID NO: 605014 - RNA, 22 nt, Human
caaagcaguuuuaaucaaguag

SEQ ID NO: 605015 - RNA, 22 nt, Human
uggaggcagucaccugaaguca

SEQ ID NO: 605016 - RNA, 22 nt, Human
agcugaggguucgguguccaca

SEQ ID NO: 605017 - RNA, 22 nt, Human
gcaggcuguagacaccaaacua

SEQ ID NO: 605018 - RNA, 22 nt, Human
aggagaguaccauugggccgca

SEQ ID NO: 605019 - RNA, 22 nt, Human
ugcugcuucaccuguuguacag

SEQ ID NO: 605020 - RNA, 22 nt, Human
acaguguugaggugcuuguuuc

SEQ ID NO: 605021 - RNA, 22 nt, Human
cugccugcaucccacagugggg

SEQ ID NO: 605022 - RNA, 17 nt, Human
agacagaccucugcauc

SEQ ID NO: 605023 - RNA, 22 nt, Human
ggaaaagacagaauucuagaau

SEQ ID NO: 605024 - RNA, 22 nt, Human
aacauucuucaaauaucacucu

SEQ ID NO: 605025 - RNA, 22 nt, Human
uggagcaggugcucaggguaau

SEQ ID NO: 605026 - RNA, 22 nt, Human
gcugccaguaguuggagcucca

SEQ ID NO: 605027 - RNA, 22 nt, Human
uuuccuuugaggguccuacacu

SEQ ID NO: 605028 - RNA, 21 nt, Human
agggaaagaaaaugagcuaau

SEQ ID NO: 605029 - RNA, 22 nt, Human
uucuccuugguuuaugggacau

SEQ ID NO: 605030 - RNA, 17 nt, Human
auguuaauuucacauuu

SEQ ID NO: 605031 - RNA, 18 nt, Human
gcacagagcccaggcucu

SEQ ID NO: 605032 - RNA, 22 nt, Human
acagcucugggugcaggaggug

SEQ ID NO: 605033 - RNA, 21 nt, Human
ccuccaggugauuccgugcuc

SEQ ID NO: 605034 - RNA, 22 nt, Human
gagcagagacaguacaacuggc

SEQ ID NO: 605035 - RNA, 22 nt, Human
uggacaggggcugcuguuguca

SEQ ID NO: 605036 - RNA, 22 nt, Human
aauaugauccuuaaccuucaug

SEQ ID NO: 605037 - RNA, 22 nt, Human
gcagcuccuccugggcuggaga

SEQ ID NO: 605038 - RNA, 22 nt, Human
uuaaaugaacgagauaugcaac

SEQ ID NO: 605039 - RNA, 22 nt, Human
uguccugggaaugggaugcagu

SEQ ID NO: 605040 - RNA, 22 nt, Human
ugugacagucguuaggagcuca

SEQ ID NO: 605041 - RNA, 22 nt, Human
gcuggcucaagugugcuuccca

SEQ ID NO: 605042 - RNA, 22 nt, Human
aauguuuucauuauccuaacug

SEQ ID NO: 605043 - RNA, 22 nt, Human
agacaggccacucuggucuggu

SEQ ID NO: 605044 - RNA, 22 nt, Human
caugucuuucucaucacaucua

SEQ ID NO: 605045 - RNA, 22 nt, Human
ucugggauagggccagaacaug

SEQ ID NO: 605046 - RNA, 22 nt, Human
gagaaauaggcaaugguaucua

SEQ ID NO: 605047 - RNA, 22 nt, Human
uuaccuaaaauagcucaauuua

SEQ ID NO: 605048 - RNA, 22 nt, Human
gagcuggccucaggcacaggag

SEQ ID NO: 605049 - RNA, 22 nt, Human
cugagggcagugaugaagguga

SEQ ID NO: 605050 - RNA, 22 nt, Human
aagaguuuccaugcucugugcu

SEQ ID NO: 605051 - RNA, 22 nt, Human
agcugccucagcaacacagacc

SEQ ID NO: 605052 - RNA, 22 nt, Human
aggugcuggagucugggcagga

SEQ ID NO: 605053 - RNA, 22 nt, Human
ucucucuccuaguuuuuagugg

SEQ ID NO: 605054 - RNA, 22 nt, Human
cucuggcuuguuaaugcauauu

SEQ ID NO: 605055 - RNA, 22 nt, Human
auccagcacuuguucaugugaa

SEQ ID NO: 605056 - RNA, 22 nt, Human
ugcugaggucauuuccaaguga

SEQ ID NO: 605057 - RNA, 22 nt, Human
gugcugagauuacaggugugag

SEQ ID NO: 605058 - RNA, 22 nt, Human
ggcuggaggagaauggguguga

SEQ ID NO: 605059 - RNA, 22 nt, Human
aguguacaguucuaugaauuuc

SEQ ID NO: 605060 - RNA, 22 nt, Human
gcuuuggucagguguccagccc

SEQ ID NO: 605061 - RNA, 22 nt, Human
aagauuuucucaacuguauuug

SEQ ID NO: 605062 - RNA, 23 nt, Human
auugaccagcugucucauuuuca

SEQ ID NO: 605063 - RNA, 22 nt, Human
aacacugugagguaaugaccua

SEQ ID NO: 605064 - RNA, 22 nt, Human
ugugcaguuucuauguugucca

SEQ ID NO: 605065 - RNA, 22 nt, Human
aaagaagauggagaccugacua

SEQ ID NO: 605066 - RNA, 17 nt, Human
ccucccacaccgcccug

SEQ ID NO: 605067 - RNA, 22 nt, Human
agggcucccgugaggugacugc

SEQ ID NO: 605068 - RNA, 22 nt, Human
uccuuccuuccugaaauuuuag

SEQ ID NO: 605069 - RNA, 22 nt, Human
gccuucugauugcuggacugac

SEQ ID NO: 605070 - RNA, 22 nt, Human
aguaaauuucugcauguguacu

SEQ ID NO: 605071 - RNA, 22 nt, Human
aauuagcauuucccauauaaau

SEQ ID NO: 605072 - RNA, 22 nt, Human
aagcuucauuucaacucagggg

SEQ ID NO: 605073 - RNA, 22 nt, Human
uacagguagagucucuaguuua

SEQ ID NO: 605074 - RNA, 22 nt, Human
cugcugggauagaaguaucuca

SEQ ID NO: 605075 - RNA, 22 nt, Human
aacuuucuuucacagaaguauc

SEQ ID NO: 605076 - RNA, 22 nt, Human
accugggaggcagagguugcag

SEQ ID NO: 605077 - RNA, 22 nt, Human
agggccagccccacccucucug

SEQ ID NO: 605078 - RNA, 22 nt, Human
cuacagaguaucuaaagaggua

SEQ ID NO: 605079 - RNA, 22 nt, Human
uugccuuugacggugcagcagu

SEQ ID NO: 605080 - RNA, 22 nt, Human
accuuaaaugugacauagucua

SEQ ID NO: 605081 - RNA, 22 nt, Human
cauuugaaccuggauguucuua

SEQ ID NO: 605082 - RNA, 22 nt, Human
uguuucuugggugcucacauca

SEQ ID NO: 605083 - RNA, 22 nt, Human
gccacagcagggcccucucagg

SEQ ID NO: 605084 - RNA, 22 nt, Human
ugagcuggcaggggcucaggga

SEQ ID NO: 605085 - RNA, 21 nt, Human
guggccugauuaugaaugggu

SEQ ID NO: 605086 - RNA, 22 nt, Human
uuuacacaaaagauagcacacc

SEQ ID NO: 605087 - RNA, 22 nt, Human
aguuuacagauguaguaggggu

SEQ ID NO: 605088 - RNA, 22 nt, Human
guauuuuacugcucaaagcucu

SEQ ID NO: 605089 - RNA, 22 nt, Human
agggggcucagcaggcucugga

SEQ ID NO: 605090 - RNA, 22 nt, Human
cuuuacaaauagggagggagug

SEQ ID NO: 605091 - RNA, 22 nt, Human
aggcuaaggugggaggaucgcu

SEQ ID NO: 605092 - RNA, 22 nt, Human
uacuguaugaauuauguuauuu

SEQ ID NO: 605093 - RNA, 22 nt, Human
ucugaggaaaagaggagguagc

SEQ ID NO: 605094 - RNA, 22 nt, Human
gcaguaaagccugagauauaug

SEQ ID NO: 605095 - RNA, 22 nt, Human
accaggagggacccugguggcc

SEQ ID NO: 605096 - RNA, 22 nt, Human
agcugcuggggagggcagacac

SEQ ID NO: 605097 - RNA, 22 nt, Human
acaugaaaagacuaucugauua

SEQ ID NO: 605098 - RNA, 22 nt, Human
caguuuuugccauuaagaguaa

SEQ ID NO: 605099 - RNA, 22 nt, Human
aagaggcuggaggauacugcgc

SEQ ID NO: 605100 - RNA, 22 nt, Human
uaacauuuaaauuuuucacaua

SEQ ID NO: 605101 - RNA, 20 nt, Human
gggugagauguaggagaggg

SEQ ID NO: 605102 - RNA, 23 nt, Human
auaaugcaaguggugguaaucug

SEQ ID NO: 605103 - RNA, 22 nt, Human
cauggggaugaggcugagacuu

SEQ ID NO: 605104 - RNA, 19 nt, Human
uagagcugcuuccuggcag

SEQ ID NO: 605105 - RNA, 22 nt, Human
ucuggcuucaguaggguucacu

SEQ ID NO: 605106 - RNA, 22 nt, Human
caaugcuucugagggaauuaca

SEQ ID NO: 605107 - RNA, 22 nt, Human
acagcuguauucaaguugcaag

SEQ ID NO: 605108 - RNA, 22 nt, Human
uggaaggaaagguagcagagaa

SEQ ID NO: 605109 - RNA, 22 nt, Human
aggagagucuugagucacuggu

SEQ ID NO: 605110 - RNA, 22 nt, Human
gcugccuccugagauuugggca

SEQ ID NO: 605111 - RNA, 22 nt, Human
uccuugacugugaggaacuagc

SEQ ID NO: 605112 - RNA, 22 nt, Human
uaggcugggcugagcuggacgg

SEQ ID NO: 605113 - RNA, 22 nt, Human
ugaaugauaugugaaaaggaac

SEQ ID NO: 605114 - RNA, 22 nt, Human
ggucugagguuugggauucacu

SEQ ID NO: 605115 - RNA, 22 nt, Human
aucaaauuaugugcuacaagaa

SEQ ID NO: 605116 - RNA, 22 nt, Human
gucccucaagguccagucaugg

SEQ ID NO: 605117 - RNA, 14 nt, Human
aagaucaccuuccu

SEQ ID NO: 605118 - RNA, 22 nt, Human
gggcacuggaaggcucucaggc

SEQ ID NO: 605119 - RNA, 22 nt, Human
agguaaagacagugaaagaggg

SEQ ID NO: 605120 - RNA, 22 nt, Human
ugggacagauuauaagucugca

SEQ ID NO: 605121 - RNA, 22 nt, Human
ugggcagcaaagacugugugcu

SEQ ID NO: 605122 - RNA, 22 nt, Human
cagggccaggcugauggccugg

SEQ ID NO: 605123 - RNA, 22 nt, Human
ccuucccaggcuagaccaacau

SEQ ID NO: 605124 - RNA, 22 nt, Human
agcccaugguguacucuguggc

SEQ ID NO: 605125 - RNA, 22 nt, Human
uugaaguugcacauuauaauuu

SEQ ID NO: 605126 - RNA, 22 nt, Human
aacuaauacauuaauacaugug

SEQ ID NO: 605127 - RNA, 22 nt, Human
cagugcccuuccaggacugcag

SEQ ID NO: 605128 - RNA, 22 nt, Human
aagaggccacagcugacagcac

SEQ ID NO: 605129 - RNA, 22 nt, Human
gguaggagugaagacuuaagau

SEQ ID NO: 605130 - RNA, 22 nt, Human
agggagaaaauuggaugcacaa

SEQ ID NO: 605131 - RNA, 22 nt, Human
acauucucuccaugucuucuuu

SEQ ID NO: 605132 - RNA, 22 nt, Human
uaucuugccuuuaacugcucau

SEQ ID NO: 605133 - RNA, 20 nt, Human
ugugcccugcagacuucuuu

SEQ ID NO: 605134 - RNA, 22 nt, Human
aauguauaauauuuaaugcuuu

SEQ ID NO: 605135 - RNA, 22 nt, Human
gcugucacauuuggagcacugg

SEQ ID NO: 605136 - RNA, 22 nt, Human
uaaaggaaucaguuuuagagau

SEQ ID NO: 605137 - RNA, 18 nt, Human
gacccagcagaugggcuu

SEQ ID NO: 605138 - RNA, 22 nt, Human
cacagagauuagaauuagacua

SEQ ID NO: 605139 - RNA, 22 nt, Human
ccaguguuugaugggauuuuca

SEQ ID NO: 605140 - RNA, 22 nt, Human
aaauaguucagccacggugacu

SEQ ID NO: 605141 - RNA, 22 nt, Human
acauaaauagauuauugggagg

SEQ ID NO: 605142 - RNA, 22 nt, Human
cuuggcauuguguugauagaag

SEQ ID NO: 605143 - RNA, 19 nt, Human
agcuaauggaaguuuacug

SEQ ID NO: 605144 - RNA, 22 nt, Human
guucaaauggcugcaguuacca

SEQ ID NO: 605145 - RNA, 22 nt, Human
cugaacaucccgcagugcacga

SEQ ID NO: 605146 - RNA, 19 nt, Human
aggucugcagcugcaguuu

SEQ ID NO: 605147 - RNA, 19 nt, Human
agccacagaacuugcagga

SEQ ID NO: 605148 - RNA, 22 nt, Human
cuuccucccccacacacucacu

SEQ ID NO: 605149 - RNA, 22 nt, Human
ugaagcaaauuguuuagccuga

SEQ ID NO: 605150 - RNA, 22 nt, Human
cagggugcgggagaugugcacc

SEQ ID NO: 605151 - RNA, 22 nt, Human
uggccaugaaggaggcagcaga

SEQ ID NO: 605152 - RNA, 20 nt, Human
gagccugggaagucuaaggu

SEQ ID NO: 605153 - RNA, 22 nt, Human
uggagcagggcaucacugugcg

SEQ ID NO: 605154 - RNA, 22 nt, Human
ggcuucuuccuggcuccuauua

SEQ ID NO: 605155 - RNA, 22 nt, Human
aucuuuacaguguaagugcaga

SEQ ID NO: 605156 - RNA, 22 nt, Human
auauguguauggauuucuaucu

SEQ ID NO: 605157 - RNA, 22 nt, Human
uucuguuuuagaaauaaguagu

SEQ ID NO: 605158 - RNA, 22 nt, Human
uggaucaugugaugucaggagu

SEQ ID NO: 605159 - RNA, 22 nt, Human
cugggcucaguggcucauggcu

SEQ ID NO: 605160 - RNA, 22 nt, Human
cugccuuccaaccccagacucc

SEQ ID NO: 605161 - RNA, 18 nt, Human
ccuguguguguugcaggc

SEQ ID NO: 605162 - RNA, 22 nt, Human
cuuuguaagucuuucuccaaga

SEQ ID NO: 605163 - RNA, 22 nt, Human
gccauggggcucagcugcacua

SEQ ID NO: 605164 - RNA, 22 nt, Human
uuucagaaauuauauuagaugc

SEQ ID NO: 605165 - RNA, 22 nt, Human
aggaggggcauagaaauguaau

SEQ ID NO: 605166 - RNA, 22 nt, Human
cagcuuccauaagagauggaga

SEQ ID NO: 605167 - RNA, 19 nt, Human
ucucuggggacacuuucac

SEQ ID NO: 605168 - RNA, 22 nt, Human
aucugccugcaguggagguggg

SEQ ID NO: 605169 - RNA, 22 nt, Human
ugcauuaaggccauugaaauuu

SEQ ID NO: 605170 - RNA, 22 nt, Human
gggaaacuucugcuaaaaccag

SEQ ID NO: 605171 - RNA, 18 nt, Human
gcagagcugggauuccca

SEQ ID NO: 605172 - RNA, 22 nt, Human
uuuaugcagcacuuuacauuug

SEQ ID NO: 605173 - RNA, 22 nt, Human
uguaacaugguucuuacucuca

SEQ ID NO: 605174 - RNA, 22 nt, Human
cggggccuagucuaccucggca

SEQ ID NO: 605175 - RNA, 22 nt, Human
uccucauacauaucucagucuu

SEQ ID NO: 605176 - RNA, 22 nt, Human
uggucucuccaugcccuccacc

SEQ ID NO: 605177 - RNA, 22 nt, Human
caggcuccagcuuccugcucag

SEQ ID NO: 605178 - RNA, 22 nt, Human
aaggccuugccugacagcacca

SEQ ID NO: 605179 - RNA, 20 nt, Human
cccagggaccugagcuccau

SEQ ID NO: 605180 - RNA, 22 nt, Human
gcuggccucgcaggcaggaugu

SEQ ID NO: 605181 - RNA, 22 nt, Human
uggccuuggcagugagaagagu

SEQ ID NO: 605182 - RNA, 22 nt, Human
ugcagaagaaugagcuuggagu

SEQ ID NO: 605183 - RNA, 22 nt, Human
gacaagacugguuuauuuaagg

SEQ ID NO: 605184 - RNA, 22 nt, Human
ucugccuugagguccucagcuc

SEQ ID NO: 605185 - RNA, 22 nt, Human
auggcuggcacuggccuggguu

SEQ ID NO: 605186 - RNA, 22 nt, Human
uuugugcacuucuguagcugcc

SEQ ID NO: 605187 - RNA, 22 nt, Human
caggcuggaguacaauugugug

SEQ ID NO: 605188 - RNA, 22 nt, Human
cugugcucuggcaucgcugcaa

SEQ ID NO: 605189 - RNA, 22 nt, Human
gaggaagggacuuuauuaucug

SEQ ID NO: 605190 - RNA, 22 nt, Human
acccagggagugcuccuguucu

SEQ ID NO: 605191 - RNA, 19 nt, Human
aaacacagauuucuuacca

SEQ ID NO: 605192 - RNA, 22 nt, Human
uccacgcugugugaccuugggc

SEQ ID NO: 605193 - RNA, 22 nt, Human
gccuggcuccuaagagcacaac

SEQ ID NO: 605194 - RNA, 22 nt, Human
gaacuggguccuugagucuaga

SEQ ID NO: 605195 - RNA, 22 nt, Human
aucuggagcuuguuagauguuu

SEQ ID NO: 605196 - RNA, 22 nt, Human
uuugaaaggguuaugagacuga

SEQ ID NO: 605197 - RNA, 22 nt, Human
aagauugucaggcuugcuguau

SEQ ID NO: 605198 - RNA, 22 nt, Human
aauaagcuggagcuauauugag

SEQ ID NO: 605199 - RNA, 22 nt, Human
uguccacaucacucacuuguca

SEQ ID NO: 605200 - RNA, 22 nt, Human
guuaugaagucauucacaaaua

SEQ ID NO: 605201 - RNA, 20 nt, Human
cacaggcuauaugagagcca

SEQ ID NO: 605202 - RNA, 22 nt, Human
ucuuuccuacuuuauugugaac

SEQ ID NO: 605203 - RNA, 22 nt, Human
cuucucucugcauaggcauggg

SEQ ID NO: 605204 - RNA, 22 nt, Human
cucucugguacauagaguuugg

SEQ ID NO: 605205 - RNA, 22 nt, Human
ggcaggugcucugugggccugg

SEQ ID NO: 605206 - RNA, 21 nt, Human
aggcagcuggaaggccuggcu

SEQ ID NO: 605207 - RNA, 22 nt, Human
agucuccacaacagcccugaua

SEQ ID NO: 605208 - RNA, 22 nt, Human
cuagaauuuuaauuggguauau

SEQ ID NO: 605209 - RNA, 22 nt, Human
cauaauuaaauucugggcaaga

SEQ ID NO: 605210 - RNA, 22 nt, Human
cagagguagggagcuauguuau

SEQ ID NO: 605211 - RNA, 22 nt, Human
ccaccagcagugugcaaggauu

SEQ ID NO: 605212 - RNA, 22 nt, Human
uaggccacggaaagcagguugc

SEQ ID NO: 605213 - RNA, 22 nt, Human
ccacugucugcaggccucagca

SEQ ID NO: 605214 - RNA, 22 nt, Human
aauuacuuaagagaaacuuuga

SEQ ID NO: 605215 - RNA, 23 nt, Human
acuuuucaauuagcuaugcuuaa

SEQ ID NO: 605216 - RNA, 22 nt, Human
ucagcacuauacauuuugaaua

SEQ ID NO: 605217 - RNA, 18 nt, Human
ucauucaaagucuacuga

SEQ ID NO: 605218 - RNA, 22 nt, Human
acauuugaggauguuaagaaug

SEQ ID NO: 605219 - RNA, 22 nt, Human
uggcagagaauaaaucuugacu

SEQ ID NO: 605220 - RNA, 22 nt, Human
uaucauaaguuaauuaaacagu

SEQ ID NO: 605221 - RNA, 22 nt, Human
ugaggaagggugugacggcacc

SEQ ID NO: 605222 - RNA, 22 nt, Human
cugggccuccagcucugccagc

SEQ ID NO: 605223 - RNA, 22 nt, Human
uguccuuuuggcugucuauggu

SEQ ID NO: 605224 - RNA, 22 nt, Human
ggacaggguaaguacuagugug

SEQ ID NO: 605225 - RNA, 22 nt, Human
ugagcagauggaggcuucugca

SEQ ID NO: 605226 - RNA, 22 nt, Human
aauucauauggauaugcuagua

SEQ ID NO: 605227 - RNA, 22 nt, Human
uagcaggguccaaugugaggca

SEQ ID NO: 605228 - RNA, 22 nt, Human
cauaauuuuuuuaagucagaac

SEQ ID NO: 605229 - RNA, 22 nt, Human
cauacaaauguguccaggcucu

SEQ ID NO: 605230 - RNA, 22 nt, Human
aaucagaaaauucaguggaauu

SEQ ID NO: 605231 - RNA, 22 nt, Human
ugggcuggcugaggcauucacu

SEQ ID NO: 605232 - RNA, 22 nt, Human
ucucugagggagauggccugcc

SEQ ID NO: 605233 - RNA, 22 nt, Human
ugagcaguaacagcucacaggg

SEQ ID NO: 605234 - RNA, 18 nt, Human
acucaaggguggagagaa

SEQ ID NO: 605235 - RNA, 22 nt, Human
acacauauguaugcaucaugug

SEQ ID NO: 605236 - RNA, 22 nt, Human
uuucagaguuauguaagaaaau

SEQ ID NO: 605237 - RNA, 22 nt, Human
uaugaagauauaucugaucucu

SEQ ID NO: 605238 - RNA, 22 nt, Human
agcuuugggcagaagaggauuc

SEQ ID NO: 605239 - RNA, 22 nt, Human
cugccccaggccuccuuuucuu

SEQ ID NO: 605240 - RNA, 22 nt, Human
cagaggcauuacugaaaaggug

SEQ ID NO: 605241 - RNA, 22 nt, Human
gugaggugggcuggccagagac

SEQ ID NO: 605242 - RNA, 22 nt, Human
gaguccaguucuuuccagcagu

SEQ ID NO: 605243 - RNA, 22 nt, Human
uauauguguggauucuuguaga

SEQ ID NO: 605244 - RNA, 22 nt, Human
cucgcaggacagugcuaggacu

SEQ ID NO: 605245 - RNA, 22 nt, Human
agggccagggaagcuguauuuu

SEQ ID NO: 605246 - RNA, 22 nt, Human
cccucccugugugccucauuug

SEQ ID NO: 605247 - RNA, 22 nt, Human
uuugcauuguaauauuuaguuc

SEQ ID NO: 605248 - RNA, 22 nt, Human
cuggcuuucugaacaucaguga

SEQ ID NO: 605249 - RNA, 22 nt, Human
caggagaagguuuggagugcag

SEQ ID NO: 605250 - RNA, 18 nt, Human
gcagagugcgucucugug

SEQ ID NO: 605251 - RNA, 22 nt, Human
auuuccuucccagauuugguuc

SEQ ID NO: 605252 - RNA, 22 nt, Human
uaaaugaagcucaugggccaca

SEQ ID NO: 605253 - RNA, 22 nt, Human
cacacugucuuucagaaugguu

SEQ ID NO: 605254 - RNA, 22 nt, Human
gcugcagaauuuccuucucauu

SEQ ID NO: 605255 - RNA, 20 nt, Human
aagcuuccaggaucuggugu

SEQ ID NO: 605256 - RNA, 22 nt, Human
uauagcauauacagauaagcug

SEQ ID NO: 605257 - RNA, 22 nt, Human
gcuuucugauugcgaaaacaaa

SEQ ID NO: 605258 - RNA, 22 nt, Human
ugacugccccuuccauuccugc

SEQ ID NO: 605259 - RNA, 22 nt, Human
gaggccagggaugcaaugagag

SEQ ID NO: 605260 - RNA, 22 nt, Human
aaaaaaucagaucuuugguuaa

SEQ ID NO: 605261 - RNA, 22 nt, Human
uccccaccuacacacugcuccu

SEQ ID NO: 605262 - RNA, 22 nt, Human
aguggaccagaagacugaagcu

SEQ ID NO: 605263 - RNA, 22 nt, Human
ugcccuuauaaaggaggccuga

SEQ ID NO: 605264 - RNA, 22 nt, Human
uccaguuugggugugagcugcg

SEQ ID NO: 605265 - RNA, 22 nt, Human
ucuguugacuccuagcagccau

SEQ ID NO: 605266 - RNA, 22 nt, Human
caaugcacgcucagauuugacc

SEQ ID NO: 605267 - RNA, 22 nt, Human
gacuggggcucuagccaggccu

SEQ ID NO: 605268 - RNA, 22 nt, Human
cagcucagucuggagagaugca

SEQ ID NO: 605269 - RNA, 22 nt, Human
auuagcuuaguguuuccguaau

SEQ ID NO: 605270 - RNA, 22 nt, Human
ucucuuauuuugccuuugacaa

SEQ ID NO: 605271 - RNA, 22 nt, Human
uggcugagaaaaaagagcuaua

SEQ ID NO: 605272 - RNA, 22 nt, Human
aaauugcauugagcugcuuauu

SEQ ID NO: 605273 - RNA, 22 nt, Human
ccagcuggggaaguggggcaua

SEQ ID NO: 605274 - RNA, 22 nt, Human
cugguuuuauguuauagaugga

SEQ ID NO: 605275 - RNA, 22 nt, Human
uccucauagacugacugcuugc

SEQ ID NO: 605276 - RNA, 22 nt, Human
auggguggagggugacacggau

SEQ ID NO: 605277 - RNA, 18 nt, Human
ccagagcuggcuccucgc

SEQ ID NO: 605278 - RNA, 22 nt, Human
gaauauuuguaauuacuguuga

SEQ ID NO: 605279 - RNA, 22 nt, Human
gaaagcagcuaagucuuaugau

SEQ ID NO: 605280 - RNA, 22 nt, Human
gggucccaggaaggagcagugu

SEQ ID NO: 605281 - RNA, 22 nt, Human
ucugaaauucacaguugaguca

SEQ ID NO: 605282 - RNA, 22 nt, Human
ugucaccacuggcugaaacacc

SEQ ID NO: 605283 - RNA, 22 nt, Human
agcacccuucagcccagccugg

SEQ ID NO: 605284 - RNA, 22 nt, Human
cugacaaaggcaaggcaggggg

SEQ ID NO: 605285 - RNA, 19 nt, Human
cugaggugcaguaagaggc

SEQ ID NO: 605286 - RNA, 22 nt, Human
gcaggaguaugcagcuaugguu

SEQ ID NO: 605287 - RNA, 22 nt, Human
aucacauuuauaguggcacgca

SEQ ID NO: 605288 - RNA, 22 nt, Human
gccacagcuuuuaaccucgggg

SEQ ID NO: 605289 - RNA, 22 nt, Human
guuuugcagagugcaauaaauc

SEQ ID NO: 605290 - RNA, 22 nt, Human
agccaggauggucucgaucggc

SEQ ID NO: 605291 - RNA, 22 nt, Human
aggagcacugagccagcauggg

SEQ ID NO: 605292 - RNA, 22 nt, Human
gaggaagaauugguuauuggag

SEQ ID NO: 605293 - RNA, 19 nt, Human
ucugaagaauuagagagca

SEQ ID NO: 605294 - RNA, 22 nt, Human
aaugguuuaacauaugcuugag

SEQ ID NO: 605295 - RNA, 20 nt, Human
caaguguuauugugcauuua

SEQ ID NO: 605296 - RNA, 22 nt, Human
gcagagcauguccucaggacag

SEQ ID NO: 605297 - RNA, 22 nt, Human
uacacauaggaggguaauaaaa

SEQ ID NO: 605298 - RNA, 22 nt, Human
agguggggccaaaugcuacagu

SEQ ID NO: 605299 - RNA, 22 nt, Human
auuuuacauaaggaagguuuaa

SEQ ID NO: 605300 - RNA, 22 nt, Human
guuuagaugagauuuuagaaca

SEQ ID NO: 605301 - RNA, 23 nt, Human
ugcaaaauuugcagaguucgaug

SEQ ID NO: 605302 - RNA, 22 nt, Human
agcagagacaugaaauaugcuu

SEQ ID NO: 605303 - RNA, 22 nt, Human
auuuucaguugaaaaaguuggu

SEQ ID NO: 605304 - RNA, 22 nt, Human
ggaggaggcggcagaaguuccu

SEQ ID NO: 605305 - RNA, 22 nt, Human
uccugguguaaugguaagcaug

SEQ ID NO: 605306 - RNA, 22 nt, Human
agaugauggccauguccucucc

SEQ ID NO: 605307 - RNA, 22 nt, Human
acaggauuaauaaaaaauugua

SEQ ID NO: 605308 - RNA, 22 nt, Human
uuuauauuguaaaaaugguucu

SEQ ID NO: 605309 - RNA, 22 nt, Human
ugguggccgaagcccucucuca

SEQ ID NO: 605310 - RNA, 22 nt, Human
aggcuucauuacagugguucaa

SEQ ID NO: 605311 - RNA, 22 nt, Human
uucuucaugcuguugcugcuug

SEQ ID NO: 605312 - RNA, 22 nt, Human
ugcacaaauuuguguaugcuca

SEQ ID NO: 605313 - RNA, 22 nt, Human
ugcugguaccgcgccuccgcca

SEQ ID NO: 605314 - RNA, 22 nt, Human
uuaauaauaaugagcccauuuu

SEQ ID NO: 605315 - RNA, 17 nt, Human
ccaggagagaugcuugu

SEQ ID NO: 605316 - RNA, 21 nt, Human
agcugcuccagggagcucagg

SEQ ID NO: 605317 - RNA, 22 nt, Human
cuuuaagacuaaauuagaguuu

SEQ ID NO: 605318 - RNA, 22 nt, Human
cugauuuucaaaauguguuaaa

SEQ ID NO: 605319 - RNA, 22 nt, Human
gcagacagcauguugggcuauu

SEQ ID NO: 605320 - RNA, 22 nt, Human
aauaaugucugcuauuuuaaaa

SEQ ID NO: 605321 - RNA, 22 nt, Human
uuaucuuagaggugauuguauu

SEQ ID NO: 605322 - RNA, 22 nt, Human
ggcacagcucaggucccagcuc

SEQ ID NO: 605323 - RNA, 22 nt, Human
uuagugucuucuucauccucug

SEQ ID NO: 605324 - RNA, 22 nt, Human
cagaaauaucaguugaaagugc

SEQ ID NO: 605325 - RNA, 22 nt, Human
uuguuuuuaaacaugugacuga

SEQ ID NO: 605326 - RNA, 20 nt, Human
uagggagauaugcucuuuuc

SEQ ID NO: 605327 - RNA, 22 nt, Human
aacaugaaguuuucuauaguga

SEQ ID NO: 605328 - RNA, 22 nt, Human
cugugccuuaguauucucauuu

SEQ ID NO: 605329 - RNA, 22 nt, Human
agucacaugagcacuaauuagg

SEQ ID NO: 605330 - RNA, 22 nt, Human
cuauuacaaucugcuacuauga

SEQ ID NO: 605331 - RNA, 20 nt, Human
uauacuaacauauaucuguu

SEQ ID NO: 605332 - RNA, 22 nt, Human
ugcaagggcuuagggggcugug

SEQ ID NO: 605333 - RNA, 22 nt, Human
gugccacauggccuaauagaga

SEQ ID NO: 605334 - RNA, 22 nt, Human
uuauguguguacaugcauaugu

SEQ ID NO: 605335 - RNA, 22 nt, Human
aacaaucuguucgauagaaaau

SEQ ID NO: 605336 - RNA, 22 nt, Human
ucccugcccugccuucaugguu

SEQ ID NO: 605337 - RNA, 22 nt, Human
ggguccaccugagcagcagccu

SEQ ID NO: 605338 - RNA, 22 nt, Human
ggccgggcaggucucagccagc

SEQ ID NO: 605339 - RNA, 22 nt, Human
agacacagucugucuggaggag

SEQ ID NO: 605340 - RNA, 22 nt, Human
cauucacaucuuguuccaucac

SEQ ID NO: 605341 - RNA, 22 nt, Human
ggucaucugccuccaaagcacu

SEQ ID NO: 605342 - RNA, 22 nt, Human
acaguggaaagaaacgaauuag

SEQ ID NO: 605343 - RNA, 22 nt, Human
uggcagagcccagaacugagca

SEQ ID NO: 605344 - RNA, 22 nt, Human
gagggccaaagagcaagagccu

SEQ ID NO: 605345 - RNA, 22 nt, Human
auuugugccaaauuauuucuaa

SEQ ID NO: 605346 - RNA, 22 nt, Human
gggggaggugaaugcaauaagg

SEQ ID NO: 605347 - RNA, 22 nt, Human
ucccugagugggcugguaguau

SEQ ID NO: 605348 - RNA, 22 nt, Human
uucugaaagucuuuuuaaguua

SEQ ID NO: 605349 - RNA, 22 nt, Human
aagugccugaccuagccuggag

SEQ ID NO: 605350 - RNA, 22 nt, Human
uguguccuuaugaaaauacugu

SEQ ID NO: 605351 - RNA, 15 nt, Human
gccuugaaugugaau

SEQ ID NO: 605352 - RNA, 22 nt, Human
ucacuuugaugacauuguagcu

SEQ ID NO: 605353 - RNA, 22 nt, Human
uuaguuuucccaucuuuauggu

SEQ ID NO: 605354 - RNA, 22 nt, Human
guccucagucaguuuggugggg

SEQ ID NO: 605355 - RNA, 22 nt, Human
gggcacugcuggaggcucccug

SEQ ID NO: 605356 - RNA, 20 nt, Human
uacuggaaauuucuccaccu

SEQ ID NO: 605357 - RNA, 22 nt, Human
accaccaggggauuuucagaac

SEQ ID NO: 605358 - RNA, 22 nt, Human
ucugucuuuagaggccugugcu

SEQ ID NO: 605359 - RNA, 22 nt, Human
cccaagggaugcuugaguaguu

SEQ ID NO: 605360 - RNA, 22 nt, Human
ccucuucuagguuucagccugc

SEQ ID NO: 605361 - RNA, 22 nt, Human
uuauuuccaguccagaaauuua

SEQ ID NO: 605362 - RNA, 22 nt, Human
gcaggcacuccuaggaccauca

SEQ ID NO: 605363 - RNA, 22 nt, Human
ggucugaggugggacccaggaa

SEQ ID NO: 605364 - RNA, 22 nt, Human
augcuaaaaacuugaucauuau

SEQ ID NO: 605365 - RNA, 22 nt, Human
aaauguuccuuuggauuaaacu

SEQ ID NO: 605366 - RNA, 22 nt, Human
agcagguggccacgaggaggag

SEQ ID NO: 605367 - RNA, 22 nt, Human
uagaggugagaggaacuuugga

SEQ ID NO: 605368 - RNA, 22 nt, Human
augcuuaauacacuguuaaagg

SEQ ID NO: 605369 - RNA, 22 nt, Human
gcagagcagaggugcagguugg

SEQ ID NO: 605370 - RNA, 20 nt, Human
caggcacacucauuccugcu

SEQ ID NO: 605371 - RNA, 22 nt, Human
auaccaauuagaguuuguugca

SEQ ID NO: 605372 - RNA, 22 nt, Human
ggcuucugaaaucucugugcgu

SEQ ID NO: 605373 - RNA, 22 nt, Human
augcugaucuguaauaagauuu

SEQ ID NO: 605374 - RNA, 22 nt, Human
uccuggagggaggcggugcuac

SEQ ID NO: 605375 - RNA, 21 nt, Human
ugugauaaacuccaaguggga

SEQ ID NO: 605376 - RNA, 22 nt, Human
ugcaggcuccaugaggacaggc

SEQ ID NO: 605377 - RNA, 22 nt, Human
ucuccucuauuucuguauguau

SEQ ID NO: 605378 - RNA, 22 nt, Human
guacacagaugcuugagaaucu

SEQ ID NO: 605379 - RNA, 22 nt, Human
cagcauggggaucacuguaggc

SEQ ID NO: 605380 - RNA, 22 nt, Human
acaggggcuccgaaggugaggg

SEQ ID NO: 605381 - RNA, 20 nt, Human
agugaauagagacauugccc

SEQ ID NO: 605382 - RNA, 22 nt, Human
uuauaagaguauauaguguacu

SEQ ID NO: 605383 - RNA, 18 nt, Human
ucuagaaacuucucuccu

SEQ ID NO: 605384 - RNA, 22 nt, Human
aacaauaggagugaugcaguau

SEQ ID NO: 605385 - RNA, 22 nt, Human
auauuguguguacaaguaguua

SEQ ID NO: 605386 - RNA, 23 nt, Human
gaagccacacaaaggucgccaag

SEQ ID NO: 605387 - RNA, 21 nt, Human
ggaacauuguuaauagucucu

SEQ ID NO: 605388 - RNA, 21 nt, Human
agaaaaaccagcauguuuuca

SEQ ID NO: 605389 - RNA, 22 nt, Human
ggagguggagcuggaaguucca

SEQ ID NO: 605390 - RNA, 22 nt, Human
acuuucucaaaucagacuuuaa

SEQ ID NO: 605391 - RNA, 22 nt, Human
augcagggucuccgugugacga

SEQ ID NO: 605392 - RNA, 22 nt, Human
uucauagagcagcucacugaau

SEQ ID NO: 605393 - RNA, 22 nt, Human
aggcugagucaaguuaggguga

SEQ ID NO: 605394 - RNA, 22 nt, Human
cucugggcaggaccaguggacc

SEQ ID NO: 605395 - RNA, 22 nt, Human
cuucccagacgggguggcagcc

SEQ ID NO: 605396 - RNA, 20 nt, Human
ucuugagaacaauuucuggc

SEQ ID NO: 605397 - RNA, 22 nt, Human
uuaugacaggaaaaucacagaa

SEQ ID NO: 605398 - RNA, 22 nt, Human
uagcagaggcuacugcuccuug

SEQ ID NO: 605399 - RNA, 18 nt, Human
aagaacugagguccuaga

SEQ ID NO: 605400 - RNA, 22 nt, Human
uugaggucaucugaaguacuag

SEQ ID NO: 605401 - RNA, 20 nt, Human
gaacagucuucugagccaca

SEQ ID NO: 605402 - RNA, 22 nt, Human
cucucuguuaugcuuucaugaa

SEQ ID NO: 605403 - RNA, 19 nt, Human
ugaggggaggagaggccug

SEQ ID NO: 605404 - RNA, 21 nt, Human
ucuuuuguaacuauuucagcc

SEQ ID NO: 605405 - RNA, 22 nt, Human
cugggagaugacucagagcagg

SEQ ID NO: 605406 - RNA, 22 nt, Human
uacuuuuuagcacagugugugc

SEQ ID NO: 605407 - RNA, 22 nt, Human
cacagagcugaaccugggucau

SEQ ID NO: 605408 - RNA, 22 nt, Human
acagugcuuggcacacaguaau

SEQ ID NO: 605409 - RNA, 22 nt, Human
uucaguaaaacacugcaauguc

SEQ ID NO: 605410 - RNA, 22 nt, Human
aagaaauuaaugugccauuacu

SEQ ID NO: 605411 - RNA, 22 nt, Human
acaaaguuauucuuucagagga

SEQ ID NO: 605412 - RNA, 23 nt, Human
ucauuucagguugcaugguacca

SEQ ID NO: 605413 - RNA, 22 nt, Human
uaguuuacucaucuauaaaaug

SEQ ID NO: 605414 - RNA, 22 nt, Human
agagccugugggagaugcagcu

SEQ ID NO: 605415 - RNA, 22 nt, Human
ugagcagacuugaugaggcagc

SEQ ID NO: 605416 - RNA, 22 nt, Human
uguaggucucagugucugagcu

SEQ ID NO: 605417 - RNA, 22 nt, Human
agagagagaaaugaaaugugcu

SEQ ID NO: 605418 - RNA, 22 nt, Human
ugagccuggccugcagagacca

SEQ ID NO: 605419 - RNA, 21 nt, Human
uuguaaauggcuuuuuccuuc

SEQ ID NO: 605420 - RNA, 22 nt, Human
agccccucuccgcccugagucg

SEQ ID NO: 605421 - RNA, 22 nt, Human
gagcuucucaacaguuaucucu

SEQ ID NO: 605422 - RNA, 22 nt, Human
cagaugcuauguauuauguaug

SEQ ID NO: 605423 - RNA, 22 nt, Human
aggcuccauuuuccugcagcug

SEQ ID NO: 605424 - RNA, 22 nt, Human
uacauguaagacaugagacucu

SEQ ID NO: 605425 - RNA, 22 nt, Human
uaggaaacucucagcuggucau

SEQ ID NO: 605426 - RNA, 22 nt, Human
cagcagugacaagacuaagaag

SEQ ID NO: 605427 - RNA, 22 nt, Human
ggccccagcagacccuccucug

SEQ ID NO: 605428 - RNA, 22 nt, Human
uacaaauguauuuuauuuuggu

SEQ ID NO: 605429 - RNA, 22 nt, Human
agugugaguaauucagggaggg

SEQ ID NO: 605430 - RNA, 22 nt, Human
gaagcccuauccucuccuggga

SEQ ID NO: 605431 - RNA, 21 nt, Human
agcagaggcugccuggugacu

SEQ ID NO: 605432 - RNA, 22 nt, Human
cuauugaaaguguacaauucaa

SEQ ID NO: 605433 - RNA, 22 nt, Human
caggcuccuucccagggauggu

SEQ ID NO: 605434 - RNA, 22 nt, Human
ucucaucuucauaucugaaaga

SEQ ID NO: 605435 - RNA, 22 nt, Human
aucaggcuaguguguguguuca

SEQ ID NO: 605436 - RNA, 22 nt, Human
uuagggaaauauuuauauacuu

SEQ ID NO: 605437 - RNA, 22 nt, Human
uaguaaaucucagaaaaagauc

SEQ ID NO: 605438 - RNA, 22 nt, Human
ggaggcucuaaacuuuccuugg

SEQ ID NO: 605439 - RNA, 22 nt, Human
ucagcuugcuaaaagggcaucu

SEQ ID NO: 605440 - RNA, 22 nt, Human
acucucuugggggagagcagag

SEQ ID NO: 605441 - RNA, 22 nt, Human
ucccagcuuagauuugcucauu

SEQ ID NO: 605442 - RNA, 22 nt, Human
cuccuggacauggagcggagga

SEQ ID NO: 605443 - RNA, 21 nt, Human
ugaggccaauagccccuggac

SEQ ID NO: 605444 - RNA, 22 nt, Human
gagcugugugccuggauggucu

SEQ ID NO: 605445 - RNA, 22 nt, Human
aaugguuuguaccuguccuugg

SEQ ID NO: 605446 - RNA, 22 nt, Human
ggaagcagccugaagccaaggg

SEQ ID NO: 605447 - RNA, 22 nt, Human
ugaagacaagugugcugguguu

SEQ ID NO: 605448 - RNA, 23 nt, Human
ggagugcaauggcgccaucucgg

SEQ ID NO: 605449 - RNA, 22 nt, Human
uggagcagcuaagccucugaga

SEQ ID NO: 605450 - RNA, 22 nt, Human
aagggcaggaaaagauggaugu

SEQ ID NO: 605451 - RNA, 22 nt, Human
caguucauccccauguuuucaa

SEQ ID NO: 605452 - RNA, 22 nt, Human
agguccugucuuaucucuguaa

SEQ ID NO: 605453 - RNA, 22 nt, Human
uuucuauuuuaaaggcauaugg

SEQ ID NO: 605454 - RNA, 22 nt, Human
gaggguggguuucuugcacguc

SEQ ID NO: 605455 - RNA, 17 nt, Human
gauuuccugaaguucuu

SEQ ID NO: 605456 - RNA, 22 nt, Human
gcagugccuugcuucucugucu

SEQ ID NO: 605457 - RNA, 22 nt, Human
ugaacuucagugauuugcugca

SEQ ID NO: 605458 - RNA, 22 nt, Human
cucuccaggcugggacaggacc

SEQ ID NO: 605459 - RNA, 22 nt, Human
acugagguugaaauagugaugu

SEQ ID NO: 605460 - RNA, 22 nt, Human
ccagccucacuggcaucaccua

SEQ ID NO: 605461 - RNA, 22 nt, Human
uagaagcagcaggacucauggu

SEQ ID NO: 605462 - RNA, 22 nt, Human
agcauagauacauugagccaca

SEQ ID NO: 605463 - RNA, 22 nt, Human
ggaggccaaagugugggcggcu

SEQ ID NO: 605464 - RNA, 22 nt, Human
uguaugaaaaggaauagauuga

SEQ ID NO: 605465 - RNA, 22 nt, Human
aaucuacauuucaguuuugccc

SEQ ID NO: 605466 - RNA, 22 nt, Human
ugaugaaugucauacauaauga

SEQ ID NO: 605467 - RNA, 22 nt, Human
aagaacauaaacagaaggacag

SEQ ID NO: 605468 - RNA, 22 nt, Human
gggaaacuagaagcaggguuau

SEQ ID NO: 605469 - RNA, 22 nt, Human
caggcugaucagggcugggaug

SEQ ID NO: 605470 - RNA, 22 nt, Human
guuuucuuccugcaauuggcau

SEQ ID NO: 605471 - RNA, 22 nt, Human
uacauauuguccauaguugcuu

SEQ ID NO: 605472 - RNA, 23 nt, Human
cagcugaagcagccugggcugga

SEQ ID NO: 605473 - RNA, 22 nt, Human
ucccuugagaguuggccaauug

SEQ ID NO: 605474 - RNA, 22 nt, Human
ccugcuggcauucuugcucccu

SEQ ID NO: 605475 - RNA, 22 nt, Human
aucucuggguccauagaagaga

SEQ ID NO: 605476 - RNA, 22 nt, Human
cuuuuuauaccgugccaguuga

SEQ ID NO: 605477 - RNA, 22 nt, Human
guaauuuuggaguauaaccugg

SEQ ID NO: 605478 - RNA, 22 nt, Human
ugccucgugucugagucuguuc

SEQ ID NO: 605479 - RNA, 22 nt, Human
agaaacugacaggaaaugaauu

SEQ ID NO: 605480 - RNA, 21 nt, Human
agcuuguguguaucacagugu

SEQ ID NO: 605481 - RNA, 17 nt, Human
uguuuuuucccuguucu

SEQ ID NO: 605482 - RNA, 22 nt, Human
ggcucacgcaauuaucccggcc

SEQ ID NO: 605483 - RNA, 22 nt, Human
uagugcuugguggagauggaga

SEQ ID NO: 605484 - RNA, 22 nt, Human
cugugucuguggaauagcgaau

SEQ ID NO: 605485 - RNA, 22 nt, Human
uuguuuuaguagguacacugag

SEQ ID NO: 605486 - RNA, 22 nt, Human
acaugcauauacuuaaauaugu

SEQ ID NO: 605487 - RNA, 22 nt, Human
uaucaaaaggaguugaaagggg

SEQ ID NO: 605488 - RNA, 22 nt, Human
auguuucaccaguuuuauaaga

SEQ ID NO: 605489 - RNA, 22 nt, Human
cuuccuggcaugggucucauga

SEQ ID NO: 605490 - RNA, 22 nt, Human
aacaaaguagcugcuguucuua

SEQ ID NO: 605491 - RNA, 22 nt, Human
uuggaagauuacuuaguuuucu

SEQ ID NO: 605492 - RNA, 22 nt, Human
caugcucuagauucucucuaau

SEQ ID NO: 605493 - RNA, 22 nt, Human
uccugagugagagcugggaggu

SEQ ID NO: 605494 - RNA, 22 nt, Human
aaagaugaucuacaaguucauu

SEQ ID NO: 605495 - RNA, 22 nt, Human
auugugcagcucugcucuuauu

SEQ ID NO: 605496 - RNA, 22 nt, Human
auggggagagccucugucccca

SEQ ID NO: 605497 - RNA, 22 nt, Human
ucugggcugcuaugaggcagag

SEQ ID NO: 605498 - RNA, 22 nt, Human
ugugaguucuuagaaagucagu

SEQ ID NO: 605499 - RNA, 20 nt, Human
uggccuuggggagcucacac

SEQ ID NO: 605500 - RNA, 22 nt, Human
agcauguaaagcucuuagcacc

SEQ ID NO: 605501 - RNA, 22 nt, Human
cccaggagguggagcuugcagu

SEQ ID NO: 605502 - RNA, 22 nt, Human
ucuuggcuaguaccuuccugcc

SEQ ID NO: 605503 - RNA, 22 nt, Human
agcaaagauguccggggcaagc

SEQ ID NO: 605504 - RNA, 22 nt, Human
caggguagggcaagggaaccug

SEQ ID NO: 605505 - RNA, 22 nt, Human
gaauguaauagucaguagaaca

SEQ ID NO: 605506 - RNA, 22 nt, Human
cugccccaggaccucuucugga

SEQ ID NO: 605507 - RNA, 22 nt, Human
agggcgccugcuguggccaccg

SEQ ID NO: 605508 - RNA, 22 nt, Human
agaggagaauccguuuccuugc

SEQ ID NO: 605509 - RNA, 22 nt, Human
gccuucagcggccgcucgcugc

SEQ ID NO: 605510 - RNA, 22 nt, Human
agaaauaagagcuuuccuuggg

SEQ ID NO: 605511 - RNA, 21 nt, Human
uuuacugagcacuuacuaugu

SEQ ID NO: 605512 - RNA, 22 nt, Human
cagcaaaauuugaggauugccu

SEQ ID NO: 605513 - RNA, 22 nt, Human
cuguggauuuacuugagaagcu

SEQ ID NO: 605514 - RNA, 22 nt, Human
uucauaaucaccaaaaacugga

SEQ ID NO: 605515 - RNA, 22 nt, Human
ggcuccagaugucuccuggcaa

SEQ ID NO: 605516 - RNA, 22 nt, Human
aguugaaagccuuauuucucug

SEQ ID NO: 605517 - RNA, 22 nt, Human
ccugccaggcgagucuaggcca

SEQ ID NO: 605518 - RNA, 22 nt, Human
cuggagcagguuuaggaguccc

SEQ ID NO: 605519 - RNA, 22 nt, Human
ucacaugcuacugagccagacc

SEQ ID NO: 605520 - RNA, 22 nt, Human
auuuuccuccaugugagcaguu

SEQ ID NO: 605521 - RNA, 22 nt, Human
ugacuuuuggaccucacugucc

SEQ ID NO: 605522 - RNA, 22 nt, Human
ucaacaauugcauguugauguu

SEQ ID NO: 605523 - RNA, 22 nt, Human
acagaauauugguuacuguugc

SEQ ID NO: 605524 - RNA, 22 nt, Human
caggaugagguagaggcagaua

SEQ ID NO: 605525 - RNA, 22 nt, Human
augaaugacugucuacuuuggg

SEQ ID NO: 605526 - RNA, 19 nt, Human
uuucaggagcuaugcaggg

SEQ ID NO: 605527 - RNA, 22 nt, Human
gagccuguguuuccuguagcca

SEQ ID NO: 605528 - RNA, 22 nt, Human
caugggccauggugaagccagg

SEQ ID NO: 605529 - RNA, 17 nt, Human
ugaggccauggcaccau

SEQ ID NO: 605530 - RNA, 22 nt, Human
ggucccaggagaauaggugcaa

SEQ ID NO: 605531 - RNA, 22 nt, Human
aaaugacacucauucaguguca

SEQ ID NO: 605532 - RNA, 22 nt, Human
uggcucagucuggguugacuga

SEQ ID NO: 605533 - RNA, 22 nt, Human
ccuggccaggcauggagucaca

SEQ ID NO: 605534 - RNA, 22 nt, Human
uggaaggaagccaaggaagguu

SEQ ID NO: 605535 - RNA, 22 nt, Human
guauuucccccagacucccugg

SEQ ID NO: 605536 - RNA, 22 nt, Human
cuugggugcuggaggcugccgc

SEQ ID NO: 605537 - RNA, 22 nt, Human
cugagggcccugaagcuuggca

SEQ ID NO: 605538 - RNA, 21 nt, Human
agaugcugugcuccaggagca

SEQ ID NO: 605539 - RNA, 22 nt, Human
aaugucuucaguguauacaugg

SEQ ID NO: 605540 - RNA, 22 nt, Human
uuugucagucaugucugcuuuu

SEQ ID NO: 605541 - RNA, 20 nt, Human
cagcaacuuuggacugaguu

SEQ ID NO: 605542 - RNA, 22 nt, Human
acagagaccaguuacagcgucc

SEQ ID NO: 605543 - RNA, 22 nt, Human
gcaguaggggcuggagggcugu

SEQ ID NO: 605544 - RNA, 22 nt, Human
agugucucagccccaacuagag

SEQ ID NO: 605545 - RNA, 22 nt, Human
ucugcuguaaccuucagaggua

SEQ ID NO: 605546 - RNA, 22 nt, Human
cauuaagauuuuuuucuacugg

SEQ ID NO: 605547 - RNA, 22 nt, Human
agcaaggaaacuauggagagau

SEQ ID NO: 605548 - RNA, 22 nt, Human
agggcugaugcaccauguagcc

SEQ ID NO: 605549 - RNA, 22 nt, Human
cagggccacugcaugagguuca

SEQ ID NO: 605550 - RNA, 22 nt, Human
uguuucaacuguuaagauaugc

SEQ ID NO: 605551 - RNA, 22 nt, Human
aaaacaguuuaggcaucacagu

SEQ ID NO: 605552 - RNA, 22 nt, Human
uuggcucagcugggacuguuga

SEQ ID NO: 605553 - RNA, 22 nt, Human
ugggaacaguagcugcugagcu

SEQ ID NO: 605554 - RNA, 22 nt, Human
agagguguggccaggacucaag

SEQ ID NO: 605555 - RNA, 22 nt, Human
aacagaaaagguagguggcuuu

SEQ ID NO: 605556 - RNA, 22 nt, Human
aaggggaguuagugauaaaacc

SEQ ID NO: 605557 - RNA, 22 nt, Human
uuacauuuugcacagauguccc

SEQ ID NO: 605558 - RNA, 22 nt, Human
gcugcugccuguagccagggug

SEQ ID NO: 605559 - RNA, 22 nt, Human
ugcuuccgcuaaaaauuaaucc

SEQ ID NO: 605560 - RNA, 22 nt, Human
cagaauuuaaguggauuauucu

SEQ ID NO: 605561 - RNA, 22 nt, Human
gcauuagacccaagguauuuug

SEQ ID NO: 605562 - RNA, 22 nt, Human
ucugccugaaccacucuuggag

SEQ ID NO: 605563 - RNA, 22 nt, Human
uggcugaggagggucuucuggu

SEQ ID NO: 605564 - RNA, 22 nt, Human
cacacaugcauguaagaccucu

SEQ ID NO: 605565 - RNA, 22 nt, Human
gcuggcuguaucaccuggccag

SEQ ID NO: 605566 - RNA, 22 nt, Human
gagcuuugcuggaagccugggg

SEQ ID NO: 605567 - RNA, 22 nt, Human
aaguuaugaaauuuggacagcu

SEQ ID NO: 605568 - RNA, 22 nt, Human
gcagccugaugaucuggguugu

SEQ ID NO: 605569 - RNA, 22 nt, Human
gaggagcccuguuccccaggcc

SEQ ID NO: 605570 - RNA, 22 nt, Human
aggcagaggaaggguggauuug

SEQ ID NO: 605571 - RNA, 21 nt, Human
gcuggcuuuauucugcguuug

SEQ ID NO: 605572 - RNA, 22 nt, Human
uuucaaagucaagaaggauacu

SEQ ID NO: 605573 - RNA, 22 nt, Human
cuuagaaugucuacucuuacca

SEQ ID NO: 605574 - RNA, 22 nt, Human
acaaaguaggucaucaaagcuc

SEQ ID NO: 605575 - RNA, 22 nt, Human
auguaacauugaauuauauagu

SEQ ID NO: 605576 - RNA, 22 nt, Human
aggcuuuccugucacucaugcu

SEQ ID NO: 605577 - RNA, 22 nt, Human
uacagugcauagaggcaugaua

SEQ ID NO: 605578 - RNA, 22 nt, Human
ugcagcauuaguacaagucuca

SEQ ID NO: 605579 - RNA, 22 nt, Human
uuucauagcugaaaauguugaa

SEQ ID NO: 605580 - RNA, 22 nt, Human
agcuccugaaaagcgcuugcuu

SEQ ID NO: 605581 - RNA, 22 nt, Human
caguuuuccaugacucagagag

SEQ ID NO: 605582 - RNA, 22 nt, Human
aggagcugcagauucugccuug

SEQ ID NO: 605583 - RNA, 22 nt, Human
uuuauuguuaucaugggugagu

SEQ ID NO: 605584 - RNA, 22 nt, Human
ucugucacuuauuaagauggau

SEQ ID NO: 605585 - RNA, 21 nt, Human
uuagacuuggguuuuuccugg

SEQ ID NO: 605586 - RNA, 22 nt, Human
uggcaucuguguugcgguuguc

SEQ ID NO: 605587 - RNA, 22 nt, Human
acagacaguaugguggggcuga

SEQ ID NO: 605588 - RNA, 22 nt, Human
caguucucugugccucgcuggg

SEQ ID NO: 605589 - RNA, 22 nt, Human
aacacaggccagccugugcagu

SEQ ID NO: 605590 - RNA, 22 nt, Human
acaggaggagcagcugugugcc

SEQ ID NO: 605591 - RNA, 22 nt, Human
ccaggagagcaaaggucacucu

SEQ ID NO: 605592 - RNA, 22 nt, Human
ccucagugaccuauugcauuca

SEQ ID NO: 605593 - RNA, 22 nt, Human
gccaaaggauucuauggagaua

SEQ ID NO: 605594 - RNA, 22 nt, Human
gaaggcaguaaauggcuguuuu

SEQ ID NO: 605595 - RNA, 22 nt, Human
caagguuucuaugcucaaagga

SEQ ID NO: 605596 - RNA, 22 nt, Human
agcagccuugugacuccggggu

SEQ ID NO: 605597 - RNA, 22 nt, Human
aaaucuguaagcaauugcucag

SEQ ID NO: 605598 - RNA, 23 nt, Human
ugagcccaguuuucccucuugcc

SEQ ID NO: 605599 - RNA, 22 nt, Human
aggcucugccaauuccuuccuc

SEQ ID NO: 605600 - RNA, 22 nt, Human
uaagagaugguuaucaaaagca

SEQ ID NO: 605601 - RNA, 22 nt, Human
gagcaucgcugagaucccagac

SEQ ID NO: 605602 - RNA, 22 nt, Human
gacaugggaugagaugaagcau

SEQ ID NO: 605603 - RNA, 22 nt, Human
cagguccaacuauuuaucugug

SEQ ID NO: 605604 - RNA, 22 nt, Human
auuuucaagggagaggccucug

SEQ ID NO: 605605 - RNA, 22 nt, Human
gcucccaccuuugcuaucagua

SEQ ID NO: 605606 - RNA, 18 nt, Human
ugugccucugcaggacgu

SEQ ID NO: 605607 - RNA, 20 nt, Human
ccugcugugcuuuccaugga

SEQ ID NO: 605608 - RNA, 22 nt, Human
gcagggugccgacuucagggau

SEQ ID NO: 605609 - RNA, 22 nt, Human
ucccucagggugcaguugcuuu

SEQ ID NO: 605610 - RNA, 22 nt, Human
gagcugccagacaugggaauga

SEQ ID NO: 605611 - RNA, 22 nt, Human
ugaggaugacgauggcaauggc

SEQ ID NO: 605612 - RNA, 22 nt, Human
uuggccuuaaccucucugugcc

SEQ ID NO: 605613 - RNA, 19 nt, Human
aggcuaaagagucuugcgu

SEQ ID NO: 605614 - RNA, 22 nt, Human
agguacaucuauggggauagaa

SEQ ID NO: 605615 - RNA, 22 nt, Human
ucugugcuagaggaguuggcca

SEQ ID NO: 605616 - RNA, 21 nt, Human
uuuauuuauauaggacacaug

SEQ ID NO: 605617 - RNA, 22 nt, Human
ucaguggagagcuuccaggauu

SEQ ID NO: 605618 - RNA, 22 nt, Human
caagcuccuuacauccacaggg

SEQ ID NO: 605619 - RNA, 22 nt, Human
cacauuuaaagguugaagcuga

SEQ ID NO: 605620 - RNA, 22 nt, Human
ggcuucaccaggugcaugcaug

SEQ ID NO: 605621 - RNA, 22 nt, Human
acugaaaaagacaucuugguaa

SEQ ID NO: 605622 - RNA, 22 nt, Human
gugcauauguaccugugaucau

SEQ ID NO: 605623 - RNA, 22 nt, Human
ccuuagaucaggcugucuaggg

SEQ ID NO: 605624 - RNA, 19 nt, Human
agugguagaugagcaggag

SEQ ID NO: 605625 - RNA, 22 nt, Human
caguacuuugaagauauuuuag

SEQ ID NO: 605626 - RNA, 22 nt, Human
aagcugaggucaaguagcuagu

SEQ ID NO: 605627 - RNA, 22 nt, Human
uaggaaacaaaguaaugcaacu

SEQ ID NO: 605628 - RNA, 22 nt, Human
gaguggagcaaaagagguagau

SEQ ID NO: 605629 - RNA, 17 nt, Human
cccagagaugcugccuu

SEQ ID NO: 605630 - RNA, 22 nt, Human
gggggcgggagacagcagugac

SEQ ID NO: 605631 - RNA, 22 nt, Human
aauaacugcacuuguugaaugc

SEQ ID NO: 605632 - RNA, 22 nt, Human
ccuugaaauguucucacugggg

SEQ ID NO: 605633 - RNA, 21 nt, Human
ugcugccaucaugcagagaug

SEQ ID NO: 605634 - RNA, 22 nt, Human
ggccucaguuucuccauggguu

SEQ ID NO: 605635 - RNA, 22 nt, Human
ugccuuuucuguagcucuggaa

SEQ ID NO: 605636 - RNA, 19 nt, Human
cugagucaaagguuguggg

SEQ ID NO: 605637 - RNA, 22 nt, Human
auccuuuaaguuaauaaaauuc

SEQ ID NO: 605638 - RNA, 22 nt, Human
cugcugaaugucucuuugguuu

SEQ ID NO: 605639 - RNA, 22 nt, Human
auaauguuucaguacugucugu

SEQ ID NO: 605640 - RNA, 22 nt, Human
uuccugggccuuaaaucuuuug

SEQ ID NO: 605641 - RNA, 22 nt, Human
uugaaugauccuaucuagcaca

SEQ ID NO: 605642 - RNA, 22 nt, Human
uucuccagccuauuggccuauc

SEQ ID NO: 605643 - RNA, 22 nt, Human
aaaguaaagauugggaaugugu

SEQ ID NO: 605644 - RNA, 22 nt, Human
auucaugaaucuacauuguggu

SEQ ID NO: 605645 - RNA, 22 nt, Human
agccaggugcaguggcacacac

SEQ ID NO: 605646 - RNA, 22 nt, Human
acuuucucaggaauucacagac

SEQ ID NO: 605647 - RNA, 22 nt, Human
uguaacaaaauaccuuggauug

SEQ ID NO: 605648 - RNA, 22 nt, Human
gcuaaaugaugggaaaucuggg

SEQ ID NO: 605649 - RNA, 22 nt, Human
uuauaauugcuuauuagaccca

SEQ ID NO: 605650 - RNA, 22 nt, Human
guuauuuuaacuucucaguaau

SEQ ID NO: 605651 - RNA, 22 nt, Human
cagcggccggugaggaagggga

SEQ ID NO: 605652 - RNA, 18 nt, Human
uggcagguagacucaggu

SEQ ID NO: 605653 - RNA, 22 nt, Human
uuguaacagguacuaaauaacu

SEQ ID NO: 605654 - RNA, 22 nt, Human
cuccugggagcagggauggaug

SEQ ID NO: 605655 - RNA, 22 nt, Human
cauggcccucuucuggagcaau

SEQ ID NO: 605656 - RNA, 22 nt, Human
ucccuggggaagggcaagcaag

SEQ ID NO: 605657 - RNA, 22 nt, Human
caggaggcuccuagggcucugu

SEQ ID NO: 605658 - RNA, 22 nt, Human
guccucugggagccuugagccu

SEQ ID NO: 605659 - RNA, 21 nt, Human
cagaggggcuagccuggcugc

SEQ ID NO: 605660 - RNA, 22 nt, Human
gagguuuuaggcugccauuauu

SEQ ID NO: 605661 - RNA, 22 nt, Human
ugaaagguuaaaaguaguauug

SEQ ID NO: 605662 - RNA, 19 nt, Human
auuuauuguaugauuccau

SEQ ID NO: 605663 - RNA, 22 nt, Human
ggcagaaggcaauuagagacug

SEQ ID NO: 605664 - RNA, 22 nt, Human
cagucucugucaucucauggga

SEQ ID NO: 605665 - RNA, 22 nt, Human
cuucuuccaagcuuaugcucaa

SEQ ID NO: 605666 - RNA, 22 nt, Human
uuccaauggaaucaugucuuga

SEQ ID NO: 605667 - RNA, 22 nt, Human
uaaaacugaauacauacugagg

SEQ ID NO: 605668 - RNA, 22 nt, Human
uuuaaaaguuaucaucugucca

SEQ ID NO: 605669 - RNA, 22 nt, Human
gcugcagcagaaguucucagag

SEQ ID NO: 605670 - RNA, 22 nt, Human
uuaauauacaauuuuacgggcu

SEQ ID NO: 605671 - RNA, 22 nt, Human
cuugugcagccuccucuugcag

SEQ ID NO: 605672 - RNA, 22 nt, Human
ucagcuucccuaucugaccaua

SEQ ID NO: 605673 - RNA, 22 nt, Human
ugaaggugaccugacaguggcu

SEQ ID NO: 605674 - RNA, 23 nt, Human
cccuguagcccaggacaggcuuu

SEQ ID NO: 605675 - RNA, 17 nt, Human
cagcucugcaucuuccu

SEQ ID NO: 605676 - RNA, 22 nt, Human
ugacauccggccacuagacucc

SEQ ID NO: 605677 - RNA, 22 nt, Human
ccuggccaaucuagggcuguua

SEQ ID NO: 605678 - RNA, 22 nt, Human
uaugaacuguacuguacuaagc

SEQ ID NO: 605679 - RNA, 22 nt, Human
gauuuguccacagagugaugaa

SEQ ID NO: 605680 - RNA, 22 nt, Human
agagaccuuucuccugccuuuc

SEQ ID NO: 605681 - RNA, 22 nt, Human
acauggcucagucucaugacag

SEQ ID NO: 605682 - RNA, 17 nt, Human
ggacacagcucauggcu

SEQ ID NO: 605683 - RNA, 22 nt, Human
agccuggauccauguggcuacc

SEQ ID NO: 605684 - RNA, 22 nt, Human
cuggccagaguuggagggugug

SEQ ID NO: 605685 - RNA, 22 nt, Human
gaaugaacaaaugugguggaga

SEQ ID NO: 605686 - RNA, 22 nt, Human
auuguauaacagcauguauuuu

SEQ ID NO: 605687 - RNA, 22 nt, Human
uaagaacauuuucggaaagaua

SEQ ID NO: 605688 - RNA, 22 nt, Human
uugaggccugcuggaagguguu

SEQ ID NO: 605689 - RNA, 20 nt, Human
caaagacaugcuaggggugg

SEQ ID NO: 605690 - RNA, 22 nt, Human
aaauuccagcaacaccuuuuua

SEQ ID NO: 605691 - RNA, 22 nt, Human
ccagguggaggugugagguccu

SEQ ID NO: 605692 - RNA, 22 nt, Human
uucuagagccagggcagcugca

SEQ ID NO: 605693 - RNA, 22 nt, Human
acaaacagcuaacauauguuaa

SEQ ID NO: 605694 - RNA, 23 nt, Human
uuaagacuggcugaacuuaguag

SEQ ID NO: 605695 - RNA, 22 nt, Human
uacaugcucaguaacuuucagu

SEQ ID NO: 605696 - RNA, 22 nt, Human
agggccagcacuccuggcagga

SEQ ID NO: 605697 - RNA, 22 nt, Human
cuuagugacauguauucuucau

SEQ ID NO: 605698 - RNA, 23 nt, Human
agggagaugccacaaagaugccc

SEQ ID NO: 605699 - RNA, 22 nt, Human
ucagggaaaggggagagucauu

SEQ ID NO: 605700 - RNA, 22 nt, Human
gguuuuaacuacagaauugcaa

SEQ ID NO: 605701 - RNA, 22 nt, Human
ugcauggaguaauugaugcuug

SEQ ID NO: 605702 - RNA, 22 nt, Human
cccagcuguaacgggucugcac

SEQ ID NO: 605703 - RNA, 22 nt, Human
ugcugaaguuacuagagacuau

SEQ ID NO: 605704 - RNA, 17 nt, Human
ugcuugacucucuuguu

SEQ ID NO: 605705 - RNA, 22 nt, Human
ggagcaccaaaguaacuagcac

SEQ ID NO: 605706 - RNA, 22 nt, Human
uagcccaggcuggagggcagug

SEQ ID NO: 605707 - RNA, 22 nt, Human
uugaaugaggaagagcacuggc

SEQ ID NO: 605708 - RNA, 22 nt, Human
gcucuguucaucaguuuguugg

SEQ ID NO: 605709 - RNA, 20 nt, Human
gugggcagagcaccaccugg

SEQ ID NO: 605710 - RNA, 22 nt, Human
ggcugccauaacagaguaccac

SEQ ID NO: 605711 - RNA, 22 nt, Human
uccagggacacagaguccuucu

SEQ ID NO: 605712 - RNA, 22 nt, Human
acauuguuccugagaacuuggg

SEQ ID NO: 605713 - RNA, 22 nt, Human
cuucucagaggccagaagcuau

SEQ ID NO: 605714 - RNA, 22 nt, Human
agguggcagagugacaggcuga

SEQ ID NO: 605715 - RNA, 22 nt, Human
ggcagccaugucccagggcuuc

SEQ ID NO: 605716 - RNA, 22 nt, Human
aauucugagaacaaaagguacu

SEQ ID NO: 605717 - RNA, 22 nt, Human
uucugcuucugugugucccagg

SEQ ID NO: 605718 - RNA, 22 nt, Human
ugagguguguccccagggaggu

SEQ ID NO: 605719 - RNA, 22 nt, Human
ggagagcugguagcuggcucca

SEQ ID NO: 605720 - RNA, 22 nt, Human
auuucaacguuagauguaauag

SEQ ID NO: 605721 - RNA, 22 nt, Human
uuggaagacagugaaacagcac

SEQ ID NO: 605722 - RNA, 22 nt, Human
ugggagaugguucugagacuuu

SEQ ID NO: 605723 - RNA, 22 nt, Human
ugcuuuauuuauaaaauagcaa

SEQ ID NO: 605724 - RNA, 22 nt, Human
cguccccucguucccacuuugg

SEQ ID NO: 605725 - RNA, 22 nt, Human
cuacugaauuagacugcauuuu

SEQ ID NO: 605726 - RNA, 22 nt, Human
acauaacaugucaaucacccga

SEQ ID NO: 605727 - RNA, 22 nt, Human
cuucccagaacaauguaggcuu

SEQ ID NO: 605728 - RNA, 22 nt, Human
aagcagaggguauggccagguu

SEQ ID NO: 605729 - RNA, 21 nt, Human
acagcauguuuguguguuugc

SEQ ID NO: 605730 - RNA, 22 nt, Human
acuguauuuuguacuuucgugu

SEQ ID NO: 605731 - RNA, 22 nt, Human
ucucaucuagacucugcccuug

SEQ ID NO: 605732 - RNA, 22 nt, Human
uuaugagcuaaguuguggcccc

SEQ ID NO: 605733 - RNA, 20 nt, Human
auucuaaagcucugcucuuu

SEQ ID NO: 605734 - RNA, 22 nt, Human
agcacugauuuuguugcacuua

SEQ ID NO: 605735 - RNA, 22 nt, Human
ugcugcaggcagccccucuacu

SEQ ID NO: 605736 - RNA, 21 nt, Human
uuucccagcagagauagcugg

SEQ ID NO: 605737 - RNA, 22 nt, Human
uggcacugacagggugcucaag

SEQ ID NO: 605738 - RNA, 22 nt, Human
aguguacauguacacauuagua

SEQ ID NO: 605739 - RNA, 22 nt, Human
ugacauuuuuaaaaccacuagu

SEQ ID NO: 605740 - RNA, 22 nt, Human
agcaaugacuaaggcacuuugg

SEQ ID NO: 605741 - RNA, 22 nt, Human
aagcagaggccacagagugggc

SEQ ID NO: 605742 - RNA, 22 nt, Human
cuccugacuugugagccccucc

SEQ ID NO: 605743 - RNA, 22 nt, Human
ggaugggaacuugguagggcau

SEQ ID NO: 605744 - RNA, 22 nt, Human
gaauguuacuuugauuuugucc

SEQ ID NO: 605745 - RNA, 20 nt, Human
caguauugauccauugucug

SEQ ID NO: 605746 - RNA, 22 nt, Human
cugccugcugcccuccagagcc

SEQ ID NO: 605747 - RNA, 22 nt, Human
uuaaaguuugccuauguguugu

SEQ ID NO: 605748 - RNA, 22 nt, Human
uggcggcucaggaggggcaguu

SEQ ID NO: 605749 - RNA, 22 nt, Human
uacacuggggcucugggaguga

SEQ ID NO: 605750 - RNA, 22 nt, Human
gugcaugugucuuuauaguaga

SEQ ID NO: 605751 - RNA, 22 nt, Human
aggagcugggcugcugcuggga

SEQ ID NO: 605752 - RNA, 22 nt, Human
agcacugauuuaaacuggauuu

SEQ ID NO: 605753 - RNA, 22 nt, Human
ucuguuucuauaaagacaagag

SEQ ID NO: 605754 - RNA, 22 nt, Human
caggcuggagugaguguagugg

SEQ ID NO: 605755 - RNA, 22 nt, Human
ugcacgugggcucucugcucuu

SEQ ID NO: 605756 - RNA, 22 nt, Human
agcugugguucugggcagcgac

SEQ ID NO: 605757 - RNA, 20 nt, Human
uucugccuaggguuagccug

SEQ ID NO: 605758 - RNA, 22 nt, Human
gggcagugacaaaggggaugaa

SEQ ID NO: 605759 - RNA, 22 nt, Human
cagaaguuaugucaauggucau

SEQ ID NO: 605760 - RNA, 22 nt, Human
guaggcagugcuugauuuucca

SEQ ID NO: 605761 - RNA, 22 nt, Human
uaaucacagaaacagacuguuu

SEQ ID NO: 605762 - RNA, 22 nt, Human
uacagugucugcaacugcacac

SEQ ID NO: 605763 - RNA, 22 nt, Human
ggagaugcuuuccaguggggau

SEQ ID NO: 605764 - RNA, 22 nt, Human
uagaacuagaacaaggauuuga

SEQ ID NO: 605765 - RNA, 22 nt, Human
aguguguacucauauacuucca

SEQ ID NO: 605766 - RNA, 22 nt, Human
cauuucaauacaguuuguaaau

SEQ ID NO: 605767 - RNA, 22 nt, Human
ucagggcugcagaagaggcagg

SEQ ID NO: 605768 - RNA, 22 nt, Human
acagguggagugguuagcaggc

SEQ ID NO: 605769 - RNA, 22 nt, Human
cccaggaggugugcccaacucg

SEQ ID NO: 605770 - RNA, 22 nt, Human
uaauuuugucccccugcacaua

SEQ ID NO: 605771 - RNA, 22 nt, Human
ccgcccacacuaaauaugagcg

SEQ ID NO: 605772 - RNA, 22 nt, Human
aauagcugauuaauguacuacc

SEQ ID NO: 605773 - RNA, 22 nt, Human
uucuccagaccacugccucugu

SEQ ID NO: 605774 - RNA, 22 nt, Human
uuuagcuugaaucuuguuuaaa

SEQ ID NO: 605775 - RNA, 22 nt, Human
caguaggaaggaugcagaaaaa

SEQ ID NO: 605776 - RNA, 22 nt, Human
ucuuauaaucucuauuuuaaug

SEQ ID NO: 605777 - RNA, 22 nt, Human
augccugcuuacuccaggugcu

SEQ ID NO: 605778 - RNA, 22 nt, Human
aaaaccaggcuugcugugcucg

SEQ ID NO: 605779 - RNA, 22 nt, Human
uggcccagcugcagauggugga

SEQ ID NO: 605780 - RNA, 22 nt, Human
caggguggaagcuguagagugg

SEQ ID NO: 605781 - RNA, 22 nt, Human
uccugcaggccuguucccagua

SEQ ID NO: 605782 - RNA, 22 nt, Human
aggcacugugcuucuuauaugu

SEQ ID NO: 605783 - RNA, 22 nt, Human
ccuggcugccgagugugcagcg

SEQ ID NO: 605784 - RNA, 19 nt, Human
ucugaggcuucuccccuug

SEQ ID NO: 605785 - RNA, 22 nt, Human
ugcaggugugugcaagggaggg

SEQ ID NO: 605786 - RNA, 22 nt, Human
aacauacuuauacuaaauaaug

SEQ ID NO: 605787 - RNA, 22 nt, Human
cacagcuucccaaaguggaccu

SEQ ID NO: 605788 - RNA, 22 nt, Human
ucugugugauuucagggaaguc

SEQ ID NO: 605789 - RNA, 22 nt, Human
uacuguacauuccguuuguugc

SEQ ID NO: 605790 - RNA, 22 nt, Human
uauaagugacagauuauccaaa

SEQ ID NO: 605791 - RNA, 22 nt, Human
ccugcagggaaucgaggcagaa

SEQ ID NO: 605792 - RNA, 22 nt, Human
auauuaaauggauuuugggagc

SEQ ID NO: 605793 - RNA, 17 nt, Human
gcccaggaaggacggcc

SEQ ID NO: 605794 - RNA, 22 nt, Human
ggagcagccgcgucucagggca

SEQ ID NO: 605795 - RNA, 22 nt, Human
gccaggcuaagaaaggugugau

SEQ ID NO: 605796 - RNA, 22 nt, Human
cuuccuagugucuacuuuggag

SEQ ID NO: 605797 - RNA, 22 nt, Human
gcugcucuggcucugcaguguc

SEQ ID NO: 605798 - RNA, 22 nt, Human
uccaggcugugcaugaguuuag

SEQ ID NO: 605799 - RNA, 22 nt, Human
gugcccugaugcaauugucuca

SEQ ID NO: 605800 - RNA, 22 nt, Human
uauuaugaggggcagagggcau

SEQ ID NO: 605801 - RNA, 22 nt, Human
uagcugcccaucuuuccuuuag

SEQ ID NO: 605802 - RNA, 22 nt, Human
auguaguuuggggcuagauuua

SEQ ID NO: 605803 - RNA, 22 nt, Human
cagcucuuuuucacacaacaug

SEQ ID NO: 605804 - RNA, 22 nt, Human
ucugucacucccugaugaugaa

SEQ ID NO: 605805 - RNA, 22 nt, Human
aggaaugauaguaaaagagaau

SEQ ID NO: 605806 - RNA, 22 nt, Human
cauaauuucacugucguauggc

SEQ ID NO: 605807 - RNA, 22 nt, Human
aauuccauccauuuguuucaac

SEQ ID NO: 605808 - RNA, 22 nt, Human
cagcuuugauucuuucugccau

SEQ ID NO: 605809 - RNA, 22 nt, Human
ugaggacaugagugggacagag

SEQ ID NO: 605810 - RNA, 20 nt, Human
gaaacauuggcagcaacuga

SEQ ID NO: 605811 - RNA, 22 nt, Human
uccagaaaauucagaaauuguu

SEQ ID NO: 605812 - RNA, 22 nt, Human
uaauggaaguuaaauaugguau

SEQ ID NO: 605813 - RNA, 22 nt, Human
gggccugaaaccuucagggcuu

SEQ ID NO: 605814 - RNA, 22 nt, Human
auacagcuuaugcauauaucuc

SEQ ID NO: 605815 - RNA, 22 nt, Human
gccuggcagggcccggacggca

SEQ ID NO: 605816 - RNA, 21 nt, Human
agaggaagugauuggucuggc

SEQ ID NO: 605817 - RNA, 22 nt, Human
ugaagccauaggacagaggaua

SEQ ID NO: 605818 - RNA, 23 nt, Human
cuauggaauaccaaugauucuca

SEQ ID NO: 605819 - RNA, 22 nt, Human
cuucucggccguguggaugcgc

SEQ ID NO: 605820 - RNA, 22 nt, Human
agagacagaggcaauauagcuu

SEQ ID NO: 605821 - RNA, 22 nt, Human
auacaaugggugcaaagaugug

SEQ ID NO: 605822 - RNA, 15 nt, Human
uacauucauuuccac

SEQ ID NO: 605823 - RNA, 22 nt, Human
ccuggagauuucuucaagcuuu

SEQ ID NO: 605824 - RNA, 22 nt, Human
acucucucacacacgccuauau

SEQ ID NO: 605825 - RNA, 22 nt, Human
cugaguccuugggcuuagagug

SEQ ID NO: 605826 - RNA, 22 nt, Human
gaggccuguagucauggaugua

SEQ ID NO: 605827 - RNA, 19 nt, Human
uggcauugguccagauaaa

SEQ ID NO: 605828 - RNA, 22 nt, Human
guauuagcuguuagcuacauca

SEQ ID NO: 605829 - RNA, 22 nt, Human
uaccauuugagagagaacauaa

SEQ ID NO: 605830 - RNA, 22 nt, Human
gguuccaccuggcgagggguau

SEQ ID NO: 605831 - RNA, 22 nt, Human
aauaguguauuuuucaaaauua

SEQ ID NO: 605832 - RNA, 22 nt, Human
cagggcacuuaaauugccucgu

SEQ ID NO: 605833 - RNA, 22 nt, Human
ucucauuuggcuuuguuuuaaa

SEQ ID NO: 605834 - RNA, 22 nt, Human
ugaaugauuaaaacccggacua

SEQ ID NO: 605835 - RNA, 22 nt, Human
ugggccacacacagaagaauca

SEQ ID NO: 605836 - RNA, 22 nt, Human
agaugguagguggcaggacuga

SEQ ID NO: 605837 - RNA, 21 nt, Human
aucucacagcccagagaagcc

SEQ ID NO: 605838 - RNA, 22 nt, Human
cugggucugugcccagggaccu

SEQ ID NO: 605839 - RNA, 22 nt, Human
cagagacaggaaucagcugcag

SEQ ID NO: 605840 - RNA, 22 nt, Human
gugaagcauaacugaaggauuu

SEQ ID NO: 605841 - RNA, 22 nt, Human
uggaacacaucucgcugcaggg

SEQ ID NO: 605842 - RNA, 22 nt, Human
uuccccaggugauucucauggc

SEQ ID NO: 605843 - RNA, 22 nt, Human
ucagccuuguggcccugcucca

SEQ ID NO: 605844 - RNA, 22 nt, Human
cccgagccucgguuucuuuucu

SEQ ID NO: 605845 - RNA, 22 nt, Human
ucuagaaaguuuguacugauuu

SEQ ID NO: 605846 - RNA, 22 nt, Human
cuccugucagaagcauccugag

SEQ ID NO: 605847 - RNA, 22 nt, Human
gagggcuccauuccccgugccc

SEQ ID NO: 605848 - RNA, 22 nt, Human
ucuuccuuuuguaccuucugaa

SEQ ID NO: 605849 - RNA, 23 nt, Human
cuagaauuuugcuaaaagacuag

SEQ ID NO: 605850 - RNA, 22 nt, Human
gugccucugagcucugcuacag

SEQ ID NO: 605851 - RNA, 22 nt, Human
acagccuguguaccagcuggga

SEQ ID NO: 605852 - RNA, 22 nt, Human
guguggggucuucucuuggccu

SEQ ID NO: 605853 - RNA, 22 nt, Human
aacaugaugacauuguaagcuu

SEQ ID NO: 605854 - RNA, 22 nt, Human
acaguggaaaugugggagggga

SEQ ID NO: 605855 - RNA, 22 nt, Human
cugcugggccuggucucugagg

SEQ ID NO: 605856 - RNA, 22 nt, Human
gcugggcaggccucgugagggc

SEQ ID NO: 605857 - RNA, 22 nt, Human
guuggugaguuucugaucacaa

SEQ ID NO: 605858 - RNA, 22 nt, Human
gggccugugcacaguucuguua

SEQ ID NO: 605859 - RNA, 22 nt, Human
aucuucaacaacaaauugccuc

SEQ ID NO: 605860 - RNA, 22 nt, Human
gaauuucaaaagccagaacggg

SEQ ID NO: 605861 - RNA, 22 nt, Human
auuuaugauagcugcauuaaag

SEQ ID NO: 605862 - RNA, 22 nt, Human
ggcagacuguaauaggagaauu

SEQ ID NO: 605863 - RNA, 22 nt, Human
ugaggcagcccacuuuccuuag

SEQ ID NO: 605864 - RNA, 22 nt, Human
cuaaacaggaaggagcaccuga

SEQ ID NO: 605865 - RNA, 22 nt, Human
ucuguuuccucuuguguaaagu

SEQ ID NO: 605866 - RNA, 22 nt, Human
auaacuuaaugggucaugcucu

SEQ ID NO: 605867 - RNA, 22 nt, Human
ccucaggcucugggugccuacc

SEQ ID NO: 605868 - RNA, 22 nt, Human
ugguccuucucugccugcagug

SEQ ID NO: 605869 - RNA, 22 nt, Human
ggcuuccuaucccaucugagug

SEQ ID NO: 605870 - RNA, 18 nt, Human
aacuaaagaucuuuaagc

SEQ ID NO: 605871 - RNA, 22 nt, Human
cuguacaggucaaugauaagau

SEQ ID NO: 605872 - RNA, 22 nt, Human
ugggcugaguggcagccagagu

SEQ ID NO: 605873 - RNA, 22 nt, Human
uaaagccauacugaaagccacu

SEQ ID NO: 605874 - RNA, 22 nt, Human
cugccuagggucugguaccaca

SEQ ID NO: 605875 - RNA, 22 nt, Human
uuccuaaugucuacuuuaguuc

SEQ ID NO: 605876 - RNA, 22 nt, Human
ccuggugcugcuaucaggggua

SEQ ID NO: 605877 - RNA, 22 nt, Human
gccaguggcaugcggcagggac

SEQ ID NO: 605878 - RNA, 23 nt, Human
agugagcagcuguagggcaagga

SEQ ID NO: 605879 - RNA, 22 nt, Human
acagggcuauauuccucagagc

SEQ ID NO: 605880 - RNA, 22 nt, Human
caggccaggguugagaagagaa

SEQ ID NO: 605881 - RNA, 22 nt, Human
aaguuacauauucuugggcuau

SEQ ID NO: 605882 - RNA, 22 nt, Human
uguuuaauuucacaaaguugac

SEQ ID NO: 605883 - RNA, 22 nt, Human
ggucccugguucccucugagcu

SEQ ID NO: 605884 - RNA, 23 nt, Human
aggcagcagguuguccaggguga

SEQ ID NO: 605885 - RNA, 22 nt, Human
gcugaggccaggccccaccgga

SEQ ID NO: 605886 - RNA, 22 nt, Human
cuaguucuuaacuguuaugauu

SEQ ID NO: 605887 - RNA, 19 nt, Human
ucuucccuggcugucaguc

SEQ ID NO: 605888 - RNA, 22 nt, Human
gagcucuguguggcuugggugg

SEQ ID NO: 605889 - RNA, 22 nt, Human
uguguucugaaggagaagagug

SEQ ID NO: 605890 - RNA, 22 nt, Human
ggccaggcuggucucagacuuc

SEQ ID NO: 605891 - RNA, 22 nt, Human
acauucaagaugcauucacuua

SEQ ID NO: 605892 - RNA, 22 nt, Human
gaggagggcaguuccucuuuua

SEQ ID NO: 605893 - RNA, 21 nt, Human
uggcugacucuuccuaucauu

SEQ ID NO: 605894 - RNA, 22 nt, Human
gccuggaguacuccuugaagug

SEQ ID NO: 605895 - RNA, 22 nt, Human
ggacccagguagggaggaagau

SEQ ID NO: 605896 - RNA, 22 nt, Human
cagguuccaguugcagggacuu

SEQ ID NO: 605897 - RNA, 22 nt, Human
gggcugggauugcuugcuguga

SEQ ID NO: 605898 - RNA, 22 nt, Human
ucaguuaccugacagugguuau

SEQ ID NO: 605899 - RNA, 22 nt, Human
ucugaagacauaugauauggug

SEQ ID NO: 605900 - RNA, 22 nt, Human
ugaccaaagaguugcuuguauu

SEQ ID NO: 605901 - RNA, 22 nt, Human
ugggguagguaugaaaacuagg

SEQ ID NO: 605902 - RNA, 22 nt, Human
aguucugauaaaggaggaagau

SEQ ID NO: 605903 - RNA, 22 nt, Human
cgagaguggacagggcgcagcu

SEQ ID NO: 605904 - RNA, 22 nt, Human
auuuucagaacauucauucacu

SEQ ID NO: 605905 - RNA, 22 nt, Human
ugagcuggucacuccuucugaa

SEQ ID NO: 605906 - RNA, 22 nt, Human
ugcaaaauaaugaacgauuuuu

SEQ ID NO: 605907 - RNA, 22 nt, Human
aagaugcaugcugaagcuggcu

SEQ ID NO: 605908 - RNA, 22 nt, Human
agggccaguaccaggugggugg

SEQ ID NO: 605909 - RNA, 22 nt, Human
acacaguaucaaauuucaucuu

SEQ ID NO: 605910 - RNA, 22 nt, Human
gaggucaggcucaagcugggcc

SEQ ID NO: 605911 - RNA, 22 nt, Human
gucuuucuuaauucaagugcuu

SEQ ID NO: 605912 - RNA, 22 nt, Human
aagacauuggcauugacuguaa

SEQ ID NO: 605913 - RNA, 22 nt, Human
gguagcguuaucaauuugagug

SEQ ID NO: 605914 - RNA, 22 nt, Human
aaguuccucaaauaaaacauga

SEQ ID NO: 605915 - RNA, 22 nt, Human
acccaggguagagugcaguggc

SEQ ID NO: 605916 - RNA, 22 nt, Human
caugcuaauuaauuccaccugc

SEQ ID NO: 605917 - RNA, 22 nt, Human
caggggcaagaaugcugucagc

SEQ ID NO: 605918 - RNA, 22 nt, Human
gcuaggugcagcagacagcuua

SEQ ID NO: 605919 - RNA, 22 nt, Human
ugcaugauagagaugguauuag

SEQ ID NO: 605920 - RNA, 22 nt, Human
uuguuagcaugcuuaauggaua

SEQ ID NO: 605921 - RNA, 22 nt, Human
cuguagcaaguuauucaauaaa

SEQ ID NO: 605922 - RNA, 22 nt, Human
uugcccugucucacuauguuaa

SEQ ID NO: 605923 - RNA, 21 nt, Human
uauuuccaacccuuuauccuu

SEQ ID NO: 605924 - RNA, 22 nt, Human
uggccaccccuuucucugcacu

SEQ ID NO: 605925 - RNA, 22 nt, Human
gugggccuugcagggugcaggg

SEQ ID NO: 605926 - RNA, 22 nt, Human
aaugcuuauggguuccauaaua

SEQ ID NO: 605927 - RNA, 20 nt, Human
aggcacuggggauagguaag

SEQ ID NO: 605928 - RNA, 22 nt, Human
acacuagagagcaggcauuccc

SEQ ID NO: 605929 - RNA, 22 nt, Human
aauaagcugcuaggaacuuagu

SEQ ID NO: 605930 - RNA, 22 nt, Human
ucaggagcugugaauacaaagg

SEQ ID NO: 605931 - RNA, 22 nt, Human
ccagcuccaaguuugggcauca

SEQ ID NO: 605932 - RNA, 22 nt, Human
cuucucaaacugagacugucua

SEQ ID NO: 605933 - RNA, 22 nt, Human
ugggcuuccuggagccugugcu

SEQ ID NO: 605934 - RNA, 22 nt, Human
cuuugcagcaauuucuguuaaa

SEQ ID NO: 605935 - RNA, 22 nt, Human
gcauuuuaauaagauucauagg

SEQ ID NO: 605936 - RNA, 17 nt, Human
aaacuggggucaggagc

SEQ ID NO: 605937 - RNA, 22 nt, Human
uaaugcuucuguuaggaucuuc

SEQ ID NO: 605938 - RNA, 22 nt, Human
aaggaggaauucugaguucaug

SEQ ID NO: 605939 - RNA, 22 nt, Human
cagcucuucagugccugagaua

SEQ ID NO: 605940 - RNA, 22 nt, Human
ugagcaggcgcagcaggagguc

SEQ ID NO: 605941 - RNA, 22 nt, Human
ggacagagcccugguggccuaa

SEQ ID NO: 605942 - RNA, 22 nt, Human
ccugcagguccccggaugcgca

SEQ ID NO: 605943 - RNA, 22 nt, Human
cuuagcuuuguccuaggucucu

SEQ ID NO: 605944 - RNA, 22 nt, Human
aaaaggcagugcaagagagggu

SEQ ID NO: 605945 - RNA, 22 nt, Human
uaugcuuuacuuuucauuguga

SEQ ID NO: 605946 - RNA, 22 nt, Human
uucaguuugaauucuguagaac

SEQ ID NO: 605947 - RNA, 22 nt, Human
uggaaggagcuaaggaccuggg

SEQ ID NO: 605948 - RNA, 22 nt, Human
auuuucacccugaauauauuga

SEQ ID NO: 605949 - RNA, 22 nt, Human
gucacaugccagugcacacagg

SEQ ID NO: 605950 - RNA, 22 nt, Human
agagguagagguugcagugagc

SEQ ID NO: 605951 - RNA, 22 nt, Human
uguauuaacauuaauaaaaugg

SEQ ID NO: 605952 - RNA, 22 nt, Human
agagccuggcaaaagguccugc

SEQ ID NO: 605953 - RNA, 22 nt, Human
agccagagagccccagguucua

SEQ ID NO: 605954 - RNA, 18 nt, Human
uguuaaggauccaguagu

SEQ ID NO: 605955 - RNA, 22 nt, Human
ucucagaaaaacuuugagggua

SEQ ID NO: 605956 - RNA, 22 nt, Human
ccagaagucaggaaugagucuu

SEQ ID NO: 605957 - RNA, 22 nt, Human
uggcagcaauuugugauguuga

SEQ ID NO: 605958 - RNA, 22 nt, Human
aauguaaacagcaagagaaggg

SEQ ID NO: 605959 - RNA, 22 nt, Human
gccuguuuguuugcaaaggagc

SEQ ID NO: 605960 - RNA, 22 nt, Human
cccagggauguggcagauguua

SEQ ID NO: 605961 - RNA, 22 nt, Human
caaagacugcauaacacaugaa

SEQ ID NO: 605962 - RNA, 22 nt, Human
uacugcuuguuagcuguauuug

SEQ ID NO: 605963 - RNA, 22 nt, Human
ucugaaauccuuuaucuuggcu

SEQ ID NO: 605964 - RNA, 22 nt, Human
gggaaacuuucacaauguccag

SEQ ID NO: 605965 - RNA, 22 nt, Human
aggcaauuguuuguguaauagg

SEQ ID NO: 605966 - RNA, 22 nt, Human
uuaaaugaugcauaucauuuag

SEQ ID NO: 605967 - RNA, 22 nt, Human
auggaagcagaccggaggaaua

SEQ ID NO: 605968 - RNA, 22 nt, Human
ggucccuggggaacuaggcugu

SEQ ID NO: 605969 - RNA, 23 nt, Human
ugcaggcuaggaagagagccuuc

SEQ ID NO: 605970 - RNA, 22 nt, Human
uccagagccuauauguucaacu

SEQ ID NO: 605971 - RNA, 22 nt, Human
acauuauaguugcuacagagua

SEQ ID NO: 605972 - RNA, 22 nt, Human
uggagaagucaaagugaacagg

SEQ ID NO: 605973 - RNA, 22 nt, Human
uacacuuuuuacuacagauucu

SEQ ID NO: 605974 - RNA, 22 nt, Human
cccagcucugcagaccugcccu

SEQ ID NO: 605975 - RNA, 22 nt, Human
auuaguguucuuaucuucuagg

SEQ ID NO: 605976 - RNA, 22 nt, Human
gcuguggcucucacaagcaaau

SEQ ID NO: 605977 - RNA, 22 nt, Human
caugcggcucuuuccaaaccgg

SEQ ID NO: 605978 - RNA, 22 nt, Human
ugccuccauguuucagcaucua

SEQ ID NO: 605979 - RNA, 22 nt, Human
ggcuccuguccccucagcugcu

SEQ ID NO: 605980 - RNA, 22 nt, Human
agggcugagugggagagaguug

SEQ ID NO: 605981 - RNA, 22 nt, Human
caggacugaagggcacagggaa

SEQ ID NO: 605982 - RNA, 22 nt, Human
uccccucccuuccaacagagcu

SEQ ID NO: 605983 - RNA, 22 nt, Human
aacaguuuccugacuccuauga

SEQ ID NO: 605984 - RNA, 22 nt, Human
auguuauaguuauaaaaugagg

SEQ ID NO: 605985 - RNA, 22 nt, Human
augcuguuauucuaauguguga

SEQ ID NO: 605986 - RNA, 22 nt, Human
uggcuucauucagcaugacagu

SEQ ID NO: 605987 - RNA, 22 nt, Human
cagggccugcuuccuucuuguu

SEQ ID NO: 605988 - RNA, 22 nt, Human
aagaauuauugcaauacuagau

SEQ ID NO: 605989 - RNA, 22 nt, Human
acagaguuguguuuguacaacg

SEQ ID NO: 605990 - RNA, 18 nt, Human
auaucagcuacuucaugg

SEQ ID NO: 605991 - RNA, 22 nt, Human
ucaaaguaaaaguauagaguuu

SEQ ID NO: 605992 - RNA, 22 nt, Human
uguuuacacuucaagguuaagg

SEQ ID NO: 605993 - RNA, 23 nt, Human
auagaaacuaacaauuuggcuua

SEQ ID NO: 605994 - RNA, 22 nt, Human
aaauccuuuggaggacaugaug

SEQ ID NO: 605995 - RNA, 22 nt, Human
cccagcauggagugaggacuca

SEQ ID NO: 605996 - RNA, 22 nt, Human
aggcaggauugcugacaacaau

SEQ ID NO: 605997 - RNA, 22 nt, Human
gauauuuucauucggaugcuca

SEQ ID NO: 605998 - RNA, 22 nt, Human
uuccucagacccucauugugag

SEQ ID NO: 605999 - RNA, 22 nt, Human
gcuaggucugugcgcagccgcu

SEQ ID NO: 606000 - RNA, 22 nt, Human
aaucaacugagcccugguucuc

SEQ ID NO: 606001 - RNA, 23 nt, Human
acagggcuuaucugucacucauc

SEQ ID NO: 606002 - RNA, 22 nt, Human
guggcaguggagacccgagccu

SEQ ID NO: 606003 - RNA, 22 nt, Human
uuucccuacuuguaacuggaaa

SEQ ID NO: 606004 - RNA, 22 nt, Human
aacacaaucuuccaguuugcug

SEQ ID NO: 606005 - RNA, 22 nt, Human
caggcagcaucagucugcugua

SEQ ID NO: 606006 - RNA, 22 nt, Human
aacaaguaaguuuauauauauu

SEQ ID NO: 606007 - RNA, 22 nt, Human
aaauagagcuggguuaaacuuu

SEQ ID NO: 606008 - RNA, 22 nt, Human
gccaggcucagcagucaaccug

SEQ ID NO: 606009 - RNA, 22 nt, Human
gcuguccaugucuggccucagu

SEQ ID NO: 606010 - RNA, 22 nt, Human
gaaggagagggucaaggauaau

SEQ ID NO: 606011 - RNA, 22 nt, Human
gggcucaguucugcuucaugcu

SEQ ID NO: 606012 - RNA, 22 nt, Human
aaaugcauuucacuaauguuuc

SEQ ID NO: 606013 - RNA, 22 nt, Human
ccuccccacgggcagccggcgc

SEQ ID NO: 606014 - RNA, 22 nt, Human
uggcacaguccugggugccugc

SEQ ID NO: 606015 - RNA, 22 nt, Human
gcaaacauuuggucuagugugu

SEQ ID NO: 606016 - RNA, 23 nt, Human
ucccugagcuggagagacugcac

SEQ ID NO: 606017 - RNA, 22 nt, Human
ccuggagugacagguguagccu

SEQ ID NO: 606018 - RNA, 22 nt, Human
aaagaacaaauuagcuguuuua

SEQ ID NO: 606019 - RNA, 22 nt, Human
gauggaagaaaaaugcaugucu

SEQ ID NO: 606020 - RNA, 22 nt, Human
ccugucuguuugcccauucuug

SEQ ID NO: 606021 - RNA, 22 nt, Human
ccagccuggacugggucuugug

SEQ ID NO: 606022 - RNA, 22 nt, Human
auccaggaaggauggcauugag

SEQ ID NO: 606023 - RNA, 22 nt, Human
aucugaaagcuaggaguucuca

SEQ ID NO: 606024 - RNA, 22 nt, Human
gacauuuaaggcagucacuuaa

SEQ ID NO: 606025 - RNA, 22 nt, Human
uggcagagaacacacaugauuc

SEQ ID NO: 606026 - RNA, 22 nt, Human
aaauagauuucucuggguuugu

SEQ ID NO: 606027 - RNA, 22 nt, Human
cugggaggcaccgcgucgugcu

SEQ ID NO: 606028 - RNA, 22 nt, Human
uguacuugcuuauuagaaaucu

SEQ ID NO: 606029 - RNA, 22 nt, Human
gacagacaggugugguaggcac

SEQ ID NO: 606030 - RNA, 22 nt, Human
gugagaguguuuggaaauagaa

SEQ ID NO: 606031 - RNA, 22 nt, Human
ccacuuugaaccacugaggugg

SEQ ID NO: 606032 - RNA, 22 nt, Human
agggcuaggaauggaacuggag

SEQ ID NO: 606033 - RNA, 22 nt, Human
aauuuuaugccuugcacguugg

SEQ ID NO: 606034 - RNA, 22 nt, Human
ccuucugucucccucauauuga

SEQ ID NO: 606035 - RNA, 22 nt, Human
uccucuugggaauaccuuucua

SEQ ID NO: 606036 - RNA, 22 nt, Human
uacacagauaugugaucaauca

SEQ ID NO: 606037 - RNA, 22 nt, Human
gaggcugaacagguucucauga

SEQ ID NO: 606038 - RNA, 22 nt, Human
gccugagcaggcguggaccaug

SEQ ID NO: 606039 - RNA, 22 nt, Human
aguugcucaauguggcugugga

SEQ ID NO: 606040 - RNA, 22 nt, Human
ccugccugcaaaaugggacaag

SEQ ID NO: 606041 - RNA, 22 nt, Human
ugcaggggcuugucugggccug

SEQ ID NO: 606042 - RNA, 21 nt, Human
aagagcuggaucaaggauaag

SEQ ID NO: 606043 - RNA, 22 nt, Human
uacuuucuuucccaagaggugg

SEQ ID NO: 606044 - RNA, 22 nt, Human
auggacaaugugaaacuacaag

SEQ ID NO: 606045 - RNA, 22 nt, Human
uggaacaaaauauuuauguuug

SEQ ID NO: 606046 - RNA, 22 nt, Human
uaccaaaaagugagccccagag

SEQ ID NO: 606047 - RNA, 16 nt, Human
agguggagaaguucac

SEQ ID NO: 606048 - RNA, 22 nt, Human
aaacacaccuuuggaacuguga

SEQ ID NO: 606049 - RNA, 20 nt, Human
aagagaagaagucuuugaaa

SEQ ID NO: 606050 - RNA, 22 nt, Human
ugcaccuuuaaauucagcagua

SEQ ID NO: 606051 - RNA, 22 nt, Human
agacauauggugaaacauuuua

SEQ ID NO: 606052 - RNA, 22 nt, Human
ucugagcuacgaugccugucac

SEQ ID NO: 606053 - RNA, 22 nt, Human
cugucucugucuuaacucccag

SEQ ID NO: 606054 - RNA, 22 nt, Human
ugugcccaucucccagcuugac

SEQ ID NO: 606055 - RNA, 22 nt, Human
gggcugagaaguugaucccaag

SEQ ID NO: 606056 - RNA, 22 nt, Human
aaguuaagggucccagucuguu

SEQ ID NO: 606057 - RNA, 22 nt, Human
ucuggggagucaaagagaccug

SEQ ID NO: 606058 - RNA, 22 nt, Human
cagcucugaagaaaggugucua

SEQ ID NO: 606059 - RNA, 22 nt, Human
ccagggcaggagaaagacucac

SEQ ID NO: 606060 - RNA, 22 nt, Human
gcauucaucaaaaauguuccuc

SEQ ID NO: 606061 - RNA, 22 nt, Human
auugcugaaaguauuuuaugac

SEQ ID NO: 606062 - RNA, 20 nt, Human
aaugucuugagacauuucag

SEQ ID NO: 606063 - RNA, 22 nt, Human
gagagcuguaauagucaugucu

SEQ ID NO: 606064 - RNA, 22 nt, Human
auauggaaauagcaauaugguu

SEQ ID NO: 606065 - RNA, 17 nt, Human
gcaagggaugggagauu

SEQ ID NO: 606066 - RNA, 20 nt, Human
uucugcuugcaaauaucaag

SEQ ID NO: 606067 - RNA, 22 nt, Human
cuaggcugugcauugcaugaca

SEQ ID NO: 606068 - RNA, 22 nt, Human
uuuacaaggcagaacugauuaa

SEQ ID NO: 606069 - RNA, 22 nt, Human
uagaggcuucuacugcucacuu

SEQ ID NO: 606070 - RNA, 22 nt, Human
ugaaaucuacccuauucagggu

SEQ ID NO: 606071 - RNA, 22 nt, Human
aggugagggugccagugcaugg

SEQ ID NO: 606072 - RNA, 22 nt, Human
aacagcuuuuuuggucagcauu

SEQ ID NO: 606073 - RNA, 22 nt, Human
cugaggucucuuuccauaguga

SEQ ID NO: 606074 - RNA, 22 nt, Human
ucccucacugguucugcauccc

SEQ ID NO: 606075 - RNA, 22 nt, Human
aaagaucagucugaagcaacau

SEQ ID NO: 606076 - RNA, 22 nt, Human
ggagcuggucagccuugagcau

SEQ ID NO: 606077 - RNA, 22 nt, Human
acucucugucuaaaugcaguuu

SEQ ID NO: 606078 - RNA, 22 nt, Human
uagcuuaaggaguaccagauca

SEQ ID NO: 606079 - RNA, 22 nt, Human
cccaagccagacccugacccug

SEQ ID NO: 606080 - RNA, 22 nt, Human
acauuuuucuaggaggcaaggu

SEQ ID NO: 606081 - RNA, 22 nt, Human
augcugaacugagauguaacuu

SEQ ID NO: 606082 - RNA, 22 nt, Human
aaauagaauuggaagcagaguu

SEQ ID NO: 606083 - RNA, 22 nt, Human
ucacuggguaggacaugcugau

SEQ ID NO: 606084 - RNA, 23 nt, Human
acaacaggaaaucagaccugaac

SEQ ID NO: 606085 - RNA, 22 nt, Human
auaaucuuguauuuccuaaagu

SEQ ID NO: 606086 - RNA, 22 nt, Human
ggcccugggacacaacaccgaa

SEQ ID NO: 606087 - RNA, 19 nt, Human
gggacuggaggauguggag

SEQ ID NO: 606088 - RNA, 22 nt, Human
gcugcagaucccacccauuccc

SEQ ID NO: 606089 - RNA, 22 nt, Human
aggaauaaccucauugcuuuuu

SEQ ID NO: 606090 - RNA, 22 nt, Human
uacugcuagaugaaaauguagg

SEQ ID NO: 606091 - RNA, 20 nt, Human
uuacagaaaugauguuauuu

SEQ ID NO: 606092 - RNA, 22 nt, Human
aaacaugcauucaagaaaaucu

SEQ ID NO: 606093 - RNA, 22 nt, Human
ccucccacuucuugcugagguc

SEQ ID NO: 606094 - RNA, 22 nt, Human
aaagcagcagcacguggaagag

SEQ ID NO: 606095 - RNA, 22 nt, Human
gcagccugaggcccuuucuggc

SEQ ID NO: 606096 - RNA, 22 nt, Human
agucauuuugccagucuucagg

SEQ ID NO: 606097 - RNA, 22 nt, Human
uucaguuuguuugacuguuaga

SEQ ID NO: 606098 - RNA, 22 nt, Human
aggucugaguagagaaaaggca

SEQ ID NO: 606099 - RNA, 22 nt, Human
gggaguggggcuuaccuugaag

SEQ ID NO: 606100 - RNA, 22 nt, Human
ugagccugcaauaagcacagcc

SEQ ID NO: 606101 - RNA, 22 nt, Human
cuggagcucagcccagguucca

SEQ ID NO: 606102 - RNA, 22 nt, Human
cugcuuuaaaacugauacauga

SEQ ID NO: 606103 - RNA, 22 nt, Human
ccucgaccuccccaggcucagg

SEQ ID NO: 606104 - RNA, 22 nt, Human
gacaggaagucugaaggaggga

SEQ ID NO: 606105 - RNA, 19 nt, Human
ccagcagaagccacuccug

SEQ ID NO: 606106 - RNA, 22 nt, Human
auuauuuagaaaucgauugaaa

SEQ ID NO: 606107 - RNA, 22 nt, Human
uccuggcuuuucuuggcucauc

SEQ ID NO: 606108 - RNA, 22 nt, Human
acaggccugagauuuugcauuu

SEQ ID NO: 606109 - RNA, 22 nt, Human
acucauguuuucucuagcugga

SEQ ID NO: 606110 - RNA, 22 nt, Human
auuuacauuccauggugguuac

SEQ ID NO: 606111 - RNA, 23 nt, Human
cugaggccugcugcguucagguu

SEQ ID NO: 606112 - RNA, 22 nt, Human
ggguggggcccaggaaaucuau

SEQ ID NO: 606113 - RNA, 23 nt, Human
uagaauccucugagauggaauag

SEQ ID NO: 606114 - RNA, 22 nt, Human
acugaguuauggguaugccuug

SEQ ID NO: 606115 - RNA, 18 nt, Human
uccagcgugcuccagggc

SEQ ID NO: 606116 - RNA, 22 nt, Human
uccugagggcgauucagcaggu

SEQ ID NO: 606117 - RNA, 22 nt, Human
auuccuuguuucacugaaaagg

SEQ ID NO: 606118 - RNA, 22 nt, Human
cucccucagaggagcaccuguu

SEQ ID NO: 606119 - RNA, 22 nt, Human
gggcagccucggugccugcugc

SEQ ID NO: 606120 - RNA, 22 nt, Human
uuuucuaacaucuaguaauuug

SEQ ID NO: 606121 - RNA, 22 nt, Human
cagacaggguggguuucugggc

SEQ ID NO: 606122 - RNA, 22 nt, Human
uaaugccacggcagggaacagc

SEQ ID NO: 606123 - RNA, 22 nt, Human
acagcugggaacucacacagca

SEQ ID NO: 606124 - RNA, 22 nt, Human
ucauuccauuuccagcucugaa

SEQ ID NO: 606125 - RNA, 22 nt, Human
ugggagcaguugugaagcucag

SEQ ID NO: 606126 - RNA, 22 nt, Human
gggcuggagacaagugagccgc

SEQ ID NO: 606127 - RNA, 22 nt, Human
cuucuuggugauggcuuaccug

SEQ ID NO: 606128 - RNA, 22 nt, Human
ugaccacauugauuucucaucc

SEQ ID NO: 606129 - RNA, 22 nt, Human
uggaaaggaggcuuguggaaua

SEQ ID NO: 606130 - RNA, 22 nt, Human
cacagggaggcggucacuggcu

SEQ ID NO: 606131 - RNA, 22 nt, Human
augcauauuucaugaaucuuug

SEQ ID NO: 606132 - RNA, 22 nt, Human
gaggagcugggacccugucauc

SEQ ID NO: 606133 - RNA, 22 nt, Human
uuuucauuguuccucgagcauu

SEQ ID NO: 606134 - RNA, 22 nt, Human
ucaggcuggggugcuaaggugu

SEQ ID NO: 606135 - RNA, 22 nt, Human
cucccaggugucccuucugcca

SEQ ID NO: 606136 - RNA, 22 nt, Human
acccaggcgggagugcaguguc

SEQ ID NO: 606137 - RNA, 22 nt, Human
aaaugugcaugagucagaagug

SEQ ID NO: 606138 - RNA, 22 nt, Human
uccuggggcucaugggauuugu

SEQ ID NO: 606139 - RNA, 23 nt, Human
ugugggaauguuggagaggaaac

SEQ ID NO: 606140 - RNA, 22 nt, Human
uuccccagggaagcuccugcgc

SEQ ID NO: 606141 - RNA, 22 nt, Human
agaaugcucuucaaaaucuagc

SEQ ID NO: 606142 - RNA, 22 nt, Human
cugaggcaggggcagcuggaga

SEQ ID NO: 606143 - RNA, 19 nt, Human
cugaggcaaguggugguca

SEQ ID NO: 606144 - RNA, 22 nt, Human
cacacacugacaccuuaucuug

SEQ ID NO: 606145 - RNA, 22 nt, Human
uugcugaaggccucuugggguu

SEQ ID NO: 606146 - RNA, 22 nt, Human
uggcagcuugaaugcagucuuu

SEQ ID NO: 606147 - RNA, 22 nt, Human
cccaauaaaauucauuuucauu

SEQ ID NO: 606148 - RNA, 22 nt, Human
uucuuacauauuuucauauggu

SEQ ID NO: 606149 - RNA, 18 nt, Human
agcuugccucaagcuuuu

SEQ ID NO: 606150 - RNA, 22 nt, Human
guggaacauguccauauacauu

SEQ ID NO: 606151 - RNA, 22 nt, Human
aguccuggcauauagguccuca

SEQ ID NO: 606152 - RNA, 22 nt, Human
cucccucaggccuuagcccugc

SEQ ID NO: 606153 - RNA, 22 nt, Human
aguuauaaucugcuacugauau

SEQ ID NO: 606154 - RNA, 22 nt, Human
auagggcagucaggccgccacu

SEQ ID NO: 606155 - RNA, 22 nt, Human
uuaguuaauugacuauguugca

SEQ ID NO: 606156 - RNA, 22 nt, Human
cugcauccauguugcugcaaag

SEQ ID NO: 606157 - RNA, 22 nt, Human
auucugcacuuccuuugcuucc

SEQ ID NO: 606158 - RNA, 22 nt, Human
ugagugagcuggggagccggug

SEQ ID NO: 606159 - RNA, 22 nt, Human
gcauggcagccaguacauggug

SEQ ID NO: 606160 - RNA, 22 nt, Human
augcuauuaauauccagucuga

SEQ ID NO: 606161 - RNA, 22 nt, Human
cucacacacgaagcccuuggcc

SEQ ID NO: 606162 - RNA, 22 nt, Human
cauguguuucgagacuguugag

SEQ ID NO: 606163 - RNA, 22 nt, Human
gaggauggaggcaguuagggcc

SEQ ID NO: 606164 - RNA, 22 nt, Human
ugauucuguaaacaugucuuua

SEQ ID NO: 606165 - RNA, 22 nt, Human
agugcuguccaguuucacaggu

SEQ ID NO: 606166 - RNA, 22 nt, Human
uccuccagaccacuucugugcg

SEQ ID NO: 606167 - RNA, 22 nt, Human
cauugucacccaaagcucauag

SEQ ID NO: 606168 - RNA, 22 nt, Human
ucauggggcucuucaaguggag

SEQ ID NO: 606169 - RNA, 22 nt, Human
uuucauuucauagaauuguguu

SEQ ID NO: 606170 - RNA, 22 nt, Human
uggcaguucaggcugcaaucau

SEQ ID NO: 606171 - RNA, 22 nt, Human
agguggagugaaggaaaggcag

SEQ ID NO: 606172 - RNA, 22 nt, Human
agcccuccuggggccacgcugg

SEQ ID NO: 606173 - RNA, 22 nt, Human
cucugagagagcuggugagcac

SEQ ID NO: 606174 - RNA, 22 nt, Human
gaaagguugggugaauggugga

SEQ ID NO: 606175 - RNA, 22 nt, Human
gggugguguauuagagcugcag

SEQ ID NO: 606176 - RNA, 22 nt, Human
guaacaguuuggguuccaauug

SEQ ID NO: 606177 - RNA, 22 nt, Human
accuuuauauaucaacuucucc

SEQ ID NO: 606178 - RNA, 22 nt, Human
agccuggaggaggaguugagca

SEQ ID NO: 606179 - RNA, 22 nt, Human
acugcuuuaucugagaaguccu

SEQ ID NO: 606180 - RNA, 22 nt, Human
ggcacugggagaggugagacgg

SEQ ID NO: 606181 - RNA, 22 nt, Human
ugcacaggccuugaagggagag

SEQ ID NO: 606182 - RNA, 22 nt, Human
caagcuggagguuggagcuacu

SEQ ID NO: 606183 - RNA, 22 nt, Human
ugcagaggagcuggaaggcugg

SEQ ID NO: 606184 - RNA, 22 nt, Human
ugcagcuucuccaaauauuaca

SEQ ID NO: 606185 - RNA, 22 nt, Human
gcugcccugcaucugugccuuc

SEQ ID NO: 606186 - RNA, 22 nt, Human
ucuuuauugcuacugguuuguc

SEQ ID NO: 606187 - RNA, 22 nt, Human
acagagcacugcccugugccgc

SEQ ID NO: 606188 - RNA, 22 nt, Human
ugugaauagauugaagcuuugg

SEQ ID NO: 606189 - RNA, 22 nt, Human
ggcgugggaaguggggcuucug

SEQ ID NO: 606190 - RNA, 22 nt, Human
augacccuuacugcaucauaca

SEQ ID NO: 606191 - RNA, 22 nt, Human
ugggcuggcguggagaguuuag

SEQ ID NO: 606192 - RNA, 22 nt, Human
cauuucuagacaaguccuggag

SEQ ID NO: 606193 - RNA, 22 nt, Human
gcaugcaguaaaauucagcaac

SEQ ID NO: 606194 - RNA, 22 nt, Human
cuuccugaacaaugccaucaau

SEQ ID NO: 606195 - RNA, 22 nt, Human
uauuuaauaaaacuauggcaug

SEQ ID NO: 606196 - RNA, 22 nt, Human
gauaucauaucagacaaccucu

SEQ ID NO: 606197 - RNA, 21 nt, Human
agcuuguuauuaauucagaac

SEQ ID NO: 606198 - RNA, 22 nt, Human
uccaggagugauaaggccacug

SEQ ID NO: 606199 - RNA, 22 nt, Human
ccuccugggcuccugucugcac

SEQ ID NO: 606200 - RNA, 22 nt, Human
ugccugcuagauauccagguga

SEQ ID NO: 606201 - RNA, 22 nt, Human
ggcccaggaugcaagaacugaa

SEQ ID NO: 606202 - RNA, 17 nt, Human
ccaggagcgugggucuc

SEQ ID NO: 606203 - RNA, 22 nt, Human
ucugaguucauaccaggcuacc

SEQ ID NO: 606204 - RNA, 22 nt, Human
aaaaacacugggcugggaguca

SEQ ID NO: 606205 - RNA, 22 nt, Human
uuacacagugcacaagcagagu

SEQ ID NO: 606206 - RNA, 22 nt, Human
ucaguguuuuaacugucuuuua

SEQ ID NO: 606207 - RNA, 22 nt, Human
auuuguucauggguuguuaugc

SEQ ID NO: 606208 - RNA, 22 nt, Human
ucucugaguucuccuccagccc

SEQ ID NO: 606209 - RNA, 22 nt, Human
acugcuuuaaaaaagcaagcuu

SEQ ID NO: 606210 - RNA, 22 nt, Human
ccacaggacggaggucuggccg

SEQ ID NO: 606211 - RNA, 22 nt, Human
acuuagcaguuuagaauauguc

SEQ ID NO: 606212 - RNA, 22 nt, Human
uucugaugguggaaugcuucag

SEQ ID NO: 606213 - RNA, 22 nt, Human
aaggaagggaaauagugauguc

SEQ ID NO: 606214 - RNA, 22 nt, Human
uccgggagcugaacgucuugcg

SEQ ID NO: 606215 - RNA, 22 nt, Human
cagcugggcuaagaguagaggc

SEQ ID NO: 606216 - RNA, 22 nt, Human
gcuacaggagcugucacaugcu

SEQ ID NO: 606217 - RNA, 22 nt, Human
gccugaggaaugcuccugacuu

SEQ ID NO: 606218 - RNA, 21 nt, Human
cacuguauagcaggagaaaac

SEQ ID NO: 606219 - RNA, 22 nt, Human
cccaggcugauguucagcgggu

SEQ ID NO: 606220 - RNA, 22 nt, Human
cagggccagccauccugcuggg

SEQ ID NO: 606221 - RNA, 22 nt, Human
aaccugagauacuggucuuuau

SEQ ID NO: 606222 - RNA, 22 nt, Human
cagucacuuacaaaaauauaau

SEQ ID NO: 606223 - RNA, 22 nt, Human
gaaauugucagcuucuuucagu

SEQ ID NO: 606224 - RNA, 22 nt, Human
ugcaggugauucugaugcaguu

SEQ ID NO: 606225 - RNA, 22 nt, Human
caaauacuaaacauaagauuuu

SEQ ID NO: 606226 - RNA, 22 nt, Human
cccaggagacugagcuguaacc

SEQ ID NO: 606227 - RNA, 22 nt, Human
cagaggaggccaccgcauaggc

SEQ ID NO: 606228 - RNA, 22 nt, Human
cuacaucacuuaauucuuagaa

SEQ ID NO: 606229 - RNA, 22 nt, Human
acaauuagugaucagugaugcc

SEQ ID NO: 606230 - RNA, 22 nt, Human
cggccaagccggggccccgaag

SEQ ID NO: 606231 - RNA, 22 nt, Human
aucaaaguggaaguuuacuagg

SEQ ID NO: 606232 - RNA, 19 nt, Human
agcaacaccguuuauuucc

SEQ ID NO: 606233 - RNA, 22 nt, Human
uaucagaaaugccuuaaauugg

SEQ ID NO: 606234 - RNA, 22 nt, Human
guguguguguaaaaauccagag

SEQ ID NO: 606235 - RNA, 22 nt, Human
cagcgccuccuggaccuccucu

SEQ ID NO: 606236 - RNA, 22 nt, Human
acauuuaguaugagucucugua

SEQ ID NO: 606237 - RNA, 22 nt, Human
ggggaugguggcauuuguaaaa

SEQ ID NO: 606238 - RNA, 22 nt, Human
cagaggugcuggagugaguccu

SEQ ID NO: 606239 - RNA, 21 nt, Human
caggcucugcuagaggagccu

SEQ ID NO: 606240 - RNA, 22 nt, Human
ccagggugaccagcuggccuag

SEQ ID NO: 606241 - RNA, 17 nt, Human
cagcucugcagacuucc

SEQ ID NO: 606242 - RNA, 22 nt, Human
cugagcccuugcuuaugcuucc

SEQ ID NO: 606243 - RNA, 22 nt, Human
ugcccugcuaaccuugguucca

SEQ ID NO: 606244 - RNA, 22 nt, Human
ggcaccaggggauguaaugucc

SEQ ID NO: 606245 - RNA, 22 nt, Human
ugagguccugcauguugagguc

SEQ ID NO: 606246 - RNA, 22 nt, Human
cuggccacuggagguggcaccc

SEQ ID NO: 606247 - RNA, 22 nt, Human
ccauuuuuaaagagcuuaagua

SEQ ID NO: 606248 - RNA, 22 nt, Human
cugugcacuucucuuuauuugu

SEQ ID NO: 606249 - RNA, 22 nt, Human
agagcauccugguuuuaugaag

SEQ ID NO: 606250 - RNA, 19 nt, Human
agaggccucagcagcuggc

SEQ ID NO: 606251 - RNA, 19 nt, Human
ugagugggagcccagguau

SEQ ID NO: 606252 - RNA, 22 nt, Human
uccugucagugaggcagaugaa

SEQ ID NO: 606253 - RNA, 22 nt, Human
aaugaugguuaaacacuggagg

SEQ ID NO: 606254 - RNA, 22 nt, Human
cauugcaccacauugcaucccu

SEQ ID NO: 606255 - RNA, 22 nt, Human
uucaagcagagauauuucaaga

SEQ ID NO: 606256 - RNA, 22 nt, Human
aacaugaugacaaagguauauu

SEQ ID NO: 606257 - RNA, 22 nt, Human
cauugaaaaacguugacugagu

SEQ ID NO: 606258 - RNA, 22 nt, Human
uugaggcacacacagguugcau

SEQ ID NO: 606259 - RNA, 22 nt, Human
acauuaaauuucauagugauua

SEQ ID NO: 606260 - RNA, 22 nt, Human
auuguucauguaugaauaaaua

SEQ ID NO: 606261 - RNA, 22 nt, Human
ccugugccaaaaggcugcuuau

SEQ ID NO: 606262 - RNA, 22 nt, Human
ccagggcagcgccccuccacgc

SEQ ID NO: 606263 - RNA, 18 nt, Human
ugagguagcuuuccuccu

SEQ ID NO: 606264 - RNA, 22 nt, Human
aaguuuauguugguaagauauc

SEQ ID NO: 606265 - RNA, 22 nt, Human
gaagggugugauuugccugaga

SEQ ID NO: 606266 - RNA, 22 nt, Human
ugcugagacaacaggaaacaag

SEQ ID NO: 606267 - RNA, 20 nt, Human
aagcaucuggauguagcaau

SEQ ID NO: 606268 - RNA, 22 nt, Human
cgcauccagggcgcaggaucug

SEQ ID NO: 606269 - RNA, 22 nt, Human
ugaauguucucuaaauacuccu

SEQ ID NO: 606270 - RNA, 22 nt, Human
uugcauaugaagcugacuuaaa

SEQ ID NO: 606271 - RNA, 22 nt, Human
caucuuuauuuauauagacagg

SEQ ID NO: 606272 - RNA, 20 nt, Human
ccugccugccucggcucauu

SEQ ID NO: 606273 - RNA, 22 nt, Human
uauuuuacagacuacuuuagau

SEQ ID NO: 606274 - RNA, 22 nt, Human
gaaugauaaauggaagcagcau

SEQ ID NO: 606275 - RNA, 22 nt, Human
aagaauguggguggauaugaug

SEQ ID NO: 606276 - RNA, 22 nt, Human
accaggcuccccuuggauccug

SEQ ID NO: 606277 - RNA, 22 nt, Human
ccaggguggcguagaugcuggg

SEQ ID NO: 606278 - RNA, 22 nt, Human
cgaggccagcucuaagcccuac

SEQ ID NO: 606279 - RNA, 22 nt, Human
gcccagagugaguccugggccc

SEQ ID NO: 606280 - RNA, 22 nt, Human
gaggccaacuuuggagaacagg

SEQ ID NO: 606281 - RNA, 22 nt, Human
ucaauuuuaugaaacaaaguga

SEQ ID NO: 606282 - RNA, 22 nt, Human
uuucuaagcuuaguaugaggca

SEQ ID NO: 606283 - RNA, 22 nt, Human
uccaggcuuuggggcaggagcg

SEQ ID NO: 606284 - RNA, 22 nt, Human
accugggaaaaggaguggccau

SEQ ID NO: 606285 - RNA, 22 nt, Human
gguggacaguguuagcucuggg

SEQ ID NO: 606286 - RNA, 22 nt, Human
aggggccugguuggccucuguu

SEQ ID NO: 606287 - RNA, 22 nt, Human
cccagcucccugguauuugugc

SEQ ID NO: 606288 - RNA, 20 nt, Human
aguuuaagaaaaagcuccag

SEQ ID NO: 606289 - RNA, 22 nt, Human
ucaccuugugaucucccugccu

SEQ ID NO: 606290 - RNA, 22 nt, Human
uguccagugauucucaugagcc

SEQ ID NO: 606291 - RNA, 22 nt, Human
cagcuucauugccugaugucuu

SEQ ID NO: 606292 - RNA, 19 nt, Human
ggcagacacaguugacaug

SEQ ID NO: 606293 - RNA, 22 nt, Human
uaaauaucaccuggaauuguua

SEQ ID NO: 606294 - RNA, 22 nt, Human
auuuccuaggugcucgagugcu

SEQ ID NO: 606295 - RNA, 22 nt, Human
uacagcuuuauacccaucaaaa

SEQ ID NO: 606296 - RNA, 22 nt, Human
cuacauuuggagaguauaggaa

SEQ ID NO: 606297 - RNA, 22 nt, Human
ugcuuucuguuuuucauauaau

SEQ ID NO: 606298 - RNA, 22 nt, Human
aguuaacucauuuuauaaugcc

SEQ ID NO: 606299 - RNA, 21 nt, Human
ucacagagccacagaauuggu

SEQ ID NO: 606300 - RNA, 22 nt, Human
uuugacaguguuggggcaggcu

SEQ ID NO: 606301 - RNA, 22 nt, Human
cuggcuccuccaaggccuggag

SEQ ID NO: 606302 - RNA, 22 nt, Human
uuagccauuuuauucagcaggu

SEQ ID NO: 606303 - RNA, 22 nt, Human
aaacacagggauauauauucca

SEQ ID NO: 606304 - RNA, 22 nt, Human
uuaagauuuucuucaguauuau

SEQ ID NO: 606305 - RNA, 22 nt, Human
cauuaugccaaaguagaaauau

SEQ ID NO: 606306 - RNA, 22 nt, Human
ugagggagcugaccuuucugug

SEQ ID NO: 606307 - RNA, 22 nt, Human
cuugucugcuauaaaaauccag

SEQ ID NO: 606308 - RNA, 22 nt, Human
ugccacagagcaauucugcuga

SEQ ID NO: 606309 - RNA, 21 nt, Human
ggacacugauaaucuuguugc

SEQ ID NO: 606310 - RNA, 16 nt, Human
gggcugggggauucug

SEQ ID NO: 606311 - RNA, 22 nt, Human
caugccagggcuugcugccugg

SEQ ID NO: 606312 - RNA, 22 nt, Human
aguggggccggugaggccgagg

SEQ ID NO: 606313 - RNA, 22 nt, Human
auuaagugacuaaaguaaugcu

SEQ ID NO: 606314 - RNA, 22 nt, Human
guacuuuagaguaaaauagacc

SEQ ID NO: 606315 - RNA, 22 nt, Human
ugucccagcacuuugggagucu

SEQ ID NO: 606316 - RNA, 22 nt, Human
acuccucagccagcaucaggga

SEQ ID NO: 606317 - RNA, 23 nt, Human
agagagaguuugugucagguacc

SEQ ID NO: 606318 - RNA, 23 nt, Human
uaggccagggugaccuggggaga

SEQ ID NO: 606319 - RNA, 22 nt, Human
cuauuuuaagaggccauuaggu

SEQ ID NO: 606320 - RNA, 22 nt, Human
aauugcauguuaaugacuaagu

SEQ ID NO: 606321 - RNA, 22 nt, Human
ccaugcuccuuaccacucacuu

SEQ ID NO: 606322 - RNA, 23 nt, Human
uugcagggauggaguucaaaaug

SEQ ID NO: 606323 - RNA, 22 nt, Human
gaguaagagcuggcuuuggugu

SEQ ID NO: 606324 - RNA, 22 nt, Human
guauuuuucauuccaagugaga

SEQ ID NO: 606325 - RNA, 22 nt, Human
gcuguccaggagugcagagauu

SEQ ID NO: 606326 - RNA, 22 nt, Human
ugcauggauaaaaguauauuau

SEQ ID NO: 606327 - RNA, 22 nt, Human
cugcagggacccaagucuuugg

SEQ ID NO: 606328 - RNA, 22 nt, Human
acccugggucauauacagugug

SEQ ID NO: 606329 - RNA, 22 nt, Human
guugcuucucuuaaguccagcu

SEQ ID NO: 606330 - RNA, 21 nt, Human
aagaacuauugagguacacag

SEQ ID NO: 606331 - RNA, 22 nt, Human
ugcuuaaaaaguaacugcugau

SEQ ID NO: 606332 - RNA, 22 nt, Human
aaacauuguuaugauaaauuac

SEQ ID NO: 606333 - RNA, 22 nt, Human
agugauggugagugagaagcuc

SEQ ID NO: 606334 - RNA, 19 nt, Human
cacugugguccuucacugc

SEQ ID NO: 606335 - RNA, 22 nt, Human
aagcagcauaugacagcaucca

SEQ ID NO: 606336 - RNA, 22 nt, Human
cagaggcgaggcagcugaaccu

SEQ ID NO: 606337 - RNA, 22 nt, Human
uccaccaggcuccauguucagu

SEQ ID NO: 606338 - RNA, 22 nt, Human
uuuauguuugacaaugaucugg

SEQ ID NO: 606339 - RNA, 22 nt, Human
uaguuuuacuugcgaugauaau

SEQ ID NO: 606340 - RNA, 17 nt, Human
ccuguuguugccuuugc

SEQ ID NO: 606341 - RNA, 22 nt, Human
ggagaugggggauuuuacagcg

SEQ ID NO: 606342 - RNA, 21 nt, Human
ucuggcuuucauuccccuucu

SEQ ID NO: 606343 - RNA, 22 nt, Human
aguccuuaugagaugcugccuu

SEQ ID NO: 606344 - RNA, 22 nt, Human
uggcaggaggaugaggcggcua

SEQ ID NO: 606345 - RNA, 22 nt, Human
gaccaggaaagagugugacuaa

SEQ ID NO: 606346 - RNA, 23 nt, Human
uaagacacccgacuccagagaug

SEQ ID NO: 606347 - RNA, 22 nt, Human
cuuccucucaauaagaugagaa

SEQ ID NO: 606348 - RNA, 19 nt, Human
uuugaaaggauuguuauuu

SEQ ID NO: 606349 - RNA, 22 nt, Human
aagauacagugaaagggcauug

SEQ ID NO: 606350 - RNA, 22 nt, Human
cagggcaaagagagcacaugcu

SEQ ID NO: 606351 - RNA, 22 nt, Human
ugaguuauaaugaauauuugaa

SEQ ID NO: 606352 - RNA, 22 nt, Human
ggagccuauuauuagcauggca

SEQ ID NO: 606353 - RNA, 22 nt, Human
uagaaacagcauauauuagccc

SEQ ID NO: 606354 - RNA, 22 nt, Human
gcuuccaguaaguugcugccau

SEQ ID NO: 606355 - RNA, 22 nt, Human
aacacugacgacgugaacuaaa

SEQ ID NO: 606356 - RNA, 20 nt, Human
agcuaggagaaagcauggag

SEQ ID NO: 606357 - RNA, 22 nt, Human
gcuggcucugcacccaggccuc

SEQ ID NO: 606358 - RNA, 22 nt, Human
ugcuucuggcuuaucucgugcc

SEQ ID NO: 606359 - RNA, 22 nt, Human
caugagauaauuuuucuccagu

SEQ ID NO: 606360 - RNA, 22 nt, Human
agaucauaugaaaaauuucaag

SEQ ID NO: 606361 - RNA, 22 nt, Human
ucagaacauucucauugacugc

SEQ ID NO: 606362 - RNA, 21 nt, Human
acaaugucaaggucagacauu

SEQ ID NO: 606363 - RNA, 22 nt, Human
ucccagaggcuccagucucuau

SEQ ID NO: 606364 - RNA, 22 nt, Human
ggaagcugguaauuguugggac

SEQ ID NO: 606365 - RNA, 22 nt, Human
uuuuggggagaacgguugcuau

SEQ ID NO: 606366 - RNA, 22 nt, Human
cagggagaggcaucauagggaa

SEQ ID NO: 606367 - RNA, 21 nt, Human
agcagaggcagaauguaugca

SEQ ID NO: 606368 - RNA, 22 nt, Human
gauucagugagggugagaagaa

SEQ ID NO: 606369 - RNA, 22 nt, Human
gcagagcagcaaauggaaagga

SEQ ID NO: 606370 - RNA, 22 nt, Human
augacauuuauacagugagcuu

SEQ ID NO: 606371 - RNA, 19 nt, Human
auagucuuuccaauuauac

SEQ ID NO: 606372 - RNA, 21 nt, Human
gacuuuaauuugagagcaaaa

SEQ ID NO: 606373 - RNA, 22 nt, Human
ucagggacagggugcugcugcg

SEQ ID NO: 606374 - RNA, 22 nt, Human
gaaggagcuaaagggagcccug

SEQ ID NO: 606375 - RNA, 22 nt, Human
ucccuguccugggcaaucccag

SEQ ID NO: 606376 - RNA, 22 nt, Human
uucucagacuuccagcaccagc

SEQ ID NO: 606377 - RNA, 22 nt, Human
ugggguggaacccuucugcugg

SEQ ID NO: 606378 - RNA, 22 nt, Human
caaagcaguauuggauucuuua

SEQ ID NO: 606379 - RNA, 22 nt, Human
acuuccagcaccucaagcggaa

SEQ ID NO: 606380 - RNA, 22 nt, Human
ggugguggagccagcugggagu

SEQ ID NO: 606381 - RNA, 22 nt, Human
cuccagcuagggcuggcuuacu

SEQ ID NO: 606382 - RNA, 21 nt, Human
ccagcugcuccuugagguucc

SEQ ID NO: 606383 - RNA, 22 nt, Human
uaacaaacuggaaauugacauu

SEQ ID NO: 606384 - RNA, 22 nt, Human
aagcacugagcacaguggcuga

SEQ ID NO: 606385 - RNA, 22 nt, Human
ucaggagaaggcaauguggaaa

SEQ ID NO: 606386 - RNA, 22 nt, Human
ucuuuaaugugauuguaauuau

SEQ ID NO: 606387 - RNA, 22 nt, Human
uauuuauucauucagcaagcau

SEQ ID NO: 606388 - RNA, 22 nt, Human
aaauugauguucccaguugaaa

SEQ ID NO: 606389 - RNA, 22 nt, Human
agaacugguggugaucaguuau

SEQ ID NO: 606390 - RNA, 22 nt, Human
gguggccugaauuagcucaggg

SEQ ID NO: 606391 - RNA, 22 nt, Human
aagagaaagcagacuuugucau

SEQ ID NO: 606392 - RNA, 22 nt, Human
agggcuccuccccggccuccac

SEQ ID NO: 606393 - RNA, 22 nt, Human
acauauuggcuuagcucuguga

SEQ ID NO: 606394 - RNA, 22 nt, Human
cugggcucagaaccuuguuaag

SEQ ID NO: 606395 - RNA, 22 nt, Human
ucaucacucauuggacaacaga

SEQ ID NO: 606396 - RNA, 22 nt, Human
ucugugccagcagccuccugga

SEQ ID NO: 606397 - RNA, 22 nt, Human
uguagcauuuuauguaauaagu

SEQ ID NO: 606398 - RNA, 22 nt, Human
aaaauuauagaucuagugccug

SEQ ID NO: 606399 - RNA, 22 nt, Human
ugagcugugucuuggugagagu

SEQ ID NO: 606400 - RNA, 22 nt, Human
uccagcccgacugggccugccg

SEQ ID NO: 606401 - RNA, 22 nt, Human
uuuucugaaguuuaagacauuu

SEQ ID NO: 606402 - RNA, 22 nt, Human
cucaggucacggaucugagcug

SEQ ID NO: 606403 - RNA, 22 nt, Human
ggcauuaacucuguuucaauuu

SEQ ID NO: 606404 - RNA, 22 nt, Human
aauguagaugagauauuuuuug

SEQ ID NO: 606405 - RNA, 22 nt, Human
gagucucugaccagggugccaa

SEQ ID NO: 606406 - RNA, 22 nt, Human
uggcaaggccacaggugcaguu

SEQ ID NO: 606407 - RNA, 22 nt, Human
aaaugcacaaagauuuugcacu

SEQ ID NO: 606408 - RNA, 22 nt, Human
uaggagacauugaucccaagaa

SEQ ID NO: 606409 - RNA, 22 nt, Human
uuaaaaugcagauuaugacuca

SEQ ID NO: 606410 - RNA, 22 nt, Human
cuggaugcuuccucucugcuag

SEQ ID NO: 606411 - RNA, 22 nt, Human
gacauugaaguauuuuugucga

SEQ ID NO: 606412 - RNA, 22 nt, Human
gaucagaaugggacauauccug

SEQ ID NO: 606413 - RNA, 22 nt, Human
ugccugagugauguggcagcca

SEQ ID NO: 606414 - RNA, 22 nt, Human
cugggaggauucauugagguga

SEQ ID NO: 606415 - RNA, 22 nt, Human
agcagugugcuucguuucauga

SEQ ID NO: 606416 - RNA, 22 nt, Human
gcaagagacuuuuaugucugcc

SEQ ID NO: 606417 - RNA, 22 nt, Human
aagacaggaacauagcaaaucc

SEQ ID NO: 606418 - RNA, 22 nt, Human
augcuguguuuuaaauggaaau

SEQ ID NO: 606419 - RNA, 22 nt, Human
ucuguguugauaauuuuggaga

SEQ ID NO: 606420 - RNA, 22 nt, Human
uuucaugauccauuuacaaaau

SEQ ID NO: 606421 - RNA, 22 nt, Human
gguaggcagaucacugucuaug

SEQ ID NO: 606422 - RNA, 22 nt, Human
uaaagacacccagggagggacu

SEQ ID NO: 606423 - RNA, 22 nt, Human
cucuuuaguggugaugaugcua

SEQ ID NO: 606424 - RNA, 22 nt, Human
cagggcagggagcuuagaauga

SEQ ID NO: 606425 - RNA, 22 nt, Human
agaggccaauaguagguggcau

SEQ ID NO: 606426 - RNA, 22 nt, Human
cuccaggaaaauagggaaugag

SEQ ID NO: 606427 - RNA, 22 nt, Human
gccaggaguucagaugcauguu

SEQ ID NO: 606428 - RNA, 17 nt, Human
cuccuggcagccucagg

SEQ ID NO: 606429 - RNA, 22 nt, Human
ucuuggcuucuguauuuccugu

SEQ ID NO: 606430 - RNA, 18 nt, Human
auagaaaccuuuaaucag

SEQ ID NO: 606431 - RNA, 22 nt, Human
ucucuuggugauagucuuucuu

SEQ ID NO: 606432 - RNA, 22 nt, Human
caugcucacaaaagauggcaaa

SEQ ID NO: 606433 - RNA, 22 nt, Human
gcccaggaaauaaaagugggcu

SEQ ID NO: 606434 - RNA, 22 nt, Human
cugcagggaccacaagcagguu

SEQ ID NO: 606435 - RNA, 22 nt, Human
ccaggagcaacuugaaggcaag

SEQ ID NO: 606436 - RNA, 19 nt, Human
ugaagcaggcagagaagau

SEQ ID NO: 606437 - RNA, 22 nt, Human
cuacaucaaguaaucuucaaaa

SEQ ID NO: 606438 - RNA, 22 nt, Human
cuggccagaagcaccuuuggcg

SEQ ID NO: 606439 - RNA, 22 nt, Human
uccuccagcuucucuuuugggg

SEQ ID NO: 606440 - RNA, 22 nt, Human
aggggaugccuaguggagucuc

SEQ ID NO: 606441 - RNA, 22 nt, Human
ucucugugguaugucauagcaa

SEQ ID NO: 606442 - RNA, 22 nt, Human
cuggcugaauccuagucucaua

SEQ ID NO: 606443 - RNA, 22 nt, Human
cagcugagaagugauagcugca

SEQ ID NO: 606444 - RNA, 22 nt, Human
ccagaggagaugccuccucugu

SEQ ID NO: 606445 - RNA, 22 nt, Human
auaaauagugcugccaugagua

SEQ ID NO: 606446 - RNA, 22 nt, Human
accuuuuuguucuguucucagc

SEQ ID NO: 606447 - RNA, 22 nt, Human
gugcagggcuggcaccggaggc

SEQ ID NO: 606448 - RNA, 22 nt, Human
ggccacagucucuggaaggaug

SEQ ID NO: 606449 - RNA, 22 nt, Human
uguaaaauaccauuccuuguca

SEQ ID NO: 606450 - RNA, 22 nt, Human
ugauuagacaaaggaaucaugc

SEQ ID NO: 606451 - RNA, 22 nt, Human
uuuacaauucucuaccaguguu

SEQ ID NO: 606452 - RNA, 22 nt, Human
uuucaaugacacaaaagagaaa

SEQ ID NO: 606453 - RNA, 22 nt, Human
agaccugguuuaucaccagcau

SEQ ID NO: 606454 - RNA, 23 nt, Human
auuuacagguuaaaugaaaucag

SEQ ID NO: 606455 - RNA, 22 nt, Human
uucauugauaguuuuauguaug

SEQ ID NO: 606456 - RNA, 22 nt, Human
caggaacauuguagaauugaaa

SEQ ID NO: 606457 - RNA, 22 nt, Human
cagagcagccuccagggggagc

SEQ ID NO: 606458 - RNA, 22 nt, Human
ucagcuuuuaaaaacaagaagu

SEQ ID NO: 606459 - RNA, 22 nt, Human
gaggggagaaggcacuaaccag

SEQ ID NO: 606460 - RNA, 20 nt, Human
ccauggccacaucugugcug

SEQ ID NO: 606461 - RNA, 20 nt, Human
aaagucuuaugguuaauuuu

SEQ ID NO: 606462 - RNA, 21 nt, Human
accuucaguguucucagcugc

SEQ ID NO: 606463 - RNA, 22 nt, Human
caggagcucucaucgucagggc

SEQ ID NO: 606464 - RNA, 22 nt, Human
ugggcagauuaaugcaguggcu

SEQ ID NO: 606465 - RNA, 22 nt, Human
cugggagaggaaccucgagggu

SEQ ID NO: 606466 - RNA, 22 nt, Human
ugcuuaauaggaguugaacauu

SEQ ID NO: 606467 - RNA, 22 nt, Human
gucccagagagcacuaguccau

SEQ ID NO: 606468 - RNA, 22 nt, Human
uucagaaacaucaguggaugga

SEQ ID NO: 606469 - RNA, 22 nt, Human
agaaaacacugcccccucucuc

SEQ ID NO: 606470 - RNA, 19 nt, Human
ucuccaguugcuuucaggg

SEQ ID NO: 606471 - RNA, 22 nt, Human
gcugcuuugugaaaaucauuca

SEQ ID NO: 606472 - RNA, 22 nt, Human
ucaguguuuccugugguacagc

SEQ ID NO: 606473 - RNA, 22 nt, Human
cugaguccagggacagaggcgu

SEQ ID NO: 606474 - RNA, 22 nt, Human
aggaggaggcuggaguacaccc

SEQ ID NO: 606475 - RNA, 22 nt, Human
gcagugggcaacaagagcugga

SEQ ID NO: 606476 - RNA, 22 nt, Human
cuaggcagauggagaaguggcu

SEQ ID NO: 606477 - RNA, 22 nt, Human
ggcagugagcuggagggaagga

SEQ ID NO: 606478 - RNA, 22 nt, Human
cuugaaucuucugaguauuugc

SEQ ID NO: 606479 - RNA, 20 nt, Human
ucccuggggcccuacuuccu

SEQ ID NO: 606480 - RNA, 22 nt, Human
auuauucagucuuguaaggagu

SEQ ID NO: 606481 - RNA, 22 nt, Human
acaucucacuucuuugaaggcu

SEQ ID NO: 606482 - RNA, 22 nt, Human
aggcugagcuggcccuugaaau

SEQ ID NO: 606483 - RNA, 22 nt, Human
cugucuucuccuuuguuucagg

SEQ ID NO: 606484 - RNA, 22 nt, Human
cugggagagccuuuccugaguc

SEQ ID NO: 606485 - RNA, 22 nt, Human
acagaacaagaccugcuuauug

SEQ ID NO: 606486 - RNA, 22 nt, Human
guguauaauccugcaaagggag

SEQ ID NO: 606487 - RNA, 22 nt, Human
agcuuccuacaaccaucucaga

SEQ ID NO: 606488 - RNA, 22 nt, Human
gaugcugagagguggagggaac

SEQ ID NO: 606489 - RNA, 23 nt, Human
uugauucuccaguaugggcugag

SEQ ID NO: 606490 - RNA, 22 nt, Human
caguguggcugagacagaggcu

SEQ ID NO: 606491 - RNA, 22 nt, Human
gggcacugagggcccacaggau

SEQ ID NO: 606492 - RNA, 22 nt, Human
uucaaugugguuauaauaacua

SEQ ID NO: 606493 - RNA, 22 nt, Human
uccugggaacucggaaagcucu

SEQ ID NO: 606494 - RNA, 22 nt, Human
agcugcucuuugaaggacacuu

SEQ ID NO: 606495 - RNA, 22 nt, Human
aggggcgcugcgguccucagcc

SEQ ID NO: 606496 - RNA, 22 nt, Human
aagauguugcauuagaauaccu

SEQ ID NO: 606497 - RNA, 22 nt, Human
acuuguuuuaucugucaauaga

SEQ ID NO: 606498 - RNA, 22 nt, Human
auuauuauuuuagagagaggcc

SEQ ID NO: 606499 - RNA, 22 nt, Human
gagaauuuucuaguaguuucau

SEQ ID NO: 606500 - RNA, 22 nt, Human
ucuaggccguaggauacagagc

SEQ ID NO: 606501 - RNA, 22 nt, Human
gaaauagaggacagcuggauca

SEQ ID NO: 606502 - RNA, 22 nt, Human
gacaguguuacaauuuaaugga

SEQ ID NO: 606503 - RNA, 19 nt, Human
ucuuggcuuugucuacugu

SEQ ID NO: 606504 - RNA, 22 nt, Human
uauacaguaucuuuugaaggca

SEQ ID NO: 606505 - RNA, 22 nt, Human
caggugggccgggguuuguucu

SEQ ID NO: 606506 - RNA, 22 nt, Human
ugaccaggauacugcagggaug

SEQ ID NO: 606507 - RNA, 22 nt, Human
acauagauuuaagagcaauuag

SEQ ID NO: 606508 - RNA, 22 nt, Human
auggcuucucgcuggcaccugu

SEQ ID NO: 606509 - RNA, 22 nt, Human
gggaugaggaucaaucagggag

SEQ ID NO: 606510 - RNA, 22 nt, Human
gcucacaguacagugcuggcuc

SEQ ID NO: 606511 - RNA, 22 nt, Human
ucuauucaggcagagugcagca

SEQ ID NO: 606512 - RNA, 22 nt, Human
ugggccucggagcacaggagac

SEQ ID NO: 606513 - RNA, 22 nt, Human
gagccccaggacagcucuaguu

SEQ ID NO: 606514 - RNA, 22 nt, Human
gcauguggugcugaggcugucg

SEQ ID NO: 606515 - RNA, 22 nt, Human
agccccuugugggcgcacagca

SEQ ID NO: 606516 - RNA, 22 nt, Human
cucccagacaugugccuccuug

SEQ ID NO: 606517 - RNA, 22 nt, Human
caguggcagagaacagagaccu

SEQ ID NO: 606518 - RNA, 22 nt, Human
ugcaagaaagguggggccaggc

SEQ ID NO: 606519 - RNA, 22 nt, Human
gcacacauucggauucuuaacc

SEQ ID NO: 606520 - RNA, 22 nt, Human
ucugccaggccugcuuccgggg

SEQ ID NO: 606521 - RNA, 18 nt, Human
aagccagagaccacugcc

SEQ ID NO: 606522 - RNA, 22 nt, Human
uucuucuucaagugcugcauuc

SEQ ID NO: 606523 - RNA, 22 nt, Human
uauguuaagugggauaaucaaa

SEQ ID NO: 606524 - RNA, 22 nt, Human
cagaggccuuucuacagugaua

SEQ ID NO: 606525 - RNA, 22 nt, Human
ucccagggcacucacccucccu

SEQ ID NO: 606526 - RNA, 22 nt, Human
gacaggggcuuugcaugcuuua

SEQ ID NO: 606527 - RNA, 22 nt, Human
aggagaggcucuaacucugugu

SEQ ID NO: 606528 - RNA, 22 nt, Human
gggcaggagagaacagucaugg

SEQ ID NO: 606529 - RNA, 23 nt, Human
aggcaaugcccugcugagaacuc

SEQ ID NO: 606530 - RNA, 22 nt, Human
uuuauaugaaagugaccagugg

SEQ ID NO: 606531 - RNA, 22 nt, Human
cuggcagcuucaggacacucgg

SEQ ID NO: 606532 - RNA, 16 nt, Human
cuuccucuucacuggc

SEQ ID NO: 606533 - RNA, 22 nt, Human
gugaagcagaguguggaagcaa

SEQ ID NO: 606534 - RNA, 22 nt, Human
uuucuucuaugugugauauuuu

SEQ ID NO: 606535 - RNA, 22 nt, Human
gcugauccuuuuaugucuagcu

SEQ ID NO: 606536 - RNA, 22 nt, Human
cuuguuuuggcuaguaugaugu

SEQ ID NO: 606537 - RNA, 22 nt, Human
cacagggccuugugugacugca

SEQ ID NO: 606538 - RNA, 22 nt, Human
cucuuuaacucccauucugucc

SEQ ID NO: 606539 - RNA, 22 nt, Human
cugugugugcuacaggcuucca

SEQ ID NO: 606540 - RNA, 22 nt, Human
cucaggauggaagccuacagga

SEQ ID NO: 606541 - RNA, 22 nt, Human
uccagagguauguagagaguau

SEQ ID NO: 606542 - RNA, 22 nt, Human
guauuuuauggcaugcaguggc

SEQ ID NO: 606543 - RNA, 22 nt, Human
ugagcagggacuuugaguguag

SEQ ID NO: 606544 - RNA, 22 nt, Human
uuuauugacccaaagcgagagu

SEQ ID NO: 606545 - RNA, 22 nt, Human
aggcagcccacaggacacagga

SEQ ID NO: 606546 - RNA, 22 nt, Human
cacaggagauugaucuauuggu

SEQ ID NO: 606547 - RNA, 22 nt, Human
aggggccaccaccaaggaaggu

SEQ ID NO: 606548 - RNA, 22 nt, Human
ucuucaaacugaaaauuuagaa

SEQ ID NO: 606549 - RNA, 22 nt, Human
gaugauuugaggauuucaugag

SEQ ID NO: 606550 - RNA, 22 nt, Human
aauguuuuacagaucccauuag

SEQ ID NO: 606551 - RNA, 18 nt, Human
ccuaagcuccagccccag

SEQ ID NO: 606552 - RNA, 19 nt, Human
gaggggaggaauugacaag

SEQ ID NO: 606553 - RNA, 22 nt, Human
auacaaagacaaaucucaaucu

SEQ ID NO: 606554 - RNA, 22 nt, Human
uuauuuccacaaugugguaggg

SEQ ID NO: 606555 - RNA, 22 nt, Human
augggaggguggaaaggcucug

SEQ ID NO: 606556 - RNA, 22 nt, Human
auguacaauucuccuugguagg

SEQ ID NO: 606557 - RNA, 22 nt, Human
aggaagccuggcauuaaaaagc

SEQ ID NO: 606558 - RNA, 22 nt, Human
acuguuaaguaugaaguaaggc

SEQ ID NO: 606559 - RNA, 22 nt, Human
ugaugggacugccagcugcuga

SEQ ID NO: 606560 - RNA, 22 nt, Human
cgaggccaccgugguuuccgag

SEQ ID NO: 606561 - RNA, 22 nt, Human
gaagucugcugcucaggaguuu

SEQ ID NO: 606562 - RNA, 22 nt, Human
gaccuccagcggcccugcagag

SEQ ID NO: 606563 - RNA, 18 nt, Human
uucagcagcagacacacu

SEQ ID NO: 606564 - RNA, 22 nt, Human
auggagagugaaagucucucua

SEQ ID NO: 606565 - RNA, 22 nt, Human
guuuuauuuccaugagagaccg

SEQ ID NO: 606566 - RNA, 22 nt, Human
guggucagaaaucucaguggca

SEQ ID NO: 606567 - RNA, 22 nt, Human
uugugcauauagaguuagaugg

SEQ ID NO: 606568 - RNA, 19 nt, Human
ucucacaguuuccuugccu

SEQ ID NO: 606569 - RNA, 22 nt, Human
cagagagaggccacugcuauua

SEQ ID NO: 606570 - RNA, 21 nt, Human
ucugcccuccaggagcucaua

SEQ ID NO: 606571 - RNA, 22 nt, Human
gguguuggaacauggugagauu

SEQ ID NO: 606572 - RNA, 22 nt, Human
acaaggcuguuggucacaaacc

SEQ ID NO: 606573 - RNA, 22 nt, Human
aagcugcccuguguuagaguuc

SEQ ID NO: 606574 - RNA, 22 nt, Human
ucugagcuccaugcaggaggcu

SEQ ID NO: 606575 - RNA, 22 nt, Human
cugucaucacaguugagcagcc

SEQ ID NO: 606576 - RNA, 22 nt, Human
agcuccacucccugccuguuuc

SEQ ID NO: 606577 - RNA, 22 nt, Human
ucuagaaacagguuucuagaaa

SEQ ID NO: 606578 - RNA, 22 nt, Human
cuguaugaaauugucauuuuua

SEQ ID NO: 606579 - RNA, 22 nt, Human
uuuaauauccaguggauacaaa

SEQ ID NO: 606580 - RNA, 22 nt, Human
cugcccugacugaccuuuugaa

SEQ ID NO: 606581 - RNA, 22 nt, Human
auggcagagggauugaacagcu

SEQ ID NO: 606582 - RNA, 22 nt, Human
ucagugucuugggcuugaaugc

SEQ ID NO: 606583 - RNA, 22 nt, Human
ggcugccuugacccuggcuccg

SEQ ID NO: 606584 - RNA, 22 nt, Human
ggugcaggaaucugcaauugaa

SEQ ID NO: 606585 - RNA, 22 nt, Human
aacaucuuaagauagaagggga

SEQ ID NO: 606586 - RNA, 20 nt, Human
uaagcacaugaacaguccuc

SEQ ID NO: 606587 - RNA, 22 nt, Human
cuuugugaugaggccuaagaca

SEQ ID NO: 606588 - RNA, 20 nt, Human
acagaaagagagaaugucag

SEQ ID NO: 606589 - RNA, 22 nt, Human
agaaacaacuuguuucucuugc

SEQ ID NO: 606590 - RNA, 22 nt, Human
uaguuaauucuuuaagaacaag

SEQ ID NO: 606591 - RNA, 21 nt, Human
ggcaagaaacacaaucaagua

SEQ ID NO: 606592 - RNA, 22 nt, Human
caugaggugauaaagcugggau

SEQ ID NO: 606593 - RNA, 22 nt, Human
gcugagcugggacaguccuggg

SEQ ID NO: 606594 - RNA, 22 nt, Human
ucuggcuuuccuggagcaagaa

SEQ ID NO: 606595 - RNA, 19 nt, Human
guccagccuuugggucuua

SEQ ID NO: 606596 - RNA, 22 nt, Human
ccauccugucuguggccucagg

SEQ ID NO: 606597 - RNA, 22 nt, Human
ccagggaggguccuguggcuuc

SEQ ID NO: 606598 - RNA, 22 nt, Human
uguggacucgcauggcugaggc

SEQ ID NO: 606599 - RNA, 22 nt, Human
ccuccccacagcccaggagacu

SEQ ID NO: 606600 - RNA, 22 nt, Human
cuggcuuccaugcuguaguggc

SEQ ID NO: 606601 - RNA, 22 nt, Human
caaggaauauuuaagaacguca

SEQ ID NO: 606602 - RNA, 22 nt, Human
augaaauuaaucaacacauaca

SEQ ID NO: 606603 - RNA, 22 nt, Human
guauacauacuucuagauuaaa

SEQ ID NO: 606604 - RNA, 22 nt, Human
uuuuccuucaccucuugagccu

SEQ ID NO: 606605 - RNA, 19 nt, Human
agcuccaggccuggaugcu

SEQ ID NO: 606606 - RNA, 22 nt, Human
uuuauuaaaacuguuggcucug

SEQ ID NO: 606607 - RNA, 20 nt, Human
acaguguuuuugaguagagc

SEQ ID NO: 606608 - RNA, 22 nt, Human
aauacuugaauuucaugucagg

SEQ ID NO: 606609 - RNA, 22 nt, Human
gaggccagcgcgcagcacuuuu

SEQ ID NO: 606610 - RNA, 22 nt, Human
uggcuucaaagguagcauacaa

SEQ ID NO: 606611 - RNA, 22 nt, Human
acaggcagguaauuuacauauu

SEQ ID NO: 606612 - RNA, 22 nt, Human
uaaagccacuucauucuagucu

SEQ ID NO: 606613 - RNA, 22 nt, Human
cccccagcucugcugggucccg

SEQ ID NO: 606614 - RNA, 22 nt, Human
uugggggguugaggaguagaua

SEQ ID NO: 606615 - RNA, 22 nt, Human
ggcugcucaaggacucugaucg

SEQ ID NO: 606616 - RNA, 22 nt, Human
caggccucaggggcucaggcug

SEQ ID NO: 606617 - RNA, 22 nt, Human
ugcuggcuguucuagggaggcc

SEQ ID NO: 606618 - RNA, 22 nt, Human
gagagcugcagccgagaggggg

SEQ ID NO: 606619 - RNA, 22 nt, Human
augaagcauuacaggaugacag

SEQ ID NO: 606620 - RNA, 22 nt, Human
auaagcuuccuguuagaaaccg

SEQ ID NO: 606621 - RNA, 22 nt, Human
cagugcuguuguaagcucauug

SEQ ID NO: 606622 - RNA, 22 nt, Human
uuuuauugcaauaaagugugua

SEQ ID NO: 606623 - RNA, 22 nt, Human
cuccccauggcaacaguuaugg

SEQ ID NO: 606624 - RNA, 22 nt, Human
auuauuucucacucacauaaua

SEQ ID NO: 606625 - RNA, 22 nt, Human
ugcggcagccaccgcguggccc

SEQ ID NO: 606626 - RNA, 22 nt, Human
acuguacauguaaacauuguca

SEQ ID NO: 606627 - RNA, 22 nt, Human
cccaggaguuggaggcuacggu

SEQ ID NO: 606628 - RNA, 22 nt, Human
cagccucuaagcacagccucuc

SEQ ID NO: 606629 - RNA, 22 nt, Human
uucaaacucuugcucugcuagu

SEQ ID NO: 606630 - RNA, 22 nt, Human
aggcugugggacaguuaggaga

SEQ ID NO: 606631 - RNA, 22 nt, Human
gcagggcucagccgcucccacc

SEQ ID NO: 606632 - RNA, 22 nt, Human
uuuaucaucuuguuuuuaaagc

SEQ ID NO: 606633 - RNA, 23 nt, Human
auaauaauuauggcagcaaagug

SEQ ID NO: 606634 - RNA, 22 nt, Human
ggccacauguggcugcucguau

SEQ ID NO: 606635 - RNA, 22 nt, Human
gugaggacugguaaggacugca

SEQ ID NO: 606636 - RNA, 18 nt, Human
auauucaagaagacagag

SEQ ID NO: 606637 - RNA, 22 nt, Human
agccagaggucaugagcacagg

SEQ ID NO: 606638 - RNA, 22 nt, Human
ucaguaaaugccuuucugugaa

SEQ ID NO: 606639 - RNA, 22 nt, Human
cuggcuuguuuuaagaauacaa

SEQ ID NO: 606640 - RNA, 22 nt, Human
agcucacaguguccuuccucaa

SEQ ID NO: 606641 - RNA, 22 nt, Human
ugugggccucagcaggacucca

SEQ ID NO: 606642 - RNA, 19 nt, Human
agaugucuauuugacuauc

SEQ ID NO: 606643 - RNA, 22 nt, Human
acauuaugagcccacuggugaa

SEQ ID NO: 606644 - RNA, 22 nt, Human
aguggcuguuccaggugaggac

SEQ ID NO: 606645 - RNA, 22 nt, Human
caggacagcucaacaccuccuc

SEQ ID NO: 606646 - RNA, 22 nt, Human
auccucaguguuucugacaucu

SEQ ID NO: 606647 - RNA, 22 nt, Human
gccugggauucccagaggggca

SEQ ID NO: 606648 - RNA, 22 nt, Human
augcugagauccucaggccaga

SEQ ID NO: 606649 - RNA, 22 nt, Human
ucuucaccaucaacagaaugaa

SEQ ID NO: 606650 - RNA, 22 nt, Human
ucccugcuugcucucagcccuu

SEQ ID NO: 606651 - RNA, 22 nt, Human
cugagcugacaucuuccucuuu

SEQ ID NO: 606652 - RNA, 20 nt, Human
uuauguguaccugugcuccc

SEQ ID NO: 606653 - RNA, 22 nt, Human
uuagagauacauuuguagcuug

SEQ ID NO: 606654 - RNA, 22 nt, Human
uccugggcagaaugggauggcu

SEQ ID NO: 606655 - RNA, 22 nt, Human
ugagcucuguuagggcuggaac

SEQ ID NO: 606656 - RNA, 22 nt, Human
cuucuucaucuguaaaacuugg

SEQ ID NO: 606657 - RNA, 22 nt, Human
uuucucuccccaaguggaauug

SEQ ID NO: 606658 - RNA, 22 nt, Human
agucagcagugaaagcacagcc

SEQ ID NO: 606659 - RNA, 22 nt, Human
ggaagccacccagcuuugauag

SEQ ID NO: 606660 - RNA, 22 nt, Human
auauacaggugguauguguaaa

SEQ ID NO: 606661 - RNA, 22 nt, Human
augucauugccaagaugcuaau

SEQ ID NO: 606662 - RNA, 22 nt, Human
ggugcccagagccaggaaugag

SEQ ID NO: 606663 - RNA, 22 nt, Human
gcugaggaaaggcuggaaggga

SEQ ID NO: 606664 - RNA, 23 nt, Human
uuuagcaugaagcagcuggagaa

SEQ ID NO: 606665 - RNA, 22 nt, Human
ugaggaagaacaagaauuuaga

SEQ ID NO: 606666 - RNA, 22 nt, Human
cuugacacugucacucaggcca

SEQ ID NO: 606667 - RNA, 22 nt, Human
agaguuuguacuuuacccugag

SEQ ID NO: 606668 - RNA, 22 nt, Human
cagugaaguuuaaaguguagau

SEQ ID NO: 606669 - RNA, 22 nt, Human
ggagggacccacucuagaggug

SEQ ID NO: 606670 - RNA, 22 nt, Human
uggccuugguccucuuugcaau

SEQ ID NO: 606671 - RNA, 22 nt, Human
ugaugaauuaguaacaaaugag

SEQ ID NO: 606672 - RNA, 22 nt, Human
gcuuuaaugcaauuucaccuca

SEQ ID NO: 606673 - RNA, 22 nt, Human
gccuucaguagugucagcugua

SEQ ID NO: 606674 - RNA, 22 nt, Human
ggcuucugagugcucugcuguu

SEQ ID NO: 606675 - RNA, 22 nt, Human
cuggaguuugcggggacagaga

SEQ ID NO: 606676 - RNA, 22 nt, Human
acagaggucaccuuuguaucuu

SEQ ID NO: 606677 - RNA, 22 nt, Human
ccagcuccagguagaugggcag

SEQ ID NO: 606678 - RNA, 22 nt, Human
gauuuuauauggcauacugugg

SEQ ID NO: 606679 - RNA, 22 nt, Human
gaaugauagagcugccuucgga

SEQ ID NO: 606680 - RNA, 22 nt, Human
agccagugggauuagagccucu

SEQ ID NO: 606681 - RNA, 22 nt, Human
uuucaguuagcugagacccagg

SEQ ID NO: 606682 - RNA, 22 nt, Human
uggagagucucugagccagggc

SEQ ID NO: 606683 - RNA, 23 nt, Human
uaucuacuuugcaauucaguacc

SEQ ID NO: 606684 - RNA, 20 nt, Human
ccucugccuuucuagucuga

SEQ ID NO: 606685 - RNA, 22 nt, Human
uguaggauuuucaccagaccuu

SEQ ID NO: 606686 - RNA, 22 nt, Human
gugcagcagggggaagacagug

SEQ ID NO: 606687 - RNA, 22 nt, Human
auuuccuaggguagaugucaca

SEQ ID NO: 606688 - RNA, 23 nt, Human
uggggcucuggcaggccugaggu

SEQ ID NO: 606689 - RNA, 22 nt, Human
uuccugccuacaugccuuaugc

SEQ ID NO: 606690 - RNA, 22 nt, Human
uacaguagaauuuuuaguaacu

SEQ ID NO: 606691 - RNA, 22 nt, Human
ccauguggugggaaggagaaug

SEQ ID NO: 606692 - RNA, 22 nt, Human
cucugugagggucuguacagaa

SEQ ID NO: 606693 - RNA, 22 nt, Human
gccugccuuugugaggaagcgg

SEQ ID NO: 606694 - RNA, 22 nt, Human
uugauuucuauucagauguaga

SEQ ID NO: 606695 - RNA, 22 nt, Human
uugccacaguagcaaaagguuc

SEQ ID NO: 606696 - RNA, 22 nt, Human
ugccaggcccugcgggguccca

SEQ ID NO: 606697 - RNA, 20 nt, Human
guucaugucucaaauagaaa

SEQ ID NO: 606698 - RNA, 21 nt, Human
gggcagcacgucauuccugug

SEQ ID NO: 606699 - RNA, 22 nt, Human
ucccagaacccugccagguccu

SEQ ID NO: 606700 - RNA, 22 nt, Human
caaauucaaugaacauguuuaa

SEQ ID NO: 606701 - RNA, 22 nt, Human
caaaaguaauuaugguuuuugc

SEQ ID NO: 606702 - RNA, 21 nt, Human
ucuccagugcuucugccucuu

SEQ ID NO: 606703 - RNA, 23 nt, Human
uuucaacaggcagagaagacuua

SEQ ID NO: 606704 - RNA, 22 nt, Human
uaucuauguggugaucuuauuu

SEQ ID NO: 606705 - RNA, 22 nt, Human
agaugguucagaauuauaaaga

SEQ ID NO: 606706 - RNA, 22 nt, Human
cacggccagggcugugggugcg

SEQ ID NO: 606707 - RNA, 22 nt, Human
uccuggguagccuguccaagau

SEQ ID NO: 606708 - RNA, 22 nt, Human
aggccucauugcccaccugugg

SEQ ID NO: 606709 - RNA, 22 nt, Human
uucuuuuaaaagagagcagaaa

SEQ ID NO: 606710 - RNA, 22 nt, Human
gacagcaggagaucaugauaga

SEQ ID NO: 606711 - RNA, 20 nt, Human
ccuccaggcacacccaugug

SEQ ID NO: 606712 - RNA, 22 nt, Human
ugccugggccuucccaccucug

SEQ ID NO: 606713 - RNA, 22 nt, Human
ccaggcagggcucaaggaaccu

SEQ ID NO: 606714 - RNA, 19 nt, Human
ugacagguuuuauguguuu

SEQ ID NO: 606715 - RNA, 22 nt, Human
cagggcauccgugcuccaugcu

SEQ ID NO: 606716 - RNA, 22 nt, Human
uagaaagcugaguaauacauuu

SEQ ID NO: 606717 - RNA, 22 nt, Human
uuuuuccaggguuagauguuua

SEQ ID NO: 606718 - RNA, 18 nt, Human
uucucagacuuuggaagu

SEQ ID NO: 606719 - RNA, 22 nt, Human
cugccugcuuaccaugcaucag

SEQ ID NO: 606720 - RNA, 22 nt, Human
cucuuaauguuuuauagauuga

SEQ ID NO: 606721 - RNA, 22 nt, Human
gaaagagaggggcugagaugca

SEQ ID NO: 606722 - RNA, 22 nt, Human
cccaguggcuguccccaugggc

SEQ ID NO: 606723 - RNA, 22 nt, Human
gaagccacuauagauauucuaa

SEQ ID NO: 606724 - RNA, 22 nt, Human
ccaccaggcacucacagggaag

SEQ ID NO: 606725 - RNA, 22 nt, Human
ccaugugggauuuuggugucug

SEQ ID NO: 606726 - RNA, 22 nt, Human
aaggcagcacagcaacugcuca

SEQ ID NO: 606727 - RNA, 22 nt, Human
uucaaaaagguauguucaaguc

SEQ ID NO: 606728 - RNA, 22 nt, Human
accuguguuuucccucaguuuc

SEQ ID NO: 606729 - RNA, 22 nt, Human
agagcuggguggacuuguaguu

SEQ ID NO: 606730 - RNA, 22 nt, Human
aucucuguaauuacaugauauu

SEQ ID NO: 606731 - RNA, 22 nt, Human
uagaggcuuucagcgguagguc

SEQ ID NO: 606732 - RNA, 21 nt, Human
aggugggagaccauguagguc

SEQ ID NO: 606733 - RNA, 22 nt, Human
ccucugccugcacaucauccug

SEQ ID NO: 606734 - RNA, 22 nt, Human
ucuauaaauuaugcagucucag

SEQ ID NO: 606735 - RNA, 22 nt, Human
caggaggagcauuagcgucuca

SEQ ID NO: 606736 - RNA, 22 nt, Human
uggcucucugggagguccuggc

SEQ ID NO: 606737 - RNA, 22 nt, Human
uagacagauuuaaaggaaugga

SEQ ID NO: 606738 - RNA, 22 nt, Human
ugaggaggucagagucuggcug

SEQ ID NO: 606739 - RNA, 22 nt, Human
aacaguuuaugauaaauucuua

SEQ ID NO: 606740 - RNA, 22 nt, Human
gaagaagguggcccagggguag

SEQ ID NO: 606741 - RNA, 22 nt, Human
gucuccaguguucaggugacug

SEQ ID NO: 606742 - RNA, 22 nt, Human
acagcucauuuguaaaacggag

SEQ ID NO: 606743 - RNA, 20 nt, Human
cugacagaaaauauuucauc

SEQ ID NO: 606744 - RNA, 22 nt, Human
ccaccugcugguuuugcucucc

SEQ ID NO: 606745 - RNA, 22 nt, Human
agugugcauuugcagaagaccc

SEQ ID NO: 606746 - RNA, 22 nt, Human
aagcccuuuucaagauacaaca

SEQ ID NO: 606747 - RNA, 22 nt, Human
agggaagcagcagccgccuguc

SEQ ID NO: 606748 - RNA, 22 nt, Human
cccugugccuaguuggccuaaa

SEQ ID NO: 606749 - RNA, 22 nt, Human
uuggccaacauggugaaacccc

SEQ ID NO: 606750 - RNA, 22 nt, Human
cugggcugcgguucucugaagc

SEQ ID NO: 606751 - RNA, 22 nt, Human
agcugagggcaggaugggguga

SEQ ID NO: 606752 - RNA, 22 nt, Human
accugccucuaagcagcaggug

SEQ ID NO: 606753 - RNA, 22 nt, Human
cuggguggcuguccagccagcc

SEQ ID NO: 606754 - RNA, 22 nt, Human
cuucagagcuuguuaaaacugu

SEQ ID NO: 606755 - RNA, 22 nt, Human
acaguucuguccuagacuucgu

SEQ ID NO: 606756 - RNA, 22 nt, Human
gaagaauauucuugaucuuaga

SEQ ID NO: 606757 - RNA, 22 nt, Human
ucaccacugaggccacguggcu

SEQ ID NO: 606758 - RNA, 22 nt, Human
ggguuaaagcaggaagcaucuu

SEQ ID NO: 606759 - RNA, 22 nt, Human
acagcacaggaguugaaugggc

SEQ ID NO: 606760 - RNA, 22 nt, Human
cuguaugaaauuaaguaaacag

SEQ ID NO: 606761 - RNA, 20 nt, Human
agcggcagcuuccugcuucg

SEQ ID NO: 606762 - RNA, 22 nt, Human
uggcugaggcacagcugccgcc

SEQ ID NO: 606763 - RNA, 22 nt, Human
aaauggcagugucauaaggcuc

SEQ ID NO: 606764 - RNA, 22 nt, Human
caaucuauagagcuuuagacua

SEQ ID NO: 606765 - RNA, 22 nt, Human
augagguaauagggcagugggg

SEQ ID NO: 606766 - RNA, 22 nt, Human
caaggagaaaacggcuucugaa

SEQ ID NO: 606767 - RNA, 22 nt, Human
cagcaagaaucagacaaccuca

SEQ ID NO: 606768 - RNA, 22 nt, Human
ucaguauaauugcuggcacuga

SEQ ID NO: 606769 - RNA, 22 nt, Human
acaagcaugggcuuugacauca

SEQ ID NO: 606770 - RNA, 22 nt, Human
gacccuguuucuacaaauaauu

SEQ ID NO: 606771 - RNA, 22 nt, Human
ggagaaggaauauuggaguagg

SEQ ID NO: 606772 - RNA, 23 nt, Human
uccagcagagccuuccaggaggg

SEQ ID NO: 606773 - RNA, 22 nt, Human
acaggccagccugggguaaggu

SEQ ID NO: 606774 - RNA, 22 nt, Human
ugugagcuuaggacagggcuau

SEQ ID NO: 606775 - RNA, 22 nt, Human
aaauuuaagaagugugugcgug

SEQ ID NO: 606776 - RNA, 22 nt, Human
aaaugucaaggugauagaugca

SEQ ID NO: 606777 - RNA, 22 nt, Human
uuucuauuguaagucuccuaua

SEQ ID NO: 606778 - RNA, 18 nt, Human
gggcauggaugcagcauc

SEQ ID NO: 606779 - RNA, 22 nt, Human
ccagugggaacacuggcauugc

SEQ ID NO: 606780 - RNA, 22 nt, Human
uagaacuuauuagaaaggcuca

SEQ ID NO: 606781 - RNA, 18 nt, Human
cuuauuguuuaaauggcc

SEQ ID NO: 606782 - RNA, 20 nt, Human
aagcuucacuucauuugauc

SEQ ID NO: 606783 - RNA, 22 nt, Human
cagccagccucucaaccaugca

SEQ ID NO: 606784 - RNA, 22 nt, Human
uuugcuauuuuucugugcagcu

SEQ ID NO: 606785 - RNA, 22 nt, Human
cucugguucagggcucccuggc

SEQ ID NO: 606786 - RNA, 22 nt, Human
ggccugagaaccauggggccaa

SEQ ID NO: 606787 - RNA, 22 nt, Human
ugaugaggaccuggucucugcu

SEQ ID NO: 606788 - RNA, 22 nt, Human
gggccuggggugacguaccccu

SEQ ID NO: 606789 - RNA, 22 nt, Human
gcugccuucccaggccuuugcu

SEQ ID NO: 606790 - RNA, 22 nt, Human
guaaagaaggcaaccugguuau

SEQ ID NO: 606791 - RNA, 22 nt, Human
agcuucuuugugggcuccagaa

SEQ ID NO: 606792 - RNA, 22 nt, Human
gaccugccugagcugccucugc

SEQ ID NO: 606793 - RNA, 23 nt, Human
cuacaagagcaagcauggacaag

SEQ ID NO: 606794 - RNA, 22 nt, Human
ucccagggcuuuucucaugcuu

SEQ ID NO: 606795 - RNA, 22 nt, Human
ugucagugucuaugaagaauuu

SEQ ID NO: 606796 - RNA, 22 nt, Human
aaauauagugacacuuauaguc

SEQ ID NO: 606797 - RNA, 22 nt, Human
aaaucugagaaauauuguccag

SEQ ID NO: 606798 - RNA, 22 nt, Human
uaguugacuucucuaucccagc

SEQ ID NO: 606799 - RNA, 22 nt, Human
ggggccuguagagcuucaggga

SEQ ID NO: 606800 - RNA, 22 nt, Human
cgggcgcacuccgggcagcugu

SEQ ID NO: 606801 - RNA, 22 nt, Human
gucuggagccccagucaaugag

SEQ ID NO: 606802 - RNA, 22 nt, Human
agaguuuaccacuauuuuuggu

SEQ ID NO: 606803 - RNA, 20 nt, Human
ccucuguguccugugucaua

SEQ ID NO: 606804 - RNA, 22 nt, Human
ugcagggcaguuuguuucggca

SEQ ID NO: 606805 - RNA, 22 nt, Human
uagguuuacugaauuaguggaa

SEQ ID NO: 606806 - RNA, 22 nt, Human
cugagguagccauggcccaagu

SEQ ID NO: 606807 - RNA, 22 nt, Human
auggaaagcuaagccauuuacc

SEQ ID NO: 606808 - RNA, 22 nt, Human
cagccacucggccauaaaggcu

SEQ ID NO: 606809 - RNA, 22 nt, Human
agaaaacuggagccugggguug

SEQ ID NO: 606810 - RNA, 22 nt, Human
ugagggccgaggagcugugggu

SEQ ID NO: 606811 - RNA, 22 nt, Human
cccuccagugucccagugggga

SEQ ID NO: 606812 - RNA, 22 nt, Human
guggugcaggaagcaucuggcu

SEQ ID NO: 606813 - RNA, 22 nt, Human
ucccagagauuuccucuccuuc

SEQ ID NO: 606814 - RNA, 22 nt, Human
guguccagagaaacucacagcu

SEQ ID NO: 606815 - RNA, 22 nt, Human
ucaaaaucaaagauacuugaaa

SEQ ID NO: 606816 - RNA, 22 nt, Human
uuugcauugcauuaaguauucu

SEQ ID NO: 606817 - RNA, 22 nt, Human
ucaguucuuuauuucacaguga

SEQ ID NO: 606818 - RNA, 22 nt, Human
agccuggccugggcaggcacau

SEQ ID NO: 606819 - RNA, 19 nt, Human
uuuucccacccuuuagaau

SEQ ID NO: 606820 - RNA, 22 nt, Human
aacaugaaaagcccagagaggu

SEQ ID NO: 606821 - RNA, 22 nt, Human
gccuuauuaccugcacuuugaa

SEQ ID NO: 606822 - RNA, 22 nt, Human
uggaggccuagguugaugugug

SEQ ID NO: 606823 - RNA, 22 nt, Human
cugauauucuuugagcugcuaa

SEQ ID NO: 606824 - RNA, 22 nt, Human
auuuaauuuacauuugacagag

SEQ ID NO: 606825 - RNA, 22 nt, Human
acaggcugaggaugauugcauc

SEQ ID NO: 606826 - RNA, 22 nt, Human
cuuauauuugucaacuuuacaa

SEQ ID NO: 606827 - RNA, 22 nt, Human
ucaggcaggcucagaggaaaac

SEQ ID NO: 606828 - RNA, 19 nt, Human
acagcagguguggggauaa

SEQ ID NO: 606829 - RNA, 22 nt, Human
gcaggccuaagagaaggcauug

SEQ ID NO: 606830 - RNA, 22 nt, Human
uggggggcacuucagcacaaug

SEQ ID NO: 606831 - RNA, 17 nt, Human
uguucucuucagaaauc

SEQ ID NO: 606832 - RNA, 22 nt, Human
gcucugggugaacuuggagcaa

SEQ ID NO: 606833 - RNA, 22 nt, Human
ugggagcaagcuggugcuggag

SEQ ID NO: 606834 - RNA, 22 nt, Human
auacacagcuacauugaacaau

SEQ ID NO: 606835 - RNA, 20 nt, Human
gcagccucaacaggcacagc

SEQ ID NO: 606836 - RNA, 22 nt, Human
aacagauauaggcagaacuuug

SEQ ID NO: 606837 - RNA, 22 nt, Human
gcauggcaaauaucgagggcag

SEQ ID NO: 606838 - RNA, 22 nt, Human
aucauucuaguccuuauggucu

SEQ ID NO: 606839 - RNA, 22 nt, Human
auggaacaucagguuaagaaau

SEQ ID NO: 606840 - RNA, 22 nt, Human
cucccucacaaagcauucucuu

SEQ ID NO: 606841 - RNA, 22 nt, Human
acaagaagagcauuugcagggu

SEQ ID NO: 606842 - RNA, 22 nt, Human
ggagucugcucccagacaugau

SEQ ID NO: 606843 - RNA, 22 nt, Human
agggaggaguccucaaagucau

SEQ ID NO: 606844 - RNA, 22 nt, Human
gaggcauggccugaggcuagga

SEQ ID NO: 606845 - RNA, 22 nt, Human
aaguuucauguggagguagacu

SEQ ID NO: 606846 - RNA, 21 nt, Human
uuugaaagugggugauucuuu

SEQ ID NO: 606847 - RNA, 22 nt, Human
acuuguuuggagccagcuguaa

SEQ ID NO: 606848 - RNA, 22 nt, Human
acuuccuguguuggucuugcug

SEQ ID NO: 606849 - RNA, 22 nt, Human
uaauuguaaaguaguaguacag

SEQ ID NO: 606850 - RNA, 22 nt, Human
agcuagaauguuccuuuucauu

SEQ ID NO: 606851 - RNA, 22 nt, Human
agccugucugucuccaaagcug

SEQ ID NO: 606852 - RNA, 22 nt, Human
gcccucucuucugcagccucca

SEQ ID NO: 606853 - RNA, 22 nt, Human
cuugaauugggggaagaucacu

SEQ ID NO: 606854 - RNA, 22 nt, Human
agugcugagugauugcaaagga

SEQ ID NO: 606855 - RNA, 22 nt, Human
acagcuccuacugaagccaugu

SEQ ID NO: 606856 - RNA, 22 nt, Human
cagacagaccugcaagggcaca

SEQ ID NO: 606857 - RNA, 19 nt, Human
gccuugaagcaacucuugu

SEQ ID NO: 606858 - RNA, 22 nt, Human
uacuuuauucaggaaggcuggu

SEQ ID NO: 606859 - RNA, 22 nt, Human
ucaguccacuaagacccuuguu

SEQ ID NO: 606860 - RNA, 22 nt, Human
cccugcucuucugacucaagcu

SEQ ID NO: 606861 - RNA, 22 nt, Human
aagaugcagcuuuacaauaagg

SEQ ID NO: 606862 - RNA, 19 nt, Human
agccagggugagaaggagc

SEQ ID NO: 606863 - RNA, 22 nt, Human
auguguguaugugccuauaucu

SEQ ID NO: 606864 - RNA, 22 nt, Human
uacauucuauaucuguuacauc

SEQ ID NO: 606865 - RNA, 22 nt, Human
gggagcagccugccucccaccu

SEQ ID NO: 606866 - RNA, 22 nt, Human
gaggaagaaagcauaggugggg

SEQ ID NO: 606867 - RNA, 22 nt, Human
cccaggaacuccagagcuccuc

SEQ ID NO: 606868 - RNA, 22 nt, Human
ucacuuuaccucauucaggcag

SEQ ID NO: 606869 - RNA, 22 nt, Human
uaaguuaacccuguuaauagau

SEQ ID NO: 606870 - RNA, 22 nt, Human
uugaggcagguccggguccuuc

SEQ ID NO: 606871 - RNA, 22 nt, Human
ucaauucuagagccuuacauug

SEQ ID NO: 606872 - RNA, 22 nt, Human
gaauacauuggaaaucagaaua

SEQ ID NO: 606873 - RNA, 22 nt, Human
ugagcuccuggucacaauuauc

SEQ ID NO: 606874 - RNA, 22 nt, Human
ggcucuccacuauggaugagaa

SEQ ID NO: 606875 - RNA, 22 nt, Human
ccagggucuuggagaggagugc

SEQ ID NO: 606876 - RNA, 22 nt, Human
agccagcucccuccccugcagg

SEQ ID NO: 606877 - RNA, 19 nt, Human
ucacaagagagauaaagug

SEQ ID NO: 606878 - RNA, 22 nt, Human
uuacaugaugauuucauaaaca

SEQ ID NO: 606879 - RNA, 22 nt, Human
augcaggguucugggcuagaga

SEQ ID NO: 606880 - RNA, 22 nt, Human
cuuccucuguggccagagugua

SEQ ID NO: 606881 - RNA, 22 nt, Human
uccaggcaguuuuccagguugu

SEQ ID NO: 606882 - RNA, 22 nt, Human
auuccucauuuguugagaacca

SEQ ID NO: 606883 - RNA, 22 nt, Human
ggcuucaguggccagagaugau

SEQ ID NO: 606884 - RNA, 22 nt, Human
ggagauggcaagaaguuauuag

SEQ ID NO: 606885 - RNA, 22 nt, Human
uggagagcagggcuggaguuca

SEQ ID NO: 606886 - RNA, 22 nt, Human
uaccauuuacuugaaaauaaaa

SEQ ID NO: 606887 - RNA, 22 nt, Human
uaauacacacucucauuccuaa

SEQ ID NO: 606888 - RNA, 22 nt, Human
cugugcccagcucccugacugc

SEQ ID NO: 606889 - RNA, 22 nt, Human
ugguuacacagcauguggacuu

SEQ ID NO: 606890 - RNA, 22 nt, Human
caggcaggugcagauuccucuu

SEQ ID NO: 606891 - RNA, 23 nt, Human
aagcacagaaugguuuaggaguu

SEQ ID NO: 606892 - RNA, 22 nt, Human
cucaguuuuugcugucugguuc

SEQ ID NO: 606893 - RNA, 22 nt, Human
aauaauguaggaugauaaauga

SEQ ID NO: 606894 - RNA, 18 nt, Human
cacaggcucccagugagg

SEQ ID NO: 606895 - RNA, 22 nt, Human
ugcugaggcaguccuaacagga

SEQ ID NO: 606896 - RNA, 22 nt, Human
cagcucugugcaggccugggga

SEQ ID NO: 606897 - RNA, 20 nt, Human
uacugcaggaaucagcuagc

SEQ ID NO: 606898 - RNA, 22 nt, Human
ggucugagugggcaggggccgg

SEQ ID NO: 606899 - RNA, 22 nt, Human
cagcccuugaugauaauuuauc

SEQ ID NO: 606900 - RNA, 22 nt, Human
aauucucuccaggguaacauca

SEQ ID NO: 606901 - RNA, 22 nt, Human
cuucuuauuaauccuucucugu

SEQ ID NO: 606902 - RNA, 22 nt, Human
ccagcugcauccuauucacugc

SEQ ID NO: 606903 - RNA, 22 nt, Human
aaugaaugaaccacauauaaca

SEQ ID NO: 606904 - RNA, 22 nt, Human
cacagcuucugagugaggauuu

SEQ ID NO: 606905 - RNA, 23 nt, Human
gcacugggcucucagcaaggugu

SEQ ID NO: 606906 - RNA, 22 nt, Human
ucucuucacaugcuugcuccaa

SEQ ID NO: 606907 - RNA, 22 nt, Human
agaagcuugaaggagcagugac

SEQ ID NO: 606908 - RNA, 22 nt, Human
aacagaauaucaaaagauuaug

SEQ ID NO: 606909 - RNA, 22 nt, Human
aggcauggauguagcagugacc

SEQ ID NO: 606910 - RNA, 22 nt, Human
uacacacaugcauuugccuuau

SEQ ID NO: 606911 - RNA, 22 nt, Human
ucacugaagacugggcucuaaa

SEQ ID NO: 606912 - RNA, 22 nt, Human
uaauacuuuugccuuguauuca

SEQ ID NO: 606913 - RNA, 22 nt, Human
acagugcugugcagucugcccu

SEQ ID NO: 606914 - RNA, 21 nt, Human
uuguguuuccccagucacuuu

SEQ ID NO: 606915 - RNA, 22 nt, Human
uggcugcaguucacaggagcaa

SEQ ID NO: 606916 - RNA, 16 nt, Human
gcaggcagaucacaug

SEQ ID NO: 606917 - RNA, 22 nt, Human
aaggccaggccuagcacggagg

SEQ ID NO: 606918 - RNA, 22 nt, Human
aggccuggcaugagaccugaga

SEQ ID NO: 606919 - RNA, 22 nt, Human
cuauggaagggaugcaaagaaa

SEQ ID NO: 606920 - RNA, 22 nt, Human
ucauucuggaugacuuucuaga

SEQ ID NO: 606921 - RNA, 22 nt, Human
uaggcugagcuaagagagcuua

SEQ ID NO: 606922 - RNA, 22 nt, Human
caagauucagagucuucuaacc

SEQ ID NO: 606923 - RNA, 22 nt, Human
ugagacaggagaggccccuccu

SEQ ID NO: 606924 - RNA, 22 nt, Human
acagucuuuagaguauuguccu

SEQ ID NO: 606925 - RNA, 22 nt, Human
cccagcugauuuuugcagagau

SEQ ID NO: 606926 - RNA, 22 nt, Human
ugaaucauggauaaauagcuua

SEQ ID NO: 606927 - RNA, 22 nt, Human
guggccuggaaaggcuggucug

SEQ ID NO: 606928 - RNA, 22 nt, Human
ccagggcuugguggcuuguauc

SEQ ID NO: 606929 - RNA, 22 nt, Human
uagaaacaugagagaaacucuu

SEQ ID NO: 606930 - RNA, 22 nt, Human
aggcggcugguguccugcaggu

SEQ ID NO: 606931 - RNA, 22 nt, Human
caagauauugauuuccagcuga

SEQ ID NO: 606932 - RNA, 22 nt, Human
ucucugaagaaucgaugauucu

SEQ ID NO: 606933 - RNA, 20 nt, Human
guggccuguccuguuguggg

SEQ ID NO: 606934 - RNA, 20 nt, Human
ccugccuguguuugugauga

SEQ ID NO: 606935 - RNA, 22 nt, Human
uuuauuccaugugucuaugacc

SEQ ID NO: 606936 - RNA, 22 nt, Human
uagcauuagagauagaaauagu

SEQ ID NO: 606937 - RNA, 22 nt, Human
gccucaggccuauagcugcugu

SEQ ID NO: 606938 - RNA, 22 nt, Human
gacaggaauguguggaugcgga

SEQ ID NO: 606939 - RNA, 22 nt, Human
uuacacaugcucacuuauuugu

SEQ ID NO: 606940 - RNA, 22 nt, Human
aauagcauccuguaucucuucc

SEQ ID NO: 606941 - RNA, 22 nt, Human
cagaaaaggguguuuguucagg

SEQ ID NO: 606942 - RNA, 19 nt, Human
ugcuuugcucuuggacuca

SEQ ID NO: 606943 - RNA, 22 nt, Human
cgcaacucagcaacuuaacugc

SEQ ID NO: 606944 - RNA, 22 nt, Human
cuuuauguccaccagacugcaa

SEQ ID NO: 606945 - RNA, 22 nt, Human
uggcuuccgccgcgggccucgg

SEQ ID NO: 606946 - RNA, 22 nt, Human
ggacacagccacuuaggguacc

SEQ ID NO: 606947 - RNA, 20 nt, Human
cagcacagagcuuggcucua

SEQ ID NO: 606948 - RNA, 22 nt, Human
ggcuguagguuggugcuggaca

SEQ ID NO: 606949 - RNA, 22 nt, Human
uuaauuguuggaaauagauuau

SEQ ID NO: 606950 - RNA, 22 nt, Human
ugucccauggauaccaggcuau

SEQ ID NO: 606951 - RNA, 22 nt, Human
auccaaaucaugucagaagaac

SEQ ID NO: 606952 - RNA, 22 nt, Human
uuggggcucugaaaaagaugua

SEQ ID NO: 606953 - RNA, 21 nt, Human
ggcccugguuacgccuccucu

SEQ ID NO: 606954 - RNA, 22 nt, Human
gcaaacuggcaaaccugucugu

SEQ ID NO: 606955 - RNA, 22 nt, Human
agcuguguaagucauguaggug

SEQ ID NO: 606956 - RNA, 22 nt, Human
acagccagugacuggacaagcu

SEQ ID NO: 606957 - RNA, 22 nt, Human
cugcuuucugcaccccaggucg

SEQ ID NO: 606958 - RNA, 21 nt, Human
agacagaacaacugcucucca

SEQ ID NO: 606959 - RNA, 22 nt, Human
ugcccuggggucuggagcagca

SEQ ID NO: 606960 - RNA, 20 nt, Human
auaauuuacccugcaccacu

SEQ ID NO: 606961 - RNA, 22 nt, Human
aaggccaggaaauuaucccuau

SEQ ID NO: 606962 - RNA, 20 nt, Human
ccuggagccuggaaggaguc

SEQ ID NO: 606963 - RNA, 22 nt, Human
caucacagguccugaugacauu

SEQ ID NO: 606964 - RNA, 22 nt, Human
acagugcuaucaauagcuagaa

SEQ ID NO: 606965 - RNA, 22 nt, Human
augcagacaugggagaguugag

SEQ ID NO: 606966 - RNA, 22 nt, Human
caguggaagcuggcugugaaga

SEQ ID NO: 606967 - RNA, 22 nt, Human
guguuugcuggagcucuggguc

SEQ ID NO: 606968 - RNA, 22 nt, Human
ggcgcucaguguugccccagag

SEQ ID NO: 606969 - RNA, 21 nt, Human
caguuacacaaguguuaccag

SEQ ID NO: 606970 - RNA, 22 nt, Human
cccuucagugcuaggcugccug

SEQ ID NO: 606971 - RNA, 22 nt, Human
cugggcuguucugccccugggu

SEQ ID NO: 606972 - RNA, 22 nt, Human
aagcaggaaggagcccagggca

SEQ ID NO: 606973 - RNA, 21 nt, Human
ucauuucucuauguauuucac

SEQ ID NO: 606974 - RNA, 22 nt, Human
guccuguguguugccggcugaa

SEQ ID NO: 606975 - RNA, 22 nt, Human
agcuccuccugugccaggccag

SEQ ID NO: 606976 - RNA, 22 nt, Human
agauguggauccuaggguagaa

SEQ ID NO: 606977 - RNA, 23 nt, Human
ugaaagcaaugggucuauaguau

SEQ ID NO: 606978 - RNA, 22 nt, Human
uuggaagggauauuggcauaug

SEQ ID NO: 606979 - RNA, 22 nt, Human
guuccaaauuuggaucuuuagg

SEQ ID NO: 606980 - RNA, 22 nt, Human
gcaugcugagcccacgccuggg

SEQ ID NO: 606981 - RNA, 22 nt, Human
agcauaaaggucaacguuuuag

SEQ ID NO: 606982 - RNA, 22 nt, Human
agagaagggccuguauguaauc

SEQ ID NO: 606983 - RNA, 22 nt, Human
ccucacuggccagccaggggug

SEQ ID NO: 606984 - RNA, 22 nt, Human
acuugucuggcagaucaugcaa

SEQ ID NO: 606985 - RNA, 22 nt, Human
gcagggcuccacuguggccaag

SEQ ID NO: 606986 - RNA, 22 nt, Human
ggcaggagggcggacaaugacc

SEQ ID NO: 606987 - RNA, 23 nt, Human
uuaaaauguggucucucccuagu

SEQ ID NO: 606988 - RNA, 22 nt, Human
ccacagaggacaacugccuggc

SEQ ID NO: 606989 - RNA, 22 nt, Human
uggccuggggaccugugagacc

SEQ ID NO: 606990 - RNA, 22 nt, Human
agcugaagcagucaguucagcu

SEQ ID NO: 606991 - RNA, 22 nt, Human
uugaaucauuacaauagauaag

SEQ ID NO: 606992 - RNA, 22 nt, Human
auuugguuucaggauucucagg

SEQ ID NO: 606993 - RNA, 22 nt, Human
uccugguggucugugcuucuuc

SEQ ID NO: 606994 - RNA, 22 nt, Human
aauagcuuaguccugauucugu

SEQ ID NO: 606995 - RNA, 22 nt, Human
agagacaggauaucugcucaug

SEQ ID NO: 606996 - RNA, 22 nt, Human
gaaaguuugccucucucuugag

SEQ ID NO: 606997 - RNA, 22 nt, Human
agcuaggggaccaagguggccc

SEQ ID NO: 606998 - RNA, 22 nt, Human
uuugggcugguuugccaugccc

SEQ ID NO: 606999 - RNA, 22 nt, Human
ggcagugaugucaaacagugaa

SEQ ID NO: 607000 - RNA, 22 nt, Human
ccugcaccucugugcuuggaac

SEQ ID NO: 607001 - RNA, 22 nt, Human
agggccagcuagagcccucgcc

SEQ ID NO: 607002 - RNA, 22 nt, Human
ccagcuucucucugaugcagcu

SEQ ID NO: 607003 - RNA, 22 nt, Human
cuggccuuucgugagagcuggg

SEQ ID NO: 607004 - RNA, 22 nt, Human
uucugaaauucgacuauccaau

SEQ ID NO: 607005 - RNA, 22 nt, Human
uccuucuguagucccugucccu

SEQ ID NO: 607006 - RNA, 22 nt, Human
gauuauggagaagaacaaugaa

SEQ ID NO: 607007 - RNA, 22 nt, Human
ggagcuguuggcagcuaucuug

SEQ ID NO: 607008 - RNA, 22 nt, Human
aagcacugaggaaaaauuugau

SEQ ID NO: 607009 - RNA, 22 nt, Human
aaaucucaggccucuauuuacu

SEQ ID NO: 607010 - RNA, 22 nt, Human
uaggcagauguuaacaggaaaa

SEQ ID NO: 607011 - RNA, 22 nt, Human
agcagcuggugagcaagcucag

SEQ ID NO: 607012 - RNA, 22 nt, Human
uccugggcccaggcugccaggg

SEQ ID NO: 607013 - RNA, 22 nt, Human
uggguccaguguccuggcuaug

SEQ ID NO: 607014 - RNA, 22 nt, Human
cauauuuuaguugcugaacagc

SEQ ID NO: 607015 - RNA, 22 nt, Human
ugucuucauuccccaugaaguc

SEQ ID NO: 607016 - RNA, 22 nt, Human
aauaaucucccuuuuuguaugu

SEQ ID NO: 607017 - RNA, 22 nt, Human
ucagggcaucaucaugaauaua

SEQ ID NO: 607018 - RNA, 22 nt, Human
uuggcucaugcuguuuugugca

SEQ ID NO: 607019 - RNA, 22 nt, Human
ugggacagagugagcuuuggcc

SEQ ID NO: 607020 - RNA, 22 nt, Human
gcugcagccaaauucauuguca

SEQ ID NO: 607021 - RNA, 22 nt, Human
aauuggacugugcugcucaaaa

SEQ ID NO: 607022 - RNA, 21 nt, Human
uccauaagagaccaucuccua

SEQ ID NO: 607023 - RNA, 22 nt, Human
aagccacagaucguucugucac

SEQ ID NO: 607024 - RNA, 22 nt, Human
uccccacacagauacagaguag

SEQ ID NO: 607025 - RNA, 22 nt, Human
cugccuccugccgugcagcuuc

SEQ ID NO: 607026 - RNA, 22 nt, Human
acaaagugcugacauuacaggc

SEQ ID NO: 607027 - RNA, 20 nt, Human
acuguguaaacaugauucau

SEQ ID NO: 607028 - RNA, 22 nt, Human
gagcuuugagauucuuauggua

SEQ ID NO: 607029 - RNA, 22 nt, Human
augcaugcuucuuauaguacuu

SEQ ID NO: 607030 - RNA, 22 nt, Human
caggaaacauucccauaacaca

SEQ ID NO: 607031 - RNA, 22 nt, Human
cugggccacuuccucaggggaa

SEQ ID NO: 607032 - RNA, 22 nt, Human
cugagggcuggagcugaggccu

SEQ ID NO: 607033 - RNA, 22 nt, Human
ucaaaguuuguggcaauuuauu

SEQ ID NO: 607034 - RNA, 22 nt, Human
gggucaggcucagcagggcagc

SEQ ID NO: 607035 - RNA, 22 nt, Human
ugucauggggaaaauaacagac

SEQ ID NO: 607036 - RNA, 22 nt, Human
uggagacugauaaaggcuauug

SEQ ID NO: 607037 - RNA, 22 nt, Human
ugugggcucuaauggcagcaga

SEQ ID NO: 607038 - RNA, 22 nt, Human
accagcuggcccaugagcacgu

SEQ ID NO: 607039 - RNA, 22 nt, Human
ggcccagguccagcgaguaccu

SEQ ID NO: 607040 - RNA, 22 nt, Human
uuuacaggguucaagaaugaaa

SEQ ID NO: 607041 - RNA, 22 nt, Human
aagcaggcgagggccuggagca

SEQ ID NO: 607042 - RNA, 22 nt, Human
uguuaaaaauucagcucuagau

SEQ ID NO: 607043 - RNA, 22 nt, Human
gaggagggagaauuaggcuuaa

SEQ ID NO: 607044 - RNA, 22 nt, Human
ugcagggccuugggaugugucc

SEQ ID NO: 607045 - RNA, 22 nt, Human
ucucaugaaaggucucuccugg

SEQ ID NO: 607046 - RNA, 22 nt, Human
gaacauucuuggaggaaauaac

SEQ ID NO: 607047 - RNA, 22 nt, Human
gaucuggaaucugaaggcugag

SEQ ID NO: 607048 - RNA, 22 nt, Human
agaaucugcauuuuaacaagcu

SEQ ID NO: 607049 - RNA, 22 nt, Human
agugcuucuuaaaccuuucuac

SEQ ID NO: 607050 - RNA, 23 nt, Human
augaggucagccauaagacggaa

SEQ ID NO: 607051 - RNA, 22 nt, Human
ccugcaggggagagacuucuag

SEQ ID NO: 607052 - RNA, 22 nt, Human
uaacacaugguucugucaggaa

SEQ ID NO: 607053 - RNA, 22 nt, Human
aagagagaccaugggggacagg

SEQ ID NO: 607054 - RNA, 20 nt, Human
ggugcagguaacgcugugcu

SEQ ID NO: 607055 - RNA, 22 nt, Human
cacaggagaaaggggaagcucg

SEQ ID NO: 607056 - RNA, 22 nt, Human
uaggacaggugaggggcugugg

SEQ ID NO: 607057 - RNA, 22 nt, Human
ccaggagagcauugcacagagg

SEQ ID NO: 607058 - RNA, 22 nt, Human
uaccugucaaaagacauggaga

SEQ ID NO: 607059 - RNA, 22 nt, Human
ccagccccuauccucgcuccac

SEQ ID NO: 607060 - RNA, 22 nt, Human
cuccugggcucauaucauucag

SEQ ID NO: 607061 - RNA, 22 nt, Human
agaugugggcaauggaauggag

SEQ ID NO: 607062 - RNA, 22 nt, Human
auguuuucuccauguuaugcuu

SEQ ID NO: 607063 - RNA, 22 nt, Human
auuaaggagggcugggcaugau

SEQ ID NO: 607064 - RNA, 22 nt, Human
agaauacaucuagugcugcaug

SEQ ID NO: 607065 - RNA, 22 nt, Human
agccccucuguggcucugccuc

SEQ ID NO: 607066 - RNA, 23 nt, Human
agucaguguaaguuuggaaugca

SEQ ID NO: 607067 - RNA, 22 nt, Human
uguguguguccucauuugcaga

SEQ ID NO: 607068 - RNA, 22 nt, Human
caggugaacucaguuuuguauu

SEQ ID NO: 607069 - RNA, 22 nt, Human
uuacauucaauuucuagaggua

SEQ ID NO: 607070 - RNA, 22 nt, Human
ugggcuccagcaccugugcucu

SEQ ID NO: 607071 - RNA, 22 nt, Human
cccaggagaugcacuccauugg

SEQ ID NO: 607072 - RNA, 22 nt, Human
cugaggucagaguuuagucugg

SEQ ID NO: 607073 - RNA, 22 nt, Human
ggagcugugggacgcuguccca

SEQ ID NO: 607074 - RNA, 22 nt, Human
uguaugugcuugagaagguggg

SEQ ID NO: 607075 - RNA, 22 nt, Human
aagcucugcucagcagacuagg

SEQ ID NO: 607076 - RNA, 22 nt, Human
cagagguagcaugcuguggcuu

SEQ ID NO: 607077 - RNA, 22 nt, Human
auccaagagacauuugugaaug

SEQ ID NO: 607078 - RNA, 22 nt, Human
gcuccagggacccaagagaaaa

SEQ ID NO: 607079 - RNA, 22 nt, Human
cauguuaaguguuugauaacca

SEQ ID NO: 607080 - RNA, 22 nt, Human
aagugaugcuacgacuuugaca

SEQ ID NO: 607081 - RNA, 22 nt, Human
ucccagcagggccgaccagccu

SEQ ID NO: 607082 - RNA, 22 nt, Human
auuuuuccaugauacuuaucug

SEQ ID NO: 607083 - RNA, 22 nt, Human
aaagguuugccgaccucugcuu

SEQ ID NO: 607084 - RNA, 22 nt, Human
ugcagcugaugauacccccaug

SEQ ID NO: 607085 - RNA, 22 nt, Human
uaaaguuuguagcaauugauau

SEQ ID NO: 607086 - RNA, 22 nt, Human
accucugaagggccaagcaaug

SEQ ID NO: 607087 - RNA, 22 nt, Human
caggaggaaaguuccacucaac

SEQ ID NO: 607088 - RNA, 22 nt, Human
auuuaacaagacagagaacugg

SEQ ID NO: 607089 - RNA, 19 nt, Human
aaggcuuggcugagcuggg

SEQ ID NO: 607090 - RNA, 22 nt, Human
agucauaauuauaaacaucagu

SEQ ID NO: 607091 - RNA, 22 nt, Human
ugugggaaugacgaggaagagg

SEQ ID NO: 607092 - RNA, 22 nt, Human
ugcaagaucuugucucugccac

SEQ ID NO: 607093 - RNA, 22 nt, Human
cggcagagcggcgagccccucc

SEQ ID NO: 607094 - RNA, 21 nt, Human
ggcugcugucaccgcugucac

SEQ ID NO: 607095 - RNA, 22 nt, Human
ggaccugaacauaaaacgaggc

SEQ ID NO: 607096 - RNA, 22 nt, Human
gaaguuuagguucuuauguuua

SEQ ID NO: 607097 - RNA, 19 nt, Human
aguuggggcagggaagaga

SEQ ID NO: 607098 - RNA, 22 nt, Human
uggaggcaacugaagauguagu

SEQ ID NO: 607099 - RNA, 22 nt, Human
ugaagacagggucuuuaacgag

SEQ ID NO: 607100 - RNA, 22 nt, Human
aucaugacagagucugccaucc

SEQ ID NO: 607101 - RNA, 22 nt, Human
aaucuucacucauucagaguug

SEQ ID NO: 607102 - RNA, 22 nt, Human
aggcaggagugacccugacagg

SEQ ID NO: 607103 - RNA, 22 nt, Human
cagagguacaagcuaaguuggg

SEQ ID NO: 607104 - RNA, 22 nt, Human
gaguggggcccacugcugggug

SEQ ID NO: 607105 - RNA, 22 nt, Human
aacugauuucaaguucaguuuc

SEQ ID NO: 607106 - RNA, 22 nt, Human
ugccugggagugaccaagacuc

SEQ ID NO: 607107 - RNA, 22 nt, Human
cacccugcccacuagcaaucug

SEQ ID NO: 607108 - RNA, 22 nt, Human
gcucacugcaaccucugcuucc

SEQ ID NO: 607109 - RNA, 22 nt, Human
uucugggaggcuggcugucaua

SEQ ID NO: 607110 - RNA, 22 nt, Human
gccugagaaggauaggaagcga

SEQ ID NO: 607111 - RNA, 22 nt, Human
ugggacucacucuuuuggccag

SEQ ID NO: 607112 - RNA, 22 nt, Human
agacacugaaucagagggacau

SEQ ID NO: 607113 - RNA, 22 nt, Human
ccucacucugcacccugcagca

SEQ ID NO: 607114 - RNA, 22 nt, Human
ugcaggagacauaauagggacu

SEQ ID NO: 607115 - RNA, 22 nt, Human
gaagguuugauccuuauuuaua

SEQ ID NO: 607116 - RNA, 22 nt, Human
aacagcagaaacugcaagcuac

SEQ ID NO: 607117 - RNA, 22 nt, Human
ggccagagagcagccaggauuc

SEQ ID NO: 607118 - RNA, 22 nt, Human
gaggcuagagcaggggcucaau

SEQ ID NO: 607119 - RNA, 21 nt, Human
gccugggaaaucugggaagcc

SEQ ID NO: 607120 - RNA, 22 nt, Human
ccccaggacguggcccucauag

SEQ ID NO: 607121 - RNA, 22 nt, Human
uuagugguacucagggagggaa

SEQ ID NO: 607122 - RNA, 22 nt, Human
acuuccagugucugcugcuagc

SEQ ID NO: 607123 - RNA, 22 nt, Human
ugaccaauacuguggaugccag

SEQ ID NO: 607124 - RNA, 22 nt, Human
aaaguacagauggugagguugg

SEQ ID NO: 607125 - RNA, 23 nt, Human
uggcugagcccacuaucuuggcc

SEQ ID NO: 607126 - RNA, 22 nt, Human
uagcacaggucuuguugccauu

SEQ ID NO: 607127 - RNA, 22 nt, Human
gaagucugagugggggccaggc

SEQ ID NO: 607128 - RNA, 22 nt, Human
ucugaccacagacaaccugcua

SEQ ID NO: 607129 - RNA, 21 nt, Human
augugaaauaucaucagagca

SEQ ID NO: 607130 - RNA, 23 nt, Human
acugagccagggccugggucagc

SEQ ID NO: 607131 - RNA, 22 nt, Human
aggcaggaacccugugugcgcc

SEQ ID NO: 607132 - RNA, 22 nt, Human
ugaggaugguguuggagagggc

SEQ ID NO: 607133 - RNA, 22 nt, Human
uguacaaaacaagaugggggua

SEQ ID NO: 607134 - RNA, 22 nt, Human
gaagagguagcauuggcaggug

SEQ ID NO: 607135 - RNA, 21 nt, Human
ucucuggaauuagaccauguu

SEQ ID NO: 607136 - RNA, 22 nt, Human
uacuuuaauauaugugaaguuc

SEQ ID NO: 607137 - RNA, 22 nt, Human
cagcaguuaugaguagaauagu

SEQ ID NO: 607138 - RNA, 22 nt, Human
gggcacugugcugggugcuuua

SEQ ID NO: 607139 - RNA, 22 nt, Human
cugucagcacucuacuacagau

SEQ ID NO: 607140 - RNA, 22 nt, Human
acagaugagagacaaugugcua

SEQ ID NO: 607141 - RNA, 22 nt, Human
aguccuggguccagcagguccu

SEQ ID NO: 607142 - RNA, 22 nt, Human
uugcuuagcgacuccccuuccu

SEQ ID NO: 607143 - RNA, 22 nt, Human
cacuguuuuauuccaacauagg

SEQ ID NO: 607144 - RNA, 22 nt, Human
acucccagguugccuggcaggc

SEQ ID NO: 607145 - RNA, 22 nt, Human
guaaauauuaaaggcugcuaga

SEQ ID NO: 607146 - RNA, 22 nt, Human
cauguguuaaucuuucugcaaa

SEQ ID NO: 607147 - RNA, 22 nt, Human
ugcuacagagccaggaagagug

SEQ ID NO: 607148 - RNA, 19 nt, Human
cuccuggcucugucauuuu

SEQ ID NO: 607149 - RNA, 22 nt, Human
caggaguggugugagggacucc

SEQ ID NO: 607150 - RNA, 22 nt, Human
cagaggcccagugagagggcug

SEQ ID NO: 607151 - RNA, 22 nt, Human
gcugggaguuacugucuccuuu

SEQ ID NO: 607152 - RNA, 22 nt, Human
cccaggcuccugacucauucua

SEQ ID NO: 607153 - RNA, 22 nt, Human
uauuuuaaagugaagggucuug

SEQ ID NO: 607154 - RNA, 22 nt, Human
aucuuuaaagacaugugaacuu

SEQ ID NO: 607155 - RNA, 22 nt, Human
acaggaguuaaggcugaguuga

SEQ ID NO: 607156 - RNA, 22 nt, Human
gcugggccagagcagcagcacu

SEQ ID NO: 607157 - RNA, 20 nt, Human
cuggggaggaggauguguuc

SEQ ID NO: 607158 - RNA, 22 nt, Human
cagaaacauguauaaaguugua

SEQ ID NO: 607159 - RNA, 21 nt, Human
aggaguugcuguggccugguu

SEQ ID NO: 607160 - RNA, 22 nt, Human
cuacagguaugugcaugacauc

SEQ ID NO: 607161 - RNA, 22 nt, Human
cucugaagaugguaccagcuuu

SEQ ID NO: 607162 - RNA, 22 nt, Human
cgcccagcugaaaucuccaggc

SEQ ID NO: 607163 - RNA, 22 nt, Human
agugugggccacgcagcugagc

SEQ ID NO: 607164 - RNA, 22 nt, Human
gaagcaguucgaaagcaguugg

SEQ ID NO: 607165 - RNA, 22 nt, Human
agcugccugcuuaugagcucca

SEQ ID NO: 607166 - RNA, 19 nt, Human
ugguggaggccccauguuc

SEQ ID NO: 607167 - RNA, 22 nt, Human
ucuuucaaagcaaaaugaggcu

SEQ ID NO: 607168 - RNA, 22 nt, Human
aagcacuuagaagagugccugc

SEQ ID NO: 607169 - RNA, 21 nt, Human
cuguuugcaagccuauguguc

SEQ ID NO: 607170 - RNA, 20 nt, Human
auugugaauacugcauaugu

SEQ ID NO: 607171 - RNA, 22 nt, Human
uuugucauguccuuaacugucu

SEQ ID NO: 607172 - RNA, 22 nt, Human
ugccuguguggucugcgcauua

SEQ ID NO: 607173 - RNA, 22 nt, Human
agcugcuuauaagauuugggag

SEQ ID NO: 607174 - RNA, 22 nt, Human
gugcagguggcuucuagcuucu

SEQ ID NO: 607175 - RNA, 22 nt, Human
ugccugucuuuccucccucgua

SEQ ID NO: 607176 - RNA, 22 nt, Human
gccacagguggaauuaagaaau

SEQ ID NO: 607177 - RNA, 22 nt, Human
cucauaaagugagaauaugacc

SEQ ID NO: 607178 - RNA, 18 nt, Human
ucugaggaauggaagagc

SEQ ID NO: 607179 - RNA, 22 nt, Human
cuccagugucucagagcagaug

SEQ ID NO: 607180 - RNA, 22 nt, Human
agcugguggagaagcagaccuc

SEQ ID NO: 607181 - RNA, 22 nt, Human
ggucccaggaaucuguguucua

SEQ ID NO: 607182 - RNA, 22 nt, Human
ucccagaaaaaggaggcuauga

SEQ ID NO: 607183 - RNA, 22 nt, Human
ucaagggaggagacacagcccu

SEQ ID NO: 607184 - RNA, 22 nt, Human
ugcacugauccugaccagugaa

SEQ ID NO: 607185 - RNA, 22 nt, Human
uguguacaucucuucucacauu

SEQ ID NO: 607186 - RNA, 22 nt, Human
ugucauuuccugaaugcugagu

SEQ ID NO: 607187 - RNA, 19 nt, Human
ucaaggcucccugagggau

SEQ ID NO: 607188 - RNA, 22 nt, Human
caggugccucaggaugagacaa

SEQ ID NO: 607189 - RNA, 22 nt, Human
gcugggcuucacagagccuuua

SEQ ID NO: 607190 - RNA, 22 nt, Human
gaaucuuaaaucggaaucuuaa

SEQ ID NO: 607191 - RNA, 22 nt, Human
gcaguggaagccucuuuaagca

SEQ ID NO: 607192 - RNA, 22 nt, Human
aaguuacagauugggagcagag

SEQ ID NO: 607193 - RNA, 23 nt, Human
uccagucuccugaaaggcagcgu

SEQ ID NO: 607194 - RNA, 22 nt, Human
auguuacauaguccuuauuugu

SEQ ID NO: 607195 - RNA, 22 nt, Human
acauuucuaauuuaauguaaca

SEQ ID NO: 607196 - RNA, 22 nt, Human
aauauuucuggugcuucucacu

SEQ ID NO: 607197 - RNA, 22 nt, Human
uggaggaaguggcuggccagaa

SEQ ID NO: 607198 - RNA, 22 nt, Human
uaguccuuacuuacuagaauaa

SEQ ID NO: 607199 - RNA, 22 nt, Human
aguggcaguuugggagcuacag

SEQ ID NO: 607200 - RNA, 18 nt, Human
aguuuuuaggaagaaaug

SEQ ID NO: 607201 - RNA, 20 nt, Human
cacaugcuguguguuucucu

SEQ ID NO: 607202 - RNA, 22 nt, Human
ugaacacaguucugaugagcuu

SEQ ID NO: 607203 - RNA, 22 nt, Human
ucaggcugauaggaggaacuga

SEQ ID NO: 607204 - RNA, 20 nt, Human
uccagcugucuuucagagac

SEQ ID NO: 607205 - RNA, 22 nt, Human
gacagaggcaagaccagaagcc

SEQ ID NO: 607206 - RNA, 22 nt, Human
agagauaugaguaguugugaca

SEQ ID NO: 607207 - RNA, 22 nt, Human
ugcaugcaugcuacugggaggu

SEQ ID NO: 607208 - RNA, 22 nt, Human
uaaagcaaggcaaauuguuggu

SEQ ID NO: 607209 - RNA, 22 nt, Human
agugggaggaaguggugauauu

SEQ ID NO: 607210 - RNA, 22 nt, Human
ccaggccuuccaguacgcagaa

SEQ ID NO: 607211 - RNA, 22 nt, Human
gcauaucagcaucaaaacacag

SEQ ID NO: 607212 - RNA, 20 nt, Human
ccucucugcaugcucccuga

SEQ ID NO: 607213 - RNA, 22 nt, Human
agauucaggacuggccacagcc

SEQ ID NO: 607214 - RNA, 22 nt, Human
uuucuagucucgaucucuuaau

SEQ ID NO: 607215 - RNA, 23 nt, Human
uaaagacagccuucaggauucug

SEQ ID NO: 607216 - RNA, 22 nt, Human
ucugcuuucuuacuaaaaauga

SEQ ID NO: 607217 - RNA, 22 nt, Human
uacaugcauuggauggcaauag

SEQ ID NO: 607218 - RNA, 22 nt, Human
gaacacugaggacacugagaau

SEQ ID NO: 607219 - RNA, 19 nt, Human
augaauugagcacuuacua

SEQ ID NO: 607220 - RNA, 17 nt, Human
aucaguagcauaucaga

SEQ ID NO: 607221 - RNA, 22 nt, Human
cuuggcuguaaaaucagaggcu

SEQ ID NO: 607222 - RNA, 22 nt, Human
acacagaguaucuuuugccuag

SEQ ID NO: 607223 - RNA, 22 nt, Human
ugggaaugugagcauucauuca

SEQ ID NO: 607224 - RNA, 22 nt, Human
auagcuuacaggugauaucagc

SEQ ID NO: 607225 - RNA, 23 nt, Human
acugauucuugaaguugacaagu

SEQ ID NO: 607226 - RNA, 22 nt, Human
agcugcagagguuugugcaaca

SEQ ID NO: 607227 - RNA, 22 nt, Human
uugugacauugauuaaacuaug

SEQ ID NO: 607228 - RNA, 22 nt, Human
cacauguacagaagcaggcugg

SEQ ID NO: 607229 - RNA, 22 nt, Human
ucacauuugcaauugcauuguu

SEQ ID NO: 607230 - RNA, 22 nt, Human
cacaggcucuccagggccugga

SEQ ID NO: 607231 - RNA, 22 nt, Human
agagguugggucugaggugaga

SEQ ID NO: 607232 - RNA, 22 nt, Human
gauacauuccgggagggcuacc

SEQ ID NO: 607233 - RNA, 22 nt, Human
guacaaaaguuauugcgguuuu

SEQ ID NO: 607234 - RNA, 22 nt, Human
aucuuccuuugccaugggauag

SEQ ID NO: 607235 - RNA, 22 nt, Human
ugccucagucuaaagucucuca

SEQ ID NO: 607236 - RNA, 22 nt, Human
uugaaacuuuaguaaacuaagg

SEQ ID NO: 607237 - RNA, 22 nt, Human
acugaauaauggucugugaucu

SEQ ID NO: 607238 - RNA, 22 nt, Human
gaguccaguuguucacagaggc

SEQ ID NO: 607239 - RNA, 22 nt, Human
cauuucuaagaagaucugggua

SEQ ID NO: 607240 - RNA, 22 nt, Human
uggcucugucacugugagcuau

SEQ ID NO: 607241 - RNA, 22 nt, Human
ucauaaacucacuaguuuaugu

SEQ ID NO: 607242 - RNA, 22 nt, Human
uaaaugcuaucgcauaaaaccu

SEQ ID NO: 607243 - RNA, 21 nt, Human
uuccacagugagaacugcaag

SEQ ID NO: 607244 - RNA, 19 nt, Human
uacauuccacacaaucucu

SEQ ID NO: 607245 - RNA, 22 nt, Human
acagugugguuugagcacuggg

SEQ ID NO: 607246 - RNA, 22 nt, Human
ucacugggagagcugacaagga

SEQ ID NO: 607247 - RNA, 23 nt, Human
ccacugaagaauccagggaguuu

SEQ ID NO: 607248 - RNA, 22 nt, Human
gcugagugauucauacgcugcu

SEQ ID NO: 607249 - RNA, 22 nt, Human
aacauagaauggcuccagagcu

SEQ ID NO: 607250 - RNA, 22 nt, Human
caccagggcagcagccuagucu

SEQ ID NO: 607251 - RNA, 22 nt, Human
caacuguuauaaaucaacagag

SEQ ID NO: 607252 - RNA, 22 nt, Human
cagcuauuggcaagaaguggug

SEQ ID NO: 607253 - RNA, 21 nt, Human
cagagguggccugaccucuga

SEQ ID NO: 607254 - RNA, 22 nt, Human
uaguuucuuucacguaguaaua

SEQ ID NO: 607255 - RNA, 22 nt, Human
uucccugaucacgugucaggag

SEQ ID NO: 607256 - RNA, 22 nt, Human
uuccuggggcuuagcaauggag

SEQ ID NO: 607257 - RNA, 22 nt, Human
auuaggcauuauggggauaagg

SEQ ID NO: 607258 - RNA, 22 nt, Human
ucuggccccuggcaguccugga

SEQ ID NO: 607259 - RNA, 22 nt, Human
ucaggccacggcucacugagac

SEQ ID NO: 607260 - RNA, 22 nt, Human
aagaugaagaacaugagcacac

SEQ ID NO: 607261 - RNA, 22 nt, Human
ggaagggcaauaaaaucucagg

SEQ ID NO: 607262 - RNA, 22 nt, Human
aucgaauaauugcauucuauaa

SEQ ID NO: 607263 - RNA, 20 nt, Human
aucuuugucucuguaguugu

SEQ ID NO: 607264 - RNA, 22 nt, Human
cagguuggggacuuaggaugac

SEQ ID NO: 607265 - RNA, 22 nt, Human
ugaauuuaaaauaaauguaguu

SEQ ID NO: 607266 - RNA, 22 nt, Human
auuaucuaggaauugacagaag

SEQ ID NO: 607267 - RNA, 22 nt, Human
uccaggugggcugcacccaggc

SEQ ID NO: 607268 - RNA, 22 nt, Human
acacuuuguccuuuuucauugu

SEQ ID NO: 607269 - RNA, 22 nt, Human
uugcuuuugugugcucucugga

SEQ ID NO: 607270 - RNA, 22 nt, Human
aggccaagugcugggacaggug

SEQ ID NO: 607271 - RNA, 22 nt, Human
ugaaagaacuagcaucuucaag

SEQ ID NO: 607272 - RNA, 21 nt, Human
cagaggguuucucagguguuu

SEQ ID NO: 607273 - RNA, 22 nt, Human
uguggacuuuaguaggugagag

SEQ ID NO: 607274 - RNA, 22 nt, Human
gagcuccagggaacagcagcua

SEQ ID NO: 607275 - RNA, 22 nt, Human
guguccagggccguguugucuu

SEQ ID NO: 607276 - RNA, 22 nt, Human
caacacugacaauggacugauu

SEQ ID NO: 607277 - RNA, 22 nt, Human
cugagauggaguuucgcucuuc

SEQ ID NO: 607278 - RNA, 22 nt, Human
ugggagaagcagugggacagua

SEQ ID NO: 607279 - RNA, 22 nt, Human
guuuuguuuugagucaacucca

SEQ ID NO: 607280 - RNA, 22 nt, Human
ccaguguuacggcuugaacuau

SEQ ID NO: 607281 - RNA, 22 nt, Human
agccccaggaugggccgcagga

SEQ ID NO: 607282 - RNA, 21 nt, Human
aggggacagaguagcuccagg

SEQ ID NO: 607283 - RNA, 22 nt, Human
aacuuuaaggcuauaaauuaug

SEQ ID NO: 607284 - RNA, 22 nt, Human
cuguuuuugugcugugucuccc

SEQ ID NO: 607285 - RNA, 22 nt, Human
cugcuguacuuaggaagaggaa

SEQ ID NO: 607286 - RNA, 22 nt, Human
gccaccagggggcuccagugag

SEQ ID NO: 607287 - RNA, 22 nt, Human
aagcugcagacccccugucuca

SEQ ID NO: 607288 - RNA, 22 nt, Human
gugaaugaaaggaugauucuuu

SEQ ID NO: 607289 - RNA, 22 nt, Human
uguagggaggaaagggcucuug

SEQ ID NO: 607290 - RNA, 22 nt, Human
agccuaggagguuggggcugca

SEQ ID NO: 607291 - RNA, 22 nt, Human
augggaugaucaccugagcuca

SEQ ID NO: 607292 - RNA, 22 nt, Human
gcuccacugccccugggcaccg

SEQ ID NO: 607293 - RNA, 22 nt, Human
ggcagucacaggggagacuggg

SEQ ID NO: 607294 - RNA, 22 nt, Human
aacaucaucaugaacaacuaau

SEQ ID NO: 607295 - RNA, 22 nt, Human
aggcagcaugggccccagcucc

SEQ ID NO: 607296 - RNA, 21 nt, Human
cucugcugaguccuaggauuc

SEQ ID NO: 607297 - RNA, 22 nt, Human
ugugcuuucaaaguuaaguaaa

SEQ ID NO: 607298 - RNA, 22 nt, Human
gucccaggggagcucucugauu

SEQ ID NO: 607299 - RNA, 19 nt, Human
uccuggggaggggcauggc

SEQ ID NO: 607300 - RNA, 22 nt, Human
uggcugcagacaccuauggcag

SEQ ID NO: 607301 - RNA, 22 nt, Human
cugcaugaagucuuuuuuauag

SEQ ID NO: 607302 - RNA, 22 nt, Human
agauuacaacaugggacgcaua

SEQ ID NO: 607303 - RNA, 22 nt, Human
cagcuucuggcguggagccuga

SEQ ID NO: 607304 - RNA, 22 nt, Human
aggggcgucuguaggcaguggg

SEQ ID NO: 607305 - RNA, 22 nt, Human
aacugaggccaagugaggaaag

SEQ ID NO: 607306 - RNA, 22 nt, Human
caagaugccccugguagggauc

SEQ ID NO: 607307 - RNA, 22 nt, Human
ugagaaccaugaaaagcuguca

SEQ ID NO: 607308 - RNA, 22 nt, Human
aauaaacugcucaauugcauca

SEQ ID NO: 607309 - RNA, 20 nt, Human
cucucuggaaggugggagcc

SEQ ID NO: 607310 - RNA, 22 nt, Human
cagcagaggugguucacauugu

SEQ ID NO: 607311 - RNA, 22 nt, Human
uagagcuagcuucaaaaugcga

SEQ ID NO: 607312 - RNA, 22 nt, Human
aauuauauuguggugugaaugu

SEQ ID NO: 607313 - RNA, 22 nt, Human
uaguuucugguucuugcucugg

SEQ ID NO: 607314 - RNA, 22 nt, Human
auaugcuauugcuguaauuuaa

SEQ ID NO: 607315 - RNA, 22 nt, Human
aggaaagggguagguguggacg

SEQ ID NO: 607316 - RNA, 22 nt, Human
gcacacagcuagauuaccauuc

SEQ ID NO: 607317 - RNA, 21 nt, Human
ugugaaauagcuaugcuacau

SEQ ID NO: 607318 - RNA, 22 nt, Human
acaggcagggaccuuggcuaag

SEQ ID NO: 607319 - RNA, 22 nt, Human
ccagcagagcauggggaggaag

SEQ ID NO: 607320 - RNA, 22 nt, Human
aguccaggcucuuccugaagaa

SEQ ID NO: 607321 - RNA, 22 nt, Human
aggugacugguuuaucuggcag

SEQ ID NO: 607322 - RNA, 22 nt, Human
acugucacuugcaacugugagg

SEQ ID NO: 607323 - RNA, 22 nt, Human
uaggcugggagccugaggcuag

SEQ ID NO: 607324 - RNA, 22 nt, Human
caucagcuuuucuaugugguga

SEQ ID NO: 607325 - RNA, 22 nt, Human
caggucugcagacagggccaug

SEQ ID NO: 607326 - RNA, 22 nt, Human
ugggcugaaaugcuguggacua

SEQ ID NO: 607327 - RNA, 19 nt, Human
gcaggguguugacuguccc

SEQ ID NO: 607328 - RNA, 21 nt, Human
acagcagagaucaagacuaag

SEQ ID NO: 607329 - RNA, 22 nt, Human
ggccucuguuuggagccaggau

SEQ ID NO: 607330 - RNA, 22 nt, Human
agccccucuguagcuaauagua

SEQ ID NO: 607331 - RNA, 22 nt, Human
ucugaagggcugaguggaggag

SEQ ID NO: 607332 - RNA, 22 nt, Human
ugccccucuugcuggcccuguc

SEQ ID NO: 607333 - RNA, 22 nt, Human
aggggcucaagcaguguggucu

SEQ ID NO: 607334 - RNA, 22 nt, Human
ucugcugaacuugcugcccaga

SEQ ID NO: 607335 - RNA, 22 nt, Human
cuggcuggaggugagucacuga

SEQ ID NO: 607336 - RNA, 20 nt, Human
aagcuggguaggagaggagc

SEQ ID NO: 607337 - RNA, 22 nt, Human
agcagagcggggccuccggaag

SEQ ID NO: 607338 - RNA, 22 nt, Human
uuggaauuuagggaauauucau

SEQ ID NO: 607339 - RNA, 22 nt, Human
ucucacagcaucauugcucaug

SEQ ID NO: 607340 - RNA, 22 nt, Human
aauguuauuguccuuuccaaaa

SEQ ID NO: 607341 - RNA, 22 nt, Human
agaagcugcguuuauuuaaauc

SEQ ID NO: 607342 - RNA, 22 nt, Human
guccagaguagucgaguauucu

SEQ ID NO: 607343 - RNA, 21 nt, Human
accuuuggguguuuauaauag

SEQ ID NO: 607344 - RNA, 22 nt, Human
uacagugcuuuuugguggagaa

SEQ ID NO: 607345 - RNA, 22 nt, Human
acuccccaaaacuaaccaugca

SEQ ID NO: 607346 - RNA, 22 nt, Human
ugaagguggcauaggagagaug

SEQ ID NO: 607347 - RNA, 22 nt, Human
auaauguguucaucuuacaauu

SEQ ID NO: 607348 - RNA, 22 nt, Human
cuguaugaguugggaauagaau

SEQ ID NO: 607349 - RNA, 22 nt, Human
gaggcucuggaguagguacaca

SEQ ID NO: 607350 - RNA, 22 nt, Human
ggcaggcagccuccauccacag

SEQ ID NO: 607351 - RNA, 22 nt, Human
ugcugcagcuaaggugaggugc

SEQ ID NO: 607352 - RNA, 22 nt, Human
aggcccccacaggcuugaggca

SEQ ID NO: 607353 - RNA, 20 nt, Human
gccagaggccggcaggggcu

SEQ ID NO: 607354 - RNA, 22 nt, Human
agagccugcuaccucauuccag

SEQ ID NO: 607355 - RNA, 22 nt, Human
acuggaguuauuauuugcagcu

SEQ ID NO: 607356 - RNA, 22 nt, Human
uuagaaaaauguucaguaguuu

SEQ ID NO: 607357 - RNA, 22 nt, Human
ggaugcuggggaccaaucucug

SEQ ID NO: 607358 - RNA, 22 nt, Human
cacaugaagagagucuaguaau

SEQ ID NO: 607359 - RNA, 22 nt, Human
gccuggcaggccugggccagca

SEQ ID NO: 607360 - RNA, 22 nt, Human
gaggccaggagugcuguaaguu

SEQ ID NO: 607361 - RNA, 22 nt, Human
gcugugcagucuuuggugugcc

SEQ ID NO: 607362 - RNA, 22 nt, Human
ugcauaaaauaugagaaaugua

SEQ ID NO: 607363 - RNA, 17 nt, Human
uuguuucuucucugugg

SEQ ID NO: 607364 - RNA, 22 nt, Human
ugccaaaaugggcuuuauaccg

SEQ ID NO: 607365 - RNA, 22 nt, Human
agaggccaccuucucuugagaa

SEQ ID NO: 607366 - RNA, 22 nt, Human
agccuuaaaugcuagauucaua

SEQ ID NO: 607367 - RNA, 22 nt, Human
ccucagcucuucccugugcaca

SEQ ID NO: 607368 - RNA, 22 nt, Human
ugaaagcacaaguucuaacagg

SEQ ID NO: 607369 - RNA, 22 nt, Human
uucugcaggagcccuaguguau

SEQ ID NO: 607370 - RNA, 22 nt, Human
gggucuaggagacaugggcaag

SEQ ID NO: 607371 - RNA, 22 nt, Human
cuccagucauagccucuugagu

SEQ ID NO: 607372 - RNA, 22 nt, Human
ugcaugcacuuggcuggcacgu

SEQ ID NO: 607373 - RNA, 22 nt, Human
cagcacacagugacucgcaccu

SEQ ID NO: 607374 - RNA, 22 nt, Human
agauggcugauuaacuccaugg

SEQ ID NO: 607375 - RNA, 22 nt, Human
gcaacacagaucuucuuuguug

SEQ ID NO: 607376 - RNA, 22 nt, Human
gggcacaguacuccaaucaacu

SEQ ID NO: 607377 - RNA, 22 nt, Human
auccaaagauggaaagaacuuu

SEQ ID NO: 607378 - RNA, 22 nt, Human
ugacaauggauauuaguugugg

SEQ ID NO: 607379 - RNA, 22 nt, Human
agcagacaauugccuggaugga

SEQ ID NO: 607380 - RNA, 22 nt, Human
uccugacuccagguccugugug

SEQ ID NO: 607381 - RNA, 22 nt, Human
uccugggagcacaugguccugc

SEQ ID NO: 607382 - RNA, 22 nt, Human
aggagagaauuacuggguguca

SEQ ID NO: 607383 - RNA, 22 nt, Human
ccagccuggggaggcagcuucu

SEQ ID NO: 607384 - RNA, 22 nt, Human
aggcaaugcagauagaugaaug

SEQ ID NO: 607385 - RNA, 23 nt, Human
agggcccaagccuggacagcagg

SEQ ID NO: 607386 - RNA, 22 nt, Human
cacagggaaccaaggcugggcc

SEQ ID NO: 607387 - RNA, 22 nt, Human
aaaugucuguuagucauaucau

SEQ ID NO: 607388 - RNA, 22 nt, Human
agaccuggaguggggccucagg

SEQ ID NO: 607389 - RNA, 23 nt, Human
aguuccagaaaaaugcucaagca

SEQ ID NO: 607390 - RNA, 22 nt, Human
gcuguguuggugaagcuguagc

SEQ ID NO: 607391 - RNA, 22 nt, Human
ucugugugugccuguuaauauu

SEQ ID NO: 607392 - RNA, 21 nt, Human
ccaggaaggacugagcucccu

SEQ ID NO: 607393 - RNA, 22 nt, Human
uucuaauuguguuugcauaucu

SEQ ID NO: 607394 - RNA, 22 nt, Human
caguccuuggcaaguucucagu

SEQ ID NO: 607395 - RNA, 22 nt, Human
gcagguggauuaucagaagugc

SEQ ID NO: 607396 - RNA, 22 nt, Human
uggcaugcaagaggaggcuccc

SEQ ID NO: 607397 - RNA, 22 nt, Human
gaggggcucuuuaauaguaaca

SEQ ID NO: 607398 - RNA, 22 nt, Human
aguguucucagcuacuagagag

SEQ ID NO: 607399 - RNA, 22 nt, Human
ugagcagaacacgggauccaug

SEQ ID NO: 607400 - RNA, 22 nt, Human
uuuagcuuguuggaacaauuga

SEQ ID NO: 607401 - RNA, 22 nt, Human
cucagcacaucuuuacauuucc

SEQ ID NO: 607402 - RNA, 22 nt, Human
agggcagcuagcuguagaaaga

SEQ ID NO: 607403 - RNA, 22 nt, Human
cacacugucuuuaugagcugua

SEQ ID NO: 607404 - RNA, 22 nt, Human
ccaccagcuuugccacccugcu

SEQ ID NO: 607405 - RNA, 21 nt, Human
agaucauucuucugagcacuu

SEQ ID NO: 607406 - RNA, 22 nt, Human
ugggcucauguuucuuugagga

SEQ ID NO: 607407 - RNA, 22 nt, Human
ugacauuuaaucccuaaauauu

SEQ ID NO: 607408 - RNA, 22 nt, Human
ggccaaggaugguggcucuggu

SEQ ID NO: 607409 - RNA, 22 nt, Human
gcuucuguggugcaucuuugcu

SEQ ID NO: 607410 - RNA, 22 nt, Human
gagaaagcuucagaaauggccu

SEQ ID NO: 607411 - RNA, 21 nt, Human
auaaaguuuuacaggaaugca

SEQ ID NO: 607412 - RNA, 22 nt, Human
uggcccaggaggccagagggca

SEQ ID NO: 607413 - RNA, 22 nt, Human
augauacaucuucaugucagug

SEQ ID NO: 607414 - RNA, 22 nt, Human
cagggcugaggacacaaguaaa

SEQ ID NO: 607415 - RNA, 22 nt, Human
gucccuaguggaaagacaugau

SEQ ID NO: 607416 - RNA, 22 nt, Human
acuuucaacuuggugggagagc

SEQ ID NO: 607417 - RNA, 22 nt, Human
cacagcugcccuaacuguacuc

SEQ ID NO: 607418 - RNA, 22 nt, Human
uuucaucugugcugccaagacu

SEQ ID NO: 607419 - RNA, 22 nt, Human
gagcacagcagggcucugggug

SEQ ID NO: 607420 - RNA, 22 nt, Human
accccagcccugcuucugggag

SEQ ID NO: 607421 - RNA, 21 nt, Human
auuagaagguauuuagggccu

SEQ ID NO: 607422 - RNA, 22 nt, Human
guguccacggcugagaaugauu

SEQ ID NO: 607423 - RNA, 22 nt, Human
gaggccaugaauggauguuccu

SEQ ID NO: 607424 - RNA, 22 nt, Human
auuuuugagcugugaacauagc

SEQ ID NO: 607425 - RNA, 22 nt, Human
aggcucugcagaccccagcugu

SEQ ID NO: 607426 - RNA, 22 nt, Human
cauuucuguucucuuccuguac

SEQ ID NO: 607427 - RNA, 22 nt, Human
agaguuaagcuuugccuaaaga

SEQ ID NO: 607428 - RNA, 22 nt, Human
aggcacugaaagguggccagag

SEQ ID NO: 607429 - RNA, 22 nt, Human
ugcccuugaaauacgcuugggg

SEQ ID NO: 607430 - RNA, 23 nt, Human
aggggcagcaaguuuugguguua

SEQ ID NO: 607431 - RNA, 22 nt, Human
cagcucugggagucccaccccu

SEQ ID NO: 607432 - RNA, 22 nt, Human
auagaauagcauagaaaauuga

SEQ ID NO: 607433 - RNA, 22 nt, Human
cugaggcuuggaggggucuggu

SEQ ID NO: 607434 - RNA, 23 nt, Human
ugcacaggacggccuuauaagua

SEQ ID NO: 607435 - RNA, 20 nt, Human
ggcacuggaagcacacagga

SEQ ID NO: 607436 - RNA, 23 nt, Human
acugccagauugaagguuucuua

SEQ ID NO: 607437 - RNA, 22 nt, Human
ugaaauaggaaacagauguuuc

SEQ ID NO: 607438 - RNA, 22 nt, Human
cagcugaguguuggcauguuca

SEQ ID NO: 607439 - RNA, 22 nt, Human
gcucccaccaggcagaccuacc

SEQ ID NO: 607440 - RNA, 22 nt, Human
cgagaugguauuuuuaacgcag

SEQ ID NO: 607441 - RNA, 21 nt, Human
ucucugggaggacuugugaga

SEQ ID NO: 607442 - RNA, 22 nt, Human
uauaauaugaggcaggagugau

SEQ ID NO: 607443 - RNA, 22 nt, Human
agugugugaccuuuuaauuuaa

SEQ ID NO: 607444 - RNA, 22 nt, Human
gugagacaagauuuguaggcag

SEQ ID NO: 607445 - RNA, 22 nt, Human
guauuuuuaguagagucggggu

SEQ ID NO: 607446 - RNA, 22 nt, Human
ucucagagggaaacaugaguga

SEQ ID NO: 607447 - RNA, 22 nt, Human
aaagccaguucuuagagaaagc

SEQ ID NO: 607448 - RNA, 22 nt, Human
cuguccagcugaccagagcagc

SEQ ID NO: 607449 - RNA, 23 nt, Human
uccagcagccaagaaggguagaa

SEQ ID NO: 607450 - RNA, 22 nt, Human
gacagcugaaaaauguaaggua

SEQ ID NO: 607451 - RNA, 22 nt, Human
uuccagagugacugugccacuu

SEQ ID NO: 607452 - RNA, 22 nt, Human
gcccagggugaagugcaguugu

SEQ ID NO: 607453 - RNA, 22 nt, Human
gccagguggagguugcagugag

SEQ ID NO: 607454 - RNA, 22 nt, Human
ccaggccccagggcuggcuuuc

SEQ ID NO: 607455 - RNA, 22 nt, Human
auuuuuguauccccagcuccug

SEQ ID NO: 607456 - RNA, 22 nt, Human
ccugggcaggccggacgcuggg

SEQ ID NO: 607457 - RNA, 22 nt, Human
acagaguacauucagagacuau

SEQ ID NO: 607458 - RNA, 22 nt, Human
auguagcugcagaugauaaugc

SEQ ID NO: 607459 - RNA, 22 nt, Human
uucuauuuccaguccuucagag

SEQ ID NO: 607460 - RNA, 22 nt, Human
gccaggguugccaaugggggca

SEQ ID NO: 607461 - RNA, 22 nt, Human
ggccucucuggcauggcugccc

SEQ ID NO: 607462 - RNA, 22 nt, Human
guggcagguuauaagcaucuca

SEQ ID NO: 607463 - RNA, 22 nt, Human
aaauaacagucagggacaacau

SEQ ID NO: 607464 - RNA, 22 nt, Human
acuguuaaaguaauuaauuguc

SEQ ID NO: 607465 - RNA, 22 nt, Human
ggcaagauccaaggggcuagga

SEQ ID NO: 607466 - RNA, 22 nt, Human
auacaucuagagucauaaaaac

SEQ ID NO: 607467 - RNA, 22 nt, Human
gcccagcugucuggcagggaug

SEQ ID NO: 607468 - RNA, 22 nt, Human
cauaauuuuccaugguuugcua

SEQ ID NO: 607469 - RNA, 22 nt, Human
aagcuguuaauggcuugcagcu

SEQ ID NO: 607470 - RNA, 22 nt, Human
cugcuguccaggagugcccugu

SEQ ID NO: 607471 - RNA, 22 nt, Human
ugcacuccaggcugggugacag

SEQ ID NO: 607472 - RNA, 22 nt, Human
guuuaugaauugcauucccuuu

SEQ ID NO: 607473 - RNA, 22 nt, Human
ugcccacauucugaagcucccu

SEQ ID NO: 607474 - RNA, 19 nt, Human
cccagguguuugaggcugc

SEQ ID NO: 607475 - RNA, 22 nt, Human
aggaaagguagcgugccagcag

SEQ ID NO: 607476 - RNA, 22 nt, Human
guggcagcggcccaggccgucu

SEQ ID NO: 607477 - RNA, 22 nt, Human
ccagaggcggagguuugcagug

SEQ ID NO: 607478 - RNA, 22 nt, Human
uuugaauaucacaaacuuucaa

SEQ ID NO: 607479 - RNA, 22 nt, Human
cugagcuguuuaaucccagaua

SEQ ID NO: 607480 - RNA, 22 nt, Human
agaggcccugggcuggugugcu

SEQ ID NO: 607481 - RNA, 22 nt, Human
ccuggagcaaaaaucuaaggag

SEQ ID NO: 607482 - RNA, 22 nt, Human
aaacuguauauuuauggcaugu

SEQ ID NO: 607483 - RNA, 22 nt, Human
aagauuuagggccaguuuacau

SEQ ID NO: 607484 - RNA, 22 nt, Human
ugcugcuuuuguauaucagaga

SEQ ID NO: 607485 - RNA, 22 nt, Human
aggcacugggggaugagcaagg

SEQ ID NO: 607486 - RNA, 22 nt, Human
ucagccaguauuugagugcuca

SEQ ID NO: 607487 - RNA, 22 nt, Human
gcuggccaguguggugaccacc

SEQ ID NO: 607488 - RNA, 22 nt, Human
gugcuccaggucgcucagagag

SEQ ID NO: 607489 - RNA, 22 nt, Human
cugugcccaccuggcucugagg

SEQ ID NO: 607490 - RNA, 22 nt, Human
cugcaguucuucuccucaaggc

SEQ ID NO: 607491 - RNA, 22 nt, Human
aggguccaucaaggacugcaca

SEQ ID NO: 607492 - RNA, 22 nt, Human
aaucagaaaggcuaaggaagca

SEQ ID NO: 607493 - RNA, 22 nt, Human
gcagccacccucaaggcugaau

SEQ ID NO: 607494 - RNA, 22 nt, Human
uguuuuaaagccauugccuuuc

SEQ ID NO: 607495 - RNA, 22 nt, Human
gagcugagccuggguggaccgc

SEQ ID NO: 607496 - RNA, 21 nt, Human
auccauccaucuuggccuaac

SEQ ID NO: 607497 - RNA, 22 nt, Human
uuucugcaaacuuccacgucuc

SEQ ID NO: 607498 - RNA, 22 nt, Human
cugaggaucuaauuauuggguc

SEQ ID NO: 607499 - RNA, 22 nt, Human
acaagauuuuaugacucuuuuu

SEQ ID NO: 607500 - RNA, 22 nt, Human
acagauaaaaguuguuuaaaau

SEQ ID NO: 607501 - RNA, 22 nt, Human
cucucuagaggcccaccuugag

SEQ ID NO: 607502 - RNA, 22 nt, Human
auucacagggacaaugggagag

SEQ ID NO: 607503 - RNA, 18 nt, Human
agacaaacuucuucugcc

SEQ ID NO: 607504 - RNA, 22 nt, Human
ggcucccuguucuauucccugg

SEQ ID NO: 607505 - RNA, 22 nt, Human
cuggguugcaaagcgcuggcug

SEQ ID NO: 607506 - RNA, 22 nt, Human
uuuuacaggucauagguauagu

SEQ ID NO: 607507 - RNA, 22 nt, Human
ucugaggcauaaccuguucugc

SEQ ID NO: 607508 - RNA, 22 nt, Human
ugccucaguuucaucugcagaa

SEQ ID NO: 607509 - RNA, 22 nt, Human
auguauaugcaugcauucaaag

SEQ ID NO: 607510 - RNA, 19 nt, Human
uucacauuuugcucugagg

SEQ ID NO: 607511 - RNA, 22 nt, Human
ucauauuuauauguuggcacag

SEQ ID NO: 607512 - RNA, 22 nt, Human
agguggggaaaccagcgauccc

SEQ ID NO: 607513 - RNA, 22 nt, Human
aaggcagcccuggcucagccug

SEQ ID NO: 607514 - RNA, 22 nt, Human
acugcaggagacacagcugcug

SEQ ID NO: 607515 - RNA, 18 nt, Human
uugauaaacaauuucauu

SEQ ID NO: 607516 - RNA, 22 nt, Human
gcccuguuuucuggguuccuug

SEQ ID NO: 607517 - RNA, 22 nt, Human
guccugggcaugcagggcuuuc

SEQ ID NO: 607518 - RNA, 22 nt, Human
gaauuagacaugcuuugcuuuu

SEQ ID NO: 607519 - RNA, 22 nt, Human
ggcccagcgaggccaccuacag

SEQ ID NO: 607520 - RNA, 22 nt, Human
cucuaggcugcccaggagcuga

SEQ ID NO: 607521 - RNA, 22 nt, Human
agugcauauaugaagaguauga

SEQ ID NO: 607522 - RNA, 22 nt, Human
cuggcuuuaccucacuggggcu

SEQ ID NO: 607523 - RNA, 22 nt, Human
gcugccugggcuggcauuccca

SEQ ID NO: 607524 - RNA, 22 nt, Human
cuacaaaaguaauugugguuuu

SEQ ID NO: 607525 - RNA, 22 nt, Human
cagcuguguaaacacaugugua

SEQ ID NO: 607526 - RNA, 22 nt, Human
cuagggugugcagauuuugccu

SEQ ID NO: 607527 - RNA, 22 nt, Human
gugggcugaggggacaccaagg

SEQ ID NO: 607528 - RNA, 22 nt, Human
uaucaguagaacaauggacauu

SEQ ID NO: 607529 - RNA, 22 nt, Human
uucagccuguucaugcuguugc

SEQ ID NO: 607530 - RNA, 21 nt, Human
uccaggggccagcacccaagc

SEQ ID NO: 607531 - RNA, 22 nt, Human
cuuugccauguugccugcagaa

SEQ ID NO: 607532 - RNA, 22 nt, Human
ugcaggugugguuccucagcca

SEQ ID NO: 607533 - RNA, 22 nt, Human
gugacauugcuaggaacagauu

SEQ ID NO: 607534 - RNA, 22 nt, Human
aagauuuucagugccuaaaaca

SEQ ID NO: 607535 - RNA, 23 nt, Human
uccugcagauaagcugguugaca

SEQ ID NO: 607536 - RNA, 22 nt, Human
uugcuuuacuuugccauucguu

SEQ ID NO: 607537 - RNA, 22 nt, Human
aagcaggcauuccagagacaau

SEQ ID NO: 607538 - RNA, 22 nt, Human
cugccucucaggucccugagau

SEQ ID NO: 607539 - RNA, 22 nt, Human
agacuggaagccugccaagcaa

SEQ ID NO: 607540 - RNA, 22 nt, Human
gggaggcugccauccuucagga

SEQ ID NO: 607541 - RNA, 22 nt, Human
aauauucauuugcagaagaagu

SEQ ID NO: 607542 - RNA, 22 nt, Human
uucaaaucccugcuccacuauu

SEQ ID NO: 607543 - RNA, 20 nt, Human
gggcagcuccccucauucug

SEQ ID NO: 607544 - RNA, 22 nt, Human
agggcauuggcacagaucugcu

SEQ ID NO: 607545 - RNA, 22 nt, Human
ugggaagggagaguguccugga

SEQ ID NO: 607546 - RNA, 22 nt, Human
guuuaucuuaauggacucagag

SEQ ID NO: 607547 - RNA, 22 nt, Human
agucccagaucuacaggaggga

SEQ ID NO: 607548 - RNA, 22 nt, Human
agaagcacgguuuugucuagca

SEQ ID NO: 607549 - RNA, 22 nt, Human
ucccagacaaucauuggccacc

SEQ ID NO: 607550 - RNA, 22 nt, Human
aggcuccaaauuaccaagcucu

SEQ ID NO: 607551 - RNA, 22 nt, Human
ugguuuuaaaagauguuugaga

SEQ ID NO: 607552 - RNA, 22 nt, Human
uaguaaaugugaaaugugggga

SEQ ID NO: 607553 - RNA, 22 nt, Human
acccagaggugucuagcaagcu

SEQ ID NO: 607554 - RNA, 22 nt, Human
cuccagaggaugcaggugaggg

SEQ ID NO: 607555 - RNA, 22 nt, Human
uagcaccugugcacaccaggca

SEQ ID NO: 607556 - RNA, 22 nt, Human
uagggcuauaagagaauaagac

SEQ ID NO: 607557 - RNA, 23 nt, Human
uggcagugaucaaaagcuuacau

SEQ ID NO: 607558 - RNA, 22 nt, Human
uuauuacaaugcagaaaauaga

SEQ ID NO: 607559 - RNA, 22 nt, Human
aggaggugcuagagaagauguu

SEQ ID NO: 607560 - RNA, 22 nt, Human
gugggacagucagaagugagca

SEQ ID NO: 607561 - RNA, 22 nt, Human
uuagaaucuaacauucuuaucu

SEQ ID NO: 607562 - RNA, 22 nt, Human
cacccauguuucccucugucuu

SEQ ID NO: 607563 - RNA, 22 nt, Human
aaagaggcucaaggugggccag

SEQ ID NO: 607564 - RNA, 22 nt, Human
uagacauuuggcaugguuuuca

SEQ ID NO: 607565 - RNA, 22 nt, Human
aucuauacccaucaugauuuaa

SEQ ID NO: 607566 - RNA, 22 nt, Human
guggcugguuuccugcaugcaa

SEQ ID NO: 607567 - RNA, 21 nt, Human
agccaggcaagcacccccacu

SEQ ID NO: 607568 - RNA, 22 nt, Human
gcaguaaauaauuuuguguaua

SEQ ID NO: 607569 - RNA, 22 nt, Human
ggugccagugggucucaggaua

SEQ ID NO: 607570 - RNA, 22 nt, Human
ugggcucucuggcaggaaggcu

SEQ ID NO: 607571 - RNA, 22 nt, Human
ccagguguggggaggacucaca

SEQ ID NO: 607572 - RNA, 22 nt, Human
gggccugccauugcugccccag

SEQ ID NO: 607573 - RNA, 22 nt, Human
ugguuuuauuuauguugaguca

SEQ ID NO: 607574 - RNA, 20 nt, Human
acuccagguggcaugaggac

SEQ ID NO: 607575 - RNA, 22 nt, Human
uagcauuuagaacaccuugaga

SEQ ID NO: 607576 - RNA, 22 nt, Human
aagucauuaucucuucuaaucu

SEQ ID NO: 607577 - RNA, 22 nt, Human
ugugaggccuagacagccuggg

SEQ ID NO: 607578 - RNA, 22 nt, Human
cagcugccuucugcgggaaguc

SEQ ID NO: 607579 - RNA, 22 nt, Human
agauaugacuagaagcucauuu

SEQ ID NO: 607580 - RNA, 22 nt, Human
ucugauaaugugcuucgugacc

SEQ ID NO: 607581 - RNA, 22 nt, Human
gcuucagauuccucuucuguaa

SEQ ID NO: 607582 - RNA, 22 nt, Human
gaggcagcuuggggcugugggu

SEQ ID NO: 607583 - RNA, 22 nt, Human
ucugcuuuagaauccaguagcu

SEQ ID NO: 607584 - RNA, 17 nt, Human
uccagcccugcccgacg

SEQ ID NO: 607585 - RNA, 22 nt, Human
acaggaacagcuugauggcauc

SEQ ID NO: 607586 - RNA, 22 nt, Human
agccagagauccaucccuagga

SEQ ID NO: 607587 - RNA, 22 nt, Human
augacacccccacagcauuguu

SEQ ID NO: 607588 - RNA, 22 nt, Human
gggcacugacagggucccaacu

SEQ ID NO: 607589 - RNA, 22 nt, Human
gcagugauuggaucagagaugg

SEQ ID NO: 607590 - RNA, 22 nt, Human
cugagcagucugacucaagcua

SEQ ID NO: 607591 - RNA, 22 nt, Human
ucaguucugaaguucugccucc

SEQ ID NO: 607592 - RNA, 23 nt, Human
cuagggcaguauuucacagacac

SEQ ID NO: 607593 - RNA, 19 nt, Human
ccaggaccuuuccaggguc

SEQ ID NO: 607594 - RNA, 22 nt, Human
gcccuccccucuggguggugag

SEQ ID NO: 607595 - RNA, 22 nt, Human
uaaaggguagguuuuacuguaa

SEQ ID NO: 607596 - RNA, 22 nt, Human
ggaaucuuugaaggauuuuaag

SEQ ID NO: 607597 - RNA, 22 nt, Human
uccagggccugagguugaagug

SEQ ID NO: 607598 - RNA, 21 nt, Human
uaacuuuugugccuaucuugu

SEQ ID NO: 607599 - RNA, 22 nt, Human
gacagggcugugggaggagcag

SEQ ID NO: 607600 - RNA, 22 nt, Human
uucugucucuguguuuacauua

SEQ ID NO: 607601 - RNA, 22 nt, Human
agagcugugaaaaugagguuug

SEQ ID NO: 607602 - RNA, 22 nt, Human
cagaggcugauggcuguagcca

SEQ ID NO: 607603 - RNA, 22 nt, Human
ugugaaauguguguauaauuaa

SEQ ID NO: 607604 - RNA, 22 nt, Human
cucaagaagagggagaccuaca

SEQ ID NO: 607605 - RNA, 22 nt, Human
gaaaacuaacggaaaaguuagg

SEQ ID NO: 607606 - RNA, 22 nt, Human
aggaagugaaagggaaggaguu

SEQ ID NO: 607607 - RNA, 22 nt, Human
uuuuaugagaaugcgccacuug

SEQ ID NO: 607608 - RNA, 18 nt, Human
agucuuguucuguugccc

SEQ ID NO: 607609 - RNA, 22 nt, Human
ccaggcugggcggggaaccugg

SEQ ID NO: 607610 - RNA, 22 nt, Human
auggaagcugaaaaagacacgg

SEQ ID NO: 607611 - RNA, 22 nt, Human
gcagaggacucaaucaagguau

SEQ ID NO: 607612 - RNA, 22 nt, Human
gaaauauacaugaagucggcug

SEQ ID NO: 607613 - RNA, 22 nt, Human
aaagaacuuauccuagaauuug

SEQ ID NO: 607614 - RNA, 22 nt, Human
cuaguggaaacuaacuggaauu

SEQ ID NO: 607615 - RNA, 22 nt, Human
auggcucugcugggcaaagcaa

SEQ ID NO: 607616 - RNA, 21 nt, Human
aucauucuggaaaauucaagc

SEQ ID NO: 607617 - RNA, 22 nt, Human
cuggaucuguuugugcuugugg

SEQ ID NO: 607618 - RNA, 22 nt, Human
uguacauacauagauauacaca

SEQ ID NO: 607619 - RNA, 22 nt, Human
ucucccagaaguccucaguaca

SEQ ID NO: 607620 - RNA, 22 nt, Human
aacaauaacuagacaugccaug

SEQ ID NO: 607621 - RNA, 22 nt, Human
agaaacuguguuacuagaaugu

SEQ ID NO: 607622 - RNA, 22 nt, Human
ccugggugaugugcugcccucg

SEQ ID NO: 607623 - RNA, 22 nt, Human
uggcucuggauuaaucuaggaa

SEQ ID NO: 607624 - RNA, 22 nt, Human
uacacagaggcagcugucugcu

SEQ ID NO: 607625 - RNA, 22 nt, Human
uggcagaguucgcugugccuuu

SEQ ID NO: 607626 - RNA, 22 nt, Human
uuuacaccauuagaagcuacuu

SEQ ID NO: 607627 - RNA, 22 nt, Human
uguuuauagggucugucacuug

SEQ ID NO: 607628 - RNA, 22 nt, Human
uuuaucugagcugauagauagu

SEQ ID NO: 607629 - RNA, 22 nt, Human
uauguauccguguguguacaga

SEQ ID NO: 607630 - RNA, 19 nt, Human
aggcacagguugucuggac

SEQ ID NO: 607631 - RNA, 22 nt, Human
accagagcuggcucugagcacc

SEQ ID NO: 607632 - RNA, 22 nt, Human
ucaugcugugaacuguauacau

SEQ ID NO: 607633 - RNA, 22 nt, Human
cugagagucaguggaguggugu

SEQ ID NO: 607634 - RNA, 22 nt, Human
augcagagcuuccaguggccug

SEQ ID NO: 607635 - RNA, 22 nt, Human
cucuacucuuaacacagcuagg

SEQ ID NO: 607636 - RNA, 22 nt, Human
guuucucuuaacacauaaagua

SEQ ID NO: 607637 - RNA, 22 nt, Human
agcagcacccagagccaugucu

SEQ ID NO: 607638 - RNA, 22 nt, Human
agagacugcgugucagcgcugg

SEQ ID NO: 607639 - RNA, 22 nt, Human
acaguaccugcucucaagcaaa

SEQ ID NO: 607640 - RNA, 18 nt, Human
ggcugagguugacuagaa

SEQ ID NO: 607641 - RNA, 22 nt, Human
auucugucuuuuuaaaauaaua

SEQ ID NO: 607642 - RNA, 22 nt, Human
ccaguccuaguucuaccuuaca

SEQ ID NO: 607643 - RNA, 17 nt, Human
gggcagggacuccuggg

SEQ ID NO: 607644 - RNA, 22 nt, Human
cugcagugccugccacugagcc

SEQ ID NO: 607645 - RNA, 22 nt, Human
gguggaaggccuggaaggaggc

SEQ ID NO: 607646 - RNA, 22 nt, Human
ccagagccugcugagccccauu

SEQ ID NO: 607647 - RNA, 22 nt, Human
gcugcuuuacugaagagauaug

SEQ ID NO: 607648 - RNA, 22 nt, Human
caggaggccaacugugggacuu

SEQ ID NO: 607649 - RNA, 22 nt, Human
ugugcagaguaaggcagcuguu

SEQ ID NO: 607650 - RNA, 22 nt, Human
acccagucauccuggugugaga

SEQ ID NO: 607651 - RNA, 22 nt, Human
ggggccagguccagcuuccaaa

SEQ ID NO: 607652 - RNA, 22 nt, Human
ggaggccaggaaggcucggaga

SEQ ID NO: 607653 - RNA, 22 nt, Human
gcuggagucccugccuuuccuu

SEQ ID NO: 607654 - RNA, 22 nt, Human
acagguggcauaggcaguuuga

SEQ ID NO: 607655 - RNA, 22 nt, Human
ugugccaggcacuugcccaggc

SEQ ID NO: 607656 - RNA, 22 nt, Human
uccaggaggcagggcugugccc

SEQ ID NO: 607657 - RNA, 23 nt, Human
ucuuccugaacuaucaggcacau

SEQ ID NO: 607658 - RNA, 22 nt, Human
ucuuuacaguccucugucaauc

SEQ ID NO: 607659 - RNA, 22 nt, Human
gauauuuaacucucacaggucc

SEQ ID NO: 607660 - RNA, 22 nt, Human
aggagggagaugcccauccugg

SEQ ID NO: 607661 - RNA, 22 nt, Human
ggacugggauucuggaucugcu

SEQ ID NO: 607662 - RNA, 22 nt, Human
aaggcagggaaaguggauuagg

SEQ ID NO: 607663 - RNA, 22 nt, Human
aggcugaggaucccuguguucu

SEQ ID NO: 607664 - RNA, 22 nt, Human
aagaauuuuccagcaugucagu

SEQ ID NO: 607665 - RNA, 22 nt, Human
gauauuuuugcagacaccuggg

SEQ ID NO: 607666 - RNA, 22 nt, Human
guuacaaaugccaaagcugaga

SEQ ID NO: 607667 - RNA, 22 nt, Human
cuuuggaacauacugcugagcu

SEQ ID NO: 607668 - RNA, 22 nt, Human
aggcaaggugcuacagacagug

SEQ ID NO: 607669 - RNA, 23 nt, Human
auauaaacaccagauagauugua

SEQ ID NO: 607670 - RNA, 22 nt, Human
cacaagacuuauuuguguagaa

SEQ ID NO: 607671 - RNA, 22 nt, Human
gggcauggccaggugagggguc

SEQ ID NO: 607672 - RNA, 22 nt, Human
uuucaguuacugcuauaucauu

SEQ ID NO: 607673 - RNA, 22 nt, Human
cacagcugaaguagccaugugg

SEQ ID NO: 607674 - RNA, 22 nt, Human
uuugcauuuguucaaguauuga

SEQ ID NO: 607675 - RNA, 22 nt, Human
cugaauccacacaaggugaugg

SEQ ID NO: 607676 - RNA, 22 nt, Human
uggagugggcaauguaggcaag

SEQ ID NO: 607677 - RNA, 22 nt, Human
ugugucccuuggaaccucagcu

SEQ ID NO: 607678 - RNA, 22 nt, Human
agacugaaacaaucugcaggca

SEQ ID NO: 607679 - RNA, 22 nt, Human
cagucccaggguugguucagcu

SEQ ID NO: 607680 - RNA, 22 nt, Human
aagggaggccagagguuuugca

SEQ ID NO: 607681 - RNA, 22 nt, Human
agccaaggucgccccagggcaa

SEQ ID NO: 607682 - RNA, 22 nt, Human
agagcaggcauaaagcuuugaa

SEQ ID NO: 607683 - RNA, 22 nt, Human
acugcugauauaagaaaagauu

SEQ ID NO: 607684 - RNA, 23 nt, Human
gcucaucaggcuuagagucaagg

SEQ ID NO: 607685 - RNA, 18 nt, Human
caggaugagugaugggga

SEQ ID NO: 607686 - RNA, 22 nt, Human
uccugggguuuuggccgcagcu

SEQ ID NO: 607687 - RNA, 22 nt, Human
ccaggagguggagauugcagug

SEQ ID NO: 607688 - RNA, 19 nt, Human
ggcagcaagcucugaaggc

SEQ ID NO: 607689 - RNA, 22 nt, Human
uccuccagcaggacugaggccc

SEQ ID NO: 607690 - RNA, 22 nt, Human
aguggggccgcgguccugcccu

SEQ ID NO: 607691 - RNA, 22 nt, Human
ggccaggagcaagccaggcucu

SEQ ID NO: 607692 - RNA, 22 nt, Human
uggaaagaaaaacaggccauga

SEQ ID NO: 607693 - RNA, 23 nt, Human
uggagaugccccacucccugucu

SEQ ID NO: 607694 - RNA, 22 nt, Human
gaagaauauggcucucagcaau

SEQ ID NO: 607695 - RNA, 22 nt, Human
ccaguguuuacaguugaacaaa

SEQ ID NO: 607696 - RNA, 22 nt, Human
ugaaagcacugauucucaacuc

SEQ ID NO: 607697 - RNA, 22 nt, Human
auugcaaauaacuguacugaau

SEQ ID NO: 607698 - RNA, 22 nt, Human
caaggcugugcaggguccauau

SEQ ID NO: 607699 - RNA, 22 nt, Human
uaaguguugguaauuacaauga

SEQ ID NO: 607700 - RNA, 22 nt, Human
cugcuuuaauguaagauauacc

SEQ ID NO: 607701 - RNA, 23 nt, Human
cuggggcucauugcaguagccau

SEQ ID NO: 607702 - RNA, 22 nt, Human
gcucugugccacaugcaguguu

SEQ ID NO: 607703 - RNA, 22 nt, Human
agcuuuguuucacauacaccuu

SEQ ID NO: 607704 - RNA, 22 nt, Human
guccucagggaauguggcgggu

SEQ ID NO: 607705 - RNA, 22 nt, Human
cugugcaguggcagcguguggg

SEQ ID NO: 607706 - RNA, 22 nt, Human
acagcagcuaaaggugucuccu

SEQ ID NO: 607707 - RNA, 22 nt, Human
auucaguuccuugugauuguag

SEQ ID NO: 607708 - RNA, 22 nt, Human
ucugaaaauguugacuuuguuu

SEQ ID NO: 607709 - RNA, 22 nt, Human
aggcucugggaagcagugaguu

SEQ ID NO: 607710 - RNA, 22 nt, Human
ucaauucaacacaugcacauug

SEQ ID NO: 607711 - RNA, 22 nt, Human
agagcugccgagcuggggccau

SEQ ID NO: 607712 - RNA, 22 nt, Human
acaauguagaggcugaaagcaa

SEQ ID NO: 607713 - RNA, 22 nt, Human
cagcccucaucucagcuucuuu

SEQ ID NO: 607714 - RNA, 22 nt, Human
ggagagagaugccgccuugcuc

SEQ ID NO: 607715 - RNA, 22 nt, Human
auggguaggauuuacucagaug

SEQ ID NO: 607716 - RNA, 22 nt, Human
aagccaguguccagaaugggca

SEQ ID NO: 607717 - RNA, 22 nt, Human
uaaaacagcagggcagagaagu

SEQ ID NO: 607718 - RNA, 22 nt, Human
ccuggggagccgccugagcccc

SEQ ID NO: 607719 - RNA, 22 nt, Human
uaacaauacccauucuaauuac

SEQ ID NO: 607720 - RNA, 22 nt, Human
cuaggcacuuguaaggccgcuc

SEQ ID NO: 607721 - RNA, 22 nt, Human
agaggagcugggaggcccucgu

SEQ ID NO: 607722 - RNA, 22 nt, Human
agggggugaaugucugucuaca

SEQ ID NO: 607723 - RNA, 21 nt, Human
acuguuaagacguagcugggg

SEQ ID NO: 607724 - RNA, 22 nt, Human
acuuguguaacacagaaagaac

SEQ ID NO: 607725 - RNA, 22 nt, Human
agggaugguggaggaauuucaa

SEQ ID NO: 607726 - RNA, 22 nt, Human
uuagaaagaacuuuagauauca

SEQ ID NO: 607727 - RNA, 22 nt, Human
agcuugggcaacacagcaagac

SEQ ID NO: 607728 - RNA, 19 nt, Human
gcacacaguagggcuggca

SEQ ID NO: 607729 - RNA, 22 nt, Human
ucaguucucucaugccugcccu

SEQ ID NO: 607730 - RNA, 22 nt, Human
uuuguacagugauguuguaugc

SEQ ID NO: 607731 - RNA, 22 nt, Human
gucuuguuugggauguggaugg

SEQ ID NO: 607732 - RNA, 22 nt, Human
aauucugaugaauaaaucaucc

SEQ ID NO: 607733 - RNA, 22 nt, Human
uauacacaaggugugcauuugu

SEQ ID NO: 607734 - RNA, 20 nt, Human
ccugaagaguuucucuuucu

SEQ ID NO: 607735 - RNA, 22 nt, Human
gugugugugcauauaacauaua

SEQ ID NO: 607736 - RNA, 19 nt, Human
agcuccugggcucugggcc

SEQ ID NO: 607737 - RNA, 22 nt, Human
uuggcucuuuccucacacagga

SEQ ID NO: 607738 - RNA, 22 nt, Human
cugggaagaaauugugggaggc

SEQ ID NO: 607739 - RNA, 22 nt, Human
ucuggaguggcagucaucugaa

SEQ ID NO: 607740 - RNA, 22 nt, Human
ccuggccugugaaucugagagc

SEQ ID NO: 607741 - RNA, 22 nt, Human
uuccuuucugucagccugagug

SEQ ID NO: 607742 - RNA, 22 nt, Human
gucugcccggccuuccuccacc

SEQ ID NO: 607743 - RNA, 22 nt, Human
ggccacagaacagcuacaggac

SEQ ID NO: 607744 - RNA, 22 nt, Human
uugcagagugguugugaggauu

SEQ ID NO: 607745 - RNA, 22 nt, Human
cagagacaggaucucgaagacu

SEQ ID NO: 607746 - RNA, 21 nt, Human
caucuuagguuguacauauau

SEQ ID NO: 607747 - RNA, 18 nt, Human
gggaggccccagcaggag

SEQ ID NO: 607748 - RNA, 22 nt, Human
gagguggcgcgccaucccugcc

SEQ ID NO: 607749 - RNA, 22 nt, Human
accuuagaaaaucaaaauuaga

SEQ ID NO: 607750 - RNA, 22 nt, Human
uacuuacauuucuguaaucggc

SEQ ID NO: 607751 - RNA, 19 nt, Human
ugaguguguguuucucuaa

SEQ ID NO: 607752 - RNA, 22 nt, Human
agcugggcuuggccaggucgcu

SEQ ID NO: 607753 - RNA, 22 nt, Human
ugcugccuuuguggggucacug

SEQ ID NO: 607754 - RNA, 21 nt, Human
ucacaggucaaugugugaagg

SEQ ID NO: 607755 - RNA, 22 nt, Human
ucugggcuuuuccaugccugug

SEQ ID NO: 607756 - RNA, 22 nt, Human
uacuaugugaaaauacuauagu

SEQ ID NO: 607757 - RNA, 22 nt, Human
aacacagaagugccaagagcca

SEQ ID NO: 607758 - RNA, 22 nt, Human
gaccagcuacuuguacaguuca

SEQ ID NO: 607759 - RNA, 22 nt, Human
agacggauuaccugaggucagg

SEQ ID NO: 607760 - RNA, 22 nt, Human
gcagcucuggggcaggccugag

SEQ ID NO: 607761 - RNA, 22 nt, Human
ucugggcugcuucagccuucgc

SEQ ID NO: 607762 - RNA, 22 nt, Human
uaauaauuuuaaagaaggcuag

SEQ ID NO: 607763 - RNA, 22 nt, Human
cguuuauuuugaagauuccacu

SEQ ID NO: 607764 - RNA, 22 nt, Human
cagcuguggagauggggugcau

SEQ ID NO: 607765 - RNA, 22 nt, Human
cuccuuccugcagaucugagau

SEQ ID NO: 607766 - RNA, 22 nt, Human
aagagggaggugcgggugcaga

SEQ ID NO: 607767 - RNA, 22 nt, Human
uuugaugaaagcuacuauuuac

SEQ ID NO: 607768 - RNA, 22 nt, Human
ccagcugcuaucaugccauuuc

SEQ ID NO: 607769 - RNA, 23 nt, Human
aguggcugagaguguuucauaug

SEQ ID NO: 607770 - RNA, 22 nt, Human
uuggaugagguugagaaucauu

SEQ ID NO: 607771 - RNA, 22 nt, Human
gggacauggaggcgcgcaggca

SEQ ID NO: 607772 - RNA, 22 nt, Human
cugcagggcuguggucuggagu

SEQ ID NO: 607773 - RNA, 22 nt, Human
aaccaaggacagcuagugaugc

SEQ ID NO: 607774 - RNA, 22 nt, Human
agaagcagcuuucaaggugauu

SEQ ID NO: 607775 - RNA, 20 nt, Human
cucaguguggccugaguguu

SEQ ID NO: 607776 - RNA, 22 nt, Human
gaauaucuuguacaucuaagua

SEQ ID NO: 607777 - RNA, 20 nt, Human
caucagugccugacaggucc

SEQ ID NO: 607778 - RNA, 22 nt, Human
ggcuucugaaccaggcccugga

SEQ ID NO: 607779 - RNA, 22 nt, Human
gcacugcaucuacuggcaagua

SEQ ID NO: 607780 - RNA, 22 nt, Human
caagauuuauauuuucacacaa

SEQ ID NO: 607781 - RNA, 22 nt, Human
uguuaaaaaugcagauuccuau

SEQ ID NO: 607782 - RNA, 22 nt, Human
auugucuuuggugcuuccagga

SEQ ID NO: 607783 - RNA, 22 nt, Human
ggcaggggugaggccacucuga

SEQ ID NO: 607784 - RNA, 22 nt, Human
cacaggcuccggccuugcagcc

SEQ ID NO: 607785 - RNA, 22 nt, Human
gaucaauacuauuaagaucaua

SEQ ID NO: 607786 - RNA, 22 nt, Human
gugaggcagaaguucccuuuua

SEQ ID NO: 607787 - RNA, 22 nt, Human
uccuuucucccagguuaguugu

SEQ ID NO: 607788 - RNA, 22 nt, Human
ccuggggaagucacuucucuuu

SEQ ID NO: 607789 - RNA, 19 nt, Human
uccaggagcaaagccaguu

SEQ ID NO: 607790 - RNA, 22 nt, Human
ggcugagcacuuuaggcaggag

SEQ ID NO: 607791 - RNA, 22 nt, Human
ggcacagggggcugaggacuag

SEQ ID NO: 607792 - RNA, 22 nt, Human
caguuuccuuguuuaccuacug

SEQ ID NO: 607793 - RNA, 22 nt, Human
aaagauuauggcauugaaauac

SEQ ID NO: 607794 - RNA, 22 nt, Human
cuacugaaacucagaaauucaa

SEQ ID NO: 607795 - RNA, 22 nt, Human
auugcacaaagagggaaacuga

SEQ ID NO: 607796 - RNA, 22 nt, Human
gaccagcucucugaagaaagag

SEQ ID NO: 607797 - RNA, 22 nt, Human
caguguguggauccucccagga

SEQ ID NO: 607798 - RNA, 22 nt, Human
aguguuucaauccuagggguug

SEQ ID NO: 607799 - RNA, 22 nt, Human
aaggcugcuuuuaacaugcaua

SEQ ID NO: 607800 - RNA, 22 nt, Human
auauaguaagcagucuguaaau

SEQ ID NO: 607801 - RNA, 22 nt, Human
acuguguauucuaaugacuaaa

SEQ ID NO: 607802 - RNA, 22 nt, Human
ccucucuuggccgcagucuucu

SEQ ID NO: 607803 - RNA, 22 nt, Human
aagagccagcuagugaagaggc

SEQ ID NO: 607804 - RNA, 22 nt, Human
gcaggacaggcguugguccagu

SEQ ID NO: 607805 - RNA, 22 nt, Human
gcuggagauagaauggccacug

SEQ ID NO: 607806 - RNA, 22 nt, Human
ggcugcaguuugucuuuugcuu

SEQ ID NO: 607807 - RNA, 22 nt, Human
uagaaguucaugcgaauuauuu

SEQ ID NO: 607808 - RNA, 22 nt, Human
aucaaagaaugugacugaaaua

SEQ ID NO: 607809 - RNA, 22 nt, Human
uggaggauuaaucuggaaagau

SEQ ID NO: 607810 - RNA, 22 nt, Human
cuaggcugagcugggcugagcu

SEQ ID NO: 607811 - RNA, 22 nt, Human
cucugggcacuguauggguucu

SEQ ID NO: 607812 - RNA, 22 nt, Human
agauaggccauuaagaaggaua

SEQ ID NO: 607813 - RNA, 22 nt, Human
ggccagcuucucugcugccugu

SEQ ID NO: 607814 - RNA, 22 nt, Human
agaagccacuggagguugagau

SEQ ID NO: 607815 - RNA, 19 nt, Human
agccaggguccagacaugu

SEQ ID NO: 607816 - RNA, 22 nt, Human
aauuuauuuccugccaguacac

SEQ ID NO: 607817 - RNA, 20 nt, Human
acacaugugcguguucagua

SEQ ID NO: 607818 - RNA, 22 nt, Human
gccucagggggagaggccagcu

SEQ ID NO: 607819 - RNA, 22 nt, Human
uaauccaauggcacaauguaug

SEQ ID NO: 607820 - RNA, 22 nt, Human
aaagccacugcauguguaguau

SEQ ID NO: 607821 - RNA, 22 nt, Human
cugguuccaggauggaucuuuc

SEQ ID NO: 607822 - RNA, 22 nt, Human
agauacaccggaaccugaggcu

SEQ ID NO: 607823 - RNA, 22 nt, Human
ggaaaacuguauuugaauaacu

SEQ ID NO: 607824 - RNA, 22 nt, Human
agaggcuggguacgggccaccu

SEQ ID NO: 607825 - RNA, 22 nt, Human
accaucuuuuccucugccuccu

SEQ ID NO: 607826 - RNA, 21 nt, Human
gagugggacaugggagugguu

SEQ ID NO: 607827 - RNA, 22 nt, Human
agccucugauggcucccaagga

SEQ ID NO: 607828 - RNA, 23 nt, Human
cugugcccggggcuccaccugau

SEQ ID NO: 607829 - RNA, 22 nt, Human
uuguggggaggauuugaugaga

SEQ ID NO: 607830 - RNA, 22 nt, Human
uauguauaugguagaaguaugu

SEQ ID NO: 607831 - RNA, 22 nt, Human
auuccuucuaaaacgcugcccu

SEQ ID NO: 607832 - RNA, 22 nt, Human
ucagcuuuuuacaugugaaaua

SEQ ID NO: 607833 - RNA, 22 nt, Human
cagcuccugggccaucuccuag

SEQ ID NO: 607834 - RNA, 22 nt, Human
ggaggugggagacauaggcggc

SEQ ID NO: 607835 - RNA, 22 nt, Human
auggagcuguagggagcagugg

SEQ ID NO: 607836 - RNA, 22 nt, Human
agcauccagcauccuauagaaa

SEQ ID NO: 607837 - RNA, 22 nt, Human
uuccaaaugaguuccaucgaau

SEQ ID NO: 607838 - RNA, 22 nt, Human
gaaggcagguuuuucaaaacug

SEQ ID NO: 607839 - RNA, 22 nt, Human
agcugguggggaagcugcaggu

SEQ ID NO: 607840 - RNA, 22 nt, Human
acaguguucuuggcgcugagug

SEQ ID NO: 607841 - RNA, 22 nt, Human
ugcauggaacggucuccugguc

SEQ ID NO: 607842 - RNA, 22 nt, Human
uggucucuguaggcuaccccau

SEQ ID NO: 607843 - RNA, 22 nt, Human
cagcccagcacuaaguagauuu

SEQ ID NO: 607844 - RNA, 22 nt, Human
uggaauaacucaccaaggucau

SEQ ID NO: 607845 - RNA, 22 nt, Human
acacugaagagcacuuucaaag

SEQ ID NO: 607846 - RNA, 22 nt, Human
cugaggcagaaaaagcaagggu

SEQ ID NO: 607847 - RNA, 22 nt, Human
gcucucugaggugcuggcagag

SEQ ID NO: 607848 - RNA, 22 nt, Human
uuuuugaaggcugaugugauua

SEQ ID NO: 607849 - RNA, 22 nt, Human
caugauagguauuuaauuaaau

SEQ ID NO: 607850 - RNA, 22 nt, Human
cuaagaagucaggggacagagg

SEQ ID NO: 607851 - RNA, 22 nt, Human
aggccaggcgagacacccggcu

SEQ ID NO: 607852 - RNA, 19 nt, Human
uuacaucugcaacacuggu

SEQ ID NO: 607853 - RNA, 22 nt, Human
uuugacagugcugcuaaaaugc

SEQ ID NO: 607854 - RNA, 22 nt, Human
aaaauugaggcucauguuaaau

SEQ ID NO: 607855 - RNA, 22 nt, Human
gcacugaugcaaaaaucacuca

SEQ ID NO: 607856 - RNA, 22 nt, Human
uuucaguguguaaauugaaaua

SEQ ID NO: 607857 - RNA, 22 nt, Human
cucugcuucauccaccacuggc

SEQ ID NO: 607858 - RNA, 22 nt, Human
ugcagccuuuagaaguucagau

SEQ ID NO: 607859 - RNA, 22 nt, Human
acauuccugaggaaauacauuc

SEQ ID NO: 607860 - RNA, 22 nt, Human
ucucauucauccaaggauuuau

SEQ ID NO: 607861 - RNA, 22 nt, Human
uacaaagcuuguacugugugac

SEQ ID NO: 607862 - RNA, 22 nt, Human
gggcuccaaccccagugaacuc

SEQ ID NO: 607863 - RNA, 19 nt, Human
cuagggcuuggcagcaggc

SEQ ID NO: 607864 - RNA, 22 nt, Human
aguaacaguaacaucuuccuag

SEQ ID NO: 607865 - RNA, 22 nt, Human
cauguccuucucauugccucau

SEQ ID NO: 607866 - RNA, 22 nt, Human
uucuuuuacauuaagauuucag

SEQ ID NO: 607867 - RNA, 22 nt, Human
acuguucauuuguccuguaucu

SEQ ID NO: 607868 - RNA, 22 nt, Human
uuaggaaacgcugcuauugacu

SEQ ID NO: 607869 - RNA, 22 nt, Human
cugccagguaaacugcaggaau

SEQ ID NO: 607870 - RNA, 22 nt, Human
accagcacuuccagaggucagg

SEQ ID NO: 607871 - RNA, 22 nt, Human
ugucaaaaagcugggacaagca

SEQ ID NO: 607872 - RNA, 22 nt, Human
uguuaaggggauauagcagggc

SEQ ID NO: 607873 - RNA, 22 nt, Human
uccugggguuuagagggaagug

SEQ ID NO: 607874 - RNA, 22 nt, Human
agacauuuauucacacauuuau

SEQ ID NO: 607875 - RNA, 22 nt, Human
caccaggagccaucaggagucc

SEQ ID NO: 607876 - RNA, 22 nt, Human
cugaggaaugagugaggagcca

SEQ ID NO: 607877 - RNA, 22 nt, Human
uuucuacuucuccugaaugucu

SEQ ID NO: 607878 - RNA, 22 nt, Human
cucccucucuaaggcaaagaga

SEQ ID NO: 607879 - RNA, 22 nt, Human
ucauuuucacacauaaauagca

SEQ ID NO: 607880 - RNA, 22 nt, Human
auuguugagugcuucagcugua

SEQ ID NO: 607881 - RNA, 16 nt, Human
ugggugggaggagcgg

SEQ ID NO: 607882 - RNA, 22 nt, Human
acuggggagagucaugccagca

SEQ ID NO: 607883 - RNA, 18 nt, Human
cuaagaggucguuucuca

SEQ ID NO: 607884 - RNA, 22 nt, Human
gcacagcucgagcucaggaggg

SEQ ID NO: 607885 - RNA, 22 nt, Human
uuuguucuugcaacaguuauua

SEQ ID NO: 607886 - RNA, 22 nt, Human
uaaaacuagaccgugagucuaa

SEQ ID NO: 607887 - RNA, 22 nt, Human
ccugccagccagaucacucgcc

SEQ ID NO: 607888 - RNA, 22 nt, Human
aagcuucaucugaugccgaacu

SEQ ID NO: 607889 - RNA, 22 nt, Human
gugcagagcaagggcugagggc

SEQ ID NO: 607890 - RNA, 22 nt, Human
uauuucuguuuauuuguacauc

SEQ ID NO: 607891 - RNA, 22 nt, Human
agucccaguucgguucuuccuc

SEQ ID NO: 607892 - RNA, 22 nt, Human
cugcuggguuugccuuucacca

SEQ ID NO: 607893 - RNA, 22 nt, Human
ccuggcucucugcagauccugg

SEQ ID NO: 607894 - RNA, 22 nt, Human
cuugcucauuaaguagcucaca

SEQ ID NO: 607895 - RNA, 22 nt, Human
gcugagggaggcugaacugagu

SEQ ID NO: 607896 - RNA, 22 nt, Human
ccaguguugcauaggaugggga

SEQ ID NO: 607897 - RNA, 22 nt, Human
ugggaggagcccucugggaagg

SEQ ID NO: 607898 - RNA, 22 nt, Human
auguguaaugugguauuuuaau

SEQ ID NO: 607899 - RNA, 22 nt, Human
cuggucacuggucucauccagc

SEQ ID NO: 607900 - RNA, 22 nt, Human
ucugcccacugcucugcugccc

SEQ ID NO: 607901 - RNA, 22 nt, Human
agcuuucucuucuuuagaaagu

SEQ ID NO: 607902 - RNA, 22 nt, Human
uggccccaucaagggaugaguu

SEQ ID NO: 607903 - RNA, 22 nt, Human
cuggccugaggucggcuguagg

SEQ ID NO: 607904 - RNA, 19 nt, Human
ggccaccucucuucccagg

SEQ ID NO: 607905 - RNA, 19 nt, Human
agucacagggaagaggaac

SEQ ID NO: 607906 - RNA, 22 nt, Human
gucuuauaguacaauuugaagu

SEQ ID NO: 607907 - RNA, 22 nt, Human
ucuguuagcugucaaaguguuu

SEQ ID NO: 607908 - RNA, 22 nt, Human
ugaacauuggcacaaggcagca

SEQ ID NO: 607909 - RNA, 22 nt, Human
cagaggaguucaguacacagcc

SEQ ID NO: 607910 - RNA, 22 nt, Human
ugcaagacuccucacuuucucu

SEQ ID NO: 607911 - RNA, 22 nt, Human
augucuuugccauaguucauau

SEQ ID NO: 607912 - RNA, 22 nt, Human
caguccaaccugccccuugggc

SEQ ID NO: 607913 - RNA, 22 nt, Human
ucugggugaugaaaugcacugu

SEQ ID NO: 607914 - RNA, 20 nt, Human
uggcuuguuucuaugggcag

SEQ ID NO: 607915 - RNA, 22 nt, Human
caguggaggcucaagugugcuu

SEQ ID NO: 607916 - RNA, 22 nt, Human
ucucauuugugugcaauucaga

SEQ ID NO: 607917 - RNA, 22 nt, Human
gcgguagcucaagcuuguaauc

SEQ ID NO: 607918 - RNA, 22 nt, Human
caaaaguaaucguggcuuuugc

SEQ ID NO: 607919 - RNA, 22 nt, Human
gggaaggagguggcuugaagug

SEQ ID NO: 607920 - RNA, 22 nt, Human
cagugcaggcuuguggccgcag

SEQ ID NO: 607921 - RNA, 22 nt, Human
acagagacugggaugccugccu

SEQ ID NO: 607922 - RNA, 22 nt, Human
ucuucccacugcccaugggcag

SEQ ID NO: 607923 - RNA, 22 nt, Human
ugcugccaccugguggcugaag

SEQ ID NO: 607924 - RNA, 22 nt, Human
uucuuaaucuguguggguucga

SEQ ID NO: 607925 - RNA, 20 nt, Human
acaggagaucugaggaaagg

SEQ ID NO: 607926 - RNA, 22 nt, Human
uuucuucucuaaucucaaugau

SEQ ID NO: 607927 - RNA, 22 nt, Human
aaacuguauagggaaaaguaga

SEQ ID NO: 607928 - RNA, 22 nt, Human
uugaaacaguagcucauagacc

SEQ ID NO: 607929 - RNA, 22 nt, Human
agccagaggaacuugaugacug

SEQ ID NO: 607930 - RNA, 22 nt, Human
agcaggaguguccccuggcugu

SEQ ID NO: 607931 - RNA, 22 nt, Human
gccuccugguugcuucuccaac

SEQ ID NO: 607932 - RNA, 22 nt, Human
gucugaggccugaggcccuggg

SEQ ID NO: 607933 - RNA, 22 nt, Human
augcaguccaagcucuagaguu

SEQ ID NO: 607934 - RNA, 20 nt, Human
uggcuccuggcuccucccuc

SEQ ID NO: 607935 - RNA, 22 nt, Human
auaauuuaauuuucacaguggu

SEQ ID NO: 607936 - RNA, 22 nt, Human
ggcugagcuuauauaugugcug

SEQ ID NO: 607937 - RNA, 22 nt, Human
cagccuuugaacuucagagguu

SEQ ID NO: 607938 - RNA, 22 nt, Human
ugauuaaaauuuaacuuaguua

SEQ ID NO: 607939 - RNA, 22 nt, Human
auucagaauggcaaacuucuag

SEQ ID NO: 607940 - RNA, 22 nt, Human
gcacacagaauugauucacugu

SEQ ID NO: 607941 - RNA, 22 nt, Human
gagcaggaacugaaaaugagac

SEQ ID NO: 607942 - RNA, 22 nt, Human
ucuguaaacaccauguuagagu

SEQ ID NO: 607943 - RNA, 22 nt, Human
uucagcaaacacgaugcuuguu

SEQ ID NO: 607944 - RNA, 22 nt, Human
uuuaguuuuaacugaaagcuau

SEQ ID NO: 607945 - RNA, 22 nt, Human
aaacuucauggauaauauaaag

SEQ ID NO: 607946 - RNA, 22 nt, Human
ugacccugcuucuuggugcagg

SEQ ID NO: 607947 - RNA, 22 nt, Human
ccugaggccccugaggauagca

SEQ ID NO: 607948 - RNA, 22 nt, Human
ccagcucagggucacauggcac

SEQ ID NO: 607949 - RNA, 22 nt, Human
agugagggacuagugcugggga

SEQ ID NO: 607950 - RNA, 22 nt, Human
augcagauaugcaaacuguagu

SEQ ID NO: 607951 - RNA, 22 nt, Human
aaauagauuuccuagcauugga

SEQ ID NO: 607952 - RNA, 22 nt, Human
guucuucagucacaucacagaa

SEQ ID NO: 607953 - RNA, 22 nt, Human
aggccacagucagugggugcug

SEQ ID NO: 607954 - RNA, 22 nt, Human
gcugcaggcauuuuccugggca

SEQ ID NO: 607955 - RNA, 22 nt, Human
aggcacugacagauucuguguc

SEQ ID NO: 607956 - RNA, 22 nt, Human
aacuuaggaaaauaaggcauga

SEQ ID NO: 607957 - RNA, 22 nt, Human
uuucccuugaauaaagauaucu

SEQ ID NO: 607958 - RNA, 22 nt, Human
aggaacaagggagccuuuucuc

SEQ ID NO: 607959 - RNA, 22 nt, Human
ucuccagguggggucaccuuuu

SEQ ID NO: 607960 - RNA, 22 nt, Human
cagggccaagcugcagcaucug

SEQ ID NO: 607961 - RNA, 18 nt, Human
ggagccagucugucucug

SEQ ID NO: 607962 - RNA, 22 nt, Human
ugagacagucaccaggcaggcc

SEQ ID NO: 607963 - RNA, 22 nt, Human
ucugaaaguaucuggaucuuuu

SEQ ID NO: 607964 - RNA, 22 nt, Human
uacuguuauauauagcagcagu

SEQ ID NO: 607965 - RNA, 22 nt, Human
aagauuaaaggggagacaagcu

SEQ ID NO: 607966 - RNA, 22 nt, Human
ucacccagguaauagcaguuug

SEQ ID NO: 607967 - RNA, 21 nt, Human
agcugagguaaggcaagagag

SEQ ID NO: 607968 - RNA, 22 nt, Human
agcuuugggauucaggcaggaa

SEQ ID NO: 607969 - RNA, 22 nt, Human
aaagacacacagccagcaagug

SEQ ID NO: 607970 - RNA, 22 nt, Human
ugguuucugcccucagagcuca

SEQ ID NO: 607971 - RNA, 22 nt, Human
cagcucagugaugccuucacag

SEQ ID NO: 607972 - RNA, 22 nt, Human
aggcugugggaguugagagucu

SEQ ID NO: 607973 - RNA, 22 nt, Human
ugcuuucaccuguuugcaccca

SEQ ID NO: 607974 - RNA, 22 nt, Human
gcagugcucugccuauaaugga

SEQ ID NO: 607975 - RNA, 22 nt, Human
ucauacaacuaagaguuucaga

SEQ ID NO: 607976 - RNA, 22 nt, Human
ugcauuggaaacucagcagcac

SEQ ID NO: 607977 - RNA, 22 nt, Human
cagcaggaggugagaugugacc

SEQ ID NO: 607978 - RNA, 22 nt, Human
aaagugcacucucagugcugcu

SEQ ID NO: 607979 - RNA, 22 nt, Human
caguuacacaccauugugaaca

SEQ ID NO: 607980 - RNA, 22 nt, Human
caggugaguuuuccuccuuggu

SEQ ID NO: 607981 - RNA, 22 nt, Human
aacacugugcaguguaaugcug

SEQ ID NO: 607982 - RNA, 22 nt, Human
ggcagcaggagccaucugguag

SEQ ID NO: 607983 - RNA, 22 nt, Human
acuuauaagagugcuaugggga

SEQ ID NO: 607984 - RNA, 22 nt, Human
gugggccucuugaggguggcua

SEQ ID NO: 607985 - RNA, 22 nt, Human
uaggaagcuaugggagauguga

SEQ ID NO: 607986 - RNA, 22 nt, Human
uggggcucaugccugcuggaac

SEQ ID NO: 607987 - RNA, 22 nt, Human
ugggacacccucacgccugcac

SEQ ID NO: 607988 - RNA, 22 nt, Human
uuuagaaugugacuguauuuga

SEQ ID NO: 607989 - RNA, 22 nt, Human
aggcacuguucccaguuauccu

SEQ ID NO: 607990 - RNA, 22 nt, Human
uuugagugcccauguuucccag

SEQ ID NO: 607991 - RNA, 22 nt, Human
cugcuuuaacagaugauggugu

SEQ ID NO: 607992 - RNA, 22 nt, Human
aaagguuuauuuguugcucaca

SEQ ID NO: 607993 - RNA, 22 nt, Human
gaauaauagcagaaauuagcag

SEQ ID NO: 607994 - RNA, 22 nt, Human
uucuuggaaauacauucaauaa

SEQ ID NO: 607995 - RNA, 20 nt, Human
agaguaacuggcacauaggg

SEQ ID NO: 607996 - RNA, 22 nt, Human
aaacaguagaaguguauuuuau

SEQ ID NO: 607997 - RNA, 22 nt, Human
acaggccuagcuaaugcuuucc

SEQ ID NO: 607998 - RNA, 20 nt, Human
ggucccugcccucugucauc

SEQ ID NO: 607999 - RNA, 22 nt, Human
ccacuguauaagcaaaaugaaa

SEQ ID NO: 608000 - RNA, 22 nt, Human
augauauuugcaaugugcuugc

SEQ ID NO: 608001 - RNA, 22 nt, Human
ugagcagaauguucagauaaau

SEQ ID NO: 608002 - RNA, 22 nt, Human
uuucacauuagauaugucauuu

SEQ ID NO: 608003 - RNA, 22 nt, Human
cacaggcugggaagccuaggcc

SEQ ID NO: 608004 - RNA, 22 nt, Human
aagcugucaauguaucuagucu

SEQ ID NO: 608005 - RNA, 22 nt, Human
aacauuaagauggcggaacagu

SEQ ID NO: 608006 - RNA, 22 nt, Human
uauuagcuccaguacuguugcc

SEQ ID NO: 608007 - RNA, 22 nt, Human
ugcacagaugcuaggaggugaa

SEQ ID NO: 608008 - RNA, 22 nt, Human
aagagcaucuauuucacagugg

SEQ ID NO: 608009 - RNA, 22 nt, Human
auuuaugacagaagauaugcug

SEQ ID NO: 608010 - RNA, 22 nt, Human
uauguucagaagaagaaugggg

SEQ ID NO: 608011 - RNA, 18 nt, Human
gcuuuauuucuuggggaa

SEQ ID NO: 608012 - RNA, 22 nt, Human
caggcacuggggaugcugggau

SEQ ID NO: 608013 - RNA, 22 nt, Human
ccacuguaaguuugaaaauaac

SEQ ID NO: 608014 - RNA, 19 nt, Human
uugcaguuggguggggagu

SEQ ID NO: 608015 - RNA, 22 nt, Human
gagcugggaguuauagcauguu

SEQ ID NO: 608016 - RNA, 22 nt, Human
cccaggcagggacgugcucugg

SEQ ID NO: 608017 - RNA, 19 nt, Human
ccaggcuuuaugcaaauac

SEQ ID NO: 608018 - RNA, 22 nt, Human
gcugccucacuccagcccaaua

SEQ ID NO: 608019 - RNA, 22 nt, Human
agggccugggccagcacccuuu

SEQ ID NO: 608020 - RNA, 22 nt, Human
acagagacuuggagcaggcuga

SEQ ID NO: 608021 - RNA, 22 nt, Human
cuuccucccggcccaugcucug

SEQ ID NO: 608022 - RNA, 22 nt, Human
gggcugagcuguucugaguuua

SEQ ID NO: 608023 - RNA, 21 nt, Human
uuuguucauagcucacucuuu

SEQ ID NO: 608024 - RNA, 22 nt, Human
uguuugaguucuagcgcauuua

SEQ ID NO: 608025 - RNA, 22 nt, Human
caaaugcauaguuuauaagaag

SEQ ID NO: 608026 - RNA, 22 nt, Human
ugccuucaccaggccuucagcc

SEQ ID NO: 608027 - RNA, 22 nt, Human
cuggggcugcagcgaucuucau

SEQ ID NO: 608028 - RNA, 22 nt, Human
ucucugccacagcuucugccuu

SEQ ID NO: 608029 - RNA, 22 nt, Human
uucuaccagaccccagacuugu

SEQ ID NO: 608030 - RNA, 22 nt, Human
agcuguggcaaccuugucagac

SEQ ID NO: 608031 - RNA, 22 nt, Human
ggugagggaguggaacgaggug

SEQ ID NO: 608032 - RNA, 22 nt, Human
uaugguagaaaaacugaguccc

SEQ ID NO: 608033 - RNA, 23 nt, Human
uuuuuugucuugcuaggcugccc

SEQ ID NO: 608034 - RNA, 22 nt, Human
augaaauaucuugaagaaauuc

SEQ ID NO: 608035 - RNA, 22 nt, Human
guuagcaaugcccaggaaugca

SEQ ID NO: 608036 - RNA, 23 nt, Human
aacacaaagcugauuccaguggc

SEQ ID NO: 608037 - RNA, 22 nt, Human
aaaagcaagaggcuggauuaaa

SEQ ID NO: 608038 - RNA, 22 nt, Human
ggagagcugacaucaugauguu

SEQ ID NO: 608039 - RNA, 22 nt, Human
uaguuacaauuaugcauggaaa

SEQ ID NO: 608040 - RNA, 22 nt, Human
guggccagccccauggacaguu

SEQ ID NO: 608041 - RNA, 22 nt, Human
acugagcucuugacugggaguu

SEQ ID NO: 608042 - RNA, 22 nt, Human
uuuccuuucugguuuggucaua

SEQ ID NO: 608043 - RNA, 22 nt, Human
cagcugccugucuggaggcaau

SEQ ID NO: 608044 - RNA, 22 nt, Human
aauuucaguaugaaguuucaca

SEQ ID NO: 608045 - RNA, 22 nt, Human
guguuuuauuggugcagucaga

SEQ ID NO: 608046 - RNA, 18 nt, Human
uccagcucacagaugggc

SEQ ID NO: 608047 - RNA, 22 nt, Human
cauucacagagggggaagcauc

SEQ ID NO: 608048 - RNA, 19 nt, Human
gccaggcucuuauucugug

SEQ ID NO: 608049 - RNA, 22 nt, Human
uaucaucauuggcaggugagaa

SEQ ID NO: 608050 - RNA, 22 nt, Human
ggcugagacaaccugggaccca

SEQ ID NO: 608051 - RNA, 22 nt, Human
auuaugaaguugagggacccug

SEQ ID NO: 608052 - RNA, 22 nt, Human
agucacccuccaacucuccacu

SEQ ID NO: 608053 - RNA, 22 nt, Human
gugggcagacaugauagaagga

SEQ ID NO: 608054 - RNA, 17 nt, Human
cugaaauauuaugauaa

SEQ ID NO: 608055 - RNA, 19 nt, Human
ccugcagggaugagagguu

SEQ ID NO: 608056 - RNA, 22 nt, Human
cugcccuguuuggacagcccgg

SEQ ID NO: 608057 - RNA, 22 nt, Human
uuuuccuucugauacuccauuu

SEQ ID NO: 608058 - RNA, 22 nt, Human
cugggcucaagaagucuucccu

SEQ ID NO: 608059 - RNA, 22 nt, Human
ggucugagagccacugaauccc

SEQ ID NO: 608060 - RNA, 22 nt, Human
cuucagcaccauagcuccuucu

SEQ ID NO: 608061 - RNA, 20 nt, Human
uuguuuuaaauccuggauga

SEQ ID NO: 608062 - RNA, 22 nt, Human
aaagcaguccuucccuuaaggu

SEQ ID NO: 608063 - RNA, 23 nt, Human
gggaaguggggauuugaagucau

SEQ ID NO: 608064 - RNA, 22 nt, Human
ugguuaaaugcuccgaucuugg

SEQ ID NO: 608065 - RNA, 22 nt, Human
acugauguucagccauguucug

SEQ ID NO: 608066 - RNA, 22 nt, Human
gcauuaauguaagacccacucc

SEQ ID NO: 608067 - RNA, 22 nt, Human
agucuucagagaaauuaacucu

SEQ ID NO: 608068 - RNA, 22 nt, Human
gaggggaagacuucuggacagu

SEQ ID NO: 608069 - RNA, 22 nt, Human
ugucaugaugugcacaccacag

SEQ ID NO: 608070 - RNA, 22 nt, Human
uucauuugcacuggauuacugg

SEQ ID NO: 608071 - RNA, 22 nt, Human
agcuggccuguuagagcugagu

SEQ ID NO: 608072 - RNA, 22 nt, Human
cguguuucagccagggccaccu

SEQ ID NO: 608073 - RNA, 22 nt, Human
uuaggcaugcaagauuaagcuc

SEQ ID NO: 608074 - RNA, 19 nt, Human
gggaugggcccucacccuc

SEQ ID NO: 608075 - RNA, 22 nt, Human
aggaaagguucagugauugaaa

SEQ ID NO: 608076 - RNA, 22 nt, Human
uaauucuagauugacauuuuga

SEQ ID NO: 608077 - RNA, 22 nt, Human
ugcucaguagcagugugcugcu

SEQ ID NO: 608078 - RNA, 22 nt, Human
ucccugccaguccuggucugaa

SEQ ID NO: 608079 - RNA, 22 nt, Human
caggccuggggcuggcuuccag

SEQ ID NO: 608080 - RNA, 19 nt, Human
acccucuccccacuggguc

SEQ ID NO: 608081 - RNA, 22 nt, Human
ugcuucugacuaagcugcauga

SEQ ID NO: 608082 - RNA, 22 nt, Human
ucauuuuucucuuacacguaga

SEQ ID NO: 608083 - RNA, 22 nt, Human
ccagcucuagccccauguggcu

SEQ ID NO: 608084 - RNA, 19 nt, Human
agggcugcucuggccuggg

SEQ ID NO: 608085 - RNA, 22 nt, Human
aagaggaacugggggcugaguc

SEQ ID NO: 608086 - RNA, 22 nt, Human
ggaggcugagaggucgcagugg

SEQ ID NO: 608087 - RNA, 22 nt, Human
ccaugcugacccugugcaggca

SEQ ID NO: 608088 - RNA, 22 nt, Human
agaauucuccuucagggcagga

SEQ ID NO: 608089 - RNA, 21 nt, Human
gucagggauucaagugcucac

SEQ ID NO: 608090 - RNA, 22 nt, Human
ucagaaacacucuucuucuguc

SEQ ID NO: 608091 - RNA, 22 nt, Human
uacauacacaaauauacuguuu

SEQ ID NO: 608092 - RNA, 22 nt, Human
uacaagaaaguccaguggguuu

SEQ ID NO: 608093 - RNA, 22 nt, Human
aggaagaaccuaagaaagucuc

SEQ ID NO: 608094 - RNA, 22 nt, Human
ggcuauggaagauaaggcugaa

SEQ ID NO: 608095 - RNA, 22 nt, Human
uaucuauaaguacuaacauggu

SEQ ID NO: 608096 - RNA, 22 nt, Human
aaugcuuugauugauuaaaaca

SEQ ID NO: 608097 - RNA, 22 nt, Human
cccuucaggguuaaguagaggg

SEQ ID NO: 608098 - RNA, 22 nt, Human
aggcuugaaaugaaaucuguaa

SEQ ID NO: 608099 - RNA, 22 nt, Human
ccagccagcugcccuuggggcc

SEQ ID NO: 608100 - RNA, 22 nt, Human
ucugggaacacacgucacuuca

SEQ ID NO: 608101 - RNA, 22 nt, Human
ccugccucaucaacuugucgug

SEQ ID NO: 608102 - RNA, 22 nt, Human
uccuggcucuaaguccugagug

SEQ ID NO: 608103 - RNA, 22 nt, Human
gccagguggucuggcuccagag

SEQ ID NO: 608104 - RNA, 22 nt, Human
gccaccucucucuugacucgag

SEQ ID NO: 608105 - RNA, 22 nt, Human
gaaggcugaugacagauucugc

SEQ ID NO: 608106 - RNA, 22 nt, Human
gcugcccuccaguucccacagu

SEQ ID NO: 608107 - RNA, 22 nt, Human
auaaaagaaguuuugguacuug

SEQ ID NO: 608108 - RNA, 22 nt, Human
uggggccagagcugcagggagc

SEQ ID NO: 608109 - RNA, 17 nt, Human
acagcagggaaguguug

SEQ ID NO: 608110 - RNA, 22 nt, Human
auccacuuggcugguuguucua

SEQ ID NO: 608111 - RNA, 22 nt, Human
uccagggaaggugugaggcugg

SEQ ID NO: 608112 - RNA, 21 nt, Human
caggaaaagcggaagucuagc

SEQ ID NO: 608113 - RNA, 22 nt, Human
ucaagcaaagauacaaauggaa

SEQ ID NO: 608114 - RNA, 22 nt, Human
cagaccugaggagcacugagcc

SEQ ID NO: 608115 - RNA, 22 nt, Human
ucugaacauuuuuugcagccua

SEQ ID NO: 608116 - RNA, 22 nt, Human
cugcucuaacugcauuaguuuu

SEQ ID NO: 608117 - RNA, 22 nt, Human
ggguagggugacuuaggcuggc

SEQ ID NO: 608118 - RNA, 22 nt, Human
gcuggaggauggacuggaagaa

SEQ ID NO: 608119 - RNA, 22 nt, Human
uagauguuuuaacucuugguua

SEQ ID NO: 608120 - RNA, 21 nt, Human
ccaggcaugacugcagagagc

SEQ ID NO: 608121 - RNA, 22 nt, Human
gggcaucugguggagccucagg

SEQ ID NO: 608122 - RNA, 22 nt, Human
gggcuucuauucaagucuguuu

SEQ ID NO: 608123 - RNA, 20 nt, Human
ucuuuaguuccuggcccuuu

SEQ ID NO: 608124 - RNA, 20 nt, Human
agucuggcaugaugcaggca

SEQ ID NO: 608125 - RNA, 22 nt, Human
aguuuuauggcucaaccuaaua

SEQ ID NO: 608126 - RNA, 22 nt, Human
aucuccgccaucgcgaacgccu

SEQ ID NO: 608127 - RNA, 22 nt, Human
uacuguacucaacaugugaguu

SEQ ID NO: 608128 - RNA, 22 nt, Human
ucaguugccaguauuuuauaua

SEQ ID NO: 608129 - RNA, 22 nt, Human
ugccuggguccaggccaagccu

SEQ ID NO: 608130 - RNA, 22 nt, Human
gguuccugugccucuagcuggc

SEQ ID NO: 608131 - RNA, 23 nt, Human
uuuuaauuuggacauaagaagau

SEQ ID NO: 608132 - RNA, 21 nt, Human
ucugaacaacauacgaaucuu

SEQ ID NO: 608133 - RNA, 22 nt, Human
ugaaacuuauaagaauaugaau

SEQ ID NO: 608134 - RNA, 22 nt, Human
ggaauucuguagcucuuccucu

SEQ ID NO: 608135 - RNA, 22 nt, Human
uucaaguucauguguagucagu

SEQ ID NO: 608136 - RNA, 22 nt, Human
uaccuucucuagaucuuuauuc

SEQ ID NO: 608137 - RNA, 22 nt, Human
cuuuuuauagcuauguccuaug

SEQ ID NO: 608138 - RNA, 22 nt, Human
auuuguaagcuagagccaugau

SEQ ID NO: 608139 - RNA, 22 nt, Human
ucucugugcccaguaguucucu

SEQ ID NO: 608140 - RNA, 22 nt, Human
ucugggagauccaagcagaacu

SEQ ID NO: 608141 - RNA, 22 nt, Human
aaauaaucaauuuuuguagaua

SEQ ID NO: 608142 - RNA, 22 nt, Human
ucugcaggagagugcccuagag

SEQ ID NO: 608143 - RNA, 22 nt, Human
ggaugggagcagaggacgacca

SEQ ID NO: 608144 - RNA, 22 nt, Human
gcagcugaauguccauugcugc

SEQ ID NO: 608145 - RNA, 22 nt, Human
uagagauggggucuugcuauga

SEQ ID NO: 608146 - RNA, 22 nt, Human
ucaggcuuccaggcucugcuga

SEQ ID NO: 608147 - RNA, 22 nt, Human
ccugagugcuuccagagucaug

SEQ ID NO: 608148 - RNA, 22 nt, Human
aggaugggucagcuagagucca

SEQ ID NO: 608149 - RNA, 19 nt, Human
agcagagcagggccguggg

SEQ ID NO: 608150 - RNA, 22 nt, Human
augggcaguguauuggaaggaa

SEQ ID NO: 608151 - RNA, 22 nt, Human
aggagggagcuuaagccaggca

SEQ ID NO: 608152 - RNA, 22 nt, Human
aaucacaguggguacuagauug

SEQ ID NO: 608153 - RNA, 22 nt, Human
ccugggcaacauagggagaccc

SEQ ID NO: 608154 - RNA, 22 nt, Human
aucauuaaauauaagcuucaca

SEQ ID NO: 608155 - RNA, 22 nt, Human
aggguggggugcuacaucuuua

SEQ ID NO: 608156 - RNA, 22 nt, Human
guguucuaauggcugagggaug

SEQ ID NO: 608157 - RNA, 22 nt, Human
uacacagauuucaguaucauca

SEQ ID NO: 608158 - RNA, 22 nt, Human
caaaugcauagaaagaugaaac

SEQ ID NO: 608159 - RNA, 22 nt, Human
agacacuguguacagaaaaaga

SEQ ID NO: 608160 - RNA, 22 nt, Human
gcagcugagagaagaacagggc

SEQ ID NO: 608161 - RNA, 22 nt, Human
acugccugugucccuucagugc

SEQ ID NO: 608162 - RNA, 20 nt, Human
cagaugggacguggaggagu

SEQ ID NO: 608163 - RNA, 22 nt, Human
cuguccuggccgcccuugugag

SEQ ID NO: 608164 - RNA, 22 nt, Human
caccccagcuucucaggauaga

SEQ ID NO: 608165 - RNA, 22 nt, Human
acugucuucaaaugaauauauu

SEQ ID NO: 608166 - RNA, 22 nt, Human
guacaggaaggagggaguuuca

SEQ ID NO: 608167 - RNA, 22 nt, Human
uccaggcugauccaugaagaau

SEQ ID NO: 608168 - RNA, 22 nt, Human
gcucugaggagccaagaaugug

SEQ ID NO: 608169 - RNA, 22 nt, Human
acugcuuugcucugcccccagg

SEQ ID NO: 608170 - RNA, 22 nt, Human
acauccugaagucagucauuug

SEQ ID NO: 608171 - RNA, 22 nt, Human
cugguccucuccagcaggcauu

SEQ ID NO: 608172 - RNA, 22 nt, Human
aaaguuuuuaagcaagacccuu

SEQ ID NO: 608173 - RNA, 22 nt, Human
gagggagagugauggaccauug

SEQ ID NO: 608174 - RNA, 22 nt, Human
gcuacugugaaggagucuuucu

SEQ ID NO: 608175 - RNA, 22 nt, Human
ggugaauaagcugaacacuugg

SEQ ID NO: 608176 - RNA, 22 nt, Human
uauguucugacucuacauggga

SEQ ID NO: 608177 - RNA, 22 nt, Human
uggccuggccacauccagcagg

SEQ ID NO: 608178 - RNA, 18 nt, Human
ggcucagcaggcucucuc

SEQ ID NO: 608179 - RNA, 22 nt, Human
ccugagcuagggaaggaagacc

SEQ ID NO: 608180 - RNA, 22 nt, Human
ugaagauuuccaccaaaucaca

SEQ ID NO: 608181 - RNA, 18 nt, Human
gagcaugggcagugggga

SEQ ID NO: 608182 - RNA, 22 nt, Human
uuuucuagggugcuaaaugaac

SEQ ID NO: 608183 - RNA, 22 nt, Human
uggcccuguguccugcugccag

SEQ ID NO: 608184 - RNA, 22 nt, Human
gcugucugcaucucuagagcuu

SEQ ID NO: 608185 - RNA, 22 nt, Human
aaacaugaugccuguacuaaga

SEQ ID NO: 608186 - RNA, 22 nt, Human
acagaagauaacugggaccaga

SEQ ID NO: 608187 - RNA, 22 nt, Human
ugcccaggcuggaaugcagugg

SEQ ID NO: 608188 - RNA, 22 nt, Human
agugggggccaacgagggcagc

SEQ ID NO: 608189 - RNA, 23 nt, Human
cauggcugauuucaagcuaccac

SEQ ID NO: 608190 - RNA, 22 nt, Human
aaauaauguuaggccuuugcuc

SEQ ID NO: 608191 - RNA, 22 nt, Human
aaaagucugcuuucuauuauca

SEQ ID NO: 608192 - RNA, 22 nt, Human
ugagaauuugugaacuuuucuc

SEQ ID NO: 608193 - RNA, 23 nt, Human
aaguaacagggauaauagcaguu

SEQ ID NO: 608194 - RNA, 22 nt, Human
aaucagaaagaucuugaugaga

SEQ ID NO: 608195 - RNA, 22 nt, Human
ccugccagaaaagagggaguuc

SEQ ID NO: 608196 - RNA, 22 nt, Human
agaggagguggugaugcuuuaa

SEQ ID NO: 608197 - RNA, 22 nt, Human
uggagaugaauauguguaccug

SEQ ID NO: 608198 - RNA, 22 nt, Human
acugggcagggaaggagaccga

SEQ ID NO: 608199 - RNA, 22 nt, Human
aggucuggugagagcaggugcu

SEQ ID NO: 608200 - RNA, 22 nt, Human
agagcugcccacacagcagauu

SEQ ID NO: 608201 - RNA, 22 nt, Human
aaacacugcaggguuuacuuga

SEQ ID NO: 608202 - RNA, 22 nt, Human
caacugagcaguagcgucugga

SEQ ID NO: 608203 - RNA, 22 nt, Human
uuccugagaaauuuguaccugg

SEQ ID NO: 608204 - RNA, 22 nt, Human
agaggcuuccugccaccugaga

SEQ ID NO: 608205 - RNA, 22 nt, Human
ucagcucucugggcucgaaccu

SEQ ID NO: 608206 - RNA, 22 nt, Human
agcccaggucuggcccagccug

SEQ ID NO: 608207 - RNA, 22 nt, Human
ugucaugggucuaaacauugau

SEQ ID NO: 608208 - RNA, 22 nt, Human
ccuggcucagaguaugucaucg

SEQ ID NO: 608209 - RNA, 22 nt, Human
aucagaaaaacauaauguuauu

SEQ ID NO: 608210 - RNA, 22 nt, Human
uuuaguuauuguuacaguauga

SEQ ID NO: 608211 - RNA, 22 nt, Human
guuccuuguaauuuguuaagga

SEQ ID NO: 608212 - RNA, 22 nt, Human
gcugagcuagaaaaggaccaca

SEQ ID NO: 608213 - RNA, 21 nt, Human
gcagccagacgggauucaguu

SEQ ID NO: 608214 - RNA, 22 nt, Human
ggcuugggagcaggcaugugac

SEQ ID NO: 608215 - RNA, 22 nt, Human
gggaguggguuuggccuaggcc

SEQ ID NO: 608216 - RNA, 22 nt, Human
cuggccuggcaggggaccucua

SEQ ID NO: 608217 - RNA, 22 nt, Human
ucugccugugguggaggaaguu

SEQ ID NO: 608218 - RNA, 22 nt, Human
agcaagaugaaggauucaagac

SEQ ID NO: 608219 - RNA, 22 nt, Human
ucugaggcagcuugccacucua

SEQ ID NO: 608220 - RNA, 22 nt, Human
uuucucuauuaggggcuagcuu

SEQ ID NO: 608221 - RNA, 22 nt, Human
uuaauucuaguuuaacacuuag

SEQ ID NO: 608222 - RNA, 22 nt, Human
uuccuucuagagcuuguuuagg

SEQ ID NO: 608223 - RNA, 22 nt, Human
uccuccagcuacuaggcaaaua

SEQ ID NO: 608224 - RNA, 22 nt, Human
aucaucuuaagguaucucaagc

SEQ ID NO: 608225 - RNA, 22 nt, Human
uggcauccagauacccugaggg

SEQ ID NO: 608226 - RNA, 18 nt, Human
gccucuguugcuugccug

SEQ ID NO: 608227 - RNA, 22 nt, Human
gcccagagagaugcuguagacc

SEQ ID NO: 608228 - RNA, 20 nt, Human
cuuggccuacuuagcuuugu

SEQ ID NO: 608229 - RNA, 22 nt, Human
gcuuggccagcagccgggaugc

SEQ ID NO: 608230 - RNA, 21 nt, Human
ugucuuuaggaccuguuaaau

SEQ ID NO: 608231 - RNA, 22 nt, Human
ccaggccugauugggaaucuug

SEQ ID NO: 608232 - RNA, 21 nt, Human
acuuaaauuccuugauauuua

SEQ ID NO: 608233 - RNA, 22 nt, Human
gggaaacucacaggugcagggg

SEQ ID NO: 608234 - RNA, 22 nt, Human
agaggcugaaugaugucaucau

SEQ ID NO: 608235 - RNA, 22 nt, Human
ggggaaacauguuguucagacc

SEQ ID NO: 608236 - RNA, 22 nt, Human
uguggucccaaggcaacuggaa

SEQ ID NO: 608237 - RNA, 22 nt, Human
agcuuuaaaaauccaauaucca

SEQ ID NO: 608238 - RNA, 22 nt, Human
uuccaaauggagaagaugaguu

SEQ ID NO: 608239 - RNA, 22 nt, Human
cagacagggguaaccuuccuca

SEQ ID NO: 608240 - RNA, 22 nt, Human
ccucuuugugccugcaggcugc

SEQ ID NO: 608241 - RNA, 22 nt, Human
aagggccuccuggggagccugg

SEQ ID NO: 608242 - RNA, 22 nt, Human
ggagacuugaguuuuugucuua

SEQ ID NO: 608243 - RNA, 22 nt, Human
ucuuuccauggccacacagucu

SEQ ID NO: 608244 - RNA, 22 nt, Human
gacaggcccgaguagcugauga

SEQ ID NO: 608245 - RNA, 20 nt, Human
ugggaguacaaucaugagca

SEQ ID NO: 608246 - RNA, 22 nt, Human
caagguuugaaaacgccauggc

SEQ ID NO: 608247 - RNA, 22 nt, Human
acugcagccuagggaccacagu

SEQ ID NO: 608248 - RNA, 22 nt, Human
uaaacagagaugccugggucug

SEQ ID NO: 608249 - RNA, 22 nt, Human
gauuuauuggucuuucauuggu

SEQ ID NO: 608250 - RNA, 22 nt, Human
augggcugaaagaguaagcugu

SEQ ID NO: 608251 - RNA, 22 nt, Human
cagaggcugacccugcuguugu

SEQ ID NO: 608252 - RNA, 22 nt, Human
cagaaaauaaacauuuguggaa

SEQ ID NO: 608253 - RNA, 19 nt, Human
ugcagaggguaggaaggcc

SEQ ID NO: 608254 - RNA, 22 nt, Human
agcauuuauuucuuagaaauug

SEQ ID NO: 608255 - RNA, 22 nt, Human
gccagcuggagacuggcagggg

SEQ ID NO: 608256 - RNA, 22 nt, Human
gcuggguuuccagcaggcagga

SEQ ID NO: 608257 - RNA, 22 nt, Human
ccacccuuggguucggaggccg

SEQ ID NO: 608258 - RNA, 19 nt, Human
cuuuuucaccuucuagaag

SEQ ID NO: 608259 - RNA, 19 nt, Human
acaaagcugugagcagcuu

SEQ ID NO: 608260 - RNA, 22 nt, Human
aguccuuagaacacuguaucug

SEQ ID NO: 608261 - RNA, 22 nt, Human
aaugccacuaaaucugugaaua

SEQ ID NO: 608262 - RNA, 22 nt, Human
acagcucucccucagagaaaug

SEQ ID NO: 608263 - RNA, 22 nt, Human
uuugcauuauauuuauagaaga

SEQ ID NO: 608264 - RNA, 22 nt, Human
aucugccaaugccaugagaaga

SEQ ID NO: 608265 - RNA, 22 nt, Human
aaaguuguuguucacagguuau

SEQ ID NO: 608266 - RNA, 21 nt, Human
uauuagcuucuggugcuguuu

SEQ ID NO: 608267 - RNA, 22 nt, Human
aagaauguuaguuucugauaca

SEQ ID NO: 608268 - RNA, 22 nt, Human
ucagggaaauuuccauguguuu

SEQ ID NO: 608269 - RNA, 22 nt, Human
uuuaaacaaauaggauugccua

SEQ ID NO: 608270 - RNA, 22 nt, Human
gggcagugaauauuggugggaa

SEQ ID NO: 608271 - RNA, 18 nt, Human
ugguggugacagggucau

SEQ ID NO: 608272 - RNA, 22 nt, Human
uuaaagcaugcugcuuuuccau

SEQ ID NO: 608273 - RNA, 18 nt, Human
caggucugucugccuccc

SEQ ID NO: 608274 - RNA, 22 nt, Human
cagacacuuauugagcaaguac

SEQ ID NO: 608275 - RNA, 22 nt, Human
cccaugagauucugaauuuggc

SEQ ID NO: 608276 - RNA, 22 nt, Human
aaagccagugguaugagagaaa

SEQ ID NO: 608277 - RNA, 22 nt, Human
cugccucuauaggaguccacca

SEQ ID NO: 608278 - RNA, 22 nt, Human
auuucccagauaaacagcugga

SEQ ID NO: 608279 - RNA, 22 nt, Human
uggccaggaggcugcuucugac

SEQ ID NO: 608280 - RNA, 22 nt, Human
ucugccuguucaagucuucuag

SEQ ID NO: 608281 - RNA, 22 nt, Human
ucagcacuuggauuucagagau

SEQ ID NO: 608282 - RNA, 22 nt, Human
augggggccugaacaggcaaaa

SEQ ID NO: 608283 - RNA, 21 nt, Human
ucagugacaggugcugaccuc

SEQ ID NO: 608284 - RNA, 22 nt, Human
guaggcagaauaauuccuccuu

SEQ ID NO: 608285 - RNA, 22 nt, Human
ccugcccacagagagggugcau

SEQ ID NO: 608286 - RNA, 22 nt, Human
uuuuuuguagcaagcgcagaua

SEQ ID NO: 608287 - RNA, 22 nt, Human
cccaggcuggagggcaguguca

SEQ ID NO: 608288 - RNA, 22 nt, Human
ucugugccucaucugguucagg

SEQ ID NO: 608289 - RNA, 22 nt, Human
uagaaaccucagggaaaucuuu

SEQ ID NO: 608290 - RNA, 22 nt, Human
agcagggccaacaguaaacacc

SEQ ID NO: 608291 - RNA, 22 nt, Human
gucuuauugcguauguauacaa

SEQ ID NO: 608292 - RNA, 22 nt, Human
uugcaguuaaaaaucauuaguu

SEQ ID NO: 608293 - RNA, 22 nt, Human
agagcuuauaucuuggccaucc

SEQ ID NO: 608294 - RNA, 22 nt, Human
cagagccucagaauccugugga

SEQ ID NO: 608295 - RNA, 22 nt, Human
augcuuuaaaacguauguguaa

SEQ ID NO: 608296 - RNA, 22 nt, Human
gugagacacgugugugaccugg

SEQ ID NO: 608297 - RNA, 22 nt, Human
ugggccuggcccuguggaggag

SEQ ID NO: 608298 - RNA, 22 nt, Human
uucugggggaauacagcuauga

SEQ ID NO: 608299 - RNA, 22 nt, Human
aaggcagcagaggaaaggugcu

SEQ ID NO: 608300 - RNA, 22 nt, Human
aaggcacuacgcugcuggggcg

SEQ ID NO: 608301 - RNA, 22 nt, Human
uagcacauaacuuagaauaguu

SEQ ID NO: 608302 - RNA, 22 nt, Human
uuagaggacaagaggccuggcu

SEQ ID NO: 608303 - RNA, 23 nt, Human
ucagaacaguucuuggugcauag

SEQ ID NO: 608304 - RNA, 22 nt, Human
ucugccagaagccagggucugg

SEQ ID NO: 608305 - RNA, 22 nt, Human
ccacagcugaccgcaggugagc

SEQ ID NO: 608306 - RNA, 22 nt, Human
ugccaggcaacugcccagccau

SEQ ID NO: 608307 - RNA, 22 nt, Human
cagcuuuccccgugccucagcc

SEQ ID NO: 608308 - RNA, 22 nt, Human
ucucagaacuuuauauguauca

SEQ ID NO: 608309 - RNA, 22 nt, Human
auacuguacgucccagauagga

SEQ ID NO: 608310 - RNA, 22 nt, Human
auuuccuauuucuuguccccua

SEQ ID NO: 608311 - RNA, 22 nt, Human
caggagcucacagucuuugggu

SEQ ID NO: 608312 - RNA, 22 nt, Human
ugcugaauuuacauuuuuguag

SEQ ID NO: 608313 - RNA, 20 nt, Human
aguggggagucaggagugcc

SEQ ID NO: 608314 - RNA, 22 nt, Human
uggcauggcguggcaucgugug

SEQ ID NO: 608315 - RNA, 22 nt, Human
agggccaguauuaagguaauua

SEQ ID NO: 608316 - RNA, 22 nt, Human
gugagaauaccagcagugagaa

SEQ ID NO: 608317 - RNA, 22 nt, Human
gaagguuugaaauagguauaga

SEQ ID NO: 608318 - RNA, 22 nt, Human
gaauguuaaugcacuucuagcu

SEQ ID NO: 608319 - RNA, 22 nt, Human
aggaggugcuguuuguccugga

SEQ ID NO: 608320 - RNA, 22 nt, Human
caaagccaggcuuucuaaugua

SEQ ID NO: 608321 - RNA, 22 nt, Human
acacuuuacagcuuccuuugca

SEQ ID NO: 608322 - RNA, 22 nt, Human
ggcagccuugacuagugacuua

SEQ ID NO: 608323 - RNA, 22 nt, Human
cuccuggggccauggaaggaac

SEQ ID NO: 608324 - RNA, 22 nt, Human
gucugaaaaugcccuacgauug

SEQ ID NO: 608325 - RNA, 22 nt, Human
gacugcuuugguuuguaaaugu

SEQ ID NO: 608326 - RNA, 22 nt, Human
uaaacaagcugucugauauucu

SEQ ID NO: 608327 - RNA, 22 nt, Human
gcacugggaaugugagcagcug

SEQ ID NO: 608328 - RNA, 22 nt, Human
ucucugagcucaggagcugcag

SEQ ID NO: 608329 - RNA, 22 nt, Human
cagacaggcaggugagagcucc

SEQ ID NO: 608330 - RNA, 22 nt, Human
uuugugcauaaagggcuauagu

SEQ ID NO: 608331 - RNA, 22 nt, Human
cagugagggaagaucucagcac

SEQ ID NO: 608332 - RNA, 22 nt, Human
ggcccagcugugcuuccagccc

SEQ ID NO: 608333 - RNA, 22 nt, Human
cccaguggugcuggcaucugug

SEQ ID NO: 608334 - RNA, 22 nt, Human
ucuggccacuaauaggucucac

SEQ ID NO: 608335 - RNA, 22 nt, Human
ucuagaaaguacuagagcuggu

SEQ ID NO: 608336 - RNA, 22 nt, Human
agggccugagaccguggcuuga

SEQ ID NO: 608337 - RNA, 22 nt, Human
ccaguccugggagcuugcacug

SEQ ID NO: 608338 - RNA, 22 nt, Human
uauaagaaacaaggcaaauuuu

SEQ ID NO: 608339 - RNA, 22 nt, Human
cacagugugacugaccuucagc

SEQ ID NO: 608340 - RNA, 22 nt, Human
cuacagugaagacuagcuauag

SEQ ID NO: 608341 - RNA, 21 nt, Human
acagcaagccuucacaugagu

SEQ ID NO: 608342 - RNA, 21 nt, Human
uggaaacagcgccaucugccg

SEQ ID NO: 608343 - RNA, 22 nt, Human
uauuagcucaugauuucggugg

SEQ ID NO: 608344 - RNA, 22 nt, Human
gcagggagguuugcugaccugg

SEQ ID NO: 608345 - RNA, 19 nt, Human
cuccacagggauugugauu

SEQ ID NO: 608346 - RNA, 22 nt, Human
augcuuugaaguuuuuccucau

SEQ ID NO: 608347 - RNA, 22 nt, Human
uucuaauccugacucagcugcu

SEQ ID NO: 608348 - RNA, 22 nt, Human
gagcugaguuaccuccagauca

SEQ ID NO: 608349 - RNA, 22 nt, Human
ccaggagaugggaaaguagcag

SEQ ID NO: 608350 - RNA, 22 nt, Human
uucagaaaucccucuucuaccc

SEQ ID NO: 608351 - RNA, 22 nt, Human
guauuugauagauuucaaagga

SEQ ID NO: 608352 - RNA, 22 nt, Human
ccucccucccugcagaagccac

SEQ ID NO: 608353 - RNA, 21 nt, Human
uggccucccacacuuccaugg

SEQ ID NO: 608354 - RNA, 22 nt, Human
gcagugggagcuuaggcagugc

SEQ ID NO: 608355 - RNA, 22 nt, Human
cagccuggccugggacugcuga

SEQ ID NO: 608356 - RNA, 22 nt, Human
gcugcucuacccaugcaucugu

SEQ ID NO: 608357 - RNA, 22 nt, Human
accagaguuuuauuaguucuaa

SEQ ID NO: 608358 - RNA, 22 nt, Human
uucauuagagauuauaaaauga

SEQ ID NO: 608359 - RNA, 22 nt, Human
ccugucugcaugaucccugcca

SEQ ID NO: 608360 - RNA, 22 nt, Human
ggguguguuccuaaggaaacca

SEQ ID NO: 608361 - RNA, 22 nt, Human
agggcagagcacugaauuggga

SEQ ID NO: 608362 - RNA, 22 nt, Human
uugucacauguaguucauucuc

SEQ ID NO: 608363 - RNA, 22 nt, Human
agcucagagauaaucaagagac

SEQ ID NO: 608364 - RNA, 22 nt, Human
agaguaugcaucuauuguaccu

SEQ ID NO: 608365 - RNA, 22 nt, Human
ucaggccuuugaacuuggagug

SEQ ID NO: 608366 - RNA, 22 nt, Human
guccugugggcccaccaugagc

SEQ ID NO: 608367 - RNA, 22 nt, Human
aacuacagcaucuauacaaaua

SEQ ID NO: 608368 - RNA, 18 nt, Human
agcuggugaaauccagua

SEQ ID NO: 608369 - RNA, 22 nt, Human
agugcccaccucucuucagcua

SEQ ID NO: 608370 - RNA, 22 nt, Human
acagacaucaucaacaucuucc

SEQ ID NO: 608371 - RNA, 22 nt, Human
uacccagcccaugccuaccuca

SEQ ID NO: 608372 - RNA, 22 nt, Human
cacaggagcuguggggcagugu

SEQ ID NO: 608373 - RNA, 22 nt, Human
ugcugagucguauuauuuuuua

SEQ ID NO: 608374 - RNA, 22 nt, Human
ugagcagacucugcagagccac

SEQ ID NO: 608375 - RNA, 22 nt, Human
uggggacauagccagucuggcu

SEQ ID NO: 608376 - RNA, 22 nt, Human
ucaggagauguaaccuuagcug

SEQ ID NO: 608377 - RNA, 22 nt, Human
ugcaaaaugacuucugaaaaga

SEQ ID NO: 608378 - RNA, 22 nt, Human
gcaggaguggagaccaugggga

SEQ ID NO: 608379 - RNA, 21 nt, Human
uugaagcaaggguggcucuga

SEQ ID NO: 608380 - RNA, 22 nt, Human
caacauaugauuuuguauauaa

SEQ ID NO: 608381 - RNA, 22 nt, Human
gcaaauguggcuuccuuucuag

SEQ ID NO: 608382 - RNA, 22 nt, Human
aagcuuugcaccgguggcugga

SEQ ID NO: 608383 - RNA, 22 nt, Human
ccucccugguggcucuggucua

SEQ ID NO: 608384 - RNA, 22 nt, Human
uccuuauaucuauaguuuugca

SEQ ID NO: 608385 - RNA, 22 nt, Human
ggcuccuguccuccuggagcuc

SEQ ID NO: 608386 - RNA, 22 nt, Human
cagggcuggcuuccaaguuguu

SEQ ID NO: 608387 - RNA, 22 nt, Human
cagugccaagccacagaucacu

SEQ ID NO: 608388 - RNA, 23 nt, Human
gguggcaggaguggaugcugagc

SEQ ID NO: 608389 - RNA, 22 nt, Human
uagaugcuguagaaauacuuau

SEQ ID NO: 608390 - RNA, 22 nt, Human
ggaacagggauuuggccugguu

SEQ ID NO: 608391 - RNA, 22 nt, Human
gaacagcugcuagagaucugug

SEQ ID NO: 608392 - RNA, 22 nt, Human
guggguggauuccagcaacgcu

SEQ ID NO: 608393 - RNA, 22 nt, Human
caauuacauuuauugagcauuc

SEQ ID NO: 608394 - RNA, 22 nt, Human
agucuucuuuguguucucucau

SEQ ID NO: 608395 - RNA, 22 nt, Human
ccagcucccugaagccuggucu

SEQ ID NO: 608396 - RNA, 22 nt, Human
uaguuuuuacugcgaguuauaa

SEQ ID NO: 608397 - RNA, 22 nt, Human
auuagcuuaucacacaagcugc

SEQ ID NO: 608398 - RNA, 22 nt, Human
acugcuuuucuaagauucugug

SEQ ID NO: 608399 - RNA, 22 nt, Human
ugaggccucugugccauccagg

SEQ ID NO: 608400 - RNA, 22 nt, Human
aguaagcaccgggauggucaag

SEQ ID NO: 608401 - RNA, 22 nt, Human
cagaguaaaccugucaucaaga

SEQ ID NO: 608402 - RNA, 22 nt, Human
aguguuucacagcacuuuuucu

SEQ ID NO: 608403 - RNA, 22 nt, Human
acccucaacaaauucacucuau

SEQ ID NO: 608404 - RNA, 22 nt, Human
ccagcucugcuugcccagucag

SEQ ID NO: 608405 - RNA, 20 nt, Human
ggaccagcugucugaggggc

SEQ ID NO: 608406 - RNA, 19 nt, Human
ugggaguggggaagguccu

SEQ ID NO: 608407 - RNA, 22 nt, Human
ccagggcagaaaaagagggaau

SEQ ID NO: 608408 - RNA, 22 nt, Human
aaauuguugaucuacaguaagg

SEQ ID NO: 608409 - RNA, 22 nt, Human
gaaaucuugcucauugugacaa

SEQ ID NO: 608410 - RNA, 22 nt, Human
uuuguuauaacaauaaaaaguc

SEQ ID NO: 608411 - RNA, 21 nt, Human
uuuuacagaugaggggaaggg

SEQ ID NO: 608412 - RNA, 22 nt, Human
aaguggagccagggaaacugaa

SEQ ID NO: 608413 - RNA, 19 nt, Human
ugccucagggcuuugagga

SEQ ID NO: 608414 - RNA, 22 nt, Human
uuuguacauccuaauucugagu

SEQ ID NO: 608415 - RNA, 22 nt, Human
gcugaaauucagauuccuaggc

SEQ ID NO: 608416 - RNA, 22 nt, Human
acugaggauuagcccaggcuag

SEQ ID NO: 608417 - RNA, 22 nt, Human
aggcagugccuggaccccagcu

SEQ ID NO: 608418 - RNA, 22 nt, Human
guuauaaaggugauaaugguca

SEQ ID NO: 608419 - RNA, 22 nt, Human
cuccugggagcuguggcagagc

SEQ ID NO: 608420 - RNA, 22 nt, Human
cagcuucaacugcacagucaac

SEQ ID NO: 608421 - RNA, 22 nt, Human
aauuuaaggaggccuucacucu

SEQ ID NO: 608422 - RNA, 22 nt, Human
ugucagugaguuaguugcaagu

SEQ ID NO: 608423 - RNA, 22 nt, Human
ugugggcaggcccgggucugag

SEQ ID NO: 608424 - RNA, 21 nt, Human
agguuuauuucaacuucagga

SEQ ID NO: 608425 - RNA, 22 nt, Human
uucucccagaccaaaggcagca

SEQ ID NO: 608426 - RNA, 22 nt, Human
ggcuggcagugugagagaggga

SEQ ID NO: 608427 - RNA, 22 nt, Human
ugaugcugagccugggacugac

SEQ ID NO: 608428 - RNA, 22 nt, Human
cuagaacagaaaguacaggaaa

SEQ ID NO: 608429 - RNA, 22 nt, Human
uagaggcucuucauugcaguag

SEQ ID NO: 608430 - RNA, 22 nt, Human
aagcuucuuagaaugcaugugc

SEQ ID NO: 608431 - RNA, 22 nt, Human
ugugggaaaugggaguggaaga

SEQ ID NO: 608432 - RNA, 22 nt, Human
aauucacuugugcacgcuaugg

SEQ ID NO: 608433 - RNA, 22 nt, Human
uguguuuguuagacuaauguua

SEQ ID NO: 608434 - RNA, 22 nt, Human
augcuuuaaacuauaaauccac

SEQ ID NO: 608435 - RNA, 22 nt, Human
cuggcuuuaaugucaucuuucu

SEQ ID NO: 608436 - RNA, 19 nt, Human
ugagauuucuuaggugauu

SEQ ID NO: 608437 - RNA, 22 nt, Human
gcucaggccuccagaggggcaa

SEQ ID NO: 608438 - RNA, 22 nt, Human
agaguucugucugccacacgaa

SEQ ID NO: 608439 - RNA, 22 nt, Human
agaggggcucauauccugucau

SEQ ID NO: 608440 - RNA, 22 nt, Human
gagaacuugaacuuuuccucug

SEQ ID NO: 608441 - RNA, 22 nt, Human
uuucagggaaguguugaaaagg

SEQ ID NO: 608442 - RNA, 19 nt, Human
accucugagaaugccaguc

SEQ ID NO: 608443 - RNA, 22 nt, Human
caguggugaagagcaggggcuc

SEQ ID NO: 608444 - RNA, 22 nt, Human
ugagcagggagcugggcugagc

SEQ ID NO: 608445 - RNA, 19 nt, Human
ucucuucucccugguuuua

SEQ ID NO: 608446 - RNA, 22 nt, Human
gauauuuuuaggugaugcaggc

SEQ ID NO: 608447 - RNA, 22 nt, Human
gggcuucucccuaaggacucug

SEQ ID NO: 608448 - RNA, 22 nt, Human
gcagggugacguugcccaccuc

SEQ ID NO: 608449 - RNA, 22 nt, Human
gcuuggcccugccgccuggguc

SEQ ID NO: 608450 - RNA, 22 nt, Human
gaagcaagugcaaggaagaggc

SEQ ID NO: 608451 - RNA, 22 nt, Human
ggacagcuccugcacuugagua

SEQ ID NO: 608452 - RNA, 22 nt, Human
uucugcacuaaauaucaaauau

SEQ ID NO: 608453 - RNA, 22 nt, Human
uuccccaguaacauacauguga

SEQ ID NO: 608454 - RNA, 22 nt, Human
cagagcugcaaaugccccuccg

SEQ ID NO: 608455 - RNA, 20 nt, Human
agaagccaagugacauguuu

SEQ ID NO: 608456 - RNA, 22 nt, Human
cucugaggucagggcccggcaa

SEQ ID NO: 608457 - RNA, 22 nt, Human
uagggaggcuacuucuuguagg

SEQ ID NO: 608458 - RNA, 22 nt, Human
gcaguguugguuugcucugcag

SEQ ID NO: 608459 - RNA, 22 nt, Human
ugggcugcccaagguggccaug

SEQ ID NO: 608460 - RNA, 22 nt, Human
gaaaggcaucuucagucucuga

SEQ ID NO: 608461 - RNA, 22 nt, Human
uggcagcuccggguaggggcug

SEQ ID NO: 608462 - RNA, 22 nt, Human
uaggggcucagaacauguccuu

SEQ ID NO: 608463 - RNA, 22 nt, Human
augggaggcagacacuaaguuc

SEQ ID NO: 608464 - RNA, 23 nt, Human
accugcuccaugucaccuucacu

SEQ ID NO: 608465 - RNA, 22 nt, Human
guugugcagucagacugccugg

SEQ ID NO: 608466 - RNA, 22 nt, Human
cuuguuuauuaugcacuguaga

SEQ ID NO: 608467 - RNA, 22 nt, Human
ccuuucugauggccucccagcc

SEQ ID NO: 608468 - RNA, 22 nt, Human
ucauuucucugagucugauaau

SEQ ID NO: 608469 - RNA, 22 nt, Human
gcugccaguguggcaugaugca

SEQ ID NO: 608470 - RNA, 22 nt, Human
ugcugucaguuggcaggaugag

SEQ ID NO: 608471 - RNA, 22 nt, Human
guccaggccaugguggacacag

SEQ ID NO: 608472 - RNA, 22 nt, Human
uggcugagccacuuguucagau

SEQ ID NO: 608473 - RNA, 22 nt, Human
uugagggucuggaucugcugcu

SEQ ID NO: 608474 - RNA, 22 nt, Human
agaugaaaagauaagcagcaau

SEQ ID NO: 608475 - RNA, 22 nt, Human
gaagguuuacugaagauuuaaa

SEQ ID NO: 608476 - RNA, 22 nt, Human
cugacagucuugccaaguuucu

SEQ ID NO: 608477 - RNA, 22 nt, Human
augaggccaccuucuacauuuc

SEQ ID NO: 608478 - RNA, 18 nt, Human
agcugcuuuuggcuuaaa

SEQ ID NO: 608479 - RNA, 21 nt, Human
ugcaggcaggcagagaugcug

SEQ ID NO: 608480 - RNA, 22 nt, Human
auuauggauggaggcauuaguc

SEQ ID NO: 608481 - RNA, 22 nt, Human
gggugugucuuuugcuccugga

SEQ ID NO: 608482 - RNA, 22 nt, Human
auaauuuaaauuaguaugugau

SEQ ID NO: 608483 - RNA, 22 nt, Human
uaacagaauuugcuaaacuccg

SEQ ID NO: 608484 - RNA, 22 nt, Human
aaggcuggaguacagugcagug

SEQ ID NO: 608485 - RNA, 23 nt, Human
cugggcacccaguaccuaggccc

SEQ ID NO: 608486 - RNA, 20 nt, Human
uagauacccaaugcucauca

SEQ ID NO: 608487 - RNA, 22 nt, Human
acuguauucuagucauguuugu

SEQ ID NO: 608488 - RNA, 22 nt, Human
ggcuauggaaauggcaggacau

SEQ ID NO: 608489 - RNA, 22 nt, Human
ugcacacacaugaaguagcaug

SEQ ID NO: 608490 - RNA, 16 nt, Human
ccccaggacuuggcac

SEQ ID NO: 608491 - RNA, 22 nt, Human
ugacaugcuaagauuauguuau

SEQ ID NO: 608492 - RNA, 20 nt, Human
gcacuuggcugcugcuucuc

SEQ ID NO: 608493 - RNA, 23 nt, Human
gcuucuagucaauuucaccagga

SEQ ID NO: 608494 - RNA, 19 nt, Human
ccagaggacuguuaaugaa

SEQ ID NO: 608495 - RNA, 22 nt, Human
uacagaaaaacuuggaggcuuu

SEQ ID NO: 608496 - RNA, 22 nt, Human
agggccugagcuggcugaccuc

SEQ ID NO: 608497 - RNA, 22 nt, Human
acccagcuguuucccgugucau

SEQ ID NO: 608498 - RNA, 22 nt, Human
ucuguuuagaugcuuuaucugu

SEQ ID NO: 608499 - RNA, 22 nt, Human
ggagccuggucagguuggcucc

SEQ ID NO: 608500 - RNA, 22 nt, Human
gucuggacagcagcaccucggc

SEQ ID NO: 608501 - RNA, 22 nt, Human
cuucuuggaagucguccuucca

SEQ ID NO: 608502 - RNA, 22 nt, Human
auaugcauaugucaaaacuuau

SEQ ID NO: 608503 - RNA, 22 nt, Human
uccucaggaucuaggagugcuu

SEQ ID NO: 608504 - RNA, 22 nt, Human
uucaugaaacuuaacuguuggg

SEQ ID NO: 608505 - RNA, 22 nt, Human
uggcaggagacacauggcauag

SEQ ID NO: 608506 - RNA, 22 nt, Human
aggaaacaacuuggcaugagcc

SEQ ID NO: 608507 - RNA, 22 nt, Human
caaaccaguaggaagucuauua

SEQ ID NO: 608508 - RNA, 22 nt, Human
ccagcugucugguuccagagcc

SEQ ID NO: 608509 - RNA, 22 nt, Human
aggcagcaaugaaugaaaugga

SEQ ID NO: 608510 - RNA, 22 nt, Human
cagggcuuuccugagaagugau

SEQ ID NO: 608511 - RNA, 22 nt, Human
acacauaucuaagauagaugac

SEQ ID NO: 608512 - RNA, 22 nt, Human
ugaggccauggucuucccaguc

SEQ ID NO: 608513 - RNA, 22 nt, Human
uccagggcuacaaggcaccaga

SEQ ID NO: 608514 - RNA, 22 nt, Human
gucccaggcuuauguggagcuu

SEQ ID NO: 608515 - RNA, 22 nt, Human
agugccuuggcugugaugggga

SEQ ID NO: 608516 - RNA, 22 nt, Human
uucuugggaauuuuuccaacac

SEQ ID NO: 608517 - RNA, 22 nt, Human
ccaguggacuucucccuguggu

SEQ ID NO: 608518 - RNA, 20 nt, Human
gccugagcuauugccaggau

SEQ ID NO: 608519 - RNA, 22 nt, Human
uuuaucucuuuugaccaagauu

SEQ ID NO: 608520 - RNA, 22 nt, Human
agcuguaagcuuugggcaaguc

SEQ ID NO: 608521 - RNA, 22 nt, Human
gcugcucuguuaauugcuguaa

SEQ ID NO: 608522 - RNA, 22 nt, Human
gcuggagucuugaaaguggacu

SEQ ID NO: 608523 - RNA, 22 nt, Human
uuaguuaaaauucugcugacau

SEQ ID NO: 608524 - RNA, 22 nt, Human
guuuuauaggcuguugcuauau

SEQ ID NO: 608525 - RNA, 22 nt, Human
cucuggagguugagcccagcaa

SEQ ID NO: 608526 - RNA, 22 nt, Human
cuuauuguuccuggacccugag

SEQ ID NO: 608527 - RNA, 22 nt, Human
uuccugagggccccagaggagg

SEQ ID NO: 608528 - RNA, 22 nt, Human
ugucccagaucacaggagggga

SEQ ID NO: 608529 - RNA, 22 nt, Human
gagggcuguggggcaugaccag

SEQ ID NO: 608530 - RNA, 22 nt, Human
ucaguuuccugguugugauauu

SEQ ID NO: 608531 - RNA, 22 nt, Human
auugugcaauguuuuacaauuu

SEQ ID NO: 608532 - RNA, 22 nt, Human
aaacauagauaauagauagaug

SEQ ID NO: 608533 - RNA, 22 nt, Human
cuggguauaggaaacaguuaag

SEQ ID NO: 608534 - RNA, 22 nt, Human
caugggggucuggacaacaggc

SEQ ID NO: 608535 - RNA, 19 nt, Human
gcucugugaugcugagggg

SEQ ID NO: 608536 - RNA, 22 nt, Human
auaauuuacuaagcucuaccuu

SEQ ID NO: 608537 - RNA, 22 nt, Human
ucaugcagauuuggagguauuu

SEQ ID NO: 608538 - RNA, 22 nt, Human
ucccugccugacagcacccacc

SEQ ID NO: 608539 - RNA, 20 nt, Human
ccuuuauuauuuguaugaug

SEQ ID NO: 608540 - RNA, 18 nt, Human
caaagcucacguuccauc

SEQ ID NO: 608541 - RNA, 22 nt, Human
cagccugcaggaggccgucagc

SEQ ID NO: 608542 - RNA, 22 nt, Human
acugauacgguuuuagagucca

SEQ ID NO: 608543 - RNA, 22 nt, Human
gaggggaaagugugaggcugcg

SEQ ID NO: 608544 - RNA, 22 nt, Human
gauauuuugagaaauccuauga

SEQ ID NO: 608545 - RNA, 22 nt, Human
ccaguccugugugacccugcac

SEQ ID NO: 608546 - RNA, 22 nt, Human
uuuuucauauuccccucucugg

SEQ ID NO: 608547 - RNA, 22 nt, Human
accagcucagaagccagaaaga

SEQ ID NO: 608548 - RNA, 22 nt, Human
cacagcagggaugaauggagug

SEQ ID NO: 608549 - RNA, 22 nt, Human
ggcugcuuuaucggcugcugaa

SEQ ID NO: 608550 - RNA, 22 nt, Human
auuuggggcucaccagggcuga

SEQ ID NO: 608551 - RNA, 22 nt, Human
gcccaggaguuugcauuuuaac

SEQ ID NO: 608552 - RNA, 22 nt, Human
ucucccacagucucccauggcu

SEQ ID NO: 608553 - RNA, 22 nt, Human
gagagguacacccuuuaaacuu

SEQ ID NO: 608554 - RNA, 22 nt, Human
cuucuugggucagagaaucauu

SEQ ID NO: 608555 - RNA, 22 nt, Human
ucucugggcccagaccuuccuu

SEQ ID NO: 608556 - RNA, 22 nt, Human
gcuguccauccacuucccagcg

SEQ ID NO: 608557 - RNA, 22 nt, Human
cuccuguggcuuucugauuuca

SEQ ID NO: 608558 - RNA, 22 nt, Human
ugcaggagagcuggucuggccc

SEQ ID NO: 608559 - RNA, 22 nt, Human
cagucuccgccagcuccucaca

SEQ ID NO: 608560 - RNA, 21 nt, Human
ccaggcuggccaugguauuga

SEQ ID NO: 608561 - RNA, 22 nt, Human
uuuccuuguuauuauuuguccu

SEQ ID NO: 608562 - RNA, 20 nt, Human
cuucuuggagaugguguuuu

SEQ ID NO: 608563 - RNA, 22 nt, Human
acacuuuaucaauauucaaaaa

SEQ ID NO: 608564 - RNA, 22 nt, Human
gcagggcucauucuaguacaau

SEQ ID NO: 608565 - RNA, 22 nt, Human
agagcaaauagagaagccagcu

SEQ ID NO: 608566 - RNA, 22 nt, Human
cccuggggcugagggauggccg

SEQ ID NO: 608567 - RNA, 22 nt, Human
gguuuguugggguccaggccca

SEQ ID NO: 608568 - RNA, 22 nt, Human
cagagccuuccuagcagacucu

SEQ ID NO: 608569 - RNA, 22 nt, Human
ugcugggggcuuucuggauacc

SEQ ID NO: 608570 - RNA, 19 nt, Human
aacaucuuuccaguagagg

SEQ ID NO: 608571 - RNA, 22 nt, Human
ucuccagucccuucucuguuag

SEQ ID NO: 608572 - RNA, 22 nt, Human
uagacauuagguagguucaugg

SEQ ID NO: 608573 - RNA, 22 nt, Human
uuaaauaguaggucuauuuugg

SEQ ID NO: 608574 - RNA, 22 nt, Human
ggggauggaggcgugugguccu

SEQ ID NO: 608575 - RNA, 22 nt, Human
uggcuccaccgccgcggagcuc

SEQ ID NO: 608576 - RNA, 22 nt, Human
ugggcugcugucugcacaugcu

SEQ ID NO: 608577 - RNA, 22 nt, Human
cugcagucuuccuuccuuaggc

SEQ ID NO: 608578 - RNA, 22 nt, Human
uugggguguuggauggagcaag

SEQ ID NO: 608579 - RNA, 22 nt, Human
aggcuggggaauugaauuugcu

SEQ ID NO: 608580 - RNA, 22 nt, Human
auggccagagaaggcaggguca

SEQ ID NO: 608581 - RNA, 22 nt, Human
uggucugggcaaauccuucuga

SEQ ID NO: 608582 - RNA, 22 nt, Human
uuuccccucaguacuaaacaua

SEQ ID NO: 608583 - RNA, 21 nt, Human
uuuagaggacacagggaggca

SEQ ID NO: 608584 - RNA, 22 nt, Human
cagaagugcaauuuaaauuagg

SEQ ID NO: 608585 - RNA, 22 nt, Human
gaugauuuucuguguuagaaga

SEQ ID NO: 608586 - RNA, 22 nt, Human
agggcccuccccgcucagggca

SEQ ID NO: 608587 - RNA, 22 nt, Human
aagaaaacaaugacuugccagc

SEQ ID NO: 608588 - RNA, 22 nt, Human
gccccaggugguaaaccuaaga

SEQ ID NO: 608589 - RNA, 22 nt, Human
uggcccagcccugcucuagggc

SEQ ID NO: 608590 - RNA, 22 nt, Human
ucuagcuuggcguuugccuucu

SEQ ID NO: 608591 - RNA, 22 nt, Human
cucucuucccgugaguguugca

SEQ ID NO: 608592 - RNA, 22 nt, Human
cccagggaggcccaggcucugc

SEQ ID NO: 608593 - RNA, 22 nt, Human
ucccaaagguccgagcgggaau

SEQ ID NO: 608594 - RNA, 22 nt, Human
gagguaacaacugaaaugagaa

SEQ ID NO: 608595 - RNA, 22 nt, Human
auuuaauaccacuuggugcuuu

SEQ ID NO: 608596 - RNA, 22 nt, Human
cuccagccagagugccucuguu

SEQ ID NO: 608597 - RNA, 22 nt, Human
uaagaaauuuaguuauagaaug

SEQ ID NO: 608598 - RNA, 22 nt, Human
auucacaauagcagcuugcaug

SEQ ID NO: 608599 - RNA, 22 nt, Human
caguccugggcacagcccuggg

SEQ ID NO: 608600 - RNA, 23 nt, Human
cacuccuguuucuaagccagcau

SEQ ID NO: 608601 - RNA, 22 nt, Human
cauuguauugaggauacuuaag

SEQ ID NO: 608602 - RNA, 22 nt, Human
aaagccaguucuuuuauauugg

SEQ ID NO: 608603 - RNA, 22 nt, Human
aagggcuggagacugggucuuc

SEQ ID NO: 608604 - RNA, 22 nt, Human
ugcaaagauuuaucuuucucca

SEQ ID NO: 608605 - RNA, 17 nt, Human
cauaaaacaguucuauu

SEQ ID NO: 608606 - RNA, 22 nt, Human
ggcagugccacuaagcucugcu

SEQ ID NO: 608607 - RNA, 22 nt, Human
gaaagacauaguugcaagaugg

SEQ ID NO: 608608 - RNA, 22 nt, Human
caggcucugcugcuacagcugu

SEQ ID NO: 608609 - RNA, 22 nt, Human
uugcaagauguuaccauuguua

SEQ ID NO: 608610 - RNA, 22 nt, Human
ucaguguuuuccagggucuacu

SEQ ID NO: 608611 - RNA, 22 nt, Human
ucugaggucagugcugcaguua

SEQ ID NO: 608612 - RNA, 22 nt, Human
agcaguggagcgagauguuuaa

SEQ ID NO: 608613 - RNA, 22 nt, Human
ugaggcucagagaagugcuguu

SEQ ID NO: 608614 - RNA, 22 nt, Human
auucacaguuuccucauauucu

SEQ ID NO: 608615 - RNA, 22 nt, Human
gggcagcugucuugguucucaa

SEQ ID NO: 608616 - RNA, 22 nt, Human
aauaaaauggucaguuuucuca

SEQ ID NO: 608617 - RNA, 22 nt, Human
ugugugccagggcaugcacagg

SEQ ID NO: 608618 - RNA, 23 nt, Human
uacuacagggucuugcuaugaau

SEQ ID NO: 608619 - RNA, 22 nt, Human
uguaggaauggauucuagaagg

SEQ ID NO: 608620 - RNA, 22 nt, Human
caggcagcguccugcuuccugu

SEQ ID NO: 608621 - RNA, 22 nt, Human
uggccuugauuaugccaguaga

SEQ ID NO: 608622 - RNA, 22 nt, Human
agagccagaccauugccgugca

SEQ ID NO: 608623 - RNA, 22 nt, Human
cagguggggagaguguggagca

SEQ ID NO: 608624 - RNA, 22 nt, Human
gagccucguggcggccacugcg

SEQ ID NO: 608625 - RNA, 22 nt, Human
guuuucugccugaaggugacca

SEQ ID NO: 608626 - RNA, 18 nt, Human
ucagagagaauaguaauu

SEQ ID NO: 608627 - RNA, 22 nt, Human
caggggccggcuguccgugccc

SEQ ID NO: 608628 - RNA, 22 nt, Human
auuuaaaugcuuaagaggguuu

SEQ ID NO: 608629 - RNA, 22 nt, Human
uccuggaagugcuuggugaggg

SEQ ID NO: 608630 - RNA, 22 nt, Human
agauucaugggaaagcuuuagg

SEQ ID NO: 608631 - RNA, 22 nt, Human
agucuucuggguguuuccagag

SEQ ID NO: 608632 - RNA, 22 nt, Human
uguuuugugcauuuacaacaug

SEQ ID NO: 608633 - RNA, 23 nt, Human
uaauuagauguugauuccugaga

SEQ ID NO: 608634 - RNA, 22 nt, Human
ucauggaugggcccagcucugu

SEQ ID NO: 608635 - RNA, 22 nt, Human
guaaacaucgacccaacagggg

SEQ ID NO: 608636 - RNA, 22 nt, Human
uacauauguaaacauguauaaa

SEQ ID NO: 608637 - RNA, 22 nt, Human
auauauuuacucuccuguugca

SEQ ID NO: 608638 - RNA, 21 nt, Human
ugcacagggcccaggagagcc

SEQ ID NO: 608639 - RNA, 19 nt, Human
cuggggcuuugguacugcc

SEQ ID NO: 608640 - RNA, 22 nt, Human
cccuggguucuggcugggcugc

SEQ ID NO: 608641 - RNA, 22 nt, Human
aagagcaggcugcuguggagua

SEQ ID NO: 608642 - RNA, 22 nt, Human
ccauggaguuccucuggucuau

SEQ ID NO: 608643 - RNA, 22 nt, Human
caggaauguagcagcgauggaa

SEQ ID NO: 608644 - RNA, 22 nt, Human
aauuaugcaaccaaugaccacg

SEQ ID NO: 608645 - RNA, 22 nt, Human
aagccaguaaguuuuugucauu

SEQ ID NO: 608646 - RNA, 22 nt, Human
aagcagggcucccuggggacuc

SEQ ID NO: 608647 - RNA, 22 nt, Human
aacaaacauuaccuggugcugg

SEQ ID NO: 608648 - RNA, 22 nt, Human
gugaggugguacaauauuaacu

SEQ ID NO: 608649 - RNA, 22 nt, Human
caccaggcugcccaggacaggg

SEQ ID NO: 608650 - RNA, 22 nt, Human
uagucuuuuuaauaaauaaugc

SEQ ID NO: 608651 - RNA, 19 nt, Human
gccucugagggcaggacac

SEQ ID NO: 608652 - RNA, 22 nt, Human
ggacagcugcuuucaggccaca

SEQ ID NO: 608653 - RNA, 22 nt, Human
gacugcuuauauguuaaagaua

SEQ ID NO: 608654 - RNA, 22 nt, Human
gcauggcauuugaagguagaag

SEQ ID NO: 608655 - RNA, 22 nt, Human
ccugcccuguguuuggggacua

SEQ ID NO: 608656 - RNA, 22 nt, Human
uuccuguggccuuacaucugug

SEQ ID NO: 608657 - RNA, 22 nt, Human
ggccagcaguauauagcuaauu

SEQ ID NO: 608658 - RNA, 22 nt, Human
aaucauaauuguauacauucau

SEQ ID NO: 608659 - RNA, 22 nt, Human
caagcccaggauuccccaguua

SEQ ID NO: 608660 - RNA, 21 nt, Human
gcuaugaauguagaaaauuau

SEQ ID NO: 608661 - RNA, 22 nt, Human
ugugaaagagucuuauaguuuc

SEQ ID NO: 608662 - RNA, 22 nt, Human
ucaguaacccugcuguucagag

SEQ ID NO: 608663 - RNA, 22 nt, Human
cuucugaggacucuaaagagga

SEQ ID NO: 608664 - RNA, 22 nt, Human
ugcagggccagacuggguugga

SEQ ID NO: 608665 - RNA, 20 nt, Human
gcuuccaggagggcugauau

SEQ ID NO: 608666 - RNA, 22 nt, Human
uuacagaacugucuugaaauuu

SEQ ID NO: 608667 - RNA, 22 nt, Human
cucucagcaggaaagcaugcaa

SEQ ID NO: 608668 - RNA, 22 nt, Human
uugucuguccaggcaccccaag

SEQ ID NO: 608669 - RNA, 22 nt, Human
ugaaagcuguccacuaggcugu

SEQ ID NO: 608670 - RNA, 22 nt, Human
agagcuguguuaagaacaggcc

SEQ ID NO: 608671 - RNA, 22 nt, Human
gccuggguuccaugaucuccag

SEQ ID NO: 608672 - RNA, 22 nt, Human
agggaagcuuguuacugagaag

SEQ ID NO: 608673 - RNA, 22 nt, Human
auuuugaaaagcauuugaguaa

SEQ ID NO: 608674 - RNA, 22 nt, Human
cuagccagauuuaaagagagac

SEQ ID NO: 608675 - RNA, 22 nt, Human
gccucccuccaccacugcaggu

SEQ ID NO: 608676 - RNA, 22 nt, Human
ggggaggaguguacagguuuau

SEQ ID NO: 608677 - RNA, 22 nt, Human
ugaaggaggaauguggccucca

SEQ ID NO: 608678 - RNA, 22 nt, Human
gaauuuuaauaaagguuuauca

SEQ ID NO: 608679 - RNA, 22 nt, Human
ugaacacacacaucuuaauaau

SEQ ID NO: 608680 - RNA, 22 nt, Human
caagaauaaccagacaauagca

SEQ ID NO: 608681 - RNA, 22 nt, Human
ccuggagucugugacuuuccuc

SEQ ID NO: 608682 - RNA, 22 nt, Human
uguaaauaauuccuaggcuuuu

SEQ ID NO: 608683 - RNA, 22 nt, Human
cucuacagcugcugccccuggu

SEQ ID NO: 608684 - RNA, 22 nt, Human
gcauuuuagaauauuggagcaa

SEQ ID NO: 608685 - RNA, 22 nt, Human
cauacauaccacugcugucuuu

SEQ ID NO: 608686 - RNA, 22 nt, Human
ucaguguuggucaagaaucagu

SEQ ID NO: 608687 - RNA, 22 nt, Human
uacauugcuuucuaauacaucu

SEQ ID NO: 608688 - RNA, 22 nt, Human
aauauaugacuccacugcauga

SEQ ID NO: 608689 - RNA, 22 nt, Human
aacauuuuuaagaccaagugcu

SEQ ID NO: 608690 - RNA, 22 nt, Human
agcaaagaagacacaggcuuca

SEQ ID NO: 608691 - RNA, 22 nt, Human
gauggcacacagacauccccgc

SEQ ID NO: 608692 - RNA, 22 nt, Human
agggaagcaaugauuauuauuc

SEQ ID NO: 608693 - RNA, 22 nt, Human
cugaauaauauuccauuaugag

SEQ ID NO: 608694 - RNA, 20 nt, Human
aagagcauaguacaggaaga

SEQ ID NO: 608695 - RNA, 22 nt, Human
acauguguuuuccuacuuauga

SEQ ID NO: 608696 - RNA, 22 nt, Human
gaaggcaggcuucugauuaggu

SEQ ID NO: 608697 - RNA, 19 nt, Human
acaauaacucauugauugc

SEQ ID NO: 608698 - RNA, 22 nt, Human
ggccagggggcuucagacucca

SEQ ID NO: 608699 - RNA, 22 nt, Human
uuccacuggcuuucagugaucu

SEQ ID NO: 608700 - RNA, 22 nt, Human
auuagcuucugugcauggacuu

SEQ ID NO: 608701 - RNA, 22 nt, Human
ugggcaggauaauaucucaugu

SEQ ID NO: 608702 - RNA, 22 nt, Human
acuuugcaaauaaacucucuaa

SEQ ID NO: 608703 - RNA, 21 nt, Human
gggccuggcugcgcaggacgg

SEQ ID NO: 608704 - RNA, 22 nt, Human
agcaacagggggauggccacug

SEQ ID NO: 608705 - RNA, 22 nt, Human
aaagaguuaagagucuuaagcu

SEQ ID NO: 608706 - RNA, 22 nt, Human
ggguggcaggauuggcaggagu

SEQ ID NO: 608707 - RNA, 22 nt, Human
uguucccauuuucugcauaauc

SEQ ID NO: 608708 - RNA, 23 nt, Human
cagucugcagcccacuugggcag

SEQ ID NO: 608709 - RNA, 19 nt, Human
acuuucuccaggaccuguu

SEQ ID NO: 608710 - RNA, 22 nt, Human
aggcugaggcaagaggaucacu

SEQ ID NO: 608711 - RNA, 22 nt, Human
gcaagcuauagaauauaagggg

SEQ ID NO: 608712 - RNA, 22 nt, Human
cuucauuuggcaggcuggccuc

SEQ ID NO: 608713 - RNA, 21 nt, Human
uucuccuccaaguugcuccug

SEQ ID NO: 608714 - RNA, 23 nt, Human
uccuggguuugaauucuagucuu

SEQ ID NO: 608715 - RNA, 22 nt, Human
ugaagucccugacauuuagaaa

SEQ ID NO: 608716 - RNA, 22 nt, Human
uuagaacauuuuuagaccaaua

SEQ ID NO: 608717 - RNA, 22 nt, Human
ucagaagccaccuuuuguuggg

SEQ ID NO: 608718 - RNA, 22 nt, Human
guaggcagauaggagugcagcc

SEQ ID NO: 608719 - RNA, 22 nt, Human
augaagcaauuagaaacuugaa

SEQ ID NO: 608720 - RNA, 22 nt, Human
cuagggccaaaggcugugaugc

SEQ ID NO: 608721 - RNA, 22 nt, Human
ggggcagaaagcccacagagug

SEQ ID NO: 608722 - RNA, 22 nt, Human
gccacugaacauuagagcuagu

SEQ ID NO: 608723 - RNA, 22 nt, Human
aaaugucuguaugagaaagaga

SEQ ID NO: 608724 - RNA, 22 nt, Human
ugaggccagugacauauauuaa

SEQ ID NO: 608725 - RNA, 22 nt, Human
gauuuauugucccuguccugcu

SEQ ID NO: 608726 - RNA, 22 nt, Human
uggcacugaagcuggaaagccu

SEQ ID NO: 608727 - RNA, 22 nt, Human
gagcugagcuuaacuccuugaa

SEQ ID NO: 608728 - RNA, 22 nt, Human
caaacauugggggcuucaacac

SEQ ID NO: 608729 - RNA, 22 nt, Human
ugcuccugauaucuaaugugua

SEQ ID NO: 608730 - RNA, 20 nt, Human
agcauucauucagcaagccu

SEQ ID NO: 608731 - RNA, 22 nt, Human
cuccuggugcuggggcugccgc

SEQ ID NO: 608732 - RNA, 22 nt, Human
gggcagcaggcuccacguuccu

SEQ ID NO: 608733 - RNA, 22 nt, Human
gaggaggcuuccgggaggcacg

SEQ ID NO: 608734 - RNA, 22 nt, Human
ugggggucaggaugaggccuug

SEQ ID NO: 608735 - RNA, 22 nt, Human
ccuggagguggagguugcagug

SEQ ID NO: 608736 - RNA, 22 nt, Human
uccagguguauuuacugaagua

SEQ ID NO: 608737 - RNA, 22 nt, Human
uuauggagacuuucagaagcgg

SEQ ID NO: 608738 - RNA, 22 nt, Human
gcccaggggaguagucaauuua

SEQ ID NO: 608739 - RNA, 22 nt, Human
ucccagaggaaauggcagcuga

SEQ ID NO: 608740 - RNA, 22 nt, Human
acccuccaggcugcagcuccug

SEQ ID NO: 608741 - RNA, 20 nt, Human
cccuccagcaaccaggacuu

SEQ ID NO: 608742 - RNA, 21 nt, Human
cagugaggcccuccuguuccc

SEQ ID NO: 608743 - RNA, 22 nt, Human
ccuggccacucagguguggggc

SEQ ID NO: 608744 - RNA, 22 nt, Human
ugacagugcggguacaucauag

SEQ ID NO: 608745 - RNA, 22 nt, Human
auggauaagaacaaauaucuga

SEQ ID NO: 608746 - RNA, 22 nt, Human
uaagcucacuguaagaacugau

SEQ ID NO: 608747 - RNA, 22 nt, Human
aaggcacuuaacgugggaggau

SEQ ID NO: 608748 - RNA, 22 nt, Human
agcauacacccuaaacugcuua

SEQ ID NO: 608749 - RNA, 22 nt, Human
aagacucuaucuuuagagauca

SEQ ID NO: 608750 - RNA, 22 nt, Human
ggacacagauaaucacacagau

SEQ ID NO: 608751 - RNA, 22 nt, Human
cagagguauuuugauaaacgcc

SEQ ID NO: 608752 - RNA, 22 nt, Human
uguccuuuguguaucuauagua

SEQ ID NO: 608753 - RNA, 22 nt, Human
cuggggccagugaggaggcuuu

SEQ ID NO: 608754 - RNA, 22 nt, Human
gacagguaccggucagacuacg

SEQ ID NO: 608755 - RNA, 22 nt, Human
ugagacagcccuucugcacagg

SEQ ID NO: 608756 - RNA, 22 nt, Human
ucucccucuguaagaucagggg

SEQ ID NO: 608757 - RNA, 22 nt, Human
ccugccuggcuuccagaagaga

SEQ ID NO: 608758 - RNA, 22 nt, Human
agggaagaaaauccaucgcugc

SEQ ID NO: 608759 - RNA, 22 nt, Human
uacuguuugcaguuugcaguau

SEQ ID NO: 608760 - RNA, 22 nt, Human
gcaaacauguugugagauacca

SEQ ID NO: 608761 - RNA, 22 nt, Human
agcagcuccccucaugcuccac

SEQ ID NO: 608762 - RNA, 23 nt, Human
uuguuucuuuguauugucucuau

SEQ ID NO: 608763 - RNA, 22 nt, Human
gaagggcuuucugggagaagag

SEQ ID NO: 608764 - RNA, 22 nt, Human
ugaggcaggagaaucacaugaa

SEQ ID NO: 608765 - RNA, 21 nt, Human
ucucugggcccuccugugggg

SEQ ID NO: 608766 - RNA, 22 nt, Human
ugcaucauuuauaaugucuuug

SEQ ID NO: 608767 - RNA, 22 nt, Human
agacuuuauaaaucuuaauuuc

SEQ ID NO: 608768 - RNA, 22 nt, Human
guagaauuaccucucuaugucc

SEQ ID NO: 608769 - RNA, 22 nt, Human
gugaaggcuacaagagaucaag

SEQ ID NO: 608770 - RNA, 19 nt, Human
uuuacaaguucuuuguaug

SEQ ID NO: 608771 - RNA, 22 nt, Human
uccucacacuauagaugaggau

SEQ ID NO: 608772 - RNA, 22 nt, Human
ucugggucggaagccccaggga

SEQ ID NO: 608773 - RNA, 21 nt, Human
gcuccuggugcugcguggcgc

SEQ ID NO: 608774 - RNA, 22 nt, Human
uauauuaacacccacuugccuc

SEQ ID NO: 608775 - RNA, 22 nt, Human
uuccugagggacuuuugagauu

SEQ ID NO: 608776 - RNA, 22 nt, Human
uccugguggcagauuuuagguc

SEQ ID NO: 608777 - RNA, 22 nt, Human
aguuagaagugugucaucugug

SEQ ID NO: 608778 - RNA, 22 nt, Human
guggucuggggucaggccugag

SEQ ID NO: 608779 - RNA, 22 nt, Human
agaaaucugacugcugugcaca

SEQ ID NO: 608780 - RNA, 22 nt, Human
gaaaaaugagcugaugucaggg

SEQ ID NO: 608781 - RNA, 22 nt, Human
gauagucaccucccuuaacuuu

SEQ ID NO: 608782 - RNA, 22 nt, Human
gcugaggcugggagcagccugu

SEQ ID NO: 608783 - RNA, 22 nt, Human
agggcugaaacauaauccuucu

SEQ ID NO: 608784 - RNA, 22 nt, Human
uacacugugacaaucaugacag

SEQ ID NO: 608785 - RNA, 22 nt, Human
agccaggaagagaggccucacc

SEQ ID NO: 608786 - RNA, 22 nt, Human
aguggcagccgagcaggagaug

SEQ ID NO: 608787 - RNA, 22 nt, Human
auauaacauacauacagaaaag

SEQ ID NO: 608788 - RNA, 22 nt, Human
ucuuggcuacuuuccugucugc

SEQ ID NO: 608789 - RNA, 22 nt, Human
ggagcuguucaggacugcuuca

SEQ ID NO: 608790 - RNA, 22 nt, Human
acaucacagagcccagauaaag

SEQ ID NO: 608791 - RNA, 20 nt, Human
ucccaaggaugccugggugu

SEQ ID NO: 608792 - RNA, 17 nt, Human
acagugagaagucaucu

SEQ ID NO: 608793 - RNA, 22 nt, Human
aucacagggugaggauuagacc

SEQ ID NO: 608794 - RNA, 19 nt, Human
agggccacggggagguauu

SEQ ID NO: 608795 - RNA, 22 nt, Human
cagcaagacaaggaacaaacug

SEQ ID NO: 608796 - RNA, 22 nt, Human
cuggaagaguaauauaaauuag

SEQ ID NO: 608797 - RNA, 22 nt, Human
gcagaggacagggauuuagauu

SEQ ID NO: 608798 - RNA, 22 nt, Human
gauuuuuauauaaagugagaaa

SEQ ID NO: 608799 - RNA, 22 nt, Human
gcaagauuccuugagccuaguu

SEQ ID NO: 608800 - RNA, 22 nt, Human
ccagacuggggcuccuugaggg

SEQ ID NO: 608801 - RNA, 22 nt, Human
guggcagggcuuugcuguucuu

SEQ ID NO: 608802 - RNA, 22 nt, Human
aggccacaguacuuugcagacc

SEQ ID NO: 608803 - RNA, 22 nt, Human
ucacuuugacggccaacuucua

SEQ ID NO: 608804 - RNA, 22 nt, Human
cagcacugcugcuguacacaca

SEQ ID NO: 608805 - RNA, 22 nt, Human
ucuccugacaugucuggaggaa

SEQ ID NO: 608806 - RNA, 22 nt, Human
acuccccagacugccaugcugg

SEQ ID NO: 608807 - RNA, 22 nt, Human
uuaaagucuauguacuacacuu

SEQ ID NO: 608808 - RNA, 22 nt, Human
aggcagaaccagcugggacuuu

SEQ ID NO: 608809 - RNA, 22 nt, Human
gcucugguuaaaaagaauuaaa

SEQ ID NO: 608810 - RNA, 19 nt, Human
agacucugccacucuucuc

SEQ ID NO: 608811 - RNA, 22 nt, Human
ccacugucagaggggcugugcc

SEQ ID NO: 608812 - RNA, 22 nt, Human
ucuggaguguccaguucuacuc

SEQ ID NO: 608813 - RNA, 22 nt, Human
gagugcaggccugagcaccauc

SEQ ID NO: 608814 - RNA, 22 nt, Human
aaaugugagacugaguuuuccu

SEQ ID NO: 608815 - RNA, 22 nt, Human
acagagagguaaaauauauagu

SEQ ID NO: 608816 - RNA, 22 nt, Human
gguggccugcccugaucccugg

SEQ ID NO: 608817 - RNA, 22 nt, Human
caggcucccacccuccugcagc

SEQ ID NO: 608818 - RNA, 22 nt, Human
cugguccuugacgcgugggagg

SEQ ID NO: 608819 - RNA, 22 nt, Human
ggcugagguguggggaacuaua

SEQ ID NO: 608820 - RNA, 22 nt, Human
cuuuggcagccucagcugcagg

SEQ ID NO: 608821 - RNA, 17 nt, Human
aagauuucauuagcuga

SEQ ID NO: 608822 - RNA, 22 nt, Human
ugggaaggcagucacuguccua

SEQ ID NO: 608823 - RNA, 21 nt, Human
aauguauaacagagcccauca

SEQ ID NO: 608824 - RNA, 22 nt, Human
agccacugugugaccagcuguc

SEQ ID NO: 608825 - RNA, 20 nt, Human
augcagucuuguggcaacua

SEQ ID NO: 608826 - RNA, 22 nt, Human
uguucuugggaaucuuacaguu

SEQ ID NO: 608827 - RNA, 22 nt, Human
gcuggugcucugggcccugagg

SEQ ID NO: 608828 - RNA, 22 nt, Human
auuuucaucgcuagguuggccu

SEQ ID NO: 608829 - RNA, 22 nt, Human
uacauacaguggaugcuuuagg

SEQ ID NO: 608830 - RNA, 21 nt, Human
uuuaauuugcauguaugacgc

SEQ ID NO: 608831 - RNA, 22 nt, Human
ucuuggccagaugcacuuccuc

SEQ ID NO: 608832 - RNA, 22 nt, Human
cugaggagcguuggucacgugu

SEQ ID NO: 608833 - RNA, 22 nt, Human
guuuucuuugaaugcuucuaga

SEQ ID NO: 608834 - RNA, 22 nt, Human
cuccuccagugggucccucagg

SEQ ID NO: 608835 - RNA, 22 nt, Human
gcuggggacuccccaccauagc

SEQ ID NO: 608836 - RNA, 19 nt, Human
ugcuucuggggcuucucca

SEQ ID NO: 608837 - RNA, 22 nt, Human
uucauugagcuguacacuuagg

SEQ ID NO: 608838 - RNA, 21 nt, Human
uauacaugugugcauacgugu

SEQ ID NO: 608839 - RNA, 22 nt, Human
gggcauggugcugguguucaug

SEQ ID NO: 608840 - RNA, 22 nt, Human
uuuccuaacucaucggauguac

SEQ ID NO: 608841 - RNA, 22 nt, Human
cugguccuccuugccuucagau

SEQ ID NO: 608842 - RNA, 23 nt, Human
cuuuccuuucuuugacacccagc

SEQ ID NO: 608843 - RNA, 22 nt, Human
uuagguaaggauggugacagua

SEQ ID NO: 608844 - RNA, 22 nt, Human
auuggcaguuggcugugguuca

SEQ ID NO: 608845 - RNA, 22 nt, Human
ucuguucuuuagccugcuugag

SEQ ID NO: 608846 - RNA, 21 nt, Human
ugaagccugaggcauagcccc

SEQ ID NO: 608847 - RNA, 22 nt, Human
cugcccucgggcccucccauag

SEQ ID NO: 608848 - RNA, 18 nt, Human
gagagggaucccucagga

SEQ ID NO: 608849 - RNA, 22 nt, Human
auuuccaagaaagcuuuaggau

SEQ ID NO: 608850 - RNA, 22 nt, Human
ugagccaggcuccaugccaccu

SEQ ID NO: 608851 - RNA, 22 nt, Human
gcaguguuguuaaaagauuaga

SEQ ID NO: 608852 - RNA, 22 nt, Human
guguguccaggcgggagucaag

SEQ ID NO: 608853 - RNA, 22 nt, Human
guaguauuuucugugauguagg

SEQ ID NO: 608854 - RNA, 22 nt, Human
uugcaguuuguggcaacuuuga

SEQ ID NO: 608855 - RNA, 22 nt, Human
uccuuagcaggcauucaggacc

SEQ ID NO: 608856 - RNA, 22 nt, Human
guuguauagagggcaugaaucu

SEQ ID NO: 608857 - RNA, 22 nt, Human
uuguuagugcaauguuugguga

SEQ ID NO: 608858 - RNA, 22 nt, Human
gcugcuggccccacaugcucca

SEQ ID NO: 608859 - RNA, 22 nt, Human
aguauaaugaaaugugucagua

SEQ ID NO: 608860 - RNA, 22 nt, Human
caggcagccugagggaucuggg

SEQ ID NO: 608861 - RNA, 22 nt, Human
uagauuucgcugcaucucaauc

SEQ ID NO: 608862 - RNA, 22 nt, Human
guaggaaagggagugaagggaa

SEQ ID NO: 608863 - RNA, 22 nt, Human
ucuaaaaaagucuguucacuug

SEQ ID NO: 608864 - RNA, 20 nt, Human
caggcaguuugugguuaggg

SEQ ID NO: 608865 - RNA, 22 nt, Human
uagacauuuucccuacccucau

SEQ ID NO: 608866 - RNA, 22 nt, Human
agagucugggcacugggaaugc

SEQ ID NO: 608867 - RNA, 22 nt, Human
gccuggcaauggccucaggaag

SEQ ID NO: 608868 - RNA, 22 nt, Human
cucuguaugaaucauauggagu

SEQ ID NO: 608869 - RNA, 22 nt, Human
acagggcaaccucugggagacu

SEQ ID NO: 608870 - RNA, 22 nt, Human
gagaaggaggcgaagcgugugc

SEQ ID NO: 608871 - RNA, 22 nt, Human
aaauuugccagaucaauucuga

SEQ ID NO: 608872 - RNA, 22 nt, Human
caggcacuucggcagcguggua

SEQ ID NO: 608873 - RNA, 23 nt, Human
guaaaauacgcagugcaguguga

SEQ ID NO: 608874 - RNA, 22 nt, Human
ugugugggagcacgggcuguug

SEQ ID NO: 608875 - RNA, 22 nt, Human
ccaggcugagcaugauuggagc

SEQ ID NO: 608876 - RNA, 22 nt, Human
gccuccaguuuuuuucugaacu

SEQ ID NO: 608877 - RNA, 22 nt, Human
ucugucuuggccagccaucugg

SEQ ID NO: 608878 - RNA, 21 nt, Human
uguauaacaacuaugcaaugu

SEQ ID NO: 608879 - RNA, 22 nt, Human
cucuggcuggcaccugaucuga

SEQ ID NO: 608880 - RNA, 22 nt, Human
ccaggcauccauugcuuccucu

SEQ ID NO: 608881 - RNA, 22 nt, Human
uccucuggauauaagccucacc

SEQ ID NO: 608882 - RNA, 22 nt, Human
gaggugggaugugugugcuacu

SEQ ID NO: 608883 - RNA, 22 nt, Human
agcccagcacugggggcccagc

SEQ ID NO: 608884 - RNA, 22 nt, Human
uuuauugcauacacaaauguca

SEQ ID NO: 608885 - RNA, 22 nt, Human
cugggacuugggcuaugcucug

SEQ ID NO: 608886 - RNA, 22 nt, Human
uuguauuagcuguaaauuuucu

SEQ ID NO: 608887 - RNA, 22 nt, Human
ugaagccauuacuguguuaggg

SEQ ID NO: 608888 - RNA, 22 nt, Human
aagcaguuaauguuuugucaau

SEQ ID NO: 608889 - RNA, 22 nt, Human
cagagagaaucuuggcagcuga

SEQ ID NO: 608890 - RNA, 22 nt, Human
uggaaagaggaagugcccagca

SEQ ID NO: 608891 - RNA, 22 nt, Human
aggcagcugcccucuccuuccu

SEQ ID NO: 608892 - RNA, 22 nt, Human
cauucacaaaaccacaugccau

SEQ ID NO: 608893 - RNA, 22 nt, Human
gcccugaggcaaaagaacaguc

SEQ ID NO: 608894 - RNA, 22 nt, Human
auuucaugugaagaagagauaa

SEQ ID NO: 608895 - RNA, 22 nt, Human
uugcaucagaaaauaugggaag

SEQ ID NO: 608896 - RNA, 23 nt, Human
cugaggggaaaagggcuucaggc

SEQ ID NO: 608897 - RNA, 22 nt, Human
cuacaggcucagggagcccucu

SEQ ID NO: 608898 - RNA, 22 nt, Human
cagaaacagagaaauauuggcu

SEQ ID NO: 608899 - RNA, 22 nt, Human
ugcagggcuacaggacuacaac

SEQ ID NO: 608900 - RNA, 22 nt, Human
aggagggcaggcuggcugccua

SEQ ID NO: 608901 - RNA, 22 nt, Human
agcugcugcgccucacccuggc

SEQ ID NO: 608902 - RNA, 22 nt, Human
ucucuguaguugggcagcugcu

SEQ ID NO: 608903 - RNA, 22 nt, Human
gccaguggagcacauggugaag

SEQ ID NO: 608904 - RNA, 22 nt, Human
ggcugcugggucaugaugcaga

SEQ ID NO: 608905 - RNA, 22 nt, Human
ccuccccacaggccaaauaggc

SEQ ID NO: 608906 - RNA, 19 nt, Human
gccaggcuccauagccggc

SEQ ID NO: 608907 - RNA, 22 nt, Human
caagaaucaacauuauuuagug

SEQ ID NO: 608908 - RNA, 21 nt, Human
uccagccuuucccucacuucc

SEQ ID NO: 608909 - RNA, 22 nt, Human
gaagcagugugaacccauguaa

SEQ ID NO: 608910 - RNA, 22 nt, Human
ugagccagaggaggcugugugg

SEQ ID NO: 608911 - RNA, 22 nt, Human
ugagguagggaaggcugguauu

SEQ ID NO: 608912 - RNA, 22 nt, Human
ucaagcuggcuguugcuauuuc

SEQ ID NO: 608913 - RNA, 22 nt, Human
gccccagaaaguucaaggcaca

SEQ ID NO: 608914 - RNA, 22 nt, Human
ugccuagaacuuuauucuuuau

SEQ ID NO: 608915 - RNA, 22 nt, Human
agccacagagcaggagaccuuu

SEQ ID NO: 608916 - RNA, 22 nt, Human
ucuccugguuuguuaaauaauu

SEQ ID NO: 608917 - RNA, 22 nt, Human
gagucugagaacugggcucagu

SEQ ID NO: 608918 - RNA, 20 nt, Human
uagcauuccagaaaacucag

SEQ ID NO: 608919 - RNA, 22 nt, Human
caagagcuagacuuugucagga

SEQ ID NO: 608920 - RNA, 22 nt, Human
cuucauuaaccaaaaugcaaua

SEQ ID NO: 608921 - RNA, 22 nt, Human
gcagggcuaauggggcaaguag

SEQ ID NO: 608922 - RNA, 22 nt, Human
cccagcaggucggugcugccug

SEQ ID NO: 608923 - RNA, 22 nt, Human
uggaggaaaaaaccaggcagag

SEQ ID NO: 608924 - RNA, 22 nt, Human
ggcuagggaucuagaccaggac

SEQ ID NO: 608925 - RNA, 22 nt, Human
acagagcuuaauucaggagcuu

SEQ ID NO: 608926 - RNA, 22 nt, Human
auaaaauuugcuacuguuaaau

SEQ ID NO: 608927 - RNA, 22 nt, Human
accagcugccaagggcuacacu

SEQ ID NO: 608928 - RNA, 22 nt, Human
uacaucaagauaaaaacuguca

SEQ ID NO: 608929 - RNA, 19 nt, Human
gaagaagcuugagaaguag

SEQ ID NO: 608930 - RNA, 22 nt, Human
auacauuagaaucugguacuca

SEQ ID NO: 608931 - RNA, 22 nt, Human
uggaagcgagacagagaucucc

SEQ ID NO: 608932 - RNA, 22 nt, Human
gucagcucagcaggugggagug

SEQ ID NO: 608933 - RNA, 23 nt, Human
acagaaaguucugcuggacagag

SEQ ID NO: 608934 - RNA, 22 nt, Human
aauugcuucauuaacauuuagg

SEQ ID NO: 608935 - RNA, 22 nt, Human
ugagccuggggccugggcagcg

SEQ ID NO: 608936 - RNA, 22 nt, Human
gugcccaggggccagcugccgg

SEQ ID NO: 608937 - RNA, 22 nt, Human
aaucuuagguuuggcuucaucu

SEQ ID NO: 608938 - RNA, 22 nt, Human
cagguccucgggggaggccggc

SEQ ID NO: 608939 - RNA, 23 nt, Human
uggcagagacccagaaucuacau

SEQ ID NO: 608940 - RNA, 21 nt, Human
uaggagcugauggggaaguag

SEQ ID NO: 608941 - RNA, 22 nt, Human
ucugggaaguccucugucaugc

SEQ ID NO: 608942 - RNA, 19 nt, Human
agccuggagggcuggucac

SEQ ID NO: 608943 - RNA, 22 nt, Human
ucacauacacuaggauauuuuu

SEQ ID NO: 608944 - RNA, 23 nt, Human
ccuggcuguggauuugggccugc

SEQ ID NO: 608945 - RNA, 22 nt, Human
uuucugucauaguuaucuuugu

SEQ ID NO: 608946 - RNA, 22 nt, Human
gcuucagcccaucccaguacau

SEQ ID NO: 608947 - RNA, 22 nt, Human
ucugcugugucccuggucuccu

SEQ ID NO: 608948 - RNA, 17 nt, Human
gagaguguauuggaugc

SEQ ID NO: 608949 - RNA, 17 nt, Human
cagcucuuccucccucu

SEQ ID NO: 608950 - RNA, 22 nt, Human
gcaggagacaacuguaaggaga

SEQ ID NO: 608951 - RNA, 22 nt, Human
aacaauaggcuauaugcuaggc

SEQ ID NO: 608952 - RNA, 22 nt, Human
guacaugugcacaacaugcaug

SEQ ID NO: 608953 - RNA, 22 nt, Human
aaauagacacuuggacagacaa

SEQ ID NO: 608954 - RNA, 22 nt, Human
aacaagauagauaucacuuagg

SEQ ID NO: 608955 - RNA, 23 nt, Human
uuuuccuuuggacaggcuguauu

SEQ ID NO: 608956 - RNA, 22 nt, Human
ugccugggcucgguagccaucg

SEQ ID NO: 608957 - RNA, 22 nt, Human
ucauaaauuagcugucuuugaa

SEQ ID NO: 608958 - RNA, 22 nt, Human
cacugaccauggccaauuggca

SEQ ID NO: 608959 - RNA, 22 nt, Human
cuccuggccacguucuugcugg

SEQ ID NO: 608960 - RNA, 22 nt, Human
ucugggagagcugcugucagag

SEQ ID NO: 608961 - RNA, 22 nt, Human
agugggagcggcagucggggac

SEQ ID NO: 608962 - RNA, 22 nt, Human
uggcaaagacgcuagcuaagau

SEQ ID NO: 608963 - RNA, 22 nt, Human
cuccagugcugucaucccuucc

SEQ ID NO: 608964 - RNA, 22 nt, Human
aggagacauggaauagugaggc

SEQ ID NO: 608965 - RNA, 22 nt, Human
ggccaggcugcccugggagcag

SEQ ID NO: 608966 - RNA, 22 nt, Human
ucucuguggguuucaccagcgc

SEQ ID NO: 608967 - RNA, 22 nt, Human
uguuagauauucauuaauagga

SEQ ID NO: 608968 - RNA, 22 nt, Human
caggccaccagauacaugcccc

SEQ ID NO: 608969 - RNA, 22 nt, Human
aucucuggccccugggguccga

SEQ ID NO: 608970 - RNA, 21 nt, Human
ucuggagucaucuuuaccaua

SEQ ID NO: 608971 - RNA, 22 nt, Human
ggaagaaaguagaaaaccgugg

SEQ ID NO: 608972 - RNA, 22 nt, Human
cccuggagaucgggagaggaag

SEQ ID NO: 608973 - RNA, 22 nt, Human
ucuaacauuguuuuucacagau

SEQ ID NO: 608974 - RNA, 19 nt, Human
cccaggagucuggcugguu

SEQ ID NO: 608975 - RNA, 22 nt, Human
gcuuaauucuggcucaguuucc

SEQ ID NO: 608976 - RNA, 22 nt, Human
agucacugggcugcuuccuaua

SEQ ID NO: 608977 - RNA, 22 nt, Human
ucauuuacuguaggagugaacc

SEQ ID NO: 608978 - RNA, 22 nt, Human
ugggccuggagcccuggagagu

SEQ ID NO: 608979 - RNA, 20 nt, Human
uauuaugaccuguguucugg

SEQ ID NO: 608980 - RNA, 22 nt, Human
cuuggucauuucuuguccuguu

SEQ ID NO: 608981 - RNA, 22 nt, Human
gaggccuauaggcaagugcugc

SEQ ID NO: 608982 - RNA, 22 nt, Human
cuggccccagaguuucacuugg

SEQ ID NO: 608983 - RNA, 22 nt, Human
cagcuggcuggucagugcacaa

SEQ ID NO: 608984 - RNA, 18 nt, Human
ggcagccuacccacuugu

SEQ ID NO: 608985 - RNA, 22 nt, Human
gacugcagugaaggcacauggg

SEQ ID NO: 608986 - RNA, 22 nt, Human
cuucuugucaauuugccauugu

SEQ ID NO: 608987 - RNA, 22 nt, Human
agcaaugcaaucuuaaccuuga

SEQ ID NO: 608988 - RNA, 22 nt, Human
agccagcaggugcagaauucca

SEQ ID NO: 608989 - RNA, 22 nt, Human
cuaguguuuggaagucauagcc

SEQ ID NO: 608990 - RNA, 20 nt, Human
ccagggcuggcuccugggau

SEQ ID NO: 608991 - RNA, 20 nt, Human
aacacaggguuaccaucaga

SEQ ID NO: 608992 - RNA, 22 nt, Human
ugaccucuguccugcagucugg

SEQ ID NO: 608993 - RNA, 22 nt, Human
ccugagaccaaguugcagccau

SEQ ID NO: 608994 - RNA, 22 nt, Human
acaagauagguugagucuagcc

SEQ ID NO: 608995 - RNA, 22 nt, Human
cuggggcucacuuuggucaggc

SEQ ID NO: 608996 - RNA, 22 nt, Human
gcccagggcuucaaagagagaa

SEQ ID NO: 608997 - RNA, 22 nt, Human
ggcacagcgacuaccaucgaaa

SEQ ID NO: 608998 - RNA, 22 nt, Human
uauauaauuuguaaaagcaccu

SEQ ID NO: 608999 - RNA, 22 nt, Human
aaagccaagcugggaaggcagg

SEQ ID NO: 609000 - RNA, 20 nt, Human
gcugggcuaccacuggcccu

SEQ ID NO: 609001 - RNA, 22 nt, Human
ggccuaggaaggggauguaacu

SEQ ID NO: 609002 - RNA, 22 nt, Human
ucacccaggcuggugcgcagug

SEQ ID NO: 609003 - RNA, 22 nt, Human
auauucuuauccuuuucucugu

SEQ ID NO: 609004 - RNA, 22 nt, Human
gaggaagggcugccugccgggc

SEQ ID NO: 609005 - RNA, 22 nt, Human
gcaggcaccacggcucaggucu

SEQ ID NO: 609006 - RNA, 22 nt, Human
agacagugcaagaagagcaggc

SEQ ID NO: 609007 - RNA, 22 nt, Human
cagagcccugggcacaugguag

SEQ ID NO: 609008 - RNA, 22 nt, Human
aagaauaagaggauuuagaaca

SEQ ID NO: 609009 - RNA, 22 nt, Human
gagcuuuuauaccuucucucag

SEQ ID NO: 609010 - RNA, 22 nt, Human
uugcuguuuuacaucugguggg

SEQ ID NO: 609011 - RNA, 22 nt, Human
acauuguucacaggggcuucuc

SEQ ID NO: 609012 - RNA, 22 nt, Human
uuaagacacauuucucagacgg

SEQ ID NO: 609013 - RNA, 20 nt, Human
aggcaucugagucacaucuu

SEQ ID NO: 609014 - RNA, 22 nt, Human
caggaaccuaaagagacauuac

SEQ ID NO: 609015 - RNA, 22 nt, Human
cccacccagccuggcugagggg

SEQ ID NO: 609016 - RNA, 23 nt, Human
ucuuguuuccuuugcgcuaucca

SEQ ID NO: 609017 - RNA, 22 nt, Human
ucauggauuaaauuauuaaguu

SEQ ID NO: 609018 - RNA, 22 nt, Human
gcagcugcuggaaguuccugcc

SEQ ID NO: 609019 - RNA, 22 nt, Human
cuggcagcagcuucuggaucga

SEQ ID NO: 609020 - RNA, 22 nt, Human
cugggacaugauagaaacagau

SEQ ID NO: 609021 - RNA, 17 nt, Human
cagggcugucugccuag

SEQ ID NO: 609022 - RNA, 22 nt, Human
uggagcaggccggaaguggcuu

SEQ ID NO: 609023 - RNA, 22 nt, Human
cuggagucacacacaccaaggu

SEQ ID NO: 609024 - RNA, 22 nt, Human
cugaagacugcugagaaguuac

SEQ ID NO: 609025 - RNA, 22 nt, Human
augcacuaugaugagcuagucu

SEQ ID NO: 609026 - RNA, 18 nt, Human
ccacccagggggagagga

SEQ ID NO: 609027 - RNA, 23 nt, Human
gcccagggacugggaaucagugg

SEQ ID NO: 609028 - RNA, 22 nt, Human
ugcaguggugguaaagaugcuc

SEQ ID NO: 609029 - RNA, 23 nt, Human
ggccucagcgcacagaaacugcu

SEQ ID NO: 609030 - RNA, 22 nt, Human
ccagcugcugugcagggaggcu

SEQ ID NO: 609031 - RNA, 22 nt, Human
ugucacuuuggggagaguuuug

SEQ ID NO: 609032 - RNA, 22 nt, Human
acuguguggaaauuugugaggg

SEQ ID NO: 609033 - RNA, 22 nt, Human
gggccaggucggugaaugguca

SEQ ID NO: 609034 - RNA, 22 nt, Human
cuauggaaacucaacauuuguu

SEQ ID NO: 609035 - RNA, 22 nt, Human
acaugaauauaugaaguucaac

SEQ ID NO: 609036 - RNA, 22 nt, Human
ggccugggcccacugucaagag

SEQ ID NO: 609037 - RNA, 22 nt, Human
gagaaacuuggaguuauucugg

SEQ ID NO: 609038 - RNA, 19 nt, Human
ucugggaagccgggcucca

SEQ ID NO: 609039 - RNA, 22 nt, Human
agggagcccugaaccagagggu

SEQ ID NO: 609040 - RNA, 22 nt, Human
ugaaaggugacauuucuuggau

SEQ ID NO: 609041 - RNA, 22 nt, Human
gcuggagcggguucgggccgcu

SEQ ID NO: 609042 - RNA, 22 nt, Human
guaggcagggcuguggggagaa

SEQ ID NO: 609043 - RNA, 22 nt, Human
aagagguucuaauuuaacuauc

SEQ ID NO: 609044 - RNA, 22 nt, Human
uuacagauggcaguuucuugag

SEQ ID NO: 609045 - RNA, 22 nt, Human
uuucacaaucaaauggugaaau

SEQ ID NO: 609046 - RNA, 22 nt, Human
agccagagaacagcaggaaaug

SEQ ID NO: 609047 - RNA, 22 nt, Human
gugguuuguuuuauuccuggaa

SEQ ID NO: 609048 - RNA, 21 nt, Human
aacuggcagaccaacuauggc

SEQ ID NO: 609049 - RNA, 22 nt, Human
cagagguagaaggcaugcagug

SEQ ID NO: 609050 - RNA, 22 nt, Human
cuucagcaucuuuuucuugggg

SEQ ID NO: 609051 - RNA, 22 nt, Human
aucagaagaaauggaugugacu

SEQ ID NO: 609052 - RNA, 22 nt, Human
caguccuuucugaaauccuaua

SEQ ID NO: 609053 - RNA, 21 nt, Human
uggcagagugcagucuauaca

SEQ ID NO: 609054 - RNA, 21 nt, Human
agagcucaaggcaaaaauaau

SEQ ID NO: 609055 - RNA, 22 nt, Human
ggucccaggauugguugcgcag

SEQ ID NO: 609056 - RNA, 22 nt, Human
ucuuucuuaaauagguggauug

SEQ ID NO: 609057 - RNA, 22 nt, Human
cuggagaguaaucucuguguua

SEQ ID NO: 609058 - RNA, 22 nt, Human
uccuggggccaggcaccucugg

SEQ ID NO: 609059 - RNA, 22 nt, Human
augaggccuaucuuggcagagg

SEQ ID NO: 609060 - RNA, 22 nt, Human
cagucucuugcuucauuaguug

SEQ ID NO: 609061 - RNA, 22 nt, Human
gaagcagcuaggaucuucauuu

SEQ ID NO: 609062 - RNA, 22 nt, Human
ugggcacucaggcugaggccgu

SEQ ID NO: 609063 - RNA, 22 nt, Human
guuuucaaggggauuuaacuga

SEQ ID NO: 609064 - RNA, 22 nt, Human
acauauaugugcacaugugcag

SEQ ID NO: 609065 - RNA, 22 nt, Human
gugcuacaugguaguguaguua

SEQ ID NO: 609066 - RNA, 22 nt, Human
cuuucucuucacugucaugauc

SEQ ID NO: 609067 - RNA, 22 nt, Human
ccugggaaggggaagagaauuc

SEQ ID NO: 609068 - RNA, 19 nt, Human
cacacccaugcuugccaag

SEQ ID NO: 609069 - RNA, 22 nt, Human
gcucacaggggcagacgaguug

SEQ ID NO: 609070 - RNA, 22 nt, Human
cugccuuuggggaguuagaggg

SEQ ID NO: 609071 - RNA, 22 nt, Human
ugagucagucugcccuggcuuc

SEQ ID NO: 609072 - RNA, 22 nt, Human
gcugagauuacgggcaugagcc

SEQ ID NO: 609073 - RNA, 22 nt, Human
augcuaaagggguaggccuccu

SEQ ID NO: 609074 - RNA, 22 nt, Human
gggagccacagugaggugcaug

SEQ ID NO: 609075 - RNA, 22 nt, Human
cccaagggguguugauggagga

SEQ ID NO: 609076 - RNA, 22 nt, Human
gcuuccuuauuguugccauagu

SEQ ID NO: 609077 - RNA, 22 nt, Human
gcucaagagagaugcaguucuu

SEQ ID NO: 609078 - RNA, 22 nt, Human
guugugcaccacuguugauuga

SEQ ID NO: 609079 - RNA, 22 nt, Human
uguacacauaucauuuguggga

SEQ ID NO: 609080 - RNA, 22 nt, Human
aggcccaguagugcugccuuua

SEQ ID NO: 609081 - RNA, 22 nt, Human
ccugcuggccaguggagggcug

SEQ ID NO: 609082 - RNA, 22 nt, Human
ucugaaaugcaaauuugacuga

SEQ ID NO: 609083 - RNA, 22 nt, Human
ugaagauuuuguagcuuucagc

SEQ ID NO: 609084 - RNA, 22 nt, Human
cuuuccuagaaauauauacuua

SEQ ID NO: 609085 - RNA, 22 nt, Human
augcugagcagagcugacaugc

SEQ ID NO: 609086 - RNA, 22 nt, Human
caggccucagagaguggcgggg

SEQ ID NO: 609087 - RNA, 22 nt, Human
cagggagcaggcucuguccauc

SEQ ID NO: 609088 - RNA, 22 nt, Human
ugaaugaucuaguuuuguagac

SEQ ID NO: 609089 - RNA, 22 nt, Human
aagagagaguuccuaggcaaaa

SEQ ID NO: 609090 - RNA, 22 nt, Human
agaagugccgaaaggaagacag

SEQ ID NO: 609091 - RNA, 22 nt, Human
uccagagcuaauucagcagcug

SEQ ID NO: 609092 - RNA, 22 nt, Human
agcaccaggucgcuggcacgcu

SEQ ID NO: 609093 - RNA, 22 nt, Human
uccagggcgugugugaaggaaa

SEQ ID NO: 609094 - RNA, 22 nt, Human
ccagccugaaaugccucauccu

SEQ ID NO: 609095 - RNA, 20 nt, Human
uucacagaggacucagguca

SEQ ID NO: 609096 - RNA, 22 nt, Human
gagccuggguccuucccuggga

SEQ ID NO: 609097 - RNA, 22 nt, Human
uauauguuuuucuaauuaggga

SEQ ID NO: 609098 - RNA, 22 nt, Human
agguccuggacugcucuuguua

SEQ ID NO: 609099 - RNA, 22 nt, Human
uaauuuaauuucaugccagccu

SEQ ID NO: 609100 - RNA, 22 nt, Human
agaaaucaggaacaguaaggag

SEQ ID NO: 609101 - RNA, 22 nt, Human
agagcuggugcauauucagaaa

SEQ ID NO: 609102 - RNA, 22 nt, Human
auaggaugauaaaauuagaaac

SEQ ID NO: 609103 - RNA, 22 nt, Human
ucucuguccccucagcuggggu

SEQ ID NO: 609104 - RNA, 22 nt, Human
cagaggaaggcucugggaaugu

SEQ ID NO: 609105 - RNA, 22 nt, Human
uaauguacaagaggcuagggug

SEQ ID NO: 609106 - RNA, 22 nt, Human
ccaggagaauaauggcagauua

SEQ ID NO: 609107 - RNA, 20 nt, Human
agugcuguggcugaauaaga

SEQ ID NO: 609108 - RNA, 17 nt, Human
ucagcauacacagagaa

SEQ ID NO: 609109 - RNA, 22 nt, Human
gcagggugaaggucacauagaa

SEQ ID NO: 609110 - RNA, 22 nt, Human
cagacaggguuuuggucuuugg

SEQ ID NO: 609111 - RNA, 22 nt, Human
uugggagguaauggagccaagu

SEQ ID NO: 609112 - RNA, 20 nt, Human
cagaugcuggaucuuggucc

SEQ ID NO: 609113 - RNA, 22 nt, Human
agucauuuucugccuguaaucu

SEQ ID NO: 609114 - RNA, 22 nt, Human
gcagggcagaaggugcugagga

SEQ ID NO: 609115 - RNA, 22 nt, Human
uuuauccaucaucugcugaagg

SEQ ID NO: 609116 - RNA, 22 nt, Human
cuuccgugucaguuccaggugg

SEQ ID NO: 609117 - RNA, 23 nt, Human
ggacaugucucuggguauuuuga

SEQ ID NO: 609118 - RNA, 22 nt, Human
aagcagcugauuucacagcuca

SEQ ID NO: 609119 - RNA, 22 nt, Human
ucugggaagccuguaugcagaa

SEQ ID NO: 609120 - RNA, 22 nt, Human
acauuuaaugauccuacuguga

SEQ ID NO: 609121 - RNA, 22 nt, Human
ccaggcugccgaggaaagaaag

SEQ ID NO: 609122 - RNA, 22 nt, Human
uuucucaaauugcaugaguagc

SEQ ID NO: 609123 - RNA, 22 nt, Human
ucucagggcgcagugaggcagu

SEQ ID NO: 609124 - RNA, 22 nt, Human
uuccuucuagcccaaguauugg

SEQ ID NO: 609125 - RNA, 22 nt, Human
agccauggcgccacuagaggga

SEQ ID NO: 609126 - RNA, 22 nt, Human
gaaguuuuuguagagacagggu

SEQ ID NO: 609127 - RNA, 21 nt, Human
acuuucuguggguucaagcau

SEQ ID NO: 609128 - RNA, 22 nt, Human
ucuggaaauaaaauuauaguug

SEQ ID NO: 609129 - RNA, 22 nt, Human
aaaucagaucuuacacaauugu

SEQ ID NO: 609130 - RNA, 23 nt, Human
uguacaguuguuugacucagcuc

SEQ ID NO: 609131 - RNA, 22 nt, Human
gcacugcagguggguggagagg

SEQ ID NO: 609132 - RNA, 22 nt, Human
uguauaaguguguagaguaaga

SEQ ID NO: 609133 - RNA, 21 nt, Human
agcugccuuuagagagaacca

SEQ ID NO: 609134 - RNA, 22 nt, Human
ggagguagucugagucauaggc

SEQ ID NO: 609135 - RNA, 22 nt, Human
uugaaacagacaaguaaauguc

SEQ ID NO: 609136 - RNA, 22 nt, Human
ggcugccugccgcccacuuggc

SEQ ID NO: 609137 - RNA, 22 nt, Human
aaagacugguguguuacauaua

SEQ ID NO: 609138 - RNA, 21 nt, Human
gacaaugcagucuuuuuugga

SEQ ID NO: 609139 - RNA, 22 nt, Human
uuccuccacgugacaggagcca

SEQ ID NO: 609140 - RNA, 22 nt, Human
cuuuagaauuugauauaaucaa

SEQ ID NO: 609141 - RNA, 23 nt, Human
gcagagcugcccuauugccuugg

SEQ ID NO: 609142 - RNA, 22 nt, Human
agaguucugcucuucucaguga

SEQ ID NO: 609143 - RNA, 18 nt, Human
uuuccuuguaugaacaua

SEQ ID NO: 609144 - RNA, 22 nt, Human
gcugaggcuccucgggaggaca

SEQ ID NO: 609145 - RNA, 22 nt, Human
cucuccauucccuacaguuuuc

SEQ ID NO: 609146 - RNA, 22 nt, Human
cauggcagcuuugggaggagga

SEQ ID NO: 609147 - RNA, 22 nt, Human
uccagggccacagaggaugcua

SEQ ID NO: 609148 - RNA, 22 nt, Human
ccaggcuuuaagagguggaaac

SEQ ID NO: 609149 - RNA, 22 nt, Human
gugcuugggggaaguaacagac

SEQ ID NO: 609150 - RNA, 23 nt, Human
uguuaauacaucugccacucauu

SEQ ID NO: 609151 - RNA, 22 nt, Human
ugccugucagggggagugggaa

SEQ ID NO: 609152 - RNA, 23 nt, Human
cguuuuuuccucagauguucugg

SEQ ID NO: 609153 - RNA, 22 nt, Human
acuacacuccaauuuucuaggu

SEQ ID NO: 609154 - RNA, 22 nt, Human
uauuuccaaaagccuauuauga

SEQ ID NO: 609155 - RNA, 22 nt, Human
gaggguggccuuuagagcccau

SEQ ID NO: 609156 - RNA, 22 nt, Human
guuuacauugcuguuugugucu

SEQ ID NO: 609157 - RNA, 22 nt, Human
aaagcuucuaggccuauugcuu

SEQ ID NO: 609158 - RNA, 22 nt, Human
uuccugccccugagagcuccca

SEQ ID NO: 609159 - RNA, 22 nt, Human
caccagaguuguccaaaugauu

SEQ ID NO: 609160 - RNA, 22 nt, Human
gucccagaaacauauugcuggu

SEQ ID NO: 609161 - RNA, 22 nt, Human
caguuacagcugcaccagagcc

SEQ ID NO: 609162 - RNA, 22 nt, Human
agccugggcaugggacgggagg

SEQ ID NO: 609163 - RNA, 22 nt, Human
caguggaauauauaggggauuu

SEQ ID NO: 609164 - RNA, 22 nt, Human
aagcauaaaacguuacaacaug

SEQ ID NO: 609165 - RNA, 22 nt, Human
uggcaguguuucuaaggggcuc

SEQ ID NO: 609166 - RNA, 22 nt, Human
cagaucugcuccucuguccaug

SEQ ID NO: 609167 - RNA, 22 nt, Human
gcuggagccuucugcucuguug

SEQ ID NO: 609168 - RNA, 22 nt, Human
cacugcuugcaguaugagugga

SEQ ID NO: 609169 - RNA, 21 nt, Human
ugccagcugcugcaucugucu

SEQ ID NO: 609170 - RNA, 22 nt, Human
aacacuggaagggacaucaagu

SEQ ID NO: 609171 - RNA, 22 nt, Human
auauaauuaauuuagcugccuc

SEQ ID NO: 609172 - RNA, 22 nt, Human
acaguguuuaagagauggcauu

SEQ ID NO: 609173 - RNA, 22 nt, Human
cuugcuuuaucugguuucucau

SEQ ID NO: 609174 - RNA, 22 nt, Human
gggaagauaguguugagggccc

SEQ ID NO: 609175 - RNA, 22 nt, Human
cagaugagcaugggcacaagca

SEQ ID NO: 609176 - RNA, 22 nt, Human
gcccaggagguggaggugcagu

SEQ ID NO: 609177 - RNA, 22 nt, Human
ucaguaaagucucuagagggua

SEQ ID NO: 609178 - RNA, 22 nt, Human
gggcccaguacccucugccaag

SEQ ID NO: 609179 - RNA, 18 nt, Human
uucacaagggcuugguuu

SEQ ID NO: 609180 - RNA, 22 nt, Human
uucacuguuguuagcagaggcg

SEQ ID NO: 609181 - RNA, 20 nt, Human
aaucagaaagugugagcucu

SEQ ID NO: 609182 - RNA, 22 nt, Human
caugcuggucagccaguggaug

SEQ ID NO: 609183 - RNA, 22 nt, Human
uuuagcauuacuaaaaugaaaa

SEQ ID NO: 609184 - RNA, 22 nt, Human
agcagccagaaagggcagucga

SEQ ID NO: 609185 - RNA, 22 nt, Human
cauaucuuaugguuuucuaagu

SEQ ID NO: 609186 - RNA, 18 nt, Human
uauaaacacacuuagguu

SEQ ID NO: 609187 - RNA, 22 nt, Human
uggucacccacugggacugcgg

SEQ ID NO: 609188 - RNA, 20 nt, Human
gggcaucuuugcuccuguuu

SEQ ID NO: 609189 - RNA, 20 nt, Human
gugcugagggcugggcaaug

SEQ ID NO: 609190 - RNA, 21 nt, Human
aggcacuguuugugguuuggg

SEQ ID NO: 609191 - RNA, 22 nt, Human
uggcuggacagugggcagugga

SEQ ID NO: 609192 - RNA, 22 nt, Human
uucagcacuggacagcgagucu

SEQ ID NO: 609193 - RNA, 22 nt, Human
aaggaagagucuagaacaggca

SEQ ID NO: 609194 - RNA, 22 nt, Human
ccugguggcuucuggguggacg

SEQ ID NO: 609195 - RNA, 22 nt, Human
guuuaugaauguuacuauagag

SEQ ID NO: 609196 - RNA, 22 nt, Human
ggcugcugacaaacaugaucau

SEQ ID NO: 609197 - RNA, 22 nt, Human
ggagauggcuggcagguagaug

SEQ ID NO: 609198 - RNA, 22 nt, Human
cugggaguuuguuaguaaugca

SEQ ID NO: 609199 - RNA, 22 nt, Human
uagaaaugagccaugguagagc

SEQ ID NO: 609200 - RNA, 22 nt, Human
ugcuccagugccugccccacag

SEQ ID NO: 609201 - RNA, 22 nt, Human
ggcucagggaaugaggaagaau

SEQ ID NO: 609202 - RNA, 22 nt, Human
acuuugugcccaacagaaagaa

SEQ ID NO: 609203 - RNA, 22 nt, Human
ucagagcugcccaugcaagggg

SEQ ID NO: 609204 - RNA, 21 nt, Human
augaaugauuucuacucuuaa

SEQ ID NO: 609205 - RNA, 22 nt, Human
acagcagagugugagauagcca

SEQ ID NO: 609206 - RNA, 22 nt, Human
auauccuugagacguggcuacu

SEQ ID NO: 609207 - RNA, 20 nt, Human
uugcacagagaaggaggcag

SEQ ID NO: 609208 - RNA, 22 nt, Human
cagugcaguugguggcaggggu

SEQ ID NO: 609209 - RNA, 22 nt, Human
ggggcagaguagcuggggugug

SEQ ID NO: 609210 - RNA, 22 nt, Human
ugggccagcacugggugcucau

SEQ ID NO: 609211 - RNA, 22 nt, Human
uggagccaaugaacauuugcug

SEQ ID NO: 609212 - RNA, 22 nt, Human
cuggucugggaugagggaugua

SEQ ID NO: 609213 - RNA, 22 nt, Human
gccaccagggggugcaaggucc

SEQ ID NO: 609214 - RNA, 22 nt, Human
guuuaaauaauuaggggccugu

SEQ ID NO: 609215 - RNA, 22 nt, Human
ucuuccaggagggcauuucuuu

SEQ ID NO: 609216 - RNA, 19 nt, Human
ugggcagcucccucugucc

SEQ ID NO: 609217 - RNA, 22 nt, Human
gcugcuggcacuggagugagcc

SEQ ID NO: 609218 - RNA, 22 nt, Human
caaauaagcaauuccauucuuc

SEQ ID NO: 609219 - RNA, 22 nt, Human
acuuugaaacuaaaauucauua

SEQ ID NO: 609220 - RNA, 18 nt, Human
ucaugcaaacgcuucaua

SEQ ID NO: 609221 - RNA, 22 nt, Human
uggaggucucugucugggcagg

SEQ ID NO: 609222 - RNA, 22 nt, Human
ggugcaggacgaaguggggguu

SEQ ID NO: 609223 - RNA, 22 nt, Human
caaugcuuuuguucuuuacuca

SEQ ID NO: 609224 - RNA, 22 nt, Human
aagcaggcaucuuggaggucaa

SEQ ID NO: 609225 - RNA, 22 nt, Human
aagaaccaaaaugaagcuaggu

SEQ ID NO: 609226 - RNA, 22 nt, Human
cucagaaaaccucuuucuugau

SEQ ID NO: 609227 - RNA, 21 nt, Human
agcaggaggcagucacagcuc

SEQ ID NO: 609228 - RNA, 22 nt, Human
uagaaauucaaugcucugagua

SEQ ID NO: 609229 - RNA, 22 nt, Human
agggccagccaggcccuacaaa

SEQ ID NO: 609230 - RNA, 22 nt, Human
uucuuuucccaauauuuugcug

SEQ ID NO: 609231 - RNA, 20 nt, Human
ugaugguauuaggaggugug

SEQ ID NO: 609232 - RNA, 22 nt, Human
acuuccugaauggggcuaauua

SEQ ID NO: 609233 - RNA, 22 nt, Human
ugcuggagagccuuggccaagg

SEQ ID NO: 609234 - RNA, 18 nt, Human
ucaggcuggaaguuugcc

SEQ ID NO: 609235 - RNA, 22 nt, Human
gggcagugguccaggcuacagc

SEQ ID NO: 609236 - RNA, 21 nt, Human
uaaagaagaugaaugugauca

SEQ ID NO: 609237 - RNA, 22 nt, Human
ccagaggucuccugcacgggau

SEQ ID NO: 609238 - RNA, 22 nt, Human
ucccagagguugagucacuuau

SEQ ID NO: 609239 - RNA, 22 nt, Human
uagcuuugccuguuaaucacaa

SEQ ID NO: 609240 - RNA, 22 nt, Human
gcugucuguucgagcguguguu

SEQ ID NO: 609241 - RNA, 22 nt, Human
aguggcugcuaugaucaggaca

SEQ ID NO: 609242 - RNA, 22 nt, Human
uccaagcacuguuaauuaaacu

SEQ ID NO: 609243 - RNA, 22 nt, Human
uggcagcuauuacaaggaaguc

SEQ ID NO: 609244 - RNA, 22 nt, Human
aaggaggaauuucagggugaau

SEQ ID NO: 609245 - RNA, 22 nt, Human
ugacaguuaagguauacauuca

SEQ ID NO: 609246 - RNA, 22 nt, Human
uuaaaauuuccccaccauguau

SEQ ID NO: 609247 - RNA, 22 nt, Human
cagcugaguuacucugaggucu

SEQ ID NO: 609248 - RNA, 19 nt, Human
agcuguggaugugggauuu

SEQ ID NO: 609249 - RNA, 22 nt, Human
ugucuuuaguuuuacugucugg

SEQ ID NO: 609250 - RNA, 22 nt, Human
uccuggugcuuguauuugaagu

SEQ ID NO: 609251 - RNA, 22 nt, Human
uuucuuagcgaugcuugauaaa

SEQ ID NO: 609252 - RNA, 22 nt, Human
gagugcugcuugggauagugag

SEQ ID NO: 609253 - RNA, 22 nt, Human
aauauucaaguuauucuuucuu

SEQ ID NO: 609254 - RNA, 23 nt, Human
uucuuuguggauaaucuccagug

SEQ ID NO: 609255 - RNA, 22 nt, Human
caggcagaaggaaguaccaggc

SEQ ID NO: 609256 - RNA, 22 nt, Human
ggccauggggacagagggugaa

SEQ ID NO: 609257 - RNA, 22 nt, Human
augcugugaaaaagaaggcuga

SEQ ID NO: 609258 - RNA, 22 nt, Human
uacagcuuaaaaaagccaacuu

SEQ ID NO: 609259 - RNA, 22 nt, Human
uggcagagcccagacuccaguc

SEQ ID NO: 609260 - RNA, 22 nt, Human
aaggccaaagacaccuacacag

SEQ ID NO: 609261 - RNA, 22 nt, Human
cugggcuguaauguggcacuga

SEQ ID NO: 609262 - RNA, 22 nt, Human
uguagcagugucuaccacauua

SEQ ID NO: 609263 - RNA, 23 nt, Human
uaugauccuccacaccuucucuc

SEQ ID NO: 609264 - RNA, 22 nt, Human
agagcugucagcguuuuggcca

SEQ ID NO: 609265 - RNA, 22 nt, Human
ucucagaaaugacaggagguac

SEQ ID NO: 609266 - RNA, 22 nt, Human
gcuuccccuccaagcacugccu

SEQ ID NO: 609267 - RNA, 19 nt, Human
gagcacagcggcauuuggu

SEQ ID NO: 609268 - RNA, 22 nt, Human
ucuuucugguuauguauagaga

SEQ ID NO: 609269 - RNA, 21 nt, Human
accucaagcaacaaccaaggu

SEQ ID NO: 609270 - RNA, 22 nt, Human
aacuggaauagcacaggaaaag

SEQ ID NO: 609271 - RNA, 22 nt, Human
cuuuacacaaugauuuucuuua

SEQ ID NO: 609272 - RNA, 22 nt, Human
ugcagagaguuagggcccguau

SEQ ID NO: 609273 - RNA, 22 nt, Human
ucauugacaguuguuucaaaua

SEQ ID NO: 609274 - RNA, 22 nt, Human
gcaggagcaauggccuaucaga

SEQ ID NO: 609275 - RNA, 22 nt, Human
cagcuuucaucagugacacuca

SEQ ID NO: 609276 - RNA, 22 nt, Human
auauagugaaagugaugugugg

SEQ ID NO: 609277 - RNA, 22 nt, Human
gaguggcauaugugccugugaa

SEQ ID NO: 609278 - RNA, 21 nt, Human
uggcacagcaagugggcucau

SEQ ID NO: 609279 - RNA, 19 nt, Human
uuuccuaaaaagcugugcu

SEQ ID NO: 609280 - RNA, 22 nt, Human
ugaggccugcuuggaauugaau

SEQ ID NO: 609281 - RNA, 23 nt, Human
ggcaugcaauggacagagcugga

SEQ ID NO: 609282 - RNA, 22 nt, Human
guuuuucuaaguagcgauauuu

SEQ ID NO: 609283 - RNA, 22 nt, Human
auucauagcucaguacagacuc

SEQ ID NO: 609284 - RNA, 22 nt, Human
guuaaugccauuaggaaauuua

SEQ ID NO: 609285 - RNA, 22 nt, Human
cacccaggcuggagugcagggg

SEQ ID NO: 609286 - RNA, 23 nt, Human
uuuacagggcacucuuaugcagc

SEQ ID NO: 609287 - RNA, 22 nt, Human
acuccacauuugaacacaguuc

SEQ ID NO: 609288 - RNA, 22 nt, Human
aggcgguggccaaggagcggga

SEQ ID NO: 609289 - RNA, 22 nt, Human
aaugaaaucugcuggguaaaga

SEQ ID NO: 609290 - RNA, 22 nt, Human
ugauauuuaagcaaaaauaugg

SEQ ID NO: 609291 - RNA, 20 nt, Human
gcacacauagaaaugcauau

SEQ ID NO: 609292 - RNA, 22 nt, Human
gcccacaguguagcagguacuc

SEQ ID NO: 609293 - RNA, 22 nt, Human
guuuuacaagguuaaucagcag

SEQ ID NO: 609294 - RNA, 22 nt, Human
uuuaucuuuggaucuucagaaa

SEQ ID NO: 609295 - RNA, 22 nt, Human
ugggcuacucugggagccuaac

SEQ ID NO: 609296 - RNA, 22 nt, Human
aucaaagagcuugacaauccua

SEQ ID NO: 609297 - RNA, 22 nt, Human
gcaggccauucaggagaugugc

SEQ ID NO: 609298 - RNA, 22 nt, Human
gcaggaguguggugggacaucc

SEQ ID NO: 609299 - RNA, 20 nt, Human
agggccugcucugugguguc

SEQ ID NO: 609300 - RNA, 22 nt, Human
ugcucuggcuggagcaaugacu

SEQ ID NO: 609301 - RNA, 22 nt, Human
uucuuacacucuuaaaaaucau

SEQ ID NO: 609302 - RNA, 22 nt, Human
aaggcugagccagggccccuau

SEQ ID NO: 609303 - RNA, 20 nt, Human
agcuggcccacagguguggg

SEQ ID NO: 609304 - RNA, 22 nt, Human
uuugugaaaugaagucacaacu

SEQ ID NO: 609305 - RNA, 22 nt, Human
uccucacaagcaagcacaggua

SEQ ID NO: 609306 - RNA, 20 nt, Human
uccaggagguuaguguggcu

SEQ ID NO: 609307 - RNA, 22 nt, Human
ugcaggcuuuagccccauggcu

SEQ ID NO: 609308 - RNA, 22 nt, Human
ccagucccgcaugguccagaau

SEQ ID NO: 609309 - RNA, 22 nt, Human
agcacagagcucggggaaugga

SEQ ID NO: 609310 - RNA, 22 nt, Human
guuguuuuuguucucuauagcu

SEQ ID NO: 609311 - RNA, 22 nt, Human
cuggugcuggagccuagucccu

SEQ ID NO: 609312 - RNA, 22 nt, Human
uugcugaaugcaaguuggauag

SEQ ID NO: 609313 - RNA, 22 nt, Human
uuucucggcagagaugaugggc

SEQ ID NO: 609314 - RNA, 22 nt, Human
agcucuggcacuggcgcgggau

SEQ ID NO: 609315 - RNA, 22 nt, Human
ggaaaaacagucuuuauuauuu

SEQ ID NO: 609316 - RNA, 22 nt, Human
aguaacaucuuugacauuuguu

SEQ ID NO: 609317 - RNA, 20 nt, Human
uuucuuguacuuggagaagg

SEQ ID NO: 609318 - RNA, 22 nt, Human
agaaggcaccguggccaauauu

SEQ ID NO: 609319 - RNA, 23 nt, Human
ugggccuggaaagccuuagagag

SEQ ID NO: 609320 - RNA, 22 nt, Human
aaauaauuauagcgagucuauc

SEQ ID NO: 609321 - RNA, 22 nt, Human
gcagagcaguacucucuugacu

SEQ ID NO: 609322 - RNA, 22 nt, Human
acagggcaccugagguaggaag

SEQ ID NO: 609323 - RNA, 18 nt, Human
gacagcuguccugagccc

SEQ ID NO: 609324 - RNA, 22 nt, Human
cugggaggcacuauucaggagg

SEQ ID NO: 609325 - RNA, 22 nt, Human
ucgaagguuauugucuuuacgu

SEQ ID NO: 609326 - RNA, 19 nt, Human
cuguccuuggcugcacugu

SEQ ID NO: 609327 - RNA, 22 nt, Human
aguguuuauauuauggaaauau

SEQ ID NO: 609328 - RNA, 22 nt, Human
ucaauacauacaauguauagug

SEQ ID NO: 609329 - RNA, 22 nt, Human
agagacuaagaaguuuuaacuu

SEQ ID NO: 609330 - RNA, 22 nt, Human
uucacaguggcuuaggcuaugg

SEQ ID NO: 609331 - RNA, 22 nt, Human
agcuacaccccuuuacaguccu

SEQ ID NO: 609332 - RNA, 22 nt, Human
aaggcaguacuuuauguccaua

SEQ ID NO: 609333 - RNA, 22 nt, Human
gggcagcucagccaccaugcag

SEQ ID NO: 609334 - RNA, 22 nt, Human
ggcagauguuauaugaucugag

SEQ ID NO: 609335 - RNA, 22 nt, Human
agggaagcaauauuagauauca

SEQ ID NO: 609336 - RNA, 22 nt, Human
auguuucaaauauauagaguug

SEQ ID NO: 609337 - RNA, 22 nt, Human
gagcuucacgggggacagcauu

SEQ ID NO: 609338 - RNA, 22 nt, Human
ugagggguaaguaaaggaauug

SEQ ID NO: 609339 - RNA, 22 nt, Human
gacaggguacgggcuaggcaca

SEQ ID NO: 609340 - RNA, 22 nt, Human
cagcuguuucaguagcguuacu

SEQ ID NO: 609341 - RNA, 22 nt, Human
ugcucccaaacgaccuacugug

SEQ ID NO: 609342 - RNA, 22 nt, Human
uauguacaccaaggauugaaaa

SEQ ID NO: 609343 - RNA, 22 nt, Human
guuuccuacacuguaguauuau

SEQ ID NO: 609344 - RNA, 22 nt, Human
ugcugaauuccagggccccacu

SEQ ID NO: 609345 - RNA, 22 nt, Human
gcuccaggcgagcuggaccaga

SEQ ID NO: 609346 - RNA, 22 nt, Human
cucugggcaaguaugauagaaa

SEQ ID NO: 609347 - RNA, 22 nt, Human
uagcaauguguguguauaaauu

SEQ ID NO: 609348 - RNA, 22 nt, Human
agucuucuuucauuuacucagu

SEQ ID NO: 609349 - RNA, 22 nt, Human
ccaggcugcuuagccuuaucuu

SEQ ID NO: 609350 - RNA, 22 nt, Human
gcagccagccccucugaccucu

SEQ ID NO: 609351 - RNA, 22 nt, Human
aggccacaaccacccugugccc

SEQ ID NO: 609352 - RNA, 22 nt, Human
cugugugcugaaaugcagugag

SEQ ID NO: 609353 - RNA, 22 nt, Human
aggcccugcaggaagcaggaug

SEQ ID NO: 609354 - RNA, 22 nt, Human
uggcagagacuccuccugggag

SEQ ID NO: 609355 - RNA, 22 nt, Human
aggaaagcaauggcugagaaca

SEQ ID NO: 609356 - RNA, 21 nt, Human
aguccaggaggaggccagguu

SEQ ID NO: 609357 - RNA, 22 nt, Human
cugacucccaagcuagugcucu

SEQ ID NO: 609358 - RNA, 22 nt, Human
cugaaugucgaucagcuugggu

SEQ ID NO: 609359 - RNA, 22 nt, Human
acagcucuuaggcagaaccaac

SEQ ID NO: 609360 - RNA, 22 nt, Human
guuauuuaacuuuguagcaugg

SEQ ID NO: 609361 - RNA, 20 nt, Human
ucauggaaucucacucuagu

SEQ ID NO: 609362 - RNA, 20 nt, Human
uccuccuugcagagcccaga

SEQ ID NO: 609363 - RNA, 22 nt, Human
cugggccugguagggcuugaaa

SEQ ID NO: 609364 - RNA, 22 nt, Human
agcagcugucccuuaacaucag

SEQ ID NO: 609365 - RNA, 22 nt, Human
ccuggcugagggaccucgggua

SEQ ID NO: 609366 - RNA, 22 nt, Human
cuuccuucaauauaauuuuuac

SEQ ID NO: 609367 - RNA, 22 nt, Human
aaagccagaguguguuagagac

SEQ ID NO: 609368 - RNA, 22 nt, Human
aacuaaaccaugacauuauauu

SEQ ID NO: 609369 - RNA, 21 nt, Human
aagccagcccacagugguuug

SEQ ID NO: 609370 - RNA, 22 nt, Human
cugggggucgcgccucugggca

SEQ ID NO: 609371 - RNA, 22 nt, Human
aguucucuuuagcucauauggu

SEQ ID NO: 609372 - RNA, 22 nt, Human
agggagcagcagccacaggaug

SEQ ID NO: 609373 - RNA, 22 nt, Human
cuucugggugccugugaguguu

SEQ ID NO: 609374 - RNA, 22 nt, Human
cuccugggcugggaacucagcc

SEQ ID NO: 609375 - RNA, 21 nt, Human
augcugaaucuuguugugcuc

SEQ ID NO: 609376 - RNA, 22 nt, Human
uuauguaugaauauaguagaag

SEQ ID NO: 609377 - RNA, 22 nt, Human
uccuccuguuucucaggccugg

SEQ ID NO: 609378 - RNA, 22 nt, Human
agcaggcuuguuaugucugaga

SEQ ID NO: 609379 - RNA, 22 nt, Human
ugcagaaaccaauucaaguaag

SEQ ID NO: 609380 - RNA, 22 nt, Human
aaaaauagaaggauugacugag

SEQ ID NO: 609381 - RNA, 22 nt, Human
cacauguccugggaaaauaacu

SEQ ID NO: 609382 - RNA, 22 nt, Human
uccugggagaguuugauucauu

SEQ ID NO: 609383 - RNA, 22 nt, Human
guguauaaugcuguuuguacau

SEQ ID NO: 609384 - RNA, 19 nt, Human
aagggcugggcaccucacu

SEQ ID NO: 609385 - RNA, 22 nt, Human
aggacacacugcaagagccugg

SEQ ID NO: 609386 - RNA, 22 nt, Human
gcccagcuccucugcagacccu

SEQ ID NO: 609387 - RNA, 19 nt, Human
ccugaccacacaggccuug

SEQ ID NO: 609388 - RNA, 22 nt, Human
ucugucacccgagcaggcgaga

SEQ ID NO: 609389 - RNA, 19 nt, Human
ccuggcucugagcccagcc

SEQ ID NO: 609390 - RNA, 22 nt, Human
gcagccaggaagccuuucccuc

SEQ ID NO: 609391 - RNA, 22 nt, Human
uaggccaguggcagguugugug

SEQ ID NO: 609392 - RNA, 22 nt, Human
caggccucccggugcacacuga

SEQ ID NO: 609393 - RNA, 22 nt, Human
gcagcugccaguccccuuccag

SEQ ID NO: 609394 - RNA, 22 nt, Human
cucuucuguaccucggccucca

SEQ ID NO: 609395 - RNA, 22 nt, Human
aagggcugcuguagaagcagag

SEQ ID NO: 609396 - RNA, 22 nt, Human
agcuggagaucaugcugauacu

SEQ ID NO: 609397 - RNA, 22 nt, Human
uauucacaaaaugagguccuca

SEQ ID NO: 609398 - RNA, 22 nt, Human
ggagccagagucugcaguguaa

SEQ ID NO: 609399 - RNA, 22 nt, Human
uaaagcaaaaaugaacugccau

SEQ ID NO: 609400 - RNA, 22 nt, Human
uccuucagugucccgcucaggu

SEQ ID NO: 609401 - RNA, 22 nt, Human
cauacaguuuucccuagaugug

SEQ ID NO: 609402 - RNA, 22 nt, Human
gaauacauguguguauagaggu

SEQ ID NO: 609403 - RNA, 22 nt, Human
gaaugcuaagcaugugggaguu

SEQ ID NO: 609404 - RNA, 21 nt, Human
uauaguguggauaugcugaug

SEQ ID NO: 609405 - RNA, 22 nt, Human
ggccauggaccccgagcugacc

SEQ ID NO: 609406 - RNA, 19 nt, Human
agggagaauuccaagagga

SEQ ID NO: 609407 - RNA, 22 nt, Human
uccagcucccacucucacugcu

SEQ ID NO: 609408 - RNA, 22 nt, Human
aggccagugccuuuccagggcu

SEQ ID NO: 609409 - RNA, 22 nt, Human
aucggggaaaagggaggcugug

SEQ ID NO: 609410 - RNA, 22 nt, Human
auguagaacagguuaaugacag

SEQ ID NO: 609411 - RNA, 22 nt, Human
aagccaggagcgaggccucggc

SEQ ID NO: 609412 - RNA, 21 nt, Human
aggcuguccuuugccagcccu

SEQ ID NO: 609413 - RNA, 22 nt, Human
auguacacaugcaugcaugugc

SEQ ID NO: 609414 - RNA, 22 nt, Human
gaggaaaaugggacaggcugua

SEQ ID NO: 609415 - RNA, 22 nt, Human
ccuggagcgcgggucaagcugg

SEQ ID NO: 609416 - RNA, 19 nt, Human
agguuucuaacuauucaag

SEQ ID NO: 609417 - RNA, 20 nt, Human
augugucuuagagcaucagg

SEQ ID NO: 609418 - RNA, 22 nt, Human
uuuguacacugucuacuaugaa

SEQ ID NO: 609419 - RNA, 23 nt, Human
caucaaguacuuuugacaagugu

SEQ ID NO: 609420 - RNA, 22 nt, Human
cagugauucagacucaucauuu

SEQ ID NO: 609421 - RNA, 22 nt, Human
auguuaugucugggaaggggua

SEQ ID NO: 609422 - RNA, 22 nt, Human
gcucccaggaugaggagccagg

SEQ ID NO: 609423 - RNA, 22 nt, Human
acccagggcucaagcguaggca

SEQ ID NO: 609424 - RNA, 22 nt, Human
cacagauaaggauguuaauuuu

SEQ ID NO: 609425 - RNA, 22 nt, Human
aguccuggccccaaggaaggau

SEQ ID NO: 609426 - RNA, 22 nt, Human
gcugucagcgcccaaggagcuc

SEQ ID NO: 609427 - RNA, 22 nt, Human
gggagggaggugcugguucacg

SEQ ID NO: 609428 - RNA, 22 nt, Human
ucugggauaagaccacagauuu

SEQ ID NO: 609429 - RNA, 22 nt, Human
agcagacauaucucaugucaca

SEQ ID NO: 609430 - RNA, 22 nt, Human
cuggaguuagaguagacacuga

SEQ ID NO: 609431 - RNA, 20 nt, Human
agccagaagaaggcuggaga

SEQ ID NO: 609432 - RNA, 22 nt, Human
cccugugggccaugugucuaca

SEQ ID NO: 609433 - RNA, 22 nt, Human
aagcuucaaugagauaauuguu

SEQ ID NO: 609434 - RNA, 22 nt, Human
gaaucauagaacauuaauagaa

SEQ ID NO: 609435 - RNA, 22 nt, Human
acaggcagcccucucccugguu

SEQ ID NO: 609436 - RNA, 22 nt, Human
guccuguguacuccugauacuu

SEQ ID NO: 609437 - RNA, 22 nt, Human
gaaacacuaugccaagacaggg

SEQ ID NO: 609438 - RNA, 22 nt, Human
ggugagaaagggauuccuguuc

SEQ ID NO: 609439 - RNA, 23 nt, Human
auuuugccucuuggcugcuuagg

SEQ ID NO: 609440 - RNA, 22 nt, Human
ucuggcaucuguuuucauauuu

SEQ ID NO: 609441 - RNA, 22 nt, Human
ugcacacacgcggcacaucugu

SEQ ID NO: 609442 - RNA, 18 nt, Human
uuugcuuuccuucuucag

SEQ ID NO: 609443 - RNA, 22 nt, Human
gcaguccuggaggaagguguga

SEQ ID NO: 609444 - RNA, 22 nt, Human
cagccuggagccacagcccagg

SEQ ID NO: 609445 - RNA, 22 nt, Human
cccaggaguuagagguuguggu

SEQ ID NO: 609446 - RNA, 18 nt, Human
cauuccaaguucuaccuc

SEQ ID NO: 609447 - RNA, 22 nt, Human
uccagccaacugccuagggagc

SEQ ID NO: 609448 - RNA, 22 nt, Human
uuagaacaccauucuauauuac

SEQ ID NO: 609449 - RNA, 22 nt, Human
gcuaggcuguguuucagacccu

SEQ ID NO: 609450 - RNA, 22 nt, Human
caugaacaccaggcaugaacaa

SEQ ID NO: 609451 - RNA, 22 nt, Human
uccuucaaaaguugagagagcc

SEQ ID NO: 609452 - RNA, 22 nt, Human
acaguucaagucuuagacaaca

SEQ ID NO: 609453 - RNA, 22 nt, Human
cuucuucauaggcaguccuguu

SEQ ID NO: 609454 - RNA, 22 nt, Human
caggcugugaaacugagaugcg

SEQ ID NO: 609455 - RNA, 22 nt, Human
aggcugugcgaggucucagagu

SEQ ID NO: 609456 - RNA, 22 nt, Human
gucuggagccacugcugcugcu

SEQ ID NO: 609457 - RNA, 22 nt, Human
uggcagcuccuggggccagcac

SEQ ID NO: 609458 - RNA, 22 nt, Human
agugggcagugcgcucggaugc

SEQ ID NO: 609459 - RNA, 22 nt, Human
gucccagcuucccacuagcagc

SEQ ID NO: 609460 - RNA, 22 nt, Human
aagcauuuuguuuuaagaauga

SEQ ID NO: 609461 - RNA, 19 nt, Human
augagguagcagcuggugc

SEQ ID NO: 609462 - RNA, 22 nt, Human
uuggaauuccuguuguuucguc

SEQ ID NO: 609463 - RNA, 22 nt, Human
cagcuguucacauuuccaaaac

SEQ ID NO: 609464 - RNA, 22 nt, Human
uccagggaagagcagaggcuac

SEQ ID NO: 609465 - RNA, 22 nt, Human
gaauauuuucaguacagauggu

SEQ ID NO: 609466 - RNA, 22 nt, Human
uuguagaaucauuauuucuagu

SEQ ID NO: 609467 - RNA, 22 nt, Human
caggaaagucuguaaaggaacc

SEQ ID NO: 609468 - RNA, 22 nt, Human
cagcugcuuucagcaggaggga

SEQ ID NO: 609469 - RNA, 22 nt, Human
aaggccagcgcagaccauuguc

SEQ ID NO: 609470 - RNA, 22 nt, Human
uacaaagggggaagagauucug

SEQ ID NO: 609471 - RNA, 22 nt, Human
ugaggcuggcaaggcugguauu

SEQ ID NO: 609472 - RNA, 20 nt, Human
uacugggcaagcccacagac

SEQ ID NO: 609473 - RNA, 22 nt, Human
uuccaaaaugccuugauaugau

SEQ ID NO: 609474 - RNA, 22 nt, Human
uaacuugauaaguauucucugc

SEQ ID NO: 609475 - RNA, 20 nt, Human
accaggagauggaggcaggg

SEQ ID NO: 609476 - RNA, 23 nt, Human
ggagccuggcauaugagacgcau

SEQ ID NO: 609477 - RNA, 22 nt, Human
caggaagaaggguggugagucc

SEQ ID NO: 609478 - RNA, 22 nt, Human
auacaucaaggaugauggugua

SEQ ID NO: 609479 - RNA, 22 nt, Human
uauuuuguaauuggucauagcu

SEQ ID NO: 609480 - RNA, 22 nt, Human
ugcugggcauuuaugcagaugg

SEQ ID NO: 609481 - RNA, 22 nt, Human
acccugagaaagucacaugcau

SEQ ID NO: 609482 - RNA, 22 nt, Human
auuccacauaggccuucaugac

SEQ ID NO: 609483 - RNA, 22 nt, Human
uuuuuaucuacagauucucagc

SEQ ID NO: 609484 - RNA, 22 nt, Human
aggaaucaggagaugagcacgg

SEQ ID NO: 609485 - RNA, 22 nt, Human
ugccugccuugcugcuggacag

SEQ ID NO: 609486 - RNA, 22 nt, Human
uuguagaaaauucucuuggaua

SEQ ID NO: 609487 - RNA, 22 nt, Human
agacagugauggacaggcagac

SEQ ID NO: 609488 - RNA, 22 nt, Human
cuuccuuccuuccccgaaaugc

SEQ ID NO: 609489 - RNA, 22 nt, Human
cuggagcaaaagugacuccucu

SEQ ID NO: 609490 - RNA, 22 nt, Human
accagaaaggaugccuccuucc

SEQ ID NO: 609491 - RNA, 22 nt, Human
aguggcagaucucuggucugga

SEQ ID NO: 609492 - RNA, 22 nt, Human
uccauuuuagagaugaagaaac

SEQ ID NO: 609493 - RNA, 22 nt, Human
ccugccagcgcuuaucucucgg

SEQ ID NO: 609494 - RNA, 22 nt, Human
accaggaguagaauaucuguga

SEQ ID NO: 609495 - RNA, 22 nt, Human
gccuggggucucugacucacag

SEQ ID NO: 609496 - RNA, 22 nt, Human
gcucacuggccugaagaggacg

SEQ ID NO: 609497 - RNA, 22 nt, Human
acaguguucucuuccuguauag

SEQ ID NO: 609498 - RNA, 22 nt, Human
cugugccugcaggccacaucaa

SEQ ID NO: 609499 - RNA, 22 nt, Human
acagcuguggggacucuugccc

SEQ ID NO: 609500 - RNA, 22 nt, Human
gcagcugggacacugaggccag

SEQ ID NO: 609501 - RNA, 22 nt, Human
caugagucauagugaagcagga

SEQ ID NO: 609502 - RNA, 22 nt, Human
agagcuguguccugugcacuag

SEQ ID NO: 609503 - RNA, 22 nt, Human
uugauaaaaugaugaaaucacu

SEQ ID NO: 609504 - RNA, 22 nt, Human
agaauuuuaucuaaagggagua

SEQ ID NO: 609505 - RNA, 22 nt, Human
ucaggcuuuuucucaaccucuu

SEQ ID NO: 609506 - RNA, 22 nt, Human
ccagaggacuugggggcugaau

SEQ ID NO: 609507 - RNA, 22 nt, Human
uuugugcagauguauauuugug

SEQ ID NO: 609508 - RNA, 22 nt, Human
aguguguguuugggcgguuuau

SEQ ID NO: 609509 - RNA, 22 nt, Human
gcuucagauucuuuucaugucu

SEQ ID NO: 609510 - RNA, 21 nt, Human
uuuuaugcauaggaaauauau

SEQ ID NO: 609511 - RNA, 22 nt, Human
aaaguugauaagguaucguagu

SEQ ID NO: 609512 - RNA, 22 nt, Human
gggaggugauuaggaccaugua

SEQ ID NO: 609513 - RNA, 22 nt, Human
acaguaugaaugcagaauguag

SEQ ID NO: 609514 - RNA, 18 nt, Human
agaggggagguaagucug

SEQ ID NO: 609515 - RNA, 22 nt, Human
ggggucugggcuuagcuggaau

SEQ ID NO: 609516 - RNA, 22 nt, Human
uuuguugugauaauggucugca

SEQ ID NO: 609517 - RNA, 22 nt, Human
gacagcagacagccuggccccu

SEQ ID NO: 609518 - RNA, 22 nt, Human
cucacugucuguacuagcugau

SEQ ID NO: 609519 - RNA, 22 nt, Human
ugccugugcccuuugcugggag

SEQ ID NO: 609520 - RNA, 22 nt, Human
aagcagccuggcaugaugcuuu

SEQ ID NO: 609521 - RNA, 22 nt, Human
ggcuggcugauaaaggguugag

SEQ ID NO: 609522 - RNA, 22 nt, Human
gcugggagcccuggucugcucc

SEQ ID NO: 609523 - RNA, 22 nt, Human
aggcagugcagaguccucuucu

SEQ ID NO: 609524 - RNA, 17 nt, Human
caggaaaauaugaguga

SEQ ID NO: 609525 - RNA, 22 nt, Human
gucagaggaggcugaguaggaa

SEQ ID NO: 609526 - RNA, 22 nt, Human
ucuuucuguaagcuccauggaa

SEQ ID NO: 609527 - RNA, 22 nt, Human
ccugccugggcucacuugccag

SEQ ID NO: 609528 - RNA, 22 nt, Human
uggcacugccaaccugcuaggu

SEQ ID NO: 609529 - RNA, 22 nt, Human
cugccccagugccaggcaggug

SEQ ID NO: 609530 - RNA, 22 nt, Human
gugccugcagcaauccauggca

SEQ ID NO: 609531 - RNA, 22 nt, Human
ugcugaggcuagaccuggaagu

SEQ ID NO: 609532 - RNA, 22 nt, Human
cagccagaucagggcagggguu

SEQ ID NO: 609533 - RNA, 22 nt, Human
ugaagcaaugaucuuuuggugg

SEQ ID NO: 609534 - RNA, 22 nt, Human
uuucauugaugggugauagaaa

SEQ ID NO: 609535 - RNA, 22 nt, Human
ccagcucauauuuuaugugcag

SEQ ID NO: 609536 - RNA, 22 nt, Human
caugggaggucugcaaggugcu

SEQ ID NO: 609537 - RNA, 22 nt, Human
cuggcuugggucuaccugccuu

SEQ ID NO: 609538 - RNA, 22 nt, Human
gcugcagacugggaggcaggug

SEQ ID NO: 609539 - RNA, 21 nt, Human
ugauugauauuugcaaacaga

SEQ ID NO: 609540 - RNA, 22 nt, Human
uccagggaucuuuagagucuuu

SEQ ID NO: 609541 - RNA, 22 nt, Human
acugaucaaggguuuaauuuua

SEQ ID NO: 609542 - RNA, 22 nt, Human
ugugaaauauuggcaauuucau

SEQ ID NO: 609543 - RNA, 22 nt, Human
ugaggccacaggaaagggcccg

SEQ ID NO: 609544 - RNA, 19 nt, Human
ucuuucauuucuagcucug

SEQ ID NO: 609545 - RNA, 22 nt, Human
cuccuacaguguuugaguccag

SEQ ID NO: 609546 - RNA, 17 nt, Human
uuuagaauacaauguuu

SEQ ID NO: 609547 - RNA, 22 nt, Human
gcucugagucacacugcccugu

SEQ ID NO: 609548 - RNA, 22 nt, Human
cuuucuugcauaauuugaaacc

SEQ ID NO: 609549 - RNA, 22 nt, Human
auggcaaaaacugcaguuaccu

SEQ ID NO: 609550 - RNA, 20 nt, Human
ugcaggugggcccuucuggg

SEQ ID NO: 609551 - RNA, 19 nt, Human
uuugugcagcaacauuaau

SEQ ID NO: 609552 - RNA, 22 nt, Human
agggccacaguggggccugaga

SEQ ID NO: 609553 - RNA, 22 nt, Human
cagagggugugaaggggaugaa

SEQ ID NO: 609554 - RNA, 20 nt, Human
uuggcucugaucaguggagc

SEQ ID NO: 609555 - RNA, 22 nt, Human
cacuucaaggaauaucuagaaa

SEQ ID NO: 609556 - RNA, 22 nt, Human
cugccagcucaccggcucagac

SEQ ID NO: 609557 - RNA, 22 nt, Human
gcugugugacugagagccuggc

SEQ ID NO: 609558 - RNA, 22 nt, Human
uccagggcaccagcgucccccu

SEQ ID NO: 609559 - RNA, 23 nt, Human
auuugcauggccggauuauggau

SEQ ID NO: 609560 - RNA, 22 nt, Human
uuucuuucaauucuccuaaugc

SEQ ID NO: 609561 - RNA, 22 nt, Human
ugacauuuuuguacaaagucag

SEQ ID NO: 609562 - RNA, 21 nt, Human
aguccuugaaacucuuucuug

SEQ ID NO: 609563 - RNA, 22 nt, Human
ugagacagcagucagggaaaua

SEQ ID NO: 609564 - RNA, 22 nt, Human
agcucucaagauaagaaagaac

SEQ ID NO: 609565 - RNA, 22 nt, Human
acauuguuguuugcagcacagg

SEQ ID NO: 609566 - RNA, 22 nt, Human
gaugggcuggggagaaagcaug

SEQ ID NO: 609567 - RNA, 22 nt, Human
ggugcagaaggaagggagcugg

SEQ ID NO: 609568 - RNA, 22 nt, Human
cacugcccaccaaguggcuggu

SEQ ID NO: 609569 - RNA, 22 nt, Human
aagucucuuuucuuccuguauu

SEQ ID NO: 609570 - RNA, 22 nt, Human
ggagcugcacgcucugaagccu

SEQ ID NO: 609571 - RNA, 19 nt, Human
ucugguucauuucugcugu

SEQ ID NO: 609572 - RNA, 22 nt, Human
aaucuguaacauucaauaaaga

SEQ ID NO: 609573 - RNA, 22 nt, Human
gaggcacaauacaugucucaag

SEQ ID NO: 609574 - RNA, 22 nt, Human
cugagguguugaugaccuaugc

SEQ ID NO: 609575 - RNA, 22 nt, Human
uguccuuauaagaaaaggaaau

SEQ ID NO: 609576 - RNA, 20 nt, Human
caggucuucauguggcuguc

SEQ ID NO: 609577 - RNA, 22 nt, Human
augcuaaggcccaggagaaaau

SEQ ID NO: 609578 - RNA, 22 nt, Human
ucauuucuauugcuacugucug

SEQ ID NO: 609579 - RNA, 22 nt, Human
guggggcuggaagauggguacu

SEQ ID NO: 609580 - RNA, 22 nt, Human
gcaggcugccaccuucugaguu

SEQ ID NO: 609581 - RNA, 22 nt, Human
agggccagaaucccucagucua

SEQ ID NO: 609582 - RNA, 22 nt, Human
auggaucacagugccgugggug

SEQ ID NO: 609583 - RNA, 22 nt, Human
ucaggcugaggucaucugcauc

SEQ ID NO: 609584 - RNA, 22 nt, Human
uagcaauaugcuaccuuaaaug

SEQ ID NO: 609585 - RNA, 22 nt, Human
ugcuggagacucacucaggugc

SEQ ID NO: 609586 - RNA, 22 nt, Human
aggggcuggcuuaucugagagu

SEQ ID NO: 609587 - RNA, 22 nt, Human
caugagagacauucugugugaa

SEQ ID NO: 609588 - RNA, 19 nt, Human
cuucauucuucagcuuuug

SEQ ID NO: 609589 - RNA, 22 nt, Human
uaccaaaaccaagccauuaucu

SEQ ID NO: 609590 - RNA, 22 nt, Human
cuucucuuggguguggugucuu

SEQ ID NO: 609591 - RNA, 22 nt, Human
guagcugauccugaggacaggg

SEQ ID NO: 609592 - RNA, 23 nt, Human
ucacugcuacucagccugagauu

SEQ ID NO: 609593 - RNA, 22 nt, Human
ugagcuggcuugucaaccaggg

SEQ ID NO: 609594 - RNA, 22 nt, Human
ugcaggugccaucgcugcucau

SEQ ID NO: 609595 - RNA, 22 nt, Human
ugaagacaaagucaggcccaga

SEQ ID NO: 609596 - RNA, 22 nt, Human
agaguucugaaauuaucuuuac

SEQ ID NO: 609597 - RNA, 22 nt, Human
gcagcuguggguuccaagucua

SEQ ID NO: 609598 - RNA, 22 nt, Human
uagaugauuuucagucaaagca

SEQ ID NO: 609599 - RNA, 22 nt, Human
aaggcugaaagaccuugaaccu

SEQ ID NO: 609600 - RNA, 22 nt, Human
cugagccuguguuucucuggca

SEQ ID NO: 609601 - RNA, 22 nt, Human
ugcagcucaggauucucagggc

SEQ ID NO: 609602 - RNA, 22 nt, Human
uagcuaauggugaagauucaga

SEQ ID NO: 609603 - RNA, 18 nt, Human
ccugaggugggaggaagg

SEQ ID NO: 609604 - RNA, 22 nt, Human
caggcuggagugcaauggcaca

SEQ ID NO: 609605 - RNA, 22 nt, Human
uuccugaaaauacagggagaga

SEQ ID NO: 609606 - RNA, 22 nt, Human
ggcugcagcagagggacucacg

SEQ ID NO: 609607 - RNA, 23 nt, Human
gugcuugaaagaugcagaauuaa

SEQ ID NO: 609608 - RNA, 22 nt, Human
guacauaauuuucagccaguuu

SEQ ID NO: 609609 - RNA, 22 nt, Human
uucugccuuacgauauuuucaa

SEQ ID NO: 609610 - RNA, 22 nt, Human
ucagaauaugcuaaugacauuu

SEQ ID NO: 609611 - RNA, 22 nt, Human
gccagccugugggggcucugug

SEQ ID NO: 609612 - RNA, 22 nt, Human
ucugcagcuugcacaggcaggc

SEQ ID NO: 609613 - RNA, 22 nt, Human
uaagacacauugagaaacacaa

SEQ ID NO: 609614 - RNA, 22 nt, Human
uuggcagaaauguggcugggag

SEQ ID NO: 609615 - RNA, 22 nt, Human
uagagcuggaauuugcagcaag

SEQ ID NO: 609616 - RNA, 22 nt, Human
cagggcuggauccuccagacuc

SEQ ID NO: 609617 - RNA, 22 nt, Human
gcccacugagugacucccucag

SEQ ID NO: 609618 - RNA, 22 nt, Human
agcccugagccagccuggucag

SEQ ID NO: 609619 - RNA, 22 nt, Human
uugaaucuauguauucagugua

SEQ ID NO: 609620 - RNA, 22 nt, Human
uugugcaauccccucauuuuau

SEQ ID NO: 609621 - RNA, 22 nt, Human
ccuuguguuuacaccugucuuu

SEQ ID NO: 609622 - RNA, 22 nt, Human
aagaacuguaucaagauguagu

SEQ ID NO: 609623 - RNA, 22 nt, Human
gaacaaggauucccaaagaaga

SEQ ID NO: 609624 - RNA, 23 nt, Human
gaggugugaauucugggugcugc

SEQ ID NO: 609625 - RNA, 22 nt, Human
cagaacauuccaugugcccugc

SEQ ID NO: 609626 - RNA, 22 nt, Human
gugcuuuuaacuuuugaaagga

SEQ ID NO: 609627 - RNA, 22 nt, Human
ucuguguguugucaggaggauu

SEQ ID NO: 609628 - RNA, 22 nt, Human
gauggaggagauggcagggugc

SEQ ID NO: 609629 - RNA, 22 nt, Human
cagaucuguuugccagaucagc

SEQ ID NO: 609630 - RNA, 22 nt, Human
aacagcagggggaccugcuggu

SEQ ID NO: 609631 - RNA, 22 nt, Human
ggcaugcuucugagaugucucc

SEQ ID NO: 609632 - RNA, 22 nt, Human
ucucuggggauggaccugggag

SEQ ID NO: 609633 - RNA, 22 nt, Human
ugacaaagguguugccagaggg

SEQ ID NO: 609634 - RNA, 22 nt, Human
aguaacaugaguuuuucuaaug

SEQ ID NO: 609635 - RNA, 19 nt, Human
cagcaagaaugaaggcaua

SEQ ID NO: 609636 - RNA, 22 nt, Human
gaucagaauucuuguguguuuc

SEQ ID NO: 609637 - RNA, 22 nt, Human
caugcauuuggaguuuucaagu

SEQ ID NO: 609638 - RNA, 22 nt, Human
gauucuuuggccuuuauugaca

SEQ ID NO: 609639 - RNA, 22 nt, Human
auguugcacaaaguccauccau

SEQ ID NO: 609640 - RNA, 22 nt, Human
gcuggccugggcagccugucgg

SEQ ID NO: 609641 - RNA, 22 nt, Human
agaauuuaggcuugucugcugu

SEQ ID NO: 609642 - RNA, 18 nt, Human
agucuucugauccauuuu

SEQ ID NO: 609643 - RNA, 22 nt, Human
uggcacagacagcacagcaaug

SEQ ID NO: 609644 - RNA, 21 nt, Human
ccugugccagucuauguguuc

SEQ ID NO: 609645 - RNA, 22 nt, Human
uaacagcuggcguuauaggaau

SEQ ID NO: 609646 - RNA, 22 nt, Human
auuccauuacagaucuuuuccu

SEQ ID NO: 609647 - RNA, 23 nt, Human
ucucaggguggcugggcccaucc

SEQ ID NO: 609648 - RNA, 22 nt, Human
gagguaucuuagagaguguaga

SEQ ID NO: 609649 - RNA, 22 nt, Human
ggugaggggagagugaaagaaa

SEQ ID NO: 609650 - RNA, 22 nt, Human
guccagagaggcaggaggcuac

SEQ ID NO: 609651 - RNA, 22 nt, Human
gggcaggugcccagggccagag

SEQ ID NO: 609652 - RNA, 22 nt, Human
aaauuugucaacuucauauguu

SEQ ID NO: 609653 - RNA, 22 nt, Human
auguguucacgugcacaugugc

SEQ ID NO: 609654 - RNA, 22 nt, Human
aggcaagcauugggaacagggc

SEQ ID NO: 609655 - RNA, 22 nt, Human
ugucaacagauacuagagagcu

SEQ ID NO: 609656 - RNA, 22 nt, Human
ugccagcuccgaggagcugcag

SEQ ID NO: 609657 - RNA, 19 nt, Human
augcagagaauggcaguag

SEQ ID NO: 609658 - RNA, 20 nt, Human
ccagagcagccacugaaguu

SEQ ID NO: 609659 - RNA, 17 nt, Human
agaugcuggccacaugu

SEQ ID NO: 609660 - RNA, 22 nt, Human
caguuacauuaauaaugcacau

SEQ ID NO: 609661 - RNA, 23 nt, Human
agcuuccuagugaccuggagucu

SEQ ID NO: 609662 - RNA, 22 nt, Human
aagccaaguuggaagacugaau

SEQ ID NO: 609663 - RNA, 21 nt, Human
cuggacugaggagacagucgc

SEQ ID NO: 609664 - RNA, 22 nt, Human
ggcugggucccagcugggagga

SEQ ID NO: 609665 - RNA, 22 nt, Human
acacaggcaaugugagugggag

SEQ ID NO: 609666 - RNA, 22 nt, Human
gcauuuuucucuccuauaggag

SEQ ID NO: 609667 - RNA, 22 nt, Human
cugacaaacuuaauuuucugaa

SEQ ID NO: 609668 - RNA, 22 nt, Human
aagaugauaggacuugcuuaag

SEQ ID NO: 609669 - RNA, 22 nt, Human
caucauuuguuugcaugcagga

SEQ ID NO: 609670 - RNA, 22 nt, Human
aagaacaugaguuaugaugauu

SEQ ID NO: 609671 - RNA, 22 nt, Human
ccagagcuccagggcuacagaa

SEQ ID NO: 609672 - RNA, 22 nt, Human
cccacucccuacgacacgcucc

SEQ ID NO: 609673 - RNA, 22 nt, Human
agcagcccuagggauugcuguu

SEQ ID NO: 609674 - RNA, 22 nt, Human
acagugagcccacuccaggaga

SEQ ID NO: 609675 - RNA, 22 nt, Human
ugagcagaggaggcugccaacu

SEQ ID NO: 609676 - RNA, 22 nt, Human
aaaggccacacugcucuuucuc

SEQ ID NO: 609677 - RNA, 17 nt, Human
acacagggagagggagc

SEQ ID NO: 609678 - RNA, 22 nt, Human
uucuuguacuggagauacauga

SEQ ID NO: 609679 - RNA, 22 nt, Human
ugaggcucacgaacagaagacu

SEQ ID NO: 609680 - RNA, 22 nt, Human
aguuugcugaugaagaaaauuu

SEQ ID NO: 609681 - RNA, 22 nt, Human
cacaggcacgccucuggccagg

SEQ ID NO: 609682 - RNA, 22 nt, Human
ugcaauuuuaauacauuagagg

SEQ ID NO: 609683 - RNA, 22 nt, Human
uucuccugcgcaggcccaggga

SEQ ID NO: 609684 - RNA, 23 nt, Human
uggcucugagagguucagaugcu

SEQ ID NO: 609685 - RNA, 22 nt, Human
caaauagacucuagaauuuauu

SEQ ID NO: 609686 - RNA, 22 nt, Human
agcagcaguugcugacguucua

SEQ ID NO: 609687 - RNA, 22 nt, Human
uggagaguggauaugggagcaa

SEQ ID NO: 609688 - RNA, 22 nt, Human
ccaggcuucaggagugguuucc

SEQ ID NO: 609689 - RNA, 22 nt, Human
uaauuuaugaugcaaagaaaag

SEQ ID NO: 609690 - RNA, 22 nt, Human
cugccugcuaccugaaaugcca

SEQ ID NO: 609691 - RNA, 22 nt, Human
aucaaaaugcuccagugauggu

SEQ ID NO: 609692 - RNA, 20 nt, Human
ggcagcucuagucgaggccc

SEQ ID NO: 609693 - RNA, 22 nt, Human
aagaguggagcuggaaaguggg

SEQ ID NO: 609694 - RNA, 22 nt, Human
aagcugggacuuagcgcagaua

SEQ ID NO: 609695 - RNA, 22 nt, Human
auacagcugccuucuaacuaug

SEQ ID NO: 609696 - RNA, 22 nt, Human
uauaaauuauuaggcugcuaaa

SEQ ID NO: 609697 - RNA, 22 nt, Human
acuuggaaaauucaaaauggca

SEQ ID NO: 609698 - RNA, 22 nt, Human
cagcacugcuucgcagccaggg

SEQ ID NO: 609699 - RNA, 22 nt, Human
caugggggcugaggcugcugua

SEQ ID NO: 609700 - RNA, 21 nt, Human
ucuuccugcuccacacucccc

SEQ ID NO: 609701 - RNA, 22 nt, Human
uacuauacucuccauuuuauag

SEQ ID NO: 609702 - RNA, 22 nt, Human
uguggcagggauacugaggcag

SEQ ID NO: 609703 - RNA, 22 nt, Human
auuuggaagaaaucugucacag

SEQ ID NO: 609704 - RNA, 22 nt, Human
aggucacacaacugucagaggc

SEQ ID NO: 609705 - RNA, 19 nt, Human
agccagugagccucugggu

SEQ ID NO: 609706 - RNA, 22 nt, Human
cccaagggugcccagcagagga

SEQ ID NO: 609707 - RNA, 22 nt, Human
ugaucaaaacauuacuccacca

SEQ ID NO: 609708 - RNA, 23 nt, Human
uugcaaaaugagucuugagugaa

SEQ ID NO: 609709 - RNA, 22 nt, Human
acccaggacaaaauaaccaggu

SEQ ID NO: 609710 - RNA, 22 nt, Human
acauuucuuuucaucucuauau

SEQ ID NO: 609711 - RNA, 22 nt, Human
ccucuucugagugagacucccu

SEQ ID NO: 609712 - RNA, 19 nt, Human
accaggaacuucccuaggc

SEQ ID NO: 609713 - RNA, 23 nt, Human
cagugcugguucugccugugggg

SEQ ID NO: 609714 - RNA, 22 nt, Human
guucaaggaagggaggaaagcc

SEQ ID NO: 609715 - RNA, 23 nt, Human
acaguuauagcugugaauaacau

SEQ ID NO: 609716 - RNA, 22 nt, Human
auguuuaaauuuauagacagug

SEQ ID NO: 609717 - RNA, 22 nt, Human
aagaugcagcaaacuacuuuuu

SEQ ID NO: 609718 - RNA, 22 nt, Human
aggcacagccucccuucacaug

SEQ ID NO: 609719 - RNA, 22 nt, Human
uauaaagaauccagaagagaca

SEQ ID NO: 609720 - RNA, 23 nt, Human
ccuggaguacuaaggggauggaa

SEQ ID NO: 609721 - RNA, 22 nt, Human
agaggaggcagcuuaacucagu

SEQ ID NO: 609722 - RNA, 22 nt, Human
guugaacuauguuuuaucugac

SEQ ID NO: 609723 - RNA, 22 nt, Human
cugugcuggagaugggccagag

SEQ ID NO: 609724 - RNA, 22 nt, Human
uaaaacuagugguugggacuaa

SEQ ID NO: 609725 - RNA, 22 nt, Human
ugaggcauuaaagggaggucaa

SEQ ID NO: 609726 - RNA, 22 nt, Human
guggugcaggccagcaggggcg

SEQ ID NO: 609727 - RNA, 22 nt, Human
gaccucagguuuguaauggaca

SEQ ID NO: 609728 - RNA, 22 nt, Human
uuccugagacccucacagugau

SEQ ID NO: 609729 - RNA, 22 nt, Human
cacugcaaugucuaccuccugg

SEQ ID NO: 609730 - RNA, 22 nt, Human
uguaagauauucagcuuauuga

SEQ ID NO: 609731 - RNA, 22 nt, Human
guggcucagcggagcucugcac

SEQ ID NO: 609732 - RNA, 22 nt, Human
cuggagucagcaaggacgaggc

SEQ ID NO: 609733 - RNA, 17 nt, Human
ucucuuucccuuucugc

SEQ ID NO: 609734 - RNA, 19 nt, Human
ucaggcaguuauucacaaa

SEQ ID NO: 609735 - RNA, 22 nt, Human
uguuuaauaauucuaugauagu

SEQ ID NO: 609736 - RNA, 22 nt, Human
gugcauguuaaugguguacaaa

SEQ ID NO: 609737 - RNA, 22 nt, Human
gggcuuaaggccagugugcuuu

SEQ ID NO: 609738 - RNA, 22 nt, Human
uguacaaagaguauagcuuuga

SEQ ID NO: 609739 - RNA, 22 nt, Human
aaacuuuuuuagguucauaggc

SEQ ID NO: 609740 - RNA, 22 nt, Human
agcccagaggcugggcgugcau

SEQ ID NO: 609741 - RNA, 22 nt, Human
ucaguucuggcugcugcuguca

SEQ ID NO: 609742 - RNA, 22 nt, Human
ucaaguguaguggugucagguc

SEQ ID NO: 609743 - RNA, 22 nt, Human
guuccugagaaauaaagagaga

SEQ ID NO: 609744 - RNA, 22 nt, Human
cuuccugaggugcugagcacag

SEQ ID NO: 609745 - RNA, 22 nt, Human
ucugagcagggcaguguccaug

SEQ ID NO: 609746 - RNA, 22 nt, Human
auuuuccaaaauaauuguuacu

SEQ ID NO: 609747 - RNA, 22 nt, Human
cuccagucauguuuacugugca

SEQ ID NO: 609748 - RNA, 22 nt, Human
aggaagccugcaggugacugcu

SEQ ID NO: 609749 - RNA, 22 nt, Human
aauuuauucccgucucugggcu

SEQ ID NO: 609750 - RNA, 21 nt, Human
cuguuucuugugaagugacac

SEQ ID NO: 609751 - RNA, 22 nt, Human
gauucugaaauuaacagacugg

SEQ ID NO: 609752 - RNA, 22 nt, Human
ugagaacauacaaacagagaaa

SEQ ID NO: 609753 - RNA, 22 nt, Human
uugcuaaaggauuuuguauuua

SEQ ID NO: 609754 - RNA, 22 nt, Human
uucccucuccaggagcccugag

SEQ ID NO: 609755 - RNA, 22 nt, Human
uuucugaagucuucuaacagau

SEQ ID NO: 609756 - RNA, 22 nt, Human
agcuucuugaccaagccuguaa

SEQ ID NO: 609757 - RNA, 22 nt, Human
ucagaacaauugggaaccauua

SEQ ID NO: 609758 - RNA, 22 nt, Human
uuccaguuggagccugccuuua

SEQ ID NO: 609759 - RNA, 22 nt, Human
cggcugagacggccauagacac

SEQ ID NO: 609760 - RNA, 22 nt, Human
ugucaggagccaccagcacucc

SEQ ID NO: 609761 - RNA, 22 nt, Human
gccuugccaaggggcagcagag

SEQ ID NO: 609762 - RNA, 23 nt, Human
cugagguggagagugagguaagu

SEQ ID NO: 609763 - RNA, 22 nt, Human
agcaggagcccuuaucaccagg

SEQ ID NO: 609764 - RNA, 22 nt, Human
uccccagaggugaggcagcuuu

SEQ ID NO: 609765 - RNA, 22 nt, Human
gcagggccagguacaagaagca

SEQ ID NO: 609766 - RNA, 22 nt, Human
acuguguguuugucuagcacag

SEQ ID NO: 609767 - RNA, 22 nt, Human
ucacuaaugauuuugaaagaag

SEQ ID NO: 609768 - RNA, 22 nt, Human
aguauaauuuacauuugguauu

SEQ ID NO: 609769 - RNA, 22 nt, Human
ugccuguccugaggaugagggu

SEQ ID NO: 609770 - RNA, 19 nt, Human
cuggaaugauagagaccuc

SEQ ID NO: 609771 - RNA, 22 nt, Human
caccugggcuaaacuaugcagg

SEQ ID NO: 609772 - RNA, 22 nt, Human
uaagacauccuggauguucaaa

SEQ ID NO: 609773 - RNA, 22 nt, Human
cuaaacauguuggugcuuuaaa

SEQ ID NO: 609774 - RNA, 22 nt, Human
ccugugggagcccaggcagaua

SEQ ID NO: 609775 - RNA, 22 nt, Human
agauacauuaguaguuacuugu

SEQ ID NO: 609776 - RNA, 22 nt, Human
ggagacaguauggcuuguagcu

SEQ ID NO: 609777 - RNA, 22 nt, Human
uccugaaggccugaguuccacc

SEQ ID NO: 609778 - RNA, 22 nt, Human
aggagacauaacuaugaugaga

SEQ ID NO: 609779 - RNA, 22 nt, Human
aaagaauagccuuuguccaaau

SEQ ID NO: 609780 - RNA, 22 nt, Human
caaggagauaaaauguugagcu

SEQ ID NO: 609781 - RNA, 22 nt, Human
caggcugggcagccuccccggc

SEQ ID NO: 609782 - RNA, 22 nt, Human
cagggcaaagucuucuagaacc

SEQ ID NO: 609783 - RNA, 22 nt, Human
ugugaggccucugcaggagcag

SEQ ID NO: 609784 - RNA, 22 nt, Human
auuucagauucgagaggaagug

SEQ ID NO: 609785 - RNA, 22 nt, Human
guaggaagcucugaggcuaguu

SEQ ID NO: 609786 - RNA, 22 nt, Human
agaguuuggauuuuaggacauc

SEQ ID NO: 609787 - RNA, 22 nt, Human
cacaucuuccagaguagcuaaa

SEQ ID NO: 609788 - RNA, 22 nt, Human
acacaggggaaaguggagcuga

SEQ ID NO: 609789 - RNA, 22 nt, Human
gcaguguuaaacaacugcugcu

SEQ ID NO: 609790 - RNA, 22 nt, Human
cagacagaggcuguaugagggc

SEQ ID NO: 609791 - RNA, 22 nt, Human
aucccagauagugacccucagg

SEQ ID NO: 609792 - RNA, 22 nt, Human
ucuggcuccacaccucacugca

SEQ ID NO: 609793 - RNA, 20 nt, Human
cugggcucgguggcccuggc

SEQ ID NO: 609794 - RNA, 22 nt, Human
ucugccugugcuguguuuucau

SEQ ID NO: 609795 - RNA, 22 nt, Human
cuacaggucaguaagaccuaga

SEQ ID NO: 609796 - RNA, 22 nt, Human
agcaaguguaagaaugcagaau

SEQ ID NO: 609797 - RNA, 23 nt, Human
aggucuggacccuuggccccugc

SEQ ID NO: 609798 - RNA, 22 nt, Human
agggcagccugagugcuggccc

SEQ ID NO: 609799 - RNA, 22 nt, Human
cguccagggcgggcuccccuca

SEQ ID NO: 609800 - RNA, 22 nt, Human
cucagucugucuugucuguguu

SEQ ID NO: 609801 - RNA, 22 nt, Human
auguuaugugcaagauacauaa

SEQ ID NO: 609802 - RNA, 22 nt, Human
gcugggacggcucaguaagaag

SEQ ID NO: 609803 - RNA, 21 nt, Human
auacagaagguggcaaaguac

SEQ ID NO: 609804 - RNA, 22 nt, Human
ugaaagcagugauuucuccuuc

SEQ ID NO: 609805 - RNA, 22 nt, Human
ccaggguuggucucucugaggu

SEQ ID NO: 609806 - RNA, 22 nt, Human
uuccuucuuugugguagaaagu

SEQ ID NO: 609807 - RNA, 22 nt, Human
augggcugacaagacaugcaua

SEQ ID NO: 609808 - RNA, 22 nt, Human
gccaguuccuguggagucagag

SEQ ID NO: 609809 - RNA, 22 nt, Human
uuucuaacguagacagggaggu

SEQ ID NO: 609810 - RNA, 22 nt, Human
gucccuuggcucacaaacagcu

SEQ ID NO: 609811 - RNA, 22 nt, Human
acagaagcaaaagcaggaucuu

SEQ ID NO: 609812 - RNA, 18 nt, Human
cugaaggauccaggugua

SEQ ID NO: 609813 - RNA, 22 nt, Human
auuaaaauuccaagguaugcca

SEQ ID NO: 609814 - RNA, 22 nt, Human
aacaugcaaugucugaaaaucc

SEQ ID NO: 609815 - RNA, 22 nt, Human
agaaugaauuaaucaacuggaa

SEQ ID NO: 609816 - RNA, 22 nt, Human
acccacagccgcugugcguccc

SEQ ID NO: 609817 - RNA, 22 nt, Human
gcuuccauguugcugcugguca

SEQ ID NO: 609818 - RNA, 18 nt, Human
gcagccccucuuccuucc

SEQ ID NO: 609819 - RNA, 22 nt, Human
ugcuucugucucuuaugccuug

SEQ ID NO: 609820 - RNA, 22 nt, Human
auggacucacuaauuccuccac

SEQ ID NO: 609821 - RNA, 22 nt, Human
agcugcucaggagagccagguc

SEQ ID NO: 609822 - RNA, 22 nt, Human
agccaggcgcaguggcuuaugc

SEQ ID NO: 609823 - RNA, 22 nt, Human
caccuagggcaucccugcccca

SEQ ID NO: 609824 - RNA, 22 nt, Human
ucuguuaaccuggucuuggcuu

SEQ ID NO: 609825 - RNA, 18 nt, Human
cggaucaugcgcugaggc

SEQ ID NO: 609826 - RNA, 22 nt, Human
uggccucuuaggacauccucua

SEQ ID NO: 609827 - RNA, 22 nt, Human
augauguuauuuucagaaacau

SEQ ID NO: 609828 - RNA, 22 nt, Human
aggggugugcauccuggaggau

SEQ ID NO: 609829 - RNA, 22 nt, Human
ggcccacuugaaauggagcuca

SEQ ID NO: 609830 - RNA, 22 nt, Human
uagugauuaaaggcagaauguu

SEQ ID NO: 609831 - RNA, 22 nt, Human
aagagggcucgauuuggcaaaa

SEQ ID NO: 609832 - RNA, 22 nt, Human
uuuaaaugcagacguugauuca

SEQ ID NO: 609833 - RNA, 22 nt, Human
gcagaggauagcauaugaaccu

SEQ ID NO: 609834 - RNA, 22 nt, Human
guguagagugacaaggugggaa

SEQ ID NO: 609835 - RNA, 22 nt, Human
ugcucauugcugauuuacaugu

SEQ ID NO: 609836 - RNA, 23 nt, Human
acagccaggaugggagcagaagc

SEQ ID NO: 609837 - RNA, 22 nt, Human
auuuagcuuucucucacuggug

SEQ ID NO: 609838 - RNA, 22 nt, Human
aucuuucucugcacuauacaau

SEQ ID NO: 609839 - RNA, 22 nt, Human
aaagccauaagccuaauacuaa

SEQ ID NO: 609840 - RNA, 22 nt, Human
cccucagcuccacccucagcag

SEQ ID NO: 609841 - RNA, 22 nt, Human
aaaugucuuuaucucauguaac

SEQ ID NO: 609842 - RNA, 22 nt, Human
aacaucaggaucuuguuacagu

SEQ ID NO: 609843 - RNA, 22 nt, Human
aguguccaacucagcuugucaa

SEQ ID NO: 609844 - RNA, 22 nt, Human
aaaagacauaugugggcauucu

SEQ ID NO: 609845 - RNA, 22 nt, Human
uagaggcacccuggaggagacu

SEQ ID NO: 609846 - RNA, 22 nt, Human
ccugguguggcugucacagagg

SEQ ID NO: 609847 - RNA, 22 nt, Human
aggcagagcuaggaagaauugu

SEQ ID NO: 609848 - RNA, 22 nt, Human
uuaaaauuauggcccauuugga

SEQ ID NO: 609849 - RNA, 19 nt, Human
uuccuaguagacugugugu

SEQ ID NO: 609850 - RNA, 22 nt, Human
uggaggagaauuuauggucgaa

SEQ ID NO: 609851 - RNA, 22 nt, Human
uguuuuuccaugugcagaacaa

SEQ ID NO: 609852 - RNA, 22 nt, Human
uacagugucccuuuuucagaca

SEQ ID NO: 609853 - RNA, 22 nt, Human
cacacacaguuuuguauucugu

SEQ ID NO: 609854 - RNA, 22 nt, Human
auacuuggugguguuccauagg

SEQ ID NO: 609855 - RNA, 22 nt, Human
gggcgccgugggaaacagccgg

SEQ ID NO: 609856 - RNA, 22 nt, Human
caggaagagguaucaccgagca

SEQ ID NO: 609857 - RNA, 22 nt, Human
agugaacaaagguagugagcau

SEQ ID NO: 609858 - RNA, 22 nt, Human
ucagagaucuucaggaugggac

SEQ ID NO: 609859 - RNA, 22 nt, Human
aggcugagugcuccccuagaug

SEQ ID NO: 609860 - RNA, 22 nt, Human
guuauugacucucuuguggcuu

SEQ ID NO: 609861 - RNA, 22 nt, Human
uugguauauugugcuacuuuau

SEQ ID NO: 609862 - RNA, 22 nt, Human
uuauggaauggagaaagucugc

SEQ ID NO: 609863 - RNA, 22 nt, Human
uauaaaugcacuuuugaaauau

SEQ ID NO: 609864 - RNA, 22 nt, Human
uggcugagggcacuaugaagcc

SEQ ID NO: 609865 - RNA, 22 nt, Human
auaagcuuugcuggagagaccu

SEQ ID NO: 609866 - RNA, 22 nt, Human
gugcugacaggagccuggcggu

SEQ ID NO: 609867 - RNA, 22 nt, Human
gaggcagcagggcugguuccuu

SEQ ID NO: 609868 - RNA, 23 nt, Human
cugggcuguccugaggucaccuc

SEQ ID NO: 609869 - RNA, 22 nt, Human
uugaggucugagacugugcagg

SEQ ID NO: 609870 - RNA, 22 nt, Human
ugaggcugccuugggaagaggg

SEQ ID NO: 609871 - RNA, 22 nt, Human
uaaucacaauucagaugucuua

SEQ ID NO: 609872 - RNA, 23 nt, Human
ccucaugaaggucugcuuccugg

SEQ ID NO: 609873 - RNA, 22 nt, Human
acguggagagaauagggcacca

SEQ ID NO: 609874 - RNA, 22 nt, Human
aggcagcagugauaagauagga

SEQ ID NO: 609875 - RNA, 22 nt, Human
cugaggccagagugggccucuu

SEQ ID NO: 609876 - RNA, 22 nt, Human
aaauaucauuuauaacuuuuaa

SEQ ID NO: 609877 - RNA, 22 nt, Human
aaauuucaguuaccuuuacguu

SEQ ID NO: 609878 - RNA, 22 nt, Human
ugcaugugcccacucuggcuua

SEQ ID NO: 609879 - RNA, 22 nt, Human
ugggagaaucuugcucugcuac

SEQ ID NO: 609880 - RNA, 22 nt, Human
agcuccugcccaggaaggcucu

SEQ ID NO: 609881 - RNA, 23 nt, Human
cggggccagggucaggaccgguc

SEQ ID NO: 609882 - RNA, 22 nt, Human
auugagaauauugugacagugu

SEQ ID NO: 609883 - RNA, 22 nt, Human
aaaguuuggauuagcaguuaga

SEQ ID NO: 609884 - RNA, 22 nt, Human
aggugggcggaucacaagguca

SEQ ID NO: 609885 - RNA, 22 nt, Human
ucugcaggucacgcuccagccu

SEQ ID NO: 609886 - RNA, 22 nt, Human
agaaauagcagagucaggcggg

SEQ ID NO: 609887 - RNA, 22 nt, Human
cggcagagcccugagucagccu

SEQ ID NO: 609888 - RNA, 22 nt, Human
caguuauaagacuaagcuauuc

SEQ ID NO: 609889 - RNA, 22 nt, Human
cugggacuuuacccuguggccc

SEQ ID NO: 609890 - RNA, 22 nt, Human
ucaggcuggaaugcaguggggc

SEQ ID NO: 609891 - RNA, 22 nt, Human
aagcucaggcuggaccuggcuu

SEQ ID NO: 609892 - RNA, 22 nt, Human
gggccagagcuuggcagcuggg

SEQ ID NO: 609893 - RNA, 22 nt, Human
caaaucauggcucuagcuuaca

SEQ ID NO: 609894 - RNA, 22 nt, Human
caugcagugacucagacacagg

SEQ ID NO: 609895 - RNA, 22 nt, Human
gcagcccaggucucucucacuc

SEQ ID NO: 609896 - RNA, 22 nt, Human
uuggcauuggagaugcaagaac

SEQ ID NO: 609897 - RNA, 18 nt, Human
cuggucagggcaaugggc

SEQ ID NO: 609898 - RNA, 22 nt, Human
uuaacauuguccuuagcagauu

SEQ ID NO: 609899 - RNA, 22 nt, Human
uugaaaaugguaagcaugauau

SEQ ID NO: 609900 - RNA, 22 nt, Human
cuuagccagcuaacuuaagcac

SEQ ID NO: 609901 - RNA, 20 nt, Human
ucccaggcugggcuccagcu

SEQ ID NO: 609902 - RNA, 22 nt, Human
auguacauucuucucaccgaag

SEQ ID NO: 609903 - RNA, 22 nt, Human
cugggaagcuucgagcaggaaa

SEQ ID NO: 609904 - RNA, 22 nt, Human
aagcagcaacaaacuggauaaa

SEQ ID NO: 609905 - RNA, 22 nt, Human
uggggcagggaugggaaacuau

SEQ ID NO: 609906 - RNA, 22 nt, Human
ucagcacugucuauuagugaga

SEQ ID NO: 609907 - RNA, 23 nt, Human
auguuaaacauaacugaagagcc

SEQ ID NO: 609908 - RNA, 22 nt, Human
auugccaccuguugcuauggag

SEQ ID NO: 609909 - RNA, 22 nt, Human
aauauuuuugaggcccuguuau

SEQ ID NO: 609910 - RNA, 22 nt, Human
agccuggauucgugcauccaca

SEQ ID NO: 609911 - RNA, 22 nt, Human
cgugggaggaaaaaugggcuuc

SEQ ID NO: 609912 - RNA, 21 nt, Human
uuuguucaggggcaaaguuaa

SEQ ID NO: 609913 - RNA, 22 nt, Human
agcagcagaagggagacccagg

SEQ ID NO: 609914 - RNA, 22 nt, Human
aaaguucuggcauuuucugucu

SEQ ID NO: 609915 - RNA, 22 nt, Human
gaauucugguuuugaaaugaau

SEQ ID NO: 609916 - RNA, 22 nt, Human
guggccagcaagugcugccucu

SEQ ID NO: 609917 - RNA, 22 nt, Human
caucucauccugcccuaaaaca

SEQ ID NO: 609918 - RNA, 22 nt, Human
cuagccagaugauucccaaaua

SEQ ID NO: 609919 - RNA, 20 nt, Human
ugcuuccuggccacugcggg

SEQ ID NO: 609920 - RNA, 23 nt, Human
uugcuuagagaccuccucaucag

SEQ ID NO: 609921 - RNA, 22 nt, Human
ugagguagagauugugacugua

SEQ ID NO: 609922 - RNA, 22 nt, Human
gagagguacggaaagagcgugg

SEQ ID NO: 609923 - RNA, 22 nt, Human
cgagcagaauggagggugccga

SEQ ID NO: 609924 - RNA, 22 nt, Human
aggcucagccugggccuagagc

SEQ ID NO: 609925 - RNA, 22 nt, Human
cuaguuguuuaauauugauuga

SEQ ID NO: 609926 - RNA, 22 nt, Human
ugggcaguugcuccucagaccc

SEQ ID NO: 609927 - RNA, 22 nt, Human
uacagauuuugugaagaagugu

SEQ ID NO: 609928 - RNA, 22 nt, Human
uuucuaauucuaacuggcagag

SEQ ID NO: 609929 - RNA, 22 nt, Human
gauaaugugccgauaauuucua

SEQ ID NO: 609930 - RNA, 22 nt, Human
cuguggcaggugucuggggcag

SEQ ID NO: 609931 - RNA, 22 nt, Human
uuucucauggacccuucaugau

SEQ ID NO: 609932 - RNA, 21 nt, Human
guuuucuuugauagagggaag

SEQ ID NO: 609933 - RNA, 22 nt, Human
acuauacauugaauguuaaggu

SEQ ID NO: 609934 - RNA, 22 nt, Human
uuugaacaagagcuucacauua

SEQ ID NO: 609935 - RNA, 22 nt, Human
caguccugcuagugugaaaagc

SEQ ID NO: 609936 - RNA, 22 nt, Human
uccuagaaggaucauucuagug

SEQ ID NO: 609937 - RNA, 22 nt, Human
cagcucaggcacuggcgcggga

SEQ ID NO: 609938 - RNA, 22 nt, Human
uagcuugacuauucuaugaugu

SEQ ID NO: 609939 - RNA, 22 nt, Human
aaauguacaacauccauauaua

SEQ ID NO: 609940 - RNA, 22 nt, Human
agggauggaagcucgucugcaa

SEQ ID NO: 609941 - RNA, 22 nt, Human
aaagcuuaagguagguacagag

SEQ ID NO: 609942 - RNA, 22 nt, Human
cagcccuggccccagguggucu

SEQ ID NO: 609943 - RNA, 22 nt, Human
agcaaggcagcuuucacugcuu

SEQ ID NO: 609944 - RNA, 22 nt, Human
aguucucaagacaauuaccugu

SEQ ID NO: 609945 - RNA, 22 nt, Human
gagagugcugaacggcaagggu

SEQ ID NO: 609946 - RNA, 22 nt, Human
cagucuccaaaucagucugaau

SEQ ID NO: 609947 - RNA, 22 nt, Human
ccugggagugugccaucucugu

SEQ ID NO: 609948 - RNA, 22 nt, Human
aaaacauugaauugcacacuau

SEQ ID NO: 609949 - RNA, 22 nt, Human
aagcacaucuccugugcagaac

SEQ ID NO: 609950 - RNA, 22 nt, Human
cugcccugucugcagccuggcu

SEQ ID NO: 609951 - RNA, 17 nt, Human
ccugucuuguuucugcc

SEQ ID NO: 609952 - RNA, 22 nt, Human
gcaguguuauguuuucuauaau

SEQ ID NO: 609953 - RNA, 22 nt, Human
cugagccaugagccugcgccca

SEQ ID NO: 609954 - RNA, 22 nt, Human
ucaaauaguugacauuaacuug

SEQ ID NO: 609955 - RNA, 22 nt, Human
aaagccuuggucaucugguucc

SEQ ID NO: 609956 - RNA, 22 nt, Human
aaacacugugggacaucuuacu

SEQ ID NO: 609957 - RNA, 22 nt, Human
cguguguguaccugcgcauuua

SEQ ID NO: 609958 - RNA, 22 nt, Human
uuucugcaucucuacaguuguu

SEQ ID NO: 609959 - RNA, 22 nt, Human
ucuccugcucagaacagccuca

SEQ ID NO: 609960 - RNA, 20 nt, Human
ggcugugcccuuccguggcc

SEQ ID NO: 609961 - RNA, 22 nt, Human
cagguaagaccguuuaggcagu

SEQ ID NO: 609962 - RNA, 22 nt, Human
cuguaugauauccaaauugaua

SEQ ID NO: 609963 - RNA, 22 nt, Human
aggcugaugcuggcugaggcug

SEQ ID NO: 609964 - RNA, 22 nt, Human
auguauaaguacacagucggaa

SEQ ID NO: 609965 - RNA, 22 nt, Human
gacccugacucuaaugcuuggc

SEQ ID NO: 609966 - RNA, 22 nt, Human
uguuuacauauuuggucucaga

SEQ ID NO: 609967 - RNA, 22 nt, Human
gcuauguguguuuugcugcagc

SEQ ID NO: 609968 - RNA, 22 nt, Human
aacccuggcccuggaauaggca

SEQ ID NO: 609969 - RNA, 22 nt, Human
guuauuuucauuggcucagacu

SEQ ID NO: 609970 - RNA, 23 nt, Human
cagcaagugaauuccaagagaga

SEQ ID NO: 609971 - RNA, 22 nt, Human
uuucagaaagcugaacauauga

SEQ ID NO: 609972 - RNA, 22 nt, Human
ccuugagccagggagcuggcag

SEQ ID NO: 609973 - RNA, 22 nt, Human
acagguggaaacaugguguugg

SEQ ID NO: 609974 - RNA, 22 nt, Human
gagcugggccucagaacacagu

SEQ ID NO: 609975 - RNA, 22 nt, Human
agaggccgggugccugcucaga

SEQ ID NO: 609976 - RNA, 22 nt, Human
uuauuuauaucucugcaguuua

SEQ ID NO: 609977 - RNA, 22 nt, Human
aaugcaauaccuuuuuaugcug

SEQ ID NO: 609978 - RNA, 22 nt, Human
agccagcugccuuucacaucug

SEQ ID NO: 609979 - RNA, 22 nt, Human
ucagaagguggagguugcagug

SEQ ID NO: 609980 - RNA, 23 nt, Human
acauacauaagcaccacauuuug

SEQ ID NO: 609981 - RNA, 22 nt, Human
aggugaggauagguggccaagg

SEQ ID NO: 609982 - RNA, 22 nt, Human
ugaggccccgaagcugagguuu

SEQ ID NO: 609983 - RNA, 22 nt, Human
uucuguaauucuguuaguuuca

SEQ ID NO: 609984 - RNA, 22 nt, Human
ucuaaagauguuuauugacaua

SEQ ID NO: 609985 - RNA, 22 nt, Human
ugagccugggagauggaggcug

SEQ ID NO: 609986 - RNA, 22 nt, Human
gugcaaaagucauugugguuuu

SEQ ID NO: 609987 - RNA, 22 nt, Human
aagccagccagugccagucuua

SEQ ID NO: 609988 - RNA, 22 nt, Human
aaacaugaugucauauaugcca

SEQ ID NO: 609989 - RNA, 22 nt, Human
aguggcagggcuggcugcugca

SEQ ID NO: 609990 - RNA, 22 nt, Human
cccagggcugcagauggaggcu

SEQ ID NO: 609991 - RNA, 22 nt, Human
ugcuuuguguuugaauagauaa

SEQ ID NO: 609992 - RNA, 22 nt, Human
uuccuuugggaaaucacuaagg

SEQ ID NO: 609993 - RNA, 22 nt, Human
ggugggagggcugcguuccucu

SEQ ID NO: 609994 - RNA, 21 nt, Human
cagagcuguccaaacccugac

SEQ ID NO: 609995 - RNA, 22 nt, Human
cuagagaaaaagcuuagguacg

SEQ ID NO: 609996 - RNA, 22 nt, Human
ccugugugucugucacugcaca

SEQ ID NO: 609997 - RNA, 22 nt, Human
ugcagagcuucauugcauaggc

SEQ ID NO: 609998 - RNA, 22 nt, Human
agaagccagucgcucucccgca

SEQ ID NO: 609999 - RNA, 22 nt, Human
uuccuucuggaagcuucagggg

SEQ ID NO: 610000 - RNA, 22 nt, Human
auuucucucauuguuagcuagg

SEQ ID NO: 610001 - RNA, 17 nt, Human
gcugccaccuuuggagc

SEQ ID NO: 610002 - RNA, 22 nt, Human
ggccuaggauucugcauuucua

SEQ ID NO: 610003 - RNA, 22 nt, Human
auacacauauguguguauaugu

SEQ ID NO: 610004 - RNA, 22 nt, Human
uaauauauaccuuuguuaggaa

SEQ ID NO: 610005 - RNA, 22 nt, Human
gaaggcuaaaggggcagagguu

SEQ ID NO: 610006 - RNA, 20 nt, Human
uccagcucaguuuuuuuguc

SEQ ID NO: 610007 - RNA, 22 nt, Human
cuggaaugagcagggcuuaugg

SEQ ID NO: 610008 - RNA, 22 nt, Human
ugguccugaggcuuguuuccac

SEQ ID NO: 610009 - RNA, 22 nt, Human
guucagauggagaaggaaaacu

SEQ ID NO: 610010 - RNA, 22 nt, Human
agauuucugucaccuucuaugc

SEQ ID NO: 610011 - RNA, 22 nt, Human
ugaggccacuuccccacagccc

SEQ ID NO: 610012 - RNA, 22 nt, Human
cucuagcugaggucacugcuau

SEQ ID NO: 610013 - RNA, 22 nt, Human
agucagugaaugguguaugcua

SEQ ID NO: 610014 - RNA, 22 nt, Human
cacucugagaaacacuaaacca

SEQ ID NO: 610015 - RNA, 22 nt, Human
caguggguaguggggauuagca

SEQ ID NO: 610016 - RNA, 22 nt, Human
cagagcaggcccacugcccucc

SEQ ID NO: 610017 - RNA, 22 nt, Human
ccagcugguaagugauggagcc

SEQ ID NO: 610018 - RNA, 22 nt, Human
uuagaacaaagccaccagguga

SEQ ID NO: 610019 - RNA, 22 nt, Human
guuaucuucuauuucucauacu

SEQ ID NO: 610020 - RNA, 22 nt, Human
acccaggcuggaaugcaguggc

SEQ ID NO: 610021 - RNA, 22 nt, Human
acccaggcuggagugcagugac

SEQ ID NO: 610022 - RNA, 20 nt, Human
caggccucugggggcccugg

SEQ ID NO: 610023 - RNA, 22 nt, Human
cugaauaauguucucuuguaug

SEQ ID NO: 610024 - RNA, 22 nt, Human
cagccagugguugaagaugcag

SEQ ID NO: 610025 - RNA, 18 nt, Human
ccugcagcccaggaggcc

SEQ ID NO: 610026 - RNA, 22 nt, Human
aaccagcuuugauacgcauuau

SEQ ID NO: 610027 - RNA, 22 nt, Human
cagagucagagcuccauggagu

SEQ ID NO: 610028 - RNA, 22 nt, Human
cagggugcagagcuaggguagu

SEQ ID NO: 610029 - RNA, 22 nt, Human
ggcagugggaaauaagugagaa

SEQ ID NO: 610030 - RNA, 22 nt, Human
gagcuuuguaaaaaacuugcac

SEQ ID NO: 610031 - RNA, 22 nt, Human
uaacaaaguauuguuuguguau

SEQ ID NO: 610032 - RNA, 22 nt, Human
gggcuuggcuggggccaccaga

SEQ ID NO: 610033 - RNA, 22 nt, Human
cagcaugcccagacugagcuaa

SEQ ID NO: 610034 - RNA, 22 nt, Human
ggcaugugccugaggucacaca

SEQ ID NO: 610035 - RNA, 22 nt, Human
aaaugcacugaauauuccaaau

SEQ ID NO: 610036 - RNA, 22 nt, Human
gaaggccacggaauggagcugg

SEQ ID NO: 610037 - RNA, 22 nt, Human
ucucccaaggcacagaaagagu

SEQ ID NO: 610038 - RNA, 22 nt, Human
uagggagaugcaagggacggag

SEQ ID NO: 610039 - RNA, 22 nt, Human
ugggggugaaagucuggacagu

SEQ ID NO: 610040 - RNA, 20 nt, Human
aggcucagcugagcucuugg

SEQ ID NO: 610041 - RNA, 22 nt, Human
agcauuaagagagacugaacug

SEQ ID NO: 610042 - RNA, 22 nt, Human
ugugaaaagggcuuuguacaaa

SEQ ID NO: 610043 - RNA, 22 nt, Human
agcuucaggaacaggcagccug

SEQ ID NO: 610044 - RNA, 22 nt, Human
ucucccaagugaccaggaaaga

SEQ ID NO: 610045 - RNA, 22 nt, Human
ccagcugacgaugccuggucuc

SEQ ID NO: 610046 - RNA, 22 nt, Human
aaaguuuguuauaugauaagga

SEQ ID NO: 610047 - RNA, 22 nt, Human
cagcacuaggauauacauuucc

SEQ ID NO: 610048 - RNA, 22 nt, Human
cagcaggguuaagugacucacc

SEQ ID NO: 610049 - RNA, 22 nt, Human
aaucuucaacagaaugguagga

SEQ ID NO: 610050 - RNA, 22 nt, Human
agcuggcugccuucuccuuagg

SEQ ID NO: 610051 - RNA, 22 nt, Human
cacagucccgugcuuaccaugu

SEQ ID NO: 610052 - RNA, 20 nt, Human
cauauggaaagauauuguuc

SEQ ID NO: 610053 - RNA, 22 nt, Human
gaggggcucuugggcaugaagg

SEQ ID NO: 610054 - RNA, 22 nt, Human
auggauggaaaaguugaggaga

SEQ ID NO: 610055 - RNA, 22 nt, Human
agcagugggggaguguuaguuu

SEQ ID NO: 610056 - RNA, 22 nt, Human
auauucuugugauuauaaagua

SEQ ID NO: 610057 - RNA, 22 nt, Human
cuggugugauugagcccaggug

SEQ ID NO: 610058 - RNA, 22 nt, Human
gagcucagccugaggccuggcu

SEQ ID NO: 610059 - RNA, 22 nt, Human
cucugaguugaggcaggagagu

SEQ ID NO: 610060 - RNA, 22 nt, Human
acugggcuucacuuggcacauc

SEQ ID NO: 610061 - RNA, 20 nt, Human
cagugccuaucauuaauucc

SEQ ID NO: 610062 - RNA, 22 nt, Human
uucuccucuguuggccuucccu

SEQ ID NO: 610063 - RNA, 22 nt, Human
cugcacagagcggcaguucuua

SEQ ID NO: 610064 - RNA, 19 nt, Human
ccagcuggccugggaccuc

SEQ ID NO: 610065 - RNA, 22 nt, Human
gcucuucuaaagaauguacagg

SEQ ID NO: 610066 - RNA, 22 nt, Human
ccccucccugaccugguugggc

SEQ ID NO: 610067 - RNA, 21 nt, Human
auacacauacacauaaaugug

SEQ ID NO: 610068 - RNA, 23 nt, Human
agggaaaguaguaauggccuuug

SEQ ID NO: 610069 - RNA, 22 nt, Human
uuuacaggauuacccuggcugc

SEQ ID NO: 610070 - RNA, 22 nt, Human
uucucuaagccuuaguuucuuc

SEQ ID NO: 610071 - RNA, 20 nt, Human
acuuucucgguuucucaccu

SEQ ID NO: 610072 - RNA, 18 nt, Human
aguugcuagaugcuguag

SEQ ID NO: 610073 - RNA, 22 nt, Human
uugcaguuuugacagaccaaau

SEQ ID NO: 610074 - RNA, 21 nt, Human
uggaaagauucaaagaccagg

SEQ ID NO: 610075 - RNA, 22 nt, Human
uuucagugcacguaguuuauuu

SEQ ID NO: 610076 - RNA, 22 nt, Human
agcuguucccucacugcaguca

SEQ ID NO: 610077 - RNA, 22 nt, Human
uucagucuccucauuuuacaaa

SEQ ID NO: 610078 - RNA, 22 nt, Human
ucuuugcuccacacucuagaga

SEQ ID NO: 610079 - RNA, 22 nt, Human
ugcaccugagaggucucugagg

SEQ ID NO: 610080 - RNA, 22 nt, Human
accuuagaccagcaagauauuu

SEQ ID NO: 610081 - RNA, 22 nt, Human
cugcugugucagaguccagggg

SEQ ID NO: 610082 - RNA, 22 nt, Human
aggugugggaaacgggugaccu

SEQ ID NO: 610083 - RNA, 23 nt, Human
ugcaaauaacaaggaguuuaagg

SEQ ID NO: 610084 - RNA, 22 nt, Human
uuuacugaauuugguauauucc

SEQ ID NO: 610085 - RNA, 22 nt, Human
gcuuggcugugagcuuugcugu

SEQ ID NO: 610086 - RNA, 22 nt, Human
aggguagggcccggagacagac

SEQ ID NO: 610087 - RNA, 22 nt, Human
gcuggcaccugcaccaagcagg

SEQ ID NO: 610088 - RNA, 22 nt, Human
acuggacucacguauuccugag

SEQ ID NO: 610089 - RNA, 22 nt, Human
ugagaugaaagcagaaagacuu

SEQ ID NO: 610090 - RNA, 22 nt, Human
agggucaggagacacuggcaac

SEQ ID NO: 610091 - RNA, 22 nt, Human
cuacauggagaagaaaauucuu

SEQ ID NO: 610092 - RNA, 22 nt, Human
gcuggguccaugguccucgggu

SEQ ID NO: 610093 - RNA, 20 nt, Human
uccaggagaacugggagccg

SEQ ID NO: 610094 - RNA, 22 nt, Human
uucuggagccgggccugggcag

SEQ ID NO: 610095 - RNA, 22 nt, Human
cagcugcugccucauccacuuu

SEQ ID NO: 610096 - RNA, 17 nt, Human
cccucuggggagggagg

SEQ ID NO: 610097 - RNA, 22 nt, Human
ugggagaacacugcucuggaug

SEQ ID NO: 610098 - RNA, 22 nt, Human
aagucuuacagacaagcugaag

SEQ ID NO: 610099 - RNA, 22 nt, Human
uccugcacaccuugagcuugga

SEQ ID NO: 610100 - RNA, 22 nt, Human
gcacagggagcaggucucuggu

SEQ ID NO: 610101 - RNA, 22 nt, Human
aguggcagagcaggugcuggaa

SEQ ID NO: 610102 - RNA, 22 nt, Human
uauucucagcaacacacaugga

SEQ ID NO: 610103 - RNA, 22 nt, Human
uucaaguuuuuaaaggcaguua

SEQ ID NO: 610104 - RNA, 22 nt, Human
agagccuggaccugggcucuga

SEQ ID NO: 610105 - RNA, 22 nt, Human
cagccccucccucaggcaggug

SEQ ID NO: 610106 - RNA, 22 nt, Human
uugcagagagguuaggaacuca

SEQ ID NO: 610107 - RNA, 22 nt, Human
uacauuccaaaggaaacuggcu

SEQ ID NO: 610108 - RNA, 19 nt, Human
uccaguuuggcaggaagac

SEQ ID NO: 610109 - RNA, 22 nt, Human
gucacaaauccccucagcaacu

SEQ ID NO: 610110 - RNA, 22 nt, Human
aaauagcuguauuuacccugua

SEQ ID NO: 610111 - RNA, 22 nt, Human
gucugucucucuccagagugca

SEQ ID NO: 610112 - RNA, 22 nt, Human
ggacugaggcccacuugaggga

SEQ ID NO: 610113 - RNA, 22 nt, Human
agggaaggagguuagaacccac

SEQ ID NO: 610114 - RNA, 22 nt, Human
aaggaaucacuucuuuaaauga

SEQ ID NO: 610115 - RNA, 22 nt, Human
gggagcuggagcuggaagacuc

SEQ ID NO: 610116 - RNA, 22 nt, Human
gccaagggggcagugcaugggu

SEQ ID NO: 610117 - RNA, 22 nt, Human
auucccagguaaaaguagagcu

SEQ ID NO: 610118 - RNA, 21 nt, Human
gcagcagaggcuugacagaca

SEQ ID NO: 610119 - RNA, 22 nt, Human
ucagaggauuggacuuuuaugu

SEQ ID NO: 610120 - RNA, 22 nt, Human
ucagcaaugugauacugugcaa

SEQ ID NO: 610121 - RNA, 22 nt, Human
cuggagcugucuucacaggccu

SEQ ID NO: 610122 - RNA, 22 nt, Human
aggcacgagcaauggccgagga

SEQ ID NO: 610123 - RNA, 22 nt, Human
aaggcugguuuccuugauguuu

SEQ ID NO: 610124 - RNA, 23 nt, Human
gagugcagaauagacaugcagug

SEQ ID NO: 610125 - RNA, 22 nt, Human
cagcuccucacgagucuugaaa

SEQ ID NO: 610126 - RNA, 22 nt, Human
caaaugcaggucauaaccugag

SEQ ID NO: 610127 - RNA, 22 nt, Human
caugaacagcuaacauuuuggg

SEQ ID NO: 610128 - RNA, 22 nt, Human
acuguauuuggauauaagaucu

SEQ ID NO: 610129 - RNA, 22 nt, Human
gcaggggcggcuggguuuccag

SEQ ID NO: 610130 - RNA, 22 nt, Human
caguuucucucauacauauuug

SEQ ID NO: 610131 - RNA, 22 nt, Human
gccagcucccaagugagccccu

SEQ ID NO: 610132 - RNA, 22 nt, Human
aaggcaggaugggaaaagauuu

SEQ ID NO: 610133 - RNA, 22 nt, Human
uuggcuuuagaccugagacugu

SEQ ID NO: 610134 - RNA, 22 nt, Human
uucaacaugcaaacauguuugu

SEQ ID NO: 610135 - RNA, 22 nt, Human
uucccagacuccacacugaggc

SEQ ID NO: 610136 - RNA, 22 nt, Human
cagguggggcagcugugggagc

SEQ ID NO: 610137 - RNA, 18 nt, Human
uggacaggguggagaaaa

SEQ ID NO: 610138 - RNA, 22 nt, Human
gguuuauugaaggccaccccac

SEQ ID NO: 610139 - RNA, 22 nt, Human
augcuaucuucagcaccuaggg

SEQ ID NO: 610140 - RNA, 22 nt, Human
gcucaggagcugacagccucaa

SEQ ID NO: 610141 - RNA, 22 nt, Human
cuuuccuaguuggucccagcac

SEQ ID NO: 610142 - RNA, 22 nt, Human
ugcuacacucaaucagugcuau

SEQ ID NO: 610143 - RNA, 22 nt, Human
auuucccagggcccucauaguu

SEQ ID NO: 610144 - RNA, 22 nt, Human
caggaaaugggucguuuuauaa

SEQ ID NO: 610145 - RNA, 19 nt, Human
acauagcuggcuacacugu

SEQ ID NO: 610146 - RNA, 22 nt, Human
uccagcccaggcuggaguguag

SEQ ID NO: 610147 - RNA, 22 nt, Human
uucucuuuauguauuuaguggg

SEQ ID NO: 610148 - RNA, 22 nt, Human
cuccugucaauaggcuccuggc

SEQ ID NO: 610149 - RNA, 20 nt, Human
ugcuuugauggaaauacagc

SEQ ID NO: 610150 - RNA, 23 nt, Human
guggagccacaucacaggcuccu

SEQ ID NO: 610151 - RNA, 22 nt, Human
agccugguguggggcugcagag

SEQ ID NO: 610152 - RNA, 22 nt, Human
uucugaaaccacugaccaacua

SEQ ID NO: 610153 - RNA, 22 nt, Human
gcuggagguagggagguccugu

SEQ ID NO: 610154 - RNA, 22 nt, Human
uacuucauuccuuuguaaaaug

SEQ ID NO: 610155 - RNA, 20 nt, Human
ucaugcaagauucauaaagg

SEQ ID NO: 610156 - RNA, 22 nt, Human
aagcugaggcccauggcaaggu

SEQ ID NO: 610157 - RNA, 22 nt, Human
ucccagcacgucugcuguuucu

SEQ ID NO: 610158 - RNA, 22 nt, Human
uccugggguguguuuugcugcu

SEQ ID NO: 610159 - RNA, 18 nt, Human
ggcugcuuaaggagaucc

SEQ ID NO: 610160 - RNA, 22 nt, Human
acagcagccuuguugguuucga

SEQ ID NO: 610161 - RNA, 22 nt, Human
gaugucuuugccaugcaugugu

SEQ ID NO: 610162 - RNA, 22 nt, Human
augauacaagcaaaacuaauca

SEQ ID NO: 610163 - RNA, 22 nt, Human
ucccucucuugggcguggcuca

SEQ ID NO: 610164 - RNA, 22 nt, Human
agcucuuccugcaccuguggcu

SEQ ID NO: 610165 - RNA, 22 nt, Human
aggcaccuugcgguccagugaa

SEQ ID NO: 610166 - RNA, 22 nt, Human
ggcaggagcucagguugguucc

SEQ ID NO: 610167 - RNA, 22 nt, Human
aagcccaguaccuucagugagg

SEQ ID NO: 610168 - RNA, 22 nt, Human
gccugccaaaagaagcugcugg

SEQ ID NO: 610169 - RNA, 19 nt, Human
aauacaguguuauagaauu

SEQ ID NO: 610170 - RNA, 22 nt, Human
cuggagccggaccagggacggu

SEQ ID NO: 610171 - RNA, 22 nt, Human
gucagugucuuaacagagauua

SEQ ID NO: 610172 - RNA, 22 nt, Human
acaggccuuggcaggcauguga

SEQ ID NO: 610173 - RNA, 22 nt, Human
ugggccuggggcagcccaaauc

SEQ ID NO: 610174 - RNA, 22 nt, Human
ugaaugauuugggugcauucag

SEQ ID NO: 610175 - RNA, 22 nt, Human
ggggaggaagcuggaacacggg

SEQ ID NO: 610176 - RNA, 22 nt, Human
gcugggcuguaguuugcugacc

SEQ ID NO: 610177 - RNA, 22 nt, Human
ucucacugcaaauauuauguau

SEQ ID NO: 610178 - RNA, 22 nt, Human
aggugcaggagcugugcaggga

SEQ ID NO: 610179 - RNA, 22 nt, Human
cauuguuaauugguaucuuaca

SEQ ID NO: 610180 - RNA, 22 nt, Human
gcuggcagguccaagauagagc

SEQ ID NO: 610181 - RNA, 22 nt, Human
aauauguucaaaauagaucacu

SEQ ID NO: 610182 - RNA, 22 nt, Human
augaguucauugcauuugacag

SEQ ID NO: 610183 - RNA, 22 nt, Human
agcagccacacgccuccuucuc

SEQ ID NO: 610184 - RNA, 22 nt, Human
uccugggcagccucucuggaag

SEQ ID NO: 610185 - RNA, 22 nt, Human
gcagguggcagaggugggaucu

SEQ ID NO: 610186 - RNA, 22 nt, Human
gaaaguauuuacauuaacaucu

SEQ ID NO: 610187 - RNA, 22 nt, Human
gaggcugaugcugccucacaga

SEQ ID NO: 610188 - RNA, 23 nt, Human
ggccuguguuuugucugaaguac

SEQ ID NO: 610189 - RNA, 22 nt, Human
ucuggaguuugaggacaagcuu

SEQ ID NO: 610190 - RNA, 22 nt, Human
agcuccugauacaugcaggaau

SEQ ID NO: 610191 - RNA, 22 nt, Human
uggugugggcguggcaggcaag

SEQ ID NO: 610192 - RNA, 22 nt, Human
ugaggcagcauucuucaagaca

SEQ ID NO: 610193 - RNA, 22 nt, Human
aagagcauauuaauaguggaga

SEQ ID NO: 610194 - RNA, 22 nt, Human
aggagagaauguuccaggcuug

SEQ ID NO: 610195 - RNA, 22 nt, Human
uacacaaaggcacucuguuguu

SEQ ID NO: 610196 - RNA, 22 nt, Human
caaauguaaauucuuuugaagc

SEQ ID NO: 610197 - RNA, 22 nt, Human
cuguguggacugguugaggccc

SEQ ID NO: 610198 - RNA, 22 nt, Human
ggugggacagguaggaguggcu

SEQ ID NO: 610199 - RNA, 22 nt, Human
auguuuuccugggagagcacuc

SEQ ID NO: 610200 - RNA, 22 nt, Human
uuuauuguugggucuuaagcug

SEQ ID NO: 610201 - RNA, 22 nt, Human
ucuuuuauccuacauuuagcuc

SEQ ID NO: 610202 - RNA, 22 nt, Human
caaauguauucucacuucaggg

SEQ ID NO: 610203 - RNA, 22 nt, Human
uuuccucuucuucccaugucau

SEQ ID NO: 610204 - RNA, 22 nt, Human
acuuguuaguuuuaucugcaug

SEQ ID NO: 610205 - RNA, 22 nt, Human
gcacacagaacauuuggauccu

SEQ ID NO: 610206 - RNA, 22 nt, Human
augacaaauucagaccauagca

SEQ ID NO: 610207 - RNA, 22 nt, Human
cugccguguuuuucauguuaaa

SEQ ID NO: 610208 - RNA, 22 nt, Human
cugaggcacugguaaugggcau

SEQ ID NO: 610209 - RNA, 22 nt, Human
gcaggggcaggagaucucaggc

SEQ ID NO: 610210 - RNA, 22 nt, Human
cagcccucugaagaggcgcuug

SEQ ID NO: 610211 - RNA, 20 nt, Human
ugagggcuaaccagacucug

SEQ ID NO: 610212 - RNA, 22 nt, Human
cagacaggguccuguccgucac

SEQ ID NO: 610213 - RNA, 22 nt, Human
ugucccucugaggcuucccugg

SEQ ID NO: 610214 - RNA, 21 nt, Human
uggccagcugcucgucuccuc

SEQ ID NO: 610215 - RNA, 22 nt, Human
cugcccaccacaccugcuccug

SEQ ID NO: 610216 - RNA, 22 nt, Human
gcuuccuguaggcagguccaag

SEQ ID NO: 610217 - RNA, 22 nt, Human
uuucaguuaaguggcuaguccc

SEQ ID NO: 610218 - RNA, 22 nt, Human
auguuauuucugaaagaucauu

SEQ ID NO: 610219 - RNA, 22 nt, Human
ucaggggcuugaggugcauguc

SEQ ID NO: 610220 - RNA, 22 nt, Human
caggggcugagaaggaacgucc

SEQ ID NO: 610221 - RNA, 22 nt, Human
auuguuuuaauuccauugugaa

SEQ ID NO: 610222 - RNA, 22 nt, Human
ugaagcaucuggucugagaauu

SEQ ID NO: 610223 - RNA, 22 nt, Human
gcuguagauggacuggcaucca

SEQ ID NO: 610224 - RNA, 19 nt, Human
aaacuaaggggaaauguuu

SEQ ID NO: 610225 - RNA, 22 nt, Human
aaucaugaaauaucaguucuuu

SEQ ID NO: 610226 - RNA, 22 nt, Human
acaugugucuaagaaugaaaga

SEQ ID NO: 610227 - RNA, 22 nt, Human
aacacugggauaggugauagac

SEQ ID NO: 610228 - RNA, 22 nt, Human
uacauugaggcaguagcuggag

SEQ ID NO: 610229 - RNA, 19 nt, Human
ugccagagauacucccaga

SEQ ID NO: 610230 - RNA, 21 nt, Human
cauuucaugauuauagaaaug

SEQ ID NO: 610231 - RNA, 22 nt, Human
ucaggcugggcuccucucccca

SEQ ID NO: 610232 - RNA, 22 nt, Human
cugagagguaagcagcgcagug

SEQ ID NO: 610233 - RNA, 22 nt, Human
cccagcuccaagggacagcgaa

SEQ ID NO: 610234 - RNA, 22 nt, Human
cacacaguaggcacucauuaau

SEQ ID NO: 610235 - RNA, 22 nt, Human
gcuggcugguccagcaggggcu

SEQ ID NO: 610236 - RNA, 22 nt, Human
cagagaugggucgcagagaugg

SEQ ID NO: 610237 - RNA, 18 nt, Human
ccagagggugcgucagcu

SEQ ID NO: 610238 - RNA, 22 nt, Human
aggcccauguucacuugcucag

SEQ ID NO: 610239 - RNA, 22 nt, Human
aaagguuaagguguucaagaaa

SEQ ID NO: 610240 - RNA, 22 nt, Human
cuuaguuuuugcccuggaguuu

SEQ ID NO: 610241 - RNA, 22 nt, Human
auggaagacuaacagaaacaug

SEQ ID NO: 610242 - RNA, 22 nt, Human
gcaagauuagaaucaacuguga

SEQ ID NO: 610243 - RNA, 17 nt, Human
agacagugagugccuug

SEQ ID NO: 610244 - RNA, 22 nt, Human
uucagaaagugaaucuuguuau

SEQ ID NO: 610245 - RNA, 22 nt, Human
acaagaauuuacauguagugga

SEQ ID NO: 610246 - RNA, 21 nt, Human
ggacagaggagaaggcacccu

SEQ ID NO: 610247 - RNA, 22 nt, Human
gcauuuaaauuugaacuucaga

SEQ ID NO: 610248 - RNA, 22 nt, Human
agccucugucaagcuuuucaaa

SEQ ID NO: 610249 - RNA, 22 nt, Human
ggaugcugcuaucaggcuucga

SEQ ID NO: 610250 - RNA, 22 nt, Human
acacugguaggaagagauggcu

SEQ ID NO: 610251 - RNA, 22 nt, Human
aggggccuggcacugagcuggc

SEQ ID NO: 610252 - RNA, 20 nt, Human
aacuccuagccucaagugau

SEQ ID NO: 610253 - RNA, 22 nt, Human
uacuugcuguuaguauuuuaca

SEQ ID NO: 610254 - RNA, 22 nt, Human
gagggcugaaguguuuuaugag

SEQ ID NO: 610255 - RNA, 22 nt, Human
gcuggcuugauaguuucugcuu

SEQ ID NO: 610256 - RNA, 22 nt, Human
uuucacaauuuuaaggagcaaa

SEQ ID NO: 610257 - RNA, 22 nt, Human
ugagauggauuggguugguucc

SEQ ID NO: 610258 - RNA, 22 nt, Human
ugggaugggaucucgcuguguc

SEQ ID NO: 610259 - RNA, 23 nt, Human
ucccuguguacagccugcaugag

SEQ ID NO: 610260 - RNA, 22 nt, Human
cugggcagagcuaacaccugag

SEQ ID NO: 610261 - RNA, 17 nt, Human
ugguccagguggagcca

SEQ ID NO: 610262 - RNA, 22 nt, Human
uucagagcaucucuaaagccag

SEQ ID NO: 610263 - RNA, 22 nt, Human
agcuccccucguuucucuccau

SEQ ID NO: 610264 - RNA, 22 nt, Human
uuacagauggaucuagcaaaau

SEQ ID NO: 610265 - RNA, 22 nt, Human
acagcaggcacacaaggauaga

SEQ ID NO: 610266 - RNA, 22 nt, Human
ugagcugggaguggugaugagg

SEQ ID NO: 610267 - RNA, 22 nt, Human
cugugucccccucagccaggug

SEQ ID NO: 610268 - RNA, 22 nt, Human
cccagcucuaggagugguggca

SEQ ID NO: 610269 - RNA, 22 nt, Human
ucugccaggagccaugagcaag

SEQ ID NO: 610270 - RNA, 22 nt, Human
aggaaaguggugggaaaucagg

SEQ ID NO: 610271 - RNA, 20 nt, Human
agaagcaucauucugauguc

SEQ ID NO: 610272 - RNA, 22 nt, Human
uguguaaauuuauuuacauaaa

SEQ ID NO: 610273 - RNA, 18 nt, Human
gaggccugagaaccaggu

SEQ ID NO: 610274 - RNA, 22 nt, Human
uagcaaguguuggugaagaugu

SEQ ID NO: 610275 - RNA, 22 nt, Human
ggcuagaguggaacuggagcgg

SEQ ID NO: 610276 - RNA, 22 nt, Human
agcccaggagguggagguugca

SEQ ID NO: 610277 - RNA, 22 nt, Human
uuacagaauguucuuccaacag

SEQ ID NO: 610278 - RNA, 22 nt, Human
auguuuuauuaccaacuuguac

SEQ ID NO: 610279 - RNA, 22 nt, Human
acagagguuuccauugagguuu

SEQ ID NO: 610280 - RNA, 23 nt, Human
augugcaaagugcuacaguauag

SEQ ID NO: 610281 - RNA, 22 nt, Human
gugggaagagccaauuggggua

SEQ ID NO: 610282 - RNA, 21 nt, Human
ucucuccucaagcucgacccc

SEQ ID NO: 610283 - RNA, 22 nt, Human
cuggagggaguuaggacccgga

SEQ ID NO: 610284 - RNA, 20 nt, Human
cagagcuguuauggaugaug

SEQ ID NO: 610285 - RNA, 22 nt, Human
ucugccugccagucugguccuc

SEQ ID NO: 610286 - RNA, 22 nt, Human
augcugggaaacugaaaggaau

SEQ ID NO: 610287 - RNA, 22 nt, Human
cuuagcuuuuccagcuucuaga

SEQ ID NO: 610288 - RNA, 22 nt, Human
aaaguuugaaugauauauuagu

SEQ ID NO: 610289 - RNA, 22 nt, Human
aagccaggcugcacuugcuggg

SEQ ID NO: 610290 - RNA, 22 nt, Human
ucucucagucagaugcuaaaga

SEQ ID NO: 610291 - RNA, 22 nt, Human
gcaugggcuuucucagaguucu

SEQ ID NO: 610292 - RNA, 23 nt, Human
ugggccaguucuguugaaagcca

SEQ ID NO: 610293 - RNA, 22 nt, Human
aagaagagaaaugugcugcugg

SEQ ID NO: 610294 - RNA, 16 nt, Human
uggggauggggaagag

SEQ ID NO: 610295 - RNA, 22 nt, Human
ugcaucuguaguggaaaccuua

SEQ ID NO: 610296 - RNA, 22 nt, Human
cagggauggagagacuacuggc

SEQ ID NO: 610297 - RNA, 22 nt, Human
guugugcaaacacuggggucug

SEQ ID NO: 610298 - RNA, 22 nt, Human
ugaggccaagccuccucugcca

SEQ ID NO: 610299 - RNA, 19 nt, Human
ucaguggaugaacauguuu

SEQ ID NO: 610300 - RNA, 22 nt, Human
ucucuagacauggggaauguca

SEQ ID NO: 610301 - RNA, 22 nt, Human
ggucccugcugaagccuuggug

SEQ ID NO: 610302 - RNA, 22 nt, Human
gaaaaagugaccuugguagcua

SEQ ID NO: 610303 - RNA, 22 nt, Human
aggccuccagccacaugccagu

SEQ ID NO: 610304 - RNA, 22 nt, Human
acaaauucuacaaucauaugau

SEQ ID NO: 610305 - RNA, 22 nt, Human
uuuaugacaagcauuacugauu

SEQ ID NO: 610306 - RNA, 22 nt, Human
agguacauaggaaaguggagcu

SEQ ID NO: 610307 - RNA, 22 nt, Human
auccugggcugcacccucagcc

SEQ ID NO: 610308 - RNA, 22 nt, Human
aucuauuaugcugagaaacugu

SEQ ID NO: 610309 - RNA, 21 nt, Human
cggaaaggacuagggcucaga

SEQ ID NO: 610310 - RNA, 22 nt, Human
cuggccaggcggccccugcaug

SEQ ID NO: 610311 - RNA, 22 nt, Human
uauucacauucucaggccuggu

SEQ ID NO: 610312 - RNA, 22 nt, Human
augcauuuauguguguacauug

SEQ ID NO: 610313 - RNA, 21 nt, Human
aauggcugggcaaggucucuc

SEQ ID NO: 610314 - RNA, 22 nt, Human
cugaaggagguagagugacaua

SEQ ID NO: 610315 - RNA, 22 nt, Human
uccugaacauuaugcaagcuuc

SEQ ID NO: 610316 - RNA, 22 nt, Human
agcugucuggaaguuccucaug

SEQ ID NO: 610317 - RNA, 22 nt, Human
cagcugaggucaaagaagcagg

SEQ ID NO: 610318 - RNA, 22 nt, Human
acacaauacagggcucaaaaua

SEQ ID NO: 610319 - RNA, 22 nt, Human
cccaguggaaggaguagaagac

SEQ ID NO: 610320 - RNA, 22 nt, Human
acccagccuacaaagcucaccu

SEQ ID NO: 610321 - RNA, 22 nt, Human
cugggccuuugcuuauuaauuu

SEQ ID NO: 610322 - RNA, 22 nt, Human
uccaggaggaggaaggcugcca

SEQ ID NO: 610323 - RNA, 22 nt, Human
acugagguuuacuugaaggaga

SEQ ID NO: 610324 - RNA, 23 nt, Human
uccuccugacacagccugaguga

SEQ ID NO: 610325 - RNA, 21 nt, Human
gaugguagccucauagaagua

SEQ ID NO: 610326 - RNA, 22 nt, Human
aaggcuggguuugggaugugau

SEQ ID NO: 610327 - RNA, 23 nt, Human
auucuucauuaucuucuagaaaa

SEQ ID NO: 610328 - RNA, 22 nt, Human
gggagggguugcauguuugagu

SEQ ID NO: 610329 - RNA, 22 nt, Human
auuugcuucuugcuuccagcac

SEQ ID NO: 610330 - RNA, 22 nt, Human
ggccaaaagcauaauccucaca

SEQ ID NO: 610331 - RNA, 19 nt, Human
gagcugagaguagcacugg

SEQ ID NO: 610332 - RNA, 22 nt, Human
caguuucuucaucaguuaagca

SEQ ID NO: 610333 - RNA, 22 nt, Human
cugggaagcauggugaugguau

SEQ ID NO: 610334 - RNA, 22 nt, Human
cuucuuucaagaauggauuagg

SEQ ID NO: 610335 - RNA, 22 nt, Human
agcucccagggcugggcaaguu

SEQ ID NO: 610336 - RNA, 22 nt, Human
agagccuggggauuggcaaggg

SEQ ID NO: 610337 - RNA, 22 nt, Human
ugaagcauaagaggguucuuuu

SEQ ID NO: 610338 - RNA, 22 nt, Human
acuuuccuagacuucagugaca

SEQ ID NO: 610339 - RNA, 18 nt, Human
acccaguuugaaggaaag

SEQ ID NO: 610340 - RNA, 22 nt, Human
auuagcauaaguguucggugca

SEQ ID NO: 610341 - RNA, 20 nt, Human
cguguguggcuauuuugggu

SEQ ID NO: 610342 - RNA, 22 nt, Human
ugcuucagugugucauuauuua

SEQ ID NO: 610343 - RNA, 22 nt, Human
uauugaaaugaaugacagugau

SEQ ID NO: 610344 - RNA, 22 nt, Human
ugccugcucuugagacuuacaa

SEQ ID NO: 610345 - RNA, 22 nt, Human
ucucugucucccguguguccgg

SEQ ID NO: 610346 - RNA, 22 nt, Human
guggccaaggcagagaaagagc

SEQ ID NO: 610347 - RNA, 22 nt, Human
cccgcaggggcagcccucaucc

SEQ ID NO: 610348 - RNA, 22 nt, Human
acaaauuauagaaaauugagcu

SEQ ID NO: 610349 - RNA, 22 nt, Human
acaucuauuuuuuucuguccau

SEQ ID NO: 610350 - RNA, 22 nt, Human
aggaggccucuauccagagaga

SEQ ID NO: 610351 - RNA, 22 nt, Human
cuaaggaaaggaaauacaguaa

SEQ ID NO: 610352 - RNA, 22 nt, Human
uuuguuuugaacuagcucagaa

SEQ ID NO: 610353 - RNA, 22 nt, Human
cuuuuuguguaugcuacaguug

SEQ ID NO: 610354 - RNA, 22 nt, Human
agagauggcgucucagagccug

SEQ ID NO: 610355 - RNA, 22 nt, Human
gcugggcugcccaaccucugac

SEQ ID NO: 610356 - RNA, 22 nt, Human
auagggaggaacugagucagga

SEQ ID NO: 610357 - RNA, 22 nt, Human
caaacauugcuaccagagguuu

SEQ ID NO: 610358 - RNA, 22 nt, Human
guccuucaucuggagccugguc

SEQ ID NO: 610359 - RNA, 22 nt, Human
gggccacaggccuugcccgcag

SEQ ID NO: 610360 - RNA, 22 nt, Human
gguguccucaugauuuucuaga

SEQ ID NO: 610361 - RNA, 22 nt, Human
cuucugggauuaauuuuuccug

SEQ ID NO: 610362 - RNA, 22 nt, Human
aguccuggacuuggagucaggg

SEQ ID NO: 610363 - RNA, 22 nt, Human
auugcuaggaacagguugcacc

SEQ ID NO: 610364 - RNA, 22 nt, Human
uguccucuuccagugcuccuuc

SEQ ID NO: 610365 - RNA, 22 nt, Human
ccccaccugugcgucugccgca

SEQ ID NO: 610366 - RNA, 22 nt, Human
cuuuacagccuccagaaggaac

SEQ ID NO: 610367 - RNA, 22 nt, Human
agaguuagguccagaauguugc

SEQ ID NO: 610368 - RNA, 22 nt, Human
caccagcuugcagucuuaaccc

SEQ ID NO: 610369 - RNA, 22 nt, Human
uugugaauagugccgcaauaaa

SEQ ID NO: 610370 - RNA, 22 nt, Human
agugaaauagcauuuaugaagc

SEQ ID NO: 610371 - RNA, 22 nt, Human
uccugaggcucacuuugaaugu

SEQ ID NO: 610372 - RNA, 22 nt, Human
uggcagguagaguucugagaug

SEQ ID NO: 610373 - RNA, 22 nt, Human
cccaggcuccuagaggcccaga

SEQ ID NO: 610374 - RNA, 22 nt, Human
aguaauaauagcuguaaagugc

SEQ ID NO: 610375 - RNA, 22 nt, Human
agaaaagaggcuuucuaagcau

SEQ ID NO: 610376 - RNA, 20 nt, Human
ucuuggaaaaaguucagaau

SEQ ID NO: 610377 - RNA, 22 nt, Human
cugauaugaugggugauuuuca

SEQ ID NO: 610378 - RNA, 22 nt, Human
ggagcagccacgucucagggca

SEQ ID NO: 610379 - RNA, 22 nt, Human
caucuuuaacaauuuacaaugu

SEQ ID NO: 610380 - RNA, 22 nt, Human
ucugauuccagugacccuagga

SEQ ID NO: 610381 - RNA, 22 nt, Human
gugacauguuauggacuggcua

SEQ ID NO: 610382 - RNA, 22 nt, Human
uggagucaugauggcugcugau

SEQ ID NO: 610383 - RNA, 22 nt, Human
acaggagggacaccuuccugcu

SEQ ID NO: 610384 - RNA, 22 nt, Human
auguuuucuuucagacuucccu

SEQ ID NO: 610385 - RNA, 23 nt, Human
cugugugugccgaggguggccac

SEQ ID NO: 610386 - RNA, 22 nt, Human
gggcuggaggagauccagaggc

SEQ ID NO: 610387 - RNA, 22 nt, Human
uuucauuuugguuaugccauaa

SEQ ID NO: 610388 - RNA, 22 nt, Human
aggccaagggcaaagcggagag

SEQ ID NO: 610389 - RNA, 22 nt, Human
cuucugugcuucacaguugcca

SEQ ID NO: 610390 - RNA, 22 nt, Human
uccuccaagcagaggcccugaa

SEQ ID NO: 610391 - RNA, 22 nt, Human
uggccucugaggcaccuuugcc

SEQ ID NO: 610392 - RNA, 22 nt, Human
uuucucucuuaaggaguuuaaa

SEQ ID NO: 610393 - RNA, 23 nt, Human
cucuggguccgauguccugacag

SEQ ID NO: 610394 - RNA, 22 nt, Human
uuaacaugucuugacuucaucu

SEQ ID NO: 610395 - RNA, 22 nt, Human
uuugacagaguugugaggauuu

SEQ ID NO: 610396 - RNA, 22 nt, Human
cugagagccuccuguuggcuag

SEQ ID NO: 610397 - RNA, 22 nt, Human
ggcugagccaugggcacugcag

SEQ ID NO: 610398 - RNA, 22 nt, Human
gcagggacgccagggacagcaa

SEQ ID NO: 610399 - RNA, 22 nt, Human
agcgagggaggucugaggacag

SEQ ID NO: 610400 - RNA, 22 nt, Human
guuauaaauaccuaauaggauu

SEQ ID NO: 610401 - RNA, 20 nt, Human
aaguugcagagaguugucuu

SEQ ID NO: 610402 - RNA, 21 nt, Human
ucuuauacagcaauagaucug

SEQ ID NO: 610403 - RNA, 17 nt, Human
caggugaccuggugaug

SEQ ID NO: 610404 - RNA, 22 nt, Human
cauucaaaagcuccauguuugu

SEQ ID NO: 610405 - RNA, 22 nt, Human
uggugcaggccaagcugcgagc

SEQ ID NO: 610406 - RNA, 22 nt, Human
cagcuuugccaaguaaggucuu

SEQ ID NO: 610407 - RNA, 22 nt, Human
aagaacaugaagucacaaaugc

SEQ ID NO: 610408 - RNA, 22 nt, Human
uaugauauucuaaauugacacc

SEQ ID NO: 610409 - RNA, 22 nt, Human
ccacaaguuucagcacccagag

SEQ ID NO: 610410 - RNA, 22 nt, Human
uagaaucauaccucuaggaaca

SEQ ID NO: 610411 - RNA, 16 nt, Human
uggagguguuucuagu

SEQ ID NO: 610412 - RNA, 22 nt, Human
ugggugguccaggcucagcaga

SEQ ID NO: 610413 - RNA, 22 nt, Human
auucuaauggcagagacuccug

SEQ ID NO: 610414 - RNA, 22 nt, Human
ucauuccuuaacauucauuugc

SEQ ID NO: 610415 - RNA, 18 nt, Human
uggagcagguaggcauga

SEQ ID NO: 610416 - RNA, 20 nt, Human
ccugucuggagacaaagaga

SEQ ID NO: 610417 - RNA, 22 nt, Human
cugcccuggcagccuaccaugg

SEQ ID NO: 610418 - RNA, 22 nt, Human
gagggccagcagccucagcaug

SEQ ID NO: 610419 - RNA, 22 nt, Human
agggcagagggugccucaccug

SEQ ID NO: 610420 - RNA, 22 nt, Human
uuuacaguccccaggugaggau

SEQ ID NO: 610421 - RNA, 22 nt, Human
accaggcugugaagugagacua

SEQ ID NO: 610422 - RNA, 20 nt, Human
ugggccugagccugugggcu

SEQ ID NO: 610423 - RNA, 22 nt, Human
aaucacaugugggucuuguagc

SEQ ID NO: 610424 - RNA, 22 nt, Human
cagugguauuugagagaaugga

SEQ ID NO: 610425 - RNA, 22 nt, Human
guccacagcuggccagggccuc

SEQ ID NO: 610426 - RNA, 22 nt, Human
cugcugaaaacaauaaugauga

SEQ ID NO: 610427 - RNA, 22 nt, Human
acauuuguaugcguuuuuacug

SEQ ID NO: 610428 - RNA, 22 nt, Human
gcuguacaaggccucugccauc

SEQ ID NO: 610429 - RNA, 22 nt, Human
gaaggagggugcggaucugagc

SEQ ID NO: 610430 - RNA, 22 nt, Human
acacagcuagugaguggcagag

SEQ ID NO: 610431 - RNA, 22 nt, Human
uccucuggggcgugguccugga

SEQ ID NO: 610432 - RNA, 22 nt, Human
uccucacagggcaggaaggagg

SEQ ID NO: 610433 - RNA, 21 nt, Human
caauggcgagaucuuggcuca

SEQ ID NO: 610434 - RNA, 22 nt, Human
uccagccuuucuacucacugag

SEQ ID NO: 610435 - RNA, 21 nt, Human
gcacccagccgguucucccag

SEQ ID NO: 610436 - RNA, 22 nt, Human
auuuccauguccaaaaauuagu

SEQ ID NO: 610437 - RNA, 22 nt, Human
aaaaguauggugguccuuuuua

SEQ ID NO: 610438 - RNA, 22 nt, Human
agcccagcugcuauguaccugg

SEQ ID NO: 610439 - RNA, 22 nt, Human
auacuuaaugucaguuugaugu

SEQ ID NO: 610440 - RNA, 22 nt, Human
uaaugucuuuaagagcauuggg

SEQ ID NO: 610441 - RNA, 22 nt, Human
agcagggcuucugugccugugc

SEQ ID NO: 610442 - RNA, 22 nt, Human
ccagagccagagaggugccugc

SEQ ID NO: 610443 - RNA, 22 nt, Human
auuccacagccgauaccaugac

SEQ ID NO: 610444 - RNA, 22 nt, Human
uaaggaggugcccacucucagg

SEQ ID NO: 610445 - RNA, 22 nt, Human
uuucucaacuguauuaugcaga

SEQ ID NO: 610446 - RNA, 21 nt, Human
aaagcaguucuuccugccucu

SEQ ID NO: 610447 - RNA, 22 nt, Human
gccuacuuaguagcugggauua

SEQ ID NO: 610448 - RNA, 22 nt, Human
ggccugugggaggacagcuggg

SEQ ID NO: 610449 - RNA, 22 nt, Human
uuucaaagucaauaucauuacc

SEQ ID NO: 610450 - RNA, 22 nt, Human
caaagccucugauuucacuugu

SEQ ID NO: 610451 - RNA, 22 nt, Human
agauguggaacacuagacugcu

SEQ ID NO: 610452 - RNA, 22 nt, Human
uugucuuuggaaauuuaauguu

SEQ ID NO: 610453 - RNA, 22 nt, Human
ucugagaaaguacuguauguuc

SEQ ID NO: 610454 - RNA, 22 nt, Human
ugcagcugcuugauucaucuug

SEQ ID NO: 610455 - RNA, 22 nt, Human
ccagcucuguaagcugugaaau

SEQ ID NO: 610456 - RNA, 22 nt, Human
gucuccugagccuugacugcaa

SEQ ID NO: 610457 - RNA, 22 nt, Human
cagcagcccacgcgugcugucc

SEQ ID NO: 610458 - RNA, 22 nt, Human
uaaggccaccguuauagaacca

SEQ ID NO: 610459 - RNA, 22 nt, Human
uguccucaaggagcuucagucu

SEQ ID NO: 610460 - RNA, 22 nt, Human
guaagacauagauuucucauga

SEQ ID NO: 610461 - RNA, 22 nt, Human
cuguccugcccacccugcaggg

SEQ ID NO: 610462 - RNA, 22 nt, Human
uggucaguugcaucagagaagu

SEQ ID NO: 610463 - RNA, 20 nt, Human
aguguacagacacuagaaau

SEQ ID NO: 610464 - RNA, 22 nt, Human
cccaggcacauccacucuguga

SEQ ID NO: 610465 - RNA, 22 nt, Human
ucucuggcagggauaucuggcu

SEQ ID NO: 610466 - RNA, 22 nt, Human
uagcagcccaguuucuggccaa

SEQ ID NO: 610467 - RNA, 22 nt, Human
cagccacuguggaauagccccc

SEQ ID NO: 610468 - RNA, 22 nt, Human
gaggcuggagauauuccaaucu

SEQ ID NO: 610469 - RNA, 22 nt, Human
auuucuagacuuagaacucuua

SEQ ID NO: 610470 - RNA, 22 nt, Human
gacagugugaacaucuaauagu

SEQ ID NO: 610471 - RNA, 22 nt, Human
cuguuuccugucuucucacuau

SEQ ID NO: 610472 - RNA, 22 nt, Human
guggcucaucuuugggaaguaa

SEQ ID NO: 610473 - RNA, 22 nt, Human
uggugcugccaccuccucugcu

SEQ ID NO: 610474 - RNA, 22 nt, Human
uccuuuaucaaggagccuuaga

SEQ ID NO: 610475 - RNA, 22 nt, Human
ucaguguuggagauaauugcac

SEQ ID NO: 610476 - RNA, 22 nt, Human
ccugcagcuuugccuccugaac

SEQ ID NO: 610477 - RNA, 22 nt, Human
ugagguaggaggauugauugag

SEQ ID NO: 610478 - RNA, 22 nt, Human
ccagcagaagcucccgcugggu

SEQ ID NO: 610479 - RNA, 22 nt, Human
caagguuuacuuuaugauccag

SEQ ID NO: 610480 - RNA, 22 nt, Human
ugaagccaaucugccaggcaga

SEQ ID NO: 610481 - RNA, 22 nt, Human
gaacacaguacuuuuccugaug

SEQ ID NO: 610482 - RNA, 22 nt, Human
aaaaguaauugugguuuuggcc

SEQ ID NO: 610483 - RNA, 22 nt, Human
ccagcccugccucucagggccc

SEQ ID NO: 610484 - RNA, 18 nt, Human
agcagagagugaauggga

SEQ ID NO: 610485 - RNA, 22 nt, Human
aggaaagaaaggaggugcauuu

SEQ ID NO: 610486 - RNA, 22 nt, Human
cagacaggagacuggaucaugg

SEQ ID NO: 610487 - RNA, 22 nt, Human
ugccucagucagcuucccuggg

SEQ ID NO: 610488 - RNA, 22 nt, Human
auucugcauaauuuccuggcag

SEQ ID NO: 610489 - RNA, 23 nt, Human
auaacugagccgaggcuuaagaa

SEQ ID NO: 610490 - RNA, 19 nt, Human
uccaggcuccauuggcaga

SEQ ID NO: 610491 - RNA, 18 nt, Human
ucucugaauauuuuaugu

SEQ ID NO: 610492 - RNA, 23 nt, Human
aacuuuacuauuuugaauaaugc

SEQ ID NO: 610493 - RNA, 22 nt, Human
uccaggcuagaagucacaggcc

SEQ ID NO: 610494 - RNA, 22 nt, Human
uaaugacuguaccaaggcuuca

SEQ ID NO: 610495 - RNA, 22 nt, Human
aaugucucuauaucucauaaga

SEQ ID NO: 610496 - RNA, 22 nt, Human
ggacugggaaucagggagaugc

SEQ ID NO: 610497 - RNA, 20 nt, Human
cuguagggugcagcaggcuc

SEQ ID NO: 610498 - RNA, 22 nt, Human
uggaagacaguugaugggaguu

SEQ ID NO: 610499 - RNA, 22 nt, Human
acuucaugcagaagagagcugu

SEQ ID NO: 610500 - RNA, 22 nt, Human
aacacauauuuauauaugcaca

SEQ ID NO: 610501 - RNA, 22 nt, Human
cauaacauguacauauaaaugc

SEQ ID NO: 610502 - RNA, 22 nt, Human
ugcuucugaguugcaggacuug

SEQ ID NO: 610503 - RNA, 22 nt, Human
aggcuggugcuuccuagggcag

SEQ ID NO: 610504 - RNA, 22 nt, Human
cugcccaccccgaggcaggaag

SEQ ID NO: 610505 - RNA, 21 nt, Human
gcagaggaaugguauacauaa

SEQ ID NO: 610506 - RNA, 22 nt, Human
acugccugccuuccagguacug

SEQ ID NO: 610507 - RNA, 22 nt, Human
acuggaguauuguuuaauacca

SEQ ID NO: 610508 - RNA, 19 nt, Human
gugcugagaugugguacua

SEQ ID NO: 610509 - RNA, 22 nt, Human
gugaagacuuggagaaguuaag

SEQ ID NO: 610510 - RNA, 22 nt, Human
caggacagaaauaaggaauaua

SEQ ID NO: 610511 - RNA, 22 nt, Human
uuuuuuccagcuucuagaggcc

SEQ ID NO: 610512 - RNA, 22 nt, Human
aaaggaggaauggagagaugcu

SEQ ID NO: 610513 - RNA, 22 nt, Human
cugugggaacacugaggacuuc

SEQ ID NO: 610514 - RNA, 22 nt, Human
ucuucaguugucauacugccuu

SEQ ID NO: 610515 - RNA, 22 nt, Human
uucaaacagaugacucugcucu

SEQ ID NO: 610516 - RNA, 22 nt, Human
gcacagcaugaagagaggaagc

SEQ ID NO: 610517 - RNA, 22 nt, Human
cccagagaaccuucugugccac

SEQ ID NO: 610518 - RNA, 22 nt, Human
gaugcuuacauagcccaagugu

SEQ ID NO: 610519 - RNA, 22 nt, Human
auauaaaguguuuagaaagcug

SEQ ID NO: 610520 - RNA, 22 nt, Human
uucuugaaaauagccauguaca

SEQ ID NO: 610521 - RNA, 22 nt, Human
ucaguguuucaguuuggaaaug

SEQ ID NO: 610522 - RNA, 22 nt, Human
uaaacauggcuguuucaguuau

SEQ ID NO: 610523 - RNA, 22 nt, Human
ucuccuggauagauacuaucca

SEQ ID NO: 610524 - RNA, 22 nt, Human
aacacauuuugccuaggcaaua

SEQ ID NO: 610525 - RNA, 22 nt, Human
agcagcuguggggacaagggua

SEQ ID NO: 610526 - RNA, 22 nt, Human
gguggggcccuggcacugguau

SEQ ID NO: 610527 - RNA, 17 nt, Human
ggccuuggggccucagu

SEQ ID NO: 610528 - RNA, 22 nt, Human
aggggagccgaggggcaucugu

SEQ ID NO: 610529 - RNA, 22 nt, Human
acuguaauuaucugaacgugca

SEQ ID NO: 610530 - RNA, 19 nt, Human
uagcuucacguggucuaga

SEQ ID NO: 610531 - RNA, 22 nt, Human
acaguguccuuguggucccugu

SEQ ID NO: 610532 - RNA, 22 nt, Human
ggcgggagcagcagcucugagc

SEQ ID NO: 610533 - RNA, 22 nt, Human
uuucuacagguugauggguuug

SEQ ID NO: 610534 - RNA, 22 nt, Human
uggcugagcucccuguguguug

SEQ ID NO: 610535 - RNA, 22 nt, Human
aaacuuuuuauucuaaugucua

SEQ ID NO: 610536 - RNA, 22 nt, Human
caaaguauauuggauugaaugg

SEQ ID NO: 610537 - RNA, 22 nt, Human
aaucauugagacaaauuagcuu

SEQ ID NO: 610538 - RNA, 22 nt, Human
aggagcugggcccaaggaugcu

SEQ ID NO: 610539 - RNA, 22 nt, Human
agauacuaaaaggggaagcucc

SEQ ID NO: 610540 - RNA, 22 nt, Human
caggauugcagauuugauuaga

SEQ ID NO: 610541 - RNA, 22 nt, Human
agaagcagaaaagggcacuuuu

SEQ ID NO: 610542 - RNA, 22 nt, Human
guguggaaagaguggccucuca

SEQ ID NO: 610543 - RNA, 22 nt, Human
gggcaggugugcagagcuguug

SEQ ID NO: 610544 - RNA, 22 nt, Human
ccaggacccugcaaacccuguu

SEQ ID NO: 610545 - RNA, 22 nt, Human
ucuuuaaucauaaccaagaugg

SEQ ID NO: 610546 - RNA, 22 nt, Human
cuccagcugcuggucugagacu

SEQ ID NO: 610547 - RNA, 22 nt, Human
uugcucugaacccagggcacca

SEQ ID NO: 610548 - RNA, 22 nt, Human
uucuuuaucaguuacucauagg

SEQ ID NO: 610549 - RNA, 23 nt, Human
uccagagcucaugcucucaacca

SEQ ID NO: 610550 - RNA, 21 nt, Human
gcagcaguguucuagaauacu

SEQ ID NO: 610551 - RNA, 22 nt, Human
cuggggucagggaucagagagc

SEQ ID NO: 610552 - RNA, 23 nt, Human
aggcccaacucugugagggcugc

SEQ ID NO: 610553 - RNA, 22 nt, Human
uuguauuucgaugcacguguag

SEQ ID NO: 610554 - RNA, 22 nt, Human
ggcacugggaaugcagugauga

SEQ ID NO: 610555 - RNA, 22 nt, Human
gcaagauguuaacauagggaga

SEQ ID NO: 610556 - RNA, 22 nt, Human
cagcauggagacaaagugggca

SEQ ID NO: 610557 - RNA, 22 nt, Human
aucugaaaagcuuuaaugagcu

SEQ ID NO: 610558 - RNA, 22 nt, Human
auaaugcagcuuuucaauggcc

SEQ ID NO: 610559 - RNA, 22 nt, Human
agcacugggaacgcauggggcc

SEQ ID NO: 610560 - RNA, 22 nt, Human
cagcugagcucccaggccauca

SEQ ID NO: 610561 - RNA, 22 nt, Human
cucugggugugacagcaccugg

SEQ ID NO: 610562 - RNA, 22 nt, Human
caacugaacugauaucaacuau

SEQ ID NO: 610563 - RNA, 22 nt, Human
acucaguacaucuggaguuggc

SEQ ID NO: 610564 - RNA, 22 nt, Human
uuaaagcaguuuguauacaugg

SEQ ID NO: 610565 - RNA, 22 nt, Human
ugccgcugucgccaccauggcu

SEQ ID NO: 610566 - RNA, 22 nt, Human
ucagcagguggugggcagguga

SEQ ID NO: 610567 - RNA, 17 nt, Human
agaaaagagaccagcag

SEQ ID NO: 610568 - RNA, 22 nt, Human
gcucucuggaagguaucauuau

SEQ ID NO: 610569 - RNA, 22 nt, Human
uggagcuggaagaauguagacg

SEQ ID NO: 610570 - RNA, 22 nt, Human
auacauuagugaacaaaagaga

SEQ ID NO: 610571 - RNA, 22 nt, Human
uucuaguugagggagacaaaua

SEQ ID NO: 610572 - RNA, 22 nt, Human
aaacagcuaauggccaggaaua

SEQ ID NO: 610573 - RNA, 22 nt, Human
cccaggcugaguuagagguguc

SEQ ID NO: 610574 - RNA, 22 nt, Human
agcaccuccuuagcuaugacca

SEQ ID NO: 610575 - RNA, 22 nt, Human
cagggugccucccgcucgccgg

SEQ ID NO: 610576 - RNA, 22 nt, Human
agcacaggcuuuggugugaggg

SEQ ID NO: 610577 - RNA, 22 nt, Human
acaugauucuugauaggcauug

SEQ ID NO: 610578 - RNA, 22 nt, Human
agugguggagccaggaaaugug

SEQ ID NO: 610579 - RNA, 22 nt, Human
augaggucuuauugcaguaguu

SEQ ID NO: 610580 - RNA, 22 nt, Human
acucugaauuaauugcucucaa

SEQ ID NO: 610581 - RNA, 22 nt, Human
cucccuucaggagaggcucaca

SEQ ID NO: 610582 - RNA, 22 nt, Human
ucucugcccauccucaguccac

SEQ ID NO: 610583 - RNA, 22 nt, Human
aguccagaccccggcagcuggu

SEQ ID NO: 610584 - RNA, 22 nt, Human
aaaugcagaaugauuucaucua

SEQ ID NO: 610585 - RNA, 22 nt, Human
acucauuugacacuuuaaacug

SEQ ID NO: 610586 - RNA, 20 nt, Human
agcuucugcugccuuucggc

SEQ ID NO: 610587 - RNA, 22 nt, Human
uggagcugagcaccuccagggc

SEQ ID NO: 610588 - RNA, 22 nt, Human
gggcugagugucccaggccgaa

SEQ ID NO: 610589 - RNA, 22 nt, Human
uguggccagcagguggcugugu

SEQ ID NO: 610590 - RNA, 22 nt, Human
aaaaucuugacuguuuuuagaa

SEQ ID NO: 610591 - RNA, 22 nt, Human
uggcccagggcacagcagggag

SEQ ID NO: 610592 - RNA, 22 nt, Human
gugccugugccaggggugugcu

SEQ ID NO: 610593 - RNA, 22 nt, Human
ggcaugcuugccaugggccagu

SEQ ID NO: 610594 - RNA, 22 nt, Human
ucucucacuggugccucuguug

SEQ ID NO: 610595 - RNA, 22 nt, Human
cugagcacugggcacauagcug

SEQ ID NO: 610596 - RNA, 22 nt, Human
aaccacagacccagacuagaga

SEQ ID NO: 610597 - RNA, 22 nt, Human
uggcccagucagcaggagaggg

SEQ ID NO: 610598 - RNA, 22 nt, Human
gcaagcuggcuguuagaggaug

SEQ ID NO: 610599 - RNA, 22 nt, Human
acuccagggcugaacgaggccc

SEQ ID NO: 610600 - RNA, 22 nt, Human
cugaggccucacuguagucccu

SEQ ID NO: 610601 - RNA, 22 nt, Human
ggacagggaucauuaucugagc

SEQ ID NO: 610602 - RNA, 22 nt, Human
uguccucuccaacagccucugu

SEQ ID NO: 610603 - RNA, 22 nt, Human
uggacacacauguaugucagag

SEQ ID NO: 610604 - RNA, 22 nt, Human
ugggccuggguuccuccugggc

SEQ ID NO: 610605 - RNA, 22 nt, Human
gccugcugaaccucaugcaguc

SEQ ID NO: 610606 - RNA, 22 nt, Human
gcuuucuguggugauguaaagg

SEQ ID NO: 610607 - RNA, 22 nt, Human
agggucugacugaauggaaaag

SEQ ID NO: 610608 - RNA, 22 nt, Human
gaacuugagauaugaguaggua

SEQ ID NO: 610609 - RNA, 22 nt, Human
cucauuuauguaaugauuaagg

SEQ ID NO: 610610 - RNA, 22 nt, Human
ggcuccagauguccccuggcaa

SEQ ID NO: 610611 - RNA, 22 nt, Human
gcccacagaggcaccaccaggc

SEQ ID NO: 610612 - RNA, 22 nt, Human
aggaaaacacaguauugaugga

SEQ ID NO: 610613 - RNA, 22 nt, Human
gcuggccauagaagccaaagag

SEQ ID NO: 610614 - RNA, 22 nt, Human
uugcagacccuuacugcuagag

SEQ ID NO: 610615 - RNA, 22 nt, Human
ugccaggccaauucuauuugac

SEQ ID NO: 610616 - RNA, 22 nt, Human
caugggcucucugagcuccagg

SEQ ID NO: 610617 - RNA, 22 nt, Human
aguuaagaaggucaacgaggga

SEQ ID NO: 610618 - RNA, 22 nt, Human
ugaggccugaagccugaaguga

SEQ ID NO: 610619 - RNA, 22 nt, Human
uugacaaaguuuaguaauaauc

SEQ ID NO: 610620 - RNA, 22 nt, Human
caaagauaugacauggaaaaug

SEQ ID NO: 610621 - RNA, 22 nt, Human
ucaggcaggacaauuauuuagg

SEQ ID NO: 610622 - RNA, 22 nt, Human
aaacucagauguggugaagacc

SEQ ID NO: 610623 - RNA, 18 nt, Human
cugugggaagaguuuggg

SEQ ID NO: 610624 - RNA, 22 nt, Human
aggcugggaaaccugaaguugu

SEQ ID NO: 610625 - RNA, 22 nt, Human
aauccugaggcaaagagaugag

SEQ ID NO: 610626 - RNA, 22 nt, Human
caguggguccuaaguacaguuc

SEQ ID NO: 610627 - RNA, 22 nt, Human
gaggaacagcagccacaugucc

SEQ ID NO: 610628 - RNA, 22 nt, Human
caaaaacugcaauuacuuuuac

SEQ ID NO: 610629 - RNA, 22 nt, Human
ggaguggugucacugagaggaa

SEQ ID NO: 610630 - RNA, 22 nt, Human
aagcagaugggacuccaaggca

SEQ ID NO: 610631 - RNA, 22 nt, Human
agucaccaucuguggcagccug

SEQ ID NO: 610632 - RNA, 22 nt, Human
gccugggagauuaauuaggaag

SEQ ID NO: 610633 - RNA, 22 nt, Human
cagugggggugaggccgaggua

SEQ ID NO: 610634 - RNA, 22 nt, Human
ucuauuagauuauucucaagga

SEQ ID NO: 610635 - RNA, 22 nt, Human
gggucgggcaggcgcccucguc

SEQ ID NO: 610636 - RNA, 22 nt, Human
ccaggccucccuuuuccagcca

SEQ ID NO: 610637 - RNA, 22 nt, Human
aucagucuguguuagaaaagag

SEQ ID NO: 610638 - RNA, 22 nt, Human
auucuuuccagacacugauugc

SEQ ID NO: 610639 - RNA, 22 nt, Human
ggccagagucuauaugcagaca

SEQ ID NO: 610640 - RNA, 20 nt, Human
ugcugcuuugccacuaguug

SEQ ID NO: 610641 - RNA, 18 nt, Human
guacacaaagucaaagua

SEQ ID NO: 610642 - RNA, 20 nt, Human
uaggcagagcugugcagccu

SEQ ID NO: 610643 - RNA, 18 nt, Human
gaauacugagagcacaaa

SEQ ID NO: 610644 - RNA, 22 nt, Human
gccuccagcuggggcauuucag

SEQ ID NO: 610645 - RNA, 22 nt, Human
gccugcagaggugcugcuagcu

SEQ ID NO: 610646 - RNA, 22 nt, Human
aagaacaguugggaggugagcc

SEQ ID NO: 610647 - RNA, 22 nt, Human
gcuggacaggccacauggagga

SEQ ID NO: 610648 - RNA, 22 nt, Human
cacaggaggcaaugguaagauu

SEQ ID NO: 610649 - RNA, 22 nt, Human
cagaggucaagaucugaaguga

SEQ ID NO: 610650 - RNA, 22 nt, Human
gauucacucauauuuuacguuu

SEQ ID NO: 610651 - RNA, 22 nt, Human
uccuggagagaggccuggaaga

SEQ ID NO: 610652 - RNA, 21 nt, Human
gaccacagggaaggucuugca

SEQ ID NO: 610653 - RNA, 22 nt, Human
ucagaggagaccaaggggaaua

SEQ ID NO: 610654 - RNA, 22 nt, Human
uagaacuuucagaaauuccaaa

SEQ ID NO: 610655 - RNA, 22 nt, Human
ugcaggagaaaguacggagcgu

SEQ ID NO: 610656 - RNA, 22 nt, Human
ucuucagcagggccucucugag

SEQ ID NO: 610657 - RNA, 22 nt, Human
aggcugaggcuggcagcuccag

SEQ ID NO: 610658 - RNA, 21 nt, Human
gggccacaccuucugcagacc

SEQ ID NO: 610659 - RNA, 22 nt, Human
uggcagggaguucguucacaac

SEQ ID NO: 610660 - RNA, 22 nt, Human
cccagcucgccgccgaugugcg

SEQ ID NO: 610661 - RNA, 18 nt, Human
agggagcaucugguugcc

SEQ ID NO: 610662 - RNA, 22 nt, Human
caaugguucucaaacuaucaug

SEQ ID NO: 610663 - RNA, 22 nt, Human
gcuguauuuaacaacuggcuca

SEQ ID NO: 610664 - RNA, 22 nt, Human
auacaaauccucugggauggua

SEQ ID NO: 610665 - RNA, 22 nt, Human
agugcagagagcaauacucuac

SEQ ID NO: 610666 - RNA, 22 nt, Human
cuggcuggucaugucaugagcc

SEQ ID NO: 610667 - RNA, 22 nt, Human
auacuuaacuguggagucauug

SEQ ID NO: 610668 - RNA, 22 nt, Human
aacaauaauugcgguucucuau

SEQ ID NO: 610669 - RNA, 18 nt, Human
aggcacuggaauuaaggg

SEQ ID NO: 610670 - RNA, 22 nt, Human
cuuugggcaaagggccaauucg

SEQ ID NO: 610671 - RNA, 22 nt, Human
aggcuguguggucaugguggcu

SEQ ID NO: 610672 - RNA, 22 nt, Human
ccuuuucuugccacugacucgg

SEQ ID NO: 610673 - RNA, 22 nt, Human
uaaagcaggccacauaugugau

SEQ ID NO: 610674 - RNA, 22 nt, Human
uuucuacaugucaauccaaacc

SEQ ID NO: 610675 - RNA, 22 nt, Human
ucagaggcuucugcucaccuca

SEQ ID NO: 610676 - RNA, 22 nt, Human
ucuccuugacaggcaggcagac

SEQ ID NO: 610677 - RNA, 22 nt, Human
ccacguccagcuaauuuucgua

SEQ ID NO: 610678 - RNA, 22 nt, Human
augugggagauuucaggaggug

SEQ ID NO: 610679 - RNA, 22 nt, Human
guaggcagugguuggaagagaa

SEQ ID NO: 610680 - RNA, 22 nt, Human
gaaugcuggcuuacaggcaguu

SEQ ID NO: 610681 - RNA, 18 nt, Human
cugccuguugcugagagg

SEQ ID NO: 610682 - RNA, 22 nt, Human
acuuuccuggcccuguccucug

SEQ ID NO: 610683 - RNA, 22 nt, Human
acuuuuuaguuuccucaaacau

SEQ ID NO: 610684 - RNA, 22 nt, Human
cugccaggcacgugcagcauca

SEQ ID NO: 610685 - RNA, 22 nt, Human
ccagcagaggggcggagugcag

SEQ ID NO: 610686 - RNA, 20 nt, Human
gcagcagacagacaggggac

SEQ ID NO: 610687 - RNA, 22 nt, Human
cacagaaguuucauagucucga

SEQ ID NO: 610688 - RNA, 22 nt, Human
uguggcagaaccagaauucaaa

SEQ ID NO: 610689 - RNA, 22 nt, Human
cacacaugaaucccuaguaccu

SEQ ID NO: 610690 - RNA, 22 nt, Human
acaauagacaaagugaauggcu

SEQ ID NO: 610691 - RNA, 22 nt, Human
ucagaggaaagggaacauaguc

SEQ ID NO: 610692 - RNA, 22 nt, Human
cagagagaauauguaguaugga

SEQ ID NO: 610693 - RNA, 22 nt, Human
aauggcuucugaagcacacuuu

SEQ ID NO: 610694 - RNA, 22 nt, Human
cuggagcugccagacgggcaca

SEQ ID NO: 610695 - RNA, 22 nt, Human
cacagcuucuccuugauaucgc

SEQ ID NO: 610696 - RNA, 22 nt, Human
acaagaaccaaagaaggauauu

SEQ ID NO: 610697 - RNA, 22 nt, Human
gggcuggggcucaauaauuugu

SEQ ID NO: 610698 - RNA, 22 nt, Human
cuagggucaggggccugcgucg

SEQ ID NO: 610699 - RNA, 22 nt, Human
cucugccaucuuggagcucaag

SEQ ID NO: 610700 - RNA, 22 nt, Human
uuuaaauucugucugccgcuua

SEQ ID NO: 610701 - RNA, 20 nt, Human
aagaggcuguggauccuacu

SEQ ID NO: 610702 - RNA, 22 nt, Human
uaguaacaacaacuagcauuuu

SEQ ID NO: 610703 - RNA, 22 nt, Human
ugguuuuaaaaacaugcugcau

SEQ ID NO: 610704 - RNA, 18 nt, Human
ucccucccugcuguggcc

SEQ ID NO: 610705 - RNA, 22 nt, Human
gcuucuggaggagcugggcuga

SEQ ID NO: 610706 - RNA, 22 nt, Human
cuuauugucuuacaguaauaga

SEQ ID NO: 610707 - RNA, 22 nt, Human
acacuuuagaaaaaagaauggu

SEQ ID NO: 610708 - RNA, 22 nt, Human
ugcccugccaagacucaguggu

SEQ ID NO: 610709 - RNA, 22 nt, Human
cauguaaaaaauuaggucaucu

SEQ ID NO: 610710 - RNA, 22 nt, Human
uuggcaggaauauugcagaggu

SEQ ID NO: 610711 - RNA, 22 nt, Human
cugaggagcugaaggcccucca

SEQ ID NO: 610712 - RNA, 22 nt, Human
uccaggcacuauauauacuuuu

SEQ ID NO: 610713 - RNA, 22 nt, Human
acacagggcagagagcuggcuc

SEQ ID NO: 610714 - RNA, 22 nt, Human
ucaggggcugugcauuucccag

SEQ ID NO: 610715 - RNA, 22 nt, Human
cacagaaaaaggcuugaaaauc

SEQ ID NO: 610716 - RNA, 22 nt, Human
ggggagaauuacauggcgugga

SEQ ID NO: 610717 - RNA, 22 nt, Human
ugaaggcagcaugcacacuagu

SEQ ID NO: 610718 - RNA, 22 nt, Human
acuccugggugcugaccagcgu

SEQ ID NO: 610719 - RNA, 19 nt, Human
ugcaagugucuuggacaag

SEQ ID NO: 610720 - RNA, 22 nt, Human
gccuucccacccugcgaggcug

SEQ ID NO: 610721 - RNA, 22 nt, Human
gcccaggaagccaccgggaagu

SEQ ID NO: 610722 - RNA, 22 nt, Human
gcaggcuugcccggccuccuuc

SEQ ID NO: 610723 - RNA, 22 nt, Human
uccacagcacaaagccagugug

SEQ ID NO: 610724 - RNA, 22 nt, Human
caggugguuaugaggaagguga

SEQ ID NO: 610725 - RNA, 22 nt, Human
aggcuuaaugaguuaaaucacu

SEQ ID NO: 610726 - RNA, 22 nt, Human
uggcagugccccuugaccagug

SEQ ID NO: 610727 - RNA, 22 nt, Human
cugugcccucuuugcuggccuu

SEQ ID NO: 610728 - RNA, 22 nt, Human
uuguauauauucuuaaagaugu

SEQ ID NO: 610729 - RNA, 22 nt, Human
guuuaugaggaaaaguuaugau

SEQ ID NO: 610730 - RNA, 22 nt, Human
caguggguccugcgucugccag

SEQ ID NO: 610731 - RNA, 21 nt, Human
cuccugggcuaagauauagug

SEQ ID NO: 610732 - RNA, 22 nt, Human
agaauuuagcuccuuggucaua

SEQ ID NO: 610733 - RNA, 22 nt, Human
gaggacagcuuagggcuuccug

SEQ ID NO: 610734 - RNA, 20 nt, Human
aguguuugcucacagucucc

SEQ ID NO: 610735 - RNA, 22 nt, Human
auccagguaugaauugugugac

SEQ ID NO: 610736 - RNA, 22 nt, Human
ccauuuuucauaaacuauccaa

SEQ ID NO: 610737 - RNA, 22 nt, Human
ucucccacuggccuuguaugau

SEQ ID NO: 610738 - RNA, 19 nt, Human
aacauggaacuggagaggg

SEQ ID NO: 610739 - RNA, 22 nt, Human
ugccugucuccucugcagggug

SEQ ID NO: 610740 - RNA, 23 nt, Human
gggcccagcacaggaccuggcag

SEQ ID NO: 610741 - RNA, 22 nt, Human
agguuucuggaaagguuuugcu

SEQ ID NO: 610742 - RNA, 22 nt, Human
uccaucaccauuucugcgagcu

SEQ ID NO: 610743 - RNA, 22 nt, Human
gcagacugcgugaggcgccgcc

SEQ ID NO: 610744 - RNA, 22 nt, Human
ggcugcggaucuaaggcuggga

SEQ ID NO: 610745 - RNA, 22 nt, Human
gcuggcugcacaggggcucacu

SEQ ID NO: 610746 - RNA, 22 nt, Human
gcagaggagcaaguugcuacag

SEQ ID NO: 610747 - RNA, 22 nt, Human
ggcaggaggugaguggcgggug

SEQ ID NO: 610748 - RNA, 22 nt, Human
caaugggccuggagagagcugg

SEQ ID NO: 610749 - RNA, 22 nt, Human
ugugaagauuaaguuacugggc

SEQ ID NO: 610750 - RNA, 22 nt, Human
guuagguagaaguuuacuuuga

SEQ ID NO: 610751 - RNA, 22 nt, Human
ucucuguggagcaguguguuca

SEQ ID NO: 610752 - RNA, 22 nt, Human
uguauuuauucaggauguaacu

SEQ ID NO: 610753 - RNA, 22 nt, Human
acagcucugcauuuuggguuaa

SEQ ID NO: 610754 - RNA, 22 nt, Human
cugagccauccauaccagcuua

SEQ ID NO: 610755 - RNA, 22 nt, Human
guagcccaccuggggagggcga

SEQ ID NO: 610756 - RNA, 20 nt, Human
gcccaagguccagaaggggg

SEQ ID NO: 610757 - RNA, 22 nt, Human
ugcauccuucccauuuaaacca

SEQ ID NO: 610758 - RNA, 22 nt, Human
ucugagaacuccggguuagauc

SEQ ID NO: 610759 - RNA, 22 nt, Human
aacaaaugauaccaguucucaa

SEQ ID NO: 610760 - RNA, 22 nt, Human
acaacaguaggaaaacaugucu

SEQ ID NO: 610761 - RNA, 22 nt, Human
uucuacuuuggacauaaaggac

SEQ ID NO: 610762 - RNA, 22 nt, Human
augucuuucuuauggucuguug

SEQ ID NO: 610763 - RNA, 22 nt, Human
agaagugcuccagugaguuggg

SEQ ID NO: 610764 - RNA, 22 nt, Human
uucauucucuuagcauaguccu

SEQ ID NO: 610765 - RNA, 23 nt, Human
uuuaugcagcauguagaacaugg

SEQ ID NO: 610766 - RNA, 22 nt, Human
agauauucuagaaccuaguaga

SEQ ID NO: 610767 - RNA, 22 nt, Human
gcuggcugugauuuugccaaca

SEQ ID NO: 610768 - RNA, 22 nt, Human
acagcucuucuucaagccuggc

SEQ ID NO: 610769 - RNA, 21 nt, Human
uacaugaguguaugagcauau

SEQ ID NO: 610770 - RNA, 19 nt, Human
aacuacagcgcacuguccu

SEQ ID NO: 610771 - RNA, 22 nt, Human
cugcuuuuucuaggaggacaau

SEQ ID NO: 610772 - RNA, 22 nt, Human
cuucugaccccuggucuacagc

SEQ ID NO: 610773 - RNA, 22 nt, Human
uggaaagacauucagccgcugg

SEQ ID NO: 610774 - RNA, 22 nt, Human
ucacuuaaaaauucuaguuaug

SEQ ID NO: 610775 - RNA, 21 nt, Human
auacuuugaauuacagccuug

SEQ ID NO: 610776 - RNA, 22 nt, Human
gcaaggcugcugccacccaucu

SEQ ID NO: 610777 - RNA, 22 nt, Human
ugugaacauuucugguuauuug

SEQ ID NO: 610778 - RNA, 22 nt, Human
aaguccuuuauccuaaaagguc

SEQ ID NO: 610779 - RNA, 22 nt, Human
gggcucuggauggagccugcag

SEQ ID NO: 610780 - RNA, 22 nt, Human
caugaaauauuaguaacuguuu

SEQ ID NO: 610781 - RNA, 22 nt, Human
uguuaagagaguuucuaauauu

SEQ ID NO: 610782 - RNA, 22 nt, Human
ccacuuuggcaccuucugccua

SEQ ID NO: 610783 - RNA, 22 nt, Human
ucugaggcaaacagaggagugu

SEQ ID NO: 610784 - RNA, 22 nt, Human
ccaguggaaauguggucaggau

SEQ ID NO: 610785 - RNA, 22 nt, Human
uggcaguggugucugcacaggc

SEQ ID NO: 610786 - RNA, 21 nt, Human
agaagccauuuguuaggacuu

SEQ ID NO: 610787 - RNA, 22 nt, Human
acuugucuaccaugaauauuua

SEQ ID NO: 610788 - RNA, 22 nt, Human
cucugagcagaggccguggcua

SEQ ID NO: 610789 - RNA, 22 nt, Human
ugagaaaugggucugcugaaga

SEQ ID NO: 610790 - RNA, 22 nt, Human
aaacaugagcacuugcuucaua

SEQ ID NO: 610791 - RNA, 21 nt, Human
agagacagagaaaguaacauu

SEQ ID NO: 610792 - RNA, 22 nt, Human
ggaagaaagcacacaaacuuga

SEQ ID NO: 610793 - RNA, 22 nt, Human
aaggcugaauucaaggguaggc

SEQ ID NO: 610794 - RNA, 22 nt, Human
aaugccaguguguugauuccag

SEQ ID NO: 610795 - RNA, 22 nt, Human
cagguaggaggcucccuagucc

SEQ ID NO: 610796 - RNA, 22 nt, Human
ucuuguuuugaacucaucagga

SEQ ID NO: 610797 - RNA, 22 nt, Human
uccugcuguuuaccuacaaugg

SEQ ID NO: 610798 - RNA, 22 nt, Human
cagcuguguagaugcaggguca

SEQ ID NO: 610799 - RNA, 22 nt, Human
cacugcuauuauuagacaaugu

SEQ ID NO: 610800 - RNA, 22 nt, Human
caggagaaacauaauuuucugg

SEQ ID NO: 610801 - RNA, 18 nt, Human
ucugucuguguugucuuu

SEQ ID NO: 610802 - RNA, 22 nt, Human
cuuacauuaaguaagagauuga

SEQ ID NO: 610803 - RNA, 22 nt, Human
cuuuuucuucuaggugugccug

SEQ ID NO: 610804 - RNA, 22 nt, Human
uauuaugagccaggugcugucu

SEQ ID NO: 610805 - RNA, 22 nt, Human
augcugaagagagaacuacuca

SEQ ID NO: 610806 - RNA, 22 nt, Human
cugaagcagauguggcugagau

SEQ ID NO: 610807 - RNA, 22 nt, Human
gcuguagguaaggauggcaaag

SEQ ID NO: 610808 - RNA, 22 nt, Human
uccuccaguggcccaguccuuc

SEQ ID NO: 610809 - RNA, 22 nt, Human
auucccacagcugguauaaaua

SEQ ID NO: 610810 - RNA, 22 nt, Human
ugugaaauugagaaacuuucac

SEQ ID NO: 610811 - RNA, 23 nt, Human
uggcacagaggaccaugcuuugc

SEQ ID NO: 610812 - RNA, 22 nt, Human
agcagcugguaggaguggccac

SEQ ID NO: 610813 - RNA, 21 nt, Human
cucaggcuggcagcaggcuag

SEQ ID NO: 610814 - RNA, 22 nt, Human
aaggggccucacagaugggcuu

SEQ ID NO: 610815 - RNA, 22 nt, Human
acaugcacacgauucagucugg

SEQ ID NO: 610816 - RNA, 22 nt, Human
uccagccaaucagagcugaggc

SEQ ID NO: 610817 - RNA, 22 nt, Human
cuggagccuucaccaggggaaa

SEQ ID NO: 610818 - RNA, 22 nt, Human
ugguuccuucugcauuuucagc

SEQ ID NO: 610819 - RNA, 21 nt, Human
gggcauccuuucccacccugc

SEQ ID NO: 610820 - RNA, 22 nt, Human
gccuggcuucccuuggagcauu

SEQ ID NO: 610821 - RNA, 23 nt, Human
aggcccugccugucccucuuuuu

SEQ ID NO: 610822 - RNA, 22 nt, Human
ucuggcugacauccuguaugag

SEQ ID NO: 610823 - RNA, 22 nt, Human
uuuuaugugucaaagcaguggu

SEQ ID NO: 610824 - RNA, 22 nt, Human
cugccugccuggagacagaugg

SEQ ID NO: 610825 - RNA, 22 nt, Human
uuuuuugucccagagagccugg

SEQ ID NO: 610826 - RNA, 22 nt, Human
gcaaacauccacugcccuugua

SEQ ID NO: 610827 - RNA, 22 nt, Human
agcucuggaacucccggcugcu

SEQ ID NO: 610828 - RNA, 22 nt, Human
gugcagucccuccucccaaggc

SEQ ID NO: 610829 - RNA, 22 nt, Human
guucagcacaggugcucagaca

SEQ ID NO: 610830 - RNA, 22 nt, Human
uuccuggguugugcauuguaca

SEQ ID NO: 610831 - RNA, 22 nt, Human
auuagaagauagugauuucugc

SEQ ID NO: 610832 - RNA, 20 nt, Human
agguggcucuuccugggcuu

SEQ ID NO: 610833 - RNA, 22 nt, Human
uaucaggaagaacacgugaaau

SEQ ID NO: 610834 - RNA, 20 nt, Human
cugggcaccugucugcaguu

SEQ ID NO: 610835 - RNA, 18 nt, Human
ggcuccagucuucagugg

SEQ ID NO: 610836 - RNA, 20 nt, Human
ugccaggcacggagugcaug

SEQ ID NO: 610837 - RNA, 22 nt, Human
uucauugauuuccuuggaauaa

SEQ ID NO: 610838 - RNA, 19 nt, Human
cgcaggagccgaggugacc

SEQ ID NO: 610839 - RNA, 22 nt, Human
agccacacagcuuaaugacaga

SEQ ID NO: 610840 - RNA, 22 nt, Human
agucccagcucugccacuuacu

SEQ ID NO: 610841 - RNA, 22 nt, Human
acagugcuaaacacuucuugaa

SEQ ID NO: 610842 - RNA, 22 nt, Human
augauacucuaggugauuuaca

SEQ ID NO: 610843 - RNA, 22 nt, Human
agaaaauaaauugaugguggaa

SEQ ID NO: 610844 - RNA, 22 nt, Human
gauaauuuaagucuugggggcu

SEQ ID NO: 610845 - RNA, 22 nt, Human
ugacagucugcaguuuuaaaaa

SEQ ID NO: 610846 - RNA, 22 nt, Human
agcuggcuuugagcugggaggu

SEQ ID NO: 610847 - RNA, 22 nt, Human
auuucuugccccugcucccuga

SEQ ID NO: 610848 - RNA, 20 nt, Human
cugggcucaagugauccucc

SEQ ID NO: 610849 - RNA, 22 nt, Human
ggaggcuccaugagcuccugca

SEQ ID NO: 610850 - RNA, 22 nt, Human
aggccacaggauugcacagcau

SEQ ID NO: 610851 - RNA, 22 nt, Human
aucauuuugugacaaugccugu

SEQ ID NO: 610852 - RNA, 22 nt, Human
aauguuaaguuuagauuauaac

SEQ ID NO: 610853 - RNA, 22 nt, Human
cuguggccuuggaccagcaucu

SEQ ID NO: 610854 - RNA, 22 nt, Human
guuuagauuucaugaagacacu

SEQ ID NO: 610855 - RNA, 22 nt, Human
ugccaggcucagccccuaucuu

SEQ ID NO: 610856 - RNA, 22 nt, Human
uucaaaugauggcaguccuggc

SEQ ID NO: 610857 - RNA, 22 nt, Human
acaagaaagguaggauucaggu

SEQ ID NO: 610858 - RNA, 22 nt, Human
cagagcugggaucccaugggcg

SEQ ID NO: 610859 - RNA, 22 nt, Human
auugaaaggcaaaguaggaagc

SEQ ID NO: 610860 - RNA, 22 nt, Human
ugucugagcgagaaaguagugu

SEQ ID NO: 610861 - RNA, 22 nt, Human
agguggcaguuguggaaccauc

SEQ ID NO: 610862 - RNA, 22 nt, Human
gagaagcaauuuccaacugugc

SEQ ID NO: 610863 - RNA, 22 nt, Human
auugucaucgauguuagccagu

SEQ ID NO: 610864 - RNA, 20 nt, Human
uccaugcaaauacagaguuu

SEQ ID NO: 610865 - RNA, 22 nt, Human
uaugugacuugacaaagcuucc

SEQ ID NO: 610866 - RNA, 22 nt, Human
cagguagggauaugauggugau

SEQ ID NO: 610867 - RNA, 22 nt, Human
uucucaggugaggcugaggcug

SEQ ID NO: 610868 - RNA, 22 nt, Human
agugugggugagggaggcccuc

SEQ ID NO: 610869 - RNA, 22 nt, Human
agcuuugguugaggggagugug

SEQ ID NO: 610870 - RNA, 21 nt, Human
ggcuguggagccaugacucac

SEQ ID NO: 610871 - RNA, 21 nt, Human
ugucucaagaaaggccucucc

SEQ ID NO: 610872 - RNA, 22 nt, Human
cuggacagaaguggcugggcag

SEQ ID NO: 610873 - RNA, 22 nt, Human
ugcuaauguuucauuuuuagau

SEQ ID NO: 610874 - RNA, 22 nt, Human
acagggcagguggcuacugguc

SEQ ID NO: 610875 - RNA, 22 nt, Human
cuggagcagcagguggccaggg

SEQ ID NO: 610876 - RNA, 22 nt, Human
agcagagcccuuccauggccuu

SEQ ID NO: 610877 - RNA, 22 nt, Human
caggcagggagccacuguauaa

SEQ ID NO: 610878 - RNA, 23 nt, Human
acuuuauugaccccaggucaguu

SEQ ID NO: 610879 - RNA, 22 nt, Human
ugcugagcccagaacggccugg

SEQ ID NO: 610880 - RNA, 22 nt, Human
gccucuggucccucaugcugug

SEQ ID NO: 610881 - RNA, 22 nt, Human
ucacuccauagcuuaacucuuu

SEQ ID NO: 610882 - RNA, 22 nt, Human
aagagagaagucucucugguuc

SEQ ID NO: 610883 - RNA, 22 nt, Human
gagggccagaucccaggaggaa

SEQ ID NO: 610884 - RNA, 20 nt, Human
agucacaggccuggaacaug

SEQ ID NO: 610885 - RNA, 22 nt, Human
caguugcagaggcagagugcua

SEQ ID NO: 610886 - RNA, 22 nt, Human
uuauucuuggaucugagucucu

SEQ ID NO: 610887 - RNA, 22 nt, Human
auguuucagggugauagaaggu

SEQ ID NO: 610888 - RNA, 22 nt, Human
cagggcuuggaucuguggucag

SEQ ID NO: 610889 - RNA, 22 nt, Human
acagggcagagggcaguuggua

SEQ ID NO: 610890 - RNA, 22 nt, Human
ugugaaaugaagauaauucuug

SEQ ID NO: 610891 - RNA, 22 nt, Human
ggcaggugcugggagcaucuca

SEQ ID NO: 610892 - RNA, 22 nt, Human
ucacagucggugacuucuugcu

SEQ ID NO: 610893 - RNA, 22 nt, Human
gacaagacuauguagaaaguau

SEQ ID NO: 610894 - RNA, 21 nt, Human
ugacugaggcuucuucacaca

SEQ ID NO: 610895 - RNA, 21 nt, Human
ugcaggaguguaaugugaccc

SEQ ID NO: 610896 - RNA, 22 nt, Human
uuucucucuacaguacuuucau

SEQ ID NO: 610897 - RNA, 22 nt, Human
agccaagggucagcugcacaga

SEQ ID NO: 610898 - RNA, 22 nt, Human
gacagcuucuagaggaauuggu

SEQ ID NO: 610899 - RNA, 22 nt, Human
acacaagucccuccauacucuc

SEQ ID NO: 610900 - RNA, 22 nt, Human
ugugugaguaaggcugagagag

SEQ ID NO: 610901 - RNA, 20 nt, Human
cucugggcugcacccucgcc

SEQ ID NO: 610902 - RNA, 22 nt, Human
aaauggaauguguuuauaauuc

SEQ ID NO: 610903 - RNA, 22 nt, Human
gggugggaaggcuaagggauug

SEQ ID NO: 610904 - RNA, 18 nt, Human
uugagggaggggcagagu

SEQ ID NO: 610905 - RNA, 22 nt, Human
aaaggagacagucuuaccugga

SEQ ID NO: 610906 - RNA, 22 nt, Human
cagagcagagugauuguucugg

SEQ ID NO: 610907 - RNA, 22 nt, Human
uaucucuguaaaagaaaucaca

SEQ ID NO: 610908 - RNA, 22 nt, Human
gcagccucaaacuccccagcuc

SEQ ID NO: 610909 - RNA, 17 nt, Human
cagcugugagagccuua

SEQ ID NO: 610910 - RNA, 22 nt, Human
ucaaggaaggucuguugcucca

SEQ ID NO: 610911 - RNA, 22 nt, Human
uauuaauaagugacuacuagcu

SEQ ID NO: 610912 - RNA, 22 nt, Human
gaagcagcagcuggggacaguu

SEQ ID NO: 610913 - RNA, 22 nt, Human
uuacaguugcccccagccucgc

SEQ ID NO: 610914 - RNA, 22 nt, Human
ccucagcugcuucccuggagcc

SEQ ID NO: 610915 - RNA, 22 nt, Human
uucaguuucagucuugcaaaaa

SEQ ID NO: 610916 - RNA, 22 nt, Human
cuucuggguugcaggucuuggc

SEQ ID NO: 610917 - RNA, 22 nt, Human
augucacaguugcaacaugaau

SEQ ID NO: 610918 - RNA, 22 nt, Human
ugaggcucuccaagcagaugag

SEQ ID NO: 610919 - RNA, 22 nt, Human
gccagccccagacauccuaucg

SEQ ID NO: 610920 - RNA, 22 nt, Human
uagcugccuaugugauaagaga

SEQ ID NO: 610921 - RNA, 22 nt, Human
agacucugcauuucuaauaagc

SEQ ID NO: 610922 - RNA, 22 nt, Human
uccaagcauguggucaggagcc

SEQ ID NO: 610923 - RNA, 22 nt, Human
aggauuugcacugguguuugag

SEQ ID NO: 610924 - RNA, 22 nt, Human
gacuuuaugaagagaugaccaa

SEQ ID NO: 610925 - RNA, 21 nt, Human
acacacuacacauuccuaguu

SEQ ID NO: 610926 - RNA, 22 nt, Human
cuuagugaggaaugaauuuguu

SEQ ID NO: 610927 - RNA, 23 nt, Human
auguaagaguuccaguuacuuug

SEQ ID NO: 610928 - RNA, 22 nt, Human
ucuccccagggguauggguauu

SEQ ID NO: 610929 - RNA, 22 nt, Human
gccgaggcucugcccagcugcu

SEQ ID NO: 610930 - RNA, 23 nt, Human
cccagggacacgaugacaccucc

SEQ ID NO: 610931 - RNA, 22 nt, Human
uucuuacagauuuggugaauga

SEQ ID NO: 610932 - RNA, 21 nt, Human
ucccagggccaggugccauca

SEQ ID NO: 610933 - RNA, 22 nt, Human
uuuuucauugcagccucucucc

SEQ ID NO: 610934 - RNA, 22 nt, Human
ugcagcugguaucccauggauu

SEQ ID NO: 610935 - RNA, 22 nt, Human
uuggcucacaugauuauggagg

SEQ ID NO: 610936 - RNA, 22 nt, Human
agagaauuuuaaaagccuugaa

SEQ ID NO: 610937 - RNA, 21 nt, Human
cacacagcugcccuuagguag

SEQ ID NO: 610938 - RNA, 22 nt, Human
agguuagugcugaaaugacaug

SEQ ID NO: 610939 - RNA, 22 nt, Human
cuauuagaaagcaucuucuaua

SEQ ID NO: 610940 - RNA, 23 nt, Human
uucauuuaggaguucauaagagc

SEQ ID NO: 610941 - RNA, 22 nt, Human
uauguuuuucaagugcacacua

SEQ ID NO: 610942 - RNA, 22 nt, Human
uggcaauaugcuuucaguggcc

SEQ ID NO: 610943 - RNA, 22 nt, Human
ucaggcagagggagaagccaag

SEQ ID NO: 610944 - RNA, 22 nt, Human
gcccagugcugagggugcugcu

SEQ ID NO: 610945 - RNA, 22 nt, Human
agccaggcuaaaugagccauga

SEQ ID NO: 610946 - RNA, 22 nt, Human
aaaugaacucaaugaucuccca

SEQ ID NO: 610947 - RNA, 22 nt, Human
ggugugggcccugaugucagca

SEQ ID NO: 610948 - RNA, 22 nt, Human
cagaaaccugucuggaguggga

SEQ ID NO: 610949 - RNA, 22 nt, Human
uccauggguagcccugguugag

SEQ ID NO: 610950 - RNA, 22 nt, Human
gcaggccaagcccucgcagaga

SEQ ID NO: 610951 - RNA, 18 nt, Human
uaggaggauacugagaug

SEQ ID NO: 610952 - RNA, 22 nt, Human
uuaguaauguguuaauaugaau

SEQ ID NO: 610953 - RNA, 22 nt, Human
cuggcagcgugagcagcaucca

SEQ ID NO: 610954 - RNA, 22 nt, Human
ucuggagugggacuuugcaucu

SEQ ID NO: 610955 - RNA, 22 nt, Human
auaauauuuggauaggacagua

SEQ ID NO: 610956 - RNA, 22 nt, Human
cuacauuucauccagggagagc

SEQ ID NO: 610957 - RNA, 22 nt, Human
uuccuuccauagcaaaacaugc

SEQ ID NO: 610958 - RNA, 22 nt, Human
auuuaauuugugucuuuagcug

SEQ ID NO: 610959 - RNA, 22 nt, Human
uuuugcaaaguacauuaucagg

SEQ ID NO: 610960 - RNA, 22 nt, Human
uaacacaguguccucagaaaca

SEQ ID NO: 610961 - RNA, 22 nt, Human
cccagccugugacagccguccu

SEQ ID NO: 610962 - RNA, 22 nt, Human
ggccuggccuccagaugugggc

SEQ ID NO: 610963 - RNA, 22 nt, Human
ucaaagagcucuaucuucaaaa

SEQ ID NO: 610964 - RNA, 22 nt, Human
accaagcacaaagaugaguaaa

SEQ ID NO: 610965 - RNA, 22 nt, Human
aaguucuuagacaagcuugugg

SEQ ID NO: 610966 - RNA, 22 nt, Human
gcagcccugcagcuccacaccg

SEQ ID NO: 610967 - RNA, 22 nt, Human
uaugcuaaauauguucacauug

SEQ ID NO: 610968 - RNA, 22 nt, Human
uuuguucauuaguacaguugua

SEQ ID NO: 610969 - RNA, 22 nt, Human
cugcuccucugagguagccaca

SEQ ID NO: 610970 - RNA, 22 nt, Human
uauuaaagagagaaucaucauc

SEQ ID NO: 610971 - RNA, 22 nt, Human
auuauugugauaggugucagug

SEQ ID NO: 610972 - RNA, 22 nt, Human
ccuguacacaauuccgaggaua

SEQ ID NO: 610973 - RNA, 23 nt, Human
uaaauuaccuuuccagugcaggg

SEQ ID NO: 610974 - RNA, 22 nt, Human
guguccuucauuggaaucucuc

SEQ ID NO: 610975 - RNA, 22 nt, Human
agcugaggccacgagugaaggg

SEQ ID NO: 610976 - RNA, 22 nt, Human
gggcaugccugcgcagugcaug

SEQ ID NO: 610977 - RNA, 22 nt, Human
ucuuacagaaaauagauaacau

SEQ ID NO: 610978 - RNA, 22 nt, Human
agggcagugggaaagccugcuc

SEQ ID NO: 610979 - RNA, 22 nt, Human
ucagcagggcugugguguggcu

SEQ ID NO: 610980 - RNA, 22 nt, Human
cuuuauuagauguagacuuucu

SEQ ID NO: 610981 - RNA, 22 nt, Human
aaggccagccugagagcuaaca

SEQ ID NO: 610982 - RNA, 22 nt, Human
cuacuucugugaugaaacuaca

SEQ ID NO: 610983 - RNA, 22 nt, Human
guguuaaugguagaaucugagu

SEQ ID NO: 610984 - RNA, 22 nt, Human
agacucugauaagcaacucuug

SEQ ID NO: 610985 - RNA, 22 nt, Human
aggagggcuaggaaaaccagga

SEQ ID NO: 610986 - RNA, 22 nt, Human
aaccaguacuuuacacagcucu

SEQ ID NO: 610987 - RNA, 22 nt, Human
ggacugggagaauggaggcaag

SEQ ID NO: 610988 - RNA, 22 nt, Human
gaagcgcggcgucggcgugggu

SEQ ID NO: 610989 - RNA, 22 nt, Human
agaggcugcacuugcucaugau

SEQ ID NO: 610990 - RNA, 22 nt, Human
cagagccuaaaacgacuccacu

SEQ ID NO: 610991 - RNA, 22 nt, Human
aagcggagcauuugaacuugaa

SEQ ID NO: 610992 - RNA, 22 nt, Human
uucuuacaaacaagaucauuga

SEQ ID NO: 610993 - RNA, 22 nt, Human
uucauauuugaaacagaaguua

SEQ ID NO: 610994 - RNA, 22 nt, Human
aggcucugaggcagauuuucgu

SEQ ID NO: 610995 - RNA, 22 nt, Human
caaagugcugagauuacaggua

SEQ ID NO: 610996 - RNA, 22 nt, Human
cauuuagaagucuuagaacuau

SEQ ID NO: 610997 - RNA, 22 nt, Human
gcaggcagagucaauuugaucc

SEQ ID NO: 610998 - RNA, 22 nt, Human
acauucuuugaguuuuguuaaa

SEQ ID NO: 610999 - RNA, 22 nt, Human
gagcugccuguugcauagcaac

SEQ ID NO: 611000 - RNA, 22 nt, Human
uuuguucugaaaacucaagucc

SEQ ID NO: 611001 - RNA, 22 nt, Human
uuagaaguucaggucuguaauc

SEQ ID NO: 611002 - RNA, 22 nt, Human
aaugauaagacaugaguagagg

SEQ ID NO: 611003 - RNA, 22 nt, Human
ugagguagcuguuuagaaagac

SEQ ID NO: 611004 - RNA, 22 nt, Human
ugcucuggguucuugcuguuac

SEQ ID NO: 611005 - RNA, 22 nt, Human
ccagaccacccuggccaugcac

SEQ ID NO: 611006 - RNA, 22 nt, Human
cuguucucuggcgguggcuguu

SEQ ID NO: 611007 - RNA, 22 nt, Human
accuuucauuaaagucuguagu

SEQ ID NO: 611008 - RNA, 22 nt, Human
ugugacagaucuuuaaauaaug

SEQ ID NO: 611009 - RNA, 22 nt, Human
cagacacuaugcuaagguacua

SEQ ID NO: 611010 - RNA, 22 nt, Human
aguggagacaggacagucgaua

SEQ ID NO: 611011 - RNA, 22 nt, Human
cagccaggagcucccccugcuc

SEQ ID NO: 611012 - RNA, 22 nt, Human
ugagauggugaagaagacagca

SEQ ID NO: 611013 - RNA, 22 nt, Human
auuaaaugguggucauucauuu

SEQ ID NO: 611014 - RNA, 22 nt, Human
cuucuccagccacgcccacucc

SEQ ID NO: 611015 - RNA, 21 nt, Human
cuacuuaaguaggggauuagg

SEQ ID NO: 611016 - RNA, 22 nt, Human
ugauauuuuucacuggccucug

SEQ ID NO: 611017 - RNA, 18 nt, Human
ugagacagcuaccacuug

SEQ ID NO: 611018 - RNA, 22 nt, Human
uaccauuucaguaaaaacuuag

SEQ ID NO: 611019 - RNA, 22 nt, Human
aagacaaucuaaggggaauggu

SEQ ID NO: 611020 - RNA, 22 nt, Human
aucuuucagagcuccaucaggg

SEQ ID NO: 611021 - RNA, 22 nt, Human
aaugauaugcaaauuaucauca

SEQ ID NO: 611022 - RNA, 22 nt, Human
ugucccuggagcuucugucccc

SEQ ID NO: 611023 - RNA, 22 nt, Human
caaaccuugcagaacugggcag

SEQ ID NO: 611024 - RNA, 22 nt, Human
ugaggcuccuuguagagagugg

SEQ ID NO: 611025 - RNA, 22 nt, Human
cagcaggcucugaguggcugcc

SEQ ID NO: 611026 - RNA, 22 nt, Human
uauuuauucuuuguacugccuu

SEQ ID NO: 611027 - RNA, 23 nt, Human
gcuguacaggaaccaguuuggag

SEQ ID NO: 611028 - RNA, 23 nt, Human
cugggccuauggucugaauccaa

SEQ ID NO: 611029 - RNA, 22 nt, Human
gacugagggauagaggugcuuc

SEQ ID NO: 611030 - RNA, 22 nt, Human
uggcuuccuguuucccagaaag

SEQ ID NO: 611031 - RNA, 22 nt, Human
uccaagcuugcuuuagccacag

SEQ ID NO: 611032 - RNA, 22 nt, Human
aguacaaauuauagcgcuugga

SEQ ID NO: 611033 - RNA, 22 nt, Human
uacacuuuucugguuacucuug

SEQ ID NO: 611034 - RNA, 22 nt, Human
gcagcagcucagccgggcacug

SEQ ID NO: 611035 - RNA, 22 nt, Human
aggcugguaguauuuagucaca

SEQ ID NO: 611036 - RNA, 22 nt, Human
uguaagaugcugggauagauga

SEQ ID NO: 611037 - RNA, 22 nt, Human
guggaaaacugagaaaauugcu

SEQ ID NO: 611038 - RNA, 22 nt, Human
cugaggucaccccacuggcugu

SEQ ID NO: 611039 - RNA, 22 nt, Human
aggagcugucagagugccagag

SEQ ID NO: 611040 - RNA, 22 nt, Human
auggaauaggcugcucuuuaaa

SEQ ID NO: 611041 - RNA, 22 nt, Human
aaacaaugagcuuuuacacacu

SEQ ID NO: 611042 - RNA, 22 nt, Human
ucugccagguggggagaggcca

SEQ ID NO: 611043 - RNA, 22 nt, Human
ugcaguguuuuucagggcauau

SEQ ID NO: 611044 - RNA, 18 nt, Human
auucuagaagaugccuug

SEQ ID NO: 611045 - RNA, 22 nt, Human
uccuaacuccacuagccuuggg

SEQ ID NO: 611046 - RNA, 22 nt, Human
cacaugaguccugccagguaug

SEQ ID NO: 611047 - RNA, 22 nt, Human
gccaggggacgcggagcgacga

SEQ ID NO: 611048 - RNA, 22 nt, Human
acauacacaagcguacaugaac

SEQ ID NO: 611049 - RNA, 22 nt, Human
acacuggguaacauaucuguua

SEQ ID NO: 611050 - RNA, 22 nt, Human
ucagcugagcuccagcucauag

SEQ ID NO: 611051 - RNA, 22 nt, Human
cccugcagacgucuugaugccu

SEQ ID NO: 611052 - RNA, 22 nt, Human
caaaugcaggucagcagguguc

SEQ ID NO: 611053 - RNA, 22 nt, Human
uuuuuuaucuaugguaguacca

SEQ ID NO: 611054 - RNA, 22 nt, Human
acugggagggucuugaagaggg

SEQ ID NO: 611055 - RNA, 22 nt, Human
uagcugccaaaagggugggcua

SEQ ID NO: 611056 - RNA, 19 nt, Human
gcagccaggugcucuaccu

SEQ ID NO: 611057 - RNA, 22 nt, Human
aggagucacucagggcuucauc

SEQ ID NO: 611058 - RNA, 22 nt, Human
uaaaguuggaccugauuuuauu

SEQ ID NO: 611059 - RNA, 22 nt, Human
cagcagacuuacuagaauguaa

SEQ ID NO: 611060 - RNA, 22 nt, Human
aaaaucuaaguagcgaguaagg

SEQ ID NO: 611061 - RNA, 22 nt, Human
gaggaaggucccaucagaauuu

SEQ ID NO: 611062 - RNA, 22 nt, Human
ucgaacucauagucguagcugu

SEQ ID NO: 611063 - RNA, 19 nt, Human
caugcugaccugcuguggu

SEQ ID NO: 611064 - RNA, 19 nt, Human
ggagacucagcccaugccu

SEQ ID NO: 611065 - RNA, 20 nt, Human
aagcuggaagaccagcauug

SEQ ID NO: 611066 - RNA, 22 nt, Human
caacagcuuuagaaacacuuuc

SEQ ID NO: 611067 - RNA, 22 nt, Human
cucugacagccuucauuaugca

SEQ ID NO: 611068 - RNA, 22 nt, Human
uaaaugcuccauacauacacca

SEQ ID NO: 611069 - RNA, 22 nt, Human
aaaaagauagcauugugcuccu

SEQ ID NO: 611070 - RNA, 22 nt, Human
ugcaguuuugccaggcaaugga

SEQ ID NO: 611071 - RNA, 18 nt, Human
acauuuaggagagucaau

SEQ ID NO: 611072 - RNA, 21 nt, Human
aucugaaguuugagaggaaag

SEQ ID NO: 611073 - RNA, 22 nt, Human
agugcaaagaaaucagcuuugu

SEQ ID NO: 611074 - RNA, 22 nt, Human
uggaggucuuacccagggcuau

SEQ ID NO: 611075 - RNA, 22 nt, Human
ugcuaaauucauuauugauuua

SEQ ID NO: 611076 - RNA, 22 nt, Human
uguguucaucuuuaaagggaag

SEQ ID NO: 611077 - RNA, 22 nt, Human
auucucuggguuccaguaaaug

SEQ ID NO: 611078 - RNA, 19 nt, Human
ggcagcucuugucuucugc

SEQ ID NO: 611079 - RNA, 22 nt, Human
cagagccugcucacgucucugu

SEQ ID NO: 611080 - RNA, 22 nt, Human
agacccagaaagcagcugcauu

SEQ ID NO: 611081 - RNA, 22 nt, Human
gggcaucuuguagccuucacuu

SEQ ID NO: 611082 - RNA, 22 nt, Human
aguccagggagcccaggcuuug

SEQ ID NO: 611083 - RNA, 23 nt, Human
agcagguagguugaaauuuuccu

SEQ ID NO: 611084 - RNA, 22 nt, Human
ucauuccuuauccguaucuuuu

SEQ ID NO: 611085 - RNA, 22 nt, Human
caggcuggcaaugcgucaagca

SEQ ID NO: 611086 - RNA, 22 nt, Human
aggaaggagggcagauauuaag

SEQ ID NO: 611087 - RNA, 22 nt, Human
gggauaggagauugggaguguu

SEQ ID NO: 611088 - RNA, 22 nt, Human
agggcagcauugccuuucucca

SEQ ID NO: 611089 - RNA, 23 nt, Human
uagggcagcugggagggacaugc

SEQ ID NO: 611090 - RNA, 22 nt, Human
uguguguguuuacaguuucuca

SEQ ID NO: 611091 - RNA, 22 nt, Human
ggcaggagcucuccaguuugcc

SEQ ID NO: 611092 - RNA, 17 nt, Human
agcugccuugcuugagc

SEQ ID NO: 611093 - RNA, 22 nt, Human
ccugccugcaccuucucugggg

SEQ ID NO: 611094 - RNA, 22 nt, Human
ugccacuggcucaauggugcag

SEQ ID NO: 611095 - RNA, 22 nt, Human
gcuuaaaagccacuuagucuau

SEQ ID NO: 611096 - RNA, 22 nt, Human
gucuccuggcugcagcuaagac

SEQ ID NO: 611097 - RNA, 22 nt, Human
agcagggggccacagucacagc

SEQ ID NO: 611098 - RNA, 22 nt, Human
gcgcgcuaccgccagggcugca

SEQ ID NO: 611099 - RNA, 20 nt, Human
uaacugaucauuuucaccag

SEQ ID NO: 611100 - RNA, 22 nt, Human
aagcagauuggggauuuccaug

SEQ ID NO: 611101 - RNA, 22 nt, Human
cugggcucuagaaaggaaagaa

SEQ ID NO: 611102 - RNA, 22 nt, Human
ccuggggcuccagagcagcgga

SEQ ID NO: 611103 - RNA, 19 nt, Human
ugcagccacgugagagacu

SEQ ID NO: 611104 - RNA, 18 nt, Human
acauuucuaugcuucugg

SEQ ID NO: 611105 - RNA, 22 nt, Human
ggacccugggcucugggccuau

SEQ ID NO: 611106 - RNA, 22 nt, Human
ucugcaagcgucacaugauucu

SEQ ID NO: 611107 - RNA, 21 nt, Human
gcccagugauuucuucacagu

SEQ ID NO: 611108 - RNA, 22 nt, Human
cucuccuuuacugcagagagcg

SEQ ID NO: 611109 - RNA, 22 nt, Human
ugccgcagugcggggagggccc

SEQ ID NO: 611110 - RNA, 22 nt, Human
guccugucccccaaggcugugg

SEQ ID NO: 611111 - RNA, 22 nt, Human
uauguagcaauagcaucauacu

SEQ ID NO: 611112 - RNA, 22 nt, Human
gcugguccugggguugcagcau

SEQ ID NO: 611113 - RNA, 22 nt, Human
uccaucugguggcuuccuuuug

SEQ ID NO: 611114 - RNA, 22 nt, Human
uucuauguagauaaggcugcuc

SEQ ID NO: 611115 - RNA, 22 nt, Human
ggcugguccuuucucuguccua

SEQ ID NO: 611116 - RNA, 22 nt, Human
uagaaagaucuguaggcaagag

SEQ ID NO: 611117 - RNA, 22 nt, Human
ggaaagggcagaggccuuggag

SEQ ID NO: 611118 - RNA, 22 nt, Human
uuucauagccuucuaaugaguu

SEQ ID NO: 611119 - RNA, 22 nt, Human
gucauucaacugcacauuaggu

SEQ ID NO: 611120 - RNA, 22 nt, Human
uauugugccagguaauguguuc

SEQ ID NO: 611121 - RNA, 22 nt, Human
gggcagaggggcgcuucccucu

SEQ ID NO: 611122 - RNA, 22 nt, Human
cacugcaacaaccucuaccucc

SEQ ID NO: 611123 - RNA, 22 nt, Human
gcuucagcuuugucuccuuggg

SEQ ID NO: 611124 - RNA, 22 nt, Human
cauaauaucuccgauuacuugc

SEQ ID NO: 611125 - RNA, 22 nt, Human
cugggccacaucagaugaagac

SEQ ID NO: 611126 - RNA, 19 nt, Human
acucugaggcugagacaag

SEQ ID NO: 611127 - RNA, 22 nt, Human
ccaggcuuuuagcugcauggca

SEQ ID NO: 611128 - RNA, 22 nt, Human
aacuucuugguccugagcuguu

SEQ ID NO: 611129 - RNA, 22 nt, Human
augaagcaguuaaggugcauga

SEQ ID NO: 611130 - RNA, 22 nt, Human
caggguggcaggcaccauggcc

SEQ ID NO: 611131 - RNA, 22 nt, Human
caggccaaagaucccauugaca

SEQ ID NO: 611132 - RNA, 22 nt, Human
uggagguggggcucaggaaucu

SEQ ID NO: 611133 - RNA, 22 nt, Human
gcagcugcagguggucccaugc

SEQ ID NO: 611134 - RNA, 22 nt, Human
ccagccagucccgcaugaccgc

SEQ ID NO: 611135 - RNA, 21 nt, Human
gaggccacuaauaggggcaga

SEQ ID NO: 611136 - RNA, 22 nt, Human
cuggagaaguacugagacauuu

SEQ ID NO: 611137 - RNA, 22 nt, Human
gcacacagagaggugguauguc

SEQ ID NO: 611138 - RNA, 21 nt, Human
agguggggcugcaccucugcu

SEQ ID NO: 611139 - RNA, 22 nt, Human
ugagagauuuucaugagugcuu

SEQ ID NO: 611140 - RNA, 22 nt, Human
aauaucuucuaaggauagaacu

SEQ ID NO: 611141 - RNA, 22 nt, Human
gaaaauuuagaacugaacuucu

SEQ ID NO: 611142 - RNA, 22 nt, Human
aggcucugugcagccugcaucu

SEQ ID NO: 611143 - RNA, 22 nt, Human
gcucucagggugauggcauacu

SEQ ID NO: 611144 - RNA, 22 nt, Human
gagcccagcuguccuuggcaaa

SEQ ID NO: 611145 - RNA, 22 nt, Human
acauccgcagguuauaaagccc

SEQ ID NO: 611146 - RNA, 22 nt, Human
acagccagaucugagagaucuu

SEQ ID NO: 611147 - RNA, 20 nt, Human
cccagagguugcggcaggag

SEQ ID NO: 611148 - RNA, 22 nt, Human
acuguauagauggaguugauuu

SEQ ID NO: 611149 - RNA, 22 nt, Human
ggaagaaaucugguuaagagau

SEQ ID NO: 611150 - RNA, 22 nt, Human
uacauguauugauuucucuucu

SEQ ID NO: 611151 - RNA, 22 nt, Human
ucugaaaacuccaugagcucgu

SEQ ID NO: 611152 - RNA, 22 nt, Human
caguuccuaugggcaaaacaca

SEQ ID NO: 611153 - RNA, 23 nt, Human
agcaggaaaccgagggugauguu

SEQ ID NO: 611154 - RNA, 22 nt, Human
auguacaucuuuauaacaagcu

SEQ ID NO: 611155 - RNA, 22 nt, Human
aaggcuuguagauuugggcuuu

SEQ ID NO: 611156 - RNA, 22 nt, Human
caccagggacaaugcuaggggu

SEQ ID NO: 611157 - RNA, 22 nt, Human
ucugagcugugaguugcuuagg

SEQ ID NO: 611158 - RNA, 22 nt, Human
aguuacaugugaauagaaagua

SEQ ID NO: 611159 - RNA, 22 nt, Human
cuguggauuuaggcagagcuga

SEQ ID NO: 611160 - RNA, 22 nt, Human
uuccuguuagccauuauuagcu

SEQ ID NO: 611161 - RNA, 22 nt, Human
cucugcagaauuugagcugcuc

SEQ ID NO: 611162 - RNA, 22 nt, Human
cagaauuuagaaaacaacauaa

SEQ ID NO: 611163 - RNA, 22 nt, Human
ugggcaaguaucggacucugag

SEQ ID NO: 611164 - RNA, 22 nt, Human
acaucuguccucugcagagcuc

SEQ ID NO: 611165 - RNA, 22 nt, Human
acacuuuacagaauguuuugau

SEQ ID NO: 611166 - RNA, 21 nt, Human
agagcugggacuugccugaga

SEQ ID NO: 611167 - RNA, 19 nt, Human
augaagcauuguuuuugua

SEQ ID NO: 611168 - RNA, 22 nt, Human
cucugaagccccaaauaguccg

SEQ ID NO: 611169 - RNA, 22 nt, Human
ccacccugccuugggccaguga

SEQ ID NO: 611170 - RNA, 22 nt, Human
cuggaauguagagacagcuuag

SEQ ID NO: 611171 - RNA, 22 nt, Human
cugagccauaagggaggcuggg

SEQ ID NO: 611172 - RNA, 22 nt, Human
cuuguauagggaaagauaaauc

SEQ ID NO: 611173 - RNA, 22 nt, Human
caggcacuguguuaggcacugu

SEQ ID NO: 611174 - RNA, 22 nt, Human
cccacagguggaagccucggaa

SEQ ID NO: 611175 - RNA, 22 nt, Human
agcaggcaggcccagcggcugg

SEQ ID NO: 611176 - RNA, 21 nt, Human
gcagccacagccaccaagcua

SEQ ID NO: 611177 - RNA, 19 nt, Human
ugcuccaggccuugccgca

SEQ ID NO: 611178 - RNA, 22 nt, Human
ugcuccuucccuucccagugag

SEQ ID NO: 611179 - RNA, 22 nt, Human
guggagaggagcagcuaccuca

SEQ ID NO: 611180 - RNA, 23 nt, Human
acuagaaaaugacuuucucccug

SEQ ID NO: 611181 - RNA, 22 nt, Human
uauuuucuggggagagugaacc

SEQ ID NO: 611182 - RNA, 22 nt, Human
gucaggacucugacccgucccg

SEQ ID NO: 611183 - RNA, 22 nt, Human
caugauggaugugcacuucgcu

SEQ ID NO: 611184 - RNA, 22 nt, Human
agaggaugauuuuaaggacacu

SEQ ID NO: 611185 - RNA, 22 nt, Human
uuauucacucauuuaacauuau

SEQ ID NO: 611186 - RNA, 22 nt, Human
uuuaaggagcuacucaccguca

SEQ ID NO: 611187 - RNA, 22 nt, Human
gugacaaaugcaaauugggcug

SEQ ID NO: 611188 - RNA, 22 nt, Human
ucuguuagagagguaguucuug

SEQ ID NO: 611189 - RNA, 22 nt, Human
agcuggcuucucugcagacauu

SEQ ID NO: 611190 - RNA, 22 nt, Human
aggaagggugucaugagcccuu

SEQ ID NO: 611191 - RNA, 22 nt, Human
caaguuuugauuuugcaguaaa

SEQ ID NO: 611192 - RNA, 22 nt, Human
gccaggcugcuggcugcugucc

SEQ ID NO: 611193 - RNA, 22 nt, Human
agcugccugggcuuguacaccu

SEQ ID NO: 611194 - RNA, 22 nt, Human
ccuggucagagcagucaggauc

SEQ ID NO: 611195 - RNA, 22 nt, Human
caaguuugcugauccuuguuuu

SEQ ID NO: 611196 - RNA, 22 nt, Human
gaucgaguuguuuguucugggg

SEQ ID NO: 611197 - RNA, 22 nt, Human
auguuuuauauuuugcagcagu

SEQ ID NO: 611198 - RNA, 20 nt, Human
agcaggaaugaugcuuucau

SEQ ID NO: 611199 - RNA, 22 nt, Human
ccacuguaaccauuaucaccau

SEQ ID NO: 611200 - RNA, 22 nt, Human
aaguuuuaacaaguacuuacua

SEQ ID NO: 611201 - RNA, 22 nt, Human
caucuuaaaaugugucauaacu

SEQ ID NO: 611202 - RNA, 22 nt, Human
agggcgaggagacggaggcaca

SEQ ID NO: 611203 - RNA, 22 nt, Human
ucuuucggccauagcgaugauu

SEQ ID NO: 611204 - RNA, 22 nt, Human
ugcagggcacggugcgcguggg

SEQ ID NO: 611205 - RNA, 22 nt, Human
cagcucccgccaucgggaggca

SEQ ID NO: 611206 - RNA, 22 nt, Human
aucaguaggccaagcagcuggc

SEQ ID NO: 611207 - RNA, 22 nt, Human
uggccugucuuguugugcuaga

SEQ ID NO: 611208 - RNA, 22 nt, Human
cugagguggcauccuagcucua

SEQ ID NO: 611209 - RNA, 22 nt, Human
uaagaggcauuagagacauagc

SEQ ID NO: 611210 - RNA, 22 nt, Human
uucauacaaugggauauuauga

SEQ ID NO: 611211 - RNA, 22 nt, Human
uccaggagaccagauguaggcc

SEQ ID NO: 611212 - RNA, 22 nt, Human
uccugagguggauugagcagag

SEQ ID NO: 611213 - RNA, 22 nt, Human
auacuuaugauaaauaauugcu

SEQ ID NO: 611214 - RNA, 22 nt, Human
uacaagagcaguaagcuugucc

SEQ ID NO: 611215 - RNA, 20 nt, Human
ucaggcaguggggaaaggca

SEQ ID NO: 611216 - RNA, 22 nt, Human
gcaauacaguagguuuauuggu

SEQ ID NO: 611217 - RNA, 22 nt, Human
ucccugggcaucacguugcuuc

SEQ ID NO: 611218 - RNA, 22 nt, Human
cccuccauuaaaacagaccuau

SEQ ID NO: 611219 - RNA, 19 nt, Human
uugcugaaggaagccucug

SEQ ID NO: 611220 - RNA, 22 nt, Human
uuuaucuuuaggacuuugcaga

SEQ ID NO: 611221 - RNA, 22 nt, Human
ggcuugaagacuaugacauuuc

SEQ ID NO: 611222 - RNA, 20 nt, Human
gucuuguagcucaaguuauu

SEQ ID NO: 611223 - RNA, 22 nt, Human
uucaauucaauucuaaauauau

SEQ ID NO: 611224 - RNA, 17 nt, Human
ccagcugcucccucaga

SEQ ID NO: 611225 - RNA, 22 nt, Human
uggcucuguucgccaucaggag

SEQ ID NO: 611226 - RNA, 17 nt, Human
ggugaguguccaggugg

SEQ ID NO: 611227 - RNA, 22 nt, Human
gugcagugaaaaaagaaugucc

SEQ ID NO: 611228 - RNA, 22 nt, Human
cugucuccgcccucuugguagg

SEQ ID NO: 611229 - RNA, 22 nt, Human
cuucuucccagcuucccucacc

SEQ ID NO: 611230 - RNA, 22 nt, Human
guguuuucucuccagcaggcag

SEQ ID NO: 611231 - RNA, 22 nt, Human
ugcauguuaagaaaauauugag

SEQ ID NO: 611232 - RNA, 22 nt, Human
uccagaggcaaaaagguaugga

SEQ ID NO: 611233 - RNA, 22 nt, Human
ucucugugagauuuguauuaag

SEQ ID NO: 611234 - RNA, 22 nt, Human
uucuggaaguguuagaaucugg

SEQ ID NO: 611235 - RNA, 22 nt, Human
gcagcugcaauaggcaucaagc

SEQ ID NO: 611236 - RNA, 22 nt, Human
aauacagauauucagugguacu

SEQ ID NO: 611237 - RNA, 22 nt, Human
agccuucucugaaauucuguuu

SEQ ID NO: 611238 - RNA, 22 nt, Human
uaaguuucuccaaagcacagaa

SEQ ID NO: 611239 - RNA, 22 nt, Human
ggacacuguauaaguuagagua

SEQ ID NO: 611240 - RNA, 22 nt, Human
uacaaagucacauugaaaugaa

SEQ ID NO: 611241 - RNA, 20 nt, Human
uaugcaguauguguguauaa

SEQ ID NO: 611242 - RNA, 22 nt, Human
ggagcugggacccugucaucug

SEQ ID NO: 611243 - RNA, 22 nt, Human
gucaggggaugugcugguggcc

SEQ ID NO: 611244 - RNA, 22 nt, Human
agguuggcugcucuuuuccuaa

SEQ ID NO: 611245 - RNA, 22 nt, Human
uggugcugacaguucugagugc

SEQ ID NO: 611246 - RNA, 22 nt, Human
gucugcccucacgccagcuggg

SEQ ID NO: 611247 - RNA, 17 nt, Human
cugggauguggacucuu

SEQ ID NO: 611248 - RNA, 22 nt, Human
aggagcccagccugggcucgga

SEQ ID NO: 611249 - RNA, 22 nt, Human
ggaccuggcaauuugcaucucu

SEQ ID NO: 611250 - RNA, 22 nt, Human
uuucagaaauggcacugaaauc

SEQ ID NO: 611251 - RNA, 22 nt, Human
agcaguuaccaaggaaccuggu

SEQ ID NO: 611252 - RNA, 22 nt, Human
ugucugaaagaggacgagcugg

SEQ ID NO: 611253 - RNA, 22 nt, Human
agcugagguugaagagugaacg

SEQ ID NO: 611254 - RNA, 22 nt, Human
auguuucugaaguuuacagaua

SEQ ID NO: 611255 - RNA, 22 nt, Human
gcccugagccaccaaugccauu

SEQ ID NO: 611256 - RNA, 22 nt, Human
uguguuggaaauagggucuuug

SEQ ID NO: 611257 - RNA, 22 nt, Human
uuauugaaauggaagcuauaac

SEQ ID NO: 611258 - RNA, 22 nt, Human
agagcuggccagggaucacucu

SEQ ID NO: 611259 - RNA, 22 nt, Human
auucuguguguacugagauggg

SEQ ID NO: 611260 - RNA, 22 nt, Human
cugggccuugcaucccagagcc

SEQ ID NO: 611261 - RNA, 22 nt, Human
aaggggagaugucaugggcccu

SEQ ID NO: 611262 - RNA, 22 nt, Human
ucaggaaaguguucucagagga

SEQ ID NO: 611263 - RNA, 22 nt, Human
gagaggauccacaaaccaggaa

SEQ ID NO: 611264 - RNA, 21 nt, Human
agggaaauccagucacuuuuc

SEQ ID NO: 611265 - RNA, 19 nt, Human
agauggggaagagugugag

SEQ ID NO: 611266 - RNA, 22 nt, Human
cugaaugauauaagaucuuucu

SEQ ID NO: 611267 - RNA, 22 nt, Human
gggugggacugaagucugaggg

SEQ ID NO: 611268 - RNA, 22 nt, Human
acuauaaaaggauaaaccagaa

SEQ ID NO: 611269 - RNA, 22 nt, Human
uaauauacuucccauaguuuga

SEQ ID NO: 611270 - RNA, 22 nt, Human
aagcagaauuucccacuaguug

SEQ ID NO: 611271 - RNA, 19 nt, Human
acuuccugcccgcuccuuu

SEQ ID NO: 611272 - RNA, 22 nt, Human
uucaauucuaaacuaauauucu

SEQ ID NO: 611273 - RNA, 22 nt, Human
ccuguguggaaaccgcaugacg

SEQ ID NO: 611274 - RNA, 18 nt, Human
uccugccugcgggcuccc

SEQ ID NO: 611275 - RNA, 22 nt, Human
uuccagagguucucagcccugu

SEQ ID NO: 611276 - RNA, 22 nt, Human
uaugugacauaucucaguuuga

SEQ ID NO: 611277 - RNA, 22 nt, Human
ugggcagagucguggggaauag

SEQ ID NO: 611278 - RNA, 22 nt, Human
uuagugucucaccuaaaaucug

SEQ ID NO: 611279 - RNA, 22 nt, Human
ugacauugugugcauuuaaagu

SEQ ID NO: 611280 - RNA, 22 nt, Human
cccuggagcaucucugcugucu

SEQ ID NO: 611281 - RNA, 22 nt, Human
cugaaugaguggauuuuucauu

SEQ ID NO: 611282 - RNA, 22 nt, Human
aaggaagaagacucuuuacucc

SEQ ID NO: 611283 - RNA, 19 nt, Human
gaggaacuggcuugguucc

SEQ ID NO: 611284 - RNA, 22 nt, Human
uccaguuuauuuuuggcagggu

SEQ ID NO: 611285 - RNA, 22 nt, Human
auauuuaaacaggguaccaaua

SEQ ID NO: 611286 - RNA, 22 nt, Human
cuccaacgaggcugggguacaa

SEQ ID NO: 611287 - RNA, 22 nt, Human
aggcaguucucguguguguccc

SEQ ID NO: 611288 - RNA, 22 nt, Human
ugcugaaucaaaacaaagguuu

SEQ ID NO: 611289 - RNA, 22 nt, Human
cucuccuuugaagcaacuguau

SEQ ID NO: 611290 - RNA, 22 nt, Human
cuguguuucugagaagugggga

SEQ ID NO: 611291 - RNA, 20 nt, Human
aguuuauuccaggagaacug

SEQ ID NO: 611292 - RNA, 18 nt, Human
agccaaggaggaggagga

SEQ ID NO: 611293 - RNA, 22 nt, Human
aaaugcacgcuacccagcuaga

SEQ ID NO: 611294 - RNA, 22 nt, Human
uuugcaaauacagaggucuugc

SEQ ID NO: 611295 - RNA, 22 nt, Human
aggcuugacugcugauuuugcc

SEQ ID NO: 611296 - RNA, 22 nt, Human
ccuggguuaguaucuguuucca

SEQ ID NO: 611297 - RNA, 22 nt, Human
ucacuggggagcacugacaugu

SEQ ID NO: 611298 - RNA, 22 nt, Human
uccauggggcccaggaugagag

SEQ ID NO: 611299 - RNA, 22 nt, Human
cuaacuacaagcggggcauccu

SEQ ID NO: 611300 - RNA, 22 nt, Human
ugauauuuuaugagcuuucaua

SEQ ID NO: 611301 - RNA, 22 nt, Human
cuugggugugaccuuggcauug

SEQ ID NO: 611302 - RNA, 22 nt, Human
gccuccccaaagugcugacagc

SEQ ID NO: 611303 - RNA, 22 nt, Human
agccaguuuccagauauuaacu

SEQ ID NO: 611304 - RNA, 22 nt, Human
caacacagguucugcaaaggaa

SEQ ID NO: 611305 - RNA, 22 nt, Human
aaucuucuuucuuaacaguaca

SEQ ID NO: 611306 - RNA, 19 nt, Human
auggcucugggaucacugc

SEQ ID NO: 611307 - RNA, 22 nt, Human
augcugaaauuuauugguaagg

SEQ ID NO: 611308 - RNA, 17 nt, Human
ggccagaggcggggcug

SEQ ID NO: 611309 - RNA, 22 nt, Human
ucuguacuuccuuuaaacuuua

SEQ ID NO: 611310 - RNA, 22 nt, Human
caguccuugcuaugacccugag

SEQ ID NO: 611311 - RNA, 22 nt, Human
cugcagggagaggggacagccu

SEQ ID NO: 611312 - RNA, 22 nt, Human
acugcaacaccuccuggguuca

SEQ ID NO: 611313 - RNA, 22 nt, Human
gggcacuguacacugugcaugg

SEQ ID NO: 611314 - RNA, 22 nt, Human
gggauggggagcuggaaagggg

SEQ ID NO: 611315 - RNA, 22 nt, Human
caccugagugucaguauucuca

SEQ ID NO: 611316 - RNA, 22 nt, Human
uggccucugcaauggauucacc

SEQ ID NO: 611317 - RNA, 22 nt, Human
agcagggguggaagguagcuuu

SEQ ID NO: 611318 - RNA, 22 nt, Human
acaauaauguauugccaaaagu

SEQ ID NO: 611319 - RNA, 22 nt, Human
uaguauuugcagauuuguguca

SEQ ID NO: 611320 - RNA, 19 nt, Human
ucucucuguacauuagaua

SEQ ID NO: 611321 - RNA, 22 nt, Human
cuccucucuggaguuaugcaga

SEQ ID NO: 611322 - RNA, 22 nt, Human
augggcagacagggagcucacg

SEQ ID NO: 611323 - RNA, 22 nt, Human
caagcagggauacugcagggag

SEQ ID NO: 611324 - RNA, 22 nt, Human
ucuccaggggcugcugugccac

SEQ ID NO: 611325 - RNA, 22 nt, Human
caggcccugccuugagggaccu

SEQ ID NO: 611326 - RNA, 22 nt, Human
ugcaugugucgggccugugcua

SEQ ID NO: 611327 - RNA, 22 nt, Human
agggcugccugacuccagagcc

SEQ ID NO: 611328 - RNA, 22 nt, Human
gcacccagugggaugcuuagca

SEQ ID NO: 611329 - RNA, 22 nt, Human
uguacaaauucauugaacugua

SEQ ID NO: 611330 - RNA, 22 nt, Human
ugugugugaaccauugagggcu

SEQ ID NO: 611331 - RNA, 22 nt, Human
agcacagagaagauuucaauua

SEQ ID NO: 611332 - RNA, 22 nt, Human
ggaaaagaauugcagugaagua

SEQ ID NO: 611333 - RNA, 22 nt, Human
gccugguguccagaggcgagug

SEQ ID NO: 611334 - RNA, 22 nt, Human
uccuggugggacagaaaaccuc

SEQ ID NO: 611335 - RNA, 22 nt, Human
acagccagggucucaggaggcg

SEQ ID NO: 611336 - RNA, 22 nt, Human
ggcuggagauaugucuggaaca

SEQ ID NO: 611337 - RNA, 22 nt, Human
gaggcuggaauauuagaaaugu

SEQ ID NO: 611338 - RNA, 21 nt, Human
aguauuucuucauguccuugc

SEQ ID NO: 611339 - RNA, 22 nt, Human
ccucagccuuggccccaggcag

SEQ ID NO: 611340 - RNA, 22 nt, Human
ccucucucuuguagucccugcc

SEQ ID NO: 611341 - RNA, 22 nt, Human
acuguguaugauauguacuggg

SEQ ID NO: 611342 - RNA, 22 nt, Human
auugacaauucuaugcagagca

SEQ ID NO: 611343 - RNA, 22 nt, Human
agugcaauguguacagaaaaau

SEQ ID NO: 611344 - RNA, 22 nt, Human
cucaguuuugcuagcuggaguu

SEQ ID NO: 611345 - RNA, 22 nt, Human
ucuccacaagcuuucuccuuuu

SEQ ID NO: 611346 - RNA, 21 nt, Human
agugaagagugaaacacaugg

SEQ ID NO: 611347 - RNA, 22 nt, Human
aaacaacuucugcacuaugggu

SEQ ID NO: 611348 - RNA, 22 nt, Human
ugggcugagcacugaggaagga

SEQ ID NO: 611349 - RNA, 20 nt, Human
ucuguuauuauuacauugcc

SEQ ID NO: 611350 - RNA, 22 nt, Human
aaguuauaucaucucauugacg

SEQ ID NO: 611351 - RNA, 22 nt, Human
agggaaggaggccauguguccc

SEQ ID NO: 611352 - RNA, 22 nt, Human
aacaaagucguugccuagaaga

SEQ ID NO: 611353 - RNA, 22 nt, Human
ccacagaaaauaaagcacgauu

SEQ ID NO: 611354 - RNA, 22 nt, Human
augaggucaucuugaaguaggg

SEQ ID NO: 611355 - RNA, 22 nt, Human
cccuuagcuggugagcccagcg

SEQ ID NO: 611356 - RNA, 22 nt, Human
cccaggccccagggcuugucag

SEQ ID NO: 611357 - RNA, 22 nt, Human
aaccagcucugcaaaaugucau

SEQ ID NO: 611358 - RNA, 22 nt, Human
gaguuugugggaauggaguauu

SEQ ID NO: 611359 - RNA, 22 nt, Human
aucuaaagugucauaaguagcu

SEQ ID NO: 611360 - RNA, 22 nt, Human
uuagaaaaaggcuguggucuua

SEQ ID NO: 611361 - RNA, 22 nt, Human
aagucaauuaguaaacuuggaa

SEQ ID NO: 611362 - RNA, 22 nt, Human
aagcacagggacucaggaccgg

SEQ ID NO: 611363 - RNA, 22 nt, Human
uuuguguuggaagaaaugcuac

SEQ ID NO: 611364 - RNA, 22 nt, Human
uucacagugguaaggguuguga

SEQ ID NO: 611365 - RNA, 22 nt, Human
augcauugaggaugacaugagu

SEQ ID NO: 611366 - RNA, 22 nt, Human
augcuuccagauugguaggggu

SEQ ID NO: 611367 - RNA, 22 nt, Human
uuuugucagugagaacagaguu

SEQ ID NO: 611368 - RNA, 22 nt, Human
aagacagugacagucacaauug

SEQ ID NO: 611369 - RNA, 23 nt, Human
uggagaauucagucuuuguuuug

SEQ ID NO: 611370 - RNA, 22 nt, Human
caugaaaugauauuuggguggg

SEQ ID NO: 611371 - RNA, 22 nt, Human
uucauugauuuccuuggaauaa

SEQ ID NO: 611372 - RNA, 22 nt, Human
gugcuuccuguauugauuccau

SEQ ID NO: 611373 - RNA, 22 nt, Human
ucuuugcauggacauguguuuu

SEQ ID NO: 611374 - RNA, 22 nt, Human
aaugcaaugcagcaccuccuug

SEQ ID NO: 611375 - RNA, 22 nt, Human
aggacagagggaccagagccca

SEQ ID NO: 611376 - RNA, 22 nt, Human
gucacucaggcuggaguucagu

SEQ ID NO: 611377 - RNA, 22 nt, Human
uuacuguagcuugacauauguc

SEQ ID NO: 611378 - RNA, 22 nt, Human
guuaacaacacugugagugcug

SEQ ID NO: 611379 - RNA, 22 nt, Human
gaugaguucuuucuauucuauu

SEQ ID NO: 611380 - RNA, 22 nt, Human
ucagaagucuggacugcuucuc

SEQ ID NO: 611381 - RNA, 22 nt, Human
auccauuugccgugcuaugugc

SEQ ID NO: 611382 - RNA, 18 nt, Human
uauaaacacacuuagguu

SEQ ID NO: 611383 - RNA, 22 nt, Human
auucugcugccuaguuuaugaa

SEQ ID NO: 611384 - RNA, 22 nt, Human
uaaaacuagugguugggacuaa

SEQ ID NO: 611385 - RNA, 22 nt, Human
gcuuuggaaauauagacucaag

SEQ ID NO: 611386 - RNA, 22 nt, Human
auucucuguacagaagguaccg

SEQ ID NO: 611387 - RNA, 22 nt, Human
ucugcucagccgaucugcuccg

SEQ ID NO: 611388 - RNA, 22 nt, Human
uacagcuugauguuuguguguu

SEQ ID NO: 611389 - RNA, 22 nt, Human
acaguguuacuugauaguguau

SEQ ID NO: 611390 - RNA, 22 nt, Human
aguacaagugaugugguaaaaa

SEQ ID NO: 611391 - RNA, 22 nt, Human
aggaauuugggguuacaugaug

SEQ ID NO: 611392 - RNA, 22 nt, Human
cacaguuuuaucuuauacugau

SEQ ID NO: 611393 - RNA, 21 nt, Human
aguuagcagauuucugucucc

SEQ ID NO: 611394 - RNA, 22 nt, Human
cuguauaugugcauacacacac

SEQ ID NO: 611395 - RNA, 22 nt, Human
uuuuuggguccaggcuguaucu

SEQ ID NO: 611396 - RNA, 22 nt, Human
gcaguuaccuauuuuguagaaa

SEQ ID NO: 611397 - RNA, 22 nt, Human
cagcuccaucuugcuuauacca

SEQ ID NO: 611398 - RNA, 22 nt, Human
guguaucaaagcacagacuuca

SEQ ID NO: 611399 - RNA, 22 nt, Human
auguaagagcuuugcagggaaa

SEQ ID NO: 611400 - RNA, 22 nt, Human
uuucugugauaggcugcgacgc

SEQ ID NO: 611401 - RNA, 22 nt, Human
uacuuugucauucuaaccuucc

SEQ ID NO: 611402 - RNA, 22 nt, Human
caauaauugcuuuccagaguua

SEQ ID NO: 611403 - RNA, 22 nt, Human
aguggcugugaaauacauggga

SEQ ID NO: 611404 - RNA, 22 nt, Human
gugauuuucuccuccuagaagu

SEQ ID NO: 611405 - RNA, 22 nt, Human
agacagcgaggacagaggggug

SEQ ID NO: 611406 - RNA, 22 nt, Human
caugucaagacugaagauccag

SEQ ID NO: 611407 - RNA, 22 nt, Human
uuauuugcccauguuuagcaga

SEQ ID NO: 611408 - RNA, 19 nt, Human
caguuuguccagaggggac

SEQ ID NO: 611409 - RNA, 22 nt, Human
agaaaucugacugcugugcaca

SEQ ID NO: 611410 - RNA, 22 nt, Human
aauguuugaacuuugcauauuu

SEQ ID NO: 611411 - RNA, 22 nt, Human
auguaugagagauucuuuuauu

SEQ ID NO: 611412 - RNA, 22 nt, Human
gccagaggggcucgaaggcgcg

SEQ ID NO: 611413 - RNA, 22 nt, Human
aucuucaaggaaaaaauacagu

SEQ ID NO: 611414 - RNA, 22 nt, Human
uuauuuaaaauguagguuggga

SEQ ID NO: 611415 - RNA, 22 nt, Human
ucagacaccgucuauuuugccu

SEQ ID NO: 611416 - RNA, 22 nt, Human
gucaucaucaggcagaugcugc

SEQ ID NO: 611417 - RNA, 21 nt, Human
uguguucuucuaggucagcua

SEQ ID NO: 611418 - RNA, 22 nt, Human
caagcagauauuuuagucaaga

SEQ ID NO: 611419 - RNA, 22 nt, Human
ucuuugcagaauuuaacuuugc

SEQ ID NO: 611420 - RNA, 22 nt, Human
aacacaguuucugcauugguag

SEQ ID NO: 611421 - RNA, 22 nt, Human
ucacuacaaccgcuaccugaca

SEQ ID NO: 611422 - RNA, 21 nt, Human
cuuuucuagucccagccccgc

SEQ ID NO: 611423 - RNA, 22 nt, Human
uacaguaaccagucuacuuaga

SEQ ID NO: 611424 - RNA, 22 nt, Human
auuugugggacuauaaugcagg

SEQ ID NO: 611425 - RNA, 22 nt, Human
gaaagagaaccugggccuagau

SEQ ID NO: 611426 - RNA, 22 nt, Human
cuucucaaaguugugaaucagg

SEQ ID NO: 611427 - RNA, 22 nt, Human
agugaaaaccuaaucaugcagu

SEQ ID NO: 611428 - RNA, 22 nt, Human
aggcagagaaaaaccagauaug

SEQ ID NO: 611429 - RNA, 22 nt, Human
uaccaaaaccaagccauuaucu

SEQ ID NO: 611430 - RNA, 22 nt, Human
uaucacauacuucucauccagg

SEQ ID NO: 611431 - RNA, 22 nt, Human
aaaagagccacuuaugaccuca

SEQ ID NO: 611432 - RNA, 22 nt, Human
uuugagaagauaggggaauacu

SEQ ID NO: 611433 - RNA, 22 nt, Human
acauauuuugaaagcuuucuaa

SEQ ID NO: 611434 - RNA, 22 nt, Human
gcuuucuuuucaagaauguauu

SEQ ID NO: 611435 - RNA, 22 nt, Human
aucuuacaauuacaagacacuc

SEQ ID NO: 611436 - RNA, 22 nt, Human
acagagacaauauuuguaaagu

SEQ ID NO: 611437 - RNA, 22 nt, Human
guuuuguucaugaacauugggu

SEQ ID NO: 611438 - RNA, 22 nt, Human
cuccaggacugaggacagagcu

SEQ ID NO: 611439 - RNA, 23 nt, Human
gacagguaaggguugggagaauc

SEQ ID NO: 611440 - RNA, 22 nt, Human
gacacuacguggcucacauuuc

SEQ ID NO: 611441 - RNA, 22 nt, Human
uauugccaaaugucugcuggaa

SEQ ID NO: 611442 - RNA, 19 nt, Human
acacaccagugccugugac

SEQ ID NO: 611443 - RNA, 22 nt, Human
agcuuuauuugucauucacggc

SEQ ID NO: 611444 - RNA, 22 nt, Human
aucucuguaaaccauaaauuga

SEQ ID NO: 611445 - RNA, 22 nt, Human
aguuuccacuggagacacugug

SEQ ID NO: 611446 - RNA, 22 nt, Human
aaaacauuuuacugccaucuca

SEQ ID NO: 611447 - RNA, 22 nt, Human
gaaacauuuguugaguacuugc

SEQ ID NO: 611448 - RNA, 22 nt, Human
ucacagcugggguuuuggcagc

SEQ ID NO: 611449 - RNA, 22 nt, Human
caaacuuacuguguuuaaagag

SEQ ID NO: 611450 - RNA, 21 nt, Human
uugauuuagcagaucuagcug

SEQ ID NO: 611451 - RNA, 22 nt, Human
ccaggcaaagcccaugcaagag

SEQ ID NO: 611452 - RNA, 22 nt, Human
aaggcacauauuuuagagucac

SEQ ID NO: 611453 - RNA, 22 nt, Human
uuuacuucugcauuuccccuag

SEQ ID NO: 611454 - RNA, 22 nt, Human
uugagauagguggaaucucuuu

SEQ ID NO: 611455 - RNA, 22 nt, Human
ugaagcuagaauguccauauuu

SEQ ID NO: 611456 - RNA, 22 nt, Human
uuuaggaagaguugaguaaauu

SEQ ID NO: 611457 - RNA, 22 nt, Human
caagauauguccuguuacuaag

SEQ ID NO: 611458 - RNA, 22 nt, Human
ugaaacagucuccagacuugga

SEQ ID NO: 611459 - RNA, 22 nt, Human
uuuauucucuaguuggucagau

SEQ ID NO: 611460 - RNA, 22 nt, Human
agagacauagcacaguuuuucg

SEQ ID NO: 611461 - RNA, 22 nt, Human
cugaaagcaaaguaauucuuaa

SEQ ID NO: 611462 - RNA, 18 nt, Human
ucagacaaguuagacagg

SEQ ID NO: 611463 - RNA, 22 nt, Human
aaggcauggcaggguuuacaca

SEQ ID NO: 611464 - RNA, 21 nt, Human
uaagccaccaugugaaaccag

SEQ ID NO: 611465 - RNA, 19 nt, Human
cagcaaacacuguaaaugg

SEQ ID NO: 611466 - RNA, 22 nt, Human
augguuuuguccucuuugguuc

SEQ ID NO: 611467 - RNA, 22 nt, Human
cuuauguaaacuacagauaaua

SEQ ID NO: 611468 - RNA, 22 nt, Human
aauggagugguucuugcccucu

SEQ ID NO: 611469 - RNA, 22 nt, Human
uccacagguccucuuugcaaag

SEQ ID NO: 611470 - RNA, 22 nt, Human
gaaucucaggggaguuacugga

SEQ ID NO: 611471 - RNA, 22 nt, Human
uuaaguauauccauuugacugg

SEQ ID NO: 611472 - RNA, 23 nt, Human
gguucugccgcuuacugcugugc

SEQ ID NO: 611473 - RNA, 22 nt, Human
ucaggagaguguucaguggagg

SEQ ID NO: 611474 - RNA, 22 nt, Human
auucaugcaggauugucuccaa

SEQ ID NO: 611475 - RNA, 23 nt, Human
aaauugucguaagguggagaugu

SEQ ID NO: 611476 - RNA, 22 nt, Human
uaucuguagucucaugguuccu

SEQ ID NO: 611477 - RNA, 22 nt, Human
uucuucauucccuuacuuccga

SEQ ID NO: 611478 - RNA, 21 nt, Human
uaagcuaaacauucaguuaac

SEQ ID NO: 611479 - RNA, 22 nt, Human
aaugaaacuaguagaaucuuug

SEQ ID NO: 611480 - RNA, 22 nt, Human
guuugagauggguuauugcucu

SEQ ID NO: 611481 - RNA, 22 nt, Human
uucagaaagugaaucuuguuau

SEQ ID NO: 611482 - RNA, 22 nt, Human
cagcugcuguucaguuuuguuu

SEQ ID NO: 611483 - RNA, 22 nt, Human
auuucauccauuaagaguacuc

SEQ ID NO: 611484 - RNA, 22 nt, Human
gugaagaugccucaggugaccc

SEQ ID NO: 611485 - RNA, 22 nt, Human
aaugaguuuguucuauuauuug

SEQ ID NO: 611486 - RNA, 22 nt, Human
uucaguaagcacuucuagagcu

SEQ ID NO: 611487 - RNA, 23 nt, Human
cguuuuuuccucagauguucugg

SEQ ID NO: 611488 - RNA, 17 nt, Human
ugcaugcgucugugaua

SEQ ID NO: 611489 - RNA, 20 nt, Human
gacuucaauuucuaucuuuu

SEQ ID NO: 611490 - RNA, 22 nt, Human
uuuggagagaugaaguucugug

SEQ ID NO: 611491 - RNA, 21 nt, Human
ugcauauauaagugcauacac

SEQ ID NO: 611492 - RNA, 19 nt, Human
agcagccaucgaccaugga

SEQ ID NO: 611493 - RNA, 22 nt, Human
acuucagugugguauaaaacgu

SEQ ID NO: 611494 - RNA, 22 nt, Human
aagacacuuucuaaauagaagu

SEQ ID NO: 611495 - RNA, 22 nt, Human
uccugucucaguguauuugcag

SEQ ID NO: 611496 - RNA, 22 nt, Human
cuaguauuaagugugaguaaaa

SEQ ID NO: 611497 - RNA, 22 nt, Human
cauugcugugggcauuugcugc

SEQ ID NO: 611498 - RNA, 22 nt, Human
uuuccaguuguucuagaaagcu

SEQ ID NO: 611499 - RNA, 22 nt, Human
gacaguggagccacguugggag

SEQ ID NO: 611500 - RNA, 22 nt, Human
cagcaguguacaaggugucaga

SEQ ID NO: 611501 - RNA, 22 nt, Human
cagacagagucuucccaucagu

SEQ ID NO: 611502 - RNA, 22 nt, Human
uugcuauuuugagagucauagu

SEQ ID NO: 611503 - RNA, 22 nt, Human
aagggaaacuuucacaaugucc

SEQ ID NO: 611504 - RNA, 23 nt, Human
uuguucuuggaucuuccugaagc

SEQ ID NO: 611505 - RNA, 22 nt, Human
cagcugcucugguggucucucc

SEQ ID NO: 611506 - RNA, 19 nt, Human
aaggcuuucugagugaaaa

SEQ ID NO: 611507 - RNA, 22 nt, Human
auuucagaguagaucguuauuu

SEQ ID NO: 611508 - RNA, 22 nt, Human
ucaucuccauacggucucgcag

SEQ ID NO: 611509 - RNA, 22 nt, Human
acauuuaaugauccuacuguga

SEQ ID NO: 611510 - RNA, 22 nt, Human
accuuuaugaaacagcugucgu

SEQ ID NO: 611511 - RNA, 22 nt, Human
gcugcuuugucuguaaaaugga

SEQ ID NO: 611512 - RNA, 22 nt, Human
uuugcaaaguccauugaaguua

SEQ ID NO: 611513 - RNA, 22 nt, Human
auguucaaguaccuuugugucu

SEQ ID NO: 611514 - RNA, 22 nt, Human
uauggcaagaugacauguucuc

SEQ ID NO: 611515 - RNA, 18 nt, Human
ucaugcaaacgcuucaua

SEQ ID NO: 611516 - RNA, 22 nt, Human
uaaagcaaugaaaguuuugcag

SEQ ID NO: 611517 - RNA, 23 nt, Human
aguguucagcauguaguaaauac

SEQ ID NO: 611518 - RNA, 22 nt, Human
uuggaauuugagaccaagaaaa

SEQ ID NO: 611519 - RNA, 22 nt, Human
ccaagaggggcagagggcugca

SEQ ID NO: 611520 - RNA, 22 nt, Human
ugagacaaagcagcugacagaa

SEQ ID NO: 611521 - RNA, 20 nt, Human
aauagcacagcucaaacauu

SEQ ID NO: 611522 - RNA, 22 nt, Human
ucuuccagauacuuccugacuu

SEQ ID NO: 611523 - RNA, 22 nt, Human
aaggauuuuuggaaugagaugg

SEQ ID NO: 611524 - RNA, 22 nt, Human
ccagagaggccuuggcaagaca

SEQ ID NO: 611525 - RNA, 22 nt, Human
cugagcagucuagccagguguu

SEQ ID NO: 611526 - RNA, 22 nt, Human
augcuugcccauguuucugaag

SEQ ID NO: 611527 - RNA, 22 nt, Human
cucugaguagauagggaaccug

SEQ ID NO: 611528 - RNA, 22 nt, Human
auugagaaaauucgagcaaguu

SEQ ID NO: 611529 - RNA, 20 nt, Human
uugagcuuuuaguacagaca

SEQ ID NO: 611530 - RNA, 22 nt, Human
uaauccaaaacugaaucugugg

SEQ ID NO: 611531 - RNA, 22 nt, Human
caaagaagagauuuacagagcu

SEQ ID NO: 611532 - RNA, 22 nt, Human
acaaguuucauuguuuagaacc

SEQ ID NO: 611533 - RNA, 22 nt, Human
gaugucuucagauggcaagaga

SEQ ID NO: 611534 - RNA, 21 nt, Human
auucaaagaagaggaaggccc

SEQ ID NO: 611535 - RNA, 22 nt, Human
gcgguauuugugugggugucga

SEQ ID NO: 611536 - RNA, 22 nt, Human
agaaggcaucagaaguguguag

SEQ ID NO: 611537 - RNA, 22 nt, Human
uaaguauuggccuauagcuaga

SEQ ID NO: 611538 - RNA, 20 nt, Human
uguauuuaaugaaggcuuuu

SEQ ID NO: 611539 - RNA, 23 nt, Human
agcaacagugggugaguguugcu

SEQ ID NO: 611540 - RNA, 20 nt, Human
uucaugcagugguugcugug

SEQ ID NO: 611541 - RNA, 20 nt, Human
uauuucugggcaaccauuua

SEQ ID NO: 611542 - RNA, 22 nt, Human
auucuagaguuucaauccaagg

SEQ ID NO: 611543 - RNA, 22 nt, Human
acuuuuaaggggccuugauuua

SEQ ID NO: 611544 - RNA, 22 nt, Human
auacaugacucacacauucugc

SEQ ID NO: 611545 - RNA, 21 nt, Human
gucuuuuuaauugcgauuucc

SEQ ID NO: 611546 - RNA, 22 nt, Human
acugccaguuguuuuguccagu

SEQ ID NO: 611547 - RNA, 22 nt, Human
guaauagucucaaacuccugga

SEQ ID NO: 611548 - RNA, 22 nt, Human
ucuucaugucucugcuugaguc

SEQ ID NO: 611549 - RNA, 22 nt, Human
uccguuuucacacugcuauaaa

SEQ ID NO: 611550 - RNA, 22 nt, Human
cagguguugcaguugaagacug

SEQ ID NO: 611551 - RNA, 22 nt, Human
auuaguguuguggcuucauggc

SEQ ID NO: 611552 - RNA, 23 nt, Human
ggacaugucucuggguauuuuga

SEQ ID NO: 611553 - RNA, 22 nt, Human
agauuauuuaagacaggaacca

SEQ ID NO: 611554 - RNA, 22 nt, Human
uucguuuaguccacaaaugcau

SEQ ID NO: 611555 - RNA, 22 nt, Human
aaggcuauaucucaauacuauu

SEQ ID NO: 611556 - RNA, 22 nt, Human
uucacagcucauacuguucuca

SEQ ID NO: 611557 - RNA, 22 nt, Human
uuucaaguagagggaucgcuag

SEQ ID NO: 611558 - RNA, 22 nt, Human
uuuaauuuucugggcccagcag

SEQ ID NO: 611559 - RNA, 22 nt, Human
uuacaguuuacauaagaauugu

SEQ ID NO: 611560 - RNA, 22 nt, Human
ucagagacaucagguuguagca

SEQ ID NO: 611561 - RNA, 22 nt, Human
agagaauuaacauuccauggcu

SEQ ID NO: 611562 - RNA, 22 nt, Human
gauuguacuuauugagcuaaac

SEQ ID NO: 611563 - RNA, 22 nt, Human
guugaaauccuaacccccuagu

SEQ ID NO: 611564 - RNA, 21 nt, Human
uaaacauaaccuuguauggcu

SEQ ID NO: 611565 - RNA, 22 nt, Human
aagaauaagaggauuuagaaca

SEQ ID NO: 611566 - RNA, 22 nt, Human
gauuuucauuauagcuaguuuc

SEQ ID NO: 611567 - RNA, 22 nt, Human
auagcaaaggacaauagucagu

SEQ ID NO: 611568 - RNA, 22 nt, Human
auuaaauuggacgcugggggaa

SEQ ID NO: 611569 - RNA, 22 nt, Human
cagggacucgcuggacauaccg

SEQ ID NO: 611570 - RNA, 22 nt, Human
ugaaauguggagaugguaagua

SEQ ID NO: 611571 - RNA, 22 nt, Human
aucgaguucugaugucccuucu

SEQ ID NO: 611572 - RNA, 22 nt, Human
gaaguauuucugaguugcccag

SEQ ID NO: 611573 - RNA, 22 nt, Human
auuaauaucccccgccguucug

SEQ ID NO: 611574 - RNA, 22 nt, Human
ugucuucuaccuugacagcauu

SEQ ID NO: 611575 - RNA, 22 nt, Human
cauaacuugguguuggaaacug

SEQ ID NO: 611576 - RNA, 21 nt, Human
aaagugguaaggauuauuuug

SEQ ID NO: 611577 - RNA, 20 nt, Human
aaaaacaguaaugcugaaga

SEQ ID NO: 611578 - RNA, 22 nt, Human
guuuccaagucucucaacaccc

SEQ ID NO: 611579 - RNA, 22 nt, Human
gagguauaguucuauuagauga

SEQ ID NO: 611580 - RNA, 22 nt, Human
uaaaaucaugacagauugacau

SEQ ID NO: 611581 - RNA, 22 nt, Human
uuguauuaaaauguguuucugu

SEQ ID NO: 611582 - RNA, 22 nt, Human
cuucuaauucuuauguaagcuu

SEQ ID NO: 611583 - RNA, 22 nt, Human
uauuucagcucuuuggauuauc

SEQ ID NO: 611584 - RNA, 22 nt, Human
aauaguguauuuuucaaaauua

SEQ ID NO: 611585 - RNA, 22 nt, Human
uucaaacacugcuuugagaggg

SEQ ID NO: 611586 - RNA, 22 nt, Human
cuugcuuuaucugguuucucau

SEQ ID NO: 611587 - RNA, 22 nt, Human
uuguuuaaagaacuucugacuu

SEQ ID NO: 611588 - RNA, 22 nt, Human
uucuguuuauaauuugcaguug

SEQ ID NO: 611589 - RNA, 21 nt, Human
ucccacuggcccagggcucca

SEQ ID NO: 611590 - RNA, 22 nt, Human
aggugcuuggcucgugcacaca

SEQ ID NO: 611591 - RNA, 22 nt, Human
cacuuggaggaaggccuauuca

SEQ ID NO: 611592 - RNA, 22 nt, Human
aauagcaaaugcucauuugaaa

SEQ ID NO: 611593 - RNA, 22 nt, Human
auugaagacuugguauccgugg

SEQ ID NO: 611594 - RNA, 22 nt, Human
auacuaagcucauuacauuuug

SEQ ID NO: 611595 - RNA, 22 nt, Human
uuguugcaagccuggaaucugg

SEQ ID NO: 611596 - RNA, 22 nt, Human
aagcgcagacacagagagugga

SEQ ID NO: 611597 - RNA, 22 nt, Human
gaacaguuucccuguagaaaau

SEQ ID NO: 611598 - RNA, 22 nt, Human
ucacuuuaccucauucaggcag

SEQ ID NO: 611599 - RNA, 23 nt, Human
uguacacuuggucaagguacuua

SEQ ID NO: 611600 - RNA, 23 nt, Human
aucauagucuuugugacuggccc

SEQ ID NO: 611601 - RNA, 22 nt, Human
ucuuuuccuugaugguuaaaua

SEQ ID NO: 611602 - RNA, 22 nt, Human
ucuucagacuguuguucuuuug

SEQ ID NO: 611603 - RNA, 22 nt, Human
uuguuuguaaggcucuuagaau

SEQ ID NO: 611604 - RNA, 22 nt, Human
agauaucuuacacuuugaaguu

SEQ ID NO: 611605 - RNA, 22 nt, Human
cuuuacagauggauaauuguuu

SEQ ID NO: 611606 - RNA, 22 nt, Human
uuugcuugauuaggauauggaa

SEQ ID NO: 611607 - RNA, 20 nt, Human
uugaggagauauugaauacu

SEQ ID NO: 611608 - RNA, 22 nt, Human
guuuugaauacuacuagaacuu

SEQ ID NO: 611609 - RNA, 22 nt, Human
auacacauguuauuguggaagc

SEQ ID NO: 611610 - RNA, 22 nt, Human
ugugacagugccagcuucauag

SEQ ID NO: 611611 - RNA, 22 nt, Human
ugucacagagcgugcaacagaa

SEQ ID NO: 611612 - RNA, 22 nt, Human
ugugcuugucguggagccaggc

SEQ ID NO: 611613 - RNA, 22 nt, Human
aaugagaauguaagugaagaga

SEQ ID NO: 611614 - RNA, 19 nt, Human
uuugauagggcauaauaua

SEQ ID NO: 611615 - RNA, 22 nt, Human
auuauugcaagcagugaaggga

SEQ ID NO: 611616 - RNA, 22 nt, Human
aaauucuguccugaaugccauu

SEQ ID NO: 611617 - RNA, 23 nt, Human
ccucaaauguagccuuuuuccca

SEQ ID NO: 611618 - RNA, 22 nt, Human
auccuucaaaaggaauagcagg

SEQ ID NO: 611619 - RNA, 22 nt, Human
gagucacauacuauguaauaga

SEQ ID NO: 611620 - RNA, 22 nt, Human
uguuuuaagggucaacugucac

SEQ ID NO: 611621 - RNA, 22 nt, Human
aagugauuucugccugcauguu

SEQ ID NO: 611622 - RNA, 18 nt, Human
gacaaaaguacagacaga

SEQ ID NO: 611623 - RNA, 22 nt, Human
guaauucugugugaaucuauua

SEQ ID NO: 611624 - RNA, 22 nt, Human
acagcuucgaggaucucauccc

SEQ ID NO: 611625 - RNA, 22 nt, Human
gcuugcuuuguaaauaucugug

SEQ ID NO: 611626 - RNA, 22 nt, Human
auguuuguguuucccauucagg

SEQ ID NO: 611627 - RNA, 22 nt, Human
ggcagaggagcuggaaacaugg

SEQ ID NO: 611628 - RNA, 22 nt, Human
caguuuuaugaaugcuuauuag

SEQ ID NO: 611629 - RNA, 22 nt, Human
uacugcaaaccauuuacaguag

SEQ ID NO: 611630 - RNA, 22 nt, Human
uuuucuaacaucuaguaauuug

SEQ ID NO: 611631 - RNA, 22 nt, Human
uuaguguccagaguuuuuauua

SEQ ID NO: 611632 - RNA, 22 nt, Human
gagaauguuaauguugaaguau

SEQ ID NO: 611633 - RNA, 22 nt, Human
aucagugacuucuuccaaaguu

SEQ ID NO: 611634 - RNA, 22 nt, Human
agaugguucagaauuauaaaga

SEQ ID NO: 611635 - RNA, 22 nt, Human
uuccaggacuggguguuugaag

SEQ ID NO: 611636 - RNA, 22 nt, Human
uugcacagaugcacaugguugc

SEQ ID NO: 611637 - RNA, 22 nt, Human
auguuguugaacucuuugcaug

SEQ ID NO: 611638 - RNA, 22 nt, Human
ugucuucauuccccaugaaguc

SEQ ID NO: 611639 - RNA, 22 nt, Human
auuaguagcacacagagaucag

SEQ ID NO: 611640 - RNA, 20 nt, Human
ucauaugugguuguauacaa

SEQ ID NO: 611641 - RNA, 22 nt, Human
uacuuugagaugaugcugaucg

SEQ ID NO: 611642 - RNA, 22 nt, Human
ucuuauaccccuaaacugcagc

SEQ ID NO: 611643 - RNA, 22 nt, Human
uucagucuuguugaaaacuugg

SEQ ID NO: 611644 - RNA, 22 nt, Human
ucuguggcauguugcacuugua

SEQ ID NO: 611645 - RNA, 22 nt, Human
uaaaguuuauuggcaccaccau

SEQ ID NO: 611646 - RNA, 22 nt, Human
agagaagagucuugucaaauua

SEQ ID NO: 611647 - RNA, 22 nt, Human
uaaaccuuauuugaauaccaac

SEQ ID NO: 611648 - RNA, 22 nt, Human
ugcaucauuaagguacaguugg

SEQ ID NO: 611649 - RNA, 22 nt, Human
aauuauugagcaucuacugugu

SEQ ID NO: 611650 - RNA, 22 nt, Human
agaacagaggccuuauguuuca

SEQ ID NO: 611651 - RNA, 22 nt, Human
acugguuuuggaaaucaguaca

SEQ ID NO: 611652 - RNA, 22 nt, Human
cuucauguacaguuauuggaga

SEQ ID NO: 611653 - RNA, 22 nt, Human
uuggaaauguagaaaagcagau

SEQ ID NO: 611654 - RNA, 22 nt, Human
cuccagaggcgacuugcaucac

SEQ ID NO: 611655 - RNA, 22 nt, Human
uuuacgaauggggugacaacuu

SEQ ID NO: 611656 - RNA, 22 nt, Human
guaaagcaaaauguagagauug

SEQ ID NO: 611657 - RNA, 22 nt, Human
uuccuuuucuucuaccacaugu

SEQ ID NO: 611658 - RNA, 22 nt, Human
uguauauacacacucccauguu

SEQ ID NO: 611659 - RNA, 22 nt, Human
aacagaaaucauuuagggcucu

SEQ ID NO: 611660 - RNA, 22 nt, Human
caauuaccaguaauugagguuu

SEQ ID NO: 611661 - RNA, 22 nt, Human
cacuguugaagauacuuccucu

SEQ ID NO: 611662 - RNA, 22 nt, Human
uuuucuuggaguggcuguccuu

SEQ ID NO: 611663 - RNA, 22 nt, Human
gguuccaggcauggcaggaugu

SEQ ID NO: 611664 - RNA, 22 nt, Human
uuagcacugucugguuaucuug

SEQ ID NO: 611665 - RNA, 22 nt, Human
cuucuuaaaguugucacagcug

SEQ ID NO: 611666 - RNA, 22 nt, Human
ugaaagcucugucaucauuccu

SEQ ID NO: 611667 - RNA, 22 nt, Human
cuuucuuucgaagacgugauua

SEQ ID NO: 611668 - RNA, 22 nt, Human
caacauuucaaggucuuuagga

SEQ ID NO: 611669 - RNA, 22 nt, Human
ccauuuguaccauuucuuugua

SEQ ID NO: 611670 - RNA, 22 nt, Human
uagaugaacagaaagccacugu

SEQ ID NO: 611671 - RNA, 22 nt, Human
cauuguuggcagagggacagag

SEQ ID NO: 611672 - RNA, 22 nt, Human
caguaaauguccucgcagggaa

SEQ ID NO: 611673 - RNA, 22 nt, Human
acucauguccuaggaguaaagc

SEQ ID NO: 611674 - RNA, 22 nt, Human
uauagugucucuagaucaaaga

SEQ ID NO: 611675 - RNA, 22 nt, Human
accuuguuguagguacaaaaga

SEQ ID NO: 611676 - RNA, 22 nt, Human
ucucugagaucagccacugacu

SEQ ID NO: 611677 - RNA, 22 nt, Human
cuggagauaagcagucccaggc

SEQ ID NO: 611678 - RNA, 22 nt, Human
uaaauacuuuuacuccacugau

SEQ ID NO: 611679 - RNA, 22 nt, Human
cugcaucaguggauaugauggu

SEQ ID NO: 611680 - RNA, 22 nt, Human
uugaauaguuuuggauagcaua

SEQ ID NO: 611681 - RNA, 23 nt, Human
aaugaguugggcagcauacaggc

SEQ ID NO: 611682 - RNA, 22 nt, Human
uucuccacccacucuuuuguug

SEQ ID NO: 611683 - RNA, 22 nt, Human
acuuugccuucuuacuguguug

SEQ ID NO: 611684 - RNA, 22 nt, Human
uuaccacagugccugucuaaug

SEQ ID NO: 611685 - RNA, 22 nt, Human
auacaugugugugcauacaugu

SEQ ID NO: 611686 - RNA, 22 nt, Human
cucagcaacagcgacuuaaggg

SEQ ID NO: 611687 - RNA, 22 nt, Human
agugcacuggcaccaucucagc

SEQ ID NO: 611688 - RNA, 22 nt, Human
augugaaagagguguucagugg

SEQ ID NO: 611689 - RNA, 22 nt, Human
ugaaucaaugaauugcacuuca

SEQ ID NO: 611690 - RNA, 23 nt, Human
aguacauuugacccaaauaagcu

SEQ ID NO: 611691 - RNA, 22 nt, Human
uucacagcuaagagcuaaguaa

SEQ ID NO: 611692 - RNA, 22 nt, Human
uuuccucacacagaagaucuug

SEQ ID NO: 611693 - RNA, 22 nt, Human
ugaggaaugugacaaaaccaag

SEQ ID NO: 611694 - RNA, 22 nt, Human
auuucagcagcccauguuugga

SEQ ID NO: 611695 - RNA, 22 nt, Human
uguaucauauggggaagcuuca

SEQ ID NO: 611696 - RNA, 22 nt, Human
guuuccagccuccuggguaaag

SEQ ID NO: 611697 - RNA, 22 nt, Human
ucuguucagaagaggugaaagu

SEQ ID NO: 611698 - RNA, 22 nt, Human
ucagaacauccugguuuaaaau

SEQ ID NO: 611699 - RNA, 22 nt, Human
ucuuagaaacuguaucgauuag

SEQ ID NO: 611700 - RNA, 22 nt, Human
aagagagaacucccuucgccag

SEQ ID NO: 611701 - RNA, 22 nt, Human
auuaaugaaacuuugguuaagc

SEQ ID NO: 611702 - RNA, 22 nt, Human
gcuguccugggaacaggcacua

SEQ ID NO: 611703 - RNA, 22 nt, Human
acaugcauaaacuacuucuuau

SEQ ID NO: 611704 - RNA, 22 nt, Human
aguucaauuguuuuguaaaagu

SEQ ID NO: 611705 - RNA, 22 nt, Human
uaagcuauuccugaagaagguu

SEQ ID NO: 611706 - RNA, 20 nt, Human
uugcaaagugaauagcaauu

SEQ ID NO: 611707 - RNA, 22 nt, Human
uauuacaguucgaguuucuagg

SEQ ID NO: 611708 - RNA, 22 nt, Human
augcuuucucuuaguucauuga

SEQ ID NO: 611709 - RNA, 22 nt, Human
cuggaucaugggaaagggauca

SEQ ID NO: 611710 - RNA, 22 nt, Human
cuggcuuugaucagagugaccu

SEQ ID NO: 611711 - RNA, 18 nt, Human
cgauguguaugugauuug

SEQ ID NO: 611712 - RNA, 22 nt, Human
auagcuuugagggcuccuuagg

SEQ ID NO: 611713 - RNA, 23 nt, Human
uaucauuucagcucucugccugg

SEQ ID NO: 611714 - RNA, 22 nt, Human
uaggaaauaauucacucuggcu

SEQ ID NO: 611715 - RNA, 22 nt, Human
agcaauguuggccuauauaccu

SEQ ID NO: 611716 - RNA, 22 nt, Human
auguacauuauucgagugaugg

SEQ ID NO: 611717 - RNA, 22 nt, Human
aaagcuauuuuauugcagcucu

SEQ ID NO: 611718 - RNA, 22 nt, Human
uaccauuucaguaaaaacuuag

SEQ ID NO: 611719 - RNA, 22 nt, Human
agaguuuacagaaauaagcugu

SEQ ID NO: 611720 - RNA, 22 nt, Human
ccuucaaucuuaagucagccca

SEQ ID NO: 611721 - RNA, 21 nt, Human
cuagaaagaauguugucgucu

SEQ ID NO: 611722 - RNA, 22 nt, Human
cuacagcuguguguuuaugugc

SEQ ID NO: 611723 - RNA, 22 nt, Human
aaugucaacacaagagaaaugc

SEQ ID NO: 611724 - RNA, 21 nt, Human
aauuucagacccauuuugccu

SEQ ID NO: 611725 - RNA, 22 nt, Human
gaguaauuuucuuaaaacauca

SEQ ID NO: 611726 - RNA, 22 nt, Human
ccuuagaaaaucauggaauauu

SEQ ID NO: 611727 - RNA, 22 nt, Human
aauuccagcugauugacuuucc

SEQ ID NO: 611728 - RNA, 22 nt, Human
cucuaaauguggucugcagaua

SEQ ID NO: 611729 - RNA, 22 nt, Human
cucagagaagauggaugaggua

SEQ ID NO: 611730 - RNA, 22 nt, Human
aguguucuagcgcugugcuugu

SEQ ID NO: 611731 - RNA, 18 nt, Human
accugauuggcgcagccc

SEQ ID NO: 611732 - RNA, 22 nt, Human
uuguacacacaggaacaaacgu

SEQ ID NO: 611733 - RNA, 22 nt, Human
uuugaaaggagcuuuauccaga

SEQ ID NO: 611734 - RNA, 22 nt, Human
aauaucaucucucuuuucugca

SEQ ID NO: 611735 - RNA, 22 nt, Human
augaauaaaacauuuuaaucag

SEQ ID NO: 611736 - RNA, 22 nt, Human
ucauuacuuauuaaaagccuug

SEQ ID NO: 611737 - RNA, 22 nt, Human
uuguaacaguagcugucagcuc

SEQ ID NO: 611738 - RNA, 22 nt, Human
gaaauguuggacacuugaaauu

SEQ ID NO: 611739 - RNA, 23 nt, Human
uggaaacauucugaauguccauc

SEQ ID NO: 611740 - RNA, 22 nt, Human
ugcuuguauucauaucacagcu

SEQ ID NO: 611741 - RNA, 19 nt, Human
uaugaaguugauaaaaguu

SEQ ID NO: 611742 - RNA, 22 nt, Human
uucaguaugcugaaugauuuuu

SEQ ID NO: 611743 - RNA, 22 nt, Human
gagcugcagcggcugacgcaac

SEQ ID NO: 611744 - RNA, 22 nt, Human
ucccacugucuucucgugcucg

SEQ ID NO: 611745 - RNA, 22 nt, Human
agugaauuagccuauuuguaaa

SEQ ID NO: 611746 - RNA, 22 nt, Human
guaugucuuaggguucaguaac

SEQ ID NO: 611747 - RNA, 22 nt, Human
ugaagacaguuuuacucaugag

SEQ ID NO: 611748 - RNA, 22 nt, Human
uaguauuuccuguaagcuauag

SEQ ID NO: 611749 - RNA, 22 nt, Human
ggaugacagaugcaggcuuuga

SEQ ID NO: 611750 - RNA, 22 nt, Human
uuagaaaucaccucugaagauc

SEQ ID NO: 611751 - RNA, 22 nt, Human
uguguacauguaucaacuaucg

SEQ ID NO: 611752 - RNA, 22 nt, Human
acaauuucuaauauagaucuua

SEQ ID NO: 611753 - RNA, 22 nt, Human
guuuacaacaucuuguccuuca

SEQ ID NO: 611754 - RNA, 22 nt, Human
ucuuauugguaaugauggcauu

SEQ ID NO: 611755 - RNA, 21 nt, Human
guucaauagcucuuugaaugc

SEQ ID NO: 611756 - RNA, 22 nt, Human
cuuuacagugaacuugcuuguc

SEQ ID NO: 611757 - RNA, 22 nt, Human
caauuuuuaaacuaugaaguug

SEQ ID NO: 611758 - RNA, 20 nt, Human
agcauuuagccuuuauccac

SEQ ID NO: 611759 - RNA, 22 nt, Human
uuccugguaacaaucucaaagu

SEQ ID NO: 611760 - RNA, 22 nt, Human
acauuuuuggguugaugucuga

SEQ ID NO: 611761 - RNA, 18 nt, Human
cuuuagcugucaucuuug

SEQ ID NO: 611762 - RNA, 22 nt, Human
cagacucuugagcugauuguau

SEQ ID NO: 611763 - RNA, 22 nt, Human
augcaguuagguaauagucuca

SEQ ID NO: 611764 - RNA, 22 nt, Human
auaguagcgagaucucagcuca

SEQ ID NO: 611765 - RNA, 22 nt, Human
augucccugagggucucucuga

SEQ ID NO: 611766 - RNA, 22 nt, Human
guuauacuuaugugcaaaaaua

SEQ ID NO: 611767 - RNA, 22 nt, Human
ugcaaauauuccaugcuguuca

SEQ ID NO: 611768 - RNA, 20 nt, Human
uuuuccacuccucaaaacag

SEQ ID NO: 611769 - RNA, 22 nt, Human
ugguaugcuuauuaucuucaac

SEQ ID NO: 611770 - RNA, 22 nt, Human
guuguacauaugaggauaaguu

SEQ ID NO: 611771 - RNA, 22 nt, Human
caagucuagcuuggucacuugg

SEQ ID NO: 611772 - RNA, 23 nt, Human
auaugucaugcaccagcacuuua

SEQ ID NO: 611773 - RNA, 22 nt, Human
ugcauaaacuucucugguguga

SEQ ID NO: 611774 - RNA, 22 nt, Human
ucauuuacacuucacaaaugga

SEQ ID NO: 611775 - RNA, 22 nt, Human
augcuuuauuggagacagucau

SEQ ID NO: 611776 - RNA, 22 nt, Human
gcagggcagggcaagaacuggg

SEQ ID NO: 611777 - RNA, 22 nt, Human
ucuaauuuuggcauuuuaaccu

SEQ ID NO: 611778 - RNA, 22 nt, Human
augcaauaguaauucuagucug

SEQ ID NO: 611779 - RNA, 23 nt, Human
uugcauuaauguggaggcacagg

SEQ ID NO: 611780 - RNA, 22 nt, Human
auuuccuggaggaauggaagca

SEQ ID NO: 611781 - RNA, 22 nt, Human
aucauccauggcugaucauaaa

SEQ ID NO: 611782 - RNA, 22 nt, Human
acuucacagauauuuauuuggu

SEQ ID NO: 611783 - RNA, 22 nt, Human
aggcauuuaaagauguaagacu

SEQ ID NO: 611784 - RNA, 22 nt, Human
uauaugcagauuuucaucaucg

SEQ ID NO: 611785 - RNA, 22 nt, Human
uuugacaugugcuuauaacuuu

SEQ ID NO: 611786 - RNA, 18 nt, Human
agcugaggggacugaaga

SEQ ID NO: 611787 - RNA, 22 nt, Human
cugcauaucaaauuacuccugg

SEQ ID NO: 611788 - RNA, 22 nt, Human
aaguuugucucauuugaucuuc

SEQ ID NO: 611789 - RNA, 19 nt, Human
auagaguagaguaucuguu

SEQ ID NO: 611790 - RNA, 22 nt, Human
gcacagucaacacuuauucacc

SEQ ID NO: 611791 - RNA, 22 nt, Human
aaguuacacauuuucauuguaa

SEQ ID NO: 611792 - RNA, 22 nt, Human
aucaugugacuagguuuggcca

SEQ ID NO: 611793 - RNA, 22 nt, Human
gaauguuuaaaaggugcaguuu

SEQ ID NO: 611794 - RNA, 22 nt, Human
uucucaaagugugcucccugga

SEQ ID NO: 611795 - RNA, 22 nt, Human
aauguuaaguuuagauuauaac

SEQ ID NO: 611796 - RNA, 22 nt, Human
aaucugagggaacuugaacucc

SEQ ID NO: 611797 - RNA, 22 nt, Human
uaaagcauguuucaguaagguu

SEQ ID NO: 611798 - RNA, 22 nt, Human
ucuccaggcuuaaucucagcuu

SEQ ID NO: 611799 - RNA, 22 nt, Human
aaauugcauuuuaaagguagau

SEQ ID NO: 611800 - RNA, 22 nt, Human
agcacugugagcaccagcacgc

SEQ ID NO: 611801 - RNA, 20 nt, Human
caauaauuuacuucccuauu

SEQ ID NO: 611802 - RNA, 22 nt, Human
gcucuaugaaccugaaucucac

SEQ ID NO: 611803 - RNA, 22 nt, Human
agugacagauuaccggcagagc

SEQ ID NO: 611804 - RNA, 22 nt, Human
aaagacuaaccaguugucaaaa

SEQ ID NO: 611805 - RNA, 22 nt, Human
uggugcugccaccuccucugcu

SEQ ID NO: 611806 - RNA, 22 nt, Human
aauucagguuauauuugcaacu

SEQ ID NO: 611807 - RNA, 22 nt, Human
guguuuugugaggccuucuuuc

SEQ ID NO: 611808 - RNA, 22 nt, Human
uagaaguuaaaggaauacagaa

SEQ ID NO: 611809 - RNA, 22 nt, Human
uaaugccuuaugucaaauguaa

SEQ ID NO: 611810 - RNA, 22 nt, Human
cucaaaauccauaaaaucaggu

SEQ ID NO: 611811 - RNA, 22 nt, Human
uguccuuaucuccaaacaauca

SEQ ID NO: 611812 - RNA, 22 nt, Human
guugcauuaaucugcucaggcu

SEQ ID NO: 611813 - RNA, 22 nt, Human
aauucauacucuauauugcuuu

SEQ ID NO: 611814 - RNA, 22 nt, Human
aaugaaacuauauuuagagagg

SEQ ID NO: 611815 - RNA, 22 nt, Human
ugcaugguuauauacuacuagu

SEQ ID NO: 611816 - RNA, 22 nt, Human
uuuuccuuaacagagggagaaa

SEQ ID NO: 611817 - RNA, 22 nt, Human
gauuugucuauauucaaauaug

SEQ ID NO: 611818 - RNA, 22 nt, Human
acuugcaucuuagagacucacc

SEQ ID NO: 611819 - RNA, 22 nt, Human
guggucaucuaacuaaauuuuc

SEQ ID NO: 611820 - RNA, 22 nt, Human
cccuuguuuuugaguacaauag

SEQ ID NO: 611821 - RNA, 22 nt, Human
aauuagaagcuguuagcaaaau

SEQ ID NO: 611822 - RNA, 22 nt, Human
aucaugcagcaacaagcaaggc

SEQ ID NO: 611823 - RNA, 22 nt, Human
uuaaguccuugguaauuuucuu

SEQ ID NO: 611824 - RNA, 22 nt, Human
uaaguauguuagaaaaucaagu

SEQ ID NO: 611825 - RNA, 22 nt, Human
cuccuuaaagggagcagcagcu

SEQ ID NO: 611826 - RNA, 22 nt, Human
guuuccuuuuggaauuagagcu

SEQ ID NO: 611827 - RNA, 22 nt, Human
ugauuccugugcuuauuccagu

SEQ ID NO: 611828 - RNA, 22 nt, Human
cacuguuuuacauguuauuuaa

SEQ ID NO: 611829 - RNA, 22 nt, Human
guguccagagccgggcugaaug

SEQ ID NO: 611830 - RNA, 22 nt, Human
uuauuuaaaagugguaagauuc

SEQ ID NO: 611831 - RNA, 22 nt, Human
cacauuuaaagguugaagcuga

SEQ ID NO: 611832 - RNA, 22 nt, Human
aaagccauaucuauucuauucu

SEQ ID NO: 611833 - RNA, 22 nt, Human
caaaauuguugaugcugcuuug

SEQ ID NO: 611834 - RNA, 22 nt, Human
guggaaauuuuaggaucaucuu

SEQ ID NO: 611835 - RNA, 23 nt, Human
uuaagacuggcugaacuuaguag

SEQ ID NO: 611836 - RNA, 22 nt, Human
caaacauuuguuggaaccccug

SEQ ID NO: 611837 - RNA, 22 nt, Human
acaugacagugacuuuauaaga

SEQ ID NO: 611838 - RNA, 22 nt, Human
guuuauuggguauuguggagcc

SEQ ID NO: 611839 - RNA, 22 nt, Human
gcauucuugguggagugcuaaa

SEQ ID NO: 611840 - RNA, 23 nt, Human
uguguucagucaaggaucagagu

SEQ ID NO: 611841 - RNA, 23 nt, Human
aacauuuguaaggugauuuuguu

SEQ ID NO: 611842 - RNA, 22 nt, Human
ucacacuuuauuuauuucaugc

SEQ ID NO: 611843 - RNA, 22 nt, Human
acagaagugacaauuucuuggg

SEQ ID NO: 611844 - RNA, 22 nt, Human
aggacaaaggaccagaucugga

SEQ ID NO: 611845 - RNA, 22 nt, Human
guauuucuuuacauaugcucau

SEQ ID NO: 611846 - RNA, 22 nt, Human
ucccucugcuagugcuugagcu

SEQ ID NO: 611847 - RNA, 22 nt, Human
uugauuugauuguaauggcucu

SEQ ID NO: 611848 - RNA, 22 nt, Human
acagacacaggcguggagucgc

SEQ ID NO: 611849 - RNA, 22 nt, Human
acagcugugggcucugcauaua

SEQ ID NO: 611850 - RNA, 22 nt, Human
uaaaugcaguacaaauuguucu

SEQ ID NO: 611851 - RNA, 22 nt, Human
agacagcacuuuuguauggggg

SEQ ID NO: 611852 - RNA, 22 nt, Human
uugaguuuccugacagcgaagg

SEQ ID NO: 611853 - RNA, 22 nt, Human
ugagucauguaauaaugcugcu

SEQ ID NO: 611854 - RNA, 22 nt, Human
ucucagaaaugacaggagguac

SEQ ID NO: 611855 - RNA, 22 nt, Human
aucaacuuguccuugauguuaa

SEQ ID NO: 611856 - RNA, 22 nt, Human
uuuucaguugugcucucuaguu

SEQ ID NO: 611857 - RNA, 19 nt, Human
cuucuggauccgcagggcc

SEQ ID NO: 611858 - RNA, 20 nt, Human
uuucacaaugaacaugucuc

SEQ ID NO: 611859 - RNA, 22 nt, Human
cuagaaguuuggguccauuaag

SEQ ID NO: 611860 - RNA, 22 nt, Human
gcaguaaauugagagucauguu

SEQ ID NO: 611861 - RNA, 22 nt, Human
uauaagaaacaaggcaaauuuu

SEQ ID NO: 611862 - RNA, 22 nt, Human
uuucucuuucaaucugcaguac

SEQ ID NO: 611863 - RNA, 22 nt, Human
uggcuuccagaacugagcaaca

SEQ ID NO: 611864 - RNA, 22 nt, Human
uucaaacaguguagaauauaug

SEQ ID NO: 611865 - RNA, 22 nt, Human
gccaugaacucgggcauggaga

SEQ ID NO: 611866 - RNA, 22 nt, Human
uuucuucucacccaggacagag

SEQ ID NO: 611867 - RNA, 21 nt, Human
uuuguucacacacagggcagc

SEQ ID NO: 611868 - RNA, 22 nt, Human
uuuugguaauuaaguagauauu

SEQ ID NO: 611869 - RNA, 22 nt, Human
aacuuaaacaagcucccaaguu

SEQ ID NO: 611870 - RNA, 22 nt, Human
uuuauacuccacucugcaagcg

SEQ ID NO: 611871 - RNA, 22 nt, Human
ugacuuuggacuagugauuuaa

SEQ ID NO: 611872 - RNA, 22 nt, Human
ucuuucagaaacuuugucugcg

SEQ ID NO: 611873 - RNA, 22 nt, Human
cuugaguaaagaaguauuuuag

SEQ ID NO: 611874 - RNA, 22 nt, Human
uagauuaucccugauuugucca

SEQ ID NO: 611875 - RNA, 22 nt, Human
ugauucaguacuuucucuaacu

SEQ ID NO: 611876 - RNA, 22 nt, Human
uagcugcacaggaaguaagauu

SEQ ID NO: 611877 - RNA, 22 nt, Human
acucccuugguggagaaugcaa

SEQ ID NO: 611878 - RNA, 22 nt, Human
acaagauagcuuagaagauuca

SEQ ID NO: 611879 - RNA, 22 nt, Human
auuugcuuguucaccaguacuu

SEQ ID NO: 611880 - RNA, 23 nt, Human
guuauugcuggugcuggccagcc

SEQ ID NO: 611881 - RNA, 22 nt, Human
ggaagccaguugcuuggugugg

SEQ ID NO: 611882 - RNA, 22 nt, Human
ugaaaugccuaugaagucagga

SEQ ID NO: 611883 - RNA, 22 nt, Human
agagcaauuagcuuagguaaaa

SEQ ID NO: 611884 - RNA, 22 nt, Human
uagaucuuucacuacuguguag

SEQ ID NO: 611885 - RNA, 22 nt, Human
ucuucaugaaauugauugcuua

SEQ ID NO: 611886 - RNA, 22 nt, Human
guucuucagauuccauuucagu

SEQ ID NO: 611887 - RNA, 22 nt, Human
ucucagcucauggcagccuuga

SEQ ID NO: 611888 - RNA, 22 nt, Human
uucaguuuugcuuuuaaucaug

SEQ ID NO: 611889 - RNA, 22 nt, Human
uucacagaauugucuugacugg

SEQ ID NO: 611890 - RNA, 22 nt, Human
agcaguuuauccucauaaugga

SEQ ID NO: 611891 - RNA, 22 nt, Human
uugggauacaucuugcugagcc

SEQ ID NO: 611892 - RNA, 18 nt, Human
gaacagcaauuucauguu

SEQ ID NO: 611893 - RNA, 22 nt, Human
gauccacaggaaccaaaacgca

SEQ ID NO: 611894 - RNA, 22 nt, Human
ucauuacaagauuuccaauuug

SEQ ID NO: 611895 - RNA, 22 nt, Human
uuaugcaaaggggccucuuccu

SEQ ID NO: 611896 - RNA, 22 nt, Human
auuuccagcagcauauuugucu

SEQ ID NO: 611897 - RNA, 22 nt, Human
cugucaaauggaaacuuauccu

SEQ ID NO: 611898 - RNA, 18 nt, Human
ucugaaggaaugauucca

SEQ ID NO: 611899 - RNA, 22 nt, Human
gucucuaucauagcugaacccu

SEQ ID NO: 611900 - RNA, 22 nt, Human
aacuagaaagaacauauuucca

SEQ ID NO: 611901 - RNA, 22 nt, Human
uuucuacauuuguaaccagauu

SEQ ID NO: 611902 - RNA, 22 nt, Human
cacagauaaggcuuugucccca

SEQ ID NO: 611903 - RNA, 22 nt, Human
uuuccaaggaugugucucucua

SEQ ID NO: 611904 - RNA, 22 nt, Human
ugcauguuucuguauguuaaug

SEQ ID NO: 611905 - RNA, 22 nt, Human
caugcauuucuaccaaggaaua

SEQ ID NO: 611906 - RNA, 22 nt, Human
ccagugugcauuaucauguguc

SEQ ID NO: 611907 - RNA, 22 nt, Human
ugcaugacaauugccgucaagu

SEQ ID NO: 611908 - RNA, 22 nt, Human
cuuguuuucuucugcagucuau

SEQ ID NO: 611909 - RNA, 22 nt, Human
uagauucugacccucuuuuuac

SEQ ID NO: 611910 - RNA, 22 nt, Human
guucuuaaagauucaucaagca

SEQ ID NO: 611911 - RNA, 22 nt, Human
aaaucaugguggaagaaacaga

SEQ ID NO: 611912 - RNA, 22 nt, Human
ccaguucuuucugugugcaaca

SEQ ID NO: 611913 - RNA, 22 nt, Human
uugaagcauuugcuauagcauu

SEQ ID NO: 611914 - RNA, 22 nt, Human
ucuguccauucagaauggcccu

SEQ ID NO: 611915 - RNA, 22 nt, Human
cagaaagcaguugucaaugggc

SEQ ID NO: 611916 - RNA, 22 nt, Human
gaaagcagaugaaauugcaaca

SEQ ID NO: 611917 - RNA, 22 nt, Human
auaggcauaacacugauguccu

SEQ ID NO: 611918 - RNA, 22 nt, Human
agugacauuauuuuguguacua

SEQ ID NO: 611919 - RNA, 22 nt, Human
auuccaaagccugaauaaugga

SEQ ID NO: 611920 - RNA, 22 nt, Human
gcuuuuauuucuucacaaaagu

SEQ ID NO: 611921 - RNA, 22 nt, Human
aaguuauugguggagagcacug

SEQ ID NO: 611922 - RNA, 22 nt, Human
uuuacaaggcaguuauuuuccu

SEQ ID NO: 611923 - RNA, 22 nt, Human
uuuagcaaggagaaauaauccu

SEQ ID NO: 611924 - RNA, 23 nt, Human
ugcaaaauuugcagaguucgaug

SEQ ID NO: 611925 - RNA, 22 nt, Human
uucugauuguuggaggaugcuu

SEQ ID NO: 611926 - RNA, 22 nt, Human
uucucugguuugcuguuucuga

SEQ ID NO: 611927 - RNA, 22 nt, Human
caaagccaggcuuucuaaugua

SEQ ID NO: 611928 - RNA, 22 nt, Human
aucauugaguaaaaugaauaca

SEQ ID NO: 611929 - RNA, 22 nt, Human
agaguguggaaauguucagagu

SEQ ID NO: 611930 - RNA, 22 nt, Human
cccauugugguuguugaggaua

SEQ ID NO: 611931 - RNA, 22 nt, Human
auugcacaucugcacuacagcc

SEQ ID NO: 611932 - RNA, 22 nt, Human
caguauuuaggauuaggagaga

SEQ ID NO: 611933 - RNA, 22 nt, Human
aaucuguugucaggaauccaca

SEQ ID NO: 611934 - RNA, 22 nt, Human
ucaguaaaugagcaaaaauuuc

SEQ ID NO: 611935 - RNA, 22 nt, Human
uaucaguagaacaauggacauu

SEQ ID NO: 611936 - RNA, 22 nt, Human
uuuccagaaauaccauuuggug

SEQ ID NO: 611937 - RNA, 22 nt, Human
uucuggagacccagcaacaggg

SEQ ID NO: 611938 - RNA, 22 nt, Human
ucauggcacaugcccuccaggg

SEQ ID NO: 611939 - RNA, 22 nt, Human
uucucugaguacguuucagugu

SEQ ID NO: 611940 - RNA, 22 nt, Human
gaguuucuucauggugcagagg

SEQ ID NO: 611941 - RNA, 22 nt, Human
caguuaaacagauugaguguua

SEQ ID NO: 611942 - RNA, 22 nt, Human
uagaagaacaugucaaacuaua

SEQ ID NO: 611943 - RNA, 22 nt, Human
aucauuugaacagaauuuguuu

SEQ ID NO: 611944 - RNA, 22 nt, Human
gaaggcaguaaauggcuguuuu

SEQ ID NO: 611945 - RNA, 22 nt, Human
cuucuucagaggccagccucug

SEQ ID NO: 611946 - RNA, 22 nt, Human
aaucuucaggguccuggggcuc

SEQ ID NO: 611947 - RNA, 22 nt, Human
uauuuggugaaucuauggucag

SEQ ID NO: 611948 - RNA, 22 nt, Human
ucuguaaacacccguaagcuuu

SEQ ID NO: 611949 - RNA, 22 nt, Human
cauuuuacgacauagggcaggc

SEQ ID NO: 611950 - RNA, 22 nt, Human
uucuuuuaauagagauccugug

SEQ ID NO: 611951 - RNA, 22 nt, Human
aaguuacaggagaaagagauca

SEQ ID NO: 611952 - RNA, 22 nt, Human
ucugcuguuuacugugugauau

SEQ ID NO: 611953 - RNA, 22 nt, Human
auuucagagugagagugcucaa

SEQ ID NO: 611954 - RNA, 20 nt, Human
uucacagaggacucagguca

SEQ ID NO: 611955 - RNA, 22 nt, Human
uggaauuaucugaagugauuug

SEQ ID NO: 611956 - RNA, 22 nt, Human
caggaaugguuaaucuaaagug

SEQ ID NO: 611957 - RNA, 17 nt, Human
uuuguucguuaguccgg

SEQ ID NO: 611958 - RNA, 22 nt, Human
cagucucuugcuucauuaguug

SEQ ID NO: 611959 - RNA, 22 nt, Human
uuccuuucucuggacugcagcc

SEQ ID NO: 611960 - RNA, 22 nt, Human
uacugcauuaucaaggggaagg

SEQ ID NO: 611961 - RNA, 18 nt, Human
uuugggauccucuuuucu

SEQ ID NO: 611962 - RNA, 22 nt, Human
augaucaagaauuuuguauucc

SEQ ID NO: 611963 - RNA, 22 nt, Human
uucacugugauguuuaagagaa

SEQ ID NO: 611964 - RNA, 22 nt, Human
cuucauuucaggcugaagaaua

SEQ ID NO: 611965 - RNA, 22 nt, Human
agaauguaagaaugcaaagauu

SEQ ID NO: 611966 - RNA, 22 nt, Human
uacuguauacuacugcuguucu

SEQ ID NO: 611967 - RNA, 22 nt, Human
uuuucaguuccaucucugcucu

SEQ ID NO: 611968 - RNA, 22 nt, Human
acuguagucuaaauauagucuu

SEQ ID NO: 611969 - RNA, 22 nt, Human
auuuacagacguggauuagugc

SEQ ID NO: 611970 - RNA, 22 nt, Human
cuacauuuacacaguuaggcuu

SEQ ID NO: 611971 - RNA, 22 nt, Human
uuuuuugucuugaagaaauggu

SEQ ID NO: 611972 - RNA, 21 nt, Human
acauguccccuaugcuuaagg

SEQ ID NO: 611973 - RNA, 22 nt, Human
ggauguuuauccuaucuuaguu

SEQ ID NO: 611974 - RNA, 22 nt, Human
guuguuuuugaacggugguggc

SEQ ID NO: 611975 - RNA, 22 nt, Human
uugacacagucaacuugauuuu

SEQ ID NO: 611976 - RNA, 22 nt, Human
cugaaacuauggggaggggagc

SEQ ID NO: 611977 - RNA, 22 nt, Human
uacauguacaugcauagguaga

SEQ ID NO: 611978 - RNA, 22 nt, Human
uuuccuguccugguacuuggca

SEQ ID NO: 611979 - RNA, 22 nt, Human
cuucacaaaauauuucauuaua

SEQ ID NO: 611980 - RNA, 22 nt, Human
gucuuuuuuacaccuuacauca

SEQ ID NO: 611981 - RNA, 22 nt, Human
accagucauagaaagcaguggu

SEQ ID NO: 611982 - RNA, 22 nt, Human
ccagaaugugugaaauuugaug

SEQ ID NO: 611983 - RNA, 22 nt, Human
ugggcacagugaguugccuuua

SEQ ID NO: 611984 - RNA, 21 nt, Human
cugcacugugauuuaaaaugu

SEQ ID NO: 611985 - RNA, 22 nt, Human
aagcauuucagguagagauauu

SEQ ID NO: 611986 - RNA, 22 nt, Human
ugcauuaagaauuucugaggau

SEQ ID NO: 611987 - RNA, 19 nt, Human
acaguuugggaaaugagca

SEQ ID NO: 611988 - RNA, 22 nt, Human
ccucuaaauuguuugaaguugg

SEQ ID NO: 611989 - RNA, 22 nt, Human
uucuuuccucccagccuuugga

SEQ ID NO: 611990 - RNA, 22 nt, Human
caauguuuuuccuuccuuaaua

SEQ ID NO: 611991 - RNA, 22 nt, Human
cugggcuuucaggcccuaaggc

SEQ ID NO: 611992 - RNA, 22 nt, Human
gaaggcaagugagccaagagaa

SEQ ID NO: 611993 - RNA, 22 nt, Human
uuuaaacuaacaguacacguug

SEQ ID NO: 611994 - RNA, 21 nt, Human
acaaauuguuuauauaggaag

SEQ ID NO: 611995 - RNA, 22 nt, Human
accaaucuccuauuuuguuuca

SEQ ID NO: 611996 - RNA, 19 nt, Human
cuccacagggauugugauu

SEQ ID NO: 611997 - RNA, 22 nt, Human
uguguuucugagaaucccaccu

SEQ ID NO: 611998 - RNA, 22 nt, Human
cagcuuuugcagacuucuugcc

SEQ ID NO: 611999 - RNA, 21 nt, Human
uaaggaagagcauuuuagguc

SEQ ID NO: 612000 - RNA, 22 nt, Human
augcuugaaaguuauuucauuu

SEQ ID NO: 612001 - RNA, 22 nt, Human
cuggcuuucauggcgcaguuga

SEQ ID NO: 612002 - RNA, 22 nt, Human
gaagauuaccugagaccacuug

SEQ ID NO: 612003 - RNA, 22 nt, Human
cagucauuaugggaguuaaucc

SEQ ID NO: 612004 - RNA, 22 nt, Human
uuggaaaugcauuuguuauuau

SEQ ID NO: 612005 - RNA, 22 nt, Human
cauuuugugcuagacacuaugg

SEQ ID NO: 612006 - RNA, 22 nt, Human
uucagauaagucaaguuaguau

SEQ ID NO: 612007 - RNA, 22 nt, Human
uacuacauacagaauuuagaga

SEQ ID NO: 612008 - RNA, 22 nt, Human
gaugggcaucaaacaugacgug

SEQ ID NO: 612009 - RNA, 21 nt, Human
agcauucaaaagaugccauaa

SEQ ID NO: 612010 - RNA, 22 nt, Human
gaagguuuuguuugcaaaucau

SEQ ID NO: 612011 - RNA, 22 nt, Human
cauuucaaacaguuacagcugc

SEQ ID NO: 612012 - RNA, 22 nt, Human
auaagugcccaaaaugaaagga

SEQ ID NO: 612013 - RNA, 19 nt, Human
uccuugacuguauucagag

SEQ ID NO: 612014 - RNA, 22 nt, Human
agccagcauauauauaguugaa

SEQ ID NO: 612015 - RNA, 22 nt, Human
uaaagacaauuucgagcuguag

SEQ ID NO: 612016 - RNA, 22 nt, Human
auucuggacaaggcaagcuccu

SEQ ID NO: 612017 - RNA, 22 nt, Human
uuauuccauagaagucaaggaa

SEQ ID NO: 612018 - RNA, 22 nt, Human
uuaaaagaauccuguuauccuc

SEQ ID NO: 612019 - RNA, 22 nt, Human
caaagaugccaaaaggaagaca

SEQ ID NO: 612020 - RNA, 22 nt, Human
uuuuccuucugauacuccauuu

SEQ ID NO: 612021 - RNA, 22 nt, Human
cauugcuguuaauugucucuag

SEQ ID NO: 612022 - RNA, 22 nt, Human
uaccuugugagcuuucuaacau

SEQ ID NO: 612023 - RNA, 23 nt, Human
acacauguuuaugcuugggggca

SEQ ID NO: 612024 - RNA, 22 nt, Human
uuccaauaaaauguuauuugca

SEQ ID NO: 612025 - RNA, 22 nt, Human
auuguacagacaugggaaacaa

SEQ ID NO: 612026 - RNA, 23 nt, Human
aacugcaagguugcugggaagua

SEQ ID NO: 612027 - RNA, 22 nt, Human
uuuuucaagacaaccugcaugu

SEQ ID NO: 612028 - RNA, 22 nt, Human
cauaaauuguacccauuccaac

SEQ ID NO: 612029 - RNA, 22 nt, Human
acaagucaguggaauuaauauu

SEQ ID NO: 612030 - RNA, 22 nt, Human
gaauacaaauaauaccaaggug

SEQ ID NO: 612031 - RNA, 22 nt, Human
uuucuagguguucacagagcau

SEQ ID NO: 612032 - RNA, 22 nt, Human
ucauuguuucugcuuuucauga

SEQ ID NO: 612033 - RNA, 22 nt, Human
guuuuaguggguggccacugau

SEQ ID NO: 612034 - RNA, 22 nt, Human
aauugguuugaauaaauaaaga

SEQ ID NO: 612035 - RNA, 22 nt, Human
aagcauuuuagauaaagcauca

SEQ ID NO: 612036 - RNA, 22 nt, Human
acaaaugcuuaguucaccaaaa

SEQ ID NO: 612037 - RNA, 22 nt, Human
uacaagcuuuuguguauaaaug

SEQ ID NO: 612038 - RNA, 22 nt, Human
ggaagcuguuaucaucuguauc

SEQ ID NO: 612039 - RNA, 22 nt, Human
agaaucugcauuuuaacaagau

SEQ ID NO: 612040 - RNA, 22 nt, Human
caaauacaaauacgggcagcuu

SEQ ID NO: 612041 - RNA, 22 nt, Human
cuucauuaaugucuauaaguuu

SEQ ID NO: 612042 - RNA, 22 nt, Human
ccugguuuaaugcucacuguug

SEQ ID NO: 612043 - RNA, 22 nt, Human
guguuucccuggcacaagaacc

SEQ ID NO: 612044 - RNA, 22 nt, Human
ugagaacaaaguugaaaguuug

SEQ ID NO: 612045 - RNA, 22 nt, Human
gauauucauaggcagguauuua

SEQ ID NO: 612046 - RNA, 22 nt, Human
uggaauguuaaaccucaaugau

SEQ ID NO: 612047 - RNA, 22 nt, Human
uguauuucugcuuucucuagua

SEQ ID NO: 612048 - RNA, 20 nt, Human
uuucacuggcuugauaaggu

SEQ ID NO: 612049 - RNA, 22 nt, Human
gacauacagcccucucccuggu

SEQ ID NO: 612050 - RNA, 22 nt, Human
uuuugaauaauucagaaacagc

SEQ ID NO: 612051 - RNA, 21 nt, Human
ucacuagugccuucugucauu

SEQ ID NO: 612052 - RNA, 23 nt, Human
gacagagugagaccuugucuuac

SEQ ID NO: 612053 - RNA, 20 nt, Human
aucggcuugccuggaaacaa

SEQ ID NO: 612054 - RNA, 21 nt, Human
acucugaaaauuaauaguuau

SEQ ID NO: 612055 - RNA, 22 nt, Human
uacauuccaaaggaaacuggcu

SEQ ID NO: 612056 - RNA, 22 nt, Human
acaacuuuaauggguuucagcu

SEQ ID NO: 612057 - RNA, 22 nt, Human
auuuuagagaaacaaacguagg

SEQ ID NO: 612058 - RNA, 22 nt, Human
uaaaguauaagcauuggaguau

SEQ ID NO: 612059 - RNA, 22 nt, Human
ccaaaauauuagugcuuaagua

SEQ ID NO: 612060 - RNA, 22 nt, Human
aucauuaacccuugaugcuggg

SEQ ID NO: 612061 - RNA, 22 nt, Human
aguaaaaucaccaucucuuugu

SEQ ID NO: 612062 - RNA, 22 nt, Human
cuccaaaggauaaaagcagagu

SEQ ID NO: 612063 - RNA, 22 nt, Human
aguaacagguguacagacuauc

SEQ ID NO: 612064 - RNA, 22 nt, Human
auuuugacauugcggcauugcu

SEQ ID NO: 612065 - RNA, 22 nt, Human
cagcaugaauguguucguaggg

SEQ ID NO: 612066 - RNA, 22 nt, Human
agcauucuguggucuucuaugg

SEQ ID NO: 612067 - RNA, 22 nt, Human
uucuaguuacagaagccuugcu

SEQ ID NO: 612068 - RNA, 22 nt, Human
agccuauucaucugaucuugaa

SEQ ID NO: 612069 - RNA, 22 nt, Human
cugucuacagaugaaauaagca

SEQ ID NO: 612070 - RNA, 22 nt, Human
cugagcaugcuacaugcagcac

SEQ ID NO: 612071 - RNA, 22 nt, Human
ucuauuaaugauucaauagugu

SEQ ID NO: 612072 - RNA, 22 nt, Human
agcaggcauuugauauauauuu

SEQ ID NO: 612073 - RNA, 22 nt, Human
aaaugcaugugcuauagaugug

SEQ ID NO: 612074 - RNA, 17 nt, Human
cauucuguaaucuuucu

SEQ ID NO: 612075 - RNA, 22 nt, Human
agcugcaaguccaaaggaauua

SEQ ID NO: 612076 - RNA, 17 nt, Human
uagauuaaacacggcca

SEQ ID NO: 612077 - RNA, 22 nt, Human
cuucuggguauuccagauaccu

SEQ ID NO: 612078 - RNA, 22 nt, Human
gugauuucagguuuuucauacu

SEQ ID NO: 612079 - RNA, 22 nt, Human
ucuucaugucaugguauauuga

SEQ ID NO: 612080 - RNA, 22 nt, Human
cacaguuuugucuugguuucca

SEQ ID NO: 612081 - RNA, 22 nt, Human
gagauuuccauauuuuguaaca

SEQ ID NO: 612082 - RNA, 22 nt, Human
ucaaagaucagaugguuguagg

SEQ ID NO: 612083 - RNA, 22 nt, Human
cuggcuuuuuucccauuaugca

SEQ ID NO: 612084 - RNA, 22 nt, Human
uugaugcugucuuucagaauca

SEQ ID NO: 612085 - RNA, 22 nt, Human
gcauuuaaauuugaacuucaga

SEQ ID NO: 612086 - RNA, 22 nt, Human
aauuauguuugcuuuagaugga

SEQ ID NO: 612087 - RNA, 22 nt, Human
ucugcuugugucuguccagccu

SEQ ID NO: 612088 - RNA, 22 nt, Human
acagugucuccugguacccagu

SEQ ID NO: 612089 - RNA, 22 nt, Human
ugucuuaugcugcauagacuau

SEQ ID NO: 612090 - RNA, 22 nt, Human
uuugcagagugcagaagcaucu

SEQ ID NO: 612091 - RNA, 22 nt, Human
cuggcagcucugagucccuucu

SEQ ID NO: 612092 - RNA, 22 nt, Human
uucuaagaaauggaaaacgauu

SEQ ID NO: 612093 - RNA, 22 nt, Human
cuguuuauucucaucuaaaaug

SEQ ID NO: 612094 - RNA, 22 nt, Human
ugcagugaugcuucuggcucag

SEQ ID NO: 612095 - RNA, 22 nt, Human
uuuacuuuugguaaggucauuu

SEQ ID NO: 612096 - RNA, 18 nt, Human
ucuuccaacacugacacc

SEQ ID NO: 612097 - RNA, 22 nt, Human
uccaaauagcuggaugauggug

SEQ ID NO: 612098 - RNA, 22 nt, Human
gggauaagagaguauuuaugca

SEQ ID NO: 612099 - RNA, 22 nt, Human
aucuucaaagcacaucguuugu

SEQ ID NO: 612100 - RNA, 22 nt, Human
cauagacauugauagguuauau

SEQ ID NO: 612101 - RNA, 22 nt, Human
gaugucuggcuaccacucgcac

SEQ ID NO: 612102 - RNA, 22 nt, Human
ucuacaacgugguuuuguugua

SEQ ID NO: 612103 - RNA, 22 nt, Human
cauuaacacuuuggauuuagac

SEQ ID NO: 612104 - RNA, 22 nt, Human
cuuucugaggagacgggcuuug

SEQ ID NO: 612105 - RNA, 22 nt, Human
aaagaugucauacacauuaaga

SEQ ID NO: 612106 - RNA, 22 nt, Human
uggaaauaguugugagucaggc

SEQ ID NO: 612107 - RNA, 22 nt, Human
cuaaauguuuuaucuuccuggc

SEQ ID NO: 612108 - RNA, 22 nt, Human
cagagggagcccuccaggagca

SEQ ID NO: 612109 - RNA, 22 nt, Human
ugaaagaagccucccuuuggag

SEQ ID NO: 612110 - RNA, 16 nt, Human
ucauugaagacaguac

SEQ ID NO: 612111 - RNA, 22 nt, Human
uugauucugcugaucucggacg

SEQ ID NO: 612112 - RNA, 21 nt, Human
uugcuguuuucccaaugcagu

SEQ ID NO: 612113 - RNA, 22 nt, Human
acugcauuaucaccaagaugua

SEQ ID NO: 612114 - RNA, 17 nt, Human
ucugagaaugcuggagg

SEQ ID NO: 612115 - RNA, 22 nt, Human
uggaaaauauuuaggugaauga

SEQ ID NO: 612116 - RNA, 22 nt, Human
uuugaauauacuucaaacaaag

SEQ ID NO: 612117 - RNA, 22 nt, Human
cuccuucacgcaggcugccaug

SEQ ID NO: 612118 - RNA, 20 nt, Human
uuugauugccccucugacuu

SEQ ID NO: 612119 - RNA, 22 nt, Human
uguaauguuagaaacaauugcu

SEQ ID NO: 612120 - RNA, 22 nt, Human
aaaguaauugugguucuugcca

SEQ ID NO: 612121 - RNA, 22 nt, Human
guaugugucuuagaacuuggga

SEQ ID NO: 612122 - RNA, 22 nt, Human
uuuaauuauaucugggcaguua

SEQ ID NO: 612123 - RNA, 22 nt, Human
aaacucuacauggucgcaaaaa

SEQ ID NO: 612124 - RNA, 22 nt, Human
uaaaguuggaccugauuuuauu

SEQ ID NO: 612125 - RNA, 20 nt, Human
ugugguuuuugccaguugaa

SEQ ID NO: 612126 - RNA, 22 nt, Human
uggaaacacccacgcaugcaua

SEQ ID NO: 612127 - RNA, 22 nt, Human
gacaagaugacaucauggcuuc

SEQ ID NO: 612128 - RNA, 22 nt, Human
auauggcuguugcacaucuaag

SEQ ID NO: 612129 - RNA, 23 nt, Human
cuuuccuuucuuugacacccagc

SEQ ID NO: 612130 - RNA, 22 nt, Human
uucucucaguuaaacuuuguga

SEQ ID NO: 612131 - RNA, 21 nt, Human
caaaagagacugauucuugga

SEQ ID NO: 612132 - RNA, 22 nt, Human
gagcugcauagcugggauccuc

SEQ ID NO: 612133 - RNA, 22 nt, Human
uacauuuauaaggcuucucugu

SEQ ID NO: 612134 - RNA, 22 nt, Human
gacauuuauuggauuuuacgag

SEQ ID NO: 612135 - RNA, 22 nt, Human
guuucuuauuucaacuggaaca

SEQ ID NO: 612136 - RNA, 22 nt, Human
auuauguagcuaaaaauugugu

SEQ ID NO: 612137 - RNA, 22 nt, Human
agaaguaucaggaagauucuca

SEQ ID NO: 612138 - RNA, 22 nt, Human
caaauguuugguggcauuuugu

SEQ ID NO: 612139 - RNA, 22 nt, Human
agcuaugaagccacuuuuaaca

SEQ ID NO: 612140 - RNA, 21 nt, Human
aucuuaaaaggucuuaacuuu

SEQ ID NO: 612141 - RNA, 22 nt, Human
aaaacuuucagggauacagaaa

SEQ ID NO: 612142 - RNA, 22 nt, Human
gaaaacacuuugaucugaaagu

SEQ ID NO: 612143 - RNA, 22 nt, Human
caagagcuggguggcaagcuag

SEQ ID NO: 612144 - RNA, 22 nt, Human
agcugaaacuucccauuaauug

SEQ ID NO: 612145 - RNA, 20 nt, Human
uccaguuuuggagacauucu

SEQ ID NO: 612146 - RNA, 22 nt, Human
uagaagaugccuuaaaguugaa

SEQ ID NO: 612147 - RNA, 22 nt, Human
guuauucuauuaaugugauugu

SEQ ID NO: 612148 - RNA, 22 nt, Human
aaaugcacaauaaaguaaaggc

SEQ ID NO: 612149 - RNA, 22 nt, Human
ucaguguccuucguucuuguug

SEQ ID NO: 612150 - RNA, 22 nt, Human
augaaacaacagacuuggucaa

SEQ ID NO: 612151 - RNA, 22 nt, Human
gguuauuguggagaaguuccgg

SEQ ID NO: 612152 - RNA, 22 nt, Human
cuucucuuggguguggugucuu

SEQ ID NO: 612153 - RNA, 22 nt, Human
caguauuucauucagaauuguu

SEQ ID NO: 612154 - RNA, 23 nt, Human
auaauaacgucugucuugucucu

SEQ ID NO: 612155 - RNA, 22 nt, Human
aaugagauggaggacucuuaau

SEQ ID NO: 612156 - RNA, 20 nt, Human
uaugauaauuacaaaauagu

SEQ ID NO: 612157 - RNA, 22 nt, Human
augaaaacggaccagagcuauu

SEQ ID NO: 612158 - RNA, 22 nt, Human
uucuuuuaauuucugucugcag

SEQ ID NO: 612159 - RNA, 22 nt, Human
cuauuuucccauaugguugaca

SEQ ID NO: 612160 - RNA, 22 nt, Human
uacaaagugauuuuggaauuga

SEQ ID NO: 612161 - RNA, 22 nt, Human
aagugucuucugauggggugug

SEQ ID NO: 612162 - RNA, 22 nt, Human
cuuccagcugauuggcauccag

SEQ ID NO: 612163 - RNA, 22 nt, Human
ugucuuacagcaaucuguucug

SEQ ID NO: 612164 - RNA, 22 nt, Human
uucagaagguaggaaugucccu

SEQ ID NO: 612165 - RNA, 22 nt, Human
ugguaaaugucuaacaaucacu

SEQ ID NO: 612166 - RNA, 22 nt, Human
uaauuuugucacagugacaugc

SEQ ID NO: 612167 - RNA, 22 nt, Human
ucgcuuuaauggucuucacagc

SEQ ID NO: 612168 - RNA, 22 nt, Human
ugguuaaaugcuccgaucuugg

SEQ ID NO: 612169 - RNA, 22 nt, Human
auuuggucuacauuuuccaaau

SEQ ID NO: 612170 - RNA, 22 nt, Human
caggaaauucccagaaggacug

SEQ ID NO: 612171 - RNA, 22 nt, Human
gaaguucugguguaugugauaa

SEQ ID NO: 612172 - RNA, 22 nt, Human
aaauugcuugagauuagucucc

SEQ ID NO: 612173 - RNA, 22 nt, Human
aauggcuguucucugugauugg

SEQ ID NO: 612174 - RNA, 22 nt, Human
aacuuucuuugcaucuaaguuu

SEQ ID NO: 612175 - RNA, 22 nt, Human
ucugaaauuuuaguuauagaaa

SEQ ID NO: 612176 - RNA, 22 nt, Human
uguuugcucugacuaucuugcg

SEQ ID NO: 612177 - RNA, 22 nt, Human
ucaauuuauguggcuauucauu

SEQ ID NO: 612178 - RNA, 22 nt, Human
acuuccagaaaugauuuaauuu

SEQ ID NO: 612179 - RNA, 19 nt, Human
aucaggcuucuauuuucuc

SEQ ID NO: 612180 - RNA, 22 nt, Human
gcaaggaagcagaguugcuauc

SEQ ID NO: 612181 - RNA, 22 nt, Human
uucgcauucagcuuugccacug

SEQ ID NO: 612182 - RNA, 22 nt, Human
ugguccagacuuugaccucuca

SEQ ID NO: 612183 - RNA, 22 nt, Human
uugcaguuuugacagaccaaau

SEQ ID NO: 612184 - RNA, 22 nt, Human
agucaacauuugagaugcaaug

SEQ ID NO: 612185 - RNA, 17 nt, Human
cagucacaggucuuuuc

SEQ ID NO: 612186 - RNA, 22 nt, Human
uuaccuuguaaaacauauuccu

SEQ ID NO: 612187 - RNA, 22 nt, Human
cuugucugcuauaaaaauccag

SEQ ID NO: 612188 - RNA, 22 nt, Human
uugauguaauacuuugcaacca

SEQ ID NO: 612189 - RNA, 22 nt, Human
cuccaggacaugacuuucuugc

SEQ ID NO: 612190 - RNA, 22 nt, Human
ucacacaucucagguguuuaau

SEQ ID NO: 612191 - RNA, 22 nt, Human
auacuucuuuagcauauugaac

SEQ ID NO: 612192 - RNA, 22 nt, Human
ucucccaaccucuggugggugc

SEQ ID NO: 612193 - RNA, 22 nt, Human
uuucacauacaguguauaguag

SEQ ID NO: 612194 - RNA, 22 nt, Human
ccacuuaagagaacagcuauag

SEQ ID NO: 612195 - RNA, 22 nt, Human
acauucaugcaccuuccuaucc

SEQ ID NO: 612196 - RNA, 22 nt, Human
gagcaacacauugaaugaggau

SEQ ID NO: 612197 - RNA, 20 nt, Human
ucuuuuauuggcagauccug

SEQ ID NO: 612198 - RNA, 22 nt, Human
aaauugcaaaaguacuuuuagg

SEQ ID NO: 612199 - RNA, 22 nt, Human
ugaauaaucuuggguauuaaua

SEQ ID NO: 612200 - RNA, 22 nt, Human
augaauuguccgauguugugca

SEQ ID NO: 612201 - RNA, 22 nt, Human
aaauccaucaaaucuucuagaa

SEQ ID NO: 612202 - RNA, 22 nt, Human
aauacagauggcaugugaagau

SEQ ID NO: 612203 - RNA, 22 nt, Human
aacacauggcaagagcaggaaa

SEQ ID NO: 612204 - RNA, 22 nt, Human
uuauuuuguagcucugaucuuu

SEQ ID NO: 612205 - RNA, 22 nt, Human
guuaaaugcagauucugacuca

SEQ ID NO: 612206 - RNA, 22 nt, Human
aaaucugagaaauauuguccag

SEQ ID NO: 612207 - RNA, 18 nt, Human
agcucacagaucuguuuu

SEQ ID NO: 612208 - RNA, 22 nt, Human
uuguaagacuguagaaugcaaa

SEQ ID NO: 612209 - RNA, 22 nt, Human
acagagacacggaagcuaaaga

SEQ ID NO: 612210 - RNA, 22 nt, Human
cacuuuuaacaggagaauuccc

SEQ ID NO: 612211 - RNA, 21 nt, Human
ccacaauucuaguuacauaug

SEQ ID NO: 612212 - RNA, 22 nt, Human
aaauugaauuugggaaacauug

SEQ ID NO: 612213 - RNA, 22 nt, Human
caggcuugaugugucuauacuu

SEQ ID NO: 612214 - RNA, 22 nt, Human
uuuacagagaauguacauaaag

SEQ ID NO: 612215 - RNA, 22 nt, Human
cugaagcugggcacuuccuuuu

SEQ ID NO: 612216 - RNA, 22 nt, Human
acauuuguuucucuagaguagg

SEQ ID NO: 612217 - RNA, 22 nt, Human
gucauuuuugacuuugaaguga

SEQ ID NO: 612218 - RNA, 22 nt, Human
aaacaucuucucuugauucuuu

SEQ ID NO: 612219 - RNA, 22 nt, Human
caggaacacaaugagucucaaa

SEQ ID NO: 612220 - RNA, 22 nt, Human
aaaauuaagugucugggaagcc

SEQ ID NO: 612221 - RNA, 22 nt, Human
ucuaugucucuggaaggagugu

SEQ ID NO: 612222 - RNA, 22 nt, Human
aaagcacauuacaagcucaguc

SEQ ID NO: 612223 - RNA, 22 nt, Human
agcuaauguauguugaaagcac

SEQ ID NO: 612224 - RNA, 22 nt, Human
ucucauuuacuuccacaggcug

SEQ ID NO: 612225 - RNA, 22 nt, Human
augauugaaaaugacauugcca

SEQ ID NO: 612226 - RNA, 22 nt, Human
cagcuugcacacauauuagacg

SEQ ID NO: 612227 - RNA, 22 nt, Human
auuuccuguaggggcuugcgaa

SEQ ID NO: 612228 - RNA, 22 nt, Human
gauucugaaauuaacagacugg

SEQ ID NO: 612229 - RNA, 22 nt, Human
aucuuuggguacaaacuugccu

SEQ ID NO: 612230 - RNA, 22 nt, Human
uaaucuuagacauguauuuuuc

SEQ ID NO: 612231 - RNA, 22 nt, Human
acauuugauauggaguugugua

SEQ ID NO: 612232 - RNA, 22 nt, Human
ggaaacauuccaagaguugaaa

SEQ ID NO: 612233 - RNA, 22 nt, Human
uggaaagaggaagugcccagca

SEQ ID NO: 612234 - RNA, 16 nt, Human
aaacugacggcaucug

SEQ ID NO: 612235 - RNA, 22 nt, Human
agagcuagaaggaagcauuucu

SEQ ID NO: 612236 - RNA, 22 nt, Human
auauaguuggguuucauucuac

SEQ ID NO: 612237 - RNA, 22 nt, Human
aguuauguccucagcaaaucaa

SEQ ID NO: 612238 - RNA, 22 nt, Human
aacagauuguaaccugauagcc

SEQ ID NO: 612239 - RNA, 22 nt, Human
uuugggcuguacaauuucugua

SEQ ID NO: 612240 - RNA, 22 nt, Human
ggucauagagcuggaaauuggc

SEQ ID NO: 612241 - RNA, 22 nt, Human
uacaucucaucugugcucuccg

SEQ ID NO: 612242 - RNA, 22 nt, Human
cuggucaauaaucauguaguac

SEQ ID NO: 612243 - RNA, 22 nt, Human
auguacaaucuaucacaagaag

SEQ ID NO: 612244 - RNA, 22 nt, Human
agcacauucccaccuguacuuc

SEQ ID NO: 612245 - RNA, 22 nt, Human
aggcgaagggaccagacgguag

SEQ ID NO: 612246 - RNA, 22 nt, Human
cucucuccuuagcugcagacca

SEQ ID NO: 612247 - RNA, 22 nt, Human
gaaaauaguucaucacaaugau

SEQ ID NO: 612248 - RNA, 22 nt, Human
augaaacucuagcuuucagcac

SEQ ID NO: 612249 - RNA, 22 nt, Human
uuugacaacugugcaguuugua

SEQ ID NO: 612250 - RNA, 22 nt, Human
aaaaugcucaucagcgauggcu

SEQ ID NO: 612251 - RNA, 22 nt, Human
auugagaaggagauuggcaucu

SEQ ID NO: 612252 - RNA, 22 nt, Human
uaucauuuuacugugacauuuu

SEQ ID NO: 612253 - RNA, 22 nt, Human
uugagcagaucgggcugugggg

SEQ ID NO: 612254 - RNA, 22 nt, Human
auaucuaggcugaauguaaaau

SEQ ID NO: 612255 - RNA, 20 nt, Human
uacaauauucccacuuugcu

SEQ ID NO: 612256 - RNA, 22 nt, Human
aaucuguuuuaaaguuugugcc

SEQ ID NO: 612257 - RNA, 22 nt, Human
ucaugcaccucuccaugucccc

SEQ ID NO: 612258 - RNA, 22 nt, Human
cugcuuuaaaacugauacauga

SEQ ID NO: 612259 - RNA, 22 nt, Human
aacaucuagguucucaucgaua

SEQ ID NO: 612260 - RNA, 22 nt, Human
uaaaugaaaggguuuaauuuau

SEQ ID NO: 612261 - RNA, 22 nt, Human
auucagaaauagaaaauuugau

SEQ ID NO: 612262 - RNA, 22 nt, Human
uuacacaacaucuguauuauua

SEQ ID NO: 612263 - RNA, 22 nt, Human
aaagucuuaauguaaguuuagu

SEQ ID NO: 612264 - RNA, 22 nt, Human
aaugcuuuuugcgaaaugugca

SEQ ID NO: 612265 - RNA, 22 nt, Human
ugucuuuagccacuugccucuu

SEQ ID NO: 612266 - RNA, 22 nt, Human
ucaauucugccucuaaauauuu

SEQ ID NO: 612267 - RNA, 22 nt, Human
uuugagaaacagacgaaagaca

SEQ ID NO: 612268 - RNA, 22 nt, Human
auguuugaaauuguaaguauau

SEQ ID NO: 612269 - RNA, 19 nt, Human
ggaggcuucuuggggucgg

SEQ ID NO: 612270 - RNA, 22 nt, Human
gugguuguuuccagguuugaaa

SEQ ID NO: 612271 - RNA, 22 nt, Human
uuagcaaacaucuucgugugag

SEQ ID NO: 612272 - RNA, 22 nt, Human
aacugcuaacugguuugauacu

SEQ ID NO: 612273 - RNA, 22 nt, Human
aaugcugugauuuauuaaguau

SEQ ID NO: 612274 - RNA, 22 nt, Human
uaaguugauuauaaccacugga

SEQ ID NO: 612275 - RNA, 21 nt, Human
uggagagugauuucagugugg

SEQ ID NO: 612276 - RNA, 22 nt, Human
agccacauggaccugaugcuag

SEQ ID NO: 612277 - RNA, 22 nt, Human
acugcauucuuuaucccacaac

SEQ ID NO: 612278 - RNA, 22 nt, Human
gaugcugauuuuacuguuuucu

SEQ ID NO: 612279 - RNA, 22 nt, Human
guugcaaaugggaagaugguua

SEQ ID NO: 612280 - RNA, 22 nt, Human
ugcaauuagcguauuaguuuau

SEQ ID NO: 612281 - RNA, 22 nt, Human
aaacacaucauucaugucguca

SEQ ID NO: 612282 - RNA, 22 nt, Human
uuuccuacugcccuauacacac

SEQ ID NO: 612283 - RNA, 22 nt, Human
aagcuguuagggagugguaggu

SEQ ID NO: 612284 - RNA, 22 nt, Human
cauccauagauugagagauggu

SEQ ID NO: 612285 - RNA, 22 nt, Human
uuuguucaccuagcaaacuuuu

SEQ ID NO: 612286 - RNA, 20 nt, Human
caucaacaccuugucagccu

SEQ ID NO: 612287 - RNA, 22 nt, Human
uuccauacgacugaggucucgg

SEQ ID NO: 612288 - RNA, 22 nt, Human
uagcagaacaauagucaaugau

SEQ ID NO: 612289 - RNA, 22 nt, Human
aagcucuuuccacuaaaccacu

SEQ ID NO: 612290 - RNA, 22 nt, Human
gaauaauugugaugcuugaagu

SEQ ID NO: 612291 - RNA, 22 nt, Human
auauuuguuuggcagaguucag

SEQ ID NO: 612292 - RNA, 22 nt, Human
auuacugaggcaaaguaguuuu

SEQ ID NO: 612293 - RNA, 22 nt, Human
cugguuuuccaauguuuugacu

SEQ ID NO: 612294 - RNA, 18 nt, Human
gcugaaauucuaaacaaa

SEQ ID NO: 612295 - RNA, 22 nt, Human
ugauuugaaaccuuuggcaaga

SEQ ID NO: 612296 - RNA, 22 nt, Human
aacacuaaaggucaguuagaag

SEQ ID NO: 612297 - RNA, 22 nt, Human
uagaaagagcuuugcuuccuuu

SEQ ID NO: 612298 - RNA, 22 nt, Human
uucagaacugucuguccuuuuc

SEQ ID NO: 612299 - RNA, 22 nt, Human
auggaguugagcucuguugucc

SEQ ID NO: 612300 - RNA, 22 nt, Human
ugucuagaaaugcugagucuca

SEQ ID NO: 612301 - RNA, 22 nt, Human
uagcagcacuauuuguuguagu

SEQ ID NO: 612302 - RNA, 22 nt, Human
gcaaggagcaccuuucuggaac

SEQ ID NO: 612303 - RNA, 22 nt, Human
uuaaccagguccuuugaaaaca

SEQ ID NO: 612304 - RNA, 22 nt, Human
cuuauuugcccauguuucuuua

SEQ ID NO: 612305 - RNA, 22 nt, Human
gagacagagagguacucaacau

SEQ ID NO: 612306 - RNA, 19 nt, Human
aacuacagcgcacuguccu

SEQ ID NO: 612307 - RNA, 19 nt, Human
uaugacaaguacuaguucu

SEQ ID NO: 612308 - RNA, 22 nt, Human
ugaaaacacuuuaguuuagguc

SEQ ID NO: 612309 - RNA, 22 nt, Human
gcuuccaaugcuucuaucacau

SEQ ID NO: 612310 - RNA, 22 nt, Human
uuugagugcccauguuucccag

SEQ ID NO: 612311 - RNA, 22 nt, Human
uacauguuauuucacuauuggu

SEQ ID NO: 612312 - RNA, 22 nt, Human
uucagaaaggcugugccagcca

SEQ ID NO: 612313 - RNA, 22 nt, Human
aaacuagguucugauuuccaag

SEQ ID NO: 612314 - RNA, 22 nt, Human
uuguacuuaaauaugcaaauag

SEQ ID NO: 612315 - RNA, 22 nt, Human
agaaaagaggcuuucuaagcau

SEQ ID NO: 612316 - RNA, 22 nt, Human
aucuaugugggaaucauaauag

SEQ ID NO: 612317 - RNA, 22 nt, Human
cucuccaggcgagguccuacug

SEQ ID NO: 612318 - RNA, 22 nt, Human
cuugugaaaugccagauaaucu

SEQ ID NO: 612319 - RNA, 22 nt, Human
uuacaauuacuugaucucagcu

SEQ ID NO: 612320 - RNA, 22 nt, Human
aacaguaugugagauuuacaca

SEQ ID NO: 612321 - RNA, 22 nt, Human
aucuguucuucaaaauauuaca

SEQ ID NO: 612322 - RNA, 22 nt, Human
uuccuguucaggaaaguugugu

SEQ ID NO: 612323 - RNA, 22 nt, Human
uuugaagauaaauauggagaaa

SEQ ID NO: 612324 - RNA, 22 nt, Human
ugucacagugcacagcuaagaa

SEQ ID NO: 612325 - RNA, 22 nt, Human
agaaagcacccugcacuuucug

SEQ ID NO: 612326 - RNA, 22 nt, Human
ucaaagcacuggggaaagccug

SEQ ID NO: 612327 - RNA, 22 nt, Human
cugcugucuuuauuucacugcu

SEQ ID NO: 612328 - RNA, 22 nt, Human
ggaaugcacuagacugugaaac

SEQ ID NO: 612329 - RNA, 22 nt, Human
uucuguaauucuguuaguuuca

SEQ ID NO: 612330 - RNA, 23 nt, Human
agugaugucacccacagacaagg

SEQ ID NO: 612331 - RNA, 20 nt, Human
uuacagaaaugauguuauuu

SEQ ID NO: 612332 - RNA, 21 nt, Human
gcucuguguuacaaguugggg

SEQ ID NO: 612333 - RNA, 22 nt, Human
auuguugacuugauuacucaac

SEQ ID NO: 612334 - RNA, 22 nt, Human
agauguuuuuccaggucuaauu

SEQ ID NO: 612335 - RNA, 22 nt, Human
guucuucaggcugugcucuaga

SEQ ID NO: 612336 - RNA, 22 nt, Human
uaucuguauucugacagucacu

SEQ ID NO: 612337 - RNA, 22 nt, Human
aacuuagagcucuccuaaauga

SEQ ID NO: 612338 - RNA, 22 nt, Human
agacauauuggcuugcuuuaau

SEQ ID NO: 612339 - RNA, 22 nt, Human
uaggaaugcagaugcauaauaa

SEQ ID NO: 612340 - RNA, 21 nt, Human
acagaagcggcgaguggcccc

SEQ ID NO: 612341 - RNA, 22 nt, Human
uguaagcuucaaauaucuguga

SEQ ID NO: 612342 - RNA, 22 nt, Human
uaucuagagccuggaagucuug

SEQ ID NO: 612343 - RNA, 22 nt, Human
gccagagaggccuuagaaucca

SEQ ID NO: 612344 - RNA, 22 nt, Human
cuuguauuaggaagaaugcuuu

SEQ ID NO: 612345 - RNA, 22 nt, Human
aaaugcacugaauauuccaaau

SEQ ID NO: 612346 - RNA, 22 nt, Human
gcugaagagagaugcguccagc

SEQ ID NO: 612347 - RNA, 22 nt, Human
uagcaggagagaaguuuuaagu

SEQ ID NO: 612348 - RNA, 22 nt, Human
auccauuuuuucagaaugcucu

SEQ ID NO: 612349 - RNA, 22 nt, Human
uaacacauagauauuuuaacuu

SEQ ID NO: 612350 - RNA, 22 nt, Human
aauguuacgaucaacaacacau

SEQ ID NO: 612351 - RNA, 22 nt, Human
ucacaguucaacuaguucagau

SEQ ID NO: 612352 - RNA, 22 nt, Human
ugcacagagggaggcauaaaau

SEQ ID NO: 612353 - RNA, 22 nt, Human
aagcaauucacaguucacuuaa

SEQ ID NO: 612354 - RNA, 22 nt, Human
uugcucuauguuuguaaacaga

SEQ ID NO: 612355 - RNA, 23 nt, Human
auuuccuaaaagauaaucauuac

SEQ ID NO: 612356 - RNA, 22 nt, Human
uuagacaucaagaagccaaugu

SEQ ID NO: 612357 - RNA, 17 nt, Human
auucaugaacauguccu

SEQ ID NO: 612358 - RNA, 22 nt, Human
auuuacucgugcuucauugaau

SEQ ID NO: 612359 - RNA, 22 nt, Human
uucucaggaacucagugucagc

SEQ ID NO: 612360 - RNA, 22 nt, Human
aagcaaaagguuacacuucugg

SEQ ID NO: 612361 - RNA, 21 nt, Human
uuuguucaggggcaaaguuaa

SEQ ID NO: 612362 - RNA, 22 nt, Human
aaggccaucuacuuacggaauu

SEQ ID NO: 612363 - RNA, 22 nt, Human
aagauuuaccacuuuauucaag

SEQ ID NO: 612364 - RNA, 22 nt, Human
cagaaagugauuugcuauucca

SEQ ID NO: 612365 - RNA, 22 nt, Human
uugcaucagcaggcauaauugg

SEQ ID NO: 612366 - RNA, 22 nt, Human
ucccagauuccugcucuuauau

SEQ ID NO: 612367 - RNA, 22 nt, Human
ggggaagaaauagaacauuuug

SEQ ID NO: 612368 - RNA, 22 nt, Human
uucuacauugugaaguucuuua

SEQ ID NO: 612369 - RNA, 22 nt, Human
ugugucuaaugacuauuucuuc

SEQ ID NO: 612370 - RNA, 22 nt, Human
cucugcaaggcccuccaguagc

SEQ ID NO: 612371 - RNA, 22 nt, Human
auuuccuauacaguuguccaua

SEQ ID NO: 612372 - RNA, 22 nt, Human
guuugcaaauuguguuaaagcu

SEQ ID NO: 612373 - RNA, 22 nt, Human
auggcuucugucuuggaaauuu

SEQ ID NO: 612374 - RNA, 22 nt, Human
acuagaaacuaauggauuauua

SEQ ID NO: 612375 - RNA, 22 nt, Human
cacagaggaugcccaagcgauc

SEQ ID NO: 612376 - RNA, 22 nt, Human
cagaaacacuguauuuagggaa

SEQ ID NO: 612377 - RNA, 22 nt, Human
ggcaagaaccucaauuaccuuu

SEQ ID NO: 612378 - RNA, 22 nt, Human
auagucuuagaaucuugagugu

SEQ ID NO: 612379 - RNA, 22 nt, Human
guucucucagcgauagugaugg

SEQ ID NO: 612380 - RNA, 22 nt, Human
uuugaaauguaucaguauaggu

SEQ ID NO: 612381 - RNA, 22 nt, Human
cgaguaauuggaaauuugcuau

SEQ ID NO: 612382 - RNA, 22 nt, Human
cauaacauccuugcuacuuuga

SEQ ID NO: 612383 - RNA, 22 nt, Human
uuuauccaccuuacccuguucc

SEQ ID NO: 612384 - RNA, 22 nt, Human
aagucauugguagcuugauagg

SEQ ID NO: 612385 - RNA, 22 nt, Human
aagaaaagguaaccgcuuaucu

SEQ ID NO: 612386 - RNA, 22 nt, Human
agugaaauaugcccauugcugu

SEQ ID NO: 612387 - RNA, 22 nt, Human
ggcccucucuacauguuagacg

SEQ ID NO: 612388 - RNA, 22 nt, Human
aguguuaaggcugguugcuaua

SEQ ID NO: 612389 - RNA, 22 nt, Human
auggcauuugaaucugucuuuu

SEQ ID NO: 612390 - RNA, 22 nt, Human
aucacaguuuuaccauuuggua

SEQ ID NO: 612391 - RNA, 22 nt, Human
cacaauuuccauugagcagcag

SEQ ID NO: 612392 - RNA, 22 nt, Human
cuuuaguucuagaaagugaaac

SEQ ID NO: 612393 - RNA, 22 nt, Human
agaaacaucgcuuaguccucau

SEQ ID NO: 612394 - RNA, 22 nt, Human
uagcauuucacugaucuucacu

SEQ ID NO: 612395 - RNA, 22 nt, Human
ucacuguuaauaaauagcaaag

SEQ ID NO: 612396 - RNA, 22 nt, Human
augagcuaagcagaaagcacac

SEQ ID NO: 612397 - RNA, 22 nt, Human
acucauuugcaugaugugcuau

SEQ ID NO: 612398 - RNA, 21 nt, Human
acaguacuugagaucuuuuga

SEQ ID NO: 612399 - RNA, 22 nt, Human
aauucaaggaucuguuaaaucu

SEQ ID NO: 612400 - RNA, 22 nt, Human
uguggaagaacuucuugcuugg

SEQ ID NO: 612401 - RNA, 22 nt, Human
ucuucacaguccuggucagugg

SEQ ID NO: 612402 - RNA, 22 nt, Human
cuuuacuucagcaagcuuuccu

SEQ ID NO: 612403 - RNA, 22 nt, Human
auacagaagaccccuccgucau

SEQ ID NO: 612404 - RNA, 22 nt, Human
gugauugugaaaacauuaagaa

SEQ ID NO: 612405 - RNA, 22 nt, Human
caagaaguugacagccagguga

SEQ ID NO: 612406 - RNA, 22 nt, Human
uggccagaacucagacaugugg

SEQ ID NO: 612407 - RNA, 22 nt, Human
acugauuucagggaugagaaga

SEQ ID NO: 612408 - RNA, 22 nt, Human
uucagagcuggugucuacagcu

SEQ ID NO: 612409 - RNA, 22 nt, Human
acugcauuugguaaagucaaga

SEQ ID NO: 612410 - RNA, 22 nt, Human
uuuguguuguacuucugugcau

SEQ ID NO: 612411 - RNA, 22 nt, Human
uguguuuuggaaggaacaugca

SEQ ID NO: 612412 - RNA, 22 nt, Human
acaggauuaauaaaaaauugua

SEQ ID NO: 612413 - RNA, 22 nt, Human
uucaacaacuugguucaaaugg

SEQ ID NO: 612414 - RNA, 22 nt, Human
ugaauagagcugcaguggacau

SEQ ID NO: 612415 - RNA, 22 nt, Human
augcacacguacccuacaaggc

SEQ ID NO: 612416 - RNA, 17 nt, Human
ucuggaugucauggaag

SEQ ID NO: 612417 - RNA, 22 nt, Human
augauuuguuaacagacuuaau

SEQ ID NO: 612418 - RNA, 22 nt, Human
gaagaaguguaagucuguuuca

SEQ ID NO: 612419 - RNA, 22 nt, Human
gaaaugucaagauauguuugga

SEQ ID NO: 612420 - RNA, 22 nt, Human
auacaacagaaaaugauuauuc

SEQ ID NO: 612421 - RNA, 22 nt, Human
caaacugaacacgaaagucuuu

SEQ ID NO: 612422 - RNA, 22 nt, Human
cacagagagcuacgugcagcgu

SEQ ID NO: 612423 - RNA, 21 nt, Human
uucacaguggauaacuuucug

SEQ ID NO: 612424 - RNA, 22 nt, Human
uuggcaauauuuacugaaguug

SEQ ID NO: 612425 - RNA, 21 nt, Human
uaaaagaugacaagacagcuc

SEQ ID NO: 612426 - RNA, 22 nt, Human
uugagacacaaggcacaguaag

SEQ ID NO: 612427 - RNA, 22 nt, Human
uuucugaggaauuaauacagaa

SEQ ID NO: 612428 - RNA, 22 nt, Human
aaguguguauuuuucuucagug

SEQ ID NO: 612429 - RNA, 22 nt, Human
ugcuugucacccugccugagug

SEQ ID NO: 612430 - RNA, 22 nt, Human
gccaaucaggaggcuguacauc

SEQ ID NO: 612431 - RNA, 22 nt, Human
ucauacauguuguguucaaaug

SEQ ID NO: 612432 - RNA, 22 nt, Human
aguacuuuuuguucaauugugc

SEQ ID NO: 612433 - RNA, 22 nt, Human
guaguucuuucucaauguucaa

SEQ ID NO: 612434 - RNA, 22 nt, Human
agauauguuaggcuuguucccu

SEQ ID NO: 612435 - RNA, 22 nt, Human
uauuuguuucuaguggcagcaa

SEQ ID NO: 612436 - RNA, 20 nt, Human
aaagauacuuuuuguaaugg

SEQ ID NO: 612437 - RNA, 23 nt, Human
cuguuauauggguguuaugugcu

SEQ ID NO: 612438 - RNA, 22 nt, Human
ucaagaaagggcuucaccagga

SEQ ID NO: 612439 - RNA, 22 nt, Human
uaauuucagugcaagcucacgg

SEQ ID NO: 612440 - RNA, 22 nt, Human
uaucugucgggagucuuccgga

SEQ ID NO: 612441 - RNA, 22 nt, Human
cugcagaugguauuguucuggu

SEQ ID NO: 612442 - RNA, 22 nt, Human
uuguacaaauaggaaccucuga

SEQ ID NO: 612443 - RNA, 22 nt, Human
caguuuuacccaagcuuauuuu

SEQ ID NO: 612444 - RNA, 22 nt, Human
uuuaaaccuaucuaagaaauag

SEQ ID NO: 612445 - RNA, 22 nt, Human
guacauauccuuuacguuuugu

SEQ ID NO: 612446 - RNA, 22 nt, Human
guguggcuaggauggcuuugcu

SEQ ID NO: 612447 - RNA, 22 nt, Human
uauccaaaggaacaaucacagc

SEQ ID NO: 612448 - RNA, 22 nt, Human
cucaggaaaauauugaagaagu

SEQ ID NO: 612449 - RNA, 22 nt, Human
uugcauauccuccaacacaugg

SEQ ID NO: 612450 - RNA, 22 nt, Human
auuagccuguugcauuuucacu

SEQ ID NO: 612451 - RNA, 22 nt, Human
gucaaaacaaaguuaagaauuc

SEQ ID NO: 612452 - RNA, 22 nt, Human
ucuguuauaaaucacacugcau

SEQ ID NO: 612453 - RNA, 20 nt, Human
cucuuuucacucucaguggu

SEQ ID NO: 612454 - RNA, 22 nt, Human
ucuuauugugaugaugaagaac

SEQ ID NO: 612455 - RNA, 22 nt, Human
ugggcacacugaaucugcuauu

SEQ ID NO: 612456 - RNA, 22 nt, Human
aguucugacucugaaucuggga

SEQ ID NO: 612457 - RNA, 22 nt, Human
aggcauuacaucuaaauauuua

SEQ ID NO: 612458 - RNA, 22 nt, Human
uuuccaaagguggcaggaacaa

SEQ ID NO: 612459 - RNA, 22 nt, Human
auucauucugaccucaagagaa

SEQ ID NO: 612460 - RNA, 22 nt, Human
uucacauaaucugcagcaagcg

SEQ ID NO: 612461 - RNA, 19 nt, Human
ucuuucauuucuagcucug

SEQ ID NO: 612462 - RNA, 22 nt, Human
caucuuuguuuuggauauaauc

SEQ ID NO: 612463 - RNA, 22 nt, Human
guguaucaacauguuuuuugug

SEQ ID NO: 612464 - RNA, 22 nt, Human
acaguaaucugggaacuuguua

SEQ ID NO: 612465 - RNA, 22 nt, Human
auugaacauuguucuaggaggc

SEQ ID NO: 612466 - RNA, 21 nt, Human
uuccuggaggcagaaacguga

SEQ ID NO: 612467 - RNA, 22 nt, Human
aaugauguuuuuaaagaacaua

SEQ ID NO: 612468 - RNA, 22 nt, Human
uaugcuguauucuguauguuag

SEQ ID NO: 612469 - RNA, 22 nt, Human
uaagaaacauuuuuaugacagu

SEQ ID NO: 612470 - RNA, 22 nt, Human
auuguuacuggguuaauuugga

SEQ ID NO: 612471 - RNA, 22 nt, Human
uagcaucuguacugacauaauc

SEQ ID NO: 612472 - RNA, 22 nt, Human
cagcacauggauggaguuagga

SEQ ID NO: 612473 - RNA, 22 nt, Human
auugucgucaauggacacauag

SEQ ID NO: 612474 - RNA, 22 nt, Human
gugacagguauacucaccauug

SEQ ID NO: 612475 - RNA, 22 nt, Human
acuuuucuuaucagaaaggcca

SEQ ID NO: 612476 - RNA, 22 nt, Human
uugagacucgagucucucagac

SEQ ID NO: 612477 - RNA, 20 nt, Human
auuugcuuaccuuguuucua

SEQ ID NO: 612478 - RNA, 22 nt, Human
uuugaacuucuaccugucauau

SEQ ID NO: 612479 - RNA, 22 nt, Human
accaagaguccaagugagguug

SEQ ID NO: 612480 - RNA, 21 nt, Human
ucaauuauggaugugugcaaa

SEQ ID NO: 612481 - RNA, 22 nt, Human
uacugaaagagugguggacucu

SEQ ID NO: 612482 - RNA, 22 nt, Human
ucacgugagggaccugugucug

SEQ ID NO: 612483 - RNA, 22 nt, Human
cugguuuuuagugcuuaggagu

SEQ ID NO: 612484 - RNA, 22 nt, Human
guucuucaaagugacaacuaaa

SEQ ID NO: 612485 - RNA, 22 nt, Human
augaaaacagccuccugugaua

SEQ ID NO: 612486 - RNA, 22 nt, Human
uuuuuaagagucuggaaauagu

SEQ ID NO: 612487 - RNA, 19 nt, Human
ugaggauugagguccagua

SEQ ID NO: 612488 - RNA, 22 nt, Human
agccugugaaaucucugccacu

SEQ ID NO: 612489 - RNA, 22 nt, Human
auguaacauaugugaucgcauu

SEQ ID NO: 612490 - RNA, 22 nt, Human
auuuuguaucuuacggggacua

SEQ ID NO: 612491 - RNA, 22 nt, Human
uuuccagucucugccuccaagg

SEQ ID NO: 612492 - RNA, 22 nt, Human
uuucauguuggauacuguuuca

SEQ ID NO: 612493 - RNA, 22 nt, Human
uuccaaggcugcuauuuguuuc

SEQ ID NO: 612494 - RNA, 22 nt, Human
uccacagugguggaauuguuca

SEQ ID NO: 612495 - RNA, 21 nt, Human
uaagaacauuaucuucuuccu

SEQ ID NO: 612496 - RNA, 22 nt, Human
uugaacaguccuaagagacccu

SEQ ID NO: 612497 - RNA, 22 nt, Human
acucaucuuugaauuuucagua

SEQ ID NO: 612498 - RNA, 22 nt, Human
ugaguguuguaaccauaugauu

SEQ ID NO: 612499 - RNA, 22 nt, Human
aagcaccuggguuauaucuuag

SEQ ID NO: 612500 - RNA, 22 nt, Human
uccaagaagcuuacaaucuaau

SEQ ID NO: 612501 - RNA, 22 nt, Human
uuucccaggcuggaaugcagug

SEQ ID NO: 612502 - RNA, 22 nt, Human
acuaauugaaaugagacuggug

SEQ ID NO: 612503 - RNA, 22 nt, Human
aacuuucagaauccuaugcauu

SEQ ID NO: 612504 - RNA, 22 nt, Human
ucagcacaggucuugcaaaaca

SEQ ID NO: 612505 - RNA, 22 nt, Human
agccuugcaugauuucauucau

SEQ ID NO: 612506 - RNA, 22 nt, Human
ugcaggcuggaggagggacuaa

SEQ ID NO: 612507 - RNA, 22 nt, Human
cugagcaucauggcagaaucuu

SEQ ID NO: 612508 - RNA, 22 nt, Human
uguuccugacggccaaagaggu

SEQ ID NO: 612509 - RNA, 22 nt, Human
uacauggauguuauccuuacug

SEQ ID NO: 612510 - RNA, 22 nt, Human
cacuguugagcaauguacagug

SEQ ID NO: 612511 - RNA, 22 nt, Human
uuuggcaagcgaguacuuucug

SEQ ID NO: 612512 - RNA, 22 nt, Human
cuuugcuaauguugcauuuuca

SEQ ID NO: 612513 - RNA, 22 nt, Human
uagcuguucucuguaaauugga

SEQ ID NO: 612514 - RNA, 22 nt, Human
cuguccauggcaaugaugcaga

SEQ ID NO: 612515 - RNA, 22 nt, Human
ucuuuuaucuguuguguaacaa

SEQ ID NO: 612516 - RNA, 22 nt, Human
ugaggucuguccugucuuugga

SEQ ID NO: 612517 - RNA, 22 nt, Human
caguguuuagcacagugcuugg

SEQ ID NO: 612518 - RNA, 22 nt, Human
aggaaauuuugaaucagugucu

SEQ ID NO: 612519 - RNA, 22 nt, Human
ugcacccacuuagcugaaguuc

SEQ ID NO: 612520 - RNA, 22 nt, Human
agauuucaauggauauugcaag

SEQ ID NO: 612521 - RNA, 22 nt, Human
uguccugugcacuguagcaugu

SEQ ID NO: 612522 - RNA, 22 nt, Human
acauucucuuuuagaaagcugu

SEQ ID NO: 612523 - RNA, 20 nt, Human
ugugcccaauguccagguuc

SEQ ID NO: 612524 - RNA, 22 nt, Human
cauuuacauuuaagguuaauau

SEQ ID NO: 612525 - RNA, 22 nt, Human
uugcuucacuacuucuaggcuc

SEQ ID NO: 612526 - RNA, 17 nt, Human
aggucugagaguaucug

SEQ ID NO: 612527 - RNA, 22 nt, Human
auuguauacaagcuuaauuguu

SEQ ID NO: 612528 - RNA, 22 nt, Human
auucuugauauagauaguuaau

SEQ ID NO: 612529 - RNA, 19 nt, Human
auucuucucuuccugcugu

SEQ ID NO: 612530 - RNA, 23 nt, Human
caaaaugcuaugugcccaaugca

SEQ ID NO: 612531 - RNA, 22 nt, Human
ugaauaugugacuuugauuuca

SEQ ID NO: 612532 - RNA, 22 nt, Human
caugcaugccgggcugacagag

SEQ ID NO: 612533 - RNA, 22 nt, Human
ccuuuuauauggcucaucacag

SEQ ID NO: 612534 - RNA, 22 nt, Human
aauggcaaaguguuuucauacc

SEQ ID NO: 612535 - RNA, 22 nt, Human
ugugcuauuuuugcauaugugu

SEQ ID NO: 612536 - RNA, 22 nt, Human
ugguggcacugacaucagacac

SEQ ID NO: 612537 - RNA, 22 nt, Human
uaucuguuuuuacagugucuuu

SEQ ID NO: 612538 - RNA, 22 nt, Human
caacuuuagaccccaaguagcu

SEQ ID NO: 612539 - RNA, 21 nt, Human
agaaggcaaaagcagacaucu

SEQ ID NO: 612540 - RNA, 22 nt, Human
uacguuuuaaacacggagccag

SEQ ID NO: 612541 - RNA, 22 nt, Human
agcaaauaauugucuuugaggg

SEQ ID NO: 612542 - RNA, 22 nt, Human
ugacauuugagagagauauaca

SEQ ID NO: 612543 - RNA, 22 nt, Human
uaacauuucggugacaguggga

SEQ ID NO: 612544 - RNA, 22 nt, Human
uuuuaauccucuugguaucuua

SEQ ID NO: 612545 - RNA, 22 nt, Human
uauaaacuccucuugcauuccu

SEQ ID NO: 612546 - RNA, 22 nt, Human
augccccagugugugcuuccuu

SEQ ID NO: 612547 - RNA, 22 nt, Human
acaaacagaguugaaaaauagg

SEQ ID NO: 612548 - RNA, 22 nt, Human
aacaugaugacauuguaagcuu

SEQ ID NO: 612549 - RNA, 22 nt, Human
uguucuuagguauuugacaguc

SEQ ID NO: 612550 - RNA, 22 nt, Human
uaaaaguuagcuaggacaaagu

SEQ ID NO: 612551 - RNA, 22 nt, Human
ucuuuugagggccagaggaaga

SEQ ID NO: 612552 - RNA, 22 nt, Human
uguaaagaaagacgcagaguua

SEQ ID NO: 612553 - RNA, 22 nt, Human
uugcaaauaauagccugaaacu

SEQ ID NO: 612554 - RNA, 22 nt, Human
ggacaucuguugugguagagga

SEQ ID NO: 612555 - RNA, 22 nt, Human
agagacuguaaugagagguaca

SEQ ID NO: 612556 - RNA, 23 nt, Human
cauuugauccucacaauaaaugg

SEQ ID NO: 612557 - RNA, 20 nt, Human
uugagcagcagugcuguguc

SEQ ID NO: 612558 - RNA, 22 nt, Human
guuuccaggcuuugguaugguu

SEQ ID NO: 612559 - RNA, 22 nt, Human
acauuguugagccucuuguuca

SEQ ID NO: 612560 - RNA, 22 nt, Human
uuauugagcacauaguaugugg

SEQ ID NO: 612561 - RNA, 22 nt, Human
uggcauuuuguagcuguguauc

SEQ ID NO: 612562 - RNA, 22 nt, Human
cucagcaacccacacacggucu

SEQ ID NO: 612563 - RNA, 22 nt, Human
cauugcaacuucaaacuccugg

SEQ ID NO: 612564 - RNA, 22 nt, Human
gugcauauguguguauacaaac

SEQ ID NO: 612565 - RNA, 19 nt, Human
uuuaaugugugcugcaauc

SEQ ID NO: 612566 - RNA, 22 nt, Human
uggaaauacaagaaguauguca

SEQ ID NO: 612567 - RNA, 22 nt, Human
aaaucccacucacgaguuuugc

SEQ ID NO: 612568 - RNA, 22 nt, Human
gcucugugggggaaauccuggg

SEQ ID NO: 612569 - RNA, 22 nt, Human
gaauguuaaugcacuucuagcu

SEQ ID NO: 612570 - RNA, 22 nt, Human
gaaacacucaauuuaguaauuc

SEQ ID NO: 612571 - RNA, 17 nt, Human
aguuuuuggaccugugu

SEQ ID NO: 612572 - RNA, 22 nt, Human
uuuggauugcuuggaugcuucg

SEQ ID NO: 612573 - RNA, 22 nt, Human
cuuuggaaaaauaccuggcaua

SEQ ID NO: 612574 - RNA, 22 nt, Human
agauguuuauaacucaugagug

SEQ ID NO: 612575 - RNA, 22 nt, Human
ugcucagaauugcgcuggugga

SEQ ID NO: 612576 - RNA, 19 nt, Human
aaugcugcuucuuuuugca

SEQ ID NO: 612577 - RNA, 22 nt, Human
acauuucuccuacuuguuauuu

SEQ ID NO: 612578 - RNA, 18 nt, Human
guagauccuugagcuacc

SEQ ID NO: 612579 - RNA, 22 nt, Human
caguuuuucaaaauuacaugau

SEQ ID NO: 612580 - RNA, 20 nt, Human
cuugaguucagagcugucau

SEQ ID NO: 612581 - RNA, 22 nt, Human
cauucauaggaggagaugauua

SEQ ID NO: 612582 - RNA, 22 nt, Human
uuuacagcuacuguccuauuuc

SEQ ID NO: 612583 - RNA, 22 nt, Human
gagcuuuucccgucuuucucgu

SEQ ID NO: 612584 - RNA, 22 nt, Human
gucuguggaguugcuugcugga

SEQ ID NO: 612585 - RNA, 22 nt, Human
agacacuguguacagaaaaaga

SEQ ID NO: 612586 - RNA, 22 nt, Human
ccagagacaaggagcuggaguc

SEQ ID NO: 612587 - RNA, 22 nt, Human
cacaucauguuaauucauuaca

SEQ ID NO: 612588 - RNA, 22 nt, Human
acacaucagaaauaugaaugag

SEQ ID NO: 612589 - RNA, 22 nt, Human
uuucaugauuaacuuagugaau

SEQ ID NO: 612590 - RNA, 22 nt, Human
uaauucuagauugacauuuuga

SEQ ID NO: 612591 - RNA, 22 nt, Human
uuaagagaagaguaucuagaac

SEQ ID NO: 612592 - RNA, 22 nt, Human herpesvirus 7
agucauuuucaaauagaguuua

SEQ ID NO: 612593 - RNA, 22 nt, Human herpesvirus 7
auccaaaucucagauauugcgu

SEQ ID NO: 612594 - RNA, 22 nt, Human herpesvirus 7
accagguuaugcaauuuuuacc

SEQ ID NO: 612595 - RNA, 22 nt, Human herpesvirus 7
agucucagcaccgcggauuuac

SEQ ID NO: 612596 - RNA, 22 nt, Human herpesvirus 7
aaucuauauguuguauuaaaau

SEQ ID NO: 612597 - RNA, 22 nt, Human herpesvirus 7
aaucuauggaugcaccaaacac

SEQ ID NO: 612598 - RNA, 22 nt, Human herpesvirus 7
acaguaaguaaaaaugguuaca

SEQ ID NO: 612599 - RNA, 22 nt, Human herpesvirus 7
aaaaagauauuuuauauagauu

SEQ ID NO: 612600 - RNA, 22 nt, Human herpesvirus 7
aaauuuuagcuucacugaaaag

SEQ ID NO: 612601 - RNA, 21 nt, Human herpesvirus 7
aaaaagauugugagcaauuua

SEQ ID NO: 612602 - RNA, 22 nt, Human herpesvirus 7
acacugaaacauaguacaaggg

SEQ ID NO: 612603 - RNA, 22 nt, Human herpesvirus 7
acaguuuauggacaauuuuggc

SEQ ID NO: 612604 - RNA, 20 nt, Human herpesvirus 7
aauaugucucugauggucuc

SEQ ID NO: 612605 - RNA, 22 nt, Human herpesvirus 7
agaagcuaugaugccugugaau

SEQ ID NO: 612606 - RNA, 19 nt, Human herpesvirus 7
gaaguucacaucuguucuu

SEQ ID NO: 612607 - RNA, 22 nt, Human herpesvirus 7
gacagguguuguuuccgaucua

SEQ ID NO: 612608 - RNA, 22 nt, Human herpesvirus 7
gacauugaaaaaaucugcuguu

SEQ ID NO: 612609 - RNA, 22 nt, Human herpesvirus 7
cauguaaguauugguuugcuca

SEQ ID NO: 612610 - RNA, 22 nt, Human herpesvirus 7
auucacaggcaucauagcuucu

SEQ ID NO: 612611 - RNA, 20 nt, Human herpesvirus 7
auuucuucaaaauugcuauu

SEQ ID NO: 612612 - RNA, 22 nt, Human herpesvirus 7
auggagcaaauguuuuacuacg

SEQ ID NO: 612613 - RNA, 22 nt, Human herpesvirus 7
acauuuguggccaggcaauuga

SEQ ID NO: 612614 - RNA, 22 nt, Human herpesvirus 7
aaacacaggaaaaauaguggug

SEQ ID NO: 612615 - RNA, 22 nt, Human herpesvirus 7
aaguugggacaaugcuuagaau

SEQ ID NO: 612616 - RNA, 22 nt, Human herpesvirus 7
aagaggaauagcacgucgcgga

SEQ ID NO: 612617 - RNA, 22 nt, Human herpesvirus 7
augaacaauaucguuuauuuca

SEQ ID NO: 612618 - RNA, 18 nt, Human herpesvirus 7
auaucuaaaguggagaca

SEQ ID NO: 612619 - RNA, 22 nt, Human herpesvirus 7
auuuaccucacuuucuucagua

SEQ ID NO: 612620 - RNA, 22 nt, Human herpesvirus 7
cacuggagaaugucgaggucuu

SEQ ID NO: 612621 - RNA, 22 nt, Human herpesvirus 7
caggggcuaucagaaacuuuca

SEQ ID NO: 612622 - RNA, 22 nt, Human herpesvirus 7
ugugcucuggcgucucgauagg

SEQ ID NO: 612623 - RNA, 22 nt, Human herpesvirus 7
ggguuagggccgcagcccuagg

SEQ ID NO: 612624 - RNA, 22 nt, Human herpesvirus 7
ggccauggcaaugcuacgaguu

SEQ ID NO: 612625 - RNA, 22 nt, Human herpesvirus 7
guacuaggucuuguucuagcuu

SEQ ID NO: 612626 - RNA, 21 nt, Human herpesvirus 7
uaugaagaguucuuguuugga

SEQ ID NO: 612627 - RNA, 22 nt, Human herpesvirus 7
guuguugucauuaaaagagauu

SEQ ID NO: 612628 - RNA, 22 nt, Human herpesvirus 7
uccuucuugagaugcccaagga

SEQ ID NO: 612629 - RNA, 23 nt, Human herpesvirus 7
ucuaaaaauaucuauuugcuuau

SEQ ID NO: 612630 - RNA, 22 nt, Human herpesvirus 7
ucaaauguuugcauuguguuuc

SEQ ID NO: 612631 - RNA, 22 nt, Human herpesvirus 7
ucagaacacaaucuuucggugu

SEQ ID NO: 612632 - RNA, 22 nt, Human herpesvirus 7
uuauagacguggaauuucuugg

SEQ ID NO: 612633 - RNA, 22 nt, Human herpesvirus 7
ugugauuauugcauuugcuuca

SEQ ID NO: 612634 - RNA, 22 nt, Human herpesvirus 7
uggucucuggaagcguggucug

SEQ ID NO: 612635 - RNA, 22 nt, Human herpesvirus 7
ugauaacaguugaaagccaaau

SEQ ID NO: 612636 - RNA, 22 nt, Human herpesvirus 7
uggagggaauagacgauuauca

SEQ ID NO: 612637 - RNA, 22 nt, Human herpesvirus 7
uucaggaaaaacgguguuguaa

SEQ ID NO: 612638 - RNA, 22 nt, Human herpesvirus 7
uucaugcucaucgucuccaagc

SEQ ID NO: 612639 - RNA, 22 nt, Human herpesvirus 7
uugaucagcgaauugggaauaa

SEQ ID NO: 612640 - RNA, 22 nt, Human herpesvirus 7
uuuggaagugcagaaaguuggu

SEQ ID NO: 612641 - RNA, 22 nt, Human herpesvirus 7
ugauggaucugguguccuucuu

SEQ ID NO: 612642 - RNA, 22 nt, Human herpesvirus 7
ugucauaaauuuuaguugccgu

SEQ ID NO: 612643 - RNA, 22 nt, Human herpesvirus 7
auauuucugaugaauagcuuuu

SEQ ID NO: 612644 - RNA, 22 nt, Human herpesvirus 7
aucuucuagaguuauugccgug

SEQ ID NO: 612645 - RNA, 22 nt, Human herpesvirus 7
augccaccgcuaacuacggugg

SEQ ID NO: 612646 - RNA, 22 nt, Human herpesvirus 7
cugcaacuuuucuccgcguccg

SEQ ID NO: 612647 - RNA, 22 nt, Human herpesvirus 7
uuggagucguucuauguaugaa

SEQ ID NO: 612648 - RNA, 22 nt, Human herpesvirus 7
uugaaucaacugcauaaauucg

SEQ ID NO: 612649 - RNA, 22 nt, Human herpesvirus 7
uugauuggaaaucaaaauucug

SEQ ID NO: 612650 - RNA, 22 nt, Human herpesvirus 7
uugcaagaugcugaggauuuaa

SEQ ID NO: 612651 - RNA, 22 nt, Human herpesvirus 7
uuccuauguguguaugaugaua

SEQ ID NO: 612652 - RNA, 22 nt, Human herpesvirus 7
uaauuucugguauggaauuggc

SEQ ID NO: 612653 - RNA, 22 nt, Human herpesvirus 7
uacaugagacagucaggugagu

SEQ ID NO: 612654 - RNA, 22 nt, Human herpesvirus 7
uacgcuuuuuucgaguccaucg

SEQ ID NO: 612655 - RNA, 22 nt, Human herpesvirus 7
gcagggguaauaacagaacauu

SEQ ID NO: 612656 - RNA, 22 nt, Human herpesvirus 7
gauauuuuggguaauaugucuu

SEQ ID NO: 612657 - RNA, 22 nt, Human herpesvirus 7
uagaugauacuuuugucaguuc

SEQ ID NO: 612658 - RNA, 22 nt, Human herpesvirus 7
uauagacauuucguuauuccau

SEQ ID NO: 612659 - RNA, 19 nt, Human herpesvirus 7
ucucuguguuuaccucacc

SEQ ID NO: 612660 - RNA, 22 nt, Human herpesvirus 7
ugauauuuuuaacacaauggca

SEQ ID NO: 612661 - RNA, 22 nt, Human herpesvirus 7
uggauuuagaugcagaucuaga

SEQ ID NO: 612662 - RNA, 22 nt, Human herpesvirus 7
cagaaucuauuccacuugaauc

SEQ ID NO: 612663 - RNA, 22 nt, Human herpesvirus 7
auucagaagaugaaagauuucu

SEQ ID NO: 612664 - RNA, 22 nt, Human herpesvirus 7
auuugaagaacaagaggcacug

SEQ ID NO: 612665 - RNA, 22 nt, Human herpesvirus 7
auuugcguuucgcuguugccaa

SEQ ID NO: 612666 - RNA, 22 nt, Human herpesvirus 7
cuguggaaauaaauccgcuugc

SEQ ID NO: 612667 - RNA, 22 nt, Human herpesvirus 7
cguuguucaguuuuuauaaaug

SEQ ID NO: 612668 - RNA, 22 nt, Human herpesvirus 7
cugaaggcgcggcucuguugcg

SEQ ID NO: 612669 - RNA, 22 nt, Human herpesvirus 7
cgaggggccuauuuauuaguau

SEQ ID NO: 612670 - RNA, 22 nt, Human herpesvirus 7
gaauggucuauuuuuuacucga

SEQ ID NO: 612671 - RNA, 22 nt, Human herpesvirus 7
cguagagagcauuagcauuaaa

SEQ ID NO: 612672 - RNA, 22 nt, Human herpesvirus 7
agggaauugauuugguuaauca

SEQ ID NO: 612673 - RNA, 22 nt, Human herpesvirus 7
agaguuucgaauccuuuuaagc

SEQ ID NO: 612674 - RNA, 22 nt, Human herpesvirus 7
acauaaaaagagagaugucuac

SEQ ID NO: 612675 - RNA, 22 nt, Human herpesvirus 7
accugucaaaaauugauuagua

SEQ ID NO: 612676 - RNA, 22 nt, Human herpesvirus 7
aaucaaguauuucagucuguag

SEQ ID NO: 612677 - RNA, 22 nt, Human herpesvirus 7
aaauacuguguucugaauuuga

SEQ ID NO: 612678 - RNA, 22 nt, Human herpesvirus 7
caugugaaauuggcauuaaugc

SEQ ID NO: 612679 - RNA, 22 nt, Human herpesvirus 7
uacauuuuuuacgaugacaaac

SEQ ID NO: 612680 - RNA, 22 nt, Human herpesvirus 7
gcuguacagauagaaaucguuc

SEQ ID NO: 612681 - RNA, 22 nt, Human herpesvirus 7
uauauuuccagacauauuguaa

SEQ ID NO: 612682 - RNA, 22 nt, Human herpesvirus 7
ucaccgccauagauguccgaca

SEQ ID NO: 612683 - RNA, 22 nt, Human herpesvirus 7
ucagagcugcuucuagaucugu

SEQ ID NO: 612684 - RNA, 23 nt, Human herpesvirus 7
ucagaugaucuucuugcagcgca

SEQ ID NO: 612685 - RNA, 22 nt, Human herpesvirus 7
uaacaacacgcuauccaaagau

SEQ ID NO: 612686 - RNA, 22 nt, Human herpesvirus 7
uagaaucaucaaugcuucaucg

SEQ ID NO: 612687 - RNA, 22 nt, Human herpesvirus 7
uagaggcagaccuaaacccaga

SEQ ID NO: 612688 - RNA, 22 nt, Human herpesvirus 7
ucugugguugcagcagucauag

SEQ ID NO: 612689 - RNA, 22 nt, Human herpesvirus 7
ugccauugaaugcguuggaaau

SEQ ID NO: 612690 - RNA, 22 nt, Human herpesvirus 7
ugaagcagguuaaagauauugu

SEQ ID NO: 612691 - RNA, 19 nt, Human herpesvirus 7
uggacguaaacaggaaaga

SEQ ID NO: 612692 - RNA, 22 nt, Human herpesvirus 7
uuuaucccaccgguccuuccuc

SEQ ID NO: 612693 - RNA, 22 nt, Human herpesvirus 7
uuuaagacauuauuugcugaac

SEQ ID NO: 612694 - RNA, 22 nt, Human herpesvirus 7
guuaggguuagggccgcagccc

SEQ ID NO: 612695 - RNA, 22 nt, Human herpesvirus 7
guugaauauauacgcuuaaaau

SEQ ID NO: 612696 - RNA, 22 nt, Human herpesvirus 7
uaaauuccauuuauaguuacaa

SEQ ID NO: 612697 - RNA, 22 nt, Human herpesvirus 7
uaagcaauguagauauagugga

SEQ ID NO: 612698 - RNA, 22 nt, Human herpesvirus 7
gcuguucgugcuucacaguguu

SEQ ID NO: 612699 - RNA, 22 nt, Human herpesvirus 7
gcucugaagauggguuguuauc

SEQ ID NO: 612700 - RNA, 22 nt, Human herpesvirus 7
gagugcagaaaugcuccgcgcu

SEQ ID NO: 612701 - RNA, 22 nt, Human herpesvirus 7
ugauauuuuuaacacaauggca

SEQ ID NO: 612702 - RNA, 22 nt, Human herpesvirus 7
uaggcugcauuguaaaauucga

SEQ ID NO: 612703 - RNA, 22 nt, Human herpesvirus 7
ucaaauguuugcauuguguuuc

SEQ ID NO: 612704 - RNA, 22 nt, Human herpesvirus 7
ucagagcugcuucuagaucugu

SEQ ID NO: 612705 - RNA, 23 nt, Human herpesvirus 7
ucagaugaucuucuugcagcgca

SEQ ID NO: 612706 - RNA, 21 nt, Human herpesvirus 7
uaugaagaguucuuguuugga

SEQ ID NO: 612707 - RNA, 22 nt, Human herpesvirus 7
ugaagcagguuaaagauauugu

SEQ ID NO: 612708 - RNA, 22 nt, Human herpesvirus 7
gauauuuuggguaauaugucuu

SEQ ID NO: 612709 - RNA, 22 nt, Human herpesvirus 7
aauggcaacgguugagcaaauu

SEQ ID NO: 612710 - RNA, 22 nt, Human herpesvirus 7
uagaaucaucaaugcuucaucg

SEQ ID NO: 612711 - RNA, 22 nt, Human herpesvirus 7
uaauuucugguauggaauuggc

SEQ ID NO: 612712 - RNA, 22 nt, Human herpesvirus 7
uaagcaauguagauauagugga

SEQ ID NO: 612713 - RNA, 22 nt, Human herpesvirus 7
uuccuauguguguaugaugaua

SEQ ID NO: 612714 - RNA, 22 nt, Human herpesvirus 7
uugacgguggaaaguucgacag

SEQ ID NO: 612715 - RNA, 22 nt, Human herpesvirus 7
auccaaaucucagauauugcgu

SEQ ID NO: 612716 - RNA, 22 nt, Human herpesvirus 7
agucauuuucaaauagaguuua

SEQ ID NO: 612717 - RNA, 22 nt, Human herpesvirus 7
agucucagcaccgcggauuuac

SEQ ID NO: 612718 - RNA, 22 nt, Human herpesvirus 7
aucuucuagaguuauugccgug

SEQ ID NO: 612719 - RNA, 22 nt, Human herpesvirus 7
aagacguauuggucaauauaau

SEQ ID NO: 612720 - RNA, 22 nt, Human herpesvirus 7
ugucauaaauuuuaguugccgu

SEQ ID NO: 612721 - RNA, 22 nt, Human herpesvirus 7
ugucaucguaauaauggaaacu

SEQ ID NO: 612722 - RNA, 22 nt, Human herpesvirus 7
auucacaggcaucauagcuucu

SEQ ID NO: 612723 - RNA, 22 nt, Human herpesvirus 7
cacuggagaaugucgaggucuu

SEQ ID NO: 612724 - RNA, 22 nt, Human
aaggaggaauguagccagcucc

SEQ ID NO: 612725 - RNA, 22 nt, Human
uugacccgaguccuucuugggg

SEQ ID NO: 612726 - RNA, 22 nt, Human
uggcuccaggggacacgcagua

SEQ ID NO: 612727 - RNA, 22 nt, Human
ggcagcugaagaggaacuuugg

SEQ ID NO: 612728 - RNA, 22 nt, Human
uccguggggccuguggcuuccg

SEQ ID NO: 612729 - RNA, 22 nt, Human
ucauuuacacuucacaaaugga

SEQ ID NO: 612730 - RNA, 22 nt, Human
ccagcugggucccugcuggggc

SEQ ID NO: 612731 - RNA, 22 nt, Human
caggcucgguccaguggcaccc

SEQ ID NO: 612732 - RNA, 22 nt, Human
ccagcagcucccucaggguccg

SEQ ID NO: 612733 - RNA, 22 nt, Human
aauggcugccagggcaggaggu

SEQ ID NO: 612734 - RNA, 22 nt, Human
cuccaggacugaggacagagcu

SEQ ID NO: 612735 - RNA, 22 nt, Human
cccuuguuuuugaguacaauag

SEQ ID NO: 612736 - RNA, 22 nt, Human
uggaaacacccacgcaugcaua

SEQ ID NO: 612737 - RNA, 23 nt, Human
ucuggcugcuccuuucaaugcuc

SEQ ID NO: 612738 - RNA, 22 nt, Human
auacaacagaaaaugauuauuc

SEQ ID NO: 612739 - RNA, 22 nt, Human
agagugaaguaauuguuaggau

SEQ ID NO: 612740 - RNA, 22 nt, Human
auauaccucauucuuugagugc

SEQ ID NO: 612741 - RNA, 18 nt, Human
gguccugggccuggcuca

SEQ ID NO: 612742 - RNA, 22 nt, Human
guauuucuuuacauaugcucau

SEQ ID NO: 612743 - RNA, 22 nt, Human
uccuggccaaguagauguggcg

SEQ ID NO: 612744 - RNA, 22 nt, Human
ccacugcuaacuugcugcagcu

SEQ ID NO: 612745 - RNA, 20 nt, Human
ggucacuguggcugcaggau

SEQ ID NO: 612746 - RNA, 22 nt, Human
cccagccucuggguucugccgg

SEQ ID NO: 612747 - RNA, 22 nt, Human
ccuggaaaaugccacuuucaca

SEQ ID NO: 612748 - RNA, 22 nt, Human
ggugcccaaggaagguugccgu

SEQ ID NO: 612749 - RNA, 22 nt, Human
augaagcauuacaggaugacag

SEQ ID NO: 612750 - RNA, 22 nt, Human
ugucuagaaaugcugagucuca

SEQ ID NO: 612751 - RNA, 22 nt, Human
cuggagauaagcagucccaggc

SEQ ID NO: 612752 - RNA, 22 nt, Human
caaugcacauggacaucaggcu

SEQ ID NO: 612753 - RNA, 22 nt, Human
ugccuggcugggcugcucaugg

SEQ ID NO: 612754 - RNA, 22 nt, Human
ugaaagcucugucaucauuccu

SEQ ID NO: 612755 - RNA, 21 nt, Human
ucccacuggcccagggcucca

SEQ ID NO: 612756 - RNA, 22 nt, Human
gugcaugucuuuggaggccucc

SEQ ID NO: 612757 - RNA, 22 nt, Human
ugcauguuucuguauguuaaug

SEQ ID NO: 612758 - RNA, 22 nt, Human
cauuguccucugaugccuuccc

SEQ ID NO: 612759 - RNA, 22 nt, Human
uccuggcccuguggccugcagu

SEQ ID NO: 612760 - RNA, 22 nt, Human
cauuguuggcagagggacagag

SEQ ID NO: 612761 - RNA, 22 nt, Human
gcagggcagggcaagaacuggg

SEQ ID NO: 612762 - RNA, 22 nt, Human
aaugcugugauuuauuaaguau

SEQ ID NO: 612763 - RNA, 22 nt, Human
caccgagugacaguagccauca

SEQ ID NO: 612764 - RNA, 22 nt, Human
uuggaaauguagaaaagcagau

SEQ ID NO: 612765 - RNA, 22 nt, Human
gagcuuggugcugccuguuguc

SEQ ID NO: 612766 - RNA, 22 nt, Human
ggcaguggugggaggcucgcuc

SEQ ID NO: 612767 - RNA, 22 nt, Human
uugaacaguccuaagagacccu

SEQ ID NO: 612768 - RNA, 22 nt, Human
uucagaaaggcugugccagcca

SEQ ID NO: 612769 - RNA, 22 nt, Human
gacagcagccacagggagaggg

SEQ ID NO: 612770 - RNA, 22 nt, Human
ugcuugucacccugccugagug

SEQ ID NO: 612771 - RNA, 22 nt, Human
aguggcugugaaauacauggga

SEQ ID NO: 612772 - RNA, 22 nt, Human
acauucaggccacaguggaguc

SEQ ID NO: 612773 - RNA, 22 nt, Human
uuccaggaagcucucggccucu

SEQ ID NO: 612774 - RNA, 22 nt, Human
acuguagucuaaauauagucuu

SEQ ID NO: 612775 - RNA, 19 nt, Human
acccucuccccacuggguc

SEQ ID NO: 612776 - RNA, 22 nt, Human
guguggcuaggauggcuuugcu

SEQ ID NO: 612777 - RNA, 22 nt, Human
ugcuccaggcugcugaagaucu

SEQ ID NO: 612778 - RNA, 18 nt, Human
cgcauguacacgucaugc

SEQ ID NO: 612779 - RNA, 22 nt, Human
ggcgcaguugagcgugcuguuc

SEQ ID NO: 612780 - RNA, 22 nt, Human
gagcugcagcggcugacgcaac

SEQ ID NO: 612781 - RNA, 22 nt, Human
aaugucaacacaagagaaaugc

SEQ ID NO: 612782 - RNA, 22 nt, Human
ggccacuguuuccugggcaguu

SEQ ID NO: 612783 - RNA, 22 nt, Human
ugguccugagcaccagccugac

SEQ ID NO: 612784 - RNA, 22 nt, Human
cagacucuugagcugauuguau

SEQ ID NO: 612785 - RNA, 22 nt, Human
cugggcccaggcggcucucgga

SEQ ID NO: 612786 - RNA, 22 nt, Human
uuguccuuaccucaaucuggaa

SEQ ID NO: 612787 - RNA, 22 nt, Human
ucaaagcacuggggaaagccug

SEQ ID NO: 612788 - RNA, 22 nt, Human
aggaaauuuugaaucagugucu

SEQ ID NO: 612789 - RNA, 22 nt, Human
cuggcagcugcccgagaugccc

SEQ ID NO: 612790 - RNA, 22 nt, Human
uuuguguuguacuucugugcau

SEQ ID NO: 612791 - RNA, 22 nt, Human
uuccccuugcacuaucacccug

SEQ ID NO: 612792 - RNA, 20 nt, Human
ggaaaaguacuccuccuuaa

SEQ ID NO: 612793 - RNA, 22 nt, Human
uccacagugguggaauuguuca

SEQ ID NO: 612794 - RNA, 21 nt, Human
cugugauguugccgggguagg

SEQ ID NO: 612795 - RNA, 22 nt, Human
ccaggugugcucugcaguggau

SEQ ID NO: 612796 - RNA, 22 nt, Human
aggcucaguauagcuggcaagu

SEQ ID NO: 612797 - RNA, 22 nt, Human
cuccacagccccuccaguggca

SEQ ID NO: 612798 - RNA, 20 nt, Human
uuacagaaaugauguuauuu

SEQ ID NO: 612799 - RNA, 22 nt, Human
gugacagguauacucaccauug

SEQ ID NO: 612800 - RNA, 22 nt, Human
ccugugauauuguucauaauau

SEQ ID NO: 612801 - RNA, 22 nt, Human
cugucacagcccgcgucuccuc

SEQ ID NO: 612802 - RNA, 22 nt, Human
aguguguccaggaagcagaugg

SEQ ID NO: 612803 - RNA, 23 nt, Human
guccuagugcuuggugcccaggc

SEQ ID NO: 612804 - RNA, 22 nt, Human
uggugcugccaccuccucugcu

SEQ ID NO: 612805 - RNA, 22 nt, Human
aggugcaucucguagcucuucu

SEQ ID NO: 612806 - RNA, 18 nt, Human
cugccagugugcucuccg

SEQ ID NO: 612807 - RNA, 22 nt, Human
gcacaguauuuaguagaaugag

SEQ ID NO: 612808 - RNA, 19 nt, Human
aacuacagcgcacuguccu

SEQ ID NO: 612809 - RNA, 22 nt, Human
ugagaagcauuaggaagaacau

SEQ ID NO: 612810 - RNA, 23 nt, Human
cuguggaucuagagggggcccua

SEQ ID NO: 612811 - RNA, 22 nt, Human
caauaguaaauuacggaggaga

SEQ ID NO: 612812 - RNA, 22 nt, Human
uuccuggccucuuccaccacca

SEQ ID NO: 612813 - RNA, 22 nt, Human
uuuacagagaauguacauaaag

SEQ ID NO: 612814 - RNA, 22 nt, Human
uccagcucugcugugcgccggu

SEQ ID NO: 612815 - RNA, 22 nt, Human
gauggugcaggugaagugcugg

SEQ ID NO: 612816 - RNA, 22 nt, Human
aaggcacauauuuuagagucac

SEQ ID NO: 612817 - RNA, 22 nt, Human
cucccugggccucaguuucucu

SEQ ID NO: 612818 - RNA, 22 nt, Human
gugacaugguuugccgucccug

SEQ ID NO: 612819 - RNA, 22 nt, Human
caggaaauucccagaaggacug

SEQ ID NO: 612820 - RNA, 22 nt, Human
uucuuucugggguccuucggcu

SEQ ID NO: 612821 - RNA, 22 nt, Human
cagguagaggcugccaucagcu

SEQ ID NO: 612822 - RNA, 22 nt, Human
uggggcuccuccuggcaggagg

SEQ ID NO: 612823 - RNA, 22 nt, Human
accaagaguccaagugagguug

SEQ ID NO: 612824 - RNA, 22 nt, Human
gagguuggagggcuggccugca

SEQ ID NO: 612825 - RNA, 22 nt, Human
ugaguggacgugaggcugagua

SEQ ID NO: 612826 - RNA, 22 nt, Human
gucccagaggacagggucacau

SEQ ID NO: 612827 - RNA, 22 nt, Human
guaugucuuaggguucaguaac

SEQ ID NO: 612828 - RNA, 22 nt, Human
ugcccguucauucauacuuaac

SEQ ID NO: 612829 - RNA, 22 nt, Human
cagggccugccugguuccugga

SEQ ID NO: 612830 - RNA, 22 nt, Human
uggcaggaaaaagggccagagg

SEQ ID NO: 612831 - RNA, 22 nt, Human
cucuccaggcgagguccuacug

SEQ ID NO: 612832 - RNA, 22 nt, Human
uguccugugcacuguagcaugu

SEQ ID NO: 612833 - RNA, 22 nt, Human
uaaggagagaauuuagagguuu

SEQ ID NO: 612834 - RNA, 22 nt, Human
aaucuguugucaggaauccaca

SEQ ID NO: 612835 - RNA, 20 nt, Human
gugcccaguuggugacagac

SEQ ID NO: 612836 - RNA, 22 nt, Human
cagaugaaguaggugacgagca

SEQ ID NO: 612837 - RNA, 22 nt, Human
ccaggcagccaagugugugugu

SEQ ID NO: 612838 - RNA, 22 nt, Human
ugccuaggcuggaaugcagugg

SEQ ID NO: 612839 - RNA, 23 nt, Human
uggccucuccccaccuggcagaa

SEQ ID NO: 612840 - RNA, 22 nt, Human
ccaagcuggacagcagcaagga

SEQ ID NO: 612841 - RNA, 22 nt, Human
gugugcgccgacacagccaggu

SEQ ID NO: 612842 - RNA, 22 nt, Human
ucuccaggcuuaaucucagcuu

SEQ ID NO: 612843 - RNA, 22 nt, Human
caauguuuuuccuuccuuaaua

SEQ ID NO: 612844 - RNA, 22 nt, Human
ccgcuguccuggagcugcugcu

SEQ ID NO: 612845 - RNA, 22 nt, Human
aggcucugucaggcggagcagc

SEQ ID NO: 612846 - RNA, 22 nt, Human
ggcccucucuacauguuagacg

SEQ ID NO: 612847 - RNA, 22 nt, Human
aaauccaucaaaucuucuagaa

SEQ ID NO: 612848 - RNA, 20 nt, Human
cugggcagguguuugaucuc

SEQ ID NO: 612849 - RNA, 22 nt, Human
uggccagucuuagcugugccug

SEQ ID NO: 612850 - RNA, 22 nt, Human
cagggucuuggcgccaucaccc

SEQ ID NO: 612851 - RNA, 22 nt, Human
acaguuaguugaggaguguuug

SEQ ID NO: 612852 - RNA, 22 nt, Human
uggcucugccccauaccccugc

SEQ ID NO: 612853 - RNA, 22 nt, Human
gacuuugguucagggcucagag

SEQ ID NO: 612854 - RNA, 22 nt, Human
guaaagcaaaauguagagauug

SEQ ID NO: 612855 - RNA, 22 nt, Human
guguguggaaugcucauuuauu

SEQ ID NO: 612856 - RNA, 22 nt, Human
cgcaggugccggcagauggggu

SEQ ID NO: 612857 - RNA, 22 nt, Human
uuuaagguacagcuagcagcau

SEQ ID NO: 612858 - RNA, 22 nt, Human
uccacagggaugccugcggcuu

SEQ ID NO: 612859 - RNA, 20 nt, Human
gagcagugagccagggaaag

SEQ ID NO: 612860 - RNA, 22 nt, Human
aaggugccacuucccucagacu

SEQ ID NO: 612861 - RNA, 22 nt, Human
ucaccgccuugcccggccgggc

SEQ ID NO: 612862 - RNA, 22 nt, Human
cuguauaugugcauacacacac

SEQ ID NO: 612863 - RNA, 22 nt, Human
aaaucugagaaauauuguccag

SEQ ID NO: 612864 - RNA, 22 nt, Human
agccaccaccacugaaagguua

SEQ ID NO: 612865 - RNA, 22 nt, Human
caauaaaguggaggcccgggcu

SEQ ID NO: 612866 - RNA, 22 nt, Human
ccugucugaaggcagggggaug

SEQ ID NO: 612867 - RNA, 22 nt, Human
aggaggguggggucugccuguc

SEQ ID NO: 612868 - RNA, 22 nt, Human
uuccuuuucuucuaccacaugu

SEQ ID NO: 612869 - RNA, 22 nt, Human
cucaugucggcaggacucgccc

SEQ ID NO: 612870 - RNA, 22 nt, Human
ucuaauuuuggcauuuuaaccu

SEQ ID NO: 612871 - RNA, 22 nt, Human
aacuuucugaaaagcuugauca

SEQ ID NO: 612872 - RNA, 22 nt, Human
cugguuuuuagugcuuaggagu

SEQ ID NO: 612873 - RNA, 22 nt, Human
caugagaucugcagggaugggc

SEQ ID NO: 612874 - RNA, 22 nt, Human
aaagcacauuacaagcucaguc

SEQ ID NO: 612875 - RNA, 21 nt, Human
auacaagaagauggcagucug

SEQ ID NO: 612876 - RNA, 22 nt, Human
ccagcugcgggcaucgagaguu

SEQ ID NO: 612877 - RNA, 22 nt, Human
acucuguuugcagguagcucag

SEQ ID NO: 612878 - RNA, 22 nt, Human
augaauuguccgauguugugca

SEQ ID NO: 612879 - RNA, 22 nt, Human
acaguaaucugggaacuuguua

SEQ ID NO: 612880 - RNA, 22 nt, Human
gugagguccucccugcugggag

SEQ ID NO: 612881 - RNA, 21 nt, Human
gucuuggcaccaggagagaga

SEQ ID NO: 612882 - RNA, 22 nt, Human
cugaaacuauggggaggggagc

SEQ ID NO: 612883 - RNA, 22 nt, Human
aggacagcagugcuggcacuug

SEQ ID NO: 612884 - RNA, 22 nt, Human
ugacuuuggacuagugauuuaa

SEQ ID NO: 612885 - RNA, 18 nt, Human
cgauguguaugugauuug

SEQ ID NO: 612886 - RNA, 22 nt, Human
ucucugagguuguuuccagcac

SEQ ID NO: 612887 - RNA, 22 nt, Human
uauacuacgcaccaaacaaagg

SEQ ID NO: 612888 - RNA, 22 nt, Human
gaaaauaguucaucacaaugau

SEQ ID NO: 612889 - RNA, 22 nt, Human
aucuggcucccuuggaauccgu

SEQ ID NO: 612890 - RNA, 22 nt, Human
agcuuuauuugucauucacggc

SEQ ID NO: 612891 - RNA, 22 nt, Human
uuguccagcgaccaggcucugu

SEQ ID NO: 612892 - RNA, 22 nt, Human
cccaggcacacugaagugacau

SEQ ID NO: 612893 - RNA, 22 nt, Human
gccuggaaugcaaugugacgaa

SEQ ID NO: 612894 - RNA, 22 nt, Human
acagugugcaagaaauggggga

SEQ ID NO: 612895 - RNA, 22 nt, Human
ccagcagcgauagggugagugc

SEQ ID NO: 612896 - RNA, 19 nt, Human
cgcacagccugccaggcgc

SEQ ID NO: 612897 - RNA, 22 nt, Human
gacuguggacucucaugauaga

SEQ ID NO: 612898 - RNA, 22 nt, Human
uccugaaaauaauuucacaaga

SEQ ID NO: 612899 - RNA, 22 nt, Human
ccuggcagaauauuaaagugca

SEQ ID NO: 612900 - RNA, 22 nt, Human
gaggcuggcagaaaagcacagg

SEQ ID NO: 612901 - RNA, 22 nt, Human
gcaaggaagcagaguugcuauc

SEQ ID NO: 612902 - RNA, 22 nt, Human
gcaugcaggaagggcuugggga

SEQ ID NO: 612903 - RNA, 22 nt, Human
caggaugccuuugaacucugga

SEQ ID NO: 612904 - RNA, 22 nt, Human
cacauuuaugggcugggaggca

SEQ ID NO: 612905 - RNA, 22 nt, Human
caagggcagcagccucaagcgg

SEQ ID NO: 612906 - RNA, 18 nt, Human
uggcaugcuuugauacau

SEQ ID NO: 612907 - RNA, 22 nt, Human
acccacagccgcugugcguccc

SEQ ID NO: 612908 - RNA, 22 nt, Human
uggguccuggaaggcgacaggu

SEQ ID NO: 612909 - RNA, 22 nt, Human
agaguguggaaauguucagagu

SEQ ID NO: 612910 - RNA, 22 nt, Human
aacacuaaaggucaguuagaag

SEQ ID NO: 612911 - RNA, 22 nt, Human
gucuguggaguugcuugcugga

SEQ ID NO: 612912 - RNA, 22 nt, Human
cguggcucugggcuccuuugcc

SEQ ID NO: 612913 - RNA, 22 nt, Human
aaagugcugggauuacaggugu

SEQ ID NO: 612914 - RNA, 22 nt, Human
ugguccagacuuugaccucuca

SEQ ID NO: 612915 - RNA, 22 nt, Human
aaucuucaggguccuggggcuc

SEQ ID NO: 612916 - RNA, 22 nt, Human
guuuacaacaucuuguccuuca

SEQ ID NO: 612917 - RNA, 22 nt, Human
agguggaguuaagugugaacug

SEQ ID NO: 612918 - RNA, 22 nt, Human
ugaggucuguccugucuuugga

SEQ ID NO: 612919 - RNA, 22 nt, Human
uuggccguuucacugggcaguu

SEQ ID NO: 612920 - RNA, 22 nt, Human
caggaggaaaguuccacucaac

SEQ ID NO: 612921 - RNA, 22 nt, Human
ugaggccaagccuccucugcca

SEQ ID NO: 612922 - RNA, 22 nt, Human
ugucccuggacuccaggagcca

SEQ ID NO: 612923 - RNA, 22 nt, Human
guggccaaggcagagaaagagc

SEQ ID NO: 612924 - RNA, 22 nt, Human
ccagcaugcucagucuaaauug

SEQ ID NO: 612925 - RNA, 22 nt, Human
cugcggcuggggacagcuguug

SEQ ID NO: 612926 - RNA, 22 nt, Human
uggcggugacggcggcgccugg

SEQ ID NO: 612927 - RNA, 22 nt, Human
cugcaucacagcaggaggcaca

SEQ ID NO: 612928 - RNA, 22 nt, Human
ccugugggagggagcggcugga

SEQ ID NO: 612929 - RNA, 22 nt, Human
ugcagggcagcuagggagcuuu

SEQ ID NO: 612930 - RNA, 22 nt, Human
aguggcuguuccaggugaggac

SEQ ID NO: 612931 - RNA, 22 nt, Human
caagcuuguuucuccugggggu

SEQ ID NO: 612932 - RNA, 22 nt, Human
cccccagcucugcugggucccg

SEQ ID NO: 612933 - RNA, 22 nt, Human
cagcuccagccaccggggggug

SEQ ID NO: 612934 - RNA, 22 nt, Human
ggcacagcugaugcagacacac

SEQ ID NO: 612935 - RNA, 22 nt, Human
uaccaaaaccaagccauuaucu

SEQ ID NO: 612936 - RNA, 22 nt, Human
caggcacaaugagcgccaucuu

SEQ ID NO: 612937 - RNA, 22 nt, Human
ugugucuuuggcgaugucugga

SEQ ID NO: 612938 - RNA, 22 nt, Human
caacuuuagaccccaaguagcu

SEQ ID NO: 612939 - RNA, 22 nt, Human
uggcucaggccuacgacgccuu

SEQ ID NO: 612940 - RNA, 18 nt, Human
uagcucuuguugguccau

SEQ ID NO: 612941 - RNA, 20 nt, Human
acagaugaggaugcggaggc

SEQ ID NO: 612942 - RNA, 20 nt, Human
guggcagugguggcagcagu

SEQ ID NO: 612943 - RNA, 22 nt, Human
caacauggcgaaaccccaucuc

SEQ ID NO: 612944 - RNA, 22 nt, Human
aggugcugccccgagaaggaug

SEQ ID NO: 612945 - RNA, 22 nt, Human
agcucaguggcuggggcgcugc

SEQ ID NO: 612946 - RNA, 22 nt, Human
uugcuucacuacuucuaggcuc

SEQ ID NO: 612947 - RNA, 21 nt, Human
ggucaggcaugugcccugagc

SEQ ID NO: 612948 - RNA, 20 nt, Human
aucagguguucagccacugc

SEQ ID NO: 612949 - RNA, 22 nt, Human
ggggugaagguuuucugaaagc

SEQ ID NO: 612950 - RNA, 22 nt, Human
ucuuuugagggccagaggaaga

SEQ ID NO: 612951 - RNA, 22 nt, Human
gccaggaccucagaugcagggc

SEQ ID NO: 612952 - RNA, 22 nt, Human
uggccaggcagguagaacggcc

SEQ ID NO: 612953 - RNA, 22 nt, Human
ugucacagagcgugcaacagaa

SEQ ID NO: 612954 - RNA, 22 nt, Human
uggcauuuuguagcuguguauc

SEQ ID NO: 612955 - RNA, 22 nt, Human
auauacacuguuucaguugaag

SEQ ID NO: 612956 - RNA, 22 nt, Human
aagcacagggacucaggaccgg

SEQ ID NO: 612957 - RNA, 22 nt, Human
uccagcaguccaugugagacac

SEQ ID NO: 612958 - RNA, 21 nt, Human
uaaacauaaccuuguauggcu

SEQ ID NO: 612959 - RNA, 22 nt, Human
uuccuggggacuuaccgucauu

SEQ ID NO: 612960 - RNA, 22 nt, Human
ucucuacagcacccgcaugcua

SEQ ID NO: 612961 - RNA, 22 nt, Human
aagacagugacagucacaauug

SEQ ID NO: 612962 - RNA, 22 nt, Human
cccucucccugcagaauguggc

SEQ ID NO: 612963 - RNA, 22 nt, Human
uaucuguauucugacagucacu

SEQ ID NO: 612964 - RNA, 22 nt, Human
acagccaggaauucuggagaag

SEQ ID NO: 612965 - RNA, 22 nt, Human
ccagccagcugcccuuggggcc

SEQ ID NO: 612966 - RNA, 22 nt, Human
gcccagccccuggguggacgug

SEQ ID NO: 612967 - RNA, 22 nt, Human
agagacauagcacaguuuuucg

SEQ ID NO: 612968 - RNA, 22 nt, Human
auggucacuucacccaugagcu

SEQ ID NO: 612969 - RNA, 22 nt, Human
acugcauucuuuaucccacaac

SEQ ID NO: 612970 - RNA, 22 nt, Human
auguccagaguaaagcacauuc

SEQ ID NO: 612971 - RNA, 22 nt, Human
uccaggagcucauccacgucaa

SEQ ID NO: 612972 - RNA, 19 nt, Human
agcagccaucgaccaugga

SEQ ID NO: 612973 - RNA, 22 nt, Human
gagccacaguggauugauucca

SEQ ID NO: 612974 - RNA, 22 nt, Human
aaguuacaggagaaagagauca

SEQ ID NO: 612975 - RNA, 22 nt, Human
uggcacugucaccaaugcuguc

SEQ ID NO: 612976 - RNA, 21 nt, Human
cuguccccagugagcaccccc

SEQ ID NO: 612977 - RNA, 22 nt, Human
augugagcuggggcccggccag

SEQ ID NO: 612978 - RNA, 22 nt, Human
cuggcaguguccagcucgugau

SEQ ID NO: 612979 - RNA, 22 nt, Human
ucaccucucuggccgucuaccu

SEQ ID NO: 612980 - RNA, 22 nt, Human
auccgggguucauuuucacuga

SEQ ID NO: 612981 - RNA, 22 nt, Human
ccauggccaggaaagccaaggu

SEQ ID NO: 612982 - RNA, 22 nt, Human
ccacuguuuccuuucugcuggc

SEQ ID NO: 612983 - RNA, 22 nt, Human
uggaucuugaugcuccaagagu

SEQ ID NO: 612984 - RNA, 22 nt, Human
ucccugagugggcugguaguau

SEQ ID NO: 612985 - RNA, 22 nt, Human
guggauggagcuggaagccauu

SEQ ID NO: 612986 - RNA, 20 nt, Human
agugauuuguuaguacauug

SEQ ID NO: 612987 - RNA, 22 nt, Human
ugacaagagaccccuccgcagg

SEQ ID NO: 612988 - RNA, 20 nt, Human
ucacuguaauugccuacauu

SEQ ID NO: 612989 - RNA, 22 nt, Human
cuucucuuggguguggugucuu

SEQ ID NO: 612990 - RNA, 22 nt, Human
auguuguugaacucuuugcaug

SEQ ID NO: 612991 - RNA, 22 nt, Human
ugcauccuguucuagguuuggg

SEQ ID NO: 612992 - RNA, 22 nt, Human
gcagugacagacaacuguuuga

SEQ ID NO: 612993 - RNA, 22 nt, Human
uaaucuuagacauguauuuuuc

SEQ ID NO: 612994 - RNA, 22 nt, Human
uuugcagagugcagaagcaucu

SEQ ID NO: 612995 - RNA, 21 nt, Human
uuccuccucuggagaagaaga

SEQ ID NO: 612996 - RNA, 22 nt, Human
acccugccucugcuuccuguag

SEQ ID NO: 612997 - RNA, 22 nt, Human
agagcaauuagcuuagguaaaa

SEQ ID NO: 612998 - RNA, 22 nt, Human
cuucuggcguuggaggucugag

SEQ ID NO: 612999 - RNA, 22 nt, Human
ugugguuuugguucagaaacaa

SEQ ID NO: 613000 - RNA, 23 nt, Human
aagugcucaguggacagcauugc

SEQ ID NO: 613001 - RNA, 18 nt, Human
gccuggcuucggagccgc

SEQ ID NO: 613002 - RNA, 21 nt, Human
uacaucaguuuucuuggcuca

SEQ ID NO: 613003 - RNA, 22 nt, Human
uguguacauguaucaacuaucg

SEQ ID NO: 613004 - RNA, 22 nt, Human
uuagcacccugauacuagaaug

SEQ ID NO: 613005 - RNA, 22 nt, Human
cagcuauuguucuguauaauga

SEQ ID NO: 613006 - RNA, 22 nt, Human
gcggagaggcagagacuccgcg

SEQ ID NO: 613007 - RNA, 22 nt, Human
gccucugcacuguggcacacca

SEQ ID NO: 613008 - RNA, 22 nt, Human
agccacugugugaccagcuguc

SEQ ID NO: 613009 - RNA, 22 nt, Human
cccagccugaucucggccagcu

SEQ ID NO: 613010 - RNA, 22 nt, Human
acaggacagucuaguaacagua

SEQ ID NO: 613011 - RNA, 22 nt, Human
cucugccagccaaagucaucac

SEQ ID NO: 613012 - RNA, 22 nt, Human
gagaguuaguugagcagucuga

SEQ ID NO: 613013 - RNA, 22 nt, Human
cagggaugggauggagucaguu

SEQ ID NO: 613014 - RNA, 22 nt, Human
agucacuguuuaaucuagcuaa

SEQ ID NO: 613015 - RNA, 22 nt, Human
uaaaaucaugacagauugacau

SEQ ID NO: 613016 - RNA, 22 nt, Human
uucuucauucccuuacuuccga

SEQ ID NO: 613017 - RNA, 22 nt, Human
guugggcugaagugugugcuua

SEQ ID NO: 613018 - RNA, 22 nt, Human
uggcccagaucucugaccuuga

SEQ ID NO: 613019 - RNA, 22 nt, Human
gugcugccuccauauccgucag

SEQ ID NO: 613020 - RNA, 22 nt, Human
ugcugugcuggcggcagaggcc

SEQ ID NO: 613021 - RNA, 22 nt, Human
aucccugugacgagcaucccua

SEQ ID NO: 613022 - RNA, 22 nt, Human
cuggccgcaguguggaguugug

SEQ ID NO: 613023 - RNA, 22 nt, Human
ggagcggagggagggccacugu

SEQ ID NO: 613024 - RNA, 22 nt, Human
accgugucugacacuuugggcg

SEQ ID NO: 613025 - RNA, 22 nt, Human
uuguaacaguagcugucagcuc

SEQ ID NO: 613026 - RNA, 22 nt, Human
ccaggagcccugccacaauggu

SEQ ID NO: 613027 - RNA, 22 nt, Human
ccaagaggggcagagggcugca

SEQ ID NO: 613028 - RNA, 22 nt, Human
uacauguuauuucacuauuggu

SEQ ID NO: 613029 - RNA, 22 nt, Human
ugggguccucucacuuggaggg

SEQ ID NO: 613030 - RNA, 22 nt, Human
guggccuuuucaaguaggguau

SEQ ID NO: 613031 - RNA, 21 nt, Human
aucuuaaaaggucuuaacuuu

SEQ ID NO: 613032 - RNA, 22 nt, Human
uggcuggcuguccagcugggca

SEQ ID NO: 613033 - RNA, 22 nt, Human
ccugggcaaaugccagagacaa

SEQ ID NO: 613034 - RNA, 20 nt, Human
cuguuugcuaucaugagcug

SEQ ID NO: 613035 - RNA, 22 nt, Human
gauggaggagauggcagggugc

SEQ ID NO: 613036 - RNA, 22 nt, Human
gagguggcugcuugcugggaaa

SEQ ID NO: 613037 - RNA, 21 nt, Human
gcuccuggugcugcguggcgc

SEQ ID NO: 613038 - RNA, 22 nt, Human
auuauguagcuaaaaauugugu

SEQ ID NO: 613039 - RNA, 22 nt, Human
ugcagcugccuagggcuggcuu

SEQ ID NO: 613040 - RNA, 22 nt, Human
gcccucugguggccgccucggc

SEQ ID NO: 613041 - RNA, 22 nt, Human
cugggucccggcuucuauccac

SEQ ID NO: 613042 - RNA, 22 nt, Human
aggcggguuuaggacaaugcuu

SEQ ID NO: 613043 - RNA, 22 nt, Human
caucaguuccugccccugcccc

SEQ ID NO: 613044 - RNA, 22 nt, Human
acagcuggccgaggcucaggga

SEQ ID NO: 613045 - RNA, 18 nt, Human
uauaaacacacuuagguu

SEQ ID NO: 613046 - RNA, 22 nt, Human
cuagcagcauucuucuaguuag

SEQ ID NO: 613047 - RNA, 22 nt, Human
gccuggcgccgggcugccuguc

SEQ ID NO: 613048 - RNA, 22 nt, Human
cagaccagccauuugccucuuc

SEQ ID NO: 613049 - RNA, 22 nt, Human
aggggagguggcagaaaugugc

SEQ ID NO: 613050 - RNA, 22 nt, Human
gcaguggccacauggaggagga

SEQ ID NO: 613051 - RNA, 22 nt, Human
gcagcuuuggagguggaacucu

SEQ ID NO: 613052 - RNA, 22 nt, Human
aaguuacacauuuucauuguaa

SEQ ID NO: 613053 - RNA, 22 nt, Human
gggagggucugagagcugcacc

SEQ ID NO: 613054 - RNA, 22 nt, Human
ggccgugcuccaaagucaucgu

SEQ ID NO: 613055 - RNA, 22 nt, Human
cuucagggguguuaguuuugug

SEQ ID NO: 613056 - RNA, 22 nt, Human
uagcugcacaggaaguaagauu

SEQ ID NO: 613057 - RNA, 22 nt, Human
acuugcaucuuagagacucacc

SEQ ID NO: 613058 - RNA, 21 nt, Human
aaacugaccuugccugagaca

SEQ ID NO: 613059 - RNA, 22 nt, Human
acaaaugcuuaguucaccaaaa

SEQ ID NO: 613060 - RNA, 22 nt, Human
agccacauggaccugaugcuag

SEQ ID NO: 613061 - RNA, 22 nt, Human
ucacccagacugucugacucuu

SEQ ID NO: 613062 - RNA, 22 nt, Human
uuugacaacugugcaguuugua

SEQ ID NO: 613063 - RNA, 17 nt, Human
uggcacagaggugcuau

SEQ ID NO: 613064 - RNA, 22 nt, Human
uggaaaauauuuaggugaauga

SEQ ID NO: 613065 - RNA, 22 nt, Human
ugcuggaguggcacuguguggc

SEQ ID NO: 613066 - RNA, 22 nt, Human
ugggaccugcucuuggaaugag

SEQ ID NO: 613067 - RNA, 22 nt, Human
uccguuuucacacugcuauaaa

SEQ ID NO: 613068 - RNA, 23 nt, Human
auagaccauugucucacacuuca

SEQ ID NO: 613069 - RNA, 22 nt, Human
acauucaugcaccuuccuaucc

SEQ ID NO: 613070 - RNA, 20 nt, Human
ucauccaggacaggaguggc

SEQ ID NO: 613071 - RNA, 22 nt, Human
ugcuuuauucgacaucugguag

SEQ ID NO: 613072 - RNA, 22 nt, Human
ccugugucaucagcuguggcua

SEQ ID NO: 613073 - RNA, 22 nt, Human
aauaaguacuuggggauaacuu

SEQ ID NO: 613074 - RNA, 22 nt, Human
uaggaaauaauucacucuggcu

SEQ ID NO: 613075 - RNA, 22 nt, Human
aaugguaauauuucauaguugu

SEQ ID NO: 613076 - RNA, 22 nt, Human
ugggagagauaggcuucuggac

SEQ ID NO: 613077 - RNA, 22 nt, Human
auggaguucugccagcgcugcu

SEQ ID NO: 613078 - RNA, 22 nt, Human
cccacaggcaggugcaugggcu

SEQ ID NO: 613079 - RNA, 22 nt, Human
acuuuagauauuccucuguaca

SEQ ID NO: 613080 - RNA, 22 nt, Human
ugcucuguucaguguaucuugu

SEQ ID NO: 613081 - RNA, 22 nt, Human
guugcaaaugggaagaugguua

SEQ ID NO: 613082 - RNA, 22 nt, Human
ugcaggaacucgaaaacuauag

SEQ ID NO: 613083 - RNA, 22 nt, Human
agcacugugagcaccagcacgc

SEQ ID NO: 613084 - RNA, 22 nt, Human
gcugucugcugggucgcucagg

SEQ ID NO: 613085 - RNA, 22 nt, Human
gaccaggagauuugagcuaggc

SEQ ID NO: 613086 - RNA, 22 nt, Human
ugggcccaucauugcugugggc

SEQ ID NO: 613087 - RNA, 22 nt, Human
gaaccuguccugagugaggagu

SEQ ID NO: 613088 - RNA, 22 nt, Human
cacgcacgcuggguggaggcgc

SEQ ID NO: 613089 - RNA, 22 nt, Human
cugagcagaagggugcacgugc

SEQ ID NO: 613090 - RNA, 22 nt, Human
uagcagaacaauagucaaugau

SEQ ID NO: 613091 - RNA, 18 nt, Human
cuggucucccuucgcuuu

SEQ ID NO: 613092 - RNA, 22 nt, Human
cugcaccgugucucgggcugcc

SEQ ID NO: 613093 - RNA, 22 nt, Human
gcugccuggaauaacggcuggc

SEQ ID NO: 613094 - RNA, 22 nt, Human
agggcaguguggugggacugac

SEQ ID NO: 613095 - RNA, 22 nt, Human
gagcaacacauugaaugaggau

SEQ ID NO: 613096 - RNA, 22 nt, Human
ccuggguccaauucuggcuugu

SEQ ID NO: 613097 - RNA, 22 nt, Human
gccagcuagaggcugcagugca

SEQ ID NO: 613098 - RNA, 22 nt, Human
ucuccacaccagaaggagcuga

SEQ ID NO: 613099 - RNA, 22 nt, Human
guuugagauggguuauugcucu

SEQ ID NO: 613100 - RNA, 22 nt, Human
ccccuuucucccgcgucuggcc

SEQ ID NO: 613101 - RNA, 22 nt, Human
uaucacauacuucucauccagg

SEQ ID NO: 613102 - RNA, 19 nt, Human
auagaguagaguaucuguu

SEQ ID NO: 613103 - RNA, 22 nt, Human
uuuccuguccugguacuuggca

SEQ ID NO: 613104 - RNA, 22 nt, Human
ccaagaggggaagggccgcagc

SEQ ID NO: 613105 - RNA, 22 nt, Human
cuagagaaaaagcuuagguacg

SEQ ID NO: 613106 - RNA, 22 nt, Human
guggcaggagggcaucacuugg

SEQ ID NO: 613107 - RNA, 22 nt, Human
gucccaggggagcucucugauu

SEQ ID NO: 613108 - RNA, 20 nt, Human
aaaaacaguaaugcugaaga

SEQ ID NO: 613109 - RNA, 22 nt, Human
ggcgaggugucugccaucaagc

SEQ ID NO: 613110 - RNA, 22 nt, Human
uggugcaggccaagcugcgagc

SEQ ID NO: 613111 - RNA, 20 nt, Human
caacacugcccauuguuugc

SEQ ID NO: 613112 - RNA, 22 nt, Human
auuuccuguaggggcuugcgaa

SEQ ID NO: 613113 - RNA, 23 nt, Human
aacauuuguaaggugauuuuguu

SEQ ID NO: 613114 - RNA, 22 nt, Human
aagccagguguuuaggccagcg

SEQ ID NO: 613115 - RNA, 21 nt, Human
ccaccaggucuucugcucggg

SEQ ID NO: 613116 - RNA, 22 nt, Human
gugcuaaugaauuggagugccu

SEQ ID NO: 613117 - RNA, 22 nt, Human
uuucuggcagcgggacaggggu

SEQ ID NO: 613118 - RNA, 22 nt, Human
auaucuaggcugaauguaaaau

SEQ ID NO: 613119 - RNA, 22 nt, Human
aguggcagggacuucauauaaa

SEQ ID NO: 613120 - RNA, 22 nt, Human
aucccuggccacgaagcugccc

SEQ ID NO: 613121 - RNA, 21 nt, Human
ucccucagaagcucuugguca

SEQ ID NO: 613122 - RNA, 22 nt, Human
aaacugaggcucccgagggugu

SEQ ID NO: 613123 - RNA, 22 nt, Human
acagcuggaggucugugagcac

SEQ ID NO: 613124 - RNA, 22 nt, Human
uuaccacagugccugucuaaug

SEQ ID NO: 613125 - RNA, 22 nt, Human
gcucagugaagggugccaagua

SEQ ID NO: 613126 - RNA, 22 nt, Human
cagggagaucuuggcuccuggu

SEQ ID NO: 613127 - RNA, 22 nt, Human
ugcauguuuuauaccaaagcuu

SEQ ID NO: 613128 - RNA, 22 nt, Human
cuggcuccauccuugagcucug

SEQ ID NO: 613129 - RNA, 22 nt, Human
cuccccacgccuggacuaagag

SEQ ID NO: 613130 - RNA, 22 nt, Human
uaaagugaaguucagaauggcu

SEQ ID NO: 613131 - RNA, 22 nt, Human
gucuuuuuuacaccuuacauca

SEQ ID NO: 613132 - RNA, 22 nt, Human
uacagugcuugguaucuaguaa

SEQ ID NO: 613133 - RNA, 22 nt, Human
agacaagagcugaggacauauu

SEQ ID NO: 613134 - RNA, 22 nt, Human
ggggucacacuguggugacugg

SEQ ID NO: 613135 - RNA, 22 nt, Human
acaugcauaaacuacuucuuau

SEQ ID NO: 613136 - RNA, 19 nt, Human
aggaaggcggcggcugccc

SEQ ID NO: 613137 - RNA, 22 nt, Human
uugagcagaucgggcugugggg

SEQ ID NO: 613138 - RNA, 22 nt, Human
uguguuuuggaaggaacaugca

SEQ ID NO: 613139 - RNA, 22 nt, Human
gccaggcaggccacgcuguguu

SEQ ID NO: 613140 - RNA, 22 nt, Human
gggcagcaucaggaggggcuuu

SEQ ID NO: 613141 - RNA, 22 nt, Human
ggcggcacgcaggcugcugucg

SEQ ID NO: 613142 - RNA, 22 nt, Human
cccuggaacccauggccagugu

SEQ ID NO: 613143 - RNA, 21 nt, Human
aacaggucccccacgggcuuu

SEQ ID NO: 613144 - RNA, 22 nt, Human
uccuggcucaggccccuggugc

SEQ ID NO: 613145 - RNA, 22 nt, Human
ggguucagugaugccuucagga

SEQ ID NO: 613146 - RNA, 22 nt, Human
ggcugagcuuuucaugaugguu

SEQ ID NO: 613147 - RNA, 22 nt, Human
caggcacaagaucggcuagaua

SEQ ID NO: 613148 - RNA, 22 nt, Human
gcugcuccgcagagugugugug

SEQ ID NO: 613149 - RNA, 20 nt, Human
gcagcagacagacaggggac

SEQ ID NO: 613150 - RNA, 23 nt, Human
agcaacagugggugaguguugcu

SEQ ID NO: 613151 - RNA, 21 nt, Human
gcagcaugagaaagccccaaa

SEQ ID NO: 613152 - RNA, 22 nt, Human
uaaguauguuagaaaaucaagu

SEQ ID NO: 613153 - RNA, 22 nt, Human
cuggacacuggggaugcgcagu

SEQ ID NO: 613154 - RNA, 22 nt, Human
augucccugagggucucucuga

SEQ ID NO: 613155 - RNA, 22 nt, Human
aaugcauacguguuuguggcaa

SEQ ID NO: 613156 - RNA, 22 nt, Human
uacauguacaugcauagguaga

SEQ ID NO: 613157 - RNA, 22 nt, Human
ccaggaugacccccacuuuccu

SEQ ID NO: 613158 - RNA, 22 nt, Human
ccagaucccuguuugccucugg

SEQ ID NO: 613159 - RNA, 22 nt, Human
gcagcugcgcugguguggggca

SEQ ID NO: 613160 - RNA, 22 nt, Human
cccagccuuugcuuccugguuc

SEQ ID NO: 613161 - RNA, 23 nt, Human
cagcacaguacauuuccugucuc

SEQ ID NO: 613162 - RNA, 22 nt, Human
gcugggucucucccugguccug

SEQ ID NO: 613163 - RNA, 22 nt, Human
cccagagcaugugcugccuuug

SEQ ID NO: 613164 - RNA, 21 nt, Human
acagaagcggcgaguggcccc

SEQ ID NO: 613165 - RNA, 22 nt, Human
aacacaguuucugcauugguag

SEQ ID NO: 613166 - RNA, 22 nt, Human
aaccauggauuucaguucaccu

SEQ ID NO: 613167 - RNA, 22 nt, Human
agacacuguguacagaaaaaga

SEQ ID NO: 613168 - RNA, 22 nt, Human
ucccuggcugguguagagggau

SEQ ID NO: 613169 - RNA, 22 nt, Human
acuggcaguagagggagcgcau

SEQ ID NO: 613170 - RNA, 17 nt, Human
ugagcaguagaagaugc

SEQ ID NO: 613171 - RNA, 20 nt, Human
uuucacaaugaacaugucuc

SEQ ID NO: 613172 - RNA, 22 nt, Human
cugaggcucugagaaagccaaa

SEQ ID NO: 613173 - RNA, 22 nt, Human
agugacagauuaccggcagagc

SEQ ID NO: 613174 - RNA, 22 nt, Human
cugagcaucauggcagaaucuu

SEQ ID NO: 613175 - RNA, 22 nt, Human
ucccagaacccugccagguccu

SEQ ID NO: 613176 - RNA, 22 nt, Human
gggaggaaggcuugggugagua

SEQ ID NO: 613177 - RNA, 22 nt, Human
cuccguggcuguggacgcagcc

SEQ ID NO: 613178 - RNA, 22 nt, Human
gauccacaggaaccaaaacgca

SEQ ID NO: 613179 - RNA, 22 nt, Human
agaaagcacccugcacuuucug

SEQ ID NO: 613180 - RNA, 22 nt, Human
ggagaggguguggaaaguuauc

SEQ ID NO: 613181 - RNA, 22 nt, Human
gccacguagaagugccgcgaga

SEQ ID NO: 613182 - RNA, 22 nt, Human
uccagaugcugcacauuccuga

SEQ ID NO: 613183 - RNA, 22 nt, Human
gcucaugggcccagagcagccc

SEQ ID NO: 613184 - RNA, 22 nt, Human
acugcauuaucaccaagaugua

SEQ ID NO: 613185 - RNA, 22 nt, Human
cagcaugaauguguucguaggg

SEQ ID NO: 613186 - RNA, 22 nt, Human
ggugacgaauccauagcaucga

SEQ ID NO: 613187 - RNA, 22 nt, Human
gccuggcucugaguuucucucc

SEQ ID NO: 613188 - RNA, 22 nt, Human
ugcagugaugcuucuggcucag

SEQ ID NO: 613189 - RNA, 22 nt, Human
uccuggcaaagauguugguguu

SEQ ID NO: 613190 - RNA, 22 nt, Human
ucccacacagcccgcucaccgg

SEQ ID NO: 613191 - RNA, 20 nt, Human
ugugcccaauguccagguuc

SEQ ID NO: 613192 - RNA, 22 nt, Human
uauuuggugaaucuauggucag

SEQ ID NO: 613193 - RNA, 21 nt, Human
gcuggcugucucuuacacggu

SEQ ID NO: 613194 - RNA, 22 nt, Human
auaacugagugagcagcgacuc

SEQ ID NO: 613195 - RNA, 22 nt, Human
cuaccugguacauagaaauguu

SEQ ID NO: 613196 - RNA, 22 nt, Human
aucugucccuccucacagccuc

SEQ ID NO: 613197 - RNA, 22 nt, Human
ugugaggaccucagcagagucu

SEQ ID NO: 613198 - RNA, 18 nt, Human
uaaguggacacaggucac

SEQ ID NO: 613199 - RNA, 22 nt, Human
ucaauuuauguggcuauucauu

SEQ ID NO: 613200 - RNA, 22 nt, Human
cagggcacuuaaauugccucgu

SEQ ID NO: 613201 - RNA, 22 nt, Human
ugcucccaaaccugacaggcuc

SEQ ID NO: 613202 - RNA, 22 nt, Human
ggcuuuuguuucagcucugcua

SEQ ID NO: 613203 - RNA, 22 nt, Human
agugacauuauuuuguguacua

SEQ ID NO: 613204 - RNA, 22 nt, Human
cggcuggagcugagaaaggagc

SEQ ID NO: 613205 - RNA, 22 nt, Human
ccugacagcgugucccuggccc

SEQ ID NO: 613206 - RNA, 22 nt, Human
cuguguccaauggccuuagcag

SEQ ID NO: 613207 - RNA, 22 nt, Human
ugcuggccucggcgcugggccu

SEQ ID NO: 613208 - RNA, 22 nt, Human
ccagcagccaccuucucgaaau

SEQ ID NO: 613209 - RNA, 22 nt, Human
agucuggagugauuauguggga

SEQ ID NO: 613210 - RNA, 22 nt, Human
ugugcugcucucagugacagcc

SEQ ID NO: 613211 - RNA, 22 nt, Human
acuggcccuggcugcuaggcug

SEQ ID NO: 613212 - RNA, 18 nt, Human
acagggagggcgcugggg

SEQ ID NO: 613213 - RNA, 22 nt, Human
agagaugcuguggguagaggca

SEQ ID NO: 613214 - RNA, 22 nt, Human
uagucaccuguugugugaugcc

SEQ ID NO: 613215 - RNA, 22 nt, Human
uguguuucugagaaucccaccu

SEQ ID NO: 613216 - RNA, 22 nt, Human
cugggacacguugugcuuuaac

SEQ ID NO: 613217 - RNA, 22 nt, Human
caucucccacuuccuugggggu

SEQ ID NO: 613218 - RNA, 22 nt, Human
ccaggcauccauugcuuccucu

SEQ ID NO: 613219 - RNA, 22 nt, Human
gcagcccaggcucgcucacugc

SEQ ID NO: 613220 - RNA, 22 nt, Human
ggcaguggcuccucucuacucc

SEQ ID NO: 613221 - RNA, 22 nt, Human
uugcccacuggcuguuggucag

SEQ ID NO: 613222 - RNA, 22 nt, Human
uucuccacccacucuuuuguug

SEQ ID NO: 613223 - RNA, 22 nt, Human
agccccaggcccggacgccucu

SEQ ID NO: 613224 - RNA, 22 nt, Human
ggcagagcuugcagugagccga

SEQ ID NO: 613225 - RNA, 22 nt, Human
gcuuggccagcagccgggaugc

SEQ ID NO: 613226 - RNA, 22 nt, Human
cugggguccuugccauguguca

SEQ ID NO: 613227 - RNA, 22 nt, Human
gguggcagaggugcaucagccc

SEQ ID NO: 613228 - RNA, 22 nt, Human
ggugagagaaaagaaacacugu

SEQ ID NO: 613229 - RNA, 22 nt, Human
uuucuuggucuucccgaccugg

SEQ ID NO: 613230 - RNA, 22 nt, Human
cccuggcucaggcagcuuuguu

SEQ ID NO: 613231 - RNA, 21 nt, Human
acagaaguggcuuggucucag

SEQ ID NO: 613232 - RNA, 22 nt, Human
caguuuuucaaaauuacaugau

SEQ ID NO: 613233 - RNA, 22 nt, Human
gugccgcuggagcuggaauuga

SEQ ID NO: 613234 - RNA, 22 nt, Human
cugggauccacgggcucccaag

SEQ ID NO: 613235 - RNA, 22 nt, Human
ccagucagccaagcugcagcgg

SEQ ID NO: 613236 - RNA, 22 nt, Human
gggcagcaggcuccacguuccu

SEQ ID NO: 613237 - RNA, 22 nt, Human
gccgugcgugcgcaggugcugu

SEQ ID NO: 613238 - RNA, 22 nt, Human
augccccagugugugcuuccuu

SEQ ID NO: 613239 - RNA, 17 nt, Human
gccuggcccagccuggc

SEQ ID NO: 613240 - RNA, 19 nt, Human
cuggcuucaagcaguccuc

SEQ ID NO: 613241 - RNA, 22 nt, Human
auacaccaccuuggaucuuuca

SEQ ID NO: 613242 - RNA, 22 nt, Human
uccuuucuucuucugcccaugg

SEQ ID NO: 613243 - RNA, 22 nt, Human
acagugcuaucaauagcuagaa

SEQ ID NO: 613244 - RNA, 22 nt, Human
aaugccuuggagagccuagagg

SEQ ID NO: 613245 - RNA, 22 nt, Human
guggcagcggcccaggccgucu

SEQ ID NO: 613246 - RNA, 22 nt, Human
uagcuguucucuguaaauugga

SEQ ID NO: 613247 - RNA, 22 nt, Human
gcacugagcuuuggaggagcag

SEQ ID NO: 613248 - RNA, 22 nt, Human
cauggcaggugcagauucugug

SEQ ID NO: 613249 - RNA, 22 nt, Human
cucccagggucuaggcugcugg

SEQ ID NO: 613250 - RNA, 22 nt, Human
ucugggccggagccgacggcag

SEQ ID NO: 613251 - RNA, 22 nt, Human
uuccuggcagaggccccgacag

SEQ ID NO: 613252 - RNA, 22 nt, Human
ugacagcuuggacaggucccuc

SEQ ID NO: 613253 - RNA, 22 nt, Human
ggcgagcaugagucacucuggg

SEQ ID NO: 613254 - RNA, 22 nt, Human
agggccacgugcaccgcggucu

SEQ ID NO: 613255 - RNA, 22 nt, Human
gcgacgcaggcacgacguguug

SEQ ID NO: 613256 - RNA, 22 nt, Human
ugggaagauaugagugaccaac

SEQ ID NO: 613257 - RNA, 22 nt, Human
cuggaagcgucggaggaagggc

SEQ ID NO: 613258 - RNA, 22 nt, Human
ccagcaggaaagugacguuuga

SEQ ID NO: 613259 - RNA, 18 nt, Human
uucggcagauacgcuugg

SEQ ID NO: 613260 - RNA, 22 nt, Human
cagggcuccccagagagccucu

SEQ ID NO: 613261 - RNA, 22 nt, Human
gcugggcaggccucgugagggc

SEQ ID NO: 613262 - RNA, 22 nt, Human
gcgagaaacuaagugcccuuug

SEQ ID NO: 613263 - RNA, 22 nt, Human
ugucauggacuggauuucugcu

SEQ ID NO: 613264 - RNA, 22 nt, Human
agcugcaccggcuggaccacug

SEQ ID NO: 613265 - RNA, 19 nt, Human
augggaagcggccagcgga

SEQ ID NO: 613266 - RNA, 22 nt, Human
auguacaaucuaucacaagaag

SEQ ID NO: 613267 - RNA, 22 nt, Human
gagaauacaaccagaagcugag

SEQ ID NO: 613268 - RNA, 22 nt, Human
uucaaacacugcuuugagaggg

SEQ ID NO: 613269 - RNA, 22 nt, Human
cccuggcucugccucagagccc

SEQ ID NO: 613270 - RNA, 22 nt, Human
agagcaccaaggugguuuggac

SEQ ID NO: 613271 - RNA, 22 nt, Human
cauagacauugauagguuauau

SEQ ID NO: 613272 - RNA, 22 nt, Human
ugacaggcuugcuaagacauag

SEQ ID NO: 613273 - RNA, 22 nt, Human
acaaaggugagcagaagacaca

SEQ ID NO: 613274 - RNA, 22 nt, Human
cugagcaugcuacaugcagcac

SEQ ID NO: 613275 - RNA, 22 nt, Human
cagagguagccgagugcaaucg

SEQ ID NO: 613276 - RNA, 22 nt, Human
ucugccaucaagaugcucuggc

SEQ ID NO: 613277 - RNA, 22 nt, Human
uuuacagcuacuguccuauuuc

SEQ ID NO: 613278 - RNA, 22 nt, Human
cggagaggugggggcagcaucu

SEQ ID NO: 613279 - RNA, 22 nt, Human
cagcugccuaugaccuagccuc

SEQ ID NO: 613280 - RNA, 22 nt, Human
uaucugucgggagucuuccgga

SEQ ID NO: 613281 - RNA, 22 nt, Human
gcggcccgagcaggacgggugg

SEQ ID NO: 613282 - RNA, 22 nt, Human
guguccagagccgggcugaaug

SEQ ID NO: 613283 - RNA, 22 nt, Human
uccugggcccuccggaucaggu

SEQ ID NO: 613284 - RNA, 22 nt, Human
ucuguggcaugguaucuggagg

SEQ ID NO: 613285 - RNA, 22 nt, Human
auagacacagcuaugauuugag

SEQ ID NO: 613286 - RNA, 21 nt, Human
uuccuggaggcagaaacguga

SEQ ID NO: 613287 - RNA, 18 nt, Human
ucugugggaucagugagg

SEQ ID NO: 613288 - RNA, 22 nt, Human
aagcgcagacacagagagugga

SEQ ID NO: 613289 - RNA, 22 nt, Human
cagucccaguuugagacucugg

SEQ ID NO: 613290 - RNA, 22 nt, Human
gucugcccuuggccugggacuu

SEQ ID NO: 613291 - RNA, 22 nt, Human
ccuguacuuguauuaaaggucc

SEQ ID NO: 613292 - RNA, 22 nt, Human
aaaggagacuucagaucuccuu

SEQ ID NO: 613293 - RNA, 22 nt, Human
ccuugcagcauauagagucccu

SEQ ID NO: 613294 - RNA, 22 nt, Human
caggacccaaccucccugcucu

SEQ ID NO: 613295 - RNA, 22 nt, Human
cagagccuuaguucuccuagaa

SEQ ID NO: 613296 - RNA, 22 nt, Human
uuagacagagcuccuugagggc

SEQ ID NO: 613297 - RNA, 20 nt, Human
ggcagagcuaugucuguugc

SEQ ID NO: 613298 - RNA, 20 nt, Human
ucuggggaugaggucuagga

SEQ ID NO: 613299 - RNA, 22 nt, Human
ugugacagugccagcuucauag

SEQ ID NO: 613300 - RNA, 22 nt, Human
uaaaaguuagcuaggacaaagu

SEQ ID NO: 613301 - RNA, 18 nt, Human
gcugaaauucuaaacaaa

SEQ ID NO: 613302 - RNA, 22 nt, Human
uggcccugccgccacgacgucu

SEQ ID NO: 613303 - RNA, 22 nt, Human
augaugaagcaugguuacacug

SEQ ID NO: 613304 - RNA, 22 nt, Human
ugcugaggagguggcugugcuu

SEQ ID NO: 613305 - RNA, 22 nt, Human
uggagugcaguugggaggacac

SEQ ID NO: 613306 - RNA, 20 nt, Human
ucucccugcccaucucagau

SEQ ID NO: 613307 - RNA, 21 nt, Human
aggucccagguuugggcagca

SEQ ID NO: 613308 - RNA, 22 nt, Human
auguauacgugcaggucacagg

SEQ ID NO: 613309 - RNA, 22 nt, Human
ccucuggccuaggccgggagag

SEQ ID NO: 613310 - RNA, 22 nt, Human
cagcagcucaggcuccuuccca

SEQ ID NO: 613311 - RNA, 22 nt, Human
gaugucuggcuaccacucgcac

SEQ ID NO: 613312 - RNA, 22 nt, Human
auacaggaugcugaacaucucu

SEQ ID NO: 613313 - RNA, 22 nt, Human
augcggagccccaagcuugaag

SEQ ID NO: 613314 - RNA, 18 nt, Human
uacagcuugaguugacug

SEQ ID NO: 613315 - RNA, 22 nt, Human
aaugugcugguaacugcuuugc

SEQ ID NO: 613316 - RNA, 22 nt, Human
uccuggguccauggcagccgaa

SEQ ID NO: 613317 - RNA, 22 nt, Human
uuaguguccagaguuuuuauua

SEQ ID NO: 613318 - RNA, 22 nt, Human
cucagaggggaugcuuggagaa

SEQ ID NO: 613319 - RNA, 22 nt, Human
cuugggcaggggaaacagcugc

SEQ ID NO: 613320 - RNA, 22 nt, Human
auugagaaaauucgagcaaguu

SEQ ID NO: 613321 - RNA, 22 nt, Human
auuuacugagguaaauaaacug

SEQ ID NO: 613322 - RNA, 22 nt, Human
aguaacagguguacagacuauc

SEQ ID NO: 613323 - RNA, 22 nt, Human
ucugcucagccgaucugcuccg

SEQ ID NO: 613324 - RNA, 22 nt, Human
ggccagccuggggcucccagac

SEQ ID NO: 613325 - RNA, 22 nt, Human
acaguguuacuugauaguguau

SEQ ID NO: 613326 - RNA, 22 nt, Human
cuguggcugcgcccugggggag

SEQ ID NO: 613327 - RNA, 22 nt, Human
aguguauucugcaugggagacu

SEQ ID NO: 613328 - RNA, 22 nt, Human
auguuuguguuucccauucagg

SEQ ID NO: 613329 - RNA, 22 nt, Human
gugccuccaggcucgacuaguc

SEQ ID NO: 613330 - RNA, 22 nt, Human
ccuguggcacaugcagggauuc

SEQ ID NO: 613331 - RNA, 22 nt, Human
guuauguaaucuaacacucagu

SEQ ID NO: 613332 - RNA, 22 nt, Human
ccaugcccuugucaucuccagg

SEQ ID NO: 613333 - RNA, 22 nt, Human
aaugaaacuaguagaaucuuug

SEQ ID NO: 613334 - RNA, 22 nt, Human
accauccaaacugcuuucugug

SEQ ID NO: 613335 - RNA, 22 nt, Human
caacagcuggaggcuuggcccg

SEQ ID NO: 613336 - RNA, 22 nt, Human
cagacagagucuucccaucagu

SEQ ID NO: 613337 - RNA, 22 nt, Human
ucgcuugaacccaggaagugga

SEQ ID NO: 613338 - RNA, 22 nt, Human
ucacaauacucacucaauggcu

SEQ ID NO: 613339 - RNA, 22 nt, Human
gaaacacucaauuuaguaauuc

SEQ ID NO: 613340 - RNA, 19 nt, Human
ucuggcugccaaggauuga

SEQ ID NO: 613341 - RNA, 18 nt, Human
gaggcacauaguuggggc

SEQ ID NO: 613342 - RNA, 22 nt, Human
aggugcuuggcucgugcacaca

SEQ ID NO: 613343 - RNA, 19 nt, Human
cagcaaacacuguaaaugg

SEQ ID NO: 613344 - RNA, 22 nt, Human
aacacauggcaagagcaggaaa

SEQ ID NO: 613345 - RNA, 19 nt, Human
ucuuucauuucuagcucug

SEQ ID NO: 613346 - RNA, 22 nt, Human
ucauuguuucugcuuuucauga

SEQ ID NO: 613347 - RNA, 22 nt, Human
cugcacagucauuuccucucaa

SEQ ID NO: 613348 - RNA, 22 nt, Human
ccagaacagaccugccugaccu

SEQ ID NO: 613349 - RNA, 22 nt, Human
ggagguggagcuggaaguucca

SEQ ID NO: 613350 - RNA, 23 nt, Human
caaaaugcuaugugcccaaugca

SEQ ID NO: 613351 - RNA, 22 nt, Human
cagcuccccucuguggggcagu

SEQ ID NO: 613352 - RNA, 22 nt, Human
guggcauugccuucugcaggaa

SEQ ID NO: 613353 - RNA, 22 nt, Human
aggcuccaugguucucccucag

SEQ ID NO: 613354 - RNA, 22 nt, Human
gucugugcaguuacuagcuggu

SEQ ID NO: 613355 - RNA, 22 nt, Human
auucccuuugacgaucccuagg

SEQ ID NO: 613356 - RNA, 22 nt, Human
ugcaugguguaauucuaaugcu

SEQ ID NO: 613357 - RNA, 22 nt, Human
gcuuucuuuucaagaauguauu

SEQ ID NO: 613358 - RNA, 22 nt, Human
gacacugcacuuggggcccaca

SEQ ID NO: 613359 - RNA, 22 nt, Human
aucagagcuaguacuugcaggu

SEQ ID NO: 613360 - RNA, 22 nt, Human
guucucucagcgauagugaugg

SEQ ID NO: 613361 - RNA, 22 nt, Human
gacagcaggaugugaggggaug

SEQ ID NO: 613362 - RNA, 22 nt, Human
uuccagcuaacucacaucccuu

SEQ ID NO: 613363 - RNA, 22 nt, Human
uuucacauacaguguauaguag

SEQ ID NO: 613364 - RNA, 22 nt, Human
aaggcagcaugaaucccuguac

SEQ ID NO: 613365 - RNA, 22 nt, Human
caugugguauugugagauccac

SEQ ID NO: 613366 - RNA, 22 nt, Human
aucuguucuucaaaauauuaca

SEQ ID NO: 613367 - RNA, 22 nt, Human
cagggccagggcuauggugaag

SEQ ID NO: 613368 - RNA, 22 nt, Human
aaugauguuuuuaaagaacaua

SEQ ID NO: 613369 - RNA, 22 nt, Human
ucucgugcaggccuugcucgga

SEQ ID NO: 613370 - RNA, 22 nt, Human
uccaugacagcgugagaguuug

SEQ ID NO: 613371 - RNA, 22 nt, Human
caagagcuggguggcaagcuag

SEQ ID NO: 613372 - RNA, 19 nt, Human
uccugcccaccagccaggg

SEQ ID NO: 613373 - RNA, 22 nt, Human
uaaccuguuaagggcugaccca

SEQ ID NO: 613374 - RNA, 22 nt, Human
agucaacauuugagaugcaaug

SEQ ID NO: 613375 - RNA, 22 nt, Human
ucucugagaucagccacugacu

SEQ ID NO: 613376 - RNA, 22 nt, Human
uuccuucuucauuguguuacag

SEQ ID NO: 613377 - RNA, 22 nt, Human
cugcgugguaggacucaguucu

SEQ ID NO: 613378 - RNA, 22 nt, Human
aaaucccacucacgaguuuugc

SEQ ID NO: 613379 - RNA, 22 nt, Human
gaggcuggacgugcauuucuac

SEQ ID NO: 613380 - RNA, 22 nt, Human
cagcugccuguauuguccucau

SEQ ID NO: 613381 - RNA, 22 nt, Human
uugggcccugcucugaguugcu

SEQ ID NO: 613382 - RNA, 22 nt, Human
uccagcugugcuccaggaggug

SEQ ID NO: 613383 - RNA, 23 nt, Human
acucugacuuaguuauagcuauu

SEQ ID NO: 613384 - RNA, 22 nt, Human
acaggcgcacaugagggccgug

SEQ ID NO: 613385 - RNA, 22 nt, Human
cacauuuaaagguugaagcuga

SEQ ID NO: 613386 - RNA, 22 nt, Human
uaguggggaaggaggacaagaa

SEQ ID NO: 613387 - RNA, 22 nt, Human
auguggcuuucugcguuuucuc

SEQ ID NO: 613388 - RNA, 20 nt, Human
cucagugcuuucauugccuc

SEQ ID NO: 613389 - RNA, 22 nt, Human
uucugugcucaaaacuuuccaa

SEQ ID NO: 613390 - RNA, 22 nt, Human
auacaugugugugcauacaugu

SEQ ID NO: 613391 - RNA, 17 nt, Human
gagguaggaagugaguc

SEQ ID NO: 613392 - RNA, 22 nt, Human
augaggagucaaggagucggag

SEQ ID NO: 613393 - RNA, 22 nt, Human
ccaaacauuucaaauuuagaga

SEQ ID NO: 613394 - RNA, 22 nt, Human
gccaggguggcagaaggcccca

SEQ ID NO: 613395 - RNA, 22 nt, Human
auuaguguuguggcuucauggc

SEQ ID NO: 613396 - RNA, 22 nt, Human
cuuugcagagggggugggagcu

SEQ ID NO: 613397 - RNA, 22 nt, Human
aguggcaguagaugagcugguu

SEQ ID NO: 613398 - RNA, 22 nt, Human
ugcccuguuccugccuccagcu

SEQ ID NO: 613399 - RNA, 22 nt, Human
ugccagcaguagcaguaggcca

SEQ ID NO: 613400 - RNA, 22 nt, Human
uguguccuucugggagucccag

SEQ ID NO: 613401 - RNA, 22 nt, Human
ccccaacccugguuccguggcg

SEQ ID NO: 613402 - RNA, 22 nt, Human
ggccauggcgggagccggcguc

SEQ ID NO: 613403 - RNA, 22 nt, Human
aacuuucuuugcaucuaaguuu

SEQ ID NO: 613404 - RNA, 19 nt, Human
uuuaaugugugcugcaauc

SEQ ID NO: 613405 - RNA, 22 nt, Human
agugcuuuauguuguugugcaa

SEQ ID NO: 613406 - RNA, 22 nt, Human
aggcagccuauggggagcucag

SEQ ID NO: 613407 - RNA, 22 nt, Human
uaauuuugucacagugacaugc

SEQ ID NO: 613408 - RNA, 22 nt, Human
agauaaaguccaaacuguguag

SEQ ID NO: 613409 - RNA, 22 nt, Human
gcuguaacuuuuucauuuucaa

SEQ ID NO: 613410 - RNA, 19 nt, Human
ugguggaggugcaccugac

SEQ ID NO: 613411 - RNA, 22 nt, Human
aauggcuguucucugugauugg

SEQ ID NO: 613412 - RNA, 22 nt, Human
cuuggcauguucaucugcuugg

SEQ ID NO: 613413 - RNA, 22 nt, Human
ucuggcuucaguaggguucacu

SEQ ID NO: 613414 - RNA, 22 nt, Human
uucaaacaguguagaauauaug

SEQ ID NO: 613415 - RNA, 22 nt, Human
uccaggagugauaaggccacug

SEQ ID NO: 613416 - RNA, 22 nt, Human
ugguccucacccuacccagcug

SEQ ID NO: 613417 - RNA, 22 nt, Human
uuauuccauagaagucaaggaa

SEQ ID NO: 613418 - RNA, 22 nt, Human
ggcagugaugucaaacagugaa

SEQ ID NO: 613419 - RNA, 22 nt, Human
uuuccaaagguggcaggaacaa

SEQ ID NO: 613420 - RNA, 22 nt, Human
uuucuaguggguauucccuguu

SEQ ID NO: 613421 - RNA, 22 nt, Human
gagaugggcgagaagguggacu

SEQ ID NO: 613422 - RNA, 22 nt, Human
uuuguguuggaagaaaugcuac

SEQ ID NO: 613423 - RNA, 22 nt, Human
cuggcuccucaggacugcggga

SEQ ID NO: 613424 - RNA, 22 nt, Human
aagcaaaagguuacacuucugg

SEQ ID NO: 613425 - RNA, 22 nt, Human
gccuguuucuccuccuuggccc

SEQ ID NO: 613426 - RNA, 22 nt, Human
gagcugcauagcugggauccuc

SEQ ID NO: 613427 - RNA, 22 nt, Human
aagggccacaugccauuuaaaa

SEQ ID NO: 613428 - RNA, 22 nt, Human
gggcucuguuuagaccagagau

SEQ ID NO: 613429 - RNA, 21 nt, Human
ugugacagaggcggugccuac

SEQ ID NO: 613430 - RNA, 22 nt, Human
cauugcuuugugcauauuuaaa

SEQ ID NO: 613431 - RNA, 23 nt, Human
uacagccaugucgcugauuuaac

SEQ ID NO: 613432 - RNA, 22 nt, Human
acuugguggcgaacgaggguca

SEQ ID NO: 613433 - RNA, 22 nt, Human
gggagaguagcuggaagguucu

SEQ ID NO: 613434 - RNA, 19 nt, Human
ccauucugucucugccaca

SEQ ID NO: 613435 - RNA, 18 nt, Human
gaaggcauucaguggcuu

SEQ ID NO: 613436 - RNA, 22 nt, Human
aauacagugaaagugagcaagg

SEQ ID NO: 613437 - RNA, 22 nt, Human
cccauugugguuguugaggaua

SEQ ID NO: 613438 - RNA, 22 nt, Human
ucccuggcacaagaaggcuguc

SEQ ID NO: 613439 - RNA, 22 nt, Human
gccagguugcugacgacgaucu

SEQ ID NO: 613440 - RNA, 22 nt, Human
ucugaggucauuccaaggacau

SEQ ID NO: 613441 - RNA, 22 nt, Human
gucuuaagaaugaaugcugaga

SEQ ID NO: 613442 - RNA, 22 nt, Human
ucugaggcugaauggacuccgu

SEQ ID NO: 613443 - RNA, 22 nt, Human
cagcuccaucuugcuuauacca

SEQ ID NO: 613444 - RNA, 22 nt, Human
gggcagcaaaucugagucuggu

SEQ ID NO: 613445 - RNA, 22 nt, Human
ccugugguuuacucuguggcua

SEQ ID NO: 613446 - RNA, 21 nt, Human
cuuuucuagucccagccccgc

SEQ ID NO: 613447 - RNA, 22 nt, Human
gcaggaguguggugggacaucc

SEQ ID NO: 613448 - RNA, 20 nt, Human
ugcuggaggcgccggcgcuc

SEQ ID NO: 613449 - RNA, 22 nt, Human
cuccuucacgcaggcugccaug

SEQ ID NO: 613450 - RNA, 22 nt, Human
cagcgguggcaaggugacugug

SEQ ID NO: 613451 - RNA, 22 nt, Human
auguaacauaugugaucgcauu

SEQ ID NO: 613452 - RNA, 22 nt, Human
ucauggcacaugcccuccaggg

SEQ ID NO: 613453 - RNA, 22 nt, Human
aaugcaaugcagcaccuccuug

SEQ ID NO: 613454 - RNA, 21 nt, Human
uccaggagcacgggacuagga

SEQ ID NO: 613455 - RNA, 22 nt, Human
ugccaggcugcccuccagucug

SEQ ID NO: 613456 - RNA, 22 nt, Human
uaacacauagauauuuuaacuu

SEQ ID NO: 613457 - RNA, 22 nt, Human
aauuauguuugcuuuagaugga

SEQ ID NO: 613458 - RNA, 22 nt, Human
cucuggucaagcaaagagguuu

SEQ ID NO: 613459 - RNA, 22 nt, Human
cagugcaacguugugcauucaa

SEQ ID NO: 613460 - RNA, 20 nt, Human
caucaacaccuugucagccu

SEQ ID NO: 613461 - RNA, 18 nt, Human
gggguagaguguccuauu

SEQ ID NO: 613462 - RNA, 22 nt, Human
uucuguucccuaggaccugggg

SEQ ID NO: 613463 - RNA, 22 nt, Human
ucacuaugcccagaauacaguu

SEQ ID NO: 613464 - RNA, 22 nt, Human
cacagaggaugcccaagcgauc

SEQ ID NO: 613465 - RNA, 18 nt, Human
acccauuauauuuguagc

SEQ ID NO: 613466 - RNA, 22 nt, Human
aggccacaggaguacugucggu

SEQ ID NO: 613467 - RNA, 22 nt, Human
uuuccagaaauaccauuuggug

SEQ ID NO: 613468 - RNA, 21 nt, Human
uugauuuagcagaucuagcug

SEQ ID NO: 613469 - RNA, 22 nt, Human
uccagcagguccgagacaaguu

SEQ ID NO: 613470 - RNA, 22 nt, Human
ucagagccccuccgcuguccca

SEQ ID NO: 613471 - RNA, 22 nt, Human
uuaauggauuggagguuucaau

SEQ ID NO: 613472 - RNA, 20 nt, Human
gaccagaucccuuaccagcu

SEQ ID NO: 613473 - RNA, 22 nt, Human
uccagccauaucuuguagcccu

SEQ ID NO: 613474 - RNA, 22 nt, Human
gucuccugaggcauccauugaa

SEQ ID NO: 613475 - RNA, 22 nt, Human
uuccagagaguuauuccccugg

SEQ ID NO: 613476 - RNA, 22 nt, Human
gguggcugugagcauuauguga

SEQ ID NO: 613477 - RNA, 22 nt, Human
augcacacguacccuacaaggc

SEQ ID NO: 613478 - RNA, 22 nt, Human
cuccugcagcccucagcagcca

SEQ ID NO: 613479 - RNA, 23 nt, Human
augcuagcugugccaacaccaua

SEQ ID NO: 613480 - RNA, 22 nt, Human
uuccuguucaggaaaguugugu

SEQ ID NO: 613481 - RNA, 22 nt, Human
aucugguuuggggauccuugug

SEQ ID NO: 613482 - RNA, 22 nt, Human
guuuauuggguauuguggagcc

SEQ ID NO: 613483 - RNA, 22 nt, Human
gcaggguaggugacagguaguc

SEQ ID NO: 613484 - RNA, 22 nt, Human
acuggaaaguauucuuucacug

SEQ ID NO: 613485 - RNA, 21 nt, Human
gcugcucgagauccagugcuu

SEQ ID NO: 613486 - RNA, 22 nt, Human
cccagcauuucugggcugcacu

SEQ ID NO: 613487 - RNA, 22 nt, Human
gcuguggcuccaauggugagcc

SEQ ID NO: 613488 - RNA, 22 nt, Human
aggccagaacagcucugcacca

SEQ ID NO: 613489 - RNA, 20 nt, Human
uugagcagcagugcuguguc

SEQ ID NO: 613490 - RNA, 22 nt, Human
cagcccacugccucugugguag

SEQ ID NO: 613491 - RNA, 22 nt, Human
uacuuucuagcucuccccaguu

SEQ ID NO: 613492 - RNA, 22 nt, Human
agcaauguuggccuauauaccu

SEQ ID NO: 613493 - RNA, 20 nt, Human
ccacccuguccggggcggag

SEQ ID NO: 613494 - RNA, 22 nt, Human
gacuggcucuaucaggauaaau

SEQ ID NO: 613495 - RNA, 22 nt, Human
gccugagccgccugagcggcgg

SEQ ID NO: 613496 - RNA, 22 nt, Human
uccaguggugguuugaagggca

SEQ ID NO: 613497 - RNA, 23 nt, Human
acagaagccaggagccgcugggc

SEQ ID NO: 613498 - RNA, 22 nt, Human
gccggucuuaagcugacuguga

SEQ ID NO: 613499 - RNA, 22 nt, Human
uuggcgcccaggacgccgccgc

SEQ ID NO: 613500 - RNA, 22 nt, Human
ggcucagaaaccucuggugucu

SEQ ID NO: 613501 - RNA, 22 nt, Human
gagcacugauuuauuuuugucu

SEQ ID NO: 613502 - RNA, 22 nt, Human
acagugucuccugguacccagu

SEQ ID NO: 613503 - RNA, 22 nt, Human
cuuugggcacugaaguaugggu

SEQ ID NO: 613504 - RNA, 22 nt, Human
uauaugcagauuuucaucaucg

SEQ ID NO: 613505 - RNA, 22 nt, Human
cuguuuauucucaucuaaaaug

SEQ ID NO: 613506 - RNA, 22 nt, Human
gacaagaugacaucauggcuuc

SEQ ID NO: 613507 - RNA, 22 nt, Human
ccucuuccacugggccccaucc

SEQ ID NO: 613508 - RNA, 22 nt, Human
aggggcuuguggaguugcuggu

SEQ ID NO: 613509 - RNA, 22 nt, Human
cagugcugcaggcgccugcggu

SEQ ID NO: 613510 - RNA, 18 nt, Human
uuugggauccucuuuucu

SEQ ID NO: 613511 - RNA, 22 nt, Human
uacagcagcccaccuucuucug

SEQ ID NO: 613512 - RNA, 22 nt, Human
agcugcaaguccaaaggaauua

SEQ ID NO: 613513 - RNA, 22 nt, Human
cugcuuuaaaacugauacauga

SEQ ID NO: 613514 - RNA, 22 nt, Human
cugggaggcccacguugggaag

SEQ ID NO: 613515 - RNA, 22 nt, Human
ucaaaaugccgagugcccaggu

SEQ ID NO: 613516 - RNA, 22 nt, Human
cauggccaaagaauuauauuuu

SEQ ID NO: 613517 - RNA, 22 nt, Human
gagugccuuccccaugcuuugg

SEQ ID NO: 613518 - RNA, 20 nt, Human
uuuuccacuccucaaaacag

SEQ ID NO: 613519 - RNA, 22 nt, Human
uugauggacagggaccacuguc

SEQ ID NO: 613520 - RNA, 22 nt, Human
guggacagacauaauccuaauu

SEQ ID NO: 613521 - RNA, 23 nt, Human
uggcucugagcuuccugguggcc

SEQ ID NO: 613522 - RNA, 22 nt, Human
aaggcuccagugaaugcuggca

SEQ ID NO: 613523 - RNA, 21 nt, Human
agagacugucacugcaguacc

SEQ ID NO: 613524 - RNA, 22 nt, Human
gcagcugccgugagcucacgcc

SEQ ID NO: 613525 - RNA, 22 nt, Human
gcagauggauguggacggcgcc

SEQ ID NO: 613526 - RNA, 19 nt, Human
cuucaguguucaccuggcc

SEQ ID NO: 613527 - RNA, 22 nt, Human
ugcccacaggaagacaccagcg

SEQ ID NO: 613528 - RNA, 21 nt, Human
cccagaaguuccauggggggc

SEQ ID NO: 613529 - RNA, 20 nt, Human
aauagcacagcucaaacauu

SEQ ID NO: 613530 - RNA, 22 nt, Human
gucuguccacuuggaagcuccc

SEQ ID NO: 613531 - RNA, 22 nt, Human
agggcucagaaagcagguuuuc

SEQ ID NO: 613532 - RNA, 22 nt, Human
ggcuucuuagaauuugacuuac

SEQ ID NO: 613533 - RNA, 22 nt, Human
ucccacagcuucgugcuucccc

SEQ ID NO: 613534 - RNA, 19 nt, Human
ugaggauugagguccagua

SEQ ID NO: 613535 - RNA, 22 nt, Human
ccuacucccuuucuagaguaug

SEQ ID NO: 613536 - RNA, 18 nt, Human
ucugaaggaaugauucca

SEQ ID NO: 613537 - RNA, 22 nt, Human
gaaaugucaagauauguuugga

SEQ ID NO: 613538 - RNA, 22 nt, Human
accugguaaccugccugacuaa

SEQ ID NO: 613539 - RNA, 23 nt, Human
aguacauuugacccaaauaagcu

SEQ ID NO: 613540 - RNA, 21 nt, Human
agccugcaauguagguaccgg

SEQ ID NO: 613541 - RNA, 22 nt, Human
auacacauguuauuguggaagc

SEQ ID NO: 613542 - RNA, 22 nt, Human
ugacagcccaccucacaggauu

SEQ ID NO: 613543 - RNA, 17 nt, Human
agcuuggagcagcauga

SEQ ID NO: 613544 - RNA, 22 nt, Human
ucccagucuagagccggauugg

SEQ ID NO: 613545 - RNA, 22 nt, Human
ucuugggcaauuucucuagagg

SEQ ID NO: 613546 - RNA, 23 nt, Human
ugagagccuggcagccuggguuc

SEQ ID NO: 613547 - RNA, 22 nt, Human
uggcuacauuuauacucucauu

SEQ ID NO: 613548 - RNA, 22 nt, Human
uuauguauggauggcugaaagu

SEQ ID NO: 613549 - RNA, 23 nt, Human
ggacaugucucuggguauuuuga

SEQ ID NO: 613550 - RNA, 22 nt, Human
gugcaggugguuggcccagccg

SEQ ID NO: 613551 - RNA, 23 nt, Human
uccaguuaaugguucccagucug

SEQ ID NO: 613552 - RNA, 22 nt, Human
ccuucaaucuuaagucagccca

SEQ ID NO: 613553 - RNA, 22 nt, Human
ugaugggaggugcugcaggacc

SEQ ID NO: 613554 - RNA, 22 nt, Human
ugcacagagggaggcauaaaau

SEQ ID NO: 613555 - RNA, 22 nt, Human
ucuucacaguccuggucagugg

SEQ ID NO: 613556 - RNA, 22 nt, Human
aacacugagaggggaguggcac

SEQ ID NO: 613557 - RNA, 22 nt, Human
caggaaugccaaccagugcaug

SEQ ID NO: 613558 - RNA, 22 nt, Human
gcugauggcuugcuggcugaca

SEQ ID NO: 613559 - RNA, 22 nt, Human
ggugggucuuguggggcagcuu

SEQ ID NO: 613560 - RNA, 22 nt, Human
ugcugcuuguuuuguaaauaaa

SEQ ID NO: 613561 - RNA, 22 nt, Human
ucugagugggaacucucaugac

SEQ ID NO: 613562 - RNA, 22 nt, Human
ugcacacaguucucaggaaaga

SEQ ID NO: 613563 - RNA, 22 nt, Human
agcucagggccaggcgcguuuc

SEQ ID NO: 613564 - RNA, 22 nt, Human
acagaagugacaauuucuuggg

SEQ ID NO: 613565 - RNA, 22 nt, Human
gagcacugagcuggaauuggag

SEQ ID NO: 613566 - RNA, 22 nt, Human
ugccgcugucgccaccauggcu

SEQ ID NO: 613567 - RNA, 22 nt, Human
gacuuugccacuugcuccagcu

SEQ ID NO: 613568 - RNA, 22 nt, Human
cuacagaauucaacaaaugguu

SEQ ID NO: 613569 - RNA, 22 nt, Human
aucaagggcgcgugguucggcg

SEQ ID NO: 613570 - RNA, 22 nt, Human
gcggcuccgaagccaggccgcg

SEQ ID NO: 613571 - RNA, 22 nt, Human
ccaucuucucuugaaccuccuu

SEQ ID NO: 613572 - RNA, 22 nt, Human
caggacccaucagccaggcacu

SEQ ID NO: 613573 - RNA, 22 nt, Human
ugugacuaggccugagcucuug

SEQ ID NO: 613574 - RNA, 22 nt, Human
uaagaaacauuuuuaugacagu

SEQ ID NO: 613575 - RNA, 22 nt, Human
gagggccaaugugucccugagc

SEQ ID NO: 613576 - RNA, 22 nt, Human
ggucuccugaccuuuagucccu

SEQ ID NO: 613577 - RNA, 22 nt, Human
gggaggugauuaggaccaugua

SEQ ID NO: 613578 - RNA, 22 nt, Human
acgcggugcggcaaguucaugg

SEQ ID NO: 613579 - RNA, 22 nt, Human
gaggugggaugugugugcuacu

SEQ ID NO: 613580 - RNA, 22 nt, Human
ugcuuguauucauaucacagcu

SEQ ID NO: 613581 - RNA, 22 nt, Human
cuguccauggcaaugaugcaga

SEQ ID NO: 613582 - RNA, 22 nt, Human
uuugggcaggcuuuucccuaga

SEQ ID NO: 613583 - RNA, 23 nt, Human
uggaaacauucugaauguccauc

SEQ ID NO: 613584 - RNA, 22 nt, Human
ugaggcuggaugggaugccucc

SEQ ID NO: 613585 - RNA, 22 nt, Human
acuuuucuuaucagaaaggcca

SEQ ID NO: 613586 - RNA, 22 nt, Human
cagagccacugucugccaggca

SEQ ID NO: 613587 - RNA, 22 nt, Human
ggagcugugcugggugaucagg

SEQ ID NO: 613588 - RNA, 22 nt, Human
gcuagggagacuugugucauca

SEQ ID NO: 613589 - RNA, 22 nt, Human
ugcugcacuuauggcucugagg

SEQ ID NO: 613590 - RNA, 22 nt, Human
aggggcacgaguagagcucuag

SEQ ID NO: 613591 - RNA, 22 nt, Human
ugcuccaucuagagcucugcag

SEQ ID NO: 613592 - RNA, 22 nt, Human
caaagccaggcuuucuaaugua

SEQ ID NO: 613593 - RNA, 22 nt, Human
gcuugcugaacaggaaccuggc

SEQ ID NO: 613594 - RNA, 22 nt, Human
cgugaugcucaggaggucauag

SEQ ID NO: 613595 - RNA, 22 nt, Human
uggaaauaguugugagucaggc

SEQ ID NO: 613596 - RNA, 22 nt, Human
agggcacucugcagggaccacc

SEQ ID NO: 613597 - RNA, 22 nt, Human
agacagcacuuuuguauggggg

SEQ ID NO: 613598 - RNA, 23 nt, Human
ucugaccucguuugcuguguucu

SEQ ID NO: 613599 - RNA, 22 nt, Human
uagugucuuccaggacauggua

SEQ ID NO: 613600 - RNA, 22 nt, Human
augacagcucuagcacacagua

SEQ ID NO: 613601 - RNA, 21 nt, Human
ugcuggguuugcccaucaggc

SEQ ID NO: 613602 - RNA, 22 nt, Human
uugggacaaagacuccuugaau

SEQ ID NO: 613603 - RNA, 19 nt, Human
ugggcagugccagggcuua

SEQ ID NO: 613604 - RNA, 22 nt, Human
ccacccuuccauucuuccucuu

SEQ ID NO: 613605 - RNA, 22 nt, Human
gccacccuggacgcacuguucg

SEQ ID NO: 613606 - RNA, 22 nt, Human
aaauucuguccugaaugccauu

SEQ ID NO: 613607 - RNA, 22 nt, Human
acagggcaccugagguaggaag

SEQ ID NO: 613608 - RNA, 22 nt, Human
ucucauaauuguuucccagcua

SEQ ID NO: 613609 - RNA, 22 nt, Human
uucccuuucuuaaagaguuagg

SEQ ID NO: 613610 - RNA, 22 nt, Human
guguuuugugaggccuucuuuc

SEQ ID NO: 613611 - RNA, 22 nt, Human
uuucacaugguacugccuguuu

SEQ ID NO: 613612 - RNA, 22 nt, Human
uggccagaacucagacaugugg

SEQ ID NO: 613613 - RNA, 22 nt, Human
cuugacacugucacucaggcca

SEQ ID NO: 613614 - RNA, 22 nt, Human
ucagguccaagauggccaucca

SEQ ID NO: 613615 - RNA, 22 nt, Human
gccuggcaaggcccuguugacu

SEQ ID NO: 613616 - RNA, 22 nt, Human
agacacauuuucagcucugcca

SEQ ID NO: 613617 - RNA, 23 nt, Human
acacauguuuaugcuugggggca

SEQ ID NO: 613618 - RNA, 22 nt, Human
ccacuguuggcccgaagggguc

SEQ ID NO: 613619 - RNA, 22 nt, Human
ggcucugcugguaagaugccuc

SEQ ID NO: 613620 - RNA, 22 nt, Human
gguguggcaguggaccugugaa

SEQ ID NO: 613621 - RNA, 22 nt, Human
cugccguguuuuucauguuaaa

SEQ ID NO: 613622 - RNA, 22 nt, Human
ggaagccaguugcuuggugugg

SEQ ID NO: 613623 - RNA, 22 nt, Human
ucauccagccucaucaggagcu

SEQ ID NO: 613624 - RNA, 22 nt, Human
ugaaaacacuuuaguuuagguc

SEQ ID NO: 613625 - RNA, 22 nt, Human
auugaacauuguucuaggaggc

SEQ ID NO: 613626 - RNA, 22 nt, Human
ugaggaggugggcacacagagu

SEQ ID NO: 613627 - RNA, 19 nt, Human
gcagcugugggaagagcca

SEQ ID NO: 613628 - RNA, 22 nt, Human
aaccagcacugcuggggccugc

SEQ ID NO: 613629 - RNA, 22 nt, Human
uccaagaagcuuacaaucuaau

SEQ ID NO: 613630 - RNA, 22 nt, Human
aaacacaucauucaugucguca

SEQ ID NO: 613631 - RNA, 22 nt, Human
gucccugauaagagccaucgau

SEQ ID NO: 613632 - RNA, 22 nt, Human
ugcccauggcaggauuucugaa

SEQ ID NO: 613633 - RNA, 22 nt, Human
agacgcgguggugcaugccugu

SEQ ID NO: 613634 - RNA, 21 nt, Human
ccaugucagaugugggcugug

SEQ ID NO: 613635 - RNA, 22 nt, Human
aggccugggacgggagccguga

SEQ ID NO: 613636 - RNA, 22 nt, Human
auguuugaaauuguaaguauau

SEQ ID NO: 613637 - RNA, 23 nt, Human
aaaguacuuaaucugcaaaccac

SEQ ID NO: 613638 - RNA, 22 nt, Human
ugucugccugcgggccggcaca

SEQ ID NO: 613639 - RNA, 22 nt, Human
ugcauaaacuucucugguguga

SEQ ID NO: 613640 - RNA, 22 nt, Human
cugggcuuucaggcccuaaggc

SEQ ID NO: 613641 - RNA, 23 nt, Human
uggugggcccugcuugcucacug

SEQ ID NO: 613642 - RNA, 22 nt, Human herpesvirus 8 [Kaposi`s sarcoma-associated h
ucuaaaucccagcaugccagau

SEQ ID NO: 613643 - RNA, 22 nt, Human herpesvirus 8 [Kaposi`s sarcoma-associated h
uccagggucaccgccucacucu

SEQ ID NO: 613644 - RNA, 22 nt, Human herpesvirus 8 [Kaposi`s sarcoma-associated h
uccaggucagagagcagggaug

SEQ ID NO: 613645 - RNA, 22 nt, Human herpesvirus 8 [Kaposi`s sarcoma-associated h
gauggccuugaagucuauguuu

SEQ ID NO: 613646 - RNA, 22 nt, Human herpesvirus 8 [Kaposi`s sarcoma-associated h
gacgguggacaugaucagggug

SEQ ID NO: 613647 - RNA, 21 nt, Human herpesvirus 8 [Kaposi`s sarcoma-associated h
cggauuccauccguggugccc

SEQ ID NO: 613648 - RNA, 22 nt, Human herpesvirus 8 [Kaposi`s sarcoma-associated h
cgccucagcgaggaccugcgca

SEQ ID NO: 613649 - RNA, 22 nt, Human herpesvirus 8 [Kaposi`s sarcoma-associated h
accgcaccaaaaauggcgucug

SEQ ID NO: 613650 - RNA, 22 nt, Human herpesvirus 8 [Kaposi`s sarcoma-associated h
ccggggaugugaugaaguuggg

SEQ ID NO: 613651 - RNA, 22 nt, Human herpesvirus 8 [Kaposi`s sarcoma-associated h
agucccgacuaaugaggacaau

SEQ ID NO: 613652 - RNA, 22 nt, Human herpesvirus 8 [Kaposi`s sarcoma-associated h
uguuuuuuguacuacagcucuc

SEQ ID NO: 613653 - RNA, 22 nt, Human herpesvirus 8 [Kaposi`s sarcoma-associated h
ggggacugucauccuguugguc

SEQ ID NO: 613654 - RNA, 22 nt, Human herpesvirus 8 [Kaposi`s sarcoma-associated h
gcuaccgacggacguauuccug

SEQ ID NO: 613655 - RNA, 22 nt, Human herpesvirus 8 [Kaposi`s sarcoma-associated h
gcaguuagacaccguuaucucc

SEQ ID NO: 613656 - RNA, 22 nt, Human herpesvirus 8 [Kaposi`s sarcoma-associated h
gcaucuuugacgagcgugacua

SEQ ID NO: 613657 - RNA, 22 nt, Human herpesvirus 8 [Kaposi`s sarcoma-associated h
cuugugcacacggcccguaugg

SEQ ID NO: 613658 - RNA, 22 nt, Human herpesvirus 8 [Kaposi`s sarcoma-associated h
gacgauguggcucgggugaaug

SEQ ID NO: 613659 - RNA, 19 nt, Human herpesvirus 8 [Kaposi`s sarcoma-associated h
agggcggguuauuggcagu

SEQ ID NO: 613660 - RNA, 16 nt, Human herpesvirus 8 [Kaposi`s sarcoma-associated h
cgcccgagcugucguu

SEQ ID NO: 613661 - RNA, 22 nt, Human herpesvirus 8 [Kaposi`s sarcoma-associated h
cgaggaauaggcagcagaggca

SEQ ID NO: 613662 - RNA, 22 nt, Human herpesvirus 8 [Kaposi`s sarcoma-associated h
agccuggacgauguacuugaac

SEQ ID NO: 613663 - RNA, 22 nt, Human herpesvirus 8 [Kaposi`s sarcoma-associated h
gggucuccugcggaggccaaua

SEQ ID NO: 613664 - RNA, 22 nt, Human herpesvirus 8 [Kaposi`s sarcoma-associated h
ggugccccuaaagaccgucugu

SEQ ID NO: 613665 - RNA, 22 nt, Human herpesvirus 8 [Kaposi`s sarcoma-associated h
guccaccauuccuccggugacu

SEQ ID NO: 613666 - RNA, 22 nt, Human herpesvirus 8 [Kaposi`s sarcoma-associated h
uccguggcaguggcagcauguu

SEQ ID NO: 613667 - RNA, 22 nt, Human herpesvirus 8 [Kaposi`s sarcoma-associated h
ggacaucgccguggaccccgga

SEQ ID NO: 613668 - RNA, 22 nt, Human herpesvirus 8 [Kaposi`s sarcoma-associated h
uguccaccggacgaguggcgcg

SEQ ID NO: 613669 - RNA, 22 nt, Human herpesvirus 8 [Kaposi`s sarcoma-associated h
cagcaccagcuucugucggugu

SEQ ID NO: 613670 - RNA, 22 nt, Human herpesvirus 8 [Kaposi`s sarcoma-associated h
auuguaaaagauccgauccuca

SEQ ID NO: 613671 - RNA, 19 nt, Human herpesvirus 8 [Kaposi`s sarcoma-associated h
caaccuaaccuagugcugc

SEQ ID NO: 613672 - RNA, 22 nt, Human herpesvirus 8 [Kaposi`s sarcoma-associated h
caaucacgggaggcuugguggc

SEQ ID NO: 613673 - RNA, 22 nt, Human herpesvirus 8 [Kaposi`s sarcoma-associated h
cacaucagcuuguccugugggg

SEQ ID NO: 613674 - RNA, 22 nt, Human herpesvirus 8 [Kaposi`s sarcoma-associated h
cacccugauaucgacggccucg

SEQ ID NO: 613675 - RNA, 22 nt, Human herpesvirus 8 [Kaposi`s sarcoma-associated h
uggcgcuggaagaaggcugucg

SEQ ID NO: 613676 - RNA, 22 nt, Human herpesvirus 8 [Kaposi`s sarcoma-associated h
uggcugcgcaguccaagggcga

SEQ ID NO: 613677 - RNA, 22 nt, Human herpesvirus 8 [Kaposi`s sarcoma-associated h
cagggggugucuccgucugcuc

SEQ ID NO: 613678 - RNA, 22 nt, Human
ucuguacacuucagcaugcauc

SEQ ID NO: 613679 - RNA, 22 nt, Human
ucaggaaaauacugcuuaucca

SEQ ID NO: 613680 - RNA, 22 nt, Human
gaacuguauaggagcaguguuu

SEQ ID NO: 613681 - RNA, 22 nt, Human
cagggugcuuccguggagcugu

SEQ ID NO: 613682 - RNA, 22 nt, Human
aauacagaggggucacaauuca

SEQ ID NO: 613683 - RNA, 19 nt, Human
uuagggguaugaaguggua

SEQ ID NO: 613684 - RNA, 22 nt, Human
gaacauuuccagaaaggaacua

SEQ ID NO: 613685 - RNA, 22 nt, Human
gaaauucacuguauuucuuggg

SEQ ID NO: 613686 - RNA, 22 nt, Human
ccauggccucgcucuacguggg

SEQ ID NO: 613687 - RNA, 18 nt, Human
agcugcccugggcuggag

SEQ ID NO: 613688 - RNA, 22 nt, Human
ugcagcugacccacuccagucc

SEQ ID NO: 613689 - RNA, 23 nt, Human
cuacaagagcaagcauggacaag

SEQ ID NO: 613690 - RNA, 22 nt, Human
uauauguguggauucuuguaga

SEQ ID NO: 613691 - RNA, 22 nt, Human
cuacagaaaaucagccacaggc

SEQ ID NO: 613692 - RNA, 22 nt, Human
cagcugagaagugauagcugca

SEQ ID NO: 613693 - RNA, 22 nt, Human
ugugccugauggucacguggcc

SEQ ID NO: 613694 - RNA, 22 nt, Human
cagcucccaguggcagcuccuu

SEQ ID NO: 613695 - RNA, 20 nt, Human
ggcaguuaaggcacagucau

SEQ ID NO: 613696 - RNA, 22 nt, Human
aggcagagcuggguuuugaaau

SEQ ID NO: 613697 - RNA, 20 nt, Human
acguggccaccaguggcuua

SEQ ID NO: 613698 - RNA, 21 nt, Human
uccuguaagcuuggguggcuc

SEQ ID NO: 613699 - RNA, 22 nt, Human
ugaguccaccuuaguauauggg

SEQ ID NO: 613700 - RNA, 22 nt, Human
uuucuacauuuguaaccagauu

SEQ ID NO: 613701 - RNA, 22 nt, Human
aagcuggagaguuucacagaug

SEQ ID NO: 613702 - RNA, 22 nt, Human
aaagucaaugauuucuccugga

SEQ ID NO: 613703 - RNA, 19 nt, Human
cucuccagcuccaguagcu

SEQ ID NO: 613704 - RNA, 22 nt, Human
ucauuucucugagucugauaau

SEQ ID NO: 613705 - RNA, 22 nt, Human
acuguacaaauauugcaaaaua

SEQ ID NO: 613706 - RNA, 22 nt, Human
acuaaaaacuacugccaauagc

SEQ ID NO: 613707 - RNA, 22 nt, Human
ggaggcuccuaagcugacuuga

SEQ ID NO: 613708 - RNA, 22 nt, Human
ugugcucuugucugugacuaac

SEQ ID NO: 613709 - RNA, 23 nt, Human
uacagcugcagaaucaggcuaag

SEQ ID NO: 613710 - RNA, 20 nt, Human
acaugaaaggaaacaggaaa

SEQ ID NO: 613711 - RNA, 22 nt, Human
ucuaccacuuauuagcucugug

SEQ ID NO: 613712 - RNA, 22 nt, Human
ccaccaugggaagagagacuaa

SEQ ID NO: 613713 - RNA, 22 nt, Human
ucugcucugggccagcuauuaa

SEQ ID NO: 613714 - RNA, 22 nt, Human
gagauuuccauauuuuguaaca

SEQ ID NO: 613715 - RNA, 22 nt, Human
gagcugccagacaugggaauga

SEQ ID NO: 613716 - RNA, 22 nt, Human
auuucuacaguacacaugcauu

SEQ ID NO: 613717 - RNA, 17 nt, Human
gacaagacagaauucau

SEQ ID NO: 613718 - RNA, 22 nt, Human
agaggugacauaggagaggcuc

SEQ ID NO: 613719 - RNA, 22 nt, Human
ggccuggacaccugaggucuua

SEQ ID NO: 613720 - RNA, 22 nt, Human
uggagguggaguuggaaacuga

SEQ ID NO: 613721 - RNA, 22 nt, Human
guucaaguucauaucucuuaac

SEQ ID NO: 613722 - RNA, 20 nt, Human
gucuccacuggggguuaacc

SEQ ID NO: 613723 - RNA, 22 nt, Human
gcucugugaccuuaggcaaguu

SEQ ID NO: 613724 - RNA, 22 nt, Human
cugugccuucugccuggaacau

SEQ ID NO: 613725 - RNA, 22 nt, Human
uuucuaguucucugccaaaaaa

SEQ ID NO: 613726 - RNA, 22 nt, Human
ccugcccagagccccuuucacu

SEQ ID NO: 613727 - RNA, 22 nt, Human
ucagaaugaaauuucuuucaga

SEQ ID NO: 613728 - RNA, 22 nt, Human
caagggugguauugggagcaua

SEQ ID NO: 613729 - RNA, 22 nt, Human
gaacaaacacaucccagcagug

SEQ ID NO: 613730 - RNA, 21 nt, Human
gcccccuggacuccucaucca

SEQ ID NO: 613731 - RNA, 22 nt, Human
uaggaagcuaugggagauguga

SEQ ID NO: 613732 - RNA, 22 nt, Human
cagccacugaacuccuggcuau

SEQ ID NO: 613733 - RNA, 22 nt, Human
ucuguacauuuguguugugaau

SEQ ID NO: 613734 - RNA, 22 nt, Human
acugugcuaucuacugaauuau

SEQ ID NO: 613735 - RNA, 22 nt, Human
cuccagcuucccucagcugugg

SEQ ID NO: 613736 - RNA, 22 nt, Human
ccuguacaagcucuuggugaca

SEQ ID NO: 613737 - RNA, 22 nt, Human
cucaggagguuuccugucuagg

SEQ ID NO: 613738 - RNA, 22 nt, Human
ccuacacaucucaccucacagg

SEQ ID NO: 613739 - RNA, 22 nt, Human
ugccauggaaguggccagaccu

SEQ ID NO: 613740 - RNA, 22 nt, Human
auggcagaauuaggauuucaag

SEQ ID NO: 613741 - RNA, 22 nt, Human
cagucucugugccagauccugg

SEQ ID NO: 613742 - RNA, 21 nt, Human
ucagcuuugcaacugcacauc

SEQ ID NO: 613743 - RNA, 22 nt, Human
cacuguacuggguugaaggacg

SEQ ID NO: 613744 - RNA, 22 nt, Human
guggaggguuugcaaugugcag

SEQ ID NO: 613745 - RNA, 22 nt, Human
ugaaggaaaugacggcagaaga

SEQ ID NO: 613746 - RNA, 22 nt, Human
cugggguggaggagcuccccug

SEQ ID NO: 613747 - RNA, 22 nt, Human
uucugaaaggcagguuguuugc

SEQ ID NO: 613748 - RNA, 22 nt, Human
cuggagggugagccucaucucu

SEQ ID NO: 613749 - RNA, 22 nt, Human
gguuugguuuuggccaucuucc

SEQ ID NO: 613750 - RNA, 22 nt, Human
uggcuugucauguaucugaggc

SEQ ID NO: 613751 - RNA, 22 nt, Human
ccugucuguccuuugcauucuu

SEQ ID NO: 613752 - RNA, 23 nt, Human
gcuguacaggaaccaguuuggag

SEQ ID NO: 613753 - RNA, 21 nt, Human
acuuugggcacuuuccugccc

SEQ ID NO: 613754 - RNA, 22 nt, Human
ugagcugggaguggugaugagg

SEQ ID NO: 613755 - RNA, 22 nt, Human
gcagcugccaguccccuuccag

SEQ ID NO: 613756 - RNA, 22 nt, Human
cauguacauucuguagauggag

SEQ ID NO: 613757 - RNA, 22 nt, Human
acauuucuuagccuaguuccag

SEQ ID NO: 613758 - RNA, 22 nt, Human
cacuguacagcauuaacaaggc

SEQ ID NO: 613759 - RNA, 22 nt, Human
uguugauuugugggcugcaaaa

SEQ ID NO: 613760 - RNA, 22 nt, Human
cuggcuuuuagugugaagacuu

SEQ ID NO: 613761 - RNA, 22 nt, Human
ugagcuggucacuccuucugaa

SEQ ID NO: 613762 - RNA, 19 nt, Human
ccuguacauuauucucccc

SEQ ID NO: 613763 - RNA, 22 nt, Human
ucagcugcugugguauguacau

SEQ ID NO: 613764 - RNA, 22 nt, Human
cgcccagcugaaaucuccaggc

SEQ ID NO: 613765 - RNA, 22 nt, Human
cagguccuggcaucaggcaggu

SEQ ID NO: 613766 - RNA, 22 nt, Human
cauuucuagacaaguccuggag

SEQ ID NO: 613767 - RNA, 22 nt, Human
aacuguaaagguugagugguaa

SEQ ID NO: 613768 - RNA, 22 nt, Human
acuguacacauucgucaagacu

SEQ ID NO: 613769 - RNA, 22 nt, Human
uucugucugauggugccagaac

SEQ ID NO: 613770 - RNA, 22 nt, Human
gcugcccugcaucugugccuuc

SEQ ID NO: 613771 - RNA, 21 nt, Human
uagggcaggcauuggaagaga

SEQ ID NO: 613772 - RNA, 22 nt, Human
uuucuccaauguaucagcacac

SEQ ID NO: 613773 - RNA, 22 nt, Human
uaaacaagcugucugauauucu

SEQ ID NO: 613774 - RNA, 22 nt, Human
gacaagacaugugaugacauca

SEQ ID NO: 613775 - RNA, 22 nt, Human
ucaggagauguaaccuuagcug

SEQ ID NO: 613776 - RNA, 22 nt, Human
aguuucuguuaccauauuugac

SEQ ID NO: 613777 - RNA, 19 nt, Human
caaguucuggagauuaggg

SEQ ID NO: 613778 - RNA, 22 nt, Human
ucuccacucugagugccuuuca

SEQ ID NO: 613779 - RNA, 22 nt, Human
caggagacuauggcccaaggcc

SEQ ID NO: 613780 - RNA, 22 nt, Human
ccuguacaagagccaucuggau

SEQ ID NO: 613781 - RNA, 22 nt, Human
uggaaacuaagacuagagagac

SEQ ID NO: 613782 - RNA, 22 nt, Human
acuguacuuuucuuggcuagau

SEQ ID NO: 613783 - RNA, 22 nt, Human
auuguacagaugagguaaguga

SEQ ID NO: 613784 - RNA, 16 nt, Human
gggggugagagagagu

SEQ ID NO: 613785 - RNA, 22 nt, Human
ugugugccagccuacgaggagc

SEQ ID NO: 613786 - RNA, 22 nt, Human
aaaaacugguaacuauucccca

SEQ ID NO: 613787 - RNA, 22 nt, Human
aacaacuugcguucagagaugu

SEQ ID NO: 613788 - RNA, 22 nt, Human
uucuucauggguucuuuuagga

SEQ ID NO: 613789 - RNA, 22 nt, Human
cugcucuaacugcauuaguuuu

SEQ ID NO: 613790 - RNA, 22 nt, Human
aauguuacgaucaacaacacau

SEQ ID NO: 613791 - RNA, 20 nt, Human
agcugcccuuuucacauguu

SEQ ID NO: 613792 - RNA, 22 nt, Human
uuucuauuggcgucacuguugu

SEQ ID NO: 613793 - RNA, 22 nt, Human
cugagagaaacaugacucagga

SEQ ID NO: 613794 - RNA, 22 nt, Human
ggcagaggaaggaugaauucac

SEQ ID NO: 613795 - RNA, 22 nt, Human
cugcccacaguucucugccaug

SEQ ID NO: 613796 - RNA, 22 nt, Human
uucucuugugccaaguuguugc

SEQ ID NO: 613797 - RNA, 21 nt, Human
uuuaggaaguuuaaggcaggu

SEQ ID NO: 613798 - RNA, 22 nt, Human
ucagucuccuuuccucuagaca

SEQ ID NO: 613799 - RNA, 22 nt, Human
ucaugaaaauagaucagaaauu

SEQ ID NO: 613800 - RNA, 21 nt, Human
agaauucuuaaguauucuaau

SEQ ID NO: 613801 - RNA, 22 nt, Human
aucuggaaaacacaguguagac

SEQ ID NO: 613802 - RNA, 22 nt, Human
ccuguacacaauuccgaggaua

SEQ ID NO: 613803 - RNA, 22 nt, Human
ggggugagaucaaggaagcccu

SEQ ID NO: 613804 - RNA, 22 nt, Human
cuccagcugccaccagauguuu

SEQ ID NO: 613805 - RNA, 22 nt, Human
gugcccaggggccagcugccgg

SEQ ID NO: 613806 - RNA, 19 nt, Human
acugugcucgggaaccacu

SEQ ID NO: 613807 - RNA, 23 nt, Human
acagcugcaccuggccgccuggc

SEQ ID NO: 613808 - RNA, 20 nt, Human
cugcugcccugucagccucu

SEQ ID NO: 613809 - RNA, 22 nt, Human
gauuaagagaaguuucuuaucg

SEQ ID NO: 613810 - RNA, 22 nt, Human
acauuucucauucuccccuaac

SEQ ID NO: 613811 - RNA, 22 nt, Human
ugcucuaagaacucuaggaauu

SEQ ID NO: 613812 - RNA, 22 nt, Human
guuauauauaguauuucucuga

SEQ ID NO: 613813 - RNA, 22 nt, Human
gacaaaacacauuaguuuaaaa

SEQ ID NO: 613814 - RNA, 22 nt, Human
aacaugaaacccaaacagaaua

SEQ ID NO: 613815 - RNA, 22 nt, Human
gcagcugcaauaggcaucaagc

SEQ ID NO: 613816 - RNA, 19 nt, Human
ugaaacaaacuuaaaagga

SEQ ID NO: 613817 - RNA, 18 nt, Human
aacaguuuccagauucuc

SEQ ID NO: 613818 - RNA, 22 nt, Human
gaggaaaauauucagggagguu

SEQ ID NO: 613819 - RNA, 22 nt, Human
acagacaaguaguucagacaag

SEQ ID NO: 613820 - RNA, 22 nt, Human
acaaaaagcuccauuacugucc

SEQ ID NO: 613821 - RNA, 17 nt, Human
gacagcugguuccuggc

SEQ ID NO: 613822 - RNA, 22 nt, Human
caaaguucucggcucaaguccu

SEQ ID NO: 613823 - RNA, 22 nt, Human
acagaacugcaggaggaaaagc

SEQ ID NO: 613824 - RNA, 22 nt, Human
uuucuauugaucuaauaaacau

SEQ ID NO: 613825 - RNA, 22 nt, Human
ugaaacaaaccaguaauuuugu

SEQ ID NO: 613826 - RNA, 23 nt, Human
ucuguacacaucagcaucuccca

SEQ ID NO: 613827 - RNA, 22 nt, Human
acauuucugcauguaggguaau

SEQ ID NO: 613828 - RNA, 21 nt, Human
ccugucuuggacugaggcacc

SEQ ID NO: 613829 - RNA, 22 nt, Human
gaaaucuuuauggaaauaacaa

SEQ ID NO: 613830 - RNA, 22 nt, Human
ggaagaaagcacacaaacuuga

SEQ ID NO: 613831 - RNA, 22 nt, Human
aaugcaguuucauuuguagaau

SEQ ID NO: 613832 - RNA, 22 nt, Human
aauguacaaaccuucuuuguag

SEQ ID NO: 613833 - RNA, 22 nt, Human
agugcaauguguacagaaaaau

SEQ ID NO: 613834 - RNA, 22 nt, Human
gggcaggaugcaguuucagaga

SEQ ID NO: 613835 - RNA, 22 nt, Human
gacaagacaccucucuccaucc

SEQ ID NO: 613836 - RNA, 22 nt, Human
uaaggaaaguacauguuuugac

SEQ ID NO: 613837 - RNA, 22 nt, Human
cugcugcugcuaucuacccagg

SEQ ID NO: 613838 - RNA, 22 nt, Human
aagaaacugaaaguggcuucau

SEQ ID NO: 613839 - RNA, 22 nt, Human
ucagucuucccuccagugcaac

SEQ ID NO: 613840 - RNA, 22 nt, Human
gguucaguuuacauuaaaaucu

SEQ ID NO: 613841 - RNA, 22 nt, Human
cuacagcagagcuacacuaacu

SEQ ID NO: 613842 - RNA, 22 nt, Human
aaagacugggacugcagcaggc

SEQ ID NO: 613843 - RNA, 22 nt, Human
gaaacuuuuaaaccucaugagu

SEQ ID NO: 613844 - RNA, 22 nt, Human
cugcucuguuucuuagcugggu

SEQ ID NO: 613845 - RNA, 22 nt, Human
cucuggggaagcagccagcugg

SEQ ID NO: 613846 - RNA, 22 nt, Human
ugugccuacugauagagccaag

SEQ ID NO: 613847 - RNA, 22 nt, Human
ggagugacucacagcugggaca

SEQ ID NO: 613848 - RNA, 23 nt, Human
uuuuccagaaucgacucuguaga

SEQ ID NO: 613849 - RNA, 22 nt, Human
auacaagaucacuccagaaaau

SEQ ID NO: 613850 - RNA, 22 nt, Human
ucuuuugagggccagaggaaga

SEQ ID NO: 613851 - RNA, 22 nt, Human
ggggcagcucccgagggcagga

SEQ ID NO: 613852 - RNA, 22 nt, Human
acauuucuuuucaucucuauau

SEQ ID NO: 613853 - RNA, 21 nt, Human
ugcaccugugccccauccuuc

SEQ ID NO: 613854 - RNA, 22 nt, Human
acuguacacgugucauuuacag

SEQ ID NO: 613855 - RNA, 22 nt, Human
acuuuuuuauaaggaagaagau

SEQ ID NO: 613856 - RNA, 22 nt, Human
agcuuuuaguacguuaaaauug

SEQ ID NO: 613857 - RNA, 22 nt, Human
guccaagagucaagaagggggc

SEQ ID NO: 613858 - RNA, 22 nt, Human
agcagcugagccccagcuguga

SEQ ID NO: 613859 - RNA, 22 nt, Human
uguaaguaguaauggaaggaca

SEQ ID NO: 613860 - RNA, 19 nt, Human
ccuggcccugcugcgcggg

SEQ ID NO: 613861 - RNA, 22 nt, Human
uuccagcuaacucacaucccuu

SEQ ID NO: 613862 - RNA, 21 nt, Human
ucuguacaucauugagucccc

SEQ ID NO: 613863 - RNA, 22 nt, Human
uugggguguuggauggagcaag

SEQ ID NO: 613864 - RNA, 22 nt, Human
ugagcuggaaucuucuugacug

SEQ ID NO: 613865 - RNA, 22 nt, Human
gcagaggccaucaacuuugcca

SEQ ID NO: 613866 - RNA, 22 nt, Human
ucauuucuccgaccugcugucc

SEQ ID NO: 613867 - RNA, 22 nt, Human
gccagcccauuaaccccugucc

SEQ ID NO: 613868 - RNA, 22 nt, Human
caguccuggggaccaggcugag

SEQ ID NO: 613869 - RNA, 22 nt, Human
ucugucuuugagaucucagccu

SEQ ID NO: 613870 - RNA, 22 nt, Human
acuuugcugcagguuuaaagag

SEQ ID NO: 613871 - RNA, 22 nt, Human
cugucuuuucauacuuucccuc

SEQ ID NO: 613872 - RNA, 22 nt, Human
aggaccugagaguuggaaaucc

SEQ ID NO: 613873 - RNA, 23 nt, Human
aggagaagagauuuccacaugca

SEQ ID NO: 613874 - RNA, 22 nt, Human
aggcugugacagggucauggag

SEQ ID NO: 613875 - RNA, 22 nt, Human
gacaagacagcuugcagacaac

SEQ ID NO: 613876 - RNA, 22 nt, Human
uggccugguccuugucaaggca

SEQ ID NO: 613877 - RNA, 22 nt, Human
aacacuguacuggaagauggac

SEQ ID NO: 613878 - RNA, 22 nt, Human
uauugaaauccauuacguucuu

SEQ ID NO: 613879 - RNA, 22 nt, Human
agccccacacucucucugagaa

SEQ ID NO: 613880 - RNA, 22 nt, Human
gcccacucuggagccuguuccc

SEQ ID NO: 613881 - RNA, 22 nt, Human
uucaggagaaaguucaguacuu

SEQ ID NO: 613882 - RNA, 22 nt, Human
uagcugccaaaagggugggcua

SEQ ID NO: 613883 - RNA, 22 nt, Human
aggcgguggccaaggagcggga

SEQ ID NO: 613884 - RNA, 22 nt, Human
ugcacaucuuucagcaucauac

SEQ ID NO: 613885 - RNA, 22 nt, Human
ugggaagggagaguguccugga

SEQ ID NO: 613886 - RNA, 22 nt, Human
caauaguaaauuacggaggaga

SEQ ID NO: 613887 - RNA, 22 nt, Human
cucuccagaucugcugagccag

SEQ ID NO: 613888 - RNA, 22 nt, Human
ugugugggcgaagacagccuuu

SEQ ID NO: 613889 - RNA, 22 nt, Human
ugguggccgaagcccucucuca

SEQ ID NO: 613890 - RNA, 22 nt, Human
auguaacaaaugguauacaugu

SEQ ID NO: 613891 - RNA, 22 nt, Human
aacuguaauuuuuacauaguaa

SEQ ID NO: 613892 - RNA, 22 nt, Human
uucuacuuuagcaugcucauuc

SEQ ID NO: 613893 - RNA, 22 nt, Human
gcuuuaaaccucuacucugucc

SEQ ID NO: 613894 - RNA, 22 nt, Human
auggcagagggauugaacagcu

SEQ ID NO: 613895 - RNA, 22 nt, Human
auuaaacaauguaaaguucuug

SEQ ID NO: 613896 - RNA, 23 nt, Human
uggcuccaugaaaauuacgagga

SEQ ID NO: 613897 - RNA, 20 nt, Human
agggcagagggauuacaggc

SEQ ID NO: 613898 - RNA, 22 nt, Human
acauuucuaauuuaauguaaca

SEQ ID NO: 613899 - RNA, 22 nt, Human
ggcagaggugacagugucuuuu

SEQ ID NO: 613900 - RNA, 18 nt, Human
acaguaaagaaaggaauu

SEQ ID NO: 613901 - RNA, 21 nt, Human
auuagaagguauuuagggccu

SEQ ID NO: 613902 - RNA, 22 nt, Human
ucuauuugcugguugcuucugu

SEQ ID NO: 613903 - RNA, 22 nt, Human
gugcccaguugaggccaggacu

SEQ ID NO: 613904 - RNA, 22 nt, Human
acuauacauugaauguuaaggu

SEQ ID NO: 613905 - RNA, 20 nt, Human
auucuacaagaauaagcaug

SEQ ID NO: 613906 - RNA, 22 nt, Human
acucucugucuaaaugcaguuu

SEQ ID NO: 613907 - RNA, 22 nt, Human
gugcaccagucacaugggcaga

SEQ ID NO: 613908 - RNA, 22 nt, Human
acuguucauuuggauuucucug

SEQ ID NO: 613909 - RNA, 22 nt, Human
cagccacugacaggaauggucc

SEQ ID NO: 613910 - RNA, 22 nt, Human
ggcagcagggucuagauugaug

SEQ ID NO: 613911 - RNA, 22 nt, Human
cuggcccccacaccugucaggg

SEQ ID NO: 613912 - RNA, 22 nt, Human
gcugcuguguuggccacugcuu

SEQ ID NO: 613913 - RNA, 22 nt, Human
aacaugaaaaccuccacagcaa

SEQ ID NO: 613914 - RNA, 22 nt, Human
aauaagaauuuacuugucaaga

SEQ ID NO: 613915 - RNA, 22 nt, Human
acucucugggcaugccccacca

SEQ ID NO: 613916 - RNA, 22 nt, Human
aaauguucuacuuugauaauua

SEQ ID NO: 613917 - RNA, 22 nt, Human
caguuuuauacacugcagcucc

SEQ ID NO: 613918 - RNA, 22 nt, Human
uucuaauuguguuugcauaucu

SEQ ID NO: 613919 - RNA, 22 nt, Human
ggcagaggaggggugaauuugc

SEQ ID NO: 613920 - RNA, 22 nt, Human
ggcagugaacagaaaugcagaa

SEQ ID NO: 613921 - RNA, 22 nt, Human
agggggugcauuugugaaugaa

SEQ ID NO: 613922 - RNA, 22 nt, Human
auugauaucaguuugcugauug

SEQ ID NO: 613923 - RNA, 22 nt, Human
guuagguagaaguuuacuuuga

SEQ ID NO: 613924 - RNA, 22 nt, Human
cagccacucggccauaaaggcu

SEQ ID NO: 613925 - RNA, 22 nt, Human
gcgguagcucaagcuuguaauc

SEQ ID NO: 613926 - RNA, 22 nt, Human
ggagguggcagagggacauucu

SEQ ID NO: 613927 - RNA, 22 nt, Human
aagacuguacauuuuccagucu

SEQ ID NO: 613928 - RNA, 22 nt, Human
uccucacauggugagccacaca

SEQ ID NO: 613929 - RNA, 22 nt, Human
aggagguggcugaacuugaggg

SEQ ID NO: 613930 - RNA, 22 nt, Human
cucaggaggugguagaggcccu

SEQ ID NO: 613931 - RNA, 22 nt, Human
cagcugaguuacucugaggucu

SEQ ID NO: 613932 - RNA, 22 nt, Human
acugucugcuggccccugguua

SEQ ID NO: 613933 - RNA, 22 nt, Human
aauaacaggcucaucagaugcu

SEQ ID NO: 613934 - RNA, 22 nt, Human
uucuggaaguguuagaaucugg

SEQ ID NO: 613935 - RNA, 22 nt, Human
cuggagggaggaggcugcuauu

SEQ ID NO: 613936 - RNA, 22 nt, Human
uccaucuguuuacuauaaagau

SEQ ID NO: 613937 - RNA, 22 nt, Human
cugugccugccuuguucacuga

SEQ ID NO: 613938 - RNA, 22 nt, Human
ggccaggagcaagccaggcucu

SEQ ID NO: 613939 - RNA, 22 nt, Human
auaauacaugguugaucuuuuc

SEQ ID NO: 613940 - RNA, 22 nt, Human
ugacaggaugaugagcaggggg

SEQ ID NO: 613941 - RNA, 18 nt, Human
ccugucugggguccccac

SEQ ID NO: 613942 - RNA, 21 nt, Human
ggaagcuguguccaugcuccu

SEQ ID NO: 613943 - RNA, 22 nt, Human
aucuggggagguaucuguaguc

SEQ ID NO: 613944 - RNA, 22 nt, Human
caguucuaauuaauaggaguaa

SEQ ID NO: 613945 - RNA, 22 nt, Human
acauuucuuccacaugcugcug

SEQ ID NO: 613946 - RNA, 22 nt, Human
gauuaagauuacauauuuaagu

SEQ ID NO: 613947 - RNA, 22 nt, Human
uaauccaaaacugaaucugugg

SEQ ID NO: 613948 - RNA, 17 nt, Human
aucuggaagcuagcuga

SEQ ID NO: 613949 - RNA, 22 nt, Human
cugcccugcuugaugacagcga

SEQ ID NO: 613950 - RNA, 22 nt, Human
ugggaaugugagcauucauuca

SEQ ID NO: 613951 - RNA, 22 nt, Human
agguggaguuaagugugaacug

SEQ ID NO: 613952 - RNA, 22 nt, Human
aagcuuuaaggaauuuuaugga

SEQ ID NO: 613953 - RNA, 22 nt, Human
aggaggugcuguuuguccugga

SEQ ID NO: 613954 - RNA, 22 nt, Human
aggcaagaacagacaugggagu

SEQ ID NO: 613955 - RNA, 22 nt, Human
acauuucuucccuuuagcagaa

SEQ ID NO: 613956 - RNA, 22 nt, Human
cuggccccaucuggagucugag

SEQ ID NO: 613957 - RNA, 22 nt, Human
ucuguacaguaccagauaguaa

SEQ ID NO: 613958 - RNA, 22 nt, Human
cuguaaaacugcuuaaguaugc

SEQ ID NO: 613959 - RNA, 22 nt, Human
ccagcuccugggucuuagucag

SEQ ID NO: 613960 - RNA, 17 nt, Human
ccugucuuguuucugcc

SEQ ID NO: 613961 - RNA, 22 nt, Human
ccagucuggcaggagggggaac

SEQ ID NO: 613962 - RNA, 22 nt, Human
gcucugugguggggcagaguuu

SEQ ID NO: 613963 - RNA, 23 nt, Human
uugcuuagagaccuccucaucag

SEQ ID NO: 613964 - RNA, 22 nt, Human
acugcagacucuacaguuauaa

SEQ ID NO: 613965 - RNA, 22 nt, Human
agcugcccagauaggaggaggc

SEQ ID NO: 613966 - RNA, 22 nt, Human
uggccugggugcugcugacauc

SEQ ID NO: 613967 - RNA, 22 nt, Human
gaaagacauaguugcaagaugg

SEQ ID NO: 613968 - RNA, 22 nt, Human
aggcagagagcaguggccgucu

SEQ ID NO: 613969 - RNA, 22 nt, Human
ccugucuggccuuccacggggg

SEQ ID NO: 613970 - RNA, 22 nt, Human
aaaaacuguaauuacuuuugca

SEQ ID NO: 613971 - RNA, 19 nt, Human
ggugugccaaaugggaaug

SEQ ID NO: 613972 - RNA, 22 nt, Human
aucuggggucagacagcccugg

SEQ ID NO: 613973 - RNA, 22 nt, Human
ucugaaaugcaaauuugacuga

SEQ ID NO: 613974 - RNA, 22 nt, Human
ggagagcugguagcuggcucca

SEQ ID NO: 613975 - RNA, 22 nt, Human
ugcccagcacccagcaugaugc

SEQ ID NO: 613976 - RNA, 22 nt, Human
gaagggugugauuugccugaga

SEQ ID NO: 613977 - RNA, 22 nt, Human
uucuacacucacccagcuguaa

SEQ ID NO: 613978 - RNA, 23 nt, Human
uucuuauuuacuuuggaaucucc

SEQ ID NO: 613979 - RNA, 20 nt, Human
aggcagagcgcacuuuuaga

SEQ ID NO: 613980 - RNA, 22 nt, Human
gcucucuguuauuaagaucuuu

SEQ ID NO: 613981 - RNA, 22 nt, Human
uggccagcccuucagccaugcc

SEQ ID NO: 613982 - RNA, 22 nt, Human
agaacugguggugaucaguuau

SEQ ID NO: 613983 - RNA, 22 nt, Human
acagguccuuauaagagcacuc

SEQ ID NO: 613984 - RNA, 22 nt, Human
uccagcuggggacaugggcuuc

SEQ ID NO: 613985 - RNA, 22 nt, Human
aagacugugucuauggcuacuc

SEQ ID NO: 613986 - RNA, 22 nt, Human
aggcugugauuccaccacucuc

SEQ ID NO: 613987 - RNA, 22 nt, Human
cugccuggaugaauggcgccuu

SEQ ID NO: 613988 - RNA, 22 nt, Human
ucugcucugagagggccaucag

SEQ ID NO: 613989 - RNA, 22 nt, Human
cuggaggggccauccacagucu

SEQ ID NO: 613990 - RNA, 22 nt, Human
acagucugcauaugaccuguag

SEQ ID NO: 613991 - RNA, 18 nt, Human
gacagcuguccugagccc

SEQ ID NO: 613992 - RNA, 22 nt, Human
uccauauuaacuaaaacuagaa

SEQ ID NO: 613993 - RNA, 22 nt, Human
acagcuccuacugaagccaugu

SEQ ID NO: 613994 - RNA, 22 nt, Human
uuuccacugggcacggggccag

SEQ ID NO: 613995 - RNA, 22 nt, Human
ugucucaucucuuaaccccacu

SEQ ID NO: 613996 - RNA, 22 nt, Human
caguuuuauugguugaaaucug

SEQ ID NO: 613997 - RNA, 22 nt, Human
uggccuggaaccuggcagggac

SEQ ID NO: 613998 - RNA, 22 nt, Human
ucuuuuaucuguuguguaacaa

SEQ ID NO: 613999 - RNA, 22 nt, Human
aaacuguaagagaauaaacuac

SEQ ID NO: 614000 - RNA, 22 nt, Human
cugcagccucaaccuccugagc

SEQ ID NO: 614001 - RNA, 22 nt, Human
augggcagacagggagcucacg

SEQ ID NO: 614002 - RNA, 22 nt, Human
ucugccgugcgaggucccacca

SEQ ID NO: 614003 - RNA, 22 nt, Human
caaggcagaauucagacucagg

SEQ ID NO: 614004 - RNA, 22 nt, Human
cuggagggacaagguaugcauu

SEQ ID NO: 614005 - RNA, 22 nt, Human
gccagccccuuagggcucuccc

SEQ ID NO: 614006 - RNA, 22 nt, Human
agaggaaaaugaguuccagaau

SEQ ID NO: 614007 - RNA, 22 nt, Human
acaguccuguacaggccauauc

SEQ ID NO: 614008 - RNA, 22 nt, Human
cugggguggugcaggccucaug

SEQ ID NO: 614009 - RNA, 22 nt, Human
uucuaguuaaaguauguauuag

SEQ ID NO: 614010 - RNA, 22 nt, Human
gugcaaugugcuucgugccaug

SEQ ID NO: 614011 - RNA, 22 nt, Human
gcucucuggcuaguccaucggg

SEQ ID NO: 614012 - RNA, 22 nt, Human
gagaggauccacaaaccaggaa

SEQ ID NO: 614013 - RNA, 22 nt, Human
aacuguaagacaaaugacuucu

SEQ ID NO: 614014 - RNA, 22 nt, Human
ugagggguaaguaaaggaauug

SEQ ID NO: 614015 - RNA, 22 nt, Human
ccugcucugguuuagucagucu

SEQ ID NO: 614016 - RNA, 22 nt, Human
aacaguuuggguagguauguag

SEQ ID NO: 614017 - RNA, 22 nt, Human
cagcccuccuuucacucccagg

SEQ ID NO: 614018 - RNA, 22 nt, Human
cucugcaggcacccaggguggg

SEQ ID NO: 614019 - RNA, 22 nt, Human
cuguuauuuagaacauggaauc

SEQ ID NO: 614020 - RNA, 22 nt, Human
cugcccugagucaugccagaug

SEQ ID NO: 614021 - RNA, 22 nt, Human
aauucuauaggcaagcuauuuu

SEQ ID NO: 614022 - RNA, 20 nt, Human
aacacugugcgugguaggug

SEQ ID NO: 614023 - RNA, 22 nt, Human
ucccagcacgucugcuguuucu

SEQ ID NO: 614024 - RNA, 22 nt, Human
ugcucagugagucugugacagg

SEQ ID NO: 614025 - RNA, 22 nt, Human
aacaaguaaguuuauauauauu

SEQ ID NO: 614026 - RNA, 22 nt, Human
uaaaaaguagugagaauggcgc

SEQ ID NO: 614027 - RNA, 22 nt, Human
aacuguucuucauuuucaguau

SEQ ID NO: 614028 - RNA, 20 nt, Human
acagcagauaccacaacuau

SEQ ID NO: 614029 - RNA, 21 nt, Human
aucuggaagaacugguaagug

SEQ ID NO: 614030 - RNA, 22 nt, Human
ccuguacuagggucucauugcc

SEQ ID NO: 614031 - RNA, 22 nt, Human
acauuucucuuagaguuggacu

SEQ ID NO: 614032 - RNA, 22 nt, Human
gccagccugugcuuggccaggc

SEQ ID NO: 614033 - RNA, 22 nt, Human
cacaguccagacuccuggaguu

SEQ ID NO: 614034 - RNA, 22 nt, Human
gcaguuuuagagcuuuaagaug

SEQ ID NO: 614035 - RNA, 22 nt, Human
uaggagggcccugaaaauggca

SEQ ID NO: 614036 - RNA, 22 nt, Human
acuuuggguaagccaggugcua

SEQ ID NO: 614037 - RNA, 22 nt, Human
uggagguguauaagguagcuuc

SEQ ID NO: 614038 - RNA, 22 nt, Human
agccaguuuccagauauuaacu

SEQ ID NO: 614039 - RNA, 22 nt, Human
uucugucucccugauguagagc

SEQ ID NO: 614040 - RNA, 22 nt, Human
aacauuucagcaaauaagaaca

SEQ ID NO: 614041 - RNA, 22 nt, Human
caguuuuagcuagagcaaacca

SEQ ID NO: 614042 - RNA, 22 nt, Human
uuucuauucuggaucuguggca

SEQ ID NO: 614043 - RNA, 22 nt, Human
accaucuuaguggccagcucuc

SEQ ID NO: 614044 - RNA, 22 nt, Human
gagcugcccugagcuuugcaug

SEQ ID NO: 614045 - RNA, 21 nt, Human
caaguguggauguggaaggua

SEQ ID NO: 614046 - RNA, 22 nt, Human
gaggggugggcuggaaguuaua

SEQ ID NO: 614047 - RNA, 22 nt, Human
gcuggaggauggacuggaagaa

SEQ ID NO: 614048 - RNA, 22 nt, Human
caguuucucucauacauauuug

SEQ ID NO: 614049 - RNA, 22 nt, Human
gcccacuccagcuucucccaca

SEQ ID NO: 614050 - RNA, 22 nt, Human
ucuuuuauuaggcugaaauggg

SEQ ID NO: 614051 - RNA, 22 nt, Human
ccagguggaaggucugugcucu

SEQ ID NO: 614052 - RNA, 22 nt, Human
ugugccugacuaggugaaucaa

SEQ ID NO: 614053 - RNA, 22 nt, Human
acaucacagagcccagauaaag

SEQ ID NO: 614054 - RNA, 22 nt, Human
acauuucucagggaguuuugcu

SEQ ID NO: 614055 - RNA, 22 nt, Human
caguuuuaugucgaauguauac

SEQ ID NO: 614056 - RNA, 22 nt, Human
gcugucugagaacaugguggaa

SEQ ID NO: 614057 - RNA, 22 nt, Human
caauuucuuguuaauucucagg

SEQ ID NO: 614058 - RNA, 22 nt, Human
caaacuguucucugugggauuc

SEQ ID NO: 614059 - RNA, 22 nt, Human
gucuggggguccgggugccugc

SEQ ID NO: 614060 - RNA, 22 nt, Human
ggaggggugcucagcugucacg

SEQ ID NO: 614061 - RNA, 20 nt, Human
cagggacagcaguggguuuu

SEQ ID NO: 614062 - RNA, 22 nt, Human
aagacuguaugagacaauauaa

SEQ ID NO: 614063 - RNA, 22 nt, Human
acuguacaaccucugccccugu

SEQ ID NO: 614064 - RNA, 22 nt, Human
auaaacugaagggaacacugag

SEQ ID NO: 614065 - RNA, 22 nt, Human
acuguccauaauauuggugaac

SEQ ID NO: 614066 - RNA, 17 nt, Human
agcacuaaaaugcuucc

SEQ ID NO: 614067 - RNA, 21 nt, Human
accaucuuccaugcauuauau

SEQ ID NO: 614068 - RNA, 22 nt, Human
aguuucuaacauauagcauugg

SEQ ID NO: 614069 - RNA, 22 nt, Human
aacauuaauuacagucaaacau

SEQ ID NO: 614070 - RNA, 22 nt, Human
ugugccuggaucucugugacaa

SEQ ID NO: 614071 - RNA, 22 nt, Human
gcugucuggcauggcguggcug

SEQ ID NO: 614072 - RNA, 22 nt, Human
cuuuggaacauacugcugagcu

SEQ ID NO: 614073 - RNA, 22 nt, Human
aacaguuugagcuuugaauuuc

SEQ ID NO: 614074 - RNA, 21 nt, Human
uuuauuaacaacuguggacgu

SEQ ID NO: 614075 - RNA, 22 nt, Human
caggcagugucccaggaagcca

SEQ ID NO: 614076 - RNA, 22 nt, Human
caguuuuaaauuuugaaugucu

SEQ ID NO: 614077 - RNA, 22 nt, Human
cuggaaugagcagggcuuaugg

SEQ ID NO: 614078 - RNA, 21 nt, Human
cauuucuauugaugagaaaag

SEQ ID NO: 614079 - RNA, 22 nt, Human
uagcauuucacugaucuucacu

SEQ ID NO: 614080 - RNA, 22 nt, Human
aacaguuugcuuuaagaggcac

SEQ ID NO: 614081 - RNA, 22 nt, Human
gccgugggugucauggcccaua

SEQ ID NO: 614082 - RNA, 22 nt, Human
cugaaacauugcaauaacaaag

SEQ ID NO: 614083 - RNA, 22 nt, Human
gacaagacuauguagaaaguau

SEQ ID NO: 614084 - RNA, 22 nt, Human
cagggugcagagcuaggguagu

SEQ ID NO: 614085 - RNA, 22 nt, Human
uaaagccacuucauucuagucu

SEQ ID NO: 614086 - RNA, 22 nt, Human
ccugaggacacacgcugcagga

SEQ ID NO: 614087 - RNA, 22 nt, Human
aggcagagcuaggaagaauugu

SEQ ID NO: 614088 - RNA, 22 nt, Human
cagaaacuucuggugucaaaua

SEQ ID NO: 614089 - RNA, 22 nt, Human
uguuuuuccaugugcagaacaa

SEQ ID NO: 614090 - RNA, 22 nt, Human
ucuguacaccaggggccauucu

SEQ ID NO: 614091 - RNA, 22 nt, Human
aaaaguuaccucuguaauauaa

SEQ ID NO: 614092 - RNA, 22 nt, Human
uucaggaggugagcaagaaggg

SEQ ID NO: 614093 - RNA, 22 nt, Human
acaagauuuuaugacucuuuuu

SEQ ID NO: 614094 - RNA, 22 nt, Human
aaacuguaaauacuaguaagug

SEQ ID NO: 614095 - RNA, 22 nt, Human
aaacaacuucugcacuaugggu

SEQ ID NO: 614096 - RNA, 22 nt, Human
gaaaaagugaccuugguagcua

SEQ ID NO: 614097 - RNA, 19 nt, Human
acaaacugaguacacuugu

SEQ ID NO: 614098 - RNA, 22 nt, Human
acugaaaaugaauuagaaacag

SEQ ID NO: 614099 - RNA, 22 nt, Human
gaaaguuuucauauauaccaaa

SEQ ID NO: 614100 - RNA, 22 nt, Human
caguccuguguuaaacaagagc

SEQ ID NO: 614101 - RNA, 22 nt, Human
agcugccccaugagaggcaggu

SEQ ID NO: 614102 - RNA, 22 nt, Human
agucucuuggcauucugaaaca

SEQ ID NO: 614103 - RNA, 22 nt, Human
aggaagcugggaaacugacauu

SEQ ID NO: 614104 - RNA, 22 nt, Human
acagucugcuugucuccauggu

SEQ ID NO: 614105 - RNA, 20 nt, Human
aggcaguuagaaggagauga

SEQ ID NO: 614106 - RNA, 20 nt, Human
aagaaacuugaaaguacaag

SEQ ID NO: 614107 - RNA, 22 nt, Human
cagaaacuauguaagaaaguga

SEQ ID NO: 614108 - RNA, 22 nt, Human
cugugacagagcuugagugaga

SEQ ID NO: 614109 - RNA, 22 nt, Human
uaggaagcugagcagcauuccu

SEQ ID NO: 614110 - RNA, 22 nt, Human
acuguacaugcaucuugucuau

SEQ ID NO: 614111 - RNA, 22 nt, Human
gaaaguuugccucucucuugag

SEQ ID NO: 614112 - RNA, 22 nt, Human
gacauaaaccuugagauauuaa

SEQ ID NO: 614113 - RNA, 22 nt, Human
ucaggaaagaguguauccauca

SEQ ID NO: 614114 - RNA, 22 nt, Human
acugauacaucuguggaagugg

SEQ ID NO: 614115 - RNA, 22 nt, Human
acauuucuuugcuagacagcag

SEQ ID NO: 614116 - RNA, 22 nt, Human
acauuucucaucuaguagagua

SEQ ID NO: 614117 - RNA, 22 nt, Human
uacuguacugcaguucugcaaa

SEQ ID NO: 614118 - RNA, 22 nt, Human
ccugcucugccaaguccucuuu

SEQ ID NO: 614119 - RNA, 22 nt, Human
ugcccagcaauaaaccagaaga

SEQ ID NO: 614120 - RNA, 22 nt, Human
acugaguguaggacuuugaguu

SEQ ID NO: 614121 - RNA, 22 nt, Human
aagucaaucacaugcacacuga

SEQ ID NO: 614122 - RNA, 22 nt, Human
cuuggucauuuggggcugcuau

SEQ ID NO: 614123 - RNA, 22 nt, Human
ugaguccaagagccagugggaa

SEQ ID NO: 614124 - RNA, 21 nt, Human
uacaagaccggauucgggccc

SEQ ID NO: 614125 - RNA, 22 nt, Human
cagcccacgucagggccacuca

SEQ ID NO: 614126 - RNA, 22 nt, Human
cugcucuagguuccugcauaug

SEQ ID NO: 614127 - RNA, 22 nt, Human
gagaaaauagcauguguaguau

SEQ ID NO: 614128 - RNA, 22 nt, Human
aaaagcucuuucugcuguagau

SEQ ID NO: 614129 - RNA, 22 nt, Human
gcuguacaaauuccacaagaga

SEQ ID NO: 614130 - RNA, 22 nt, Human
aaacuagagcaugugaguggga

SEQ ID NO: 614131 - RNA, 22 nt, Human
ccacugagaccuuuuggaggag

SEQ ID NO: 614132 - RNA, 22 nt, Human
uacuguacauuccguuuguugc

SEQ ID NO: 614133 - RNA, 22 nt, Human
ucauuucuaucuaugcagcuuc

SEQ ID NO: 614134 - RNA, 22 nt, Human
aagagcugugggugguaguccu

SEQ ID NO: 614135 - RNA, 22 nt, Human
cugucgccugguccucucugga

SEQ ID NO: 614136 - RNA, 22 nt, Human
uucuaguuuugccuuaucaaca

SEQ ID NO: 614137 - RNA, 22 nt, Human
acauuucuccuugcaggaguca

SEQ ID NO: 614138 - RNA, 19 nt, Human
cucucagccugucuccuug

SEQ ID NO: 614139 - RNA, 22 nt, Human
uuuaggaaguuucagauaggaa

SEQ ID NO: 614140 - RNA, 22 nt, Human
uggcucugggcaccguguccac

SEQ ID NO: 614141 - RNA, 22 nt, Human
aggaggugacagccugcaucug

SEQ ID NO: 614142 - RNA, 22 nt, Human
uggcacauagcagguacucagu

SEQ ID NO: 614143 - RNA, 22 nt, Human
aaacaguauuaucaauauauuu

SEQ ID NO: 614144 - RNA, 22 nt, Human
acauaaaggugacuaacaucuu

SEQ ID NO: 614145 - RNA, 22 nt, Human
guaggggugcugagaucuggaa

SEQ ID NO: 614146 - RNA, 22 nt, Human
ccugaggaccagcacccaucug

SEQ ID NO: 614147 - RNA, 22 nt, Human
aaaaacugcaauuacuuuuguc

SEQ ID NO: 614148 - RNA, 22 nt, Human
aacaguuuaugagauaugcuau

SEQ ID NO: 614149 - RNA, 16 nt, Human
aggcagagauuuaccc

SEQ ID NO: 614150 - RNA, 22 nt, Human
aaggcaggaugggaaaagauuu

SEQ ID NO: 614151 - RNA, 22 nt, Human
aaaacuguaucuucuugggacu

SEQ ID NO: 614152 - RNA, 22 nt, Human
ucugucugagggagugacauuu

SEQ ID NO: 614153 - RNA, 22 nt, Human
gcugucuguucgagcguguguu

SEQ ID NO: 614154 - RNA, 22 nt, Human
ucugaaaugcaggcaauuugcu

SEQ ID NO: 614155 - RNA, 22 nt, Human
gaacauuuaugaugcaauaccu

SEQ ID NO: 614156 - RNA, 18 nt, Human
gugggguguugugaggau

SEQ ID NO: 614157 - RNA, 22 nt, Human
aggacagcauaugggaaccagu

SEQ ID NO: 614158 - RNA, 22 nt, Human
cagcugagcaucacuagucugg

SEQ ID NO: 614159 - RNA, 20 nt, Human
gaggaaaagcugccaggccu

SEQ ID NO: 614160 - RNA, 22 nt, Human
aggagguguagauuuccuguca

SEQ ID NO: 614161 - RNA, 16 nt, Human
uggagguguuucuagu

SEQ ID NO: 614162 - RNA, 22 nt, Human
auuuauuauugugguuacuucu

SEQ ID NO: 614163 - RNA, 19 nt, Human
cuggaaugauagagaccuc

SEQ ID NO: 614164 - RNA, 22 nt, Human
ggccuggagcagagacuaggga

SEQ ID NO: 614165 - RNA, 22 nt, Human
acauuucuaguuguucaucucc

SEQ ID NO: 614166 - RNA, 22 nt, Human
cagggauucagcugaaggaggc

SEQ ID NO: 614167 - RNA, 22 nt, Human
acacuacaaucucagaacuaua

SEQ ID NO: 614168 - RNA, 22 nt, Human
ucucucugaguugagcaggagu

SEQ ID NO: 614169 - RNA, 22 nt, Human
ccuggcuuuuguuuauaaauuc

SEQ ID NO: 614170 - RNA, 22 nt, Human
ccuguacaucugcucucauugc

SEQ ID NO: 614171 - RNA, 22 nt, Human
aggggugaaggcccgauaggag

SEQ ID NO: 614172 - RNA, 22 nt, Human
acauguguggacaugaaucuac

SEQ ID NO: 614173 - RNA, 22 nt, Human
cucaggaggccauucucaaggu

SEQ ID NO: 614174 - RNA, 22 nt, Human
ccuggagggacccuggcccugu

SEQ ID NO: 614175 - RNA, 17 nt, Human
ucugucuugacugucac

SEQ ID NO: 614176 - RNA, 22 nt, Human
ucugcucuguggcuucagcuaa

SEQ ID NO: 614177 - RNA, 22 nt, Human
ccugcccaggagucucucugug

SEQ ID NO: 614178 - RNA, 22 nt, Human
gcuuuaaauggcuugcccaagu

SEQ ID NO: 614179 - RNA, 22 nt, Human
uggagguggggcucaggaaucu

SEQ ID NO: 614180 - RNA, 22 nt, Human
uccagcuggggcaguggcuggg

SEQ ID NO: 614181 - RNA, 22 nt, Human
ucugucacuauuggccagaaca

SEQ ID NO: 614182 - RNA, 22 nt, Human
aguuucuauguaagcuacguga

SEQ ID NO: 614183 - RNA, 20 nt, Human
agcugccccugggcacugcc

SEQ ID NO: 614184 - RNA, 22 nt, Human
auaacagaugugaagugcuaau

SEQ ID NO: 614185 - RNA, 22 nt, Human
cauuuguacagaacagcuuuau

SEQ ID NO: 614186 - RNA, 22 nt, Human
ugugccuguugguguagacaua

SEQ ID NO: 614187 - RNA, 22 nt, Human
gcugcccucucuggccccacac

SEQ ID NO: 614188 - RNA, 22 nt, Human
caggacagcucaacaccuccuc

SEQ ID NO: 614189 - RNA, 22 nt, Human
ugggacaggaggccucuggaga

SEQ ID NO: 614190 - RNA, 22 nt, Human
acuguaaauuuugguugcaggu

SEQ ID NO: 614191 - RNA, 18 nt, Human
guggaggguucucagaau

SEQ ID NO: 614192 - RNA, 22 nt, Human
ucccuagucgcaucuguggaga

SEQ ID NO: 614193 - RNA, 22 nt, Human
cuggccugugggcugucuccgg

SEQ ID NO: 614194 - RNA, 22 nt, Human
agcugccccucauuuucaccac

SEQ ID NO: 614195 - RNA, 22 nt, Human
gcuuuuauugucuuuacgacga

SEQ ID NO: 614196 - RNA, 22 nt, Human
ucugucacccaggcuggagugc

SEQ ID NO: 614197 - RNA, 22 nt, Human
gaaauugucagcuucuuucagu

SEQ ID NO: 614198 - RNA, 22 nt, Human
gaggaaaauaacaacuaagggc

SEQ ID NO: 614199 - RNA, 22 nt, Human
uacaggaagcacucaagaaaug

SEQ ID NO: 614200 - RNA, 22 nt, Human
uuucuacaguacugauuucaua

SEQ ID NO: 614201 - RNA, 22 nt, Human
aauacagauauucagugguacu

SEQ ID NO: 614202 - RNA, 22 nt, Human
aggcagaggagaaugaucuucc

SEQ ID NO: 614203 - RNA, 22 nt, Human
aaaauccacaacgcucauuuca

SEQ ID NO: 614204 - RNA, 22 nt, Human
agggaaauuaaugugagcaaug

SEQ ID NO: 614205 - RNA, 22 nt, Human
ggaaacagagggcaccugagcc

SEQ ID NO: 614206 - RNA, 22 nt, Human
uagggguggagcuaagaguccc

SEQ ID NO: 614207 - RNA, 22 nt, Human
cccacguugaaccgcuuacaga

SEQ ID NO: 614208 - RNA, 23 nt, Human
aaauauucuuuuuuaguaagugc

SEQ ID NO: 614209 - RNA, 19 nt, Human
aggcugugagggaggacuc

SEQ ID NO: 614210 - RNA, 22 nt, Human
aagucaauuaguaaacuuggaa

SEQ ID NO: 614211 - RNA, 22 nt, Human
aaaguuugaaugauauauuagu

SEQ ID NO: 614212 - RNA, 22 nt, Human
aaauauguaagauuagcacuag

SEQ ID NO: 614213 - RNA, 22 nt, Human
uggacaacauagugagaccuca

SEQ ID NO: 614214 - RNA, 22 nt, Human
uggaggagaccauuccacucag

SEQ ID NO: 614215 - RNA, 22 nt, Human
gacaagacauugguaaagauau

SEQ ID NO: 614216 - RNA, 22 nt, Human
ucugaaauguucucuuguuuug

SEQ ID NO: 614217 - RNA, 21 nt, Human
uuuguucaggggcaaaguuaa

SEQ ID NO: 614218 - RNA, 22 nt, Human
aaauguuccauuauuguguaau

SEQ ID NO: 614219 - RNA, 22 nt, Human
agcauaaaggucaacguuuuag

SEQ ID NO: 614220 - RNA, 22 nt, Human
ucugucuuagcaucuuugcuca

SEQ ID NO: 614221 - RNA, 22 nt, Human
agccacugugcaggagcagugu

SEQ ID NO: 614222 - RNA, 22 nt, Human
acuguacauauggauucuaaga

SEQ ID NO: 614223 - RNA, 22 nt, Human
gcugaggauauagcaggaacaa

SEQ ID NO: 614224 - RNA, 22 nt, Human
gugugcacagagcuccaguguu

SEQ ID NO: 614225 - RNA, 22 nt, Human
caguccugagccaaucaugaug

SEQ ID NO: 614226 - RNA, 22 nt, Human
cuacaagauuuuuaaaacugua

SEQ ID NO: 614227 - RNA, 22 nt, Human
uauggaaaguguuuucuucugu

SEQ ID NO: 614228 - RNA, 22 nt, Human
uaacagcucuguguggcuguaa

SEQ ID NO: 614229 - RNA, 22 nt, Human
ugagggguugugagaaauguag

SEQ ID NO: 614230 - RNA, 22 nt, Human
uuuaggaagaucugaaggaaga

SEQ ID NO: 614231 - RNA, 22 nt, Human
agagggguuaagugcuaguccg

SEQ ID NO: 614232 - RNA, 22 nt, Human
uuuccuuugcccaauacauguc

SEQ ID NO: 614233 - RNA, 22 nt, Human
auccacccugugguggcuuucu

SEQ ID NO: 614234 - RNA, 22 nt, Human
cugcccuggccacugugcccag

SEQ ID NO: 614235 - RNA, 22 nt, Human
cagcugaguuuccaagucugcc

SEQ ID NO: 614236 - RNA, 22 nt, Human
uucuaguuuagggcucuucaac

SEQ ID NO: 614237 - RNA, 22 nt, Human
acacuguagcugagggcaugcg

SEQ ID NO: 614238 - RNA, 22 nt, Human
gcucucugaggugcuggcagag

SEQ ID NO: 614239 - RNA, 22 nt, Human
caguauuuucaggauuuggaag

SEQ ID NO: 614240 - RNA, 22 nt, Human
uuccacuuaguggaagggcaug

SEQ ID NO: 614241 - RNA, 23 nt, Human
aagcugccuucgcaguuggucug

SEQ ID NO: 614242 - RNA, 22 nt, Human
uuauuuauucauucugucuguc

SEQ ID NO: 614243 - RNA, 22 nt, Human
gacagcuggcaguggaaaggug

SEQ ID NO: 614244 - RNA, 22 nt, Human
aagaaacuguugcgugacagcg

SEQ ID NO: 614245 - RNA, 18 nt, Human
cugcccagagcauuucau

SEQ ID NO: 614246 - RNA, 22 nt, Human
aagccacucacaauaacugucc

SEQ ID NO: 614247 - RNA, 22 nt, Human
auguuacaauucaaaaugcugc

SEQ ID NO: 614248 - RNA, 22 nt, Human
caguuccuaugggcaaaacaca

SEQ ID NO: 614249 - RNA, 22 nt, Human
cagccacucucagacaguccca

SEQ ID NO: 614250 - RNA, 22 nt, Human
gcuggcccagugacccacagug

SEQ ID NO: 614251 - RNA, 22 nt, Human
ccuguacacggucuaugccucc

SEQ ID NO: 614252 - RNA, 20 nt, Human
gcccacucuaauccacuguc

SEQ ID NO: 614253 - RNA, 22 nt, Human
uugacaaaggaccuugcuauuu

SEQ ID NO: 614254 - RNA, 22 nt, Human
uucugucuucccacugaggagc

SEQ ID NO: 614255 - RNA, 22 nt, Human
cucaggaggaugacugccuugg

SEQ ID NO: 614256 - RNA, 22 nt, Human
uuuauauagagauuugugcaug

SEQ ID NO: 614257 - RNA, 22 nt, Human
uaggaaaaauacagaauuauau

SEQ ID NO: 614258 - RNA, 22 nt, Human
gcugucugcugugcacugagca

SEQ ID NO: 614259 - RNA, 22 nt, Human
guacaaaaguuauugcgguuuu

SEQ ID NO: 614260 - RNA, 22 nt, Human
uuggccacacucacuagagccc

SEQ ID NO: 614261 - RNA, 22 nt, Human
ugcagcugguaucccauggauu

SEQ ID NO: 614262 - RNA, 22 nt, Human
ucaagucuugaugagacaaacc

SEQ ID NO: 614263 - RNA, 22 nt, Human
uaaacaaggguuacugagcaug

SEQ ID NO: 614264 - RNA, 22 nt, Human
ucugaaaauguugacuuuguuu

SEQ ID NO: 614265 - RNA, 22 nt, Human
aaauaaagguccacuuuagggc

SEQ ID NO: 614266 - RNA, 22 nt, Human
uagcauuucccaaaugcauuug

SEQ ID NO: 614267 - RNA, 22 nt, Human
ccuggcccuggaauagggcagg

SEQ ID NO: 614268 - RNA, 22 nt, Human
gaagccuggagaccagauguug

SEQ ID NO: 614269 - RNA, 22 nt, Human
agcuggccuuagugagcaccug

SEQ ID NO: 614270 - RNA, 22 nt, Human
gggggugaggacaggagcacug

SEQ ID NO: 614271 - RNA, 22 nt, Human
acccucaacaaauucacucuau

SEQ ID NO: 614272 - RNA, 22 nt, Human
uggccugggccugccggugcaa

SEQ ID NO: 614273 - RNA, 22 nt, Human
gcuguacauucuguggguuugg

SEQ ID NO: 614274 - RNA, 22 nt, Human
cuggcucuuuccuagcuaggcu

SEQ ID NO: 614275 - RNA, 22 nt, Human
gcuguacaaggccucugccauc

SEQ ID NO: 614276 - RNA, 22 nt, Human
uggaggugggagggacuguccu

SEQ ID NO: 614277 - RNA, 22 nt, Human
auaaaaaugagggcgguagcua

SEQ ID NO: 614278 - RNA, 22 nt, Human
uuucuaguccucaugcaucauu

SEQ ID NO: 614279 - RNA, 20 nt, Human
ggaagcuguggguccccagg

SEQ ID NO: 614280 - RNA, 22 nt, Human
ggacaggaugcugaagaugaag

SEQ ID NO: 614281 - RNA, 22 nt, Human
uucgaguuggcuuuauuaaacu

SEQ ID NO: 614282 - RNA, 20 nt, Human
uggauucuggagcugcccuc

SEQ ID NO: 614283 - RNA, 22 nt, Human
gcuguacauuuguguacacuug

SEQ ID NO: 614284 - RNA, 22 nt, Human
cuuagaugaagucacagaaccc

SEQ ID NO: 614285 - RNA, 22 nt, Human
uucagucuccucauuuuacaaa

SEQ ID NO: 614286 - RNA, 22 nt, Human
cugagcugagccaaaucugucu

SEQ ID NO: 614287 - RNA, 22 nt, Human
gaggaaaaugcaacaggaaugc

SEQ ID NO: 614288 - RNA, 22 nt, Human
aacaguuuaucaaguuuuuaca

SEQ ID NO: 614289 - RNA, 22 nt, Human
acauuucugcuagaauagguga

SEQ ID NO: 614290 - RNA, 22 nt, Human
cacagcauaaugaaauauacuu

SEQ ID NO: 614291 - RNA, 22 nt, Human
gcucucugcaagucagcagccu

SEQ ID NO: 614292 - RNA, 20 nt, Human
ccugucuggagacaaagaga

SEQ ID NO: 614293 - RNA, 23 nt, Human
ucuguacaauugagaagagaaca

SEQ ID NO: 614294 - RNA, 22 nt, Human
aaacuugauuuagaacuaaggc

SEQ ID NO: 614295 - RNA, 22 nt, Human
aggggugacacauaucagugca

SEQ ID NO: 614296 - RNA, 22 nt, Human
gccuggccgcuccgagcuccgc

SEQ ID NO: 614297 - RNA, 18 nt, Human
cugucuuuuuucucucca

SEQ ID NO: 614298 - RNA, 22 nt, Human
cuacaggucaguaagaccuaga

SEQ ID NO: 614299 - RNA, 22 nt, Human
ucugugcugccauccuguggcc

SEQ ID NO: 614300 - RNA, 22 nt, Human
aaauuuucucucuaagacuuaa

SEQ ID NO: 614301 - RNA, 19 nt, Human
ggccuggcuaucccugcug

SEQ ID NO: 614302 - RNA, 22 nt, Human
aagaauuuuccagcaugucagu

SEQ ID NO: 614303 - RNA, 22 nt, Human
aacauuucuucugaaacugagu

SEQ ID NO: 614304 - RNA, 22 nt, Human
cucugcucaccagccaugugau

SEQ ID NO: 614305 - RNA, 22 nt, Human
cuggaauguagagacagcuuag

SEQ ID NO: 614306 - RNA, 22 nt, Human
uacaaaaaauugauacugacga

SEQ ID NO: 614307 - RNA, 22 nt, Human
uuuacacauaccucuuuaaagu

SEQ ID NO: 614308 - RNA, 22 nt, Human
cuccagucuaguagagccugcu

SEQ ID NO: 614309 - RNA, 23 nt, Human
cauguacacacagcuguacagug

SEQ ID NO: 614310 - RNA, 22 nt, Human
agacucugauucccucauguca

SEQ ID NO: 614311 - RNA, 22 nt, Human
cucccacuccuggcucaccaca

SEQ ID NO: 614312 - RNA, 20 nt, Human
ucauuucuugggguuccaag

SEQ ID NO: 614313 - RNA, 22 nt, Human
auucagaaauagaaaauuugau

SEQ ID NO: 614314 - RNA, 22 nt, Human
ggagggguggucaccuggcagg

SEQ ID NO: 614315 - RNA, 22 nt, Human
auacuguaucacuugugaguga

SEQ ID NO: 614316 - RNA, 22 nt, Human
acauuucugagcagggagcugu

SEQ ID NO: 614317 - RNA, 23 nt, Human
aucaagucaucagcaaaauacau

SEQ ID NO: 614318 - RNA, 22 nt, Human
gacagcugugcaggagaagggg

SEQ ID NO: 614319 - RNA, 22 nt, Human
uggucucugcugcagcuucuca

SEQ ID NO: 614320 - RNA, 18 nt, Human
ucugucuguguugucuuu

SEQ ID NO: 614321 - RNA, 22 nt, Human
uuucuacagguugauggguuug

SEQ ID NO: 614322 - RNA, 22 nt, Human
uauuucuaagcuguaagucuga

SEQ ID NO: 614323 - RNA, 22 nt, Human
cugcugccccugagcucagccu

SEQ ID NO: 614324 - RNA, 22 nt, Human
gccaccucucucuugacucgag

SEQ ID NO: 614325 - RNA, 22 nt, Human
caagucaaagacuagaacuagu

SEQ ID NO: 614326 - RNA, 22 nt, Human
uauccaauucaccauugauggg

SEQ ID NO: 614327 - RNA, 22 nt, Human
ugccgcagugcggggagggccc

SEQ ID NO: 614328 - RNA, 22 nt, Human
aggggugauuugggacaggaca

SEQ ID NO: 614329 - RNA, 22 nt, Human
cuuuggaaaaauaccuggcaua

SEQ ID NO: 614330 - RNA, 22 nt, Human
aggcagagcugauguucuguga

SEQ ID NO: 614331 - RNA, 23 nt, Human
ccacgucugcacuguagcuguug

SEQ ID NO: 614332 - RNA, 22 nt, Human
uggacucuaugaugcgccagca

SEQ ID NO: 614333 - RNA, 22 nt, Human
uugaaaaaauugguagaggaug

SEQ ID NO: 614334 - RNA, 22 nt, Human
cuguacauaaaggaauaggugu

SEQ ID NO: 614335 - RNA, 23 nt, Human
aaaaaaccauguaggcacucagu

SEQ ID NO: 614336 - RNA, 22 nt, Human
cuggccccgguuccuaaaaacc

SEQ ID NO: 614337 - RNA, 20 nt, Human
uuucauugucagaaucuuau

SEQ ID NO: 614338 - RNA, 22 nt, Human
agcugcccaauccugcagggcg

SEQ ID NO: 614339 - RNA, 22 nt, Human
ggaagcugccaguccaccagcu

SEQ ID NO: 614340 - RNA, 22 nt, Human
uacuguacucaacaugugaguu

SEQ ID NO: 614341 - RNA, 22 nt, Human
uccaauaacaucuaaaaacuua

SEQ ID NO: 614342 - RNA, 22 nt, Human
cucaggaguuggaggcuacagu

SEQ ID NO: 614343 - RNA, 22 nt, Human
acuuuggggaacuuuucuccuc

SEQ ID NO: 614344 - RNA, 22 nt, Human
acuuuuaugauaaucaauguuc

SEQ ID NO: 614345 - RNA, 21 nt, Human
uuuauuuauauaggacacaug

SEQ ID NO: 614346 - RNA, 22 nt, Human
cuggagggcugcagcgaggcug

SEQ ID NO: 614347 - RNA, 22 nt, Human
gcuggagggguaauaggauggg

SEQ ID NO: 614348 - RNA, 22 nt, Human
agcugcccagcuaggaagaagg

SEQ ID NO: 614349 - RNA, 22 nt, Human
uuuguucacugagcaaugauua

SEQ ID NO: 614350 - RNA, 22 nt, Human
cugugccuccaaguggucucug

SEQ ID NO: 614351 - RNA, 22 nt, Human
aaaaaccuuucccauacuaaga

SEQ ID NO: 614352 - RNA, 22 nt, Human
ucuaaucuacaaaaggaaauuc

SEQ ID NO: 614353 - RNA, 22 nt, Human
gugcccaguaaaugaaagcuuu

SEQ ID NO: 614354 - RNA, 22 nt, Human
auuuaacaagacagagaacugg

SEQ ID NO: 614355 - RNA, 22 nt, Human
aggagguggccugagcgugccc

SEQ ID NO: 614356 - RNA, 20 nt, Human
aggggugaucgggugacacu

SEQ ID NO: 614357 - RNA, 20 nt, Human
gaaauucucguauuaguuua

SEQ ID NO: 614358 - RNA, 17 nt, Human
ugcagcugcucccaggc

SEQ ID NO: 614359 - RNA, 22 nt, Human
gaagccacagggaaggagaaca

SEQ ID NO: 614360 - RNA, 22 nt, Human
cucuggagggaggcugagcugg

SEQ ID NO: 614361 - RNA, 22 nt, Human
ucagaaauagucuuuaaaauga

SEQ ID NO: 614362 - RNA, 22 nt, Human
gcaggauugggcugaaggagug

SEQ ID NO: 614363 - RNA, 22 nt, Human
aguguuaaugguguauauuagg

SEQ ID NO: 614364 - RNA, 22 nt, Human
uccauuuuagagaugaagaaac

SEQ ID NO: 614365 - RNA, 22 nt, Human
aagccacuuucagcugucucag

SEQ ID NO: 614366 - RNA, 19 nt, Human
agacucugccacucuucuc

SEQ ID NO: 614367 - RNA, 22 nt, Human
ugaaacaaauuuggaaaaucua

SEQ ID NO: 614368 - RNA, 22 nt, Human
uggccuggaaaaaugcagaugg

SEQ ID NO: 614369 - RNA, 21 nt, Human
aagaacuauugagguacacag

SEQ ID NO: 614370 - RNA, 22 nt, Human
cuguacaggucaaugauaagau

SEQ ID NO: 614371 - RNA, 22 nt, Human
aaacagacugaagaguugaagc

SEQ ID NO: 614372 - RNA, 22 nt, Human
gucccacugggcaacuagaaaa

SEQ ID NO: 614373 - RNA, 22 nt, Human
gugcucuccuggcugcccugac

SEQ ID NO: 614374 - RNA, 22 nt, Human
uaggggugaggccaggcaucag

SEQ ID NO: 614375 - RNA, 22 nt, Human
cacuguacccauuuaaauaaau

SEQ ID NO: 614376 - RNA, 22 nt, Human
gaaggcagguuuuucaaaacug

SEQ ID NO: 614377 - RNA, 22 nt, Human
uuuaccauccucuuuuagaauu

SEQ ID NO: 614378 - RNA, 22 nt, Human
uggaggugacggggccucguug

SEQ ID NO: 614379 - RNA, 22 nt, Human
aaguuuuauuggcuauagcacu

SEQ ID NO: 614380 - RNA, 22 nt, Human
auucuacaacccaauaauaauu

SEQ ID NO: 614381 - RNA, 22 nt, Human
uucaaguucauguguagucagu

SEQ ID NO: 614382 - RNA, 22 nt, Human
ugacaaaacugcaauuacuuuu

SEQ ID NO: 614383 - RNA, 22 nt, Human
uccacauucucuguuacagaua

SEQ ID NO: 614384 - RNA, 22 nt, Human
uucuacuuuggacauaaaggac

SEQ ID NO: 614385 - RNA, 22 nt, Human
ccaggcccugcuccucacacca

SEQ ID NO: 614386 - RNA, 22 nt, Human
cuauuuaucuauuucugaauga

SEQ ID NO: 614387 - RNA, 22 nt, Human
aagaagaaguguuauuuuuaga

SEQ ID NO: 614388 - RNA, 22 nt, Human
uucuaguucccacauaguugcc

SEQ ID NO: 614389 - RNA, 22 nt, Human
ggccuggaaggacagcgugaug

SEQ ID NO: 614390 - RNA, 22 nt, Human
aaauguuccuuuggauuaaacu

SEQ ID NO: 614391 - RNA, 22 nt, Human
gcuguacauucugcacaggccc

SEQ ID NO: 614392 - RNA, 22 nt, Human
aagcugccagcugagcugaggc

SEQ ID NO: 614393 - RNA, 22 nt, Human
gcccagcccugaggucacagcu

SEQ ID NO: 614394 - RNA, 22 nt, Human
ggcaggagcucuccaguuugcc

SEQ ID NO: 614395 - RNA, 22 nt, Human
caggacagguguucuagaucag

SEQ ID NO: 614396 - RNA, 22 nt, Human
gacuguacgucauugaaggcca

SEQ ID NO: 614397 - RNA, 22 nt, Human
cuauuacaauucugcaaggagu

SEQ ID NO: 614398 - RNA, 22 nt, Human
cucaggaguaguucagcagcug

SEQ ID NO: 614399 - RNA, 22 nt, Human
auuuuuuagaaccuggccugau

SEQ ID NO: 614400 - RNA, 22 nt, Human
uaagacaauucuucagucacaa

SEQ ID NO: 614401 - RNA, 22 nt, Human
caaaagaagcucuuggggcuag

SEQ ID NO: 614402 - RNA, 22 nt, Human
ucuuauuauuguuguaaaagca

SEQ ID NO: 614403 - RNA, 22 nt, Human
cucaggagacaguguccacaug

SEQ ID NO: 614404 - RNA, 22 nt, Human
aagaaaacguuuugaggaguuu

SEQ ID NO: 614405 - RNA, 22 nt, Human
cuuggucauuucuuguccuguu

SEQ ID NO: 614406 - RNA, 22 nt, Human
ggcagugaaucugagagccugg

SEQ ID NO: 614407 - RNA, 22 nt, Human
agcuguggaagacugucagggu

SEQ ID NO: 614408 - RNA, 22 nt, Human
gcaaaaaccacaauuacuuuua

SEQ ID NO: 614409 - RNA, 23 nt, Human
aagcugccagucugaagccuggg

SEQ ID NO: 614410 - RNA, 22 nt, Human
ugcagcugaugauacccccaug

SEQ ID NO: 614411 - RNA, 22 nt, Human
acuguacacacuucucugucuu

SEQ ID NO: 614412 - RNA, 22 nt, Human
cagcuggcugcaugaugccaaa

SEQ ID NO: 614413 - RNA, 22 nt, Human
aggaagccaugguggacgucua

SEQ ID NO: 614414 - RNA, 22 nt, Human
gcugccaccguggagaugagug

SEQ ID NO: 614415 - RNA, 20 nt, Human
acuuuggggucuuucucaga

SEQ ID NO: 614416 - RNA, 22 nt, Human
gugugccucccauuagggugua

SEQ ID NO: 614417 - RNA, 22 nt, Human
acagaacugagaauucucuauc

SEQ ID NO: 614418 - RNA, 22 nt, Human
gaagaacugugacagaagcagu

SEQ ID NO: 614419 - RNA, 22 nt, Human
caaaaacugcaauuacuuuuac

SEQ ID NO: 614420 - RNA, 22 nt, Human
acuguauaaggcauagguaagc

SEQ ID NO: 614421 - RNA, 22 nt, Human
cacaagacuuauuuguguagaa

SEQ ID NO: 614422 - RNA, 22 nt, Human
caguuuuagggcaaugugaaga

SEQ ID NO: 614423 - RNA, 22 nt, Human
uaaggaaggggaaagacauguc

SEQ ID NO: 614424 - RNA, 22 nt, Human
acauuucucccugcaugccugc

SEQ ID NO: 614425 - RNA, 22 nt, Human
uuaguaauguguuaauaugaau

SEQ ID NO: 614426 - RNA, 22 nt, Human
ucuguaaucaagauauuugaga

SEQ ID NO: 614427 - RNA, 22 nt, Human
gcaaaaaccacaauuacuuuug

SEQ ID NO: 614428 - RNA, 22 nt, Human
cccugcagccuugcaugccuuc

SEQ ID NO: 614429 - RNA, 22 nt, Human
uuuguucaugccuauauucuca

SEQ ID NO: 614430 - RNA, 22 nt, Human
acagauccugguuacagccauu

SEQ ID NO: 614431 - RNA, 22 nt, Human
auagcagaaaccaagcuucuuc

SEQ ID NO: 614432 - RNA, 22 nt, Human
caugaaaaauuuacuguuaaca

SEQ ID NO: 614433 - RNA, 22 nt, Human
cucucugggguuccagacgugg

SEQ ID NO: 614434 - RNA, 22 nt, Human
ugagacaguucugcagcugggu

SEQ ID NO: 614435 - RNA, 22 nt, Human
caguuuuaggacauguggaugu

SEQ ID NO: 614436 - RNA, 22 nt, Human
ccaguucugacacaagcacagu

SEQ ID NO: 614437 - RNA, 22 nt, Human
uaaucacagaaacagacuguuu

SEQ ID NO: 614438 - RNA, 22 nt, Human
aacuguaaugaauuguucauga

SEQ ID NO: 614439 - RNA, 22 nt, Human
cugagcugguucucuugugaaa

SEQ ID NO: 614440 - RNA, 22 nt, Human
uuuuucugccauucaaagagga

SEQ ID NO: 614441 - RNA, 22 nt, Human
uacaagacgagggaaguucuuu

SEQ ID NO: 614442 - RNA, 19 nt, Human
gcuuuaguuuacucaucua

SEQ ID NO: 614443 - RNA, 22 nt, Human
cauuucuaagaaggcugcacau

SEQ ID NO: 614444 - RNA, 22 nt, Human
ugcccagcugucaaaguagaua

SEQ ID NO: 614445 - RNA, 22 nt, Human
cuggccccagaguuucacuugg

SEQ ID NO: 614446 - RNA, 22 nt, Human
cugugccucccuuuacuuugag

SEQ ID NO: 614447 - RNA, 22 nt, Human
guggagggaaugaaucuucucu

SEQ ID NO: 614448 - RNA, 23 nt, Human
ucugcucugaaguucggcugagc

SEQ ID NO: 614449 - RNA, 22 nt, Human
aguuucuauuuucaugucuguu

SEQ ID NO: 614450 - RNA, 22 nt, Human
aaacuguaaagcaggugaguag

SEQ ID NO: 614451 - RNA, 22 nt, Human
uuuuaucagcagggauaacaag

SEQ ID NO: 614452 - RNA, 22 nt, Human
uccucugcucagcauuccucac

SEQ ID NO: 614453 - RNA, 22 nt, Human
acauuucugucuuagggacugu

SEQ ID NO: 614454 - RNA, 22 nt, Human
aaggcaguucacucacgcagcc

SEQ ID NO: 614455 - RNA, 22 nt, Human
gcugugagcugccugugucaca

SEQ ID NO: 614456 - RNA, 22 nt, Human
aaggcaguggcuggaaaaccug

SEQ ID NO: 614457 - RNA, 17 nt, Human
gguucaguucugcauuc

SEQ ID NO: 614458 - RNA, 22 nt, Human
ucuguacaugaguugagaauca

SEQ ID NO: 614459 - RNA, 22 nt, Human
uagggguguuucgagagagguu

SEQ ID NO: 614460 - RNA, 22 nt, Human
uucuaguuuucaguccaccagg

SEQ ID NO: 614461 - RNA, 22 nt, Human
ucaggagacuuaugucacagug

SEQ ID NO: 614462 - RNA, 22 nt, Human
cuauuaaacacuacugugcacu

SEQ ID NO: 614463 - RNA, 22 nt, Human
ugaucaguguugguucuaucua

SEQ ID NO: 614464 - RNA, 22 nt, Human
gcagaauguaggccuucagugu

SEQ ID NO: 614465 - RNA, 19 nt, Human
aggcagaggcuuggcuagc

SEQ ID NO: 614466 - RNA, 22 nt, Human
auucgcgggccuggaggguggg

SEQ ID NO: 614467 - RNA, 22 nt, Human
gaagggugugugugagggacac

SEQ ID NO: 614468 - RNA, 22 nt, Human
augaaacugggauaacuauagc

SEQ ID NO: 614469 - RNA, 22 nt, Human
gcagcugcuggaaguuccugcc

SEQ ID NO: 614470 - RNA, 22 nt, Human
gaagucugcugcucaggaguuu

SEQ ID NO: 614471 - RNA, 22 nt, Human
cagccacuguggaauagccccc

SEQ ID NO: 614472 - RNA, 20 nt, Human
agccccacccuuguccuggc

SEQ ID NO: 614473 - RNA, 22 nt, Human
gcucucuggaggccauggacag

SEQ ID NO: 614474 - RNA, 22 nt, Human
uguauuccaaaaugcugaggau

SEQ ID NO: 614475 - RNA, 22 nt, Human
cugucuuugguccugucuguua

SEQ ID NO: 614476 - RNA, 22 nt, Human
ucuauuucgcauauaaguuuug

SEQ ID NO: 614477 - RNA, 22 nt, Human
agcugcccuguggggaggguug

SEQ ID NO: 614478 - RNA, 22 nt, Human
guggaaguagauuugagaaggu

SEQ ID NO: 614479 - RNA, 22 nt, Human
ugcagcugaggccagcuaugcc

SEQ ID NO: 614480 - RNA, 22 nt, Human
cuguaaaacacuguaguaucug

SEQ ID NO: 614481 - RNA, 22 nt, Human
augcagaaggagccaugcuugc

SEQ ID NO: 614482 - RNA, 22 nt, Human
gcagcugcagacccucagugcu

SEQ ID NO: 614483 - RNA, 22 nt, Human
auacaaaguauuaauccuggau

SEQ ID NO: 614484 - RNA, 22 nt, Human
ggcagagguagcuggaaccagg

SEQ ID NO: 614485 - RNA, 22 nt, Human
gcuguacaucacaauuugcugu

SEQ ID NO: 614486 - RNA, 22 nt, Human
cagccacuugugaugcugggga

SEQ ID NO: 614487 - RNA, 22 nt, Human
ccagcuuuucuuaucauuauaa

SEQ ID NO: 614488 - RNA, 20 nt, Human
gugcaauggcucagucucag

SEQ ID NO: 614489 - RNA, 22 nt, Human
agccaggauggucucgaucggc

SEQ ID NO: 614490 - RNA, 22 nt, Human
acuaagaccuagauacuagggg

SEQ ID NO: 614491 - RNA, 22 nt, Human
aaguuuuaacaaguacuuacua

SEQ ID NO: 614492 - RNA, 22 nt, Human
cugguuccaggauggaucuuuc

SEQ ID NO: 614493 - RNA, 22 nt, Human
acaggccucaagacacccaggu

SEQ ID NO: 614494 - RNA, 22 nt, Human
aagcuggauguaggaucccccu

SEQ ID NO: 614495 - RNA, 22 nt, Human
uaaaacugaauacauacugagg

SEQ ID NO: 614496 - RNA, 21 nt, Human
uaaaacuguaacuuuguccug

SEQ ID NO: 614497 - RNA, 22 nt, Human
agacuguagggauagaggucuu

SEQ ID NO: 614498 - RNA, 22 nt, Human
ugcagccaucgcagagucugua

SEQ ID NO: 614499 - RNA, 22 nt, Human
gcucuaacuauuaagaggucau

SEQ ID NO: 614500 - RNA, 22 nt, Human
aaaacauguccauacagaaacu

SEQ ID NO: 614501 - RNA, 22 nt, Human
cauuucuacagcuucuucagaa

SEQ ID NO: 614502 - RNA, 22 nt, Human
cacaguccuacagagaucagag

SEQ ID NO: 614503 - RNA, 22 nt, Human
ugagggcagagcacuggggagc

SEQ ID NO: 614504 - RNA, 18 nt, Human
agugucuggauauuuggg

SEQ ID NO: 614505 - RNA, 20 nt, Human
uuuuauauguaggguauaug

SEQ ID NO: 614506 - RNA, 22 nt, Human
aacuguaaggcuuagaacagca

SEQ ID NO: 614507 - RNA, 22 nt, Human
gcucucugggugugucuagaua

SEQ ID NO: 614508 - RNA, 21 nt, Human
aaacugaagagacaggaacuu

SEQ ID NO: 614509 - RNA, 22 nt, Human
cucaggagagucuuauaucucc

SEQ ID NO: 614510 - RNA, 22 nt, Human
accagacacugugaagacaggc

SEQ ID NO: 614511 - RNA, 22 nt, Human
ccugaggagauuguggcugggg

SEQ ID NO: 614512 - RNA, 20 nt, Human
cugcucugcuuugcaggugg

SEQ ID NO: 614513 - RNA, 20 nt, Human
ucagguagaucuuugagguc

SEQ ID NO: 614514 - RNA, 22 nt, Human
uaggaaaagcacaggauguucu

SEQ ID NO: 614515 - RNA, 22 nt, Human
guggagggugagcucauguuug

SEQ ID NO: 614516 - RNA, 22 nt, Human
ccugcuuaacauugccaugaca

SEQ ID NO: 614517 - RNA, 22 nt, Human
ugguuacacagcauguggacuu

SEQ ID NO: 614518 - RNA, 22 nt, Human
caaagacugcauaacacaugaa

SEQ ID NO: 614519 - RNA, 22 nt, Human
uagcauuuggacauugucaccu

SEQ ID NO: 614520 - RNA, 22 nt, Human
acuguacacagugguguacugu

SEQ ID NO: 614521 - RNA, 22 nt, Human
auuaagacugcccauguuuuua

SEQ ID NO: 614522 - RNA, 22 nt, Human
cagggguguuuuuggccaggag

SEQ ID NO: 614523 - RNA, 22 nt, Human
ggaagaaagguggacaacaggu

SEQ ID NO: 614524 - RNA, 22 nt, Human
cugucccagauguucucagcac

SEQ ID NO: 614525 - RNA, 22 nt, Human
auucuucugccuacuuucaucc

SEQ ID NO: 614526 - RNA, 22 nt, Human
cuguacagaguucugaguguac

SEQ ID NO: 614527 - RNA, 22 nt, Human
ccuguacauggccaucuuuacc

SEQ ID NO: 614528 - RNA, 22 nt, Human
agcaaacagugugcuaagaaau

SEQ ID NO: 614529 - RNA, 22 nt, Human
uacuguacugucuuuuuugcug

SEQ ID NO: 614530 - RNA, 22 nt, Human
gguuccacgguguuuggaggca

SEQ ID NO: 614531 - RNA, 22 nt, Human
aagcugcccaagacugaagcau

SEQ ID NO: 614532 - RNA, 22 nt, Human
gccagccccuccauccuguuca

SEQ ID NO: 614533 - RNA, 17 nt, Human
gcaguuaaauuaagaug

SEQ ID NO: 614534 - RNA, 21 nt, Human
acagcagagaucaagacuaag

SEQ ID NO: 614535 - RNA, 22 nt, Human
aucuggaagccagauacucagu

SEQ ID NO: 614536 - RNA, 22 nt, Human
ucugcucuguacugcacuggcc

SEQ ID NO: 614537 - RNA, 22 nt, Human
gggacucugagagccugagggu

SEQ ID NO: 614538 - RNA, 22 nt, Human
uuucauugucaauaaacuguau

SEQ ID NO: 614539 - RNA, 22 nt, Human
uaaggaaacaacuuguauuuuu

SEQ ID NO: 614540 - RNA, 22 nt, Human
gcaggauugggcagagggugaa

SEQ ID NO: 614541 - RNA, 22 nt, Human
aacuguacgauaauaaauuugu

SEQ ID NO: 614542 - RNA, 22 nt, Human
uggccuggugucugcgaggccu

SEQ ID NO: 614543 - RNA, 22 nt, Human
caguuuuaaauuguuagauaau

SEQ ID NO: 614544 - RNA, 22 nt, Human
uguaacaaaauaccuuggauug

SEQ ID NO: 614545 - RNA, 22 nt, Human
ccagucugaggccuggugaggg

SEQ ID NO: 614546 - RNA, 22 nt, Human
aagcugccuuccaugugaggaa

SEQ ID NO: 614547 - RNA, 22 nt, Human
aagcugccacacggugaguacu

SEQ ID NO: 614548 - RNA, 22 nt, Human
acaggccugugugcacacgagg

SEQ ID NO: 614549 - RNA, 23 nt, Human
cagaggcaucggauucaacauca

SEQ ID NO: 614550 - RNA, 22 nt, Human
ccaguccuggccaguaacauga

SEQ ID NO: 614551 - RNA, 22 nt, Human
cucaggagcuuccucagcccau

SEQ ID NO: 614552 - RNA, 22 nt, Human
gugcugccggcauagcagugaa

SEQ ID NO: 614553 - RNA, 22 nt, Human
gugcucuccagccccacgugga

SEQ ID NO: 614554 - RNA, 22 nt, Human
acuuucuuaggcuguauaaaug

SEQ ID NO: 614555 - RNA, 22 nt, Human
aaaguucucuaugguguaaaaa

SEQ ID NO: 614556 - RNA, 22 nt, Human
agacucugugcuccuugcuuuc

SEQ ID NO: 614557 - RNA, 22 nt, Human
cugcccugggaguaccuguccu

SEQ ID NO: 614558 - RNA, 22 nt, Human
cugggcaggagggcucuaugga

SEQ ID NO: 614559 - RNA, 22 nt, Human
caggauuaaggugaggggagua

SEQ ID NO: 614560 - RNA, 22 nt, Human
aagcugccugccacgcuagaua

SEQ ID NO: 614561 - RNA, 22 nt, Human
uuaggaggucuauggacauccu

SEQ ID NO: 614562 - RNA, 22 nt, Human
aagccacugagauuucacugca

SEQ ID NO: 614563 - RNA, 22 nt, Human
aggcggugcuguggacagugac

SEQ ID NO: 614564 - RNA, 22 nt, Human
cugagaaaggaccucaaacagg

SEQ ID NO: 614565 - RNA, 22 nt, Human
aaggcaguuugggccaccaucu

SEQ ID NO: 614566 - RNA, 18 nt, Human
gcagcugacacuggaguu

SEQ ID NO: 614567 - RNA, 22 nt, Human
gcucucugcagccuccuuggag

SEQ ID NO: 614568 - RNA, 22 nt, Human
cagugcuguuguaagcucauug

SEQ ID NO: 614569 - RNA, 22 nt, Human
cauuucuagggaucauaaagua

SEQ ID NO: 614570 - RNA, 22 nt, Human
acauuguauaaugauuaucaca

SEQ ID NO: 614571 - RNA, 21 nt, Human
uguuuauggaaaagagacaaa

SEQ ID NO: 614572 - RNA, 22 nt, Human
uuuuauucucaagacaauggga

SEQ ID NO: 614573 - RNA, 22 nt, Human
uuauuauagauuaugcaagauu

SEQ ID NO: 614574 - RNA, 22 nt, Human
guuuaauuuuagguugucaagc

SEQ ID NO: 614575 - RNA, 22 nt, Human
aggaagaaccuaagaaagucuc

SEQ ID NO: 614576 - RNA, 22 nt, Human
aaacucuuuccacgauuacuuu

SEQ ID NO: 614577 - RNA, 22 nt, Human
uuucuacaugucaauccaaacc

SEQ ID NO: 614578 - RNA, 22 nt, Human
ucaagucuggagaucuggaacu

SEQ ID NO: 614579 - RNA, 22 nt, Human
ggaggggucucuagcgaggaga

SEQ ID NO: 614580 - RNA, 22 nt, Human
guuucuuuugugaucaccaacc

SEQ ID NO: 614581 - RNA, 22 nt, Human
cugugccuccagucucgcuucu

SEQ ID NO: 614582 - RNA, 22 nt, Human
cagagcuguauuuaucuuucca

SEQ ID NO: 614583 - RNA, 22 nt, Human
aaauucuaugucaauguuuauu

SEQ ID NO: 614584 - RNA, 22 nt, Human
acagacuguuugguucaugucu

SEQ ID NO: 614585 - RNA, 22 nt, Human
agcugcccccagggcugugcuu

SEQ ID NO: 614586 - RNA, 22 nt, Human
uaggggugggauccaggaauua

SEQ ID NO: 614587 - RNA, 22 nt, Human
ucuuacagaaaauagauaacau

SEQ ID NO: 614588 - RNA, 22 nt, Human
auaccuguguauccacaagcgu

SEQ ID NO: 614589 - RNA, 22 nt, Human
aguuucuagccucacuguuuag

SEQ ID NO: 614590 - RNA, 22 nt, Human
aucuuaaucgaguccaugaaaa

SEQ ID NO: 614591 - RNA, 23 nt, Human
ccccucugguggcucagcuccug

SEQ ID NO: 614592 - RNA, 22 nt, Human
ccuacucugagcgccuccgcau

SEQ ID NO: 614593 - RNA, 22 nt, Human
gcaaaaacugcaauuacuuuug

SEQ ID NO: 614594 - RNA, 22 nt, Human
ccuguacauuagcugugaauug

SEQ ID NO: 614595 - RNA, 22 nt, Human
acaguucccgucuugcacagcu

SEQ ID NO: 614596 - RNA, 22 nt, Human
aacuuucuuucacagaaguauc

SEQ ID NO: 614597 - RNA, 19 nt, Human
uagcugccuguuaccucca

SEQ ID NO: 614598 - RNA, 22 nt, Human
uagggcaggggaggaaucugaa

SEQ ID NO: 614599 - RNA, 22 nt, Human
ugcucuguccagugcaccauca

SEQ ID NO: 614600 - RNA, 22 nt, Human
caguuuuacccaagcuuauuuu

SEQ ID NO: 614601 - RNA, 22 nt, Human
ggcagugagcuggagggaagga

SEQ ID NO: 614602 - RNA, 22 nt, Human
cauuucuauggcaaugggaaaa

SEQ ID NO: 614603 - RNA, 22 nt, Human
uuucuauuuacagugcuaggua

SEQ ID NO: 614604 - RNA, 22 nt, Human
uaaaacugcuugguauggucua

SEQ ID NO: 614605 - RNA, 22 nt, Human
ggcaggaggaagaguuagcacc

SEQ ID NO: 614606 - RNA, 22 nt, Human
aaagacugcaaaaacgcacaga

SEQ ID NO: 614607 - RNA, 22 nt, Human
uucuaguugagggagacaaaua

SEQ ID NO: 614608 - RNA, 22 nt, Human
ugaaacaaaaguauguagcuug

SEQ ID NO: 614609 - RNA, 21 nt, Human
ugcaggagucugugagucagg

SEQ ID NO: 614610 - RNA, 22 nt, Human
aguuuuaaaugauggugguggu

SEQ ID NO: 614611 - RNA, 22 nt, Human
uuucuacauucaaaaacuacca

SEQ ID NO: 614612 - RNA, 22 nt, Human
uagggcagccacccaggcugcu

SEQ ID NO: 614613 - RNA, 22 nt, Human
gcagcugccuauucagggcuug

SEQ ID NO: 614614 - RNA, 22 nt, Human
agcaauaacagaaaacuuuccu

SEQ ID NO: 614615 - RNA, 22 nt, Human
gcagcugcaagcacuucuggca

SEQ ID NO: 614616 - RNA, 19 nt, Human
caggacagacuucaaagcc

SEQ ID NO: 614617 - RNA, 22 nt, Human
uguuaggacuccccagaagcug

SEQ ID NO: 614618 - RNA, 20 nt, Human
gugcaauggcgcaaucucgg

SEQ ID NO: 614619 - RNA, 22 nt, Human
gcagcugcagguggucccaugc

SEQ ID NO: 614620 - RNA, 22 nt, Human
cugagcugacaucuuccucuuu

SEQ ID NO: 614621 - RNA, 22 nt, Human
auacaagacucagcacagacgg

SEQ ID NO: 614622 - RNA, 20 nt, Human
ugcccagcaagagugcaguu

SEQ ID NO: 614623 - RNA, 22 nt, Human
cuaguucuuaacuguuaugauu

SEQ ID NO: 614624 - RNA, 22 nt, Human
acaagaauuauuucuaguuaac

SEQ ID NO: 614625 - RNA, 22 nt, Human
augucuuucaaauucugccuag

SEQ ID NO: 614626 - RNA, 18 nt, Human
aagcugcccucaggcagg

SEQ ID NO: 614627 - RNA, 22 nt, Human
agggagaagguuuagcugugag

SEQ ID NO: 614628 - RNA, 22 nt, Human
uccagcucaggguuggcucaag

SEQ ID NO: 614629 - RNA, 22 nt, Human
agcuggccuucggugucacugg

SEQ ID NO: 614630 - RNA, 22 nt, Human
uaccacuacauuugcuaauggc

SEQ ID NO: 614631 - RNA, 22 nt, Human
gugcccagugcaggcccgcagg

SEQ ID NO: 614632 - RNA, 22 nt, Human
cacuguacugugaauaaggagg

SEQ ID NO: 614633 - RNA, 22 nt, Human
gcuguacaguuuacuagguggg

SEQ ID NO: 614634 - RNA, 22 nt, Human
agcugcccugggcuggagaugg

SEQ ID NO: 614635 - RNA, 22 nt, Human
uagcugccagaccauucuuacu

SEQ ID NO: 614636 - RNA, 22 nt, Human
auaaaagaaguuuugguacuug

SEQ ID NO: 614637 - RNA, 22 nt, Human
uaucugcaucugcauguguauu

SEQ ID NO: 614638 - RNA, 22 nt, Human
ucuuucuacaucauuugcuucu

SEQ ID NO: 614639 - RNA, 22 nt, Human
ccuguauuagguagacaacuau

SEQ ID NO: 614640 - RNA, 22 nt, Human
uauuucuauuccccaggcaagu

SEQ ID NO: 614641 - RNA, 22 nt, Human
gacagcuguacacuccugguua

SEQ ID NO: 614642 - RNA, 22 nt, Human
cccuggccccucacuccgaggc

SEQ ID NO: 614643 - RNA, 22 nt, Human
ggcagccaugugggcagcgagu

SEQ ID NO: 614644 - RNA, 22 nt, Human
agggugugcuguugggucuuuc

SEQ ID NO: 614645 - RNA, 22 nt, Human
uacaagaugacaggugcaugau

SEQ ID NO: 614646 - RNA, 22 nt, Human
uugucuuuggaaauuuaauguu

SEQ ID NO: 614647 - RNA, 21 nt, Human
auggagggaccagggaagcag

SEQ ID NO: 614648 - RNA, 22 nt, Human
agacuguacuuucugcagcucu

SEQ ID NO: 614649 - RNA, 22 nt, Human
ucuccugccacugcuucccauu

SEQ ID NO: 614650 - RNA, 22 nt, Human
cuguguacccacgugggcaccc

SEQ ID NO: 614651 - RNA, 22 nt, Human
ucacaagauacaguuagaagca

SEQ ID NO: 614652 - RNA, 22 nt, Human
cuggccccuguggcuaaaauca

SEQ ID NO: 614653 - RNA, 22 nt, Human
aucagucuguguuagaaaagag

SEQ ID NO: 614654 - RNA, 22 nt, Human
uucucaggugaggcugaggcug

SEQ ID NO: 614655 - RNA, 22 nt, Human
aaaauuuccaccaucuuugugu

SEQ ID NO: 614656 - RNA, 22 nt, Human
cuggagggaguuaggacccgga

SEQ ID NO: 614657 - RNA, 22 nt, Human
agggcagugggaaagccugcuc

SEQ ID NO: 614658 - RNA, 22 nt, Human
aacacuguggucuuuucaguaa

SEQ ID NO: 614659 - RNA, 22 nt, Human
acaacugucaguaaagaauauu

SEQ ID NO: 614660 - RNA, 22 nt, Human
gccagccccagacauccuaucg

SEQ ID NO: 614661 - RNA, 22 nt, Human
cagcuccuauuagacacugaau

SEQ ID NO: 614662 - RNA, 22 nt, Human
ucucugaguaagugacaguuca

SEQ ID NO: 614663 - RNA, 22 nt, Human
aaguucuacagcuucgcaggca

SEQ ID NO: 614664 - RNA, 22 nt, Human
ugaggcagugcugggaagccug

SEQ ID NO: 614665 - RNA, 22 nt, Human
gcagcccaggucucucucacuc

SEQ ID NO: 614666 - RNA, 18 nt, Human
ggccagccccaggccagc

SEQ ID NO: 614667 - RNA, 22 nt, Human
ugcagcugagucacccagccau

SEQ ID NO: 614668 - RNA, 22 nt, Human
cuggagggauguaggguguauu

SEQ ID NO: 614669 - RNA, 22 nt, Human
acucucugguguagaaagaccu

SEQ ID NO: 614670 - RNA, 22 nt, Human
ggaggcucgcuggucgcacagc

SEQ ID NO: 614671 - RNA, 23 nt, Human
gccauggcugccccacaggccuc

SEQ ID NO: 614672 - RNA, 22 nt, Human
aaauguucccaauaugaagcug

SEQ ID NO: 614673 - RNA, 22 nt, Human
uucuaccagaccccagacuugu

SEQ ID NO: 614674 - RNA, 22 nt, Human
guguuaaccagcuaaacuuugc

SEQ ID NO: 614675 - RNA, 22 nt, Human
gcagaggcucuuuaaugcuuag

SEQ ID NO: 614676 - RNA, 19 nt, Human
gagcugccuuuugaagacc

SEQ ID NO: 614677 - RNA, 22 nt, Human
uggagguguccaacucgugggu

SEQ ID NO: 614678 - RNA, 22 nt, Human
cugucugucaccaaaacagacu

SEQ ID NO: 614679 - RNA, 22 nt, Human
acuguacauguaaacauuguca

SEQ ID NO: 614680 - RNA, 22 nt, Human
aggaaacagagugaagcuuggg

SEQ ID NO: 614681 - RNA, 22 nt, Human
ccuagccccagauaucucacac

SEQ ID NO: 614682 - RNA, 22 nt, Human
aacauguagcagaaacgacuaa

SEQ ID NO: 614683 - RNA, 22 nt, Human
acuguacaacugcugagcagaa

SEQ ID NO: 614684 - RNA, 22 nt, Human
acauuucucagguaagucauuu

SEQ ID NO: 614685 - RNA, 22 nt, Human
cagguccugcagggagaguaaa

SEQ ID NO: 614686 - RNA, 21 nt, Human
uucuacaggaugaaugaaaac

SEQ ID NO: 614687 - RNA, 22 nt, Human
cucaggagaugacagaagguau

SEQ ID NO: 614688 - RNA, 22 nt, Human
ccugaggauuguuggugcuucc

SEQ ID NO: 614689 - RNA, 22 nt, Human
caguuuuaucaucugugaaaug

SEQ ID NO: 614690 - RNA, 21 nt, Human
ucugagaacuucugcugcagc

SEQ ID NO: 614691 - RNA, 19 nt, Human
aaaaggaauauucuuuggg

SEQ ID NO: 614692 - RNA, 21 nt, Human
agaaaaacacgauauaagccc

SEQ ID NO: 614693 - RNA, 22 nt, Human
aaacugaaacaucaucauguug

SEQ ID NO: 614694 - RNA, 22 nt, Human
gacuguacuugagagaggaacu

SEQ ID NO: 614695 - RNA, 21 nt, Human
ugagggguuauaacagggugg

SEQ ID NO: 614696 - RNA, 22 nt, Human
agaaaauuagauuuuacugugu

SEQ ID NO: 614697 - RNA, 22 nt, Human
agacuguaauugacaugucagc

SEQ ID NO: 614698 - RNA, 22 nt, Human
aagaauguucauuaaacuguug

SEQ ID NO: 614699 - RNA, 22 nt, Human
gaaauccaguucccuacucuua

SEQ ID NO: 614700 - RNA, 22 nt, Human
agacuguaauuuguggccuccu

SEQ ID NO: 614701 - RNA, 22 nt, Human
acauuucucuugaugucucuau

SEQ ID NO: 614702 - RNA, 22 nt, Human
caaaauucugcauuucuaauaa

SEQ ID NO: 614703 - RNA, 22 nt, Human
ggagggguggucgcgaagagca

SEQ ID NO: 614704 - RNA, 22 nt, Human
gcugccacuuggucaugucaug

SEQ ID NO: 614705 - RNA, 18 nt, Human
acauuucuaggugaaagc

SEQ ID NO: 614706 - RNA, 22 nt, Human
caggcauuucgcaaaggcugag

SEQ ID NO: 614707 - RNA, 18 nt, Human
aagaacugagguccuaga

SEQ ID NO: 614708 - RNA, 20 nt, Human
uacagucagggcacaggcag

SEQ ID NO: 614709 - RNA, 22 nt, Human
cugcuuccaugcaauggcaguc

SEQ ID NO: 614710 - RNA, 22 nt, Human
uaaggaaagugccaugauuucu

SEQ ID NO: 614711 - RNA, 22 nt, Human
ggugugccacuucacugagcag

SEQ ID NO: 614712 - RNA, 19 nt, Human
uaaaaacugaaggaagcag

SEQ ID NO: 614713 - RNA, 22 nt, Human
ugggggcauggaccagccuggc

SEQ ID NO: 614714 - RNA, 22 nt, Human
cugagcugcuuugcuuuugggg

SEQ ID NO: 614715 - RNA, 22 nt, Human
cugcuuccauggucuggagacu

SEQ ID NO: 614716 - RNA, 22 nt, Human
ucuaccacuaagugugcuuuga

SEQ ID NO: 614717 - RNA, 22 nt, Human
cauuuacuuaaaucuuuacaag

SEQ ID NO: 614718 - RNA, 22 nt, Human
aagacugucugggacaagauga

SEQ ID NO: 614719 - RNA, 22 nt, Human
cuauugcauuugcaucuucauc

SEQ ID NO: 614720 - RNA, 22 nt, Human
ugagaugaauaacuccugcuaa

SEQ ID NO: 614721 - RNA, 22 nt, Human
aagauuuaccacuuuauucaag

SEQ ID NO: 614722 - RNA, 19 nt, Human
ggcagacacaguugacaug

SEQ ID NO: 614723 - RNA, 22 nt, Human
aaaguuuggauuagcaguuaga

SEQ ID NO: 614724 - RNA, 22 nt, Human
uucaucuugauggcuuccuaau

SEQ ID NO: 614725 - RNA, 22 nt, Human
aucuggaacaaagcuuaggaau

SEQ ID NO: 614726 - RNA, 18 nt, Human
ugugccucugcaggacgu

SEQ ID NO: 614727 - RNA, 22 nt, Human
aaagaacuuauccuagaauuug

SEQ ID NO: 614728 - RNA, 22 nt, Human
uaauccaauggcacaauguaug

SEQ ID NO: 614729 - RNA, 22 nt, Human
cuccagcuuuuucccaguuggc

SEQ ID NO: 614730 - RNA, 22 nt, Human
aagaaaguggguaauaugauuu

SEQ ID NO: 614731 - RNA, 22 nt, Human
ggcagccagagggcagcuggau

SEQ ID NO: 614732 - RNA, 23 nt, Human
agaaaaguucauaccuuuuuaac

SEQ ID NO: 614733 - RNA, 22 nt, Human
gcuuuuauuucuucacaaaagu

SEQ ID NO: 614734 - RNA, 22 nt, Human
ccuuggagcggucagcacuggu

SEQ ID NO: 614735 - RNA, 22 nt, Human
augaaacaaaccucuauggagu

SEQ ID NO: 614736 - RNA, 22 nt, Human
gcuguacaggguuauccuuucc

SEQ ID NO: 614737 - RNA, 22 nt, Human
aggcucuggcaacagcuggugu

SEQ ID NO: 614738 - RNA, 22 nt, Human
ugaaacaagggaccguccuuuc

SEQ ID NO: 614739 - RNA, 22 nt, Human
agacucugauaagcaacucuug

SEQ ID NO: 614740 - RNA, 22 nt, Human
ucuuugcauggacauguguuuu

SEQ ID NO: 614741 - RNA, 22 nt, Human
acuguaaccaguguggugagag

SEQ ID NO: 614742 - RNA, 22 nt, Human
ggugugccuggggcuuagcugc

SEQ ID NO: 614743 - RNA, 22 nt, Human
aagcugccaaugguaagcugcu

SEQ ID NO: 614744 - RNA, 22 nt, Human
uuguauauauucuuaaagaugu

SEQ ID NO: 614745 - RNA, 22 nt, Human
ugcuuccagcucucuguaaggu

SEQ ID NO: 614746 - RNA, 22 nt, Human
gugugcgccgacacagccaggu

SEQ ID NO: 614747 - RNA, 22 nt, Human
uuuguucauuuugagcucauca

SEQ ID NO: 614748 - RNA, 22 nt, Human
ucuguacauuuggggaccccag

SEQ ID NO: 614749 - RNA, 22 nt, Human
aggcugugcacagggcaccugc

SEQ ID NO: 614750 - RNA, 22 nt, Human
cuacagguaugugcaugacauc

SEQ ID NO: 614751 - RNA, 22 nt, Human
uuauacuaaaacgcauugaauu

SEQ ID NO: 614752 - RNA, 22 nt, Human
uucuaccauugggaaaacagcc

SEQ ID NO: 614753 - RNA, 22 nt, Human
accaucuuaaggggacuucuua

SEQ ID NO: 614754 - RNA, 22 nt, Human
aauguacaucucaguguaguac

SEQ ID NO: 614755 - RNA, 22 nt, Human
uaacagcuggcguuauaggaau

SEQ ID NO: 614756 - RNA, 21 nt, Human
agcugcccagaguagggaagg

SEQ ID NO: 614757 - RNA, 22 nt, Human
aggcagaggaaggguggauuug

SEQ ID NO: 614758 - RNA, 22 nt, Human
gacccuguuucuacaaauaauu

SEQ ID NO: 614759 - RNA, 20 nt, Human
acuggacacugaggugagcu

SEQ ID NO: 614760 - RNA, 22 nt, Human
caguccugcccaggcugacaga

SEQ ID NO: 614761 - RNA, 22 nt, Human
uucaggagaauuccaagaagua

SEQ ID NO: 614762 - RNA, 22 nt, Human
uucuaccagcuacucacugaua

SEQ ID NO: 614763 - RNA, 22 nt, Human
ucuguacaaaggcuauuuggag

SEQ ID NO: 614764 - RNA, 22 nt, Human
ccacucugauuuuggcuccacu

SEQ ID NO: 614765 - RNA, 21 nt, Human
ggcuguggagccaugacucac

SEQ ID NO: 614766 - RNA, 22 nt, Human
cugagggagggacuuugagacu

SEQ ID NO: 614767 - RNA, 22 nt, Human
ggaagcugugcucucaggccuc

SEQ ID NO: 614768 - RNA, 22 nt, Human
ucauuucuauugcuacugucug

SEQ ID NO: 614769 - RNA, 22 nt, Human
ccacugccagcuuuguccuccc

SEQ ID NO: 614770 - RNA, 22 nt, Human
aggaggugagcggucauguggu

SEQ ID NO: 614771 - RNA, 22 nt, Human
ggcagagacuggguuggcagag

SEQ ID NO: 614772 - RNA, 22 nt, Human
ugaggcagcauucuucaagaca

SEQ ID NO: 614773 - RNA, 22 nt, Human
auacaaagcuuucugucuggua

SEQ ID NO: 614774 - RNA, 22 nt, Human
gguuccccaggcggcccuugga

SEQ ID NO: 614775 - RNA, 22 nt, Human
caaaacugucuagagagagaag

SEQ ID NO: 614776 - RNA, 20 nt, Human
ucuguacacucaucuucugc

SEQ ID NO: 614777 - RNA, 22 nt, Human
uuuauauccaucuuugaaguaa

SEQ ID NO: 614778 - RNA, 22 nt, Human
gguuccaccuggcgagggguau

SEQ ID NO: 614779 - RNA, 20 nt, Human
uggagguggucugcuguccu

SEQ ID NO: 614780 - RNA, 22 nt, Human
uggcuccaucauccaugcaaga

SEQ ID NO: 614781 - RNA, 22 nt, Human
gagcugccggcccacaguacua

SEQ ID NO: 614782 - RNA, 22 nt, Human
uggccugguuguugcugccguu

SEQ ID NO: 614783 - RNA, 22 nt, Human
aggggugugcauccuggaggau

SEQ ID NO: 614784 - RNA, 22 nt, Human
cugugccugcaggccacaucaa

SEQ ID NO: 614785 - RNA, 22 nt, Human
cuggccccaggcagccugcugg

SEQ ID NO: 614786 - RNA, 22 nt, Human
aaagacugguguguuacauaua

SEQ ID NO: 614787 - RNA, 22 nt, Human
uuccuguucaggaaaguugugu

SEQ ID NO: 614788 - RNA, 22 nt, Human
uaaggcaggacuggauagcuau

SEQ ID NO: 614789 - RNA, 22 nt, Human
uucauaguguuuccuuccagug

SEQ ID NO: 614790 - RNA, 19 nt, Human
gcuguacaguaaggagaca

SEQ ID NO: 614791 - RNA, 22 nt, Human
acaugaaaagacuaucugauua

SEQ ID NO: 614792 - RNA, 23 nt, Human
aaagacugcugagaauuuuagga

SEQ ID NO: 614793 - RNA, 22 nt, Human
aaagucaaaaugcucuccuguc

SEQ ID NO: 614794 - RNA, 22 nt, Human
cuuuggaauaauuuccuggagu

SEQ ID NO: 614795 - RNA, 22 nt, Human
guuaagaagcuagagaugaaca

SEQ ID NO: 614796 - RNA, 22 nt, Human
ccuguacagugaaugaauguga

SEQ ID NO: 614797 - RNA, 22 nt, Human
gaggaaaaugggacaggcugua

SEQ ID NO: 614798 - RNA, 18 nt, Human
acauuucuaugcuucugg

SEQ ID NO: 614799 - RNA, 22 nt, Human
caauuucuaacauuccauggau

SEQ ID NO: 614800 - RNA, 22 nt, Human
gcagcccaggcucgcucacugc

SEQ ID NO: 614801 - RNA, 22 nt, Human
gccacagcuuagaucacagccu

SEQ ID NO: 614802 - RNA, 22 nt, Human
acuguucauuuguccuguaucu

SEQ ID NO: 614803 - RNA, 22 nt, Human
uuagaucuuaggcaaauguguu

SEQ ID NO: 614804 - RNA, 22 nt, Human
uccagucucuacucugagauaa

SEQ ID NO: 614805 - RNA, 22 nt, Human
aucuggaauccuuguggacaau

SEQ ID NO: 614806 - RNA, 22 nt, Human
ugcagucuuccagcugcacaaa

SEQ ID NO: 614807 - RNA, 22 nt, Human
aaaacuguaggaauugggugcc

SEQ ID NO: 614808 - RNA, 21 nt, Human
cacaagacacauaggguguuu

SEQ ID NO: 614809 - RNA, 22 nt, Human
cucaggaggaggaaguucauug

SEQ ID NO: 614810 - RNA, 16 nt, Human
caguuuuaaggcccaa

SEQ ID NO: 614811 - RNA, 22 nt, Human
guccagcugaucuugacccagc

SEQ ID NO: 614812 - RNA, 22 nt, Human
aaacucuuccuuucuuuaaagu

SEQ ID NO: 614813 - RNA, 22 nt, Human
gacauaaaauucaauaauuugu

SEQ ID NO: 614814 - RNA, 22 nt, Human
uuuugauaucaugaugaacaga

SEQ ID NO: 614815 - RNA, 22 nt, Human
caggaaugacccaacaguuuca

SEQ ID NO: 614816 - RNA, 22 nt, Human
ucuguacaacaaagggaugaga

SEQ ID NO: 614817 - RNA, 22 nt, Human
ucagcugcucaaauuuauguca

SEQ ID NO: 614818 - RNA, 21 nt, Human
ccagcccagcugugucccagc

SEQ ID NO: 614819 - RNA, 17 nt, Human
ucugcucugccaaucca

SEQ ID NO: 614820 - RNA, 22 nt, Human
uucuaguucauauucucaaaga

SEQ ID NO: 614821 - RNA, 22 nt, Human
uaggaaaagucuagauugauga

SEQ ID NO: 614822 - RNA, 22 nt, Human
ucugucuuuagaggccugugcu

SEQ ID NO: 614823 - RNA, 22 nt, Human
aggaagcuccuggagagccagu

SEQ ID NO: 614824 - RNA, 22 nt, Human
aaacaguagaaguguauuuuau

SEQ ID NO: 614825 - RNA, 22 nt, Human
ugccgcugucgccaccauggcu

SEQ ID NO: 614826 - RNA, 19 nt, Human
agacucugugugagacuuu

SEQ ID NO: 614827 - RNA, 22 nt, Human
augucuuucuuauggucuguug

SEQ ID NO: 614828 - RNA, 22 nt, Human
aggcaguuguagagagggcucu

SEQ ID NO: 614829 - RNA, 22 nt, Human
gaaaacugugauuagaaugccu

SEQ ID NO: 614830 - RNA, 22 nt, Human
aaaaguguucaggaagaauaau

SEQ ID NO: 614831 - RNA, 22 nt, Human
aauuuguuacacagcaauauaa

SEQ ID NO: 614832 - RNA, 22 nt, Human
aggcaguucucguguguguccc

SEQ ID NO: 614833 - RNA, 22 nt, Human
caccugagcacuggggccgccc

SEQ ID NO: 614834 - RNA, 22 nt, Human
agcugcccuuuaugaugcugaa

SEQ ID NO: 614835 - RNA, 22 nt, Human
aaacuguaggagggaaaggaag

SEQ ID NO: 614836 - RNA, 22 nt, Human
ggugcugccuauagucugaaac

SEQ ID NO: 614837 - RNA, 22 nt, Human
auguucuaaucccugcuaugua

SEQ ID NO: 614838 - RNA, 22 nt, Human
auguaacacccacuuuuauagc

SEQ ID NO: 614839 - RNA, 22 nt, Human
caguuuuaugaaugcuuauuag

SEQ ID NO: 614840 - RNA, 22 nt, Human
uggucaacaggcagggaugaaa

SEQ ID NO: 614841 - RNA, 22 nt, Human
aaaguucagugccuucuauaca

SEQ ID NO: 614842 - RNA, 22 nt, Human
guaaucucagcuacuugggagg

SEQ ID NO: 614843 - RNA, 22 nt, Human
agugcaauagcaaagaacaaca

SEQ ID NO: 614844 - RNA, 22 nt, Human
uagcugccuuugggcuccugcu

SEQ ID NO: 614845 - RNA, 22 nt, Human
auacuaagcucauuacauuuug

SEQ ID NO: 614846 - RNA, 22 nt, Human
acagcaaaggacgaacacucug

SEQ ID NO: 614847 - RNA, 22 nt, Human
cacuuggaggaaggccuauuca

SEQ ID NO: 614848 - RNA, 22 nt, Human
gagcugccugugugccaugaug

SEQ ID NO: 614849 - RNA, 22 nt, Human
uucuaguucccucuggaaugua

SEQ ID NO: 614850 - RNA, 22 nt, Human
auguaacauugaauuauauagu

SEQ ID NO: 614851 - RNA, 22 nt, Human
guguggggagcugcagccacau

SEQ ID NO: 614852 - RNA, 22 nt, Human
aggaaacagugaacuuggcagg

SEQ ID NO: 614853 - RNA, 22 nt, Human
ccugucugcaugaucccugcca

SEQ ID NO: 614854 - RNA, 22 nt, Human
gacaagacugguuuauuuaagg

SEQ ID NO: 614855 - RNA, 22 nt, Human
uuuccacuguagagauguugaa

SEQ ID NO: 614856 - RNA, 22 nt, Human
gaaauucaggacaaagacucuu

SEQ ID NO: 614857 - RNA, 22 nt, Human
cuggagggacuuucucacggau

SEQ ID NO: 614858 - RNA, 22 nt, Human
aaacacuagcaggaagcacuga

SEQ ID NO: 614859 - RNA, 22 nt, Human
cacuuggaggcccccugugccc

SEQ ID NO: 614860 - RNA, 22 nt, Human
acacuguaaauugagugcguga

SEQ ID NO: 614861 - RNA, 22 nt, Human
cuggagggcuucugcagguuac

SEQ ID NO: 614862 - RNA, 22 nt, Human
cagccacuggugccaggcuguu

SEQ ID NO: 614863 - RNA, 22 nt, Human
uagcauuuggcaccaguuauuu

SEQ ID NO: 614864 - RNA, 22 nt, Human
acauuucuuucuauucaguagc

SEQ ID NO: 614865 - RNA, 22 nt, Human
gcuuucuaggcagagaugacug

SEQ ID NO: 614866 - RNA, 22 nt, Human
agguccugaggguucgucugca

SEQ ID NO: 614867 - RNA, 20 nt, Human
agaaaauguuuucagcugga

SEQ ID NO: 614868 - RNA, 22 nt, Human
accaaaaccugcuacuaaagga

SEQ ID NO: 614869 - RNA, 22 nt, Human
gagugcaguuggggugagggga

SEQ ID NO: 614870 - RNA, 22 nt, Human
aggucaagaguaaauuugggua

SEQ ID NO: 614871 - RNA, 22 nt, Human
gcgcagaguagcagagugcuga

SEQ ID NO: 614872 - RNA, 22 nt, Human
ucauacauucagcagauauuug

SEQ ID NO: 614873 - RNA, 22 nt, Human
aagaauugguuuccucugucau

SEQ ID NO: 614874 - RNA, 22 nt, Human
uccugggucccgcacaucuguc

SEQ ID NO: 614875 - RNA, 22 nt, Human
uuccugggcucuggcuggccua

SEQ ID NO: 614876 - RNA, 17 nt, Human
ucugucuugacugucac

SEQ ID NO: 614877 - RNA, 22 nt, Human
acaaagugcugacauuacaggc

SEQ ID NO: 614878 - RNA, 22 nt, Human
cuggccacugauuccuccccug

SEQ ID NO: 614879 - RNA, 22 nt, Human
ugucuuuuaccuaaugagcugg

SEQ ID NO: 614880 - RNA, 22 nt, Human
ugcccugguuacacuggagucc

SEQ ID NO: 614881 - RNA, 22 nt, Human
acauguuugauaaauauuuggg

SEQ ID NO: 614882 - RNA, 22 nt, Human
ugaggcagaaauuccuguuuuc

SEQ ID NO: 614883 - RNA, 22 nt, Human
gcucuuugcacagcucugcccu

SEQ ID NO: 614884 - RNA, 17 nt, Human
ugggggcgccagggucu

SEQ ID NO: 614885 - RNA, 22 nt, Human
uagaaagcugaguaauacauuu

SEQ ID NO: 614886 - RNA, 18 nt, Human
acaaaggaucaugaggga

SEQ ID NO: 614887 - RNA, 22 nt, Human
uggagucagaaugcgacaggcc

SEQ ID NO: 614888 - RNA, 22 nt, Human
uaauuuuuccacguacacuggg

SEQ ID NO: 614889 - RNA, 22 nt, Human
gagagcuguaauagucaugucu

SEQ ID NO: 614890 - RNA, 22 nt, Human
aauagcugggaccugaauuagc

SEQ ID NO: 614891 - RNA, 22 nt, Human
aaugcagauucuuauucuguag

SEQ ID NO: 614892 - RNA, 22 nt, Human
ucuggugucaguauucuuugaa

SEQ ID NO: 614893 - RNA, 22 nt, Human
uuccugccuacaugccuuaugc

SEQ ID NO: 614894 - RNA, 22 nt, Human
caggcaggagaggaggauuucu

SEQ ID NO: 614895 - RNA, 22 nt, Human
cagaguccuggacacagagaca

SEQ ID NO: 614896 - RNA, 22 nt, Human
ugguccuggccuugaccccagg

SEQ ID NO: 614897 - RNA, 22 nt, Human
auuccuugcacaucagauaguu

SEQ ID NO: 614898 - RNA, 22 nt, Human
gggcagguaggugaaauaauga

SEQ ID NO: 614899 - RNA, 22 nt, Human
augcccuguggcaguacauauu

SEQ ID NO: 614900 - RNA, 22 nt, Human
uacaaaaggaagagggaucuua

SEQ ID NO: 614901 - RNA, 22 nt, Human
ugcauaaaauaugagaaaugua

SEQ ID NO: 614902 - RNA, 22 nt, Human
cccuggcauaaaacuucuccag

SEQ ID NO: 614903 - RNA, 19 nt, Human
gcaggguguugacuguccc

SEQ ID NO: 614904 - RNA, 21 nt, Human
ggcuuuaugcucacccagccu

SEQ ID NO: 614905 - RNA, 22 nt, Human
uugacucauaccugccugaccc

SEQ ID NO: 614906 - RNA, 22 nt, Human
agcuaggacagguagagauggg

SEQ ID NO: 614907 - RNA, 22 nt, Human
gucccugggaaaggagagggca

SEQ ID NO: 614908 - RNA, 22 nt, Human
cugaggccccucucuugagcuu

SEQ ID NO: 614909 - RNA, 22 nt, Human
ggagucuucagauagaguauuu

SEQ ID NO: 614910 - RNA, 22 nt, Human
aggugccauugcuugccaguuu

SEQ ID NO: 614911 - RNA, 22 nt, Human
uugggguacgcaggucugggag

SEQ ID NO: 614912 - RNA, 22 nt, Human
caguggcgugaucucugcucac

SEQ ID NO: 614913 - RNA, 22 nt, Human
auacauguugagaaaauaucug

SEQ ID NO: 614914 - RNA, 22 nt, Human
uuguauuugauugucauaucgu

SEQ ID NO: 614915 - RNA, 22 nt, Human
ucagcaggcacggacaggcugc

SEQ ID NO: 614916 - RNA, 22 nt, Human
caguggguccugcgucugccag

SEQ ID NO: 614917 - RNA, 22 nt, Human
gccuucugauugcuggacugac

SEQ ID NO: 614918 - RNA, 22 nt, Human
uaccaugucuucaauaagucua

SEQ ID NO: 614919 - RNA, 22 nt, Human
ccagggaguuuccaaucugaga

SEQ ID NO: 614920 - RNA, 22 nt, Human
uguggcugacuccuggucccca

SEQ ID NO: 614921 - RNA, 22 nt, Human
cauguguuuugucauuucaaua

SEQ ID NO: 614922 - RNA, 22 nt, Human
cuugagcuaggaaggcugaggc

SEQ ID NO: 614923 - RNA, 22 nt, Human
uccugagguauaugcuuugcag

SEQ ID NO: 614924 - RNA, 22 nt, Human
uucuccuugaaaagcugcaucu

SEQ ID NO: 614925 - RNA, 22 nt, Human
gcugggagaggcagcuuucgga

SEQ ID NO: 614926 - RNA, 22 nt, Human
auuauuauauagggaaaguccc

SEQ ID NO: 614927 - RNA, 22 nt, Human
agggccaguucagaggacaugg

SEQ ID NO: 614928 - RNA, 22 nt, Human
gcugggagcaaagccaugcaua

SEQ ID NO: 614929 - RNA, 22 nt, Human
ggaacuccugcuccaagcagcu

SEQ ID NO: 614930 - RNA, 22 nt, Human
ggccaccugggaucucauccug

SEQ ID NO: 614931 - RNA, 22 nt, Human
ccugagauggggauuauuccaa

SEQ ID NO: 614932 - RNA, 22 nt, Human
agggcucuuccuuugccucuca

SEQ ID NO: 614933 - RNA, 22 nt, Human
auacaguauaacuaauaaaccc

SEQ ID NO: 614934 - RNA, 22 nt, Human
aaugcuuuaauugcauguagug

SEQ ID NO: 614935 - RNA, 22 nt, Human
aaagcaguauaaguaacggaag

SEQ ID NO: 614936 - RNA, 22 nt, Human
aaaugauugucaaaguucuguu

SEQ ID NO: 614937 - RNA, 22 nt, Human
ccucuuugacaaguaccugccc

SEQ ID NO: 614938 - RNA, 22 nt, Human
ugaagcagagugaaggugaauu

SEQ ID NO: 614939 - RNA, 22 nt, Human
uggugcaauauuaugaaaggua

SEQ ID NO: 614940 - RNA, 22 nt, Human
uucacagagcuuguucauggcc

SEQ ID NO: 614941 - RNA, 22 nt, Human
uccaggugugcucugugcccug

SEQ ID NO: 614942 - RNA, 22 nt, Human
auaagcagggucaaaugccuac

SEQ ID NO: 614943 - RNA, 22 nt, Human
aucuggagaugggucugucacc

SEQ ID NO: 614944 - RNA, 22 nt, Human
acagccagugacugcagacccu

SEQ ID NO: 614945 - RNA, 22 nt, Human
ucucuuugucugcucuuaguug

SEQ ID NO: 614946 - RNA, 22 nt, Human
uacauucucuucccauugucuc

SEQ ID NO: 614947 - RNA, 22 nt, Human
ccugagcuuuaaaagccaugua

SEQ ID NO: 614948 - RNA, 22 nt, Human
acagcagguuacaguggcacag

SEQ ID NO: 614949 - RNA, 22 nt, Human
cccuggcucugccucagagccc

SEQ ID NO: 614950 - RNA, 22 nt, Human
uccugagggacugguuccucgc

SEQ ID NO: 614951 - RNA, 19 nt, Human
uguugaagauuauuugugg

SEQ ID NO: 614952 - RNA, 22 nt, Human
caucagucccacggagcagccc

SEQ ID NO: 614953 - RNA, 22 nt, Human
aagggcucugugcuugucccau

SEQ ID NO: 614954 - RNA, 22 nt, Human
guaggcagauaggagugcagcc

SEQ ID NO: 614955 - RNA, 22 nt, Human
aggcaggucuguaucuagucuc

SEQ ID NO: 614956 - RNA, 22 nt, Human
cuggcccuguggaggcaggaac

SEQ ID NO: 614957 - RNA, 22 nt, Human
uggaaucuuuaggaagcacaua

SEQ ID NO: 614958 - RNA, 19 nt, Human
auccuggguccuccagcug

SEQ ID NO: 614959 - RNA, 22 nt, Human
gggaucuugaaacagcuggauu

SEQ ID NO: 614960 - RNA, 22 nt, Human
uccuucaaaaguugagagagcc

SEQ ID NO: 614961 - RNA, 22 nt, Human
guuuuacaagguuaaucagcag

SEQ ID NO: 614962 - RNA, 22 nt, Human
gaggcaggguguugauuacaga

SEQ ID NO: 614963 - RNA, 22 nt, Human
guuauaaaaugcacaguuguuu

SEQ ID NO: 614964 - RNA, 22 nt, Human
gccaggucuaagcaucagccac

SEQ ID NO: 614965 - RNA, 23 nt, Human
acugccaguuuuaccacagacgg

SEQ ID NO: 614966 - RNA, 22 nt, Human
acagguccucaagucagcuggg

SEQ ID NO: 614967 - RNA, 22 nt, Human
ggagucuuggccugcugagaaa

SEQ ID NO: 614968 - RNA, 22 nt, Human
aauauugagaaccagcauguuu

SEQ ID NO: 614969 - RNA, 22 nt, Human
cagugugucucuuguccuggcu

SEQ ID NO: 614970 - RNA, 22 nt, Human
uguguacauaucuauccuagau

SEQ ID NO: 614971 - RNA, 22 nt, Human
ccugaggcuugggaguuccgcc

SEQ ID NO: 614972 - RNA, 22 nt, Human
guucauuuuucccuaaugagua

SEQ ID NO: 614973 - RNA, 22 nt, Human
uccuucuccuccuugagugaca

SEQ ID NO: 614974 - RNA, 22 nt, Human
uguggcucggccagcugcugaa

SEQ ID NO: 614975 - RNA, 18 nt, Human
aguuuuuaggaagaaaug

SEQ ID NO: 614976 - RNA, 22 nt, Human
uuuucauuuuuguagaugcaag

SEQ ID NO: 614977 - RNA, 22 nt, Human
ugucauuuucuaaucuguuguc

SEQ ID NO: 614978 - RNA, 22 nt, Human
guccuggggaauacagaagccg

SEQ ID NO: 614979 - RNA, 22 nt, Human
caggcuggagugcagugucgcc

SEQ ID NO: 614980 - RNA, 22 nt, Human
uuccacagcccaagcugguggc

SEQ ID NO: 614981 - RNA, 19 nt, Human
ccagcagacacagcugccc

SEQ ID NO: 614982 - RNA, 22 nt, Human
guccugggcaugcagggcuuuc

SEQ ID NO: 614983 - RNA, 22 nt, Human
uccagggcuguuacuuuacaua

SEQ ID NO: 614984 - RNA, 22 nt, Human
agcacuuuccuggcaaaugugg

SEQ ID NO: 614985 - RNA, 22 nt, Human
gccccucuccuugugcaccugc

SEQ ID NO: 614986 - RNA, 22 nt, Human
ggagucaucucagcugagaggc

SEQ ID NO: 614987 - RNA, 22 nt, Human
cagguccaccaugccucaagcc

SEQ ID NO: 614988 - RNA, 22 nt, Human
acagcucucccucagagaaaug

SEQ ID NO: 614989 - RNA, 22 nt, Human
cuguggcugcagccuugguccu

SEQ ID NO: 614990 - RNA, 22 nt, Human
cagaaaauagaguuucucugag

SEQ ID NO: 614991 - RNA, 22 nt, Human
ggcuguggucugggugcucccc

SEQ ID NO: 614992 - RNA, 22 nt, Human
uuuucuggucacauguuauuaa

SEQ ID NO: 614993 - RNA, 22 nt, Human
cugcccuguaucuucucccaau

SEQ ID NO: 614994 - RNA, 22 nt, Human
ugggcuggcugaacuucaaccu

SEQ ID NO: 614995 - RNA, 22 nt, Human
cgguccaggauggcuggcaagc

SEQ ID NO: 614996 - RNA, 22 nt, Human
uguggcucuccuccugcugccc

SEQ ID NO: 614997 - RNA, 22 nt, Human
aguccuggcauauagguccuca

SEQ ID NO: 614998 - RNA, 22 nt, Human
cuguggagaugcagaccaggcc

SEQ ID NO: 614999 - RNA, 19 nt, Human
gccaggcucuuauucugug

SEQ ID NO: 615000 - RNA, 22 nt, Human
ggcuuuaugcacagcagauggu

SEQ ID NO: 615001 - RNA, 22 nt, Human
gccugcagugagugcagaaggu

SEQ ID NO: 615002 - RNA, 22 nt, Human
accuguuuucagaaaaugcaga

SEQ ID NO: 615003 - RNA, 22 nt, Human
cuuuaguguucaacccagauaa

SEQ ID NO: 615004 - RNA, 22 nt, Human
cugguuuugucagaagcuuuau

SEQ ID NO: 615005 - RNA, 23 nt, Human
aagauacagguguggaaugguuu

SEQ ID NO: 615006 - RNA, 22 nt, Human
cuuaaacugggcauucagagaa

SEQ ID NO: 615007 - RNA, 22 nt, Human
aaauacacguacauguguaaaa

SEQ ID NO: 615008 - RNA, 22 nt, Human
guacagucuucuuaaugcuuuu

SEQ ID NO: 615009 - RNA, 22 nt, Human
uguggagaugugagcaagggga

SEQ ID NO: 615010 - RNA, 22 nt, Human
agggcugguauguccaugaaag

SEQ ID NO: 615011 - RNA, 22 nt, Human
agggcuuucuuuguaaaagaag

SEQ ID NO: 615012 - RNA, 19 nt, Human
ccaaaggaaguuucccucc

SEQ ID NO: 615013 - RNA, 22 nt, Human
auaauguuucaguacugucugu

SEQ ID NO: 615014 - RNA, 22 nt, Human
uagauucaugcaguaugcuagu

SEQ ID NO: 615015 - RNA, 22 nt, Human
ggugcccagcaagcuuucaaug

SEQ ID NO: 615016 - RNA, 22 nt, Human
ccagggcaugggaagaacugaa

SEQ ID NO: 615017 - RNA, 22 nt, Human
ucaguguuagacaaguuuggaa

SEQ ID NO: 615018 - RNA, 22 nt, Human
agcuuuaaagcauauuucuaag

SEQ ID NO: 615019 - RNA, 22 nt, Human
cauggccaaagaauuauauuuu

SEQ ID NO: 615020 - RNA, 22 nt, Human
ggugcaggcgguggggcaagua

SEQ ID NO: 615021 - RNA, 22 nt, Human
uggcaggugcacuuuugguuuc

SEQ ID NO: 615022 - RNA, 22 nt, Human
cagcucaggaaggaaggccggc

SEQ ID NO: 615023 - RNA, 22 nt, Human
cuucaguuagccaauucagguc

SEQ ID NO: 615024 - RNA, 22 nt, Human
agaaagaacguugguuaucuua

SEQ ID NO: 615025 - RNA, 22 nt, Human
uggccaccuuauggcuauugga

SEQ ID NO: 615026 - RNA, 22 nt, Human
cuguggagcuuguggcaguggg

SEQ ID NO: 615027 - RNA, 19 nt, Human
gcagauccaaaagucacau

SEQ ID NO: 615028 - RNA, 22 nt, Human
cugcccuggaaaacguaucuua

SEQ ID NO: 615029 - RNA, 22 nt, Human
uggcuuggcuaagaucuaagcu

SEQ ID NO: 615030 - RNA, 22 nt, Human
cucaaauagaacugaucuauaa

SEQ ID NO: 615031 - RNA, 22 nt, Human
uucacagaccaggaggcuguga

SEQ ID NO: 615032 - RNA, 22 nt, Human
gugcccuggaugacuuuggucu

SEQ ID NO: 615033 - RNA, 22 nt, Human
gaggcuagagcaggggcucaau

SEQ ID NO: 615034 - RNA, 22 nt, Human
gcaguggggaaugcuggggaga

SEQ ID NO: 615035 - RNA, 22 nt, Human
uaccuguuuuaaagcuaaaagg

SEQ ID NO: 615036 - RNA, 20 nt, Human
aucaaaauccuauugagguu

SEQ ID NO: 615037 - RNA, 22 nt, Human
uggcucuguucgccaucaggag

SEQ ID NO: 615038 - RNA, 22 nt, Human
cagaggucccuguucuuaagga

SEQ ID NO: 615039 - RNA, 22 nt, Human
uccagccuugccacuuuucugu

SEQ ID NO: 615040 - RNA, 22 nt, Human
ccaggcugugguuuagauagag

SEQ ID NO: 615041 - RNA, 22 nt, Human
aggacuggcccugaggggaggc

SEQ ID NO: 615042 - RNA, 23 nt, Human
augcccuguagaggcugcugacc

SEQ ID NO: 615043 - RNA, 22 nt, Human
gauaaauugcacuuuuucuuac

SEQ ID NO: 615044 - RNA, 22 nt, Human
gugcagagagguggagggacuu

SEQ ID NO: 615045 - RNA, 22 nt, Human
gucaaaaaguagucauuucugu

SEQ ID NO: 615046 - RNA, 22 nt, Human
agugcaggagccuggccagagc

SEQ ID NO: 615047 - RNA, 22 nt, Human
cagagcggccacuagagggcgc

SEQ ID NO: 615048 - RNA, 22 nt, Human
auuccuugcucucaucaaccuu

SEQ ID NO: 615049 - RNA, 22 nt, Human
gcagguccagucaccagagaga

SEQ ID NO: 615050 - RNA, 22 nt, Human
aaagaauuuguacacccuacua

SEQ ID NO: 615051 - RNA, 22 nt, Human
guccagagaguaaaggggguaa

SEQ ID NO: 615052 - RNA, 21 nt, Human
ucaguaaaccuaaagauugua

SEQ ID NO: 615053 - RNA, 22 nt, Human
auaaggaaaugaaacucuaaua

SEQ ID NO: 615054 - RNA, 22 nt, Human
aagugcaaaucuguggcugaaa

SEQ ID NO: 615055 - RNA, 22 nt, Human
ggcagguacagcaagaggacaa

SEQ ID NO: 615056 - RNA, 22 nt, Human
aggcagaagccagccagggucc

SEQ ID NO: 615057 - RNA, 22 nt, Human
aaugcaccuaccuugauucugc

SEQ ID NO: 615058 - RNA, 22 nt, Human
agugggagagaagcaaguagua

SEQ ID NO: 615059 - RNA, 22 nt, Human
agguucagaugacuuuuaugcu

SEQ ID NO: 615060 - RNA, 22 nt, Human
aaauuugauaagccauuguuac

SEQ ID NO: 615061 - RNA, 22 nt, Human
cugcauccuaaccuccaugcag

SEQ ID NO: 615062 - RNA, 22 nt, Human
aaaguagaguuguggaauuacu

SEQ ID NO: 615063 - RNA, 18 nt, Human
cugggucuccaggcugcc

SEQ ID NO: 615064 - RNA, 22 nt, Human
caaauagauuguucaauccuga

SEQ ID NO: 615065 - RNA, 22 nt, Human
ccaguguuuuccaguuugccca

SEQ ID NO: 615066 - RNA, 22 nt, Human
gcagcaggcacuuaccguugcu

SEQ ID NO: 615067 - RNA, 22 nt, Human
gguccagggaacuuugaaggau

SEQ ID NO: 615068 - RNA, 19 nt, Human
cgcagguggaaggagccgc

SEQ ID NO: 615069 - RNA, 22 nt, Human
cagauaacacaaagaaaugggc

SEQ ID NO: 615070 - RNA, 22 nt, Human
auguguuuauaauuacucaauc

SEQ ID NO: 615071 - RNA, 22 nt, Human
uaugcuuuacuuuucauuguga

SEQ ID NO: 615072 - RNA, 22 nt, Human
guccugggcccaggggcugccu

SEQ ID NO: 615073 - RNA, 22 nt, Human
ugcccuggaaccaucuacaguc

SEQ ID NO: 615074 - RNA, 22 nt, Human
ucagguccucugggucccagcc

SEQ ID NO: 615075 - RNA, 22 nt, Human
agguccugucuaucacccucgc

SEQ ID NO: 615076 - RNA, 22 nt, Human
gugcccuggcucacagugucuc

SEQ ID NO: 615077 - RNA, 22 nt, Human
gggacaauggaggccucucucc

SEQ ID NO: 615078 - RNA, 22 nt, Human
uguggggaucuucuagcuuuuc

SEQ ID NO: 615079 - RNA, 22 nt, Human
ggcuuuauuugcagccauuguu

SEQ ID NO: 615080 - RNA, 22 nt, Human
gcugagagugggugcagugcuu

SEQ ID NO: 615081 - RNA, 20 nt, Human
ccagagcagccacugaaguu

SEQ ID NO: 615082 - RNA, 22 nt, Human
accaggagccauagagucaggc

SEQ ID NO: 615083 - RNA, 22 nt, Human
ccggcgggcgcggugacgucag

SEQ ID NO: 615084 - RNA, 22 nt, Human
gugcccaguccugccuugacag

SEQ ID NO: 615085 - RNA, 22 nt, Human
gcaguuccuacaguggaaagcg

SEQ ID NO: 615086 - RNA, 22 nt, Human
ggccuguccagccugccuggcu

SEQ ID NO: 615087 - RNA, 22 nt, Human
ggugcaaagauggcaguugcaa

SEQ ID NO: 615088 - RNA, 22 nt, Human
caugagugucaucucagcagcu

SEQ ID NO: 615089 - RNA, 22 nt, Human
agaaaugccuacgagauaggga

SEQ ID NO: 615090 - RNA, 22 nt, Human
auuauaggcuugagccaccgug

SEQ ID NO: 615091 - RNA, 22 nt, Human
aucaaaaugcuccagugauggu

SEQ ID NO: 615092 - RNA, 22 nt, Human
uuccuggggcuccagcuaccag

SEQ ID NO: 615093 - RNA, 23 nt, Human
aguuccagaaaaaugcucaagca

SEQ ID NO: 615094 - RNA, 22 nt, Human
ucacuuagauggggaucaucac

SEQ ID NO: 615095 - RNA, 22 nt, Human
ugagaaugaaucuuuugcuuuc

SEQ ID NO: 615096 - RNA, 22 nt, Human
ccagccugaaaugccucauccu

SEQ ID NO: 615097 - RNA, 22 nt, Human
aaucaagaaaaugaggauucuu

SEQ ID NO: 615098 - RNA, 22 nt, Human
uacagcauugcauuuuccuuug

SEQ ID NO: 615099 - RNA, 22 nt, Human
uccucccuucucacugggaagg

SEQ ID NO: 615100 - RNA, 22 nt, Human
uuucauuucauagaauuguguu

SEQ ID NO: 615101 - RNA, 22 nt, Human
cuccuggcccugagcucccagg

SEQ ID NO: 615102 - RNA, 19 nt, Human
uuggaaggagccagagugg

SEQ ID NO: 615103 - RNA, 22 nt, Human
caggcuccacuguaggcagcuc

SEQ ID NO: 615104 - RNA, 22 nt, Human
agagccagcaagugaauaguga

SEQ ID NO: 615105 - RNA, 22 nt, Human
caggcuggagugaguguagugg

SEQ ID NO: 615106 - RNA, 22 nt, Human
ggagaagggacagacucagcuu

SEQ ID NO: 615107 - RNA, 18 nt, Human
uccugggaaaggcauaca

SEQ ID NO: 615108 - RNA, 22 nt, Human
cugggcucaaauccuggcccug

SEQ ID NO: 615109 - RNA, 22 nt, Human
ggccaggccaagaggguuggaa

SEQ ID NO: 615110 - RNA, 22 nt, Human
cuggaaggcggagguuguagug

SEQ ID NO: 615111 - RNA, 22 nt, Human
cuggcugaggcagagccugggg

SEQ ID NO: 615112 - RNA, 22 nt, Human
agaggcaagauuaucagggcau

SEQ ID NO: 615113 - RNA, 22 nt, Human
uggcagguuaacuuacaacugu

SEQ ID NO: 615114 - RNA, 22 nt, Human
acagaauauuguaagugccacu

SEQ ID NO: 615115 - RNA, 20 nt, Human
agugcaagaaagcacagcug

SEQ ID NO: 615116 - RNA, 22 nt, Human
guuauuuucauuggcucagacu

SEQ ID NO: 615117 - RNA, 22 nt, Human
aggagaggcucuaacucugugu

SEQ ID NO: 615118 - RNA, 22 nt, Human
ugguugugucacuuagauuaga

SEQ ID NO: 615119 - RNA, 22 nt, Human
agaggcagaaguguucaaaccc

SEQ ID NO: 615120 - RNA, 22 nt, Human
aagcagaguuagcuugucaccu

SEQ ID NO: 615121 - RNA, 16 nt, Human
uugcccugaggggagg

SEQ ID NO: 615122 - RNA, 18 nt, Human
uggcagguagacucaggu

SEQ ID NO: 615123 - RNA, 22 nt, Human
gcaguguuaccucuucaguggg

SEQ ID NO: 615124 - RNA, 22 nt, Human
cgccggcuugaggcaggcggca

SEQ ID NO: 615125 - RNA, 22 nt, Human
uacauacauuaccucauuuagu

SEQ ID NO: 615126 - RNA, 22 nt, Human
ugcaggucaucccugugcuucu

SEQ ID NO: 615127 - RNA, 22 nt, Human
ggcaggacauugacuacaguga

SEQ ID NO: 615128 - RNA, 22 nt, Human
ccaguguuuccccagaagagag

SEQ ID NO: 615129 - RNA, 20 nt, Human
ucagccuucucauccugggg

SEQ ID NO: 615130 - RNA, 22 nt, Human
ggcagguggacgugcuaaagcu

SEQ ID NO: 615131 - RNA, 22 nt, Human
agcagggggcauccuugcccuu

SEQ ID NO: 615132 - RNA, 19 nt, Human
acagucagggaauaaagac

SEQ ID NO: 615133 - RNA, 23 nt, Human
uggacgccgacuuuggaggcgcu

SEQ ID NO: 615134 - RNA, 22 nt, Human
ucugugugcccaccugacaccu

SEQ ID NO: 615135 - RNA, 21 nt, Human
acaaaggaagucucuuuuaag

SEQ ID NO: 615136 - RNA, 22 nt, Human
ugauuucucauauuguucaaaa

SEQ ID NO: 615137 - RNA, 22 nt, Human
cugggagaugacucagagcagg

SEQ ID NO: 615138 - RNA, 21 nt, Human
gggccacucuagagaaagaaa

SEQ ID NO: 615139 - RNA, 22 nt, Human
uuggaaaugcaaauauauugaa

SEQ ID NO: 615140 - RNA, 22 nt, Human
gcuggcugggucccugagaggc

SEQ ID NO: 615141 - RNA, 22 nt, Human
agcuggcuucucugcagacauu

SEQ ID NO: 615142 - RNA, 22 nt, Human
agguaccauaugcgggagcaac

SEQ ID NO: 615143 - RNA, 22 nt, Human
gguccagguauguggugugaau

SEQ ID NO: 615144 - RNA, 22 nt, Human
auucacaaaugcugccccauuc

SEQ ID NO: 615145 - RNA, 22 nt, Human
ugcaggucaaucuucagguucc

SEQ ID NO: 615146 - RNA, 22 nt, Human
cuucauguucugccuguggaag

SEQ ID NO: 615147 - RNA, 22 nt, Human
uuagagaauuccaaaugacuac

SEQ ID NO: 615148 - RNA, 20 nt, Human
agggucaguagcacagagcu

SEQ ID NO: 615149 - RNA, 22 nt, Human
caggcugggcagccuccccggc

SEQ ID NO: 615150 - RNA, 22 nt, Human
accugaggacuggaugguagaa

SEQ ID NO: 615151 - RNA, 22 nt, Human
ugguccugucucaaggagccuu

SEQ ID NO: 615152 - RNA, 22 nt, Human
ccagcucuggcuucuugcuggg

SEQ ID NO: 615153 - RNA, 18 nt, Human
ggccucuggacuggcagc

SEQ ID NO: 615154 - RNA, 22 nt, Human
aaauuacagaucaccaaugcau

SEQ ID NO: 615155 - RNA, 22 nt, Human
cugagggcuggagcugaggccu

SEQ ID NO: 615156 - RNA, 22 nt, Human
ugcuuaaaggauaguuuaaacu

SEQ ID NO: 615157 - RNA, 21 nt, Human
agaagccaugccaguaaaauu

SEQ ID NO: 615158 - RNA, 22 nt, Human
accugaggaagggcgagaagcu

SEQ ID NO: 615159 - RNA, 22 nt, Human
ccugcagguuucccccggacgg

SEQ ID NO: 615160 - RNA, 22 nt, Human
caggccaggguugagaagagaa

SEQ ID NO: 615161 - RNA, 20 nt, Human
gcuguggcaaagcuuugugu

SEQ ID NO: 615162 - RNA, 22 nt, Human
auuugucaauaagaugaacaua

SEQ ID NO: 615163 - RNA, 22 nt, Human
uauaaauuauuaggcugcuaaa

SEQ ID NO: 615164 - RNA, 22 nt, Human
uccuucaacuuuuuacuugccc

SEQ ID NO: 615165 - RNA, 22 nt, Human
aagccuucccuuuuugagcuca

SEQ ID NO: 615166 - RNA, 22 nt, Human
ugcaggucucugcaaggccuau

SEQ ID NO: 615167 - RNA, 22 nt, Human
uguuccuggggaccugccuucc

SEQ ID NO: 615168 - RNA, 22 nt, Human
aaagagaaaaagaucccggcuc

SEQ ID NO: 615169 - RNA, 22 nt, Human
ccuggccuuaagggcagggagc

SEQ ID NO: 615170 - RNA, 22 nt, Human
ugccagcucccuuuucuccucc

SEQ ID NO: 615171 - RNA, 22 nt, Human
gagcauuuuugucugcauuuua

SEQ ID NO: 615172 - RNA, 22 nt, Human
aaucuguuaagaacagaaaugu

SEQ ID NO: 615173 - RNA, 22 nt, Human
cccagcucuggaagguggggga

SEQ ID NO: 615174 - RNA, 22 nt, Human
guagaauauaugguuaguauug

SEQ ID NO: 615175 - RNA, 23 nt, Human
uaacucugugaagggugacuggg

SEQ ID NO: 615176 - RNA, 22 nt, Human
aagcagagaaaagcuuagguuc

SEQ ID NO: 615177 - RNA, 19 nt, Human
gagcgcagagggcagggga

SEQ ID NO: 615178 - RNA, 22 nt, Human
ugaggcaggaggauugcaggau

SEQ ID NO: 615179 - RNA, 22 nt, Human
gggcuuuagauugcagaggauu

SEQ ID NO: 615180 - RNA, 22 nt, Human
cugcccugagucaugccagaug

SEQ ID NO: 615181 - RNA, 21 nt, Human
cugugcuuuuuaagugugaug

SEQ ID NO: 615182 - RNA, 22 nt, Human
aaauauugguaggaugcuuguu

SEQ ID NO: 615183 - RNA, 22 nt, Human
accaggaguuuugaccaggggc

SEQ ID NO: 615184 - RNA, 22 nt, Human
cuguggcuaugguguacauacu

SEQ ID NO: 615185 - RNA, 22 nt, Human
cugcccuguuuggacagcccgg

SEQ ID NO: 615186 - RNA, 21 nt, Human
cagcuccacuaaagcagcugu

SEQ ID NO: 615187 - RNA, 22 nt, Human
aaccagagaaauggagugauaa

SEQ ID NO: 615188 - RNA, 22 nt, Human
ggagaggugcaggucaguggca

SEQ ID NO: 615189 - RNA, 22 nt, Human
gacagcagagcagacuaaugga

SEQ ID NO: 615190 - RNA, 22 nt, Human
cagagaaacucagauagcugau

SEQ ID NO: 615191 - RNA, 22 nt, Human
gccuguuucccugacgcuuaca

SEQ ID NO: 615192 - RNA, 22 nt, Human
ugggugaggagaggcugucuaa

SEQ ID NO: 615193 - RNA, 22 nt, Human
gaggccugggagaacuguuuuu

SEQ ID NO: 615194 - RNA, 22 nt, Human
guccagagccggaagagugaca

SEQ ID NO: 615195 - RNA, 19 nt, Human
gaggcgaggcgugcaggag

SEQ ID NO: 615196 - RNA, 22 nt, Human
auguggcuaguccucugcggca

SEQ ID NO: 615197 - RNA, 22 nt, Human
agcuccaggaucugaaaguucg

SEQ ID NO: 615198 - RNA, 18 nt, Human
uucuggcucacucaugcu

SEQ ID NO: 615199 - RNA, 22 nt, Human
acaauguuuuuguucaaagagu

SEQ ID NO: 615200 - RNA, 22 nt, Human
ugaagcaggaaccagcagcauu

SEQ ID NO: 615201 - RNA, 21 nt, Human
gcagccaggacuuugggcugg

SEQ ID NO: 615202 - RNA, 22 nt, Human
cuuaucagauuaucugggcugu

SEQ ID NO: 615203 - RNA, 22 nt, Human
gucacuuuauuaauuuugguga

SEQ ID NO: 615204 - RNA, 22 nt, Human
caggcagggagccacuguauaa

SEQ ID NO: 615205 - RNA, 22 nt, Human
uucuuuuuggauagcugaugaa

SEQ ID NO: 615206 - RNA, 22 nt, Human
guuuauaaggcccaauauuucu

SEQ ID NO: 615207 - RNA, 22 nt, Human
aagcaauagcaacaacuuuaca

SEQ ID NO: 615208 - RNA, 19 nt, Human
ucccucagucugccaggcc

SEQ ID NO: 615209 - RNA, 22 nt, Human
ccaguguucaauacauauuugu

SEQ ID NO: 615210 - RNA, 22 nt, Human
aaaaugcuauuucauggaggag

SEQ ID NO: 615211 - RNA, 22 nt, Human
aguuagagacacaugcacaugc

SEQ ID NO: 615212 - RNA, 22 nt, Human
uagugcaaggauugcugcagag

SEQ ID NO: 615213 - RNA, 20 nt, Human
uaaagacauaagcuacuauc

SEQ ID NO: 615214 - RNA, 22 nt, Human
cugccacuuacuaggcauggug

SEQ ID NO: 615215 - RNA, 22 nt, Human
ucaguguucuggauuuggggca

SEQ ID NO: 615216 - RNA, 22 nt, Human
gccuggagcagacgugucccgg

SEQ ID NO: 615217 - RNA, 22 nt, Human
cagggaugggauggagucaguu

SEQ ID NO: 615218 - RNA, 22 nt, Human
gcugaggcuuagcuaaaaauuu

SEQ ID NO: 615219 - RNA, 22 nt, Human
ugcaggucuccauuggcagacu

SEQ ID NO: 615220 - RNA, 22 nt, Human
gaauuacagccagaagaaugaa

SEQ ID NO: 615221 - RNA, 22 nt, Human
ucagaacaauuccuuuauaaca

SEQ ID NO: 615222 - RNA, 22 nt, Human
guuuuacacaccuaugaaagac

SEQ ID NO: 615223 - RNA, 22 nt, Human
ucugggagcacacgcagugauc

SEQ ID NO: 615224 - RNA, 22 nt, Human
agcuucauaauuccuugacuca

SEQ ID NO: 615225 - RNA, 22 nt, Human
ugaggcaggacuugcauaaagu

SEQ ID NO: 615226 - RNA, 22 nt, Human
gcaaggagacuguagggccaag

SEQ ID NO: 615227 - RNA, 22 nt, Human
cagcuguucacauuuccaaaac

SEQ ID NO: 615228 - RNA, 22 nt, Human
gcugggagaggcccugaaguga

SEQ ID NO: 615229 - RNA, 19 nt, Human
cuccaaguuaagagggagg

SEQ ID NO: 615230 - RNA, 22 nt, Human
ugugugcuaauguaugcucuaa

SEQ ID NO: 615231 - RNA, 22 nt, Human
guauagaaacccagaaagauag

SEQ ID NO: 615232 - RNA, 22 nt, Human
uuuagcaauuauuaaggguuga

SEQ ID NO: 615233 - RNA, 22 nt, Human
augaggcaugugaggagaaggg

SEQ ID NO: 615234 - RNA, 22 nt, Human
ccuccuggugggcgcuucuggc

SEQ ID NO: 615235 - RNA, 22 nt, Human
cuggcucuaagugucagcuccc

SEQ ID NO: 615236 - RNA, 22 nt, Human
aggcauggguagaagagaagcc

SEQ ID NO: 615237 - RNA, 22 nt, Human
cugcauccuggaaauagcuaag

SEQ ID NO: 615238 - RNA, 22 nt, Human
cagaaagcgggaugcagcaugu

SEQ ID NO: 615239 - RNA, 22 nt, Human
ccuuccuuucagggcuaugccu

SEQ ID NO: 615240 - RNA, 20 nt, Human
auuauucauacaugugugac

SEQ ID NO: 615241 - RNA, 22 nt, Human
agaaggguaguuguaagaguga

SEQ ID NO: 615242 - RNA, 22 nt, Human
aggcaguggcugagaccagggg

SEQ ID NO: 615243 - RNA, 22 nt, Human
ucaaaggaaacgugguccuggc

SEQ ID NO: 615244 - RNA, 22 nt, Human
aauguguucacaggaaauacag

SEQ ID NO: 615245 - RNA, 22 nt, Human
ucaaagagcuauucaguugugg

SEQ ID NO: 615246 - RNA, 22 nt, Human
gcaguguuccuucuacuggggc

SEQ ID NO: 615247 - RNA, 22 nt, Human
aaugaacuggagaacaaugacc

SEQ ID NO: 615248 - RNA, 22 nt, Human
accuucaacucaaaguguccca

SEQ ID NO: 615249 - RNA, 22 nt, Human
aaguagcaaucucauuaguugg

SEQ ID NO: 615250 - RNA, 22 nt, Human
agggagaggagggucuuguuga

SEQ ID NO: 615251 - RNA, 22 nt, Human
auggcagaccugggcuggagaa

SEQ ID NO: 615252 - RNA, 22 nt, Human
ugucauuuaguccucugugugu

SEQ ID NO: 615253 - RNA, 22 nt, Human
acagaacaggcugagaaaaaca

SEQ ID NO: 615254 - RNA, 22 nt, Human
uuuacauggaauauugucuugu

SEQ ID NO: 615255 - RNA, 22 nt, Human
uucuuuuaauguucugaaguuu

SEQ ID NO: 615256 - RNA, 22 nt, Human
agcuccugaguagcuuuacuca

SEQ ID NO: 615257 - RNA, 22 nt, Human
ugggagaaucuugcucugcuac

SEQ ID NO: 615258 - RNA, 22 nt, Human
uccucagcaaacacuucacucu

SEQ ID NO: 615259 - RNA, 22 nt, Human
cggcaggugugcucacucugcc

SEQ ID NO: 615260 - RNA, 22 nt, Human
cagggcaaagucuucuagaacc

SEQ ID NO: 615261 - RNA, 22 nt, Human
guggaaggugcuagaacaagga

SEQ ID NO: 615262 - RNA, 22 nt, Human
cacagauagaccuuaugagauu

SEQ ID NO: 615263 - RNA, 22 nt, Human
ucccuuguccucuucgucacug

SEQ ID NO: 615264 - RNA, 22 nt, Human
ugcuuaaacacauacauacaua

SEQ ID NO: 615265 - RNA, 22 nt, Human
ggcugaggcucaugccaucuug

SEQ ID NO: 615266 - RNA, 22 nt, Human
aacagaaggggguauuuacauu

SEQ ID NO: 615267 - RNA, 21 nt, Human
gccugggauaguggccuccgg

SEQ ID NO: 615268 - RNA, 22 nt, Human
ugaggccugaagccuggagccu

SEQ ID NO: 615269 - RNA, 22 nt, Human
gagccaggucgggccgcggcga

SEQ ID NO: 615270 - RNA, 22 nt, Human
augcuugggacucccuguagca

SEQ ID NO: 615271 - RNA, 22 nt, Human
uagcaaaagcucaacaggaagg

SEQ ID NO: 615272 - RNA, 19 nt, Human
accugccaugacagccuga

SEQ ID NO: 615273 - RNA, 22 nt, Human
caggaacaacucccagcaucuc

SEQ ID NO: 615274 - RNA, 22 nt, Human
ugaccuguguuugcuguugcuc

SEQ ID NO: 615275 - RNA, 22 nt, Human
ugacagaacagguugggagcaa

SEQ ID NO: 615276 - RNA, 22 nt, Human
cuggcuuguuuuaagaauacaa

SEQ ID NO: 615277 - RNA, 18 nt, Human
aggcaggugcuaauauuu

SEQ ID NO: 615278 - RNA, 22 nt, Human
gcuggcuguaucaccuggccag

SEQ ID NO: 615279 - RNA, 22 nt, Human
uuccuacagcccugaaucucua

SEQ ID NO: 615280 - RNA, 23 nt, Human
ucuguuuugcaacaugugacaag

SEQ ID NO: 615281 - RNA, 22 nt, Human
auguacaaucuaucacaagaag

SEQ ID NO: 615282 - RNA, 22 nt, Human
aaauaugugaucagugaauaaa

SEQ ID NO: 615283 - RNA, 22 nt, Human
ggcuuuauauuguuugagcaga

SEQ ID NO: 615284 - RNA, 22 nt, Human
ggccuugguuccaaagcaggca

SEQ ID NO: 615285 - RNA, 22 nt, Human
gccaggcuguggggaacuugaa

SEQ ID NO: 615286 - RNA, 22 nt, Human
aagauacaucauucaggaguga

SEQ ID NO: 615287 - RNA, 22 nt, Human
ccaaaccauccaucuccaggcu

SEQ ID NO: 615288 - RNA, 20 nt, Human
aaguccugaccuagucuaaa

SEQ ID NO: 615289 - RNA, 23 nt, Human
aaagaugugaguauucauauggc

SEQ ID NO: 615290 - RNA, 21 nt, Human
aagaggaagcauuauggcaua

SEQ ID NO: 615291 - RNA, 22 nt, Human
cuguccuccagacgacaguccc

SEQ ID NO: 615292 - RNA, 22 nt, Human
uuauuuacaacucuucucuucc

SEQ ID NO: 615293 - RNA, 22 nt, Human
ugaggcagugcugggaagccug

SEQ ID NO: 615294 - RNA, 22 nt, Human
auggaagggacagaagggcaag

SEQ ID NO: 615295 - RNA, 22 nt, Human
caggcccagcccuuagccaggu

SEQ ID NO: 615296 - RNA, 22 nt, Human
cauggccacaucuagcugcaag

SEQ ID NO: 615297 - RNA, 22 nt, Human
ucccaggguuacagccagggca

SEQ ID NO: 615298 - RNA, 22 nt, Human
uacaacaguucaugaaaugaaa

SEQ ID NO: 615299 - RNA, 22 nt, Human
aagcacugggaggaggcugaga

SEQ ID NO: 615300 - RNA, 22 nt, Human
ccuggagaccagaggauacuuc

SEQ ID NO: 615301 - RNA, 22 nt, Human
ugccaccuaguggucuuuaguc

SEQ ID NO: 615302 - RNA, 22 nt, Human
gugcuggggagauaggaagaga

SEQ ID NO: 615303 - RNA, 22 nt, Human
aggcccuuaggaccccugcgug

SEQ ID NO: 615304 - RNA, 22 nt, Human
ggcugggagccccacagaguca

SEQ ID NO: 615305 - RNA, 22 nt, Human
uacaagagacaccagggaggcu

SEQ ID NO: 615306 - RNA, 22 nt, Human
cuuaagauugucagcuucagcc

SEQ ID NO: 615307 - RNA, 22 nt, Human
cuuggccugacauguggcaggg

SEQ ID NO: 615308 - RNA, 22 nt, Human
gcuggcuuuugaagucuagcua

SEQ ID NO: 615309 - RNA, 22 nt, Human
ggaaagauuugucacaugaaug

SEQ ID NO: 615310 - RNA, 22 nt, Human
uuccuugaccacugcauaauga

SEQ ID NO: 615311 - RNA, 22 nt, Human
cagaggcugcucuggguggcau

SEQ ID NO: 615312 - RNA, 19 nt, Human
uccagccugcuguuucucu

SEQ ID NO: 615313 - RNA, 22 nt, Human
ucagcaggguuugacuucuaau

SEQ ID NO: 615314 - RNA, 22 nt, Human
agcacaugcacagugcuacacu

SEQ ID NO: 615315 - RNA, 22 nt, Human
aguuuccuuggauucaauuugg

SEQ ID NO: 615316 - RNA, 22 nt, Human
caccaggcugaaccagagggga

SEQ ID NO: 615317 - RNA, 22 nt, Human
uccugggcuuaagugauccucc

SEQ ID NO: 615318 - RNA, 22 nt, Human
uccugcaggcuugaguccucag

SEQ ID NO: 615319 - RNA, 22 nt, Human
cuccugggaugacucuuucuuu

SEQ ID NO: 615320 - RNA, 22 nt, Human
ucuguggccugccuccucauuu

SEQ ID NO: 615321 - RNA, 22 nt, Human
uacaaaguuugggguccucaaa

SEQ ID NO: 615322 - RNA, 20 nt, Human
gggaggccccagaguccagg

SEQ ID NO: 615323 - RNA, 22 nt, Human
aagugcuuuacaaaugucuguu

SEQ ID NO: 615324 - RNA, 22 nt, Human
ugguccaguagcagggauacca

SEQ ID NO: 615325 - RNA, 21 nt, Human
aaagcagcccauggcacaguc

SEQ ID NO: 615326 - RNA, 22 nt, Human
gcucaccacugcuagagucuau

SEQ ID NO: 615327 - RNA, 19 nt, Human
cugggcugaggucugccuu

SEQ ID NO: 615328 - RNA, 22 nt, Human
augcccugcucucgggaaggga

SEQ ID NO: 615329 - RNA, 22 nt, Human
acaccuuugccccaagucauag

SEQ ID NO: 615330 - RNA, 22 nt, Human
cuccaggguuccccgauccacu

SEQ ID NO: 615331 - RNA, 22 nt, Human
cuggccuggucuggccucucca

SEQ ID NO: 615332 - RNA, 22 nt, Human
gccugguggugugcucaagugg

SEQ ID NO: 615333 - RNA, 22 nt, Human
uucuuuguggcagugagcuggg

SEQ ID NO: 615334 - RNA, 22 nt, Human
ugaacacacacaucuuaauaau

SEQ ID NO: 615335 - RNA, 22 nt, Human
gaaagaaugcuauagugacuuc

SEQ ID NO: 615336 - RNA, 22 nt, Human
gcaguguuaaugcgaguguuca

SEQ ID NO: 615337 - RNA, 22 nt, Human
ugaagcaggguggccagauugu

SEQ ID NO: 615338 - RNA, 22 nt, Human
gccuguuuaaguauucugacau

SEQ ID NO: 615339 - RNA, 22 nt, Human
aaucauaauuguauacauucau

SEQ ID NO: 615340 - RNA, 22 nt, Human
cuggcucuucagugcuugguuc

SEQ ID NO: 615341 - RNA, 22 nt, Human
gcucuuuggauuccuuuacaaa

SEQ ID NO: 615342 - RNA, 22 nt, Human
uuuucaugucauguccuugagg

SEQ ID NO: 615343 - RNA, 22 nt, Human
uccaaaggcccuaauaagcuug

SEQ ID NO: 615344 - RNA, 20 nt, Human
accaggagauggaggcaggg

SEQ ID NO: 615345 - RNA, 20 nt, Human
uccugagugcaguuggcuug

SEQ ID NO: 615346 - RNA, 22 nt, Human
cugccuuugcccuugacacugu

SEQ ID NO: 615347 - RNA, 19 nt, Human
cuuugcuuguuucuguguc

SEQ ID NO: 615348 - RNA, 22 nt, Human
agcacagagguggaaguguaua

SEQ ID NO: 615349 - RNA, 22 nt, Human
ugccauuucuuucaauauucuu

SEQ ID NO: 615350 - RNA, 22 nt, Human
cuccuggggcacuuagaagcaa

SEQ ID NO: 615351 - RNA, 22 nt, Human
ggcacacaaaggcagcauuuga

SEQ ID NO: 615352 - RNA, 21 nt, Human
uggcucugcucagagcagucc

SEQ ID NO: 615353 - RNA, 22 nt, Human
uccuggccugucuggaguagcu

SEQ ID NO: 615354 - RNA, 17 nt, Human
aggcagguaagaguuau

SEQ ID NO: 615355 - RNA, 22 nt, Human
agaauaugaucggaauacagau

SEQ ID NO: 615356 - RNA, 21 nt, Human
gugcccuguucccacaugccc

SEQ ID NO: 615357 - RNA, 20 nt, Human
gggaugagaguccuagcucu

SEQ ID NO: 615358 - RNA, 22 nt, Human
aacagugucaggauuacagaua

SEQ ID NO: 615359 - RNA, 22 nt, Human
gcacaaaagguacuucauguag

SEQ ID NO: 615360 - RNA, 22 nt, Human
agucucugucguagaucagcgu

SEQ ID NO: 615361 - RNA, 21 nt, Human
ccagaggccucucuuggccac

SEQ ID NO: 615362 - RNA, 22 nt, Human
uuaaaaauauguagggcccgau

SEQ ID NO: 615363 - RNA, 22 nt, Human
agccuugaaugcgcugcauugg

SEQ ID NO: 615364 - RNA, 22 nt, Human
aauguuugugcauaaauauguu

SEQ ID NO: 615365 - RNA, 22 nt, Human
caguguuuguggaauucaggug

SEQ ID NO: 615366 - RNA, 22 nt, Human
aagcagagaccggcuaauggag

SEQ ID NO: 615367 - RNA, 22 nt, Human
uccaggagacacaagguacaua

SEQ ID NO: 615368 - RNA, 23 nt, Human
agcuccaggugauuguaaugugu

SEQ ID NO: 615369 - RNA, 22 nt, Human
gcugaggcggaaggauugcuag

SEQ ID NO: 615370 - RNA, 22 nt, Human
ucccugggaccggcagcucaca

SEQ ID NO: 615371 - RNA, 22 nt, Human
ugggccagcacugggugcucau

SEQ ID NO: 615372 - RNA, 22 nt, Human
uccagagcagguggucagaagg

SEQ ID NO: 615373 - RNA, 22 nt, Human
aaaucgguugguucaagguaau

SEQ ID NO: 615374 - RNA, 20 nt, Human
uggccuuggggagcucacac

SEQ ID NO: 615375 - RNA, 22 nt, Human
guccugugugagugcaccaccu

SEQ ID NO: 615376 - RNA, 20 nt, Human
cacagagucuugcagcguuc

SEQ ID NO: 615377 - RNA, 17 nt, Human
ccucagcuucuuuccuc

SEQ ID NO: 615378 - RNA, 22 nt, Human
aauaaugagacagcuuauuuaa

SEQ ID NO: 615379 - RNA, 22 nt, Human
ggagcuguguuauccauuccca

SEQ ID NO: 615380 - RNA, 22 nt, Human
agagccugugauugucaucacc

SEQ ID NO: 615381 - RNA, 22 nt, Human
guggaaggaagagauggcccca

SEQ ID NO: 615382 - RNA, 22 nt, Human
acaguguucugcuuuuuaaucc

SEQ ID NO: 615383 - RNA, 22 nt, Human
uuagcaaauaucuugaaacagg

SEQ ID NO: 615384 - RNA, 22 nt, Human
ugaggcaggacauggacaacug

SEQ ID NO: 615385 - RNA, 22 nt, Human
caucaugucugcaggaaugugu

SEQ ID NO: 615386 - RNA, 20 nt, Human
uauaaauucagagcuuuggu

SEQ ID NO: 615387 - RNA, 22 nt, Human
ugccgcuccaggucucgcggug

SEQ ID NO: 615388 - RNA, 22 nt, Human
uccugccaggagugcuggcccu

SEQ ID NO: 615389 - RNA, 20 nt, Human
augcccuguccucuucuguu

SEQ ID NO: 615390 - RNA, 22 nt, Human
uccuggcccgaucccugugaag

SEQ ID NO: 615391 - RNA, 22 nt, Human
ugucucaucucuuaaccccacu

SEQ ID NO: 615392 - RNA, 22 nt, Human
caccuguuagcucuaauuuucu

SEQ ID NO: 615393 - RNA, 21 nt, Human
uucuuucugaaucugaaguau

SEQ ID NO: 615394 - RNA, 22 nt, Human
uuucagagucuggcugcagccu

SEQ ID NO: 615395 - RNA, 20 nt, Human
gaaguccuuucacucuuccc

SEQ ID NO: 615396 - RNA, 22 nt, Human
uuuuauaaagagagucaguugg

SEQ ID NO: 615397 - RNA, 22 nt, Human
cccugcagagccagcccugacc

SEQ ID NO: 615398 - RNA, 22 nt, Human
gccaggcucucagugacugccc

SEQ ID NO: 615399 - RNA, 22 nt, Human
gcugggagugggcaagaugaga

SEQ ID NO: 615400 - RNA, 22 nt, Human
cugugcuucagagucagugcug

SEQ ID NO: 615401 - RNA, 21 nt, Human
cuguccucagauguggacgag

SEQ ID NO: 615402 - RNA, 22 nt, Human
uuccauuuuucuaacucucaga

SEQ ID NO: 615403 - RNA, 22 nt, Human
accuguuuguguuuggacugca

SEQ ID NO: 615404 - RNA, 22 nt, Human
uggccugaguugucugcaggcc

SEQ ID NO: 615405 - RNA, 22 nt, Human
auucauaacggcaaaugucacc

SEQ ID NO: 615406 - RNA, 22 nt, Human
ggcgccagcccaggccgucgug

SEQ ID NO: 615407 - RNA, 22 nt, Human
ccaguguuccagagagcugaug

SEQ ID NO: 615408 - RNA, 22 nt, Human
uaaaugaguaauauagcuguuu

SEQ ID NO: 615409 - RNA, 22 nt, Human
gacccugaggaugcaccagcag

SEQ ID NO: 615410 - RNA, 22 nt, Human
gacagcagacaaaccauguuuu

SEQ ID NO: 615411 - RNA, 22 nt, Human
augaauugaaagaagaauaucu

SEQ ID NO: 615412 - RNA, 22 nt, Human
ggagaaggcgaagucauucuuu

SEQ ID NO: 615413 - RNA, 18 nt, Human
ucucuucuuggcagucaa

SEQ ID NO: 615414 - RNA, 22 nt, Human
guccagaguauucaaguaacuu

SEQ ID NO: 615415 - RNA, 22 nt, Human
aaagauaauguuuccuuauucu

SEQ ID NO: 615416 - RNA, 22 nt, Human
caaaugaauuucccugcaaaug

SEQ ID NO: 615417 - RNA, 22 nt, Human
uuuauuauguacaggcacuaua

SEQ ID NO: 615418 - RNA, 22 nt, Human
aacacauggcaagagcaggaaa

SEQ ID NO: 615419 - RNA, 22 nt, Human
ugaagcaguucucagaaguggg

SEQ ID NO: 615420 - RNA, 22 nt, Human
ucuuggcuccucacagcaucag

SEQ ID NO: 615421 - RNA, 22 nt, Human
gcagcagguccgcaucaucauc

SEQ ID NO: 615422 - RNA, 22 nt, Human
uccaggcauuccagccauucca

SEQ ID NO: 615423 - RNA, 22 nt, Human
agcuccagggaaagaguggauc

SEQ ID NO: 615424 - RNA, 22 nt, Human
caaaugcaugagaaauaagagg

SEQ ID NO: 615425 - RNA, 22 nt, Human
aggagaggaaucauuauuacaa

SEQ ID NO: 615426 - RNA, 22 nt, Human
gaggaaaagagacagguuauug

SEQ ID NO: 615427 - RNA, 20 nt, Human
ugugaaagcaguagaaugac

SEQ ID NO: 615428 - RNA, 22 nt, Human
ggcaggggugaggccacucuga

SEQ ID NO: 615429 - RNA, 22 nt, Human
acaguguuuaaaaaucagaucu

SEQ ID NO: 615430 - RNA, 22 nt, Human
aacauuuaugguagucauugca

SEQ ID NO: 615431 - RNA, 22 nt, Human
auuccuuguauaucuacaugca

SEQ ID NO: 615432 - RNA, 19 nt, Human
uggagaggaaaugcugcuc

SEQ ID NO: 615433 - RNA, 22 nt, Human
ggccaccucugcccuacugagu

SEQ ID NO: 615434 - RNA, 22 nt, Human
gcucucuggaagguaucauuau

SEQ ID NO: 615435 - RNA, 22 nt, Human
gccuguuuaucuaucaugaacu

SEQ ID NO: 615436 - RNA, 22 nt, Human
cugggcccacgagggcucuggg

SEQ ID NO: 615437 - RNA, 22 nt, Human
ccaguguucaucaagaaaaugu

SEQ ID NO: 615438 - RNA, 22 nt, Human
agggcuuuugcaauccaagucu

SEQ ID NO: 615439 - RNA, 22 nt, Human
gcagcgagugcggcugccacag

SEQ ID NO: 615440 - RNA, 22 nt, Human
ucaaguaguacccaaugcgugg

SEQ ID NO: 615441 - RNA, 22 nt, Human
cugguccagaauuuaugauucu

SEQ ID NO: 615442 - RNA, 22 nt, Human
cucuuugugcuauuaugauccu

SEQ ID NO: 615443 - RNA, 22 nt, Human
ucuggccugaaaguccaugcuu

SEQ ID NO: 615444 - RNA, 22 nt, Human
ucaguguuuuaacugucuuuua

SEQ ID NO: 615445 - RNA, 22 nt, Human
uccuuaaaugugaucuagauuu

SEQ ID NO: 615446 - RNA, 22 nt, Human
gggcugugugcccacuucccau

SEQ ID NO: 615447 - RNA, 22 nt, Human
ugccagccuccugauaucaucc

SEQ ID NO: 615448 - RNA, 22 nt, Human
gccaccuguuucgcuugcccag

SEQ ID NO: 615449 - RNA, 22 nt, Human
auacaguguacuauuuagcagu

SEQ ID NO: 615450 - RNA, 22 nt, Human
uuccugggguacuggagaaaau

SEQ ID NO: 615451 - RNA, 22 nt, Human
caagaggagcaggcaggugugc

SEQ ID NO: 615452 - RNA, 22 nt, Human
ggucucaaggaauauaaugagu

SEQ ID NO: 615453 - RNA, 22 nt, Human
agguccagaguugagauacaga

SEQ ID NO: 615454 - RNA, 22 nt, Human
augaggcaggagugcaguggca

SEQ ID NO: 615455 - RNA, 22 nt, Human
acuccugguuuguguccuggcu

SEQ ID NO: 615456 - RNA, 22 nt, Human
ucauuguugacauaccaagagc

SEQ ID NO: 615457 - RNA, 22 nt, Human
ucagcagggccaugcucucucu

SEQ ID NO: 615458 - RNA, 22 nt, Human
uucaggaagguccuauagcaga

SEQ ID NO: 615459 - RNA, 22 nt, Human
uuaugacagaaaugaaaagcug

SEQ ID NO: 615460 - RNA, 22 nt, Human
ccacagguacggauugaggacc

SEQ ID NO: 615461 - RNA, 22 nt, Human
ugcaggagcugcuguccugcuc

SEQ ID NO: 615462 - RNA, 22 nt, Human
gguuccaggcauggcaggaugu

SEQ ID NO: 615463 - RNA, 22 nt, Human
uucauguuuuauucaguaauua

SEQ ID NO: 615464 - RNA, 22 nt, Human
gaggcaugcagagcuggagcag

SEQ ID NO: 615465 - RNA, 21 nt, Human
uggcagggguaguaguacagc

SEQ ID NO: 615466 - RNA, 22 nt, Human
agggaucagcagaggguguggu

SEQ ID NO: 615467 - RNA, 22 nt, Human
guggcucuguaaaaugccugca

SEQ ID NO: 615468 - RNA, 22 nt, Human
caaaggcaugugaguauaugug

SEQ ID NO: 615469 - RNA, 22 nt, Human
uggagugcaguugggaggacac

SEQ ID NO: 615470 - RNA, 22 nt, Human
guaagccugagaaacaccaccu

SEQ ID NO: 615471 - RNA, 22 nt, Human
cgaggcagaggcugaaacggcu

SEQ ID NO: 615472 - RNA, 22 nt, Human
accugccaagcaucaguggcag

SEQ ID NO: 615473 - RNA, 22 nt, Human
augcccugugacucuccuggac

SEQ ID NO: 615474 - RNA, 22 nt, Human
uucaaaacaaucuguuugcauu

SEQ ID NO: 615475 - RNA, 22 nt, Human
aacaaagcaccacugagucagu

SEQ ID NO: 615476 - RNA, 23 nt, Human
ugaagguauuaccugagaugcuc

SEQ ID NO: 615477 - RNA, 22 nt, Human
caagggggcaggaucacacuug

SEQ ID NO: 615478 - RNA, 20 nt, Human
cagugcccguggaaaagaug

SEQ ID NO: 615479 - RNA, 22 nt, Human
acuguggccuuguggguucagg

SEQ ID NO: 615480 - RNA, 22 nt, Human
aaguccaggcuggcguagaguc

SEQ ID NO: 615481 - RNA, 22 nt, Human
uguauuuugugaggaucacucu

SEQ ID NO: 615482 - RNA, 22 nt, Human
acaguacagugcagaggaagau

SEQ ID NO: 615483 - RNA, 22 nt, Human
gacagcaugagagaugccagug

SEQ ID NO: 615484 - RNA, 22 nt, Human
ucaguguucgcucagggacucc

SEQ ID NO: 615485 - RNA, 20 nt, Human
ucacauccucucccaacaug

SEQ ID NO: 615486 - RNA, 22 nt, Human
ugcaaaaauugcuggaaucuuu

SEQ ID NO: 615487 - RNA, 22 nt, Human
cugcccugcagcuccacggacu

SEQ ID NO: 615488 - RNA, 22 nt, Human
ucagccuuugaagggcugcagg

SEQ ID NO: 615489 - RNA, 22 nt, Human
uggccacccccaaugucaguag

SEQ ID NO: 615490 - RNA, 22 nt, Human
guguccagcguggaaugagggu

SEQ ID NO: 615491 - RNA, 20 nt, Human
ugguccaggaccuggugucc

SEQ ID NO: 615492 - RNA, 22 nt, Human
ugucaaaaccuuggaggcaagg

SEQ ID NO: 615493 - RNA, 22 nt, Human
ggugaggguaaauauaggcaaa

SEQ ID NO: 615494 - RNA, 22 nt, Human
ucauucacugcccagcagugua

SEQ ID NO: 615495 - RNA, 22 nt, Human
uuacaacaaaggcacgugcaug

SEQ ID NO: 615496 - RNA, 22 nt, Human
ggccaccuuaaguuaaggauau

SEQ ID NO: 615497 - RNA, 22 nt, Human
gguguccgcgcuguagaagguc

SEQ ID NO: 615498 - RNA, 22 nt, Human
agcagcagauccaaaaaaugug

SEQ ID NO: 615499 - RNA, 19 nt, Human
ugcuauuugaagaagugua

SEQ ID NO: 615500 - RNA, 22 nt, Human
auauuuguuagagucuaugugu

SEQ ID NO: 615501 - RNA, 22 nt, Human
uaggacauaaguauucuaacuu

SEQ ID NO: 615502 - RNA, 19 nt, Human
aguguuaacccaguguugg

SEQ ID NO: 615503 - RNA, 22 nt, Human
acacacaacucauuguguaaua

SEQ ID NO: 615504 - RNA, 22 nt, Human
aguccugguucugauucugaca

SEQ ID NO: 615505 - RNA, 22 nt, Human
aggcuccauuccaggagcuaga

SEQ ID NO: 615506 - RNA, 22 nt, Human
augaggcagguggaggcugcca

SEQ ID NO: 615507 - RNA, 22 nt, Human
ggcuuuauuaacucauccguaa

SEQ ID NO: 615508 - RNA, 22 nt, Human
agagaacagacagaugcaauga

SEQ ID NO: 615509 - RNA, 22 nt, Human
caaaccuugcagaacugggcag

SEQ ID NO: 615510 - RNA, 22 nt, Human
ggcgggagauggggccguucag

SEQ ID NO: 615511 - RNA, 22 nt, Human
guuuauaaugucugugccaaaa

SEQ ID NO: 615512 - RNA, 22 nt, Human
uguauuuucagaguggcauuuc

SEQ ID NO: 615513 - RNA, 22 nt, Human
cagcccugaaacaaccuccucu

SEQ ID NO: 615514 - RNA, 22 nt, Human
uaacuucuggaaaugcaucugc

SEQ ID NO: 615515 - RNA, 22 nt, Human
cuucagaaacuaguaacagcua

SEQ ID NO: 615516 - RNA, 22 nt, Human
agccagggcucuccuucgcgug

SEQ ID NO: 615517 - RNA, 22 nt, Human
ucccauguugugccuggcugca

SEQ ID NO: 615518 - RNA, 22 nt, Human
cuggcccuauuccaggccuucc

SEQ ID NO: 615519 - RNA, 22 nt, Human
ggacaaagccugguggcaggug

SEQ ID NO: 615520 - RNA, 22 nt, Human
cucucccccacagcagccuucu

SEQ ID NO: 615521 - RNA, 22 nt, Human
cugggagagaagcgaagcuggg

SEQ ID NO: 615522 - RNA, 22 nt, Human
cuauauacuuuucacagauguu

SEQ ID NO: 615523 - RNA, 22 nt, Human
cagggugacaaguggcaaggag

SEQ ID NO: 615524 - RNA, 22 nt, Human
uuauuuuaccuuccucugagcu

SEQ ID NO: 615525 - RNA, 22 nt, Human
cuccuggcaguuccccuuguca

SEQ ID NO: 615526 - RNA, 22 nt, Human
gggggcggagcacgugaccacg

SEQ ID NO: 615527 - RNA, 22 nt, Human
gucuguggcaggggagaaguuu

SEQ ID NO: 615528 - RNA, 22 nt, Human
aauguggcauugucauuauugg

SEQ ID NO: 615529 - RNA, 22 nt, Human
ugugaagguagcucuuggcacu

SEQ ID NO: 615530 - RNA, 22 nt, Human
uucagacaauaagagucaucuc

SEQ ID NO: 615531 - RNA, 22 nt, Human
uucuuugugcugaagaagcccu

SEQ ID NO: 615532 - RNA, 22 nt, Human
cuggggauccuuuuugcaucua

SEQ ID NO: 615533 - RNA, 22 nt, Human
cuguggagugcuuggcucagug

SEQ ID NO: 615534 - RNA, 21 nt, Human
ucucugggaggacuugugaga

SEQ ID NO: 615535 - RNA, 22 nt, Human
ccuugcagacaucaguaguggc

SEQ ID NO: 615536 - RNA, 22 nt, Human
uauuauuaugcauagcaugaaa

SEQ ID NO: 615537 - RNA, 22 nt, Human
cuggccuggggccucagcugcu

SEQ ID NO: 615538 - RNA, 22 nt, Human
gggaggagcugagugugugugc

SEQ ID NO: 615539 - RNA, 22 nt, Human
caguaaauacauaucagagaag

SEQ ID NO: 615540 - RNA, 22 nt, Human
ugaggcaggaugcuugcacagg

SEQ ID NO: 615541 - RNA, 22 nt, Human
guccugguagggcucugugucu

SEQ ID NO: 615542 - RNA, 22 nt, Human
ccuggggccccgagccagaagc

SEQ ID NO: 615543 - RNA, 22 nt, Human
gaaaauaggcugcaucuccuuc

SEQ ID NO: 615544 - RNA, 22 nt, Human
uccucccugcacucagugaagu

SEQ ID NO: 615545 - RNA, 22 nt, Human
agggccagcacuccuggcagga

SEQ ID NO: 615546 - RNA, 22 nt, Human
ggacaggugcaaagggcacaug

SEQ ID NO: 615547 - RNA, 22 nt, Human
aguguguacucauauacuucca

SEQ ID NO: 615548 - RNA, 22 nt, Human
ugcccuggugaagugcucuccu

SEQ ID NO: 615549 - RNA, 22 nt, Human
ugccuggguugacucuuagcug

SEQ ID NO: 615550 - RNA, 22 nt, Human
ucauuucaguggcacagaagau

SEQ ID NO: 615551 - RNA, 22 nt, Human
accugcagcugagaaaaugacu

SEQ ID NO: 615552 - RNA, 22 nt, Human
ucuguggccuccuuccacuuac

SEQ ID NO: 615553 - RNA, 22 nt, Human
ccuggcagcgugccgagcugcg

SEQ ID NO: 615554 - RNA, 22 nt, Human
aucccccucuuggauggcggca

SEQ ID NO: 615555 - RNA, 22 nt, Human
ucucuucuaauuaggguccaug

SEQ ID NO: 615556 - RNA, 22 nt, Human
gccacugauuccaagucaauuu

SEQ ID NO: 615557 - RNA, 19 nt, Human
uuccugggguuccauugug

SEQ ID NO: 615558 - RNA, 20 nt, Human
agugggagagggcagacugc

SEQ ID NO: 615559 - RNA, 22 nt, Human
uaccuggggcugggcuuugauu

SEQ ID NO: 615560 - RNA, 22 nt, Human
uccagagccccagucuaguggg

SEQ ID NO: 615561 - RNA, 22 nt, Human
aguugucccggucuagccacuu

SEQ ID NO: 615562 - RNA, 20 nt, Human
ugccagggccagcagaggcu

SEQ ID NO: 615563 - RNA, 21 nt, Human
ugggcucuuuaacccaggcac

SEQ ID NO: 615564 - RNA, 22 nt, Human
uggcagguggcucuggcauucu

SEQ ID NO: 615565 - RNA, 22 nt, Human
acugugugaaacaucaaugugu

SEQ ID NO: 615566 - RNA, 22 nt, Human
ugcacgugggcucucugcucuu

SEQ ID NO: 615567 - RNA, 22 nt, Human
cccuucaagcucucuggguuuu

SEQ ID NO: 615568 - RNA, 22 nt, Human
uccccaguaagccugcacugug

SEQ ID NO: 615569 - RNA, 22 nt, Human
uccucuggcucuuucccuagga

SEQ ID NO: 615570 - RNA, 22 nt, Human
uacaacaggaauuucaacuuug

SEQ ID NO: 615571 - RNA, 22 nt, Human
uuuauuaauguagcauccaugg

SEQ ID NO: 615572 - RNA, 22 nt, Human
gguguucaaaugaacacaugca

SEQ ID NO: 615573 - RNA, 22 nt, Human
ccaaggucuuggacagcuaaug

SEQ ID NO: 615574 - RNA, 22 nt, Human
aggcagguuggggaaaagcacu

SEQ ID NO: 615575 - RNA, 22 nt, Human
uugcccugcggguccugcgcaa

SEQ ID NO: 615576 - RNA, 21 nt, Human
gccugggaaaucugggaagcc

SEQ ID NO: 615577 - RNA, 22 nt, Human
uacauguguucuguuucaaguu

SEQ ID NO: 615578 - RNA, 22 nt, Human
gaagccaacauuccaaguagaa

SEQ ID NO: 615579 - RNA, 22 nt, Human
cgucaucacggcaagcaucucc

SEQ ID NO: 615580 - RNA, 22 nt, Human
gugcccugucucuugucuccag

SEQ ID NO: 615581 - RNA, 22 nt, Human
ugggaaauauucuaaaagucuu

SEQ ID NO: 615582 - RNA, 22 nt, Human
uguccagggauggggucaggga

SEQ ID NO: 615583 - RNA, 23 nt, Human
ugguccugccaacggugccccuc

SEQ ID NO: 615584 - RNA, 22 nt, Human
ccuggggagaagagcuuccccc

SEQ ID NO: 615585 - RNA, 23 nt, Human
acaaugucuguucauaaaauacc

SEQ ID NO: 615586 - RNA, 22 nt, Human
augcccugagcaggccuucaag

SEQ ID NO: 615587 - RNA, 22 nt, Human
gaggcaccagacauggccucau

SEQ ID NO: 615588 - RNA, 22 nt, Human
uacucaaacucacuaagacaga

SEQ ID NO: 615589 - RNA, 22 nt, Human
aggacaaaggaccagaucugga

SEQ ID NO: 615590 - RNA, 22 nt, Human
aauaaugagcuugucuaauugu

SEQ ID NO: 615591 - RNA, 22 nt, Human
uggacuuucuaggguagaggaa

SEQ ID NO: 615592 - RNA, 22 nt, Human
aaccagagugacacucuacaga

SEQ ID NO: 615593 - RNA, 22 nt, Human
gugcuuccucugccaacacucu

SEQ ID NO: 615594 - RNA, 22 nt, Human
auucaauaagucacuguggaau

SEQ ID NO: 615595 - RNA, 22 nt, Human
aaggcugguggauuaugagguc

SEQ ID NO: 615596 - RNA, 21 nt, Human
gucagcagauccagcacuugu

SEQ ID NO: 615597 - RNA, 22 nt, Human
agggcuuugauggcauucucau

SEQ ID NO: 615598 - RNA, 20 nt, Human
gcaggucccuggcaugcaga

SEQ ID NO: 615599 - RNA, 21 nt, Human
caaauacuuagaaacuuaaga

SEQ ID NO: 615600 - RNA, 22 nt, Human
uucuucugacacugaugcugua

SEQ ID NO: 615601 - RNA, 21 nt, Human
cuuuuacauucagucaugaug

SEQ ID NO: 615602 - RNA, 22 nt, Human
gucccuggaucugggacagcug

SEQ ID NO: 615603 - RNA, 22 nt, Human
uuacacaguugguaggggcaga

SEQ ID NO: 615604 - RNA, 22 nt, Human
auuucuguaacuuaugaaaguu

SEQ ID NO: 615605 - RNA, 22 nt, Human
ugcacuuugcaggcauggaaac

SEQ ID NO: 615606 - RNA, 22 nt, Human
caaguagaguucacuugucuuu

SEQ ID NO: 615607 - RNA, 20 nt, Human
cuugauucuuugaugaggua

SEQ ID NO: 615608 - RNA, 20 nt, Human
ggccaccugcuucagacccc

SEQ ID NO: 615609 - RNA, 22 nt, Human
cagguccacggcgcccaggggu

SEQ ID NO: 615610 - RNA, 22 nt, Human
ugacaaagacaaagauaugucc

SEQ ID NO: 615611 - RNA, 22 nt, Human
uagugcaacagggaaagagugu

SEQ ID NO: 615612 - RNA, 17 nt, Human
cuuguugagcucguucc

SEQ ID NO: 615613 - RNA, 23 nt, Human
ugcagaggcaugaucacugcuca

SEQ ID NO: 615614 - RNA, 22 nt, Human
gcagggacaacugugcaccuga

SEQ ID NO: 615615 - RNA, 22 nt, Human
uguggcuuuugcuagcuuugca

SEQ ID NO: 615616 - RNA, 22 nt, Human
uuggcauugaaguuucauuggu

SEQ ID NO: 615617 - RNA, 22 nt, Human
ccucuguacaggucagcaucua

SEQ ID NO: 615618 - RNA, 21 nt, Human
ucagcaggcaccagaaggcug

SEQ ID NO: 615619 - RNA, 22 nt, Human
uaccuguugucacgauaacacu

SEQ ID NO: 615620 - RNA, 22 nt, Human
uuuacaaguacaccuaacagcu

SEQ ID NO: 615621 - RNA, 22 nt, Human
ggccugagaauguaccagaucu

SEQ ID NO: 615622 - RNA, 22 nt, Human
uguccagggggcuuaccuggag

SEQ ID NO: 615623 - RNA, 18 nt, Human
uccuggccacacuaccuu

SEQ ID NO: 615624 - RNA, 22 nt, Human
ggguccagcuacaucagggugg

SEQ ID NO: 615625 - RNA, 22 nt, Human
cagaaauauuccaaguacugca

SEQ ID NO: 615626 - RNA, 22 nt, Human
aaggcagguauugaugccacag

SEQ ID NO: 615627 - RNA, 22 nt, Human
cuguggcucauucuugguggca

SEQ ID NO: 615628 - RNA, 22 nt, Human
agcuggccauugugaguggccu

SEQ ID NO: 615629 - RNA, 22 nt, Human
guccugggaggggcugguccug

SEQ ID NO: 615630 - RNA, 21 nt, Human
ggagaaggacaauguugagua

SEQ ID NO: 615631 - RNA, 22 nt, Human
gggcggggcuuccguccuccac

SEQ ID NO: 615632 - RNA, 21 nt, Human
aggugccaaggagaagcaggc

SEQ ID NO: 615633 - RNA, 22 nt, Human
cagcaggaggugagaugugacc

SEQ ID NO: 615634 - RNA, 22 nt, Human
ugccucuguugagccuuggcug

SEQ ID NO: 615635 - RNA, 22 nt, Human
ugcccuuggguaacuugcugau

SEQ ID NO: 615636 - RNA, 22 nt, Human
cuccugggcugggaacucagcc

SEQ ID NO: 615637 - RNA, 22 nt, Human
aaauauuugucugaggcgguug

SEQ ID NO: 615638 - RNA, 23 nt, Human
cagcuccagugcacucagguagc

SEQ ID NO: 615639 - RNA, 22 nt, Human
aaauaguuuagcucucauuuca

SEQ ID NO: 615640 - RNA, 22 nt, Human
uggaaggccuguuguguccuag

SEQ ID NO: 615641 - RNA, 22 nt, Human
gugaaauauuuaacguccaggu

SEQ ID NO: 615642 - RNA, 22 nt, Human
ugccugggacaugcuguggacu

SEQ ID NO: 615643 - RNA, 22 nt, Human
ugaggcagccugcauuaaagag

SEQ ID NO: 615644 - RNA, 22 nt, Human
auagguccaaggagaggucuuu

SEQ ID NO: 615645 - RNA, 18 nt, Human
gccugccagccgagggac

SEQ ID NO: 615646 - RNA, 22 nt, Human
ugccuucaccaggccuucagcc

SEQ ID NO: 615647 - RNA, 20 nt, Human
uccuggaggcuucauccaua

SEQ ID NO: 615648 - RNA, 22 nt, Human
agguccaggccucaugauggcc

SEQ ID NO: 615649 - RNA, 22 nt, Human
uccaggcaaagccuuguagacg

SEQ ID NO: 615650 - RNA, 22 nt, Human
gugugaaaguaauugcgguuuu

SEQ ID NO: 615651 - RNA, 22 nt, Human
gucuggugggauuccaaguggc

SEQ ID NO: 615652 - RNA, 22 nt, Human
uuuauuaagaugcgaaugcuga

SEQ ID NO: 615653 - RNA, 22 nt, Human
ugagaaugugcaauauccuucc

SEQ ID NO: 615654 - RNA, 22 nt, Human
caugucuuauuuaugcuucuua

SEQ ID NO: 615655 - RNA, 22 nt, Human
uguguguguccucauuugcaga

SEQ ID NO: 615656 - RNA, 22 nt, Human
guuuauaaauucugcuuuuguu

SEQ ID NO: 615657 - RNA, 22 nt, Human
agcccagugggccgaggcgggg

SEQ ID NO: 615658 - RNA, 22 nt, Human
cucuagcugaggucacugcuau

SEQ ID NO: 615659 - RNA, 23 nt, Human
gccucuggagccccagugcucag

SEQ ID NO: 615660 - RNA, 20 nt, Human
ucaggaugugcugagugaag

SEQ ID NO: 615661 - RNA, 22 nt, Human
cuccugggggacagcggcaggg

SEQ ID NO: 615662 - RNA, 22 nt, Human
uauuucacauaccacagagugu

SEQ ID NO: 615663 - RNA, 22 nt, Human
acaaauagagauucaaauaaag

SEQ ID NO: 615664 - RNA, 22 nt, Human
agcauucaaguaauucacuugg

SEQ ID NO: 615665 - RNA, 22 nt, Human
ucccagggcucuagagugcugg

SEQ ID NO: 615666 - RNA, 22 nt, Human
uauuuucauucugugugacugu

SEQ ID NO: 615667 - RNA, 22 nt, Human
ccagaggcuggcaagggcuccu

SEQ ID NO: 615668 - RNA, 22 nt, Human
aaagagaacuuuuacccaagaa

SEQ ID NO: 615669 - RNA, 22 nt, Human
uccuugggaaacaucauguaau

SEQ ID NO: 615670 - RNA, 22 nt, Human
cuucuccuuauaugucccguuc

SEQ ID NO: 615671 - RNA, 22 nt, Human
aggugcaguggcucaugccugu

SEQ ID NO: 615672 - RNA, 22 nt, Human
gaaaaggaaauuuauagagauc

SEQ ID NO: 615673 - RNA, 22 nt, Human
ucuagcugaggguaggagaccu

SEQ ID NO: 615674 - RNA, 22 nt, Human
gagaaagacguaggcugggagg

SEQ ID NO: 615675 - RNA, 22 nt, Human
uucauguguauggaacauuuuu

SEQ ID NO: 615676 - RNA, 22 nt, Human
aagucuguagaaaaacaguuua

SEQ ID NO: 615677 - RNA, 22 nt, Human
ccagggaggagcauuucauggu

SEQ ID NO: 615678 - RNA, 22 nt, Human
uagaaagacuguccagauuuca

SEQ ID NO: 615679 - RNA, 22 nt, Human
gaggccugggagccuguccucc

SEQ ID NO: 615680 - RNA, 20 nt, Human
acaguguuagguuuuuccuu

SEQ ID NO: 615681 - RNA, 22 nt, Human
cagcuucaacugcacagucaac

SEQ ID NO: 615682 - RNA, 22 nt, Human
aguggggaagagcaugggcccu

SEQ ID NO: 615683 - RNA, 22 nt, Human
augcaaaaguaauugcaauuuu

SEQ ID NO: 615684 - RNA, 22 nt, Human
guuccuuguauuucagacauga

SEQ ID NO: 615685 - RNA, 21 nt, Human
cagggcaaccaaguccagaga

SEQ ID NO: 615686 - RNA, 22 nt, Human
agaucugguuggaguccugaca

SEQ ID NO: 615687 - RNA, 22 nt, Human
aaaggucuugucuugacagagu

SEQ ID NO: 615688 - RNA, 23 nt, Human
uuggaagggaagagcauuugaga

SEQ ID NO: 615689 - RNA, 22 nt, Human
aguuucaguucugucauuuaua

SEQ ID NO: 615690 - RNA, 22 nt, Human
gugugaaaugguucucuuuguu

SEQ ID NO: 615691 - RNA, 22 nt, Human
uugaagguuuaacugagaggca

SEQ ID NO: 615692 - RNA, 22 nt, Human
uucuuaaagaggcaaaacacag

SEQ ID NO: 615693 - RNA, 22 nt, Human
uuccugggcaggacgagagucu

SEQ ID NO: 615694 - RNA, 22 nt, Human
uugcacuccagcccgagcaaca

SEQ ID NO: 615695 - RNA, 22 nt, Human
cuguggcugcguaggucuggca

SEQ ID NO: 615696 - RNA, 21 nt, Human
agguccaguucugucuuggac

SEQ ID NO: 615697 - RNA, 22 nt, Human
auuuauuauugugguuacuucu

SEQ ID NO: 615698 - RNA, 22 nt, Human
gcuuccugagaaacaaucugau

SEQ ID NO: 615699 - RNA, 20 nt, Human
agaagccaagugacauguuu

SEQ ID NO: 615700 - RNA, 22 nt, Human
ggugagaaagggauuccuguuc

SEQ ID NO: 615701 - RNA, 22 nt, Human
uccugagggcauuuuggugacu

SEQ ID NO: 615702 - RNA, 22 nt, Human
augcccugggagugcuguacca

SEQ ID NO: 615703 - RNA, 22 nt, Human
ucauagaaauaucacgucuuuu

SEQ ID NO: 615704 - RNA, 22 nt, Human
aaagcacauaguagaaggauuu

SEQ ID NO: 615705 - RNA, 22 nt, Human
uccugggaggcaggaccccuuu

SEQ ID NO: 615706 - RNA, 22 nt, Human
auucacaauuagaaguagauaa

SEQ ID NO: 615707 - RNA, 22 nt, Human
aagccuuccugagugcaaggcc

SEQ ID NO: 615708 - RNA, 22 nt, Human
uggcagccuggaaucucucagc

SEQ ID NO: 615709 - RNA, 22 nt, Human
auguugagagcugagaucagcc

SEQ ID NO: 615710 - RNA, 22 nt, Human
aaguguuuggggaucauuuuaa

SEQ ID NO: 615711 - RNA, 22 nt, Human
ucaguguucagggaccaggucc

SEQ ID NO: 615712 - RNA, 22 nt, Human
cuguggcugcgccaucgaaaac

SEQ ID NO: 615713 - RNA, 22 nt, Human
gggcagguacaagaugcuucuu

SEQ ID NO: 615714 - RNA, 22 nt, Human
aaggccugcucagcugucugug

SEQ ID NO: 615715 - RNA, 22 nt, Human
ccugauuauuguaaauauauuu

SEQ ID NO: 615716 - RNA, 22 nt, Human
aagugugggaaguagguggcga

SEQ ID NO: 615717 - RNA, 22 nt, Human
uggaggucgcuagcgagcgggc

SEQ ID NO: 615718 - RNA, 22 nt, Human
ggcaggguggcccuccagugag

SEQ ID NO: 615719 - RNA, 17 nt, Human
uugcccugauuuuuaac

SEQ ID NO: 615720 - RNA, 22 nt, Human
aaaaaauuaucauaguuccuga

SEQ ID NO: 615721 - RNA, 22 nt, Human
cuccugggagcuguggcagagc

SEQ ID NO: 615722 - RNA, 22 nt, Human
gccaccucuuugucucugccgc

SEQ ID NO: 615723 - RNA, 22 nt, Human
ucaaaggaauuugauuuugaug

SEQ ID NO: 615724 - RNA, 22 nt, Human
uucuggcucuccccugcugggu

SEQ ID NO: 615725 - RNA, 22 nt, Human
gcucuuauagucccagcauguu

SEQ ID NO: 615726 - RNA, 22 nt, Human
gaaaucuuccaauggucacauc

SEQ ID NO: 615727 - RNA, 22 nt, Human
uccuggaguugucuguacucau

SEQ ID NO: 615728 - RNA, 22 nt, Human
cagugggugccaucgugcccuu

SEQ ID NO: 615729 - RNA, 22 nt, Human
agggccugcucuaucacucuca

SEQ ID NO: 615730 - RNA, 22 nt, Human
caaguagagauuacagugugca

SEQ ID NO: 615731 - RNA, 22 nt, Human
agacauuauggcuuucacuggg

SEQ ID NO: 615732 - RNA, 22 nt, Human
uugcccugcguuaccaucucuu

SEQ ID NO: 615733 - RNA, 22 nt, Human
cuuagcaugcaguguucugccc

SEQ ID NO: 615734 - RNA, 22 nt, Human
ugcaaguaguccagccuuuggg

SEQ ID NO: 615735 - RNA, 22 nt, Human
gcugcccugucugcagcaggac

SEQ ID NO: 615736 - RNA, 22 nt, Human
auagugucagaaaaucauaaga

SEQ ID NO: 615737 - RNA, 22 nt, Human
aaaugaguagcgaugcacauua

SEQ ID NO: 615738 - RNA, 22 nt, Human
uuugggcaggcuuuucccuaga

SEQ ID NO: 615739 - RNA, 22 nt, Human
aggcagcguagcaaggcuagua

SEQ ID NO: 615740 - RNA, 22 nt, Human
cagugcaauguuaaauaggaaa

SEQ ID NO: 615741 - RNA, 22 nt, Human
agaaggguucaggaauauguua

SEQ ID NO: 615742 - RNA, 23 nt, Human
aggcagguuugggcucuucuugu

SEQ ID NO: 615743 - RNA, 22 nt, Human
acaguguuauuucugaguaaug

SEQ ID NO: 615744 - RNA, 20 nt, Human
accugaggucccuauggucu

SEQ ID NO: 615745 - RNA, 22 nt, Human
ucauccaggaaaagauuuggaa

SEQ ID NO: 615746 - RNA, 22 nt, Human
uuguuuaaaagaaaucauagaa

SEQ ID NO: 615747 - RNA, 22 nt, Human
aagcuguuguucauccugaauu

SEQ ID NO: 615748 - RNA, 22 nt, Human
cccagccugaucucggccagcu

SEQ ID NO: 615749 - RNA, 22 nt, Human
caagcagacaguaggccuagaa

SEQ ID NO: 615750 - RNA, 22 nt, Human
gcagaacaacguaggaguggag

SEQ ID NO: 615751 - RNA, 22 nt, Human
aaugaaagaaugaaacagccca

SEQ ID NO: 615752 - RNA, 22 nt, Human
gcagggggauggaguugaaaug

SEQ ID NO: 615753 - RNA, 21 nt, Human
uggcauggagguagcagugug

SEQ ID NO: 615754 - RNA, 22 nt, Human
guuuuacaaaugacggcauuca

SEQ ID NO: 615755 - RNA, 22 nt, Human
ccacugggggcugcucccaggu

SEQ ID NO: 615756 - RNA, 22 nt, Human
aagcaugggaggccuggaggag

SEQ ID NO: 615757 - RNA, 22 nt, Human
agauaauuauuuacuucaaagu

SEQ ID NO: 615758 - RNA, 22 nt, Human
agaugaaagauuuuuauagaga

SEQ ID NO: 615759 - RNA, 22 nt, Human
cuguggcucuccaauggaggga

SEQ ID NO: 615760 - RNA, 22 nt, Human
cuccagugggggugagccuaga

SEQ ID NO: 615761 - RNA, 22 nt, Human
aagaaaugugaauauugaauag

SEQ ID NO: 615762 - RNA, 23 nt, Human
agcugggaauuuucugaagcuuu

SEQ ID NO: 615763 - RNA, 22 nt, Human
gggcaagugucaagcaugucau

SEQ ID NO: 615764 - RNA, 22 nt, Human
uggcacuugcuucagaugaugu

SEQ ID NO: 615765 - RNA, 18 nt, Human
cuguucagcugaacuaca

SEQ ID NO: 615766 - RNA, 22 nt, Human
ggagggggaagaagcuaaagac

SEQ ID NO: 615767 - RNA, 22 nt, Human
ccaaguaguugagacuacaggu

SEQ ID NO: 615768 - RNA, 19 nt, Human
uuuuuacaaguagguguga

SEQ ID NO: 615769 - RNA, 22 nt, Human
uccuguuuccaauuuguugggu

SEQ ID NO: 615770 - RNA, 22 nt, Human
ucugcaaacuuaaguugaaaua

SEQ ID NO: 615771 - RNA, 22 nt, Human
aagaaagugcuuuguaaauuau

SEQ ID NO: 615772 - RNA, 22 nt, Human
uaguguucuaagaacauccaug

SEQ ID NO: 615773 - RNA, 22 nt, Human
cucuggcuggcaccugaucuga

SEQ ID NO: 615774 - RNA, 22 nt, Human
aaaguagauuucucauggcgaa

SEQ ID NO: 615775 - RNA, 22 nt, Human
aagugcaaugaauagcugcaau

SEQ ID NO: 615776 - RNA, 22 nt, Human
agguacaguagacagacaguua

SEQ ID NO: 615777 - RNA, 22 nt, Human
cucccuggugacucccaaagcu

SEQ ID NO: 615778 - RNA, 22 nt, Human
uggagaggaaagugcaguuuug

SEQ ID NO: 615779 - RNA, 22 nt, Human
acccgggaggcaggagucauag

SEQ ID NO: 615780 - RNA, 22 nt, Human
ccucugccugcacaucauccug

SEQ ID NO: 615781 - RNA, 22 nt, Human
uucaguuccauuucaggugggu

SEQ ID NO: 615782 - RNA, 22 nt, Human
uuccugggauuauugucaagca

SEQ ID NO: 615783 - RNA, 22 nt, Human
auauuacauaaacaugagugaa

SEQ ID NO: 615784 - RNA, 22 nt, Human
acauuaacacuggugcuggugu

SEQ ID NO: 615785 - RNA, 22 nt, Human
agaagcagcaagcccuucaaag

SEQ ID NO: 615786 - RNA, 22 nt, Human
ucugaggcagcuugccacucua

SEQ ID NO: 615787 - RNA, 22 nt, Human
ggggaggccaguggaccguccc

SEQ ID NO: 615788 - RNA, 22 nt, Human
uugauugaauuuugaaaaucua

SEQ ID NO: 615789 - RNA, 22 nt, Human
aaaaaucacuuuuauaggcagc

SEQ ID NO: 615790 - RNA, 22 nt, Human
cagguccacagcccaucacugc

SEQ ID NO: 615791 - RNA, 22 nt, Human
gggagggcuuggacccagaugu

SEQ ID NO: 615792 - RNA, 18 nt, Human
ccuguguguguugcaggc

SEQ ID NO: 615793 - RNA, 22 nt, Human
aggucucaaguugagaaggcag

SEQ ID NO: 615794 - RNA, 22 nt, Human
aucuguuguuuguuugcuaaag

SEQ ID NO: 615795 - RNA, 23 nt, Human
auuuacagcugugugagcaaguu

SEQ ID NO: 615796 - RNA, 22 nt, Human
uuccugugauauuagccacugu

SEQ ID NO: 615797 - RNA, 22 nt, Human
guggaaggaauuaacagacuag

SEQ ID NO: 615798 - RNA, 22 nt, Human
agguucagugccuggaacaggg

SEQ ID NO: 615799 - RNA, 22 nt, Human
cccauucuucaugguuuccugu

SEQ ID NO: 615800 - RNA, 22 nt, Human
uccaggaguggggcagaggucu

SEQ ID NO: 615801 - RNA, 22 nt, Human
gaggcaguggucugaugcaagg

SEQ ID NO: 615802 - RNA, 22 nt, Human
agggucugaccaccaguaggga

SEQ ID NO: 615803 - RNA, 22 nt, Human
cuucuugucaauuugccauugu

SEQ ID NO: 615804 - RNA, 22 nt, Human
aguguucauuuauucauucacu

SEQ ID NO: 615805 - RNA, 23 nt, Human
uaaagacagccuucaggauucug

SEQ ID NO: 615806 - RNA, 22 nt, Human
agcaccuggucuccuggcgcug

SEQ ID NO: 615807 - RNA, 22 nt, Human
aaaagagagcugaggagcucca

SEQ ID NO: 615808 - RNA, 22 nt, Human
uuguugaauuaguugacugugu

SEQ ID NO: 615809 - RNA, 22 nt, Human
uuccacaggacuaaaugucauc

SEQ ID NO: 615810 - RNA, 22 nt, Human
auggaaggcuuuaugacucaaa

SEQ ID NO: 615811 - RNA, 22 nt, Human
gugcccuggggugaaccccugg

SEQ ID NO: 615812 - RNA, 22 nt, Human
gggcucagucugcggcgcgcgg

SEQ ID NO: 615813 - RNA, 22 nt, Human
uggcagguagucagaggcgaca

SEQ ID NO: 615814 - RNA, 22 nt, Human
uuucacaaguuucaggauucug

SEQ ID NO: 615815 - RNA, 23 nt, Human
gagcagagcgggcggggguccug

SEQ ID NO: 615816 - RNA, 22 nt, Human
ucuccuugcuacccaguauguc

SEQ ID NO: 615817 - RNA, 22 nt, Human
uuccucuuuagggcuggccagg

SEQ ID NO: 615818 - RNA, 22 nt, Human
uacagaagcugagacacugaga

SEQ ID NO: 615819 - RNA, 22 nt, Human
uccugggcgguuaugugaucug

SEQ ID NO: 615820 - RNA, 22 nt, Human
ucaaauagguaugaguagaaau

SEQ ID NO: 615821 - RNA, 22 nt, Human
gggcaaguugagaagaaugcua

SEQ ID NO: 615822 - RNA, 22 nt, Human
ugcccugggaacacagaugcca

SEQ ID NO: 615823 - RNA, 22 nt, Human
ucccagccuggacccugccagu

SEQ ID NO: 615824 - RNA, 22 nt, Human
uacagugugacauuucuacaaa

SEQ ID NO: 615825 - RNA, 22 nt, Human
aauggcucugauguuguuguga

SEQ ID NO: 615826 - RNA, 22 nt, Human
uugugaauagugccgcaauaaa

SEQ ID NO: 615827 - RNA, 22 nt, Human
gcuuucugguucucaaagcacu

SEQ ID NO: 615828 - RNA, 19 nt, Human
gccugggaugggcagaacu

SEQ ID NO: 615829 - RNA, 22 nt, Human
agacugggauucucccugauca

SEQ ID NO: 615830 - RNA, 22 nt, Human
gacaaagucaacaguacucuca

SEQ ID NO: 615831 - RNA, 22 nt, Human
ugaaugugaugcuaaacauaug

SEQ ID NO: 615832 - RNA, 22 nt, Human
cuuccuugugguccuucucauu

SEQ ID NO: 615833 - RNA, 18 nt, Human
auacaagaucaaguguuc

SEQ ID NO: 615834 - RNA, 22 nt, Human
gagguucauucagcucugucac

SEQ ID NO: 615835 - RNA, 22 nt, Human
ugccagccagggaagcucaccc

SEQ ID NO: 615836 - RNA, 20 nt, Human
guccaggacccagcaggagg

SEQ ID NO: 615837 - RNA, 22 nt, Human
ggagaagaggagcuggaagccu

SEQ ID NO: 615838 - RNA, 22 nt, Human
agguccagugaaacuuuauuug

SEQ ID NO: 615839 - RNA, 22 nt, Human
caggcgggcaggugcggccccu

SEQ ID NO: 615840 - RNA, 21 nt, Human
uccagggaauuucaacuuuua

SEQ ID NO: 615841 - RNA, 22 nt, Human
agguccagcuguugcagccucc

SEQ ID NO: 615842 - RNA, 22 nt, Human
ucccuggguccugcuugcucuc

SEQ ID NO: 615843 - RNA, 22 nt, Human
ggcaugucugauggcccaaguc

SEQ ID NO: 615844 - RNA, 22 nt, Human
uggcuccugcagaccaucugga

SEQ ID NO: 615845 - RNA, 22 nt, Human
augcuuuagugucaaguuuggg

SEQ ID NO: 615846 - RNA, 22 nt, Human
ugagaaaugggucugcugaaga

SEQ ID NO: 615847 - RNA, 22 nt, Human
auccuggguaaguuccuuuuaa

SEQ ID NO: 615848 - RNA, 22 nt, Human
gcaguggcuaggagucuggcgu

SEQ ID NO: 615849 - RNA, 20 nt, Human
ugaagcagccuugauucugu

SEQ ID NO: 615850 - RNA, 22 nt, Human
agguggagaagagaugggcagu

SEQ ID NO: 615851 - RNA, 23 nt, Human
uccugcagauaagcugguugaca

SEQ ID NO: 615852 - RNA, 22 nt, Human
ccaaauauuaacaaaguaauuu

SEQ ID NO: 615853 - RNA, 22 nt, Human
aaguagacuuuugcaucaagga

SEQ ID NO: 615854 - RNA, 22 nt, Human
uccuggggaggguucuggcucc

SEQ ID NO: 615855 - RNA, 22 nt, Human
uucugguucucaggaaugcuaa

SEQ ID NO: 615856 - RNA, 22 nt, Human
agugcaaagggaucagauuggg

SEQ ID NO: 615857 - RNA, 22 nt, Human
aggagauuguacugucaucacu

SEQ ID NO: 615858 - RNA, 22 nt, Human
uccugcagagucccacugauuu

SEQ ID NO: 615859 - RNA, 22 nt, Human
uacaguauggaaaauguauagu

SEQ ID NO: 615860 - RNA, 22 nt, Human
cagagaaagggugaauuccuuc

SEQ ID NO: 615861 - RNA, 22 nt, Human
aaagcagucucagacuuaagca

SEQ ID NO: 615862 - RNA, 22 nt, Human
uccugcagcucugagaagcauc

SEQ ID NO: 615863 - RNA, 22 nt, Human
aggaggcaggaagucuauggga

SEQ ID NO: 615864 - RNA, 19 nt, Human
uuucuaagcuaaaugcuuc

SEQ ID NO: 615865 - RNA, 22 nt, Human
gccuguggccacugcgucugca

SEQ ID NO: 615866 - RNA, 22 nt, Human
agcacuuugggagauaaagcug

SEQ ID NO: 615867 - RNA, 22 nt, Human
ggcaggguggcagaggcucaga

SEQ ID NO: 615868 - RNA, 22 nt, Human
cugcaggagcaaagccucugcu

SEQ ID NO: 615869 - RNA, 22 nt, Human
aguccuggacuuggagucaggg

SEQ ID NO: 615870 - RNA, 22 nt, Human
gcaguguuucaaaucaaaggca

SEQ ID NO: 615871 - RNA, 22 nt, Human
gaaagcagaugaaauugcaaca

SEQ ID NO: 615872 - RNA, 22 nt, Human
cuuaauguggaccugguuucua

SEQ ID NO: 615873 - RNA, 22 nt, Human
cucaguccgucccgcuaggugc

SEQ ID NO: 615874 - RNA, 22 nt, Human
cugcccugaccugccucagagu

SEQ ID NO: 615875 - RNA, 22 nt, Human
ugaggcagcuuuuucugugugu

SEQ ID NO: 615876 - RNA, 22 nt, Human
cccgacuagcugggauuacagg

SEQ ID NO: 615877 - RNA, 22 nt, Human
aauguguuauuucagaauccag

SEQ ID NO: 615878 - RNA, 22 nt, Human
ugcuuccuugagcucuccaauc

SEQ ID NO: 615879 - RNA, 22 nt, Human
cauugugcagggauaaugcagc

SEQ ID NO: 615880 - RNA, 22 nt, Human
gaggcaguccaguggguaagaa

SEQ ID NO: 615881 - RNA, 22 nt, Human
uauacaagaggugagaugagca

SEQ ID NO: 615882 - RNA, 22 nt, Human
accugggaggcggagguugcag

SEQ ID NO: 615883 - RNA, 20 nt, Human
ugacaaagaguaagaggagg

SEQ ID NO: 615884 - RNA, 22 nt, Human
ccugugugguagccagcggugc

SEQ ID NO: 615885 - RNA, 22 nt, Human
auuauaaauauuuucuaggggu

SEQ ID NO: 615886 - RNA, 22 nt, Human
auugacaacccugguaugagca

SEQ ID NO: 615887 - RNA, 22 nt, Human
aguucaaagcugcaguaaugga

SEQ ID NO: 615888 - RNA, 22 nt, Human
gaagauaauuccuacuuauaac

SEQ ID NO: 615889 - RNA, 22 nt, Human
aggcagguagaaggaucuuuau

SEQ ID NO: 615890 - RNA, 19 nt, Human
uggcucuguuucucuggag

SEQ ID NO: 615891 - RNA, 22 nt, Human
aaguccagggaucaaaguaggc

SEQ ID NO: 615892 - RNA, 22 nt, Human
ugaagcuggaaguuagguagac

SEQ ID NO: 615893 - RNA, 22 nt, Human
caggcuggagugcaauggugcu

SEQ ID NO: 615894 - RNA, 22 nt, Human
ucugggagauccaagcagaacu

SEQ ID NO: 615895 - RNA, 22 nt, Human
uuccugguaguaagacaucugg

SEQ ID NO: 615896 - RNA, 22 nt, Human
agggucuguggaugcaucuggg

SEQ ID NO: 615897 - RNA, 23 nt, Human
uguuuuucauucacaugggcugu

SEQ ID NO: 615898 - RNA, 20 nt, Human
gcuuucuaugagauggacug

SEQ ID NO: 615899 - RNA, 22 nt, Human
cgaggcagacaaaaguuggaag

SEQ ID NO: 615900 - RNA, 22 nt, Human
ccuggggagccgccugagcccc

SEQ ID NO: 615901 - RNA, 22 nt, Human
uacauuugcuuugauuuucagc

SEQ ID NO: 615902 - RNA, 22 nt, Human
gccuguuuuugcuucguuuaag

SEQ ID NO: 615903 - RNA, 22 nt, Human
cacaguguagacuaauaauaga

SEQ ID NO: 615904 - RNA, 22 nt, Human
ccugacaggagaagcgcagcau

SEQ ID NO: 615905 - RNA, 22 nt, Human
gccugggaaagaguagggaaau

SEQ ID NO: 615906 - RNA, 22 nt, Human
ggcugagcuuauauaugugcug

SEQ ID NO: 615907 - RNA, 22 nt, Human
agaguccaaaugugcaguuaug

SEQ ID NO: 615908 - RNA, 22 nt, Human
cagacaggcuagccagacucac

SEQ ID NO: 615909 - RNA, 18 nt, Human
agggucagugucacuggc

SEQ ID NO: 615910 - RNA, 22 nt, Human
ucauccaguuguggagagggaa

SEQ ID NO: 615911 - RNA, 22 nt, Human
ggguccagauggugagaguuaa

SEQ ID NO: 615912 - RNA, 22 nt, Human
gguccagaagcugguaggguag

SEQ ID NO: 615913 - RNA, 22 nt, Human
ucccuggagguguuugcucagg

SEQ ID NO: 615914 - RNA, 22 nt, Human
ccugucuguauugguuugcuau

SEQ ID NO: 615915 - RNA, 22 nt, Human
aaagccuuuucuguuuaacaca

SEQ ID NO: 615916 - RNA, 22 nt, Human
uuucagagcucuaggcucucag

SEQ ID NO: 615917 - RNA, 22 nt, Human
agccagggcugcagguuccuug

SEQ ID NO: 615918 - RNA, 22 nt, Human
auggccaccauuuaaugaagcu

SEQ ID NO: 615919 - RNA, 22 nt, Human
gucaagaugagaauucuuuuua

SEQ ID NO: 615920 - RNA, 22 nt, Human
ccuggguuggagagcaauggug

SEQ ID NO: 615921 - RNA, 22 nt, Human
cugcccugcucuccgggaucuu

SEQ ID NO: 615922 - RNA, 22 nt, Human
gauuuucaugauaaacuuguga

SEQ ID NO: 615923 - RNA, 22 nt, Human
ccuggggaagucacuucucuuu

SEQ ID NO: 615924 - RNA, 22 nt, Human
aagacaauuuugaguaugcaca

SEQ ID NO: 615925 - RNA, 22 nt, Human
cagaggcaggauaagaacugcg

SEQ ID NO: 615926 - RNA, 22 nt, Human
gguggcggccacuucagcccug

SEQ ID NO: 615927 - RNA, 22 nt, Human
agugcaaauuauuuaccugauu

SEQ ID NO: 615928 - RNA, 22 nt, Human
accagggcagccgagguguguc

SEQ ID NO: 615929 - RNA, 22 nt, Human
auucagaaaggguugccugguu

SEQ ID NO: 615930 - RNA, 22 nt, Human
ugaaagaacuagcaucuucaag

SEQ ID NO: 615931 - RNA, 22 nt, Human
ccucuuugugccugcaggcugc

SEQ ID NO: 615932 - RNA, 22 nt, Human
ucugaggcccuacccugagccu

SEQ ID NO: 615933 - RNA, 22 nt, Human
ccaguguugcauaggaugggga

SEQ ID NO: 615934 - RNA, 22 nt, Human
gggcagguggcaaagccagagg

SEQ ID NO: 615935 - RNA, 22 nt, Human
uuguauuucgaugcacguguag

SEQ ID NO: 615936 - RNA, 22 nt, Human
agguucagacgcauaauaggca

SEQ ID NO: 615937 - RNA, 22 nt, Human
gccaggucucauaaaugcagcu

SEQ ID NO: 615938 - RNA, 22 nt, Human
agaaaauaauuucuuggcuggu

SEQ ID NO: 615939 - RNA, 22 nt, Human
gaaauauucuugucuuguuuuc

SEQ ID NO: 615940 - RNA, 22 nt, Human
auacagugaauacuuacagugu

SEQ ID NO: 615941 - RNA, 22 nt, Human
accaaggagacaaagguguauu

SEQ ID NO: 615942 - RNA, 22 nt, Human
cuguggcuggccuuauugcugc

SEQ ID NO: 615943 - RNA, 22 nt, Human
ugaggcagcaauugauuauuca

SEQ ID NO: 615944 - RNA, 22 nt, Human
agagcuaagaaacagaauugcu

SEQ ID NO: 615945 - RNA, 22 nt, Human
cuguggagcagggcagggucac

SEQ ID NO: 615946 - RNA, 22 nt, Human
ucucagcugacugcuuuccucg

SEQ ID NO: 615947 - RNA, 22 nt, Human
ucaaaggaguuuaaguuacugg

SEQ ID NO: 615948 - RNA, 22 nt, Human
cuuccuugcugucugcuccagg

SEQ ID NO: 615949 - RNA, 22 nt, Human
cuuugaaaacuuaaauaacagc

SEQ ID NO: 615950 - RNA, 22 nt, Human
uuaaauuauuucuagugaggug

SEQ ID NO: 615951 - RNA, 22 nt, Human
auuugcuuucccuucccugaca

SEQ ID NO: 615952 - RNA, 22 nt, Human
ugggcugcggauaggccucgga

SEQ ID NO: 615953 - RNA, 22 nt, Human
ugcaaauauugggacagucuag

SEQ ID NO: 615954 - RNA, 22 nt, Human
cuuacaagaccaaagaaaggau

SEQ ID NO: 615955 - RNA, 22 nt, Human
cagcucuguaaauuccuucauc

SEQ ID NO: 615956 - RNA, 22 nt, Human
aggucaagggcaagagugaggu

SEQ ID NO: 615957 - RNA, 22 nt, Human
ugcuuaaaaugaugauuauuuu

SEQ ID NO: 615958 - RNA, 22 nt, Human
ugcaaaaacugcaauugcuuuu

SEQ ID NO: 615959 - RNA, 22 nt, Human
aguggcaauugacaacaaagga

SEQ ID NO: 615960 - RNA, 22 nt, Human
uuaaagcugagcccucagaagc

SEQ ID NO: 615961 - RNA, 22 nt, Human
auguccagggcacacagcagug

SEQ ID NO: 615962 - RNA, 22 nt, Human
ggccuuugcguccacgccgcuu

SEQ ID NO: 615963 - RNA, 22 nt, Human
ugaccacagacccaaugacuac

SEQ ID NO: 615964 - RNA, 22 nt, Human
acaaguaguaaauuauuaggug

SEQ ID NO: 615965 - RNA, 22 nt, Human
cacauacaugcacaccuaaaua

SEQ ID NO: 615966 - RNA, 23 nt, Human
agguucaggagauggaggaacaa

SEQ ID NO: 615967 - RNA, 23 nt, Human
ugucaucuccagacucccagugc

SEQ ID NO: 615968 - RNA, 22 nt, Human
caggaggcccacaggccccugc

SEQ ID NO: 615969 - RNA, 18 nt, Human
cgggcgggcgccuggccc

SEQ ID NO: 615970 - RNA, 22 nt, Human
ugcagucuccaccuccugggug

SEQ ID NO: 615971 - RNA, 21 nt, Human
aggugggcagguggaguggcc

SEQ ID NO: 615972 - RNA, 23 nt, Human
ucauggaacugggcaaucuugaa

SEQ ID NO: 615973 - RNA, 22 nt, Human
uuauuugccagaauuucucuug

SEQ ID NO: 615974 - RNA, 22 nt, Human
aauaauuuuagcucagaguugu

SEQ ID NO: 615975 - RNA, 19 nt, Human
ugggagaggcaacagagua

SEQ ID NO: 615976 - RNA, 22 nt, Human
gcacuucuauuuuuuucagugg

SEQ ID NO: 615977 - RNA, 22 nt, Human
cuuugauauaaguauacauagu

SEQ ID NO: 615978 - RNA, 22 nt, Human
ccaggauggggagcagauagaa

SEQ ID NO: 615979 - RNA, 17 nt, Human
uuucagauucacuuucu

SEQ ID NO: 615980 - RNA, 22 nt, Human
gggugcaggcagcccaggcagg

SEQ ID NO: 615981 - RNA, 22 nt, Human
cagugagauaccacagagcaaa

SEQ ID NO: 615982 - RNA, 22 nt, Human
gcucagcugagcgaaggacaug

SEQ ID NO: 615983 - RNA, 22 nt, Human
uuucuuuugaauaguguguggu

SEQ ID NO: 615984 - RNA, 22 nt, Human
aaaggaaaauaaguaguuccau

SEQ ID NO: 615985 - RNA, 22 nt, Human
ccagccuuugcaucccccaucu

SEQ ID NO: 615986 - RNA, 22 nt, Human
aagguccagaggucccgucacc

SEQ ID NO: 615987 - RNA, 22 nt, Human
agguccaguugccagaauggcc

SEQ ID NO: 615988 - RNA, 17 nt, Human
gaaagguccuagaaauc

SEQ ID NO: 615989 - RNA, 22 nt, Human
cugguuuuaauguuauguuuau

SEQ ID NO: 615990 - RNA, 22 nt, Human
aacuuguuuagaagagguuacu

SEQ ID NO: 615991 - RNA, 22 nt, Human
gcugaggccccagggugauggg

SEQ ID NO: 615992 - RNA, 22 nt, Human
acagccagaggagccaggcugg

SEQ ID NO: 615993 - RNA, 22 nt, Human
cuggaaggagaaggaggcugug

SEQ ID NO: 615994 - RNA, 22 nt, Human
ggccacugccuccgccauggcu

SEQ ID NO: 615995 - RNA, 22 nt, Human
aguggcagagccaggguuggga

SEQ ID NO: 615996 - RNA, 22 nt, Human
cagcuauuuugccuaucauggu

SEQ ID NO: 615997 - RNA, 22 nt, Human
caggcacugcacuaccacuuuu

SEQ ID NO: 615998 - RNA, 22 nt, Human
cugcccugauaugauuuagaac

SEQ ID NO: 615999 - RNA, 22 nt, Human
uccagggaucuuuagagucuuu

SEQ ID NO: 616000 - RNA, 22 nt, Human
cugggacacccagagcugcaga

SEQ ID NO: 616001 - RNA, 22 nt, Human
agaacgucuuuacucuuacgaa

SEQ ID NO: 616002 - RNA, 22 nt, Human
ucugucuuugagaucucagccu

SEQ ID NO: 616003 - RNA, 22 nt, Human
ccugggcucaagugaugguccc

SEQ ID NO: 616004 - RNA, 22 nt, Human
acacaagauuguguauugaauu

SEQ ID NO: 616005 - RNA, 22 nt, Human
acauuucucagguaagucauuu

SEQ ID NO: 616006 - RNA, 22 nt, Human
gccaggcuggugcaaggauauu

SEQ ID NO: 616007 - RNA, 22 nt, Human
aaacucuguugagauaauauuu

SEQ ID NO: 616008 - RNA, 22 nt, Human
aguuucaauucuuuucacaaag

SEQ ID NO: 616009 - RNA, 20 nt, Human
acaguguuuuugaguagagc

SEQ ID NO: 616010 - RNA, 20 nt, Human
uggccaccacuguauaucaa

SEQ ID NO: 616011 - RNA, 22 nt, Human
ggcaggacucucaggaccaagc

SEQ ID NO: 616012 - RNA, 22 nt, Human
gcagggcagccacaggcccccu

SEQ ID NO: 616013 - RNA, 22 nt, Human
ggugcccagagccaggaaugag

SEQ ID NO: 616014 - RNA, 22 nt, Human
ugaggcagaaaauagcaguuca

SEQ ID NO: 616015 - RNA, 22 nt, Human
ggagaguuguuuuugccuagau

SEQ ID NO: 616016 - RNA, 22 nt, Human
ucuggagucugagaucugagga

SEQ ID NO: 616017 - RNA, 22 nt, Human
aaauaugacuagaaugccaggu

SEQ ID NO: 616018 - RNA, 22 nt, Human
aagaccuugucuaaacauguag

SEQ ID NO: 616019 - RNA, 22 nt, Human
gcuuuuguggugauggagaggc

SEQ ID NO: 616020 - RNA, 23 nt, Human
gcucaucaggcuuagagucaagg

SEQ ID NO: 616021 - RNA, 22 nt, Human
cugugccuuggcgcugugccac

SEQ ID NO: 616022 - RNA, 22 nt, Human
accugggauggggccagguuua

SEQ ID NO: 616023 - RNA, 22 nt, Human
uacagucacauucugaggucuu

SEQ ID NO: 616024 - RNA, 22 nt, Human
agauauauuuccugcccaaggc

SEQ ID NO: 616025 - RNA, 22 nt, Human
ucccugggccuccugcuaugca

SEQ ID NO: 616026 - RNA, 22 nt, Human
uugaagguaaauuauauugauc

SEQ ID NO: 616027 - RNA, 18 nt, Human
agaagcagguaaaauucu

SEQ ID NO: 616028 - RNA, 22 nt, Human
cugccacucugggugggccugg

SEQ ID NO: 616029 - RNA, 22 nt, Human
uccuggcccacuaugccagcau

SEQ ID NO: 616030 - RNA, 22 nt, Human
gaggccugcuuuggcacucugg

SEQ ID NO: 616031 - RNA, 22 nt, Human
auguuuuauuaccaacuuguac

SEQ ID NO: 616032 - RNA, 22 nt, Human
agcugccuuaaauuacuuugug

SEQ ID NO: 616033 - RNA, 22 nt, Human
cuguggcucugcagucccaaca

SEQ ID NO: 616034 - RNA, 22 nt, Human
agucccaggcagccgagccggu

SEQ ID NO: 616035 - RNA, 22 nt, Human
ugcccuggcuggagugcagugg

SEQ ID NO: 616036 - RNA, 22 nt, Human
ccaguccugccacccugucuau

SEQ ID NO: 616037 - RNA, 22 nt, Human
uaggaagggcucagggcucggu

SEQ ID NO: 616038 - RNA, 22 nt, Human
uuccuggggugaagauauuuuu

SEQ ID NO: 616039 - RNA, 22 nt, Human
uggcagguggagacagcagagc

SEQ ID NO: 616040 - RNA, 22 nt, Human
agucauccaagagccugggcag

SEQ ID NO: 616041 - RNA, 20 nt, Human
gcaacucacccacagcagcu

SEQ ID NO: 616042 - RNA, 22 nt, Human
ccucccuuccccaguagucaag

SEQ ID NO: 616043 - RNA, 22 nt, Human
gucccuggguagcucaguggcu

SEQ ID NO: 616044 - RNA, 22 nt, Human
guccacagcuggccagggccuc

SEQ ID NO: 616045 - RNA, 22 nt, Human
gcugggagccccgagccagcgc

SEQ ID NO: 616046 - RNA, 22 nt, Human
caugucuuauauccugucuuca

SEQ ID NO: 616047 - RNA, 22 nt, Human
gcaguguuacuugguuugcaga

SEQ ID NO: 616048 - RNA, 22 nt, Human
ggcuuuaucaaaugagacccug

SEQ ID NO: 616049 - RNA, 22 nt, Human
uugauucagagaagauuggccc

SEQ ID NO: 616050 - RNA, 22 nt, Human
ccagcucuguaagcugugaaau

SEQ ID NO: 616051 - RNA, 22 nt, Human
cagagaaaaaauccugcucuca

SEQ ID NO: 616052 - RNA, 22 nt, Human
gcaaggucuuucagaaaggaaa

SEQ ID NO: 616053 - RNA, 22 nt, Human
agugucuuugacacauucaaag

SEQ ID NO: 616054 - RNA, 22 nt, Human
gccucugcaacuccgccuuggu

SEQ ID NO: 616055 - RNA, 22 nt, Human
auaugcaagcacauagaauacu

SEQ ID NO: 616056 - RNA, 22 nt, Human
uuaguuuucccaucuuuauggu

SEQ ID NO: 616057 - RNA, 22 nt, Human
ggagaucuugcuugaaggcaug

SEQ ID NO: 616058 - RNA, 22 nt, Human
ccauuguaaauucuguggaagu

SEQ ID NO: 616059 - RNA, 20 nt, Human
cuccaggggaagagccuucc

SEQ ID NO: 616060 - RNA, 21 nt, Human
gaaaauacaaugagcuugacc

SEQ ID NO: 616061 - RNA, 22 nt, Human
auguguguguuuaauccucaaa

SEQ ID NO: 616062 - RNA, 22 nt, Human
ucccugggccuaucuuagcucc

SEQ ID NO: 616063 - RNA, 22 nt, Human
aagcaauaggguaaucuacuca

SEQ ID NO: 616064 - RNA, 22 nt, Human
cagcuucuuagucuuuccuugu

SEQ ID NO: 616065 - RNA, 22 nt, Human
auccucuguggauuacaccuag

SEQ ID NO: 616066 - RNA, 22 nt, Human
uccugcagagacagaggccuca

SEQ ID NO: 616067 - RNA, 22 nt, Human
cagaggcauuacugaaaaggug

SEQ ID NO: 616068 - RNA, 21 nt, Human
uccuggcuuuaugcuaccucu

SEQ ID NO: 616069 - RNA, 22 nt, Human
ucaaaggauaacugagggcagu

SEQ ID NO: 616070 - RNA, 22 nt, Human
uucuggcuugaccccuacuucc

SEQ ID NO: 616071 - RNA, 22 nt, Human
caggcaagauuagagaugagca

SEQ ID NO: 616072 - RNA, 22 nt, Human
cagcucagacgcaggucgagca

SEQ ID NO: 616073 - RNA, 22 nt, Human
auccugggcaagucaauguccc

SEQ ID NO: 616074 - RNA, 22 nt, Human
gugcccuguucauuucucuccc

SEQ ID NO: 616075 - RNA, 22 nt, Human
acagaauaguuggcccugcuau

SEQ ID NO: 616076 - RNA, 22 nt, Human
gcuacaaacugucauggugcuu

SEQ ID NO: 616077 - RNA, 22 nt, Human
uccagaguuguaaguguugaca

SEQ ID NO: 616078 - RNA, 17 nt, Human
ccugggaggaguuauga

SEQ ID NO: 616079 - RNA, 22 nt, Human
ugcccagcacugugccagucac

SEQ ID NO: 616080 - RNA, 22 nt, Human
uggccagugauuaaugacgcuu

SEQ ID NO: 616081 - RNA, 20 nt, Human
gcuucaaagccauccuuuua

SEQ ID NO: 616082 - RNA, 22 nt, Human
uagguucaggagauauugcaca

SEQ ID NO: 616083 - RNA, 22 nt, Human
uuuuuccaccguacuuccugag

SEQ ID NO: 616084 - RNA, 21 nt, Human
cccugcaggccagggcugagc

SEQ ID NO: 616085 - RNA, 22 nt, Human
agaggcagccguauuucaaagg

SEQ ID NO: 616086 - RNA, 22 nt, Human
aauuuguuacacagcaauauaa

SEQ ID NO: 616087 - RNA, 22 nt, Human
ccuggccagcgccggcugcucg

SEQ ID NO: 616088 - RNA, 23 nt, Human
gccagccuugcucuccugcagcc

SEQ ID NO: 616089 - RNA, 22 nt, Human
cugcccugagggccuguguguu

SEQ ID NO: 616090 - RNA, 22 nt, Human
auucaucuaugacucuaaugug

SEQ ID NO: 616091 - RNA, 22 nt, Human
ggucccaguugcccaggucagg

SEQ ID NO: 616092 - RNA, 22 nt, Human
aaggaucaaguggauuuucuua

SEQ ID NO: 616093 - RNA, 22 nt, Human
ucauguuuuugccauaugacuc

SEQ ID NO: 616094 - RNA, 22 nt, Human
ccaguguuauuuuagaguguga

SEQ ID NO: 616095 - RNA, 22 nt, Human
ucugggagaagcugaugugaag

SEQ ID NO: 616096 - RNA, 22 nt, Human
uccagggaagagcagaggcuac

SEQ ID NO: 616097 - RNA, 22 nt, Human
gagugcaaguucuuccuucuuc

SEQ ID NO: 616098 - RNA, 22 nt, Human
cuggguguagauggaaguuugg

SEQ ID NO: 616099 - RNA, 20 nt, Human
uaaauuagccuugaagauua

SEQ ID NO: 616100 - RNA, 21 nt, Human
gccugcaguuuugaagcccuu

SEQ ID NO: 616101 - RNA, 22 nt, Human
gccuguuugagaauagucaggg

SEQ ID NO: 616102 - RNA, 22 nt, Human
acacacaaaucuauuagugaau

SEQ ID NO: 616103 - RNA, 22 nt, Human
gauucaauguugcagauggaau

SEQ ID NO: 616104 - RNA, 22 nt, Human
aacaaaggccguuaauaaccac

SEQ ID NO: 616105 - RNA, 22 nt, Human
aaauugcucuuuaaaaguacug

SEQ ID NO: 616106 - RNA, 22 nt, Human
uccugggaccaggcaccuacug

SEQ ID NO: 616107 - RNA, 22 nt, Human
cuuccugggucagccuggaggu

SEQ ID NO: 616108 - RNA, 22 nt, Human
acagcaaaggacgaacacucug

SEQ ID NO: 616109 - RNA, 22 nt, Human
ucucccucuuugucugcuuugg

SEQ ID NO: 616110 - RNA, 22 nt, Human
ggugggaucaaagagucauucg

SEQ ID NO: 616111 - RNA, 22 nt, Human
guccuggguccccgcaggucag

SEQ ID NO: 616112 - RNA, 22 nt, Human
uacaagaaaguccaguggguuu

SEQ ID NO: 616113 - RNA, 22 nt, Human
guccuagugccuggaagcuggg

SEQ ID NO: 616114 - RNA, 22 nt, Human
uuaaacaccugucuaguguagc

SEQ ID NO: 616115 - RNA, 22 nt, Human
cugggccacaucagaugaagac

SEQ ID NO: 616116 - RNA, 22 nt, Human
ucgaacucauagucguagcugu

SEQ ID NO: 616117 - RNA, 22 nt, Human
uggccaggccggggacagaacu

SEQ ID NO: 616118 - RNA, 22 nt, Human
aggcagguccccuggaaggcac

SEQ ID NO: 616119 - RNA, 22 nt, Human
gcagcucaagagaggugcuaug

SEQ ID NO: 616120 - RNA, 22 nt, Human
caggauggagagugagggguca

SEQ ID NO: 616121 - RNA, 22 nt, Human
uuucaucugugcugccaagacu

SEQ ID NO: 616122 - RNA, 22 nt, Human
cucuuuguggaacggcaguguc

SEQ ID NO: 616123 - RNA, 22 nt, Human
acucaggaaaugaagacugguu

SEQ ID NO: 616124 - RNA, 22 nt, Human
ggcaguucuggaugcauuguca

SEQ ID NO: 616125 - RNA, 22 nt, Human
uggcagguuaugcgggccacau

SEQ ID NO: 616126 - RNA, 22 nt, Human
ccucugccuuuagugaaaguug

SEQ ID NO: 616127 - RNA, 22 nt, Human
agguccagaggcuccuuauuac

SEQ ID NO: 616128 - RNA, 22 nt, Human
caggcuggucccagagcauugc

SEQ ID NO: 616129 - RNA, 19 nt, Human
cagaaauagcgaaguguaa

SEQ ID NO: 616130 - RNA, 22 nt, Human
uugugaguagugccgcaauaaa

SEQ ID NO: 616131 - RNA, 19 nt, Human
cagaguccuugaccagucc

SEQ ID NO: 616132 - RNA, 22 nt, Human
ucugggugugguaucuuagcca

SEQ ID NO: 616133 - RNA, 22 nt, Human
agaggcaggaagagcugauuuu

SEQ ID NO: 616134 - RNA, 22 nt, Human
aaauagacaggcuuaaauagga

SEQ ID NO: 616135 - RNA, 17 nt, Human
cagugaucauuacauua

SEQ ID NO: 616136 - RNA, 22 nt, Human
gggcagguggccucuuguacua

SEQ ID NO: 616137 - RNA, 22 nt, Human
gccuguuuuccugcugugguug

SEQ ID NO: 616138 - RNA, 22 nt, Human
cuggcuuuguucugauugcuuc

SEQ ID NO: 616139 - RNA, 22 nt, Human
agccaugggcucccaguccuuu

SEQ ID NO: 616140 - RNA, 21 nt, Human
acuggcugccaugauccaggg

SEQ ID NO: 616141 - RNA, 18 nt, Human
cagauccaggcagcuauu

SEQ ID NO: 616142 - RNA, 22 nt, Human
ggcaggguuuacaauagcaaua

SEQ ID NO: 616143 - RNA, 22 nt, Human
ggucauugaaaucagaaggguu

SEQ ID NO: 616144 - RNA, 22 nt, Human
guccagccagcugguccuugcc

SEQ ID NO: 616145 - RNA, 22 nt, Human
gaaagaaugagcaucaugacuu

SEQ ID NO: 616146 - RNA, 22 nt, Human
ucuugcuagaaucauuuggaga

SEQ ID NO: 616147 - RNA, 22 nt, Human
gcuggagaaacugcagcugagg

SEQ ID NO: 616148 - RNA, 22 nt, Human
gcauggccuugcuguaguggua

SEQ ID NO: 616149 - RNA, 22 nt, Human
acaugugucuaagaaugaaaga

SEQ ID NO: 616150 - RNA, 22 nt, Human
cagggucaccagagaucugcau

SEQ ID NO: 616151 - RNA, 22 nt, Human
gcagugggccugaggaagggug

SEQ ID NO: 616152 - RNA, 22 nt, Human
cugggagaggaaccucgagggu

SEQ ID NO: 616153 - RNA, 22 nt, Human
cgaggcaggcaggcggaggaua

SEQ ID NO: 616154 - RNA, 21 nt, Human
gccugggaagagaaagguaag

SEQ ID NO: 616155 - RNA, 22 nt, Human
cugggagagccuuuccugaguc

SEQ ID NO: 616156 - RNA, 19 nt, Human
ccucugccagcccgccucu

SEQ ID NO: 616157 - RNA, 22 nt, Human
aggcaggcacuccggaaguguc

SEQ ID NO: 616158 - RNA, 22 nt, Human
agugcgugguuuacagcuaguu

SEQ ID NO: 616159 - RNA, 22 nt, Human
aggucacacuuggaucauagaa

SEQ ID NO: 616160 - RNA, 22 nt, Human
cccugccaaucccgucucucug

SEQ ID NO: 616161 - RNA, 22 nt, Human
ucagcaggugaacaucaugcca

SEQ ID NO: 616162 - RNA, 22 nt, Human
gcagccaggguuaauuauauuu

SEQ ID NO: 616163 - RNA, 22 nt, Human
agucauuaauuaguaggaaggu

SEQ ID NO: 616164 - RNA, 22 nt, Human
cagcuucaugacaaacaguuuu

SEQ ID NO: 616165 - RNA, 22 nt, Human
uccuggugaucaaaauucauuu

SEQ ID NO: 616166 - RNA, 22 nt, Human
ccugaggacagugugaccaugg

SEQ ID NO: 616167 - RNA, 17 nt, Human
ggaaggucaaggggagg

SEQ ID NO: 616168 - RNA, 22 nt, Human
ugguccagaagauauucaacca

SEQ ID NO: 616169 - RNA, 22 nt, Human
cugagaagcaaagaacugcacu

SEQ ID NO: 616170 - RNA, 22 nt, Human
uccugaggccucugugauguga

SEQ ID NO: 616171 - RNA, 22 nt, Human
ccuguugucucuuccuguugac

SEQ ID NO: 616172 - RNA, 19 nt, Human
ugaagcagcaaacucucag

SEQ ID NO: 616173 - RNA, 22 nt, Human
ccugagcuggcagugaccugga

SEQ ID NO: 616174 - RNA, 20 nt, Human
ccagacagcaccugccuggu

SEQ ID NO: 616175 - RNA, 22 nt, Human
ggcguggggccuucugcccgcu

SEQ ID NO: 616176 - RNA, 18 nt, Human
aagcaggguccauugugc

SEQ ID NO: 616177 - RNA, 19 nt, Human
gcucagagacaccuguugc

SEQ ID NO: 616178 - RNA, 22 nt, Human
agagccugggaauuugcauguu

SEQ ID NO: 616179 - RNA, 21 nt, Human
aaugugugcuauuuaucuuuu

SEQ ID NO: 616180 - RNA, 22 nt, Human
gucagugugagauaaucuugga

SEQ ID NO: 616181 - RNA, 22 nt, Human
agggagaguuugauguuuccuc

SEQ ID NO: 616182 - RNA, 22 nt, Human
acuuccuuuugggaaacuguuu

SEQ ID NO: 616183 - RNA, 22 nt, Human
agguccuguccuuggucucuga

SEQ ID NO: 616184 - RNA, 22 nt, Human
aauguauucugggaaaauguua

SEQ ID NO: 616185 - RNA, 22 nt, Human
ggagaaggaauauuggaguagg

SEQ ID NO: 616186 - RNA, 22 nt, Human
cagaaauauuuauugagugaca

SEQ ID NO: 616187 - RNA, 22 nt, Human
ccuggggcucugcacagagcag

SEQ ID NO: 616188 - RNA, 22 nt, Human
cagguccagaaaccaaaggauu

SEQ ID NO: 616189 - RNA, 22 nt, Human
aaugauuuccccuacacagaag

SEQ ID NO: 616190 - RNA, 22 nt, Human
cuccugaggaaaagcuugguca

SEQ ID NO: 616191 - RNA, 22 nt, Human
ggagaggcgaugagucacagcc

SEQ ID NO: 616192 - RNA, 22 nt, Human
cuggccugugggcugucuccgg

SEQ ID NO: 616193 - RNA, 22 nt, Human
aaucucuucccaguaaaaaugg

SEQ ID NO: 616194 - RNA, 22 nt, Human
uguccacuuugucagugucaua

SEQ ID NO: 616195 - RNA, 22 nt, Human
ggcccuguccccuucaguuuug

SEQ ID NO: 616196 - RNA, 22 nt, Human
guggcucuggcuuuccaggcgg

SEQ ID NO: 616197 - RNA, 22 nt, Human
ugcacuuuuauaucacucuggc

SEQ ID NO: 616198 - RNA, 22 nt, Human
uccaggagugcugguuagagua

SEQ ID NO: 616199 - RNA, 22 nt, Human
cacaguguuugauuuaggggcc

SEQ ID NO: 616200 - RNA, 22 nt, Human
acuguggccggaacagugggac

SEQ ID NO: 616201 - RNA, 22 nt, Human
aaggcuggaguacagugcagug

SEQ ID NO: 616202 - RNA, 19 nt, Human
ugucccuggucaccagacu

SEQ ID NO: 616203 - RNA, 22 nt, Human
ugaaaccacugaugguaccaag

SEQ ID NO: 616204 - RNA, 22 nt, Human
cuucaaauacaaguagauuaug

SEQ ID NO: 616205 - RNA, 22 nt, Human
cugcccuguagcuguucuagca

SEQ ID NO: 616206 - RNA, 22 nt, Human
augcauuuuugaguaugaauga

SEQ ID NO: 616207 - RNA, 22 nt, Human
uuuauuuauaagccacuugcug

SEQ ID NO: 616208 - RNA, 18 nt, Human
aggcaggugcuggaaguc

SEQ ID NO: 616209 - RNA, 22 nt, Human
ugaggcaggacugagcgggaug

SEQ ID NO: 616210 - RNA, 22 nt, Human
ugugaagguuaaauaauaugau

SEQ ID NO: 616211 - RNA, 22 nt, Human
caccagcuacagacuacugugu

SEQ ID NO: 616212 - RNA, 22 nt, Human
caugaaagcaggaaugguuuua

SEQ ID NO: 616213 - RNA, 22 nt, Human
ugccuucacugagcuuauggga

SEQ ID NO: 616214 - RNA, 22 nt, Human
cccagaggugaaggagguggga

SEQ ID NO: 616215 - RNA, 22 nt, Human
uuggaaggauuuagagaugucu

SEQ ID NO: 616216 - RNA, 22 nt, Human
gcuggcugaguucugucgucug

SEQ ID NO: 616217 - RNA, 22 nt, Human
agcuccugggccaagcccaugc

SEQ ID NO: 616218 - RNA, 22 nt, Human
gggcagguuggcaucccgggca

SEQ ID NO: 616219 - RNA, 22 nt, Human
agccuucaaccuagcuagagca

SEQ ID NO: 616220 - RNA, 22 nt, Human
gagaagggauauggcuucuuga

SEQ ID NO: 616221 - RNA, 22 nt, Human
auaugaguuucccacuucugga

SEQ ID NO: 616222 - RNA, 23 nt, Human
ccuggguuucagagcugcuuuuc

SEQ ID NO: 616223 - RNA, 22 nt, Human
guuccuuggaagaacuugaggu

SEQ ID NO: 616224 - RNA, 22 nt, Human
cagugggguuucugugggugcu

SEQ ID NO: 616225 - RNA, 23 nt, Human
ccgugaagacagacagacagcag

SEQ ID NO: 616226 - RNA, 22 nt, Human
cagggcggggucugccggcccu

SEQ ID NO: 616227 - RNA, 22 nt, Human
guauuuuuagguaaggaaagua

SEQ ID NO: 616228 - RNA, 22 nt, Human
aggcuccagcagccagaggaag

SEQ ID NO: 616229 - RNA, 22 nt, Human
ucagcaggcugucagcaggggc

SEQ ID NO: 616230 - RNA, 22 nt, Human
uggccagccuugucaucgcuuu

SEQ ID NO: 616231 - RNA, 22 nt, Human
uccugaggaugguugaagugca

SEQ ID NO: 616232 - RNA, 21 nt, Human
aaggcuggagaugcaggucug

SEQ ID NO: 616233 - RNA, 22 nt, Human
uauguugaucauagguaaaaga

SEQ ID NO: 616234 - RNA, 22 nt, Human
agagccaggcggcugggcaccu

SEQ ID NO: 616235 - RNA, 22 nt, Human
auguggcugccaccugccugaa

SEQ ID NO: 616236 - RNA, 22 nt, Human
ugcacaaaggcucccugcugag

SEQ ID NO: 616237 - RNA, 22 nt, Human
guccagagauggacgagcagau

SEQ ID NO: 616238 - RNA, 22 nt, Human
ugguccagacauuucugaggua

SEQ ID NO: 616239 - RNA, 22 nt, Human
guuuauaagguaaaggagagag

SEQ ID NO: 616240 - RNA, 22 nt, Human
uuaaaauuuccccaccauguau

SEQ ID NO: 616241 - RNA, 22 nt, Human
aagccaaauaauguagguacau

SEQ ID NO: 616242 - RNA, 22 nt, Human
gccaggagugucccacucauuu

SEQ ID NO: 616243 - RNA, 22 nt, Human
uuaagaaugugccuuuugguug

SEQ ID NO: 616244 - RNA, 22 nt, Human
ugggagcagcagggagaugcgg

SEQ ID NO: 616245 - RNA, 22 nt, Human
agcugguaaaggggaaagcaga

SEQ ID NO: 616246 - RNA, 22 nt, Human
cuccugggaaaugaaggggcag

SEQ ID NO: 616247 - RNA, 19 nt, Human
uggccaccucugcuguucu

SEQ ID NO: 616248 - RNA, 22 nt, Human
cuccagugagcgcggggcaugg

SEQ ID NO: 616249 - RNA, 22 nt, Human
ggagaaggcacacccaccucug

SEQ ID NO: 616250 - RNA, 19 nt, Human
agagccagacagcauagga

SEQ ID NO: 616251 - RNA, 22 nt, Human
gguggggccagggcuccaaccu

SEQ ID NO: 616252 - RNA, 22 nt, Human
uuuauucuagcucagaauaguu

SEQ ID NO: 616253 - RNA, 20 nt, Human
gcucuuuguaagggaauuug

SEQ ID NO: 616254 - RNA, 22 nt, Human
ccugggagccgacugacugugc

SEQ ID NO: 616255 - RNA, 22 nt, Human
gugcuccucacaguguggcccu

SEQ ID NO: 616256 - RNA, 22 nt, Human
acaguguucacuuaacaaugga

SEQ ID NO: 616257 - RNA, 22 nt, Human
ucucuucuagcuucuugugguu

SEQ ID NO: 616258 - RNA, 22 nt, Human
gaaguagauucguugcaucuug

SEQ ID NO: 616259 - RNA, 22 nt, Human
uuccuuugggaaaucacuaagg

SEQ ID NO: 616260 - RNA, 23 nt, Human
cugggcugcuugagucccuggcu

SEQ ID NO: 616261 - RNA, 22 nt, Human
uggcuccuggcagguguuucaa

SEQ ID NO: 616262 - RNA, 23 nt, Human
aagcacagaaugguuuaggaguu

SEQ ID NO: 616263 - RNA, 22 nt, Human
uggaugugucgcccuggcucuc

SEQ ID NO: 616264 - RNA, 22 nt, Human
gugcccugaaagaguuaauuca

SEQ ID NO: 616265 - RNA, 22 nt, Human
caggccagagcgcgugguuggg

SEQ ID NO: 616266 - RNA, 22 nt, Human
ucugggcucacgagucuggaca

SEQ ID NO: 616267 - RNA, 22 nt, Human
gccucugucauagcucauguga

SEQ ID NO: 616268 - RNA, 22 nt, Human
uuucucaaaagacagaagugaa

SEQ ID NO: 616269 - RNA, 22 nt, Human
augcacaagaggcuagaaaaga

SEQ ID NO: 616270 - RNA, 22 nt, Human
uuccuccagccuggagcacuuc

SEQ ID NO: 616271 - RNA, 21 nt, Human
ugugaguccaucugagcagaa

SEQ ID NO: 616272 - RNA, 22 nt, Human
uccagggaugccagccauguug

SEQ ID NO: 616273 - RNA, 22 nt, Human
agaaugugaagauuuugaauua

SEQ ID NO: 616274 - RNA, 22 nt, Human
aggugacugguuuaucuggcag

SEQ ID NO: 616275 - RNA, 22 nt, Human
ggaaggcagugaaggggcugau

SEQ ID NO: 616276 - RNA, 22 nt, Human
gagagcaggcucucgggggcca

SEQ ID NO: 616277 - RNA, 22 nt, Human
ugggcagggaucucuuuugcaa

SEQ ID NO: 616278 - RNA, 22 nt, Human
ugaggcaguugagcuuccugag

SEQ ID NO: 616279 - RNA, 22 nt, Human
ggauacagcggcuucugcgcga

SEQ ID NO: 616280 - RNA, 22 nt, Human
acagcaguggugcacugagcca

SEQ ID NO: 616281 - RNA, 22 nt, Human
uaauacagaaguguauuaaaau

SEQ ID NO: 616282 - RNA, 22 nt, Human
uguggggaagaguaugacuugg

SEQ ID NO: 616283 - RNA, 22 nt, Human
aaauauaguaaaugcauaguuc

SEQ ID NO: 616284 - RNA, 22 nt, Human
guuucaauuugacccaaaucuu

SEQ ID NO: 616285 - RNA, 22 nt, Human
gccucuguggcucagccuugcu

SEQ ID NO: 616286 - RNA, 22 nt, Human
accuguuuacccugggcucccc

SEQ ID NO: 616287 - RNA, 22 nt, Human
gcugguccucaagggcacagcc

SEQ ID NO: 616288 - RNA, 22 nt, Human
cuuuucugugaugcugacaguc

SEQ ID NO: 616289 - RNA, 22 nt, Human
acuaggaaggcauaugggcaga

SEQ ID NO: 616290 - RNA, 22 nt, Human
agaaaaagucaaggaauuggac

SEQ ID NO: 616291 - RNA, 23 nt, Human
agguggagcugugcagccggggc

SEQ ID NO: 616292 - RNA, 18 nt, Human
gcuccuggagucugacuc

SEQ ID NO: 616293 - RNA, 21 nt, Human
agguuccagcagccagagaau

SEQ ID NO: 616294 - RNA, 22 nt, Human
ggcaggugcuugucgaaggccu

SEQ ID NO: 616295 - RNA, 22 nt, Human
auguaaauuguacugacacacg

SEQ ID NO: 616296 - RNA, 22 nt, Human
ucuggcugcguggccuuuagca

SEQ ID NO: 616297 - RNA, 22 nt, Human
guugacagaaaaauaacauagc

SEQ ID NO: 616298 - RNA, 20 nt, Human
cucacagucaaugcagaggu

SEQ ID NO: 616299 - RNA, 22 nt, Human
uccucacacuauagaugaggau

SEQ ID NO: 616300 - RNA, 22 nt, Human
agagggaucacccuguuucugg

SEQ ID NO: 616301 - RNA, 22 nt, Human
ucccuggcagcuguccuuucag

SEQ ID NO: 616302 - RNA, 22 nt, Human
ugguccaguaaggguggagaga

SEQ ID NO: 616303 - RNA, 22 nt, Human
uccagggccaugaaguugcaca

SEQ ID NO: 616304 - RNA, 22 nt, Human
uuucaugcacaaaugagcaagg

SEQ ID NO: 616305 - RNA, 22 nt, Human
cuccugggaauuuaguugugag

SEQ ID NO: 616306 - RNA, 22 nt, Human
aagcagaacugggaaguagugg

SEQ ID NO: 616307 - RNA, 22 nt, Human
caaauggauacaggcaaacauu

SEQ ID NO: 616308 - RNA, 22 nt, Human
uggcagguuucguuaaaaaugg

SEQ ID NO: 616309 - RNA, 22 nt, Human
aacuucauuccuuuuuaugacu

SEQ ID NO: 616310 - RNA, 22 nt, Human
ucagcaggcccauccuccaggc

SEQ ID NO: 616311 - RNA, 22 nt, Human
agguccaggagauuuggcaauu

SEQ ID NO: 616312 - RNA, 18 nt, Human
gaguguggcacugggccc

SEQ ID NO: 616313 - RNA, 22 nt, Human
aggcauggggcugcagucaggu

SEQ ID NO: 616314 - RNA, 22 nt, Human
uguuaaaguggauaagcugaau

SEQ ID NO: 616315 - RNA, 22 nt, Human
ccaggcugcuguugguguccgc

SEQ ID NO: 616316 - RNA, 22 nt, Human
ugcuuccuucccguucuucucc

SEQ ID NO: 616317 - RNA, 22 nt, Human
uggccacccagcugacgccuuc

SEQ ID NO: 616318 - RNA, 22 nt, Human
agcugccucugcugguuuagaa

SEQ ID NO: 616319 - RNA, 22 nt, Human
gccagccugugcuuggccaggc

SEQ ID NO: 616320 - RNA, 22 nt, Human
aggcuaggguaacagauguggc

SEQ ID NO: 616321 - RNA, 22 nt, Human
gccuguuuggaaucuguuuaau

SEQ ID NO: 616322 - RNA, 20 nt, Human
uccugcagucgcuagcgccc

SEQ ID NO: 616323 - RNA, 22 nt, Human
uguguuuacuucuaugcaguuu

SEQ ID NO: 616324 - RNA, 22 nt, Human
ucagcucucacagaucucaacc

SEQ ID NO: 616325 - RNA, 22 nt, Human
aaguuagaaauaagggcucucc

SEQ ID NO: 616326 - RNA, 22 nt, Human
ugcuuaaaaagcuccaucaaua

SEQ ID NO: 616327 - RNA, 22 nt, Human
gagguccaggguggggccugag

SEQ ID NO: 616328 - RNA, 22 nt, Human
gaaauacaggaaugccacacag

SEQ ID NO: 616329 - RNA, 22 nt, Human
gaggcuagauguuugcugggag

SEQ ID NO: 616330 - RNA, 22 nt, Human
gaugagaauguuuaucaaaugc

SEQ ID NO: 616331 - RNA, 22 nt, Human
uuggaaauggcuguaguuauga

SEQ ID NO: 616332 - RNA, 22 nt, Human
ggacugggccagggguuggacu

SEQ ID NO: 616333 - RNA, 22 nt, Human
uuucaaagguggaagagugaau

SEQ ID NO: 616334 - RNA, 22 nt, Human
ucccugggcacaaucugcuggc

SEQ ID NO: 616335 - RNA, 22 nt, Human
ugugucuguccucgguugaugc

SEQ ID NO: 616336 - RNA, 18 nt, Human
uuucacaaccuccagagg

SEQ ID NO: 616337 - RNA, 22 nt, Human
ucuguuuucauuugucuugaga

SEQ ID NO: 616338 - RNA, 22 nt, Human
cugacccuugcucgggcccugu

SEQ ID NO: 616339 - RNA, 22 nt, Human
uccccagucccggcggugggug

SEQ ID NO: 616340 - RNA, 22 nt, Human
ccugucugaggaggugcucuuu

SEQ ID NO: 616341 - RNA, 22 nt, Human
gaggaggcuuccgggaggcacg

SEQ ID NO: 616342 - RNA, 22 nt, Human
acauuucucccugcaugccugc

SEQ ID NO: 616343 - RNA, 22 nt, Human
cuguaucuguguuggaugaguu

SEQ ID NO: 616344 - RNA, 22 nt, Human
caguaaauauaggaacguggaa

SEQ ID NO: 616345 - RNA, 22 nt, Human
gcagcaggaauuuaaauuuaua

SEQ ID NO: 616346 - RNA, 22 nt, Human
cugccaggcugucccagguccg

SEQ ID NO: 616347 - RNA, 23 nt, Human
ucaaaggaggcaucguucugcag

SEQ ID NO: 616348 - RNA, 22 nt, Human
cuguggugagcaacugacugaa

SEQ ID NO: 616349 - RNA, 22 nt, Human
ggcuauauccucacaagaugga

SEQ ID NO: 616350 - RNA, 22 nt, Human
uaaagacaugcaaagucuaauu

SEQ ID NO: 616351 - RNA, 22 nt, Human
accugggaggcagagguugcag

SEQ ID NO: 616352 - RNA, 19 nt, Human
ccagcagguucauuucagg

SEQ ID NO: 616353 - RNA, 22 nt, Human
cacagugucugugcuucagugu

SEQ ID NO: 616354 - RNA, 22 nt, Human
agaagccagauuguagugggac

SEQ ID NO: 616355 - RNA, 20 nt, Human
guggagaggcuggcgggacu

SEQ ID NO: 616356 - RNA, 21 nt, Human
gaagacaaaugggaauagcug

SEQ ID NO: 616357 - RNA, 23 nt, Human
augguccagccagcugcacagga

SEQ ID NO: 616358 - RNA, 22 nt, Human
ucccaaagcuacucuucugacu

SEQ ID NO: 616359 - RNA, 22 nt, Human
gcggggggcagcagucgcucag

SEQ ID NO: 616360 - RNA, 22 nt, Human
ccucuucuaggacguccuugug

SEQ ID NO: 616361 - RNA, 22 nt, Human
cugcccugugcacaggaaacug

SEQ ID NO: 616362 - RNA, 22 nt, Human
gauuagaugacuaaugagcugu

SEQ ID NO: 616363 - RNA, 22 nt, Human
ucagcagggaggcucugugccc

SEQ ID NO: 616364 - RNA, 22 nt, Human
guauuuuucaguuaggagcuua

SEQ ID NO: 616365 - RNA, 19 nt, Human
acauauguggauauacaug

SEQ ID NO: 616366 - RNA, 22 nt, Human
gcuaccugagcaagagcuucaa

SEQ ID NO: 616367 - RNA, 22 nt, Human
ucaguguuugaacccaggguua

SEQ ID NO: 616368 - RNA, 22 nt, Human
auuaguguacaucucacacgca

SEQ ID NO: 616369 - RNA, 22 nt, Human
aucuuggggaauccucugugua

SEQ ID NO: 616370 - RNA, 22 nt, Human
gcauggccuucagggacagcug

SEQ ID NO: 616371 - RNA, 20 nt, Human
aagguccaaacucuguguuc

SEQ ID NO: 616372 - RNA, 22 nt, Human
uccuggagcuggugucuuuccc

SEQ ID NO: 616373 - RNA, 22 nt, Human
auguguauccaucugucuauuu

SEQ ID NO: 616374 - RNA, 22 nt, Human
guggaaggugaaggagcagcga

SEQ ID NO: 616375 - RNA, 22 nt, Human
gaugcaggugugccacagagcu

SEQ ID NO: 616376 - RNA, 22 nt, Human
gucuggcuagagacacccuccc

SEQ ID NO: 616377 - RNA, 22 nt, Human
auccugggcaaaguaugcuguc

SEQ ID NO: 616378 - RNA, 22 nt, Human
guaagccucugcucuaucuggu

SEQ ID NO: 616379 - RNA, 22 nt, Human
uuaaauuccagccucauaauag

SEQ ID NO: 616380 - RNA, 22 nt, Human
acagggucuuagagaucaccug

SEQ ID NO: 616381 - RNA, 22 nt, Human
gagaaggggugauguggguaau

SEQ ID NO: 616382 - RNA, 22 nt, Human
guggaagggacugccuagagga

SEQ ID NO: 616383 - RNA, 22 nt, Human
uaccucaaguuccaggaaagcg

SEQ ID NO: 616384 - RNA, 22 nt, Human
gugggagaagcccuguucguag

SEQ ID NO: 616385 - RNA, 22 nt, Human
gcaguguuucagugcuuuuucu

SEQ ID NO: 616386 - RNA, 22 nt, Human
uucaccuguguuuuguggcuga

SEQ ID NO: 616387 - RNA, 22 nt, Human
cugugccuccagucucgcuucu

SEQ ID NO: 616388 - RNA, 22 nt, Human
cagugcaagugacugaucaagg

SEQ ID NO: 616389 - RNA, 22 nt, Human
ucagaaacacucuucuucuguc

SEQ ID NO: 616390 - RNA, 22 nt, Human
agcaggucuugcucucaacagg

SEQ ID NO: 616391 - RNA, 22 nt, Human
guggcauugacauguaaacagu

SEQ ID NO: 616392 - RNA, 22 nt, Human
cuggagucacucauguagcugc

SEQ ID NO: 616393 - RNA, 22 nt, Human
aaagccuuuuaugaucaguuaa

SEQ ID NO: 616394 - RNA, 22 nt, Human
auuggaaauacaguagaaaaau

SEQ ID NO: 616395 - RNA, 22 nt, Human
auguaaaguaucugaaaugcug

SEQ ID NO: 616396 - RNA, 22 nt, Human
gcuggguuuucuuccgggccua

SEQ ID NO: 616397 - RNA, 22 nt, Human
acugucuccucaucaugccugg

SEQ ID NO: 616398 - RNA, 22 nt, Human
cuggaaggguacauaggaaacu

SEQ ID NO: 616399 - RNA, 22 nt, Human
cccagccucugggcucacccaa

SEQ ID NO: 616400 - RNA, 22 nt, Human
caucuugcuugucuuuaguaag

SEQ ID NO: 616401 - RNA, 22 nt, Human
agcuuucacgauuuggaacagg

SEQ ID NO: 616402 - RNA, 22 nt, Human
caaguuuuagaaauaucuggau

SEQ ID NO: 616403 - RNA, 22 nt, Human
cuggcucccaugagcucucacg

SEQ ID NO: 616404 - RNA, 22 nt, Human
cgaggcggcggaagugcccgua

SEQ ID NO: 616405 - RNA, 22 nt, Human
uccugagggcugcagucauagg

SEQ ID NO: 616406 - RNA, 22 nt, Human
ggacaggugacugcccagagug

SEQ ID NO: 616407 - RNA, 22 nt, Human
cugugggcuccugcagcucagg

SEQ ID NO: 616408 - RNA, 23 nt, Human
gcagaaauucucacacugaggcc

SEQ ID NO: 616409 - RNA, 22 nt, Human
gcuggcuguguuccuucugcca

SEQ ID NO: 616410 - RNA, 22 nt, Human
cuguggcuuugugucuauugua

SEQ ID NO: 616411 - RNA, 22 nt, Human
cuggguucuauuuuuggcuuca

SEQ ID NO: 616412 - RNA, 22 nt, Human
auucaauaaauaugcuacaugg

SEQ ID NO: 616413 - RNA, 22 nt, Human
gcagggucgcucuaggagauca

SEQ ID NO: 616414 - RNA, 22 nt, Human
aggaagcuuggggcagggcuac

SEQ ID NO: 616415 - RNA, 22 nt, Human
guccugggggcagcugugucca

SEQ ID NO: 616416 - RNA, 22 nt, Human
acagcucugagauauuacuauu

SEQ ID NO: 616417 - RNA, 22 nt, Human
acauuucugcuagaauagguga

SEQ ID NO: 616418 - RNA, 22 nt, Human
ccaaaggaugucccuguguuuu

SEQ ID NO: 616419 - RNA, 22 nt, Human
ugggcucuggggaaacugugau

SEQ ID NO: 616420 - RNA, 22 nt, Human
ugccuggcugaggugacagguu

SEQ ID NO: 616421 - RNA, 22 nt, Human
cugggcucagcaggccaaggcc

SEQ ID NO: 616422 - RNA, 22 nt, Human
cuuuacagauaggaacuacuca

SEQ ID NO: 616423 - RNA, 22 nt, Human
ugauacauaaaccaucauuuug

SEQ ID NO: 616424 - RNA, 22 nt, Human
caguaaaagauggaaauagaau

SEQ ID NO: 616425 - RNA, 22 nt, Human
gaauuccuuaggcucuugacug

SEQ ID NO: 616426 - RNA, 22 nt, Human
gccuggagggucccucucugga

SEQ ID NO: 616427 - RNA, 22 nt, Human
acaaaauagaguucuccccugg

SEQ ID NO: 616428 - RNA, 22 nt, Human
ucaguguuuccugugguacagc

SEQ ID NO: 616429 - RNA, 22 nt, Human
gcccagcugucuggcagggaug

SEQ ID NO: 616430 - RNA, 22 nt, Human
ugcuuuaaaccauggaugugag

SEQ ID NO: 616431 - RNA, 22 nt, Human
ucagaggcuugaagcccaagcc

SEQ ID NO: 616432 - RNA, 22 nt, Human
aggucagguaucagcagguauu

SEQ ID NO: 616433 - RNA, 22 nt, Human
uguggucuccugucuuggccuu

SEQ ID NO: 616434 - RNA, 21 nt, Human
cccuucuugggucaaaguaua

SEQ ID NO: 616435 - RNA, 22 nt, Human
agucuguggauggacuggcaga

SEQ ID NO: 616436 - RNA, 22 nt, Human
aggaucaaaugaaauauuuuga

SEQ ID NO: 616437 - RNA, 23 nt, Human
cagugggcuucuaacugcuccug

SEQ ID NO: 616438 - RNA, 22 nt, Human
accuucaaguaugugggcugaa

SEQ ID NO: 616439 - RNA, 23 nt, Human
cuguggcugaguccuguuggagu

SEQ ID NO: 616440 - RNA, 22 nt, Human
agggcuuuacuucucaguucua

SEQ ID NO: 616441 - RNA, 22 nt, Human
cugugcuuucgagaugugaucu

SEQ ID NO: 616442 - RNA, 22 nt, Human
guucgcaucuugaucauggacu

SEQ ID NO: 616443 - RNA, 20 nt, Human
caugcugccuccauugaugc

SEQ ID NO: 616444 - RNA, 22 nt, Human
gcaguguucuuguugcuuuuau

SEQ ID NO: 616445 - RNA, 22 nt, Human
ggaggccaaagugugggcggcu

SEQ ID NO: 616446 - RNA, 22 nt, Human
gcuggagucuggaggugugcca

SEQ ID NO: 616447 - RNA, 22 nt, Human
ggaggcggggaaggcaucccau

SEQ ID NO: 616448 - RNA, 22 nt, Human
agggccagagucuguguagaua

SEQ ID NO: 616449 - RNA, 22 nt, Human
gcuggccuugugucugaggaag

SEQ ID NO: 616450 - RNA, 22 nt, Human
aaauugcuaaauuguaagaggg

SEQ ID NO: 616451 - RNA, 22 nt, Human
uacaagaaacuacaugaaugca

SEQ ID NO: 616452 - RNA, 22 nt, Human
uuggaaggcccugccuagcagg

SEQ ID NO: 616453 - RNA, 22 nt, Human
agagguggccaugggcgcugga

SEQ ID NO: 616454 - RNA, 22 nt, Human
gguggccauaggaccagccugg

SEQ ID NO: 616455 - RNA, 23 nt, Human
cugcccugaucuugaucuauugu

SEQ ID NO: 616456 - RNA, 22 nt, Human
uccugugucucagcgugaagca

SEQ ID NO: 616457 - RNA, 22 nt, Human
uagguccagcacgguguagcuu

SEQ ID NO: 616458 - RNA, 22 nt, Human
ugaaggucaugguaauauuuuu

SEQ ID NO: 616459 - RNA, 22 nt, Human
aggcagguuacaaaaacuuuau

SEQ ID NO: 616460 - RNA, 22 nt, Human
gccugggauagaggcaaugcau

SEQ ID NO: 616461 - RNA, 22 nt, Human
uagguucagcuuucauccugaa

SEQ ID NO: 616462 - RNA, 22 nt, Human
cuggagaaguacugagacauuu

SEQ ID NO: 616463 - RNA, 22 nt, Human
ccaggccagcgcuggcuggagg

SEQ ID NO: 616464 - RNA, 22 nt, Human
cuuuucuggaaucaucucuaac

SEQ ID NO: 616465 - RNA, 22 nt, Human
uggagucacuuccauaugggaa

SEQ ID NO: 616466 - RNA, 22 nt, Human
auuucucaaccaggucaaaaag

SEQ ID NO: 616467 - RNA, 22 nt, Human
ggcagucccaggcugcauguug

SEQ ID NO: 616468 - RNA, 22 nt, Human
uccagggccacagaggaugcua

SEQ ID NO: 616469 - RNA, 22 nt, Human
uuuauauuguaaaaaugguucu

SEQ ID NO: 616470 - RNA, 22 nt, Human
gugcauauguguguauacaaac

SEQ ID NO: 616471 - RNA, 22 nt, Human
uggagagguuuaaacaaaaguu

SEQ ID NO: 616472 - RNA, 21 nt, Human
uggcuuuuauggagcucuggg

SEQ ID NO: 616473 - RNA, 22 nt, Human
agcuucuguucaucuuccaggc

SEQ ID NO: 616474 - RNA, 22 nt, Human
ucucuuuguggccaggagagga

SEQ ID NO: 616475 - RNA, 22 nt, Human
cugguuaaaugaaaaaguauua

SEQ ID NO: 616476 - RNA, 22 nt, Human
gcagccagaagacucagaacaa

SEQ ID NO: 616477 - RNA, 22 nt, Human
cugggucugggccuccuggagu

SEQ ID NO: 616478 - RNA, 22 nt, Human
ugcccuguggguaucugauggc

SEQ ID NO: 616479 - RNA, 22 nt, Human
cauuugcuagcaggccuuuuau

SEQ ID NO: 616480 - RNA, 22 nt, Human
agaggcaggagguugacuugag

SEQ ID NO: 616481 - RNA, 22 nt, Human
caggcuccuucccagggauggu

SEQ ID NO: 616482 - RNA, 22 nt, Human
cccuguuuuaaguugauauuga

SEQ ID NO: 616483 - RNA, 22 nt, Human
caaagaaggaacuauaauccca

SEQ ID NO: 616484 - RNA, 22 nt, Human
guggcaggagacuggaagaugg

SEQ ID NO: 616485 - RNA, 22 nt, Human
ucuucuguuuuagauugcauac

SEQ ID NO: 616486 - RNA, 22 nt, Human
gaagcagaaguacgauuuacua

SEQ ID NO: 616487 - RNA, 22 nt, Human
aagccaguaaguuuuugucauu

SEQ ID NO: 616488 - RNA, 22 nt, Human
gcaaguacaaacgcaucggcug

SEQ ID NO: 616489 - RNA, 23 nt, Human
uuguauuuuuaguagagacaggg

SEQ ID NO: 616490 - RNA, 22 nt, Human
uuggaaggggcagaguggcugc

SEQ ID NO: 616491 - RNA, 22 nt, Human
ugggagagaauucuggugacug

SEQ ID NO: 616492 - RNA, 19 nt, Human
uggaaaauggauugaauca

SEQ ID NO: 616493 - RNA, 22 nt, Human
ggaagaaaucugguuaagagau

SEQ ID NO: 616494 - RNA, 20 nt, Human
ggcaggacccgguagggagc

SEQ ID NO: 616495 - RNA, 22 nt, Human
uuuccuuguucauuugcccuau

SEQ ID NO: 616496 - RNA, 22 nt, Human
caggcuggaguuaccuuuaggg

SEQ ID NO: 616497 - RNA, 22 nt, Human
ugauaaacuggagagguggagg

SEQ ID NO: 616498 - RNA, 22 nt, Human
ggugcaggacgaaguggggguu

SEQ ID NO: 616499 - RNA, 22 nt, Human
gcuccugggcucuaccuugcua

SEQ ID NO: 616500 - RNA, 22 nt, Human
gcugaggcaagauuugaaccca

SEQ ID NO: 616501 - RNA, 22 nt, Human
uccuguuuaucugugugacucg

SEQ ID NO: 616502 - RNA, 22 nt, Human
agcuccaggugcaagucauggu

SEQ ID NO: 616503 - RNA, 22 nt, Human
ugaguccagaugggccagcagg

SEQ ID NO: 616504 - RNA, 22 nt, Human
augcccugcaucaagugacacu

SEQ ID NO: 616505 - RNA, 22 nt, Human
guuccuugggaacaacgcugaa

SEQ ID NO: 616506 - RNA, 22 nt, Human
caguuuugguccuuucuaggua

SEQ ID NO: 616507 - RNA, 22 nt, Human
uccuguggcguuaucaugugau

SEQ ID NO: 616508 - RNA, 22 nt, Human
aggaaauaggaccagacaaagc

SEQ ID NO: 616509 - RNA, 22 nt, Human
gaaauauugggacucagagcuu

SEQ ID NO: 616510 - RNA, 22 nt, Human
caaguccaagaucaagaagcca

SEQ ID NO: 616511 - RNA, 22 nt, Human
aaauaugagggugaugcccaga

SEQ ID NO: 616512 - RNA, 22 nt, Human
gaggccuggaauuccagccugg

SEQ ID NO: 616513 - RNA, 22 nt, Human
uucagcuucauuugucuuuaug

SEQ ID NO: 616514 - RNA, 22 nt, Human
acauuuuuggguugaugucuga

SEQ ID NO: 616515 - RNA, 22 nt, Human
uauuuucuggggagagugaacc

SEQ ID NO: 616516 - RNA, 22 nt, Human
caggcccauuuguagccacuuu

SEQ ID NO: 616517 - RNA, 22 nt, Human
gcaguguuauguuuucuauaau

SEQ ID NO: 616518 - RNA, 21 nt, Human
uuccuggggaaggagcugccu

SEQ ID NO: 616519 - RNA, 22 nt, Human
gcgguccaggagcgcagguccu

SEQ ID NO: 616520 - RNA, 22 nt, Human
cagggcauuacuucagguccuu

SEQ ID NO: 616521 - RNA, 22 nt, Human
aacaaacaguuaaguguggaug

SEQ ID NO: 616522 - RNA, 22 nt, Human
uccugguguuuaugucacauag

SEQ ID NO: 616523 - RNA, 21 nt, Human
ugcagcagaagucucuguguc

SEQ ID NO: 616524 - RNA, 18 nt, Human
ccagggagcuuauuagga

SEQ ID NO: 616525 - RNA, 22 nt, Human
acaguguuuuagaaaagcuuga

SEQ ID NO: 616526 - RNA, 22 nt, Human
aaguuuugaaauacugaagugu

SEQ ID NO: 616527 - RNA, 22 nt, Human
cagguccaacuauuuaucugug

SEQ ID NO: 616528 - RNA, 22 nt, Human
ucuggccccggucuucacagcu

SEQ ID NO: 616529 - RNA, 22 nt, Human
ucuggcuucccacucugccggg

SEQ ID NO: 616530 - RNA, 22 nt, Human
cuuuucuuauguggacguaccu

SEQ ID NO: 616531 - RNA, 21 nt, Human
agcuggaaucuggcugugcuu

SEQ ID NO: 616532 - RNA, 22 nt, Human
uagggacaaagagcugaggccu

SEQ ID NO: 616533 - RNA, 19 nt, Human
agaggcagucuccaacagg

SEQ ID NO: 616534 - RNA, 22 nt, Human
cugcccugggaguaccuguccu

SEQ ID NO: 616535 - RNA, 22 nt, Human
ggcaggcgugguggccucagaa

SEQ ID NO: 616536 - RNA, 22 nt, Human
auauuguacuaggguuacaugu

SEQ ID NO: 616537 - RNA, 19 nt, Human
aaauggagcuaaucuuguc

SEQ ID NO: 616538 - RNA, 22 nt, Human
ugucugcuacuugguucuacca

SEQ ID NO: 616539 - RNA, 22 nt, Human
agacaauauauaauuuuaguug

SEQ ID NO: 616540 - RNA, 22 nt, Human
cugcccugggauggucugugcg

SEQ ID NO: 616541 - RNA, 22 nt, Human
ccagagguccugcucacuggug

SEQ ID NO: 616542 - RNA, 20 nt, Human
ugguccugucccacccacuc

SEQ ID NO: 616543 - RNA, 22 nt, Human
ggcacuuugccuuuaugcacug

SEQ ID NO: 616544 - RNA, 22 nt, Human
gcugaggcugggagcagccugu

SEQ ID NO: 616545 - RNA, 22 nt, Human
gggucuggcaugcugagaugga

SEQ ID NO: 616546 - RNA, 22 nt, Human
augcccugaaagauucaaaggc

SEQ ID NO: 616547 - RNA, 22 nt, Human
uggagagguugaauaacuuguc

SEQ ID NO: 616548 - RNA, 22 nt, Human
uguuuuuccaugugcagaacaa

SEQ ID NO: 616549 - RNA, 22 nt, Human
cuguggcuuucucugccuccuu

SEQ ID NO: 616550 - RNA, 22 nt, Human
gcagaggauagcauaugaaccu

SEQ ID NO: 616551 - RNA, 22 nt, Human
aggaagcuaaccagggagugag

SEQ ID NO: 616552 - RNA, 22 nt, Human
agagucugccuuuuucuccugc

SEQ ID NO: 616553 - RNA, 22 nt, Human
agguccuggugaccauggaguu

SEQ ID NO: 616554 - RNA, 22 nt, Human
uuugcaaauaccaugaaacuug

SEQ ID NO: 616555 - RNA, 22 nt, Human
ggccagguuggguggaaguggc

SEQ ID NO: 616556 - RNA, 22 nt, Human
uccaggcacagaguuggucagu

SEQ ID NO: 616557 - RNA, 22 nt, Human
cacacaaauauucuggaggcaa

SEQ ID NO: 616558 - RNA, 18 nt, Human
ggucaggggcggagagaa

SEQ ID NO: 616559 - RNA, 22 nt, Human
ucaguaaaucucuaauuggcau

SEQ ID NO: 616560 - RNA, 22 nt, Human
uuuccagucucagcccuguaac

SEQ ID NO: 616561 - RNA, 18 nt, Human
acagugguuugaugugcu

SEQ ID NO: 616562 - RNA, 22 nt, Human
uaggaacaaguuuccuugcugu

SEQ ID NO: 616563 - RNA, 17 nt, Human
agcaaaaguaucaaagc

SEQ ID NO: 616564 - RNA, 22 nt, Human
aagguccaugacucggcauagu

SEQ ID NO: 616565 - RNA, 22 nt, Human
ggaggcaggaaagacagguuca

SEQ ID NO: 616566 - RNA, 17 nt, Human
gagauggguggaucacc

SEQ ID NO: 616567 - RNA, 22 nt, Human
ugaggcagggaguuuaauuguc

SEQ ID NO: 616568 - RNA, 22 nt, Human
uguccuguucuugcuguguccu

SEQ ID NO: 616569 - RNA, 22 nt, Human
uagauaugaugagucacuugag

SEQ ID NO: 616570 - RNA, 22 nt, Human
accuguuuaccugcaccuguuu

SEQ ID NO: 616571 - RNA, 22 nt, Human
aggucucaagagaaaaguggug

SEQ ID NO: 616572 - RNA, 19 nt, Human
uccuggggauguggucacc

SEQ ID NO: 616573 - RNA, 22 nt, Human
aguguucuucuucaaagcucug

SEQ ID NO: 616574 - RNA, 22 nt, Human
auguucuacagauggaaagggg

SEQ ID NO: 616575 - RNA, 22 nt, Human
uggggagagguaucauugagau

SEQ ID NO: 616576 - RNA, 18 nt, Human
uuugcaaaggaaguaugg

SEQ ID NO: 616577 - RNA, 22 nt, Human
auaguauuuccagaaauagucu

SEQ ID NO: 616578 - RNA, 22 nt, Human
uuucagaggaggaaggcaguua

SEQ ID NO: 616579 - RNA, 22 nt, Human
ggcagggcaggaaagucaggaa

SEQ ID NO: 616580 - RNA, 22 nt, Human
ggguccagaguugaagagguua

SEQ ID NO: 616581 - RNA, 22 nt, Human
ccugcagguccccggaugcgca

SEQ ID NO: 616582 - RNA, 22 nt, Human
cugcccugcuucugagggaagc

SEQ ID NO: 616583 - RNA, 20 nt, Human
acaaaauagguacuggguag

SEQ ID NO: 616584 - RNA, 20 nt, Human
cuguggugagcaggagagua

SEQ ID NO: 616585 - RNA, 22 nt, Human
agcaccugugugguagggaggu

SEQ ID NO: 616586 - RNA, 22 nt, Human
ccagcucuaaacggcucugugg

SEQ ID NO: 616587 - RNA, 22 nt, Human
uccuaggguaaucagcauacau

SEQ ID NO: 616588 - RNA, 22 nt, Human
gccugggugucgaucacuagug

SEQ ID NO: 616589 - RNA, 22 nt, Human
uggccaccccuuucucugcacu

SEQ ID NO: 616590 - RNA, 22 nt, Human
agugggagccagcagcuugggg

SEQ ID NO: 616591 - RNA, 22 nt, Human
gcuguuggcgaggagcucagcu

SEQ ID NO: 616592 - RNA, 22 nt, Human
ucaggucccacugcuaguaagu

SEQ ID NO: 616593 - RNA, 22 nt, Human
agggccaggcucccaugucagg

SEQ ID NO: 616594 - RNA, 22 nt, Human
uaguuaaagcccuaaauugaua

SEQ ID NO: 616595 - RNA, 22 nt, Human
ggguccagagccucagcccaga

SEQ ID NO: 616596 - RNA, 22 nt, Human
ugggggcuccaggcuccaggga

SEQ ID NO: 616597 - RNA, 22 nt, Human
agccuguggaucccugcacugg

SEQ ID NO: 616598 - RNA, 22 nt, Human
agcuaggagauuuugugaggcu

SEQ ID NO: 616599 - RNA, 22 nt, Human
gggccuguaugggucucagaua

SEQ ID NO: 616600 - RNA, 22 nt, Human
uguguucaaucccuagucucag

SEQ ID NO: 616601 - RNA, 22 nt, Human
uuacaagauaacggagaaagca

SEQ ID NO: 616602 - RNA, 22 nt, Human
cuaggcuguaaagagcuaggag

SEQ ID NO: 616603 - RNA, 22 nt, Human
gcgcaggugcugcuggagcagc

SEQ ID NO: 616604 - RNA, 22 nt, Human
auucaagaggaacaaugaagau

SEQ ID NO: 616605 - RNA, 22 nt, Human
ggaaggcucuguuccuugacuu

SEQ ID NO: 616606 - RNA, 22 nt, Human
ugguccagugacagauaggcac

SEQ ID NO: 616607 - RNA, 22 nt, Human
guccugguccugccuccccaug

SEQ ID NO: 616608 - RNA, 22 nt, Human
agaggcaguauacaauccgagc

SEQ ID NO: 616609 - RNA, 22 nt, Human
uuucuaaaggguagauuuggcc

SEQ ID NO: 616610 - RNA, 22 nt, Human
guccaggaaucaaaagauggaa

SEQ ID NO: 616611 - RNA, 22 nt, Human
cauccagggcagccauggccug

SEQ ID NO: 616612 - RNA, 22 nt, Human
gccaccugcgggccguggugga

SEQ ID NO: 616613 - RNA, 22 nt, Human
gggcugaugaugagcagaggug

SEQ ID NO: 616614 - RNA, 22 nt, Human
aaaugcuaacaaggaaugcugc

SEQ ID NO: 616615 - RNA, 22 nt, Human
aggucaaagaaccuagcuauag

SEQ ID NO: 616616 - RNA, 22 nt, Human
aaagccuugagauccuauaguu

SEQ ID NO: 616617 - RNA, 22 nt, Human
uuccuugaaaguuugaacugac

SEQ ID NO: 616618 - RNA, 22 nt, Human
cagcuucagggacagcuucuuu

SEQ ID NO: 616619 - RNA, 22 nt, Human
acacagaguuauuaugugaacu

SEQ ID NO: 616620 - RNA, 22 nt, Human
cuguggcuguauuuggccagag

SEQ ID NO: 616621 - RNA, 22 nt, Human
aggacuggcagugugagggguc

SEQ ID NO: 616622 - RNA, 22 nt, Human
acucagcuuccuacagcuagaa

SEQ ID NO: 616623 - RNA, 22 nt, Human
ucuggggugcagccuggacaua

SEQ ID NO: 616624 - RNA, 22 nt, Human
gaggaaaauggaguguaauuaa

SEQ ID NO: 616625 - RNA, 20 nt, Human
aggcaguguagagaugagua

SEQ ID NO: 616626 - RNA, 22 nt, Human
auuguaucuugucauuaugcau

SEQ ID NO: 616627 - RNA, 22 nt, Human
aggccaggccuuucuccauucc

SEQ ID NO: 616628 - RNA, 17 nt, Human
guccuggugugugagga

SEQ ID NO: 616629 - RNA, 22 nt, Human
uuggaaggguuucaguuagucu

SEQ ID NO: 616630 - RNA, 22 nt, Human
caggggcgguggcucacgccug

SEQ ID NO: 616631 - RNA, 22 nt, Human
ugagggagucaugauuaaggaa

SEQ ID NO: 616632 - RNA, 22 nt, Human
auauucuugugauuauaaagua

SEQ ID NO: 616633 - RNA, 22 nt, Human
uauuauuauaguuauugggaag

SEQ ID NO: 616634 - RNA, 22 nt, Human
gccuguuuguuugcaaaggagc

SEQ ID NO: 616635 - RNA, 22 nt, Human
gcucccagaaccaaggcugggg

SEQ ID NO: 616636 - RNA, 22 nt, Human
uagugcaaugugaggcaguacc

SEQ ID NO: 616637 - RNA, 22 nt, Human
augaugcuguuuaucauauacu

SEQ ID NO: 616638 - RNA, 22 nt, Human
ggcaggugaucuagagucaaua

SEQ ID NO: 616639 - RNA, 22 nt, Human
cugccuggguucaaguccuguu

SEQ ID NO: 616640 - RNA, 22 nt, Human
ucuucaaacccugguuuuguga

SEQ ID NO: 616641 - RNA, 22 nt, Human
ugaggcagugugagauaauaaa

SEQ ID NO: 616642 - RNA, 20 nt, Human
uccugguggauacugcuuaa

SEQ ID NO: 616643 - RNA, 22 nt, Human
agaaagggucacugaaagagga

SEQ ID NO: 616644 - RNA, 22 nt, Human
ggguccaguaguugguggccgu

SEQ ID NO: 616645 - RNA, 22 nt, Human
ugcaugucaaggcacucaggau

SEQ ID NO: 616646 - RNA, 19 nt, Human
agucuguggauuugugggu

SEQ ID NO: 616647 - RNA, 22 nt, Human
gcagaauuccuucuuccuuggg

SEQ ID NO: 616648 - RNA, 22 nt, Human
ucgugaagucacaauaaagucu

SEQ ID NO: 616649 - RNA, 22 nt, Human
ucaaguuuaauugagauguuua

SEQ ID NO: 616650 - RNA, 18 nt, Human
cgaggcaggcggaucacg

SEQ ID NO: 616651 - RNA, 22 nt, Human
cuggguuccauguagccaagag

SEQ ID NO: 616652 - RNA, 22 nt, Human
uucuggcugaaaguuuauuuga

SEQ ID NO: 616653 - RNA, 22 nt, Human
caaagaagagauuuacagagcu

SEQ ID NO: 616654 - RNA, 22 nt, Human
aguccagggcuuagucagcggg

SEQ ID NO: 616655 - RNA, 22 nt, Human
cagaggcagccgggggagaacg

SEQ ID NO: 616656 - RNA, 22 nt, Human
uuuucaguuugcacugcagugc

SEQ ID NO: 616657 - RNA, 22 nt, Human
ugggcuggcugaggcauucacu

SEQ ID NO: 616658 - RNA, 22 nt, Human
auuaaagaaacccagcauguga

SEQ ID NO: 616659 - RNA, 22 nt, Human
gugucagauguccagggcagca

SEQ ID NO: 616660 - RNA, 21 nt, Human
cagugggcugcugcgcuccag

SEQ ID NO: 616661 - RNA, 22 nt, Human
aaagagaaaaugaucuguacau

SEQ ID NO: 616662 - RNA, 20 nt, Human
aaagagaagccucaccuugu

SEQ ID NO: 616663 - RNA, 22 nt, Human
uagguucagugucuuguucugc

SEQ ID NO: 616664 - RNA, 22 nt, Human
ugccagggugucaggagagcua

SEQ ID NO: 616665 - RNA, 22 nt, Human
cuaaauuaucaugagaauuaug

SEQ ID NO: 616666 - RNA, 22 nt, Human
aagggcuggaucucucugagca

SEQ ID NO: 616667 - RNA, 22 nt, Human
uggcagguuuccuccucauagu

SEQ ID NO: 616668 - RNA, 22 nt, Human
gcagaaguaggcucuguguagg

SEQ ID NO: 616669 - RNA, 16 nt, Human
cuguggcucccagguu

SEQ ID NO: 616670 - RNA, 17 nt, Human
gugcagggaugaaggau

SEQ ID NO: 616671 - RNA, 20 nt, Human
uggaauggguccuugaaaaa

SEQ ID NO: 616672 - RNA, 22 nt, Human
uuggaauucaaguuguagcuua

SEQ ID NO: 616673 - RNA, 20 nt, Human
uuaagaaaagcacauccugc

SEQ ID NO: 616674 - RNA, 22 nt, Human
agauuuguaugucuaaauguaa

SEQ ID NO: 616675 - RNA, 23 nt, Human
uucuuuguggauaaucuccagug

SEQ ID NO: 616676 - RNA, 22 nt, Human
gcugggagccguaccugucacg

SEQ ID NO: 616677 - RNA, 22 nt, Human
auuagauuguaaauguuuucac

SEQ ID NO: 616678 - RNA, 22 nt, Human
ugucuuuuuacuauguucaauc

SEQ ID NO: 616679 - RNA, 22 nt, Human
ucuguuuugcauaauguucuuu

SEQ ID NO: 616680 - RNA, 22 nt, Human
agaggucuuuuggucugcagaa

SEQ ID NO: 616681 - RNA, 22 nt, Human
acuggcugcgggguggaagaag

SEQ ID NO: 616682 - RNA, 22 nt, Human
gcccauggacacccaagugcca

SEQ ID NO: 616683 - RNA, 22 nt, Human
cucuuugucacucauacaguca

SEQ ID NO: 616684 - RNA, 22 nt, Human
uuguugaauggauaaauaaauu

SEQ ID NO: 616685 - RNA, 22 nt, Human
cagcaggauagguuucuuugga

SEQ ID NO: 616686 - RNA, 22 nt, Human
uccugggaacucggaaagcucu

SEQ ID NO: 616687 - RNA, 22 nt, Human
uccucugcuccaucuuuacugu

SEQ ID NO: 616688 - RNA, 22 nt, Human
ccugcaggggagagacuucuag

SEQ ID NO: 616689 - RNA, 22 nt, Human
gggccagagcuuggcagcuggg

SEQ ID NO: 616690 - RNA, 22 nt, Human
augaccagccgagauaaacaga

SEQ ID NO: 616691 - RNA, 23 nt, Human
cucccugaacaugacacaccaga

SEQ ID NO: 616692 - RNA, 22 nt, Human
gccuguuuggcaucauugguug

SEQ ID NO: 616693 - RNA, 22 nt, Human
ugauacccuuuggcugcgagca

SEQ ID NO: 616694 - RNA, 22 nt, Human
uacaugcuccuuaugagaaucu

SEQ ID NO: 616695 - RNA, 22 nt, Human
cuggcagcuucaggacacucgg

SEQ ID NO: 616696 - RNA, 22 nt, Human
aaaggucuacaucacugaaaga

SEQ ID NO: 616697 - RNA, 22 nt, Human
ggacucucaggcugucggcuuc

SEQ ID NO: 616698 - RNA, 22 nt, Human
uuccuggguuuacguauugggu

SEQ ID NO: 616699 - RNA, 22 nt, Human
uuugucuuguaaguuaaauuca

SEQ ID NO: 616700 - RNA, 17 nt, Human
agcaggcacgucagcac

SEQ ID NO: 616701 - RNA, 22 nt, Human
cacaggaaaugauucugcagca

SEQ ID NO: 616702 - RNA, 22 nt, Human
cugcccugugguuguggguucu

SEQ ID NO: 616703 - RNA, 22 nt, Human
gugcccugagcuuaugcauucu

SEQ ID NO: 616704 - RNA, 22 nt, Human
caacaccuugaucuuggacuuc

SEQ ID NO: 616705 - RNA, 22 nt, Human
gcauggccaggaaagguagaaa

SEQ ID NO: 616706 - RNA, 22 nt, Human
aggccucugggucuccucugac

SEQ ID NO: 616707 - RNA, 22 nt, Human
aguuuacauaaaaaggcagagg

SEQ ID NO: 616708 - RNA, 22 nt, Human
gaggggcagugcacccgggccc

SEQ ID NO: 616709 - RNA, 22 nt, Human
gaggcaggcagauugcuugagg

SEQ ID NO: 616710 - RNA, 22 nt, Human
uggccaggcauucagauaagac

SEQ ID NO: 616711 - RNA, 22 nt, Human
uuugucuuaaaucuuguuacug

SEQ ID NO: 616712 - RNA, 22 nt, Human
cccugcaggggaccugcagccu

SEQ ID NO: 616713 - RNA, 22 nt, Human
ggcaggacugaucagugggaug

SEQ ID NO: 616714 - RNA, 22 nt, Human
uuucuguagggauuucacaguu

SEQ ID NO: 616715 - RNA, 22 nt, Human
ggaugggcugaaagguagcccc

SEQ ID NO: 616716 - RNA, 21 nt, Human
aaggaaaagcuuggucucuga

SEQ ID NO: 616717 - RNA, 22 nt, Human
ugcacaaagcauucuagacgca

SEQ ID NO: 616718 - RNA, 22 nt, Human
gucuggcuuuauauuugcuauu

SEQ ID NO: 616719 - RNA, 22 nt, Human
aacaguaagagauguuuuaucu

SEQ ID NO: 616720 - RNA, 22 nt, Human
ugguccagaugccuuggcuuua

SEQ ID NO: 616721 - RNA, 22 nt, Human
accauguuggccaagcuggucu

SEQ ID NO: 616722 - RNA, 22 nt, Human
ccagugggagggagcuaggcca

SEQ ID NO: 616723 - RNA, 22 nt, Human
guuuauuagaguuuucugucug

SEQ ID NO: 616724 - RNA, 20 nt, Human
uacagaaacaggacuuuugg

SEQ ID NO: 616725 - RNA, 22 nt, Human
agcuccuggcaaggucauggug

SEQ ID NO: 616726 - RNA, 22 nt, Human
auuguugaggcaguucaucuug

SEQ ID NO: 616727 - RNA, 20 nt, Human
cagaggcauuuucagacucu

SEQ ID NO: 616728 - RNA, 22 nt, Human
uaaaugcuuucuaugaaagagg

SEQ ID NO: 616729 - RNA, 22 nt, Human
caggccagcguccagaacaagc

SEQ ID NO: 616730 - RNA, 22 nt, Human
accugagggcccaaacuuggua

SEQ ID NO: 616731 - RNA, 21 nt, Human
uggcagguucaaaggccuauc

SEQ ID NO: 616732 - RNA, 22 nt, Human
ugcaaguaaccaucacuaucuc

SEQ ID NO: 616733 - RNA, 21 nt, Human
uagaggcaggagggacugcag

SEQ ID NO: 616734 - RNA, 22 nt, Human
ugcaggucuauuuaaaugauug

SEQ ID NO: 616735 - RNA, 22 nt, Human
cauuuacacuucuaaccacaag

SEQ ID NO: 616736 - RNA, 22 nt, Human
uuggaaggagucaaccagcuga

SEQ ID NO: 616737 - RNA, 22 nt, Human
acugaggauggauaggucauau

SEQ ID NO: 616738 - RNA, 23 nt, Human
ggugggagauuauccagaauuau

SEQ ID NO: 616739 - RNA, 22 nt, Human
uuucaucucucuaaaagacagu

SEQ ID NO: 616740 - RNA, 19 nt, Human
ugggcagguucaguaaugg

SEQ ID NO: 616741 - RNA, 22 nt, Human
ugugugaagcacauguucaagg

SEQ ID NO: 616742 - RNA, 22 nt, Human
ccagggaaguaguugugagagc

SEQ ID NO: 616743 - RNA, 22 nt, Human
ucauugucuugauaugauuguc

SEQ ID NO: 616744 - RNA, 22 nt, Human
ggcuccacccugcuuccagaag

SEQ ID NO: 616745 - RNA, 22 nt, Human
auaaauuaggaucugggguucc

SEQ ID NO: 616746 - RNA, 22 nt, Human
gcagggcagaaggugcugagga

SEQ ID NO: 616747 - RNA, 22 nt, Human
gcaggguggauggcagggccag

SEQ ID NO: 616748 - RNA, 22 nt, Human
uuggaaggaccaggccuugauu

SEQ ID NO: 616749 - RNA, 22 nt, Human
uccucugcuccaggcuggacuu

SEQ ID NO: 616750 - RNA, 19 nt, Human
gcuccugggccucacucau

SEQ ID NO: 616751 - RNA, 18 nt, Human
cuccagggaacucaguca

SEQ ID NO: 616752 - RNA, 22 nt, Human
ccugaguagcuggaauuaaagg

SEQ ID NO: 616753 - RNA, 22 nt, Human
uccugggcugugugccacucug

SEQ ID NO: 616754 - RNA, 22 nt, Human
aagaauggugguggggccagca

SEQ ID NO: 616755 - RNA, 22 nt, Human
guccuggggauuauagaguguu

SEQ ID NO: 616756 - RNA, 20 nt, Human
cuuguugauucuaggaauga

SEQ ID NO: 616757 - RNA, 22 nt, Human
gcagggcauagaggcacggagg

SEQ ID NO: 616758 - RNA, 20 nt, Human
acagaaagcugccuuguccc

SEQ ID NO: 616759 - RNA, 22 nt, Human
auuaaauacugcaggcuaagca

SEQ ID NO: 616760 - RNA, 22 nt, Human
ugaccuauuagauuuccuugcc

SEQ ID NO: 616761 - RNA, 22 nt, Human
uggcauggcaacccugcaggga

SEQ ID NO: 616762 - RNA, 22 nt, Human
aauuacaaauguagacucucau

SEQ ID NO: 616763 - RNA, 22 nt, Human
ucaugccaaaauccaguggcuu

SEQ ID NO: 616764 - RNA, 22 nt, Human
caggaaaaaugccaggagucag

SEQ ID NO: 616765 - RNA, 22 nt, Human
auacagaacucucaguuguaua

SEQ ID NO: 616766 - RNA, 22 nt, Human
agccaggaagaaggucacacca

SEQ ID NO: 616767 - RNA, 22 nt, Human
gccagcucaguuucaaaguagg

SEQ ID NO: 616768 - RNA, 22 nt, Human
cuccagggcagcauggcagugg

SEQ ID NO: 616769 - RNA, 22 nt, Human
uuccagcuaacucacaucccuu

SEQ ID NO: 616770 - RNA, 22 nt, Human
ucuggcccagccccugagguca

SEQ ID NO: 616771 - RNA, 22 nt, Human
augaagauauucuuguuuucug

SEQ ID NO: 616772 - RNA, 22 nt, Human
acagagaaagugggcugaagau

SEQ ID NO: 616773 - RNA, 22 nt, Human
cagguccugcagggagaguaaa

SEQ ID NO: 616774 - RNA, 22 nt, Human
agguauuauuagcaucucuauu

SEQ ID NO: 616775 - RNA, 20 nt, Human
auucacaaagccaguguugc

SEQ ID NO: 616776 - RNA, 22 nt, Human
gcugaggcaguccacccuugug

SEQ ID NO: 616777 - RNA, 22 nt, Human
guccucuggccuuucccaggac

SEQ ID NO: 616778 - RNA, 22 nt, Human
aggcuuuaaguggccuacagcu

SEQ ID NO: 616779 - RNA, 22 nt, Human
augugggccgugcggguguccu

SEQ ID NO: 616780 - RNA, 22 nt, Human
acaguguucucuuccuguauag

SEQ ID NO: 616781 - RNA, 22 nt, Human
gaaauauuucucuugagccccu

SEQ ID NO: 616782 - RNA, 22 nt, Human
augucuguuuauccuucaagau

SEQ ID NO: 616783 - RNA, 22 nt, Human
gggcaggugccagcucccuguc

SEQ ID NO: 616784 - RNA, 21 nt, Human
cagaggcagguccugggacgg

SEQ ID NO: 616785 - RNA, 22 nt, Human
agcaggcaggaaggcagcacug

SEQ ID NO: 616786 - RNA, 22 nt, Human
uguauacauucucuuggguuug

SEQ ID NO: 616787 - RNA, 22 nt, Human
ccucuuugacucucaggucuuu

SEQ ID NO: 616788 - RNA, 22 nt, Human
agcaccuggagggcugggaccu

SEQ ID NO: 616789 - RNA, 22 nt, Human
aaguaacuuauuugcaaacagg

SEQ ID NO: 616790 - RNA, 22 nt, Human
gaggcauggccugaggcuagga

SEQ ID NO: 616791 - RNA, 22 nt, Human
gagagaaagccccugcaucccu

SEQ ID NO: 616792 - RNA, 21 nt, Human
ucccagggccaggugccauca

SEQ ID NO: 616793 - RNA, 22 nt, Human
uuggaaggaagaaccgcgguag

SEQ ID NO: 616794 - RNA, 22 nt, Human
gcccagugcugagggugcugcu

SEQ ID NO: 616795 - RNA, 22 nt, Human
gucuuuggagaggugccauuuc

SEQ ID NO: 616796 - RNA, 22 nt, Human
uacagucaacauugaugaugau

SEQ ID NO: 616797 - RNA, 22 nt, Human
gcugccuucccggaaugucauc

SEQ ID NO: 616798 - RNA, 22 nt, Human
uuucagagaauuagaagcugau

SEQ ID NO: 616799 - RNA, 22 nt, Human
uucuuccucacacucucaccca

SEQ ID NO: 616800 - RNA, 22 nt, Human
cuaaaaauccacacuaggugaa

SEQ ID NO: 616801 - RNA, 21 nt, Human
agcugccuccacuucugaggc

SEQ ID NO: 616802 - RNA, 22 nt, Human
gaagaagccucuguggaucuga

SEQ ID NO: 616803 - RNA, 22 nt, Human
agccugguuuaagcauuuuaua

SEQ ID NO: 616804 - RNA, 22 nt, Human
ucagcagggagaggagaaugca

SEQ ID NO: 616805 - RNA, 22 nt, Human
gcaaagcagaacccucucuauc

SEQ ID NO: 616806 - RNA, 23 nt, Human
uggagggcagaauaacagacuac

SEQ ID NO: 616807 - RNA, 22 nt, Human
uaagcagaaaaagugggaguua

SEQ ID NO: 616808 - RNA, 21 nt, Human
uccugggggguaggugaguuu

SEQ ID NO: 616809 - RNA, 19 nt, Human
ccccaggguaggcuagggg

SEQ ID NO: 616810 - RNA, 22 nt, Human
ucaaagagcucuaucuucaaaa

SEQ ID NO: 616811 - RNA, 22 nt, Human
uccagggcaggugcugggcucu

SEQ ID NO: 616812 - RNA, 22 nt, Human
ccaggagccacucaggcccaca

SEQ ID NO: 616813 - RNA, 23 nt, Human
uggaagcagaaguuucaauaucc

SEQ ID NO: 616814 - RNA, 22 nt, Human
ucaguguucagcggugugugca

SEQ ID NO: 616815 - RNA, 22 nt, Human
gcaguguucagugaagcaggag

SEQ ID NO: 616816 - RNA, 22 nt, Human
ucaguguuacauuauauagaac

SEQ ID NO: 616817 - RNA, 22 nt, Human
acaguguuacuugauaguguau

SEQ ID NO: 616818 - RNA, 22 nt, Human
gucacccugcuggcuguucagc

SEQ ID NO: 616819 - RNA, 22 nt, Human
uuuauauuaccuggaauagcuu

SEQ ID NO: 616820 - RNA, 22 nt, Human
cuccugggcuucgaaggcuccc

SEQ ID NO: 616821 - RNA, 22 nt, Human
ggguccaggucuucaggcagag

SEQ ID NO: 616822 - RNA, 22 nt, Human
ucaguguuuguggcaaauguua

SEQ ID NO: 616823 - RNA, 22 nt, Human
agguccagagguugaacggugg

SEQ ID NO: 616824 - RNA, 23 nt, Human
auaugucaugcaccagcacuuua

SEQ ID NO: 616825 - RNA, 23 nt, Human
ggguccagagacaggcaugggug

SEQ ID NO: 616826 - RNA, 18 nt, Human
cucucugggugaggacaa

SEQ ID NO: 616827 - RNA, 22 nt, Human
cccucaccaggcuccaggcaug

SEQ ID NO: 616828 - RNA, 20 nt, Human
cuccugggacugcugguuau

SEQ ID NO: 616829 - RNA, 22 nt, Human
uuaccuguuuuacaugcacaac

SEQ ID NO: 616830 - RNA, 22 nt, Human
acaguguuucacuuaaccguuu

SEQ ID NO: 616831 - RNA, 22 nt, Human
uguauuuuuaggaaugcgcuau

SEQ ID NO: 616832 - RNA, 21 nt, Human
auuuacaaaacagucccuucc

SEQ ID NO: 616833 - RNA, 22 nt, Human
uagguucagagaacugaaaaua

SEQ ID NO: 616834 - RNA, 22 nt, Human
ucccucagucccuggacaggca

SEQ ID NO: 616835 - RNA, 20 nt, Human
uggaugucaaauuaggcugg

SEQ ID NO: 616836 - RNA, 17 nt, Human
gagcagggaugcgguuc

SEQ ID NO: 616837 - RNA, 22 nt, Human
ucuugcuaggagcuauggaaga

SEQ ID NO: 616838 - RNA, 22 nt, Human
gaggcaggcccugaaugaguca

SEQ ID NO: 616839 - RNA, 22 nt, Human
aggugggcgcugcucccgcugg

SEQ ID NO: 616840 - RNA, 22 nt, Human
gacggcagaaacucaugagguc

SEQ ID NO: 616841 - RNA, 22 nt, Human
gaagaaagggaauuaacuugag

SEQ ID NO: 616842 - RNA, 22 nt, Human
uaauauguguuacugacuuuuu

SEQ ID NO: 616843 - RNA, 22 nt, Human
ucugggagugaagcaacagaug

SEQ ID NO: 616844 - RNA, 22 nt, Human
uuccugggggcagcagucuuga

SEQ ID NO: 616845 - RNA, 22 nt, Human
uucagcuugaaucuggcuuuga

SEQ ID NO: 616846 - RNA, 22 nt, Human
uugcuauaaaugguuucauauu

SEQ ID NO: 616847 - RNA, 22 nt, Human
gcucuggccagacccucagugg

SEQ ID NO: 616848 - RNA, 22 nt, Human
agguccaaauguugagacugau

SEQ ID NO: 616849 - RNA, 22 nt, Human
ugcagaaggaggaggaaaucca

SEQ ID NO: 616850 - RNA, 22 nt, Human
auggguuuauagguggacuuuu

SEQ ID NO: 616851 - RNA, 22 nt, Human
caggaacaauaucuguccuggu

SEQ ID NO: 616852 - RNA, 18 nt, Human
uggaaauugaaacagaaa

SEQ ID NO: 616853 - RNA, 22 nt, Human
ucaguguuaaucagugguaccu

SEQ ID NO: 616854 - RNA, 22 nt, Human
gagguucaguccugcucuguca

SEQ ID NO: 616855 - RNA, 22 nt, Human
aagugugauuuguagaaugccu

SEQ ID NO: 616856 - RNA, 22 nt, Human
caucugcuguuccuuggacuca

SEQ ID NO: 616857 - RNA, 23 nt, Human
uaggcaggacucagauaugacag

SEQ ID NO: 616858 - RNA, 22 nt, Human
uuggaaggcagcauuuguccau

SEQ ID NO: 616859 - RNA, 22 nt, Human
ugugcacaggaagcuauucucu

SEQ ID NO: 616860 - RNA, 19 nt, Human
cccuggagaauacccugga

SEQ ID NO: 616861 - RNA, 22 nt, Human
uggcagguggcacagccuggga

SEQ ID NO: 616862 - RNA, 22 nt, Human
cugggccaagaaguuguguaug

SEQ ID NO: 616863 - RNA, 22 nt, Human
caggucucggguucagcaguga

SEQ ID NO: 616864 - RNA, 22 nt, Human
agaagccaacagggcaggagag

SEQ ID NO: 616865 - RNA, 22 nt, Human
cugaggcugggcugaggguaua

SEQ ID NO: 616866 - RNA, 22 nt, Human
aaauuagaaauacuuucaaagc

SEQ ID NO: 616867 - RNA, 22 nt, Human
agucauuacggacuaguacuac

SEQ ID NO: 616868 - RNA, 19 nt, Human
aaaaagaggcuauaauauu

SEQ ID NO: 616869 - RNA, 22 nt, Human
acauuucuuugcuagacagcag

SEQ ID NO: 616870 - RNA, 22 nt, Human
gccaccuguuucagaugugguu

SEQ ID NO: 616871 - RNA, 22 nt, Human
guccagagaagggaggggacuc

SEQ ID NO: 616872 - RNA, 22 nt, Human
gaugaggcagcucagggggaaa

SEQ ID NO: 616873 - RNA, 22 nt, Human
agagaaggguguagccugggcc

SEQ ID NO: 616874 - RNA, 22 nt, Human
gccugggagaaugaccuccaac

SEQ ID NO: 616875 - RNA, 22 nt, Human
ugguccagcuugauucucuucu

SEQ ID NO: 616876 - RNA, 22 nt, Human
ucuguggcacgauugcacugca

SEQ ID NO: 616877 - RNA, 22 nt, Human
agagaacagcauugcagcuuug

SEQ ID NO: 616878 - RNA, 22 nt, Human
auguguuuguaccuuuaaauau

SEQ ID NO: 616879 - RNA, 22 nt, Human
uggcccugcugggucagagcug

SEQ ID NO: 616880 - RNA, 22 nt, Human
ccaggagcgcgugaacaggcug

SEQ ID NO: 616881 - RNA, 22 nt, Human
ucaugccaaacugaacacaguu

SEQ ID NO: 616882 - RNA, 22 nt, Human
guuuauuaacugucaagugauu

SEQ ID NO: 616883 - RNA, 22 nt, Human
gcuggcugaggucuagcucuuu

SEQ ID NO: 616884 - RNA, 22 nt, Human
aauaugcaaauagguguaauga

SEQ ID NO: 616885 - RNA, 22 nt, Human
augcuuggcguuucacuuccug

SEQ ID NO: 616886 - RNA, 22 nt, Human
ggccaggcuggucucagacuuc

SEQ ID NO: 616887 - RNA, 22 nt, Human
agggcuuuguggcagucacuau

SEQ ID NO: 616888 - RNA, 22 nt, Human
augugcagcuuuucuagagaag

SEQ ID NO: 616889 - RNA, 22 nt, Human
gggcuuuaacacccagucaggg

SEQ ID NO: 616890 - RNA, 22 nt, Human
caagaauauaaauacuuucaaa

SEQ ID NO: 616891 - RNA, 22 nt, Human
cugggccacaagccugugugau

SEQ ID NO: 616892 - RNA, 22 nt, Human
uacagugucuggauaucaaagg

SEQ ID NO: 616893 - RNA, 22 nt, Human
auuuccaugaaggcagauuuua

SEQ ID NO: 616894 - RNA, 22 nt, Human
ugggagaggcugccaucuugca

SEQ ID NO: 616895 - RNA, 22 nt, Human
gcagggcagcugaagcuaggug

SEQ ID NO: 616896 - RNA, 22 nt, Human
uuuucauuguuacuaugagcua

SEQ ID NO: 616897 - RNA, 22 nt, Human
ucccagggauuaggacauggau

SEQ ID NO: 616898 - RNA, 22 nt, Human
aggcuccaaauuaccaagcucu

SEQ ID NO: 616899 - RNA, 22 nt, Human
ugagagaggggacugccugcuu

SEQ ID NO: 616900 - RNA, 22 nt, Human
agucccagccuaggcugugcug

SEQ ID NO: 616901 - RNA, 22 nt, Human
acugcaugauaauaauagcaga

SEQ ID NO: 616902 - RNA, 22 nt, Human
auggaguucugccagcgcugcu

SEQ ID NO: 616903 - RNA, 22 nt, Human
gagcuuuucccgucuuucucgu

SEQ ID NO: 616904 - RNA, 22 nt, Human
caaggugaacuugcuguacagc

SEQ ID NO: 616905 - RNA, 22 nt, Human
uuauuucauugauuucuaagac

SEQ ID NO: 616906 - RNA, 22 nt, Human
ucagcucuaccugggagcuguc

SEQ ID NO: 616907 - RNA, 22 nt, Human
ucaguccucacuugguucuaag

SEQ ID NO: 616908 - RNA, 22 nt, Human
cuggaagggucagagugaugag

SEQ ID NO: 616909 - RNA, 22 nt, Human
ugguuaaguccagaaaggaagc

SEQ ID NO: 616910 - RNA, 22 nt, Human
uuuacaaggaucaagggaucuc

SEQ ID NO: 616911 - RNA, 22 nt, Human
cagaggcaggaagaugggcagu

SEQ ID NO: 616912 - RNA, 22 nt, Human
gucagcaggguccccuugagug

SEQ ID NO: 616913 - RNA, 22 nt, Human
ugguccaggcacccuucuagag

SEQ ID NO: 616914 - RNA, 22 nt, Human
gccaccuguaagccauuaggcc

SEQ ID NO: 616915 - RNA, 22 nt, Human
ucauccaguaccauggaaggca

SEQ ID NO: 616916 - RNA, 22 nt, Human
aaguagaaaaccgcacuggacu

SEQ ID NO: 616917 - RNA, 22 nt, Human
ggcgcacaaugugcagguuugu

SEQ ID NO: 616918 - RNA, 19 nt, Human
cacauacagaaaagaguaa

SEQ ID NO: 616919 - RNA, 22 nt, Human
agauacaaguuaagagaaagga

SEQ ID NO: 616920 - RNA, 21 nt, Human
ugaaugcuucgucauccuggc

SEQ ID NO: 616921 - RNA, 22 nt, Human
uagugcaaaggcccugagaugg

SEQ ID NO: 616922 - RNA, 22 nt, Human
gauaaauuaucagggguuuaaa

SEQ ID NO: 616923 - RNA, 22 nt, Human
aggcaauccccugaggauacuu

SEQ ID NO: 616924 - RNA, 22 nt, Human
uggccuuggagaggcacggccc

SEQ ID NO: 616925 - RNA, 22 nt, Human
ggaggaaaggcucccucccucu

SEQ ID NO: 616926 - RNA, 22 nt, Human
uuguuugaauaacagacaaauu

SEQ ID NO: 616927 - RNA, 22 nt, Human
aggguccaucaaggacugcaca

SEQ ID NO: 616928 - RNA, 22 nt, Human
gauggcagucaaccaggugagg

SEQ ID NO: 616929 - RNA, 22 nt, Human
uugagaagguggucauuugcaa

SEQ ID NO: 616930 - RNA, 22 nt, Human
gugcccugugaacuguaaggaa

SEQ ID NO: 616931 - RNA, 22 nt, Human
aggcaggucacaugcuuggcga

SEQ ID NO: 616932 - RNA, 22 nt, Human
ucuugaaggggggcaguguuga

SEQ ID NO: 616933 - RNA, 22 nt, Human
gcagccaggaaagcuggacccu

SEQ ID NO: 616934 - RNA, 18 nt, Human
ugacagaaccuggagccu

SEQ ID NO: 616935 - RNA, 22 nt, Human
gccucccugagucacccaagca

SEQ ID NO: 616936 - RNA, 22 nt, Human
ucccccuccaauugccauguua

SEQ ID NO: 616937 - RNA, 22 nt, Human
gaagaaagauuggcaugcuuca

SEQ ID NO: 616938 - RNA, 22 nt, Human
aaccagagagucuucuucauug

SEQ ID NO: 616939 - RNA, 22 nt, Human
uugaagauuauucuauuaaaag

SEQ ID NO: 616940 - RNA, 22 nt, Human
agaagccauguuuaguaggaug

SEQ ID NO: 616941 - RNA, 20 nt, Human
agagauuuuaguagccacag

SEQ ID NO: 616942 - RNA, 22 nt, Human
ucuguggcuguuaucuuuauau

SEQ ID NO: 616943 - RNA, 22 nt, Human
aggcagguuggugagaagacug

SEQ ID NO: 616944 - RNA, 22 nt, Human
uaugcuuugguagagaguugug

SEQ ID NO: 616945 - RNA, 22 nt, Human
gccaggcugccuuaucucuagc

SEQ ID NO: 616946 - RNA, 22 nt, Human
gccuguggccgacugagagccu

SEQ ID NO: 616947 - RNA, 22 nt, Human
ggaagggguuaggggucccuga

SEQ ID NO: 616948 - RNA, 22 nt, Human
uggacucagugcugccauuccc

SEQ ID NO: 616949 - RNA, 22 nt, Human
aaacucuguagcuaaacauaau

SEQ ID NO: 616950 - RNA, 22 nt, Human
ucaguguugugcacauacaaaa

SEQ ID NO: 616951 - RNA, 22 nt, Human
cuuuuucauuggcuuuaggaca

SEQ ID NO: 616952 - RNA, 22 nt, Human
ucuggccccuggcaguccugga

SEQ ID NO: 616953 - RNA, 22 nt, Human
ugaacagaugccuucucccaug

SEQ ID NO: 616954 - RNA, 22 nt, Human
agcaaauacuugaauaaaaaga

SEQ ID NO: 616955 - RNA, 22 nt, Human
auaccuguguauccacaagcgu

SEQ ID NO: 616956 - RNA, 19 nt, Human
gcuggcuggaggagggaca

SEQ ID NO: 616957 - RNA, 22 nt, Human
ugaaugcuuggagucauaaaau

SEQ ID NO: 616958 - RNA, 22 nt, Human
uguguucaccaaaguguagaaa

SEQ ID NO: 616959 - RNA, 22 nt, Human
cuguggcucaggccuguaagcc

SEQ ID NO: 616960 - RNA, 19 nt, Human
auuugcuugucugcucugc

SEQ ID NO: 616961 - RNA, 22 nt, Human
gaagcuaaugagauaaaugcca

SEQ ID NO: 616962 - RNA, 22 nt, Human
auccugggggcagcuggaaaca

SEQ ID NO: 616963 - RNA, 22 nt, Human
gagguccauacagcuauucuac

SEQ ID NO: 616964 - RNA, 19 nt, Human
accaggaguaucagagcug

SEQ ID NO: 616965 - RNA, 22 nt, Human
gcauuuuucuaaucauuggcau

SEQ ID NO: 616966 - RNA, 22 nt, Human
ccagggcagcagaauuggggca

SEQ ID NO: 616967 - RNA, 22 nt, Human
uggcccugaggacccagugugg

SEQ ID NO: 616968 - RNA, 21 nt, Human
agagacugucacugcaguacc

SEQ ID NO: 616969 - RNA, 22 nt, Human
ggccaccuggguucgacugggc

SEQ ID NO: 616970 - RNA, 22 nt, Human
uggagcugaacuuugaggccag

SEQ ID NO: 616971 - RNA, 22 nt, Human
aagaugaaucaguauguguccu

SEQ ID NO: 616972 - RNA, 22 nt, Human
agcaggucgccgaagauagcuc

SEQ ID NO: 616973 - RNA, 22 nt, Human
cucucugguacauagaguuugg

SEQ ID NO: 616974 - RNA, 20 nt, Human
accugggaaaaccuuuuccu

SEQ ID NO: 616975 - RNA, 22 nt, Human
aaguccugugcuagagacaccu

SEQ ID NO: 616976 - RNA, 22 nt, Human
gucuggcuuugcucagaugcug

SEQ ID NO: 616977 - RNA, 22 nt, Human
gccugggagagggauagugcag

SEQ ID NO: 616978 - RNA, 22 nt, Human
ggcagguagccuagaggagguu

SEQ ID NO: 616979 - RNA, 22 nt, Human
gcuggcagguaaagccccgggg

SEQ ID NO: 616980 - RNA, 22 nt, Human
ucauguguccuaguucauauaa

SEQ ID NO: 616981 - RNA, 22 nt, Human
cccugcagaucuaggguccuuc

SEQ ID NO: 616982 - RNA, 22 nt, Human
ccugccucaggacucugcauau

SEQ ID NO: 616983 - RNA, 22 nt, Human
auuuuguuauagaacucuguga

SEQ ID NO: 616984 - RNA, 22 nt, Human
uuugcaaaaugaggugaagagu

SEQ ID NO: 616985 - RNA, 22 nt, Human
ucuucacauucacguaacauag

SEQ ID NO: 616986 - RNA, 22 nt, Human
ucaaaagaaacaccauguuccu

SEQ ID NO: 616987 - RNA, 22 nt, Human
cauguccauuuaugcacagaaa

SEQ ID NO: 616988 - RNA, 22 nt, Human
uucauuguacuuuaagagaugc

SEQ ID NO: 616989 - RNA, 22 nt, Human
auagggccuaaaaaguauugcu

SEQ ID NO: 616990 - RNA, 22 nt, Human
aggcaggcccucuggaaaggua

SEQ ID NO: 616991 - RNA, 22 nt, Human
aggccagggcacugcucuuuag

SEQ ID NO: 616992 - RNA, 22 nt, Human
uaugcuaauuguuagucacaug

SEQ ID NO: 616993 - RNA, 22 nt, Human
uggaagggagugacagucagag

SEQ ID NO: 616994 - RNA, 22 nt, Human
gagagcugggggacuguggaug

SEQ ID NO: 616995 - RNA, 22 nt, Human
ugaagguaaaggaaggaggcuu

SEQ ID NO: 616996 - RNA, 22 nt, Human
uccugcagagccgcccucaggu

SEQ ID NO: 616997 - RNA, 22 nt, Human
uccaaauauuaugauuauagga

SEQ ID NO: 616998 - RNA, 22 nt, Human
guggaagggucacagccccuac

SEQ ID NO: 616999 - RNA, 22 nt, Human
cccugcagcauucucuaacugg

SEQ ID NO: 617000 - RNA, 22 nt, Human
cugaggcugaagagggccuacg

SEQ ID NO: 617001 - RNA, 22 nt, Human
uuagcugcugauuaaauauguu

SEQ ID NO: 617002 - RNA, 22 nt, Human
agcaucugcauauugggagacc

SEQ ID NO: 617003 - RNA, 22 nt, Human
gagaaagauguaggcugggagg

SEQ ID NO: 617004 - RNA, 22 nt, Human
agcacagaaugagguggaagug

SEQ ID NO: 617005 - RNA, 22 nt, Human
gucccuggagcugagcagugcu

SEQ ID NO: 617006 - RNA, 22 nt, Human
aaauagaauuggaagcagaguu

SEQ ID NO: 617007 - RNA, 22 nt, Human
ugugugauugcaggagaugugg

SEQ ID NO: 617008 - RNA, 22 nt, Human
cauggccagauucuuucuucuc

SEQ ID NO: 617009 - RNA, 22 nt, Human
uccuguuucaacccuuacacug

SEQ ID NO: 617010 - RNA, 21 nt, Human
gcagggacaaagcuucaggag

SEQ ID NO: 617011 - RNA, 20 nt, Human
caaggccuggaucuaguugc

SEQ ID NO: 617012 - RNA, 22 nt, Human
ccuggggaccugccucagcccu

SEQ ID NO: 617013 - RNA, 22 nt, Human
acucagagaaacagcagggugu

SEQ ID NO: 617014 - RNA, 22 nt, Human
uccugggaaguugcaucaccgu

SEQ ID NO: 617015 - RNA, 23 nt, Human
uuuauuuauuuaggcugagggau

SEQ ID NO: 617016 - RNA, 22 nt, Human
ggaggcagaacuucccgucagu

SEQ ID NO: 617017 - RNA, 22 nt, Human
gccuguuucuccuccuuggccc

SEQ ID NO: 617018 - RNA, 21 nt, Human
uacacaaagcgugguccagag

SEQ ID NO: 617019 - RNA, 22 nt, Human
ggguccaguuucaucugagguu

SEQ ID NO: 617020 - RNA, 22 nt, Human
uugcuuuugucucggguuugga

SEQ ID NO: 617021 - RNA, 22 nt, Human
accugaggccuccccagcagac

SEQ ID NO: 617022 - RNA, 22 nt, Human
cagcucugaagaaaggugucua

SEQ ID NO: 617023 - RNA, 22 nt, Human
gugcccuggagggguugaaggg

SEQ ID NO: 617024 - RNA, 22 nt, Human
gcaguguugacuaugguaugag

SEQ ID NO: 617025 - RNA, 22 nt, Human
aaaauacuguggaguguugaaa

SEQ ID NO: 617026 - RNA, 22 nt, Human
uccugggauuaagguggugauu

SEQ ID NO: 617027 - RNA, 22 nt, Human
uggccuuguguuuaagcaagaa

SEQ ID NO: 617028 - RNA, 22 nt, Human
ccaggccucaccugcccaccua

SEQ ID NO: 617029 - RNA, 22 nt, Human
ucuaccuggaguccguuguuaa

SEQ ID NO: 617030 - RNA, 22 nt, Human
uagguucaaguucaggcucuau

SEQ ID NO: 617031 - RNA, 20 nt, Human
ucauccaggacaggaguggc

SEQ ID NO: 617032 - RNA, 22 nt, Human
acaugcuacacagagcuccucg

SEQ ID NO: 617033 - RNA, 22 nt, Human
gggguuaacaguauugcucaug

SEQ ID NO: 617034 - RNA, 22 nt, Human
gccugccaguguuugaggauug

SEQ ID NO: 617035 - RNA, 22 nt, Human
guaggcagugguuggaagagaa

SEQ ID NO: 617036 - RNA, 22 nt, Human
uugcauuuugguuguaaauaug

SEQ ID NO: 617037 - RNA, 22 nt, Human
gcugucuugaugauuggaugcu

SEQ ID NO: 617038 - RNA, 22 nt, Human
cuguggcuuuggggcggaggac

SEQ ID NO: 617039 - RNA, 22 nt, Human
ggagcagggaauuacagcgcag

SEQ ID NO: 617040 - RNA, 22 nt, Human
ggcaaguaauacaggauuauuu

SEQ ID NO: 617041 - RNA, 22 nt, Human
acaguagaguaaaugguuagau

SEQ ID NO: 617042 - RNA, 22 nt, Human
uaaauuagggacuuuaguuaau

SEQ ID NO: 617043 - RNA, 22 nt, Human
gaaugcuauuauuucugugugu

SEQ ID NO: 617044 - RNA, 17 nt, Human
auguaagaagaaagcag

SEQ ID NO: 617045 - RNA, 22 nt, Human
cauggccaaggaugcucaacca

SEQ ID NO: 617046 - RNA, 22 nt, Human
guccugggagaugggacccuga

SEQ ID NO: 617047 - RNA, 22 nt, Human
ccaggagagcaaaggucacucu

SEQ ID NO: 617048 - RNA, 22 nt, Human
cugcccugacugaccuuuugaa

SEQ ID NO: 617049 - RNA, 22 nt, Human
ugggcuuuaucaugggucuggu

SEQ ID NO: 617050 - RNA, 22 nt, Human
cacaaauaccaguuuccuaaca

SEQ ID NO: 617051 - RNA, 22 nt, Human
uccugcgguucaugcucauucu

SEQ ID NO: 617052 - RNA, 19 nt, Human
gccugccagauaguaauga

SEQ ID NO: 617053 - RNA, 22 nt, Human
cucuggcucccgcagcccccau

SEQ ID NO: 617054 - RNA, 22 nt, Human
guauuuuauggcaugcaguggc

SEQ ID NO: 617055 - RNA, 22 nt, Human
acuaggaauucaaguagacaga

SEQ ID NO: 617056 - RNA, 22 nt, Human
uucugugugcuuacugguguuc

SEQ ID NO: 617057 - RNA, 22 nt, Human
uuucugcaacgagucuuugacu

SEQ ID NO: 617058 - RNA, 22 nt, Human
caggucucucccaagcuacaau

SEQ ID NO: 617059 - RNA, 23 nt, Human
ugugucugaggauauaugugcau

SEQ ID NO: 617060 - RNA, 22 nt, Human
aguguucacucuguggagccca

SEQ ID NO: 617061 - RNA, 22 nt, Human
uuggaagggaacaccauuugac

SEQ ID NO: 617062 - RNA, 22 nt, Human
aguggcagaagucacuggguag

SEQ ID NO: 617063 - RNA, 22 nt, Human
ccaaagugauaugugcuguaag

SEQ ID NO: 617064 - RNA, 18 nt, Human
uguuccugccuuucucug

SEQ ID NO: 617065 - RNA, 22 nt, Human
uaccuggcuggggaauagccag

SEQ ID NO: 617066 - RNA, 22 nt, Human
ugggccacagagugagaaaugu

SEQ ID NO: 617067 - RNA, 22 nt, Human
caggaaaaggagacuuuagcac

SEQ ID NO: 617068 - RNA, 23 nt, Human
aagugcaagugaaaggcacaguu

SEQ ID NO: 617069 - RNA, 22 nt, Human
gacagcauuccaucugcagguu

SEQ ID NO: 617070 - RNA, 22 nt, Human
uggcuccucuucuggguguccc

SEQ ID NO: 617071 - RNA, 18 nt, Human
gucagaggauggggaaau

SEQ ID NO: 617072 - RNA, 22 nt, Human
uccugaggcacaauccuagaau

SEQ ID NO: 617073 - RNA, 23 nt, Human
guucauuuuauugucugauugcu

SEQ ID NO: 617074 - RNA, 22 nt, Human
aaauuacagccuuggguagcuu

SEQ ID NO: 617075 - RNA, 19 nt, Human
cacugugguccuucacugc

SEQ ID NO: 617076 - RNA, 22 nt, Human
uccaaaggggcaguguccagcc

SEQ ID NO: 617077 - RNA, 22 nt, Human
acugugugacuguuauuacugu

SEQ ID NO: 617078 - RNA, 22 nt, Human
caguccugagcuccugggcuga

SEQ ID NO: 617079 - RNA, 22 nt, Human
uccugggaguggccauguaaug

SEQ ID NO: 617080 - RNA, 22 nt, Human
ggguccaggcacuaugcuaagu

SEQ ID NO: 617081 - RNA, 22 nt, Human
gacagcuccuuuuggugcauau

SEQ ID NO: 617082 - RNA, 22 nt, Human
gucaugccuggcuucuuagaca

SEQ ID NO: 617083 - RNA, 22 nt, Human
aguagaauaauuggauuacagu

SEQ ID NO: 617084 - RNA, 22 nt, Human
acauuuuuacugggcaucugca

SEQ ID NO: 617085 - RNA, 22 nt, Human
aaagcaguauaguggaagggcu

SEQ ID NO: 617086 - RNA, 22 nt, Human
ggccaccuuccaguugccugca

SEQ ID NO: 617087 - RNA, 18 nt, Human
ucaugagguagaggcugg

SEQ ID NO: 617088 - RNA, 22 nt, Human
cuugagcuuagguucaggauug

SEQ ID NO: 617089 - RNA, 22 nt, Human
caggccucuauggucagcugag

SEQ ID NO: 617090 - RNA, 22 nt, Human
aaauggaggcacgcagugguua

SEQ ID NO: 617091 - RNA, 18 nt, Human
gccugcucugcucucccc

SEQ ID NO: 617092 - RNA, 22 nt, Human
caggucaaagguuaguuauguu

SEQ ID NO: 617093 - RNA, 22 nt, Human
uaaagcagugugguuguguccc

SEQ ID NO: 617094 - RNA, 22 nt, Human
gcaguguugcuaggugcgguga

SEQ ID NO: 617095 - RNA, 22 nt, Human
aacacaaaaauucucaggggca

SEQ ID NO: 617096 - RNA, 22 nt, Human
gaguaaaucgucauugcagcau

SEQ ID NO: 617097 - RNA, 22 nt, Human
guuuauaauccaacucugcucc

SEQ ID NO: 617098 - RNA, 22 nt, Human
gcuccuggcaggcagugugugu

SEQ ID NO: 617099 - RNA, 22 nt, Human
agggccagaaucccucagucua

SEQ ID NO: 617100 - RNA, 22 nt, Human
uguccuccagcagcaugguaug

SEQ ID NO: 617101 - RNA, 22 nt, Human
uccugcagaucaaagccuuuga

SEQ ID NO: 617102 - RNA, 22 nt, Human
gaaauauuacaguggaggggau

SEQ ID NO: 617103 - RNA, 22 nt, Human
cagcaguacuucucagagguau

SEQ ID NO: 617104 - RNA, 22 nt, Human
ggugccaggcuguagucagggu

SEQ ID NO: 617105 - RNA, 22 nt, Human
uguuuucucuugaaaagcaguc

SEQ ID NO: 617106 - RNA, 22 nt, Human
aggaaaauuaucaugagagcca

SEQ ID NO: 617107 - RNA, 21 nt, Human
aguguguucuuggcauuaccu

SEQ ID NO: 617108 - RNA, 22 nt, Human
gcaguguuuuacagaccagcau

SEQ ID NO: 617109 - RNA, 22 nt, Human
cccuguuuauuuuuggagagaa

SEQ ID NO: 617110 - RNA, 22 nt, Human
uuguggcugugcaccgcugccu

SEQ ID NO: 617111 - RNA, 22 nt, Human
agcuuuaugcuuccuacaagcu

SEQ ID NO: 617112 - RNA, 21 nt, Human
ggcaagaaacacaaucaagua

SEQ ID NO: 617113 - RNA, 22 nt, Human
agugucuggucucugaacuaaa

SEQ ID NO: 617114 - RNA, 20 nt, Human
cugcccagccacugagggau

SEQ ID NO: 617115 - RNA, 22 nt, Human
ggagaaggugcuggucacugug

SEQ ID NO: 617116 - RNA, 22 nt, Human
uggagaggagcaccauggccau

SEQ ID NO: 617117 - RNA, 22 nt, Human
ugaggcagguggauuacaaggu

SEQ ID NO: 617118 - RNA, 22 nt, Human
acaaacagaguugaaaaauagg

SEQ ID NO: 617119 - RNA, 22 nt, Human
uccagagcugagggucaguaga

SEQ ID NO: 617120 - RNA, 22 nt, Human
cccuggaggcggauguugcagu

SEQ ID NO: 617121 - RNA, 22 nt, Human
aaaccuuuaccagacuagcaag

SEQ ID NO: 617122 - RNA, 22 nt, Human
uagugcaaucucuuccucagca

SEQ ID NO: 617123 - RNA, 22 nt, Human
uuuaaaaaacuagucugagucu

SEQ ID NO: 617124 - RNA, 22 nt, Human
cuggccugaggccgccuucaga

SEQ ID NO: 617125 - RNA, 22 nt, Human
uacaaagugagcaaccucuuuu

SEQ ID NO: 617126 - RNA, 22 nt, Human
guccugggaaggaagccaggga

SEQ ID NO: 617127 - RNA, 22 nt, Human
uggcuccuaggauggugccugg

SEQ ID NO: 617128 - RNA, 23 nt, Human
uggcuaaacaguggagaaagcuu

SEQ ID NO: 617129 - RNA, 22 nt, Human
cuguggcuuugcagggcuuguu

SEQ ID NO: 617130 - RNA, 22 nt, Human
cacagugugacugaccuucagc

SEQ ID NO: 617131 - RNA, 21 nt, Human
ggcuggucgcgugcaugucuc

SEQ ID NO: 617132 - RNA, 22 nt, Human
gggcaaguguuuugucugccug

SEQ ID NO: 617133 - RNA, 18 nt, Human
caggucugucugccuccc

SEQ ID NO: 617134 - RNA, 22 nt, Human
aguccaggcauuccagccauuc

SEQ ID NO: 617135 - RNA, 18 nt, Human
gcccaugguaaaugcugu

SEQ ID NO: 617136 - RNA, 22 nt, Human
acaguguucaaaccacuaggcu

SEQ ID NO: 617137 - RNA, 22 nt, Human
agguggagugugcagggagagc

SEQ ID NO: 617138 - RNA, 22 nt, Human
uaaauuagagccagguaaguuu

SEQ ID NO: 617139 - RNA, 22 nt, Human
ccagcuggugggucuuucucug

SEQ ID NO: 617140 - RNA, 22 nt, Human
gcaggcccuccucuagcaaggc

SEQ ID NO: 617141 - RNA, 22 nt, Human
guuguugaugaagaucugacug

SEQ ID NO: 617142 - RNA, 22 nt, Human
gccuucugauaucucuuggcau

SEQ ID NO: 617143 - RNA, 22 nt, Human
uccaggcuugagaccaggcucu

SEQ ID NO: 617144 - RNA, 22 nt, Human
cuuuguugugccugagugcacc

SEQ ID NO: 617145 - RNA, 22 nt, Human
aguucaaagucaaggaaacugu

SEQ ID NO: 617146 - RNA, 22 nt, Human
ugaggccagagaguuugcauuu

SEQ ID NO: 617147 - RNA, 22 nt, Human
gagcccgagcgcguacccggcg

SEQ ID NO: 617148 - RNA, 22 nt, Human
gagucagguccguggacaguua

SEQ ID NO: 617149 - RNA, 22 nt, Human
ccagcucugcuugcccagucag

SEQ ID NO: 617150 - RNA, 22 nt, Human
ucuucacaccgggcagcaggaa

SEQ ID NO: 617151 - RNA, 22 nt, Human
ggucucagacuggcaggcagug

SEQ ID NO: 617152 - RNA, 22 nt, Human
uaugcuuucauucauaugugag

SEQ ID NO: 617153 - RNA, 22 nt, Human
aaagcaaugcccguucauuauc

SEQ ID NO: 617154 - RNA, 22 nt, Human
agcuccaggauaagacaggugc

SEQ ID NO: 617155 - RNA, 22 nt, Human
uccugggaguaauugagucaug

SEQ ID NO: 617156 - RNA, 19 nt, Human
gccucugcuggggacaggc

SEQ ID NO: 617157 - RNA, 22 nt, Human
caaauagacuucaaucucuuga

SEQ ID NO: 617158 - RNA, 22 nt, Human
aaguccagugcuuuagauucca

SEQ ID NO: 617159 - RNA, 22 nt, Human
gagaagggggcucgaguguccu

SEQ ID NO: 617160 - RNA, 22 nt, Human
gaggcacuggaggaaaggagaa

SEQ ID NO: 617161 - RNA, 22 nt, Human
uugagggucuggaucugcugcu

SEQ ID NO: 617162 - RNA, 22 nt, Human
ggcagaguugguggagucaguu

SEQ ID NO: 617163 - RNA, 22 nt, Human
gaguccaggcuggucaaauagc

SEQ ID NO: 617164 - RNA, 22 nt, Human
cucuguuuggcgcugcuccuuc

SEQ ID NO: 617165 - RNA, 22 nt, Human
uaccugcagcgggaauccauua

SEQ ID NO: 617166 - RNA, 22 nt, Human
uaaguagaugcaaaauggaguu

SEQ ID NO: 617167 - RNA, 22 nt, Human
cuguggcuggaauaauaaaugu

SEQ ID NO: 617168 - RNA, 22 nt, Human
uuggaaggcugaauggccucuc

SEQ ID NO: 617169 - RNA, 19 nt, Human
ccagccucucuuccacccc

SEQ ID NO: 617170 - RNA, 22 nt, Human
uuucaucuuccuuggcauaggu

SEQ ID NO: 617171 - RNA, 22 nt, Human
cauacagaaaauauauuuugau

SEQ ID NO: 617172 - RNA, 22 nt, Human
ucaguguuggcuacaucugccu

SEQ ID NO: 617173 - RNA, 22 nt, Human
ucaguguuggcauucagaaaug

SEQ ID NO: 617174 - RNA, 22 nt, Human
aagauacagacagagccaaaau

SEQ ID NO: 617175 - RNA, 22 nt, Human
auuuauuaagcaucugcuaugu

SEQ ID NO: 617176 - RNA, 22 nt, Human
uguuuugucuaauagggcaggu

SEQ ID NO: 617177 - RNA, 22 nt, Human
uguguucauuucucucugcugu

SEQ ID NO: 617178 - RNA, 22 nt, Human
gcaggcaccacggcucaggucu

SEQ ID NO: 617179 - RNA, 22 nt, Human
gcagcucccuggcugcaaauga

SEQ ID NO: 617180 - RNA, 20 nt, Human
auaaaauaacugccacaaga

SEQ ID NO: 617181 - RNA, 22 nt, Human
accuucuggucugccugacagc

SEQ ID NO: 617182 - RNA, 21 nt, Human
cugagggccgcagcugggcuc

SEQ ID NO: 617183 - RNA, 22 nt, Human
uucaaaaguaaucaguauuaga

SEQ ID NO: 617184 - RNA, 21 nt, Human
uagggggcagugggaugcuua

SEQ ID NO: 617185 - RNA, 22 nt, Human
gccugggagcacaucggggucc

SEQ ID NO: 617186 - RNA, 22 nt, Human
cugggacauauugcuaguguug

SEQ ID NO: 617187 - RNA, 22 nt, Human
cacugugggccugucgugggug

SEQ ID NO: 617188 - RNA, 22 nt, Human
ucuuucagcucuucaggaccca

SEQ ID NO: 617189 - RNA, 22 nt, Human
ucugcaggacugaggccuguuu

SEQ ID NO: 617190 - RNA, 22 nt, Human
auuguugaggagacucuucaau

SEQ ID NO: 617191 - RNA, 22 nt, Human
acagcucacucacagggcuagu

SEQ ID NO: 617192 - RNA, 22 nt, Human
ggcacuuugauuuugagaugca

SEQ ID NO: 617193 - RNA, 22 nt, Human
aauuguuguacagaauaaauga

SEQ ID NO: 617194 - RNA, 22 nt, Human
uccugugguaugggagugaugu

SEQ ID NO: 617195 - RNA, 22 nt, Human
ugugugaagugauuuuaagucu

SEQ ID NO: 617196 - RNA, 22 nt, Human
caaaugcauaguuuauaagaag

SEQ ID NO: 617197 - RNA, 22 nt, Human
ucaguguuuccuagagcauaua

SEQ ID NO: 617198 - RNA, 22 nt, Human
cuggguauaggaaacaguuaag

SEQ ID NO: 617199 - RNA, 22 nt, Human
gagguggauguugcagugagcu

SEQ ID NO: 617200 - RNA, 22 nt, Human
uuuaaauucugucugccgcuua

SEQ ID NO: 617201 - RNA, 22 nt, Human
uugaggagaagacuuugcuucc

SEQ ID NO: 617202 - RNA, 22 nt, Human
agcugagagguggcaagcugua

SEQ ID NO: 617203 - RNA, 22 nt, Human
ggcagucccagcccagaggcgc

SEQ ID NO: 617204 - RNA, 22 nt, Human
ugaggcaggaguucaggcugcg

SEQ ID NO: 617205 - RNA, 22 nt, Human
acucaggaauggggcugggacu

SEQ ID NO: 617206 - RNA, 22 nt, Human
ccagagggagccaccagggugu

SEQ ID NO: 617207 - RNA, 22 nt, Human
ucauuuuuagcgcgcaaaaguu

SEQ ID NO: 617208 - RNA, 22 nt, Human
gggcuauagcacuauguauggg

SEQ ID NO: 617209 - RNA, 22 nt, Human
aagacaauguuucugauagaua

SEQ ID NO: 617210 - RNA, 22 nt, Human
gugcagugagcagugcagcacc

SEQ ID NO: 617211 - RNA, 23 nt, Human
uccagggcaguggcugggucugc

SEQ ID NO: 617212 - RNA, 22 nt, Human
ugcccugguagacacagacugu

SEQ ID NO: 617213 - RNA, 22 nt, Human
caggcaggucagugaagaagga

SEQ ID NO: 617214 - RNA, 22 nt, Human
agcaguuuuccugagcuccuca

SEQ ID NO: 617215 - RNA, 22 nt, Human
agagaggcauucggugauccca

SEQ ID NO: 617216 - RNA, 22 nt, Human
cucuggcuuguuaaugcauauu

SEQ ID NO: 617217 - RNA, 22 nt, Human
auuuucaguugaaaaaguuggu

SEQ ID NO: 617218 - RNA, 22 nt, Human
acaguguugaggugcuuguuuc

SEQ ID NO: 617219 - RNA, 22 nt, Human
aaggcuggucagauguggugaa

SEQ ID NO: 617220 - RNA, 22 nt, Human
ucauugccauggcauuugcaga

SEQ ID NO: 617221 - RNA, 22 nt, Human
ucuuggcuacuuaggaggauuc

SEQ ID NO: 617222 - RNA, 22 nt, Human
uauaaaauggcaucagcuccaa

SEQ ID NO: 617223 - RNA, 23 nt, Human
guaaaauacgcagugcaguguga

SEQ ID NO: 617224 - RNA, 22 nt, Human
agggccagccgacuuccagccu

SEQ ID NO: 617225 - RNA, 22 nt, Human
uccccaccuaagauacccaucu

SEQ ID NO: 617226 - RNA, 15 nt, Human
cuguggcuaaccuaa

SEQ ID NO: 617227 - RNA, 22 nt, Human
uugcauuugagaaaguucuccu

SEQ ID NO: 617228 - RNA, 22 nt, Human
auuguugacuugauuacucaac

SEQ ID NO: 617229 - RNA, 22 nt, Human
acaguguuuauguacagauugu

SEQ ID NO: 617230 - RNA, 22 nt, Human
aaagcagagguugcagugagcu

SEQ ID NO: 617231 - RNA, 22 nt, Human
augcagaauugcuaaguaucug

SEQ ID NO: 617232 - RNA, 22 nt, Human
uacagcauuaacaggcuguuua

SEQ ID NO: 617233 - RNA, 20 nt, Human
agaaacagcacaauucuguu

SEQ ID NO: 617234 - RNA, 22 nt, Human
uuggaaaugauuucuauuauua

SEQ ID NO: 617235 - RNA, 22 nt, Human
uuguuuguaaggcucuuagaau

SEQ ID NO: 617236 - RNA, 22 nt, Human
ugaggcaggaguuaaugugcuc

SEQ ID NO: 617237 - RNA, 22 nt, Human
uggaggucugcaaggcgcugga

SEQ ID NO: 617238 - RNA, 21 nt, Human
gaaaggucuuaacuuacagag

SEQ ID NO: 617239 - RNA, 22 nt, Human
gcaguguuuuucaaugcuucca

SEQ ID NO: 617240 - RNA, 22 nt, Human
gagccuggccuccugccucagc

SEQ ID NO: 617241 - RNA, 22 nt, Human
ggccaucugccucaaugugugc

SEQ ID NO: 617242 - RNA, 22 nt, Human
uuaaaguauagaggacaaaaac

SEQ ID NO: 617243 - RNA, 22 nt, Human
agugccaaacaguacauaacau

SEQ ID NO: 617244 - RNA, 22 nt, Human
auuucucauguacaaaaacacu

SEQ ID NO: 617245 - RNA, 22 nt, Human
uggccagcccucuucccacacu

SEQ ID NO: 617246 - RNA, 22 nt, Human
uuuauuuaaagucguguguuaa

SEQ ID NO: 617247 - RNA, 22 nt, Human
aauguagaaugauccuuaggau

SEQ ID NO: 617248 - RNA, 22 nt, Human
uucacccuggaccagaaauugg

SEQ ID NO: 617249 - RNA, 22 nt, Human
aagaggggugugugucaaccca

SEQ ID NO: 617250 - RNA, 22 nt, Human
cuuuucuguaucaaaaggauua

SEQ ID NO: 617251 - RNA, 22 nt, Human
auauacagggagaaacagcuua

SEQ ID NO: 617252 - RNA, 18 nt, Human
cagggcuguggggucacu

SEQ ID NO: 617253 - RNA, 22 nt, Human
uaggacugauaaggggccagag

SEQ ID NO: 617254 - RNA, 22 nt, Human
uguccugugaccuggcaccaca

SEQ ID NO: 617255 - RNA, 22 nt, Human
ucuugagugcgcuuggguguuc

SEQ ID NO: 617256 - RNA, 22 nt, Human
gaagccuugaacugcaaacccc

SEQ ID NO: 617257 - RNA, 22 nt, Human
gaucucuguggacucuuagcac

SEQ ID NO: 617258 - RNA, 22 nt, Human
ccagucuguacuuugcucuguu

SEQ ID NO: 617259 - RNA, 22 nt, Human
aagguccaguuugaauuacugu

SEQ ID NO: 617260 - RNA, 22 nt, Human
cuccagggagcuguggagguuu

SEQ ID NO: 617261 - RNA, 22 nt, Human
ugggcucucuuuaccucauaac

SEQ ID NO: 617262 - RNA, 22 nt, Human
cuccugggucauugccagcaaa

SEQ ID NO: 617263 - RNA, 22 nt, Human
gcuggagaguaguaagcaguua

SEQ ID NO: 617264 - RNA, 22 nt, Human
ugaggaaauugaggcucacaga

SEQ ID NO: 617265 - RNA, 22 nt, Human
ccaugcagugcuggagcugauu

SEQ ID NO: 617266 - RNA, 22 nt, Human
ugcaaguaauuccagcuacuga

SEQ ID NO: 617267 - RNA, 22 nt, Human
aacagcuagaauucuacuggcu

SEQ ID NO: 617268 - RNA, 22 nt, Human
gagucaggcacugcugcugcuc

SEQ ID NO: 617269 - RNA, 22 nt, Human
uccaggagguaugaguggcccc

SEQ ID NO: 617270 - RNA, 22 nt, Human
ggaaucuuaauggcauggaguu

SEQ ID NO: 617271 - RNA, 22 nt, Human
cugggcuagaaggaccaggaug

SEQ ID NO: 617272 - RNA, 22 nt, Human
ccagggcaucacauccaguguu

SEQ ID NO: 617273 - RNA, 22 nt, Human
gaaaccuuugccgauggggucc

SEQ ID NO: 617274 - RNA, 22 nt, Human
cauucaaacauuaauuuauuca

SEQ ID NO: 617275 - RNA, 22 nt, Human
gaauauuuguaauuacuguuga

SEQ ID NO: 617276 - RNA, 22 nt, Human
gccuguuuacuuugccgcagga

SEQ ID NO: 617277 - RNA, 22 nt, Human
uuuaauguagcgugaaaugauu

SEQ ID NO: 617278 - RNA, 22 nt, Human
agggccugugaauucucccugc

SEQ ID NO: 617279 - RNA, 22 nt, Human
ggacaaaggucuggggaaccug

SEQ ID NO: 617280 - RNA, 22 nt, Human
gcuccuggcuucacugacauca

SEQ ID NO: 617281 - RNA, 22 nt, Human
ccagcccuugaggucuguccau

SEQ ID NO: 617282 - RNA, 22 nt, Human
uucagccuguucaugcuguugc

SEQ ID NO: 617283 - RNA, 22 nt, Human
acauuucugcaucucagagcua

SEQ ID NO: 617284 - RNA, 22 nt, Human
cucugcgccacccucgccugcu

SEQ ID NO: 617285 - RNA, 22 nt, Human
uacaggcccauagucccugcuu

SEQ ID NO: 617286 - RNA, 22 nt, Human
uuucacaaagcauagcacuuua

SEQ ID NO: 617287 - RNA, 22 nt, Human
gccuguuuuagaugcauugaug

SEQ ID NO: 617288 - RNA, 22 nt, Human
cuguggcuucuagguccccgau

SEQ ID NO: 617289 - RNA, 22 nt, Human
uacaaagugaaauaauucugag

SEQ ID NO: 617290 - RNA, 19 nt, Human
cuguggcugaccucuggcc

SEQ ID NO: 617291 - RNA, 22 nt, Human
cugcccugggccaggaagcggc

SEQ ID NO: 617292 - RNA, 22 nt, Human
cccagccuuugcuuccugguuc

SEQ ID NO: 617293 - RNA, 22 nt, Human
accuucaagauugugggucaau

SEQ ID NO: 617294 - RNA, 22 nt, Human
augaggcauauccuccuauggu

SEQ ID NO: 617295 - RNA, 22 nt, Human
gggagggccaggcucacccagg

SEQ ID NO: 617296 - RNA, 22 nt, Human
ucccauguaagaaggagacagg

SEQ ID NO: 617297 - RNA, 22 nt, Human
ugggggcuagaacccagggauu

SEQ ID NO: 617298 - RNA, 22 nt, Human
gccugaggaaugcuccugacuu

SEQ ID NO: 617299 - RNA, 22 nt, Human
auuuccauguccaaaaauuagu

SEQ ID NO: 617300 - RNA, 22 nt, Human
ggucugugcucuggagccucug

SEQ ID NO: 617301 - RNA, 22 nt, Human
gcaggcaccggguugcuccccu

SEQ ID NO: 617302 - RNA, 22 nt, Human
agggaugacucuuggcugauuc

SEQ ID NO: 617303 - RNA, 20 nt, Human
ucccauguccauaucagccc

SEQ ID NO: 617304 - RNA, 22 nt, Human
ugcccuugaggacagcucccag

SEQ ID NO: 617305 - RNA, 22 nt, Human
ccugaggcccuggcugugcuga

SEQ ID NO: 617306 - RNA, 22 nt, Human
uuacuuuagaucauacugugug

SEQ ID NO: 617307 - RNA, 22 nt, Human
caggcugggaacgccacccgcu

SEQ ID NO: 617308 - RNA, 22 nt, Human
augucuuugccauaguucauau

SEQ ID NO: 617309 - RNA, 20 nt, Human
auguuguuuacucauagcau

SEQ ID NO: 617310 - RNA, 22 nt, Human
aggcagguguuaccucugguuu

SEQ ID NO: 617311 - RNA, 22 nt, Human
ggccagggaggagaggccccug

SEQ ID NO: 617312 - RNA, 22 nt, Human
uccuggccuagaguuuguguuc

SEQ ID NO: 617313 - RNA, 22 nt, Human
uccugcagcugaagcucaugug

SEQ ID NO: 617314 - RNA, 22 nt, Human
cagguccaauugcgcuaaaauc

SEQ ID NO: 617315 - RNA, 21 nt, Human
cccugguuccacugucaccgc

SEQ ID NO: 617316 - RNA, 22 nt, Human
cuucaaaagccagaagccugcg

SEQ ID NO: 617317 - RNA, 22 nt, Human
cugggaugauagugcuaguauu

SEQ ID NO: 617318 - RNA, 22 nt, Human
uggggagaaaugucuuuguucc

SEQ ID NO: 617319 - RNA, 22 nt, Human
uguguugugacauucuuggaug

SEQ ID NO: 617320 - RNA, 22 nt, Human
cuugaaauccagauuucagagg

SEQ ID NO: 617321 - RNA, 22 nt, Human
aagggcuuuuaagauuuauccu

SEQ ID NO: 617322 - RNA, 22 nt, Human
uuguguuucccuugcauauucc

SEQ ID NO: 617323 - RNA, 22 nt, Human
uggagaauuuugucaccagaca

SEQ ID NO: 617324 - RNA, 22 nt, Human
cagggcaaagagagcacaugcu

SEQ ID NO: 617325 - RNA, 22 nt, Human
ugaagccagggacugacacuuc

SEQ ID NO: 617326 - RNA, 22 nt, Human
uaaagcagccagggucuaagcc

SEQ ID NO: 617327 - RNA, 21 nt, Human
uccagaggaggacagacucag

SEQ ID NO: 617328 - RNA, 22 nt, Human
acagcagcauaaacugacuaag

SEQ ID NO: 617329 - RNA, 22 nt, Human
cagggauggccuggcgggccac

SEQ ID NO: 617330 - RNA, 22 nt, Human
caacuuguucuugguagaucua

SEQ ID NO: 617331 - RNA, 21 nt, Human
ccuucuccacagggucuccgg

SEQ ID NO: 617332 - RNA, 22 nt, Human
gcuuucugaagcaguguuucuc

SEQ ID NO: 617333 - RNA, 22 nt, Human
augauggaauauuauucaggca

SEQ ID NO: 617334 - RNA, 22 nt, Human
agugggugggugucugacaguu

SEQ ID NO: 617335 - RNA, 20 nt, Human
cagaggcaaggagacuugga

SEQ ID NO: 617336 - RNA, 22 nt, Human
uuucuauuguaagucuccuaua

SEQ ID NO: 617337 - RNA, 22 nt, Human
uucccaugccuggccccuaucc

SEQ ID NO: 617338 - RNA, 22 nt, Human
auauacaguuuuacaggguuuc

SEQ ID NO: 617339 - RNA, 23 nt, Human
aaguccagaaggagaacugggag

SEQ ID NO: 617340 - RNA, 22 nt, Human
uaaauuacucaaugcacauaaa

SEQ ID NO: 617341 - RNA, 22 nt, Human
gugcccugaggucuucacuuug

SEQ ID NO: 617342 - RNA, 22 nt, Human
ggucucgagccaggcagcugca

SEQ ID NO: 617343 - RNA, 22 nt, Human
gcgggcggggguucccaggucu

SEQ ID NO: 617344 - RNA, 21 nt, Human
guggcucugccaggacugaaa

SEQ ID NO: 617345 - RNA, 22 nt, Human
auugaagaaacccaaauaaugg

SEQ ID NO: 617346 - RNA, 22 nt, Human
cuggaaggugacugucuugaau

SEQ ID NO: 617347 - RNA, 21 nt, Human
uuuucuggaguaugucuccuc

SEQ ID NO: 617348 - RNA, 23 nt, Human
ugaugcaguaaauuggucucuaa

SEQ ID NO: 617349 - RNA, 22 nt, Human
gagugcaguaugagaggcugcu

SEQ ID NO: 617350 - RNA, 22 nt, Human
gcaguguugagugguggcugaa

SEQ ID NO: 617351 - RNA, 22 nt, Human
ggaggcagaauagagugugggu

SEQ ID NO: 617352 - RNA, 22 nt, Human
uacagucaauacuaggaccaua

SEQ ID NO: 617353 - RNA, 22 nt, Human
acaaaugaaucauacauaaugu

SEQ ID NO: 617354 - RNA, 22 nt, Human
cauuugcucugugucaguggca

SEQ ID NO: 617355 - RNA, 19 nt, Human
uuucacaaagagagcguga

SEQ ID NO: 617356 - RNA, 22 nt, Human
aguguggggucaccggcccagg

SEQ ID NO: 617357 - RNA, 22 nt, Human
ccagggcagugggagaaggugc

SEQ ID NO: 617358 - RNA, 22 nt, Human
aaauauaauuucugccucaaua

SEQ ID NO: 617359 - RNA, 22 nt, Human
gcaggucuggcauagagccugc

SEQ ID NO: 617360 - RNA, 22 nt, Human
auacagcaguuugugauccuag

SEQ ID NO: 617361 - RNA, 22 nt, Human
acaguguuguggcucuuaauag

SEQ ID NO: 617362 - RNA, 22 nt, Human
ggagagaauuccauggacaugu

SEQ ID NO: 617363 - RNA, 22 nt, Human
aggugcaguguuuaaaaguagc

SEQ ID NO: 617364 - RNA, 23 nt, Human
gcaagagacagagcauccuguuc

SEQ ID NO: 617365 - RNA, 22 nt, Human
ccaggcugugcuuuucauaaau

SEQ ID NO: 617366 - RNA, 22 nt, Human
ggagaaggaagaaagcuacuau

SEQ ID NO: 617367 - RNA, 22 nt, Human
uuccuggggcuuagcaauggag

SEQ ID NO: 617368 - RNA, 22 nt, Human
uccucugguuauacuugcaccc

SEQ ID NO: 617369 - RNA, 22 nt, Human
aacacauuuugccuaggcaaua

SEQ ID NO: 617370 - RNA, 22 nt, Human
gccugggacccuuagcucuugg

SEQ ID NO: 617371 - RNA, 22 nt, Human
uuuugccuaagaaucucucuga

SEQ ID NO: 617372 - RNA, 22 nt, Human
cagaagcagauucuaaagcaag

SEQ ID NO: 617373 - RNA, 22 nt, Human
acaguguucuuggcgcugagug

SEQ ID NO: 617374 - RNA, 22 nt, Human
auuuucagaacauucauucacu

SEQ ID NO: 617375 - RNA, 22 nt, Human
gaagcuaaaccacagcuaagaa

SEQ ID NO: 617376 - RNA, 22 nt, Human
caaguaugagaaagcuauuacc

SEQ ID NO: 617377 - RNA, 22 nt, Human
gcuggcuugacagaggccuggg

SEQ ID NO: 617378 - RNA, 22 nt, Human
aagcaugggaaucccacagggu

SEQ ID NO: 617379 - RNA, 18 nt, Human
cccagccucuccuuucua

SEQ ID NO: 617380 - RNA, 22 nt, Human
aagucaaagcuuucagaggaaa

SEQ ID NO: 617381 - RNA, 22 nt, Human
guuguaaguuuaaugucaauug

SEQ ID NO: 617382 - RNA, 20 nt, Human
uagugcaaaggcagccauag

SEQ ID NO: 617383 - RNA, 22 nt, Human
cagaugaagaucauagaauagu

SEQ ID NO: 617384 - RNA, 22 nt, Human
uuguagcugaaaguaaagaagu

SEQ ID NO: 617385 - RNA, 22 nt, Human
ucucuucacacuaccccugugu

SEQ ID NO: 617386 - RNA, 17 nt, Human
uuucaucugggaccacc

SEQ ID NO: 617387 - RNA, 22 nt, Human
uuggguuuugauacaugucuaa

SEQ ID NO: 617388 - RNA, 22 nt, Human
uccaggagaccagauguaggcc

SEQ ID NO: 617389 - RNA, 22 nt, Human
ugugagucuaggucaggguguu

SEQ ID NO: 617390 - RNA, 22 nt, Human
ugggcucuggagggccuaggau

SEQ ID NO: 617391 - RNA, 22 nt, Human
cacucccucuaguugcauucug

SEQ ID NO: 617392 - RNA, 17 nt, Human
ccaggcuauaccaggcu

SEQ ID NO: 617393 - RNA, 22 nt, Human
gaggcagugucgguggcaggau

SEQ ID NO: 617394 - RNA, 20 nt, Human
uggccaccugcgucccagcc

SEQ ID NO: 617395 - RNA, 22 nt, Human
agggggcuggagacaccuccuc

SEQ ID NO: 617396 - RNA, 21 nt, Human
uccugggagucugagauccug

SEQ ID NO: 617397 - RNA, 22 nt, Human
uagaaacauucaguugcagucc

SEQ ID NO: 617398 - RNA, 22 nt, Human
caggcuggcaaugcgucaagca

SEQ ID NO: 617399 - RNA, 22 nt, Human
agagauuugucaaugauuucca

SEQ ID NO: 617400 - RNA, 22 nt, Human
gcacaaagguggaaggaggaag

SEQ ID NO: 617401 - RNA, 22 nt, Human
aacguccucaccuguaacuugg

SEQ ID NO: 617402 - RNA, 22 nt, Human
gagcaggugccuguagcucucu

SEQ ID NO: 617403 - RNA, 22 nt, Human
ccugggcaacauagggagaccc

SEQ ID NO: 617404 - RNA, 22 nt, Human
agaggcugaaugaugucaucau

SEQ ID NO: 617405 - RNA, 21 nt, Human
gcagaaguggcuacaucucca

SEQ ID NO: 617406 - RNA, 18 nt, Human
caggagcaggaguugaac

SEQ ID NO: 617407 - RNA, 22 nt, Human
ccagggcacguugggacaguac

SEQ ID NO: 617408 - RNA, 22 nt, Human
uguguucagaauuugcugcuuu

SEQ ID NO: 617409 - RNA, 22 nt, Human
caaugcugugcuccucaugagg

SEQ ID NO: 617410 - RNA, 22 nt, Human
uccugcagaccucagucagguc

SEQ ID NO: 617411 - RNA, 22 nt, Human
cauggccacaugauaaucaagu

SEQ ID NO: 617412 - RNA, 23 nt, Human
aggugccaacugagagcugagag

SEQ ID NO: 617413 - RNA, 23 nt, Human
auuuuaaccuugacuaacaugca

SEQ ID NO: 617414 - RNA, 22 nt, Human
ccugggcaacauagugagaccu

SEQ ID NO: 617415 - RNA, 22 nt, Human
ucugggcuuuacacugugcuua

SEQ ID NO: 617416 - RNA, 21 nt, Human
cauuuacaugacagauugguu

SEQ ID NO: 617417 - RNA, 22 nt, Human
uuuucugccugcguguuuagga

SEQ ID NO: 617418 - RNA, 22 nt, Human
agcuuccugaugcaagagggcu

SEQ ID NO: 617419 - RNA, 18 nt, Human
uugaggaguucacugucu

SEQ ID NO: 617420 - RNA, 22 nt, Human
auggccaggguggcacuguggu

SEQ ID NO: 617421 - RNA, 22 nt, Human
gauggcagcagcagccagggau

SEQ ID NO: 617422 - RNA, 22 nt, Human
auuccugguggcagaaacauga

SEQ ID NO: 617423 - RNA, 22 nt, Human
ugugaauggacaauuaaaucua

SEQ ID NO: 617424 - RNA, 22 nt, Human
aagaacagguucuagaaccauu

SEQ ID NO: 617425 - RNA, 22 nt, Human
agguccagacuguguacccuag

SEQ ID NO: 617426 - RNA, 22 nt, Human
uuacaagauaugugagaacuag

SEQ ID NO: 617427 - RNA, 22 nt, Human
aauucaaugguuuuuaggauau

SEQ ID NO: 617428 - RNA, 22 nt, Human
gcugggcuucaccuccagaguu

SEQ ID NO: 617429 - RNA, 22 nt, Human
cuccugggcuaugucugcuugg

SEQ ID NO: 617430 - RNA, 22 nt, Human
uuuuccucaccuaacucaaggu

SEQ ID NO: 617431 - RNA, 22 nt, Human
aaaaugcugggaaaguuggaau

SEQ ID NO: 617432 - RNA, 22 nt, Human
uugaagaugguagcaauuuccu

SEQ ID NO: 617433 - RNA, 22 nt, Human
accuucaaugaaaauaauaguc

SEQ ID NO: 617434 - RNA, 22 nt, Human
gggcagguguuuccaaggugag

SEQ ID NO: 617435 - RNA, 22 nt, Human
uuuaaauuuguguuuagagggu

SEQ ID NO: 617436 - RNA, 22 nt, Human
aggagaaguaaggcuagaugau

SEQ ID NO: 617437 - RNA, 22 nt, Human
aagcagcuuaaauuagagccug

SEQ ID NO: 617438 - RNA, 22 nt, Human
aggugccagcucucaggcagga

SEQ ID NO: 617439 - RNA, 22 nt, Human
gagaagggcuugggagucaaca

SEQ ID NO: 617440 - RNA, 22 nt, Human
gagagcauguggucuaguuuua

SEQ ID NO: 617441 - RNA, 22 nt, Human
caagccagcuccugccacagag

SEQ ID NO: 617442 - RNA, 22 nt, Human
acaguguucacuaagguuagcu

SEQ ID NO: 617443 - RNA, 22 nt, Human
ggaugucgaggaugggguagca

SEQ ID NO: 617444 - RNA, 22 nt, Human
augcccugcugccaucuggccg

SEQ ID NO: 617445 - RNA, 22 nt, Human
aaaugcaaggcacauuccuuuu

SEQ ID NO: 617446 - RNA, 22 nt, Human
aggcagguguugggagacacca

SEQ ID NO: 617447 - RNA, 22 nt, Human
acagacaguaaauaguguggcu

SEQ ID NO: 617448 - RNA, 22 nt, Human
ccuccugcacuugcuuuccuuc

SEQ ID NO: 617449 - RNA, 22 nt, Human
gcuggcuuccuucugcagcuag

SEQ ID NO: 617450 - RNA, 20 nt, Human
uuuucugugccaagaaaacu

SEQ ID NO: 617451 - RNA, 21 nt, Human
auggagucaggggaaugggcc

SEQ ID NO: 617452 - RNA, 22 nt, Human
gagguccauuuucacauaugau

SEQ ID NO: 617453 - RNA, 22 nt, Human
cuggccucagagggucauggug

SEQ ID NO: 617454 - RNA, 22 nt, Human
agggcucagaacaaugagugua

SEQ ID NO: 617455 - RNA, 22 nt, Human
caggcuggagugcaauggcaca

SEQ ID NO: 617456 - RNA, 22 nt, Human
auaaaaaggacagauguggucu

SEQ ID NO: 617457 - RNA, 22 nt, Human
ucuggcccaaguuuucggugag

SEQ ID NO: 617458 - RNA, 22 nt, Human
gagcuccaccaccuucaggcag

SEQ ID NO: 617459 - RNA, 22 nt, Human
gccuggagaccugcuccucuac

SEQ ID NO: 617460 - RNA, 22 nt, Human
uuccugggugguccugguagag

SEQ ID NO: 617461 - RNA, 22 nt, Human
gaaacaaucaucaugugauuug

SEQ ID NO: 617462 - RNA, 20 nt, Human
gucugaggagcagugggaaa

SEQ ID NO: 617463 - RNA, 22 nt, Human
uuccuggggggauagauuucac

SEQ ID NO: 617464 - RNA, 22 nt, Human
uuccagcccgcgacuuguucag

SEQ ID NO: 617465 - RNA, 22 nt, Human
cccuggaggcaaagguugcagu

SEQ ID NO: 617466 - RNA, 22 nt, Human
gcaguguuaaacaacugcugcu

SEQ ID NO: 617467 - RNA, 19 nt, Human
gccagcagaaugaugaggc

SEQ ID NO: 617468 - RNA, 22 nt, Human
gggcccagcacuggcugggauc

SEQ ID NO: 617469 - RNA, 22 nt, Human
agacaaaggauuaaugaugaug

SEQ ID NO: 617470 - RNA, 22 nt, Human
aaccagaggcagcaguaccuga

SEQ ID NO: 617471 - RNA, 22 nt, Human
caaggccugacugcuugucuaa

SEQ ID NO: 617472 - RNA, 22 nt, Human
ccuguccagggacugagggaga

SEQ ID NO: 617473 - RNA, 17 nt, Human
gggcuuuagguggugua

SEQ ID NO: 617474 - RNA, 23 nt, Human
agacuggggcauaagaagauggc

SEQ ID NO: 617475 - RNA, 22 nt, Human
uuuacaagaaaucaugaugcua

SEQ ID NO: 617476 - RNA, 22 nt, Human
caagccuuggaaauccauucug

SEQ ID NO: 617477 - RNA, 22 nt, Human
aggaagcaguuuauaaugcauu

SEQ ID NO: 617478 - RNA, 22 nt, Human
ccaugccuuucacugaaccagu

SEQ ID NO: 617479 - RNA, 22 nt, Human
accuucugaccaguuaucuuga

SEQ ID NO: 617480 - RNA, 22 nt, Human
uaggcacaagaccaugcaaagg

SEQ ID NO: 617481 - RNA, 22 nt, Human
cugccagcaaugugaccaugcu

SEQ ID NO: 617482 - RNA, 22 nt, Human
cugugugcucggauggacucgu

SEQ ID NO: 617483 - RNA, 22 nt, Human
uucuuuguuugauaaguaugcu

SEQ ID NO: 617484 - RNA, 22 nt, Human
guacaauagcaguuuucccuuu

SEQ ID NO: 617485 - RNA, 22 nt, Human
uuccugggagcuagccacaucu

SEQ ID NO: 617486 - RNA, 22 nt, Human
uuuccucuuuguaccuugacua

SEQ ID NO: 617487 - RNA, 22 nt, Human
agguccaguuuucugacaaggg

SEQ ID NO: 617488 - RNA, 22 nt, Human
ugggagucagucguucucagag

SEQ ID NO: 617489 - RNA, 21 nt, Human
cugcaggaugcugaagccagg

SEQ ID NO: 617490 - RNA, 22 nt, Human
cugaggcacugucagcugaggc

SEQ ID NO: 617491 - RNA, 22 nt, Human
gggcuuuaaucuuguuaacuag

SEQ ID NO: 617492 - RNA, 22 nt, Human
uuuuuaucuacagauucucagc

SEQ ID NO: 617493 - RNA, 22 nt, Human
auuaguguucuuaucuucuagg

SEQ ID NO: 617494 - RNA, 22 nt, Human
auguccagaguguccuggaaag

SEQ ID NO: 617495 - RNA, 21 nt, Human
agcuggccugguuugagcucc

SEQ ID NO: 617496 - RNA, 22 nt, Human
uuucagaguuaguagagcaugu

SEQ ID NO: 617497 - RNA, 22 nt, Human
ugcauguuaagaaaauauugag

SEQ ID NO: 617498 - RNA, 22 nt, Human
acagguguccucacagggggug

SEQ ID NO: 617499 - RNA, 22 nt, Human
cagcuguucggggcuggcaugu

SEQ ID NO: 617500 - RNA, 22 nt, Human
aguggcaguagaugagcugguu

SEQ ID NO: 617501 - RNA, 22 nt, Human
cuggagucuucagcuugcugcc

SEQ ID NO: 617502 - RNA, 22 nt, Human
agaaucaaagagaaauacuuug

SEQ ID NO: 617503 - RNA, 22 nt, Human
ggaugggagcagaggacgacca

SEQ ID NO: 617504 - RNA, 22 nt, Human
ugugcaaaauaauaaaucacug

SEQ ID NO: 617505 - RNA, 22 nt, Human
aaacaaagccagggaaguuaug

SEQ ID NO: 617506 - RNA, 22 nt, Human
agguggagacccagagaaggcg

SEQ ID NO: 617507 - RNA, 22 nt, Human
aagucagauaggugaguccaaa

SEQ ID NO: 617508 - RNA, 20 nt, Human
cucugcagcaaggccugggu

SEQ ID NO: 617509 - RNA, 22 nt, Human
ggagggacccacugcggugacc

SEQ ID NO: 617510 - RNA, 22 nt, Human
ccagcuuuucuuaucauuauaa

SEQ ID NO: 617511 - RNA, 22 nt, Human
cagauccacccuuguagugaca

SEQ ID NO: 617512 - RNA, 22 nt, Human
uguagaaagaauauguuucaua

SEQ ID NO: 617513 - RNA, 22 nt, Human
ccagcucucuuugaagcauaaa

SEQ ID NO: 617514 - RNA, 22 nt, Human
cuucaaaugugauuuuaauaac

SEQ ID NO: 617515 - RNA, 22 nt, Human
uuacaagauugauuugcuuggc

SEQ ID NO: 617516 - RNA, 22 nt, Human
ggagaucuuuaggaguuggacu

SEQ ID NO: 617517 - RNA, 20 nt, Human
cugggccauccuuuuacaau

SEQ ID NO: 617518 - RNA, 22 nt, Human
cagggugccucugcucccacca

SEQ ID NO: 617519 - RNA, 20 nt, Human
cucuuaaauguaaaguaggc

SEQ ID NO: 617520 - RNA, 22 nt, Human
ggcuccuguccccucagcugcu

SEQ ID NO: 617521 - RNA, 22 nt, Human
auauucaucguguagaaauacu

SEQ ID NO: 617522 - RNA, 22 nt, Human
uagguucaugaaauuuucagga

SEQ ID NO: 617523 - RNA, 22 nt, Human
aauuaaaaaaggagagcuugcu

SEQ ID NO: 617524 - RNA, 22 nt, Human
ccaggagcagauauggacauaa

SEQ ID NO: 617525 - RNA, 22 nt, Human
ucugggagagggaaagaagacu

SEQ ID NO: 617526 - RNA, 22 nt, Human
aaggcugggaaacaugcaggcc

SEQ ID NO: 617527 - RNA, 22 nt, Human
ugaagauuuccaccaaaucaca

SEQ ID NO: 617528 - RNA, 22 nt, Human
aggagaggguggcauuaaguuu

SEQ ID NO: 617529 - RNA, 22 nt, Human
aacagcuauucacuacuauggg

SEQ ID NO: 617530 - RNA, 22 nt, Human
auuccuuggaacagaugcgaag

SEQ ID NO: 617531 - RNA, 22 nt, Human
ugaugcaguguccucccaugca

SEQ ID NO: 617532 - RNA, 22 nt, Human
augcccuggacuucuaguauuc

SEQ ID NO: 617533 - RNA, 22 nt, Human
gaaagcaauuuguguaaucugu

SEQ ID NO: 617534 - RNA, 22 nt, Human
caguauuuucaggauuuggaag

SEQ ID NO: 617535 - RNA, 22 nt, Human
uccuggcccaaucugcccauga

SEQ ID NO: 617536 - RNA, 22 nt, Human
cuguggcucagcacggggucag

SEQ ID NO: 617537 - RNA, 22 nt, Human
cccaguggcuuuugcccagguu

SEQ ID NO: 617538 - RNA, 22 nt, Human
cacuggcugagcuucucuaggg

SEQ ID NO: 617539 - RNA, 22 nt, Human
ggugcaggagcggggugcucgg

SEQ ID NO: 617540 - RNA, 22 nt, Human
aaagaugucaguuugaaauaac

SEQ ID NO: 617541 - RNA, 22 nt, Human
aaaggaagaugccaggacucug

SEQ ID NO: 617542 - RNA, 22 nt, Human
agguucaggcacuugcccaaca

SEQ ID NO: 617543 - RNA, 22 nt, Human
gccugccaugagcuaaugacac

SEQ ID NO: 617544 - RNA, 22 nt, Human
aaggcuguccaggagaaaauag

SEQ ID NO: 617545 - RNA, 22 nt, Human
auuccuuguuucacugaaaagg

SEQ ID NO: 617546 - RNA, 22 nt, Human
ugugcacauauacucauauucc

SEQ ID NO: 617547 - RNA, 20 nt, Human
ggcaggaccccaguggcauc

SEQ ID NO: 617548 - RNA, 18 nt, Human
cugccacuuaauguggug

SEQ ID NO: 617549 - RNA, 22 nt, Human
aauguguuuucacugaagauuc

SEQ ID NO: 617550 - RNA, 22 nt, Human
gaguccaguaguuaggacagag

SEQ ID NO: 617551 - RNA, 22 nt, Human
agggccaguaccaggugggugg

SEQ ID NO: 617552 - RNA, 22 nt, Human
aacuuaaacccacucauguaga

SEQ ID NO: 617553 - RNA, 22 nt, Human
cacagugugggcauggugccug

SEQ ID NO: 617554 - RNA, 22 nt, Human
cugucccucucacaccucacca

SEQ ID NO: 617555 - RNA, 22 nt, Human
ugaggcaguauuuuagugacuu

SEQ ID NO: 617556 - RNA, 22 nt, Human
uugcagcuucuugcaucagaaa

SEQ ID NO: 617557 - RNA, 22 nt, Human
gucccuggggaaucagcuggag

SEQ ID NO: 617558 - RNA, 22 nt, Human
gaguccaguucuuuccagcagu

SEQ ID NO: 617559 - RNA, 19 nt, Human
ggccaggcugacugugguc

SEQ ID NO: 617560 - RNA, 22 nt, Human
gugcccuguugcacacuugagg

SEQ ID NO: 617561 - RNA, 22 nt, Human
ugaggcagugauguuuaagcac

SEQ ID NO: 617562 - RNA, 22 nt, Human
uggcuccucccugugugugcgu

SEQ ID NO: 617563 - RNA, 22 nt, Human
uuccuugaaugagucauggaaa

SEQ ID NO: 617564 - RNA, 22 nt, Human
aggcagucagcccugcuagggu

SEQ ID NO: 617565 - RNA, 22 nt, Human
gggcagguggagggcccagcca

SEQ ID NO: 617566 - RNA, 22 nt, Human
ggcaaggugcuacagacaguga

SEQ ID NO: 617567 - RNA, 22 nt, Human
uagcaaaauguggauguaguug

SEQ ID NO: 617568 - RNA, 22 nt, Human
cgcaggcucgguucacagagca

SEQ ID NO: 617569 - RNA, 22 nt, Human
agcuucuuaaguuccugcagca

SEQ ID NO: 617570 - RNA, 22 nt, Human
gcugaggccaggccccaccgga

SEQ ID NO: 617571 - RNA, 22 nt, Human
gagccaggggucagcuccgagg

SEQ ID NO: 617572 - RNA, 22 nt, Human
auaggccaauacuguagaguuu

SEQ ID NO: 617573 - RNA, 22 nt, Human
aaauuagauaugugugagacuc

SEQ ID NO: 617574 - RNA, 22 nt, Human
ucaggcugauaggaggaacuga

SEQ ID NO: 617575 - RNA, 22 nt, Human
cuggaagggagcacuguagaga

SEQ ID NO: 617576 - RNA, 22 nt, Human
ucaguguuucaguuuggaaaug

SEQ ID NO: 617577 - RNA, 22 nt, Human
caccaggcacauaguaggcacu

SEQ ID NO: 617578 - RNA, 22 nt, Human
cuauaaaucuacccagcauugg

SEQ ID NO: 617579 - RNA, 23 nt, Human
uccaggagaauuccagggcccgg

SEQ ID NO: 617580 - RNA, 22 nt, Human
ccugcaagagcggagaagccag

SEQ ID NO: 617581 - RNA, 22 nt, Human
uccagggauguccuguagcacu

SEQ ID NO: 617582 - RNA, 22 nt, Human
gggcgggguggcucaugccugu

SEQ ID NO: 617583 - RNA, 19 nt, Human
uuucaggagcuaugcaggg

SEQ ID NO: 617584 - RNA, 22 nt, Human
aaagacacacagccagcaagug

SEQ ID NO: 617585 - RNA, 22 nt, Human
ucaguuuccugguuuuaauauu

SEQ ID NO: 617586 - RNA, 22 nt, Human
auuugcuuguaaauguaugccu

SEQ ID NO: 617587 - RNA, 22 nt, Human
ggcccuuggagccuccacagug

SEQ ID NO: 617588 - RNA, 22 nt, Human
cauccagcuccugggggccacc

SEQ ID NO: 617589 - RNA, 22 nt, Human
gcugggaggcagcaccuuuagc

SEQ ID NO: 617590 - RNA, 20 nt, Human
ugugcccugcagacuucuuu

SEQ ID NO: 617591 - RNA, 22 nt, Human
uuggaaggagucuuuggggaug

SEQ ID NO: 617592 - RNA, 22 nt, Human
auuuuacuucauuugaaaugcc

SEQ ID NO: 617593 - RNA, 23 nt, Human
auaagccuuuucuuucugcccca

SEQ ID NO: 617594 - RNA, 22 nt, Human
gcuuuauuuugugagggauuac

SEQ ID NO: 617595 - RNA, 22 nt, Human
uccugaggaaaguucaugaaug

SEQ ID NO: 617596 - RNA, 17 nt, Human
caggaaaauaugaguga

SEQ ID NO: 617597 - RNA, 22 nt, Human
aagcaggauggagguugaguua

SEQ ID NO: 617598 - RNA, 22 nt, Human
gugcccugggccuucagggcca

SEQ ID NO: 617599 - RNA, 22 nt, Human
uuauguguguacaugcauaugu

SEQ ID NO: 617600 - RNA, 22 nt, Human
cuggaaggagcccgggcggauc

SEQ ID NO: 617601 - RNA, 22 nt, Human
cuguggcuaggaagcuguggga

SEQ ID NO: 617602 - RNA, 22 nt, Human
agcagggagaccaucucuuccu

SEQ ID NO: 617603 - RNA, 22 nt, Human
aggcagugagcagggugucaug

SEQ ID NO: 617604 - RNA, 22 nt, Human
agagccuguacuuuucugugaa

SEQ ID NO: 617605 - RNA, 22 nt, Human
aucuguggcuggugagaggcag

SEQ ID NO: 617606 - RNA, 22 nt, Human
gggcggugccugucuccgaagc

SEQ ID NO: 617607 - RNA, 22 nt, Human
aucuggaggccugucuuauccc

SEQ ID NO: 617608 - RNA, 22 nt, Human
aacaaagcccugcccaagagcu

SEQ ID NO: 617609 - RNA, 22 nt, Human
ggcaucuuguugcucaaaucua

SEQ ID NO: 617610 - RNA, 22 nt, Human
cucugguugcagcugaaguucc

SEQ ID NO: 617611 - RNA, 23 nt, Human
ggagugcaauggcgccaucucgg

SEQ ID NO: 617612 - RNA, 22 nt, Human
aacuuuaaggcuauaaauuaug

SEQ ID NO: 617613 - RNA, 22 nt, Human
acaaauaugguacucggagaaa

SEQ ID NO: 617614 - RNA, 22 nt, Human
agugucuuugucucucaagcac

SEQ ID NO: 617615 - RNA, 20 nt, Human
ugccuugggacagugccugu

SEQ ID NO: 617616 - RNA, 22 nt, Human
ucagguccuuuugguguauauu

SEQ ID NO: 617617 - RNA, 22 nt, Human
gccagcuguucagacauucuuu

SEQ ID NO: 617618 - RNA, 22 nt, Human
ucagaaaccagcucucucaauu

SEQ ID NO: 617619 - RNA, 23 nt, Human
gccaggcuccggucuguggccac

SEQ ID NO: 617620 - RNA, 22 nt, Human
aaggugacucacaaagccaguu

SEQ ID NO: 617621 - RNA, 22 nt, Human
cuucaauaggaacugcauggca

SEQ ID NO: 617622 - RNA, 22 nt, Human
gagaggcugacuggcuguccug

SEQ ID NO: 617623 - RNA, 22 nt, Human
accuguuuuccuaucuagauug

SEQ ID NO: 617624 - RNA, 22 nt, Human
caggcagggagcuggaaaggau

SEQ ID NO: 617625 - RNA, 22 nt, Human
cccuggcucuucaccaccugcc

SEQ ID NO: 617626 - RNA, 22 nt, Human
ugggcuccagcaccugugcucu

SEQ ID NO: 617627 - RNA, 22 nt, Human
caaauuacccucaacaucuaga

SEQ ID NO: 617628 - RNA, 22 nt, Human
cuucacaaauggccuagaguuc

SEQ ID NO: 617629 - RNA, 17 nt, Human
cuccuggcagccucagg

SEQ ID NO: 617630 - RNA, 17 nt, Human
cucugcagugcauggcu

SEQ ID NO: 617631 - RNA, 19 nt, Human
uggcucugucgaaggcaca

SEQ ID NO: 617632 - RNA, 22 nt, Human
agccuucacugggaccuuggau

SEQ ID NO: 617633 - RNA, 22 nt, Human
aaauuagaucaguggauuuucu

SEQ ID NO: 617634 - RNA, 22 nt, Human
aacacaaagaagcugcaggauc

SEQ ID NO: 617635 - RNA, 22 nt, Human
gcugcccacaaccccgugucua

SEQ ID NO: 617636 - RNA, 22 nt, Human
ucucuggguucucacucagcac

SEQ ID NO: 617637 - RNA, 22 nt, Human
cuguggcugugaaacuucucag

SEQ ID NO: 617638 - RNA, 22 nt, Human
aaauggaggcaaaauugguuuc

SEQ ID NO: 617639 - RNA, 22 nt, Human
cagggugacugcccuggccacu

SEQ ID NO: 617640 - RNA, 22 nt, Human
ccccagcccacaagcauauuaa

SEQ ID NO: 617641 - RNA, 22 nt, Human
uuccugggcuuuccccucuggu

SEQ ID NO: 617642 - RNA, 23 nt, Human
gagugcagaauagacaugcagug

SEQ ID NO: 617643 - RNA, 22 nt, Human
ugggcucugaagggucccggau

SEQ ID NO: 617644 - RNA, 22 nt, Human
agcugccuaguagauugauugg

SEQ ID NO: 617645 - RNA, 19 nt, Human
cuuccuugcuccccaugug

SEQ ID NO: 617646 - RNA, 22 nt, Human
gagaaaaugucagacuuggucg

SEQ ID NO: 617647 - RNA, 22 nt, Human
ccuuccuugagaagcaauuccu

SEQ ID NO: 617648 - RNA, 22 nt, Human
gcagggcuuuuugaaacauggu

SEQ ID NO: 617649 - RNA, 22 nt, Human
uucuuuguugagcaaguaggac

SEQ ID NO: 617650 - RNA, 22 nt, Human
auuguugagugcuucagcugua

SEQ ID NO: 617651 - RNA, 22 nt, Human
gagguccacugaggcaacaggg

SEQ ID NO: 617652 - RNA, 22 nt, Human
uguggaauauuagauuagguug

SEQ ID NO: 617653 - RNA, 22 nt, Human
aaggcagggaaaguggauuagg

SEQ ID NO: 617654 - RNA, 22 nt, Human
uuucagugcacguaguuuauuu

SEQ ID NO: 617655 - RNA, 22 nt, Human
caaacauagugaagcaaugaca

SEQ ID NO: 617656 - RNA, 22 nt, Human
ggcaguguggccugaguaaguc

SEQ ID NO: 617657 - RNA, 22 nt, Human
gagggcaguagccucguacccu

SEQ ID NO: 617658 - RNA, 22 nt, Human
uuccuggggacuuaccgucauu

SEQ ID NO: 617659 - RNA, 22 nt, Human
auguguauauuuauuguaguuu

SEQ ID NO: 617660 - RNA, 22 nt, Human
caaguccaggugggcaaauaaa

SEQ ID NO: 617661 - RNA, 22 nt, Human
ccagugugguagguccacaggu

SEQ ID NO: 617662 - RNA, 22 nt, Human
cuccuggcucgcccccagcuga

SEQ ID NO: 617663 - RNA, 22 nt, Human
ggagacagugguagggccuaag

SEQ ID NO: 617664 - RNA, 22 nt, Human
caguggucccugagguugcugg

SEQ ID NO: 617665 - RNA, 22 nt, Human
aggcuagaggcuucuggcuuca

SEQ ID NO: 617666 - RNA, 22 nt, Human
ugagaagcccacacucuuuccu

SEQ ID NO: 617667 - RNA, 22 nt, Human
agucccagugagaugagccacg

SEQ ID NO: 617668 - RNA, 22 nt, Human
cauuugcugaggccuucagagg

SEQ ID NO: 617669 - RNA, 22 nt, Human
uaaauuacccuuuagggaauug

SEQ ID NO: 617670 - RNA, 22 nt, Human
auguccagaguaaagcacauuc

SEQ ID NO: 617671 - RNA, 22 nt, Human
acaguguuguauuuaguuugau

SEQ ID NO: 617672 - RNA, 22 nt, Human
ucugggcuuggauuggcucugc

SEQ ID NO: 617673 - RNA, 19 nt, Human
accaggagacagugagcuu

SEQ ID NO: 617674 - RNA, 21 nt, Human
accuucaagccagaggugguc

SEQ ID NO: 617675 - RNA, 22 nt, Human
cuccucuucugaguaccaggga

SEQ ID NO: 617676 - RNA, 22 nt, Human
aaacucuguauuugcugugggu

SEQ ID NO: 617677 - RNA, 22 nt, Human
gccagggaacccaagggccuca

SEQ ID NO: 617678 - RNA, 22 nt, Human
cuuggcaguuucggaaggauga

SEQ ID NO: 617679 - RNA, 22 nt, Human
uguggagaagaaggccacugca

SEQ ID NO: 617680 - RNA, 22 nt, Human
uuggguuuucccuugaaacuga

SEQ ID NO: 617681 - RNA, 22 nt, Human
agggccugggucuguacuccuc

SEQ ID NO: 617682 - RNA, 22 nt, Human
ugugaauauuuccuucuuugga

SEQ ID NO: 617683 - RNA, 22 nt, Human
cauuugucucuaggaagugagg

SEQ ID NO: 617684 - RNA, 22 nt, Human
gccuucugcgcucgugucuccg

SEQ ID NO: 617685 - RNA, 22 nt, Human
ccuuucugauggccucccagcc

SEQ ID NO: 617686 - RNA, 22 nt, Human
ugcacuuuaaaaaauggugaug

SEQ ID NO: 617687 - RNA, 19 nt, Human
acaggggcuagcggaagca

SEQ ID NO: 617688 - RNA, 22 nt, Human
agauuuguccugcuuucuaccu

SEQ ID NO: 617689 - RNA, 22 nt, Human
cccgagugucuacucacuccca

SEQ ID NO: 617690 - RNA, 22 nt, Human
uugcccugcagcggugaguggu

SEQ ID NO: 617691 - RNA, 22 nt, Human
agagauuuacacaugccuuuuc

SEQ ID NO: 617692 - RNA, 22 nt, Human
ucaguuucacagucugugcaga

SEQ ID NO: 617693 - RNA, 22 nt, Human
gaauuugucccuugauauaaaa

SEQ ID NO: 617694 - RNA, 22 nt, Human
gagccuggauagccuuguucca

SEQ ID NO: 617695 - RNA, 22 nt, Human
cccugcagagagugcuuuugug

SEQ ID NO: 617696 - RNA, 22 nt, Human
cagcuggcagcccuggcccugc

SEQ ID NO: 617697 - RNA, 22 nt, Human
cugggagaggcugcuccgcucu

SEQ ID NO: 617698 - RNA, 21 nt, Human
gacaggggaagaagcaaggag

SEQ ID NO: 617699 - RNA, 22 nt, Human
uuuacaagucagggacuguucu

SEQ ID NO: 617700 - RNA, 22 nt, Human
uuugcaaagugcuugcagagua

SEQ ID NO: 617701 - RNA, 22 nt, Human
ccagagaauuuuagacaaaaau

SEQ ID NO: 617702 - RNA, 22 nt, Human
auggguuucccucugaaauuau

SEQ ID NO: 617703 - RNA, 22 nt, Human
uauuuuacuuuaaagcgagaga

SEQ ID NO: 617704 - RNA, 22 nt, Human
agagcuaggaaugaccacucuc

SEQ ID NO: 617705 - RNA, 22 nt, Human
gugagaagauaaguauugcaaa

SEQ ID NO: 617706 - RNA, 22 nt, Human
acagaagcucaagagagcagug

SEQ ID NO: 617707 - RNA, 22 nt, Human
cuccuggggccauggaaggaac

SEQ ID NO: 617708 - RNA, 22 nt, Human
cagaauaugacaagauuuuccu

SEQ ID NO: 617709 - RNA, 22 nt, Human
cccugcagaucagugagaacuu

SEQ ID NO: 617710 - RNA, 22 nt, Human
uccugggauucugcauuucuaa

SEQ ID NO: 617711 - RNA, 22 nt, Human
uuuucaguaaugucuacauaau

SEQ ID NO: 617712 - RNA, 22 nt, Human
ugaggcaggagaauggcgggaa

SEQ ID NO: 617713 - RNA, 22 nt, Human
cuuguccagauguuuguuaggu

SEQ ID NO: 617714 - RNA, 19 nt, Human
gggcuuuacuccaaguggg

SEQ ID NO: 617715 - RNA, 22 nt, Human
ccuacucugagcgccuccgcau

SEQ ID NO: 617716 - RNA, 22 nt, Human
ggcgccagcacugcagcgccuc

SEQ ID NO: 617717 - RNA, 22 nt, Human
ggagaagguggcucagcaaagg

SEQ ID NO: 617718 - RNA, 22 nt, Human
cuccugggaggaugcggacccg

SEQ ID NO: 617719 - RNA, 22 nt, Human
gaggcagugcauugucuagggg

SEQ ID NO: 617720 - RNA, 22 nt, Human
ucccugugucuuccucuugccc

SEQ ID NO: 617721 - RNA, 22 nt, Human
cucuggcuguuugcagcucaag

SEQ ID NO: 617722 - RNA, 22 nt, Human
uucccacagagauuacauugaa

SEQ ID NO: 617723 - RNA, 22 nt, Human
uccuucaaucacccagugggga

SEQ ID NO: 617724 - RNA, 22 nt, Human
gaggccuggaccagccacagag

SEQ ID NO: 617725 - RNA, 22 nt, Human
agaguauugugaccauuuguca

SEQ ID NO: 617726 - RNA, 22 nt, Human
uccugggagcacaugguccugc

SEQ ID NO: 617727 - RNA, 18 nt, Human
uggcuccugccuccugca

SEQ ID NO: 617728 - RNA, 18 nt, Human
auauucaagaagacagag

SEQ ID NO: 617729 - RNA, 22 nt, Human
uugaguguaaggaauguggggc

SEQ ID NO: 617730 - RNA, 22 nt, Human
uccaggcagggcagccaucaag

SEQ ID NO: 617731 - RNA, 21 nt, Human
cagaauccagucucuuauuac

SEQ ID NO: 617732 - RNA, 22 nt, Human
ccugggaguggcacucacagca

SEQ ID NO: 617733 - RNA, 21 nt, Human
uccaggaguucuaauaggugu

SEQ ID NO: 617734 - RNA, 22 nt, Human
gggcggcgucggcgaggccauc

SEQ ID NO: 617735 - RNA, 22 nt, Human
gaauuuacaaguugaauaacaa

SEQ ID NO: 617736 - RNA, 22 nt, Human
uggaugagucugagauugggca

SEQ ID NO: 617737 - RNA, 22 nt, Human
cagcaggaaagacaucugagca

SEQ ID NO: 617738 - RNA, 22 nt, Human
gagcuggaggaccaggacuggg

SEQ ID NO: 617739 - RNA, 22 nt, Human
cccagguccccaccugucugcu

SEQ ID NO: 617740 - RNA, 22 nt, Human
gcagcagggugccagcuuugca

SEQ ID NO: 617741 - RNA, 20 nt, Human
cugagccaacucucuucuug

SEQ ID NO: 617742 - RNA, 22 nt, Human
guuucccaaauuguucacaggg

SEQ ID NO: 617743 - RNA, 20 nt, Human
aacuccuagccucaagugau

SEQ ID NO: 617744 - RNA, 22 nt, Human
uuguuuccuuucuauacaggau

SEQ ID NO: 617745 - RNA, 22 nt, Human
cccaguggggagcugagguuca

SEQ ID NO: 617746 - RNA, 22 nt, Human
agugcuggguacuguucccauu

SEQ ID NO: 617747 - RNA, 22 nt, Human
ugcauauccacaccuuaucucu

SEQ ID NO: 617748 - RNA, 22 nt, Human
ugucaaaaagcugggacaagca

SEQ ID NO: 617749 - RNA, 22 nt, Human
gcuguucagaugcgauucagga

SEQ ID NO: 617750 - RNA, 22 nt, Human
uggccagguugggcuuugcagc

SEQ ID NO: 617751 - RNA, 22 nt, Human
guucugaguccuccuuugaagg

SEQ ID NO: 617752 - RNA, 22 nt, Human
uccuguggucuggaaggaaugg

SEQ ID NO: 617753 - RNA, 22 nt, Human
ugaagcaguuacuggguguuaa

SEQ ID NO: 617754 - RNA, 22 nt, Human
uagaaagacaugggccagcagc

SEQ ID NO: 617755 - RNA, 22 nt, Human
cuuucacaguccugacugagcg

SEQ ID NO: 617756 - RNA, 22 nt, Human
aggcgcaggguuuggacccagg

SEQ ID NO: 617757 - RNA, 22 nt, Human
ggugcaggaaucugcaauugaa

SEQ ID NO: 617758 - RNA, 22 nt, Human
ugaggcagaguaagauacauga

SEQ ID NO: 617759 - RNA, 22 nt, Human
gguccaggggguagauauguga

SEQ ID NO: 617760 - RNA, 22 nt, Human
agcaguaagcaacugagcuugc

SEQ ID NO: 617761 - RNA, 22 nt, Human
ugagcuccggcauauggaauua

SEQ ID NO: 617762 - RNA, 22 nt, Human
uauacaagugagaagaagaguu

SEQ ID NO: 617763 - RNA, 23 nt, Human
cccaugcugggcgcagugaaugg

SEQ ID NO: 617764 - RNA, 22 nt, Human
cagggugcugcaccaucccuca

SEQ ID NO: 617765 - RNA, 22 nt, Human
cuuccaaguugcucugcugacc

SEQ ID NO: 617766 - RNA, 22 nt, Human
caguguggugugcacagcuuag

SEQ ID NO: 617767 - RNA, 22 nt, Human
agugcaaaauucagaagcaauu

SEQ ID NO: 617768 - RNA, 20 nt, Human
aauuagauguuuaaucaaua

SEQ ID NO: 617769 - RNA, 22 nt, Human
gcaguguuaggaauaaaaauga

SEQ ID NO: 617770 - RNA, 21 nt, Human
ugccuuggcaaaugaccauga

SEQ ID NO: 617771 - RNA, 17 nt, Human
ggcaggugcggggccgc

SEQ ID NO: 617772 - RNA, 22 nt, Human
cugagggagaagucacgggcag

SEQ ID NO: 617773 - RNA, 22 nt, Human
uggagagcgcgacgggaggaag

SEQ ID NO: 617774 - RNA, 22 nt, Human
agccuucaguaaauccacugug

SEQ ID NO: 617775 - RNA, 22 nt, Human
ugcaaaaaggcagacuggugau

SEQ ID NO: 617776 - RNA, 22 nt, Human
agcgcaggaacacgucugccuu

SEQ ID NO: 617777 - RNA, 22 nt, Human
cagggcuugaaucaaggaaguc

SEQ ID NO: 617778 - RNA, 22 nt, Human
aagggcugagaaguggggcugg

SEQ ID NO: 617779 - RNA, 22 nt, Human
gggcuuuaggggccagugacca

SEQ ID NO: 617780 - RNA, 18 nt, Human
agggagagaccgcggguc

SEQ ID NO: 617781 - RNA, 21 nt, Human
cuccugggcuaagauauagug

SEQ ID NO: 617782 - RNA, 23 nt, Human
uggagaauguguuuacuucgugu

SEQ ID NO: 617783 - RNA, 22 nt, Human
agaagcaguuauuuuuugcaca

SEQ ID NO: 617784 - RNA, 22 nt, Human
uguguucauuuaacuguucuuu

SEQ ID NO: 617785 - RNA, 22 nt, Human
auggauaaucaugaacuuugag

SEQ ID NO: 617786 - RNA, 20 nt, Human
gaguccaggggccuguagca

SEQ ID NO: 617787 - RNA, 22 nt, Human
gggcaggagagaacagucaugg

SEQ ID NO: 617788 - RNA, 22 nt, Human
agcuggcuuugagcugggaggu

SEQ ID NO: 617789 - RNA, 22 nt, Human
gcaggcguguuucacgugccag

SEQ ID NO: 617790 - RNA, 22 nt, Human
cagcucugccucuggggcugag

SEQ ID NO: 617791 - RNA, 22 nt, Human
uccuguggaagacaguguuggg

SEQ ID NO: 617792 - RNA, 22 nt, Human
ccaguguucaguaugcauuaag

SEQ ID NO: 617793 - RNA, 22 nt, Human
cccuggaggagcuuagagcuug

SEQ ID NO: 617794 - RNA, 22 nt, Human
gagaagccgagucagcugagcc

SEQ ID NO: 617795 - RNA, 22 nt, Human
gguggggccugcuccagcggcc

SEQ ID NO: 617796 - RNA, 22 nt, Human
uuccugggcugcagagagcacc

SEQ ID NO: 617797 - RNA, 22 nt, Human
acaacaaagacacuugaaauga

SEQ ID NO: 617798 - RNA, 22 nt, Human
agacagcaugagccugcugaug

SEQ ID NO: 617799 - RNA, 22 nt, Human
cugcccuggccacugugcccag

SEQ ID NO: 617800 - RNA, 18 nt, Human
aggccucugugugcccag

SEQ ID NO: 617801 - RNA, 22 nt, Human
gucaugccagcggagcucggga

SEQ ID NO: 617802 - RNA, 22 nt, Human
ugaggcaggagaaucacaugaa

SEQ ID NO: 617803 - RNA, 22 nt, Human
gaagucauccacuaugggggag

SEQ ID NO: 617804 - RNA, 22 nt, Human
guuagaauaaaaggucagagag

SEQ ID NO: 617805 - RNA, 22 nt, Human
agaacaauguuaaauuauuaag

SEQ ID NO: 617806 - RNA, 22 nt, Human
gcuggggacuccccaccauagc

SEQ ID NO: 617807 - RNA, 22 nt, Human
ccacagcuagggcaaucugauu

SEQ ID NO: 617808 - RNA, 22 nt, Human
cugggccagcaacugcaaugga

SEQ ID NO: 617809 - RNA, 18 nt, Human
auccugggagcagacagc

SEQ ID NO: 617810 - RNA, 22 nt, Human
uccagaggcucugagggagagu

SEQ ID NO: 617811 - RNA, 22 nt, Human
cuaguagacagaaauguccagu

SEQ ID NO: 617812 - RNA, 22 nt, Human
uccacagcacaaagccagugug

SEQ ID NO: 617813 - RNA, 22 nt, Human
cagaaauaaacuucucacaucg

SEQ ID NO: 617814 - RNA, 22 nt, Human
acuccugggugcugaccagcgu

SEQ ID NO: 617815 - RNA, 22 nt, Human
ucaugccaauuucugcauggcu

SEQ ID NO: 617816 - RNA, 19 nt, Human
uuuacaaguucuuuguaug

SEQ ID NO: 617817 - RNA, 18 nt, Human
cugccccuucucugagau

SEQ ID NO: 617818 - RNA, 22 nt, Human
aaagacaguggauucaaaaucc

SEQ ID NO: 617819 - RNA, 22 nt, Human
accugccagcugagaagggugu

SEQ ID NO: 617820 - RNA, 22 nt, Human
cugcagagaugaagaagguggc

SEQ ID NO: 617821 - RNA, 22 nt, Human
ggccaccuccgugaaggaauga

SEQ ID NO: 617822 - RNA, 22 nt, Human
aggacugggugcagagggcauc

SEQ ID NO: 617823 - RNA, 22 nt, Human
auacaguauguaggcuuuucag

SEQ ID NO: 617824 - RNA, 22 nt, Human
gccucccuccaccacugcaggu

SEQ ID NO: 617825 - RNA, 21 nt, Human
ucuuuuaacaccaggaauucc

SEQ ID NO: 617826 - RNA, 22 nt, Human
aaggaaauacaacauguauuca

SEQ ID NO: 617827 - RNA, 22 nt, Human
ucauccaguucacauggugagu

SEQ ID NO: 617828 - RNA, 22 nt, Human
ugguccaggguguaguacagag

SEQ ID NO: 617829 - RNA, 22 nt, Human
agccagggucucucgcucuguu

SEQ ID NO: 617830 - RNA, 22 nt, Human
ccugaguggagggauucugcag

SEQ ID NO: 617831 - RNA, 22 nt, Human
uugauuuuuccagcuucuagag

SEQ ID NO: 617832 - RNA, 22 nt, Human
agggccuggaacuggagaccac

SEQ ID NO: 617833 - RNA, 22 nt, Human
uguuuugucuaaucuaaauucu

SEQ ID NO: 617834 - RNA, 22 nt, Human
aauguguucaguuaaaugaacu

SEQ ID NO: 617835 - RNA, 22 nt, Human
caggcaggagacauuugguugg

SEQ ID NO: 617836 - RNA, 22 nt, Human
gaagagaagguguaggccaucc

SEQ ID NO: 617837 - RNA, 22 nt, Human
gagagaaaaaugagcuucauug

SEQ ID NO: 617838 - RNA, 22 nt, Human
ggagguccaugugaauguggcc

SEQ ID NO: 617839 - RNA, 22 nt, Human
ccagugcaccaagaggccuaga

SEQ ID NO: 617840 - RNA, 22 nt, Human
ucuucaaaaauacagguuuuca

SEQ ID NO: 617841 - RNA, 22 nt, Human
ugggcuuugagcucggucaccu

SEQ ID NO: 617842 - RNA, 22 nt, Human
uccuggccgccgcguggggccg

SEQ ID NO: 617843 - RNA, 22 nt, Human
uccaggcaaagggacuagcagg

SEQ ID NO: 617844 - RNA, 22 nt, Human
uuucaggauuaguuuaagcagg

SEQ ID NO: 617845 - RNA, 22 nt, Human
uagaagaacaugucaaacuaua

SEQ ID NO: 617846 - RNA, 22 nt, Human
ugucagugaguuggguccugag

SEQ ID NO: 617847 - RNA, 20 nt, Human
aaagcaguaugcaaguagag

SEQ ID NO: 617848 - RNA, 22 nt, Human
aaggccugggaggccucucuuc

SEQ ID NO: 617849 - RNA, 22 nt, Human
caggcucacuguaaggucagcu

SEQ ID NO: 617850 - RNA, 22 nt, Human
uccacagugguugaacuaguaa

SEQ ID NO: 617851 - RNA, 22 nt, Human
guuuuuuggguguauaucuucu

SEQ ID NO: 617852 - RNA, 23 nt, Human
uccagccucuugcucucacaugc

SEQ ID NO: 617853 - RNA, 23 nt, Human
uaauuagauguugauuccugaga

SEQ ID NO: 617854 - RNA, 22 nt, Human
agugucugaaccugcaguggga

SEQ ID NO: 617855 - RNA, 22 nt, Human
uccagagccugcgcacuggcug

SEQ ID NO: 617856 - RNA, 23 nt, Human
gggcagguuuuuauaggcuucag

SEQ ID NO: 617857 - RNA, 22 nt, Human
augugcaggauccaggcuccua

SEQ ID NO: 617858 - RNA, 22 nt, Human
auuuauuaccucggaguuucug

SEQ ID NO: 617859 - RNA, 22 nt, Human
gggaguccaaauugguacaaua

SEQ ID NO: 617860 - RNA, 22 nt, Human
aggcagaaccagcugggacuuu

SEQ ID NO: 617861 - RNA, 22 nt, Human
agucugucuaauauuauucagg

SEQ ID NO: 617862 - RNA, 22 nt, Human
ucaguguuuacaugcauccuug

SEQ ID NO: 617863 - RNA, 22 nt, Human
aguuuuguaauucucaaaaaua

SEQ ID NO: 617864 - RNA, 22 nt, Human
ucugggugcccuuugcucuguu

SEQ ID NO: 617865 - RNA, 18 nt, Human
ugguccaguucagauaua

SEQ ID NO: 617866 - RNA, 22 nt, Human
uggcaggugaaguuguuaggga

SEQ ID NO: 617867 - RNA, 22 nt, Human
uuugcuauaaaagggucacacg

SEQ ID NO: 617868 - RNA, 22 nt, Human
gaaugcuacuugacucagcuca

SEQ ID NO: 617869 - RNA, 18 nt, Human
ucagucuauuguauaaga

SEQ ID NO: 617870 - RNA, 22 nt, Human
agguacagaugaaagucuaguu

SEQ ID NO: 617871 - RNA, 22 nt, Human
gcuggccucgcaggcaggaugu

SEQ ID NO: 617872 - RNA, 22 nt, Human
ucucagcucuuuuuucacagaa

SEQ ID NO: 617873 - RNA, 22 nt, Human
aauccuggcugcguuggccagc

SEQ ID NO: 617874 - RNA, 22 nt, Human
gacucugugggaggaggcucag

SEQ ID NO: 617875 - RNA, 22 nt, Human
gagugcaauaaacuguuuucua

SEQ ID NO: 617876 - RNA, 22 nt, Human
gaggcacugcugggccccugua

SEQ ID NO: 617877 - RNA, 22 nt, Human
aaacagcucaagaaguuacucu

SEQ ID NO: 617878 - RNA, 22 nt, Human
guuguugaucacaugcauaucu

SEQ ID NO: 617879 - RNA, 22 nt, Human
ggucucagcccucgccagcagc

SEQ ID NO: 617880 - RNA, 22 nt, Human
ugaguagacgugaucuaguaac

SEQ ID NO: 617881 - RNA, 22 nt, Human
ggggaucuaggauauuucauga

SEQ ID NO: 617882 - RNA, 22 nt, Human
uagcagaggcuacugcuccuug

SEQ ID NO: 617883 - RNA, 22 nt, Human
uugcauuuuuagaugcuucugu

SEQ ID NO: 617884 - RNA, 22 nt, Human
uggagaaugauauuccaucauu

SEQ ID NO: 617885 - RNA, 22 nt, Human
gcuggcugccuuacuuugugga

SEQ ID NO: 617886 - RNA, 22 nt, Human
ucuguggcugugcugggccaga

SEQ ID NO: 617887 - RNA, 22 nt, Human
cuccaggggccagaagccuggc

SEQ ID NO: 617888 - RNA, 22 nt, Human
uccugggccaagggcugugagg

SEQ ID NO: 617889 - RNA, 22 nt, Human
caaguauauuugaacauguaaa

SEQ ID NO: 617890 - RNA, 22 nt, Human
ccagcaggguugguuucuucug

SEQ ID NO: 617891 - RNA, 22 nt, Human
gaauauuuuuaaagggacuaau

SEQ ID NO: 617892 - RNA, 22 nt, Human
agccagggauggcagugcccag

SEQ ID NO: 617893 - RNA, 22 nt, Human
agccagggcugcgagcagacag

SEQ ID NO: 617894 - RNA, 22 nt, Human
agaacaaugcguauuuuacucc

SEQ ID NO: 617895 - RNA, 22 nt, Human
aaaaggcucuucaaaauggaag

SEQ ID NO: 617896 - RNA, 22 nt, Human
aauaugcaaagcguguuaucug

SEQ ID NO: 617897 - RNA, 17 nt, Human
ugccagccugucccagg

SEQ ID NO: 617898 - RNA, 22 nt, Human
aggugacaucccggcagcagag

SEQ ID NO: 617899 - RNA, 22 nt, Human
gugugagagaagcugccaugga

SEQ ID NO: 617900 - RNA, 22 nt, Human
gcuggcuugauaguuucugcuu

SEQ ID NO: 617901 - RNA, 22 nt, Human
uagugcaauuccccauacuaac

SEQ ID NO: 617902 - RNA, 22 nt, Human
gauuucuucucucccaagagga

SEQ ID NO: 617903 - RNA, 22 nt, Human
auauguguguauuucuuacuag

SEQ ID NO: 617904 - RNA, 22 nt, Human
ccagcaggagaugccugugucu

SEQ ID NO: 617905 - RNA, 22 nt, Human
uuggcauucaugggacaacaaa

SEQ ID NO: 617906 - RNA, 22 nt, Human
guccagggggcuuaagcaaacu

SEQ ID NO: 617907 - RNA, 22 nt, Human
augcccuggggcuaccucugag

SEQ ID NO: 617908 - RNA, 22 nt, Human
acauuucuaauuuaauguaaca

SEQ ID NO: 617909 - RNA, 22 nt, Human
ggagaggugaauggcugcucua

SEQ ID NO: 617910 - RNA, 22 nt, Human
cuguggccccacccucuuggcc

SEQ ID NO: 617911 - RNA, 22 nt, Human
uccagggaaggugugaggcugg

SEQ ID NO: 617912 - RNA, 22 nt, Human
aagcagaguccccuucccaugg

SEQ ID NO: 617913 - RNA, 22 nt, Human
aaagccuucugucuagcagaua

SEQ ID NO: 617914 - RNA, 22 nt, Human
uccagggcuugacagggugccu

SEQ ID NO: 617915 - RNA, 22 nt, Human
aggcagguuucccggcugucaa

SEQ ID NO: 617916 - RNA, 22 nt, Human
aggaaagguagcgugccagcag

SEQ ID NO: 617917 - RNA, 22 nt, Human
agaauguguuuuaacaugggaa

SEQ ID NO: 617918 - RNA, 22 nt, Human
ucuguggcccaagugauggcug

SEQ ID NO: 617919 - RNA, 22 nt, Human
gcccuggccuucaucucagaca

SEQ ID NO: 617920 - RNA, 22 nt, Human
auguggcucagcaggcucccgu

SEQ ID NO: 617921 - RNA, 22 nt, Human
cugcaaaaguaauuggggcuuu

SEQ ID NO: 617922 - RNA, 22 nt, Human
cauugaaauauggaaacugaug

SEQ ID NO: 617923 - RNA, 22 nt, Human
ggagaagggcaugguaguuuua

SEQ ID NO: 617924 - RNA, 22 nt, Human
uaggcacaaaaugaaaauggca

SEQ ID NO: 617925 - RNA, 16 nt, Human
uccuggccuuuggaag

SEQ ID NO: 617926 - RNA, 22 nt, Human
ugcaggucauguggcgggacug

SEQ ID NO: 617927 - RNA, 22 nt, Human
gcaggucccagaaaguuaauuc

SEQ ID NO: 617928 - RNA, 22 nt, Human
ugggccagcugaagugccgccc

SEQ ID NO: 617929 - RNA, 22 nt, Human
agcaggaggguuuuguagaguc

SEQ ID NO: 617930 - RNA, 22 nt, Human
agccuugcaugauuucauucau

SEQ ID NO: 617931 - RNA, 22 nt, Human
auccagcuuugucuggucuucg

SEQ ID NO: 617932 - RNA, 22 nt, Human
agagcggggauaguuaauauuc

SEQ ID NO: 617933 - RNA, 22 nt, Human
agguccagccugcccucucucc

SEQ ID NO: 617934 - RNA, 22 nt, Human
uccaaagacuugcuguauguaa

SEQ ID NO: 617935 - RNA, 22 nt, Human
uuacaagauuaauuauuggagu

SEQ ID NO: 617936 - RNA, 22 nt, Human
uccagggccccccaguugcacg

SEQ ID NO: 617937 - RNA, 22 nt, Human
uggaaucuugcgggcacauggc

SEQ ID NO: 617938 - RNA, 22 nt, Human
aaggcaggagcuguaucuuauu

SEQ ID NO: 617939 - RNA, 22 nt, Human
aaauuagaccagggcuccugga

SEQ ID NO: 617940 - RNA, 22 nt, Human
gccaggagaaugcuagcagagg

SEQ ID NO: 617941 - RNA, 22 nt, Human
augcagaaggagccaugcuugc

SEQ ID NO: 617942 - RNA, 20 nt, Human
uagguccaaugcucgucuuc

SEQ ID NO: 617943 - RNA, 22 nt, Human
uggaaggggccaggcgcggagu

SEQ ID NO: 617944 - RNA, 22 nt, Human
ugcaggagagugagucaguagg

SEQ ID NO: 617945 - RNA, 22 nt, Human
ccagggcauguaacuaauggug

SEQ ID NO: 617946 - RNA, 22 nt, Human
acacauaagccuaaucaucucc

SEQ ID NO: 617947 - RNA, 22 nt, Human
uuccuguggccuuacaucugug

SEQ ID NO: 617948 - RNA, 22 nt, Human
uaggccauugauuuuuauaagu

SEQ ID NO: 617949 - RNA, 22 nt, Human
caguccugggcaggucaggcca

SEQ ID NO: 617950 - RNA, 22 nt, Human
gccucuggggcagcugagucau

SEQ ID NO: 617951 - RNA, 22 nt, Human
uuucagagaggcuucaaaucuu

SEQ ID NO: 617952 - RNA, 22 nt, Human
uauauacaagguagguuuaggu

SEQ ID NO: 617953 - RNA, 22 nt, Human
auguccaggaagucuuaacuca

SEQ ID NO: 617954 - RNA, 22 nt, Human
guuucucacuuccaguagccaa

SEQ ID NO: 617955 - RNA, 22 nt, Human
agccaggccagcugucuugagu

SEQ ID NO: 617956 - RNA, 22 nt, Human
uagguucagcuuccacugccua

SEQ ID NO: 617957 - RNA, 20 nt, Human
agggccuggaguacagcagg

SEQ ID NO: 617958 - RNA, 22 nt, Human
aauuacagucggagcagcacug

SEQ ID NO: 617959 - RNA, 22 nt, Human
aaagccuuugucucaggcucug

SEQ ID NO: 617960 - RNA, 22 nt, Human
ucagcagggccuccuugugcag

SEQ ID NO: 617961 - RNA, 22 nt, Human
uccuguuucuccugcaaaaucc

SEQ ID NO: 617962 - RNA, 22 nt, Human
cucuuaaaaacuugauauauuu

SEQ ID NO: 617963 - RNA, 22 nt, Human
agcuggaacccgggugggcagc

SEQ ID NO: 617964 - RNA, 21 nt, Human
uucugccuucgaggucucagg

SEQ ID NO: 617965 - RNA, 22 nt, Human
ucuuggaaucuccauagaguga

SEQ ID NO: 617966 - RNA, 22 nt, Human
ugccaccuggacaaccuuaugc

SEQ ID NO: 617967 - RNA, 22 nt, Human
uggcaggucaugaguggccacc

SEQ ID NO: 617968 - RNA, 22 nt, Human
agcugcugagccauguccugcu

SEQ ID NO: 617969 - RNA, 22 nt, Human
auccccaggggcauucaagcuu

SEQ ID NO: 617970 - RNA, 19 nt, Human
uuucaaagggcauaagccu

SEQ ID NO: 617971 - RNA, 21 nt, Human
gacaaagugaagcaggcagga

SEQ ID NO: 617972 - RNA, 22 nt, Human
cccagccuuccacccuggacua

SEQ ID NO: 617973 - RNA, 22 nt, Human
aaacucuggagauguuuaugca

SEQ ID NO: 617974 - RNA, 22 nt, Human
ggaggccaguccuggccgggcu

SEQ ID NO: 617975 - RNA, 20 nt, Human
uuccuggggaaugauagaag

SEQ ID NO: 617976 - RNA, 22 nt, Human
gccucugcugcaagccugguug

SEQ ID NO: 617977 - RNA, 22 nt, Human
agcugaagcucagcccaguagu

SEQ ID NO: 617978 - RNA, 22 nt, Human
agaaagaggaugcagaucucau

SEQ ID NO: 617979 - RNA, 22 nt, Human
gggaugagagcugggacagaag

SEQ ID NO: 617980 - RNA, 22 nt, Human
ucauccaguaugacuggugucu

SEQ ID NO: 617981 - RNA, 22 nt, Human
uugccacuaacuagcugugaga

SEQ ID NO: 617982 - RNA, 22 nt, Human
cugccacuagcuuucacaucuu

SEQ ID NO: 617983 - RNA, 22 nt, Human
ucagcuuuugucagaaauugua

SEQ ID NO: 617984 - RNA, 22 nt, Human
ugaccacugaauaugacugccu

SEQ ID NO: 617985 - RNA, 19 nt, Human
ucaugcaguggggggugug

SEQ ID NO: 617986 - RNA, 20 nt, Human
uggaaggcaucugcauuauu

SEQ ID NO: 617987 - RNA, 23 nt, Human
uggagaauuuagagucucuagga

SEQ ID NO: 617988 - RNA, 22 nt, Human
ugagucuucuuccgggauugcu

SEQ ID NO: 617989 - RNA, 18 nt, Human
agaagcagguucucccag

SEQ ID NO: 617990 - RNA, 22 nt, Human
cuguggcuucagcauucagagc

SEQ ID NO: 617991 - RNA, 22 nt, Human
uauuucugauugcucaugaggc

SEQ ID NO: 617992 - RNA, 22 nt, Human
ggcaguucucagccaaggcaau

SEQ ID NO: 617993 - RNA, 22 nt, Human
uucuggcuguaugauauuuaau

SEQ ID NO: 617994 - RNA, 22 nt, Human
ggagaaggguauguguggcgga

SEQ ID NO: 617995 - RNA, 22 nt, Human
cuggguuuagggucuccccuug

SEQ ID NO: 617996 - RNA, 22 nt, Human
uggaaggagcuaaggaccuggg

SEQ ID NO: 617997 - RNA, 22 nt, Human
ugaggcaguauucuccauucca

SEQ ID NO: 617998 - RNA, 22 nt, Human
aaaauggcuuaauaggcaauaa

SEQ ID NO: 617999 - RNA, 22 nt, Human
cauaaauuguacccauuccaac

SEQ ID NO: 618000 - RNA, 23 nt, Human
ugacaaagcgagacuccagcuca

SEQ ID NO: 618001 - RNA, 22 nt, Human
uagguccacagauuugguuucu

SEQ ID NO: 618002 - RNA, 20 nt, Human
accugccacagagaaaggua

SEQ ID NO: 618003 - RNA, 22 nt, Human
ggccugagcuugggcagcguau

SEQ ID NO: 618004 - RNA, 22 nt, Human
agcaaguaguaccaaguagcuc

SEQ ID NO: 618005 - RNA, 22 nt, Human
aggcagguuuacucuuauuugg

SEQ ID NO: 618006 - RNA, 22 nt, Human
cuggaaggucuguccccacugc

SEQ ID NO: 618007 - RNA, 22 nt, Human
auccaggguguggagagagcuc

SEQ ID NO: 618008 - RNA, 21 nt, Human
uuccuggggacuuccguggga

SEQ ID NO: 618009 - RNA, 22 nt, Human
augugcagaggcuuccuugacu

SEQ ID NO: 618010 - RNA, 22 nt, Human
accuucaauuauuuuuguucca

SEQ ID NO: 618011 - RNA, 22 nt, Human
cauggccaggcccagggcccag

SEQ ID NO: 618012 - RNA, 22 nt, Human
gaggaaggcuaaggggcuuaga

SEQ ID NO: 618013 - RNA, 22 nt, Human
ugcuccugcugcaugcaucucc

SEQ ID NO: 618014 - RNA, 22 nt, Human
uuagaaaaauguucaguaguuu

SEQ ID NO: 618015 - RNA, 22 nt, Human
acauguguggacaugaaucuac

SEQ ID NO: 618016 - RNA, 22 nt, Human
uacagugucccuuuuucagaca

SEQ ID NO: 618017 - RNA, 22 nt, Human
gccaccuggacagcugugcccu

SEQ ID NO: 618018 - RNA, 23 nt, Human
ucuguggccccuucgccccacuc

SEQ ID NO: 618019 - RNA, 22 nt, Human
guccagagaggcaggaggcuac

SEQ ID NO: 618020 - RNA, 22 nt, Human
gcaguguugugauccaggucuu

SEQ ID NO: 618021 - RNA, 22 nt, Human
gccaggcugcuggcugcugucc

SEQ ID NO: 618022 - RNA, 22 nt, Human
uccugcagguggaugauucucu

SEQ ID NO: 618023 - RNA, 22 nt, Human
cugaggacauugaugaggcaau

SEQ ID NO: 618024 - RNA, 22 nt, Human
uugcauuucacuuucaguaggc

SEQ ID NO: 618025 - RNA, 22 nt, Human
ggcccugagcugaaguacugug

SEQ ID NO: 618026 - RNA, 22 nt, Human
acaaguaggugcacuucaauag

SEQ ID NO: 618027 - RNA, 22 nt, Human
cuggagucagcaaggacgaggc

SEQ ID NO: 618028 - RNA, 22 nt, Human
ccugaggacacacgcugcagga

SEQ ID NO: 618029 - RNA, 22 nt, Human
cagccaagaaagcagugcucca

SEQ ID NO: 618030 - RNA, 19 nt, Human
uggagguccaggaguaggg

SEQ ID NO: 618031 - RNA, 22 nt, Human
uccuggccuugcgucuugggag

SEQ ID NO: 618032 - RNA, 22 nt, Human
acauuucucuugaugucucuau

SEQ ID NO: 618033 - RNA, 22 nt, Human
caaugucaaggagaccaaaacg

SEQ ID NO: 618034 - RNA, 22 nt, Human
ugcuuccuugaucauucccaaa

SEQ ID NO: 618035 - RNA, 22 nt, Human
gcaguguuucccagagauggaa

SEQ ID NO: 618036 - RNA, 22 nt, Human
agggcuggaggguacuaguuua

SEQ ID NO: 618037 - RNA, 22 nt, Human
uaccaaguguauuaugcuuugu

SEQ ID NO: 618038 - RNA, 22 nt, Human
aggcaggugagucaaaacagac

SEQ ID NO: 618039 - RNA, 22 nt, Human
uccuggcccuguggccugcagu

SEQ ID NO: 618040 - RNA, 17 nt, Human
ggacacagcucauggcu

SEQ ID NO: 618041 - RNA, 22 nt, Human
cuggcugugcugacugagaggg

SEQ ID NO: 618042 - RNA, 22 nt, Human
ucugggaguuagaauacauggg

SEQ ID NO: 618043 - RNA, 22 nt, Human
cuggcccucgucaguuucacug

SEQ ID NO: 618044 - RNA, 22 nt, Human
gucuuuuuuacaccuuacauca

SEQ ID NO: 618045 - RNA, 22 nt, Human
cuggcucccucucccugaguca

SEQ ID NO: 618046 - RNA, 22 nt, Human
cuccucuggaaauuccucugcc

SEQ ID NO: 618047 - RNA, 22 nt, Human
ggagggggacugacacugauuu

SEQ ID NO: 618048 - RNA, 22 nt, Human
ugugugaggacucagugaaaca

SEQ ID NO: 618049 - RNA, 20 nt, Human
ucucuggguucucacucagc

SEQ ID NO: 618050 - RNA, 22 nt, Human
guggcuuuauaggaagaggaac

SEQ ID NO: 618051 - RNA, 20 nt, Human
gggaggcauuggucccucac

SEQ ID NO: 618052 - RNA, 22 nt, Human
guccuggugccaccugcgggau

SEQ ID NO: 618053 - RNA, 22 nt, Human
ccaggcuuucccagccucucca

SEQ ID NO: 618054 - RNA, 19 nt, Human
cuggaaggagggacuguuc

SEQ ID NO: 618055 - RNA, 20 nt, Human
cagguccagcacgugcacgg

SEQ ID NO: 618056 - RNA, 22 nt, Human
auguccagggggcuugacuggu

SEQ ID NO: 618057 - RNA, 22 nt, Human
uggcucuggccaccgggagggc

SEQ ID NO: 618058 - RNA, 21 nt, Human
cuggagucuggggguggcagu

SEQ ID NO: 618059 - RNA, 22 nt, Human
ugggcaggggcccugcuuccgu

SEQ ID NO: 618060 - RNA, 23 nt, Human
ucccagccucuucucuugcauac

SEQ ID NO: 618061 - RNA, 22 nt, Human
ccugguguugccaaucugugcc

SEQ ID NO: 618062 - RNA, 22 nt, Human
agcugauuccacuuuuucccca

SEQ ID NO: 618063 - RNA, 22 nt, Human
acauuucuggaguuucucaaca

SEQ ID NO: 618064 - RNA, 22 nt, Human
cugccaggugagcuccaggccu

SEQ ID NO: 618065 - RNA, 22 nt, Human
aggcauggauguagcagugacc

SEQ ID NO: 618066 - RNA, 21 nt, Human
ugggagagcguugcuguccuc

SEQ ID NO: 618067 - RNA, 23 nt, Human
agccuucaggcaaugucaguaga

SEQ ID NO: 618068 - RNA, 22 nt, Human
ugaggcagcaauuguauuguau

SEQ ID NO: 618069 - RNA, 22 nt, Human
aaaguacaugcaauucuucuga

SEQ ID NO: 618070 - RNA, 22 nt, Human
ggcuuccuggagaaggucugag

SEQ ID NO: 618071 - RNA, 22 nt, Human
ucuggaguguguguauucagcu

SEQ ID NO: 618072 - RNA, 22 nt, Human
ugcauaucuucaaugcuguugc

SEQ ID NO: 618073 - RNA, 22 nt, Human
uuauuuaaaagugguaagauuc

SEQ ID NO: 618074 - RNA, 22 nt, Human
agaggcuggauugagcauagac

SEQ ID NO: 618075 - RNA, 22 nt, Human
aaccaugcuagcaucaaaaugu

SEQ ID NO: 618076 - RNA, 22 nt, Human
agaggcagcagucauacuacag

SEQ ID NO: 618077 - RNA, 22 nt, Human
acacuagcuaaaugcugauuaa

SEQ ID NO: 618078 - RNA, 22 nt, Human
ggcgcucaguguugccccagag

SEQ ID NO: 618079 - RNA, 22 nt, Human
aguaaauaacagagaaaauggg

SEQ ID NO: 618080 - RNA, 22 nt, Human
cuggcccuguaggaugugaguu

SEQ ID NO: 618081 - RNA, 22 nt, Human
caaauagacucuagaauuuauu

SEQ ID NO: 618082 - RNA, 22 nt, Human
cauggccacauuggaccgaagc

SEQ ID NO: 618083 - RNA, 22 nt, Human
ugggcucucaaagugcggcuug

SEQ ID NO: 618084 - RNA, 22 nt, Human
gaagggggagcucuuccuaauu

SEQ ID NO: 618085 - RNA, 22 nt, Human
ccagggaaaggagguugacuug

SEQ ID NO: 618086 - RNA, 22 nt, Human
auccucgucugcacaucaaagg

SEQ ID NO: 618087 - RNA, 22 nt, Human
uucaaacacagacagcagcaug

SEQ ID NO: 618088 - RNA, 21 nt, Human
gccagccuguuuaccuguggu

SEQ ID NO: 618089 - RNA, 17 nt, Human
ccuguguuugcuccuuc

SEQ ID NO: 618090 - RNA, 22 nt, Human
caggaaagaaaugagaacacca

SEQ ID NO: 618091 - RNA, 22 nt, Human
caggcaaggagcuggcucaagu

SEQ ID NO: 618092 - RNA, 22 nt, Human
accugggaguaugcagugguga

SEQ ID NO: 618093 - RNA, 22 nt, Human
ugugugugaguccuggcuuucc

SEQ ID NO: 618094 - RNA, 22 nt, Human
cagggaugucucuggaagggag

SEQ ID NO: 618095 - RNA, 22 nt, Human
uugaaggugacauaucuggagc

SEQ ID NO: 618096 - RNA, 22 nt, Human
uugcccuguggggccuccagcc

SEQ ID NO: 618097 - RNA, 22 nt, Human
agaagccagaggcaguggguac

SEQ ID NO: 618098 - RNA, 22 nt, Human
auuguugauaaucguguuguca

SEQ ID NO: 618099 - RNA, 22 nt, Human
aggcauggcauggggcagaugu

SEQ ID NO: 618100 - RNA, 22 nt, Human
uauacaggaacuguuggcuccc

SEQ ID NO: 618101 - RNA, 22 nt, Human
aaguaugucaaucauacuucaa

SEQ ID NO: 618102 - RNA, 22 nt, Human
guaaacauuacugugcuguaua

SEQ ID NO: 618103 - RNA, 22 nt, Human
auauguguauggauuucuaucu

SEQ ID NO: 618104 - RNA, 22 nt, Human
uagaaagaacuucauguaaaac

SEQ ID NO: 618105 - RNA, 22 nt, Human
aagguccacaacugguaaaugg

SEQ ID NO: 618106 - RNA, 22 nt, Human
ccagggcaacgcugucucagag

SEQ ID NO: 618107 - RNA, 22 nt, Human
cugaggcugcccagggccaggu

SEQ ID NO: 618108 - RNA, 23 nt, Human
agcuuuaacccuuucaggagcau

SEQ ID NO: 618109 - RNA, 22 nt, Human
auauacaggugguauguguaaa

SEQ ID NO: 618110 - RNA, 22 nt, Human
gagaaagaaagggaaguuuguu

SEQ ID NO: 618111 - RNA, 22 nt, Human
auacucaauuuguuggaaagca

SEQ ID NO: 618112 - RNA, 22 nt, Human
uccugggagcccuugcuccacc

SEQ ID NO: 618113 - RNA, 22 nt, Human
aguagaauguucuaugucaaug

SEQ ID NO: 618114 - RNA, 22 nt, Human
auuuguuguugcuccccuaaga

SEQ ID NO: 618115 - RNA, 22 nt, Human
cugugccugccuuguucacuga

SEQ ID NO: 618116 - RNA, 21 nt, Human
gggccuggcugcgcaggacgg

SEQ ID NO: 618117 - RNA, 22 nt, Human
cugggcucaccuguggcuggca

SEQ ID NO: 618118 - RNA, 22 nt, Human
ucugcagcuuacuuucacauga

SEQ ID NO: 618119 - RNA, 22 nt, Human
ugcucaucaacaugaugaucau

SEQ ID NO: 618120 - RNA, 22 nt, Human
gcugaggcuccucgggaggaca

SEQ ID NO: 618121 - RNA, 22 nt, Human
uuccacauuccuuacauucaua

SEQ ID NO: 618122 - RNA, 22 nt, Human
uggcaggggaggugcuugcuua

SEQ ID NO: 618123 - RNA, 18 nt, Human
gcuuuauuucuuggggaa

SEQ ID NO: 618124 - RNA, 22 nt, Human
uagucccggaacuccuucaggu

SEQ ID NO: 618125 - RNA, 22 nt, Human
ggagaggguagggguccugccc

SEQ ID NO: 618126 - RNA, 22 nt, Human
gggcaggagagggccaccugga

SEQ ID NO: 618127 - RNA, 22 nt, Human
gccagccuucuguggccugcaa

SEQ ID NO: 618128 - RNA, 22 nt, Human
aauucaaucuguagauugugau

SEQ ID NO: 618129 - RNA, 22 nt, Human
uguguuuauaguguaucuucca

SEQ ID NO: 618130 - RNA, 22 nt, Human
uaaaguuauaaauuaccuguca

SEQ ID NO: 618131 - RNA, 22 nt, Human
ccugcagguugcagaggcggaa

SEQ ID NO: 618132 - RNA, 22 nt, Human
cagggcaaguuugagauuauuu

SEQ ID NO: 618133 - RNA, 22 nt, Human
uccagggaccucccugagagcu

SEQ ID NO: 618134 - RNA, 22 nt, Human
ugagaaugaggggguagaaggu

SEQ ID NO: 618135 - RNA, 22 nt, Human
gucugcucaugcuaccgcgggc

SEQ ID NO: 618136 - RNA, 23 nt, Human
aaagcaaggaauuggcaacagag

SEQ ID NO: 618137 - RNA, 22 nt, Human
cagccuucaaggcuuagcucag

SEQ ID NO: 618138 - RNA, 22 nt, Human
uuuuuacacuuagcauugagcg

SEQ ID NO: 618139 - RNA, 22 nt, Human
cagugcaauuacaagcuaauuc

SEQ ID NO: 618140 - RNA, 22 nt, Human
cucauggagggagugcucuucc

SEQ ID NO: 618141 - RNA, 22 nt, Human
cuuccuugcggccccugccuag

SEQ ID NO: 618142 - RNA, 22 nt, Human
accuguuuagaaagcuuaugag

SEQ ID NO: 618143 - RNA, 22 nt, Human
guggcucuugcauggggucucu

SEQ ID NO: 618144 - RNA, 22 nt, Human
uccagccacguauuaucucacu

SEQ ID NO: 618145 - RNA, 22 nt, Human
ggaagggccucgggcgugggac

SEQ ID NO: 618146 - RNA, 22 nt, Human
aggaccaggucuaaugaagaca

SEQ ID NO: 618147 - RNA, 22 nt, Human
aggggcaggugcugcacuuaga

SEQ ID NO: 618148 - RNA, 22 nt, Human
aaaguccagggaaagagcgucu

SEQ ID NO: 618149 - RNA, 22 nt, Human
cccugugucuucuugccuuugu

SEQ ID NO: 618150 - RNA, 22 nt, Human
ucagcaggggccguugggugga

SEQ ID NO: 618151 - RNA, 22 nt, Human
gagcucauucauucauugccug

SEQ ID NO: 618152 - RNA, 22 nt, Human
uggaagggaacagguggguguu

SEQ ID NO: 618153 - RNA, 22 nt, Human
cccugcagagaccacugaccuu

SEQ ID NO: 618154 - RNA, 22 nt, Human
cccugcagggaggauucugaag

SEQ ID NO: 618155 - RNA, 22 nt, Human
acuguggccaaagccucuggga

SEQ ID NO: 618156 - RNA, 22 nt, Human
gggcagguuauuggaguaggga

SEQ ID NO: 618157 - RNA, 22 nt, Human
gugcagggcagccgaaugggcu

SEQ ID NO: 618158 - RNA, 18 nt, Human
uccugcagcuucuaugua

SEQ ID NO: 618159 - RNA, 22 nt, Human
cagguccuuuaguguccagaac

SEQ ID NO: 618160 - RNA, 22 nt, Human
uuaggaaaggguuuucuaacag

SEQ ID NO: 618161 - RNA, 22 nt, Human
agagucugauauuuguaccaga

SEQ ID NO: 618162 - RNA, 22 nt, Human
gcagcucccaucagggcacaga

SEQ ID NO: 618163 - RNA, 19 nt, Human
ugguccagcuucuucuccu

SEQ ID NO: 618164 - RNA, 22 nt, Human
cuugaauccaaaugggagauga

SEQ ID NO: 618165 - RNA, 21 nt, Human
cucuuuguggcaauguauuuu

SEQ ID NO: 618166 - RNA, 22 nt, Human
aggcuuuaauuaucuacaggag

SEQ ID NO: 618167 - RNA, 22 nt, Human
ccugaccacccuuggacaaggu

SEQ ID NO: 618168 - RNA, 22 nt, Human
acucagcucaggagcuggcugg

SEQ ID NO: 618169 - RNA, 23 nt, Human
ggguccagccaauuccaaggaaa

SEQ ID NO: 618170 - RNA, 22 nt, Human
gcuggggagcaagaguagugag

SEQ ID NO: 618171 - RNA, 22 nt, Human
cagggaugcugcuuaggcaguu

SEQ ID NO: 618172 - RNA, 19 nt, Human
gucccugggcagaggcacc

SEQ ID NO: 618173 - RNA, 22 nt, Human
uaggauaggauggagacagaau

SEQ ID NO: 618174 - RNA, 22 nt, Human
ugggcagggagcuggaaccaca

SEQ ID NO: 618175 - RNA, 22 nt, Human
aacaaagaugggugggaaagag

SEQ ID NO: 618176 - RNA, 22 nt, Human
uaaagacaugguguaggugaac

SEQ ID NO: 618177 - RNA, 22 nt, Human
acaacaaaaucacuagucuucc

SEQ ID NO: 618178 - RNA, 22 nt, Human
cagguccuggcaucaggcaggu

SEQ ID NO: 618179 - RNA, 22 nt, Human
gaggcacucucgacaagggugg

SEQ ID NO: 618180 - RNA, 22 nt, Human
cccagugucugggccugcaggg

SEQ ID NO: 618181 - RNA, 22 nt, Human
aguagauuuuagauuacauagu

SEQ ID NO: 618182 - RNA, 22 nt, Human
gccugccuuuguaugacccuga

SEQ ID NO: 618183 - RNA, 21 nt, Human
uguccaagguaugcacugggg

SEQ ID NO: 618184 - RNA, 23 nt, Human
uccuggguuugaauucuagucuu

SEQ ID NO: 618185 - RNA, 22 nt, Human
acuguuuucuuagcucccugcu

SEQ ID NO: 618186 - RNA, 22 nt, Human
uugucugaaaagguaaauauuu

SEQ ID NO: 618187 - RNA, 22 nt, Human
aauaugcauuaacuguguacau

SEQ ID NO: 618188 - RNA, 23 nt, Human
agguccuggacauaugugcauca

SEQ ID NO: 618189 - RNA, 22 nt, Human
cagggauggcugucaggaugua

SEQ ID NO: 618190 - RNA, 21 nt, Human
uuuauuuauauaggacacaug

SEQ ID NO: 618191 - RNA, 22 nt, Human
uguuuucuguguagagaucaca

SEQ ID NO: 618192 - RNA, 22 nt, Human
gcuuccuagcauuagccauugc

SEQ ID NO: 618193 - RNA, 20 nt, Human
caugccugcugguaucuggc

SEQ ID NO: 618194 - RNA, 22 nt, Human
ggaaagcuuuguacuugaaaac

SEQ ID NO: 618195 - RNA, 22 nt, Human
agggagagacauuuccuucuug

SEQ ID NO: 618196 - RNA, 20 nt, Human
gcuuccaccugaagcgcacc

SEQ ID NO: 618197 - RNA, 23 nt, Human
agcauaaaccucuguggcuuuag

SEQ ID NO: 618198 - RNA, 22 nt, Human
gcagagucagguccaaggacug

SEQ ID NO: 618199 - RNA, 21 nt, Human
agaggcaggcauuaaguacac

SEQ ID NO: 618200 - RNA, 22 nt, Human
agcagggacuacgugaaaguga

SEQ ID NO: 618201 - RNA, 22 nt, Human
gccgagcacagugcagcugccu

SEQ ID NO: 618202 - RNA, 22 nt, Human
uagaaagagcuuugcuuccuuu

SEQ ID NO: 618203 - RNA, 22 nt, Human
agccaggggauucaucagggac

SEQ ID NO: 618204 - RNA, 22 nt, Human
ugugaagcuggauccuggagcu

SEQ ID NO: 618205 - RNA, 22 nt, Human
gauuuacagaucuaagggucac

SEQ ID NO: 618206 - RNA, 20 nt, Human
aaaauauguauaacucuucu

SEQ ID NO: 618207 - RNA, 22 nt, Human
uuuguauuuuucccagcuagcu

SEQ ID NO: 618208 - RNA, 22 nt, Human
uaaagugucugccucagcucag

SEQ ID NO: 618209 - RNA, 22 nt, Human
gccagcuggcugcaggucccag

SEQ ID NO: 618210 - RNA, 22 nt, Human
ugggaagggccgauggagccuc

SEQ ID NO: 618211 - RNA, 22 nt, Human
guguccagggcuggaagugagg

SEQ ID NO: 618212 - RNA, 22 nt, Human
acaugaaaagacuaucugauua

SEQ ID NO: 618213 - RNA, 20 nt, Human
uugcaaagugaauagcaauu

SEQ ID NO: 618214 - RNA, 23 nt, Human
gguccaggaaaggcagcagcacc

SEQ ID NO: 618215 - RNA, 22 nt, Human
aagaugaacugucuucacccau

SEQ ID NO: 618216 - RNA, 22 nt, Human
ccugggcuccacuccaagagca

SEQ ID NO: 618217 - RNA, 22 nt, Human
uccugaggacuaacaggaagga

SEQ ID NO: 618218 - RNA, 22 nt, Human
ugugaagguaagguuugcuuga

SEQ ID NO: 618219 - RNA, 22 nt, Human
uacucaaaaaguuaugaaucau

SEQ ID NO: 618220 - RNA, 22 nt, Human
cuggguguagcccaguaugagg

SEQ ID NO: 618221 - RNA, 22 nt, Human
aguagaaucccuugcaaugucc

SEQ ID NO: 618222 - RNA, 22 nt, Human
ggccaccuaggagccacaguga

SEQ ID NO: 618223 - RNA, 22 nt, Human
augacagaugcuguggggaggu

SEQ ID NO: 618224 - RNA, 22 nt, Human
accugcagcuaaagauguaggg

SEQ ID NO: 618225 - RNA, 22 nt, Human
caaguagaacagagcuaccuug

SEQ ID NO: 618226 - RNA, 22 nt, Human
ccaacaguccagaugagauggu

SEQ ID NO: 618227 - RNA, 22 nt, Human
ucacugggcaucggagcugaaa

SEQ ID NO: 618228 - RNA, 22 nt, Human
agaggccggccgagcccauggg

SEQ ID NO: 618229 - RNA, 22 nt, Human
uggaaggcugugauuacugugc

SEQ ID NO: 618230 - RNA, 21 nt, Human
gagugcaggucugaugccauc

SEQ ID NO: 618231 - RNA, 22 nt, Human
guugaguggguuaggaugcuga

SEQ ID NO: 618232 - RNA, 19 nt, Human
agagucugugcucuuccua

SEQ ID NO: 618233 - RNA, 22 nt, Human
auaagccugauucacuugucau

SEQ ID NO: 618234 - RNA, 22 nt, Human
cauuucagugucuugugaugaa

SEQ ID NO: 618235 - RNA, 23 nt, Human
auaaauuacuaucucccuagagc

SEQ ID NO: 618236 - RNA, 22 nt, Human
gucaauauauucugucucuuug

SEQ ID NO: 618237 - RNA, 21 nt, Human
accugccacauugcagacuug

SEQ ID NO: 618238 - RNA, 22 nt, Human
ggcaggugcccagagagcacga

SEQ ID NO: 618239 - RNA, 18 nt, Human
cugaggcuggcaggagcc

SEQ ID NO: 618240 - RNA, 22 nt, Human
ucaguguuuaccguauguuguu

SEQ ID NO: 618241 - RNA, 20 nt, Human
cuccaguguucaggggagug

SEQ ID NO: 618242 - RNA, 22 nt, Human
uguggaaugcuccuaagugaau

SEQ ID NO: 618243 - RNA, 22 nt, Human
uuccugggccuuaaaucuuuug

SEQ ID NO: 618244 - RNA, 20 nt, Human
gccagcugcccuuccacccu

SEQ ID NO: 618245 - RNA, 22 nt, Human
caggcuggaguacaauugugug

SEQ ID NO: 618246 - RNA, 22 nt, Human
uugagcucuccucaucacccug

SEQ ID NO: 618247 - RNA, 22 nt, Human
aauaucagcucugucacuuacu

SEQ ID NO: 618248 - RNA, 22 nt, Human
ggguccagaguuuucccgcccu

SEQ ID NO: 618249 - RNA, 22 nt, Human
uuucaaagagaggcagaaggaa

SEQ ID NO: 618250 - RNA, 22 nt, Human
uccugaggcuaaagugcagugg

SEQ ID NO: 618251 - RNA, 22 nt, Human
aaaguagaacauuuucuuaucu

SEQ ID NO: 618252 - RNA, 22 nt, Human
augucuuuauuaauaucaugcc

SEQ ID NO: 618253 - RNA, 22 nt, Human
acucugugaagaugcaggcuug

SEQ ID NO: 618254 - RNA, 22 nt, Human
agggaaauggagaguguaguuu

SEQ ID NO: 618255 - RNA, 22 nt, Human
agugucaacucggaauaaggau

SEQ ID NO: 618256 - RNA, 22 nt, Human
cuuucccuuagccccauucuau

SEQ ID NO: 618257 - RNA, 22 nt, Human
ggacuuuagcuguaaugugugu

SEQ ID NO: 618258 - RNA, 22 nt, Human
ggagagguguauucaguggguc

SEQ ID NO: 618259 - RNA, 22 nt, Human
gccacagggcgagcggaggcca

SEQ ID NO: 618260 - RNA, 22 nt, Human
ccuggguggcugccugccuuuc

SEQ ID NO: 618261 - RNA, 22 nt, Human
uagguucacugucuugaggagc

SEQ ID NO: 618262 - RNA, 23 nt, Human
gggggcgugucauggagggccac

SEQ ID NO: 618263 - RNA, 22 nt, Human
uuacaagaucuuugaaggcaag

SEQ ID NO: 618264 - RNA, 22 nt, Human
gccagcucagugccaggccccu

SEQ ID NO: 618265 - RNA, 22 nt, Human
aucuguguccuuauaagagaca

SEQ ID NO: 618266 - RNA, 19 nt, Human
uccugggcugcgucuugcc

SEQ ID NO: 618267 - RNA, 22 nt, Human
gucccugguuugcccaggacca

SEQ ID NO: 618268 - RNA, 22 nt, Human
cagggagaagucuggucagucc

SEQ ID NO: 618269 - RNA, 22 nt, Human
ggaaggaacaaacccugugugg

SEQ ID NO: 618270 - RNA, 22 nt, Human
caugcagucaauaaacaugugu

SEQ ID NO: 618271 - RNA, 22 nt, Human
ggguccagcgacagcaggcuca

SEQ ID NO: 618272 - RNA, 20 nt, Human
ccugucuccucuuaccuggc

SEQ ID NO: 618273 - RNA, 22 nt, Human
aacuucauggguucaaagcugg

SEQ ID NO: 618274 - RNA, 18 nt, Human
gcuggcugcacuucugcu

SEQ ID NO: 618275 - RNA, 22 nt, Human
gugguguaggucacaguuagga

SEQ ID NO: 618276 - RNA, 20 nt, Human
agggucugaugugguggccc

SEQ ID NO: 618277 - RNA, 22 nt, Human
gagucauugcacacuagcucag

SEQ ID NO: 618278 - RNA, 22 nt, Human
ucccaugugacucagcugccug

SEQ ID NO: 618279 - RNA, 22 nt, Human
cagaggcacagugcgggccacu

SEQ ID NO: 618280 - RNA, 22 nt, Human
aguccguggccagacucaagag

SEQ ID NO: 618281 - RNA, 22 nt, Human
ugcuuccuauccacacaaugcc

SEQ ID NO: 618282 - RNA, 22 nt, Human
agggccugggguagcuuacugc

SEQ ID NO: 618283 - RNA, 19 nt, Human
cagaggcaccagguauaga

SEQ ID NO: 618284 - RNA, 22 nt, Human
uaagagcuaggauuuuaaauca

SEQ ID NO: 618285 - RNA, 22 nt, Human
gaucucuggguccuguuggccu

SEQ ID NO: 618286 - RNA, 22 nt, Human
cuguggcuaggauuauuccuga

SEQ ID NO: 618287 - RNA, 22 nt, Human
uggcacuuaaugcaugugcuau

SEQ ID NO: 618288 - RNA, 22 nt, Human
cguggcugguggaccugagggc

SEQ ID NO: 618289 - RNA, 22 nt, Human
guggcucucgccagccugcggg

SEQ ID NO: 618290 - RNA, 22 nt, Human
agcuuuagagagccaagacuca

SEQ ID NO: 618291 - RNA, 22 nt, Human
cuuuuucuaaucauaauugucu

SEQ ID NO: 618292 - RNA, 22 nt, Human
gggccaggaguggagauauggg

SEQ ID NO: 618293 - RNA, 22 nt, Human
agccaggggagucagcugcugg

SEQ ID NO: 618294 - RNA, 22 nt, Human
acugugugggccgcucacuggg

SEQ ID NO: 618295 - RNA, 22 nt, Human
uaaaaguuuuaguuguacauaa

SEQ ID NO: 618296 - RNA, 23 nt, Human
uaaauuaccuuuccagugcaggg

SEQ ID NO: 618297 - RNA, 20 nt, Human
gcugccuuguccugcuuggu

SEQ ID NO: 618298 - RNA, 22 nt, Human
ucaugugucugccaguguuuau

SEQ ID NO: 618299 - RNA, 22 nt, Human
uacauauuugucuuuguacugu

SEQ ID NO: 618300 - RNA, 20 nt, Human
uuggagucuaaagacugggg

SEQ ID NO: 618301 - RNA, 22 nt, Human
ccucccugggugacgggcuccu

SEQ ID NO: 618302 - RNA, 22 nt, Human
ccuuggcugaggagggagcuga

SEQ ID NO: 618303 - RNA, 19 nt, Human
agccagaacuaguguuucu

SEQ ID NO: 618304 - RNA, 22 nt, Human
aagccuucaguccguugcagag

SEQ ID NO: 618305 - RNA, 22 nt, Human
ggcuuuauuuugcaugaaugcu

SEQ ID NO: 618306 - RNA, 22 nt, Human
ggcaggugcugggagcaucuca

SEQ ID NO: 618307 - RNA, 21 nt, Human
accuucugaauuaccuaccaa

SEQ ID NO: 618308 - RNA, 22 nt, Human
uggcaaggcugugggggcagag

SEQ ID NO: 618309 - RNA, 22 nt, Human
uaaauacagucauuugagccau

SEQ ID NO: 618310 - RNA, 22 nt, Human
gcugcaggagcuggagcugugg

SEQ ID NO: 618311 - RNA, 22 nt, Human
auuuuugcccugcaguacauaa

SEQ ID NO: 618312 - RNA, 22 nt, Human
cggagaggaccugcaacucgcu

SEQ ID NO: 618313 - RNA, 22 nt, Human
acaguuagguccuaaaauucug

SEQ ID NO: 618314 - RNA, 22 nt, Human
auuuaaauuuucugauggagag

SEQ ID NO: 618315 - RNA, 21 nt, Human
ccacucugaguguugaacaga

SEQ ID NO: 618316 - RNA, 22 nt, Human
cugacucugacaggacuugugg

SEQ ID NO: 618317 - RNA, 22 nt, Human
guagaugagcucacaugaccuu

SEQ ID NO: 618318 - RNA, 22 nt, Human
agggaggaucugcuccuugucu

SEQ ID NO: 618319 - RNA, 22 nt, Human
auuacaagggucugacuggagg

SEQ ID NO: 618320 - RNA, 19 nt, Human
ccacuuugcuucucugggu

SEQ ID NO: 618321 - RNA, 23 nt, Human
uguugaaguaacuguuacauaga

SEQ ID NO: 618322 - RNA, 18 nt, Human
auguacauuugcuaaagc

SEQ ID NO: 618323 - RNA, 22 nt, Human
auaaaaaugagggcgguagcua

SEQ ID NO: 618324 - RNA, 22 nt, Human
ucuggccucuugggaugcuccc

SEQ ID NO: 618325 - RNA, 22 nt, Human
gcagggcagcuuagucccuguc

SEQ ID NO: 618326 - RNA, 19 nt, Human
uccagggcaggaacaugua

SEQ ID NO: 618327 - RNA, 22 nt, Human
aaacucuggggguggagcccag

SEQ ID NO: 618328 - RNA, 22 nt, Human
gcugaggccucagaaggcugag

SEQ ID NO: 618329 - RNA, 22 nt, Human
uauuuaucaagguaggagaaua

SEQ ID NO: 618330 - RNA, 22 nt, Human
cuagaaagauacuuaaaucaag

SEQ ID NO: 618331 - RNA, 22 nt, Human
ugccauccaacaguuccaucuu

SEQ ID NO: 618332 - RNA, 20 nt, Human
uuugcuaugcauaucugacc

SEQ ID NO: 618333 - RNA, 22 nt, Human
gccaggcugguuauuuaaugag

SEQ ID NO: 618334 - RNA, 22 nt, Human
uacacagggaaaggucucagag

SEQ ID NO: 618335 - RNA, 22 nt, Human
aaauaugagauguucucuuucg

SEQ ID NO: 618336 - RNA, 22 nt, Human
gacauaaaccuugagauauuaa

SEQ ID NO: 618337 - RNA, 22 nt, Human
ucccuguggauaucugcagcug

SEQ ID NO: 618338 - RNA, 22 nt, Human
uagcagaacaauagucaaugau

SEQ ID NO: 618339 - RNA, 22 nt, Human
ugggagagucuaaaaccgaggu

SEQ ID NO: 618340 - RNA, 22 nt, Human
agggcuuugagaauaguggaac

SEQ ID NO: 618341 - RNA, 22 nt, Human
ggaaaguggugguggaaagagg

SEQ ID NO: 618342 - RNA, 21 nt, Human
guuauuuuaagugagcuuugc

SEQ ID NO: 618343 - RNA, 22 nt, Human
uucauugugaacacauucugcc

SEQ ID NO: 618344 - RNA, 22 nt, Human
ugguccagucguuccuuuccuu

SEQ ID NO: 618345 - RNA, 22 nt, Human
aggcccagcuugaagugggaag

SEQ ID NO: 618346 - RNA, 22 nt, Human
aaagcaaucagauucagauguc

SEQ ID NO: 618347 - RNA, 22 nt, Human
ccuggccacagggcucugcauu

SEQ ID NO: 618348 - RNA, 22 nt, Human
gcaggcucagagcagauuagca

SEQ ID NO: 618349 - RNA, 22 nt, Human
uugagcccaggaggccugggug

SEQ ID NO: 618350 - RNA, 19 nt, Human
gggcccagcauggaggguu

SEQ ID NO: 618351 - RNA, 22 nt, Human
uccuguggagaggacuggaggu

SEQ ID NO: 618352 - RNA, 22 nt, Human
cugggagaucuccugagggcag

SEQ ID NO: 618353 - RNA, 22 nt, Human
ugauucuguucuccuugagaau

SEQ ID NO: 618354 - RNA, 22 nt, Human
agaaauccugauggagucugaa

SEQ ID NO: 618355 - RNA, 20 nt, Human
gaaguccuguuauauccuuu

SEQ ID NO: 618356 - RNA, 18 nt, Human
augcccuguugacuucag

SEQ ID NO: 618357 - RNA, 22 nt, Human
aacaguguuuuucuucagcacu

SEQ ID NO: 618358 - RNA, 22 nt, Human
uccagggcugacuugggagagg

SEQ ID NO: 618359 - RNA, 22 nt, Human
uucaguuuugcuuuuaaucaug

SEQ ID NO: 618360 - RNA, 21 nt, Human
agagccugagaucuuccagca

SEQ ID NO: 618361 - RNA, 23 nt, Human
aaggcauuggcuucucucauuuc

SEQ ID NO: 618362 - RNA, 22 nt, Human
uaacucugcuuguucucugagu

SEQ ID NO: 618363 - RNA, 22 nt, Human
ggguucagguuggccugagcac

SEQ ID NO: 618364 - RNA, 22 nt, Human
uuugauaauuaaaaauuguagu

SEQ ID NO: 618365 - RNA, 22 nt, Human
ugucuuuuggagcaucuuucuu

SEQ ID NO: 618366 - RNA, 22 nt, Human
uugccacugaaccagucuugca

SEQ ID NO: 618367 - RNA, 22 nt, Human
agcaggaguuugaugcuuuuau

SEQ ID NO: 618368 - RNA, 22 nt, Human
uuucaaagcaacugaaaaggaa

SEQ ID NO: 618369 - RNA, 22 nt, Human
gguccugaggggagcugaaggu

SEQ ID NO: 618370 - RNA, 22 nt, Human
uccagggcuggguuggcucagc

SEQ ID NO: 618371 - RNA, 22 nt, Human
ugugaaagucaaauuaauugaa

SEQ ID NO: 618372 - RNA, 22 nt, Human
aguggguguagucuuccuccug

SEQ ID NO: 618373 - RNA, 22 nt, Human
cagugcaacagauucgagaagc

SEQ ID NO: 618374 - RNA, 22 nt, Human
aggcaagugcauuagaagagca

SEQ ID NO: 618375 - RNA, 22 nt, Human
aaggcaggaugcggacccaucu

SEQ ID NO: 618376 - RNA, 22 nt, Human
gcuccuggucuggagcuucaag

SEQ ID NO: 618377 - RNA, 22 nt, Human
gagccuucaucgcagccuuguu

SEQ ID NO: 618378 - RNA, 22 nt, Human
uugaucaucuugugcugacggc

SEQ ID NO: 618379 - RNA, 22 nt, Human
aaagccuucaaguagauguaag

SEQ ID NO: 618380 - RNA, 22 nt, Human
ccaguguuuucauccucccuug

SEQ ID NO: 618381 - RNA, 22 nt, Human
ccaugggaauugggagguccca

SEQ ID NO: 618382 - RNA, 22 nt, Human
uacaaauggguuaaaauauagu

SEQ ID NO: 618383 - RNA, 22 nt, Human
uauuuuugccucucagauaaaa

SEQ ID NO: 618384 - RNA, 22 nt, Human
ccuggccacccagccuuggcca

SEQ ID NO: 618385 - RNA, 23 nt, Human
aagaggaggcccugcucccgucc

SEQ ID NO: 618386 - RNA, 18 nt, Human
agcuccugaacucugugg

SEQ ID NO: 618387 - RNA, 22 nt, Human
ucugccaccuucauccuccacu

SEQ ID NO: 618388 - RNA, 22 nt, Human
gccugggaagacuaagugggag

SEQ ID NO: 618389 - RNA, 22 nt, Human
ugauuuuuggaucugagcugca

SEQ ID NO: 618390 - RNA, 22 nt, Human
gcggagggcgagcccgcggagc

SEQ ID NO: 618391 - RNA, 22 nt, Human
uauguacaccggggaagguggg

SEQ ID NO: 618392 - RNA, 22 nt, Human
gguccccguggaggcuggagcg

SEQ ID NO: 618393 - RNA, 22 nt, Human
cugcccuggucccauggcugau

SEQ ID NO: 618394 - RNA, 22 nt, Human
acacaauacagggcucaaaaua

SEQ ID NO: 618395 - RNA, 22 nt, Human
caucucugguucagucucugug

SEQ ID NO: 618396 - RNA, 22 nt, Human
uuuccucacacagaagaucuug

SEQ ID NO: 618397 - RNA, 22 nt, Human
ucuggaguaauuacagugacug

SEQ ID NO: 618398 - RNA, 22 nt, Human
guccagccccugacucccaggc

SEQ ID NO: 618399 - RNA, 22 nt, Human
aggcagggcugggauuagacuc

SEQ ID NO: 618400 - RNA, 22 nt, Human
gaagccuuaucagucacuuaua

SEQ ID NO: 618401 - RNA, 22 nt, Human
agguccaggcauuuggguuggg

SEQ ID NO: 618402 - RNA, 22 nt, Human
uuauugugucuugguuuaucuu

SEQ ID NO: 618403 - RNA, 22 nt, Human
auccugggccucagaggugugu

SEQ ID NO: 618404 - RNA, 22 nt, Human
ccuggcacacgguggcauucaa

SEQ ID NO: 618405 - RNA, 22 nt, Human
ugggcucugguuuccuggcugg

SEQ ID NO: 618406 - RNA, 22 nt, Human
uuucauuuugguuaugccauaa

SEQ ID NO: 618407 - RNA, 22 nt, Human
aggcuagggccauggcugguga

SEQ ID NO: 618408 - RNA, 22 nt, Human
agaacagaggccuuauguuuca

SEQ ID NO: 618409 - RNA, 22 nt, Human
uauugaguuacagaaaauacuu

SEQ ID NO: 618410 - RNA, 22 nt, Human
uuuacaaggcagaacugauuaa

SEQ ID NO: 618411 - RNA, 22 nt, Human
cuguguuucugagaagugggga

SEQ ID NO: 618412 - RNA, 22 nt, Human
gcuuccuucuaccacaucaugc

SEQ ID NO: 618413 - RNA, 23 nt, Human
uggcucugugucacauacaggau

SEQ ID NO: 618414 - RNA, 22 nt, Human
gagguccagagcagguucagug

SEQ ID NO: 618415 - RNA, 22 nt, Human
cuggcuccauccuugagcucug

SEQ ID NO: 618416 - RNA, 19 nt, Human
ggccaccucucuucccagg

SEQ ID NO: 618417 - RNA, 22 nt, Human
uggaaggcagugauauuguuga

SEQ ID NO: 618418 - RNA, 22 nt, Human
cucuggcuuugcucaugcaucc

SEQ ID NO: 618419 - RNA, 22 nt, Human
uggcauuuaguugcguauugca

SEQ ID NO: 618420 - RNA, 22 nt, Human
ggcaagguacucuagagcacau

SEQ ID NO: 618421 - RNA, 22 nt, Human
uaaaaggagguugaagcuguca

SEQ ID NO: 618422 - RNA, 22 nt, Human
ucugucauuagccuugacugua

SEQ ID NO: 618423 - RNA, 22 nt, Human
gagaaagggaacuuacagagug

SEQ ID NO: 618424 - RNA, 22 nt, Human
aaagaugucacaagaugugaug

SEQ ID NO: 618425 - RNA, 22 nt, Human
uucuuuuuaaaguguguaugca

SEQ ID NO: 618426 - RNA, 20 nt, Human
cuguggcucaugcaucugcc

SEQ ID NO: 618427 - RNA, 22 nt, Human
ugggcaggagagaagcuaaaga

SEQ ID NO: 618428 - RNA, 22 nt, Human
cagguccaagagauccuccuac

SEQ ID NO: 618429 - RNA, 22 nt, Human
caagccagcaguuuaaugacuc

SEQ ID NO: 618430 - RNA, 21 nt, Human
auggccacuauggugcagcag

SEQ ID NO: 618431 - RNA, 22 nt, Human
ugugaauauccauuuguuucag

SEQ ID NO: 618432 - RNA, 21 nt, Human
gagccuucccucugcccuuuc

SEQ ID NO: 618433 - RNA, 22 nt, Human
cccagccucagcuuuacuucca

SEQ ID NO: 618434 - RNA, 17 nt, Human
acagcaggcccggaggg

SEQ ID NO: 618435 - RNA, 22 nt, Human
agggcagcucucaccucuggcc

SEQ ID NO: 618436 - RNA, 22 nt, Human
ccugaccauuugccacaugggu

SEQ ID NO: 618437 - RNA, 22 nt, Human
gcaggguccauggaggcagccc

SEQ ID NO: 618438 - RNA, 19 nt, Human
gcaggcacagcccugggug

SEQ ID NO: 618439 - RNA, 22 nt, Human
uucugcauuggagucuauucuu

SEQ ID NO: 618440 - RNA, 22 nt, Human
aggcccagagagccaguuagug

SEQ ID NO: 618441 - RNA, 22 nt, Human
ccuggcaggcaagaggaaggga

SEQ ID NO: 618442 - RNA, 22 nt, Human
gugccacuuaccugggaggagu

SEQ ID NO: 618443 - RNA, 22 nt, Human
caguccagagcccaccagagga

SEQ ID NO: 618444 - RNA, 22 nt, Human
agcuccugcacccagccuugag

SEQ ID NO: 618445 - RNA, 22 nt, Human
cuguggauuuaggcagagcuga

SEQ ID NO: 618446 - RNA, 22 nt, Human
agaaaacauuacauaggugugu

SEQ ID NO: 618447 - RNA, 22 nt, Human
cugcccugcuggagaucacagu

SEQ ID NO: 618448 - RNA, 22 nt, Human
auguaauuuauguuauccauaa

SEQ ID NO: 618449 - RNA, 22 nt, Human
cuucauuuggagaacugugcuu

SEQ ID NO: 618450 - RNA, 22 nt, Human
cagaaauaucaguugaaagugc

SEQ ID NO: 618451 - RNA, 22 nt, Human
aggaauggugcucagcagaaau

SEQ ID NO: 618452 - RNA, 22 nt, Human
caugcuuugggucagaaaugcc

SEQ ID NO: 618453 - RNA, 22 nt, Human
aggaggcacucacucucagggu

SEQ ID NO: 618454 - RNA, 22 nt, Human
uucaaaagacucagauguagcg

SEQ ID NO: 618455 - RNA, 22 nt, Human
gacaucaauucagcauuuuaag

SEQ ID NO: 618456 - RNA, 22 nt, Human
cagguucccuagcagcaaagcc

SEQ ID NO: 618457 - RNA, 22 nt, Human
acuguggcuaauucauuugguc

SEQ ID NO: 618458 - RNA, 22 nt, Human
agcuaggaaauugaggcugaga

SEQ ID NO: 618459 - RNA, 21 nt, Human
ccagggaagaaaugagggcag

SEQ ID NO: 618460 - RNA, 22 nt, Human
agcuuuaaaaauccaauaucca

SEQ ID NO: 618461 - RNA, 21 nt, Human
uggauaaaggcacuuuucauc

SEQ ID NO: 618462 - RNA, 22 nt, Human
aguggcagagcaggugcuggaa

SEQ ID NO: 618463 - RNA, 22 nt, Human
cauaauaucuccgauuacuugc

SEQ ID NO: 618464 - RNA, 22 nt, Human
ugaggcagauauuuauuggguu

SEQ ID NO: 618465 - RNA, 22 nt, Human
gcaggucucaaucugagcaggc

SEQ ID NO: 618466 - RNA, 22 nt, Human
ggcggggucugagcgccgcgcc

SEQ ID NO: 618467 - RNA, 22 nt, Human
cuguggcuuuuccggggagccu

SEQ ID NO: 618468 - RNA, 22 nt, Human
cuguggcucaaaaucccaugau

SEQ ID NO: 618469 - RNA, 22 nt, Human
uccucuggaaccucacccuugc

SEQ ID NO: 618470 - RNA, 19 nt, Human
ggaaggcagaggggcugug

SEQ ID NO: 618471 - RNA, 22 nt, Human
aggagggcuaggaaaaccagga

SEQ ID NO: 618472 - RNA, 22 nt, Human
cugggccaugggccagcgaggc

SEQ ID NO: 618473 - RNA, 22 nt, Human
cauggccagcccugagguucag

SEQ ID NO: 618474 - RNA, 22 nt, Human
aucauacagccuuuguuagugu

SEQ ID NO: 618475 - RNA, 22 nt, Human
uggggagaagcaauagacucua

SEQ ID NO: 618476 - RNA, 22 nt, Human
aagggggccacaccugguguga

SEQ ID NO: 618477 - RNA, 22 nt, Human
gcauggccucugugcuuguugc

SEQ ID NO: 618478 - RNA, 22 nt, Human
cuauacaucccaauuucagaga

SEQ ID NO: 618479 - RNA, 22 nt, Human
ugggcucugcaucagugcccau

SEQ ID NO: 618480 - RNA, 22 nt, Human
aggcaggccuacacaaugggag

SEQ ID NO: 618481 - RNA, 22 nt, Human
uuacuuuaucuccuagauucca

SEQ ID NO: 618482 - RNA, 22 nt, Human
ugggguacuuguaucaaagcac

SEQ ID NO: 618483 - RNA, 22 nt, Human
ccuggcccuggaauagggcagg

SEQ ID NO: 618484 - RNA, 22 nt, Human
ugccacuggcucaauggugcag

SEQ ID NO: 618485 - RNA, 22 nt, Human
ugaggcaguucuuacuuguauu

SEQ ID NO: 618486 - RNA, 22 nt, Human
gagaggcccuguggucccagcu

SEQ ID NO: 618487 - RNA, 22 nt, Human
agucucuuacccaagcagaaug

SEQ ID NO: 618488 - RNA, 22 nt, Human
ccaguguuagagacugauacag

SEQ ID NO: 618489 - RNA, 19 nt, Human
gcuccuggaugaccugugg

SEQ ID NO: 618490 - RNA, 22 nt, Human
ugccagcuuuugacuaucuuag

SEQ ID NO: 618491 - RNA, 22 nt, Human
aauauuuaugacaggaaguagc

SEQ ID NO: 618492 - RNA, 22 nt, Human
ggcaggguaaaccgagguaagu

SEQ ID NO: 618493 - RNA, 22 nt, Human
augcuucuguaaugugggaaug

SEQ ID NO: 618494 - RNA, 22 nt, Human
aggcauggacauuucggcagcu

SEQ ID NO: 618495 - RNA, 17 nt, Human
agaaagaggauccacag

SEQ ID NO: 618496 - RNA, 22 nt, Human
ccugggcaacauagugagaccc

SEQ ID NO: 618497 - RNA, 22 nt, Human
gggagggccagugcucucuaga

SEQ ID NO: 618498 - RNA, 22 nt, Human
cuguggcuggcucaucauaggu

SEQ ID NO: 618499 - RNA, 22 nt, Human
uucauuuguggugaaugaagug

SEQ ID NO: 618500 - RNA, 22 nt, Human
gggaaagaagaucuagauacug

SEQ ID NO: 618501 - RNA, 22 nt, Human
aucuucaauugaaaacuagccu

SEQ ID NO: 618502 - RNA, 22 nt, Human
uuuucucuauauugucugugaa

SEQ ID NO: 618503 - RNA, 22 nt, Human
caugccuguauuucugaucuau

SEQ ID NO: 618504 - RNA, 22 nt, Human
ccagggaggguccuguggcuuc

SEQ ID NO: 618505 - RNA, 22 nt, Human
agggccagcccauaaugccaaa

SEQ ID NO: 618506 - RNA, 22 nt, Human
cuggaaagucaggucagaaacu

SEQ ID NO: 618507 - RNA, 22 nt, Human
guccaggaguuuccaauuaagc

SEQ ID NO: 618508 - RNA, 22 nt, Human
cugcccugcuuguuuccagugg

SEQ ID NO: 618509 - RNA, 22 nt, Human
ucccagugagguccuggcuguc

SEQ ID NO: 618510 - RNA, 22 nt, Human
uuucuuuugcccuguggguuag

SEQ ID NO: 618511 - RNA, 18 nt, Human
acauuucuccuucugacc

SEQ ID NO: 618512 - RNA, 22 nt, Human
uccugugugggcaggaugagaa

SEQ ID NO: 618513 - RNA, 22 nt, Human
gcucuguggcaggaggucuugu

SEQ ID NO: 618514 - RNA, 22 nt, Human
cuggcagcccaaccuagagucu

SEQ ID NO: 618515 - RNA, 21 nt, Human
uuccucuugcuuccgccuugc

SEQ ID NO: 618516 - RNA, 22 nt, Human
uccugggacucaacuuagaagg

SEQ ID NO: 618517 - RNA, 22 nt, Human
augacagacagaagggauuuuu

SEQ ID NO: 618518 - RNA, 22 nt, Human
uccucagcuuuuauuucacuug

SEQ ID NO: 618519 - RNA, 22 nt, Human
aauacagagaauguuauuugga

SEQ ID NO: 618520 - RNA, 22 nt, Human
agaaggguguauacauuuccug

SEQ ID NO: 618521 - RNA, 22 nt, Human
cuuauaaaguccaucugaacaa

SEQ ID NO: 618522 - RNA, 22 nt, Human
uugagucucugccaaaacacaa

SEQ ID NO: 618523 - RNA, 22 nt, Human
ucauuucuccuaagugaaauau

SEQ ID NO: 618524 - RNA, 22 nt, Human
uuacaagauaaccugaugcugu

SEQ ID NO: 618525 - RNA, 22 nt, Human
aaggcuguuuauuagaaaaagu

SEQ ID NO: 618526 - RNA, 22 nt, Human
aagggaaaucauauggugcagu

SEQ ID NO: 618527 - RNA, 22 nt, Human
uuuauaaacaguaccacggugc

SEQ ID NO: 618528 - RNA, 22 nt, Human
guccugguuuucacagaccuuu

SEQ ID NO: 618529 - RNA, 19 nt, Human
ccugcagggaugagagguu

SEQ ID NO: 618530 - RNA, 20 nt, Human
ggaaucuuugcaggaaaaua

SEQ ID NO: 618531 - RNA, 22 nt, Human
caaagacacgggaaacaacguu

SEQ ID NO: 618532 - RNA, 22 nt, Human
cuguggcuccagugaaccaaug

SEQ ID NO: 618533 - RNA, 22 nt, Human
agcuccagaagccugcaaggua

SEQ ID NO: 618534 - RNA, 22 nt, Human
cugacccuagcaucucugugca

SEQ ID NO: 618535 - RNA, 22 nt, Human
cugggccaucucucugcaagug

SEQ ID NO: 618536 - RNA, 22 nt, Human
ucucuuugacccuuuagcucca

SEQ ID NO: 618537 - RNA, 22 nt, Human
uagaauaguguuuucauuaugg

SEQ ID NO: 618538 - RNA, 22 nt, Human
aggagacauaacuaugaugaga

SEQ ID NO: 618539 - RNA, 22 nt, Human
aaguuucauuguucauguaaca

SEQ ID NO: 618540 - RNA, 22 nt, Human
aaauuagaccaguucaggucca

SEQ ID NO: 618541 - RNA, 20 nt, Human
uaacagaaguagaagugggu

SEQ ID NO: 618542 - RNA, 22 nt, Human
agauuuguauagaugugguuga

SEQ ID NO: 618543 - RNA, 22 nt, Human
ugagguagaagccuggguugag

SEQ ID NO: 618544 - RNA, 22 nt, Human
augcuuggaugcugccauggga

SEQ ID NO: 618545 - RNA, 22 nt, Human
ucugaaauacugcagguucucu

SEQ ID NO: 618546 - RNA, 22 nt, Human
uuuucauuagaaugacugagaa

SEQ ID NO: 618547 - RNA, 22 nt, Human
gcuguaaagaacauuaggaauc

SEQ ID NO: 618548 - RNA, 22 nt, Human
cacaggaauaagucaaacuuca

SEQ ID NO: 618549 - RNA, 22 nt, Human
ccaggggaaacagggagcacuc

SEQ ID NO: 618550 - RNA, 22 nt, Human
acaguguuuucuuaaggagaaa

SEQ ID NO: 618551 - RNA, 22 nt, Human
aaguagaaucucagguaggcua

SEQ ID NO: 618552 - RNA, 22 nt, Human
uaagccugcaugaaccaugaga

SEQ ID NO: 618553 - RNA, 21 nt, Human
cacuccacuuagaacaggguu

SEQ ID NO: 618554 - RNA, 22 nt, Human
gcaguguugguuugcucugcag

SEQ ID NO: 618555 - RNA, 22 nt, Human
uauacaggaaauuuuggaacag

SEQ ID NO: 618556 - RNA, 22 nt, Human
cuucuccucugaguccugggag

SEQ ID NO: 618557 - RNA, 22 nt, Human
caggccucaugguguguccuuc

SEQ ID NO: 618558 - RNA, 22 nt, Human
aggaaaaagaguugcugccuuc

SEQ ID NO: 618559 - RNA, 22 nt, Human
auguguuuugguaauuucugcu

SEQ ID NO: 618560 - RNA, 22 nt, Human
cucaguccuuauuugccucuac

SEQ ID NO: 618561 - RNA, 22 nt, Human
gccuguuugacuggucucugcu

SEQ ID NO: 618562 - RNA, 22 nt, Human
accugaggcuguuagucuaggu

SEQ ID NO: 618563 - RNA, 22 nt, Human
ggagaagggaacugaguuuuug

SEQ ID NO: 618564 - RNA, 22 nt, Human
aaugggaaagagacuagaugcu

SEQ ID NO: 618565 - RNA, 18 nt, Human
uccugggaacuugcuagc

SEQ ID NO: 618566 - RNA, 22 nt, Human
ggcccagcugugcuuccagccc

SEQ ID NO: 618567 - RNA, 22 nt, Human
aaguccugggugagaacugucc

SEQ ID NO: 618568 - RNA, 22 nt, Human
gccagaggggcucgaaggcgcg

SEQ ID NO: 618569 - RNA, 22 nt, Human
uaccugcacagccagccaugug

SEQ ID NO: 618570 - RNA, 22 nt, Human
ggaugggcagacaggacggcac

SEQ ID NO: 618571 - RNA, 20 nt, Human
agcuaggagaaagcauggag

SEQ ID NO: 618572 - RNA, 22 nt, Human
cguccgcaaugcaagccuuuua

SEQ ID NO: 618573 - RNA, 22 nt, Human
aggagagggguaggauuaauuu

SEQ ID NO: 618574 - RNA, 22 nt, Human
uagauucaaguauucaguuugg

SEQ ID NO: 618575 - RNA, 22 nt, Human
gauuucuuuaugaaguacagaa

SEQ ID NO: 618576 - RNA, 22 nt, Human
agaagcaggccucacagaucug

SEQ ID NO: 618577 - RNA, 22 nt, Human
cugcaaaaguaauugcagguuu

SEQ ID NO: 618578 - RNA, 22 nt, Human
ucauagaagcacucagcucccu

SEQ ID NO: 618579 - RNA, 22 nt, Human
aauguguuuuaugagagaauau

SEQ ID NO: 618580 - RNA, 22 nt, Human
cuccugggagucuuccuggaug

SEQ ID NO: 618581 - RNA, 22 nt, Human
uccaaagaaccuggcuacuguc

SEQ ID NO: 618582 - RNA, 22 nt, Human
gcuggguuuccagcaggcagga

SEQ ID NO: 618583 - RNA, 16 nt, Human
ucaguguuccagaaua

SEQ ID NO: 618584 - RNA, 22 nt, Human
uccuggugccuggagcucucca

SEQ ID NO: 618585 - RNA, 22 nt, Human
ccuggguuauuuuggucuagug

SEQ ID NO: 618586 - RNA, 22 nt, Human
ggcuuuaugcagggauagaaau

SEQ ID NO: 618587 - RNA, 22 nt, Human
gagagcugauagaugagcuacu

SEQ ID NO: 618588 - RNA, 22 nt, Human
ugugacagccaguaaaguaagc

SEQ ID NO: 618589 - RNA, 22 nt, Human
agggcuuugauguccaugagga

SEQ ID NO: 618590 - RNA, 18 nt, Human
ugagaauguaagaaaugg

SEQ ID NO: 618591 - RNA, 22 nt, Human
ggagaaugauucuuugcucacu

SEQ ID NO: 618592 - RNA, 22 nt, Human
uuucacagcgucuuucucuugc

SEQ ID NO: 618593 - RNA, 22 nt, Human
cccuguuuggauggggacccag

SEQ ID NO: 618594 - RNA, 22 nt, Human
uccacagauuaaaaacauacuu

SEQ ID NO: 618595 - RNA, 22 nt, Human
ggguucagagucaggugugaua

SEQ ID NO: 618596 - RNA, 22 nt, Human
auuaaagacagcagauggaugg

SEQ ID NO: 618597 - RNA, 22 nt, Human
cuggcccuggagggcugugcga

SEQ ID NO: 618598 - RNA, 21 nt, Human
uuguugagaguuagaacaugg

SEQ ID NO: 618599 - RNA, 23 nt, Human
aacacaaagcugauuccaguggc

SEQ ID NO: 618600 - RNA, 22 nt, Human
gcggcgccuaagccccgaccuc

SEQ ID NO: 618601 - RNA, 22 nt, Human
aagacuugaccagguugaaggc

SEQ ID NO: 618602 - RNA, 21 nt, Human
uccuggcccacucuaucccca

SEQ ID NO: 618603 - RNA, 22 nt, Human
ugaagaucugucaaccccauau

SEQ ID NO: 618604 - RNA, 22 nt, Human
uccugggcacaagugagucucc

SEQ ID NO: 618605 - RNA, 22 nt, Human
caggaaaauggaaucaccugua

SEQ ID NO: 618606 - RNA, 17 nt, Human
cccuggcaaagaauggc

SEQ ID NO: 618607 - RNA, 22 nt, Human
gcugaggcaaaccaagaaugua

SEQ ID NO: 618608 - RNA, 22 nt, Human
aucuggaggauucugggacuug

SEQ ID NO: 618609 - RNA, 22 nt, Human
uucaauagaaaugacauucuuu

SEQ ID NO: 618610 - RNA, 22 nt, Human
accugagggagauuaggccuga

SEQ ID NO: 618611 - RNA, 22 nt, Human
ugguuugagagugugagcuuuu

SEQ ID NO: 618612 - RNA, 18 nt, Human
gccugggaggaggaaaug

SEQ ID NO: 618613 - RNA, 22 nt, Human
agggccagcugcagaauuagca

SEQ ID NO: 618614 - RNA, 22 nt, Human
uugcccugucuuaagcuggcaa

SEQ ID NO: 618615 - RNA, 22 nt, Human
cagggcuuuccugagaagugau

SEQ ID NO: 618616 - RNA, 22 nt, Human
ucccucugguccucgguggaga

SEQ ID NO: 618617 - RNA, 22 nt, Human
agggcuuugcaaugcacagugg

SEQ ID NO: 618618 - RNA, 22 nt, Human
agggggugcuacuuccagaguu

SEQ ID NO: 618619 - RNA, 22 nt, Human
uccagggcuacaaggcaccaga

SEQ ID NO: 618620 - RNA, 22 nt, Human
cacaguggcuuugcuggucucg

SEQ ID NO: 618621 - RNA, 22 nt, Human
ggcagagugcucugggcagggg

SEQ ID NO: 618622 - RNA, 23 nt, Human
cccugcagucagggugagauggu

SEQ ID NO: 618623 - RNA, 19 nt, Human
ccagugcaagguaagauag

SEQ ID NO: 618624 - RNA, 22 nt, Human
caaguagaaggaugugauugua

SEQ ID NO: 618625 - RNA, 22 nt, Human
ucaaauauuggcuauuucacau

SEQ ID NO: 618626 - RNA, 22 nt, Human
caggaaaugcuaucauagcuga

SEQ ID NO: 618627 - RNA, 22 nt, Human
ggcauggccuguaagacggaga

SEQ ID NO: 618628 - RNA, 23 nt, Human
uccagggauuaaugaagucaguc

SEQ ID NO: 618629 - RNA, 22 nt, Human
ucaguguugaauuuuuugcaaa

SEQ ID NO: 618630 - RNA, 22 nt, Human
agcugccucccugugcuugucc

SEQ ID NO: 618631 - RNA, 22 nt, Human
gccugggagugcacagugaggu

SEQ ID NO: 618632 - RNA, 22 nt, Human
ugugaagguaaggaggggcaag

SEQ ID NO: 618633 - RNA, 22 nt, Human
cuuuuacauuuguugaagagua

SEQ ID NO: 618634 - RNA, 22 nt, Human
gccucugcucggacuuugccuc

SEQ ID NO: 618635 - RNA, 22 nt, Human
gcaggccagcugugcagauggg

SEQ ID NO: 618636 - RNA, 22 nt, Human
cacaguccagacuccuggaguu

SEQ ID NO: 618637 - RNA, 22 nt, Human
uucuuucucuguaaaaggaaaa

SEQ ID NO: 618638 - RNA, 22 nt, Human
uguuucuucucacacaaacuca

SEQ ID NO: 618639 - RNA, 22 nt, Human
auccugggaaugggagggucau

SEQ ID NO: 618640 - RNA, 22 nt, Human
agaaggaaggauaacugcauua

SEQ ID NO: 618641 - RNA, 22 nt, Human
ugaggcagggagaguggauaug

SEQ ID NO: 618642 - RNA, 22 nt, Human
gcugugugcuaggauauguuuu

SEQ ID NO: 618643 - RNA, 22 nt, Human
gggaucuuucugaugcuguggc

SEQ ID NO: 618644 - RNA, 22 nt, Human
ugcugcuuugauguguaaauca

SEQ ID NO: 618645 - RNA, 22 nt, Human
agagaugaagggcauuccccag

SEQ ID NO: 618646 - RNA, 22 nt, Human
uugcaagauguuaccauuguua

SEQ ID NO: 618647 - RNA, 22 nt, Human
auuagugucugugaauaauucu

SEQ ID NO: 618648 - RNA, 23 nt, Human
aacguccucaacaggauugcacc

SEQ ID NO: 618649 - RNA, 22 nt, Human
gcccagugguaaaagcaggccu

SEQ ID NO: 618650 - RNA, 22 nt, Human
augcccugccaagcaggcuaaa

SEQ ID NO: 618651 - RNA, 20 nt, Human
agucccaacauucagcucug

SEQ ID NO: 618652 - RNA, 22 nt, Human
uuggaaggugagucccuggguu

SEQ ID NO: 618653 - RNA, 22 nt, Human
uccugcagccauuagaggucaa

SEQ ID NO: 618654 - RNA, 22 nt, Human
ggagggguggaaggagugccug

SEQ ID NO: 618655 - RNA, 22 nt, Human
auguguguauauauagucauuu

SEQ ID NO: 618656 - RNA, 22 nt, Human
guccacagagggcugggcaggc

SEQ ID NO: 618657 - RNA, 22 nt, Human
caccaaagucgcuucugucguc

SEQ ID NO: 618658 - RNA, 22 nt, Human
cuguggcucuuuaguugagcac

SEQ ID NO: 618659 - RNA, 22 nt, Human
cagucagucaauacucuuugag

SEQ ID NO: 618660 - RNA, 22 nt, Human
uuaccuguguguuugauacaua

SEQ ID NO: 618661 - RNA, 22 nt, Human
auugaaagagaauguagcucuu

SEQ ID NO: 618662 - RNA, 22 nt, Human
uugcuuucccaaggcagaacau

SEQ ID NO: 618663 - RNA, 22 nt, Human
auuuauuaugggauuuggcaca

SEQ ID NO: 618664 - RNA, 21 nt, Human
aucagaaucucuagauuugga

SEQ ID NO: 618665 - RNA, 22 nt, Human
uuugcuuuugugcucuaguggu

SEQ ID NO: 618666 - RNA, 17 nt, Human
uuugaaaggaugucagu

SEQ ID NO: 618667 - RNA, 22 nt, Human
ggccaccuuccuguggucucug

SEQ ID NO: 618668 - RNA, 22 nt, Human
uccugaggacccugucaggggc

SEQ ID NO: 618669 - RNA, 22 nt, Human
aaauugcuauaugugaauguga

SEQ ID NO: 618670 - RNA, 22 nt, Human
accagggcggcuugaggaggca

SEQ ID NO: 618671 - RNA, 22 nt, Human
acugggcccauauacucagucu

SEQ ID NO: 618672 - RNA, 19 nt, Human
ccagcccugucacuucuug

SEQ ID NO: 618673 - RNA, 22 nt, Human
cauguguuucgagacuguugag

SEQ ID NO: 618674 - RNA, 22 nt, Human
ggguccagaaugagaaugggcu

SEQ ID NO: 618675 - RNA, 22 nt, Human
uauuucuaagagauaucuguac

SEQ ID NO: 618676 - RNA, 22 nt, Human
gggcugggcaugguguucccuc

SEQ ID NO: 618677 - RNA, 22 nt, Human
ggcggguggcgaggcuucucgg

SEQ ID NO: 618678 - RNA, 19 nt, Human
aggcaugggaagagaaguc

SEQ ID NO: 618679 - RNA, 22 nt, Human
uccugggguccugacugcuucc

SEQ ID NO: 618680 - RNA, 22 nt, Human
gcugccuucccaggccuuugcu

SEQ ID NO: 618681 - RNA, 22 nt, Human
uggagaauggaauguugugcag

SEQ ID NO: 618682 - RNA, 22 nt, Human
aaaauacacauacuaggggaaa

SEQ ID NO: 618683 - RNA, 22 nt, Human
aaaaugcucaucagcgauggcu

SEQ ID NO: 618684 - RNA, 22 nt, Human
ucuccuggcucaccaggcugga

SEQ ID NO: 618685 - RNA, 22 nt, Human
gcugugcugauucauucccugc

SEQ ID NO: 618686 - RNA, 22 nt, Human
aagcagcuucccuggcuccugg

SEQ ID NO: 618687 - RNA, 22 nt, Human
agcaggugguaggcagucagca

SEQ ID NO: 618688 - RNA, 22 nt, Human
gcucuggcuacuccacccuguu

SEQ ID NO: 618689 - RNA, 22 nt, Human
aauguugauguuuucagugagc

SEQ ID NO: 618690 - RNA, 22 nt, Human
gcucuucucagauuguacacuc

SEQ ID NO: 618691 - RNA, 22 nt, Human
guuauaaaggugauaaugguca

SEQ ID NO: 618692 - RNA, 22 nt, Human
uggccagcagaguucacucucu

SEQ ID NO: 618693 - RNA, 22 nt, Human
aaguuagagauuccaucaugcu

SEQ ID NO: 618694 - RNA, 22 nt, Human
cacuucagcuacaaucacauga

SEQ ID NO: 618695 - RNA, 22 nt, Human
uuuaaauuauaguuaaugucug

SEQ ID NO: 618696 - RNA, 22 nt, Human
aggguccauguuuccaguuaau

SEQ ID NO: 618697 - RNA, 22 nt, Human
auaaugcauuuagaauaauuca

SEQ ID NO: 618698 - RNA, 23 nt, Human
ccagugugguagguccacaggug

SEQ ID NO: 618699 - RNA, 22 nt, Human
agccaggacagggcagcucgcu

SEQ ID NO: 618700 - RNA, 22 nt, Human
uaagaaauuuaguuauagaaug

SEQ ID NO: 618701 - RNA, 22 nt, Human
cagcuacagaggccacauggcu

SEQ ID NO: 618702 - RNA, 22 nt, Human
ggguucagacuaaagcuaugca

SEQ ID NO: 618703 - RNA, 20 nt, Human
auauuucuuaagaacuuuca

SEQ ID NO: 618704 - RNA, 23 nt, Human
uuuuccuuuggacaggcuguauu

SEQ ID NO: 618705 - RNA, 22 nt, Human
uguccuagauccagcugugcug

SEQ ID NO: 618706 - RNA, 22 nt, Human
ugugcagagaagccacuggggg

SEQ ID NO: 618707 - RNA, 19 nt, Human
agaggcaaggguggaagua

SEQ ID NO: 618708 - RNA, 22 nt, Human
ccaugccuggacuccacucuca

SEQ ID NO: 618709 - RNA, 22 nt, Human
aacuccugaggaaauggucuca

SEQ ID NO: 618710 - RNA, 22 nt, Human
gugcccagcuccaccucacaga

SEQ ID NO: 618711 - RNA, 17 nt, Human
uccuggccuggugugug

SEQ ID NO: 618712 - RNA, 22 nt, Human
cuggguuuuauuacagugagcu

SEQ ID NO: 618713 - RNA, 22 nt, Human
caggcugggcuccggagauaaa

SEQ ID NO: 618714 - RNA, 22 nt, Human
ggcuccuggggaggugagcuug

SEQ ID NO: 618715 - RNA, 20 nt, Human
cuuccacacaagaagcacag

SEQ ID NO: 618716 - RNA, 22 nt, Human
auugaaaaaugacuauugcuua

SEQ ID NO: 618717 - RNA, 22 nt, Human
uuauuuacuggauggccuuggg

SEQ ID NO: 618718 - RNA, 22 nt, Human
ucacaaagcuuugauaagcaga

SEQ ID NO: 618719 - RNA, 22 nt, Human
uagauucagauauuuaggacaa

SEQ ID NO: 618720 - RNA, 21 nt, Human
gggcaggucucugaugucaac

SEQ ID NO: 618721 - RNA, 22 nt, Human
uacaacagaccuagaugaauga

SEQ ID NO: 618722 - RNA, 22 nt, Human
agcagggaggcggugugcuggc

SEQ ID NO: 618723 - RNA, 22 nt, Human
aggcauggcuuuaggcaggcgu

SEQ ID NO: 618724 - RNA, 22 nt, Human
auccuggguuugugaguuuaug

SEQ ID NO: 618725 - RNA, 22 nt, Human
caggaaaaugucaauggaaagc

SEQ ID NO: 618726 - RNA, 18 nt, Human
agucccaucuucagcucu

SEQ ID NO: 618727 - RNA, 22 nt, Human
uuuacaaggcaguuauuuuccu

SEQ ID NO: 618728 - RNA, 22 nt, Human
cuuccuggccauugccauggca

SEQ ID NO: 618729 - RNA, 22 nt, Human
gcagaggacacaggagggcaag

SEQ ID NO: 618730 - RNA, 21 nt, Human
cgcagagcgaacuugcggcgc

SEQ ID NO: 618731 - RNA, 18 nt, Human
uugagucuagccauggaa

SEQ ID NO: 618732 - RNA, 22 nt, Human
uggcagaaugaagacuggggcc

SEQ ID NO: 618733 - RNA, 22 nt, Human
uauuucuguuuauuuguacauc

SEQ ID NO: 618734 - RNA, 22 nt, Human
augagcuagaaaaccaugugga

SEQ ID NO: 618735 - RNA, 22 nt, Human
ccuguggcugccacuuggguga

SEQ ID NO: 618736 - RNA, 22 nt, Human
ggguccagacuaugaagaacuu

SEQ ID NO: 618737 - RNA, 22 nt, Human
gcagcuccuuuaggcugcaaag

SEQ ID NO: 618738 - RNA, 22 nt, Human
ggagcaagucccaggcacuagu

SEQ ID NO: 618739 - RNA, 22 nt, Human
aggcaggugggucacuugaguc

SEQ ID NO: 618740 - RNA, 20 nt, Human
uccaggcagacagcuauggg

SEQ ID NO: 618741 - RNA, 22 nt, Human
uacuuuuuaugauaagaacuga

SEQ ID NO: 618742 - RNA, 22 nt, Human
ggagagguuauccguguuaugu

SEQ ID NO: 618743 - RNA, 22 nt, Human
ugaguggacaccugcuucuuua

SEQ ID NO: 618744 - RNA, 22 nt, Human
cgcaccacugaauuccagccug

SEQ ID NO: 618745 - RNA, 18 nt, Human
ucucaaaaauaauggcuu

SEQ ID NO: 618746 - RNA, 22 nt, Human
aggaggguggggucugccuguc

SEQ ID NO: 618747 - RNA, 22 nt, Human
ggcuuuauuauguggccaugug

SEQ ID NO: 618748 - RNA, 22 nt, Human
cauugcaacuucaaacuccugg

SEQ ID NO: 618749 - RNA, 22 nt, Human
uggcuuuaagaagacugacagc

SEQ ID NO: 618750 - RNA, 22 nt, Human
uauguacaucguugaauucaaa

SEQ ID NO: 618751 - RNA, 22 nt, Human
agagcccucucauuggcuuauu

SEQ ID NO: 618752 - RNA, 22 nt, Human
gaagagaagcaucaauagguaa

SEQ ID NO: 618753 - RNA, 22 nt, Human
agagcuguuuggacaucugagu

SEQ ID NO: 618754 - RNA, 22 nt, Human
ggcuuccuggggccuccugcaa

SEQ ID NO: 618755 - RNA, 22 nt, Human
ugcagcaguuuaaugcaggguu

SEQ ID NO: 618756 - RNA, 22 nt, Human
ucuuuuucuuauucccacacug

SEQ ID NO: 618757 - RNA, 22 nt, Human
ugcacaaacacagagaauagau

SEQ ID NO: 618758 - RNA, 22 nt, Human
gccuguuuccaucaacacaugc

SEQ ID NO: 618759 - RNA, 22 nt, Human
cagaggccccagaacuagcucu

SEQ ID NO: 618760 - RNA, 22 nt, Human
guucaaaauucaaaugguauac

SEQ ID NO: 618761 - RNA, 22 nt, Human
uuacaagacacagugcugaagg

SEQ ID NO: 618762 - RNA, 22 nt, Human
acaugcaaaaauauauuuauga

SEQ ID NO: 618763 - RNA, 22 nt, Human
uugcuucagaaguucugcuugu

SEQ ID NO: 618764 - RNA, 22 nt, Human
gcuggcagcauuagacccuggg

SEQ ID NO: 618765 - RNA, 19 nt, Human
gcccaggggcccgaugcug

SEQ ID NO: 618766 - RNA, 22 nt, Human
ugaagauauuuuaaaauacuga

SEQ ID NO: 618767 - RNA, 22 nt, Human
cuguggaguccuggggaaugga

SEQ ID NO: 618768 - RNA, 22 nt, Human
gcauggccuugugcuccuucuc

SEQ ID NO: 618769 - RNA, 17 nt, Human
uaaauacacaaggguau

SEQ ID NO: 618770 - RNA, 22 nt, Human
uuugaagagccacagugaaauu

SEQ ID NO: 618771 - RNA, 22 nt, Human
gccaggucuggguagcagagga

SEQ ID NO: 618772 - RNA, 22 nt, Human
agacagggagggagcgcggcug

SEQ ID NO: 618773 - RNA, 22 nt, Human
guuuacaguggcuucauuggau

SEQ ID NO: 618774 - RNA, 22 nt, Human
gcugggcuccaggccaggguga

SEQ ID NO: 618775 - RNA, 21 nt, Human
agggccagaucaccaaggagc

SEQ ID NO: 618776 - RNA, 22 nt, Human
uucugugugccagaguugugcu

SEQ ID NO: 618777 - RNA, 19 nt, Human
uggcucuuuuuaugacauu

SEQ ID NO: 618778 - RNA, 22 nt, Human
uaacucugaauccucacagcag

SEQ ID NO: 618779 - RNA, 22 nt, Human
gaaggccugugguagugagacg

SEQ ID NO: 618780 - RNA, 22 nt, Human
caguaaauuuuauuugugggug

SEQ ID NO: 618781 - RNA, 22 nt, Human
uacacaaaggcacucuguuguu

SEQ ID NO: 618782 - RNA, 22 nt, Human
gggccuggugcuucugacuccu

SEQ ID NO: 618783 - RNA, 22 nt, Human
uuuauuuauccuucuggauugc

SEQ ID NO: 618784 - RNA, 22 nt, Human
ccugggagagccaucuguggcc

SEQ ID NO: 618785 - RNA, 23 nt, Human
gcaguguuugcuucaucuuaucc

SEQ ID NO: 618786 - RNA, 22 nt, Human
ugucacuuuggccaagccauug

SEQ ID NO: 618787 - RNA, 22 nt, Human
ugaaagaagugucacauugcca

SEQ ID NO: 618788 - RNA, 19 nt, Human
gacuccaacuuuaagcaug

SEQ ID NO: 618789 - RNA, 22 nt, Human
uauuacaaauuauaaugggaga

SEQ ID NO: 618790 - RNA, 22 nt, Human
gagcucauccccaugguccguc

SEQ ID NO: 618791 - RNA, 20 nt, Human
cucuuuguuggcaaacucuu

SEQ ID NO: 618792 - RNA, 17 nt, Human
ucagcaggggccaagcu

SEQ ID NO: 618793 - RNA, 22 nt, Human
uggcagguagaguucugagaug

SEQ ID NO: 618794 - RNA, 22 nt, Human
uugaagaucuuugcauugcagg

SEQ ID NO: 618795 - RNA, 22 nt, Human
ccagcuggcccagcugugcucc

SEQ ID NO: 618796 - RNA, 22 nt, Human
ugcugaaauuagaacauugagg

SEQ ID NO: 618797 - RNA, 22 nt, Human
gaagaucagaguaagcuuuuua

SEQ ID NO: 618798 - RNA, 22 nt, Human
aagugggaauagaaaugaaggu

SEQ ID NO: 618799 - RNA, 22 nt, Human
cuuugggcaaagggccaauucg

SEQ ID NO: 618800 - RNA, 22 nt, Human
ggaugggcccgggacggcgcug

SEQ ID NO: 618801 - RNA, 20 nt, Human
uccaagcccuccuuccauuc

SEQ ID NO: 618802 - RNA, 22 nt, Human
agaaugugugauugaagcucuu

SEQ ID NO: 618803 - RNA, 23 nt, Human
ugcagccacucaggagcucagug

SEQ ID NO: 618804 - RNA, 22 nt, Human
cuggaagggaaaucucuuggca

SEQ ID NO: 618805 - RNA, 22 nt, Human
gaauuagacaugcuuugcuuuu

SEQ ID NO: 618806 - RNA, 22 nt, Human
cagggugccucccgcucgccgg

SEQ ID NO: 618807 - RNA, 22 nt, Human
ccaguguuuccgucaguacacg

SEQ ID NO: 618808 - RNA, 18 nt, Human
cuucauuuguagaguucc

SEQ ID NO: 618809 - RNA, 22 nt, Human
gcauuucugugcauacacauga

SEQ ID NO: 618810 - RNA, 22 nt, Human
acaguguuuuaugagaauuguu

SEQ ID NO: 618811 - RNA, 22 nt, Human
ugccagggcugcuacuggcuga

SEQ ID NO: 618812 - RNA, 22 nt, Human
caagguaguucuggucauugac

SEQ ID NO: 618813 - RNA, 22 nt, Human
ggcugcaggaacgacggagggg

SEQ ID NO: 618814 - RNA, 22 nt, Human
auaaugagcuuuugaauacuga

SEQ ID NO: 618815 - RNA, 22 nt, Human
ggagucuuaaaaaucaaaugga

SEQ ID NO: 618816 - RNA, 22 nt, Human
ccaguguuacggcuugaacuau

SEQ ID NO: 618817 - RNA, 22 nt, Human
uucaggugucaaggauaggcug

SEQ ID NO: 618818 - RNA, 22 nt, Human
gcuagcuuuauaaugcugggcg

SEQ ID NO: 618819 - RNA, 21 nt, Human
uucagcuuaugugucacuugc

SEQ ID NO: 618820 - RNA, 20 nt, Human
cucagcucuucagggcaagu

SEQ ID NO: 618821 - RNA, 22 nt, Human
ggugcagggagaggcaggcccc

SEQ ID NO: 618822 - RNA, 22 nt, Human
gcauaugaucacgugugucggu

SEQ ID NO: 618823 - RNA, 22 nt, Human
cucaaaagacuuaaacauaaga

SEQ ID NO: 618824 - RNA, 22 nt, Human
aagcacugagcacaguggcuga

SEQ ID NO: 618825 - RNA, 22 nt, Human
uacugugugauuccauuuacgu

SEQ ID NO: 618826 - RNA, 22 nt, Human
ugauuuaaaagaaacauugucu

SEQ ID NO: 618827 - RNA, 22 nt, Human
cagcuauuauuuucucuaaauu

SEQ ID NO: 618828 - RNA, 22 nt, Human
ucagcucucugggcucgaaccu

SEQ ID NO: 618829 - RNA, 22 nt, Human
guuuuggcucuggcauguggaa

SEQ ID NO: 618830 - RNA, 23 nt, Human
uuucacaaugagcauuacagaau

SEQ ID NO: 618831 - RNA, 23 nt, Human
uugagcucaguagcucugcuggu

SEQ ID NO: 618832 - RNA, 22 nt, Human
gggcauguacauaaucuagaaa

SEQ ID NO: 618833 - RNA, 23 nt, Human
agcuccagcugacgugggcagcc

SEQ ID NO: 618834 - RNA, 21 nt, Human
agcuggcucucucuggagaga

SEQ ID NO: 618835 - RNA, 22 nt, Human
uacuguguggugagcugucucc

SEQ ID NO: 618836 - RNA, 20 nt, Human
ugcugcuuugccacuaguug

SEQ ID NO: 618837 - RNA, 22 nt, Human
aauaugcauguauacaugugua

SEQ ID NO: 618838 - RNA, 22 nt, Human
ccagaggagcaggcuggcucca

SEQ ID NO: 618839 - RNA, 21 nt, Human
uggcaggcagcuggaagcuug

SEQ ID NO: 618840 - RNA, 22 nt, Human
uaauauuucuacccugcugccu

SEQ ID NO: 618841 - RNA, 21 nt, Human
ucccauuguuccccuccagug

SEQ ID NO: 618842 - RNA, 22 nt, Human
ugggccacggggguggagagcu

SEQ ID NO: 618843 - RNA, 22 nt, Human
ucagcaggcaggaggcaugcca

SEQ ID NO: 618844 - RNA, 18 nt, Human
uccagagcuacuguggug

SEQ ID NO: 618845 - RNA, 22 nt, Human
agagauugugcuacucacccaa

SEQ ID NO: 618846 - RNA, 22 nt, Human
uccuggguuaauuaugauucac

SEQ ID NO: 618847 - RNA, 22 nt, Human
gccacaggcacuuaagggcugg

SEQ ID NO: 618848 - RNA, 21 nt, Human
ggcccugguuacgccuccucu

SEQ ID NO: 618849 - RNA, 22 nt, Human
cauguguuaaucuuucugcaaa

SEQ ID NO: 618850 - RNA, 22 nt, Human
uguaagccuucccugagaaagu

SEQ ID NO: 618851 - RNA, 22 nt, Human
cagagccucucagaggucagac

SEQ ID NO: 618852 - RNA, 22 nt, Human
guccaggcugcccaggguccug

SEQ ID NO: 618853 - RNA, 22 nt, Human
accuguuuggaggagguguuag

SEQ ID NO: 618854 - RNA, 22 nt, Human
aguuccagaacuggaaaaggac

SEQ ID NO: 618855 - RNA, 22 nt, Human
ucugggagagcacguggcugac

SEQ ID NO: 618856 - RNA, 22 nt, Human
uccucccugaguggggacagcu

SEQ ID NO: 618857 - RNA, 19 nt, Human
agggcuuugugugcugcuc

SEQ ID NO: 618858 - RNA, 22 nt, Human
uuugcaaaugcucugcagagcu

SEQ ID NO: 618859 - RNA, 22 nt, Human
ugcaaguaacuuguuugggagg

SEQ ID NO: 618860 - RNA, 22 nt, Human
uguguggcaagcuguaugcuag

SEQ ID NO: 618861 - RNA, 22 nt, Human
ggcaggucaucaacuguaauuu

SEQ ID NO: 618862 - RNA, 22 nt, Human
acugaggacagugaggagggcu

SEQ ID NO: 618863 - RNA, 22 nt, Human
ccaguguggccaggugcuggua

SEQ ID NO: 618864 - RNA, 22 nt, Human
aaauggaguucuaaguauagua

SEQ ID NO: 618865 - RNA, 22 nt, Human
aagauauucaaagauuuauuag

SEQ ID NO: 618866 - RNA, 17 nt, Human
gcauguaguacauguaa

SEQ ID NO: 618867 - RNA, 22 nt, Human
auucauuugcuauuguguaugg

SEQ ID NO: 618868 - RNA, 22 nt, Human
gcaguguuuguguucucacaug

SEQ ID NO: 618869 - RNA, 22 nt, Human
ugggaguccaaggcaggcggau

SEQ ID NO: 618870 - RNA, 21 nt, Human
gggcagaggggccuccugggu

SEQ ID NO: 618871 - RNA, 18 nt, Human
aaauuagauggaccugug

SEQ ID NO: 618872 - RNA, 22 nt, Human
agggcugaguggugcagucaaa

SEQ ID NO: 618873 - RNA, 22 nt, Human
aggaagcauguuggauccacuu

SEQ ID NO: 618874 - RNA, 22 nt, Human
agcagccaaccuuacauucauc

SEQ ID NO: 618875 - RNA, 22 nt, Human
cauggccagggagagagaaugu

SEQ ID NO: 618876 - RNA, 22 nt, Human
acauuaacaccauaaguguguu

SEQ ID NO: 618877 - RNA, 22 nt, Human
acauuaacaccgugaguuuggu

SEQ ID NO: 618878 - RNA, 22 nt, Human
cccuuuaaguagaauauauuau

SEQ ID NO: 618879 - RNA, 22 nt, Human
acugggccuugccauggcagcc

SEQ ID NO: 618880 - RNA, 22 nt, Human
acauuuuuauucaucaaagcag

SEQ ID NO: 618881 - RNA, 22 nt, Human
uauguacauaacaugaaaugca

SEQ ID NO: 618882 - RNA, 20 nt, Human
ucagccuugaaugcuugaaa

SEQ ID NO: 618883 - RNA, 22 nt, Human
ggacaaaggguggagccucuga

SEQ ID NO: 618884 - RNA, 22 nt, Human
accagggcuuacagcaguagcu

SEQ ID NO: 618885 - RNA, 22 nt, Human
uuucagagaugcagaauucagg

SEQ ID NO: 618886 - RNA, 22 nt, Human
uugcccugucucacuauguuaa

SEQ ID NO: 618887 - RNA, 22 nt, Human
ugcuugcaagagaugcaaugac

SEQ ID NO: 618888 - RNA, 22 nt, Human
cagaggcgaggcagcugaaccu

SEQ ID NO: 618889 - RNA, 22 nt, Human
aauuuucacagugcugugagau

SEQ ID NO: 618890 - RNA, 22 nt, Human
agugacaaggugguaaugaagc

SEQ ID NO: 618891 - RNA, 22 nt, Human
guggagaggaacccagcucugu

SEQ ID NO: 618892 - RNA, 22 nt, Human
cuucaauaccugcguugcuagu

SEQ ID NO: 618893 - RNA, 22 nt, Human
cugggcugcaguuccugguccu

SEQ ID NO: 618894 - RNA, 22 nt, Human
gcugaggcucaagucauggguc

SEQ ID NO: 618895 - RNA, 22 nt, Human
caggcaggagccagggauucca

SEQ ID NO: 618896 - RNA, 22 nt, Human
cuuccuggcucggugccucacc

SEQ ID NO: 618897 - RNA, 22 nt, Human
cuggaagggucuacuuagcaga

SEQ ID NO: 618898 - RNA, 22 nt, Human
ucuuggcugcagagccggcaag

SEQ ID NO: 618899 - RNA, 22 nt, Human
ucuucuuuggaugaaagaauau

SEQ ID NO: 618900 - RNA, 22 nt, Human
ccagggaagauuagaagccacu

SEQ ID NO: 618901 - RNA, 22 nt, Human
caaaaggcaggggaaagagugc

SEQ ID NO: 618902 - RNA, 22 nt, Human
uggagucaucuuaaucuaggca

SEQ ID NO: 618903 - RNA, 22 nt, Human
ucucuucuuuggggugggcuca

SEQ ID NO: 618904 - RNA, 22 nt, Human
cucuuuuucaccucugucagcg

SEQ ID NO: 618905 - RNA, 22 nt, Human
agcacagauggauguauucauu

SEQ ID NO: 618906 - RNA, 22 nt, Human
cugagcugcucccgcugcagcg

SEQ ID NO: 618907 - RNA, 18 nt, Human
aggcugcacugucuuaaa

SEQ ID NO: 618908 - RNA, 22 nt, Human
gggcaaguccggugcccagagc

SEQ ID NO: 618909 - RNA, 22 nt, Human
acaggaaaugaaaugguaucua

SEQ ID NO: 618910 - RNA, 22 nt, Human
gaagguccagcguggccaaguc

SEQ ID NO: 618911 - RNA, 22 nt, Human
guccagugcuuauagaaucagu

SEQ ID NO: 618912 - RNA, 22 nt, Human
caggcugggacugaccccugcu

SEQ ID NO: 618913 - RNA, 22 nt, Human
uccugcaggccuguucccagua

SEQ ID NO: 618914 - RNA, 22 nt, Human
agaaagacgugaugaagaagua

SEQ ID NO: 618915 - RNA, 22 nt, Human
gugcagguuuaggaagcagcuc

SEQ ID NO: 618916 - RNA, 22 nt, Human
uguguucauguauguauacaua

SEQ ID NO: 618917 - RNA, 22 nt, Human
uagguucacacaucuuccagau

SEQ ID NO: 618918 - RNA, 22 nt, Human
aggaugagccgcgcaagcugac

SEQ ID NO: 618919 - RNA, 22 nt, Human
gguugguaacucccugugcagu

SEQ ID NO: 618920 - RNA, 22 nt, Human
ggaggugguggcagugacaauu

SEQ ID NO: 618921 - RNA, 18 nt, Human
gcucuggcucaccuccag

SEQ ID NO: 618922 - RNA, 22 nt, Human
ccugggagugucagacuugcuu

SEQ ID NO: 618923 - RNA, 22 nt, Human
agggggugaaugucugucuaca

SEQ ID NO: 618924 - RNA, 22 nt, Human
uucacaguggcccucucugagu

SEQ ID NO: 618925 - RNA, 22 nt, Human
aaagugggaacaauggagagug

SEQ ID NO: 618926 - RNA, 22 nt, Human
ccagaggcuggggaaggauaca

SEQ ID NO: 618927 - RNA, 22 nt, Human
cugcccugcuugaugacagcga

SEQ ID NO: 618928 - RNA, 22 nt, Human
cuggcuccaaauucugauguuc

SEQ ID NO: 618929 - RNA, 22 nt, Human
auuucuguggcuucauucuccu

SEQ ID NO: 618930 - RNA, 22 nt, Human
ccucuggcaacuucacagccca

SEQ ID NO: 618931 - RNA, 22 nt, Human
aaagccagaguguguuagagac

SEQ ID NO: 618932 - RNA, 22 nt, Human
agguccagguuccguuucugcg

SEQ ID NO: 618933 - RNA, 22 nt, Human
uccugggccuguacuccauccg

SEQ ID NO: 618934 - RNA, 22 nt, Human
ggcagguggaaguuggcagagc

SEQ ID NO: 618935 - RNA, 22 nt, Human
uccugagguggauugagcagag

SEQ ID NO: 618936 - RNA, 22 nt, Human
gcuggcuguuggagguaccugc

SEQ ID NO: 618937 - RNA, 22 nt, Human
guccagugacaaguagcuggcc

SEQ ID NO: 618938 - RNA, 22 nt, Human
uuccuccacgugacaggagcca

SEQ ID NO: 618939 - RNA, 22 nt, Human
gcggggggcaggcaguacguug

SEQ ID NO: 618940 - RNA, 23 nt, Human
gcagagucaaguagucaugagug

SEQ ID NO: 618941 - RNA, 22 nt, Human
gccuggaggggacagucucugg

SEQ ID NO: 618942 - RNA, 22 nt, Human
uaguguuuaguacauaugcaua

SEQ ID NO: 618943 - RNA, 22 nt, Human
cugcccugccuggccagugugg

SEQ ID NO: 618944 - RNA, 19 nt, Human
cagcucaguuugauucucu

SEQ ID NO: 618945 - RNA, 22 nt, Human
ccaggaguuugaggcugcagug

SEQ ID NO: 618946 - RNA, 22 nt, Human
cucccugcuuguuucccuucag

SEQ ID NO: 618947 - RNA, 22 nt, Human
cuucacaauucuaacagggcaa

SEQ ID NO: 618948 - RNA, 22 nt, Human
ugccuccuucaggagggcccgg

SEQ ID NO: 618949 - RNA, 22 nt, Human
ucuucuuugaaucauagugacc

SEQ ID NO: 618950 - RNA, 22 nt, Human
uugauucagaaaaagauggaga

SEQ ID NO: 618951 - RNA, 22 nt, Human
uuucuagaaacauuaucucuau

SEQ ID NO: 618952 - RNA, 22 nt, Human
accugccagaaugcuaguccug

SEQ ID NO: 618953 - RNA, 22 nt, Human
ccaguguuugaugggauuuuca

SEQ ID NO: 618954 - RNA, 22 nt, Human
uggaaacagaucauaacuaagc

SEQ ID NO: 618955 - RNA, 22 nt, Human
gcaaguagugggaaagaagaug

SEQ ID NO: 618956 - RNA, 22 nt, Human
gcccagcugagaagcgcggggc

SEQ ID NO: 618957 - RNA, 22 nt, Human
gcuggcuguguuucaucucuga

SEQ ID NO: 618958 - RNA, 23 nt, Human
cucaccaagcgccgccgcugugu

SEQ ID NO: 618959 - RNA, 22 nt, Human
uugcuuuuuaauuaggaggcag

SEQ ID NO: 618960 - RNA, 22 nt, Human
aauaugcagcaugaugaaguaa

SEQ ID NO: 618961 - RNA, 22 nt, Human
guaccagucucugugggcaccu

SEQ ID NO: 618962 - RNA, 20 nt, Human
cagugcaacugaagaacuga

SEQ ID NO: 618963 - RNA, 22 nt, Human
ggcaggcaacggaccacuaguc

SEQ ID NO: 618964 - RNA, 22 nt, Human
ggccaggcacugugugagauau

SEQ ID NO: 618965 - RNA, 22 nt, Human
uggaaacacucaagcuuauauu

SEQ ID NO: 618966 - RNA, 22 nt, Human
aauauagaaucacuuuccuuca

SEQ ID NO: 618967 - RNA, 22 nt, Human
ucacucucuaagcaugacagac

SEQ ID NO: 618968 - RNA, 18 nt, Human
ggccugaggauuucagca

SEQ ID NO: 618969 - RNA, 22 nt, Human
gugcaaaaaucuaucaccagca

SEQ ID NO: 618970 - RNA, 22 nt, Human
uuucuuuuacaguguggcuauu

SEQ ID NO: 618971 - RNA, 22 nt, Human
gaaauauuguacuggagauguu

SEQ ID NO: 618972 - RNA, 22 nt, Human
aaagauguuaugaaauaacuau

SEQ ID NO: 618973 - RNA, 22 nt, Human
guauuuuuaguagagucggggu

SEQ ID NO: 618974 - RNA, 22 nt, Human
gccaggcuaagaaaggugugau

SEQ ID NO: 618975 - RNA, 22 nt, Human
ccucuggcuguaccacuggcac

SEQ ID NO: 618976 - RNA, 22 nt, Human
uggaaggcuuugcuguccuugc

SEQ ID NO: 618977 - RNA, 22 nt, Human
gucagaggaauggaugagugau

SEQ ID NO: 618978 - RNA, 19 nt, Human
uggcagguagugagcaguc

SEQ ID NO: 618979 - RNA, 22 nt, Human
cuguggcugaacucugaagagg

SEQ ID NO: 618980 - RNA, 22 nt, Human
acaguguuuugucuggcagggc

SEQ ID NO: 618981 - RNA, 20 nt, Human
ggguccaggacucugaauuu

SEQ ID NO: 618982 - RNA, 22 nt, Human
gugcccugaugcaauugucuca

SEQ ID NO: 618983 - RNA, 22 nt, Human
uaacuucugcacagaaaauuug

SEQ ID NO: 618984 - RNA, 22 nt, Human
uccuaggaaguggaggcaccug

SEQ ID NO: 618985 - RNA, 22 nt, Human
gguccagaguccuugcuagaga

SEQ ID NO: 618986 - RNA, 22 nt, Human
acauacauggauucauggauuc

SEQ ID NO: 618987 - RNA, 22 nt, Human
auagcaaagccuggcacaauga

SEQ ID NO: 618988 - RNA, 22 nt, Human
auagcagaaaccaagcuucuuc

SEQ ID NO: 618989 - RNA, 22 nt, Human
ucagcaggcucugguugaccau

SEQ ID NO: 618990 - RNA, 22 nt, Human
aggcaguguauugcuagcggcu

SEQ ID NO: 618991 - RNA, 21 nt, Human
aguuuccucaacugcagaagg

SEQ ID NO: 618992 - RNA, 22 nt, Human
aaacuuguucucuugugccuau

SEQ ID NO: 618993 - RNA, 22 nt, Human
cagccucuaagcacagccucuc

SEQ ID NO: 618994 - RNA, 22 nt, Human
aguaacaaagugggagaaugau

SEQ ID NO: 618995 - RNA, 23 nt, Human
aggauguaggauguauggcagag

SEQ ID NO: 618996 - RNA, 22 nt, Human
cagguacacaggacaaaguacu

SEQ ID NO: 618997 - RNA, 22 nt, Human
ugcugggccaaagcaggguuuu

SEQ ID NO: 618998 - RNA, 22 nt, Human
ucaguguuggagauaauugcac

SEQ ID NO: 618999 - RNA, 22 nt, Human
cagguccaagguuccugaauag

SEQ ID NO: 619000 - RNA, 22 nt, Human
gggugccacagagcuuccacuu

SEQ ID NO: 619001 - RNA, 22 nt, Human
cuacagguaugugcaugacauc

SEQ ID NO: 619002 - RNA, 22 nt, Human
gagucugugguauuuuaucaua

SEQ ID NO: 619003 - RNA, 22 nt, Human
aggucacaggguugaaguacuu

SEQ ID NO: 619004 - RNA, 22 nt, Human
uguguucugaaggagaagagug

SEQ ID NO: 619005 - RNA, 22 nt, Human
acaacagagcuggacugagagg

SEQ ID NO: 619006 - RNA, 22 nt, Human
cagguggccuugccaucuccug

SEQ ID NO: 619007 - RNA, 22 nt, Human
uggagggcaugcuguccauggg

SEQ ID NO: 619008 - RNA, 22 nt, Human
gguggccaggccagcucuggcc

SEQ ID NO: 619009 - RNA, 22 nt, Human
accuguuuguguccauuaguga

SEQ ID NO: 619010 - RNA, 22 nt, Human
auuacuuucagaugugcuguaa

SEQ ID NO: 619011 - RNA, 22 nt, Human
uccugagggcgauucagcaggu

SEQ ID NO: 619012 - RNA, 22 nt, Human
uagugcaaaggucuugcaccag

SEQ ID NO: 619013 - RNA, 22 nt, Human
gcugaggcucaauccccuucug

SEQ ID NO: 619014 - RNA, 22 nt, Human
gcuguggcuuucuguuucuguu

SEQ ID NO: 619015 - RNA, 22 nt, Human
ugugugaacauguuuucauuuc

SEQ ID NO: 619016 - RNA, 22 nt, Human
guguccugccacccugggcuuu

SEQ ID NO: 619017 - RNA, 22 nt, Human
uccugguggugccagcugcagg

SEQ ID NO: 619018 - RNA, 22 nt, Human
gccugggagauuaauuaggaag

SEQ ID NO: 619019 - RNA, 21 nt, Human
ugaaacaaucagacagagucu

SEQ ID NO: 619020 - RNA, 17 nt, Human
caguggucugagguaug

SEQ ID NO: 619021 - RNA, 22 nt, Human
cugcccuggcagccuaccaugg

SEQ ID NO: 619022 - RNA, 21 nt, Human
agcaggucuacagguucauag

SEQ ID NO: 619023 - RNA, 22 nt, Human
ggcuuuauaggguagaggauca

SEQ ID NO: 619024 - RNA, 20 nt, Human
uccuggagcugcuugaauuc

SEQ ID NO: 619025 - RNA, 19 nt, Human
uccugcagaccagaccugu

SEQ ID NO: 619026 - RNA, 22 nt, Human
ggcaggucagguccaugaccaa

SEQ ID NO: 619027 - RNA, 23 nt, Human
ugaggaccucucaggggccaggc

SEQ ID NO: 619028 - RNA, 18 nt, Human
agcuggcccuggcugccg

SEQ ID NO: 619029 - RNA, 22 nt, Human
cuuggacuuuagucucucucca

SEQ ID NO: 619030 - RNA, 19 nt, Human
agccaggguccagacaugu

SEQ ID NO: 619031 - RNA, 22 nt, Human
uuuuauuaucuuugaaugggac

SEQ ID NO: 619032 - RNA, 22 nt, Human
ugccucugugugcaggugagca

SEQ ID NO: 619033 - RNA, 22 nt, Human
ucaaaaauguuuuauauuggua

SEQ ID NO: 619034 - RNA, 22 nt, Human
ggcuuuauguuuuucauguggu

SEQ ID NO: 619035 - RNA, 22 nt, Human
ugcaaguaugacagccccaugg

SEQ ID NO: 619036 - RNA, 22 nt, Human
ugaagcaggugaauggaugucg

SEQ ID NO: 619037 - RNA, 22 nt, Human
ggcucuucuguuucacaggcca

SEQ ID NO: 619038 - RNA, 19 nt, Human
cgccuggcaggcccugcgc

SEQ ID NO: 619039 - RNA, 22 nt, Human
ccagguggcuucugcccgaugu

SEQ ID NO: 619040 - RNA, 22 nt, Human
ccagaggaugcuggucagccuc

SEQ ID NO: 619041 - RNA, 22 nt, Human
gcagggugacguugcccaccuc

SEQ ID NO: 619042 - RNA, 22 nt, Human
ucuguuuugugucucucuggug

SEQ ID NO: 619043 - RNA, 22 nt, Human
ccuugugcagguucaugauggg

SEQ ID NO: 619044 - RNA, 22 nt, Human
uuuguugaguuacagagaugaa

SEQ ID NO: 619045 - RNA, 22 nt, Human
ccagugugaaccucaccacccu

SEQ ID NO: 619046 - RNA, 22 nt, Human
uaaguagacuguugaacuuggu

SEQ ID NO: 619047 - RNA, 22 nt, Human
auguccagaggugagucagagc

SEQ ID NO: 619048 - RNA, 22 nt, Human
ugauucaacuuucuugaaugca

SEQ ID NO: 619049 - RNA, 22 nt, Human
uggacuccagugucuguguucu

SEQ ID NO: 619050 - RNA, 22 nt, Human
agccagggaugcagcacaguga

SEQ ID NO: 619051 - RNA, 22 nt, Human
ugcacuccaggcugggugacag

SEQ ID NO: 619052 - RNA, 22 nt, Human
aagaaaacaaugacuugccagc

SEQ ID NO: 619053 - RNA, 22 nt, Human
augugugugcauuucucucccu

SEQ ID NO: 619054 - RNA, 22 nt, Human
agugggagcggcagucggggac

SEQ ID NO: 619055 - RNA, 22 nt, Human
acuggacagaggaaauauggag

SEQ ID NO: 619056 - RNA, 22 nt, Human
cuguggcuucugggucaguuca

SEQ ID NO: 619057 - RNA, 22 nt, Human
uuuguauaagaacauucuagca

SEQ ID NO: 619058 - RNA, 22 nt, Human
guuuuauaggugaaauauuacu

SEQ ID NO: 619059 - RNA, 22 nt, Human
cuccugcugaauggccaggagc

SEQ ID NO: 619060 - RNA, 22 nt, Human
caggcucacuuucucagucaca

SEQ ID NO: 619061 - RNA, 22 nt, Human
gaagccagauuaucacaagcca

SEQ ID NO: 619062 - RNA, 22 nt, Human
uugacguccucgauggggaacu

SEQ ID NO: 619063 - RNA, 22 nt, Human
gcuggaaggcuaggcucaguug

SEQ ID NO: 619064 - RNA, 22 nt, Human
caggccaggugcucuagaauca

SEQ ID NO: 619065 - RNA, 22 nt, Human
guccuggggauacagaagugaa

SEQ ID NO: 619066 - RNA, 22 nt, Human
cgguccagagcuaguucauugc

SEQ ID NO: 619067 - RNA, 22 nt, Human
ccuggcacugaccaggcacuga

SEQ ID NO: 619068 - RNA, 22 nt, Human
aaagcacaugaguaguguagua

SEQ ID NO: 619069 - RNA, 22 nt, Human
uggcaggaaauacccugccuag

SEQ ID NO: 619070 - RNA, 22 nt, Human
gagcagcuugcgcugucuucac

SEQ ID NO: 619071 - RNA, 22 nt, Human
aggagggcaggcuggcugccua

SEQ ID NO: 619072 - RNA, 22 nt, Human
uucagaaagugaaucuuguuau

SEQ ID NO: 619073 - RNA, 22 nt, Human
uuccaugugaguacacugugau

SEQ ID NO: 619074 - RNA, 22 nt, Human
agcagggaggucuagcacgugg

SEQ ID NO: 619075 - RNA, 22 nt, Human
gcgggggcggcgcagaccucag

SEQ ID NO: 619076 - RNA, 22 nt, Human
augacuucugcaaggucauuug

SEQ ID NO: 619077 - RNA, 22 nt, Human
aucucuggccuuccuuuuccaa

SEQ ID NO: 619078 - RNA, 22 nt, Human
cagguucccuugcagcuaagug

SEQ ID NO: 619079 - RNA, 22 nt, Human
aaacacuucuuaggucuuaagu

SEQ ID NO: 619080 - RNA, 22 nt, Human
uuaaaaugcagauuaugacuca

SEQ ID NO: 619081 - RNA, 22 nt, Human
uuuccuugccuccuguccuucu

SEQ ID NO: 619082 - RNA, 22 nt, Human
aguuucuuuagauagaaaguuc

SEQ ID NO: 619083 - RNA, 22 nt, Human
uggcaggugccuguaaucucag

SEQ ID NO: 619084 - RNA, 22 nt, Human
cugggcaggagggcucuaugga

SEQ ID NO: 619085 - RNA, 22 nt, Human
caggcccauaaugcaaauauuu

SEQ ID NO: 619086 - RNA, 17 nt, Human
uccagagcacagagcuc

SEQ ID NO: 619087 - RNA, 22 nt, Human
acucagaguuuuacccagagac

SEQ ID NO: 619088 - RNA, 22 nt, Human
guccagcccgggcuccgccagc

SEQ ID NO: 619089 - RNA, 22 nt, Human
uguggagcucagaaguagcagu

SEQ ID NO: 619090 - RNA, 22 nt, Human
caacugaaaagauucuacgcag

SEQ ID NO: 619091 - RNA, 22 nt, Human
agguucaguaaauguuaguuga

SEQ ID NO: 619092 - RNA, 22 nt, Human
uuguuucugaguuuucauguau

SEQ ID NO: 619093 - RNA, 17 nt, Human
ugguccagguggagcca

SEQ ID NO: 619094 - RNA, 22 nt, Human
ucuguggcuuccuauuucuugg

SEQ ID NO: 619095 - RNA, 22 nt, Human
uuuacaaguuuacagaaugaug

SEQ ID NO: 619096 - RNA, 22 nt, Human
ccuuuaaagacugcauaacuuc

SEQ ID NO: 619097 - RNA, 22 nt, Human
ggcaagucaggaaguugacauu

SEQ ID NO: 619098 - RNA, 22 nt, Human
aggucaaggcugcagugagcug

SEQ ID NO: 619099 - RNA, 22 nt, Human
gacccugauaggaguagaagaa

SEQ ID NO: 619100 - RNA, 23 nt, Human
agcuccagaacauagcacaggaa

SEQ ID NO: 619101 - RNA, 22 nt, Human
gaugcgggcccgcuccacugcc

SEQ ID NO: 619102 - RNA, 22 nt, Human
aggucuaggagucugaaaguau

SEQ ID NO: 619103 - RNA, 22 nt, Human
gccaggcuggugucacaacucu

SEQ ID NO: 619104 - RNA, 22 nt, Human
cucccugugucuucacuuggcc

SEQ ID NO: 619105 - RNA, 22 nt, Human
uccuguuuaggcuguggucugg

SEQ ID NO: 619106 - RNA, 19 nt, Human
ucucuucucccugguuuua

SEQ ID NO: 619107 - RNA, 22 nt, Human
agggaaauaaucuauucugagg

SEQ ID NO: 619108 - RNA, 22 nt, Human
gaggagagaagcuaacggugcu

SEQ ID NO: 619109 - RNA, 17 nt, Human
ccaggugggaggugggg

SEQ ID NO: 619110 - RNA, 18 nt, Human
uggcagguccagcugugg

SEQ ID NO: 619111 - RNA, 22 nt, Human
cuacaggucaagcaguagcucu

SEQ ID NO: 619112 - RNA, 22 nt, Human
auccugggaaguggccuccucc

SEQ ID NO: 619113 - RNA, 22 nt, Human
aacaucugaucgaacagugcca

SEQ ID NO: 619114 - RNA, 18 nt, Human
aaguagaucaugagccac

SEQ ID NO: 619115 - RNA, 22 nt, Human
aggagaauuaggaacucaagau

SEQ ID NO: 619116 - RNA, 22 nt, Human
aagcagcuuucuuuccugugaa

SEQ ID NO: 619117 - RNA, 22 nt, Human
uauugaauuagacccuaaaaug

SEQ ID NO: 619118 - RNA, 22 nt, Human
agguacagggugaaaguuuaug

SEQ ID NO: 619119 - RNA, 22 nt, Human
cuccagugagugagcaggcgac

SEQ ID NO: 619120 - RNA, 22 nt, Human
guuuguugauaugccccuuugu

SEQ ID NO: 619121 - RNA, 22 nt, Human
auggccagucaagccucuggcu

SEQ ID NO: 619122 - RNA, 22 nt, Human
acacacaauuaguuuuaugcuu

SEQ ID NO: 619123 - RNA, 22 nt, Human
auacaguagacaaucucaugaa

SEQ ID NO: 619124 - RNA, 22 nt, Human
gcuuccucccugcugcucacua

SEQ ID NO: 619125 - RNA, 22 nt, Human
aggcaggugcuuaugacuugcu

SEQ ID NO: 619126 - RNA, 22 nt, Human
ucauuucugagccuuccaugau

SEQ ID NO: 619127 - RNA, 23 nt, Human
ggccacugaauuuucugcaucuu

SEQ ID NO: 619128 - RNA, 22 nt, Human
uuggaagggaaccgaguuugcu

SEQ ID NO: 619129 - RNA, 21 nt, Human
ccucugugcuaaagggcuccc

SEQ ID NO: 619130 - RNA, 22 nt, Human
cuucauuucaggcugaagaaua

SEQ ID NO: 619131 - RNA, 22 nt, Human
caucucaguguacagggagucu

SEQ ID NO: 619132 - RNA, 23 nt, Human
guccuagugcuuggugcccaggc

SEQ ID NO: 619133 - RNA, 22 nt, Human
uuuucaggugcaguaaucauau

SEQ ID NO: 619134 - RNA, 22 nt, Human
uuagaggugucaggagcacagg

SEQ ID NO: 619135 - RNA, 22 nt, Human
uuugcaaauaaauaagugcucg

SEQ ID NO: 619136 - RNA, 22 nt, Human
aaggcaggaugggaaaagauuu

SEQ ID NO: 619137 - RNA, 22 nt, Human
gccugggauuguguaagugaau

SEQ ID NO: 619138 - RNA, 22 nt, Human
ccugcagggugcugccacagau

SEQ ID NO: 619139 - RNA, 20 nt, Human
agguccuguuccuugucucc

SEQ ID NO: 619140 - RNA, 21 nt, Human
uuguuuccucccaaaaugcca

SEQ ID NO: 619141 - RNA, 21 nt, Human
ggcuggacaucccaggagacu

SEQ ID NO: 619142 - RNA, 22 nt, Human
gagaaugggaaugaaaguagca

SEQ ID NO: 619143 - RNA, 23 nt, Human
ucccuguguacagccugcaugag

SEQ ID NO: 619144 - RNA, 22 nt, Human
gccagaggcccaaggacagcug

SEQ ID NO: 619145 - RNA, 22 nt, Human
ugggagagugcucaaugugcaa

SEQ ID NO: 619146 - RNA, 22 nt, Human
aaauggcuacaagaugugcucu

SEQ ID NO: 619147 - RNA, 22 nt, Human
ugauuuuuagcuauucugaaga

SEQ ID NO: 619148 - RNA, 22 nt, Human
aaagucacuuccuucugucagc

SEQ ID NO: 619149 - RNA, 22 nt, Human
uauuauuaaauggcagaauuuu

SEQ ID NO: 619150 - RNA, 22 nt, Human
agaauauucaucuguauucuua

SEQ ID NO: 619151 - RNA, 22 nt, Human
uugaagucaguucauauuuuua

SEQ ID NO: 619152 - RNA, 22 nt, Human
aaacucuggauuggaguccagc

SEQ ID NO: 619153 - RNA, 16 nt, Human
uggcagguuuuuaucu

SEQ ID NO: 619154 - RNA, 22 nt, Human
cagaagcuuugucuagucuuga

SEQ ID NO: 619155 - RNA, 22 nt, Human
ucaaaacacuauuaccuuuaau

SEQ ID NO: 619156 - RNA, 22 nt, Human
ccugugucaucagcuguggcua

SEQ ID NO: 619157 - RNA, 18 nt, Human
augugagagaaucuucuu

SEQ ID NO: 619158 - RNA, 19 nt, Human
ggcagguagagggccaguc

SEQ ID NO: 619159 - RNA, 22 nt, Human
ugauucaauaggaauugaguag

SEQ ID NO: 619160 - RNA, 22 nt, Human
cugggcugucaauggcccucug

SEQ ID NO: 619161 - RNA, 22 nt, Human
agauugucauugacgaugagca

SEQ ID NO: 619162 - RNA, 22 nt, Human
cuguggaguggggaguacuggu

SEQ ID NO: 619163 - RNA, 22 nt, Human
aaauaagaaauucuucuuugca

SEQ ID NO: 619164 - RNA, 22 nt, Human
ccucccugcuccucaacuggca

SEQ ID NO: 619165 - RNA, 22 nt, Human
aaaaguaauugaugcaaucgua

SEQ ID NO: 619166 - RNA, 22 nt, Human
cauuuguucugauuucaaaagg

SEQ ID NO: 619167 - RNA, 22 nt, Human
ggucaggggcugcucuacagag

SEQ ID NO: 619168 - RNA, 22 nt, Human
cugggcuggacacacuuaaccu

SEQ ID NO: 619169 - RNA, 22 nt, Human
uauuuuacaugauccagaguug

SEQ ID NO: 619170 - RNA, 22 nt, Human
ugcccccugguggccagagccg

SEQ ID NO: 619171 - RNA, 23 nt, Human
aggaggaaaaguuaucugcugag

SEQ ID NO: 619172 - RNA, 22 nt, Human
aggucucacuuuguggaaguga

SEQ ID NO: 619173 - RNA, 22 nt, Human
agccuucagcaguucaggugcc

SEQ ID NO: 619174 - RNA, 19 nt, Human
uggcaggcccaggauggac

SEQ ID NO: 619175 - RNA, 18 nt, Human
auccugggccagucuuuc

SEQ ID NO: 619176 - RNA, 22 nt, Human
cagauaauaauaugacuucacu

SEQ ID NO: 619177 - RNA, 21 nt, Human
ucccacugccacagcuucagg

SEQ ID NO: 619178 - RNA, 20 nt, Human
caguccugcaggcgggagaa

SEQ ID NO: 619179 - RNA, 19 nt, Human
ggcaggcuggauagagagg

SEQ ID NO: 619180 - RNA, 22 nt, Human
uuugucuucccccuuuaaucag

SEQ ID NO: 619181 - RNA, 22 nt, Human
gaagaccacccccuacagcaca

SEQ ID NO: 619182 - RNA, 22 nt, Human
ugucaaaaauaagagagauugu

SEQ ID NO: 619183 - RNA, 22 nt, Human
ucuacagugucaaugugucuug

SEQ ID NO: 619184 - RNA, 22 nt, Human
auggaagguccuacagagcgca

SEQ ID NO: 619185 - RNA, 22 nt, Human
ugugugaauggauuauucuauu

SEQ ID NO: 619186 - RNA, 22 nt, Human
cagaaauguuuguuaauauugu

SEQ ID NO: 619187 - RNA, 22 nt, Human
gugcaaguccagaaagaacucu

SEQ ID NO: 619188 - RNA, 22 nt, Human
cacaguggcaaaggggcuuggg

SEQ ID NO: 619189 - RNA, 21 nt, Human
guagauaaagcauuuucauua

SEQ ID NO: 619190 - RNA, 22 nt, Human
uuucuguuaggcaucauuuuaa

SEQ ID NO: 619191 - RNA, 22 nt, Human
acaguguuuaaaauaauaugcu

SEQ ID NO: 619192 - RNA, 22 nt, Human
uagagaaacagaaccaacaggg

SEQ ID NO: 619193 - RNA, 20 nt, Human
caguccugccccuuggggac

SEQ ID NO: 619194 - RNA, 22 nt, Human
auugaagauuaaaugcuuccuu

SEQ ID NO: 619195 - RNA, 22 nt, Human
gcccuuuguggucagaggccug

SEQ ID NO: 619196 - RNA, 22 nt, Human
gcaccaugauggagccucauua

SEQ ID NO: 619197 - RNA, 22 nt, Human
uguguguuaucuuaguucaucu

SEQ ID NO: 619198 - RNA, 19 nt, Human
cuggccuguguccugugcu

SEQ ID NO: 619199 - RNA, 22 nt, Human
ucucugagcccaauguagcaau

SEQ ID NO: 619200 - RNA, 22 nt, Human
gaggcaguaauugugggcaaua

SEQ ID NO: 619201 - RNA, 22 nt, Human
aaguuuguucauucauucaucc

SEQ ID NO: 619202 - RNA, 22 nt, Human
uggcagguccacucacagaucu

SEQ ID NO: 619203 - RNA, 22 nt, Human
cauauucuguuggucacauaga

SEQ ID NO: 619204 - RNA, 22 nt, Human
guccugggccugcugaggcuga

SEQ ID NO: 619205 - RNA, 22 nt, Human
ggcacuuuucuccccggucaug

SEQ ID NO: 619206 - RNA, 22 nt, Human
aaguuuguagcuggaugucugu

SEQ ID NO: 619207 - RNA, 22 nt, Human
aaguccuguuccucauacuucc

SEQ ID NO: 619208 - RNA, 22 nt, Human
cugcccucccaguugguccgug

SEQ ID NO: 619209 - RNA, 22 nt, Human
agccagggacgcugcaggcuac

SEQ ID NO: 619210 - RNA, 22 nt, Human
agagccugggcagcuccucugg

SEQ ID NO: 619211 - RNA, 22 nt, Human
acuccuggguugcaguccucaa

SEQ ID NO: 619212 - RNA, 22 nt, Human
accugccagaauccaagccaca

SEQ ID NO: 619213 - RNA, 22 nt, Human
gcauggccauggcacuauggac

SEQ ID NO: 619214 - RNA, 22 nt, Human
aguggcaauguagagagugauc

SEQ ID NO: 619215 - RNA, 20 nt, Human
uuauuuguuuacuuuggucc

SEQ ID NO: 619216 - RNA, 22 nt, Human
acagguccuuauaagagcacuc

SEQ ID NO: 619217 - RNA, 22 nt, Human
auguguaugagugugcuucuuu

SEQ ID NO: 619218 - RNA, 22 nt, Human
ugcaagaaugacccaucuaccc

SEQ ID NO: 619219 - RNA, 22 nt, Human
ucugcauauuguuaauggaaug

SEQ ID NO: 619220 - RNA, 19 nt, Human
ucuggcugccaaggauuga

SEQ ID NO: 619221 - RNA, 22 nt, Human
agcaggaaagaaaaaucugugu

SEQ ID NO: 619222 - RNA, 22 nt, Human
ucuggcccugcugcugugagca

SEQ ID NO: 619223 - RNA, 22 nt, Human
gcaguguugagccagcuggggg

SEQ ID NO: 619224 - RNA, 22 nt, Human
uagguucacuuagcugugggaa

SEQ ID NO: 619225 - RNA, 22 nt, Human
uugaaaaguuuugaaacacucu

SEQ ID NO: 619226 - RNA, 22 nt, Human
aguuucauauuaccaugucacc

SEQ ID NO: 619227 - RNA, 22 nt, Human
ggagccagaggcugcugcugug

SEQ ID NO: 619228 - RNA, 22 nt, Human
uuccugggacuggagcagccca

SEQ ID NO: 619229 - RNA, 22 nt, Human
auccugggcaguuuugagugcu

SEQ ID NO: 619230 - RNA, 22 nt, Human
cauuugcuguauuuucagauuc

SEQ ID NO: 619231 - RNA, 22 nt, Human
uccucacauggugagccacaca

SEQ ID NO: 619232 - RNA, 22 nt, Human
cuuuuacaguggaccugccauu

SEQ ID NO: 619233 - RNA, 22 nt, Human
ccucucccacguggcagaggcu

SEQ ID NO: 619234 - RNA, 22 nt, Human
augcaaaauuaccauucuguuc

SEQ ID NO: 619235 - RNA, 23 nt, Human
agcacaaaguguuuuccuuguag

SEQ ID NO: 619236 - RNA, 22 nt, Human
ucaguguuuauugcggugugua

SEQ ID NO: 619237 - RNA, 22 nt, Human
acaaaggacugaaacuggcugu

SEQ ID NO: 619238 - RNA, 22 nt, Human
uagugucagcaucucauugagc

SEQ ID NO: 619239 - RNA, 21 nt, Human
gcuggcugucccagggaagca

SEQ ID NO: 619240 - RNA, 22 nt, Human
ggcaggugcuaagagagguaaa

SEQ ID NO: 619241 - RNA, 22 nt, Human
uugcccugucaguagaagugca

SEQ ID NO: 619242 - RNA, 21 nt, Human
ugcacuuugggggacaggcug

SEQ ID NO: 619243 - RNA, 22 nt, Human
gcucuggcuacuguggcuaccg

SEQ ID NO: 619244 - RNA, 22 nt, Human
ccagacaggaacacacaucucc

SEQ ID NO: 619245 - RNA, 22 nt, Human
cuguggcugccucaccuacagg

SEQ ID NO: 619246 - RNA, 22 nt, Human
cuccugggcucaagugauccuc

SEQ ID NO: 619247 - RNA, 22 nt, Human
ccugcaggcugcaggccaguuc

SEQ ID NO: 619248 - RNA, 22 nt, Human
auacaaagacaaaucucaaucu

SEQ ID NO: 619249 - RNA, 22 nt, Human
cugugcuuguguucauuguuaa

SEQ ID NO: 619250 - RNA, 22 nt, Human
caguuucuuaagacugagaucu

SEQ ID NO: 619251 - RNA, 22 nt, Human
uuuuggcucugucuguaucuuu

SEQ ID NO: 619252 - RNA, 22 nt, Human
cuguggcuaauaauuaguauuu

SEQ ID NO: 619253 - RNA, 22 nt, Human
auuccucauuuguugagaacca

SEQ ID NO: 619254 - RNA, 22 nt, Human
agagaaugcagggcuucggaca

SEQ ID NO: 619255 - RNA, 22 nt, Human
gaucuugaaauaucuuuuccua

SEQ ID NO: 619256 - RNA, 21 nt, Human
ugucuuuggccucauucccag

SEQ ID NO: 619257 - RNA, 22 nt, Human
uagcagagguaaguguggcaau

SEQ ID NO: 619258 - RNA, 22 nt, Human
ggcaccuggauguagcagugaa

SEQ ID NO: 619259 - RNA, 22 nt, Human
ucuuggaacuuauuauuguaga

SEQ ID NO: 619260 - RNA, 22 nt, Human
uccugcagugugucuccugcac

SEQ ID NO: 619261 - RNA, 22 nt, Human
ugggcucuagacuuuagugugg

SEQ ID NO: 619262 - RNA, 22 nt, Human
gguggccauucuaccgccuucu

SEQ ID NO: 619263 - RNA, 22 nt, Human
ucaguguuggucaagaaucagu

SEQ ID NO: 619264 - RNA, 22 nt, Human
cucuggcuccauuucccuaugu

SEQ ID NO: 619265 - RNA, 22 nt, Human
ccugggcaauauagugaggccc

SEQ ID NO: 619266 - RNA, 22 nt, Human
uccuucuuugacaaguggcaga

SEQ ID NO: 619267 - RNA, 22 nt, Human
uuucagagucagcuccucucua

SEQ ID NO: 619268 - RNA, 22 nt, Human
ggcggggguccaggagccugca

SEQ ID NO: 619269 - RNA, 22 nt, Human
auuuguugcuagcagcacugau

SEQ ID NO: 619270 - RNA, 22 nt, Human
guucugucugagcaccacagga

SEQ ID NO: 619271 - RNA, 22 nt, Human
aggagaggcaucaagaaaaucg

SEQ ID NO: 619272 - RNA, 22 nt, Human
gccagcugaaauuucaguucug

SEQ ID NO: 619273 - RNA, 22 nt, Human
ucaaaaaguugaagaguugggg

SEQ ID NO: 619274 - RNA, 22 nt, Human
uugcuuuucccugucucugauu

SEQ ID NO: 619275 - RNA, 22 nt, Human
agggaucacgguggacuuggau

SEQ ID NO: 619276 - RNA, 21 nt, Human
gugcagaggaauguagggggc

SEQ ID NO: 619277 - RNA, 22 nt, Human
uuguauuaauugaaaugaaugc

SEQ ID NO: 619278 - RNA, 22 nt, Human
agcuggcuaugcccugugaacc

SEQ ID NO: 619279 - RNA, 22 nt, Human
uagugcaagguuuugccaacuu

SEQ ID NO: 619280 - RNA, 22 nt, Human
ucacuggggcccacaucaacau

SEQ ID NO: 619281 - RNA, 22 nt, Human
caggcugggcugguguuagagu

SEQ ID NO: 619282 - RNA, 23 nt, Human
caggcaggaugaggacuacacuc

SEQ ID NO: 619283 - RNA, 22 nt, Human
caggcuggacauuagauacaua

SEQ ID NO: 619284 - RNA, 19 nt, Human
cugcagggaugugcagagu

SEQ ID NO: 619285 - RNA, 22 nt, Human
uccugggcuugcuccuccagcu

SEQ ID NO: 619286 - RNA, 22 nt, Human
guuuucugauuagcaaaucuga

SEQ ID NO: 619287 - RNA, 23 nt, Human
caguggucagaacgugggagggu

SEQ ID NO: 619288 - RNA, 22 nt, Human
aguuuagaagaggaacuuguua

SEQ ID NO: 619289 - RNA, 22 nt, Human
uuaaaugacgggacuggguuuu

SEQ ID NO: 619290 - RNA, 22 nt, Human
auuggucaccucccucagcucu

SEQ ID NO: 619291 - RNA, 22 nt, Human
ccagcuccagcauagccaccau

SEQ ID NO: 619292 - RNA, 22 nt, Human
agagccaggcucccauggggca

SEQ ID NO: 619293 - RNA, 22 nt, Human
gccggggcuggggagagacaug

SEQ ID NO: 619294 - RNA, 22 nt, Human
uggauauccuuguuaacuuucu

SEQ ID NO: 619295 - RNA, 22 nt, Human
agcagagacaugaaauaugcuu

SEQ ID NO: 619296 - RNA, 18 nt, Human
aguccuggagaucaccaa

SEQ ID NO: 619297 - RNA, 22 nt, Human
aaaauagguacggauuagaaug

SEQ ID NO: 619298 - RNA, 22 nt, Human
uuggaaauguagaaaagcagau

SEQ ID NO: 619299 - RNA, 22 nt, Human
gcagggcaucccugagcgggug

SEQ ID NO: 619300 - RNA, 22 nt, Human
gaggcaggcacuguuaucagca

SEQ ID NO: 619301 - RNA, 22 nt, Human
ugagucaugggcuugagguuac

SEQ ID NO: 619302 - RNA, 22 nt, Human
uuaccuaaaauagcucaauuua

SEQ ID NO: 619303 - RNA, 22 nt, Human
caucucuucauuagcauuauug

SEQ ID NO: 619304 - RNA, 22 nt, Human
uccucagcuuugguuuacucau

SEQ ID NO: 619305 - RNA, 22 nt, Human
aaagccuucuucggucugugau

SEQ ID NO: 619306 - RNA, 22 nt, Human
aaacucugcacugcgguaaggu

SEQ ID NO: 619307 - RNA, 22 nt, Human
gggcgcagccaauccuggcccu

SEQ ID NO: 619308 - RNA, 22 nt, Human
cugcccuggguuuuaugggagu

SEQ ID NO: 619309 - RNA, 22 nt, Human
ccugggcucaccaugccuugga

SEQ ID NO: 619310 - RNA, 22 nt, Human
gacacagggacgugcucugccu

SEQ ID NO: 619311 - RNA, 22 nt, Human
ugcccugggaggcuuuccuguu

SEQ ID NO: 619312 - RNA, 22 nt, Human
ugcagccauuugaaaagcaguu

SEQ ID NO: 619313 - RNA, 22 nt, Human
guggcaggaucacggcucacug

SEQ ID NO: 619314 - RNA, 22 nt, Human
acaaugcaccagcaucuucacc

SEQ ID NO: 619315 - RNA, 22 nt, Human
aacaaaguagcugcuguucuua

SEQ ID NO: 619316 - RNA, 22 nt, Human
cuguaaauaugaagaauauaug

SEQ ID NO: 619317 - RNA, 22 nt, Human
agcugccuggagucauuuccug

SEQ ID NO: 619318 - RNA, 22 nt, Human
agcucagcccuccugugcagcu

SEQ ID NO: 619319 - RNA, 22 nt, Human
caggcaaggaggcacugaggga

SEQ ID NO: 619320 - RNA, 23 nt, Human
aacuccugaaucgugagccaucu

SEQ ID NO: 619321 - RNA, 22 nt, Human
gcugcccugugguccagcaggu

SEQ ID NO: 619322 - RNA, 22 nt, Human
ccagccucacuggcaucaccua

SEQ ID NO: 619323 - RNA, 22 nt, Human
gggcagguggcagggucucugg

SEQ ID NO: 619324 - RNA, 19 nt, Human
agcucuuugcugcauucca

SEQ ID NO: 619325 - RNA, 22 nt, Human
gcuggcugcgucaucacagggc

SEQ ID NO: 619326 - RNA, 22 nt, Human
aauuccagcuaggaaaagcuuc

SEQ ID NO: 619327 - RNA, 22 nt, Human
aggaaaggccucagcagaaacc

SEQ ID NO: 619328 - RNA, 22 nt, Human
ccuuuugcucucccauccagaa

SEQ ID NO: 619329 - RNA, 22 nt, Human
gaugcagggcuggcaggagcuu

SEQ ID NO: 619330 - RNA, 21 nt, Human
caaaagagacugauucuugga

SEQ ID NO: 619331 - RNA, 22 nt, Human
ugguccagacuuugaccucuca

SEQ ID NO: 619332 - RNA, 22 nt, Human
uccuggcccggccgggccugcu

SEQ ID NO: 619333 - RNA, 22 nt, Human
uaaaaaguagugagaauggcgc

SEQ ID NO: 619334 - RNA, 22 nt, Human
uuuccucugacugcuccccugc

SEQ ID NO: 619335 - RNA, 22 nt, Human
guguggcuagaagugucuuguu

SEQ ID NO: 619336 - RNA, 22 nt, Human
cagguccaguaaaaagaguccu

SEQ ID NO: 619337 - RNA, 22 nt, Human
gugcccugacacaccuggugug

SEQ ID NO: 619338 - RNA, 20 nt, Human
uccuggccuucucgggcagu

SEQ ID NO: 619339 - RNA, 20 nt, Human
agcugccuucauuuucuaga

SEQ ID NO: 619340 - RNA, 22 nt, Human
cccagugucucuugugccuuuc

SEQ ID NO: 619341 - RNA, 22 nt, Human
gcagaagucagaccaucugaau

SEQ ID NO: 619342 - RNA, 22 nt, Human
uuagauaccuuuguguuguaga

SEQ ID NO: 619343 - RNA, 22 nt, Human
ucuguccagcucuggggcucac

SEQ ID NO: 619344 - RNA, 22 nt, Human
uaacagaaaggggacagaaaua

SEQ ID NO: 619345 - RNA, 22 nt, Human
ugaggcaggaauggggaaaagu

SEQ ID NO: 619346 - RNA, 22 nt, Human
uuuaaauuuagaagaaacacug

SEQ ID NO: 619347 - RNA, 22 nt, Human
uccaugggaagauuuugagugg

SEQ ID NO: 619348 - RNA, 22 nt, Human
gcuggccugucuagagccuuac

SEQ ID NO: 619349 - RNA, 20 nt, Human
uauuuacaacuuagagccuc

SEQ ID NO: 619350 - RNA, 22 nt, Human
cugcccugcuaaugaguuccaa

SEQ ID NO: 619351 - RNA, 22 nt, Human
guaaaauucuagcaucugaaag

SEQ ID NO: 619352 - RNA, 22 nt, Human
gcuggacucaggggacucaggg

SEQ ID NO: 619353 - RNA, 22 nt, Human
ucucacucauuuccuaggucuu

SEQ ID NO: 619354 - RNA, 22 nt, Human
uggccaggaggcugcuucugac

SEQ ID NO: 619355 - RNA, 22 nt, Human
auguguuuugguggaucauuca

SEQ ID NO: 619356 - RNA, 22 nt, Human
acaaaaagcuccauuacugucc

SEQ ID NO: 619357 - RNA, 22 nt, Human
acaguguuccuuuguugugacu

SEQ ID NO: 619358 - RNA, 18 nt, Human
uuuccuuguaugaacaua

SEQ ID NO: 619359 - RNA, 22 nt, Human
ggcaggacagucccaguucaaa

SEQ ID NO: 619360 - RNA, 22 nt, Human
uaaagcaggcaucucucuccuc

SEQ ID NO: 619361 - RNA, 22 nt, Human
aggcgcagaaggccaggggccu

SEQ ID NO: 619362 - RNA, 22 nt, Human
aggaaaugcaggcaaauacucu

SEQ ID NO: 619363 - RNA, 22 nt, Human
ugaggcagucacccccuccugc

SEQ ID NO: 619364 - RNA, 22 nt, Human
aacaaacauuaccuggugcugg

SEQ ID NO: 619365 - RNA, 22 nt, Human
gcugcagggagcuggaaggcuc

SEQ ID NO: 619366 - RNA, 22 nt, Human
ccaggcuggagugcaauggugc

SEQ ID NO: 619367 - RNA, 22 nt, Human
ucccugggccacagcugugagc

SEQ ID NO: 619368 - RNA, 22 nt, Human
cuccugggagcagggauggaug

SEQ ID NO: 619369 - RNA, 22 nt, Human
cuguggcuucugcuugggccuc

SEQ ID NO: 619370 - RNA, 22 nt, Human
gagccagguuggaggcugcagu

SEQ ID NO: 619371 - RNA, 22 nt, Human
cucagucucuugggcugugaag

SEQ ID NO: 619372 - RNA, 22 nt, Human
guuauaaaugacugcaaaaguu

SEQ ID NO: 619373 - RNA, 22 nt, Human
caucaucuggcuuuuagaaaaa

SEQ ID NO: 619374 - RNA, 22 nt, Human
gcugggagcccuggucugcucc

SEQ ID NO: 619375 - RNA, 22 nt, Human
uguuuugugcauuuacaacaug

SEQ ID NO: 619376 - RNA, 22 nt, Human
auuauaaaccuuugaggguggg

SEQ ID NO: 619377 - RNA, 22 nt, Human
cgcagggauuucaaggggccuu

SEQ ID NO: 619378 - RNA, 22 nt, Human
gcauuuuucaucccucuugggu

SEQ ID NO: 619379 - RNA, 22 nt, Human
acaaagauguuuaaagcauuua

SEQ ID NO: 619380 - RNA, 22 nt, Human
uggaaggcaggaccugccuugg

SEQ ID NO: 619381 - RNA, 22 nt, Human
accugcaguggccacuccuaau

SEQ ID NO: 619382 - RNA, 22 nt, Human
acauuucuuuucaucucuauau

SEQ ID NO: 619383 - RNA, 22 nt, Human
cccagccuacucugccauagca

SEQ ID NO: 619384 - RNA, 22 nt, Human
caagucugaccucugggugaag

SEQ ID NO: 619385 - RNA, 22 nt, Human
caaaggcaacauauacuuguuu

SEQ ID NO: 619386 - RNA, 22 nt, Human
guggcagcugugggacacuggu

SEQ ID NO: 619387 - RNA, 20 nt, Human
uccagggcaacuagagugug

SEQ ID NO: 619388 - RNA, 22 nt, Human
ucaggcacuggcugagugaugg

SEQ ID NO: 619389 - RNA, 22 nt, Human
uucuggcugcagucccuguaau

SEQ ID NO: 619390 - RNA, 21 nt, Human
acacaaaccuccucagccugg

SEQ ID NO: 619391 - RNA, 17 nt, Human
uccugccaccugucagg

SEQ ID NO: 619392 - RNA, 22 nt, Human
gccucuggaguugcuuguaaau

SEQ ID NO: 619393 - RNA, 20 nt, Human
uccagggcuagggagcucau

SEQ ID NO: 619394 - RNA, 19 nt, Human
caggccucuggucugcugu

SEQ ID NO: 619395 - RNA, 22 nt, Human
aucauuuuauggcugagaggac

SEQ ID NO: 619396 - RNA, 22 nt, Human
ggagccuuagacaucugauccu

SEQ ID NO: 619397 - RNA, 20 nt, Human
guccugggagccacagcaca

SEQ ID NO: 619398 - RNA, 22 nt, Human
agggcuuuaaugauuauuuucu

SEQ ID NO: 619399 - RNA, 22 nt, Human
cccauucccuuuacuguugcau

SEQ ID NO: 619400 - RNA, 22 nt, Human
aaugggaaaagaguaugauuua

SEQ ID NO: 619401 - RNA, 22 nt, Human
augcuauguaacuggcagauag

SEQ ID NO: 619402 - RNA, 22 nt, Human
aagaugcagcuuuacaauaagg

SEQ ID NO: 619403 - RNA, 19 nt, Human
acuaaaaaugauguuugag

SEQ ID NO: 619404 - RNA, 22 nt, Human
agcaccugugcccugauggaga

SEQ ID NO: 619405 - RNA, 22 nt, Human
uccagagguauguagagaguau

SEQ ID NO: 619406 - RNA, 22 nt, Human
gauuuucauuugcacucuagaa

SEQ ID NO: 619407 - RNA, 22 nt, Human
uggaaucucugguaucugggga

SEQ ID NO: 619408 - RNA, 22 nt, Human
acuggcugugcccauagagcuc

SEQ ID NO: 619409 - RNA, 22 nt, Human
agucauuacagcaggcagaagg

SEQ ID NO: 619410 - RNA, 23 nt, Human
gccugccauauaccuggaaacag

SEQ ID NO: 619411 - RNA, 22 nt, Human
ucugugugugccuguuaauauu

SEQ ID NO: 619412 - RNA, 22 nt, Human
uccugccagcuggggcugcuuc

SEQ ID NO: 619413 - RNA, 22 nt, Human
cugcccacuauguugucauggg

SEQ ID NO: 619414 - RNA, 22 nt, Human
gccaggcucuugguuauguuuu

SEQ ID NO: 619415 - RNA, 22 nt, Human
aaacucuauaggcagaagcaau

SEQ ID NO: 619416 - RNA, 22 nt, Human
augagguaauacuuucaguccu

SEQ ID NO: 619417 - RNA, 22 nt, Human
gagagcaggaggcagcgggacg

SEQ ID NO: 619418 - RNA, 22 nt, Human
uguggaauuucuuucagguaug

SEQ ID NO: 619419 - RNA, 22 nt, Human
gaauuuccucuaaaccccugag

SEQ ID NO: 619420 - RNA, 19 nt, Human
ugguaaagacuguccccca

SEQ ID NO: 619421 - RNA, 22 nt, Human
ucaguccucucuggguuucuua

SEQ ID NO: 619422 - RNA, 22 nt, Human
auuccuugggaauuauugaaug

SEQ ID NO: 619423 - RNA, 22 nt, Human
aaguccaccagucagacuagga

SEQ ID NO: 619424 - RNA, 17 nt, Human
agguucagguuacauuc

SEQ ID NO: 619425 - RNA, 22 nt, Human
caggcuggagugcaguugugca

SEQ ID NO: 619426 - RNA, 22 nt, Human
cugaucuuaaguaacauuauuu

SEQ ID NO: 619427 - RNA, 22 nt, Human
gagguccaacacaauggguguu

SEQ ID NO: 619428 - RNA, 22 nt, Human
gcaguggcuaagcucgcaugca

SEQ ID NO: 619429 - RNA, 22 nt, Human
agaaaaugugaacuugugaauu

SEQ ID NO: 619430 - RNA, 22 nt, Human
uccugggagaguuugauucauu

SEQ ID NO: 619431 - RNA, 22 nt, Human
gggcaggucugggucagccuga

SEQ ID NO: 619432 - RNA, 22 nt, Human
aguccuggguccagcagguccu

SEQ ID NO: 619433 - RNA, 23 nt, Human
ucuguguagccaggucuggaggg

SEQ ID NO: 619434 - RNA, 22 nt, Human
ugacaaacccugcaaauagcuc

SEQ ID NO: 619435 - RNA, 22 nt, Human
auacaaugggugcaaagaugug

SEQ ID NO: 619436 - RNA, 22 nt, Human
uccugggacuuucaaggcuagg

SEQ ID NO: 619437 - RNA, 22 nt, Human
ugcuuccugaggccgucuucuc

SEQ ID NO: 619438 - RNA, 22 nt, Human
gccccuugucuccaggccccaa

SEQ ID NO: 619439 - RNA, 22 nt, Human
uguuucuguaugaucaauauug

SEQ ID NO: 619440 - RNA, 22 nt, Human
gaugaggcaagccagaggacug

SEQ ID NO: 619441 - RNA, 22 nt, Human
cccagccucuggauucugcccu

SEQ ID NO: 619442 - RNA, 22 nt, Human
cucggaauggaacaacagcggu

SEQ ID NO: 619443 - RNA, 22 nt, Human
agguccaucguggaugaacugc

SEQ ID NO: 619444 - RNA, 22 nt, Human
caggcaggugcagauuccucuu

SEQ ID NO: 619445 - RNA, 22 nt, Human
uuaaauuauugagggauuguca

SEQ ID NO: 619446 - RNA, 22 nt, Human
cuguggcugucucuuucccaug

SEQ ID NO: 619447 - RNA, 22 nt, Human
agugucaaaugugugccaagcu

SEQ ID NO: 619448 - RNA, 22 nt, Human
cauggccagggcagauggcagg

SEQ ID NO: 619449 - RNA, 22 nt, Human
uuggaagguucuggucaugguu

SEQ ID NO: 619450 - RNA, 22 nt, Human
ugaggcaggagguugagaacug

SEQ ID NO: 619451 - RNA, 22 nt, Human
aaggaaagacauauaaaugacu

SEQ ID NO: 619452 - RNA, 22 nt, Human
cauggccaggcacgcgcauagc

SEQ ID NO: 619453 - RNA, 22 nt, Human
aaagcagguugcaauuacagug

SEQ ID NO: 619454 - RNA, 22 nt, Human
ugugaaggcagagccagugaaa

SEQ ID NO: 619455 - RNA, 17 nt, Human
uccuguuuaucauugau

SEQ ID NO: 619456 - RNA, 22 nt, Human
gccugggauucucaaaggggug

SEQ ID NO: 619457 - RNA, 22 nt, Human
cuguggcucucagaggcugcug

SEQ ID NO: 619458 - RNA, 22 nt, Human
gaagucaugcucccaucuugcu

SEQ ID NO: 619459 - RNA, 22 nt, Human
gcagggcaaauguggaaaggag

SEQ ID NO: 619460 - RNA, 21 nt, Human
ugaggcaggggugcuuuuguc

SEQ ID NO: 619461 - RNA, 22 nt, Human
cucugcaacuucuagcaguguc

SEQ ID NO: 619462 - RNA, 22 nt, Human
aaggcugugucagaagcucccu

SEQ ID NO: 619463 - RNA, 22 nt, Human
uucuuucucuacuagcagagcu

SEQ ID NO: 619464 - RNA, 22 nt, Human
uuucaaagaccauuaacuauca

SEQ ID NO: 619465 - RNA, 22 nt, Human
gcagggccagguacaagaagca

SEQ ID NO: 619466 - RNA, 22 nt, Human
ccaguguuccauggagugauua

SEQ ID NO: 619467 - RNA, 22 nt, Human
ucauaaagcauuucagcuuuug

SEQ ID NO: 619468 - RNA, 23 nt, Human
ccagggagguugauugguuaccc

SEQ ID NO: 619469 - RNA, 22 nt, Human
cccagguagugagaaauggagg

SEQ ID NO: 619470 - RNA, 22 nt, Human
aggucaccauggcaugcuccac

SEQ ID NO: 619471 - RNA, 22 nt, Human
acucuguguuuugguggcagca

SEQ ID NO: 619472 - RNA, 22 nt, Human
auccugggcugcacccucagcc

SEQ ID NO: 619473 - RNA, 22 nt, Human
gauuucuuuagguguaauagug

SEQ ID NO: 619474 - RNA, 20 nt, Human
ggccggggagcucuccaggg

SEQ ID NO: 619475 - RNA, 22 nt, Human
uuucagaggaaaucucauugag

SEQ ID NO: 619476 - RNA, 22 nt, Human
uggagucaguggcuauugggca

SEQ ID NO: 619477 - RNA, 22 nt, Human
ucuggccccgcaugcacuuuau

SEQ ID NO: 619478 - RNA, 22 nt, Human
aguacugucagcaggguguuga

SEQ ID NO: 619479 - RNA, 22 nt, Human
guuuucuuugaaugcuucuaga

SEQ ID NO: 619480 - RNA, 22 nt, Human
auaaugagaauacaguaacuau

SEQ ID NO: 619481 - RNA, 22 nt, Human
aaguuacaguuacagaauggag

SEQ ID NO: 619482 - RNA, 20 nt, Human
aucccuggccuuaaggagug

SEQ ID NO: 619483 - RNA, 22 nt, Human
guagggacuuguuuuacuagua

SEQ ID NO: 619484 - RNA, 23 nt, Human
ugccaggguuuguuugugguuca

SEQ ID NO: 619485 - RNA, 22 nt, Human
ccaguguugaacaguauuugga

SEQ ID NO: 619486 - RNA, 22 nt, Human
ugcugggggugucucaccaggc

SEQ ID NO: 619487 - RNA, 22 nt, Human
uacagaaagggaugauugaucu

SEQ ID NO: 619488 - RNA, 22 nt, Human
ggaaggcuugaguucccagguc

SEQ ID NO: 619489 - RNA, 22 nt, Human
accuguuuuagucuuuaaucau

SEQ ID NO: 619490 - RNA, 22 nt, Human
ucauaaagcuugccugcagugu

SEQ ID NO: 619491 - RNA, 22 nt, Human
ggguccaggcggcauaguugua

SEQ ID NO: 619492 - RNA, 22 nt, Human
cagugaaguucuacugaauggu

SEQ ID NO: 619493 - RNA, 22 nt, Human
uuggaaggccagcaccuugagu

SEQ ID NO: 619494 - RNA, 22 nt, Human
uccugggcgauuuucugaauau

SEQ ID NO: 619495 - RNA, 20 nt, Human
ugccuuggagcagccaaggu

SEQ ID NO: 619496 - RNA, 23 nt, Human
cugggcuguccugaggucaccuc

SEQ ID NO: 619497 - RNA, 21 nt, Human
ugcagcagauuugggggaaga

SEQ ID NO: 619498 - RNA, 22 nt, Human
uggcagguacccauuggcugua

SEQ ID NO: 619499 - RNA, 22 nt, Human
uuuaacuuagaagagauauccu

SEQ ID NO: 619500 - RNA, 21 nt, Human
ucauuucucuauguauuucac

SEQ ID NO: 619501 - RNA, 22 nt, Human
ugguccaguuuagcauugagug

SEQ ID NO: 619502 - RNA, 22 nt, Human
cuguguuuggacaacuuuucag

SEQ ID NO: 619503 - RNA, 22 nt, Human
aauucaaucuaagaaaugauca

SEQ ID NO: 619504 - RNA, 22 nt, Human
auauuuaacuggucccaauaua

SEQ ID NO: 619505 - RNA, 22 nt, Human
uugcagcuucuaacagcuucag

SEQ ID NO: 619506 - RNA, 22 nt, Human
cucuuuguggccaccuaaucuu

SEQ ID NO: 619507 - RNA, 22 nt, Human
augcagaacguuugugaaacuu

SEQ ID NO: 619508 - RNA, 19 nt, Human
uccucugguaccacccuug

SEQ ID NO: 619509 - RNA, 22 nt, Human
caggccagcagggccuccgugg

SEQ ID NO: 619510 - RNA, 22 nt, Human
agguccaggauuuguggggucu

SEQ ID NO: 619511 - RNA, 22 nt, Human
gccugagggcuccuagcaggcu

SEQ ID NO: 619512 - RNA, 22 nt, Human
uuuccuugggucucuuaguggc

SEQ ID NO: 619513 - RNA, 22 nt, Human
gaaagguuguaacaagacucuu

SEQ ID NO: 619514 - RNA, 22 nt, Human
guccugggcggagggcugcugu

SEQ ID NO: 619515 - RNA, 22 nt, Human
cugggcucaguggcucauggcu

SEQ ID NO: 619516 - RNA, 21 nt, Human
gcagggaccgcgacuucuggg

SEQ ID NO: 619517 - RNA, 22 nt, Human
cuguguuuugagauauuauuaa

SEQ ID NO: 619518 - RNA, 22 nt, Human
uggagucacagugaccugaguc

SEQ ID NO: 619519 - RNA, 22 nt, Human
aaaugcuacauacacaucaggg

SEQ ID NO: 619520 - RNA, 22 nt, Human
ccaguguuggaggauggcuugc

SEQ ID NO: 619521 - RNA, 19 nt, Human
ccaggccuggcgucuccgc

SEQ ID NO: 619522 - RNA, 22 nt, Human
ucagguccagcuccugugccuc

SEQ ID NO: 619523 - RNA, 22 nt, Human
uuacaagaugggaaagggaagu

SEQ ID NO: 619524 - RNA, 16 nt, Human
uuuauuuacuaguguu

SEQ ID NO: 619525 - RNA, 22 nt, Human
gcuuccaccuacuaaaugccac

SEQ ID NO: 619526 - RNA, 22 nt, Human
aaguccagugaaauagaaugca

SEQ ID NO: 619527 - RNA, 22 nt, Human
aggugggcccagugggcuccag

SEQ ID NO: 619528 - RNA, 22 nt, Human
gaagagaaaggcaaggaguuuu

SEQ ID NO: 619529 - RNA, 22 nt, Human
acaguguuuaagagauggcauu

SEQ ID NO: 619530 - RNA, 22 nt, Human
cagcagguggacacacucaccu

SEQ ID NO: 619531 - RNA, 19 nt, Human
aaagaucugggauugagac

SEQ ID NO: 619532 - RNA, 22 nt, Human
cugcccugggugcuggggaucc

SEQ ID NO: 619533 - RNA, 22 nt, Human
gcuguucuuugcaucucuggug

SEQ ID NO: 619534 - RNA, 22 nt, Human
aucuguggcgcaaacaaaggcu

SEQ ID NO: 619535 - RNA, 22 nt, Human
guaaauuauuucaagaucaucu

SEQ ID NO: 619536 - RNA, 22 nt, Human
auccugggaagcugacauugaa

SEQ ID NO: 619537 - RNA, 22 nt, Human
cugcagagcaaguucucuguug

SEQ ID NO: 619538 - RNA, 22 nt, Human
augagugugaaguuagcucagu

SEQ ID NO: 619539 - RNA, 22 nt, Human
cuggaaggcagagguugcagug

SEQ ID NO: 619540 - RNA, 22 nt, Human
gagagcuggauucuggauaggu

SEQ ID NO: 619541 - RNA, 22 nt, Human
ucuggaguagggucugggaauu

SEQ ID NO: 619542 - RNA, 22 nt, Human
gugagcuuugugguaaugaagu

SEQ ID NO: 619543 - RNA, 22 nt, Human
agucauuaagacaacuggagua

SEQ ID NO: 619544 - RNA, 22 nt, Human
agucuucucauuucacaugcuu

SEQ ID NO: 619545 - RNA, 17 nt, Human
aggugcagaggcagagc

SEQ ID NO: 619546 - RNA, 22 nt, Human
uccuggaggcaaaugagcacau

SEQ ID NO: 619547 - RNA, 22 nt, Human
ucauugucagcucuugacuucu

SEQ ID NO: 619548 - RNA, 22 nt, Human
acuguggcacuaggcaccuuac

SEQ ID NO: 619549 - RNA, 22 nt, Human
uucaugaauguuccaugugagu

SEQ ID NO: 619550 - RNA, 22 nt, Human
ucccacucccaggcaggccucu

SEQ ID NO: 619551 - RNA, 18 nt, Human
agggccagcugugaguag

SEQ ID NO: 619552 - RNA, 22 nt, Human
augaggcaaggaucagguaagg

SEQ ID NO: 619553 - RNA, 22 nt, Human
ugucuuuaagcaaacaguguuu

SEQ ID NO: 619554 - RNA, 22 nt, Human
gacccugacucuaaugcuuggc

SEQ ID NO: 619555 - RNA, 22 nt, Human
aaaaugauauccugacuuuuau

SEQ ID NO: 619556 - RNA, 22 nt, Human
uuuaaauaggacuccugggggu

SEQ ID NO: 619557 - RNA, 23 nt, Human
ggguccagagaagccauuagggc

SEQ ID NO: 619558 - RNA, 22 nt, Human
auucacaacaaaaggauaugag

SEQ ID NO: 619559 - RNA, 19 nt, Human
ggcauggucggaagagcuc

SEQ ID NO: 619560 - RNA, 22 nt, Human
gaauauuuucaguacagauggu

SEQ ID NO: 619561 - RNA, 22 nt, Human
uauuuguugaguuguuaugucu

SEQ ID NO: 619562 - RNA, 23 nt, Human
uccuucaaguuaggaagugaaca

SEQ ID NO: 619563 - RNA, 22 nt, Human
uuuauucacuucagugccaaag

SEQ ID NO: 619564 - RNA, 22 nt, Human
ucagcaggcagugggucacaau

SEQ ID NO: 619565 - RNA, 22 nt, Human
ucaaaauuuuauuucucaagga

SEQ ID NO: 619566 - RNA, 22 nt, Human
gggacaucuuucuagucagggu

SEQ ID NO: 619567 - RNA, 22 nt, Human
gggcgcaucaccugaggucagg

SEQ ID NO: 619568 - RNA, 22 nt, Human
cuucagagaacuugaucgcugc

SEQ ID NO: 619569 - RNA, 20 nt, Human
gugugaagcccucaggagga

SEQ ID NO: 619570 - RNA, 22 nt, Human
aguaaaaauugaggugcaaaau

SEQ ID NO: 619571 - RNA, 22 nt, Human
ccagcucaucucagugaaaugc

SEQ ID NO: 619572 - RNA, 22 nt, Human
aaacucugaugcuuauugggaa

SEQ ID NO: 619573 - RNA, 22 nt, Human
ccugcagguaaggcuaacugcc

SEQ ID NO: 619574 - RNA, 22 nt, Human
uauuuuacuauuuggcaaaguc

SEQ ID NO: 619575 - RNA, 22 nt, Human
ucagcagggcugggagcuguga

SEQ ID NO: 619576 - RNA, 18 nt, Human
uuucacagauucaugacu

SEQ ID NO: 619577 - RNA, 22 nt, Human
agccuucauaaucuugggcuuu

SEQ ID NO: 619578 - RNA, 22 nt, Human
aagaucaauguucauuaagaug

SEQ ID NO: 619579 - RNA, 22 nt, Human
uggaagggguuacgcagcagga

SEQ ID NO: 619580 - RNA, 22 nt, Human
ggucccagaauugguuagcaca

SEQ ID NO: 619581 - RNA, 22 nt, Human
gagcaggucuuucauggugcau

SEQ ID NO: 619582 - RNA, 22 nt, Human
aaggaggagugggguccuggaa

SEQ ID NO: 619583 - RNA, 22 nt, Human
gucccugggucuaaggcaguaa

SEQ ID NO: 619584 - RNA, 22 nt, Human
cagguggcuuauuagggucagu

SEQ ID NO: 619585 - RNA, 22 nt, Human
agcgugaauuaguugguacaca

SEQ ID NO: 619586 - RNA, 21 nt, Human
ugaaagaggauguggucauuc

SEQ ID NO: 619587 - RNA, 22 nt, Human
ggcucugcccagguggacagca

SEQ ID NO: 619588 - RNA, 22 nt, Human
ucugugugggauaguuugagga

SEQ ID NO: 619589 - RNA, 22 nt, Human
uccacagugguugaacuaguuu

SEQ ID NO: 619590 - RNA, 22 nt, Human
gccuucugaucgcuggacugac

SEQ ID NO: 619591 - RNA, 22 nt, Human
cuggaaggggcagucuuugggc

SEQ ID NO: 619592 - RNA, 22 nt, Human
ggcaguaugaguucaaauaauu

SEQ ID NO: 619593 - RNA, 22 nt, Human
uuaccugugucaguauaugaga

SEQ ID NO: 619594 - RNA, 19 nt, Human
agguccugaucagcaagga

SEQ ID NO: 619595 - RNA, 22 nt, Human
cugccagcucgccacaaugaca

SEQ ID NO: 619596 - RNA, 22 nt, Human
ucugggcuauauggucucugcu

SEQ ID NO: 619597 - RNA, 22 nt, Human
acaguguucuugauauuacagu

SEQ ID NO: 619598 - RNA, 22 nt, Human
uaggcaggcugaauguagauuu

SEQ ID NO: 619599 - RNA, 22 nt, Human
uaugcuuuuaaccuguaacuga

SEQ ID NO: 619600 - RNA, 22 nt, Human
cuuccuuggcuucuggggugug

SEQ ID NO: 619601 - RNA, 22 nt, Human
agacacugauguucagcucaau

SEQ ID NO: 619602 - RNA, 22 nt, Human
gaucuugagcaaguugcauccc

SEQ ID NO: 619603 - RNA, 19 nt, Human
cucugggcugcaucuuggu

SEQ ID NO: 619604 - RNA, 20 nt, Human
uggcagguggccucaguucc

SEQ ID NO: 619605 - RNA, 22 nt, Human
gaaacaauuuuuguugucuaag

SEQ ID NO: 619606 - RNA, 22 nt, Human
auaaauuaugaauggcccuuuu

SEQ ID NO: 619607 - RNA, 22 nt, Human
auguuucaaauauauagaguug

SEQ ID NO: 619608 - RNA, 22 nt, Human
gagagucuagugcaccuaguuu

SEQ ID NO: 619609 - RNA, 18 nt, Human
caggugggucuccugccc

SEQ ID NO: 619610 - RNA, 22 nt, Human
uuaaauuaggacucuaguucug

SEQ ID NO: 619611 - RNA, 22 nt, Human
ccuugcuguuagccuacauuau

SEQ ID NO: 619612 - RNA, 22 nt, Human
uccagagggcgauggcuggggg

SEQ ID NO: 619613 - RNA, 22 nt, Human
uuuaccaucugccacagauaug

SEQ ID NO: 619614 - RNA, 22 nt, Human
gugugcauguggaagcauguau

SEQ ID NO: 619615 - RNA, 22 nt, Human
gugggcuggacccuccugcucc

SEQ ID NO: 619616 - RNA, 22 nt, Human
aaauggcugacuaaauuaaauu

SEQ ID NO: 619617 - RNA, 22 nt, Human
acagaagcaaagacucaggcaa

SEQ ID NO: 619618 - RNA, 22 nt, Human
gcagggucuugagaggcagcca

SEQ ID NO: 619619 - RNA, 22 nt, Human
gaguccagcagaaugagccaag

SEQ ID NO: 619620 - RNA, 22 nt, Human
agaaaauaaauugaugguggaa

SEQ ID NO: 619621 - RNA, 19 nt, Human
aggugacaugugacagccu

SEQ ID NO: 619622 - RNA, 22 nt, Human
ccugagcucaaagggugccugg

SEQ ID NO: 619623 - RNA, 22 nt, Human
uugagucuccucagcagggcua

SEQ ID NO: 619624 - RNA, 22 nt, Human
ccugggugcccggcccuucucu

SEQ ID NO: 619625 - RNA, 22 nt, Human
agccagcaucccuucagucucc

SEQ ID NO: 619626 - RNA, 19 nt, Human
aaagcagaggagcaucuga

SEQ ID NO: 619627 - RNA, 17 nt, Human
uggggaugguucaugag

SEQ ID NO: 619628 - RNA, 20 nt, Human
gccagaggccggcaggggcu

SEQ ID NO: 619629 - RNA, 21 nt, Human
agaagccauuuguuaggacuu

SEQ ID NO: 619630 - RNA, 22 nt, Human
ucuguggcuuucuuauguugua

SEQ ID NO: 619631 - RNA, 22 nt, Human
cuggaagguggauggcgaggcc

SEQ ID NO: 619632 - RNA, 22 nt, Human
gaggcagagugcaccccaggag

SEQ ID NO: 619633 - RNA, 22 nt, Human
gggaacagggccugagcugggg

SEQ ID NO: 619634 - RNA, 22 nt, Human
gcaguguuuggauccauagcga

SEQ ID NO: 619635 - RNA, 22 nt, Human
cugcccugugaggguccuuggg

SEQ ID NO: 619636 - RNA, 22 nt, Human
cuguggagguaggagcaggaca

SEQ ID NO: 619637 - RNA, 22 nt, Human
ggcucccugggugcuccugcuc

SEQ ID NO: 619638 - RNA, 20 nt, Human
ugggcucugcuuccuggagu

SEQ ID NO: 619639 - RNA, 22 nt, Human
cugcccuguccuucccgccggc

SEQ ID NO: 619640 - RNA, 23 nt, Human
uccugaggguuucccagccuugg

SEQ ID NO: 619641 - RNA, 22 nt, Human
aggcuccacccuacagagcucc

SEQ ID NO: 619642 - RNA, 22 nt, Human
gcuuccuuauuguugccauagu

SEQ ID NO: 619643 - RNA, 20 nt, Human
cagaaagaagguagauuuuu

SEQ ID NO: 619644 - RNA, 22 nt, Human
ugguuaaaaugcagauucagua

SEQ ID NO: 619645 - RNA, 22 nt, Human
aaauagaauuaacuagcuacug

SEQ ID NO: 619646 - RNA, 22 nt, Human
cugcccugucuuuuucugauga

SEQ ID NO: 619647 - RNA, 22 nt, Human
aagcaggacguauuucuauccu

SEQ ID NO: 619648 - RNA, 22 nt, Human
caguaaauaguggagauguggg

SEQ ID NO: 619649 - RNA, 22 nt, Human
uuuuaauacugcuauuguagga

SEQ ID NO: 619650 - RNA, 22 nt, Human
aagaaagagaucacuccuccau

SEQ ID NO: 619651 - RNA, 23 nt, Human
agcuccagggaacaggcaguagg

SEQ ID NO: 619652 - RNA, 22 nt, Human
cccuggagguggagguugcagg

SEQ ID NO: 619653 - RNA, 22 nt, Human
accuguuuguuaagaaagcuuc

SEQ ID NO: 619654 - RNA, 22 nt, Human
ggccagggccaaggcuuuccca

SEQ ID NO: 619655 - RNA, 22 nt, Human
cuguggcugcagaccuuaaaca

SEQ ID NO: 619656 - RNA, 22 nt, Human
ggcccagcccgagucagccuuc

SEQ ID NO: 619657 - RNA, 22 nt, Human
gccaccuggacucagagccagg

SEQ ID NO: 619658 - RNA, 22 nt, Human
ggucccagguugacagggagac

SEQ ID NO: 619659 - RNA, 22 nt, Human
aucucugguuguuuugcuccca

SEQ ID NO: 619660 - RNA, 22 nt, Human
uguuuacuuuccuucucacagg

SEQ ID NO: 619661 - RNA, 22 nt, Human
ggagaagggccaauuccaugua

SEQ ID NO: 619662 - RNA, 19 nt, Human
aaacucugaaggccacugg

SEQ ID NO: 619663 - RNA, 22 nt, Human
cccagccucuguuugcuccucu

SEQ ID NO: 619664 - RNA, 22 nt, Human
agagcuguuaauuuugcacugg

SEQ ID NO: 619665 - RNA, 22 nt, Human
cccaguguuacgugacagccug

SEQ ID NO: 619666 - RNA, 22 nt, Human
accugcagccacuucucuccuu

SEQ ID NO: 619667 - RNA, 22 nt, Human
ugaggcagguaagcaaguuuug

SEQ ID NO: 619668 - RNA, 22 nt, Human
acauagaguucaauuuucaguc

SEQ ID NO: 619669 - RNA, 22 nt, Human
gaaauacaaagccagccauuuu

SEQ ID NO: 619670 - RNA, 22 nt, Human
gcaggcucccuugcagagcagg

SEQ ID NO: 619671 - RNA, 22 nt, Human
agcuuccuguugagagagggag

SEQ ID NO: 619672 - RNA, 20 nt, Human
uccaggcccacucagcugaa

SEQ ID NO: 619673 - RNA, 22 nt, Human
ggcucuucugguugucacauuu

SEQ ID NO: 619674 - RNA, 22 nt, Human
ccugaggcaaggacuugguggc

SEQ ID NO: 619675 - RNA, 22 nt, Human
ugccauauugcaaagugucugc

SEQ ID NO: 619676 - RNA, 22 nt, Human
uaggcagggauuaggguugauu

SEQ ID NO: 619677 - RNA, 22 nt, Human
uccugcagcugcagaccugggg

SEQ ID NO: 619678 - RNA, 22 nt, Human
agguucagucuuuggaccccuc

SEQ ID NO: 619679 - RNA, 22 nt, Human
cuguggcugaguuccuuauguu

SEQ ID NO: 619680 - RNA, 22 nt, Human
gguggauagguacauggacuuu

SEQ ID NO: 619681 - RNA, 22 nt, Human
uaauuacaaagcaagcacaggg

SEQ ID NO: 619682 - RNA, 22 nt, Human
agugucuuucauauccuccauc

SEQ ID NO: 619683 - RNA, 22 nt, Human
ucagcagggcauacugagccua

SEQ ID NO: 619684 - RNA, 22 nt, Human
auuucuucagguucuucuagga

SEQ ID NO: 619685 - RNA, 22 nt, Human
ugcauuccuuugucuguuaaag

SEQ ID NO: 619686 - RNA, 22 nt, Human
guucauuuuacuguaaauagca

SEQ ID NO: 619687 - RNA, 22 nt, Human
aaguccagcauuuggguagauu

SEQ ID NO: 619688 - RNA, 22 nt, Human
gugcccugcaugccccggguau

SEQ ID NO: 619689 - RNA, 22 nt, Human
ggcggggccucgcgaacggccu

SEQ ID NO: 619690 - RNA, 22 nt, Human
cacaguguuccagagcaguggu

SEQ ID NO: 619691 - RNA, 22 nt, Human
uuuauaaaauagacugggucua

SEQ ID NO: 619692 - RNA, 22 nt, Human
aguguuuggggugauuguaacc

SEQ ID NO: 619693 - RNA, 19 nt, Human
gcaggucauuaggcuaggu

SEQ ID NO: 619694 - RNA, 22 nt, Human
acuucuucuucagcugggggau

SEQ ID NO: 619695 - RNA, 22 nt, Human
augcuaaauucagacaggguua

SEQ ID NO: 619696 - RNA, 22 nt, Human
caggucgccagcaggaacguca

SEQ ID NO: 619697 - RNA, 22 nt, Human
agcuccagaggcagugaugaag

SEQ ID NO: 619698 - RNA, 22 nt, Human
gcaaguaggaaguguccuccuu

SEQ ID NO: 619699 - RNA, 22 nt, Human
auuuucuguaacuauuucuaua

SEQ ID NO: 619700 - RNA, 22 nt, Human
ucucugaucuuuaauucagaua

SEQ ID NO: 619701 - RNA, 22 nt, Human
cugaagauuauaaacagacaua

SEQ ID NO: 619702 - RNA, 22 nt, Human
ucauuguugcguuaaugucuuc

SEQ ID NO: 619703 - RNA, 22 nt, Human
cagcaggaaguacuagcuuuga

SEQ ID NO: 619704 - RNA, 20 nt, Human
uuucagagugucuuuccauu

SEQ ID NO: 619705 - RNA, 22 nt, Human
uuucagagguaugcugcuuauc

SEQ ID NO: 619706 - RNA, 22 nt, Human
aagauucacagagugaaugaaa

SEQ ID NO: 619707 - RNA, 22 nt, Human
cugggccagucucggccgcucu

SEQ ID NO: 619708 - RNA, 22 nt, Human
gccagcaguccugcugugugcc

SEQ ID NO: 619709 - RNA, 22 nt, Human
ggagggccaucuugggugugau

SEQ ID NO: 619710 - RNA, 22 nt, Human
ccuugcucaagcuagugacggg

SEQ ID NO: 619711 - RNA, 20 nt, Human
uuguugagcucuucaaagaa

SEQ ID NO: 619712 - RNA, 22 nt, Human
cucuuccuacagucugcuaugc

SEQ ID NO: 619713 - RNA, 22 nt, Human
gaguccaguuagugaggcuggg

SEQ ID NO: 619714 - RNA, 22 nt, Human
ugaguccaagagccagugggaa

SEQ ID NO: 619715 - RNA, 22 nt, Human
gcuggcuggaguaaggagggag

SEQ ID NO: 619716 - RNA, 23 nt, Human
agaggcaggaguggcuugcccgg

SEQ ID NO: 619717 - RNA, 22 nt, Human
augcagaaagagaauguaaugu

SEQ ID NO: 619718 - RNA, 22 nt, Human
gcagcaggcuuuucauaccuug

SEQ ID NO: 619719 - RNA, 22 nt, Human
cagggaugagcagauggagcaa

SEQ ID NO: 619720 - RNA, 22 nt, Human
uucagcagguggugaguucugc

SEQ ID NO: 619721 - RNA, 22 nt, Human
aaggaaagauucucucucuaga

SEQ ID NO: 619722 - RNA, 22 nt, Human
ccacagugacacgggcuggccc

SEQ ID NO: 619723 - RNA, 22 nt, Human
agaauauugaaaguucuugaca

SEQ ID NO: 619724 - RNA, 22 nt, Human
cugaagaugucugagaugcuca

SEQ ID NO: 619725 - RNA, 22 nt, Human
cuggaagguaacaaggccauua

SEQ ID NO: 619726 - RNA, 22 nt, Human
guuuccuguggccacagaauaa

SEQ ID NO: 619727 - RNA, 22 nt, Human
agaaaacauaggagacaggaaa

SEQ ID NO: 619728 - RNA, 22 nt, Human
cuuccuucugaagcauagaagc

SEQ ID NO: 619729 - RNA, 22 nt, Human
ggaguggccucuccugugcagg

SEQ ID NO: 619730 - RNA, 22 nt, Human
auuccuuggcauucuggacuug

SEQ ID NO: 619731 - RNA, 22 nt, Human
uacaguagucgucuuauuuuga

SEQ ID NO: 619732 - RNA, 22 nt, Human
accugcaggcacaggugugcgc

SEQ ID NO: 619733 - RNA, 22 nt, Human
agccaaaguccaaaugcagugu

SEQ ID NO: 619734 - RNA, 19 nt, Human
cccaacuugacuauuuucu

SEQ ID NO: 619735 - RNA, 22 nt, Human
gcaguggggcgcugggaguugg

SEQ ID NO: 619736 - RNA, 22 nt, Human
uuccuggguugugcauuguaca

SEQ ID NO: 619737 - RNA, 22 nt, Human
gcacaaaacacauuuugacaau

SEQ ID NO: 619738 - RNA, 22 nt, Human
uuuccuccuagccuccagccgc

SEQ ID NO: 619739 - RNA, 23 nt, Human
gggagaugggaaaugaaggcucu

SEQ ID NO: 619740 - RNA, 22 nt, Human
uauuucuaagcuguaagucuga

SEQ ID NO: 619741 - RNA, 22 nt, Human
uauuuucaucuuguccuuggau

SEQ ID NO: 619742 - RNA, 22 nt, Human
ggagcagaugucuucauggccu

SEQ ID NO: 619743 - RNA, 22 nt, Human
ugaucccaaucuuuccugcucc

SEQ ID NO: 619744 - RNA, 22 nt, Human
uaggccaugcagcaaagaggcu

SEQ ID NO: 619745 - RNA, 22 nt, Human
agagagcccgggccagggcaca

SEQ ID NO: 619746 - RNA, 22 nt, Human
ccaggagcgggaaaaggaagaa

SEQ ID NO: 619747 - RNA, 22 nt, Human
cugcaggggaccaaagucugac

SEQ ID NO: 619748 - RNA, 22 nt, Human
gucuggcuguccagcuuaucua

SEQ ID NO: 619749 - RNA, 22 nt, Human
cuaugaccccagcaugaauaag

SEQ ID NO: 619750 - RNA, 22 nt, Human
gauuucuuuagcucaucagauc

SEQ ID NO: 619751 - RNA, 19 nt, Human
accugcaguaauaauuccu

SEQ ID NO: 619752 - RNA, 22 nt, Human
aguguccccuccaagggccugg

SEQ ID NO: 619753 - RNA, 22 nt, Human
aggugggacccguggggugcga

SEQ ID NO: 619754 - RNA, 22 nt, Human
gagugcaauggcaugaucuggg

SEQ ID NO: 619755 - RNA, 22 nt, Human
uaggaacauaugcagugcuuuu

SEQ ID NO: 619756 - RNA, 22 nt, Human
ucaguguuugguuucagaauug

SEQ ID NO: 619757 - RNA, 22 nt, Human
ugaggcaggaaguuauauaaug

SEQ ID NO: 619758 - RNA, 22 nt, Human
auacagggacauccaguuuuuc

SEQ ID NO: 619759 - RNA, 22 nt, Human
aaagccuugggauuugugauca

SEQ ID NO: 619760 - RNA, 22 nt, Human
cuggccuggagccucugggugg

SEQ ID NO: 619761 - RNA, 22 nt, Human
uccuggaguggagucuguuguu

SEQ ID NO: 619762 - RNA, 22 nt, Human
ccacaucugguggccagugcua

SEQ ID NO: 619763 - RNA, 22 nt, Human
acauuucuccuugcaggaguca

SEQ ID NO: 619764 - RNA, 18 nt, Human
ugaucuuugaguauaaug

SEQ ID NO: 619765 - RNA, 22 nt, Human
ccucccuucaguagagcccaau

SEQ ID NO: 619766 - RNA, 22 nt, Human
ucugugugguaguuucagugaa

SEQ ID NO: 619767 - RNA, 22 nt, Human
agguucagaguuguugauguuu

SEQ ID NO: 619768 - RNA, 22 nt, Human
acagcagggggagcuguuggac

SEQ ID NO: 619769 - RNA, 22 nt, Human
uagguccacaagaucaaugcag

SEQ ID NO: 619770 - RNA, 22 nt, Human
uuuccuugcacauugguuucca

SEQ ID NO: 619771 - RNA, 22 nt, Human
gcaguguuacuuggaguacuaa

SEQ ID NO: 619772 - RNA, 22 nt, Human
gaaguagaaagccucguaaaua

SEQ ID NO: 619773 - RNA, 22 nt, Human
cugcaggcugagcgccugccgg

SEQ ID NO: 619774 - RNA, 22 nt, Human
ugccuucaaucaggauggucuc

SEQ ID NO: 619775 - RNA, 22 nt, Human
cuguucaguaaccuauaaaaca

SEQ ID NO: 619776 - RNA, 22 nt, Human
cccagcuccuuacagggccgaa

SEQ ID NO: 619777 - RNA, 20 nt, Human
augcaaacucacaaaauacc

SEQ ID NO: 619778 - RNA, 20 nt, Human
uccuggccucccuggggcuc

SEQ ID NO: 619779 - RNA, 22 nt, Human
uacagcaugaucacaauggaaa

SEQ ID NO: 619780 - RNA, 20 nt, Human
ugcugaagaaucacagaugg

SEQ ID NO: 619781 - RNA, 22 nt, Human
ccaguguucauaauuuuacacu

SEQ ID NO: 619782 - RNA, 22 nt, Human
auuauaaagaacaugugugugg

SEQ ID NO: 619783 - RNA, 22 nt, Human
ccugggaggcuguuuccagccu

SEQ ID NO: 619784 - RNA, 22 nt, Human
auuuguagugaagugaaaauaa

SEQ ID NO: 619785 - RNA, 16 nt, Human
gcugggagggagaggu

SEQ ID NO: 619786 - RNA, 21 nt, Human
aggagggcacaaggccaggaa

SEQ ID NO: 619787 - RNA, 22 nt, Human
auuuugcacacuaugcagcuuu

SEQ ID NO: 619788 - RNA, 22 nt, Human
uuccuggggcgacuguaucuga

SEQ ID NO: 619789 - RNA, 22 nt, Human
agccagggaaggauaacaagaa

SEQ ID NO: 619790 - RNA, 22 nt, Human
uccagggcuuggcugggacggu

SEQ ID NO: 619791 - RNA, 23 nt, Human
uuauaaauauuuucagguguguu

SEQ ID NO: 619792 - RNA, 23 nt, Human
uccugccagaugacuccuuucuu

SEQ ID NO: 619793 - RNA, 22 nt, Human
cagcaguaacucccgugcagca

SEQ ID NO: 619794 - RNA, 22 nt, Human
gggcugaucgcuugagcucagg

SEQ ID NO: 619795 - RNA, 22 nt, Human
uccaguggaacagauguugccu

SEQ ID NO: 619796 - RNA, 22 nt, Human
ccugggagccaagccucugugu

SEQ ID NO: 619797 - RNA, 22 nt, Human
ccagguggugaaagugggcccu

SEQ ID NO: 619798 - RNA, 22 nt, Human
auauuucuccaaauguuuucaa

SEQ ID NO: 619799 - RNA, 20 nt, Human
uacaaaccuccacacuggug

SEQ ID NO: 619800 - RNA, 22 nt, Human
aaacagcagcuguuuaauuugc

SEQ ID NO: 619801 - RNA, 22 nt, Human
ggcgggugcacagacccuuccc

SEQ ID NO: 619802 - RNA, 22 nt, Human
uugaaauaucaaguuauuagug

SEQ ID NO: 619803 - RNA, 18 nt, Human
uucuccagaaaacauagc

SEQ ID NO: 619804 - RNA, 20 nt, Human
uaugcuuuuuauaagauuga

SEQ ID NO: 619805 - RNA, 19 nt, Human
aggcaggugcagagguccc

SEQ ID NO: 619806 - RNA, 22 nt, Human
ugugggaggucuggaaggcucc

SEQ ID NO: 619807 - RNA, 22 nt, Human
ucagguccaagauggccaucca

SEQ ID NO: 619808 - RNA, 22 nt, Human
agaucaaaaacuuaauggcuuu

SEQ ID NO: 619809 - RNA, 22 nt, Human
ugucaugggcauuuauugaggg

SEQ ID NO: 619810 - RNA, 21 nt, Human
uguguucuucuaggucagcua

SEQ ID NO: 619811 - RNA, 22 nt, Human
cuggguguuggguacugaccgu

SEQ ID NO: 619812 - RNA, 22 nt, Human
gacaucauaucaggaggcaugu

SEQ ID NO: 619813 - RNA, 22 nt, Human
caauuagaggaggaagcucaua

SEQ ID NO: 619814 - RNA, 22 nt, Human
cccagcucuaggagugguggca

SEQ ID NO: 619815 - RNA, 22 nt, Human
ugacuugucucuuugggagaca

SEQ ID NO: 619816 - RNA, 22 nt, Human
ccuggcagguggagguugcagu

SEQ ID NO: 619817 - RNA, 22 nt, Human
cggagaggugggggcagcaucu

SEQ ID NO: 619818 - RNA, 22 nt, Human
ucaaguagaacuauaaugaugu

SEQ ID NO: 619819 - RNA, 22 nt, Human
cuguucacagaauccuccccug

SEQ ID NO: 619820 - RNA, 23 nt, Human
uggcaggugguuagauguuuugu

SEQ ID NO: 619821 - RNA, 22 nt, Human
uucacaguggcugugccauuug

SEQ ID NO: 619822 - RNA, 20 nt, Human
uuucacaaugaacaugucuc

SEQ ID NO: 619823 - RNA, 22 nt, Human
agugauggggcccugcacugau

SEQ ID NO: 619824 - RNA, 22 nt, Human
uccuggaguaggccuuagccau

SEQ ID NO: 619825 - RNA, 22 nt, Human
uggagaauucuauguugagggg

SEQ ID NO: 619826 - RNA, 22 nt, Human
gaggaaaaugcaacaggaaugc

SEQ ID NO: 619827 - RNA, 22 nt, Human
auuccuugggcugccuuauuau

SEQ ID NO: 619828 - RNA, 22 nt, Human
agcucucugauaaauugauaaa

SEQ ID NO: 619829 - RNA, 18 nt, Human
ugaggcagucagugaugg

SEQ ID NO: 619830 - RNA, 22 nt, Human
ugccuaggcuggaaugcagugg

SEQ ID NO: 619831 - RNA, 19 nt, Human
uggccagguacugucugcu

SEQ ID NO: 619832 - RNA, 22 nt, Human
accuguggaucagauucuugua

SEQ ID NO: 619833 - RNA, 22 nt, Human
gagcucauuguggauggauggg

SEQ ID NO: 619834 - RNA, 22 nt, Human
ccaggucccuggaauuuaugag

SEQ ID NO: 619835 - RNA, 22 nt, Human
ugcauacauaaagugcuaucau

SEQ ID NO: 619836 - RNA, 22 nt, Human
aggccaucaaaucauguagugc

SEQ ID NO: 619837 - RNA, 22 nt, Human
gggcuggaggagauccagaggc

SEQ ID NO: 619838 - RNA, 23 nt, Human
gguaccagcacagaguggagagg

SEQ ID NO: 619839 - RNA, 22 nt, Human
aggugcagugaaggaaaaggaa

SEQ ID NO: 619840 - RNA, 22 nt, Human
cugggugucaggagacaugaug

SEQ ID NO: 619841 - RNA, 22 nt, Human
cuguguuuuuggucugaucuau

SEQ ID NO: 619842 - RNA, 17 nt, Human
agcugccuugcuugagc

SEQ ID NO: 619843 - RNA, 22 nt, Human
aggcauggauggauccagggcu

SEQ ID NO: 619844 - RNA, 22 nt, Human
caugcagugacucagacacagg

SEQ ID NO: 619845 - RNA, 22 nt, Human
auacagugccccuuuucacaug

SEQ ID NO: 619846 - RNA, 22 nt, Human
aagcacaggaucuugaggagcg

SEQ ID NO: 619847 - RNA, 18 nt, Human
uugaaguuauuuacauuc

SEQ ID NO: 619848 - RNA, 22 nt, Human
gaauccaggguuguuugagcua

SEQ ID NO: 619849 - RNA, 22 nt, Human
acaggaaagagcuaggcauagg

SEQ ID NO: 619850 - RNA, 22 nt, Human
cugcccaggaaggagaggaugg

SEQ ID NO: 619851 - RNA, 22 nt, Human
gccuguuucuaaucucauuucu

SEQ ID NO: 619852 - RNA, 22 nt, Human
agaagcagggcagggaaaagca

SEQ ID NO: 619853 - RNA, 22 nt, Human
agacacugccacuucuguuccc

SEQ ID NO: 619854 - RNA, 22 nt, Human
gggcagguguugucaaucuaau

SEQ ID NO: 619855 - RNA, 22 nt, Human
ugugugaacucucugauguaca

SEQ ID NO: 619856 - RNA, 22 nt, Human
cuguucagaaaaaaucuucaug

SEQ ID NO: 619857 - RNA, 22 nt, Human
uacaaagucaccagcuucuugc

SEQ ID NO: 619858 - RNA, 22 nt, Human
aaacucugccauuuuuggccug

SEQ ID NO: 619859 - RNA, 22 nt, Human
ucugggagagucuaacuuguuu

SEQ ID NO: 619860 - RNA, 22 nt, Human
gcagccagccccucugaccucu

SEQ ID NO: 619861 - RNA, 22 nt, Human
ugacuuccugcacucaggugau

SEQ ID NO: 619862 - RNA, 22 nt, Human
ccagugcgagccugugcuggcc

SEQ ID NO: 619863 - RNA, 22 nt, Human
uccuggggcucuuugaugugau

SEQ ID NO: 619864 - RNA, 22 nt, Human
gcaggcucaaaagcugguagga

SEQ ID NO: 619865 - RNA, 22 nt, Human
aagccuucagaguuggcugguc

SEQ ID NO: 619866 - RNA, 22 nt, Human
gucacccugcuguuuguccauu

SEQ ID NO: 619867 - RNA, 22 nt, Human
ucaaaggagacacaaggagaaa

SEQ ID NO: 619868 - RNA, 22 nt, Human
uuggaaggaauuaaggucauga

SEQ ID NO: 619869 - RNA, 23 nt, Human
agguucagcuuucuuacucuggg

SEQ ID NO: 619870 - RNA, 22 nt, Human
cugugucuucacauuugugugc

SEQ ID NO: 619871 - RNA, 23 nt, Human
gcuugcucauucuaucacacagc

SEQ ID NO: 619872 - RNA, 22 nt, Human
uuguauuuccuauaaccuuucu

SEQ ID NO: 619873 - RNA, 22 nt, Human
auaaugcagcuuuucaauggcc

SEQ ID NO: 619874 - RNA, 22 nt, Human
aggcaggggagcuggaagggua

SEQ ID NO: 619875 - RNA, 22 nt, Human
agucucuuaaugggcagaaagu

SEQ ID NO: 619876 - RNA, 22 nt, Human
guuccuuguaauuuguuaagga

SEQ ID NO: 619877 - RNA, 22 nt, Human
gcugaggccaguuuaaugagga

SEQ ID NO: 619878 - RNA, 22 nt, Human
uccuucaaagcuccuagugagc

SEQ ID NO: 619879 - RNA, 22 nt, Human
agagaaaguccugaucucucua

SEQ ID NO: 619880 - RNA, 22 nt, Human
aguguucagugauugucaaccg

SEQ ID NO: 619881 - RNA, 22 nt, Human
caucuugcuucaucugcugugu

SEQ ID NO: 619882 - RNA, 22 nt, Human
agccaggacguugcucagcucc

SEQ ID NO: 619883 - RNA, 22 nt, Human
cugggcucuagaaaggaaagaa

SEQ ID NO: 619884 - RNA, 22 nt, Human
uguccaguccuuggggugcugu

SEQ ID NO: 619885 - RNA, 21 nt, Human
uccucccugagcuguggggga

SEQ ID NO: 619886 - RNA, 22 nt, Human
ugccuggcacagagcagguggc

SEQ ID NO: 619887 - RNA, 22 nt, Human
gccaccugguggcaucuucugg

SEQ ID NO: 619888 - RNA, 19 nt, Human
gcugggagcagacccuccc

SEQ ID NO: 619889 - RNA, 22 nt, Human
uuugaaagaauuuauguacuuu

SEQ ID NO: 619890 - RNA, 22 nt, Human
guggcugcuguccucucugguu

SEQ ID NO: 619891 - RNA, 23 nt, Human
aguucaaaaucaaccaggacacu

SEQ ID NO: 619892 - RNA, 22 nt, Human
accugcagguguuuccacacuu

SEQ ID NO: 619893 - RNA, 22 nt, Human
gcaaauacauguugagcaccua

SEQ ID NO: 619894 - RNA, 22 nt, Human
auucagaaagauaugccugguu

SEQ ID NO: 619895 - RNA, 22 nt, Human
aggcaggugggagugauuccuu

SEQ ID NO: 619896 - RNA, 22 nt, Human
agugcaaagcagccuguacacc

SEQ ID NO: 619897 - RNA, 22 nt, Human
auuggccauuugcauguauuau

SEQ ID NO: 619898 - RNA, 22 nt, Human
gcaggcacuccuaggaccauca

SEQ ID NO: 619899 - RNA, 22 nt, Human
ggccccagauucugggcugggu

SEQ ID NO: 619900 - RNA, 22 nt, Human
uauuacaagaaagggcaugaau

SEQ ID NO: 619901 - RNA, 22 nt, Human
caauuagacauuuauuggccag

SEQ ID NO: 619902 - RNA, 22 nt, Human
uuccugggaggcuguguacuug

SEQ ID NO: 619903 - RNA, 22 nt, Human
ccccaugcugggaucugacacc

SEQ ID NO: 619904 - RNA, 18 nt, Human
cuggagucacagugggga

SEQ ID NO: 619905 - RNA, 22 nt, Human
gacccugagcaaaagcaguucu

SEQ ID NO: 619906 - RNA, 22 nt, Human
ggaaggaaagcagcuuggcccu

SEQ ID NO: 619907 - RNA, 22 nt, Human
agucuugguccaggcucauuuc

SEQ ID NO: 619908 - RNA, 22 nt, Human
guaagccuggaauuuuugacuu

SEQ ID NO: 619909 - RNA, 18 nt, Human
uucagcagcagacacacu

SEQ ID NO: 619910 - RNA, 22 nt, Human
aguaaucaauuuuucgguggau

SEQ ID NO: 619911 - RNA, 22 nt, Human
augucaccuucgguggcacggu

SEQ ID NO: 619912 - RNA, 22 nt, Human
uggagcaugagagucuuuagcu

SEQ ID NO: 619913 - RNA, 21 nt, Human
ugagugccaccugcuggccaa

SEQ ID NO: 619914 - RNA, 22 nt, Human
gcggggcccccggccgagcucu

SEQ ID NO: 619915 - RNA, 22 nt, Human
caagaagucauuuagccucuca

SEQ ID NO: 619916 - RNA, 22 nt, Human
ucuuacaagaaauaagccaaug

SEQ ID NO: 619917 - RNA, 22 nt, Human
caggccagugggaaauagggau

SEQ ID NO: 619918 - RNA, 22 nt, Human
acccagagcccuuagcacagac

SEQ ID NO: 619919 - RNA, 22 nt, Human
cuggccacaugugugcugagca

SEQ ID NO: 619920 - RNA, 22 nt, Human
ucuugcacuucaugaauauguu

SEQ ID NO: 619921 - RNA, 22 nt, Human
uuguugcaaggguuaaaugaga

SEQ ID NO: 619922 - RNA, 22 nt, Human
ggccagggggcuucagacucca

SEQ ID NO: 619923 - RNA, 22 nt, Human
cugcagggaccacaagcagguu

SEQ ID NO: 619924 - RNA, 22 nt, Human
acuggcugaaaguaaagaacac

SEQ ID NO: 619925 - RNA, 22 nt, Human
gaagagcuggaauccagucugg

SEQ ID NO: 619926 - RNA, 18 nt, Human
gcaagcccucuccauuaa

SEQ ID NO: 619927 - RNA, 19 nt, Human
ucucaauguucagaaagcu

SEQ ID NO: 619928 - RNA, 22 nt, Human
uaaauucugaucaaguuccuuc

SEQ ID NO: 619929 - RNA, 22 nt, Human
cuggccacuggagguggcaccc

SEQ ID NO: 619930 - RNA, 22 nt, Human
cuccuggcuaugacuacauuuc

SEQ ID NO: 619931 - RNA, 22 nt, Human
uuugagguuagcuagcagauca

SEQ ID NO: 619932 - RNA, 22 nt, Human
cacaguggaaguccaggauccc

SEQ ID NO: 619933 - RNA, 16 nt, Human
ggguccagaucugcuc

SEQ ID NO: 619934 - RNA, 22 nt, Human
cagcaggauuggauacaucuca

SEQ ID NO: 619935 - RNA, 23 nt, Human
aaauaggaguaucuggaucauga

SEQ ID NO: 619936 - RNA, 22 nt, Human
aggucacacaacugucagaggc

SEQ ID NO: 619937 - RNA, 22 nt, Human
agucuugaaagcacauuagagu

SEQ ID NO: 619938 - RNA, 21 nt, Human
ugcauauauaagugcauacac

SEQ ID NO: 619939 - RNA, 22 nt, Human
ucuguggcauguugcacuugua

SEQ ID NO: 619940 - RNA, 22 nt, Human
gccaccugugugggccuuugug

SEQ ID NO: 619941 - RNA, 22 nt, Human
ccagggggcuuggugaggccau

SEQ ID NO: 619942 - RNA, 22 nt, Human
uuguggcucaucuucagcuccc

SEQ ID NO: 619943 - RNA, 22 nt, Human
ggguccagggccaguggcugag

SEQ ID NO: 619944 - RNA, 22 nt, Human
cugccccugccaggcagcuguc

SEQ ID NO: 619945 - RNA, 22 nt, Human
gagcagggagacaacucuggug

SEQ ID NO: 619946 - RNA, 22 nt, Human
aacaugcaaugucugaaaaucc

SEQ ID NO: 619947 - RNA, 22 nt, Human
auguuucugaaguuuacagaua

SEQ ID NO: 619948 - RNA, 22 nt, Human
aaagaucagucugaagcaacau

SEQ ID NO: 619949 - RNA, 22 nt, Human
ggcuuuauuucacuguaccaua

SEQ ID NO: 619950 - RNA, 20 nt, Human
aaauuuaggaaauuuuacgc

SEQ ID NO: 619951 - RNA, 22 nt, Human
agggcgggcucaucacaugcuc

SEQ ID NO: 619952 - RNA, 22 nt, Human
uucuggcuccagaugcuucugu

SEQ ID NO: 619953 - RNA, 22 nt, Human
uuuucugugauucugagguugg

SEQ ID NO: 619954 - RNA, 22 nt, Human
ggccugaggcgucccagcugug

SEQ ID NO: 619955 - RNA, 22 nt, Human
ugagucuuuccaaagccgucau

SEQ ID NO: 619956 - RNA, 22 nt, Human
cuggcuccauuacucagcaucu

SEQ ID NO: 619957 - RNA, 22 nt, Human
cugcccugucugcagccuggcu

SEQ ID NO: 619958 - RNA, 23 nt, Human
uugaauaggguggcaacaaacug

SEQ ID NO: 619959 - RNA, 22 nt, Human
aggcgcagacauacagggucug

SEQ ID NO: 619960 - RNA, 22 nt, Human
gccagccugugggggcucugug

SEQ ID NO: 619961 - RNA, 22 nt, Human
guccagugcuaacagguugagg

SEQ ID NO: 619962 - RNA, 22 nt, Human
ucagccuugcuucuggacuggu

SEQ ID NO: 619963 - RNA, 22 nt, Human
caggcucccugcaggccaguga

SEQ ID NO: 619964 - RNA, 22 nt, Human
ugugacagugccagcuucauag

SEQ ID NO: 619965 - RNA, 22 nt, Human
uccuguuuuuguaaucgacucu

SEQ ID NO: 619966 - RNA, 22 nt, Human
uuugggcugguuugccaugccc

SEQ ID NO: 619967 - RNA, 22 nt, Human
uguguucaaucaccaaagguau

SEQ ID NO: 619968 - RNA, 22 nt, Human
ggagggcaacuuuucaguaggu

SEQ ID NO: 619969 - RNA, 22 nt, Human
aaaaugacauuccagugauauu

SEQ ID NO: 619970 - RNA, 22 nt, Human
uuuauuauccaguguugucaug

SEQ ID NO: 619971 - RNA, 23 nt, Human
aggagaagagauuuccacaugca

SEQ ID NO: 619972 - RNA, 22 nt, Human
guccugguggagucucugggga

SEQ ID NO: 619973 - RNA, 22 nt, Human
cagaagcacauguuuacaugua

SEQ ID NO: 619974 - RNA, 22 nt, Human
acuuuucaaaugggaaacucag

SEQ ID NO: 619975 - RNA, 22 nt, Human
ggguccaggcguggcccagaug

SEQ ID NO: 619976 - RNA, 22 nt, Human
aagcacagggacucaggaccgg

SEQ ID NO: 619977 - RNA, 22 nt, Human
uuguuaaaacuccauugguuug

SEQ ID NO: 619978 - RNA, 17 nt, Human
cugaagauaauggcaac

SEQ ID NO: 619979 - RNA, 22 nt, Human
uacauacacaaauauacuguuu

SEQ ID NO: 619980 - RNA, 22 nt, Human
aaacuuguucucauguugcaga

SEQ ID NO: 619981 - RNA, 21 nt, Human
ugccagggauuuacagagccu

SEQ ID NO: 619982 - RNA, 22 nt, Human
ccugugugaagguuaggcaggu

SEQ ID NO: 619983 - RNA, 22 nt, Human
acuccugggugcauuucugauu

SEQ ID NO: 619984 - RNA, 22 nt, Human
caggcaggcugcuuuuuguuca

SEQ ID NO: 619985 - RNA, 22 nt, Human
cucuggcugccucucaggccug

SEQ ID NO: 619986 - RNA, 22 nt, Human
auaaaagaucccuucugagcuc

SEQ ID NO: 619987 - RNA, 22 nt, Human
ugccuucauccauguuauagug

SEQ ID NO: 619988 - RNA, 22 nt, Human
ucaguguuauuagaugagguuu

SEQ ID NO: 619989 - RNA, 22 nt, Human
aguguuucaagugaugcuuugg

SEQ ID NO: 619990 - RNA, 22 nt, Human
agccuguguuuuuucuauugca

SEQ ID NO: 619991 - RNA, 22 nt, Human
uuccuggguucccucucauucu

SEQ ID NO: 619992 - RNA, 22 nt, Human
ugaggcaggagaaucaccggaa

SEQ ID NO: 619993 - RNA, 22 nt, Human
auggccaccaucucuaaaacac

SEQ ID NO: 619994 - RNA, 22 nt, Human
caaaaagcuuagguaacaagcc

SEQ ID NO: 619995 - RNA, 22 nt, Human
guauuuuucauuccaagugaga

SEQ ID NO: 619996 - RNA, 22 nt, Human
uugcccuggggcuggccuggca

SEQ ID NO: 619997 - RNA, 22 nt, Human
uuugucuuauccaaucucucag

SEQ ID NO: 619998 - RNA, 22 nt, Human
gacagcauggugucuguucagg

SEQ ID NO: 619999 - RNA, 22 nt, Human
gucaggucuuggaagauaggcu

SEQ ID NO: 620000 - RNA, 22 nt, Human
ucuucaaacccuggcucuuccu

SEQ ID NO: 620001 - RNA, 21 nt, Human
auucagaguaauucaucuuua

SEQ ID NO: 620002 - RNA, 22 nt, Human
uccagaggcuccaaagggagau

SEQ ID NO: 620003 - RNA, 22 nt, Human
cuguggcuccauagaaguugca

SEQ ID NO: 620004 - RNA, 22 nt, Human
gacccugaggauucccugcuga

SEQ ID NO: 620005 - RNA, 22 nt, Human
ugcauccuccuuuguccucuug

SEQ ID NO: 620006 - RNA, 22 nt, Human
ggugcccaccugucuuccugga

SEQ ID NO: 620007 - RNA, 22 nt, Human
agaaaggaggaagaaugaccuc

SEQ ID NO: 620008 - RNA, 23 nt, Human
agaaggguccuuggcagcgacag

SEQ ID NO: 620009 - RNA, 22 nt, Human
uagaggcacccuggaggagacu

SEQ ID NO: 620010 - RNA, 22 nt, Human
acucaggaaaugagaggcucuc

SEQ ID NO: 620011 - RNA, 22 nt, Human
ggauccagaggugaagauggga

SEQ ID NO: 620012 - RNA, 22 nt, Human
agggcuuuggcccccugcugca

SEQ ID NO: 620013 - RNA, 22 nt, Human
uccugggucugggugucugagg

SEQ ID NO: 620014 - RNA, 22 nt, Human
gagaggccauggcugugcagug

SEQ ID NO: 620015 - RNA, 22 nt, Human
aggacuggugccagacaaggua

SEQ ID NO: 620016 - RNA, 22 nt, Human
aaauugcugugaggugguagua

SEQ ID NO: 620017 - RNA, 17 nt, Human
aaguccagaguugagca

SEQ ID NO: 620018 - RNA, 22 nt, Human
cuccugggcugucggcgcucug

SEQ ID NO: 620019 - RNA, 20 nt, Human
uuggaagguggagaagagga

SEQ ID NO: 620020 - RNA, 22 nt, Human
aaguagacagucaucuacuuug

SEQ ID NO: 620021 - RNA, 22 nt, Human
ggcugcagagcugggugggccu

SEQ ID NO: 620022 - RNA, 22 nt, Human
uacaugucuacaugcauuuuug

SEQ ID NO: 620023 - RNA, 22 nt, Human
ggcuuuauuaagcaggguaagu

SEQ ID NO: 620024 - RNA, 21 nt, Human
aggaggaacccguggcugggc

SEQ ID NO: 620025 - RNA, 22 nt, Human
ugccaguugggaaaacagacau

SEQ ID NO: 620026 - RNA, 22 nt, Human
ccagagcagaaccggaacacca

SEQ ID NO: 620027 - RNA, 22 nt, Human
gggcaggugcccagggccagag

SEQ ID NO: 620028 - RNA, 22 nt, Human
uuggaagggauauuggcauaug

SEQ ID NO: 620029 - RNA, 20 nt, Human
acuuuacagagaagacugac

SEQ ID NO: 620030 - RNA, 22 nt, Human
ccuuuuuucuaugccaacucug

SEQ ID NO: 620031 - RNA, 22 nt, Human
gcauggccuccagccaacagca

SEQ ID NO: 620032 - RNA, 22 nt, Human
ggccacugaccuacaucugggg

SEQ ID NO: 620033 - RNA, 22 nt, Human
agagccuguaacaucuuucuua

SEQ ID NO: 620034 - RNA, 22 nt, Human
agagccaggcucuaccuggguu

SEQ ID NO: 620035 - RNA, 22 nt, Human
agcuuuaaaucaauccagugag

SEQ ID NO: 620036 - RNA, 20 nt, Human
cugcccugcccuggguccug

SEQ ID NO: 620037 - RNA, 22 nt, Human
gggcaggugaccucuuguccug

SEQ ID NO: 620038 - RNA, 22 nt, Human
uuacaagacagugugguaaaua

SEQ ID NO: 620039 - RNA, 22 nt, Human
ggagcagagcauuucacagccu

SEQ ID NO: 620040 - RNA, 22 nt, Human
uugcccugccucccugagguga

SEQ ID NO: 620041 - RNA, 22 nt, Human
uacuuaaaacugauagaaucuc

SEQ ID NO: 620042 - RNA, 22 nt, Human
auuuauaacgugcagccagggu

SEQ ID NO: 620043 - RNA, 23 nt, Human
agcuuccuagugaccuggagucu

SEQ ID NO: 620044 - RNA, 22 nt, Human
auggccacauuuaguaacuggu

SEQ ID NO: 620045 - RNA, 22 nt, Human
aaagcagaggugauaugacuua

SEQ ID NO: 620046 - RNA, 22 nt, Human
cugugcuugcggguguggagcc

SEQ ID NO: 620047 - RNA, 22 nt, Human
gggcuuuaugagauugagaucu

SEQ ID NO: 620048 - RNA, 22 nt, Human
cgaggcagggaagcugcaaaag

SEQ ID NO: 620049 - RNA, 22 nt, Human
augcccugcugcuggggcagug

SEQ ID NO: 620050 - RNA, 22 nt, Human
uaggcaggugugcacugcccac

SEQ ID NO: 620051 - RNA, 22 nt, Human
agggcuuucggcacucugaggg

SEQ ID NO: 620052 - RNA, 22 nt, Human
auacauauccacaggagauaaa

SEQ ID NO: 620053 - RNA, 22 nt, Human
uuuacaagucuguugaucccaa

SEQ ID NO: 620054 - RNA, 22 nt, Human
aaacagaaauuuccucaugcuc

SEQ ID NO: 620055 - RNA, 22 nt, Human
uuguugacgacuugacuuucuc

SEQ ID NO: 620056 - RNA, 22 nt, Human
ggagagcugacaucaugauguu

SEQ ID NO: 620057 - RNA, 22 nt, Human
guguccagagaacugugggagc

SEQ ID NO: 620058 - RNA, 22 nt, Human
acaguuaucuuugaaauagaga

SEQ ID NO: 620059 - RNA, 22 nt, Human
aggcuggugccugcagugaauc

SEQ ID NO: 620060 - RNA, 22 nt, Human
agugcaggccccaggccaggcc

SEQ ID NO: 620061 - RNA, 22 nt, Human
uaaaguguaugccaucucucau

SEQ ID NO: 620062 - RNA, 22 nt, Human
agaaggguagggacuuauccaa

SEQ ID NO: 620063 - RNA, 22 nt, Human
gggggcuggaauauccaucaac

SEQ ID NO: 620064 - RNA, 22 nt, Human
cuguggcuggccugucugacau

SEQ ID NO: 620065 - RNA, 22 nt, Human
acugccaaugguaguuugaugg

SEQ ID NO: 620066 - RNA, 22 nt, Human
caggucagagguagaugagaug

SEQ ID NO: 620067 - RNA, 22 nt, Human
ugucuguggcaauuguggguaa

SEQ ID NO: 620068 - RNA, 22 nt, Human
ccaggcugcuuuauuacucugu

SEQ ID NO: 620069 - RNA, 22 nt, Human
gggcagguacuggguggugagc

SEQ ID NO: 620070 - RNA, 22 nt, Human
aaauggcuuugaggguaggaca

SEQ ID NO: 620071 - RNA, 22 nt, Human
gaggggaaagugugaggcugcg

SEQ ID NO: 620072 - RNA, 22 nt, Human
ggcaaguauuugugcaucuaca

SEQ ID NO: 620073 - RNA, 22 nt, Human
ccaguguguucccugccucacu

SEQ ID NO: 620074 - RNA, 19 nt, Human
uaccauguugacuuuccug

SEQ ID NO: 620075 - RNA, 22 nt, Human
gaagcuccguacuaugacuuuu

SEQ ID NO: 620076 - RNA, 22 nt, Human
gacacaaaguuugucagaaauu

SEQ ID NO: 620077 - RNA, 22 nt, Human
ucauggcuugcagauggccacc

SEQ ID NO: 620078 - RNA, 22 nt, Human
uggagaauuaggccaaaucucc

SEQ ID NO: 620079 - RNA, 22 nt, Human
gccuguuuggcugcugacauug

SEQ ID NO: 620080 - RNA, 22 nt, Human
aggcagguguuaacccucugag

SEQ ID NO: 620081 - RNA, 22 nt, Human
uuuauuuaccuuauguccucca

SEQ ID NO: 620082 - RNA, 22 nt, Human
agguccaguuuucaguucucau

SEQ ID NO: 620083 - RNA, 22 nt, Human
ugcugccuggagccuuuuguuu

SEQ ID NO: 620084 - RNA, 22 nt, Human
guggcagggguauuccagcuga

SEQ ID NO: 620085 - RNA, 22 nt, Human
cugaggcugggcauggggucca

SEQ ID NO: 620086 - RNA, 22 nt, Human
agguccagugcucuuggugguu

SEQ ID NO: 620087 - RNA, 22 nt, Human
ggacaaagcucugcugccuccc

SEQ ID NO: 620088 - RNA, 22 nt, Human
cuggcccuggcuggagcccagg

SEQ ID NO: 620089 - RNA, 22 nt, Human
agggaaggaaaagcugucgcuu

SEQ ID NO: 620090 - RNA, 22 nt, Human
uuucucucagccuguagaaacu

SEQ ID NO: 620091 - RNA, 22 nt, Human
cuuuacaaauagggagggagug

SEQ ID NO: 620092 - RNA, 21 nt, Human
gcagccagccgagaccaugcc

SEQ ID NO: 620093 - RNA, 22 nt, Human
cagagaaagaagcccauucauu

SEQ ID NO: 620094 - RNA, 22 nt, Human
ucagcaggcgguuccuuguggg

SEQ ID NO: 620095 - RNA, 22 nt, Human
caaauauuccagguacaucccu

SEQ ID NO: 620096 - RNA, 22 nt, Human
gggaaaucucguccucuauuua

SEQ ID NO: 620097 - RNA, 22 nt, Human
uccuucaagugcaguaccugag

SEQ ID NO: 620098 - RNA, 22 nt, Human
ggucccagcugcucaagaggcu

SEQ ID NO: 620099 - RNA, 23 nt, Human
uugagucuuauaggauugaggug

SEQ ID NO: 620100 - RNA, 22 nt, Human
ugaaaaugcacgcuggaaagca

SEQ ID NO: 620101 - RNA, 22 nt, Human
agagccuggagguucugcugaa

SEQ ID NO: 620102 - RNA, 22 nt, Human
aauaaaauggucaguuuucuca

SEQ ID NO: 620103 - RNA, 22 nt, Human
uuucaauaacaaagcucauuuu

SEQ ID NO: 620104 - RNA, 22 nt, Human
ccggcgggcagcggcagugagc

SEQ ID NO: 620105 - RNA, 20 nt, Human
gugcccugugggcuauuuuc

SEQ ID NO: 620106 - RNA, 22 nt, Human
auuuuacauaaggaagguuuaa

SEQ ID NO: 620107 - RNA, 22 nt, Human
aguguuuaaugccuuuuccagc

SEQ ID NO: 620108 - RNA, 22 nt, Human
uuucaaagguuuugucaugucu

SEQ ID NO: 620109 - RNA, 22 nt, Human
ccagcagggcagugcccuggac

SEQ ID NO: 620110 - RNA, 23 nt, Human
cuguuaaauuccuuaagagcagg

SEQ ID NO: 620111 - RNA, 17 nt, Human
uuaagguggaucagcac

SEQ ID NO: 620112 - RNA, 21 nt, Human
agaaguccccacucugucgca

SEQ ID NO: 620113 - RNA, 22 nt, Human
guuaaauaaccucauguccguu

SEQ ID NO: 620114 - RNA, 20 nt, Human
uugauucaagggcugaugga

SEQ ID NO: 620115 - RNA, 22 nt, Human
ugaagcugugggcaguggagcc

SEQ ID NO: 620116 - RNA, 22 nt, Human
ucugugugcccuaaagccugcu

SEQ ID NO: 620117 - RNA, 22 nt, Human
cuggaagguuccucccagcucc

SEQ ID NO: 620118 - RNA, 22 nt, Human
ggguccagguuuagucauuugu

SEQ ID NO: 620119 - RNA, 22 nt, Human
uccagggacagcgcuggagcua

SEQ ID NO: 620120 - RNA, 22 nt, Human
ucugcaggcauuuuugguuguc

SEQ ID NO: 620121 - RNA, 22 nt, Human
auggcaaaaauuaacagaucaa

SEQ ID NO: 620122 - RNA, 22 nt, Human
uauguccugcuacucucucaug

SEQ ID NO: 620123 - RNA, 22 nt, Human
agccagaaaggggcauuaucug

SEQ ID NO: 620124 - RNA, 22 nt, Human
gcuggggagaauuggguuaucu

SEQ ID NO: 620125 - RNA, 22 nt, Human
agaaguccccccagcaucguag

SEQ ID NO: 620126 - RNA, 22 nt, Human
uucauggaucaugccuuuugug

SEQ ID NO: 620127 - RNA, 22 nt, Human
cagcucagucuggagagaugca

SEQ ID NO: 620128 - RNA, 22 nt, Human
gcaucuaaauaaacgugggagu

SEQ ID NO: 620129 - RNA, 22 nt, Human
cuuuacagaaagagaacucugg

SEQ ID NO: 620130 - RNA, 22 nt, Human
ccagugcgcaggcgccaccugu

SEQ ID NO: 620131 - RNA, 22 nt, Human
gcuucaaacugagcuucaagug

SEQ ID NO: 620132 - RNA, 22 nt, Human
uuuacaugaguagcagauguuc

SEQ ID NO: 620133 - RNA, 22 nt, Human
agcaagaagggcaaggaaguuu

SEQ ID NO: 620134 - RNA, 22 nt, Human
acagcaggaagcuggagggaaa

SEQ ID NO: 620135 - RNA, 22 nt, Human
ugguccaguucugugauauugc

SEQ ID NO: 620136 - RNA, 22 nt, Human
uucucacaggcuggaaugauga

SEQ ID NO: 620137 - RNA, 22 nt, Human
ucagguccccaacucuucucac

SEQ ID NO: 620138 - RNA, 22 nt, Human
cagcuggguggcucuucugcuc

SEQ ID NO: 620139 - RNA, 22 nt, Human
caguuucuguggucucuuuuca

SEQ ID NO: 620140 - RNA, 22 nt, Human
accugcaggggugcucucuggg

SEQ ID NO: 620141 - RNA, 22 nt, Human
gcuggcuggcgggugcguccuc

SEQ ID NO: 620142 - RNA, 22 nt, Human
uccaaaggaagaggcugucagu

SEQ ID NO: 620143 - RNA, 22 nt, Human
cccagccugucuuucccaauga

SEQ ID NO: 620144 - RNA, 22 nt, Human
acaggggcuccgaaggugaggg

SEQ ID NO: 620145 - RNA, 22 nt, Human
ugaagauccuaucugcaaauau

SEQ ID NO: 620146 - RNA, 22 nt, Human
ggggcccagcaccccuccucgc

SEQ ID NO: 620147 - RNA, 22 nt, Human
ugguuccuacgcacauugaauu

SEQ ID NO: 620148 - RNA, 22 nt, Human
ccugggcuuacgaccucugacu

SEQ ID NO: 620149 - RNA, 22 nt, Human
augggcaagggguaaggacacu

SEQ ID NO: 620150 - RNA, 22 nt, Human
augaaagaugauuuaaaguacu

SEQ ID NO: 620151 - RNA, 23 nt, Human
uggcucucucagugcugcagagg

SEQ ID NO: 620152 - RNA, 22 nt, Human
guggaagguaaugcagcuuacu

SEQ ID NO: 620153 - RNA, 22 nt, Human
uccuguguaaauagaucugguu

SEQ ID NO: 620154 - RNA, 22 nt, Human
uuaaauaguaggucuauuuugg

SEQ ID NO: 620155 - RNA, 22 nt, Human
uccugggugugauauucauaga

SEQ ID NO: 620156 - RNA, 20 nt, Human
agccucugcccuucccacug

SEQ ID NO: 620157 - RNA, 22 nt, Human
cuggagcucuucugagugugcu

SEQ ID NO: 620158 - RNA, 22 nt, Human
accuguuucucucugaguuacu

SEQ ID NO: 620159 - RNA, 22 nt, Human
ggagggccccuccagugggcag

SEQ ID NO: 620160 - RNA, 22 nt, Human
auuuauuaugggauuuggcuca

SEQ ID NO: 620161 - RNA, 22 nt, Human
cuggcucauagagcagcuccaa

SEQ ID NO: 620162 - RNA, 22 nt, Human
cucaaauauguggucagaaagc

SEQ ID NO: 620163 - RNA, 22 nt, Human
gugggagaagauuuggucaucu

SEQ ID NO: 620164 - RNA, 22 nt, Human
agagucugugcuuucaucagga

SEQ ID NO: 620165 - RNA, 22 nt, Human
ggguccagggacguuucugcag

SEQ ID NO: 620166 - RNA, 22 nt, Human
acaguguucugaaaguugaggg

SEQ ID NO: 620167 - RNA, 22 nt, Human
ggcaggcucagcagccaaggag

SEQ ID NO: 620168 - RNA, 22 nt, Human
uccuucaagaugccacagcuuu

SEQ ID NO: 620169 - RNA, 22 nt, Human
gcaguguuguuaaaagauuaga

SEQ ID NO: 620170 - RNA, 22 nt, Human
uggcacuuagaucagguugggu

SEQ ID NO: 620171 - RNA, 22 nt, Human
agggcucaauggugggcaugua

SEQ ID NO: 620172 - RNA, 22 nt, Human
auauuauucuagcucuugugug

SEQ ID NO: 620173 - RNA, 22 nt, Human
acuuguugcccuccugaaaauu

SEQ ID NO: 620174 - RNA, 22 nt, Human
ggccacuguccucuagcccaga

SEQ ID NO: 620175 - RNA, 22 nt, Human
uuguuuccauugcagacugugu

SEQ ID NO: 620176 - RNA, 22 nt, Human
agaagccauggggucaccagag

SEQ ID NO: 620177 - RNA, 22 nt, Human
uccucacagaguggcaggcaau

SEQ ID NO: 620178 - RNA, 22 nt, Human
gagaagggauaugccacucucg

SEQ ID NO: 620179 - RNA, 22 nt, Human
cuuuuacacucaucugggaggg

SEQ ID NO: 620180 - RNA, 22 nt, Human
ggcuccugccgucuuuucugag

SEQ ID NO: 620181 - RNA, 22 nt, Human
cuguuaaaugagaaagcagacu

SEQ ID NO: 620182 - RNA, 22 nt, Human
gcagcaggauggccaauugcca

SEQ ID NO: 620183 - RNA, 22 nt, Human
uucuggcuuauccuaacucuaa

SEQ ID NO: 620184 - RNA, 22 nt, Human
cuguggcucucugcaggguccc

SEQ ID NO: 620185 - RNA, 23 nt, Human
ucuggcuuugcuggaaguuuuga

SEQ ID NO: 620186 - RNA, 23 nt, Human
uggagaauucuuccuuccacugu

SEQ ID NO: 620187 - RNA, 22 nt, Human
uuggcauuggagaugcaagaac

SEQ ID NO: 620188 - RNA, 23 nt, Human
gccugggacucaggaggagcuca

SEQ ID NO: 620189 - RNA, 22 nt, Human
uugaagauucuuuuuguuagua

SEQ ID NO: 620190 - RNA, 22 nt, Human
aaaguagaggcauugaucaggu

SEQ ID NO: 620191 - RNA, 23 nt, Human
ucucugggugggcugugucuaua

SEQ ID NO: 620192 - RNA, 22 nt, Human
cuggugaauggauaaacuguug

SEQ ID NO: 620193 - RNA, 22 nt, Human
uuaaaugagauguucagauauu

SEQ ID NO: 620194 - RNA, 22 nt, Human
aauagaauguaaucuaauacau

SEQ ID NO: 620195 - RNA, 20 nt, Human
ugaggcaggagaauggcaug

SEQ ID NO: 620196 - RNA, 22 nt, Human
uuucugugguggguaguucaga

SEQ ID NO: 620197 - RNA, 22 nt, Human
gucuggcuuuugcccuguguuu

SEQ ID NO: 620198 - RNA, 22 nt, Human
gccucugcaauuacauugugcc

SEQ ID NO: 620199 - RNA, 22 nt, Human
uauuuucaccuucucuggauau

SEQ ID NO: 620200 - RNA, 22 nt, Human
uggaaggcuuggaauacuucca

SEQ ID NO: 620201 - RNA, 22 nt, Human
augagagguuucgucagaggaa

SEQ ID NO: 620202 - RNA, 22 nt, Human
uggaccucacugucugcuggua

SEQ ID NO: 620203 - RNA, 22 nt, Human
ccaguguuuaggaauaaaaugu

SEQ ID NO: 620204 - RNA, 22 nt, Human
ccaggcugaauauguuccaggg

SEQ ID NO: 620205 - RNA, 22 nt, Human
agguucaggcugcacaccugag

SEQ ID NO: 620206 - RNA, 22 nt, Human
aaagcacuucaggagcaguuug

SEQ ID NO: 620207 - RNA, 22 nt, Human
ucagcaggcacaccaaaaacug

SEQ ID NO: 620208 - RNA, 22 nt, Human
acaugaaaguuauucugaguug

SEQ ID NO: 620209 - RNA, 22 nt, Human
guccugggaacuggacagcuaa

SEQ ID NO: 620210 - RNA, 22 nt, Human
ugugcaaaguguacaaauuaau

SEQ ID NO: 620211 - RNA, 22 nt, Human
aucugucuauguggcuauguau

SEQ ID NO: 620212 - RNA, 22 nt, Human
uccuguguuacugccuggagcg

SEQ ID NO: 620213 - RNA, 22 nt, Human
cauuaaaauaucucaugguguu

SEQ ID NO: 620214 - RNA, 22 nt, Human
gugcccugguccccagcauaua

SEQ ID NO: 620215 - RNA, 22 nt, Human
uugcccugaagaacgucccaga

SEQ ID NO: 620216 - RNA, 22 nt, Human
ggguccagacacuccagaggaa

SEQ ID NO: 620217 - RNA, 22 nt, Human
cuguggcucauaucuguaaucu

SEQ ID NO: 620218 - RNA, 23 nt, Human
guuuuacaggugagaaaauggag

SEQ ID NO: 620219 - RNA, 22 nt, Human
uuuuauaagcaagaaagggaaa

SEQ ID NO: 620220 - RNA, 22 nt, Human
agguccagaacgugccuacucu

SEQ ID NO: 620221 - RNA, 22 nt, Human
gcagccaggggcugugaccugu

SEQ ID NO: 620222 - RNA, 22 nt, Human
aagggaaacuuucacaaugucc

SEQ ID NO: 620223 - RNA, 22 nt, Human
aauggcuauacaacaugaguau

SEQ ID NO: 620224 - RNA, 22 nt, Human
ccagguccuguuuucaccacag

SEQ ID NO: 620225 - RNA, 22 nt, Human
uucccuggggaaggugaccuuu

SEQ ID NO: 620226 - RNA, 22 nt, Human
gcaguguuuacauauuagaaac

SEQ ID NO: 620227 - RNA, 22 nt, Human
uccagggccugagguugaagug

SEQ ID NO: 620228 - RNA, 18 nt, Human
gggcuuuacagaguggag

SEQ ID NO: 620229 - RNA, 22 nt, Human
aaggcuggguuugggaugugau

SEQ ID NO: 620230 - RNA, 22 nt, Human
uggccaggcagguagaacggcc

SEQ ID NO: 620231 - RNA, 22 nt, Human
aaggagucugggccauucagag

SEQ ID NO: 620232 - RNA, 15 nt, Human
gggcaggucuggggc

SEQ ID NO: 620233 - RNA, 22 nt, Human
aaaaaauuccauucugugccuu

SEQ ID NO: 620234 - RNA, 22 nt, Human
aagcaggagaugggugcuuuuc

SEQ ID NO: 620235 - RNA, 22 nt, Human
gcucuuuguauuuuggaaucaa

SEQ ID NO: 620236 - RNA, 22 nt, Human
ccugggugaugugcugcccucg

SEQ ID NO: 620237 - RNA, 22 nt, Human
uggcaggugccaugggcucaga

SEQ ID NO: 620238 - RNA, 22 nt, Human
gcaguguuaccuugggcugguu

SEQ ID NO: 620239 - RNA, 22 nt, Human
uggagaauauuuccaaaucuaa

SEQ ID NO: 620240 - RNA, 22 nt, Human
gcaccuuucuauauucaguggc

SEQ ID NO: 620241 - RNA, 22 nt, Human
uucuuucugaauacaguugagu

SEQ ID NO: 620242 - RNA, 22 nt, Human
auuugcuuccuaauacucauau

SEQ ID NO: 620243 - RNA, 22 nt, Human
accuucaagaaacauuuccuug

SEQ ID NO: 620244 - RNA, 22 nt, Human
aagacaauauugcugugaacgu

SEQ ID NO: 620245 - RNA, 22 nt, Human
gugugucugaaguugaguagac

SEQ ID NO: 620246 - RNA, 23 nt, Human
gcucuggcagcuugugucagcac

SEQ ID NO: 620247 - RNA, 22 nt, Human
ucaaaaauggucuuugagcugc

SEQ ID NO: 620248 - RNA, 22 nt, Human
agcuguguucugguugauucac

SEQ ID NO: 620249 - RNA, 22 nt, Human
uccuuggggacgcugacaucgu

SEQ ID NO: 620250 - RNA, 22 nt, Human
auuugcuugacuauggcuugca

SEQ ID NO: 620251 - RNA, 22 nt, Human
ggggccuuggaucugugccccg

SEQ ID NO: 620252 - RNA, 22 nt, Human
gccucccuggcccacagcagcg

SEQ ID NO: 620253 - RNA, 22 nt, Human
accaggaggccuggagcacaaa

SEQ ID NO: 620254 - RNA, 22 nt, Human
aaaacacugcaaagcugauugg

SEQ ID NO: 620255 - RNA, 22 nt, Human
guuuucuaaguagguagcacca

SEQ ID NO: 620256 - RNA, 22 nt, Human
agaaagaacgcacuugugcugc

SEQ ID NO: 620257 - RNA, 22 nt, Human
uggcuccuuuccgggucuccag

SEQ ID NO: 620258 - RNA, 22 nt, Human
auggccagccacuccugauggc

SEQ ID NO: 620259 - RNA, 22 nt, Human
ggcaccugguaagugcucagua

SEQ ID NO: 620260 - RNA, 22 nt, Human
ugccuucaagacccauccucca

SEQ ID NO: 620261 - RNA, 22 nt, Human
ugcagcagagugggccugggug

SEQ ID NO: 620262 - RNA, 22 nt, Human
ggagaauggccaucuuuucaga

SEQ ID NO: 620263 - RNA, 22 nt, Human
cagcccugcacgcugccuccgc

SEQ ID NO: 620264 - RNA, 22 nt, Human
acaagcuccuuauucagcuggg

SEQ ID NO: 620265 - RNA, 22 nt, Human
cugugucggacgugggcagcag

SEQ ID NO: 620266 - RNA, 23 nt, Human
aauuacaaccaagaacuggaagg

SEQ ID NO: 620267 - RNA, 22 nt, Human
ccaggccucccuuuuccagcca

SEQ ID NO: 620268 - RNA, 22 nt, Human
uuugcaaacacuuaagaagaga

SEQ ID NO: 620269 - RNA, 22 nt, Human
aggaccagaggccagagucagc

SEQ ID NO: 620270 - RNA, 22 nt, Human
uggcggggcagcucuggcuucu

SEQ ID NO: 620271 - RNA, 22 nt, Human
uuuauuauagugguggggacug

SEQ ID NO: 620272 - RNA, 22 nt, Human
ggccaccuggcugugggggcag

SEQ ID NO: 620273 - RNA, 22 nt, Human
uagguucauauucuagaaucau

SEQ ID NO: 620274 - RNA, 22 nt, Human
uauuuuacagacuacuuuagau

SEQ ID NO: 620275 - RNA, 22 nt, Human
augguguuuauaggcaaagauc

SEQ ID NO: 620276 - RNA, 22 nt, Human
caggugggcugccucuccagcu

SEQ ID NO: 620277 - RNA, 17 nt, Human
aggcauggucuggggug

SEQ ID NO: 620278 - RNA, 21 nt, Human
cucugcagugcccaccuugcc

SEQ ID NO: 620279 - RNA, 22 nt, Human
cugggucuggcuacugcuuccu

SEQ ID NO: 620280 - RNA, 22 nt, Human
ccuggguuaguaucuguuucca

SEQ ID NO: 620281 - RNA, 22 nt, Human
ugucauuuauucucuuauucua

SEQ ID NO: 620282 - RNA, 22 nt, Human
uuacaagacacugcugacacag

SEQ ID NO: 620283 - RNA, 21 nt, Human
ccugugugugucccuuuaaga

SEQ ID NO: 620284 - RNA, 22 nt, Human
gaaguagaaaacucaguuucaa

SEQ ID NO: 620285 - RNA, 22 nt, Human
ggccuggagucagggaaagcaa

SEQ ID NO: 620286 - RNA, 22 nt, Human
agccucugucaagcuuuucaaa

SEQ ID NO: 620287 - RNA, 22 nt, Human
auuguugaucuucugguaagcc

SEQ ID NO: 620288 - RNA, 22 nt, Human
caaagauaugacauggaaaaug

SEQ ID NO: 620289 - RNA, 22 nt, Human
uccgggagcugaacgucuugcg

SEQ ID NO: 620290 - RNA, 22 nt, Human
caggucccguuccccagagauu

SEQ ID NO: 620291 - RNA, 22 nt, Human
ucaaaggaaacacaagcuucug

SEQ ID NO: 620292 - RNA, 22 nt, Human
ggcgaggccgggacaggcugga

SEQ ID NO: 620293 - RNA, 22 nt, Human
uuucaguguguaaauugaaaua

SEQ ID NO: 620294 - RNA, 22 nt, Human
ucuguggcuugggccugccugu

SEQ ID NO: 620295 - RNA, 22 nt, Human
aacuuguuagaaaugcagaauc

SEQ ID NO: 620296 - RNA, 22 nt, Human
ccagugugggcccggccuccuc

SEQ ID NO: 620297 - RNA, 22 nt, Human
agcaaaauaagguaauuuauug

SEQ ID NO: 620298 - RNA, 22 nt, Human
cauggccagcccccaguuccuc

SEQ ID NO: 620299 - RNA, 22 nt, Human
gcaguguucuaaauugggugug

SEQ ID NO: 620300 - RNA, 22 nt, Human
uuucagagaacugaguccuugc

SEQ ID NO: 620301 - RNA, 22 nt, Human
cgucuuccucuuacgaugcgcu

SEQ ID NO: 620302 - RNA, 22 nt, Human
aggcugguaguauuuagucaca

SEQ ID NO: 620303 - RNA, 21 nt, Human
agauuacaggugugauccacc

SEQ ID NO: 620304 - RNA, 22 nt, Human
uccccuccaacuccaacuaugg

SEQ ID NO: 620305 - RNA, 22 nt, Human
uucacagugagcuaugucuugu

SEQ ID NO: 620306 - RNA, 22 nt, Human
caggugccucaggaugagacaa

SEQ ID NO: 620307 - RNA, 20 nt, Human
aggucucagagcaagagccc

SEQ ID NO: 620308 - RNA, 22 nt, Human
cccuguuuaagaaaccuguaaa

SEQ ID NO: 620309 - RNA, 22 nt, Human
uauaaauuaaugugcccaugag

SEQ ID NO: 620310 - RNA, 22 nt, Human
aaaauauuuuagggccaggaga

SEQ ID NO: 620311 - RNA, 22 nt, Human
augcccuggacuagcuauacuu

SEQ ID NO: 620312 - RNA, 22 nt, Human
gaagucuucaucugaugcucug

SEQ ID NO: 620313 - RNA, 22 nt, Human
aggucaaguuuagauagaguua

SEQ ID NO: 620314 - RNA, 22 nt, Human
cugugugcauaguugugcucaa

SEQ ID NO: 620315 - RNA, 22 nt, Human
uuaucaguuguguguauacacg

SEQ ID NO: 620316 - RNA, 17 nt, Human
agcuccuggggucuuua

SEQ ID NO: 620317 - RNA, 22 nt, Human
gaaggaagauucuguuggaauc

SEQ ID NO: 620318 - RNA, 22 nt, Human
uuuauuaugauggacaccuucg

SEQ ID NO: 620319 - RNA, 22 nt, Human
ugcacuuuauuuccucucacac

SEQ ID NO: 620320 - RNA, 22 nt, Human
auauuuaaacaggguaccaaua

SEQ ID NO: 620321 - RNA, 22 nt, Human
aagaaagccaaaguucauaccu

SEQ ID NO: 620322 - RNA, 22 nt, Human
ccagggagccuggugugucagc

SEQ ID NO: 620323 - RNA, 22 nt, Human
agagagccugaguggcagcuau

SEQ ID NO: 620324 - RNA, 22 nt, Human
aaaaugaagcaaaggcauucag

SEQ ID NO: 620325 - RNA, 22 nt, Human
ugcugccugguuucuucuugcu

SEQ ID NO: 620326 - RNA, 22 nt, Human
auuuuuccugcuggaucugcuc

SEQ ID NO: 620327 - RNA, 21 nt, Human
guucaauagcucuuugaaugc

SEQ ID NO: 620328 - RNA, 22 nt, Human
ccugugugauuggaagcugaga

SEQ ID NO: 620329 - RNA, 22 nt, Human
uuuuaacuuaaaauacauagau

SEQ ID NO: 620330 - RNA, 22 nt, Human
aagugcaaauuuaagaaggcau

SEQ ID NO: 620331 - RNA, 22 nt, Human
ugucaugggucuaaacauugau

SEQ ID NO: 620332 - RNA, 22 nt, Human
aagacaauuugauacuaguugc

SEQ ID NO: 620333 - RNA, 22 nt, Human
cccaguguuccuugaggggcug

SEQ ID NO: 620334 - RNA, 22 nt, Human
acucagcugaugaagcacaagu

SEQ ID NO: 620335 - RNA, 22 nt, Human
ugggagucaacccucacgagca

SEQ ID NO: 620336 - RNA, 22 nt, Human
uccaggcaaagugcugggcugc

SEQ ID NO: 620337 - RNA, 22 nt, Human
uuuugaaagggugauuuggcuu

SEQ ID NO: 620338 - RNA, 22 nt, Human
guuuuggcagccguguucacau

SEQ ID NO: 620339 - RNA, 22 nt, Human
gugugagcaucaaagccuguca

SEQ ID NO: 620340 - RNA, 22 nt, Human
gcuguguaucagaugccacggg

SEQ ID NO: 620341 - RNA, 22 nt, Human
ccucccugcgcuccugcggcgg

SEQ ID NO: 620342 - RNA, 22 nt, Human
uggccacccacccuaaucuuuc

SEQ ID NO: 620343 - RNA, 22 nt, Human
cuggcucuuucagccgcuggag

SEQ ID NO: 620344 - RNA, 23 nt, Human
augcccugugcagaaauguggaa

SEQ ID NO: 620345 - RNA, 22 nt, Human
auccugggcagugugucacucu

SEQ ID NO: 620346 - RNA, 22 nt, Human
cagguccagucacuggucugca

SEQ ID NO: 620347 - RNA, 22 nt, Human
aagggggcacagucacuguaau

SEQ ID NO: 620348 - RNA, 22 nt, Human
ccugggcagggagaccaggcuc

SEQ ID NO: 620349 - RNA, 22 nt, Human
uccugagggcucggggcucaug

SEQ ID NO: 620350 - RNA, 22 nt, Human
uugaagauaggccaggaugagc

SEQ ID NO: 620351 - RNA, 22 nt, Human
acucaucagauuagauuagggc

SEQ ID NO: 620352 - RNA, 22 nt, Human
gccagugugguguagucaugaa

SEQ ID NO: 620353 - RNA, 22 nt, Human
auuuguugaauaaauuaguauu

SEQ ID NO: 620354 - RNA, 22 nt, Human
uccugggaagagaccugagcau

SEQ ID NO: 620355 - RNA, 18 nt, Human
ugauggaggagggcuggu

SEQ ID NO: 620356 - RNA, 22 nt, Human
uggacucaaguccaaguucacg

SEQ ID NO: 620357 - RNA, 22 nt, Human
aguuucuugaagacugauguuu

SEQ ID NO: 620358 - RNA, 22 nt, Human
ggucagggggaucugugaggua

SEQ ID NO: 620359 - RNA, 22 nt, Human
guggagcaggacuagcugagaa

SEQ ID NO: 620360 - RNA, 22 nt, Human
ucaguguuuuuaaagcaauaua

SEQ ID NO: 620361 - RNA, 22 nt, Human
ucuuuuauuaggcugaaauggg

SEQ ID NO: 620362 - RNA, 23 nt, Human
aggaagcuaaguguggcugcgga

SEQ ID NO: 620363 - RNA, 20 nt, Human
ggaagcagagaacuguuuuc

SEQ ID NO: 620364 - RNA, 22 nt, Human
ucagcucugccuguggaggcac

SEQ ID NO: 620365 - RNA, 22 nt, Human
gaucucugaaucugaagccuuc

SEQ ID NO: 620366 - RNA, 22 nt, Human
augcccugugguucaugugaga

SEQ ID NO: 620367 - RNA, 22 nt, Human
augcccugaggaaugucacgcu

SEQ ID NO: 620368 - RNA, 22 nt, Human
aggucuagauuuauagacagca

SEQ ID NO: 620369 - RNA, 19 nt, Human
uccaggagcaaagccaguu

SEQ ID NO: 620370 - RNA, 21 nt, Human
aucucgggcuucucgcccagc

SEQ ID NO: 620371 - RNA, 22 nt, Human
ggccucacccaucggugccuuu

SEQ ID NO: 620372 - RNA, 22 nt, Human
uucugugucuucuuguucugug

SEQ ID NO: 620373 - RNA, 22 nt, Human
uuugaguugcuuauuuaauagg

SEQ ID NO: 620374 - RNA, 22 nt, Human
gacacuguuauggugagguaag

SEQ ID NO: 620375 - RNA, 19 nt, Human
gcagugucaugguaggagc

SEQ ID NO: 620376 - RNA, 19 nt, Human
aggagaagacucucucccc

SEQ ID NO: 620377 - RNA, 22 nt, Human
cuguguuugacaggcggucucc

SEQ ID NO: 620378 - RNA, 22 nt, Human
uuaacaaaguaacgggaaaaga

SEQ ID NO: 620379 - RNA, 22 nt, Human
agcagaagugccuuagcaauca

SEQ ID NO: 620380 - RNA, 22 nt, Human
cuuguuaaauuauauaagcaga

SEQ ID NO: 620381 - RNA, 22 nt, Human
auauacaguauguacugugguu

SEQ ID NO: 620382 - RNA, 22 nt, Human
cccagccugugacagccguccu

SEQ ID NO: 620383 - RNA, 22 nt, Human
ccagcucugcauguuucccuug

SEQ ID NO: 620384 - RNA, 22 nt, Human
uccuggaggacagaggcaucuc

SEQ ID NO: 620385 - RNA, 22 nt, Human
ggagcugcacgcucugaagccu

SEQ ID NO: 620386 - RNA, 22 nt, Human
uccuggccuuagcgaggcgguc

SEQ ID NO: 620387 - RNA, 22 nt, Human
uuccgcuguuuaguugaaguuu

SEQ ID NO: 620388 - RNA, 22 nt, Human
agauggggcugaaaguuccaau

SEQ ID NO: 620389 - RNA, 22 nt, Human
guccaagagucaagaagggggc

SEQ ID NO: 620390 - RNA, 22 nt, Human
ucugcccuuggcucucuuguug

SEQ ID NO: 620391 - RNA, 22 nt, Human
uuggcucaggaccccugugacu

SEQ ID NO: 620392 - RNA, 22 nt, Human
gccugggauucccagaggggca

SEQ ID NO: 620393 - RNA, 22 nt, Human
gccuucuguccaaccccacgau

SEQ ID NO: 620394 - RNA, 22 nt, Human
ccucagucugucugaucugcca

SEQ ID NO: 620395 - RNA, 22 nt, Human
guguucauugcuagugaggugu

SEQ ID NO: 620396 - RNA, 22 nt, Human
auacaucaccuauauauucaca

SEQ ID NO: 620397 - RNA, 22 nt, Human
gauuuguuucaaguuagcaucu

SEQ ID NO: 620398 - RNA, 22 nt, Human
aggagaggucucccuuccccag

SEQ ID NO: 620399 - RNA, 20 nt, Human
acaguguuaguuaucaucuc

SEQ ID NO: 620400 - RNA, 22 nt, Human
ucccagggucaguggugaggcc

SEQ ID NO: 620401 - RNA, 22 nt, Human
ggcuggagugggcuccagaguu

SEQ ID NO: 620402 - RNA, 22 nt, Human
aaagggcugaugugacauagcu

SEQ ID NO: 620403 - RNA, 22 nt, Human
gaaguccuccuaucuugcucuu

SEQ ID NO: 620404 - RNA, 22 nt, Human
ucaguguucuuauuuaauuagg

SEQ ID NO: 620405 - RNA, 20 nt, Human
uccugcaguuccuaggaggg

SEQ ID NO: 620406 - RNA, 22 nt, Human
ucaguguuuauucaauguuauu

SEQ ID NO: 620407 - RNA, 22 nt, Human
aggaacaacugauucagucaac

SEQ ID NO: 620408 - RNA, 22 nt, Human
cuguggcugcgcccugggggag

SEQ ID NO: 620409 - RNA, 22 nt, Human
uagcaauguguguguauaaauu

SEQ ID NO: 620410 - RNA, 21 nt, Human
gacacaaaggguaguaauggu

SEQ ID NO: 620411 - RNA, 23 nt, Human
auuuuacaggucaguuccuugaa

SEQ ID NO: 620412 - RNA, 22 nt, Human
acaguguuuggcaaugcaugca

SEQ ID NO: 620413 - RNA, 22 nt, Human
uuguaugaucaaaagaaaugua

SEQ ID NO: 620414 - RNA, 22 nt, Human
ggcuuuaagguuuaggaagcaa

SEQ ID NO: 620415 - RNA, 22 nt, Human
aggucccaggcauagcuggucu

SEQ ID NO: 620416 - RNA, 22 nt, Human
agccuucaguaagggcuuagca

SEQ ID NO: 620417 - RNA, 22 nt, Human
uagugugguaaauaaauguuuu

SEQ ID NO: 620418 - RNA, 22 nt, Human
uuaaauuagucaagcuucucug

SEQ ID NO: 620419 - RNA, 22 nt, Human
cuggaagggggacagccacaca

SEQ ID NO: 620420 - RNA, 22 nt, Human
gugcccugaguggguaggagag

SEQ ID NO: 620421 - RNA, 22 nt, Human
gcagcuuucuugcccuaaucuu

SEQ ID NO: 620422 - RNA, 22 nt, Human
cgguccagggaacgcccccgcc

SEQ ID NO: 620423 - RNA, 22 nt, Human
auagaaaacagauguccuuaaa

SEQ ID NO: 620424 - RNA, 22 nt, Human
uccugggcagcgggacgcucag

SEQ ID NO: 620425 - RNA, 22 nt, Human
agccaugcuccuuccccucugg

SEQ ID NO: 620426 - RNA, 22 nt, Human
auccacccugugguggcuuucu

SEQ ID NO: 620427 - RNA, 22 nt, Human
ugagucuuuucauuguguggau

SEQ ID NO: 620428 - RNA, 22 nt, Human
auauuucuggggguguguuucu

SEQ ID NO: 620429 - RNA, 22 nt, Human
cuccugggcucauaucauucag

SEQ ID NO: 620430 - RNA, 22 nt, Human
ccaguccugcucccugaccacc

SEQ ID NO: 620431 - RNA, 22 nt, Human
cagguagaggcugccaucagcu

SEQ ID NO: 620432 - RNA, 22 nt, Human
uugucuggucaaaucacuugua

SEQ ID NO: 620433 - RNA, 22 nt, Human
ugagaaugccauaagagcuauu

SEQ ID NO: 620434 - RNA, 22 nt, Human
uucauauaaauggaaucagaau

SEQ ID NO: 620435 - RNA, 22 nt, Human
cugcccuguggcucugagucau

SEQ ID NO: 620436 - RNA, 17 nt, Human
agaggcagauacuugga

SEQ ID NO: 620437 - RNA, 22 nt, Human
aagguccaguggaaacuagagu

SEQ ID NO: 620438 - RNA, 22 nt, Human
ucugccugagggagcugaggaa

SEQ ID NO: 620439 - RNA, 22 nt, Human
agcugugguguuuucaagcccu

SEQ ID NO: 620440 - RNA, 22 nt, Human
gggagagguuacccgagcaacu

SEQ ID NO: 620441 - RNA, 22 nt, Human
aaauagaaaccaacaaggucag

SEQ ID NO: 620442 - RNA, 22 nt, Human
ucugggagguguuuugagaacu

SEQ ID NO: 620443 - RNA, 22 nt, Human
gcaguaaauaauuuuguguaua

SEQ ID NO: 620444 - RNA, 22 nt, Human
ugaguccaauaggggccuggaa

SEQ ID NO: 620445 - RNA, 23 nt, Human
agucauuaagaaguucaggaacu

SEQ ID NO: 620446 - RNA, 22 nt, Human
uaaauuguuuucuagaaguugu

SEQ ID NO: 620447 - RNA, 22 nt, Human
agaagacagagucuacauucua

SEQ ID NO: 620448 - RNA, 22 nt, Human
gaggcacugcaguacagugacu

SEQ ID NO: 620449 - RNA, 22 nt, Human
uccugaggcucacuuugaaugu

SEQ ID NO: 620450 - RNA, 22 nt, Human
ucuuuuuauauugacaaaaggu

SEQ ID NO: 620451 - RNA, 22 nt, Human
uagaauugggccuaacuuccau

SEQ ID NO: 620452 - RNA, 22 nt, Human
cagcaggaggugaguagcaggu

SEQ ID NO: 620453 - RNA, 23 nt, Human
cccuggaguaaauucuuggaagg

SEQ ID NO: 620454 - RNA, 22 nt, Human
cugggcuguuuguucuggucuc

SEQ ID NO: 620455 - RNA, 20 nt, Human
ccuguuccauucccucaacc

SEQ ID NO: 620456 - RNA, 22 nt, Human
cccugguucagguuucucugaa

SEQ ID NO: 620457 - RNA, 22 nt, Human
aauagcauagaguuaaaaugca

SEQ ID NO: 620458 - RNA, 22 nt, Human
cagcuguucuugggacagacag

SEQ ID NO: 620459 - RNA, 22 nt, Human
uggccaccuucccacuucugcc

SEQ ID NO: 620460 - RNA, 22 nt, Human
gggcaggugugcagagcuguug

SEQ ID NO: 620461 - RNA, 22 nt, Human
aaauuagaagugcucaggaaua

SEQ ID NO: 620462 - RNA, 22 nt, Human
agguccagcucuauugaaaaga

SEQ ID NO: 620463 - RNA, 22 nt, Human
agguccugaagauuuuacuaga

SEQ ID NO: 620464 - RNA, 22 nt, Human
ccaguguuuacaguugaacaaa

SEQ ID NO: 620465 - RNA, 22 nt, Human
uauucaugagauaggcaguuuu

SEQ ID NO: 620466 - RNA, 22 nt, Human
cucuucuuauggccguggcuga

SEQ ID NO: 620467 - RNA, 22 nt, Human
aguuuggaagucaggcuuuucu

SEQ ID NO: 620468 - RNA, 22 nt, Human
ugaggcagcauucuucaagaca

SEQ ID NO: 620469 - RNA, 22 nt, Human
cggucaggugcagcguuggcac

SEQ ID NO: 620470 - RNA, 22 nt, Human
gaggcaguuugccaugccagga

SEQ ID NO: 620471 - RNA, 22 nt, Human
augacagaaggccucccugaca

SEQ ID NO: 620472 - RNA, 21 nt, Human
gccagcugcagggcuuccuug

SEQ ID NO: 620473 - RNA, 22 nt, Human
ccaguguucccucggguucaug

SEQ ID NO: 620474 - RNA, 22 nt, Human
ugucuuuuauaacugacauaua

SEQ ID NO: 620475 - RNA, 22 nt, Human
gugcccugaucgcuaggcuccc

SEQ ID NO: 620476 - RNA, 22 nt, Human
uggcagguuggccuuugguuca

SEQ ID NO: 620477 - RNA, 22 nt, Human
uggcuccuucauucuccugcca

SEQ ID NO: 620478 - RNA, 22 nt, Human
aaguccugggcauuugaacagg

SEQ ID NO: 620479 - RNA, 22 nt, Human
ccugcagggaaucgaggcagaa

SEQ ID NO: 620480 - RNA, 22 nt, Human
uccugaggcccuguuagggucu

SEQ ID NO: 620481 - RNA, 22 nt, Human
caaucccaucaccaucugcucu

SEQ ID NO: 620482 - RNA, 22 nt, Human
cccagccucuggguucugccgg

SEQ ID NO: 620483 - RNA, 22 nt, Human
accugccagugaauacuaucuu

SEQ ID NO: 620484 - RNA, 22 nt, Human
ucaaaacaacacucagguguaa

SEQ ID NO: 620485 - RNA, 18 nt, Human
cuccugggcugcagaugc

SEQ ID NO: 620486 - RNA, 22 nt, Human
cucugcuuuuuagggagccuag

SEQ ID NO: 620487 - RNA, 22 nt, Human
caggccagguggcaggcaaaac

SEQ ID NO: 620488 - RNA, 22 nt, Human
gaagaaagaucaaauaguuucc

SEQ ID NO: 620489 - RNA, 22 nt, Human
cagagccuggcgaugucaugga

SEQ ID NO: 620490 - RNA, 22 nt, Human
uuugucuuggccaagguucuga

SEQ ID NO: 620491 - RNA, 22 nt, Human
auuucacaaagaacagaugcag

SEQ ID NO: 620492 - RNA, 22 nt, Human
uccuuggagguguucaucugcc

SEQ ID NO: 620493 - RNA, 22 nt, Human
aaguaacuaaagauauccauuu

SEQ ID NO: 620494 - RNA, 22 nt, Human
ccugggcuucugucuagauguu

SEQ ID NO: 620495 - RNA, 22 nt, Human
aggugcagcugguggagucugg

SEQ ID NO: 620496 - RNA, 22 nt, Human
ugaagcagaggggucuugagcu

SEQ ID NO: 620497 - RNA, 17 nt, Human
gagucuguguucaucag

SEQ ID NO: 620498 - RNA, 22 nt, Human
uugugaauggugccgcaauaaa

SEQ ID NO: 620499 - RNA, 22 nt, Human
uguuccuguacugcuguggcuu

SEQ ID NO: 620500 - RNA, 22 nt, Human
cagcuguuacucugaguaaaug

SEQ ID NO: 620501 - RNA, 22 nt, Human
gccuguuuguuaugucauggua

SEQ ID NO: 620502 - RNA, 17 nt, Human
gcaggcacugcugccug

SEQ ID NO: 620503 - RNA, 22 nt, Human
ccagcucucugcagaaaggacu

SEQ ID NO: 620504 - RNA, 22 nt, Human
cagaggccauauuucuucacuc

SEQ ID NO: 620505 - RNA, 22 nt, Human
cuggaagguucuuugugugccu

SEQ ID NO: 620506 - RNA, 20 nt, Human
gauaaauugucucuuaagug

SEQ ID NO: 620507 - RNA, 22 nt, Human
ccucugcacuucaccuuagcuc

SEQ ID NO: 620508 - RNA, 22 nt, Human
uauauaugggggaagcuggaug

SEQ ID NO: 620509 - RNA, 20 nt, Human
uuauguguaccugugcuccc

SEQ ID NO: 620510 - RNA, 22 nt, Human
gccuucugugcuccuggccuuu

SEQ ID NO: 620511 - RNA, 22 nt, Human
gcaaagaaaugucagugagagg

SEQ ID NO: 620512 - RNA, 22 nt, Human
ugaagcuuuaggauggguucau

SEQ ID NO: 620513 - RNA, 22 nt, Human
gcugccuuccaaagaguuuuau

SEQ ID NO: 620514 - RNA, 22 nt, Human
gagagcugggcuuugggugaag

SEQ ID NO: 620515 - RNA, 22 nt, Human
agauuucacaugcugcucuauu

SEQ ID NO: 620516 - RNA, 22 nt, Human
ucugacccguggcucugccucc

SEQ ID NO: 620517 - RNA, 22 nt, Human
cagauaaauagauagauaaacu

SEQ ID NO: 620518 - RNA, 22 nt, Human
ccucucccgggugccgcugggc

SEQ ID NO: 620519 - RNA, 22 nt, Human
uccagaggcaaaaagguaugga

SEQ ID NO: 620520 - RNA, 22 nt, Human
ucagcucuguuuugaguggaac

SEQ ID NO: 620521 - RNA, 22 nt, Human
augaucucauucuuucaaaggg

SEQ ID NO: 620522 - RNA, 22 nt, Human
uccuuagacaaagagugggcuu

SEQ ID NO: 620523 - RNA, 22 nt, Human
ucauugcaguagggagagaccc

SEQ ID NO: 620524 - RNA, 20 nt, Human
ugggauuguuuuuuagcuuc

SEQ ID NO: 620525 - RNA, 18 nt, Human
agaauugcugcuucuucu

SEQ ID NO: 620526 - RNA, 20 nt, Human
gcaagugaaaacuaugggug

SEQ ID NO: 620527 - RNA, 22 nt, Human
gggcggggggagcuggaaugaa

SEQ ID NO: 620528 - RNA, 22 nt, Human
gauggagucugaagcugggaac

SEQ ID NO: 620529 - RNA, 22 nt, Human
gcugaggcaaauaguuuuaagu

SEQ ID NO: 620530 - RNA, 22 nt, Human
cagaagcugcagugaucuggga

SEQ ID NO: 620531 - RNA, 22 nt, Human
gagguccagccaagcggcaagg

SEQ ID NO: 620532 - RNA, 22 nt, Human
cccuggaguccuggcaguugau

SEQ ID NO: 620533 - RNA, 22 nt, Human
uaacagaaauagaaaugagagu

SEQ ID NO: 620534 - RNA, 22 nt, Human
augacuucaccucugugaagca

SEQ ID NO: 620535 - RNA, 22 nt, Human
uggcagccaucagagcaggggu

SEQ ID NO: 620536 - RNA, 22 nt, Human
ccaguguucugguguucauuuc

SEQ ID NO: 620537 - RNA, 22 nt, Human
auggccaguguuucccucaguu

SEQ ID NO: 620538 - RNA, 22 nt, Human
gacagcaucuguguggcaggag

SEQ ID NO: 620539 - RNA, 22 nt, Human
uagaggcauaagagggaagcag

SEQ ID NO: 620540 - RNA, 22 nt, Human
gaaggggguugcagucuagggu

SEQ ID NO: 620541 - RNA, 22 nt, Human
ucagaacaguucuuaauauugc

SEQ ID NO: 620542 - RNA, 22 nt, Human
ucugggagcagcucagcagauu

SEQ ID NO: 620543 - RNA, 22 nt, Human
caauauauaaugaguacuuucc

SEQ ID NO: 620544 - RNA, 22 nt, Human
cugccacuuuggagugcucaga

SEQ ID NO: 620545 - RNA, 22 nt, Human
gaguccaguuguucacagaggc

SEQ ID NO: 620546 - RNA, 20 nt, Human
ggagggcagcugagaguugg

SEQ ID NO: 620547 - RNA, 21 nt, Human
agcugccugcucuggaccugg

SEQ ID NO: 620548 - RNA, 22 nt, Human
gagggccagaguccugggguca

SEQ ID NO: 620549 - RNA, 22 nt, Human
gccaccugccaacuugcuggaa

SEQ ID NO: 620550 - RNA, 22 nt, Human
uuaauuacaaaacacauagguu

SEQ ID NO: 620551 - RNA, 22 nt, Human
gacagcagccacagggagaggg

SEQ ID NO: 620552 - RNA, 20 nt, Human
uccuggaguauuccaugcuu

SEQ ID NO: 620553 - RNA, 21 nt, Human
acaguucaugauaacuccauc

SEQ ID NO: 620554 - RNA, 22 nt, Human
aagaucaagaucagagaacagc

SEQ ID NO: 620555 - RNA, 22 nt, Human
cuggcagcauuaacagagagca

SEQ ID NO: 620556 - RNA, 22 nt, Human
agacaaagaaaccguagaagca

SEQ ID NO: 620557 - RNA, 22 nt, Human
agggccugggccagcacccuuu

SEQ ID NO: 620558 - RNA, 22 nt, Human
uuucagagccuuuaucucucua

SEQ ID NO: 620559 - RNA, 22 nt, Human
uguaccuggagagcucuuggcc

SEQ ID NO: 620560 - RNA, 22 nt, Human
ucagcuuuccugcagcuaaggg

SEQ ID NO: 620561 - RNA, 22 nt, Human
ucuugggagucccaggacauag

SEQ ID NO: 620562 - RNA, 22 nt, Human
ugugugaaucuauugaauauau

SEQ ID NO: 620563 - RNA, 22 nt, Human
cuggagaagcauucaaauaauu

SEQ ID NO: 620564 - RNA, 22 nt, Human
gggcaggugauuuuggcuccau

SEQ ID NO: 620565 - RNA, 22 nt, Human
uuuucaguuacuguuuauguga

SEQ ID NO: 620566 - RNA, 22 nt, Human
ucaguguuuuccagggucuacu

SEQ ID NO: 620567 - RNA, 22 nt, Human
aauaauacaugagauuaauguu

SEQ ID NO: 620568 - RNA, 22 nt, Human
cccuguguaguuaacuuuccac

SEQ ID NO: 620569 - RNA, 20 nt, Human
ccuguguggccagcugaggc

SEQ ID NO: 620570 - RNA, 22 nt, Human
gggcagguauuuaucuucuauu

SEQ ID NO: 620571 - RNA, 22 nt, Human
acuguggccugcuguaugggcu

SEQ ID NO: 620572 - RNA, 22 nt, Human
ucuggaguugugcaguggaccu

SEQ ID NO: 620573 - RNA, 22 nt, Human
aaaacauuuuacugccaucuca

SEQ ID NO: 620574 - RNA, 22 nt, Human
uuuccuuguuauuauuuguccu

SEQ ID NO: 620575 - RNA, 22 nt, Human
uccacagggauguugaguucuu

SEQ ID NO: 620576 - RNA, 18 nt, Human
ccucugccauagccagca

SEQ ID NO: 620577 - RNA, 22 nt, Human
accuucaaacuagauagaaguu

SEQ ID NO: 620578 - RNA, 22 nt, Human
uuuaauuagcaagccagagagc

SEQ ID NO: 620579 - RNA, 22 nt, Human
gggagauggcucagaggccgcg

SEQ ID NO: 620580 - RNA, 22 nt, Human
cagagcauaauugacaugaggu

SEQ ID NO: 620581 - RNA, 22 nt, Human
cagguucagcaggaggcauccc

SEQ ID NO: 620582 - RNA, 22 nt, Human
uccuucuuucccccuagucauu

SEQ ID NO: 620583 - RNA, 19 nt, Human
agggaauccggcugaggga

SEQ ID NO: 620584 - RNA, 22 nt, Human
cugcccugcccaggccuugggc

SEQ ID NO: 620585 - RNA, 22 nt, Human
cauaaauucaguucugccucuu

SEQ ID NO: 620586 - RNA, 22 nt, Human
guccaggaagcaauaaauagaa

SEQ ID NO: 620587 - RNA, 21 nt, Human
uggcggggacuuguggcugcc

SEQ ID NO: 620588 - RNA, 22 nt, Human
uuacuaggccaguuuucacuuu

SEQ ID NO: 620589 - RNA, 19 nt, Human
ucuguggccuucccugaug

SEQ ID NO: 620590 - RNA, 22 nt, Human
uggaaucucuuuggggacugaa

SEQ ID NO: 620591 - RNA, 21 nt, Human
agcagagugcuuugacuuugu

SEQ ID NO: 620592 - RNA, 22 nt, Human
agggccuggaacugugggcagg

SEQ ID NO: 620593 - RNA, 22 nt, Human
cuguggcucaauugccuacuga

SEQ ID NO: 620594 - RNA, 22 nt, Human
ccaggaguuggaagcugccaug

SEQ ID NO: 620595 - RNA, 19 nt, Human
gguccagacuucagacuag

SEQ ID NO: 620596 - RNA, 22 nt, Human
uuuguugacaucccuguacuuu

SEQ ID NO: 620597 - RNA, 22 nt, Human
ugggcugccggcaggcucugcc

SEQ ID NO: 620598 - RNA, 22 nt, Human
agauauuuguaucuugcuauug

SEQ ID NO: 620599 - RNA, 22 nt, Human
uuuuuacagucauggucacuca

SEQ ID NO: 620600 - RNA, 22 nt, Human
aaaugcuagggagaaacucucc

SEQ ID NO: 620601 - RNA, 22 nt, Human
uuggaaauacgaguaguaucau

SEQ ID NO: 620602 - RNA, 22 nt, Human
ggccggggccuccccgcgucgc

SEQ ID NO: 620603 - RNA, 22 nt, Human
agccucugcuggcccuggcacu

SEQ ID NO: 620604 - RNA, 22 nt, Human
agaucacaguggcaacucccuu

SEQ ID NO: 620605 - RNA, 22 nt, Human
gcaguguuggcaggauggggcu

SEQ ID NO: 620606 - RNA, 22 nt, Human
ucauccagccucaucaggagcu

SEQ ID NO: 620607 - RNA, 22 nt, Human
guuuauaugaacuucauaccca

SEQ ID NO: 620608 - RNA, 22 nt, Human
ugugaaggacuuguuccauugu

SEQ ID NO: 620609 - RNA, 22 nt, Human
uuucaguguuaugacuuucauu

SEQ ID NO: 620610 - RNA, 22 nt, Human
acuguuuucuguaaagggccag

SEQ ID NO: 620611 - RNA, 22 nt, Human
cuggagucucuucuguagcuac

SEQ ID NO: 620612 - RNA, 22 nt, Human
uccugggcagccucucuggaag

SEQ ID NO: 620613 - RNA, 22 nt, Human
guuauaaauaccuaauaggauu

SEQ ID NO: 620614 - RNA, 22 nt, Human
uccacagggccuuucuggugug

SEQ ID NO: 620615 - RNA, 22 nt, Human
uguuuacuagccaacauggaga

SEQ ID NO: 620616 - RNA, 22 nt, Human
uggagaaucuggaaacuguuga

SEQ ID NO: 620617 - RNA, 22 nt, Human
ggagaggugagagguacaaguu

SEQ ID NO: 620618 - RNA, 22 nt, Human
gucccuggggguuuaggacuca

SEQ ID NO: 620619 - RNA, 22 nt, Human
ggccaccucugcccuaccgagu

SEQ ID NO: 620620 - RNA, 22 nt, Human
agccagggaagaggccuaccuc

SEQ ID NO: 620621 - RNA, 22 nt, Human
aagaaugauuacaaagcaacga

SEQ ID NO: 620622 - RNA, 22 nt, Human
gagggccagaucccaggaggaa

SEQ ID NO: 620623 - RNA, 22 nt, Human
aaagcaagucucuacaaaguac

SEQ ID NO: 620624 - RNA, 22 nt, Human
aguggcagagucaggguuugga

SEQ ID NO: 620625 - RNA, 22 nt, Human
agggcuuuguuuaggugaccac

SEQ ID NO: 620626 - RNA, 22 nt, Human
gccaggcuguuuuuauuacugu

SEQ ID NO: 620627 - RNA, 22 nt, Human
gucaaaacaaaguuaagaauuc

SEQ ID NO: 620628 - RNA, 22 nt, Human
caggauccuggcugcauggacg

SEQ ID NO: 620629 - RNA, 22 nt, Human
cuggaaggcucugcugccuguc

SEQ ID NO: 620630 - RNA, 22 nt, Human
ucagacagagaaguacaaugag

SEQ ID NO: 620631 - RNA, 22 nt, Human
uuaguugauagccaaaauuuau

SEQ ID NO: 620632 - RNA, 22 nt, Human
agggcuuuugagcgcacgucug

SEQ ID NO: 620633 - RNA, 22 nt, Human
ucagguccuuacugugcucccu

SEQ ID NO: 620634 - RNA, 22 nt, Human
cauggccaggccaagagaguac

SEQ ID NO: 620635 - RNA, 22 nt, Human
gaaaaugccucuggcauuaaac

SEQ ID NO: 620636 - RNA, 22 nt, Human
gcugucuggaggcucugaggga

SEQ ID NO: 620637 - RNA, 22 nt, Human
ggugcccagcgaaguggcugug

SEQ ID NO: 620638 - RNA, 22 nt, Human
caauguaucaagaagcaucagu

SEQ ID NO: 620639 - RNA, 22 nt, Human
ugaggcagcccacuuuccuuag

SEQ ID NO: 620640 - RNA, 22 nt, Human
ucagcaggcaccggaaguguuu

SEQ ID NO: 620641 - RNA, 22 nt, Human
uauauaugagcaugugaggaca

SEQ ID NO: 620642 - RNA, 22 nt, Human
gagcagagucuauuuccacacu

SEQ ID NO: 620643 - RNA, 22 nt, Human
ggaugggaacuugguagggcau

SEQ ID NO: 620644 - RNA, 22 nt, Human
ccagcagguguagggcucaugg

SEQ ID NO: 620645 - RNA, 22 nt, Human
cagugugacuucugagcugcca

SEQ ID NO: 620646 - RNA, 22 nt, Human
ugagucuuuuauccugggaaug

SEQ ID NO: 620647 - RNA, 22 nt, Human
ggaaggguucaggugggccugc

SEQ ID NO: 620648 - RNA, 22 nt, Human
guggcagcugguaugcagacag

SEQ ID NO: 620649 - RNA, 22 nt, Human
ccugggucuucagucugcuggu

SEQ ID NO: 620650 - RNA, 17 nt, Human
guccugggaggagagag

SEQ ID NO: 620651 - RNA, 22 nt, Human
acauuguugagccucuuguuca

SEQ ID NO: 620652 - RNA, 19 nt, Human
agcaguggagccaugccug

SEQ ID NO: 620653 - RNA, 22 nt, Human
ggcucacgcaauuaucccggcc

SEQ ID NO: 620654 - RNA, 22 nt, Human
ccagagagggcgccaccuggag

SEQ ID NO: 620655 - RNA, 22 nt, Human
aacagguagggacucuaacuug

SEQ ID NO: 620656 - RNA, 22 nt, Human
uuccuccagccuggagcacuuc

SEQ ID NO: 620657 - RNA, 22 nt, Human
uuuuccuucugauacuccauuu

SEQ ID NO: 620658 - RNA, 22 nt, Human
agcucagaacugcagacaugug

SEQ ID NO: 620659 - RNA, 22 nt, Human
ccagagaggccuuggcaagaca

SEQ ID NO: 620660 - RNA, 22 nt, Human
aguccccucuaacccaacuuua

SEQ ID NO: 620661 - RNA, 22 nt, Human
cuucucugucacaggguuacgu

SEQ ID NO: 620662 - RNA, 22 nt, Human
ucugagggauuugucccuuauc

SEQ ID NO: 620663 - RNA, 22 nt, Human
uggaucugcucuaugaacugcu

SEQ ID NO: 620664 - RNA, 22 nt, Human
ucuucaugaaauugauugcuua

SEQ ID NO: 620665 - RNA, 22 nt, Human
cuuguauuaggaagaaugcuuu

SEQ ID NO: 620666 - RNA, 22 nt, Human
ccuucuagcaaaucaacauaaa

SEQ ID NO: 620667 - RNA, 22 nt, Human
ucaauucugccucuaaauauuu

SEQ ID NO: 620668 - RNA, 22 nt, Human
uuuaaaccuaucuaagaaauag

SEQ ID NO: 620669 - RNA, 22 nt, Human
caguggaugucucauaguguga

SEQ ID NO: 620670 - RNA, 22 nt, Human
uaacuucucugagccucauucc

SEQ ID NO: 620671 - RNA, 22 nt, Human
gaugaguucuuucuauucuauu

SEQ ID NO: 620672 - RNA, 22 nt, Human
aggcuguagaucuagacaugua

SEQ ID NO: 620673 - RNA, 23 nt, Human
cugagggcuggucugaagucugc

SEQ ID NO: 620674 - RNA, 22 nt, Human
ugcucccaggcauucucuguug

SEQ ID NO: 620675 - RNA, 22 nt, Human
ugcuuuggcccaacauugaugc

SEQ ID NO: 620676 - RNA, 22 nt, Human
aauagcaaaugcucauuugaaa

SEQ ID NO: 620677 - RNA, 22 nt, Human
gaggcucagagggacuuucaag

SEQ ID NO: 620678 - RNA, 22 nt, Human
uucuuuuaauuucugucugcag

SEQ ID NO: 620679 - RNA, 22 nt, Human
gggagcugaacugcugaaguug

SEQ ID NO: 620680 - RNA, 18 nt, Human
uccuuucaccccuucucu

SEQ ID NO: 620681 - RNA, 22 nt, Human
uguuuuaagggucaacugucac

SEQ ID NO: 620682 - RNA, 22 nt, Human
acaggaucgcccuguugcccag

SEQ ID NO: 620683 - RNA, 22 nt, Human
ucauccugaagaaccugcuucc

SEQ ID NO: 620684 - RNA, 22 nt, Human
gaauaauugugaugcuugaagu

SEQ ID NO: 620685 - RNA, 22 nt, Human
aguucugacucugaaucuggga

SEQ ID NO: 620686 - RNA, 22 nt, Human
cugcugucuuuauuucacugcu

SEQ ID NO: 620687 - RNA, 22 nt, Human
aguguucuagcgcugugcuugu

SEQ ID NO: 620688 - RNA, 22 nt, Human
ccaggcccugccugugguuccu

SEQ ID NO: 620689 - RNA, 22 nt, Human
ggcugcugcccaccccugcaug

SEQ ID NO: 620690 - RNA, 21 nt, Human
ccacaauucuaguuacauaug

SEQ ID NO: 620691 - RNA, 22 nt, Human
ccugguguuaucauaggucaug

SEQ ID NO: 620692 - RNA, 22 nt, Human
ucucagcucauggcagccuuga

SEQ ID NO: 620693 - RNA, 22 nt, Human
augcaggaagagcccuggagcu

SEQ ID NO: 620694 - RNA, 22 nt, Human
ugcugcucaagcugcagcaaaa

SEQ ID NO: 620695 - RNA, 22 nt, Human
aggacucaucccugcuugucag

SEQ ID NO: 620696 - RNA, 22 nt, Human
gcauucuugguggagugcuaaa

SEQ ID NO: 620697 - RNA, 17 nt, Human
cauucuguaaucuuucu

SEQ ID NO: 620698 - RNA, 22 nt, Human
cauuguguauuucuguaguacu

SEQ ID NO: 620699 - RNA, 22 nt, Human
agcugcugcaaguggugcuaac

SEQ ID NO: 620700 - RNA, 20 nt, Human
cuuguuaaauaugcagguag

SEQ ID NO: 620701 - RNA, 22 nt, Human
uucuuugcccauguuuccuaag

SEQ ID NO: 620702 - RNA, 22 nt, Human
acauuuaaugauccuacuguga

SEQ ID NO: 620703 - RNA, 22 nt, Human
agguagcuggugcugggcuccu

SEQ ID NO: 620704 - RNA, 22 nt, Human
ucagucucuggggcuucuguuu

SEQ ID NO: 620705 - RNA, 22 nt, Human
cauaacauccuugcuacuuuga

SEQ ID NO: 620706 - RNA, 22 nt, Human
cugagggccuucuaugcugagc

SEQ ID NO: 620707 - RNA, 22 nt, Human
uaucauuuuacugugacauuuu

SEQ ID NO: 620708 - RNA, 22 nt, Human
aguuagugaagcucaucacagc

SEQ ID NO: 620709 - RNA, 22 nt, Human
gccagagaggccuuagaaucca

SEQ ID NO: 620710 - RNA, 22 nt, Human
uucuguuuauaauuugcaguug

SEQ ID NO: 620711 - RNA, 16 nt, Human
aggcucagaggcugga

SEQ ID NO: 620712 - RNA, 22 nt, Human
uucuuuuaauagagauccugug

SEQ ID NO: 620713 - RNA, 22 nt, Human
uuacaauuacuugaucucagcu

SEQ ID NO: 620714 - RNA, 19 nt, Human
auucuucucuuccugcugu

SEQ ID NO: 620715 - RNA, 19 nt, Human
ugggcuuccccagggcaga

SEQ ID NO: 620716 - RNA, 22 nt, Human
agaugcugccaggccccucagu

SEQ ID NO: 620717 - RNA, 22 nt, Human
aagcaccuggguuauaucuuag

SEQ ID NO: 620718 - RNA, 22 nt, Human
uccagguccuacuggcccauag

SEQ ID NO: 620719 - RNA, 22 nt, Human
ucuuuuccuugaugguuaaaua

SEQ ID NO: 620720 - RNA, 22 nt, Human
cccaccacgugcuuugcuggag

SEQ ID NO: 620721 - RNA, 22 nt, Human
augggaggcagacacuaaguuc

SEQ ID NO: 620722 - RNA, 22 nt, Human
cugcucucuguuccccuggauc

SEQ ID NO: 620723 - RNA, 22 nt, Human
cuugaaguggagcuuuugaaau

SEQ ID NO: 620724 - RNA, 22 nt, Human
aggcucagcaucugauucauau

SEQ ID NO: 620725 - RNA, 22 nt, Human
ggccuuccauugcucuuuucua

SEQ ID NO: 620726 - RNA, 22 nt, Human
uuauugcuaugaugauguguag

SEQ ID NO: 620727 - RNA, 22 nt, Human
gcuucuggugaggccucaggaa

SEQ ID NO: 620728 - RNA, 19 nt, Human
ggaggcuucuuggggucgg

SEQ ID NO: 620729 - RNA, 15 nt, Human
gagaugcucucaggg

SEQ ID NO: 620730 - RNA, 22 nt, Human
ggcucagaggagcuggaacggu

SEQ ID NO: 620731 - RNA, 18 nt, Human
uccaggcuccaggcuaac

SEQ ID NO: 620732 - RNA, 22 nt, Human
ucuccucuccuuucauguuguu

SEQ ID NO: 620733 - RNA, 22 nt, Human
acagccaacgucuuucuuacuu

SEQ ID NO: 620734 - RNA, 22 nt, Human
guccagagaguaaaggggguaa

SEQ ID NO: 620735 - RNA, 22 nt, Human
uuuaauuuucugggcccagcag

SEQ ID NO: 620736 - RNA, 22 nt, Human
caggcgaccccuaggagcaaca

SEQ ID NO: 620737 - RNA, 22 nt, Human
agagaccuuccugacuccagag

SEQ ID NO: 620738 - RNA, 22 nt, Human
uguggccaccagagcugcuauu

SEQ ID NO: 620739 - RNA, 22 nt, Human
uuucauguuggauacuguuuca

SEQ ID NO: 620740 - RNA, 22 nt, Human
cuccagaggcgacuugcaucac

SEQ ID NO: 620741 - RNA, 22 nt, Human
uccucuucaaaauagcucugaa

SEQ ID NO: 620742 - RNA, 22 nt, Human
cugggaggcggagguuguagug

SEQ ID NO: 620743 - RNA, 22 nt, Human
agaucugaggguccaagggagg

SEQ ID NO: 620744 - RNA, 22 nt, Human
caguggguccugcgucugccag

SEQ ID NO: 620745 - RNA, 22 nt, Human
gccacaggaaagcacccuggag

SEQ ID NO: 620746 - RNA, 23 nt, Human
uuguucuuggaucuuccugaagc

SEQ ID NO: 620747 - RNA, 22 nt, Human
aucauccauggcugaucauaaa

SEQ ID NO: 620748 - RNA, 22 nt, Human
guucuccaggggcuguucaucu

SEQ ID NO: 620749 - RNA, 22 nt, Human
ucaggccaggagaucagauuga

SEQ ID NO: 620750 - RNA, 21 nt, Human
gccaccucaaucuucuagcgc

SEQ ID NO: 620751 - RNA, 22 nt, Human
gcugucccgaaccccugguaau

SEQ ID NO: 620752 - RNA, 22 nt, Human
agggcuccuaugccccauggac

SEQ ID NO: 620753 - RNA, 22 nt, Human
aucccaggcggcacagguugca

SEQ ID NO: 620754 - RNA, 22 nt, Human
ucuuccuggauggggguugaug

SEQ ID NO: 620755 - RNA, 22 nt, Human
ucucugucucccguguguccgg

SEQ ID NO: 620756 - RNA, 22 nt, Human
ugauuccugugcuuauuccagu

SEQ ID NO: 620757 - RNA, 22 nt, Human
caggccacagcuaaagaggauu

SEQ ID NO: 620758 - RNA, 19 nt, Human
gcuuccagcacugcaggag

SEQ ID NO: 620759 - RNA, 22 nt, Human
cuuuauguuggggugucuuagu

SEQ ID NO: 620760 - RNA, 22 nt, Human
acaagcgggccacagugcuggu

SEQ ID NO: 620761 - RNA, 22 nt, Human
gugcuuccuguauugauuccau

SEQ ID NO: 620762 - RNA, 20 nt, Human
cauuccugaggaauucaugu

SEQ ID NO: 620763 - RNA, 22 nt, Human
caucccugauuccuaguacagu

SEQ ID NO: 620764 - RNA, 22 nt, Human
ccucuucuaggacguccuugug

SEQ ID NO: 620765 - RNA, 22 nt, Human
ucuuccagauacuuccugacuu

SEQ ID NO: 620766 - RNA, 22 nt, Human
uuuucuaacaucuaguaauuug

SEQ ID NO: 620767 - RNA, 22 nt, Human
ucuaguuagugguugauacugu

SEQ ID NO: 620768 - RNA, 22 nt, Human
ugcagcaucuccuugugccaug

SEQ ID NO: 620769 - RNA, 22 nt, Human
uucccagauuggagggcagggg

SEQ ID NO: 620770 - RNA, 22 nt, Human
augcaguuagguaauagucuca

SEQ ID NO: 620771 - RNA, 22 nt, Human
ggagagaacugaccugaaagga

SEQ ID NO: 620772 - RNA, 22 nt, Human
gggcugacaguuuccccugaaa

SEQ ID NO: 620773 - RNA, 22 nt, Human
caguuaaucuugccauuauauc

SEQ ID NO: 620774 - RNA, 22 nt, Human
caggauaaauaguaaauguaag

SEQ ID NO: 620775 - RNA, 19 nt, Human
agauuuaccucauauaguu

SEQ ID NO: 620776 - RNA, 22 nt, Human
ggcauuuaguuuucauauucug

SEQ ID NO: 620777 - RNA, 22 nt, Human
ucccucugggcuccagcacgga

SEQ ID NO: 620778 - RNA, 22 nt, Human
ccagagucauuuugagucauaa

SEQ ID NO: 620779 - RNA, 22 nt, Human
uguuacagaaugaauuuccgga

SEQ ID NO: 620780 - RNA, 23 nt, Human
cacaggcugcgcauaagcuucuc

SEQ ID NO: 620781 - RNA, 22 nt, Human
uacagaggguaauugaucaagg

SEQ ID NO: 620782 - RNA, 22 nt, Human
caucucaucagugagagucagc

SEQ ID NO: 620783 - RNA, 22 nt, Human
ugcuggcccuggcucagggaac

SEQ ID NO: 620784 - RNA, 22 nt, Human
aaugaugguuaaacacuggagg

SEQ ID NO: 620785 - RNA, 22 nt, Human
gggcagguguugucaaucuaau

SEQ ID NO: 620786 - RNA, 22 nt, Human
guagaauaaauguacacaucug

SEQ ID NO: 620787 - RNA, 16 nt, Human
uuguggcuuuugcaca

SEQ ID NO: 620788 - RNA, 22 nt, Human
aucaaagaaugugacugaaaua

SEQ ID NO: 620789 - RNA, 22 nt, Human
cagcccuggaacagcugacuca

SEQ ID NO: 620790 - RNA, 22 nt, Human
auggcagaauccauaguaggug

SEQ ID NO: 620791 - RNA, 22 nt, Human
cuuuggcugcauucgaguugcu

SEQ ID NO: 620792 - RNA, 22 nt, Human
gcaggccucuguugagggccuu

SEQ ID NO: 620793 - RNA, 22 nt, Human
ucucugaaggcuguguugaugg

SEQ ID NO: 620794 - RNA, 22 nt, Human
gagagcugggcuuugggugaag

SEQ ID NO: 620795 - RNA, 22 nt, Human
gcucaggacuggaggagcgggg

SEQ ID NO: 620796 - RNA, 22 nt, Human
uagaaacaaagaccugggugcu

SEQ ID NO: 620797 - RNA, 20 nt, Human
aggaugcagggagucugcag

SEQ ID NO: 620798 - RNA, 22 nt, Human
auuuagacuucuugcagguaau

SEQ ID NO: 620799 - RNA, 22 nt, Human
uccugcagcucugagaagcauc

SEQ ID NO: 620800 - RNA, 17 nt, Human
acauacacuggugaaca

SEQ ID NO: 620801 - RNA, 22 nt, Human
aguguuucccaguaggaugaaa

SEQ ID NO: 620802 - RNA, 22 nt, Human
gcugucgugugcaagugacaga

SEQ ID NO: 620803 - RNA, 22 nt, Human
cuguccucaucugccccaaggg

SEQ ID NO: 620804 - RNA, 22 nt, Human
aggugcagcugacaccaugugg

SEQ ID NO: 620805 - RNA, 19 nt, Human
uugugagcugaagaacagg

SEQ ID NO: 620806 - RNA, 22 nt, Human
gugcugaggaaggaagacuuau

SEQ ID NO: 620807 - RNA, 22 nt, Human
ggcuuaaaucacagugacuuuu

SEQ ID NO: 620808 - RNA, 22 nt, Human
uuuagcaaaacauuaugucugu

SEQ ID NO: 620809 - RNA, 22 nt, Human
ugaggcucuccaagcagaugag

SEQ ID NO: 620810 - RNA, 22 nt, Human
gucugacaccuagaguccagga

SEQ ID NO: 620811 - RNA, 22 nt, Human
acagcuucgaggaucucauccc

SEQ ID NO: 620812 - RNA, 22 nt, Human
cuggccaguguggcucugaucu

SEQ ID NO: 620813 - RNA, 20 nt, Human
agagcagcaguuggugaggu

SEQ ID NO: 620814 - RNA, 22 nt, Human
ugaggcaggacauggacaacug

SEQ ID NO: 620815 - RNA, 22 nt, Human
agcacuuugggagauaaagcug

SEQ ID NO: 620816 - RNA, 22 nt, Human
uaaggcacccuucugaguagag

SEQ ID NO: 620817 - RNA, 21 nt, Human
uccuugcuauuuuccucagcu

SEQ ID NO: 620818 - RNA, 22 nt, Human
augucugucuuuguacuccaca

SEQ ID NO: 620819 - RNA, 22 nt, Human
ugcuggagcccaggcggccuuu

SEQ ID NO: 620820 - RNA, 22 nt, Human
gcacuugucaaauauuauagua

SEQ ID NO: 620821 - RNA, 22 nt, Human
aaggagaaggguaaucaacaca

SEQ ID NO: 620822 - RNA, 22 nt, Human
gcacccaggcuugggcagcaac

SEQ ID NO: 620823 - RNA, 23 nt, Human
ugucccagagggagggauaggcu

SEQ ID NO: 620824 - RNA, 22 nt, Human
uagaagcagcaggacucauggu

SEQ ID NO: 620825 - RNA, 22 nt, Human
uuucuucagccacuccaaacug

SEQ ID NO: 620826 - RNA, 22 nt, Human
uaaagguagugugacauauugu

SEQ ID NO: 620827 - RNA, 22 nt, Human
ugggaggacuugugggcuucau

SEQ ID NO: 620828 - RNA, 22 nt, Human
cugcagggaccacaagcagguu

SEQ ID NO: 620829 - RNA, 22 nt, Human
ucagaggauagaaauacuuauu

SEQ ID NO: 620830 - RNA, 22 nt, Human
aguacuuuacuucuuacaguuu

SEQ ID NO: 620831 - RNA, 22 nt, Human
gagcagcuccagccgcaugacu

SEQ ID NO: 620832 - RNA, 22 nt, Human
ugcccucuuaggucugcgcagc

SEQ ID NO: 620833 - RNA, 22 nt, Human
aggaucuuauguaauaauuaug

SEQ ID NO: 620834 - RNA, 22 nt, Human
gagggcugcuggaaaaaugcag

SEQ ID NO: 620835 - RNA, 22 nt, Human
aaaauugagaguuauagauggu

SEQ ID NO: 620836 - RNA, 22 nt, Human
uggcaggaaggagacucagccc

SEQ ID NO: 620837 - RNA, 22 nt, Human
guuuaagaaaauucauguuguu

SEQ ID NO: 620838 - RNA, 18 nt, Human
gcauuuuaaucugaggca

SEQ ID NO: 620839 - RNA, 22 nt, Human
uuccagauguuuaaguucugcu

SEQ ID NO: 620840 - RNA, 22 nt, Human
cuuaggaaaguuggcugauuuc

SEQ ID NO: 620841 - RNA, 18 nt, Human
aaguaugccuauguuauu

SEQ ID NO: 620842 - RNA, 21 nt, Human
gagauggcccaguagcgggcc

SEQ ID NO: 620843 - RNA, 22 nt, Human
uucuccaacacaagcaugaugu

SEQ ID NO: 620844 - RNA, 22 nt, Human
gagaagaaauagaaucacauuu

SEQ ID NO: 620845 - RNA, 22 nt, Human
caggccaauaucacaugcuaug

SEQ ID NO: 620846 - RNA, 22 nt, Human
uuccauaauaggcuuaagugaa

SEQ ID NO: 620847 - RNA, 22 nt, Human
uagcccaggcuguagugcagug

SEQ ID NO: 620848 - RNA, 22 nt, Human
ugagaaggcucaggcuuagaga

SEQ ID NO: 620849 - RNA, 22 nt, Human
cuguuuucuagggcugagguga

SEQ ID NO: 620850 - RNA, 22 nt, Human
aagcuuuagagaugaguuccuu

SEQ ID NO: 620851 - RNA, 22 nt, Human
agcauguguaaucucaauaccu

SEQ ID NO: 620852 - RNA, 22 nt, Human
ucuggcucuauaacuccuagcu

SEQ ID NO: 620853 - RNA, 22 nt, Human
gcccagcccagaaagguucgga

SEQ ID NO: 620854 - RNA, 21 nt, Human
agaauaaugguaucauuugcu

SEQ ID NO: 620855 - RNA, 22 nt, Human
agagcagcugacagccugccau

SEQ ID NO: 620856 - RNA, 22 nt, Human
gccaccaugucuggcugaguuu

SEQ ID NO: 620857 - RNA, 22 nt, Human
auggggugagacuaggauuaaa

SEQ ID NO: 620858 - RNA, 22 nt, Human
ugcugguccccugcagccugug

SEQ ID NO: 620859 - RNA, 22 nt, Human
uccucugcuccaggcuggacuu

SEQ ID NO: 620860 - RNA, 22 nt, Human
ugagaauuuuuugucaugcauu

SEQ ID NO: 620861 - RNA, 19 nt, Human
cugugggcggaggaggggc

SEQ ID NO: 620862 - RNA, 22 nt, Human
aaaugucuuuaucucauguaac

SEQ ID NO: 620863 - RNA, 22 nt, Human
ucuugaaaauugagguugaagg

SEQ ID NO: 620864 - RNA, 22 nt, Human
cugggcagugguggcaucuuug

SEQ ID NO: 620865 - RNA, 22 nt, Human
gucaacauuuacugcccuggcc

SEQ ID NO: 620866 - RNA, 22 nt, Human
auucucucuagaagcugagaug

SEQ ID NO: 620867 - RNA, 23 nt, Human
ugcagcugccucuggcgggccgg

SEQ ID NO: 620868 - RNA, 22 nt, Human
uuggaaggaagaaccgcgguag

SEQ ID NO: 620869 - RNA, 22 nt, Human
aguagauuucugcugaagcuuu

SEQ ID NO: 620870 - RNA, 22 nt, Human
gguucaguuuacauuaaaaucu

SEQ ID NO: 620871 - RNA, 22 nt, Human
aaugaugaacucagagggaacc

SEQ ID NO: 620872 - RNA, 22 nt, Human
cugugcugggugugcuuaugau

SEQ ID NO: 620873 - RNA, 22 nt, Human
uccuugacugugaggaacuagc

SEQ ID NO: 620874 - RNA, 22 nt, Human
gcacacaugcaugugugcaucc

SEQ ID NO: 620875 - RNA, 22 nt, Human
auguuucauuuagauaucaggc

SEQ ID NO: 620876 - RNA, 22 nt, Human
uggggagagauugaggaguuuu

SEQ ID NO: 620877 - RNA, 22 nt, Human
agagccugcaucaggcuugggg

SEQ ID NO: 620878 - RNA, 22 nt, Human
aaugcacaugccacauguggua

SEQ ID NO: 620879 - RNA, 21 nt, Human
ggagucuguggaugcuguuuc

SEQ ID NO: 620880 - RNA, 22 nt, Human
aaguguuuauuuauaacgaucu

SEQ ID NO: 620881 - RNA, 22 nt, Human
agagaaggucacuaaggaccca

SEQ ID NO: 620882 - RNA, 22 nt, Human
uuccuugagguauucaguuuua

SEQ ID NO: 620883 - RNA, 22 nt, Human
gaucagaaucuucauuuucagu

SEQ ID NO: 620884 - RNA, 18 nt, Human
gcuagggcaugcauggug

SEQ ID NO: 620885 - RNA, 22 nt, Human
gccagauguagauagcaaggua

SEQ ID NO: 620886 - RNA, 22 nt, Human
uuaccuaaaauagcucaauuua

SEQ ID NO: 620887 - RNA, 22 nt, Human
uugaacauuaacuucagucuau

SEQ ID NO: 620888 - RNA, 22 nt, Human
caggugccucaggaugagacaa

SEQ ID NO: 620889 - RNA, 22 nt, Human
ggcagcugaccuagcaccaucc

SEQ ID NO: 620890 - RNA, 19 nt, Human
uggcaucuguaaaauggug

SEQ ID NO: 620891 - RNA, 22 nt, Human
cagagggugugaaggggaugaa

SEQ ID NO: 620892 - RNA, 22 nt, Human
cugggagagguggugggaagua

SEQ ID NO: 620893 - RNA, 22 nt, Human
cugcccugucugcagccuggcu

SEQ ID NO: 620894 - RNA, 23 nt, Human
ucaucaaacagcugcucaagaaa

SEQ ID NO: 620895 - RNA, 22 nt, Human
gacagcugggaggaugacauaa

SEQ ID NO: 620896 - RNA, 22 nt, Human
aggagcugucauuugauucaca

SEQ ID NO: 620897 - RNA, 22 nt, Human
gcuggcacugggaaggacugag

SEQ ID NO: 620898 - RNA, 22 nt, Human
ugccugccccacaagggguugc

SEQ ID NO: 620899 - RNA, 23 nt, Human
uauggcuuacagugcuuuaggua

SEQ ID NO: 620900 - RNA, 22 nt, Human
gaauaauuuugaucagaaggga

SEQ ID NO: 620901 - RNA, 20 nt, Human
agguccugggacuggcagag

SEQ ID NO: 620902 - RNA, 22 nt, Human
caagaauuguacaaacugggug

SEQ ID NO: 620903 - RNA, 22 nt, Human
accugccuauggagccacaugg

SEQ ID NO: 620904 - RNA, 22 nt, Human
auacacaucuauuuaagagaca

SEQ ID NO: 620905 - RNA, 22 nt, Human
ugaaaucuacccuauucagggu

SEQ ID NO: 620906 - RNA, 22 nt, Human
ugccuuuugaagccucacaggu

SEQ ID NO: 620907 - RNA, 22 nt, Human
auccuguggcuccagggagccg

SEQ ID NO: 620908 - RNA, 22 nt, Human
gagggcucaacuacuacuaggc

SEQ ID NO: 620909 - RNA, 19 nt, Human
agcagggagugguuguggg

SEQ ID NO: 620910 - RNA, 22 nt, Human
cagcagcuggugagacacagcc

SEQ ID NO: 620911 - RNA, 22 nt, Human
uguuaaacucguagguuaggcu

SEQ ID NO: 620912 - RNA, 22 nt, Human
acugggccacauagaccugcug

SEQ ID NO: 620913 - RNA, 22 nt, Human
ugcuggggcagaagagccaaga

SEQ ID NO: 620914 - RNA, 22 nt, Human
cucuggguucuggccugcaccc

SEQ ID NO: 620915 - RNA, 22 nt, Human
ccugggccaggcuugggaaugc

SEQ ID NO: 620916 - RNA, 22 nt, Human
ucuggccagcaugagaccuggu

SEQ ID NO: 620917 - RNA, 22 nt, Human
acaggucuacuggcaagcagug

SEQ ID NO: 620918 - RNA, 22 nt, Human
aaggcagagucuaucuuggaag

SEQ ID NO: 620919 - RNA, 22 nt, Human
gccucaggugcaucucucauuc

SEQ ID NO: 620920 - RNA, 22 nt, Human
ggacaggauaagagacacugcc

SEQ ID NO: 620921 - RNA, 22 nt, Human
uagagguagaguuacauuaguc

SEQ ID NO: 620922 - RNA, 22 nt, Human
auguuuuccauugccauggaaa

SEQ ID NO: 620923 - RNA, 20 nt, Human
gggugggagagucugagggu

SEQ ID NO: 620924 - RNA, 23 nt, Human
cuguauuugacuugagcggaaau

SEQ ID NO: 620925 - RNA, 21 nt, Human
acuuggccaggcccccaccug

SEQ ID NO: 620926 - RNA, 22 nt, Human
uagagcugauaaugaggccaag

SEQ ID NO: 620927 - RNA, 22 nt, Human
caggggaguuuuaugcaacaga

SEQ ID NO: 620928 - RNA, 23 nt, Human
gggcaccaggagcaccggacagg

SEQ ID NO: 620929 - RNA, 22 nt, Human
aacaguaugugagauuuacaca

SEQ ID NO: 620930 - RNA, 22 nt, Human
cugugcugauucagcacaggcc

SEQ ID NO: 620931 - RNA, 22 nt, Human
uucaccagguguacaguuaguu

SEQ ID NO: 620932 - RNA, 17 nt, Human
uuccugugguuugaucu

SEQ ID NO: 620933 - RNA, 22 nt, Human
gucacacaauaguaaguggucc

SEQ ID NO: 620934 - RNA, 22 nt, Human
aucagaauaauuagauuucaga

SEQ ID NO: 620935 - RNA, 22 nt, Human
cccaggucugugccagcucuga

SEQ ID NO: 620936 - RNA, 22 nt, Human
cuggagccugcaguuuucacuu

SEQ ID NO: 620937 - RNA, 22 nt, Human
uuguacagaaaaaauucuuggu

SEQ ID NO: 620938 - RNA, 22 nt, Human
agaugcugccucuccucacaag

SEQ ID NO: 620939 - RNA, 22 nt, Human
gagcccuguagcaagucauguc

SEQ ID NO: 620940 - RNA, 22 nt, Human
uugcauaaaugcuuaaaauuug

SEQ ID NO: 620941 - RNA, 22 nt, Human
cugaaggagaaggccacuguuc

SEQ ID NO: 620942 - RNA, 22 nt, Human
ucagaggcagcugauguucugu

SEQ ID NO: 620943 - RNA, 22 nt, Human
ugggccuguggcuuggcucuag

SEQ ID NO: 620944 - RNA, 22 nt, Human
agguuccuuauggggauggcua

SEQ ID NO: 620945 - RNA, 22 nt, Human
uuuucacaugcuuggggacuua

SEQ ID NO: 620946 - RNA, 22 nt, Human
uuucuacaugucaguaacugau

SEQ ID NO: 620947 - RNA, 22 nt, Human
gugggagcugcggaggccuggg

SEQ ID NO: 620948 - RNA, 22 nt, Human
uuucucucuggcccugauuguc

SEQ ID NO: 620949 - RNA, 22 nt, Human
uggcaggguuggccaccuuacc

SEQ ID NO: 620950 - RNA, 22 nt, Human
guggcuuccaugugcaucugac

SEQ ID NO: 620951 - RNA, 22 nt, Human
uuugaugaguuuaauaacagcc

SEQ ID NO: 620952 - RNA, 22 nt, Human
ucacuguaaacuaggucagucc

SEQ ID NO: 620953 - RNA, 23 nt, Human
aggaauggcuagaagugugaccc

SEQ ID NO: 620954 - RNA, 22 nt, Human
auguauuugaaauuugagacau

SEQ ID NO: 620955 - RNA, 22 nt, Human
ggcugggcucgcugauuggcug

SEQ ID NO: 620956 - RNA, 22 nt, Human
ccagcugugccguguggauagc

SEQ ID NO: 620957 - RNA, 22 nt, Human
aaauagcagccuuuaguuaaca

SEQ ID NO: 620958 - RNA, 22 nt, Human
uggcucagagagggagugugga

SEQ ID NO: 620959 - RNA, 22 nt, Human
ugggcagacauugaguuuguuc

SEQ ID NO: 620960 - RNA, 22 nt, Human
cuggaaguauaggggagaugau

SEQ ID NO: 620961 - RNA, 22 nt, Human
auucugcuucuuauuucacgug

SEQ ID NO: 620962 - RNA, 22 nt, Human
caaguccuuuucuuggcucagg

SEQ ID NO: 620963 - RNA, 19 nt, Human
agccagcagcguagcaucu

SEQ ID NO: 620964 - RNA, 22 nt, Human
cagcuggaugggagaccauguu

SEQ ID NO: 620965 - RNA, 20 nt, Human
augggcugguuaggaagugu

SEQ ID NO: 620966 - RNA, 22 nt, Human
agaucaaagccaugagagauuu

SEQ ID NO: 620967 - RNA, 22 nt, Human
gcuccuggcaggcagugugugu

SEQ ID NO: 620968 - RNA, 22 nt, Human
ugacauuuuaucaauaucacag

SEQ ID NO: 620969 - RNA, 20 nt, Human
cuccagccccugcccugguc

SEQ ID NO: 620970 - RNA, 22 nt, Human
ucaauuacagcaaugacuguac

SEQ ID NO: 620971 - RNA, 22 nt, Human
agacaguggcucagccccaguc

SEQ ID NO: 620972 - RNA, 22 nt, Human
ugcugaggcauuuggacagagu

SEQ ID NO: 620973 - RNA, 22 nt, Human
cagcugguuaucagagaggccu

SEQ ID NO: 620974 - RNA, 22 nt, Human
cugguguggacuccgcgcggag

SEQ ID NO: 620975 - RNA, 22 nt, Human
cuacagguaugugcaugacauc

SEQ ID NO: 620976 - RNA, 22 nt, Human
uagcacaguauuucucaacugg

SEQ ID NO: 620977 - RNA, 19 nt, Human
aaagaacuuugggcuaggc

SEQ ID NO: 620978 - RNA, 21 nt, Human
ugcagauaauugaaagcugac

SEQ ID NO: 620979 - RNA, 22 nt, Human
agaggauucacugcagaagaca

SEQ ID NO: 620980 - RNA, 22 nt, Human
auuccucauuuguugagaacca

SEQ ID NO: 620981 - RNA, 22 nt, Human
uguaaacaugcugaggcuggag

SEQ ID NO: 620982 - RNA, 23 nt, Human
agucuuacugucccagaacaggg

SEQ ID NO: 620983 - RNA, 22 nt, Human
uccucuggaaccucacccuugc

SEQ ID NO: 620984 - RNA, 22 nt, Human
ugucaaacaccaacauuucucc

SEQ ID NO: 620985 - RNA, 23 nt, Human
uguguauguaucuaugcauaggu

SEQ ID NO: 620986 - RNA, 20 nt, Human
ugauucuggucuacgcuuua

SEQ ID NO: 620987 - RNA, 20 nt, Human
uuggaggugcagugcaugca

SEQ ID NO: 620988 - RNA, 22 nt, Human
gugugcauguggaagcauguau

SEQ ID NO: 620989 - RNA, 22 nt, Human
ugagccuggguggucgaggcug

SEQ ID NO: 620990 - RNA, 22 nt, Human
uggcaggcaggcagccuucuga

SEQ ID NO: 620991 - RNA, 22 nt, Human
agcagaugugucucugcacugu

SEQ ID NO: 620992 - RNA, 22 nt, Human
acugaaaaagacaucuugguaa

SEQ ID NO: 620993 - RNA, 20 nt, Human
acauccuggugacuagaacu

SEQ ID NO: 620994 - RNA, 22 nt, Human
cauguuggcugaggcuguauuu

SEQ ID NO: 620995 - RNA, 22 nt, Human
ggguccugcgugggcccaggac

SEQ ID NO: 620996 - RNA, 22 nt, Human
ugugucucaagucagagcauca

SEQ ID NO: 620997 - RNA, 22 nt, Human
uggcuucacugcucaagugauu

SEQ ID NO: 620998 - RNA, 22 nt, Human
agaaaguuaaacagugauaaga

SEQ ID NO: 620999 - RNA, 22 nt, Human
uuaacaguuaaacaauuggcua

SEQ ID NO: 621000 - RNA, 18 nt, Human
uguagagccagguuugcc

SEQ ID NO: 621001 - RNA, 22 nt, Human
gagcagcuggaggccuuguugg

SEQ ID NO: 621002 - RNA, 22 nt, Human
cgugugcgcacaccuguuucca

SEQ ID NO: 621003 - RNA, 18 nt, Human
uuggaccugugucagggc

SEQ ID NO: 621004 - RNA, 22 nt, Human
aacagcaggcaccaaggcuaug

SEQ ID NO: 621005 - RNA, 22 nt, Human
guuuccuaccagugguuccaga

SEQ ID NO: 621006 - RNA, 22 nt, Human
gucaaguuuauccgcucauuca

SEQ ID NO: 621007 - RNA, 22 nt, Human
aucauuuacaaacucagcauug

SEQ ID NO: 621008 - RNA, 22 nt, Human
aaaacuuucagggauacagaaa

SEQ ID NO: 621009 - RNA, 22 nt, Human
ggugggccaggaaggccgccag

SEQ ID NO: 621010 - RNA, 20 nt, Human
acagccagaggaggcagaca

SEQ ID NO: 621011 - RNA, 22 nt, Human
aaggcgcugggcuaaggcacca

SEQ ID NO: 621012 - RNA, 22 nt, Human
ugggccuggagcccuggagagu

SEQ ID NO: 621013 - RNA, 22 nt, Human
gccccaggugguaaaccuaaga

SEQ ID NO: 621014 - RNA, 19 nt, Human
acagaagcauagaaaagga

SEQ ID NO: 621015 - RNA, 22 nt, Human
gauuucaaggaguuuucacagu

SEQ ID NO: 621016 - RNA, 22 nt, Human
gaaggagagaaaggcaauucug

SEQ ID NO: 621017 - RNA, 23 nt, Human
gugcacagucaagcccagcuuag

SEQ ID NO: 621018 - RNA, 22 nt, Human
uccaggagauucauuaggucau

SEQ ID NO: 621019 - RNA, 22 nt, Human
acagguggcuuauuggcugauu

SEQ ID NO: 621020 - RNA, 22 nt, Human
cugcaguaucugcuuuggguag

SEQ ID NO: 621021 - RNA, 22 nt, Human
aggagucacucagggcuucauc

SEQ ID NO: 621022 - RNA, 22 nt, Human
ucauggaaggaguggccaagug

SEQ ID NO: 621023 - RNA, 22 nt, Human
agcucuccaucuaucugugaug

SEQ ID NO: 621024 - RNA, 22 nt, Human
ccagccagcugcccuuggggcc

SEQ ID NO: 621025 - RNA, 22 nt, Human
cacuugaaaguaaugguugugc

SEQ ID NO: 621026 - RNA, 19 nt, Human
ugaggggcucacagucuca

SEQ ID NO: 621027 - RNA, 22 nt, Human
cugaggaggcuaauuugaggau

SEQ ID NO: 621028 - RNA, 23 nt, Human
gcagagguuauguuuuuuaggcu

SEQ ID NO: 621029 - RNA, 22 nt, Human
aagguuagugcaucuuuuguuu

SEQ ID NO: 621030 - RNA, 22 nt, Human
uucuccccugacccugaugagg

SEQ ID NO: 621031 - RNA, 23 nt, Human
uccagcucccuucaauggcacug

SEQ ID NO: 621032 - RNA, 22 nt, Human
gcucaggaccgaggggugggaa

SEQ ID NO: 621033 - RNA, 23 nt, Human
ucacacuggauacacaugcaaga

SEQ ID NO: 621034 - RNA, 22 nt, Human
gaaggcuguggcuggucucagu

SEQ ID NO: 621035 - RNA, 22 nt, Human
ggggaccuaggcucugucucuu

SEQ ID NO: 621036 - RNA, 22 nt, Human
agugauggagcuuccucugcua

SEQ ID NO: 621037 - RNA, 22 nt, Human
gagggcaggggucuugcacggu

SEQ ID NO: 621038 - RNA, 21 nt, Human
uccauaagagaccaucuccua

SEQ ID NO: 621039 - RNA, 22 nt, Human
uucuuuuuggauagcugaugaa

SEQ ID NO: 621040 - RNA, 22 nt, Human
guuccacaucacacuacuugau

SEQ ID NO: 621041 - RNA, 22 nt, Human
ccaggucuuggcccccggaccu

SEQ ID NO: 621042 - RNA, 22 nt, Human
aacuucauggguucaaagcugg

SEQ ID NO: 621043 - RNA, 22 nt, Human
aaauuugccagaucaauucuga

SEQ ID NO: 621044 - RNA, 22 nt, Human
uccugcagagccgcccucaggu

SEQ ID NO: 621045 - RNA, 22 nt, Human
gacagcaggagaucaugauaga

SEQ ID NO: 621046 - RNA, 19 nt, Human
gucuuacaggcaacaugag

SEQ ID NO: 621047 - RNA, 22 nt, Human
gcugaagguguguggagagagg

SEQ ID NO: 621048 - RNA, 22 nt, Human
uggcuggcauagccauugcucc

SEQ ID NO: 621049 - RNA, 22 nt, Human
ucuuugcaguggugaauaaaga

SEQ ID NO: 621050 - RNA, 22 nt, Human
ugaggccucugugccauccagg

SEQ ID NO: 621051 - RNA, 22 nt, Human
agugcaugcgcuugggaggggu

SEQ ID NO: 621052 - RNA, 22 nt, Human
uaagcacacaauaucuggagag

SEQ ID NO: 621053 - RNA, 22 nt, Human
acaaaugccauauauaaauucu

SEQ ID NO: 621054 - RNA, 22 nt, Human
uggcagggccugaaucuuauac

SEQ ID NO: 621055 - RNA, 22 nt, Human
uuucaauguaugucuuucugag

SEQ ID NO: 621056 - RNA, 22 nt, Human
ccagaggugcugggagaggucu

SEQ ID NO: 621057 - RNA, 22 nt, Human
ggcaucaguauggccauagggu

SEQ ID NO: 621058 - RNA, 22 nt, Human
gucucccaucguuugugaggaa

SEQ ID NO: 621059 - RNA, 22 nt, Human
agugggcagcccaggaggucuu

SEQ ID NO: 621060 - RNA, 22 nt, Human
ccucuacagggcauagcccaaa

SEQ ID NO: 621061 - RNA, 22 nt, Human
uguggaaugcuccuaagugaau

SEQ ID NO: 621062 - RNA, 22 nt, Human
aucuugugcugacaaaacacau

SEQ ID NO: 621063 - RNA, 22 nt, Human
aagcaacuggcucauugucuca

SEQ ID NO: 621064 - RNA, 22 nt, Human
aacacagggacucccaggagaa

SEQ ID NO: 621065 - RNA, 22 nt, Human
uagaacuucuuacagcuaaguu

SEQ ID NO: 621066 - RNA, 22 nt, Human
auggcugccccaaauuguugcu

SEQ ID NO: 621067 - RNA, 22 nt, Human
ccaaaauuaagccucuuauguu

SEQ ID NO: 621068 - RNA, 22 nt, Human
ugucagcauugaugaaaugugg

SEQ ID NO: 621069 - RNA, 22 nt, Human
accaggaggaaguguuaaugau

SEQ ID NO: 621070 - RNA, 19 nt, Human
uagaaugcccacuuaaaaa

SEQ ID NO: 621071 - RNA, 22 nt, Human
auugcuuacagcuauuucugua

SEQ ID NO: 621072 - RNA, 22 nt, Human
cacagcuucccgugcauggaga

SEQ ID NO: 621073 - RNA, 22 nt, Human
aaggaaacacugaacuuuguag

SEQ ID NO: 621074 - RNA, 22 nt, Human
caggcagcccugcaccaagugu

SEQ ID NO: 621075 - RNA, 22 nt, Human
gagaaaccgauucugcauguca

SEQ ID NO: 621076 - RNA, 22 nt, Human
agcuccagcccaucugcucgug

SEQ ID NO: 621077 - RNA, 22 nt, Human
gccagaagggguggauccaggc

SEQ ID NO: 621078 - RNA, 22 nt, Human
gaagcccagcaaacugugauca

SEQ ID NO: 621079 - RNA, 22 nt, Human
uacaguuuuucacugaagaugu

SEQ ID NO: 621080 - RNA, 22 nt, Human
gugugccuaugaguggugaaca

SEQ ID NO: 621081 - RNA, 22 nt, Human
uuugacauuaaggaacauauau

SEQ ID NO: 621082 - RNA, 22 nt, Human
auaaugcaccuuugaguauggc

SEQ ID NO: 621083 - RNA, 22 nt, Human
auacaugugccgcguuggugug

SEQ ID NO: 621084 - RNA, 22 nt, Human
uacaaaugaaccaacuuugaug

SEQ ID NO: 621085 - RNA, 22 nt, Human
gcgacgcucgggcuccgaugcc

SEQ ID NO: 621086 - RNA, 22 nt, Human
gcgcucaggugccaggccugcg

SEQ ID NO: 621087 - RNA, 22 nt, Human
agcacagagcuaggaguggagg

SEQ ID NO: 621088 - RNA, 22 nt, Human
ugccuucuugaauaugguucuu

SEQ ID NO: 621089 - RNA, 22 nt, Human
guguuuauuuucauaguuggcc

SEQ ID NO: 621090 - RNA, 21 nt, Human
guucugaguuagaguuggcca

SEQ ID NO: 621091 - RNA, 22 nt, Human
aauguacagcugcugcugaagg

SEQ ID NO: 621092 - RNA, 22 nt, Human
ccacagaccuuggcuuccaccu

SEQ ID NO: 621093 - RNA, 22 nt, Human
ucugcucagguuaccuagcuag

SEQ ID NO: 621094 - RNA, 22 nt, Human
auggccagagaaggcaggguca

SEQ ID NO: 621095 - RNA, 22 nt, Human
uuauuuuuaaaaguucacacag

SEQ ID NO: 621096 - RNA, 22 nt, Human
uucaacaggaaagcacuuuaca

SEQ ID NO: 621097 - RNA, 22 nt, Human
uguguggguacagaugauuguu

SEQ ID NO: 621098 - RNA, 22 nt, Human
auggccaaaucuaaacuguugg

SEQ ID NO: 621099 - RNA, 22 nt, Human
ggaagggcaaaagagaugaacu

SEQ ID NO: 621100 - RNA, 22 nt, Human
agguagcuaaaacaggcuuuug

SEQ ID NO: 621101 - RNA, 22 nt, Human
caguccugaggaagagcugcug

SEQ ID NO: 621102 - RNA, 22 nt, Human
cuggcucccgaagcccucagug

SEQ ID NO: 621103 - RNA, 22 nt, Human
uguaacaaugaauauagugacu

SEQ ID NO: 621104 - RNA, 22 nt, Human
cucuuuguagccuuugcauauu

SEQ ID NO: 621105 - RNA, 22 nt, Human
gauucacagaacuuagucaagc

SEQ ID NO: 621106 - RNA, 23 nt, Human
aggcuuuaugguagaaaguuugc

SEQ ID NO: 621107 - RNA, 22 nt, Human
uuaacaauagaguuucuucagg

SEQ ID NO: 621108 - RNA, 22 nt, Human
gucuccaguguucaggugacug

SEQ ID NO: 621109 - RNA, 18 nt, Human
gucauggguaguuuagua

SEQ ID NO: 621110 - RNA, 22 nt, Human
ugcuucugacauguucuugguu

SEQ ID NO: 621111 - RNA, 19 nt, Human
aaguucucagaguucaaag

SEQ ID NO: 621112 - RNA, 22 nt, Human
ucugacaauaacugaguuuaac

SEQ ID NO: 621113 - RNA, 22 nt, Human
cagugguucucaaucaggaaug

SEQ ID NO: 621114 - RNA, 16 nt, Human
uccaggcauaucugag

SEQ ID NO: 621115 - RNA, 22 nt, Human
uaugcaguguaugcacugagau

SEQ ID NO: 621116 - RNA, 22 nt, Human
ccaggaucuggguccaugggac

SEQ ID NO: 621117 - RNA, 19 nt, Human
gugggccaggcagaaggcu

SEQ ID NO: 621118 - RNA, 22 nt, Human
ggcaccuuggcuagugaucaac

SEQ ID NO: 621119 - RNA, 22 nt, Human
agcuacaugaaauugcugauau

SEQ ID NO: 621120 - RNA, 22 nt, Human
cuuuucauuguuuguacaugca

SEQ ID NO: 621121 - RNA, 22 nt, Human
gaaucagacugaccugaguuca

SEQ ID NO: 621122 - RNA, 22 nt, Human
caugaggucagggggagccggu

SEQ ID NO: 621123 - RNA, 22 nt, Human
uugaggucccugccuugccuuc

SEQ ID NO: 621124 - RNA, 22 nt, Human
guguaaaugccccauucauuga

SEQ ID NO: 621125 - RNA, 22 nt, Human
uuacaaagaaaauuaggcauuu

SEQ ID NO: 621126 - RNA, 22 nt, Human
accauuaacaugauuuugggga

SEQ ID NO: 621127 - RNA, 22 nt, Human
uuucugcuugagagaauugcug

SEQ ID NO: 621128 - RNA, 21 nt, Human
gcagccagccgagaccaugcc

SEQ ID NO: 621129 - RNA, 22 nt, Human
uggcuucaagucuagguucuac

SEQ ID NO: 621130 - RNA, 22 nt, Human
caugcacaaagguaagaugcgu

SEQ ID NO: 621131 - RNA, 22 nt, Human
ggcaccagggacaauccucuuc

SEQ ID NO: 621132 - RNA, 22 nt, Human
cagcaauaguguguuuguuuca

SEQ ID NO: 621133 - RNA, 22 nt, Human
gaggcagcugggauacaaggga

SEQ ID NO: 621134 - RNA, 22 nt, Human
ucacuacauuuuagacaguaaa

SEQ ID NO: 621135 - RNA, 22 nt, Human
cugccagaucauuggauucaca

SEQ ID NO: 621136 - RNA, 22 nt, Human
ggcacagcuacuugcucacucu

SEQ ID NO: 621137 - RNA, 22 nt, Human
cacuguaauggaauuuucuuua

SEQ ID NO: 621138 - RNA, 22 nt, Human
aaggaauucccuuucugacaga

SEQ ID NO: 621139 - RNA, 22 nt, Human
cuggauggaaggaggauaguau

SEQ ID NO: 621140 - RNA, 22 nt, Human
aaugcagugagccauuaaaugg

SEQ ID NO: 621141 - RNA, 22 nt, Human
gggcaagaagcuggaagcauuc

SEQ ID NO: 621142 - RNA, 22 nt, Human
ggagggcacaggaccagaaauc

SEQ ID NO: 621143 - RNA, 19 nt, Human
agauggggaagagugugag

SEQ ID NO: 621144 - RNA, 22 nt, Human
agggucugaccaccaguaggga

SEQ ID NO: 621145 - RNA, 22 nt, Human
uugggguguuggauggagcaag

SEQ ID NO: 621146 - RNA, 20 nt, Human
uugggccacacugauucagc

SEQ ID NO: 621147 - RNA, 22 nt, Human
ugcguggcgcagcgugugggau

SEQ ID NO: 621148 - RNA, 22 nt, Human
ccucugagaccagcucugcacc

SEQ ID NO: 621149 - RNA, 22 nt, Human
ggcugcuugcuguuucuuggau

SEQ ID NO: 621150 - RNA, 22 nt, Human
aagcugucaauguaucuagucu

SEQ ID NO: 621151 - RNA, 18 nt, Human
gcagggcuggacaaguca

SEQ ID NO: 621152 - RNA, 22 nt, Human
guuuggggaguuccuuuaggcc

SEQ ID NO: 621153 - RNA, 22 nt, Human
ucagaauaaguuaugaaaugaa

SEQ ID NO: 621154 - RNA, 22 nt, Human
aggucugagcaggggagaacag

SEQ ID NO: 621155 - RNA, 22 nt, Human
uguggcagaguaaggacccagu

SEQ ID NO: 621156 - RNA, 22 nt, Human
agggccucugacgcccccagcc

SEQ ID NO: 621157 - RNA, 22 nt, Human
cugugcauggccaucagugccc

SEQ ID NO: 621158 - RNA, 22 nt, Human
cugucccucaucaccucugggu

SEQ ID NO: 621159 - RNA, 22 nt, Human
ucagcccaguuaagaaccuguu

SEQ ID NO: 621160 - RNA, 22 nt, Human
cuccugggaggaugcggacccg

SEQ ID NO: 621161 - RNA, 22 nt, Human
aguauuuucgccaucacaagaa

SEQ ID NO: 621162 - RNA, 21 nt, Human
uggaggaauaaagcacagaag

SEQ ID NO: 621163 - RNA, 22 nt, Human
guacgugcaugcacgugugccu

SEQ ID NO: 621164 - RNA, 22 nt, Human
agucagaagggcccuuccuucc

SEQ ID NO: 621165 - RNA, 22 nt, Human
ugcaccauuaauuuaugugaga

SEQ ID NO: 621166 - RNA, 22 nt, Human
uucccuaagcauugcaauggcg

SEQ ID NO: 621167 - RNA, 22 nt, Human
uccagcuguaguggauuugaga

SEQ ID NO: 621168 - RNA, 22 nt, Human
caaggcauuaccauggcuagag

SEQ ID NO: 621169 - RNA, 22 nt, Human
uuuuaaucaugcuucuaugucc

SEQ ID NO: 621170 - RNA, 22 nt, Human
ugcauauuuguaugauguuuag

SEQ ID NO: 621171 - RNA, 22 nt, Human
cuuucaugcaguugacaaggug

SEQ ID NO: 621172 - RNA, 22 nt, Human
gaauggcauugucagccuuuau

SEQ ID NO: 621173 - RNA, 22 nt, Human
agcauauacaaacucauauaca

SEQ ID NO: 621174 - RNA, 22 nt, Human
uuuuaaacugcagaauuuagaa

SEQ ID NO: 621175 - RNA, 22 nt, Human
ccugcagggaaucgaggcagaa

SEQ ID NO: 621176 - RNA, 22 nt, Human
cccugcugcauggccuccacga

SEQ ID NO: 621177 - RNA, 19 nt, Human
aauaauguucaugagauug

SEQ ID NO: 621178 - RNA, 22 nt, Human
gugaggagggcuggucccaggc

SEQ ID NO: 621179 - RNA, 22 nt, Human
cagcugggugaucuugggcagg

SEQ ID NO: 621180 - RNA, 22 nt, Human
uagaaaguacuaaauuuaacug

SEQ ID NO: 621181 - RNA, 19 nt, Human
gcucagagacaccuguugc

SEQ ID NO: 621182 - RNA, 22 nt, Human
acacuguagacuguugaaguac

SEQ ID NO: 621183 - RNA, 22 nt, Human
augaauugaggaaaacagucgu

SEQ ID NO: 621184 - RNA, 22 nt, Human
aacuguuacauaguuauagauc

SEQ ID NO: 621185 - RNA, 22 nt, Human
ugagucuguauguccagauuua

SEQ ID NO: 621186 - RNA, 22 nt, Human
gagggaugucaggggaccuugg

SEQ ID NO: 621187 - RNA, 22 nt, Human
auuacagauuauaaauuugagc

SEQ ID NO: 621188 - RNA, 22 nt, Human
aucaugacaucugaguuuaagu

SEQ ID NO: 621189 - RNA, 22 nt, Human
aagcauuuauagauaagaauuu

SEQ ID NO: 621190 - RNA, 22 nt, Human
gagcccuguucaggccuccuca

SEQ ID NO: 621191 - RNA, 22 nt, Human
ucacaggagucauaauuacagu

SEQ ID NO: 621192 - RNA, 22 nt, Human
gugcugugcgcuuuuucuguau

SEQ ID NO: 621193 - RNA, 19 nt, Human
aauguaguguuaugucaac

SEQ ID NO: 621194 - RNA, 22 nt, Human
auccugucucuacccaucggcu

SEQ ID NO: 621195 - RNA, 22 nt, Human
gacccaggcccaaggcugccag

SEQ ID NO: 621196 - RNA, 22 nt, Human
cuacccaggcuggagugcagua

SEQ ID NO: 621197 - RNA, 22 nt, Human
ccuuuuucugaguuguagcuuc

SEQ ID NO: 621198 - RNA, 22 nt, Human
acaacagagcuggacugagagg

SEQ ID NO: 621199 - RNA, 22 nt, Human
gcacaggcaucaggcuuuuucu

SEQ ID NO: 621200 - RNA, 22 nt, Human
uguuacaacuauagaucccaag

SEQ ID NO: 621201 - RNA, 22 nt, Human
acaggccacaguggagucucug

SEQ ID NO: 621202 - RNA, 22 nt, Human
gugggcagauuaauuucucaau

SEQ ID NO: 621203 - RNA, 22 nt, Human
cugggcagcugugcaaacaaua

SEQ ID NO: 621204 - RNA, 22 nt, Human
uucaguauacuucauaacauuu

SEQ ID NO: 621205 - RNA, 22 nt, Human
gcuauuguuuauuuugaaucua

SEQ ID NO: 621206 - RNA, 22 nt, Human
ucugagaaggguaggcuccauu

SEQ ID NO: 621207 - RNA, 22 nt, Human
ugaccuauuagauuuccuugcc

SEQ ID NO: 621208 - RNA, 22 nt, Human
cccacucuggcucccuucuagu

SEQ ID NO: 621209 - RNA, 22 nt, Human
gauuuccauuuucaacuccugc

SEQ ID NO: 621210 - RNA, 22 nt, Human
caagcagggagcaucaagggag

SEQ ID NO: 621211 - RNA, 22 nt, Human
uuggcacuucacgagacagcua

SEQ ID NO: 621212 - RNA, 22 nt, Human
ccugugcuggacagggcugggc

SEQ ID NO: 621213 - RNA, 22 nt, Human
gcucagaggcacgaccucuugg

SEQ ID NO: 621214 - RNA, 22 nt, Human
cuuguuuaaauaagauagcagu

SEQ ID NO: 621215 - RNA, 22 nt, Human
aguucacagcaaaguggggacc

SEQ ID NO: 621216 - RNA, 22 nt, Human
auucugucuaagcuggcuacgu

SEQ ID NO: 621217 - RNA, 22 nt, Human
gcagaggagugauuaugccgug

SEQ ID NO: 621218 - RNA, 22 nt, Human
gaugucuuggucaacuugggcu

SEQ ID NO: 621219 - RNA, 22 nt, Human
ugaacuuuugcacagaggauuu

SEQ ID NO: 621220 - RNA, 22 nt, Human
ucacccaggcugguaugcagug

SEQ ID NO: 621221 - RNA, 22 nt, Human
uccugcuuugugccucacacuu

SEQ ID NO: 621222 - RNA, 21 nt, Human
cagcucugagauuucuacuag

SEQ ID NO: 621223 - RNA, 22 nt, Human
uucaugcuuguuccuccaccug

SEQ ID NO: 621224 - RNA, 17 nt, Human
guccuggugugugagga

SEQ ID NO: 621225 - RNA, 22 nt, Human
aaugauuuggcaaaggaaucca

SEQ ID NO: 621226 - RNA, 22 nt, Human
gugggugugguucguuuaagac

SEQ ID NO: 621227 - RNA, 22 nt, Human
gccuuuuuuguugcucugucac

SEQ ID NO: 621228 - RNA, 22 nt, Human
acagggcuuuuaaucaguaguu

SEQ ID NO: 621229 - RNA, 22 nt, Human
ccaggguuggcaagcaaggcuu

SEQ ID NO: 621230 - RNA, 22 nt, Human
uucaggaugcucagaguagucu

SEQ ID NO: 621231 - RNA, 22 nt, Human
caggaagcucuuagcagucacc

SEQ ID NO: 621232 - RNA, 22 nt, Human
cuggcagguccagcuggacuca

SEQ ID NO: 621233 - RNA, 22 nt, Human
cuuccaggugcuggccuggccu

SEQ ID NO: 621234 - RNA, 22 nt, Human
cuucacuugcucaucaugcuau

SEQ ID NO: 621235 - RNA, 22 nt, Human
ugggagagauaggcuucuggac

SEQ ID NO: 621236 - RNA, 19 nt, Human
cugggacuccugauaccuu

SEQ ID NO: 621237 - RNA, 23 nt, Human
aguuuuuaauggucauagcugag

SEQ ID NO: 621238 - RNA, 22 nt, Human
ugacacugaccuaaagaccugg

SEQ ID NO: 621239 - RNA, 22 nt, Human
gcaggucuguugauuacaguca

SEQ ID NO: 621240 - RNA, 22 nt, Human
ucugugcucaaguucugccucu

SEQ ID NO: 621241 - RNA, 22 nt, Human
ggacugaacacuuaaaugucca

SEQ ID NO: 621242 - RNA, 22 nt, Human
uagcagggguagauagagugug

SEQ ID NO: 621243 - RNA, 22 nt, Human
uugaggaaaggaauuuauuuua

SEQ ID NO: 621244 - RNA, 22 nt, Human
ccugagagguuggccuguccag

SEQ ID NO: 621245 - RNA, 22 nt, Human
ggaggcggacacagguaguguu

SEQ ID NO: 621246 - RNA, 22 nt, Human
agucugugaacuuggcagggaa

SEQ ID NO: 621247 - RNA, 22 nt, Human
caaagaaucacucaucuuuagc

SEQ ID NO: 621248 - RNA, 22 nt, Human
uacagcuugauguuuguguguu

SEQ ID NO: 621249 - RNA, 22 nt, Human
cuugucugugucggauaaaacu

SEQ ID NO: 621250 - RNA, 22 nt, Human
cucugacuuuaaauacaggaug

SEQ ID NO: 621251 - RNA, 22 nt, Human
ucacugugcacauaugauaggu

SEQ ID NO: 621252 - RNA, 22 nt, Human
caggcuggaguacaauugugug

SEQ ID NO: 621253 - RNA, 22 nt, Human
cugcugcugcuaucuacccagg

SEQ ID NO: 621254 - RNA, 22 nt, Human
uuuucagaggccuaagagguuu

SEQ ID NO: 621255 - RNA, 22 nt, Human
uaagaagcaguucacaaguaaa

SEQ ID NO: 621256 - RNA, 22 nt, Human
uugacaagcgaaguaccauaau

SEQ ID NO: 621257 - RNA, 18 nt, Human
ucuuuggacaacuacugg

SEQ ID NO: 621258 - RNA, 22 nt, Human
agguaacacuacuuaguauacu

SEQ ID NO: 621259 - RNA, 22 nt, Human
agcucucugauaaauugauaaa

SEQ ID NO: 621260 - RNA, 22 nt, Human
ucacaagacugagcuugcuuga

SEQ ID NO: 621261 - RNA, 22 nt, Human
cauucucucuacuuguuuucaa

SEQ ID NO: 621262 - RNA, 22 nt, Human
ugcacacaccgugcuucacuga

SEQ ID NO: 621263 - RNA, 22 nt, Human
aagcaugcaaucugugauaagg

SEQ ID NO: 621264 - RNA, 22 nt, Human
caccucugccucaagcuuccca

SEQ ID NO: 621265 - RNA, 22 nt, Human
uggguucuagagggaccagaac

SEQ ID NO: 621266 - RNA, 22 nt, Human
gagccugagugcugccuccccu

SEQ ID NO: 621267 - RNA, 22 nt, Human
uggcaggagguuuucuccagga

SEQ ID NO: 621268 - RNA, 20 nt, Human
agcaagaguaaggacagcga

SEQ ID NO: 621269 - RNA, 22 nt, Human
aucuccccgagcuuaccuccug

SEQ ID NO: 621270 - RNA, 22 nt, Human
agggagccaggaacgcaggucg

SEQ ID NO: 621271 - RNA, 21 nt, Human
aaacaucucugcuuuuguguc

SEQ ID NO: 621272 - RNA, 23 nt, Human
aggucuggacccuuggccccugc

SEQ ID NO: 621273 - RNA, 22 nt, Human
aagcacagaaaaggagcaugga

SEQ ID NO: 621274 - RNA, 21 nt, Human
gagcucucaggcaagaagcag

SEQ ID NO: 621275 - RNA, 22 nt, Human
ugagcuugcagugccagccuug

SEQ ID NO: 621276 - RNA, 22 nt, Human
cugcugugucagaguccagggg

SEQ ID NO: 621277 - RNA, 22 nt, Human
aggccgaaguggaugggcaucu

SEQ ID NO: 621278 - RNA, 22 nt, Human
cauucaaaggcauguccuauuu

SEQ ID NO: 621279 - RNA, 22 nt, Human
auucucagaucuuagaggaaua

SEQ ID NO: 621280 - RNA, 22 nt, Human
gauacaaauucaugucugaauu

SEQ ID NO: 621281 - RNA, 22 nt, Human
uugagaaauguuuuuuaagcug

SEQ ID NO: 621282 - RNA, 22 nt, Human
cauugcaccacauugcaucccu

SEQ ID NO: 621283 - RNA, 22 nt, Human
auguucuguuuuguaauucaua

SEQ ID NO: 621284 - RNA, 20 nt, Human
acagauaccagggacauggg

SEQ ID NO: 621285 - RNA, 22 nt, Human
ugcugggcauuuaugcagaugg

SEQ ID NO: 621286 - RNA, 20 nt, Human
guaaagcauucuuggcauac

SEQ ID NO: 621287 - RNA, 22 nt, Human
auucuucacauaagugcuguac

SEQ ID NO: 621288 - RNA, 22 nt, Human
agagacugcaaugagugguagg

SEQ ID NO: 621289 - RNA, 22 nt, Human
augauucaagaaaauaggaugg

SEQ ID NO: 621290 - RNA, 22 nt, Human
aacugcucauuugagaguaugc

SEQ ID NO: 621291 - RNA, 22 nt, Human
uguguucauguugauucauagc

SEQ ID NO: 621292 - RNA, 22 nt, Human
gaggccuggugugucucccgcu

SEQ ID NO: 621293 - RNA, 22 nt, Human
agccuucauaaucuugggcuuu

SEQ ID NO: 621294 - RNA, 22 nt, Human
gcccucagaaugggcucuaauc

SEQ ID NO: 621295 - RNA, 22 nt, Human
uguacaguuuuaacucugaggg

SEQ ID NO: 621296 - RNA, 21 nt, Human
uaauuuauucagcacaguguu

SEQ ID NO: 621297 - RNA, 22 nt, Human
uaaauuacccuuuagggaauug

SEQ ID NO: 621298 - RNA, 16 nt, Human
ucagggcagaauggca

SEQ ID NO: 621299 - RNA, 22 nt, Human
ucuuaacaagcuccucagugcu

SEQ ID NO: 621300 - RNA, 22 nt, Human
aagggaaacuuucacaaugucc

SEQ ID NO: 621301 - RNA, 22 nt, Human
uugcauagugcugagguucggg

SEQ ID NO: 621302 - RNA, 17 nt, Human
gcucuggcacaggauug

SEQ ID NO: 621303 - RNA, 22 nt, Human
caggcagagguaccaagauuga

SEQ ID NO: 621304 - RNA, 22 nt, Human
ucuuuggcaucagggccagcua

SEQ ID NO: 621305 - RNA, 22 nt, Human
uuuacaaccucauauucugaug

SEQ ID NO: 621306 - RNA, 22 nt, Human
ugcaucuguaguggaaaccuua

SEQ ID NO: 621307 - RNA, 22 nt, Human
uugcagacauuccagagcuuuu

SEQ ID NO: 621308 - RNA, 22 nt, Human
cauugaaaaacguugacugagu

SEQ ID NO: 621309 - RNA, 22 nt, Human
cccagggagagcgcggaggcgg

SEQ ID NO: 621310 - RNA, 22 nt, Human
uagcauuccaucuuggacuugu

SEQ ID NO: 621311 - RNA, 22 nt, Human
aaagaacuuaagaaauuaggcu

SEQ ID NO: 621312 - RNA, 22 nt, Human
aggagccaguggaguuccugcc

SEQ ID NO: 621313 - RNA, 22 nt, Human
gagaagggggcucgaguguccu

SEQ ID NO: 621314 - RNA, 17 nt, Human
agggacagcaguuuagg

SEQ ID NO: 621315 - RNA, 22 nt, Human
agcuucugcaucuuuucuuccc

SEQ ID NO: 621316 - RNA, 22 nt, Human
ucucuggagcugcagauccagg

SEQ ID NO: 621317 - RNA, 23 nt, Human
cuuauucauucauguagcccauu

SEQ ID NO: 621318 - RNA, 23 nt, Human
uggagcugacagucagagggagg

SEQ ID NO: 621319 - RNA, 22 nt, Human
uuaacagacauauauauuugua

SEQ ID NO: 621320 - RNA, 22 nt, Human
gccuggagaccugcuccucuac

SEQ ID NO: 621321 - RNA, 22 nt, Human
cagggcugguuugucgaagaaa

SEQ ID NO: 621322 - RNA, 22 nt, Human
uauucuagaaguccaccagucu

SEQ ID NO: 621323 - RNA, 22 nt, Human
acuguacaaccucugccccugu

SEQ ID NO: 621324 - RNA, 22 nt, Human
acaaaugcuuaguucaccaaaa

SEQ ID NO: 621325 - RNA, 20 nt, Human
acaauacagguugugucuga

SEQ ID NO: 621326 - RNA, 22 nt, Human
cuccugggcucaagugauccuc

SEQ ID NO: 621327 - RNA, 22 nt, Human
gcauguguuauuuuauguauga

SEQ ID NO: 621328 - RNA, 22 nt, Human
agcacaaaagcagccacagaug

SEQ ID NO: 621329 - RNA, 22 nt, Human
aguguuucaagaagcaggaagu

SEQ ID NO: 621330 - RNA, 22 nt, Human
aagcucagaguagcucagcguc

SEQ ID NO: 621331 - RNA, 22 nt, Human
agguagguuaaauuucuuuauc

SEQ ID NO: 621332 - RNA, 22 nt, Human
agugcagggggaaagggugucu

SEQ ID NO: 621333 - RNA, 22 nt, Human
ggcccagucuggggcccuguga

SEQ ID NO: 621334 - RNA, 23 nt, Human
uacuguauauuacuguguuauac

SEQ ID NO: 621335 - RNA, 22 nt, Human
ugcucuccggcuuccguggccu

SEQ ID NO: 621336 - RNA, 22 nt, Human
acagauggaauguguuauggga

SEQ ID NO: 621337 - RNA, 23 nt, Human
acucguggaauucucugcgaucg

SEQ ID NO: 621338 - RNA, 22 nt, Human
cgcagagggcaggcagugcugg

SEQ ID NO: 621339 - RNA, 22 nt, Human
cuggcucacuagcccugcccug

SEQ ID NO: 621340 - RNA, 22 nt, Human
ggagcagggaauuacagcgcag

SEQ ID NO: 621341 - RNA, 19 nt, Human
uucuuagucucaugcauga

SEQ ID NO: 621342 - RNA, 22 nt, Human
gaggagcuugugagaagauguc

SEQ ID NO: 621343 - RNA, 22 nt, Human
auuucacagcugucaguguuac

SEQ ID NO: 621344 - RNA, 22 nt, Human
aggcuggucccagggagggaau

SEQ ID NO: 621345 - RNA, 22 nt, Human
uauucccacuccucagcaauuu

SEQ ID NO: 621346 - RNA, 18 nt, Human
ccuucagcucugguuuuc

SEQ ID NO: 621347 - RNA, 22 nt, Human
aaauguagaccuauagggaccu

SEQ ID NO: 621348 - RNA, 22 nt, Human
gaagcagucagcagcaccuuug

SEQ ID NO: 621349 - RNA, 22 nt, Human
aaccacagacccagacuagaga

SEQ ID NO: 621350 - RNA, 22 nt, Human
gugccagccuggugcgccuggg

SEQ ID NO: 621351 - RNA, 22 nt, Human
acaaugaacacacaaggaauuc

SEQ ID NO: 621352 - RNA, 17 nt, Human
gggcagggacuccuggg

SEQ ID NO: 621353 - RNA, 22 nt, Human
cuuccuugcugucugcuccagg

SEQ ID NO: 621354 - RNA, 22 nt, Human
aaauacaaaaauuagccaggca

SEQ ID NO: 621355 - RNA, 22 nt, Human
acucuuugucuguugccgcuua

SEQ ID NO: 621356 - RNA, 22 nt, Human
ucaggaaggcgccccaucagga

SEQ ID NO: 621357 - RNA, 22 nt, Human
acagguggacacagcagcaguc

SEQ ID NO: 621358 - RNA, 22 nt, Human
agcccugggcguuacugggaug

SEQ ID NO: 621359 - RNA, 22 nt, Human
uugaggucauauauauuuggca

SEQ ID NO: 621360 - RNA, 22 nt, Human
acagauggccauauuacuauau

SEQ ID NO: 621361 - RNA, 22 nt, Human
gagccaaaugugcagacauugu

SEQ ID NO: 621362 - RNA, 22 nt, Human
accagcugugugacuuuuaaug

SEQ ID NO: 621363 - RNA, 22 nt, Human
agcagcuguuagaaacaggaag

SEQ ID NO: 621364 - RNA, 22 nt, Human
cugagguguggucugggaguau

SEQ ID NO: 621365 - RNA, 22 nt, Human
ucagaaguccaauaccauggga

SEQ ID NO: 621366 - RNA, 22 nt, Human
ucaggggaaaucucucagcgaa

SEQ ID NO: 621367 - RNA, 22 nt, Human
auauuuguaguggguaagaagu

SEQ ID NO: 621368 - RNA, 22 nt, Human
gggaccugccaaggccacccag

SEQ ID NO: 621369 - RNA, 20 nt, Human
cucucucuccauucccaggg

SEQ ID NO: 621370 - RNA, 21 nt, Human
ucugggggugagccuagaaau

SEQ ID NO: 621371 - RNA, 22 nt, Human
cagaaaugacaaaguaagagga

SEQ ID NO: 621372 - RNA, 22 nt, Human
auguauugucucuuuuccuuaa

SEQ ID NO: 621373 - RNA, 22 nt, Human
uugaacauuggcaauuucauau

SEQ ID NO: 621374 - RNA, 22 nt, Human
uuuauagcugugagaccuuggg

SEQ ID NO: 621375 - RNA, 22 nt, Human
auucuaaugcccuggccccagc

SEQ ID NO: 621376 - RNA, 22 nt, Human
uagcagcugucaguuucacaua

SEQ ID NO: 621377 - RNA, 22 nt, Human
cggcagagacggcgcuuugaac

SEQ ID NO: 621378 - RNA, 22 nt, Human
uguuccagauuuagccaaccga

SEQ ID NO: 621379 - RNA, 22 nt, Human
cagggcagggccacacccccug

SEQ ID NO: 621380 - RNA, 22 nt, Human
aagggugggcccuggcagccau

SEQ ID NO: 621381 - RNA, 22 nt, Human
uuucacaaguuucaggauucug

SEQ ID NO: 621382 - RNA, 22 nt, Human
gcagauggcgcaguggaaguuc

SEQ ID NO: 621383 - RNA, 22 nt, Human
acuaaagcucacagaguugaac

SEQ ID NO: 621384 - RNA, 22 nt, Human
gacuccaggugcaggaggagcc

SEQ ID NO: 621385 - RNA, 22 nt, Human
aggcuaggccuugcccuggaac

SEQ ID NO: 621386 - RNA, 22 nt, Human
uccagcauuagaugugaaauug

SEQ ID NO: 621387 - RNA, 22 nt, Human
gcauguguuauuucucuguggg

SEQ ID NO: 621388 - RNA, 22 nt, Human
ugccaguguggaacuaggaaga

SEQ ID NO: 621389 - RNA, 22 nt, Human
agugcccuggcccagcuggacc

SEQ ID NO: 621390 - RNA, 22 nt, Human
ggcuucugaaacuguauugaga

SEQ ID NO: 621391 - RNA, 22 nt, Human
agcagcucuguuuaccuggagg

SEQ ID NO: 621392 - RNA, 22 nt, Human
uauucacagcugccgcacucag

SEQ ID NO: 621393 - RNA, 22 nt, Human
aguaauaauuuauauuagggag

SEQ ID NO: 621394 - RNA, 22 nt, Human
ucugagguaccagcugguuuau

SEQ ID NO: 621395 - RNA, 22 nt, Human
uccucaggcugccuggaagacu

SEQ ID NO: 621396 - RNA, 17 nt, Human
ggcuucagggagcuggg

SEQ ID NO: 621397 - RNA, 22 nt, Human
ucauuucaugucucaggcacug

SEQ ID NO: 621398 - RNA, 21 nt, Human
uagccauguuccuuaugguuc

SEQ ID NO: 621399 - RNA, 23 nt, Human
ucccugagaugcugcucuguccc

SEQ ID NO: 621400 - RNA, 22 nt, Human
cagagguuaccuagagcaagaa

SEQ ID NO: 621401 - RNA, 22 nt, Human
uuucauuucauagaauuguguu

SEQ ID NO: 621402 - RNA, 22 nt, Human
cucagaaaggguugcugagggc

SEQ ID NO: 621403 - RNA, 23 nt, Human
cugcauauggagguuagcaacuc

SEQ ID NO: 621404 - RNA, 22 nt, Human
uuaaaagaccuguugagguuag

SEQ ID NO: 621405 - RNA, 22 nt, Human
uauccauaccacuacuucccuu

SEQ ID NO: 621406 - RNA, 22 nt, Human
uuaagauagaacccaguagucu

SEQ ID NO: 621407 - RNA, 21 nt, Human
cauuagggcagaagcaggaag

SEQ ID NO: 621408 - RNA, 20 nt, Human
gcugccuuguccugcuuggu

SEQ ID NO: 621409 - RNA, 22 nt, Human
cugccucucagccugaccgcca

SEQ ID NO: 621410 - RNA, 22 nt, Human
aggcagggcugggauuagacuc

SEQ ID NO: 621411 - RNA, 22 nt, Human
ugucauuuaguccucugugugu

SEQ ID NO: 621412 - RNA, 19 nt, Human
ugcuggaacaucaguagcu

SEQ ID NO: 621413 - RNA, 22 nt, Human
aagggcugaaagaccuugggca

SEQ ID NO: 621414 - RNA, 22 nt, Human
cggucugagauuuuuaauaggc

SEQ ID NO: 621415 - RNA, 22 nt, Human
uucugaaaccacugaccaacua

SEQ ID NO: 621416 - RNA, 22 nt, Human
gggggacuggaccguccugggu

SEQ ID NO: 621417 - RNA, 22 nt, Human
aagacccacaaggcugaauguu

SEQ ID NO: 621418 - RNA, 22 nt, Human
uagauuuguguuugggaugaga

SEQ ID NO: 621419 - RNA, 22 nt, Human
uugacuucccagacuuguguuu

SEQ ID NO: 621420 - RNA, 22 nt, Human
uacaguauagaauguguauuaa

SEQ ID NO: 621421 - RNA, 21 nt, Human
uuuaugcagauaaugcuauuu

SEQ ID NO: 621422 - RNA, 22 nt, Human
ggcugugaaguagcaggggcag

SEQ ID NO: 621423 - RNA, 22 nt, Human
cugggcacagacccccugggcc

SEQ ID NO: 621424 - RNA, 22 nt, Human
aaauuuaagaagugugugcgug

SEQ ID NO: 621425 - RNA, 22 nt, Human
auuugcaagaguaagaauuucu

SEQ ID NO: 621426 - RNA, 22 nt, Human
ugcagaguaaaagcagaugcua

SEQ ID NO: 621427 - RNA, 22 nt, Human
ucauugaagugacugaaagauu

SEQ ID NO: 621428 - RNA, 22 nt, Human
ccacccuggguucugaugugga

SEQ ID NO: 621429 - RNA, 15 nt, Human
uucaggauaugacuc

SEQ ID NO: 621430 - RNA, 22 nt, Human
gggagggagaggacaguucuau

SEQ ID NO: 621431 - RNA, 22 nt, Human
acaugaaaccugagucuaacuc

SEQ ID NO: 621432 - RNA, 22 nt, Human
ugacaggaugaugagcaggggg

SEQ ID NO: 621433 - RNA, 22 nt, Human
uuugacaacugugcaguuugua

SEQ ID NO: 621434 - RNA, 22 nt, Human
cagacaauuaaguaauugaggu

SEQ ID NO: 621435 - RNA, 22 nt, Human
aaaaccacaaugacuuuugcac

SEQ ID NO: 621436 - RNA, 22 nt, Human
aaagugcugaagaccuagcugu

SEQ ID NO: 621437 - RNA, 22 nt, Human
cagaaacugcuccccugguagg

SEQ ID NO: 621438 - RNA, 22 nt, Human
uauaauuuaucaugucacaguu

SEQ ID NO: 621439 - RNA, 22 nt, Human
cucagggcucugcaugcacacg

SEQ ID NO: 621440 - RNA, 22 nt, Human
gugcaggauguugggaaucagg

SEQ ID NO: 621441 - RNA, 22 nt, Human
gagcagcugguaggugaaccca

SEQ ID NO: 621442 - RNA, 22 nt, Human
uccugugguaugggagugaugu

SEQ ID NO: 621443 - RNA, 22 nt, Human
ccugggucuguauugguaggua

SEQ ID NO: 621444 - RNA, 22 nt, Human
augcauaaagaaagcuaucugg

SEQ ID NO: 621445 - RNA, 22 nt, Human
ucugucaccgagggcauccaaa

SEQ ID NO: 621446 - RNA, 22 nt, Human
cugcuuuaaaacugauacauga

SEQ ID NO: 621447 - RNA, 22 nt, Human
ucuggggaauguucauuucuga

SEQ ID NO: 621448 - RNA, 22 nt, Human
guccucuugcucauuggggcag

SEQ ID NO: 621449 - RNA, 22 nt, Human
ugauaugcauguaagggagaca

SEQ ID NO: 621450 - RNA, 22 nt, Human
cacaguccuacagagaucagag

SEQ ID NO: 621451 - RNA, 22 nt, Human
uccugcagcugauaaauacagu

SEQ ID NO: 621452 - RNA, 22 nt, Human
agggcagaaaccaccuugaugg

SEQ ID NO: 621453 - RNA, 22 nt, Human
gaggagaggggcucccaagagc

SEQ ID NO: 621454 - RNA, 20 nt, Human
aauuuuaucuccauccuuug

SEQ ID NO: 621455 - RNA, 22 nt, Human
uuaguugauguucuggagguag

SEQ ID NO: 621456 - RNA, 22 nt, Human
uuuccaauuugguagucaucgg

SEQ ID NO: 621457 - RNA, 22 nt, Human
cuguggcuuuggggcggaggac

SEQ ID NO: 621458 - RNA, 22 nt, Human
uucugcuaugaaaaaagugcug

SEQ ID NO: 621459 - RNA, 22 nt, Human
aaguguuuacuuaaagucaugg

SEQ ID NO: 621460 - RNA, 22 nt, Human
ucagaaguccccagucaaggag

SEQ ID NO: 621461 - RNA, 22 nt, Human
uagaggcuucuacugcucacuu

SEQ ID NO: 621462 - RNA, 22 nt, Human
caggugacuucugaggccuuca

SEQ ID NO: 621463 - RNA, 22 nt, Human
uguccuggaguuauaaugccug

SEQ ID NO: 621464 - RNA, 22 nt, Human
cacuuaaauguuccuacagcag

SEQ ID NO: 621465 - RNA, 23 nt, Human
uaauuuuagccuuacaggacccu

SEQ ID NO: 621466 - RNA, 22 nt, Human
caggaugcacuaggaaccaggg

SEQ ID NO: 621467 - RNA, 22 nt, Human
cuggcugcaggaaggagugggc

SEQ ID NO: 621468 - RNA, 22 nt, Human
gcacaggaggccgaugcucaug

SEQ ID NO: 621469 - RNA, 22 nt, Human
cagcccugcugacacugucuga

SEQ ID NO: 621470 - RNA, 22 nt, Human
aggccaaguuacuugggaaagc

SEQ ID NO: 621471 - RNA, 22 nt, Human
guuuaaccauugcauauccaua

SEQ ID NO: 621472 - RNA, 22 nt, Human
guggccugggguuuguucugag

SEQ ID NO: 621473 - RNA, 22 nt, Human
gggaagcagacggcggggaaau

SEQ ID NO: 621474 - RNA, 22 nt, Human
ccacaagacucugucagcauaa

SEQ ID NO: 621475 - RNA, 22 nt, Human
aaauccagguaguuugguuuga

SEQ ID NO: 621476 - RNA, 22 nt, Human
cucuuuggagaagcacguauua

SEQ ID NO: 621477 - RNA, 20 nt, Human
agcaaaaugcaagauuuuca

SEQ ID NO: 621478 - RNA, 22 nt, Human
ucagacugcugucccugccugg

SEQ ID NO: 621479 - RNA, 22 nt, Human
gcugggccccuugaaaggcguc

SEQ ID NO: 621480 - RNA, 17 nt, Human
ucgguuugccaggcuuc

SEQ ID NO: 621481 - RNA, 22 nt, Human
agcccagggaguugauuagcau

SEQ ID NO: 621482 - RNA, 22 nt, Human
cagaaaaggaagagcuauguaa

SEQ ID NO: 621483 - RNA, 22 nt, Human
gucaagucaugacucaaaggaa

SEQ ID NO: 621484 - RNA, 22 nt, Human
augugcuugaagccucagagaa

SEQ ID NO: 621485 - RNA, 22 nt, Human
agauuucagaugcucggcaguu

SEQ ID NO: 621486 - RNA, 22 nt, Human
gaggaagcagggcuuggcugag

SEQ ID NO: 621487 - RNA, 22 nt, Human
ggugcuguggcagcuccuccuc

SEQ ID NO: 621488 - RNA, 22 nt, Human
gaaauaauuuagaagguauucc

SEQ ID NO: 621489 - RNA, 22 nt, Human
uauugcuuuuauuucuauggac

SEQ ID NO: 621490 - RNA, 22 nt, Human
aucauagguguguuaccaguua

SEQ ID NO: 621491 - RNA, 21 nt, Human
ccaaaggcuauguaucuucug

SEQ ID NO: 621492 - RNA, 22 nt, Human
ucacagaagggaaagaugccaa

SEQ ID NO: 621493 - RNA, 22 nt, Human
guuauauauaguauuucucuga

SEQ ID NO: 621494 - RNA, 22 nt, Human
ugguccuggugcaagugcauuu

SEQ ID NO: 621495 - RNA, 22 nt, Human
gccaaaucacagggccaaaagc

SEQ ID NO: 621496 - RNA, 22 nt, Human
cucugcagagccuccagcccag

SEQ ID NO: 621497 - RNA, 22 nt, Human
cagguccaauugcgcuaaaauc

SEQ ID NO: 621498 - RNA, 22 nt, Human
uccuggcagcccgcaggugcug

SEQ ID NO: 621499 - RNA, 22 nt, Human
cauuaacaauuguuuaugcugu

SEQ ID NO: 621500 - RNA, 22 nt, Human
cuucccuuucuggugacuucuc

SEQ ID NO: 621501 - RNA, 22 nt, Human
uucucuuagcuguaaagucaau

SEQ ID NO: 621502 - RNA, 22 nt, Human
uucuggaagaauaaugggcaaa

SEQ ID NO: 621503 - RNA, 20 nt, Human
uuuauucagccuacccucuu

SEQ ID NO: 621504 - RNA, 22 nt, Human
gucauuuuaugggaacagauuu

SEQ ID NO: 621505 - RNA, 22 nt, Human
auaaacaguaaaugugagcagu

SEQ ID NO: 621506 - RNA, 23 nt, Human
ucucagugcacgcaccaugccug

SEQ ID NO: 621507 - RNA, 22 nt, Human
augcucuauaaauaugacaugu

SEQ ID NO: 621508 - RNA, 22 nt, Human
guacacagaugcuugagaaucu

SEQ ID NO: 621509 - RNA, 22 nt, Human
uccugggcacaagugagucucc

SEQ ID NO: 621510 - RNA, 22 nt, Human
cugcuccuggucauccuccacu

SEQ ID NO: 621511 - RNA, 22 nt, Human
uccaggccuuugcacauguugu

SEQ ID NO: 621512 - RNA, 18 nt, Human
auuguuaauagaguacuu

SEQ ID NO: 621513 - RNA, 17 nt, Human
cucugggucuccugcuu

SEQ ID NO: 621514 - RNA, 22 nt, Human
uccuggcuaacacggugacacc

SEQ ID NO: 621515 - RNA, 22 nt, Human
gagguccacugaggcaacaggg

SEQ ID NO: 621516 - RNA, 22 nt, Human
acucucucacagcuuggcugau

SEQ ID NO: 621517 - RNA, 22 nt, Human
cuggggugagcagaaacagggg

SEQ ID NO: 621518 - RNA, 22 nt, Human
uugcuuccucugugcaauccuc

SEQ ID NO: 621519 - RNA, 22 nt, Human
cucucugaggaaggagcaucug

SEQ ID NO: 621520 - RNA, 22 nt, Human
aggagugugaagagccuagauc

SEQ ID NO: 621521 - RNA, 23 nt, Human
gacagguaaggguugggagaauc

SEQ ID NO: 621522 - RNA, 22 nt, Human
ugcagagggaaaaggugcuccu

SEQ ID NO: 621523 - RNA, 18 nt, Human
cucuuaagccuuugucaa

SEQ ID NO: 621524 - RNA, 22 nt, Human
cucagagagguugaacaacuug

SEQ ID NO: 621525 - RNA, 22 nt, Human
aaccuggaggcuguguagucuu

SEQ ID NO: 621526 - RNA, 23 nt, Human
ugauuacaagggccaaagaaagg

SEQ ID NO: 621527 - RNA, 18 nt, Human
gagaaaguuugggcagaa

SEQ ID NO: 621528 - RNA, 22 nt, Human
uuucaaacuccagcucaccaau

SEQ ID NO: 621529 - RNA, 18 nt, Human
uuuccaagaagagagcuc

SEQ ID NO: 621530 - RNA, 22 nt, Human
agcuccagagucugaacuauuc

SEQ ID NO: 621531 - RNA, 22 nt, Human
ucucuacauaaccucaauacuc

SEQ ID NO: 621532 - RNA, 22 nt, Human
ccagaggaguugaggcuuuggg

SEQ ID NO: 621533 - RNA, 22 nt, Human
uggaccagcagccccagugccu

SEQ ID NO: 621534 - RNA, 22 nt, Human
uccugaaggagcaguugcuggg

SEQ ID NO: 621535 - RNA, 22 nt, Human
uggcacagccaucuucuccugc

SEQ ID NO: 621536 - RNA, 23 nt, Human
agaaguucaagaccagccugccc

SEQ ID NO: 621537 - RNA, 22 nt, Human
gaggguccuggcuaagucugac

SEQ ID NO: 621538 - RNA, 22 nt, Human
uauaauuuuagaagagauggaa

SEQ ID NO: 621539 - RNA, 22 nt, Human
agcacauuaguaucuaagaaca

SEQ ID NO: 621540 - RNA, 22 nt, Human
cuuacagagaagaaaauguagu

SEQ ID NO: 621541 - RNA, 22 nt, Human
augaggccuuucuucacccuuu

SEQ ID NO: 621542 - RNA, 22 nt, Human
agauaugacuagaagcucauuu

SEQ ID NO: 621543 - RNA, 23 nt, Human
aaagauguucccaaaguucacgu

SEQ ID NO: 621544 - RNA, 22 nt, Human
uucagaaagugaaucuuguuau

SEQ ID NO: 621545 - RNA, 22 nt, Human
ugugggugguaaaauacaauga

SEQ ID NO: 621546 - RNA, 19 nt, Human
gaggaggcuucagcuuucu

SEQ ID NO: 621547 - RNA, 22 nt, Human
caguauguacucuuaucaugua

SEQ ID NO: 621548 - RNA, 22 nt, Human
guuuaugaggaaaaguuaugau

SEQ ID NO: 621549 - RNA, 22 nt, Human
uuucuacuucuccugaaugucu

SEQ ID NO: 621550 - RNA, 22 nt, Human
gcagaggacacaggagggcaag

SEQ ID NO: 621551 - RNA, 22 nt, Human
ugaggugacaauucauucucca

SEQ ID NO: 621552 - RNA, 22 nt, Human
cuucaguuuaucccaucaucca

SEQ ID NO: 621553 - RNA, 22 nt, Human
ggacccugggcagcuggcugcu

SEQ ID NO: 621554 - RNA, 22 nt, Human
cuccuggaagcccgcccugcug

SEQ ID NO: 621555 - RNA, 22 nt, Human
augaacacaauacgugcaugca

SEQ ID NO: 621556 - RNA, 22 nt, Human
cacccccaggagcuccagggac

SEQ ID NO: 621557 - RNA, 23 nt, Human
cagggaggagauacuguguaucu

SEQ ID NO: 621558 - RNA, 22 nt, Human
guucaaaauucaaaugguauac

SEQ ID NO: 621559 - RNA, 22 nt, Human
auuuccuucggacaguuugggu

SEQ ID NO: 621560 - RNA, 22 nt, Human
gaugauuguuggcucucuugau

SEQ ID NO: 621561 - RNA, 22 nt, Human
cacacaguggaguauuacucag

SEQ ID NO: 621562 - RNA, 23 nt, Human
ucuguacacaucagcaucuccca

SEQ ID NO: 621563 - RNA, 22 nt, Human
agcugagauuguuuccauuucu

SEQ ID NO: 621564 - RNA, 22 nt, Human
cugugcuucgcaacuccaaggu

SEQ ID NO: 621565 - RNA, 23 nt, Human
cacugggcccaggguguggaggc

SEQ ID NO: 621566 - RNA, 22 nt, Human
auuucugauaguaaaggucuuu

SEQ ID NO: 621567 - RNA, 22 nt, Human
cucaggcugcccugacagcccc

SEQ ID NO: 621568 - RNA, 22 nt, Human
acagcuaaucccccuagauucu

SEQ ID NO: 621569 - RNA, 22 nt, Human
uucauugauaguuuuauguaug

SEQ ID NO: 621570 - RNA, 22 nt, Human
acuaaaguguuggagaaugagg

SEQ ID NO: 621571 - RNA, 22 nt, Human
gaccuucuugcuguguccuaac

SEQ ID NO: 621572 - RNA, 22 nt, Human
cuuaauguggaccugguuucua

SEQ ID NO: 621573 - RNA, 22 nt, Human
ugugaggccuagacagccuggg

SEQ ID NO: 621574 - RNA, 22 nt, Human
agggcagacuaggauggaagug

SEQ ID NO: 621575 - RNA, 22 nt, Human
ugauuucaaguagugacaugcu

SEQ ID NO: 621576 - RNA, 22 nt, Human
guuuacauuaaguauuagcauc

SEQ ID NO: 621577 - RNA, 19 nt, Human
acaagucacuuacuuagua

SEQ ID NO: 621578 - RNA, 22 nt, Human
gucugcugcagagcauggcuuu

SEQ ID NO: 621579 - RNA, 22 nt, Human
auaaccaugauuaaucuaagaa

SEQ ID NO: 621580 - RNA, 22 nt, Human
uucucacacuuuccacugaggu

SEQ ID NO: 621581 - RNA, 22 nt, Human
uuacauauuauccaaaacugcu

SEQ ID NO: 621582 - RNA, 22 nt, Human
gaggagagaacauuccuccaua

SEQ ID NO: 621583 - RNA, 22 nt, Human
ccaagugauacacccgccucgg

SEQ ID NO: 621584 - RNA, 22 nt, Human
ggcccaguguaccccaggcagu

SEQ ID NO: 621585 - RNA, 22 nt, Human
ucaguguguuacuuucuccuau

SEQ ID NO: 621586 - RNA, 22 nt, Human
uggaggccacaugaacgcugcg

SEQ ID NO: 621587 - RNA, 22 nt, Human
cauucuucuggauaguuaguug

SEQ ID NO: 621588 - RNA, 22 nt, Human
aucuggauagguuguuuugcau

SEQ ID NO: 621589 - RNA, 22 nt, Human
uuccugugguccagagucaucc

SEQ ID NO: 621590 - RNA, 22 nt, Human
agcugcagauaggauguuauuu

SEQ ID NO: 621591 - RNA, 22 nt, Human
aggcuucaggaagucuccuggg

SEQ ID NO: 621592 - RNA, 17 nt, Human
cugcuuugugcaacgcu

SEQ ID NO: 621593 - RNA, 22 nt, Human
ucuuuugugccaaguaaugaau

SEQ ID NO: 621594 - RNA, 22 nt, Human
ugguuccaagauggcugccaca

SEQ ID NO: 621595 - RNA, 22 nt, Human
gccagcucuguggcuguacuug

SEQ ID NO: 621596 - RNA, 22 nt, Human
auuguaauuuuagagaaagugg

SEQ ID NO: 621597 - RNA, 21 nt, Human
agauuauaaagaaccuucuua

SEQ ID NO: 621598 - RNA, 22 nt, Human
guaucacuuuugagagugagaa

SEQ ID NO: 621599 - RNA, 22 nt, Human
ucaaugcauaggagguggcaga

SEQ ID NO: 621600 - RNA, 22 nt, Human
agaagucaaugaugagagugcu

SEQ ID NO: 621601 - RNA, 22 nt, Human
guacugaauaacaaagucuguc

SEQ ID NO: 621602 - RNA, 22 nt, Human
guggcugcaguaguguaggguc

SEQ ID NO: 621603 - RNA, 22 nt, Human
agccucucacugucacccuccc

SEQ ID NO: 621604 - RNA, 22 nt, Human
auguuacauaguccuuauuugu

SEQ ID NO: 621605 - RNA, 22 nt, Human
gcuuccuuccuuacauuggugg

SEQ ID NO: 621606 - RNA, 22 nt, Human
uucuuaagcguaugauaaugaa

SEQ ID NO: 621607 - RNA, 22 nt, Human
uuauuuuaccuuccucugagcu

SEQ ID NO: 621608 - RNA, 22 nt, Human
ccaggcucacugacuaccacau

SEQ ID NO: 621609 - RNA, 22 nt, Human
uauacugaucacugaggucauc

SEQ ID NO: 621610 - RNA, 22 nt, Human
cacagccuuuaggguacacaca

SEQ ID NO: 621611 - RNA, 18 nt, Human
ucuuuaaguugucagagu

SEQ ID NO: 621612 - RNA, 23 nt, Human
ucuccuggcugcacuguggccac

SEQ ID NO: 621613 - RNA, 22 nt, Human
ggagccccaauugagcaguacg

SEQ ID NO: 621614 - RNA, 22 nt, Human
gcuccugugcaggucucgguug

SEQ ID NO: 621615 - RNA, 19 nt, Human
gacuccaacuuuaagcaug

SEQ ID NO: 621616 - RNA, 22 nt, Human
ugcuggaauugaccuagaagga

SEQ ID NO: 621617 - RNA, 22 nt, Human
uauaggaaauuuaucuccuggg

SEQ ID NO: 621618 - RNA, 22 nt, Human
cucccaagcugugcugaacugu

SEQ ID NO: 621619 - RNA, 22 nt, Human
ccaguccugccacccugucuau

SEQ ID NO: 621620 - RNA, 22 nt, Human
aagagacuguaaaggcgugagu

SEQ ID NO: 621621 - RNA, 23 nt, Human
auguuaaacauaacugaagagcc

SEQ ID NO: 621622 - RNA, 22 nt, Human
uucuuguucuccucauuuagag

SEQ ID NO: 621623 - RNA, 22 nt, Human
cgcuggccauagccuccugugu

SEQ ID NO: 621624 - RNA, 22 nt, Human
cagcccuggcagcuuucagggu

SEQ ID NO: 621625 - RNA, 21 nt, Human
ggcagcacuaccugaagcaua

SEQ ID NO: 621626 - RNA, 19 nt, Human
cgccuggcaggcccugcgc

SEQ ID NO: 621627 - RNA, 22 nt, Human
ggccugugcacaugugcaggaa

SEQ ID NO: 621628 - RNA, 22 nt, Human
auuuacauuccauggugguuac

SEQ ID NO: 621629 - RNA, 22 nt, Human
cagcaucucuuuuugcauuccu

SEQ ID NO: 621630 - RNA, 22 nt, Human
cuucagcaacuuuggaauguuu

SEQ ID NO: 621631 - RNA, 22 nt, Human
auaacagacugauuuuuaaaug

SEQ ID NO: 621632 - RNA, 22 nt, Human
acuguuacagggcacugaacau

SEQ ID NO: 621633 - RNA, 22 nt, Human
ucauugaaugagaugcaauaga

SEQ ID NO: 621634 - RNA, 22 nt, Human
uucauucucuuagcauaguccu

SEQ ID NO: 621635 - RNA, 20 nt, Human
gcugcucuccacggucugca

SEQ ID NO: 621636 - RNA, 22 nt, Human
ucuaaugaggacuuuauagaga

SEQ ID NO: 621637 - RNA, 22 nt, Human
uucuggaggccccuuccuucuc

SEQ ID NO: 621638 - RNA, 22 nt, Human
uuucuaaaugguggcugcauug

SEQ ID NO: 621639 - RNA, 22 nt, Human
acaaaguuugugguauuccaag

SEQ ID NO: 621640 - RNA, 22 nt, Human
gcuuagucaauuauaaauaggc

SEQ ID NO: 621641 - RNA, 22 nt, Human
cucuggguggucucacugagug

SEQ ID NO: 621642 - RNA, 17 nt, Human
agccugccccaugcugc

SEQ ID NO: 621643 - RNA, 22 nt, Human
gcggggcacagugauggagcac

SEQ ID NO: 621644 - RNA, 22 nt, Human
ucaccuguauuaauacagaacu

SEQ ID NO: 621645 - RNA, 22 nt, Human
aaugagaacugggaguuggugg

SEQ ID NO: 621646 - RNA, 22 nt, Human
agcacagaaagcacauuugaaa

SEQ ID NO: 621647 - RNA, 22 nt, Human
acauguuuggcucuaugcuaua

SEQ ID NO: 621648 - RNA, 22 nt, Human
uccuucagggggccgccugcac

SEQ ID NO: 621649 - RNA, 22 nt, Human
gggagguucuguucgcacuuga

SEQ ID NO: 621650 - RNA, 22 nt, Human
uuucagucauggauucacugag

SEQ ID NO: 621651 - RNA, 23 nt, Human
ugagucaccacaguuacagucac

SEQ ID NO: 621652 - RNA, 22 nt, Human
gaaucuaugccucauauagacc

SEQ ID NO: 621653 - RNA, 22 nt, Human
gacagcagacagaacuaccugc

SEQ ID NO: 621654 - RNA, 22 nt, Human
agaugguuaucuuuucuuugua

SEQ ID NO: 621655 - RNA, 22 nt, Human
gaaauagaggacagcuggauca

SEQ ID NO: 621656 - RNA, 22 nt, Human
ccagcauuugcuucuggugggg

SEQ ID NO: 621657 - RNA, 22 nt, Human
ugcccacauggugccauggcca

SEQ ID NO: 621658 - RNA, 22 nt, Human
uccuggggaggguucuggcucc

SEQ ID NO: 621659 - RNA, 22 nt, Human
uggcagguuaacuuacaacugu

SEQ ID NO: 621660 - RNA, 22 nt, Human
cugaaagggagaacaccaagag

SEQ ID NO: 621661 - RNA, 22 nt, Human
ggucauuguucuuuucugugau

SEQ ID NO: 621662 - RNA, 22 nt, Human
caagaaacaccaaugacugcug

SEQ ID NO: 621663 - RNA, 22 nt, Human
acaggcucucuauugagugcag

SEQ ID NO: 621664 - RNA, 22 nt, Human
uaugaacacacuuuggaaguga

SEQ ID NO: 621665 - RNA, 16 nt, Human
gggcuggagauacagu

SEQ ID NO: 621666 - RNA, 22 nt, Human
aaaccuguggccacuaaauuug

SEQ ID NO: 621667 - RNA, 22 nt, Human
agcauucauugcuagaauguaa

SEQ ID NO: 621668 - RNA, 22 nt, Human
aguguuugucccguuagaaaug

SEQ ID NO: 621669 - RNA, 22 nt, Human
auccaggcugucuaaugggaga

SEQ ID NO: 621670 - RNA, 22 nt, Human
gaagagcuaaaggcacaggcuu

SEQ ID NO: 621671 - RNA, 22 nt, Human
uaaagcccucugaucacacugg

SEQ ID NO: 621672 - RNA, 22 nt, Human
uagcccuguccuuggccugugc

SEQ ID NO: 621673 - RNA, 22 nt, Human
agaccuguuggguucauuggcu

SEQ ID NO: 621674 - RNA, 22 nt, Human
aagcagauuggggauuuccaug

SEQ ID NO: 621675 - RNA, 22 nt, Human
uuugaagacagaucaauauaag

SEQ ID NO: 621676 - RNA, 19 nt, Human
ggccagcacagggcucugu

SEQ ID NO: 621677 - RNA, 22 nt, Human
gcaggagcagucaggggcagcu

SEQ ID NO: 621678 - RNA, 22 nt, Human
aagaauugaugugaauugcagc

SEQ ID NO: 621679 - RNA, 22 nt, Human
uauuaagauacguaguuguaaa

SEQ ID NO: 621680 - RNA, 22 nt, Human
ugaaaucaaugucuucugucuc

SEQ ID NO: 621681 - RNA, 22 nt, Human
ccugcagggugcugccacagau

SEQ ID NO: 621682 - RNA, 20 nt, Human
agggcagcuugaggagccgg

SEQ ID NO: 621683 - RNA, 22 nt, Human
acugagggccaaaggcacugag

SEQ ID NO: 621684 - RNA, 22 nt, Human
uuaugcaugagauaaaaauugg

SEQ ID NO: 621685 - RNA, 22 nt, Human
cuucuguguuuuacuauaugua

SEQ ID NO: 621686 - RNA, 22 nt, Human
cugugcuggauucugaggcuac

SEQ ID NO: 621687 - RNA, 22 nt, Human
augcuguuauucuaauguguga

SEQ ID NO: 621688 - RNA, 22 nt, Human
auguuauaguuauaaaaugagg

SEQ ID NO: 621689 - RNA, 22 nt, Human
gaguugaagaaauaguuuugau

SEQ ID NO: 621690 - RNA, 22 nt, Human
gggacgggcaguccaagggguc

SEQ ID NO: 621691 - RNA, 22 nt, Human
cacaggagagcugggaggugcc

SEQ ID NO: 621692 - RNA, 22 nt, Human
ggggaacaccgggcagaggcgc

SEQ ID NO: 621693 - RNA, 22 nt, Human
gggauuacagaugugagccauu

SEQ ID NO: 621694 - RNA, 22 nt, Human
agguuucuggaaagguuuugcu

SEQ ID NO: 621695 - RNA, 22 nt, Human
uuccuuccugucuuccuuacug

SEQ ID NO: 621696 - RNA, 22 nt, Human
gcugggcuguaguuugcugacc

SEQ ID NO: 621697 - RNA, 22 nt, Human
gucacacagggccuccaaauca

SEQ ID NO: 621698 - RNA, 22 nt, Human
gaaagaaugcugggagccaucu

SEQ ID NO: 621699 - RNA, 22 nt, Human
uggcucucaggccugcugcguu

SEQ ID NO: 621700 - RNA, 22 nt, Human
agcagggcuguguagguaauga

SEQ ID NO: 621701 - RNA, 22 nt, Human
caacauuauauagccacaugcc

SEQ ID NO: 621702 - RNA, 22 nt, Human
cuuuuggccucaaaggaaagaa

SEQ ID NO: 621703 - RNA, 22 nt, Human
gaggagguuccggguggagaag

SEQ ID NO: 621704 - RNA, 22 nt, Human
agcgauucuaauuggagauuaa

SEQ ID NO: 621705 - RNA, 22 nt, Human
gggcccagcacuggcugggauc

SEQ ID NO: 621706 - RNA, 22 nt, Human
caucagagguacuuaaugaaug

SEQ ID NO: 621707 - RNA, 22 nt, Human
ucuggaauaacccugcuuccaa

SEQ ID NO: 621708 - RNA, 22 nt, Human
ggccuccaucuuaucuuacucu

SEQ ID NO: 621709 - RNA, 22 nt, Human
acugucccauuuauguagacau

SEQ ID NO: 621710 - RNA, 22 nt, Human
aguacaguagggugcuguuagu

SEQ ID NO: 621711 - RNA, 22 nt, Human
ucagacagcuugcagggaggug

SEQ ID NO: 621712 - RNA, 22 nt, Human
acucauguaagcggaauguagu

SEQ ID NO: 621713 - RNA, 22 nt, Human
cugagccccaucugaggugccc

SEQ ID NO: 621714 - RNA, 22 nt, Human
uucacauugugcagauuauggu

SEQ ID NO: 621715 - RNA, 16 nt, Human
ugggugggaggagcgg

SEQ ID NO: 621716 - RNA, 19 nt, Human
gagcgcagagggcagggga

SEQ ID NO: 621717 - RNA, 22 nt, Human
acaauagugccuggcauagagu

SEQ ID NO: 621718 - RNA, 22 nt, Human
aacaggaauugcaggcagaucu

SEQ ID NO: 621719 - RNA, 22 nt, Human
cucuucaaaagucuaauccuua

SEQ ID NO: 621720 - RNA, 22 nt, Human
aagcucaggcuggaccuggcuu

SEQ ID NO: 621721 - RNA, 22 nt, Human
aauucugaaagauuccuuauuc

SEQ ID NO: 621722 - RNA, 22 nt, Human
aaucugaauauuuauguguauu

SEQ ID NO: 621723 - RNA, 22 nt, Human
auacggguuguuaaaaaaucau

SEQ ID NO: 621724 - RNA, 22 nt, Human
ggaguggcagcuaggcugucag

SEQ ID NO: 621725 - RNA, 22 nt, Human
cugaaagcaaaguaauucuuaa

SEQ ID NO: 621726 - RNA, 22 nt, Human
cagugccugugggcuucuucca

SEQ ID NO: 621727 - RNA, 22 nt, Human
cacaugagagcccccaagagca

SEQ ID NO: 621728 - RNA, 22 nt, Human
cagcagcagcuuaguggucccc

SEQ ID NO: 621729 - RNA, 23 nt, Human
aggcagugucucuuauccugucc

SEQ ID NO: 621730 - RNA, 22 nt, Human
cugcauuagucaugcuuugcag

SEQ ID NO: 621731 - RNA, 22 nt, Human
ggcgcuggccacgguggcucug

SEQ ID NO: 621732 - RNA, 22 nt, Human
cucauggauauaagaacuguuu

SEQ ID NO: 621733 - RNA, 22 nt, Human
uucugugugcugucuuggcuuu

SEQ ID NO: 621734 - RNA, 21 nt, Human
gggaucugaggcaagucuccu

SEQ ID NO: 621735 - RNA, 22 nt, Human
ugucauugaggaaaacuaggug

SEQ ID NO: 621736 - RNA, 22 nt, Human
auggguggccccgugugcaguc

SEQ ID NO: 621737 - RNA, 22 nt, Human
uguggagcucagaaguagcagu

SEQ ID NO: 621738 - RNA, 22 nt, Human
gcucuccugugcagaugcugcu

SEQ ID NO: 621739 - RNA, 22 nt, Human
accaguaugugccuucaguguc

SEQ ID NO: 621740 - RNA, 22 nt, Human
gcagggacgccagggacagcaa

SEQ ID NO: 621741 - RNA, 22 nt, Human
ggugugugguuuugauacaguc

SEQ ID NO: 621742 - RNA, 17 nt, Human
gcaaggaaguucuuugc

SEQ ID NO: 621743 - RNA, 22 nt, Human
gacauuuacugaauacugauua

SEQ ID NO: 621744 - RNA, 22 nt, Human
uucucuguuuuccccucgaugu

SEQ ID NO: 621745 - RNA, 22 nt, Human
uucaaaccuucacuugcagagu

SEQ ID NO: 621746 - RNA, 19 nt, Human
cuggcucuuggguggagga

SEQ ID NO: 621747 - RNA, 22 nt, Human
cacaagggcuuuguaggcuuug

SEQ ID NO: 621748 - RNA, 22 nt, Human
acaggcaaagggucaguagcag

SEQ ID NO: 621749 - RNA, 22 nt, Human
uacaaugcauucauuuuugagg

SEQ ID NO: 621750 - RNA, 22 nt, Human
ccuucagccuucauccuuccuu

SEQ ID NO: 621751 - RNA, 22 nt, Human
cagcccugcagccauggccugu

SEQ ID NO: 621752 - RNA, 22 nt, Human
caaagaauagcauggcauuugu

SEQ ID NO: 621753 - RNA, 20 nt, Human
uuugaacuuuguacucuguu

SEQ ID NO: 621754 - RNA, 22 nt, Human
gaucauuuugaugcccuuuuag

SEQ ID NO: 621755 - RNA, 22 nt, Human
ucagagaaaauggaaacuuuua

SEQ ID NO: 621756 - RNA, 22 nt, Human
ucuguguguugucaggaggauu

SEQ ID NO: 621757 - RNA, 22 nt, Human
uaauaagcguagaagguauauc

SEQ ID NO: 621758 - RNA, 22 nt, Human
ucucaggguuuguacaagugua

SEQ ID NO: 621759 - RNA, 22 nt, Human
caggccagaggcuguuguugcg

SEQ ID NO: 621760 - RNA, 22 nt, Human
uggacucuaugaugcgccagca

SEQ ID NO: 621761 - RNA, 22 nt, Human
ggcacugaucugauuucccucc

SEQ ID NO: 621762 - RNA, 22 nt, Human
guucuccaggggcuguucaucu

SEQ ID NO: 621763 - RNA, 22 nt, Human
uggcaguggcgggacucagggc

SEQ ID NO: 621764 - RNA, 22 nt, Human
guuucaauuugaaugcgaggcu

SEQ ID NO: 621765 - RNA, 20 nt, Human
agacaguggggagcuccuag

SEQ ID NO: 621766 - RNA, 22 nt, Human
gucaggauuuacaaacuucagu

SEQ ID NO: 621767 - RNA, 22 nt, Human
ucugagcuggagcccaucaccu

SEQ ID NO: 621768 - RNA, 22 nt, Human
ugcaagagcagaaagaacugag

SEQ ID NO: 621769 - RNA, 22 nt, Human
uccugggaguggccauguaaug

SEQ ID NO: 621770 - RNA, 22 nt, Human
cagagccauuauggagacuugc

SEQ ID NO: 621771 - RNA, 22 nt, Human
gcaaaaaccacaauuacuuuug

SEQ ID NO: 621772 - RNA, 19 nt, Human
uaucuuuaugcaguggugg

SEQ ID NO: 621773 - RNA, 22 nt, Human
cauaugaaguucaacagagaug

SEQ ID NO: 621774 - RNA, 22 nt, Human
aaaaguauuuauggcuauguaa

SEQ ID NO: 621775 - RNA, 22 nt, Human
aaggaagacuugagaagguucc

SEQ ID NO: 621776 - RNA, 22 nt, Human
ucugccugccagucugguccuc

SEQ ID NO: 621777 - RNA, 22 nt, Human
uauacacauuuuuaccuauagu

SEQ ID NO: 621778 - RNA, 22 nt, Human
auacaucaugcuccauauauuu

SEQ ID NO: 621779 - RNA, 22 nt, Human
ucacagcaggguaacaggaaga

SEQ ID NO: 621780 - RNA, 22 nt, Human
auucuucucuggguuggguuca

SEQ ID NO: 621781 - RNA, 22 nt, Human
cuuuauauccagauguuuggug

SEQ ID NO: 621782 - RNA, 22 nt, Human
gaaugaaaaccuuggcucaaau

SEQ ID NO: 621783 - RNA, 22 nt, Human
ugagguggcuagggaggcacuc

SEQ ID NO: 621784 - RNA, 22 nt, Human
agcugcagucaagcugggccac

SEQ ID NO: 621785 - RNA, 22 nt, Human
gcaaaucaccaccuagcuggau

SEQ ID NO: 621786 - RNA, 22 nt, Human
acaggcuggaggaggaccaaga

SEQ ID NO: 621787 - RNA, 22 nt, Human
acacaugaccuccgcagcagca

SEQ ID NO: 621788 - RNA, 22 nt, Human
guuaacacaggacucucugccu

SEQ ID NO: 621789 - RNA, 22 nt, Human
gucuggagggaagagaugucag

SEQ ID NO: 621790 - RNA, 22 nt, Human
gagcugagggucuaggaggguu

SEQ ID NO: 621791 - RNA, 22 nt, Human
cuauuuucccauaugguugaca

SEQ ID NO: 621792 - RNA, 22 nt, Human
gaaaaugugucaucccuacugu

SEQ ID NO: 621793 - RNA, 22 nt, Human
uacagauauauagugugugccu

SEQ ID NO: 621794 - RNA, 22 nt, Human
cuggcaggagcuguggccguag

SEQ ID NO: 621795 - RNA, 22 nt, Human
gugugagagacugaagaaagcc

SEQ ID NO: 621796 - RNA, 22 nt, Human
uuucuuccuggauuccuacuuc

SEQ ID NO: 621797 - RNA, 22 nt, Human
uggugccuugggccuacagcgc

SEQ ID NO: 621798 - RNA, 22 nt, Human
agagauuucuacugcacucuuu

SEQ ID NO: 621799 - RNA, 19 nt, Human
uuaggaaaccacuuuccuu

SEQ ID NO: 621800 - RNA, 22 nt, Human
cagacacacaagcaaucuaagu

SEQ ID NO: 621801 - RNA, 18 nt, Human
caguuuuuauaucuggca

SEQ ID NO: 621802 - RNA, 22 nt, Human
gugguccccagagcuguguaca

SEQ ID NO: 621803 - RNA, 22 nt, Human
ugaggccugggcacauaaccuc

SEQ ID NO: 621804 - RNA, 22 nt, Human
agcaaggaaacuauggagagau

SEQ ID NO: 621805 - RNA, 22 nt, Human
cugaggucuauuuugaaacugc

SEQ ID NO: 621806 - RNA, 22 nt, Human
aauucauugccagaaucuauga

SEQ ID NO: 621807 - RNA, 22 nt, Human
uggcccagucagcaggagaggg

SEQ ID NO: 621808 - RNA, 16 nt, Human
ggagguggguaaggug

SEQ ID NO: 621809 - RNA, 22 nt, Human
gcaguucuacuuauccauagac

SEQ ID NO: 621810 - RNA, 22 nt, Human
ccagguguucuuugucccuguu

SEQ ID NO: 621811 - RNA, 22 nt, Human
gccucugcggagcuguacauca

SEQ ID NO: 621812 - RNA, 20 nt, Human
uuuuauauguaggguauaug

SEQ ID NO: 621813 - RNA, 22 nt, Human
guggcagugggaugcuaucagg

SEQ ID NO: 621814 - RNA, 19 nt, Human
ggggagguauuguuuucau

SEQ ID NO: 621815 - RNA, 21 nt, Human
ggccucugccuugccccacuc

SEQ ID NO: 621816 - RNA, 20 nt, Human
uccuggccuucucgggcagu

SEQ ID NO: 621817 - RNA, 22 nt, Human
auuguaaaaguauucuaagauu

SEQ ID NO: 621818 - RNA, 19 nt, Human
uauuauuuguagcaaggcc

SEQ ID NO: 621819 - RNA, 21 nt, Human
gguugguguguccaguggcca

SEQ ID NO: 621820 - RNA, 22 nt, Human
caaauguauguuuuccuaugua

SEQ ID NO: 621821 - RNA, 22 nt, Human
aguggacucuucccagugcuug

SEQ ID NO: 621822 - RNA, 22 nt, Human
gcagcugaauguccauugcugc

SEQ ID NO: 621823 - RNA, 22 nt, Human
auuuuucucuccacuccauuaa

SEQ ID NO: 621824 - RNA, 22 nt, Human
acauauaugcugggacugugac

SEQ ID NO: 621825 - RNA, 22 nt, Human
uuaugaaggaucagguacuugg

SEQ ID NO: 621826 - RNA, 22 nt, Human
uccugccucacaguugaaguuu

SEQ ID NO: 621827 - RNA, 22 nt, Human
aucaggaucacugggagucuug

SEQ ID NO: 621828 - RNA, 22 nt, Human
uggcuaaucuuaaggcuuuugc

SEQ ID NO: 621829 - RNA, 22 nt, Human
uaacucugaauccucacagcag

SEQ ID NO: 621830 - RNA, 22 nt, Human
gcugauccuuuuaugucuagcu

SEQ ID NO: 621831 - RNA, 22 nt, Human
gcuuagcaaugugacaagaugc

SEQ ID NO: 621832 - RNA, 22 nt, Human
uuucauuuugguuaugccauaa

SEQ ID NO: 621833 - RNA, 22 nt, Human
cugggccuggagcccacgagcc

SEQ ID NO: 621834 - RNA, 22 nt, Human
ccaggguuggaugagucacuua

SEQ ID NO: 621835 - RNA, 22 nt, Human
cccagcauggagugaggacuca

SEQ ID NO: 621836 - RNA, 20 nt, Human
uggcuccagccuccccuacc

SEQ ID NO: 621837 - RNA, 21 nt, Human
caggcucugcugggugcuggg

SEQ ID NO: 621838 - RNA, 22 nt, Human
ccuggcucuucgggaguuuguu

SEQ ID NO: 621839 - RNA, 22 nt, Human
gggcagcaucaggaggggcuuu

SEQ ID NO: 621840 - RNA, 22 nt, Human
ucaggagcugugaauacaaagg

SEQ ID NO: 621841 - RNA, 22 nt, Human
ugcagggcaguuuguuucggca

SEQ ID NO: 621842 - RNA, 22 nt, Human
cagugcuggcuguuaggacagu

SEQ ID NO: 621843 - RNA, 22 nt, Human
ugaguucucaugaaaucuaguu

SEQ ID NO: 621844 - RNA, 22 nt, Human
uagucagacccaagagagccau

SEQ ID NO: 621845 - RNA, 22 nt, Human
ugaaacggaauguucuuuaucg

SEQ ID NO: 621846 - RNA, 19 nt, Human
uggucccauacugcuggcc

SEQ ID NO: 621847 - RNA, 22 nt, Human
ugaggcuuagauuugguaacuc

SEQ ID NO: 621848 - RNA, 22 nt, Human
cuggucaggaagguggggacag

SEQ ID NO: 621849 - RNA, 23 nt, Human
gucuuuauaguggggcacuuugu

SEQ ID NO: 621850 - RNA, 22 nt, Human
uguuuagaggaacuggaaucag

SEQ ID NO: 621851 - RNA, 19 nt, Human
uuucagacucaucuccagc

SEQ ID NO: 621852 - RNA, 22 nt, Human
aauacuaguuauuaaagcuuuu

SEQ ID NO: 621853 - RNA, 20 nt, Human
ucuuugugucagauggacag

SEQ ID NO: 621854 - RNA, 22 nt, Human
gcaguccucguaaaggucgaag

SEQ ID NO: 621855 - RNA, 22 nt, Human
augagguacuaguauauacgua

SEQ ID NO: 621856 - RNA, 22 nt, Human
ccuguacauuagcugugaauug

SEQ ID NO: 621857 - RNA, 22 nt, Human
guaaaguucuacuagaaucaac

SEQ ID NO: 621858 - RNA, 22 nt, Human
gugaaaauaaggcugguucuug

SEQ ID NO: 621859 - RNA, 22 nt, Human
gccuguccuggaugcucugcaa

SEQ ID NO: 621860 - RNA, 22 nt, Human
gcugguuucacccaaccgaugu

SEQ ID NO: 621861 - RNA, 22 nt, Human
caugcauacacaggucaggcag

SEQ ID NO: 621862 - RNA, 22 nt, Human
aauaauagcagaguuuacaauc

SEQ ID NO: 621863 - RNA, 22 nt, Human
uggagcagcauucauccagcag

SEQ ID NO: 621864 - RNA, 22 nt, Human
uccugaagcucucuuaaggaaa

SEQ ID NO: 621865 - RNA, 22 nt, Human
uugggacaucuggcauacaguu

SEQ ID NO: 621866 - RNA, 22 nt, Human
ucccagccuuccagucugguuu

SEQ ID NO: 621867 - RNA, 22 nt, Human
gccuggcugggcaccaggggag

SEQ ID NO: 621868 - RNA, 22 nt, Human
auggccucuagcugagaccaau

SEQ ID NO: 621869 - RNA, 22 nt, Human
aguaugaagaauacauagauga

SEQ ID NO: 621870 - RNA, 22 nt, Human
cccucugguuugcccuugggug

SEQ ID NO: 621871 - RNA, 22 nt, Human
ucagagcccugcuccuccccaa

SEQ ID NO: 621872 - RNA, 22 nt, Human
gacagcuguacacuccugguua

SEQ ID NO: 621873 - RNA, 22 nt, Human
gccagcagcccagaaggacuuu

SEQ ID NO: 621874 - RNA, 22 nt, Human
aaucacaugugcucaauuuuaa

SEQ ID NO: 621875 - RNA, 18 nt, Human
auacaagaucaaguguuc

SEQ ID NO: 621876 - RNA, 22 nt, Human
uauucacaggcacgaaauauug

SEQ ID NO: 621877 - RNA, 22 nt, Human
agaccgagaaguucuccaggcc

SEQ ID NO: 621878 - RNA, 22 nt, Human
gcucccucccaccagccugcag

SEQ ID NO: 621879 - RNA, 22 nt, Human
caacuuuagcaauguuaguaua

SEQ ID NO: 621880 - RNA, 22 nt, Human
uggauugauaaaaugggauguu

SEQ ID NO: 621881 - RNA, 22 nt, Human
auuuguaucaaucucaauauau

SEQ ID NO: 621882 - RNA, 22 nt, Human
ggcacacagauggagcacuagc

SEQ ID NO: 621883 - RNA, 22 nt, Human
ucugccuucgcugcucccugaa

SEQ ID NO: 621884 - RNA, 22 nt, Human
aaugaagauaaaaugggaugga

SEQ ID NO: 621885 - RNA, 22 nt, Human
gugaaauauuuaacguccaggu

SEQ ID NO: 621886 - RNA, 22 nt, Human
ucagugcucugagguccagggu

SEQ ID NO: 621887 - RNA, 20 nt, Human
cagagaccugucuucacaga

SEQ ID NO: 621888 - RNA, 22 nt, Human
uccagcuggcccggccaugaau

SEQ ID NO: 621889 - RNA, 22 nt, Human
acccagcuggaugcauggaggc

SEQ ID NO: 621890 - RNA, 22 nt, Human
gagugacucuagaaaguuucuu

SEQ ID NO: 621891 - RNA, 22 nt, Human
ucuggcucagggcucugaggga

SEQ ID NO: 621892 - RNA, 22 nt, Human
ccuuggagcggucagcacuggu

SEQ ID NO: 621893 - RNA, 22 nt, Human
cuagggucaggggccugcgucg

SEQ ID NO: 621894 - RNA, 22 nt, Human
uuuuaauucaaagugaauagug

SEQ ID NO: 621895 - RNA, 22 nt, Human
aggaugaauaacugaaauggug

SEQ ID NO: 621896 - RNA, 22 nt, Human
ugggcugcugagaaugagagag

SEQ ID NO: 621897 - RNA, 22 nt, Human
aucugucuugccuugcauauuu

SEQ ID NO: 621898 - RNA, 22 nt, Human
gcucaggcuggauugcaguggc

SEQ ID NO: 621899 - RNA, 20 nt, Human
uacuguuguugcuguugcca

SEQ ID NO: 621900 - RNA, 22 nt, Human
ugcuccuggcaucucugcgucc

SEQ ID NO: 621901 - RNA, 22 nt, Human
gaguccaguuagugaggcuggg

SEQ ID NO: 621902 - RNA, 22 nt, Human
uggugucuccauccugcccugc

SEQ ID NO: 621903 - RNA, 22 nt, Human
caucccugacuucuaggugaca

SEQ ID NO: 621904 - RNA, 22 nt, Human
uuacuucuuacaaaagaaauau

SEQ ID NO: 621905 - RNA, 22 nt, Human
gccaugcagcuuauuaaagugg

SEQ ID NO: 621906 - RNA, 22 nt, Human
ggcuucucuccaguaugcauuc

SEQ ID NO: 621907 - RNA, 22 nt, Human
caaugaacacagcaauuucaua

SEQ ID NO: 621908 - RNA, 21 nt, Human
uccagcucucauaguguucca

SEQ ID NO: 621909 - RNA, 22 nt, Human
caggcugccuggaagaggacug

SEQ ID NO: 621910 - RNA, 22 nt, Human
augcuuuuaacuccuuuauccc

SEQ ID NO: 621911 - RNA, 22 nt, Human
gaggaagaaagcauaggugggg

SEQ ID NO: 621912 - RNA, 22 nt, Human
cugggguggugcaggccucaug

SEQ ID NO: 621913 - RNA, 22 nt, Human
aacaugcuaugugucugaauca

SEQ ID NO: 621914 - RNA, 22 nt, Human
ugggcucugguuuccuggcugg

SEQ ID NO: 621915 - RNA, 22 nt, Human
ucaaucacguguuccauguucu

SEQ ID NO: 621916 - RNA, 22 nt, Human
ucauaacaaccuggaaggccag

SEQ ID NO: 621917 - RNA, 22 nt, Human
gaggggcuguggagcucucugg

SEQ ID NO: 621918 - RNA, 22 nt, Human
cugggaggauucauugagguga

SEQ ID NO: 621919 - RNA, 22 nt, Human
ugagaagcucugaaacaguauc

SEQ ID NO: 621920 - RNA, 22 nt, Human
gcugccugucugcugacccagg

SEQ ID NO: 621921 - RNA, 22 nt, Human
aaauugcuauaugugaauguga

SEQ ID NO: 621922 - RNA, 22 nt, Human
auguagugcccuuugucaucua

SEQ ID NO: 621923 - RNA, 22 nt, Human
ugaaaauucaucucauagcaga

SEQ ID NO: 621924 - RNA, 20 nt, Human
ugcaggugggcccuucuggg

SEQ ID NO: 621925 - RNA, 22 nt, Human
cuccaggaaaauagggaaugag

SEQ ID NO: 621926 - RNA, 22 nt, Human
ucuuuaaugugauuguaauuau

SEQ ID NO: 621927 - RNA, 22 nt, Human
auuuuuccaugauacuuaucug

SEQ ID NO: 621928 - RNA, 22 nt, Human
gugacaggcccagugggaugca

SEQ ID NO: 621929 - RNA, 22 nt, Human
gugggcugaggggacaccaagg

SEQ ID NO: 621930 - RNA, 22 nt, Human
agaacagaagggaggaaggccu

SEQ ID NO: 621931 - RNA, 22 nt, Human
ccagcccuugcugaaggguggc

SEQ ID NO: 621932 - RNA, 22 nt, Human
uacauaguuccauuuacaggaa

SEQ ID NO: 621933 - RNA, 20 nt, Human
agguggcucuuccugggcuu

SEQ ID NO: 621934 - RNA, 22 nt, Human
aaggccaugcacauccuaggca

SEQ ID NO: 621935 - RNA, 21 nt, Human
gcagaugggagucaucaggcu

SEQ ID NO: 621936 - RNA, 23 nt, Human
caugaagguagcacaaagccucu

SEQ ID NO: 621937 - RNA, 22 nt, Human
aaccaggaauugcagggcugca

SEQ ID NO: 621938 - RNA, 20 nt, Human
aguguuugcucacagucucc

SEQ ID NO: 621939 - RNA, 22 nt, Human
auagaaauguauuuuggacuag

SEQ ID NO: 621940 - RNA, 22 nt, Human
cccugcagccuugcaugccuuc

SEQ ID NO: 621941 - RNA, 22 nt, Human
ugaguccugcugagcagagagg

SEQ ID NO: 621942 - RNA, 22 nt, Human
agcucugugaagccagcaguuc

SEQ ID NO: 621943 - RNA, 22 nt, Human
cugagaaauucuuucuuucacu

SEQ ID NO: 621944 - RNA, 22 nt, Human
caggcucccugggcaguggcag

SEQ ID NO: 621945 - RNA, 22 nt, Human
ucuccagaguaaccuuggagca

SEQ ID NO: 621946 - RNA, 22 nt, Human
aaagccuucaaguagauguaag

SEQ ID NO: 621947 - RNA, 22 nt, Human
aggaucagggugguggaaguca

SEQ ID NO: 621948 - RNA, 22 nt, Human
uuccagccagauuugcuggguu

SEQ ID NO: 621949 - RNA, 22 nt, Human
aacacucaauuuacaaacucug

SEQ ID NO: 621950 - RNA, 22 nt, Human
cagcaguguacaaggugucaga

SEQ ID NO: 621951 - RNA, 22 nt, Human
gcuucacagaaucaauaguugg

SEQ ID NO: 621952 - RNA, 21 nt, Human
agcugagcccagaagacuggu

SEQ ID NO: 621953 - RNA, 22 nt, Human
gcucugaagggugagcuguucg

SEQ ID NO: 621954 - RNA, 22 nt, Human
agggccuguccgcucccgcccg

SEQ ID NO: 621955 - RNA, 22 nt, Human
uacauauacugagugauuugcu

SEQ ID NO: 621956 - RNA, 22 nt, Human
ugagcagaacacgggauccaug

SEQ ID NO: 621957 - RNA, 22 nt, Human
ggagacacagagcaacaaaaua

SEQ ID NO: 621958 - RNA, 22 nt, Human
caggugggagcggagacugauu

SEQ ID NO: 621959 - RNA, 22 nt, Human
acccaggccauuggcaagaguc

SEQ ID NO: 621960 - RNA, 22 nt, Human
uaauuucaccguugcuagaaau

SEQ ID NO: 621961 - RNA, 22 nt, Human
cccugccaaucccgucucucug

SEQ ID NO: 621962 - RNA, 22 nt, Human
cugcugucuaguaucuuaaaaa

SEQ ID NO: 621963 - RNA, 19 nt, Human
agggcuaggcacauagggc

SEQ ID NO: 621964 - RNA, 22 nt, Human
agcaccugcuugugacuaggga

SEQ ID NO: 621965 - RNA, 22 nt, Human
aggacuucaucaccuguauaaa

SEQ ID NO: 621966 - RNA, 22 nt, Human
gaagaauugcccauuucugucu

SEQ ID NO: 621967 - RNA, 23 nt, Human
uggaauaauaagguacauuaaca

SEQ ID NO: 621968 - RNA, 22 nt, Human
cucuccuccaacagcccugccg

SEQ ID NO: 621969 - RNA, 22 nt, Human
acagaugagacuccaggaccuu

SEQ ID NO: 621970 - RNA, 22 nt, Human
ccacacugucuaacaaggcaua

SEQ ID NO: 621971 - RNA, 22 nt, Human
gcccugaacgaggggucuggag

SEQ ID NO: 621972 - RNA, 22 nt, Human
gcucaccaagcagagacucugg

SEQ ID NO: 621973 - RNA, 19 nt, Human
aggcuucauccugggcagc

SEQ ID NO: 621974 - RNA, 22 nt, Human
agggcccucugggcacuguggc

SEQ ID NO: 621975 - RNA, 22 nt, Human
augagguuugagccucuugacc

SEQ ID NO: 621976 - RNA, 22 nt, Human
uuggcaaaggacucaaagcagg

SEQ ID NO: 621977 - RNA, 22 nt, Human
aaaugaaaugagugccuggagg

SEQ ID NO: 621978 - RNA, 23 nt, Human
acauacauaagcaccacauuuug

SEQ ID NO: 621979 - RNA, 22 nt, Human
ccagggcaggagaaagacucac

SEQ ID NO: 621980 - RNA, 22 nt, Human
caggaagauuguggaggugguu

SEQ ID NO: 621981 - RNA, 22 nt, Human
aaugcaaagugaggugaguggc

SEQ ID NO: 621982 - RNA, 22 nt, Human
cagggcugaggacacaaguaaa

SEQ ID NO: 621983 - RNA, 22 nt, Human
ucagaggugagcaugugaccaa

SEQ ID NO: 621984 - RNA, 22 nt, Human
uccgaggcgcaccggcgcuccu

SEQ ID NO: 621985 - RNA, 22 nt, Human
ucuuggaagccucaagauacuc

SEQ ID NO: 621986 - RNA, 22 nt, Human
cauuuguaguuaaaaaugucuc

SEQ ID NO: 621987 - RNA, 23 nt, Human
agucagugcgggauggucagggg

SEQ ID NO: 621988 - RNA, 22 nt, Human
gcugccagccaacuugcugugc

SEQ ID NO: 621989 - RNA, 22 nt, Human
guggcuguucuugccccaugcu

SEQ ID NO: 621990 - RNA, 22 nt, Human
gagcuuccagagacaucagagu

SEQ ID NO: 621991 - RNA, 22 nt, Human
ucaccggcagacguggccugau

SEQ ID NO: 621992 - RNA, 22 nt, Human
gccugcagggcccuuguggguc

SEQ ID NO: 621993 - RNA, 22 nt, Human
uaugaagcuuugaaaagcuuac

SEQ ID NO: 621994 - RNA, 22 nt, Human
ucugaaaucuguaagcacuagc

SEQ ID NO: 621995 - RNA, 22 nt, Human
agcaccaugaccuugccauuga

SEQ ID NO: 621996 - RNA, 22 nt, Human
uaaucacagaaaugcccauuca

SEQ ID NO: 621997 - RNA, 22 nt, Human
uaugaauauaccacaauuuagg

SEQ ID NO: 621998 - RNA, 22 nt, Human
aguuauguccucagcaaaucaa

SEQ ID NO: 621999 - RNA, 22 nt, Human
augcugacagacuauuaacuau

SEQ ID NO: 622000 - RNA, 18 nt, Human
uacuuuauucccccucca

SEQ ID NO: 622001 - RNA, 22 nt, Human
aguucacagggaagguuauugu

SEQ ID NO: 622002 - RNA, 21 nt, Human
uguguucuucuaggucagcua

SEQ ID NO: 622003 - RNA, 22 nt, Human
cucuccaucugugugaccuccc

SEQ ID NO: 622004 - RNA, 22 nt, Human
cucagagcugaggccagggaca

SEQ ID NO: 622005 - RNA, 22 nt, Human
ccagugcuaagguagccucugc

SEQ ID NO: 622006 - RNA, 22 nt, Human
gucuuuaugguaugaaaacuga

SEQ ID NO: 622007 - RNA, 22 nt, Human
acaguguuuaaaaaucagaucu

SEQ ID NO: 622008 - RNA, 22 nt, Human
cacagcuugggcucugacaaua

SEQ ID NO: 622009 - RNA, 22 nt, Human
ucuagcaccacauuaaauagca

SEQ ID NO: 622010 - RNA, 22 nt, Human
gaggagaagcuaagaaacacag

SEQ ID NO: 622011 - RNA, 22 nt, Human
aguguccccucugaggagugag

SEQ ID NO: 622012 - RNA, 20 nt, Human
gacuuuacaucagcacucuu

SEQ ID NO: 622013 - RNA, 22 nt, Human
aaccagcuccagccuccauuca

SEQ ID NO: 622014 - RNA, 22 nt, Human
ugggagcugggguuggacgucu

SEQ ID NO: 622015 - RNA, 22 nt, Human
cccugugguugcuagggcacag

SEQ ID NO: 622016 - RNA, 22 nt, Human
caggccaacugcauggugacca

SEQ ID NO: 622017 - RNA, 22 nt, Human
cagggcaaagagagcacaugcu

SEQ ID NO: 622018 - RNA, 22 nt, Human
caguggccaugguggcaggggu

SEQ ID NO: 622019 - RNA, 22 nt, Human
ucauagcuaagcuccagagugc

SEQ ID NO: 622020 - RNA, 22 nt, Human
gauucaaaaauaagcuccuauu

SEQ ID NO: 622021 - RNA, 22 nt, Human
uagguaguuuccuguuguuggg

SEQ ID NO: 622022 - RNA, 21 nt, Human
ucccugcuuucuggcccaguc

SEQ ID NO: 622023 - RNA, 22 nt, Human
gagcugaagcgcuacagcaucc

SEQ ID NO: 622024 - RNA, 22 nt, Human
accuuauucuugcccuuagaug

SEQ ID NO: 622025 - RNA, 22 nt, Human
ccugcucugccaaguccucuuu

SEQ ID NO: 622026 - RNA, 22 nt, Human
ccaggagcgggaaaaggaagaa

SEQ ID NO: 622027 - RNA, 22 nt, Human
agggccuggaacugugggcagg

SEQ ID NO: 622028 - RNA, 22 nt, Human
acuacacagggaugugacuacc

SEQ ID NO: 622029 - RNA, 22 nt, Human
ucacaaugaaaaacacuacaua

SEQ ID NO: 622030 - RNA, 22 nt, Human
aagcaacagaaacauucuaaua

SEQ ID NO: 622031 - RNA, 22 nt, Human
cagcccugcuggcaaugaugag

SEQ ID NO: 622032 - RNA, 22 nt, Human
gggucagggaggccccaccaug

SEQ ID NO: 622033 - RNA, 22 nt, Human
gggcugagugaccucaggccaa

SEQ ID NO: 622034 - RNA, 22 nt, Human
cagagcauuaaaaccagcucug

SEQ ID NO: 622035 - RNA, 22 nt, Human
uccagcagcccgaaggcccauc

SEQ ID NO: 622036 - RNA, 22 nt, Human
caugggaggccugcugcuggug

SEQ ID NO: 622037 - RNA, 22 nt, Human
guguaaaucagcuuguguaaua

SEQ ID NO: 622038 - RNA, 22 nt, Human
ggauccaguccagggcugugug

SEQ ID NO: 622039 - RNA, 22 nt, Human
uacuucaaccuucucuauuaga

SEQ ID NO: 622040 - RNA, 20 nt, Human
uccuuuggccuuagagcugu

SEQ ID NO: 622041 - RNA, 22 nt, Human
aucagcaucggguggugguggg

SEQ ID NO: 622042 - RNA, 22 nt, Human
agggcagaccacgugcaaggau

SEQ ID NO: 622043 - RNA, 22 nt, Human
ugauuacauugguaauguuuau

SEQ ID NO: 622044 - RNA, 22 nt, Human
aacuuuggccacaaguacccug

SEQ ID NO: 622045 - RNA, 22 nt, Human
ggcugcugguggaaugguaggc

SEQ ID NO: 622046 - RNA, 22 nt, Human
ucaguguuggucaagaaucagu

SEQ ID NO: 622047 - RNA, 22 nt, Human
uccauuuuagagaugaagaaac

SEQ ID NO: 622048 - RNA, 22 nt, Human
aggaacuagugcaacaggagcg

SEQ ID NO: 622049 - RNA, 22 nt, Human
gggaaggcaggauucucuggug

SEQ ID NO: 622050 - RNA, 22 nt, Human
aagcauggcuguucuagcuaua

SEQ ID NO: 622051 - RNA, 22 nt, Human
aggacucaucccugcuugucag

SEQ ID NO: 622052 - RNA, 22 nt, Human
ucaggauaaaauguaauggcaa

SEQ ID NO: 622053 - RNA, 22 nt, Human
uacaaacuguuauuauuauugu

SEQ ID NO: 622054 - RNA, 22 nt, Human
caacuauauagaaauugauugu

SEQ ID NO: 622055 - RNA, 22 nt, Human
guggcaggagagacacagccau

SEQ ID NO: 622056 - RNA, 22 nt, Human
ccugugcuggcuuuauucucag

SEQ ID NO: 622057 - RNA, 21 nt, Human
uacaagaccggauucgggccc

SEQ ID NO: 622058 - RNA, 22 nt, Human
agugacugguuuugacaggaau

SEQ ID NO: 622059 - RNA, 22 nt, Human
aguggagaauaugcagaaagcc

SEQ ID NO: 622060 - RNA, 21 nt, Human
guuuucuuugauagagggaag

SEQ ID NO: 622061 - RNA, 23 nt, Human
uuuauuuauuuaggcugagggau

SEQ ID NO: 622062 - RNA, 22 nt, Human
cugacucccugauucuggguuu

SEQ ID NO: 622063 - RNA, 22 nt, Human
agaaccucaauuauuuuugcac

SEQ ID NO: 622064 - RNA, 22 nt, Human
auuuuagagaaacaaacguagg

SEQ ID NO: 622065 - RNA, 22 nt, Human
gcugcuucuccucccuggggau

SEQ ID NO: 622066 - RNA, 22 nt, Human
auucaaauuaaguuaauucagc

SEQ ID NO: 622067 - RNA, 22 nt, Human
ggcugccuuuagaacggaugcu

SEQ ID NO: 622068 - RNA, 22 nt, Human
cagggcugcuggccgugcccuc

SEQ ID NO: 622069 - RNA, 19 nt, Human
gugagcuucuuguaagagg

SEQ ID NO: 622070 - RNA, 18 nt, Human
gucugccuucucccuucc

SEQ ID NO: 622071 - RNA, 22 nt, Human
uccaggccgcauaguuacucug

SEQ ID NO: 622072 - RNA, 22 nt, Human
ugccugggacaugcuguggacu

SEQ ID NO: 622073 - RNA, 22 nt, Human
uuaacaugucuugacuucaucu

SEQ ID NO: 622074 - RNA, 22 nt, Human
ugaugggaggugcugcaggacc

SEQ ID NO: 622075 - RNA, 22 nt, Human
ccaggauggggagcagauagaa

SEQ ID NO: 622076 - RNA, 22 nt, Human
uagcccugcugugaugugaagu

SEQ ID NO: 622077 - RNA, 22 nt, Human
aagaaaugugaauauugaauag

SEQ ID NO: 622078 - RNA, 22 nt, Human
ggagauggcucugcaaggucua

SEQ ID NO: 622079 - RNA, 22 nt, Human
agggcugaguggugcagucaaa

SEQ ID NO: 622080 - RNA, 22 nt, Human
gggcuggacugcauugccucgc

SEQ ID NO: 622081 - RNA, 22 nt, Human
uggcucuuucugucugggaucc

SEQ ID NO: 622082 - RNA, 22 nt, Human
cacugucacguucugaaacugu

SEQ ID NO: 622083 - RNA, 22 nt, Human
uauuuagcuggagucagugcuu

SEQ ID NO: 622084 - RNA, 22 nt, Human
aauucacauauacauuauuccu

SEQ ID NO: 622085 - RNA, 22 nt, Human
ccuuagcuggagugguggaaug

SEQ ID NO: 622086 - RNA, 23 nt, Human
acagaugaaaguguggcucagag

SEQ ID NO: 622087 - RNA, 22 nt, Human
uguaguagcauucacgaagugu

SEQ ID NO: 622088 - RNA, 22 nt, Human
gaggacacaaaguggcugagau

SEQ ID NO: 622089 - RNA, 19 nt, Human
ucucugugucucuguuuau

SEQ ID NO: 622090 - RNA, 22 nt, Human
gcucagagcacucagacucagc

SEQ ID NO: 622091 - RNA, 22 nt, Human
acuuccagauggccccaucuaa

SEQ ID NO: 622092 - RNA, 19 nt, Human
caacaguacugguuugucc

SEQ ID NO: 622093 - RNA, 21 nt, Human
aggaaaggccagcacguaggg

SEQ ID NO: 622094 - RNA, 21 nt, Human
agcucagcaagauggaggcuc

SEQ ID NO: 622095 - RNA, 21 nt, Human
cucugcugaguccuaggauuc

SEQ ID NO: 622096 - RNA, 21 nt, Human
gccuugccgugaaagcccuuu

SEQ ID NO: 622097 - RNA, 22 nt, Human
acagccagugacuggacaagcu

SEQ ID NO: 622098 - RNA, 20 nt, Human
ugcagguguguccaagcacu

SEQ ID NO: 622099 - RNA, 22 nt, Human
gcuggcucagggacuagaguuu

SEQ ID NO: 622100 - RNA, 22 nt, Human
accaugcaucaaagcuaauaua

SEQ ID NO: 622101 - RNA, 22 nt, Human
gggcaugguggcaggcaccugu

SEQ ID NO: 622102 - RNA, 22 nt, Human
uccucuucugccuauaucugcc

SEQ ID NO: 622103 - RNA, 22 nt, Human
ugugucuaggcucaugcuugcu

SEQ ID NO: 622104 - RNA, 22 nt, Human
aagacaggaaaagcuccaggcc

SEQ ID NO: 622105 - RNA, 22 nt, Human
guuacaacucccugaaccucgg

SEQ ID NO: 622106 - RNA, 22 nt, Human
aucugacaucuacuagaacaga

SEQ ID NO: 622107 - RNA, 22 nt, Human
gagcaggccagcaauggaaggg

SEQ ID NO: 622108 - RNA, 22 nt, Human
ugcugccacugguagucucauu

SEQ ID NO: 622109 - RNA, 22 nt, Human
cuccuuccugguuagcaccuua

SEQ ID NO: 622110 - RNA, 22 nt, Human
ccuccagggccccucucacugg

SEQ ID NO: 622111 - RNA, 22 nt, Human
ucugggguggagcccuggaguc

SEQ ID NO: 622112 - RNA, 22 nt, Human
aagauuugguaucagaagaccu

SEQ ID NO: 622113 - RNA, 22 nt, Human
gcugcccacaaccccgugucua

SEQ ID NO: 622114 - RNA, 22 nt, Human
agccuggauucgugcauccaca

SEQ ID NO: 622115 - RNA, 22 nt, Human
ucaguguuggagauaauugcac

SEQ ID NO: 622116 - RNA, 22 nt, Human
ggcugggaggccgugcugaccu

SEQ ID NO: 622117 - RNA, 22 nt, Human
ugaggggccgcccaagcacuuc

SEQ ID NO: 622118 - RNA, 22 nt, Human
agggcucaggggccccaagcug

SEQ ID NO: 622119 - RNA, 22 nt, Human
uuagaaacccagacucuuaggu

SEQ ID NO: 622120 - RNA, 22 nt, Human
cacccagccuucacacaggagu

SEQ ID NO: 622121 - RNA, 16 nt, Human
gcagaggaaaggggag

SEQ ID NO: 622122 - RNA, 22 nt, Human
uggaucugguucccugagccuu

SEQ ID NO: 622123 - RNA, 22 nt, Human
aggcgugguugaggcgagcaua

SEQ ID NO: 622124 - RNA, 22 nt, Human
gccaggaccucccagagcuuuc

SEQ ID NO: 622125 - RNA, 22 nt, Human
acugcaacaccuccuggguuca

SEQ ID NO: 622126 - RNA, 22 nt, Human
ugucaugggcauuuauugaggg

SEQ ID NO: 622127 - RNA, 22 nt, Human
uugcagagcaguaggaauauag

SEQ ID NO: 622128 - RNA, 22 nt, Human
uguuucaugaaacauguuuagg

SEQ ID NO: 622129 - RNA, 22 nt, Human
gaggaaaagagacagguuauug

SEQ ID NO: 622130 - RNA, 22 nt, Human
gugaacaucagauuacaugaga

SEQ ID NO: 622131 - RNA, 22 nt, Human
uuccuucuuccaaacccaucau

SEQ ID NO: 622132 - RNA, 21 nt, Human
ucagggcagcugcucuucaga

SEQ ID NO: 622133 - RNA, 21 nt, Human
gcuuucagaagucucauaguu

SEQ ID NO: 622134 - RNA, 22 nt, Human
caucuuuauuuauauagacagg

SEQ ID NO: 622135 - RNA, 22 nt, Human
acuguagagaaucugagaaaaa

SEQ ID NO: 622136 - RNA, 22 nt, Human
ggagaaggugcuggucacugug

SEQ ID NO: 622137 - RNA, 22 nt, Human
gauauacauagguuucuaugca

SEQ ID NO: 622138 - RNA, 22 nt, Human
aggggcuccaaggaaguuuggg

SEQ ID NO: 622139 - RNA, 22 nt, Human
cagguacaaagcuacugccuga

SEQ ID NO: 622140 - RNA, 22 nt, Human
gcagcugaagcugcaguuccag

SEQ ID NO: 622141 - RNA, 22 nt, Human
cuggcuuccaccauggccccug

SEQ ID NO: 622142 - RNA, 22 nt, Human
aguuacugcuuucaggaaguuu

SEQ ID NO: 622143 - RNA, 17 nt, Human
cugauggauuuuuucca

SEQ ID NO: 622144 - RNA, 22 nt, Human
agcuggaaagaagguggcagcc

SEQ ID NO: 622145 - RNA, 22 nt, Human
aauagcuugccuaauccucaug

SEQ ID NO: 622146 - RNA, 22 nt, Human
gcaccugauugauuucacugcu

SEQ ID NO: 622147 - RNA, 22 nt, Human
ucucaggaagauuagggcuaag

SEQ ID NO: 622148 - RNA, 22 nt, Human
uuuagcauuccugggaugauuu

SEQ ID NO: 622149 - RNA, 22 nt, Human
gcuucauuugagaaccucugug

SEQ ID NO: 622150 - RNA, 22 nt, Human
ggaggccaucagggagggcauu

SEQ ID NO: 622151 - RNA, 22 nt, Human
ggagucugauuuuuuaugggug

SEQ ID NO: 622152 - RNA, 22 nt, Human
uuggggaagcuuugaaauacuu

SEQ ID NO: 622153 - RNA, 20 nt, Human
uccagcccugcuucucucuu

SEQ ID NO: 622154 - RNA, 22 nt, Human
ucuguguugagaaggaucauga

SEQ ID NO: 622155 - RNA, 23 nt, Human
cugaccugacccauaagcaagga

SEQ ID NO: 622156 - RNA, 22 nt, Human
cagcaccauuuuccuggucagc

SEQ ID NO: 622157 - RNA, 22 nt, Human
ugguccaggguguaguacagag

SEQ ID NO: 622158 - RNA, 22 nt, Human
acagcagguuauuguuauggca

SEQ ID NO: 622159 - RNA, 19 nt, Human
uggaccugugcccauggcu

SEQ ID NO: 622160 - RNA, 22 nt, Human
acaugcacacgauucagucugg

SEQ ID NO: 622161 - RNA, 22 nt, Human
ugcauauucuccuuuauuuugu

SEQ ID NO: 622162 - RNA, 22 nt, Human
cuggaauggguuucaggcacug

SEQ ID NO: 622163 - RNA, 22 nt, Human
uacauagaacauguuuaauguc

SEQ ID NO: 622164 - RNA, 22 nt, Human
acuuuguauaagacaauaaaga

SEQ ID NO: 622165 - RNA, 19 nt, Human
ugagcaugcgagcugagaa

SEQ ID NO: 622166 - RNA, 22 nt, Human
gagaucucuagcacuuccugua

SEQ ID NO: 622167 - RNA, 22 nt, Human
uucuccugcccuuggacuucca

SEQ ID NO: 622168 - RNA, 22 nt, Human
uggcugugggaugagagccuca

SEQ ID NO: 622169 - RNA, 22 nt, Human
aagggcagaaagggacgcuuug

SEQ ID NO: 622170 - RNA, 22 nt, Human
gccucugcaauuacauugugcc

SEQ ID NO: 622171 - RNA, 22 nt, Human
guucuccuuguggcugcagcag

SEQ ID NO: 622172 - RNA, 22 nt, Human
aaggcagaaauucaacuacugg

SEQ ID NO: 622173 - RNA, 22 nt, Human
uaagaauagucccuagaugugu

SEQ ID NO: 622174 - RNA, 22 nt, Human
cagagcagguaucuuuggugaa

SEQ ID NO: 622175 - RNA, 22 nt, Human
gugggcagguaggcaccagcua

SEQ ID NO: 622176 - RNA, 22 nt, Human
ccagugacuggcuuucuggugu

SEQ ID NO: 622177 - RNA, 22 nt, Human
ggcuucuuuuuaguaaauguca

SEQ ID NO: 622178 - RNA, 22 nt, Human
uuacagaacugucuugaaauuu

SEQ ID NO: 622179 - RNA, 22 nt, Human
ucucagugguguuuugagucca

SEQ ID NO: 622180 - RNA, 22 nt, Human
guaaacaucgacccaacagggg

SEQ ID NO: 622181 - RNA, 22 nt, Human
aagcagcugauuucacagcuca

SEQ ID NO: 622182 - RNA, 22 nt, Human
ugccuggcacuccuggagcuca

SEQ ID NO: 622183 - RNA, 22 nt, Human
cagugaaguucuacugaauggu

SEQ ID NO: 622184 - RNA, 22 nt, Human
cugcagggacccaagucuuugg

SEQ ID NO: 622185 - RNA, 22 nt, Human
uauucuuguaccuuaaaugauu

SEQ ID NO: 622186 - RNA, 22 nt, Human
agcugaggcaugaugcuaucag

SEQ ID NO: 622187 - RNA, 22 nt, Human
gcauggaucuaagaggucaagg

SEQ ID NO: 622188 - RNA, 22 nt, Human
cuggcuggguuccaggauucca

SEQ ID NO: 622189 - RNA, 22 nt, Human
ucuccugguacccuuccuagca

SEQ ID NO: 622190 - RNA, 22 nt, Human
aauugguuugaguugucucuau

SEQ ID NO: 622191 - RNA, 22 nt, Human
cuuuggcagccucagcugcagg

SEQ ID NO: 622192 - RNA, 22 nt, Human
gucacuuucacacuuuauugcu

SEQ ID NO: 622193 - RNA, 22 nt, Human
agcugccccaugagaggcaggu

SEQ ID NO: 622194 - RNA, 22 nt, Human
cagcugccagcuucucuccauc

SEQ ID NO: 622195 - RNA, 22 nt, Human
gcaggggaguggaugauggauu

SEQ ID NO: 622196 - RNA, 22 nt, Human
cuggcccuguggaggcaggaac

SEQ ID NO: 622197 - RNA, 22 nt, Human
aggcucugugauccacaaugag

SEQ ID NO: 622198 - RNA, 22 nt, Human
uggucuuagcuggaaggaggga

SEQ ID NO: 622199 - RNA, 22 nt, Human
ccacuggcugucagcaggacuc

SEQ ID NO: 622200 - RNA, 22 nt, Human
caguuuagaagaaucaugaaca

SEQ ID NO: 622201 - RNA, 22 nt, Human
uucaaacucuugcucugcuagu

SEQ ID NO: 622202 - RNA, 22 nt, Human
aacacuuuuuccuccugucugg

SEQ ID NO: 622203 - RNA, 19 nt, Human
uaacaagcacucugcauuc

SEQ ID NO: 622204 - RNA, 22 nt, Human
gcagugcuuuagucuguccuuu

SEQ ID NO: 622205 - RNA, 22 nt, Human
caggagacucagcauccaggau

SEQ ID NO: 622206 - RNA, 22 nt, Human
ggccucugaggacagccuuggc

SEQ ID NO: 622207 - RNA, 22 nt, Human
ccagagggaagaggaagcgcug

SEQ ID NO: 622208 - RNA, 22 nt, Human
ggcccagcucuauugaauuaca

SEQ ID NO: 622209 - RNA, 22 nt, Human
uccugccacugcacauauacuu

SEQ ID NO: 622210 - RNA, 22 nt, Human
auuuuagagcuccaaguacagc

SEQ ID NO: 622211 - RNA, 22 nt, Human
ucuaccacuuauuagcucugug

SEQ ID NO: 622212 - RNA, 22 nt, Human
gagcuguccaagauggucguaa

SEQ ID NO: 622213 - RNA, 19 nt, Human
acuuucuccaggaccuguu

SEQ ID NO: 622214 - RNA, 22 nt, Human
agcugcucccuauccuuuccuu

SEQ ID NO: 622215 - RNA, 23 nt, Human
uggcuucaacucugucggcagcc

SEQ ID NO: 622216 - RNA, 22 nt, Human
gccaacaggccuugcucugcuc

SEQ ID NO: 622217 - RNA, 22 nt, Human
uaggaacaaguuuccuugcugu

SEQ ID NO: 622218 - RNA, 22 nt, Human
agagaaaacucauugagguguc

SEQ ID NO: 622219 - RNA, 22 nt, Human
cuuccugggucagccuggaggu

SEQ ID NO: 622220 - RNA, 22 nt, Human
uuuauaccucauucuuagcaaa

SEQ ID NO: 622221 - RNA, 22 nt, Human
aaaccacuuauaucgugauuug

SEQ ID NO: 622222 - RNA, 22 nt, Human
auuugucaauaagaugaacaua

SEQ ID NO: 622223 - RNA, 22 nt, Human
ggaagacagaagccuacagcuu

SEQ ID NO: 622224 - RNA, 22 nt, Human
uguaggaagauauaaaauaucu

SEQ ID NO: 622225 - RNA, 22 nt, Human
ccaguccagugccaugcauggc

SEQ ID NO: 622226 - RNA, 22 nt, Human
gugaaggauuggagggcaucuu

SEQ ID NO: 622227 - RNA, 22 nt, Human
ugcagcagaaguguucuucucu

SEQ ID NO: 622228 - RNA, 22 nt, Human
uagcuauuuugcuuggaaauac

SEQ ID NO: 622229 - RNA, 22 nt, Human
agggcuccuccccggccuccac

SEQ ID NO: 622230 - RNA, 22 nt, Human
aaugaacccuucaagcucugau

SEQ ID NO: 622231 - RNA, 22 nt, Human
ccaguguugaacaguauuugga

SEQ ID NO: 622232 - RNA, 22 nt, Human
ucugaggucauaaagcaacuuu

SEQ ID NO: 622233 - RNA, 22 nt, Human
ucucugucuuuguugucuucac

SEQ ID NO: 622234 - RNA, 20 nt, Human
ggcagaugcagagcuaugca

SEQ ID NO: 622235 - RNA, 22 nt, Human
augaggcauucacagaaggcac

SEQ ID NO: 622236 - RNA, 22 nt, Human
uauuuguauguguguacauaua

SEQ ID NO: 622237 - RNA, 22 nt, Human
ugagaggccccagcucuuggcc

SEQ ID NO: 622238 - RNA, 22 nt, Human
uauuuaucaagguaggagaaua

SEQ ID NO: 622239 - RNA, 22 nt, Human
gaacuuuaauuagcuuuugucu

SEQ ID NO: 622240 - RNA, 22 nt, Human
ucucuggcacauaauaaggucu

SEQ ID NO: 622241 - RNA, 22 nt, Human
ucuuauuuagagaggacuagag

SEQ ID NO: 622242 - RNA, 22 nt, Human
uccagcagggaauuaguagucu

SEQ ID NO: 622243 - RNA, 22 nt, Human
gaggagacaguggagccgcuac

SEQ ID NO: 622244 - RNA, 22 nt, Human
cucaucugucugggcugguuuu

SEQ ID NO: 622245 - RNA, 22 nt, Human
acccuccaggcugcagcuccug

SEQ ID NO: 622246 - RNA, 22 nt, Human
uuuuauuggagugauaccaagc

SEQ ID NO: 622247 - RNA, 22 nt, Human
gggcccugugauuucuugagga

SEQ ID NO: 622248 - RNA, 22 nt, Human
ugggcagcagaaccaggccgac

SEQ ID NO: 622249 - RNA, 22 nt, Human
caucaaagcuuuuuucuguguu

SEQ ID NO: 622250 - RNA, 22 nt, Human
uccaggcccagacggggugagg

SEQ ID NO: 622251 - RNA, 22 nt, Human
ucacauguauaugcagcacagc

SEQ ID NO: 622252 - RNA, 19 nt, Human
cacuucaauccuuuaucaa

SEQ ID NO: 622253 - RNA, 22 nt, Human
aagucccugguuccuagcaaaa

SEQ ID NO: 622254 - RNA, 22 nt, Human
ugcagaaggaggaggaaaucca

SEQ ID NO: 622255 - RNA, 22 nt, Human
uucaugaagggugaauauaguc

SEQ ID NO: 622256 - RNA, 22 nt, Human
gaggcaugcagagcuggagcag

SEQ ID NO: 622257 - RNA, 22 nt, Human
ucucagggcgcagugaggcagu

SEQ ID NO: 622258 - RNA, 22 nt, Human
ucagggcuggcuuuugcagagc

SEQ ID NO: 622259 - RNA, 22 nt, Human
gcccuugggagguuccacuggg

SEQ ID NO: 622260 - RNA, 22 nt, Human
agccagaggucaugagcacagg

SEQ ID NO: 622261 - RNA, 22 nt, Human
auguacaucuuuauaacaagcu

SEQ ID NO: 622262 - RNA, 18 nt, Human
gggcagcacagcagccuc

SEQ ID NO: 622263 - RNA, 22 nt, Human
aggaaggguucuuugugaaaga

SEQ ID NO: 622264 - RNA, 22 nt, Human
agaaguaucaggaagauucuca

SEQ ID NO: 622265 - RNA, 22 nt, Human
ucucuuauuuugccuuugacaa

SEQ ID NO: 622266 - RNA, 22 nt, Human
gcuggcugggucccugagaggc

SEQ ID NO: 622267 - RNA, 22 nt, Human
acauguuugauaaauauuuggg

SEQ ID NO: 622268 - RNA, 21 nt, Human
ucagaguguguuacagcaagc

SEQ ID NO: 622269 - RNA, 22 nt, Human
augggccaaguaaacauucuca

SEQ ID NO: 622270 - RNA, 22 nt, Human
ggccugugagccuuaguuuaua

SEQ ID NO: 622271 - RNA, 22 nt, Human
gccaggcaaauuaaggaaugca

SEQ ID NO: 622272 - RNA, 22 nt, Human
uacaucauggcuucaugcugca

SEQ ID NO: 622273 - RNA, 22 nt, Human
cugaaaggaauaaggcucuuug

SEQ ID NO: 622274 - RNA, 22 nt, Human
agucacugucuugcaaagguca

SEQ ID NO: 622275 - RNA, 22 nt, Human
gaaugaacaaggauguucaucc

SEQ ID NO: 622276 - RNA, 22 nt, Human
caaagguaaagaucugcugugg

SEQ ID NO: 622277 - RNA, 22 nt, Human
gacauuuauuggauuuuacgag

SEQ ID NO: 622278 - RNA, 22 nt, Human
aacuugguaccaccuucugaag

SEQ ID NO: 622279 - RNA, 22 nt, Human
aaacacuagcaggaagcacuga

SEQ ID NO: 622280 - RNA, 22 nt, Human
uggcaagcucguuugggucaga

SEQ ID NO: 622281 - RNA, 22 nt, Human
agcuuucuaguuuagccaucuu

SEQ ID NO: 622282 - RNA, 22 nt, Human
cuggcucuuuccuagcuaggcu

SEQ ID NO: 622283 - RNA, 22 nt, Human
ucuaguguuuuggaacauggaa

SEQ ID NO: 622284 - RNA, 22 nt, Human
auucugaggacagagucuagca

SEQ ID NO: 622285 - RNA, 22 nt, Human
caagggcucuaagucacaagau

SEQ ID NO: 622286 - RNA, 22 nt, Human
aggcgcagcacgugagaguugg

SEQ ID NO: 622287 - RNA, 22 nt, Human
ccucuuugacaaguaccugccc

SEQ ID NO: 622288 - RNA, 20 nt, Human
aggcuucaaccauacaccuu

SEQ ID NO: 622289 - RNA, 22 nt, Human
uuugcauuguaauauuuaguuc

SEQ ID NO: 622290 - RNA, 22 nt, Human
cagaggcauuacugaaaaggug

SEQ ID NO: 622291 - RNA, 22 nt, Human
cugagcagcacagggcgccagg

SEQ ID NO: 622292 - RNA, 22 nt, Human
gccuggagacagcagaggcggc

SEQ ID NO: 622293 - RNA, 22 nt, Human
aaaauacuguggaguguugaaa

SEQ ID NO: 622294 - RNA, 22 nt, Human
aggcccugaccugggagaucua

SEQ ID NO: 622295 - RNA, 15 nt, Human
ugauuuccuacuaac

SEQ ID NO: 622296 - RNA, 23 nt, Human
auccuauauaaccuuggaggcug

SEQ ID NO: 622297 - RNA, 22 nt, Human
cucaaauauaagcuaaaugugg

SEQ ID NO: 622298 - RNA, 22 nt, Human
acacauuaaaacgucuacaaug

SEQ ID NO: 622299 - RNA, 22 nt, Human
uuugcauaagucauguccagug

SEQ ID NO: 622300 - RNA, 22 nt, Human
uguuucuugggugcucacauca

SEQ ID NO: 622301 - RNA, 22 nt, Human
agggcagagacaugcuuccuga

SEQ ID NO: 622302 - RNA, 22 nt, Human
aaagacaguggauucaaaaucc

SEQ ID NO: 622303 - RNA, 22 nt, Human
uucaccagauuuuguauaguca

SEQ ID NO: 622304 - RNA, 22 nt, Human
gauggugucccaggcucaggcu

SEQ ID NO: 622305 - RNA, 22 nt, Human
aagaggcuucagauccuucaga

SEQ ID NO: 622306 - RNA, 22 nt, Human
ucuggcucugaauucacuucug

SEQ ID NO: 622307 - RNA, 22 nt, Human
uacauugacucucugucccuaa

SEQ ID NO: 622308 - RNA, 22 nt, Human
cugucuguguggacacggcugc

SEQ ID NO: 622309 - RNA, 22 nt, Human
uccuggacagauccccaucauc

SEQ ID NO: 622310 - RNA, 22 nt, Human
auuuacauuuauuugagaaggu

SEQ ID NO: 622311 - RNA, 22 nt, Human
uaccuuugaucuggaauuuuaa

SEQ ID NO: 622312 - RNA, 23 nt, Human
ccuccugggcacaggccugaugg

SEQ ID NO: 622313 - RNA, 22 nt, Human
ucuauucaggcagagugcagca

SEQ ID NO: 622314 - RNA, 22 nt, Human
ugcugggugguugcuccucccg

SEQ ID NO: 622315 - RNA, 22 nt, Human
gcaguaucuaugugauggguug

SEQ ID NO: 622316 - RNA, 22 nt, Human
ggcaucuccaaaacaugaacuc

SEQ ID NO: 622317 - RNA, 22 nt, Human
cuauuuuaagaggccauuaggu

SEQ ID NO: 622318 - RNA, 22 nt, Human
auauggaacuauucuguguaga

SEQ ID NO: 622319 - RNA, 22 nt, Human
uccacaguuuugccacuagcug

SEQ ID NO: 622320 - RNA, 21 nt, Human
aguuuuccauuagggagggag

SEQ ID NO: 622321 - RNA, 22 nt, Human
auccucagcaucuagcaugaag

SEQ ID NO: 622322 - RNA, 22 nt, Human
ugucacauccauuuugcaagua

SEQ ID NO: 622323 - RNA, 22 nt, Human
acagcucuguguauugucaucu

SEQ ID NO: 622324 - RNA, 22 nt, Human
ugaaggcugggcucagccagcu

SEQ ID NO: 622325 - RNA, 22 nt, Human
acugggcaaggauaugaugggu

SEQ ID NO: 622326 - RNA, 22 nt, Human
ggaccaggcaagcugaggcggg

SEQ ID NO: 622327 - RNA, 22 nt, Human
uuauucacucauuuaacauuau

SEQ ID NO: 622328 - RNA, 22 nt, Human
gugucauguagaaauugaugaa

SEQ ID NO: 622329 - RNA, 22 nt, Human
ucacuguaucauguugcacuua

SEQ ID NO: 622330 - RNA, 22 nt, Human
cuggcucugggccucagacacu

SEQ ID NO: 622331 - RNA, 22 nt, Human
cauaauccauuugcacugcaga

SEQ ID NO: 622332 - RNA, 22 nt, Human
auaaaguuuaaaagucaauagu

SEQ ID NO: 622333 - RNA, 22 nt, Human
acccagugacauccuuuaccug

SEQ ID NO: 622334 - RNA, 22 nt, Human
cagcugaauggcucccugcuaa

SEQ ID NO: 622335 - RNA, 22 nt, Human
uggcagcucuguucaacaugag

SEQ ID NO: 622336 - RNA, 22 nt, Human
uuaaaggcgauaaggcaguguu

SEQ ID NO: 622337 - RNA, 21 nt, Human
ccugccaggaaacugaguguc

SEQ ID NO: 622338 - RNA, 22 nt, Human
cuggaggaccacagaagcuggu

SEQ ID NO: 622339 - RNA, 22 nt, Human
ugaagaggccaaacuaucauug

SEQ ID NO: 622340 - RNA, 22 nt, Human
gugagagccugucuggaugucg

SEQ ID NO: 622341 - RNA, 22 nt, Human
ugcauccuuaaccagcaucacu

SEQ ID NO: 622342 - RNA, 22 nt, Human
caauuucacuaauaauauuuac

SEQ ID NO: 622343 - RNA, 22 nt, Human
agaaagacgugaugaagaagua

SEQ ID NO: 622344 - RNA, 22 nt, Human
acauagaaccuggcacauagua

SEQ ID NO: 622345 - RNA, 22 nt, Human
uacuuacacugaagcaaagaua

SEQ ID NO: 622346 - RNA, 22 nt, Human
acuauacauugaauguuaaggu

SEQ ID NO: 622347 - RNA, 22 nt, Human
gaggaggaaaggaguugaaaug

SEQ ID NO: 622348 - RNA, 22 nt, Human
ccugagauuuguaauuuuugua

SEQ ID NO: 622349 - RNA, 22 nt, Human
agcuucuggaaggcaaggcuug

SEQ ID NO: 622350 - RNA, 22 nt, Human
agucucugucguagaucagcgu

SEQ ID NO: 622351 - RNA, 22 nt, Human
uggcugcuuaaaauugcugcaa

SEQ ID NO: 622352 - RNA, 22 nt, Human
cacacagcucaggggcacugcc

SEQ ID NO: 622353 - RNA, 22 nt, Human
augggcugaaagaguaagcugu

SEQ ID NO: 622354 - RNA, 22 nt, Human
ugcauuugcuggggaugugauu

SEQ ID NO: 622355 - RNA, 22 nt, Human
cagaagaauggugucugagcuc

SEQ ID NO: 622356 - RNA, 22 nt, Human
ucaggaacuucuaggaaagcug

SEQ ID NO: 622357 - RNA, 23 nt, Human
ccugugucuguugcugaauaaug

SEQ ID NO: 622358 - RNA, 22 nt, Human
aacauucugucaauugaugacc

SEQ ID NO: 622359 - RNA, 22 nt, Human
ucuaauccuugcuaccugggug

SEQ ID NO: 622360 - RNA, 22 nt, Human
aguuagaauauaauuauguuaa

SEQ ID NO: 622361 - RNA, 22 nt, Human
gaccuuccaugccuucuuccaa

SEQ ID NO: 622362 - RNA, 22 nt, Human
uuucugcaacgagucuuugacu

SEQ ID NO: 622363 - RNA, 22 nt, Human
aaacuagagcaugugaguggga

SEQ ID NO: 622364 - RNA, 22 nt, Human
ugucccuaaagaaacagacauu

SEQ ID NO: 622365 - RNA, 22 nt, Human
uuucuaagcuuaguaugaggca

SEQ ID NO: 622366 - RNA, 22 nt, Human
auuugccuuucgaaucaacagg

SEQ ID NO: 622367 - RNA, 20 nt, Human
ucuguuauuauuacauugcc

SEQ ID NO: 622368 - RNA, 22 nt, Human
gagaggugaaauaguuguccgg

SEQ ID NO: 622369 - RNA, 22 nt, Human
ggaagggaaaauucauucggcu

SEQ ID NO: 622370 - RNA, 22 nt, Human
acuguauagauggaguugauuu

SEQ ID NO: 622371 - RNA, 22 nt, Human
ggcaaaaacagcaaugacuuuu

SEQ ID NO: 622372 - RNA, 22 nt, Human
ucacaggcuaaauuuaugcagg

SEQ ID NO: 622373 - RNA, 22 nt, Human
aucacuuugguaccaauucagc

SEQ ID NO: 622374 - RNA, 22 nt, Human
ugugccuucccucugcugauuu

SEQ ID NO: 622375 - RNA, 22 nt, Human
aaucuuucauucauucauacau

SEQ ID NO: 622376 - RNA, 22 nt, Human
ccagcuccaggacugggagcug

SEQ ID NO: 622377 - RNA, 22 nt, Human
auucaugaaucuacauuguggu

SEQ ID NO: 622378 - RNA, 22 nt, Human
agaaaucuaagaugcucaagga

SEQ ID NO: 622379 - RNA, 22 nt, Human
auguccagaguaaagcacauuc

SEQ ID NO: 622380 - RNA, 22 nt, Human
cauucacauucuucuuacuguu

SEQ ID NO: 622381 - RNA, 22 nt, Human
gcauggccaggaaagguagaaa

SEQ ID NO: 622382 - RNA, 22 nt, Human
guuuaucugcacucucuuguag

SEQ ID NO: 622383 - RNA, 22 nt, Human
cuacuuccagggguggggcuca

SEQ ID NO: 622384 - RNA, 22 nt, Human
ucugucugacaggguaugaacu

SEQ ID NO: 622385 - RNA, 22 nt, Human
aggucugagcucagggccuggc

SEQ ID NO: 622386 - RNA, 22 nt, Human
ucuuacaagaaauaagccaaug

SEQ ID NO: 622387 - RNA, 22 nt, Human
ugcaaaaaggcagacuggugau

SEQ ID NO: 622388 - RNA, 22 nt, Human
ugcuccugauaucuaaugugua

SEQ ID NO: 622389 - RNA, 22 nt, Human
uuccugugugaccgagacagug

SEQ ID NO: 622390 - RNA, 22 nt, Human
uucuucucagggucccacaugg

SEQ ID NO: 622391 - RNA, 22 nt, Human
uucuucuucauuucugacgaug

SEQ ID NO: 622392 - RNA, 22 nt, Human
agaggcacagaggcaguccccu

SEQ ID NO: 622393 - RNA, 22 nt, Human
agggcucuguuggggucagcac

SEQ ID NO: 622394 - RNA, 22 nt, Human
aguguauucagaauguagcaaa

SEQ ID NO: 622395 - RNA, 22 nt, Human
auccaggccugagucugguccu

SEQ ID NO: 622396 - RNA, 22 nt, Human
ucagaggagggacucagaccca

SEQ ID NO: 622397 - RNA, 22 nt, Human
ugcaugugucgggccugugcua

SEQ ID NO: 622398 - RNA, 22 nt, Human
acagcagcuggguucccaccau

SEQ ID NO: 622399 - RNA, 22 nt, Human
uagaaacaucagcuaaccaaaa

SEQ ID NO: 622400 - RNA, 22 nt, Human
acucaggccuccuucuguccuu

SEQ ID NO: 622401 - RNA, 22 nt, Human
ugaccuuucuuugagauuccug

SEQ ID NO: 622402 - RNA, 22 nt, Human
accuuucacgguaucagacauc

SEQ ID NO: 622403 - RNA, 22 nt, Human
gggaagagaggaggugguuucg

SEQ ID NO: 622404 - RNA, 22 nt, Human
caggcucaauggccacuugggc

SEQ ID NO: 622405 - RNA, 22 nt, Human
ccaaggagaaaugcugugcuuu

SEQ ID NO: 622406 - RNA, 22 nt, Human
cugagguuuacaagcuauugcu

SEQ ID NO: 622407 - RNA, 22 nt, Human
auucuggaaagcuauucucucu

SEQ ID NO: 622408 - RNA, 23 nt, Human
aagaaugcuucugaagagcugcc

SEQ ID NO: 622409 - RNA, 22 nt, Human
aaauugcgcacauuucuccguu

SEQ ID NO: 622410 - RNA, 22 nt, Human
gaaacagugagaacuuuuccug

SEQ ID NO: 622411 - RNA, 22 nt, Human
aauagcuuuuacuccuccgagg

SEQ ID NO: 622412 - RNA, 22 nt, Human
uugcaauuaacauaugucaacu

SEQ ID NO: 622413 - RNA, 23 nt, Human
cccaggcuacaaauuaugcucug

SEQ ID NO: 622414 - RNA, 18 nt, Human
cagaaaucacaccagcac

SEQ ID NO: 622415 - RNA, 16 nt, Human
ucagcuauagggauug

SEQ ID NO: 622416 - RNA, 22 nt, Human
ucaggcaggcucagaggaaaac

SEQ ID NO: 622417 - RNA, 22 nt, Human
uugaaaauaucacaggagcagc

SEQ ID NO: 622418 - RNA, 22 nt, Human
uguagaagcuagccuggagcca

SEQ ID NO: 622419 - RNA, 22 nt, Human
aggaggcuguggagcacuccau

SEQ ID NO: 622420 - RNA, 22 nt, Human
uguucuugggaaucuuacaguu

SEQ ID NO: 622421 - RNA, 22 nt, Human
acauugauauuucaaauacagg

SEQ ID NO: 622422 - RNA, 22 nt, Human
cucucagggcagguggccuuuc

SEQ ID NO: 622423 - RNA, 22 nt, Human
uccaggcuuuggggcaggagcg

SEQ ID NO: 622424 - RNA, 22 nt, Human
uggcccugacacgugguacugg

SEQ ID NO: 622425 - RNA, 22 nt, Human
cuuggagacaggacaggcagaa

SEQ ID NO: 622426 - RNA, 22 nt, Human
ggagaggcuuggcccagccugg

SEQ ID NO: 622427 - RNA, 22 nt, Human
agcaggcaggcccagcggcugg

SEQ ID NO: 622428 - RNA, 22 nt, Human
aaaaaauuaucauaguuccuga

SEQ ID NO: 622429 - RNA, 22 nt, Human
aagaaauuaaggaaugcaacga

SEQ ID NO: 622430 - RNA, 22 nt, Human
ccagaaaagcaucugguucuuu

SEQ ID NO: 622431 - RNA, 22 nt, Human
uuauuaaucuuaucuuuggaaa

SEQ ID NO: 622432 - RNA, 22 nt, Human
caguuuauaugucagagcugua

SEQ ID NO: 622433 - RNA, 22 nt, Human
uugaauuauaagugugucuacu

SEQ ID NO: 622434 - RNA, 22 nt, Human
auugaaaucccuaccucagagg

SEQ ID NO: 622435 - RNA, 22 nt, Human
guuucucaguuuggucugcaga

SEQ ID NO: 622436 - RNA, 22 nt, Human
uugcagcagggugaauucacuc

SEQ ID NO: 622437 - RNA, 22 nt, Human
aauuacuuaagagaaacuuuga

SEQ ID NO: 622438 - RNA, 22 nt, Human
aaagugcugugauuacaggcau

SEQ ID NO: 622439 - RNA, 22 nt, Human
cuggaggaccccugccuggaag

SEQ ID NO: 622440 - RNA, 21 nt, Human
uggcuuugcccugcuugcccc

SEQ ID NO: 622441 - RNA, 22 nt, Human
ugcccaggcuucacccucagag

SEQ ID NO: 622442 - RNA, 23 nt, Human
agagcuuagggaauucacaugag

SEQ ID NO: 622443 - RNA, 22 nt, Human
auuugucucucuggguuuacuu

SEQ ID NO: 622444 - RNA, 22 nt, Human
cucagaggucaagagcagagcu

SEQ ID NO: 622445 - RNA, 22 nt, Human
uuucauuaaagucaaaucuggu

SEQ ID NO: 622446 - RNA, 22 nt, Human
uuagcacuuugauucaugcaga

SEQ ID NO: 622447 - RNA, 22 nt, Human
auggcccugccaggaggaacaa

SEQ ID NO: 622448 - RNA, 22 nt, Human
gcucccugcauuucccacccuu

SEQ ID NO: 622449 - RNA, 22 nt, Human
uggagcaagcuggagagaacau

SEQ ID NO: 622450 - RNA, 22 nt, Human
gugcagcagggggaagacagug

SEQ ID NO: 622451 - RNA, 22 nt, Human
ucauugaauuucacagcuuuau

SEQ ID NO: 622452 - RNA, 22 nt, Human
uggcaaagacugcaaggacuuu

SEQ ID NO: 622453 - RNA, 22 nt, Human
cagugcauaaucuaaauggggg

SEQ ID NO: 622454 - RNA, 22 nt, Human
gcagcccaggcucgcucacugc

SEQ ID NO: 622455 - RNA, 22 nt, Human
ugucugcccucaacccagaggc

SEQ ID NO: 622456 - RNA, 22 nt, Human
caucucauagugcagugcugua

SEQ ID NO: 622457 - RNA, 22 nt, Human
uggcagauuuugaagacagaga

SEQ ID NO: 622458 - RNA, 22 nt, Human
uauuuguguggguaucuauaua

SEQ ID NO: 622459 - RNA, 22 nt, Human
aggcuguugcaugccacagaua

SEQ ID NO: 622460 - RNA, 22 nt, Human
ggagccagagggaugcaguuga

SEQ ID NO: 622461 - RNA, 22 nt, Human
aauaaacugcucaauugcauca

SEQ ID NO: 622462 - RNA, 22 nt, Human
caguucugguuugcagauauau

SEQ ID NO: 622463 - RNA, 21 nt, Human
gggcauccuuucccacccugc

SEQ ID NO: 622464 - RNA, 22 nt, Human
aggaaauaggaccagacaaagc

SEQ ID NO: 622465 - RNA, 22 nt, Human
gauuuguuucaaguuagcaucu

SEQ ID NO: 622466 - RNA, 22 nt, Human
gcacaggaaaugacucauguua

SEQ ID NO: 622467 - RNA, 21 nt, Human
auccguuuaauaauacugaau

SEQ ID NO: 622468 - RNA, 22 nt, Human
uccugaagaugaaaagagaggu

SEQ ID NO: 622469 - RNA, 22 nt, Human
uuuagucuagucuccucagaaa

SEQ ID NO: 622470 - RNA, 22 nt, Human
agaguacugccucaguuaugaa

SEQ ID NO: 622471 - RNA, 22 nt, Human
acccagggcuuaaggcggugca

SEQ ID NO: 622472 - RNA, 22 nt, Human
cagcugaguguuggcauguuca

SEQ ID NO: 622473 - RNA, 22 nt, Human
ucagccaguuugauucuauuug

SEQ ID NO: 622474 - RNA, 22 nt, Human
uucaaacaguugcacaacuuau

SEQ ID NO: 622475 - RNA, 22 nt, Human
aucaguuuuguucacuacuaua

SEQ ID NO: 622476 - RNA, 22 nt, Human
ucccaaggugcucggcaacagg

SEQ ID NO: 622477 - RNA, 22 nt, Human
cuggggaggaugcuacgaccug

SEQ ID NO: 622478 - RNA, 22 nt, Human
ucaguguguaguaaauuguagg

SEQ ID NO: 622479 - RNA, 22 nt, Human
acagcugugggcucugcauaua

SEQ ID NO: 622480 - RNA, 22 nt, Human
ugaugcugagccugggacugac

SEQ ID NO: 622481 - RNA, 22 nt, Human
uuucucacccaagaguuauuuu

SEQ ID NO: 622482 - RNA, 22 nt, Human
uugggagcaaauaggaaagagg

SEQ ID NO: 622483 - RNA, 22 nt, Human
ggaaaaauagaguauacuuuaa

SEQ ID NO: 622484 - RNA, 22 nt, Human
uccugcuugaaacucugccuuc

SEQ ID NO: 622485 - RNA, 22 nt, Human
ucugucuuugagaucucagccu

SEQ ID NO: 622486 - RNA, 22 nt, Human
guucaaauuuuggcuguacugc

SEQ ID NO: 622487 - RNA, 22 nt, Human
acaacaguccaguauagacugu

SEQ ID NO: 622488 - RNA, 22 nt, Human
cuggggaaggcggugacugcgc

SEQ ID NO: 622489 - RNA, 22 nt, Human
gguuuccugcauugggaaauuu

SEQ ID NO: 622490 - RNA, 22 nt, Human
agcagcaauaauaaaguaauac

SEQ ID NO: 622491 - RNA, 22 nt, Human
aagggugaagggugguggccua

SEQ ID NO: 622492 - RNA, 22 nt, Human
caguacuuguccucagguguua

SEQ ID NO: 622493 - RNA, 21 nt, Human
ccaggacuccauggggucucu

SEQ ID NO: 622494 - RNA, 22 nt, Human
ucacagaauagcacuguaagcg

SEQ ID NO: 622495 - RNA, 22 nt, Human
uuaaagagucuacugcacaucc

SEQ ID NO: 622496 - RNA, 22 nt, Human
cuaaagauaaggaaaguauccu

SEQ ID NO: 622497 - RNA, 22 nt, Human
gugcagagaaaugagaagucga

SEQ ID NO: 622498 - RNA, 22 nt, Human
cuguucuucugggaauggcccu

SEQ ID NO: 622499 - RNA, 22 nt, Human
guggcagugugaggauccugcu

SEQ ID NO: 622500 - RNA, 16 nt, Human
aaccucucuacugugg

SEQ ID NO: 622501 - RNA, 23 nt, Human
cugagggcuggucugaagucugc

SEQ ID NO: 622502 - RNA, 22 nt, Human
caugggcucucugagcuccagg

SEQ ID NO: 622503 - RNA, 22 nt, Human
uacacagacucuucaauucaga

SEQ ID NO: 622504 - RNA, 22 nt, Human
guucucucagccuuuguuauua

SEQ ID NO: 622505 - RNA, 22 nt, Human
aggcugggaaauguagucuucc

SEQ ID NO: 622506 - RNA, 22 nt, Human
aagaaagugcuuuguaaauuau

SEQ ID NO: 622507 - RNA, 22 nt, Human
aucaggaagaagaauguguugg

SEQ ID NO: 622508 - RNA, 22 nt, Human
aauucacaauuauguugggaga

SEQ ID NO: 622509 - RNA, 22 nt, Human
acugaggucaugcauaguuucu

SEQ ID NO: 622510 - RNA, 23 nt, Human
ugggcuucugagaaagcaccuaa

SEQ ID NO: 622511 - RNA, 22 nt, Human
gagaggcugaaaucacaggagc

SEQ ID NO: 622512 - RNA, 22 nt, Human
uauuuggaaaggacauguaagu

SEQ ID NO: 622513 - RNA, 22 nt, Human
ggaugcugggagacagcaggca

SEQ ID NO: 622514 - RNA, 22 nt, Human
ucaguuuucucaucugugaaau

SEQ ID NO: 622515 - RNA, 22 nt, Human
uuauuauagauuaugcaagauu

SEQ ID NO: 622516 - RNA, 22 nt, Human
uuuaguguuugcguguacuccu

SEQ ID NO: 622517 - RNA, 22 nt, Human
uagcagcugcaucauuuuacag

SEQ ID NO: 622518 - RNA, 22 nt, Human
gggacuggaguagaggccggug

SEQ ID NO: 622519 - RNA, 22 nt, Human
aaagauguuuuacauagcaccu

SEQ ID NO: 622520 - RNA, 23 nt, Human
aacaggaugugcuucaucuuuug

SEQ ID NO: 622521 - RNA, 22 nt, Human
caacacagguucugcaaaggaa

SEQ ID NO: 622522 - RNA, 22 nt, Human
ugugggaaugcugaugggaucu

SEQ ID NO: 622523 - RNA, 22 nt, Human
ucagaacacuuucucuacugac

SEQ ID NO: 622524 - RNA, 22 nt, Human
gagaggaaagauauauacuucu

SEQ ID NO: 622525 - RNA, 22 nt, Human
uuacuuuauagaacacuggggg

SEQ ID NO: 622526 - RNA, 22 nt, Human
aacagaggcucccugcacuugu

SEQ ID NO: 622527 - RNA, 22 nt, Human
aaaagcagagacucuggagcua

SEQ ID NO: 622528 - RNA, 22 nt, Human
uuucaaacauuccugggagacu

SEQ ID NO: 622529 - RNA, 22 nt, Human
aagugaaacauguaucucuuua

SEQ ID NO: 622530 - RNA, 22 nt, Human
cucugcugcuugccagucauug

SEQ ID NO: 622531 - RNA, 22 nt, Human
uucagaaaugaauauugguauu

SEQ ID NO: 622532 - RNA, 22 nt, Human
augccaaauucuacuuucagca

SEQ ID NO: 622533 - RNA, 22 nt, Human
gcugcagagugaugaagugggg

SEQ ID NO: 622534 - RNA, 22 nt, Human
uccuggagcuucaguuuccuuu

SEQ ID NO: 622535 - RNA, 22 nt, Human
ugcagcauuauguagcuguuuu

SEQ ID NO: 622536 - RNA, 22 nt, Human
aguuucuagccucacuguuuag

SEQ ID NO: 622537 - RNA, 22 nt, Human
uuccauuguuucugucuucacu

SEQ ID NO: 622538 - RNA, 22 nt, Human
caaaggcuuccacugcauccuu

SEQ ID NO: 622539 - RNA, 22 nt, Human
guucagcaaguacucaguccac

SEQ ID NO: 622540 - RNA, 22 nt, Human
agucacauagcucugguuucuu

SEQ ID NO: 622541 - RNA, 22 nt, Human
cuggaucuugcugcauugagaa

SEQ ID NO: 622542 - RNA, 22 nt, Human
guugaugaaaaugaauugcaug

SEQ ID NO: 622543 - RNA, 22 nt, Human
uugggcucaggaguuugagacc

SEQ ID NO: 622544 - RNA, 22 nt, Human
ccagcagcaggccaggcccucc

SEQ ID NO: 622545 - RNA, 22 nt, Human
agcuggugcucaggggcaugga

SEQ ID NO: 622546 - RNA, 22 nt, Human
aaauaugagauguucucuuucg

SEQ ID NO: 622547 - RNA, 22 nt, Human
cuguccuguacuuugaggcccu

SEQ ID NO: 622548 - RNA, 22 nt, Human
ccagcuccucuugucucuagca

SEQ ID NO: 622549 - RNA, 22 nt, Human
agggcauuggcacagaucugcu

SEQ ID NO: 622550 - RNA, 22 nt, Human
cagcugcaguucaaugcuugcu

SEQ ID NO: 622551 - RNA, 21 nt, Human
uacagaaugcgcuucagucug

SEQ ID NO: 622552 - RNA, 22 nt, Human
ugagccaggcacugcuccugga

SEQ ID NO: 622553 - RNA, 22 nt, Human
ugucuuuugccaaagaucaguu

SEQ ID NO: 622554 - RNA, 22 nt, Human
uaguuucugaggauugaaagau

SEQ ID NO: 622555 - RNA, 22 nt, Human
aagcuggacucugccauuuacu

SEQ ID NO: 622556 - RNA, 22 nt, Human
gugcaugugcguugacugucca

SEQ ID NO: 622557 - RNA, 22 nt, Human
gauaaacaugggagaaaggaau

SEQ ID NO: 622558 - RNA, 22 nt, Human
cuggcuccaucuuugcuuccug

SEQ ID NO: 622559 - RNA, 22 nt, Human
acauucauuccaggucagucag

SEQ ID NO: 622560 - RNA, 22 nt, Human
ugugccugaguuggcugaguac

SEQ ID NO: 622561 - RNA, 22 nt, Human
auugacaauucuaugcagagca

SEQ ID NO: 622562 - RNA, 22 nt, Human
aauguuuuacagaucccauuag

SEQ ID NO: 622563 - RNA, 22 nt, Human
ggcugcagauuguagucuguua

SEQ ID NO: 622564 - RNA, 22 nt, Human
agaggaagauuuuauuaaccag

SEQ ID NO: 622565 - RNA, 22 nt, Human
acagaagagcacauuuaguaug

SEQ ID NO: 622566 - RNA, 22 nt, Human
cuauuagguuggugcaaaagua

SEQ ID NO: 622567 - RNA, 22 nt, Human
ugaacccaggagguugcaguga

SEQ ID NO: 622568 - RNA, 22 nt, Human
ggcugccccagugcucauggcu

SEQ ID NO: 622569 - RNA, 22 nt, Human
ucaucauguuugauuuccacag

SEQ ID NO: 622570 - RNA, 22 nt, Human
uucuugggugugaccagucuga

SEQ ID NO: 622571 - RNA, 22 nt, Human
ggccccuguaaaauguacaugu

SEQ ID NO: 622572 - RNA, 22 nt, Human
aggagaauuaggaacucaagau

SEQ ID NO: 622573 - RNA, 22 nt, Human
uggcaggcucugaguagcaccu

SEQ ID NO: 622574 - RNA, 22 nt, Human
ucuguucaugucuuuuuaagug

SEQ ID NO: 622575 - RNA, 22 nt, Human
gcugagagcggccagcugggaa

SEQ ID NO: 622576 - RNA, 21 nt, Human
uuugaaagugggugauucuuu

SEQ ID NO: 622577 - RNA, 22 nt, Human
ccagguaggagagagggauccu

SEQ ID NO: 622578 - RNA, 22 nt, Human
ggucagugacuuuuuucugugg

SEQ ID NO: 622579 - RNA, 22 nt, Human
gugaccaucagagaauaacaaa

SEQ ID NO: 622580 - RNA, 22 nt, Human
ucugggaacucugucauuuccc

SEQ ID NO: 622581 - RNA, 22 nt, Human
accagagcgcucaagccuuccc

SEQ ID NO: 622582 - RNA, 22 nt, Human
ucagauuuacugcagagcagau

SEQ ID NO: 622583 - RNA, 22 nt, Human
acagaauuuaaagcucuagacu

SEQ ID NO: 622584 - RNA, 22 nt, Human
acaggaguuuaagaaauauuuc

SEQ ID NO: 622585 - RNA, 23 nt, Human
ugcagccacucaggagcucagug

SEQ ID NO: 622586 - RNA, 22 nt, Human
cagggcuguaaauuagugcuga

SEQ ID NO: 622587 - RNA, 22 nt, Human
aaaauuaagugucugggaagcc

SEQ ID NO: 622588 - RNA, 22 nt, Human
agucuccuuggccucaaugccu

SEQ ID NO: 622589 - RNA, 22 nt, Human
caucauauggaauuuaaaguca

SEQ ID NO: 622590 - RNA, 22 nt, Human
uauaaaguuucgaaagauguau

SEQ ID NO: 622591 - RNA, 22 nt, Human
guguccugggggacuucagguu

SEQ ID NO: 622592 - RNA, 22 nt, Human
ucuauuguaggcauguagcuug

SEQ ID NO: 622593 - RNA, 22 nt, Human
uggcccugcuguaucaucugcu

SEQ ID NO: 622594 - RNA, 19 nt, Human
uccugggcugggccagguc

SEQ ID NO: 622595 - RNA, 22 nt, Human
cucacagagcucauacugggag

SEQ ID NO: 622596 - RNA, 22 nt, Human
cuuguugcaaacauucacucca

SEQ ID NO: 622597 - RNA, 22 nt, Human
ccugcccacagagagggugcau

SEQ ID NO: 622598 - RNA, 22 nt, Human
ucccagcacagggcagauguga

SEQ ID NO: 622599 - RNA, 17 nt, Human
ugguuccaaccauacgc

SEQ ID NO: 622600 - RNA, 22 nt, Human
gcagaagcagggcaggggcaaa

SEQ ID NO: 622601 - RNA, 22 nt, Human
agaaagagcucgggauuaacag

SEQ ID NO: 622602 - RNA, 22 nt, Human
gagcugggucuccaccuuggca

SEQ ID NO: 622603 - RNA, 22 nt, Human
ucagggcacugucaccugauau

SEQ ID NO: 622604 - RNA, 22 nt, Human
aaaaggcauuuugucaaccaua

SEQ ID NO: 622605 - RNA, 22 nt, Human
ugcauuucagaagaaaauucgg

SEQ ID NO: 622606 - RNA, 22 nt, Human
aaguucaaucagaugaaaaagc

SEQ ID NO: 622607 - RNA, 22 nt, Human
auguauguuaguguauuaucua

SEQ ID NO: 622608 - RNA, 22 nt, Human
ucaggcagucugacuccggagg

SEQ ID NO: 622609 - RNA, 19 nt, Human
ucugaggcuucuccccuug

SEQ ID NO: 622610 - RNA, 19 nt, Human
cagagccuucagugacucc

SEQ ID NO: 622611 - RNA, 22 nt, Human
ggcacagcucaggucccagcuc

SEQ ID NO: 622612 - RNA, 22 nt, Human
cagucucacccuggaggcccca

SEQ ID NO: 622613 - RNA, 22 nt, Human
gucagcucagcaggugggagug

SEQ ID NO: 622614 - RNA, 22 nt, Human
aaugaagauuauggugauuaag

SEQ ID NO: 622615 - RNA, 22 nt, Human
agucaguguagaaagcccaggc

SEQ ID NO: 622616 - RNA, 22 nt, Human
uaggaaacucucagcuggucau

SEQ ID NO: 622617 - RNA, 22 nt, Human
uacagaaauugccaccagcucu

SEQ ID NO: 622618 - RNA, 22 nt, Human
agcagccaaccuuacauucauc

SEQ ID NO: 622619 - RNA, 22 nt, Human
aacuuagugagccacucuugca

SEQ ID NO: 622620 - RNA, 22 nt, Human
ucagagaauccguaagucacaa

SEQ ID NO: 622621 - RNA, 22 nt, Human
auucuuacaaagcagagucugu

SEQ ID NO: 622622 - RNA, 22 nt, Human
ucugugccucaucugguucagg

SEQ ID NO: 622623 - RNA, 22 nt, Human
uaagaacagauaaaguuucccc

SEQ ID NO: 622624 - RNA, 22 nt, Human
augcacugggugaggaaggaga

SEQ ID NO: 622625 - RNA, 18 nt, Human
ccuggaccugucuccuuu

SEQ ID NO: 622626 - RNA, 22 nt, Human
caggaaugauauucgaggagau

SEQ ID NO: 622627 - RNA, 22 nt, Human
agauuuagugguggaauuuugg

SEQ ID NO: 622628 - RNA, 22 nt, Human
aucaaaguaggcauauguuuuu

SEQ ID NO: 622629 - RNA, 22 nt, Human
ugcauguuugugucugagaacu

SEQ ID NO: 622630 - RNA, 20 nt, Human
ucauggaaucucacucuagu

SEQ ID NO: 622631 - RNA, 22 nt, Human
uggagauggguuaauggagaga

SEQ ID NO: 622632 - RNA, 22 nt, Human
uuuuauguugcuauaauaggua

SEQ ID NO: 622633 - RNA, 22 nt, Human
auaagcaugauuaccgggagca

SEQ ID NO: 622634 - RNA, 22 nt, Human
cuggaguacaggaaucuuccca

SEQ ID NO: 622635 - RNA, 22 nt, Human
cugaagcauaucaugccaaguu

SEQ ID NO: 622636 - RNA, 22 nt, Human
gaggacacaugacuccagcagg

SEQ ID NO: 622637 - RNA, 22 nt, Human
cccuggcagagggggcaggugc

SEQ ID NO: 622638 - RNA, 22 nt, Human
acaguaagcgggguuggagggc

SEQ ID NO: 622639 - RNA, 22 nt, Human
agaugugggugucaggcaguga

SEQ ID NO: 622640 - RNA, 23 nt, Human
ccaggcucuuucaccugcuauuc

SEQ ID NO: 622641 - RNA, 22 nt, Human
ucauuucagccauuuuuaaaug

SEQ ID NO: 622642 - RNA, 22 nt, Human
ugcugucuucucugaggucccu

SEQ ID NO: 622643 - RNA, 22 nt, Human
ccuuuaauuuacaauguuaauu

SEQ ID NO: 622644 - RNA, 22 nt, Human
gugccuguuucuuuugaauuca

SEQ ID NO: 622645 - RNA, 22 nt, Human
aagcugccugggaggaagggcu

SEQ ID NO: 622646 - RNA, 22 nt, Human
aggcugcaggucugggucaugu

SEQ ID NO: 622647 - RNA, 20 nt, Human
aagaaacuugaaaguacaag

SEQ ID NO: 622648 - RNA, 22 nt, Human
uagaaaacuaauacaugcuuga

SEQ ID NO: 622649 - RNA, 22 nt, Human
aaggcacagaggcagggcacuu

SEQ ID NO: 622650 - RNA, 22 nt, Human
gugacucuguuucugaaaacag

SEQ ID NO: 622651 - RNA, 21 nt, Human
cuacuuaaguaggggauuagg

SEQ ID NO: 622652 - RNA, 22 nt, Human
auaaaaguucaagagaguacag

SEQ ID NO: 622653 - RNA, 22 nt, Human
aguuuccacuggagacacugug

SEQ ID NO: 622654 - RNA, 23 nt, Human
uaggcaggacucagauaugacag

SEQ ID NO: 622655 - RNA, 22 nt, Human
aagagagggguugcauggaaau

SEQ ID NO: 622656 - RNA, 22 nt, Human
gggacgacaggcucugugguag

SEQ ID NO: 622657 - RNA, 22 nt, Human
uaacaugagagcuaagacauua

SEQ ID NO: 622658 - RNA, 22 nt, Human
cacaagacuuauuuguguagaa

SEQ ID NO: 622659 - RNA, 22 nt, Human
caccuggaguagcaagguaauu

SEQ ID NO: 622660 - RNA, 22 nt, Human
guccugugggcccaccaugagc

SEQ ID NO: 622661 - RNA, 22 nt, Human
ccugcacccaggccgcaccucu

SEQ ID NO: 622662 - RNA, 22 nt, Human
ugcggagggagcagucggcugu

SEQ ID NO: 622663 - RNA, 22 nt, Human
uuuccaauaaagugucauuguu

SEQ ID NO: 622664 - RNA, 22 nt, Human
ugcaaagaaggggaggaggauu

SEQ ID NO: 622665 - RNA, 22 nt, Human
uuuaugauuauuuuaaagcagc

SEQ ID NO: 622666 - RNA, 22 nt, Human
cucccugacaggccaugggcuu

SEQ ID NO: 622667 - RNA, 22 nt, Human
ucaccauuggcaauuauaaaac

SEQ ID NO: 622668 - RNA, 22 nt, Human
gccugagccgccugagcggcgg

SEQ ID NO: 622669 - RNA, 22 nt, Human
uaagcauacauucucuccuuuc

SEQ ID NO: 622670 - RNA, 22 nt, Human
aagacauuccaaaguggcuaau

SEQ ID NO: 622671 - RNA, 22 nt, Human
cacuucaauuaacuucagcauu

SEQ ID NO: 622672 - RNA, 22 nt, Human
aagcaaaggcaggagcuuguga

SEQ ID NO: 622673 - RNA, 22 nt, Human
cugaggagucaguuccacucag

SEQ ID NO: 622674 - RNA, 22 nt, Human
ucagugcacagagauuuuuguu

SEQ ID NO: 622675 - RNA, 22 nt, Human
aguguacaaaaugauagauaaa

SEQ ID NO: 622676 - RNA, 22 nt, Human
uacauguuuacuccaagucagg

SEQ ID NO: 622677 - RNA, 22 nt, Human
acugagacugccccuguaacaa

SEQ ID NO: 622678 - RNA, 22 nt, Human
gagcucagagccuauaguuggu

SEQ ID NO: 622679 - RNA, 22 nt, Human
ugaauauggcaacucuuguaac

SEQ ID NO: 622680 - RNA, 22 nt, Human
uaaauaucaguccagcucuucc

SEQ ID NO: 622681 - RNA, 22 nt, Human
auccaucccaucuucaccaggg

SEQ ID NO: 622682 - RNA, 22 nt, Human
uaacuuuugugaucugucgauu

SEQ ID NO: 622683 - RNA, 22 nt, Human
augacaagggaggguccugcua

SEQ ID NO: 622684 - RNA, 22 nt, Human
ucucacagggcuaggcccugcc

SEQ ID NO: 622685 - RNA, 18 nt, Human
uguugaaacuucagguaa

SEQ ID NO: 622686 - RNA, 22 nt, Human
uccaucugcauuugguuucugu

SEQ ID NO: 622687 - RNA, 22 nt, Human
gguuccagaguauuucauuuca

SEQ ID NO: 622688 - RNA, 18 nt, Human
ccuggcuuuucuacuugc

SEQ ID NO: 622689 - RNA, 22 nt, Human
aaguggcagaauaguggcagga

SEQ ID NO: 622690 - RNA, 22 nt, Human
uugagaagaaauaguuugcaau

SEQ ID NO: 622691 - RNA, 21 nt, Human
uuauucugagaugagauucuu

SEQ ID NO: 622692 - RNA, 22 nt, Human
uggcgagguuucagagagcggc

SEQ ID NO: 622693 - RNA, 21 nt, Human
ccagcuuucccaagucccuuu

SEQ ID NO: 622694 - RNA, 22 nt, Human
ugggcugcccugaugguccuca

SEQ ID NO: 622695 - RNA, 22 nt, Human
cugggcucaguggcucauggcu

SEQ ID NO: 622696 - RNA, 21 nt, Human
uugaagcaaggguggcucuga

SEQ ID NO: 622697 - RNA, 22 nt, Human
uuuguucugcaucacagaaaaa

SEQ ID NO: 622698 - RNA, 22 nt, Human
uuagcaauaugaaugcauuugc

SEQ ID NO: 622699 - RNA, 22 nt, Human
cacuucaccacuaggcuauacu

SEQ ID NO: 622700 - RNA, 22 nt, Human
gaggugugaggaaugaaugggg

SEQ ID NO: 622701 - RNA, 22 nt, Human
ggcuggagauaugucuggaaca

SEQ ID NO: 622702 - RNA, 23 nt, Human
cuauggaauaccaaugauucuca

SEQ ID NO: 622703 - RNA, 21 nt, Human
augugcagcaagcagcaugcu

SEQ ID NO: 622704 - RNA, 22 nt, Human
auggcuuuccggacuuuggcca

SEQ ID NO: 622705 - RNA, 22 nt, Human
gacaaaggaucagagguuggga

SEQ ID NO: 622706 - RNA, 22 nt, Human
gagagaccucagaaacaaucua

SEQ ID NO: 622707 - RNA, 22 nt, Human
ucagccagagggggcaaaggaa

SEQ ID NO: 622708 - RNA, 22 nt, Human
gccagugcuuguggagcuggca

SEQ ID NO: 622709 - RNA, 22 nt, Human
uaaugcaggugcccuuggguuu

SEQ ID NO: 622710 - RNA, 22 nt, Human
agccuggaccaggggccucaga

SEQ ID NO: 622711 - RNA, 22 nt, Human
uagcagaagaacaacaugaucu

SEQ ID NO: 622712 - RNA, 22 nt, Human
cagcugccuaugaccuagccuc

SEQ ID NO: 622713 - RNA, 22 nt, Human
ucacaguugauugaaacacagc

SEQ ID NO: 622714 - RNA, 22 nt, Human
gccuugggggugaaagaggcua

SEQ ID NO: 622715 - RNA, 22 nt, Human
gggcuccagcccgggaccaggu

SEQ ID NO: 622716 - RNA, 22 nt, Human
gaggccugucgcuaggccucug

SEQ ID NO: 622717 - RNA, 22 nt, Human
cucagugcuuuggauccuggau

SEQ ID NO: 622718 - RNA, 20 nt, Human
uuugucaacugcauccagca

SEQ ID NO: 622719 - RNA, 22 nt, Human
uccucagacuucccuuugugua

SEQ ID NO: 622720 - RNA, 22 nt, Human
uggcugcucaagggaggaggcu

SEQ ID NO: 622721 - RNA, 22 nt, Human
ugucuuauguagauacugagaa

SEQ ID NO: 622722 - RNA, 22 nt, Human
aucugcuugcccucuuaggacc

SEQ ID NO: 622723 - RNA, 22 nt, Human
cagggaugugaugagcugagcc

SEQ ID NO: 622724 - RNA, 22 nt, Human
gcaagcaagcagguagagcuga

SEQ ID NO: 622725 - RNA, 22 nt, Human
ucuuugcaugcauuuucccuua

SEQ ID NO: 622726 - RNA, 20 nt, Human
gcagagcuguucugugggga

SEQ ID NO: 622727 - RNA, 22 nt, Human
uuugacaagagcaaauguucuu

SEQ ID NO: 622728 - RNA, 22 nt, Human
augucuauauagucaauaauca

SEQ ID NO: 622729 - RNA, 22 nt, Human
uguggggacccaugccaugggc

SEQ ID NO: 622730 - RNA, 22 nt, Human
auugaaauugaugaaauucuug

SEQ ID NO: 622731 - RNA, 22 nt, Human
uaggaaacucaaagggaagugg

SEQ ID NO: 622732 - RNA, 22 nt, Human
gagguccagagcagguucagug

SEQ ID NO: 622733 - RNA, 22 nt, Human
ugugcucuucuguuacuuguag

SEQ ID NO: 622734 - RNA, 20 nt, Human
uccuucaggcagggccuagu

SEQ ID NO: 622735 - RNA, 22 nt, Human
gacauuuaaggcagucacuuaa

SEQ ID NO: 622736 - RNA, 22 nt, Human
cauauacacuuccaccucugug

SEQ ID NO: 622737 - RNA, 22 nt, Human
uuuagacacuagggaugcagug

SEQ ID NO: 622738 - RNA, 22 nt, Human
auggcagaauuaggauuucaag

SEQ ID NO: 622739 - RNA, 22 nt, Human
aaagacacaaauguagaccaaa

SEQ ID NO: 622740 - RNA, 22 nt, Human
uuuauguuugcauuuucaaaga

SEQ ID NO: 622741 - RNA, 22 nt, Human
cugcagccuccuccagcuacgu

SEQ ID NO: 622742 - RNA, 22 nt, Human
ccucaggcuuaacuugucuuga

SEQ ID NO: 622743 - RNA, 22 nt, Human
agauauuuguaucuugcuauug

SEQ ID NO: 622744 - RNA, 22 nt, Human
agccagcaugaagacagaggcc

SEQ ID NO: 622745 - RNA, 22 nt, Human
ugguggggucaucgucagaugc

SEQ ID NO: 622746 - RNA, 21 nt, Human
uguggucuuuuaguuccauca

SEQ ID NO: 622747 - RNA, 22 nt, Human
cuccugaggaaaagcuugguca

SEQ ID NO: 622748 - RNA, 22 nt, Human
acagagguuuccauugagguuu

SEQ ID NO: 622749 - RNA, 20 nt, Human
aucaucucaaagcugagguu

SEQ ID NO: 622750 - RNA, 22 nt, Human
ccuggagcaaaaaucuaaggag

SEQ ID NO: 622751 - RNA, 22 nt, Human
uauuugaugaagguaaagucuu

SEQ ID NO: 622752 - RNA, 22 nt, Human
guaggcagugguuggaagagaa

SEQ ID NO: 622753 - RNA, 23 nt, Human
ucucugugugccucaguuucuuc

SEQ ID NO: 622754 - RNA, 22 nt, Human
aagguauauguacaauagacau

SEQ ID NO: 622755 - RNA, 22 nt, Human
uacaacugcacaucugaaucac

SEQ ID NO: 622756 - RNA, 22 nt, Human
uaggaacacagggacuugauga

SEQ ID NO: 622757 - RNA, 22 nt, Human
uggccugacugucaggcuguau

SEQ ID NO: 622758 - RNA, 22 nt, Human
cccaugcugugccuagagagca

SEQ ID NO: 622759 - RNA, 22 nt, Human
uccuuacagguuacagaaagca

SEQ ID NO: 622760 - RNA, 22 nt, Human
uccuuuggagcuugacugguag

SEQ ID NO: 622761 - RNA, 22 nt, Human
caggcugccgugggguccaggc

SEQ ID NO: 622762 - RNA, 22 nt, Human
aaccaaggacagcuagugaugc

SEQ ID NO: 622763 - RNA, 22 nt, Human
uucugguggccagaagucugaa

SEQ ID NO: 622764 - RNA, 22 nt, Human
cagcauuguaagaaugaagacc

SEQ ID NO: 622765 - RNA, 22 nt, Human
gagggcugaagauuguggcccc

SEQ ID NO: 622766 - RNA, 22 nt, Human
gcaaaugaguuguaacauaaaa

SEQ ID NO: 622767 - RNA, 22 nt, Human
agaaggguguauacauuuccug

SEQ ID NO: 622768 - RNA, 22 nt, Human
uugcagauuaaaacacugagcu

SEQ ID NO: 622769 - RNA, 22 nt, Human
agagacaccgcgcaucauggcu

SEQ ID NO: 622770 - RNA, 22 nt, Human
ucugagguucuguuuucaacug

SEQ ID NO: 622771 - RNA, 22 nt, Human
auauuuauaaggcaggcaagua

SEQ ID NO: 622772 - RNA, 22 nt, Human
cugccagcaaugugaccaugcu

SEQ ID NO: 622773 - RNA, 22 nt, Human
augugcugaguguguauauaca

SEQ ID NO: 622774 - RNA, 18 nt, Human
gaugggagcaagagaaga

SEQ ID NO: 622775 - RNA, 22 nt, Human
gacaggcuucauccucagaguu

SEQ ID NO: 622776 - RNA, 22 nt, Human
ugucucagaggcaggaagagcc

SEQ ID NO: 622777 - RNA, 22 nt, Human
aggucucaauuccugcuccugu

SEQ ID NO: 622778 - RNA, 22 nt, Human
ggcugugauugguggaugugaa

SEQ ID NO: 622779 - RNA, 22 nt, Human
ucuugggggacuuuggcaugga

SEQ ID NO: 622780 - RNA, 22 nt, Human
uuaaaauagccagugccccucu

SEQ ID NO: 622781 - RNA, 22 nt, Human
ucauugaggaaagguaguggcu

SEQ ID NO: 622782 - RNA, 22 nt, Human
uccaggcagggcagccaucaag

SEQ ID NO: 622783 - RNA, 22 nt, Human
acugucacugugauguuagaga

SEQ ID NO: 622784 - RNA, 22 nt, Human
ucccagagcugauaagccuuua

SEQ ID NO: 622785 - RNA, 22 nt, Human
uaacagaaauaguaggugaggg

SEQ ID NO: 622786 - RNA, 22 nt, Human
agcaggguuccaggaguugcag

SEQ ID NO: 622787 - RNA, 22 nt, Human
ucagcccaguuuuaucaucugu

SEQ ID NO: 622788 - RNA, 23 nt, Human
agaguaauguuuuuacuguauuc

SEQ ID NO: 622789 - RNA, 22 nt, Human
uuaacuguaucauacuguuuca

SEQ ID NO: 622790 - RNA, 22 nt, Human
aaggaggcacccugagccugcc

SEQ ID NO: 622791 - RNA, 22 nt, Human
acugcucuguuuucauauguuu

SEQ ID NO: 622792 - RNA, 22 nt, Human
aauaucaacaguguccuucuaa

SEQ ID NO: 622793 - RNA, 22 nt, Human
ugccuuuacugauuagcugugu

SEQ ID NO: 622794 - RNA, 22 nt, Human
uuccugggcugcagagagcacc

SEQ ID NO: 622795 - RNA, 22 nt, Human
gaagcaauguguuuucaacauu

SEQ ID NO: 622796 - RNA, 22 nt, Human
ucacagcaaaagugugcagagc

SEQ ID NO: 622797 - RNA, 22 nt, Human
auaugcuuccccuucuuuuugg

SEQ ID NO: 622798 - RNA, 22 nt, Human
gugccgugggccuuagugaucu

SEQ ID NO: 622799 - RNA, 22 nt, Human
aucagaccugucuccucuugcc

SEQ ID NO: 622800 - RNA, 22 nt, Human
agcaagacucagcaggauacca

SEQ ID NO: 622801 - RNA, 22 nt, Human
cuuagcuuuaaaagugagaucu

SEQ ID NO: 622802 - RNA, 22 nt, Human
ccucagaguuggaaucacauuu

SEQ ID NO: 622803 - RNA, 22 nt, Human
uaggauggucacagagauggac

SEQ ID NO: 622804 - RNA, 22 nt, Human
cuuggcccaguugccaaggaaa

SEQ ID NO: 622805 - RNA, 22 nt, Human
uggggugggcaugcgcuguccu

SEQ ID NO: 622806 - RNA, 22 nt, Human
gccucagggauaggaugagcau

SEQ ID NO: 622807 - RNA, 22 nt, Human
agggcuggcuaggugcguuccc

SEQ ID NO: 622808 - RNA, 22 nt, Human
auugcaaaggucccauucaaga

SEQ ID NO: 622809 - RNA, 22 nt, Human
acacuguagcugagggcaugcg

SEQ ID NO: 622810 - RNA, 17 nt, Human
uuguuucuucucugugg

SEQ ID NO: 622811 - RNA, 23 nt, Human
aaaugacauaugguuucugaagg

SEQ ID NO: 622812 - RNA, 22 nt, Human
uuggaaacuuggauggaaaacc

SEQ ID NO: 622813 - RNA, 22 nt, Human
ugccagccagggaagcucaccc

SEQ ID NO: 622814 - RNA, 22 nt, Human
caggucugagucacauguucau

SEQ ID NO: 622815 - RNA, 19 nt, Human
aguguuuauguagugccua

SEQ ID NO: 622816 - RNA, 22 nt, Human
caggaggugaaggagaaccagu

SEQ ID NO: 622817 - RNA, 22 nt, Human
uuccaauuuguggugaguuaau

SEQ ID NO: 622818 - RNA, 18 nt, Human
ggcuccagucuucagugg

SEQ ID NO: 622819 - RNA, 17 nt, Human
uuauucuggcauaugug

SEQ ID NO: 622820 - RNA, 22 nt, Human
aagauuauuuaagacaggaacc

SEQ ID NO: 622821 - RNA, 22 nt, Human
gcucacagccggcuggcagggg

SEQ ID NO: 622822 - RNA, 22 nt, Human
gugaccauaauagauuaugagu

SEQ ID NO: 622823 - RNA, 22 nt, Human
uucacauucagaaaaagcccgu

SEQ ID NO: 622824 - RNA, 20 nt, Human
uccugcaguuccuaggaggg

SEQ ID NO: 622825 - RNA, 22 nt, Human
gcucagagauguucaguagcuu

SEQ ID NO: 622826 - RNA, 22 nt, Human
uaggcacugaggggagcaaggu

SEQ ID NO: 622827 - RNA, 22 nt, Human
augaagucuagcaagcauugaa

SEQ ID NO: 622828 - RNA, 22 nt, Human
ucaaaauuaaaccaacguccag

SEQ ID NO: 622829 - RNA, 22 nt, Human
uaaaauagaggaugucaugcua

SEQ ID NO: 622830 - RNA, 23 nt, Human
ucuggcuccauccuuggggaucc

SEQ ID NO: 622831 - RNA, 22 nt, Human
gggaccagaagaaggaugguga

SEQ ID NO: 622832 - RNA, 22 nt, Human
ucuaaacuacgucaaaacuagu

SEQ ID NO: 622833 - RNA, 22 nt, Human
cccggacagaggggcagagugu

SEQ ID NO: 622834 - RNA, 22 nt, Human
ccucucaucauuaucgcuuugu

SEQ ID NO: 622835 - RNA, 22 nt, Human
aaagccuugggauuugugauca

SEQ ID NO: 622836 - RNA, 22 nt, Human
acuguugucaggcugcuuugga

SEQ ID NO: 622837 - RNA, 22 nt, Human
cucugccaguuucuggccucag

SEQ ID NO: 622838 - RNA, 23 nt, Human
uccuggugacaugccugagcauc

SEQ ID NO: 622839 - RNA, 22 nt, Human
ugcuuuugcacaggugaguucc

SEQ ID NO: 622840 - RNA, 22 nt, Human
ugaguuaaucucuacgauagaa

SEQ ID NO: 622841 - RNA, 22 nt, Human
ucuuucuugguauucugagcua

SEQ ID NO: 622842 - RNA, 22 nt, Human
acuucucugguugagguccaau

SEQ ID NO: 622843 - RNA, 23 nt, Human
ucagagaaugguaugcuuuuccu

SEQ ID NO: 622844 - RNA, 22 nt, Human
augcauauuggauuagcagcca

SEQ ID NO: 622845 - RNA, 20 nt, Human
cugcaguccccucugaauca

SEQ ID NO: 622846 - RNA, 22 nt, Human
uucaccagcagcucacuaguca

SEQ ID NO: 622847 - RNA, 22 nt, Human
uucuggaauccucaaaacauga

SEQ ID NO: 622848 - RNA, 22 nt, Human
ucaagcaacagaacugugagac

SEQ ID NO: 622849 - RNA, 21 nt, Human
agcagguguaaaggaggaaau

SEQ ID NO: 622850 - RNA, 22 nt, Human
aaaucguuucguuccugguuuu

SEQ ID NO: 622851 - RNA, 22 nt, Human
cacagagcaggggucuguguca

SEQ ID NO: 622852 - RNA, 22 nt, Human
uggcuugguccuggcccuuccc

SEQ ID NO: 622853 - RNA, 20 nt, Human
ccuggaagagcuccccaggc

SEQ ID NO: 622854 - RNA, 22 nt, Human
acauuuuacaguugucuggcua

SEQ ID NO: 622855 - RNA, 22 nt, Human
cuucagggugacgcaggcugca

SEQ ID NO: 622856 - RNA, 22 nt, Human
gacuucauaauauugagcaugu

SEQ ID NO: 622857 - RNA, 22 nt, Human
uuaucauugucgcagucuaauu

SEQ ID NO: 622858 - RNA, 22 nt, Human
cauguggcacaaagaaggaaau

SEQ ID NO: 622859 - RNA, 22 nt, Human
acagacuuguucccuagugagu

SEQ ID NO: 622860 - RNA, 22 nt, Human
uaauuuaauuucaugccagccu

SEQ ID NO: 622861 - RNA, 22 nt, Human
agauacaucuugaacuucuaga

SEQ ID NO: 622862 - RNA, 22 nt, Human
caugggcugcugacaggggcuc

SEQ ID NO: 622863 - RNA, 22 nt, Human
uauuugcuuuugugccacagau

SEQ ID NO: 622864 - RNA, 20 nt, Human
auucaugucuuuauaaaagc

SEQ ID NO: 622865 - RNA, 22 nt, Human
uaagaugucauccacauagagu

SEQ ID NO: 622866 - RNA, 22 nt, Human
aggcucaguauagcuggcaagu

SEQ ID NO: 622867 - RNA, 22 nt, Human
gcucaaaggccagguagcagca

SEQ ID NO: 622868 - RNA, 22 nt, Human
ggagagcauucuuagucuguuu

SEQ ID NO: 622869 - RNA, 22 nt, Human
agcagaaaugaugguaugggac

SEQ ID NO: 622870 - RNA, 23 nt, Human
cuucaugagagcccugaggaaaa

SEQ ID NO: 622871 - RNA, 22 nt, Human
ugagggcuccccgcugcugugu

SEQ ID NO: 622872 - RNA, 22 nt, Human
uuagaucuuaggcaaauguguu

SEQ ID NO: 622873 - RNA, 22 nt, Human
ugggagaagagaaauuacugcc

SEQ ID NO: 622874 - RNA, 22 nt, Human
gugaggucaaagccuuggguau

SEQ ID NO: 622875 - RNA, 22 nt, Human
cuuucaugaacagacaaggaac

SEQ ID NO: 622876 - RNA, 22 nt, Human
aaugcuuugucugcuccagacu

SEQ ID NO: 622877 - RNA, 22 nt, Human
uccauuuacuauucucauaucg

SEQ ID NO: 622878 - RNA, 22 nt, Human
agguaggauggguggagaugau

SEQ ID NO: 622879 - RNA, 22 nt, Human
uguguuauugccacugaagacc

SEQ ID NO: 622880 - RNA, 22 nt, Human
auuuugaagggaauugaaguuc

SEQ ID NO: 622881 - RNA, 22 nt, Human
cucaggcccacagcagacccac

SEQ ID NO: 622882 - RNA, 22 nt, Human
agggauggagugcggcccggac

SEQ ID NO: 622883 - RNA, 22 nt, Human
acagugaggaagcagcugugcu

SEQ ID NO: 622884 - RNA, 22 nt, Human
caucugcucugucugccauguu

SEQ ID NO: 622885 - RNA, 22 nt, Human
uuuacaacccaaguccagagag

SEQ ID NO: 622886 - RNA, 22 nt, Human
ugggagcagcagggagaugcgg

SEQ ID NO: 622887 - RNA, 22 nt, Human
uggaucucggcaaugcgggacu

SEQ ID NO: 622888 - RNA, 22 nt, Human
cacaggaggaggugcccgggcc

SEQ ID NO: 622889 - RNA, 22 nt, Human
aaucacuuugcacucuuauuug

SEQ ID NO: 622890 - RNA, 22 nt, Human
uagcacauacauaauagauaga

SEQ ID NO: 622891 - RNA, 22 nt, Human
aggcccuguuaugagccacugu

SEQ ID NO: 622892 - RNA, 22 nt, Human
ggcuggcagugugagagaggga

SEQ ID NO: 622893 - RNA, 22 nt, Human
gcucuccaaacccuguggcuuu

SEQ ID NO: 622894 - RNA, 22 nt, Human
auuuuuucagauugaguguuaa

SEQ ID NO: 622895 - RNA, 22 nt, Human
uguuccuguacugcuguggcuu

SEQ ID NO: 622896 - RNA, 22 nt, Human
aagagcaucgguggagccccca

SEQ ID NO: 622897 - RNA, 22 nt, Human
ugugauaacuuuuacauuuucg

SEQ ID NO: 622898 - RNA, 22 nt, Human
gaaagcaguauuuaguucuguu

SEQ ID NO: 622899 - RNA, 22 nt, Human
auuuauuccuuuauggcuggag

SEQ ID NO: 622900 - RNA, 22 nt, Human
gaaagaagcuuuagauggcuau

SEQ ID NO: 622901 - RNA, 22 nt, Human
augcacagaacaauuuuaagag

SEQ ID NO: 622902 - RNA, 22 nt, Human
auucugggaguguaggaugguu

SEQ ID NO: 622903 - RNA, 22 nt, Human
ugggugugagcccgggagccgc

SEQ ID NO: 622904 - RNA, 19 nt, Human
ucagcagcacugugauuuc

SEQ ID NO: 622905 - RNA, 22 nt, Human
agccaaucuccuguugaugcca

SEQ ID NO: 622906 - RNA, 22 nt, Human
uuguuucaggaugguuuguuac

SEQ ID NO: 622907 - RNA, 22 nt, Human
gcauugguucaagguugugcag

SEQ ID NO: 622908 - RNA, 22 nt, Human
aucaaaaccuugacuuuuaaug

SEQ ID NO: 622909 - RNA, 22 nt, Human
agagacuggagaugggcagugu

SEQ ID NO: 622910 - RNA, 22 nt, Human
caccccagucuaaaaccagccu

SEQ ID NO: 622911 - RNA, 22 nt, Human
uuucaucauguuggcagauugg

SEQ ID NO: 622912 - RNA, 22 nt, Human
uuugacacugggagugugggug

SEQ ID NO: 622913 - RNA, 22 nt, Human
cugagagacuguuuguaauauu

SEQ ID NO: 622914 - RNA, 22 nt, Human
agccacgucccugucaggguca

SEQ ID NO: 622915 - RNA, 22 nt, Human
ggucagguuuuuaggagugacc

SEQ ID NO: 622916 - RNA, 22 nt, Human
guaagcacaugugugugcaugg

SEQ ID NO: 622917 - RNA, 22 nt, Human
uaacagcaggguuacaggcauu

SEQ ID NO: 622918 - RNA, 22 nt, Human
uaaaauguuugcaagagaccag

SEQ ID NO: 622919 - RNA, 22 nt, Human
gagcccuccauggagccaggca

SEQ ID NO: 622920 - RNA, 22 nt, Human
aggugagugugacugcaagaga

SEQ ID NO: 622921 - RNA, 21 nt, Human
agaucauucuucugagcacuu

SEQ ID NO: 622922 - RNA, 22 nt, Human
uguuuucaucacagaauguaac

SEQ ID NO: 622923 - RNA, 22 nt, Human
ccuuccagggagcaggcagugu

SEQ ID NO: 622924 - RNA, 22 nt, Human
cagcuauuauuuucucuaaauu

SEQ ID NO: 622925 - RNA, 22 nt, Human
gacacagguagaauaaaguacu

SEQ ID NO: 622926 - RNA, 22 nt, Human
auuuguguuguauuaagcugcu

SEQ ID NO: 622927 - RNA, 22 nt, Human
ucucucuucuuuguuaagaaug

SEQ ID NO: 622928 - RNA, 22 nt, Human
gcagugguccaguucacaccca

SEQ ID NO: 622929 - RNA, 22 nt, Human
agcugccuuauggaguaugaaa

SEQ ID NO: 622930 - RNA, 22 nt, Human
cccagcauccucagggagcggg

SEQ ID NO: 622931 - RNA, 22 nt, Human
ggcuccuucaagccugucacug

SEQ ID NO: 622932 - RNA, 22 nt, Human
ucagcuuugaucucaggcaauc

SEQ ID NO: 622933 - RNA, 22 nt, Human
gagggggacguauccugguaug

SEQ ID NO: 622934 - RNA, 22 nt, Human
cccucagcuucucccugcagcu

SEQ ID NO: 622935 - RNA, 22 nt, Human
uuucuagaguucaucaugguaa

SEQ ID NO: 622936 - RNA, 22 nt, Human
gccucugucauagcucauguga

SEQ ID NO: 622937 - RNA, 22 nt, Human
aagugcauacacuaguuaauug

SEQ ID NO: 622938 - RNA, 19 nt, Human
uggccaccucugcuguucu

SEQ ID NO: 622939 - RNA, 21 nt, Human
agcaggcaaaggugaagucuu

SEQ ID NO: 622940 - RNA, 22 nt, Human
gcaguguuaggaauaaaaauga

SEQ ID NO: 622941 - RNA, 22 nt, Human
augauucuaaacuuaaggggga

SEQ ID NO: 622942 - RNA, 22 nt, Human
cagcaucuguaggacuccucuu

SEQ ID NO: 622943 - RNA, 22 nt, Human
uggcagguggcacagccuggga

SEQ ID NO: 622944 - RNA, 22 nt, Human
aaacagucaaaggccuaagcua

SEQ ID NO: 622945 - RNA, 22 nt, Human
aacccagagcuggaggagagua

SEQ ID NO: 622946 - RNA, 22 nt, Human
ucagagaauucgauuaaaugca

SEQ ID NO: 622947 - RNA, 22 nt, Human
aggcagccaguucagguuucuu

SEQ ID NO: 622948 - RNA, 22 nt, Human
uuacaaagcaggucagcugaaa

SEQ ID NO: 622949 - RNA, 22 nt, Human
ggaggcugagaaguccaagauc

SEQ ID NO: 622950 - RNA, 22 nt, Human
aggcccugggagcagagaugca

SEQ ID NO: 622951 - RNA, 22 nt, Human
aucuguaacaucaguagcagaa

SEQ ID NO: 622952 - RNA, 22 nt, Human
uggagccaguguugcccaacac

SEQ ID NO: 622953 - RNA, 22 nt, Human
gggcuccugccuccuggcaccu

SEQ ID NO: 622954 - RNA, 22 nt, Human
aggcugagugcuccccuagaug

SEQ ID NO: 622955 - RNA, 22 nt, Human
gugucugcucagcuugcuagaa

SEQ ID NO: 622956 - RNA, 22 nt, Human
guucuuugacuccaagaaagua

SEQ ID NO: 622957 - RNA, 22 nt, Human
uauuuugucuucugcucaucac

SEQ ID NO: 622958 - RNA, 22 nt, Human
uauuucuguaacucagggucug

SEQ ID NO: 622959 - RNA, 22 nt, Human
uucugcaucccagaagaggaca

SEQ ID NO: 622960 - RNA, 22 nt, Human
aggcauuuuuguuaaucuuugg

SEQ ID NO: 622961 - RNA, 22 nt, Human
ugugugugaaccauugagggcu

SEQ ID NO: 622962 - RNA, 22 nt, Human
acaauagacccaugacacauac

SEQ ID NO: 622963 - RNA, 22 nt, Human
uguguggccuccauaggguacu

SEQ ID NO: 622964 - RNA, 22 nt, Human
acccugggacuuccgaguugag

SEQ ID NO: 622965 - RNA, 22 nt, Human
cugugggagcacaugacagaua

SEQ ID NO: 622966 - RNA, 22 nt, Human
gagaagcaaucgugacaucucc

SEQ ID NO: 622967 - RNA, 22 nt, Human
uuacuaggccaguuuucacuuu

SEQ ID NO: 622968 - RNA, 22 nt, Human
uagguucacacaucuuccagau

SEQ ID NO: 622969 - RNA, 22 nt, Human
aggagcugggcccaaggaugcu

SEQ ID NO: 622970 - RNA, 22 nt, Human
ugggaaauguguuucuggacca

SEQ ID NO: 622971 - RNA, 22 nt, Human
aggugccaccucuggugcuguc

SEQ ID NO: 622972 - RNA, 20 nt, Human
ugccgggcagccugaggagu

SEQ ID NO: 622973 - RNA, 22 nt, Human
ggugucccaggccagcugugug

SEQ ID NO: 622974 - RNA, 22 nt, Human
ucacaggagucaaggaauagua

SEQ ID NO: 622975 - RNA, 22 nt, Human
uguaugaaugggaaaaggaaac

SEQ ID NO: 622976 - RNA, 22 nt, Human
agugaugguuuccagucacuga

SEQ ID NO: 622977 - RNA, 20 nt, Human
uaugaagauaugugaacagc

SEQ ID NO: 622978 - RNA, 22 nt, Human
gagcauuugguuauaguaauuu

SEQ ID NO: 622979 - RNA, 22 nt, Human
uuuuaugugugaaaugcugucu

SEQ ID NO: 622980 - RNA, 22 nt, Human
ccagcuuuugcacuggacuggg

SEQ ID NO: 622981 - RNA, 22 nt, Human
uucagcaaccagaaaggcuggg

SEQ ID NO: 622982 - RNA, 22 nt, Human
ucaggacaacauguugcuaauc

SEQ ID NO: 622983 - RNA, 22 nt, Human
uguuuuguuuaugagagcacag

SEQ ID NO: 622984 - RNA, 22 nt, Human
cuguggcucaaaaucccaugau

SEQ ID NO: 622985 - RNA, 18 nt, Human
cagcugaggaccaaacug

SEQ ID NO: 622986 - RNA, 22 nt, Human
gugagugucagucaaagguuuu

SEQ ID NO: 622987 - RNA, 22 nt, Human
ggcacugcuguaggcagugagg

SEQ ID NO: 622988 - RNA, 22 nt, Human
cagugagaccuucuaagguggu

SEQ ID NO: 622989 - RNA, 22 nt, Human
cucaggguaaugaaagacgaau

SEQ ID NO: 622990 - RNA, 22 nt, Human
agccugccucagacucaggaua

SEQ ID NO: 622991 - RNA, 22 nt, Human
uccuugagagccacugucuugg

SEQ ID NO: 622992 - RNA, 22 nt, Human
gucuccucuucauauaccuguu

SEQ ID NO: 622993 - RNA, 22 nt, Human
cuggggaacaauuugccacacu

SEQ ID NO: 622994 - RNA, 22 nt, Human
agcagauaguagaacauguaua

SEQ ID NO: 622995 - RNA, 22 nt, Human
gaggaaggauuuaguuugaggg

SEQ ID NO: 622996 - RNA, 22 nt, Human
agaccucaauaccaggcaccac

SEQ ID NO: 622997 - RNA, 22 nt, Human
agaggagaauccguuuccuugc

SEQ ID NO: 622998 - RNA, 22 nt, Human
ccaggaguggcuggugaccuuc

SEQ ID NO: 622999 - RNA, 22 nt, Human
ugcacagguaugcaaagcaugu

SEQ ID NO: 623000 - RNA, 22 nt, Human
aagucucauccguguagcucca

SEQ ID NO: 623001 - RNA, 18 nt, Human
uccaggcuggauugauga

SEQ ID NO: 623002 - RNA, 22 nt, Human
aagagaugaagguccugacugu

SEQ ID NO: 623003 - RNA, 22 nt, Human
ggagagauaggaguccuggacu

SEQ ID NO: 623004 - RNA, 23 nt, Human
uagggcagcugggagggacaugc

SEQ ID NO: 623005 - RNA, 22 nt, Human
uauccuguuuugcacaauuaua

SEQ ID NO: 623006 - RNA, 22 nt, Human
aggcuggccagugcugcagugg

SEQ ID NO: 623007 - RNA, 22 nt, Human
cuaaaaacucuacgaugcacag

SEQ ID NO: 623008 - RNA, 22 nt, Human
gaacagcccuguuaagucuguu

SEQ ID NO: 623009 - RNA, 22 nt, Human
cuguaugauuccauuucuauaa

SEQ ID NO: 623010 - RNA, 22 nt, Human
gccaggcuggugcaaggauauu

SEQ ID NO: 623011 - RNA, 22 nt, Human
gcucgcagaucaccugggggcg

SEQ ID NO: 623012 - RNA, 22 nt, Human
uuaagcauuuauuaugugccag

SEQ ID NO: 623013 - RNA, 21 nt, Human
guguaaacggacucaugcagu

SEQ ID NO: 623014 - RNA, 22 nt, Human
ggcuuuaacaacagaaauuuau

SEQ ID NO: 623015 - RNA, 22 nt, Human
ucaggaaggcaaauugcaugau

SEQ ID NO: 623016 - RNA, 22 nt, Human
cuuaggaauauccacagcaggu

SEQ ID NO: 623017 - RNA, 22 nt, Human
uggccugccuucgcugagcuga

SEQ ID NO: 623018 - RNA, 22 nt, Human
gcagugcuugaagagguggcca

SEQ ID NO: 623019 - RNA, 22 nt, Human
gcagcgaggugaugaaauagcu

SEQ ID NO: 623020 - RNA, 22 nt, Human
uauuuggaaaguuuaucuaucu

SEQ ID NO: 623021 - RNA, 22 nt, Human
aucucugcguccccagcaucga

SEQ ID NO: 623022 - RNA, 22 nt, Human
agggcucaguaaacgguggauu

SEQ ID NO: 623023 - RNA, 22 nt, Human
gugucugcaagauagccaaguc

SEQ ID NO: 623024 - RNA, 22 nt, Human
cucugucagaguguugucccca

SEQ ID NO: 623025 - RNA, 22 nt, Human
gcugaaauuagacugcagaagu

SEQ ID NO: 623026 - RNA, 22 nt, Human
cauugcuuccuaugucccuucu

SEQ ID NO: 623027 - RNA, 18 nt, Human
gaaagugcggggcagggg

SEQ ID NO: 623028 - RNA, 22 nt, Human
ggaagaggcugagccagguccc

SEQ ID NO: 623029 - RNA, 22 nt, Human
aauguguacuuuuucaugcuca

SEQ ID NO: 623030 - RNA, 22 nt, Human
cugaggggucgugggagcccag

SEQ ID NO: 623031 - RNA, 22 nt, Human
uuuagacaucuauaauugcuaa

SEQ ID NO: 623032 - RNA, 22 nt, Human
cuggaaugucugcucaauguuu

SEQ ID NO: 623033 - RNA, 22 nt, Human
ucuuucugcagcacaggggcag

SEQ ID NO: 623034 - RNA, 22 nt, Human
uguguacaagccugaguacaga

SEQ ID NO: 623035 - RNA, 22 nt, Human
aagcaauauacugauaugauua

SEQ ID NO: 623036 - RNA, 22 nt, Human
ucagaacaguucuuaauauugc

SEQ ID NO: 623037 - RNA, 22 nt, Human
cagaugcuuguuggcuggucuc

SEQ ID NO: 623038 - RNA, 22 nt, Human
accagcugaguucucggauggu

SEQ ID NO: 623039 - RNA, 22 nt, Human
aagagcuguaugccauaugauu

SEQ ID NO: 623040 - RNA, 22 nt, Human
ucaaaucagcaagcagcuuccc

SEQ ID NO: 623041 - RNA, 22 nt, Human
ucuguucauaguaguguauaug

SEQ ID NO: 623042 - RNA, 22 nt, Human
augggggaaaguacgagcaugg

SEQ ID NO: 623043 - RNA, 22 nt, Human
augaugaaaacugaagguuagg

SEQ ID NO: 623044 - RNA, 22 nt, Human
ugaacuuuuucucuacgggcca

SEQ ID NO: 623045 - RNA, 19 nt, Human
acugggcuuguccucgugg

SEQ ID NO: 623046 - RNA, 22 nt, Human
gacagagguguccuugagucca

SEQ ID NO: 623047 - RNA, 22 nt, Human
ccucauucuuuccugggccccu

SEQ ID NO: 623048 - RNA, 22 nt, Human
aggcaccucuuaggcugcuacu

SEQ ID NO: 623049 - RNA, 22 nt, Human
aaagauggcccaugaucucuug

SEQ ID NO: 623050 - RNA, 22 nt, Human
ccuggcacacgguggcauucaa

SEQ ID NO: 623051 - RNA, 17 nt, Human
ugcaaacaaucacauau

SEQ ID NO: 623052 - RNA, 22 nt, Human
aguggcagguguguaguauccc

SEQ ID NO: 623053 - RNA, 22 nt, Human
ugcucagaaacgaggugcagcc

SEQ ID NO: 623054 - RNA, 22 nt, Human
cacaggaauuagcagccuaaaa

SEQ ID NO: 623055 - RNA, 22 nt, Human
ugcauugggagagauuagggca

SEQ ID NO: 623056 - RNA, 22 nt, Human
gcacaugguaggcauuugaugu

SEQ ID NO: 623057 - RNA, 22 nt, Human
ggcaggaaaacaaugagccagg

SEQ ID NO: 623058 - RNA, 22 nt, Human
ucaucuuuccucaaaagaucca

SEQ ID NO: 623059 - RNA, 22 nt, Human
ugcagaagacacaagguaacgu

SEQ ID NO: 623060 - RNA, 22 nt, Human
ucccugaaucucgaacuagccu

SEQ ID NO: 623061 - RNA, 22 nt, Human
uuuaagagccuguacaaauauu

SEQ ID NO: 623062 - RNA, 22 nt, Human
uggguccagugcagcugcgcgu

SEQ ID NO: 623063 - RNA, 22 nt, Human
cuguauuuguccucuauuuauu

SEQ ID NO: 623064 - RNA, 22 nt, Human
cuguucuguaagcugcuguugu

SEQ ID NO: 623065 - RNA, 17 nt, Human
uccuggauccauggugg

SEQ ID NO: 623066 - RNA, 22 nt, Human
ugccucaguuucaucugcagaa

SEQ ID NO: 623067 - RNA, 22 nt, Human
ccauccugcauugcuauucaga

SEQ ID NO: 623068 - RNA, 22 nt, Human
ugagcccuugacaucgcccacu

SEQ ID NO: 623069 - RNA, 18 nt, Human
aagucuuggaauuuccac

SEQ ID NO: 623070 - RNA, 22 nt, Human
aaauacaguguguguucuuuga

SEQ ID NO: 623071 - RNA, 22 nt, Human
acacuuaagcaugaaguauaaa

SEQ ID NO: 623072 - RNA, 22 nt, Human
ggucaugcugugaaucagugcu

SEQ ID NO: 623073 - RNA, 22 nt, Human
ggcugcucaaggacucugaucg

SEQ ID NO: 623074 - RNA, 22 nt, Human
aguggcaguuuuauauuucaug

SEQ ID NO: 623075 - RNA, 22 nt, Human
cacaaaauaucaagcacuuuua

SEQ ID NO: 623076 - RNA, 20 nt, Human
cccaggagcugugccccauc

SEQ ID NO: 623077 - RNA, 22 nt, Human
ugccugccuugcugcuggacag

SEQ ID NO: 623078 - RNA, 22 nt, Human
acuucagugugguauaaaacgu

SEQ ID NO: 623079 - RNA, 20 nt, Human
aaaagcagccagagauggua

SEQ ID NO: 623080 - RNA, 22 nt, Human
aagggcuggagacugggucuuc

SEQ ID NO: 623081 - RNA, 22 nt, Human
ccagugccugugggcauggugc

SEQ ID NO: 623082 - RNA, 22 nt, Human
uccuucagaggauaaggaagaa

SEQ ID NO: 623083 - RNA, 22 nt, Human
ugucacaucagggguguugaca

SEQ ID NO: 623084 - RNA, 22 nt, Human
ugaucagcaucuucccagcucg

SEQ ID NO: 623085 - RNA, 19 nt, Human
gccucacaggucucaggcc

SEQ ID NO: 623086 - RNA, 22 nt, Human
ucuguaaaauuaguauaauugu

SEQ ID NO: 623087 - RNA, 22 nt, Human
caaugacacucugcacagugcu

SEQ ID NO: 623088 - RNA, 22 nt, Human
gcugaguguaaugauggcagag

SEQ ID NO: 623089 - RNA, 22 nt, Human
guaugaaagcaucauuccugcu

SEQ ID NO: 623090 - RNA, 22 nt, Human
ccuggggagaagagcuuccccc

SEQ ID NO: 623091 - RNA, 22 nt, Human
gaauauuaguaucaguuauacc

SEQ ID NO: 623092 - RNA, 19 nt, Human
cagaguuugcaggcagagg

SEQ ID NO: 623093 - RNA, 22 nt, Human
ugcaggcuauccuuugcugcaa

SEQ ID NO: 623094 - RNA, 22 nt, Human
uagguucauauucuagaaucau

SEQ ID NO: 623095 - RNA, 22 nt, Human
augaaacaaaccucuauggagu

SEQ ID NO: 623096 - RNA, 22 nt, Human
gcagcccagcagggcccggagc

SEQ ID NO: 623097 - RNA, 22 nt, Human
aaauuuaaggaggugcucacuu

SEQ ID NO: 623098 - RNA, 19 nt, Human
cguccaggugcuggaagau

SEQ ID NO: 623099 - RNA, 22 nt, Human
uccaggagagguguggggacug

SEQ ID NO: 623100 - RNA, 22 nt, Human
ugcacagaugggcuuguucaua

SEQ ID NO: 623101 - RNA, 22 nt, Human
cagcccugcggagguguauacu

SEQ ID NO: 623102 - RNA, 22 nt, Human
aauucugaugauacugcauugu

SEQ ID NO: 623103 - RNA, 19 nt, Human
agcaguggagccaugccug

SEQ ID NO: 623104 - RNA, 22 nt, Human
uucugggccuccuaggacaggc

SEQ ID NO: 623105 - RNA, 22 nt, Human
uaauacaauggaguugggcccc

SEQ ID NO: 623106 - RNA, 22 nt, Human
uuugcaguagacaucuuauuuu

SEQ ID NO: 623107 - RNA, 19 nt, Human
ccuuggaguuccaggugga

SEQ ID NO: 623108 - RNA, 22 nt, Human
cugggagauucaggugaaguuu

SEQ ID NO: 623109 - RNA, 22 nt, Human
agaaaugcucaggucaacuuaa

SEQ ID NO: 623110 - RNA, 22 nt, Human
agagggcagcagcaacaacucu

SEQ ID NO: 623111 - RNA, 22 nt, Human
acacagccgugaaucugcuucu

SEQ ID NO: 623112 - RNA, 22 nt, Human
cugauacaaugcuaauaaauuu

SEQ ID NO: 623113 - RNA, 22 nt, Human
auaaugugauauuucauuuaca

SEQ ID NO: 623114 - RNA, 22 nt, Human
ugucugaguggugcaaggcuga

SEQ ID NO: 623115 - RNA, 22 nt, Human
cccuuggaagguagcuggcagu

SEQ ID NO: 623116 - RNA, 22 nt, Human
gcugcucuggcucugcaguguc

SEQ ID NO: 623117 - RNA, 22 nt, Human
ccuccuggaggcucuagggaaa

SEQ ID NO: 623118 - RNA, 22 nt, Human
ucucugucugagccuggcagac

SEQ ID NO: 623119 - RNA, 22 nt, Human
uugauuuuuuucuacuaugcgc

SEQ ID NO: 623120 - RNA, 22 nt, Human
ugagacagcagucagggaaaua

SEQ ID NO: 623121 - RNA, 22 nt, Human
aucuccaggauuuucacacuca

SEQ ID NO: 623122 - RNA, 22 nt, Human
aaucacaaaugcaaguugucac

SEQ ID NO: 623123 - RNA, 22 nt, Human
ccugacaggagaagcgcagcau

SEQ ID NO: 623124 - RNA, 22 nt, Human
acuccaguucucuuguuuauaa

SEQ ID NO: 623125 - RNA, 22 nt, Human
cccagggaggcccaggcucugc

SEQ ID NO: 623126 - RNA, 22 nt, Human
cagcuuuauuucacguguuugu

SEQ ID NO: 623127 - RNA, 22 nt, Human
acagacaaguaguucagacaag

SEQ ID NO: 623128 - RNA, 22 nt, Human
acaaaggugcgucccuucagcu

SEQ ID NO: 623129 - RNA, 22 nt, Human
cagauauaaauggaugugguag

SEQ ID NO: 623130 - RNA, 22 nt, Human
uuuacagcuagacauaccugag

SEQ ID NO: 623131 - RNA, 22 nt, Human
uacacaauucuggaugcauguc

SEQ ID NO: 623132 - RNA, 22 nt, Human
gacugcaaccuuagacuagaaa

SEQ ID NO: 623133 - RNA, 19 nt, Human
uccaggccauucccagagc

SEQ ID NO: 623134 - RNA, 21 nt, Human
gguguccagaggaguccccag

SEQ ID NO: 623135 - RNA, 22 nt, Human
auguuuuauauuuugcagcagu

SEQ ID NO: 623136 - RNA, 22 nt, Human
ugcagcucuguaugcugauuau

SEQ ID NO: 623137 - RNA, 22 nt, Human
cuucuuuuacaggucuuggguu

SEQ ID NO: 623138 - RNA, 22 nt, Human
ucuucaaaaaauauccaucagu

SEQ ID NO: 623139 - RNA, 16 nt, Human
gagaagagcccggcag

SEQ ID NO: 623140 - RNA, 22 nt, Human
auaugcauguacgugugcacaa

SEQ ID NO: 623141 - RNA, 22 nt, Human
gggcuccagaggcucacccugg

SEQ ID NO: 623142 - RNA, 22 nt, Human
uaacacuaagaaucuaaauuua

SEQ ID NO: 623143 - RNA, 22 nt, Human
aacuuuuacaaauugucaucau

SEQ ID NO: 623144 - RNA, 22 nt, Human
aagauacacguuguauugaaua

SEQ ID NO: 623145 - RNA, 22 nt, Human
cugugggcugaaagugcucccg

SEQ ID NO: 623146 - RNA, 22 nt, Human
uugugcucuguguuauuuaagg

SEQ ID NO: 623147 - RNA, 23 nt, Human
uggccaggguacuacacccaccc

SEQ ID NO: 623148 - RNA, 22 nt, Human
ccggggacuuaaagugaaggaa

SEQ ID NO: 623149 - RNA, 22 nt, Human
ugcacagacaacucuuucuaga

SEQ ID NO: 623150 - RNA, 22 nt, Human
aaaaaauuccauucugugccuu

SEQ ID NO: 623151 - RNA, 22 nt, Human
aaagaugaccguaugucagagc

SEQ ID NO: 623152 - RNA, 23 nt, Human
auaugucaugcaccagcacuuua

SEQ ID NO: 623153 - RNA, 22 nt, Human
uaauauuucuacccugcugccu

SEQ ID NO: 623154 - RNA, 22 nt, Human
guaagcaucugucucuucugca

SEQ ID NO: 623155 - RNA, 22 nt, Human
acagcuuugggcaaugcuauga

SEQ ID NO: 623156 - RNA, 22 nt, Human
cugcuucacuucgguugcauag

SEQ ID NO: 623157 - RNA, 22 nt, Human
aaggaaaugagguugauggaug

SEQ ID NO: 623158 - RNA, 22 nt, Human
uggcugaggcuuuucuuaaaga

SEQ ID NO: 623159 - RNA, 22 nt, Human
auaagguuggucuuaacuaccu

SEQ ID NO: 623160 - RNA, 22 nt, Human
ccacugaggccugggcccaggg

SEQ ID NO: 623161 - RNA, 22 nt, Human
uguuuccagaauguagcugcuu

SEQ ID NO: 623162 - RNA, 22 nt, Human
ucuguggaaauuuccugaggca

SEQ ID NO: 623163 - RNA, 22 nt, Human
ggcucugcaugugagugggugg

SEQ ID NO: 623164 - RNA, 23 nt, Human
gccaugaguucccuuucacuugu

SEQ ID NO: 623165 - RNA, 22 nt, Human
uaaauguaccuucugccuuacu

SEQ ID NO: 623166 - RNA, 22 nt, Human
aggaccugaaauucuugcuuuu

SEQ ID NO: 623167 - RNA, 19 nt, Human
uccuucagucagaucuggg

SEQ ID NO: 623168 - RNA, 22 nt, Human
aaagccaggcagccaagccagu

SEQ ID NO: 623169 - RNA, 22 nt, Human
ggugcaggaaaauuaccuggag

SEQ ID NO: 623170 - RNA, 22 nt, Human
agugcagagagcaauacucuac

SEQ ID NO: 623171 - RNA, 22 nt, Human
agcugcaacaucugcuuguccc

SEQ ID NO: 623172 - RNA, 22 nt, Human
uagaauucaagauucaacaggc

SEQ ID NO: 623173 - RNA, 22 nt, Human
cuuugaaagcucccaggacuua

SEQ ID NO: 623174 - RNA, 22 nt, Human
gcucugcccaggaccguccuug

SEQ ID NO: 623175 - RNA, 22 nt, Human
ucaugcaaagccaauuccagcu

SEQ ID NO: 623176 - RNA, 22 nt, Human
uccaggucccuggggagauuuu

SEQ ID NO: 623177 - RNA, 19 nt, Human
gagcccucuccauggccac

SEQ ID NO: 623178 - RNA, 22 nt, Human
acccagagaacugaggcaugaa

SEQ ID NO: 623179 - RNA, 23 nt, Human
agguucagcuuucuuacucuggg

SEQ ID NO: 623180 - RNA, 22 nt, Human
cucccaagauaaauaaggcagu

SEQ ID NO: 623181 - RNA, 22 nt, Human
uccugaagaacgaagucaugua

SEQ ID NO: 623182 - RNA, 22 nt, Human
uacagaacugaaguagugaaaa

SEQ ID NO: 623183 - RNA, 22 nt, Human
uuucauugaugggugauagaaa

SEQ ID NO: 623184 - RNA, 22 nt, Human
ugcuggcuggccuggccuggac

SEQ ID NO: 623185 - RNA, 22 nt, Human
ccugccagcccccauagagaca

SEQ ID NO: 623186 - RNA, 22 nt, Human
gcagcagcucagccgggcacug

SEQ ID NO: 623187 - RNA, 22 nt, Human
gcuacagacugagcauggcucu

SEQ ID NO: 623188 - RNA, 22 nt, Human
uccuggacucaggaccacagga

SEQ ID NO: 623189 - RNA, 22 nt, Human
aggguggcaccacauaucauag

SEQ ID NO: 623190 - RNA, 22 nt, Human
gguggagcugugaguagaaucu

SEQ ID NO: 623191 - RNA, 22 nt, Human
ccaggcauggggagagccagau

SEQ ID NO: 623192 - RNA, 22 nt, Human
ugcagaauguggacaguggguu

SEQ ID NO: 623193 - RNA, 22 nt, Human
ggcuagggaaauccugauccaa

SEQ ID NO: 623194 - RNA, 22 nt, Human
uuauugcuggcaccuucaauuc

SEQ ID NO: 623195 - RNA, 22 nt, Human
gaaaggagggaaacagagcggu

SEQ ID NO: 623196 - RNA, 22 nt, Human
acagaauuaacauuugaugaau

SEQ ID NO: 623197 - RNA, 22 nt, Human
cuagugaacgugguacuaugga

SEQ ID NO: 623198 - RNA, 22 nt, Human
gccaggaacacaaugccaagcu

SEQ ID NO: 623199 - RNA, 22 nt, Human
ugaccuuucaacccuucuuggc

SEQ ID NO: 623200 - RNA, 22 nt, Human
accagcuguuaggcuuggugcu

SEQ ID NO: 623201 - RNA, 22 nt, Human
cucuguccuugcacaguuccua

SEQ ID NO: 623202 - RNA, 22 nt, Human
cuggagagaccgaaagaggcug

SEQ ID NO: 623203 - RNA, 22 nt, Human
gugucugaguuuggaaagucca

SEQ ID NO: 623204 - RNA, 22 nt, Human
gagagcugucagcguagcaccg

SEQ ID NO: 623205 - RNA, 22 nt, Human
aaacaaugagcuuuuacacacu

SEQ ID NO: 623206 - RNA, 22 nt, Human
gucugugugcacagcgagugcc

SEQ ID NO: 623207 - RNA, 22 nt, Human
cuggaguguaaagagcauagaa

SEQ ID NO: 623208 - RNA, 22 nt, Human
acuggcaguggcagcagaaaga

SEQ ID NO: 623209 - RNA, 22 nt, Human
uuuagaagacagaugcacagcc

SEQ ID NO: 623210 - RNA, 22 nt, Human
cuguggagcagggcagggucac

SEQ ID NO: 623211 - RNA, 22 nt, Human
ucuggccacccgaggccccugc

SEQ ID NO: 623212 - RNA, 20 nt, Human
agaaguuuggggguguggag

SEQ ID NO: 623213 - RNA, 22 nt, Human
ggagggcaacuuuucaguaggu

SEQ ID NO: 623214 - RNA, 22 nt, Human
cgcugauaaacgucacguuccc

SEQ ID NO: 623215 - RNA, 22 nt, Human
ccugaauacuggugcugaaagu

SEQ ID NO: 623216 - RNA, 22 nt, Human
ggaggucauagcugugcaggua

SEQ ID NO: 623217 - RNA, 22 nt, Human
ucaguuugaauguuagcacagu

SEQ ID NO: 623218 - RNA, 22 nt, Human
ccaccaggacagcccugagggg

SEQ ID NO: 623219 - RNA, 22 nt, Human
cucugccugcccaccgacccau

SEQ ID NO: 623220 - RNA, 19 nt, Human
aggacucuggaggcaugag

SEQ ID NO: 623221 - RNA, 22 nt, Human
aauggcuuaaguauaagugaga

SEQ ID NO: 623222 - RNA, 22 nt, Human
uccccagauggccagcuacaug

SEQ ID NO: 623223 - RNA, 22 nt, Human
uuguaacuguggguugauuaga

SEQ ID NO: 623224 - RNA, 22 nt, Human
gggauggggggaagcguccaug

SEQ ID NO: 623225 - RNA, 22 nt, Human
acugggaggcaaagagcaagga

SEQ ID NO: 623226 - RNA, 22 nt, Human
uggacaacauagugagaccuca

SEQ ID NO: 623227 - RNA, 23 nt, Human
aacacaaagcugauuccaguggc

SEQ ID NO: 623228 - RNA, 22 nt, Human
uaguauuuauaaucaugcuuaa

SEQ ID NO: 623229 - RNA, 22 nt, Human
gaaaucaauuucuugguugaua

SEQ ID NO: 623230 - RNA, 22 nt, Human
aagaagugguuggaagaagcau

SEQ ID NO: 623231 - RNA, 22 nt, Human
uggcucugcagcagugugcgug

SEQ ID NO: 623232 - RNA, 22 nt, Human
ugucuugacuuuagagccagga

SEQ ID NO: 623233 - RNA, 22 nt, Human
uugcuucagucagugcugccca

SEQ ID NO: 623234 - RNA, 22 nt, Human
guguaugcagaaacaugcaaag

SEQ ID NO: 623235 - RNA, 22 nt, Human
ucacuguaauagguuugaagau

SEQ ID NO: 623236 - RNA, 22 nt, Human
cagcuggcauaccugggcccgg

SEQ ID NO: 623237 - RNA, 22 nt, Human
gaccauuucuaggaaucagacu

SEQ ID NO: 623238 - RNA, 22 nt, Human
aagaguuuaccagugcugcuuc

SEQ ID NO: 623239 - RNA, 22 nt, Human
agaacacuuuuaaauggcuugu

SEQ ID NO: 623240 - RNA, 22 nt, Human
aaauggauggaauugacauuua

SEQ ID NO: 623241 - RNA, 22 nt, Human
augcaaaugcuagagaauguug

SEQ ID NO: 623242 - RNA, 22 nt, Human
uacauuguuuuuucuugccauc

SEQ ID NO: 623243 - RNA, 22 nt, Human
caguaaauuuuauuugugggug

SEQ ID NO: 623244 - RNA, 22 nt, Human
uuuaugucaaaacuacaguugg

SEQ ID NO: 623245 - RNA, 22 nt, Human
ucagcagugugcuuggaaugga

SEQ ID NO: 623246 - RNA, 20 nt, Human
acuuggaacucauuuuucuu

SEQ ID NO: 623247 - RNA, 22 nt, Human
gggaagggagggccuccaguca

SEQ ID NO: 623248 - RNA, 19 nt, Human
ggagaagcccaggaauccu

SEQ ID NO: 623249 - RNA, 22 nt, Human
gacuguacgucauugaaggcca

SEQ ID NO: 623250 - RNA, 22 nt, Human
cugcuguccaggagugcccugu

SEQ ID NO: 623251 - RNA, 22 nt, Human
uaggaaauugacaccugcuuga

SEQ ID NO: 623252 - RNA, 22 nt, Human
uaagaugguuguagauggacug

SEQ ID NO: 623253 - RNA, 22 nt, Human
ucacccagauuacauccuguca

SEQ ID NO: 623254 - RNA, 22 nt, Human
uguacuuccccaaugacagcac

SEQ ID NO: 623255 - RNA, 22 nt, Human
cccaggaaugagcaggcagggg

SEQ ID NO: 623256 - RNA, 22 nt, Human
ggagagggggcucccugcuugg

SEQ ID NO: 623257 - RNA, 22 nt, Human
uggccagaguugaggggguuuc

SEQ ID NO: 623258 - RNA, 22 nt, Human
agcugaauguucucagaccaga

SEQ ID NO: 623259 - RNA, 21 nt, Human
ugagagacugguggauacagg

SEQ ID NO: 623260 - RNA, 22 nt, Human
gagaggcauggaacagauucuu

SEQ ID NO: 623261 - RNA, 22 nt, Human
gcaggaguuaggcgucguggau

SEQ ID NO: 623262 - RNA, 22 nt, Human
ucccugugccuauaugugcuga

SEQ ID NO: 623263 - RNA, 22 nt, Human
auguuuuaaauauguguguaaa

SEQ ID NO: 623264 - RNA, 22 nt, Human
ugcaaaucauaaacaauagugu

SEQ ID NO: 623265 - RNA, 22 nt, Human
gauauauuuuccauggucugca

SEQ ID NO: 623266 - RNA, 22 nt, Human
gggucagggcugccugggcuca

SEQ ID NO: 623267 - RNA, 22 nt, Human
ugucuacugagaagcuaugcaa

SEQ ID NO: 623268 - RNA, 22 nt, Human
uguaugaaagaacaagggcuua

SEQ ID NO: 623269 - RNA, 22 nt, Human
uuacuuuggauggucaagaaag

SEQ ID NO: 623270 - RNA, 22 nt, Human
uucuaacuccacuucccacucc

SEQ ID NO: 623271 - RNA, 22 nt, Human
ugaaggaauggaggaucagagc

SEQ ID NO: 623272 - RNA, 22 nt, Human
ggguacaguucuuccaguguca

SEQ ID NO: 623273 - RNA, 20 nt, Human
caguccaaucagaggccacc

SEQ ID NO: 623274 - RNA, 22 nt, Human
aggaaauaagggcacuucagau

SEQ ID NO: 623275 - RNA, 22 nt, Human
guuuuuucaugaguaguuaucu

SEQ ID NO: 623276 - RNA, 22 nt, Human
aggucaaggccaaaagaguggu

SEQ ID NO: 623277 - RNA, 22 nt, Human
uaaaugcaaugugcuuuaccag

SEQ ID NO: 623278 - RNA, 22 nt, Human
aggcugugugcuccuuaugaga

SEQ ID NO: 623279 - RNA, 22 nt, Human
ucuccaggugcuaagugugccu

SEQ ID NO: 623280 - RNA, 22 nt, Human
acauggaauguguacuaaguua

SEQ ID NO: 623281 - RNA, 22 nt, Human
auuuacacugguucucagagcu

SEQ ID NO: 623282 - RNA, 22 nt, Human
uucugcaggaugcucugguggu

SEQ ID NO: 623283 - RNA, 22 nt, Human
agguuugguuugacaagacuga

SEQ ID NO: 623284 - RNA, 22 nt, Human
aggggccuggcacugagcuggc

SEQ ID NO: 623285 - RNA, 22 nt, Human
acauuuugaaagggaaauuguu

SEQ ID NO: 623286 - RNA, 22 nt, Human
aggcaggaacccugugugcgcc

SEQ ID NO: 623287 - RNA, 22 nt, Human
ugaggaaugcugagcagaggaa

SEQ ID NO: 623288 - RNA, 22 nt, Human
ucaggagggaguguggauagag

SEQ ID NO: 623289 - RNA, 22 nt, Human
auucaguuaagggucuugagau

SEQ ID NO: 623290 - RNA, 22 nt, Human
gcaguguuucaaaucaaaggca

SEQ ID NO: 623291 - RNA, 22 nt, Human
ugagauaacaaaauuaucuuca

SEQ ID NO: 623292 - RNA, 22 nt, Human
acaaguuuuggaagucuuaagg

SEQ ID NO: 623293 - RNA, 22 nt, Human
ggcugggucccagcugggagga

SEQ ID NO: 623294 - RNA, 22 nt, Human
guggccaagagauaaaauugug

SEQ ID NO: 623295 - RNA, 22 nt, Human
ucagaggagaccaaggggaaua

SEQ ID NO: 623296 - RNA, 22 nt, Human
auaacauggaguuugucauuua

SEQ ID NO: 623297 - RNA, 20 nt, Human
aagcaucuggauguagcaau

SEQ ID NO: 623298 - RNA, 22 nt, Human
cugugcuuguguucauuguuaa

SEQ ID NO: 623299 - RNA, 22 nt, Human
cccuaggguuuggccagagccc

SEQ ID NO: 623300 - RNA, 22 nt, Human
gagauuuaauuggauuaacuua

SEQ ID NO: 623301 - RNA, 20 nt, Human
ucugagguaugauagggucu

SEQ ID NO: 623302 - RNA, 22 nt, Human
uguagcacguuaguguuagagc

SEQ ID NO: 623303 - RNA, 22 nt, Human
acaagucuuuuucaugucuucu

SEQ ID NO: 623304 - RNA, 22 nt, Human
ucaguguuugguuucagaauug

SEQ ID NO: 623305 - RNA, 22 nt, Human
cauccaaacucucauuaucugu

SEQ ID NO: 623306 - RNA, 22 nt, Human
uugacagcaaagauugugccua

SEQ ID NO: 623307 - RNA, 22 nt, Human
cccucagucuggcugggaagac

SEQ ID NO: 623308 - RNA, 22 nt, Human
uuaugcagauggcaugaggagg

SEQ ID NO: 623309 - RNA, 22 nt, Human
gauucugcugucccuaagugcc

SEQ ID NO: 623310 - RNA, 19 nt, Human
agggaaggauucugucauu

SEQ ID NO: 623311 - RNA, 22 nt, Human
augaggcagguggaggcugcca

SEQ ID NO: 623312 - RNA, 22 nt, Human
cauccagggcagccauggccug

SEQ ID NO: 623313 - RNA, 22 nt, Human
acacaugcacaacaguucuuuc

SEQ ID NO: 623314 - RNA, 22 nt, Human
guucuuggaccagcagcauuga

SEQ ID NO: 623315 - RNA, 19 nt, Human
uccagcuguuuugagucac

SEQ ID NO: 623316 - RNA, 22 nt, Human
uccugagcuuuacaguaaggac

SEQ ID NO: 623317 - RNA, 22 nt, Human
aaauggaagaagugcaauacug

SEQ ID NO: 623318 - RNA, 22 nt, Human
ggaaagagcuaaaagggugaga

SEQ ID NO: 623319 - RNA, 22 nt, Human
caaaaugugagucccaccucaa

SEQ ID NO: 623320 - RNA, 22 nt, Human
aaggguuugucucccucaaggc

SEQ ID NO: 623321 - RNA, 22 nt, Human
uaguacacuaccaucagguuuu

SEQ ID NO: 623322 - RNA, 22 nt, Human
aaaaucucauuaucaggaaggg

SEQ ID NO: 623323 - RNA, 22 nt, Human
ccagggccuacagcuuaagucc

SEQ ID NO: 623324 - RNA, 22 nt, Human
aguggugcugcgcgcggagcuc

SEQ ID NO: 623325 - RNA, 22 nt, Human
aaagcuucuauucacuuacuug

SEQ ID NO: 623326 - RNA, 22 nt, Human
acucuauaaagauaccucaauu

SEQ ID NO: 623327 - RNA, 20 nt, Human
aggcacuggauuucuuauau

SEQ ID NO: 623328 - RNA, 22 nt, Human
ugcaucuguucauucguuccca

SEQ ID NO: 623329 - RNA, 20 nt, Human
aaacugucugucaguaucua

SEQ ID NO: 623330 - RNA, 22 nt, Human
ggcggagguugcaguaagccga

SEQ ID NO: 623331 - RNA, 22 nt, Human
ggacagcauucuacuguaggca

SEQ ID NO: 623332 - RNA, 22 nt, Human
ggcacucaauaaauguugccaa

SEQ ID NO: 623333 - RNA, 22 nt, Human
uacaguaauaaaaugagcuaca

SEQ ID NO: 623334 - RNA, 22 nt, Human
acagcagggaauaugggaauug

SEQ ID NO: 623335 - RNA, 22 nt, Human
cacugcccaggcacccaucuug

SEQ ID NO: 623336 - RNA, 22 nt, Human
agaugcagacuugguucaggca

SEQ ID NO: 623337 - RNA, 22 nt, Human
uagggcucuggugggcucuguu

SEQ ID NO: 623338 - RNA, 22 nt, Human
cgggcagcggcguggccauggu

SEQ ID NO: 623339 - RNA, 22 nt, Human
cuuggaacuuaguaauaugaca

SEQ ID NO: 623340 - RNA, 22 nt, Human
aagcaauacaaguggucauuga

SEQ ID NO: 623341 - RNA, 22 nt, Human
gucuacacugaauuuccacaga

SEQ ID NO: 623342 - RNA, 22 nt, Human
acaguggaguugggguagcccu

SEQ ID NO: 623343 - RNA, 22 nt, Human
uagacuuuuaagucccucuuua

SEQ ID NO: 623344 - RNA, 22 nt, Human
uauaggcucuuguuaaccuuuu

SEQ ID NO: 623345 - RNA, 22 nt, Human
uucaagucaaggaaagaggucu

SEQ ID NO: 623346 - RNA, 22 nt, Human
ugggccagcaauugcugcucag

SEQ ID NO: 623347 - RNA, 20 nt, Human
gccaaggaggagaaacaggc

SEQ ID NO: 623348 - RNA, 22 nt, Human
aaugucaauuaccagaacagaa

SEQ ID NO: 623349 - RNA, 22 nt, Human
agcacaguuuucauugcagggu

SEQ ID NO: 623350 - RNA, 22 nt, Human
gccugggacugcagauccccag

SEQ ID NO: 623351 - RNA, 22 nt, Human
acagcuggaggucugugagcac

SEQ ID NO: 623352 - RNA, 22 nt, Human
uucccuggcucuucuacaucgu

SEQ ID NO: 623353 - RNA, 22 nt, Human
ucugaaauccuuuaucuuggcu

SEQ ID NO: 623354 - RNA, 22 nt, Human
ucccuugguaauucuguuccuu

SEQ ID NO: 623355 - RNA, 21 nt, Human
uggcaggcagcuggaagcuug

SEQ ID NO: 623356 - RNA, 22 nt, Human
ccuccuggguucaagcgauucu

SEQ ID NO: 623357 - RNA, 22 nt, Human
ucuguggauuuuaguguucaug

SEQ ID NO: 623358 - RNA, 21 nt, Human
ugaaugcuucgucauccuggc

SEQ ID NO: 623359 - RNA, 22 nt, Human
aaagaauaguuaaguuuagggc

SEQ ID NO: 623360 - RNA, 22 nt, Human
agccagugcaacagcagugaag

SEQ ID NO: 623361 - RNA, 22 nt, Human
ugccucagucuaaagucucuca

SEQ ID NO: 623362 - RNA, 22 nt, Human
uagcacagggcauaugcggugg

SEQ ID NO: 623363 - RNA, 22 nt, Human
cuggacagaaaaggccacugga

SEQ ID NO: 623364 - RNA, 22 nt, Human
ggcagccagagggcagcuggau

SEQ ID NO: 623365 - RNA, 22 nt, Human
aggcaggcccucuggaaaggua

SEQ ID NO: 623366 - RNA, 22 nt, Human
acuuuacuacauccacagaugg

SEQ ID NO: 623367 - RNA, 22 nt, Human
gaggccugaaaggggaccuaug

SEQ ID NO: 623368 - RNA, 22 nt, Human
cuguucuucuaguccacugaca

SEQ ID NO: 623369 - RNA, 22 nt, Human
uucauugaagcacaagugaucu

SEQ ID NO: 623370 - RNA, 21 nt, Human
ucuggcuuucauuccccuucu

SEQ ID NO: 623371 - RNA, 22 nt, Human
ucauccaguuguggagagggaa

SEQ ID NO: 623372 - RNA, 22 nt, Human
caggauggucucgaucuccuga

SEQ ID NO: 623373 - RNA, 18 nt, Human
uguaaacacuuucauucu

SEQ ID NO: 623374 - RNA, 22 nt, Human
gcaccugcuggaaucagucugu

SEQ ID NO: 623375 - RNA, 22 nt, Human
ccuucaaguuccuggucccugg

SEQ ID NO: 623376 - RNA, 22 nt, Human
uguggcacauacacaggagggc

SEQ ID NO: 623377 - RNA, 22 nt, Human
acauuuauauaacucacuagga

SEQ ID NO: 623378 - RNA, 22 nt, Human
auauucacaguaaguguagcag

SEQ ID NO: 623379 - RNA, 22 nt, Human
aucugguucuucuuaggcauca

SEQ ID NO: 623380 - RNA, 22 nt, Human
uuuauuccaguguuucucaaau

SEQ ID NO: 623381 - RNA, 22 nt, Human
gugccucugagcucugcuacag

SEQ ID NO: 623382 - RNA, 22 nt, Human
uagcaaagggaaagaagggccu

SEQ ID NO: 623383 - RNA, 22 nt, Human
uaguccugaccuugccaccagc

SEQ ID NO: 623384 - RNA, 22 nt, Human
ggaggcucuuauuuguucaaca

SEQ ID NO: 623385 - RNA, 22 nt, Human
ucacagaaguugaauuugcaug

SEQ ID NO: 623386 - RNA, 22 nt, Human
gaggcagcaggcugaggaggau

SEQ ID NO: 623387 - RNA, 22 nt, Human
cagcacuuuagcggaggcauca

SEQ ID NO: 623388 - RNA, 21 nt, Human
aucuggaagaacugguaagug

SEQ ID NO: 623389 - RNA, 16 nt, Human
uggaaggggucuccgg

SEQ ID NO: 623390 - RNA, 22 nt, Human
aaaagucuuggggaaggccagg

SEQ ID NO: 623391 - RNA, 22 nt, Human
aggccagcagcaugacggcauc

SEQ ID NO: 623392 - RNA, 22 nt, Human
ucuaaaaaagucuguucacuug

SEQ ID NO: 623393 - RNA, 19 nt, Human
cuucagcaucuccggagcu

SEQ ID NO: 623394 - RNA, 22 nt, Human
ccaggcccccgagcagaagaca

SEQ ID NO: 623395 - RNA, 22 nt, Human
gucucagggacugcuucugggg

SEQ ID NO: 623396 - RNA, 22 nt, Human
uuauugacuuguuuguccuggu

SEQ ID NO: 623397 - RNA, 22 nt, Human
uuuccaaaggcuaaacucaguu

SEQ ID NO: 623398 - RNA, 22 nt, Human
cucaggaguuggaggcuacagu

SEQ ID NO: 623399 - RNA, 22 nt, Human
ucugggcugugggaauucaaca

SEQ ID NO: 623400 - RNA, 22 nt, Human
gcuggcucuuuuugccgggcuc

SEQ ID NO: 623401 - RNA, 22 nt, Human
uucuggaagcugggcagcaccc

SEQ ID NO: 623402 - RNA, 22 nt, Human
uucuacauucauguauuaccuc

SEQ ID NO: 623403 - RNA, 22 nt, Human
ugucucagauacgccaucaagg

SEQ ID NO: 623404 - RNA, 22 nt, Human
gagcccugcggagccccgaggc

SEQ ID NO: 623405 - RNA, 22 nt, Human
uuucagaauaucgauucaguga

SEQ ID NO: 623406 - RNA, 22 nt, Human
ggccaugggaagagguggagag

SEQ ID NO: 623407 - RNA, 22 nt, Human
aacccaggagacagguugcagu

SEQ ID NO: 623408 - RNA, 20 nt, Human
uuuuucugggcuuccauagc

SEQ ID NO: 623409 - RNA, 22 nt, Human
ucucugggagccaggaugacac

SEQ ID NO: 623410 - RNA, 22 nt, Human
uagugcuuuggagcuuucuccu

SEQ ID NO: 623411 - RNA, 22 nt, Human
cuggacucacuauggcuucaga

SEQ ID NO: 623412 - RNA, 22 nt, Human
ggugcagagcagugucagagca

SEQ ID NO: 623413 - RNA, 22 nt, Human
guauauaugugugaacauguau

SEQ ID NO: 623414 - RNA, 23 nt, Human
ugcguacggcugccagugugacu

SEQ ID NO: 623415 - RNA, 22 nt, Human
cugggcuuugguacugugauua

SEQ ID NO: 623416 - RNA, 22 nt, Human
augcuucuuguauuuggcugac

SEQ ID NO: 623417 - RNA, 22 nt, Human
ugucugucuuuagugagauugc

SEQ ID NO: 623418 - RNA, 22 nt, Human
gugcuccaggucgcucagagag

SEQ ID NO: 623419 - RNA, 22 nt, Human
cuguacaggagacgucugugca

SEQ ID NO: 623420 - RNA, 22 nt, Human
uguacagauugaucauggagag

SEQ ID NO: 623421 - RNA, 22 nt, Human
ucuggcucauacaagccugcaa

SEQ ID NO: 623422 - RNA, 22 nt, Human
uaugcccagcuuaaaguacaca

SEQ ID NO: 623423 - RNA, 22 nt, Human
ccaggagccacucaggcccaca

SEQ ID NO: 623424 - RNA, 22 nt, Human
ucucuucuagcuucuugugguu

SEQ ID NO: 623425 - RNA, 22 nt, Human
ccucucuguguggccucuccau

SEQ ID NO: 623426 - RNA, 22 nt, Human
guuaacauuucuaggugcaggg

SEQ ID NO: 623427 - RNA, 20 nt, Human
uccacaucuuuugagaugug

SEQ ID NO: 623428 - RNA, 22 nt, Human
uucugucucuguguuuacauua

SEQ ID NO: 623429 - RNA, 22 nt, Human
uuuauuuauccuucuggauugc

SEQ ID NO: 623430 - RNA, 22 nt, Human
aaggaaccuggaguagagggag

SEQ ID NO: 623431 - RNA, 22 nt, Human
uuuacagagaauguacauaaag

SEQ ID NO: 623432 - RNA, 22 nt, Human
uuucacaggaguccuuucuaua

SEQ ID NO: 623433 - RNA, 22 nt, Human
cuggcaggucucgcugacgugu

SEQ ID NO: 623434 - RNA, 22 nt, Human
guucauucaucaaauauuuacu

SEQ ID NO: 623435 - RNA, 22 nt, Human
ugguauucuuucuguagaucau

SEQ ID NO: 623436 - RNA, 22 nt, Human
agccagggagguggagguugca

SEQ ID NO: 623437 - RNA, 22 nt, Human
ugugaaaugaguauauuugaau

SEQ ID NO: 623438 - RNA, 22 nt, Human
ggcuucuggugggagcaugacu

SEQ ID NO: 623439 - RNA, 22 nt, Human
acacauguauggcacuuacauu

SEQ ID NO: 623440 - RNA, 22 nt, Human
ccugucuguccucucaugagcc

SEQ ID NO: 623441 - RNA, 22 nt, Human
gcucugccagacacuguggcca

SEQ ID NO: 623442 - RNA, 22 nt, Human
aaagguuuugcccuggguauuc

SEQ ID NO: 623443 - RNA, 22 nt, Human
aacagcauaccaauguacauau

SEQ ID NO: 623444 - RNA, 22 nt, Human
agaucagaguggauugugcugc

SEQ ID NO: 623445 - RNA, 22 nt, Human
ucuguaaucuuccccagcucag

SEQ ID NO: 623446 - RNA, 22 nt, Human
agagacaaugccaaugcacacg

SEQ ID NO: 623447 - RNA, 22 nt, Human
agagcuguucagcagccagguu

SEQ ID NO: 623448 - RNA, 17 nt, Human
auguggcuaagcugcug

SEQ ID NO: 623449 - RNA, 17 nt, Human
ugcucuguggucuuuua

SEQ ID NO: 623450 - RNA, 22 nt, Human
cacuguugaagauacuuccucu

SEQ ID NO: 623451 - RNA, 22 nt, Human
uaagcaaugagauaaucauggg

SEQ ID NO: 623452 - RNA, 22 nt, Human
ugguggcaaaguacaaagugac

SEQ ID NO: 623453 - RNA, 22 nt, Human
agucaccaucuguggcagccug

SEQ ID NO: 623454 - RNA, 22 nt, Human
aaaaugcugggaaaguuggaau

SEQ ID NO: 623455 - RNA, 23 nt, Human
caacagcuguuagauaugggcuu

SEQ ID NO: 623456 - RNA, 22 nt, Human
agcccaggucuggcccagccug

SEQ ID NO: 623457 - RNA, 22 nt, Human
cagucacuggaauagcugagga

SEQ ID NO: 623458 - RNA, 22 nt, Human
ggccuaggauucugcauuucua

SEQ ID NO: 623459 - RNA, 22 nt, Human
ucuuucugcacuuaguggggcu

SEQ ID NO: 623460 - RNA, 22 nt, Human
uggaagagguggaaguggcuuc

SEQ ID NO: 623461 - RNA, 22 nt, Human
gcuuugcuuccuguucuagccu

SEQ ID NO: 623462 - RNA, 22 nt, Human
gggcagguuggcaucccgggca

SEQ ID NO: 623463 - RNA, 22 nt, Human
ggggacccucaggacugcgucu

SEQ ID NO: 623464 - RNA, 22 nt, Human
aauauguucaaaauagaucacu

SEQ ID NO: 623465 - RNA, 17 nt, Human
ggcagccucaggcguuu

SEQ ID NO: 623466 - RNA, 22 nt, Human
gggcaggcugagcaugucaccu

SEQ ID NO: 623467 - RNA, 22 nt, Human
acuauacugucucuuauagaua

SEQ ID NO: 623468 - RNA, 22 nt, Human
gcccuccaccuggucucucugg

SEQ ID NO: 623469 - RNA, 22 nt, Human
acagccuguguaccagcuggga

SEQ ID NO: 623470 - RNA, 22 nt, Human
uguguguguccucauuugcaga

SEQ ID NO: 623471 - RNA, 22 nt, Human
uuucagagggcagaucuggggc

SEQ ID NO: 623472 - RNA, 22 nt, Human
uuacaguagcuuuauuuggagu

SEQ ID NO: 623473 - RNA, 22 nt, Human
gggccaugagagguucaucaac

SEQ ID NO: 623474 - RNA, 22 nt, Human
gugcugagcacaccuuggagca

SEQ ID NO: 623475 - RNA, 19 nt, Human
aagaagcaauaagcuguga

SEQ ID NO: 623476 - RNA, 22 nt, Human
guaugaaguuggacuguauaaa

SEQ ID NO: 623477 - RNA, 21 nt, Human
gcuggcugucccagggaagca

SEQ ID NO: 623478 - RNA, 22 nt, Human
ccagggcugagcugugaccaug

SEQ ID NO: 623479 - RNA, 22 nt, Human
gcuggagccauuggcuuggccu

SEQ ID NO: 623480 - RNA, 22 nt, Human
ugucucagggcagcagcagggg

SEQ ID NO: 623481 - RNA, 22 nt, Human
ccucagaagcucaaggacauug

SEQ ID NO: 623482 - RNA, 22 nt, Human
ugaaaauggccugaagaagcaa

SEQ ID NO: 623483 - RNA, 22 nt, Human
guuaaagaguuuggcuuucuuc

SEQ ID NO: 623484 - RNA, 22 nt, Human
acagaauuaggagauccucuug

SEQ ID NO: 623485 - RNA, 22 nt, Human
ucacaucauuaagacuucuccu

SEQ ID NO: 623486 - RNA, 22 nt, Human
uguguuggcuugccuguuaggc

SEQ ID NO: 623487 - RNA, 22 nt, Human
uaucaagagucucuacauuaau

SEQ ID NO: 623488 - RNA, 22 nt, Human
ugaacucucccccauugcccuc

SEQ ID NO: 623489 - RNA, 22 nt, Human
ucagggucagauuccagagccu

SEQ ID NO: 623490 - RNA, 22 nt, Human
aaggcagcuucaccacagcauu

SEQ ID NO: 623491 - RNA, 22 nt, Human
ugaggaugguguuggagagggc

SEQ ID NO: 623492 - RNA, 19 nt, Human
gagaggccugugcuugaag

SEQ ID NO: 623493 - RNA, 22 nt, Human
caggaaguggcugggcuggguu

SEQ ID NO: 623494 - RNA, 22 nt, Human
gugcuuugucuucaggaucaua

SEQ ID NO: 623495 - RNA, 22 nt, Human
aguguucagugauugucaaccg

SEQ ID NO: 623496 - RNA, 22 nt, Human
gaagcagugugaacccauguaa

SEQ ID NO: 623497 - RNA, 22 nt, Human
uuagggaaauaaaauuaucagu

SEQ ID NO: 623498 - RNA, 22 nt, Human
acaaugaaagguauucugaacu

SEQ ID NO: 623499 - RNA, 22 nt, Human
uggaaggagacugggaagugug

SEQ ID NO: 623500 - RNA, 22 nt, Human
caggcugucugaauggaggccc

SEQ ID NO: 623501 - RNA, 22 nt, Human
cucaaggaaagucuggagaaga

SEQ ID NO: 623502 - RNA, 22 nt, Human
cagggccagcccacuagcgagg

SEQ ID NO: 623503 - RNA, 22 nt, Human
cuauuuguacagcauucgaguu

SEQ ID NO: 623504 - RNA, 22 nt, Human
uacauucagaagaauggacacg

SEQ ID NO: 623505 - RNA, 22 nt, Human
auggaguaauauuaacauguua

SEQ ID NO: 623506 - RNA, 22 nt, Human
guauuuggugaugccuccaaac

SEQ ID NO: 623507 - RNA, 22 nt, Human
cugggcuguuuguucuggucuc

SEQ ID NO: 623508 - RNA, 22 nt, Human
ucaacucacaagaaugagcaag

SEQ ID NO: 623509 - RNA, 22 nt, Human
ggauucuacugaucagcaccac

SEQ ID NO: 623510 - RNA, 22 nt, Human
ccagagucccuugcagcucagu

SEQ ID NO: 623511 - RNA, 22 nt, Human
aaaugcaccuugcugugagacu

SEQ ID NO: 623512 - RNA, 22 nt, Human
auuuugcugcuaugccuugcaa

SEQ ID NO: 623513 - RNA, 22 nt, Human
uuuauuuaccuuauguccucca

SEQ ID NO: 623514 - RNA, 22 nt, Human
auuucagcaaaguuuugauugg

SEQ ID NO: 623515 - RNA, 22 nt, Human
ugaaagaguuugacaugauucu

SEQ ID NO: 623516 - RNA, 22 nt, Human
ucaggaaaggcagagugucugu

SEQ ID NO: 623517 - RNA, 22 nt, Human
uccuuggagucaugauggaggu

SEQ ID NO: 623518 - RNA, 22 nt, Human
aggcacuguggguguggccgga

SEQ ID NO: 623519 - RNA, 22 nt, Human
gauaaauggcugaagaaauagu

SEQ ID NO: 623520 - RNA, 22 nt, Human
augccaaauucucagccucuuu

SEQ ID NO: 623521 - RNA, 22 nt, Human
uuucuuuuccaauaucccuacu

SEQ ID NO: 623522 - RNA, 22 nt, Human
auagaaaacagauguccuuaaa

SEQ ID NO: 623523 - RNA, 22 nt, Human
gcuggcaggguucucacugaaa

SEQ ID NO: 623524 - RNA, 22 nt, Human
gagucucugcuauguuuucucu

SEQ ID NO: 623525 - RNA, 20 nt, Human
uccuucugaggugaggagga

SEQ ID NO: 623526 - RNA, 22 nt, Human
cugcucugagaggcucuuccua

SEQ ID NO: 623527 - RNA, 22 nt, Human
auucaguguggacccauuuaaa

SEQ ID NO: 623528 - RNA, 22 nt, Human
uggcagaggcucugugauguug

SEQ ID NO: 623529 - RNA, 22 nt, Human
auucagucaaaaaugauggaga

SEQ ID NO: 623530 - RNA, 22 nt, Human
ucugggcugcuucagccuucgc

SEQ ID NO: 623531 - RNA, 22 nt, Human
uggcaggaaaguaacagagcac

SEQ ID NO: 623532 - RNA, 22 nt, Human
aucagagugggucuggcaugag

SEQ ID NO: 623533 - RNA, 22 nt, Human
accaccccagaauuuuucaagg

SEQ ID NO: 623534 - RNA, 22 nt, Human
gguagcugcagcaggcuggcaa

SEQ ID NO: 623535 - RNA, 20 nt, Human
auuguacuucuguugauggu

SEQ ID NO: 623536 - RNA, 22 nt, Human
ucagaacuacauggacauguua

SEQ ID NO: 623537 - RNA, 22 nt, Human
auuacaguggacagcuaugcac

SEQ ID NO: 623538 - RNA, 21 nt, Human
aaucaagaguacugguguggc

SEQ ID NO: 623539 - RNA, 22 nt, Human
uguaaauggucagauaaaccua

SEQ ID NO: 623540 - RNA, 22 nt, Human
auggcaagcaagcugaagagau

SEQ ID NO: 623541 - RNA, 22 nt, Human
uaauuauuaugacaacaauugc

SEQ ID NO: 623542 - RNA, 22 nt, Human
uucaauaucucuaagaaugagg

SEQ ID NO: 623543 - RNA, 22 nt, Human
ccccagaaggggacagagggua

SEQ ID NO: 623544 - RNA, 22 nt, Human
caugugaauuccaaagcuaggu

SEQ ID NO: 623545 - RNA, 22 nt, Human
gacaucauagggugggaggaaa

SEQ ID NO: 623546 - RNA, 22 nt, Human
gggcugacaccacccaggcgca

SEQ ID NO: 623547 - RNA, 22 nt, Human
agacauguccacaaagcauuca

SEQ ID NO: 623548 - RNA, 22 nt, Human
ccaaaguccauaguuuacauaa

SEQ ID NO: 623549 - RNA, 19 nt, Human
ggaaggcagaggggcugug

SEQ ID NO: 623550 - RNA, 22 nt, Human
aacaaguaaguuuauauauauu

SEQ ID NO: 623551 - RNA, 22 nt, Human
cuucacugaugggacagcucaa

SEQ ID NO: 623552 - RNA, 22 nt, Human
gcacaagaauaaccauauuuaa

SEQ ID NO: 623553 - RNA, 22 nt, Human
ccaguuuuuccagugcuuucug

SEQ ID NO: 623554 - RNA, 23 nt, Human
gugauauuaaggauagagacaag

SEQ ID NO: 623555 - RNA, 22 nt, Human
gcauuuuauaaagaguuauuug

SEQ ID NO: 623556 - RNA, 22 nt, Human
guuauacauauguguuaacaaa

SEQ ID NO: 623557 - RNA, 22 nt, Human
cagccaggagcucccccugcuc

SEQ ID NO: 623558 - RNA, 22 nt, Human
agauggcucuuugaaggggaau

SEQ ID NO: 623559 - RNA, 22 nt, Human
agggcugagacuaaggccagau

SEQ ID NO: 623560 - RNA, 22 nt, Human
cuggaggcaaagcagaggcaug

SEQ ID NO: 623561 - RNA, 22 nt, Human
gcagcuuuaaacauuggaaaua

SEQ ID NO: 623562 - RNA, 22 nt, Human
uggggcaguuaauaaacauucu

SEQ ID NO: 623563 - RNA, 22 nt, Human
ccacagagcauuagauuucaga

SEQ ID NO: 623564 - RNA, 22 nt, Human
cggcuucaucuuuacuucaaga

SEQ ID NO: 623565 - RNA, 22 nt, Human
gucccuaguggaaagacaugau

SEQ ID NO: 623566 - RNA, 22 nt, Human
ggucugaagcccacgugguacc

SEQ ID NO: 623567 - RNA, 22 nt, Human
gucucucucccaagauuggcua

SEQ ID NO: 623568 - RNA, 22 nt, Human
agcaaagcucaugacauuacag

SEQ ID NO: 623569 - RNA, 21 nt, Human
uagcuuuaauauucccacauu

SEQ ID NO: 623570 - RNA, 17 nt, Human
cccagcuggcagugccg

SEQ ID NO: 623571 - RNA, 22 nt, Human
uccagggcuuggcugggacggu

SEQ ID NO: 623572 - RNA, 22 nt, Human
agaaaacugggaggagagcuuc

SEQ ID NO: 623573 - RNA, 22 nt, Human
gucacagguguggaggugcugg

SEQ ID NO: 623574 - RNA, 22 nt, Human
ugugaauggcaguuggauagca

SEQ ID NO: 623575 - RNA, 22 nt, Human
ugugugaggugguucugagaag

SEQ ID NO: 623576 - RNA, 22 nt, Human
ucugguuagccaauaaugccaa

SEQ ID NO: 623577 - RNA, 22 nt, Human
aguaaacauuuucauauuuucu

SEQ ID NO: 623578 - RNA, 22 nt, Human
uucucaguaugugacgaggacc

SEQ ID NO: 623579 - RNA, 22 nt, Human
ucaauuuccccuauugauagac

SEQ ID NO: 623580 - RNA, 22 nt, Human
ucaaggagacagaaagcaaugg

SEQ ID NO: 623581 - RNA, 22 nt, Human
ugucuuuaauucuacauaucuc

SEQ ID NO: 623582 - RNA, 22 nt, Human
ggcugaugagcuuagcuagaga

SEQ ID NO: 623583 - RNA, 22 nt, Human
uucuggaagaguaaaauaagcc

SEQ ID NO: 623584 - RNA, 22 nt, Human
cagcuaguaaauggcaagacua

SEQ ID NO: 623585 - RNA, 22 nt, Human
aucaggaucacagaaacuuuua

SEQ ID NO: 623586 - RNA, 22 nt, Human
gcuggcuggaugguugguucgc

SEQ ID NO: 623587 - RNA, 22 nt, Human
uuucagacaggacuucauaugu

SEQ ID NO: 623588 - RNA, 22 nt, Human
ucugggcacugcugagccugua

SEQ ID NO: 623589 - RNA, 22 nt, Human
gcuuaaaagccacuuagucuau

SEQ ID NO: 623590 - RNA, 22 nt, Human
cgcagcuguccauguguggggg

SEQ ID NO: 623591 - RNA, 19 nt, Human
gcccuccucacugagcucu

SEQ ID NO: 623592 - RNA, 22 nt, Human
ucauccauaguuugguuggacu

SEQ ID NO: 623593 - RNA, 22 nt, Human
caaacauuuuaaauaagggaua

SEQ ID NO: 623594 - RNA, 17 nt, Human
uuucuagauuauccucu

SEQ ID NO: 623595 - RNA, 21 nt, Human
cucuacauucccagcaacucu

SEQ ID NO: 623596 - RNA, 19 nt, Human
acauguuuugcagaacagc

SEQ ID NO: 623597 - RNA, 22 nt, Human
cuauagaaaauuguaucacacg

SEQ ID NO: 623598 - RNA, 22 nt, Human
uacaauguaauucugauuaugu

SEQ ID NO: 623599 - RNA, 22 nt, Human
uuccaacuuugaaaauguuaug

SEQ ID NO: 623600 - RNA, 22 nt, Human
uucucaugaugcaauucauccc

SEQ ID NO: 623601 - RNA, 22 nt, Human
ccagcuggcccagcugugcucc

SEQ ID NO: 623602 - RNA, 22 nt, Human
ccagcucucuuugaagcauaaa

SEQ ID NO: 623603 - RNA, 22 nt, Human
auucucuguucaaggaugguga

SEQ ID NO: 623604 - RNA, 22 nt, Human
uuacaguauuguuaaacucuuu

SEQ ID NO: 623605 - RNA, 18 nt, Human
gcacagcuaggagggucc

SEQ ID NO: 623606 - RNA, 22 nt, Human
agcugccuguguagaaccaucu

SEQ ID NO: 623607 - RNA, 22 nt, Human
gaggcuccuugaaagggggacu

SEQ ID NO: 623608 - RNA, 22 nt, Human
ggagcagcacugauuagcgguu

SEQ ID NO: 623609 - RNA, 23 nt, Human
ccugugugcccuuaauucacagc

SEQ ID NO: 623610 - RNA, 22 nt, Human
cuuuuuuaagguagcuccuccu

SEQ ID NO: 623611 - RNA, 22 nt, Human
uauugugaguauaacugcauuu

SEQ ID NO: 623612 - RNA, 22 nt, Human
caauugaacagaugaguuaaau

SEQ ID NO: 623613 - RNA, 22 nt, Human
ucugagugagggugugagauau

SEQ ID NO: 623614 - RNA, 22 nt, Human
caagguuugaaaacgccauggc

SEQ ID NO: 623615 - RNA, 22 nt, Human
gcucucccgcagccuggugggc

SEQ ID NO: 623616 - RNA, 22 nt, Human
cucaagucugauggguuagguu

SEQ ID NO: 623617 - RNA, 22 nt, Human
caauguacuacaaagauuguca

SEQ ID NO: 623618 - RNA, 22 nt, Human
caguuuauuuccaagaugacaa

SEQ ID NO: 623619 - RNA, 23 nt, Human
ggcugcucuuuucaugcuguuuc

SEQ ID NO: 623620 - RNA, 22 nt, Human
caacagugauucugcaugagga

SEQ ID NO: 623621 - RNA, 22 nt, Human
gggcugccaagccugccugccu

SEQ ID NO: 623622 - RNA, 22 nt, Human
aagccauggcugcaucagccug

SEQ ID NO: 623623 - RNA, 22 nt, Human
cauggcuuuuuuauucugaaug

SEQ ID NO: 623624 - RNA, 22 nt, Human
gccauggggacuucauggauuu

SEQ ID NO: 623625 - RNA, 22 nt, Human
ggaugcuggggaccaaucucug

SEQ ID NO: 623626 - RNA, 22 nt, Human
agcauggggcuccgcaaugaac

SEQ ID NO: 623627 - RNA, 22 nt, Human
ggagaguggauuccagcuguau

SEQ ID NO: 623628 - RNA, 22 nt, Human
ugguuaaaugcuccgaucuugg

SEQ ID NO: 623629 - RNA, 22 nt, Human
aauaugcagcaugaugaaguaa

SEQ ID NO: 623630 - RNA, 22 nt, Human
ugggcaggagagaagcuaaaga

SEQ ID NO: 623631 - RNA, 22 nt, Human
gcuccaggaggaugaccuuccu

SEQ ID NO: 623632 - RNA, 22 nt, Human
gggcacugaaugccaagcuagg

SEQ ID NO: 623633 - RNA, 22 nt, Human
uggcccugcagaacuagccugg

SEQ ID NO: 623634 - RNA, 22 nt, Human
ggacugggagaauggaggcaag

SEQ ID NO: 623635 - RNA, 22 nt, Human
uguuuacuucuuuccauggcuu

SEQ ID NO: 623636 - RNA, 17 nt, Human
cugucugcugcuuccuc

SEQ ID NO: 623637 - RNA, 22 nt, Human
ggaacacugccuuuuauuuucc

SEQ ID NO: 623638 - RNA, 22 nt, Human
uugcagagaucagcagguuuga

SEQ ID NO: 623639 - RNA, 22 nt, Human
ugccaggccaaugaaggcaggg

SEQ ID NO: 623640 - RNA, 22 nt, Human
ggucuccaaagcugcauugaug

SEQ ID NO: 623641 - RNA, 22 nt, Human
acaagcaugugguaaaaagacc

SEQ ID NO: 623642 - RNA, 22 nt, Human
acugcaaucuggauccuagaag

SEQ ID NO: 623643 - RNA, 22 nt, Human
aggccacagauacugugaagua

SEQ ID NO: 623644 - RNA, 22 nt, Human
gaaugaauuuuggauggugaag

SEQ ID NO: 623645 - RNA, 22 nt, Human
acuuggccuuauuuccacagaa

SEQ ID NO: 623646 - RNA, 22 nt, Human
caguguggugagauuccaggug

SEQ ID NO: 623647 - RNA, 22 nt, Human
ugagaaagguauuucaugcacu

SEQ ID NO: 623648 - RNA, 22 nt, Human
caguaauagauuugagaguggu

SEQ ID NO: 623649 - RNA, 22 nt, Human
aauuucagaacuaucugggagu

SEQ ID NO: 623650 - RNA, 18 nt, Human
gcacucugacugcagagc

SEQ ID NO: 623651 - RNA, 22 nt, Human
ccuugguucugccuggccugga

SEQ ID NO: 623652 - RNA, 22 nt, Human
agccagggggacgcuuucuggc

SEQ ID NO: 623653 - RNA, 22 nt, Human
cagcacuaauccugcaauuucu

SEQ ID NO: 623654 - RNA, 22 nt, Human
uaaaauguagcuucuaggcugg

SEQ ID NO: 623655 - RNA, 22 nt, Human
caugauaacuucauuacacaau

SEQ ID NO: 623656 - RNA, 22 nt, Human
ugacuuuaauaggauuuugcau

SEQ ID NO: 623657 - RNA, 22 nt, Human
gagcccugcugggccuugucuc

SEQ ID NO: 623658 - RNA, 22 nt, Human
agaugccuaaaucugggcaagg

SEQ ID NO: 623659 - RNA, 22 nt, Human
ugcaggcucucugcugccagau

SEQ ID NO: 623660 - RNA, 22 nt, Human
gcucugugggugaguagaaucu

SEQ ID NO: 623661 - RNA, 22 nt, Human
uaauaauagcaguagcugccac

SEQ ID NO: 623662 - RNA, 22 nt, Human
ccugcucuaaaucucauggaac

SEQ ID NO: 623663 - RNA, 22 nt, Human
uugcaacacaaaguuugauucc

SEQ ID NO: 623664 - RNA, 19 nt, Human
uuuccuaaaaagcugugcu

SEQ ID NO: 623665 - RNA, 22 nt, Human
gcucaggaucccaggggugugc

SEQ ID NO: 623666 - RNA, 22 nt, Human
ccugagauggccagugcuggga

SEQ ID NO: 623667 - RNA, 20 nt, Human
uccuucagacuuuggaguug

SEQ ID NO: 623668 - RNA, 22 nt, Human
gucagcaccucuuuggggagcu

SEQ ID NO: 623669 - RNA, 22 nt, Human
gaaacacugguaaagacugccg

SEQ ID NO: 623670 - RNA, 17 nt, Human
ggccuuggggccucagu

SEQ ID NO: 623671 - RNA, 22 nt, Human
gcuagcuuuauaaugcugggcg

SEQ ID NO: 623672 - RNA, 18 nt, Human
uucugugcaucuuucuau

SEQ ID NO: 623673 - RNA, 22 nt, Human
uuaauuuucucaucugugaaau

SEQ ID NO: 623674 - RNA, 22 nt, Human
uguaauaccacuguuggacauu

SEQ ID NO: 623675 - RNA, 22 nt, Human
uuagguaaggauggugacagua

SEQ ID NO: 623676 - RNA, 22 nt, Human
uccuggccaaguuacucucugc

SEQ ID NO: 623677 - RNA, 22 nt, Human
acugugcaugaaccgaaacaaa

SEQ ID NO: 623678 - RNA, 22 nt, Human
uguuaaauugauucaccuuucu

SEQ ID NO: 623679 - RNA, 20 nt, Human
agcaguguggggagacugug

SEQ ID NO: 623680 - RNA, 22 nt, Human
gcaggagccaggccgagcuggu

SEQ ID NO: 623681 - RNA, 22 nt, Human
aagugcuuaaaaggguggucua

SEQ ID NO: 623682 - RNA, 22 nt, Human
cuuccugggcaauguucugcuu

SEQ ID NO: 623683 - RNA, 22 nt, Human
gcuggccaaaguguaccuggag

SEQ ID NO: 623684 - RNA, 22 nt, Human
gguggguaaaacugcuggcacu

SEQ ID NO: 623685 - RNA, 22 nt, Human
gggagccuugggagugccagcc

SEQ ID NO: 623686 - RNA, 22 nt, Human
agcaacaggaaauagcugauua

SEQ ID NO: 623687 - RNA, 22 nt, Human
uauaagcacauccuugacugau

SEQ ID NO: 623688 - RNA, 22 nt, Human
uuaaagcaucacacuauuaauu

SEQ ID NO: 623689 - RNA, 22 nt, Human
gcauuuauuucuuuacugcauc

SEQ ID NO: 623690 - RNA, 22 nt, Human
uggaugugagaaggaucaggcu

SEQ ID NO: 623691 - RNA, 22 nt, Human
cugacucccaagcuagugcucu

SEQ ID NO: 623692 - RNA, 22 nt, Human
uuuauuagugcuuguaucacug

SEQ ID NO: 623693 - RNA, 22 nt, Human
gaggucaggcuugcagcagggu

SEQ ID NO: 623694 - RNA, 22 nt, Human
cugcuuuacucauaggguuuca

SEQ ID NO: 623695 - RNA, 22 nt, Human
auguagaaaguucauagaugcg

SEQ ID NO: 623696 - RNA, 22 nt, Human
uugagcaucaauuaagugaguu

SEQ ID NO: 623697 - RNA, 22 nt, Human
uguucuuugcuguugauguaga

SEQ ID NO: 623698 - RNA, 22 nt, Human
gcuggcuccucuguccucacgg

SEQ ID NO: 623699 - RNA, 22 nt, Human
agucacaugaucccugggccug

SEQ ID NO: 623700 - RNA, 22 nt, Human
auugacaaaucugaacauacgg

SEQ ID NO: 623701 - RNA, 22 nt, Human
ugcuguagcccugcacagugca

SEQ ID NO: 623702 - RNA, 22 nt, Human
acaacaaagacacuugaaauga

SEQ ID NO: 623703 - RNA, 22 nt, Human
ggagagaaauugagguagcaag

SEQ ID NO: 623704 - RNA, 22 nt, Human
agcugcugagccaggcugaugu

SEQ ID NO: 623705 - RNA, 22 nt, Human
gcuuugaugaaucugugcuugg

SEQ ID NO: 623706 - RNA, 22 nt, Human
uuucauguuuucuuaaauggca

SEQ ID NO: 623707 - RNA, 22 nt, Human
aggcagauuuucuuuacucagu

SEQ ID NO: 623708 - RNA, 22 nt, Human
caaagaguuuuuucauauaaug

SEQ ID NO: 623709 - RNA, 22 nt, Human
cagcuucuccagaugacccuca

SEQ ID NO: 623710 - RNA, 22 nt, Human
gggagggauuaguucugccugg

SEQ ID NO: 623711 - RNA, 22 nt, Human
ggagcucaggcccagcaaggcc

SEQ ID NO: 623712 - RNA, 22 nt, Human
acucuucuugcugcucauuaau

SEQ ID NO: 623713 - RNA, 22 nt, Human
uugggccaagugauucucugcc

SEQ ID NO: 623714 - RNA, 22 nt, Human
ucugaacauuuuuugcagccua

SEQ ID NO: 623715 - RNA, 22 nt, Human
caugauagguauuuaauuaaau

SEQ ID NO: 623716 - RNA, 22 nt, Human
ucaugcagauaagaauaaguaa

SEQ ID NO: 623717 - RNA, 22 nt, Human
auuuccuauuucuuguccccua

SEQ ID NO: 623718 - RNA, 22 nt, Human
cgacgggcucgguccgcuuccu

SEQ ID NO: 623719 - RNA, 17 nt, Human
gcaaaggugaggagaga

SEQ ID NO: 623720 - RNA, 22 nt, Human
ggccugcucugcagccucuaca

SEQ ID NO: 623721 - RNA, 22 nt, Human
ucaagagaaggggaaauagacu

SEQ ID NO: 623722 - RNA, 23 nt, Human
caauuguauaaagcaaaugguuu

SEQ ID NO: 623723 - RNA, 22 nt, Human
gcuugcuuuguaaauaucugug

SEQ ID NO: 623724 - RNA, 22 nt, Human
ugagaaauggcagcauuacugg

SEQ ID NO: 623725 - RNA, 22 nt, Human
ucucugagcuggauuuguucuu

SEQ ID NO: 623726 - RNA, 22 nt, Human
cugagccuguguuucucuggca

SEQ ID NO: 623727 - RNA, 21 nt, Human
ggacaccagucacacuggauu

SEQ ID NO: 623728 - RNA, 22 nt, Human
ugaauagauuuuuaacauauaa

SEQ ID NO: 623729 - RNA, 22 nt, Human
agcuuuuacauaaugaucuuga

SEQ ID NO: 623730 - RNA, 22 nt, Human
gcugcacuugagccugggagaa

SEQ ID NO: 623731 - RNA, 22 nt, Human
ugaccaaaggugguuuauuugg

SEQ ID NO: 623732 - RNA, 22 nt, Human
cauucuucucccuuaccuucca

SEQ ID NO: 623733 - RNA, 22 nt, Human
gacccagcuaaccaggugggga

SEQ ID NO: 623734 - RNA, 19 nt, Human
cuggucugcugcuuccagg

SEQ ID NO: 623735 - RNA, 22 nt, Human
ggagggggaagaagcuaaagac

SEQ ID NO: 623736 - RNA, 22 nt, Human
ugcaggcccaguguagaggcuc

SEQ ID NO: 623737 - RNA, 22 nt, Human
ugaggccuggacucugcaugga

SEQ ID NO: 623738 - RNA, 22 nt, Human
cagcucugacacaguacaaaau

SEQ ID NO: 623739 - RNA, 22 nt, Human
cacugucugggacauguggucu

SEQ ID NO: 623740 - RNA, 22 nt, Human
ucuccugcucccaacugcugca

SEQ ID NO: 623741 - RNA, 22 nt, Human
cagaggucugaugcgucccugc

SEQ ID NO: 623742 - RNA, 22 nt, Human
ucugcacauggcgcugguccug

SEQ ID NO: 623743 - RNA, 22 nt, Human
ugguggacaccgcagccaugaa

SEQ ID NO: 623744 - RNA, 22 nt, Human
gagauucugguuagguguauuu

SEQ ID NO: 623745 - RNA, 22 nt, Human
aagcagcacaguaauauuggug

SEQ ID NO: 623746 - RNA, 22 nt, Human
ccugagcaacuucaagggccug

SEQ ID NO: 623747 - RNA, 22 nt, Human
aggaccagaggccagagucagc

SEQ ID NO: 623748 - RNA, 22 nt, Human
uauucauguguuggaaaggaac

SEQ ID NO: 623749 - RNA, 22 nt, Human
uugauucugauccuuugcuagc

SEQ ID NO: 623750 - RNA, 22 nt, Human
aaagcagccgguucccuggucu

SEQ ID NO: 623751 - RNA, 22 nt, Human
ggccaccuccgugaaggaauga

SEQ ID NO: 623752 - RNA, 22 nt, Human
gaggagguggaauuccaggaau

SEQ ID NO: 623753 - RNA, 20 nt, Human
agcuccuuuguguccaggau

SEQ ID NO: 623754 - RNA, 22 nt, Human
ugcuccacccucacacucuucc

SEQ ID NO: 623755 - RNA, 22 nt, Human
acaggcucacagucauuucauu

SEQ ID NO: 623756 - RNA, 22 nt, Human
ugacagaaagaguauuaaagau

SEQ ID NO: 623757 - RNA, 22 nt, Human
gugcagggcagccgaaugggcu

SEQ ID NO: 623758 - RNA, 22 nt, Human
gcagagaaaguuuuguccucag

SEQ ID NO: 623759 - RNA, 22 nt, Human
cugccucagccuucugggugac

SEQ ID NO: 623760 - RNA, 22 nt, Human
uuaaaguauagaggacaaaaac

SEQ ID NO: 623761 - RNA, 22 nt, Human
gacagggaaacauugaaguguc

SEQ ID NO: 623762 - RNA, 21 nt, Human
ugugugugcaggcacacacac

SEQ ID NO: 623763 - RNA, 22 nt, Human
aaacagcuccuuaguuuccauc

SEQ ID NO: 623764 - RNA, 22 nt, Human
guggccagaaguuaagugguua

SEQ ID NO: 623765 - RNA, 22 nt, Human
acagcugauuggaucaaggaca

SEQ ID NO: 623766 - RNA, 22 nt, Human
gaaacauugagcagaaggagaa

SEQ ID NO: 623767 - RNA, 22 nt, Human
ucacagacauggugagguaaca

SEQ ID NO: 623768 - RNA, 22 nt, Human
aagagacuuguccgaaguugua

SEQ ID NO: 623769 - RNA, 22 nt, Human
accuuuccuggcugaccgagga

SEQ ID NO: 623770 - RNA, 22 nt, Human
uauuuuacagacuacuuuagau

SEQ ID NO: 623771 - RNA, 22 nt, Human
ggaaaagaauugcagugaagua

SEQ ID NO: 623772 - RNA, 22 nt, Human
uuuguccucuccauguacaaua

SEQ ID NO: 623773 - RNA, 22 nt, Human
agcuguguucugguugauucac

SEQ ID NO: 623774 - RNA, 22 nt, Human
aaugaacacauguggucaguuu

SEQ ID NO: 623775 - RNA, 22 nt, Human
ugaaagcacugauucucaacuc

SEQ ID NO: 623776 - RNA, 22 nt, Human
uuuagcaagguagguccaugga

SEQ ID NO: 623777 - RNA, 22 nt, Human
acaugugucuaagaaugaaaga

SEQ ID NO: 623778 - RNA, 22 nt, Human
cauguuaauaugcauugaguac

SEQ ID NO: 623779 - RNA, 22 nt, Human
ccucagaccccacagggccugu

SEQ ID NO: 623780 - RNA, 22 nt, Human
acauauaugcgugggcucaugg

SEQ ID NO: 623781 - RNA, 18 nt, Human
ugaacuuuggugucucuc

SEQ ID NO: 623782 - RNA, 20 nt, Human
ucuccagaugcagaugacau

SEQ ID NO: 623783 - RNA, 22 nt, Human
uuugguaaguaugaaugcagua

SEQ ID NO: 623784 - RNA, 22 nt, Human
aggacuucuuagaugccuuccg

SEQ ID NO: 623785 - RNA, 21 nt, Human
acccccacaccuccuuaguuc

SEQ ID NO: 623786 - RNA, 22 nt, Human
gcaggggaguccacucuaugca

SEQ ID NO: 623787 - RNA, 22 nt, Human
ugcagccaccaccucugcugaa

SEQ ID NO: 623788 - RNA, 22 nt, Human
augagguuuagguuccuccucu

SEQ ID NO: 623789 - RNA, 18 nt, Human
uuccaugauuccuuucac

SEQ ID NO: 623790 - RNA, 22 nt, Human
uuucuggcagcgggacaggggu

SEQ ID NO: 623791 - RNA, 22 nt, Human
aagaggggugugugucaaccca

SEQ ID NO: 623792 - RNA, 21 nt, Human
agcugccugcucuggaccugg

SEQ ID NO: 623793 - RNA, 22 nt, Human
ugggggugcugagaagacagga

SEQ ID NO: 623794 - RNA, 22 nt, Human
cuacauuaaauuggcuuacuua

SEQ ID NO: 623795 - RNA, 22 nt, Human
cagcacaguccuuugcuuacug

SEQ ID NO: 623796 - RNA, 22 nt, Human
gauuccacagcuucgaggucuu

SEQ ID NO: 623797 - RNA, 22 nt, Human
auuguauaacagcauguauuuu

SEQ ID NO: 623798 - RNA, 20 nt, Human
caugcaacagauuauuuccc

SEQ ID NO: 623799 - RNA, 22 nt, Human
acagggagccccagcauuucca

SEQ ID NO: 623800 - RNA, 22 nt, Human
cugaauccacacaaggugaugg

SEQ ID NO: 623801 - RNA, 23 nt, Human
aguucucauucaucacggccuau

SEQ ID NO: 623802 - RNA, 22 nt, Human
gcugcugguccucagagcucau

SEQ ID NO: 623803 - RNA, 22 nt, Human
uggagauguaaagcaaggcuua

SEQ ID NO: 623804 - RNA, 22 nt, Human
cauuacagugucagaggaacug

SEQ ID NO: 623805 - RNA, 22 nt, Human
acacaguaucaaauuucaucuu

SEQ ID NO: 623806 - RNA, 22 nt, Human
ugucaccaguuccaggaaauaa

SEQ ID NO: 623807 - RNA, 22 nt, Human
ggggagaauuacauggcgugga

SEQ ID NO: 623808 - RNA, 22 nt, Human
auuccuuguuucacugaaaagg

SEQ ID NO: 623809 - RNA, 22 nt, Human
uucuuauagaagcaaccauugu

SEQ ID NO: 623810 - RNA, 22 nt, Human
guguggccuugggagaggucug

SEQ ID NO: 623811 - RNA, 22 nt, Human
ugggaugggaucucgcuguguc

SEQ ID NO: 623812 - RNA, 22 nt, Human
gagcucagcaaaggucugugug

SEQ ID NO: 623813 - RNA, 22 nt, Human
ccaggccaggagagcgagguuu

SEQ ID NO: 623814 - RNA, 22 nt, Human
ucuugaaaguaucuuauuuugu

SEQ ID NO: 623815 - RNA, 22 nt, Human
gaagcaauuaaguuugugaucu

SEQ ID NO: 623816 - RNA, 22 nt, Human
ugaggcucaaggucugguggag

SEQ ID NO: 623817 - RNA, 22 nt, Human
gauaagcacuauauaaguauuu

SEQ ID NO: 623818 - RNA, 22 nt, Human
ugagaaccaugaaaagcuguca

SEQ ID NO: 623819 - RNA, 22 nt, Human
gagaucaucuuuuuuagauucc

SEQ ID NO: 623820 - RNA, 22 nt, Human
ucaucugaccacuuuaucucuc

SEQ ID NO: 623821 - RNA, 22 nt, Human
aggaugccuucauugcauggcc

SEQ ID NO: 623822 - RNA, 20 nt, Human
ccugucuggagacaaagaga

SEQ ID NO: 623823 - RNA, 22 nt, Human
aggcuccagcccaaggcugcag

SEQ ID NO: 623824 - RNA, 22 nt, Human
cagaccuggggccugggagccc

SEQ ID NO: 623825 - RNA, 22 nt, Human
gggagcuauuuauagaggcuga

SEQ ID NO: 623826 - RNA, 22 nt, Human
auccagcuuugucuggucuucg

SEQ ID NO: 623827 - RNA, 22 nt, Human
cagaaggcuggcagauugagau

SEQ ID NO: 623828 - RNA, 22 nt, Human
cagaggccagggggcucacaaa

SEQ ID NO: 623829 - RNA, 22 nt, Human
augggaggaugcucgggugcuc

SEQ ID NO: 623830 - RNA, 22 nt, Human
ucacagaaucucugauaagucu

SEQ ID NO: 623831 - RNA, 22 nt, Human
cccagcaucccagugggcagca

SEQ ID NO: 623832 - RNA, 22 nt, Human
gagcagcuggcuguauugguuu

SEQ ID NO: 623833 - RNA, 22 nt, Human
uggagccaugccuggccuuucc

SEQ ID NO: 623834 - RNA, 22 nt, Human
ugagugugcagggaaguggcgg

SEQ ID NO: 623835 - RNA, 22 nt, Human
aaugcuguauaucuuagcuaau

SEQ ID NO: 623836 - RNA, 20 nt, Human
gaagccagaggggaaaggag

SEQ ID NO: 623837 - RNA, 18 nt, Human
ucauucauuaaacuuggc

SEQ ID NO: 623838 - RNA, 22 nt, Human
cacugcauggaugauggcugua

SEQ ID NO: 623839 - RNA, 20 nt, Human
ggcccagugaaccaggacgg

SEQ ID NO: 623840 - RNA, 22 nt, Human
aagcuuuucucuguauuaccug

SEQ ID NO: 623841 - RNA, 22 nt, Human
gcugaggcaagauuugaaccca

SEQ ID NO: 623842 - RNA, 23 nt, Human
uuuauccaacucuguaaucucuc

SEQ ID NO: 623843 - RNA, 22 nt, Human
caguucucuugaucgucucuug

SEQ ID NO: 623844 - RNA, 22 nt, Human
uuuugaauaauucagaaacagc

SEQ ID NO: 623845 - RNA, 22 nt, Human
uuauuaauacaugcaccugcau

SEQ ID NO: 623846 - RNA, 22 nt, Human
acugagguuuacuugaaggaga

SEQ ID NO: 623847 - RNA, 22 nt, Human
ccugcucagccccagcucaccc

SEQ ID NO: 623848 - RNA, 22 nt, Human
aggagugaguguccucagcaga

SEQ ID NO: 623849 - RNA, 21 nt, Human
acagcauguuuguguguuugc

SEQ ID NO: 623850 - RNA, 19 nt, Human
gggagcugaggucuuuggu

SEQ ID NO: 623851 - RNA, 22 nt, Human
ccaguuauccagcaugcugucu

SEQ ID NO: 623852 - RNA, 22 nt, Human
cucuggcuuugcucaugcaucc

SEQ ID NO: 623853 - RNA, 22 nt, Human
uagcaacguguauaaacucaag

SEQ ID NO: 623854 - RNA, 22 nt, Human
cugccguguuuuucauguuaaa

SEQ ID NO: 623855 - RNA, 22 nt, Human
ccugggaaguuguggcugcagu

SEQ ID NO: 623856 - RNA, 22 nt, Human
uauuagcagccaacuuagcugu

SEQ ID NO: 623857 - RNA, 22 nt, Human
ucuguaaagacuccaaaagcca

SEQ ID NO: 623858 - RNA, 22 nt, Human
ucacagagaaaagcuaucacaa

SEQ ID NO: 623859 - RNA, 22 nt, Human
ugccauauuauugagcauauua

SEQ ID NO: 623860 - RNA, 22 nt, Human
ccagugugauuguugcaagaau

SEQ ID NO: 623861 - RNA, 22 nt, Human
uuuauugcuggccaccuguagc

SEQ ID NO: 623862 - RNA, 22 nt, Human
aauugaaaauauuguagaccau

SEQ ID NO: 623863 - RNA, 20 nt, Human
gcucccugguagaaauguuu

SEQ ID NO: 623864 - RNA, 20 nt, Human
ccagcugagccaaggggaga

SEQ ID NO: 623865 - RNA, 22 nt, Human
aguggcuugcucugccucagcc

SEQ ID NO: 623866 - RNA, 22 nt, Human
aaggaauucuagaagguuuugu

SEQ ID NO: 623867 - RNA, 19 nt, Human
agugcaugggcgaggugca

SEQ ID NO: 623868 - RNA, 22 nt, Human
cagcauuuaucuuguagcagga

SEQ ID NO: 623869 - RNA, 22 nt, Human
uauucaaaguaccuucauugcc

SEQ ID NO: 623870 - RNA, 22 nt, Human
cugcugcuuuugcgggagaaca

SEQ ID NO: 623871 - RNA, 22 nt, Human
ggccagucugggccacggucgg

SEQ ID NO: 623872 - RNA, 22 nt, Human
ggugaaggcacaagagggcaag

SEQ ID NO: 623873 - RNA, 22 nt, Human
aaucaacaggaugugcauugua

SEQ ID NO: 623874 - RNA, 22 nt, Human
acuuccugcuaugagcuucugu

SEQ ID NO: 623875 - RNA, 20 nt, Human
agcuccucaucacuggaggu

SEQ ID NO: 623876 - RNA, 22 nt, Human
gcugucacucaccaggccugca

SEQ ID NO: 623877 - RNA, 22 nt, Human
auaucaaacgaaguuauuuuaa

SEQ ID NO: 623878 - RNA, 21 nt, Human
aggcuuggaucuagacaggcc

SEQ ID NO: 623879 - RNA, 22 nt, Human
ucaugcugugaacuguauacau

SEQ ID NO: 623880 - RNA, 22 nt, Human
uggcucuguuuguuaacuagac

SEQ ID NO: 623881 - RNA, 22 nt, Human
acaaugaauuuaauaccuuauu

SEQ ID NO: 623882 - RNA, 22 nt, Human
cuuauguauaauguuccacaua

SEQ ID NO: 623883 - RNA, 22 nt, Human
ucauuuauagcuaaccuugaau

SEQ ID NO: 623884 - RNA, 22 nt, Human
cucugugagggucuguacagaa

SEQ ID NO: 623885 - RNA, 22 nt, Human
acugaaggucucagcaaggaug

SEQ ID NO: 623886 - RNA, 22 nt, Human
cccagcagccagaaugaggagc

SEQ ID NO: 623887 - RNA, 22 nt, Human
ccaggagacuguacugauauuu

SEQ ID NO: 623888 - RNA, 22 nt, Human
uccugggaaguugcaucaccgu

SEQ ID NO: 623889 - RNA, 22 nt, Human
ugauacagaauugauaucugag

SEQ ID NO: 623890 - RNA, 22 nt, Human
agguucgggcacuuacaaaugg

SEQ ID NO: 623891 - RNA, 22 nt, Human
auugaaaaaugacuauugcuua

SEQ ID NO: 623892 - RNA, 22 nt, Human
uccagccauaucuuguagcccu

SEQ ID NO: 623893 - RNA, 22 nt, Human
gagggccaggcggagacaggcg

SEQ ID NO: 623894 - RNA, 17 nt, Human
ggcaggugacagacacc

SEQ ID NO: 623895 - RNA, 22 nt, Human
uaugcaauucucuuaauauucu

SEQ ID NO: 623896 - RNA, 22 nt, Human
aauuggcauagcauacaauuca

SEQ ID NO: 623897 - RNA, 17 nt, Human
uagcuguguuucagcua

SEQ ID NO: 623898 - RNA, 22 nt, Human
aaaucaugugcagagaucagga

SEQ ID NO: 623899 - RNA, 22 nt, Human
ucugggaugcaaacagaaucug

SEQ ID NO: 623900 - RNA, 22 nt, Human
gcagggaccucacuacccccag

SEQ ID NO: 623901 - RNA, 22 nt, Human
acacuucucuuugaagaacaau

SEQ ID NO: 623902 - RNA, 22 nt, Human
uuccuaaugucuacuuuaguuc

SEQ ID NO: 623903 - RNA, 22 nt, Human
uuugcagugauucuugcaguga

SEQ ID NO: 623904 - RNA, 22 nt, Human
uggguccaguguccuggcuaug

SEQ ID NO: 623905 - RNA, 22 nt, Human
guagaaaugguguguuucuucu

SEQ ID NO: 623906 - RNA, 22 nt, Human
ucauugaauuugguucaauaug

SEQ ID NO: 623907 - RNA, 22 nt, Human
agagacaggguuuugucguguu

SEQ ID NO: 623908 - RNA, 22 nt, Human
cuuucacagccuucguucugaa

SEQ ID NO: 623909 - RNA, 22 nt, Human
auaaagcagguccccagacacu

SEQ ID NO: 623910 - RNA, 22 nt, Human
ccaggcagcucugauuuauguc

SEQ ID NO: 623911 - RNA, 22 nt, Human
caugugugaguauaucuuaucc

SEQ ID NO: 623912 - RNA, 22 nt, Human
cugucugcucauaauggagggc

SEQ ID NO: 623913 - RNA, 22 nt, Human
uagcagagguaaguguggcaau

SEQ ID NO: 623914 - RNA, 22 nt, Human
caggugccgggaaugcagcaau

SEQ ID NO: 623915 - RNA, 19 nt, Human
cugccuguuauggagagaa

SEQ ID NO: 623916 - RNA, 22 nt, Human
uaacacaguucucuguugcaca

SEQ ID NO: 623917 - RNA, 22 nt, Human
cagcugcccaggccaccuggag

SEQ ID NO: 623918 - RNA, 22 nt, Human
gagaggccauggggugggaugc

SEQ ID NO: 623919 - RNA, 22 nt, Human
ccuccccucagacagagacugg

SEQ ID NO: 623920 - RNA, 22 nt, Human
cacaugaaggcuggggucguga

SEQ ID NO: 623921 - RNA, 22 nt, Human
gacacugaggcaugcagagccg

SEQ ID NO: 623922 - RNA, 22 nt, Human
aguugcuggcaccugugaguau

SEQ ID NO: 623923 - RNA, 22 nt, Human
caaggcugcaaaacuacauggg

SEQ ID NO: 623924 - RNA, 22 nt, Human
uggaguccuuguuggaagugaa

SEQ ID NO: 623925 - RNA, 22 nt, Human
uucuccagacaacagaggguga

SEQ ID NO: 623926 - RNA, 22 nt, Human
ccuggcaguuuugcccaggauu

SEQ ID NO: 623927 - RNA, 22 nt, Human
ggucagggggaucugugaggua

SEQ ID NO: 623928 - RNA, 22 nt, Human
auuaaguguauugcugagggua

SEQ ID NO: 623929 - RNA, 22 nt, Human
ggccacuguuuccugggcaguu

SEQ ID NO: 623930 - RNA, 21 nt, Human
auggagccuaagaguggaggu

SEQ ID NO: 623931 - RNA, 22 nt, Human
uggcacugucaccaaugcuguc

SEQ ID NO: 623932 - RNA, 22 nt, Human
gcuuggcauugaccauuaucau

SEQ ID NO: 623933 - RNA, 22 nt, Human
acagguagucugaacacugggu

SEQ ID NO: 623934 - RNA, 22 nt, Human
uucccucuccuacucaggaaag

SEQ ID NO: 623935 - RNA, 21 nt, Human
cccaccccauaaggcagaacc

SEQ ID NO: 623936 - RNA, 22 nt, Human
agcugaggccacgagugaaggg

SEQ ID NO: 623937 - RNA, 22 nt, Human
aucuuggauuggagaaagaagu

SEQ ID NO: 623938 - RNA, 22 nt, Human
acguguucaauuuccaucugac

SEQ ID NO: 623939 - RNA, 23 nt, Human
agggcuccuuguugauuagcauu

SEQ ID NO: 623940 - RNA, 23 nt, Human
uucaggaaaugaauacagacaca

SEQ ID NO: 623941 - RNA, 22 nt, Human
caggauggagagugagggguca

SEQ ID NO: 623942 - RNA, 20 nt, Human
cugagcgucuaagaggugag

SEQ ID NO: 623943 - RNA, 22 nt, Human
uauggaaaguguuuucuucugu

SEQ ID NO: 623944 - RNA, 22 nt, Human
ugcuuaaaaaguaacugcugau

SEQ ID NO: 623945 - RNA, 22 nt, Human
cacccagggcugugccugccca

SEQ ID NO: 623946 - RNA, 22 nt, Human
cagauggaacacagaaaggaga

SEQ ID NO: 623947 - RNA, 22 nt, Human
uuauucuuggaucugagucucu

SEQ ID NO: 623948 - RNA, 22 nt, Human
uccuggccugucuggaguagcu

SEQ ID NO: 623949 - RNA, 22 nt, Human
acauuugagaugccuuuuaggu

SEQ ID NO: 623950 - RNA, 22 nt, Human
guaacagaaagucaugcucauu

SEQ ID NO: 623951 - RNA, 22 nt, Human
uuacaacucugucaguauagcu

SEQ ID NO: 623952 - RNA, 22 nt, Human
gccauucauauuuuagcauuaa

SEQ ID NO: 623953 - RNA, 22 nt, Human
ggccaggcugguuccuugaccu

SEQ ID NO: 623954 - RNA, 22 nt, Human
uucucuggauguuucucaguca

SEQ ID NO: 623955 - RNA, 22 nt, Human
uacacuguacgcucugcuucaa

SEQ ID NO: 623956 - RNA, 22 nt, Human
acuguuaauucaaucaacaggu

SEQ ID NO: 623957 - RNA, 22 nt, Human
aucuuuuuaucuguuuggaaca

SEQ ID NO: 623958 - RNA, 18 nt, Human
aggccugcccagcacugu

SEQ ID NO: 623959 - RNA, 22 nt, Human
uccuuaggcaauuugggagagu

SEQ ID NO: 623960 - RNA, 22 nt, Human
ucaggauggcuucugcaucaaa

SEQ ID NO: 623961 - RNA, 22 nt, Human
ugugaaaugaagauaauucuug

SEQ ID NO: 623962 - RNA, 22 nt, Human
gcugccuccugaaagcgcucug

SEQ ID NO: 623963 - RNA, 22 nt, Human
agcuuucuauauaugaguugcu

SEQ ID NO: 623964 - RNA, 22 nt, Human
uuugcuauuuuucugugcagcu

SEQ ID NO: 623965 - RNA, 22 nt, Human
cuuuuucuaaucauaauugucu

SEQ ID NO: 623966 - RNA, 18 nt, Human
cuguugagauguggcuga

SEQ ID NO: 623967 - RNA, 22 nt, Human
uuuaucugugguaaauaacauu

SEQ ID NO: 623968 - RNA, 18 nt, Human
gaggaucagaaaucugua

SEQ ID NO: 623969 - RNA, 22 nt, Human
ggagccugggccuccugcccuu

SEQ ID NO: 623970 - RNA, 22 nt, Human
gcccugagaggcaaugacucuu

SEQ ID NO: 623971 - RNA, 22 nt, Human
guaaagcagguaguugggacac

SEQ ID NO: 623972 - RNA, 22 nt, Human
aaccugaauuuaauugaaauga

SEQ ID NO: 623973 - RNA, 19 nt, Human
uuuacagggaauggagacc

SEQ ID NO: 623974 - RNA, 22 nt, Human
cagcagcucacucagguggcuc

SEQ ID NO: 623975 - RNA, 22 nt, Human
uccagucaagcuugagaauuuc

SEQ ID NO: 623976 - RNA, 22 nt, Human
caaggaaggagagaugaugggu

SEQ ID NO: 623977 - RNA, 19 nt, Human
ucccuucuauaguaauaaa

SEQ ID NO: 623978 - RNA, 22 nt, Human
auacaaauuuauagaugcauuu

SEQ ID NO: 623979 - RNA, 22 nt, Human
aaggcacuacgcugcuggggcg

SEQ ID NO: 623980 - RNA, 22 nt, Human
aaggcugagacagcacaggucc

SEQ ID NO: 623981 - RNA, 22 nt, Human
gaacuauaugucuuaaagcuuu

SEQ ID NO: 623982 - RNA, 20 nt, Human
ugcacagggugggaagcaac

SEQ ID NO: 623983 - RNA, 20 nt, Human
cguaaggcaagugcugcauc

SEQ ID NO: 623984 - RNA, 22 nt, Human
uauuucuuucagguauguguug

SEQ ID NO: 623985 - RNA, 22 nt, Human
caggcagaggcuuuucauggcu

SEQ ID NO: 623986 - RNA, 22 nt, Human
ggccugaaauaaaguagcagaa

SEQ ID NO: 623987 - RNA, 22 nt, Human
cacuugcuggaugguggcucag

SEQ ID NO: 623988 - RNA, 22 nt, Human
aaggucauuguugcauguucuc

SEQ ID NO: 623989 - RNA, 22 nt, Human
agauuauuuccagacuaaugaa

SEQ ID NO: 623990 - RNA, 22 nt, Human
ugcacacacucugcauauacuu

SEQ ID NO: 623991 - RNA, 22 nt, Human
uacuauguucuuccuaaauagu

SEQ ID NO: 623992 - RNA, 22 nt, Human
auauuaaauggauuuugggagc

SEQ ID NO: 623993 - RNA, 23 nt, Human
ucucagaggauuccugggccuug

SEQ ID NO: 623994 - RNA, 22 nt, Human
auaugauuccacuauuguaugg

SEQ ID NO: 623995 - RNA, 22 nt, Human
aagggcucugugcuugucccau

SEQ ID NO: 623996 - RNA, 22 nt, Human
accauguguuuuacacauggua

SEQ ID NO: 623997 - RNA, 22 nt, Human
cccagcucccaaguugcuaugg

SEQ ID NO: 623998 - RNA, 19 nt, Human
auuccucaaggacagaaau

SEQ ID NO: 623999 - RNA, 22 nt, Human
aagaaaccaacccugccagcac

SEQ ID NO: 624000 - RNA, 22 nt, Human
ccugcccuaauccagagacuag

SEQ ID NO: 624001 - RNA, 22 nt, Human
ucaggcuugaggucuguaugug

SEQ ID NO: 624002 - RNA, 22 nt, Human
ucaguccauaggugggccugag

SEQ ID NO: 624003 - RNA, 22 nt, Human
acugggaagucagagagaggcu

SEQ ID NO: 624004 - RNA, 22 nt, Human
cguuuauuuugaagauuccacu

SEQ ID NO: 624005 - RNA, 22 nt, Human
ggcuucugaaccaggcccugga

SEQ ID NO: 624006 - RNA, 22 nt, Human
uaaauacagucauuugagccau

SEQ ID NO: 624007 - RNA, 22 nt, Human
agauccaguuaauagcuucauu

SEQ ID NO: 624008 - RNA, 22 nt, Human
gccucugccaagggggcugcgg

SEQ ID NO: 624009 - RNA, 22 nt, Human
guggcaggucccauuggagcag

SEQ ID NO: 624010 - RNA, 22 nt, Human
aaccagcuaaacuuugcucgaa

SEQ ID NO: 624011 - RNA, 22 nt, Human
acacaggaagagagauaauaau

SEQ ID NO: 624012 - RNA, 22 nt, Human
accaggcagcacuuuccuugca

SEQ ID NO: 624013 - RNA, 22 nt, Human
ugagagauuuucaugagugcuu

SEQ ID NO: 624014 - RNA, 22 nt, Human
aguguuuagucaaguaagacgc

SEQ ID NO: 624015 - RNA, 22 nt, Human
gucuuauuuaaggacaagaaga

SEQ ID NO: 624016 - RNA, 21 nt, Human
ugcauuucuaacuaguugacc

SEQ ID NO: 624017 - RNA, 22 nt, Human
aaucacaugcagggccuccacc

SEQ ID NO: 624018 - RNA, 19 nt, Human
ucuacaaaguggcaucagg

SEQ ID NO: 624019 - RNA, 22 nt, Human
agugauuagaaaguacacuugg

SEQ ID NO: 624020 - RNA, 22 nt, Human
cagugcaguggcugagcuggag

SEQ ID NO: 624021 - RNA, 22 nt, Human
uccccaggaaucaggugguugc

SEQ ID NO: 624022 - RNA, 22 nt, Human
ugugcuucugcagagacuauuu

SEQ ID NO: 624023 - RNA, 22 nt, Human
auauuucuugagcaccugguau

SEQ ID NO: 624024 - RNA, 22 nt, Human
aguuccaugucuggguuuguga

SEQ ID NO: 624025 - RNA, 22 nt, Human
aagaucagaacuuuauacagga

SEQ ID NO: 624026 - RNA, 22 nt, Human
cagcaucucguggcuggauaga

SEQ ID NO: 624027 - RNA, 22 nt, Human
aggcaagcgcagaagcggagga

SEQ ID NO: 624028 - RNA, 22 nt, Human
uggcuggcuagugggcaggauu

SEQ ID NO: 624029 - RNA, 22 nt, Human
guggccugucagaagccguggg

SEQ ID NO: 624030 - RNA, 22 nt, Human
agguuuacugagggugcugguu

SEQ ID NO: 624031 - RNA, 20 nt, Human
ggagagcagggaagacagua

SEQ ID NO: 624032 - RNA, 22 nt, Human
uguggugccgagagucuggacg

SEQ ID NO: 624033 - RNA, 22 nt, Human
uuucuggguuuaugucacagcu

SEQ ID NO: 624034 - RNA, 22 nt, Human
agagcuggcugcugcggugcuu

SEQ ID NO: 624035 - RNA, 22 nt, Human
ccucuucuaggacguccuugug

SEQ ID NO: 624036 - RNA, 22 nt, Human
uacuaacuuguacacagccuaa

SEQ ID NO: 624037 - RNA, 22 nt, Human
gggcagcucuggcugugggaag

SEQ ID NO: 624038 - RNA, 22 nt, Human
caugcauucagaaucucucaca

SEQ ID NO: 624039 - RNA, 23 nt, Human
cugagguaaaauauucugaagga

SEQ ID NO: 624040 - RNA, 22 nt, Human
ugugaaaagcaggcuacuuucu

SEQ ID NO: 624041 - RNA, 22 nt, Human
aaugugauuagccucuacugga

SEQ ID NO: 624042 - RNA, 19 nt, Human
uaggccagaaguuuuccac

SEQ ID NO: 624043 - RNA, 22 nt, Human
agcuucucaggagucugaggca

SEQ ID NO: 624044 - RNA, 22 nt, Human
uucauguguauggaacauuuuu

SEQ ID NO: 624045 - RNA, 22 nt, Human
gucaggaaaaauugauaauuuu

SEQ ID NO: 624046 - RNA, 22 nt, Human
agagugaaaagcuagagcagua

SEQ ID NO: 624047 - RNA, 22 nt, Human
ugaggcacugggagagcacacu

SEQ ID NO: 624048 - RNA, 22 nt, Human
gcugacugguucaggucccgcu

SEQ ID NO: 624049 - RNA, 22 nt, Human
uguuccauaaguggugcuuugu

SEQ ID NO: 624050 - RNA, 22 nt, Human
uugaaugcaucuuugagcuccu

SEQ ID NO: 624051 - RNA, 22 nt, Human
gcagcugcagacccucagugcu

SEQ ID NO: 624052 - RNA, 22 nt, Human
guuuuacaagguuaaucagcag

SEQ ID NO: 624053 - RNA, 22 nt, Human
ggcagguagccuagaggagguu

SEQ ID NO: 624054 - RNA, 22 nt, Human
uccuggaagugcuuggugaggg

SEQ ID NO: 624055 - RNA, 22 nt, Human
uucuggccaaggcugccagauu

SEQ ID NO: 624056 - RNA, 22 nt, Human
cucucuuucugaaugaggacua

SEQ ID NO: 624057 - RNA, 22 nt, Human
agguacagaugaaagucuaguu

SEQ ID NO: 624058 - RNA, 22 nt, Human
gaggugguucagguagagccca

SEQ ID NO: 624059 - RNA, 22 nt, Human
aauuauauuguggugugaaugu

SEQ ID NO: 624060 - RNA, 22 nt, Human
uauuugucuuucuuauaagaau

SEQ ID NO: 624061 - RNA, 22 nt, Human
gguggcagucuuaagagaucuu

SEQ ID NO: 624062 - RNA, 22 nt, Human
gggucugagggccuuaccacuc

SEQ ID NO: 624063 - RNA, 22 nt, Human
ugucagggcaugcgguccagcc

SEQ ID NO: 624064 - RNA, 22 nt, Human
ccagcuggaacggcagcccagc

SEQ ID NO: 624065 - RNA, 22 nt, Human
gccaggcgggucucaaacuccu

SEQ ID NO: 624066 - RNA, 20 nt, Human
acaguguuagguuuuuccuu

SEQ ID NO: 624067 - RNA, 22 nt, Human
aaauaaguuaaacuagaaugau

SEQ ID NO: 624068 - RNA, 22 nt, Human
aaagcugggcuggccaacccag

SEQ ID NO: 624069 - RNA, 22 nt, Human
aaaagagaaaguggcaggcuuu

SEQ ID NO: 624070 - RNA, 22 nt, Human
agggggguggaucaccugaggu

SEQ ID NO: 624071 - RNA, 21 nt, Human
acagcagagaucaagacuaag

SEQ ID NO: 624072 - RNA, 22 nt, Human
uuuacagcaacagugcagaggu

SEQ ID NO: 624073 - RNA, 22 nt, Human
cccagccaagugaucugaccgc

SEQ ID NO: 624074 - RNA, 22 nt, Human
agggggcaggagagaccugcug

SEQ ID NO: 624075 - RNA, 22 nt, Human
uugucaaguaaggcugacauuu

SEQ ID NO: 624076 - RNA, 18 nt, Human
aggcuucccaggcaggcc

SEQ ID NO: 624077 - RNA, 22 nt, Human
ccuggcucugcagccacuccag

SEQ ID NO: 624078 - RNA, 22 nt, Human
uuugaguugcuuauuuaauagg

SEQ ID NO: 624079 - RNA, 22 nt, Human
ugagaggucaaagggcauggag

SEQ ID NO: 624080 - RNA, 22 nt, Human
caauagcuauguaaccugaaga

SEQ ID NO: 624081 - RNA, 22 nt, Human
ugcuuuaaccaucuuguuugga

SEQ ID NO: 624082 - RNA, 19 nt, Human
ucugggaaugaugccagca

SEQ ID NO: 624083 - RNA, 22 nt, Human
auucacauuuagccucugacau

SEQ ID NO: 624084 - RNA, 18 nt, Human
ugaauagggguuugcaga

SEQ ID NO: 624085 - RNA, 22 nt, Human
uagaggcugggaauuauuuuca

SEQ ID NO: 624086 - RNA, 22 nt, Human
ccagggucuucgaggcagcaau

SEQ ID NO: 624087 - RNA, 23 nt, Human
uacuacagggucuugcuaugaau

SEQ ID NO: 624088 - RNA, 22 nt, Human
cucuggaguggguggccgggag

SEQ ID NO: 624089 - RNA, 22 nt, Human
ucagaguucucuguccagauga

SEQ ID NO: 624090 - RNA, 22 nt, Human
aacauaaauuugaaguggcaaa

SEQ ID NO: 624091 - RNA, 22 nt, Human
uuccugagucccggguaaagau

SEQ ID NO: 624092 - RNA, 22 nt, Human
ggaccaggagcucagagcccuc

SEQ ID NO: 624093 - RNA, 22 nt, Human
ucccuagucgcaucuguggaga

SEQ ID NO: 624094 - RNA, 22 nt, Human
agagcccugccaauggaugagg

SEQ ID NO: 624095 - RNA, 22 nt, Human
uucuagcacugccuggaagaca

SEQ ID NO: 624096 - RNA, 22 nt, Human
ggaaaauacugauucaugccau

SEQ ID NO: 624097 - RNA, 22 nt, Human
uacaugaauuugagucagagga

SEQ ID NO: 624098 - RNA, 22 nt, Human
ugcugagaugaauagggcuguc

SEQ ID NO: 624099 - RNA, 22 nt, Human
caugugcauccuuaaucucccu

SEQ ID NO: 624100 - RNA, 22 nt, Human
ugcaugaacacaugugcaugua

SEQ ID NO: 624101 - RNA, 22 nt, Human
cuuuccugagaaaggagaagga

SEQ ID NO: 624102 - RNA, 22 nt, Human
uagcucuucaaucacugucucc

SEQ ID NO: 624103 - RNA, 22 nt, Human
cagcuccagccaccggggggug

SEQ ID NO: 624104 - RNA, 18 nt, Human
gugugcucagagagugag

SEQ ID NO: 624105 - RNA, 22 nt, Human
aggagccagauucucucacuuu

SEQ ID NO: 624106 - RNA, 22 nt, Human
uucauagguuugcugugaacau

SEQ ID NO: 624107 - RNA, 21 nt, Human
auacauucuauuaagcauuua

SEQ ID NO: 624108 - RNA, 22 nt, Human
ggcucugcuggauugaggccag

SEQ ID NO: 624109 - RNA, 22 nt, Human
cagcccagccuugucucuuuau

SEQ ID NO: 624110 - RNA, 22 nt, Human
acaauacuuaccaauguuuuug

SEQ ID NO: 624111 - RNA, 22 nt, Human
ggggccuccagcacuaggcagc

SEQ ID NO: 624112 - RNA, 22 nt, Human
agcccgagcgcaccuguggaaa

SEQ ID NO: 624113 - RNA, 22 nt, Human
cagagguaccagcagccucugg

SEQ ID NO: 624114 - RNA, 22 nt, Human
cagagaccccgcugcccuucug

SEQ ID NO: 624115 - RNA, 22 nt, Human
agggccaccagggagucucagg

SEQ ID NO: 624116 - RNA, 22 nt, Human
ucuguuccaguagaaaggugca

SEQ ID NO: 624117 - RNA, 22 nt, Human
cccuccuuaccaccacagcucc

SEQ ID NO: 624118 - RNA, 22 nt, Human
agugcuguaacaacuuauuugg

SEQ ID NO: 624119 - RNA, 22 nt, Human
uucugcuguugugacguuaguu

SEQ ID NO: 624120 - RNA, 22 nt, Human
ucacaugucaagaagauaauuu

SEQ ID NO: 624121 - RNA, 22 nt, Human
ucuguuuaugcauauuuaaaac

SEQ ID NO: 624122 - RNA, 22 nt, Human
gacacagagggcaccagauaug

SEQ ID NO: 624123 - RNA, 22 nt, Human
uauuaucauugguaauaugguc

SEQ ID NO: 624124 - RNA, 22 nt, Human
caacacagccauuccccuagaa

SEQ ID NO: 624125 - RNA, 22 nt, Human
caggaggagcuggccgccucau

SEQ ID NO: 624126 - RNA, 22 nt, Human
ucaguuagggccucagaagaca

SEQ ID NO: 624127 - RNA, 22 nt, Human
aucuggaguuucaguuuucugg

SEQ ID NO: 624128 - RNA, 22 nt, Human
cagugaguaaguagacagcuua

SEQ ID NO: 624129 - RNA, 22 nt, Human
ccugucugcggaggaguggaag

SEQ ID NO: 624130 - RNA, 22 nt, Human
uuucucuauuaggggcuagcuu

SEQ ID NO: 624131 - RNA, 23 nt, Human
caugggagugagaaugccagcuc

SEQ ID NO: 624132 - RNA, 22 nt, Human
aggcacugugcuucuuauaugu

SEQ ID NO: 624133 - RNA, 22 nt, Human
aaguucaagcucugccuaaaau

SEQ ID NO: 624134 - RNA, 22 nt, Human
gcuggcugcuaggacagcuaca

SEQ ID NO: 624135 - RNA, 21 nt, Human
aaauuuucuuggcuguagugu

SEQ ID NO: 624136 - RNA, 22 nt, Human
acauguacauacacauauguaa

SEQ ID NO: 624137 - RNA, 22 nt, Human
gggugugucuuuugcuccugga

SEQ ID NO: 624138 - RNA, 19 nt, Human
cugucccagacucugcucu

SEQ ID NO: 624139 - RNA, 22 nt, Human
acccaggagguggaggcugcag

SEQ ID NO: 624140 - RNA, 22 nt, Human
uuucuuagcgaugcuugauaaa

SEQ ID NO: 624141 - RNA, 22 nt, Human
ggagcucaccuuggagucucug

SEQ ID NO: 624142 - RNA, 22 nt, Human
ucccugggcggacauucuccca

SEQ ID NO: 624143 - RNA, 22 nt, Human
gcaaggagccuggaggugagug

SEQ ID NO: 624144 - RNA, 22 nt, Human
ccacaggcugcugcaggucccg

SEQ ID NO: 624145 - RNA, 22 nt, Human
uugcaacuaaaagaacuugaca

SEQ ID NO: 624146 - RNA, 21 nt, Human
aaaaaugaaguuguucaggaa

SEQ ID NO: 624147 - RNA, 22 nt, Human
uuagauaauguuauuguaauuu

SEQ ID NO: 624148 - RNA, 22 nt, Human
gccuuggccaacaccuugcaaa

SEQ ID NO: 624149 - RNA, 22 nt, Human
gcuggcccagggucaccuagga

SEQ ID NO: 624150 - RNA, 22 nt, Human
cugucaguucuuccagauagag

SEQ ID NO: 624151 - RNA, 22 nt, Human
aauaucuagccuuuagcagcuu

SEQ ID NO: 624152 - RNA, 22 nt, Human
uccagagaauucuacgcagugc

SEQ ID NO: 624153 - RNA, 22 nt, Human
ggguggagaggcuaaguccagu

SEQ ID NO: 624154 - RNA, 22 nt, Human
ucaaugauuagaguuuagugug

SEQ ID NO: 624155 - RNA, 22 nt, Human
gcuggcccagcguggggccgug

SEQ ID NO: 624156 - RNA, 23 nt, Human
uggucugaagccucagguuccuc

SEQ ID NO: 624157 - RNA, 22 nt, Human
guggccagaaucuugaggccuu

SEQ ID NO: 624158 - RNA, 20 nt, Human
uggagucaugggacacucac

SEQ ID NO: 624159 - RNA, 22 nt, Human
uuccugggggcagcagucuuga

SEQ ID NO: 624160 - RNA, 22 nt, Human
uuugcuuuugugcucuaguggu

SEQ ID NO: 624161 - RNA, 22 nt, Human
aauuccagccucaguucuauua

SEQ ID NO: 624162 - RNA, 22 nt, Human
acuugcagcagcagcuauuggc

SEQ ID NO: 624163 - RNA, 19 nt, Human
gacauuccugacacuggcu

SEQ ID NO: 624164 - RNA, 22 nt, Human
gagucugagaacugggcucagu

SEQ ID NO: 624165 - RNA, 22 nt, Human
gccuugccucagccauggaaac

SEQ ID NO: 624166 - RNA, 22 nt, Human
cacagcaauagcuaacugauac

SEQ ID NO: 624167 - RNA, 22 nt, Human
aaguccauagguuucaugaggg

SEQ ID NO: 624168 - RNA, 22 nt, Human
uagagcaguggguaccauggca

SEQ ID NO: 624169 - RNA, 22 nt, Human
cacccagugaaggagcaagagg

SEQ ID NO: 624170 - RNA, 22 nt, Human
caggagcaaauccaaaagaauu

SEQ ID NO: 624171 - RNA, 22 nt, Human
agauauugugcauacugcuguu

SEQ ID NO: 624172 - RNA, 22 nt, Human
cacagcuggaaugggguaccug

SEQ ID NO: 624173 - RNA, 22 nt, Human
acaacuucucacagauaaauuu

SEQ ID NO: 624174 - RNA, 23 nt, Human
agcuccuuugaaaguauguuuuu

SEQ ID NO: 624175 - RNA, 22 nt, Human
auguaacaaaugguauacaugu

SEQ ID NO: 624176 - RNA, 22 nt, Human
acacccagcugggccaccucca

SEQ ID NO: 624177 - RNA, 22 nt, Human
ugaccaauacuguggaugccag

SEQ ID NO: 624178 - RNA, 22 nt, Human
agacauuuuagacauaaaagau

SEQ ID NO: 624179 - RNA, 22 nt, Human
ugcaaaaugacuucugaaaaga

SEQ ID NO: 624180 - RNA, 22 nt, Human
cagcauggguuccgggggccug

SEQ ID NO: 624181 - RNA, 22 nt, Human
agcugcccuucucuugcccuug

SEQ ID NO: 624182 - RNA, 22 nt, Human
cugagagaagagcgcaguuugu

SEQ ID NO: 624183 - RNA, 22 nt, Human
ccagcuccagcauagccaccau

SEQ ID NO: 624184 - RNA, 19 nt, Human
ccucacccugcagaggagg

SEQ ID NO: 624185 - RNA, 22 nt, Human
aaaagagaguugccagucugua

SEQ ID NO: 624186 - RNA, 22 nt, Human
augaacaucucugauccaagca

SEQ ID NO: 624187 - RNA, 18 nt, Human
gccuccaccauggagggu

SEQ ID NO: 624188 - RNA, 20 nt, Human
gaaacauuggcagcaacuga

SEQ ID NO: 624189 - RNA, 22 nt, Human
cgcagcagccccgugguaggug

SEQ ID NO: 624190 - RNA, 22 nt, Human
gagccaggcaccuucuguguug

SEQ ID NO: 624191 - RNA, 22 nt, Human
auuuaugcaucccagcauguga

SEQ ID NO: 624192 - RNA, 22 nt, Human
aagauguuagauuauggggaca

SEQ ID NO: 624193 - RNA, 22 nt, Human
uuggccaagggaucgagguugg

SEQ ID NO: 624194 - RNA, 22 nt, Human
ggcugggaggaugacuugcuac

SEQ ID NO: 624195 - RNA, 22 nt, Human
aaugugacugaauauuuacucu

SEQ ID NO: 624196 - RNA, 22 nt, Human
aaagaacaucggagugggcggg

SEQ ID NO: 624197 - RNA, 18 nt, Human
uuauucagacgcauauga

SEQ ID NO: 624198 - RNA, 22 nt, Human
agcuccugcccaggaaggcucu

SEQ ID NO: 624199 - RNA, 21 nt, Human
cccacggaaugaugaggcacu

SEQ ID NO: 624200 - RNA, 22 nt, Human
cccaguuucaacuuuccagugg

SEQ ID NO: 624201 - RNA, 22 nt, Human
acucaucuauuagauaucuguu

SEQ ID NO: 624202 - RNA, 22 nt, Human
uagaucugauacaauucaucug

SEQ ID NO: 624203 - RNA, 22 nt, Human
guuucagagguguucauuuuca

SEQ ID NO: 624204 - RNA, 22 nt, Human
gagagacagcacacaguguggg

SEQ ID NO: 624205 - RNA, 22 nt, Human
accuaacuuaccuagguccaca

SEQ ID NO: 624206 - RNA, 22 nt, Human
uacaggacagauguuuacagga

SEQ ID NO: 624207 - RNA, 22 nt, Human
ugaaauguucuggaguuucugu

SEQ ID NO: 624208 - RNA, 22 nt, Human
agaagccaaaugccagugaccu

SEQ ID NO: 624209 - RNA, 19 nt, Human
ugaauacagagauacagaa

SEQ ID NO: 624210 - RNA, 22 nt, Human
ccucuuccucaccaucuacaac

SEQ ID NO: 624211 - RNA, 22 nt, Human
cacagcauaaugaaauauacuu

SEQ ID NO: 624212 - RNA, 22 nt, Human
ugccucagagugggcuugcuau

SEQ ID NO: 624213 - RNA, 21 nt, Human
agcagcugggcaacauggagg

SEQ ID NO: 624214 - RNA, 22 nt, Human
cuuuuguucuacagcuggggaa

SEQ ID NO: 624215 - RNA, 22 nt, Human
augcagcugacauuuucauguu

SEQ ID NO: 624216 - RNA, 21 nt, Human
ggcacuaggcccggaggaagc

SEQ ID NO: 624217 - RNA, 22 nt, Human
cugggugguuuugaugugaauu

SEQ ID NO: 624218 - RNA, 22 nt, Human
cuguuguauuauucaauauuau

SEQ ID NO: 624219 - RNA, 22 nt, Human
ccuuuucuagaaagggaggcaa

SEQ ID NO: 624220 - RNA, 22 nt, Human
caagaucuuccucaauagaccu

SEQ ID NO: 624221 - RNA, 22 nt, Human
agcagcacccagagccaugucu

SEQ ID NO: 624222 - RNA, 18 nt, Human
agcaaauauuaagugcau

SEQ ID NO: 624223 - RNA, 22 nt, Human
cuccaggccagggaaguggaca

SEQ ID NO: 624224 - RNA, 22 nt, Human
acacaguaggauaguuugagga

SEQ ID NO: 624225 - RNA, 22 nt, Human
gugugagcaucaaagccuguca

SEQ ID NO: 624226 - RNA, 22 nt, Human
gaaguuacauacugucacuucu

SEQ ID NO: 624227 - RNA, 22 nt, Human
ucucccacgguacaggauaaac

SEQ ID NO: 624228 - RNA, 22 nt, Human
ggguggggcccaggaaaucuau

SEQ ID NO: 624229 - RNA, 22 nt, Human
uuugggaacuuaauuaugucug

SEQ ID NO: 624230 - RNA, 22 nt, Human
cagucccaucucccagguggcu

SEQ ID NO: 624231 - RNA, 22 nt, Human
agaguauuuugauuauccugga

SEQ ID NO: 624232 - RNA, 17 nt, Human
uccaggagaggcaaugg

SEQ ID NO: 624233 - RNA, 22 nt, Human
cucugcuugugucaggcaugcu

SEQ ID NO: 624234 - RNA, 23 nt, Human
acagggcuguccagggcuagguc

SEQ ID NO: 624235 - RNA, 22 nt, Human
aaaggaggaauggagagaugcu

SEQ ID NO: 624236 - RNA, 20 nt, Human
agcagcauuguucuagagca

SEQ ID NO: 624237 - RNA, 22 nt, Human
gcaaagcugggugugaaugcac

SEQ ID NO: 624238 - RNA, 19 nt, Human
ucaaaggcuuuuaggagac

SEQ ID NO: 624239 - RNA, 22 nt, Human
gcagggaagaucuuggagcugc

SEQ ID NO: 624240 - RNA, 22 nt, Human
cagaggaaguuccuugaugaga

SEQ ID NO: 624241 - RNA, 22 nt, Human
cauuugaagacuuagaagagga

SEQ ID NO: 624242 - RNA, 22 nt, Human
cugugucuccuuggugggauau

SEQ ID NO: 624243 - RNA, 22 nt, Human
ugcacagauagugauagauagc

SEQ ID NO: 624244 - RNA, 22 nt, Human
acaggucuggucugggugggac

SEQ ID NO: 624245 - RNA, 22 nt, Human
uuuuuuauagcaaugaacccac

SEQ ID NO: 624246 - RNA, 22 nt, Human
gcacagcaguggcauaaacaau

SEQ ID NO: 624247 - RNA, 22 nt, Human
acagggaccugugagcuccaua

SEQ ID NO: 624248 - RNA, 22 nt, Human
auccuugacacacuccaguacu

SEQ ID NO: 624249 - RNA, 22 nt, Human
ucacauuugcuaucccacuccu

SEQ ID NO: 624250 - RNA, 22 nt, Human
caauguaucaaccagaaaguuc

SEQ ID NO: 624251 - RNA, 22 nt, Human
gaacagcauguaagaagcuacu

SEQ ID NO: 624252 - RNA, 22 nt, Human
gccugugcuguucccucugcca

SEQ ID NO: 624253 - RNA, 21 nt, Human
uuucuuucuggcucucacagu

SEQ ID NO: 624254 - RNA, 22 nt, Human
cuuguauacaguguacacauug

SEQ ID NO: 624255 - RNA, 22 nt, Human
ucacagacaauuguuuuggugu

SEQ ID NO: 624256 - RNA, 22 nt, Human
uuuaacucugucauucucuuua

SEQ ID NO: 624257 - RNA, 22 nt, Human
uuguaacucugaauacauccua

SEQ ID NO: 624258 - RNA, 22 nt, Human
ugccuuggugcuucuucaugug

SEQ ID NO: 624259 - RNA, 22 nt, Human
cagcauuuagaauuugaagugu

SEQ ID NO: 624260 - RNA, 21 nt, Human
ucucuguggccuacccucuac

SEQ ID NO: 624261 - RNA, 22 nt, Human
ggaggcucgcuggucgcacagc

SEQ ID NO: 624262 - RNA, 21 nt, Human
aggagccagccugucagucua

SEQ ID NO: 624263 - RNA, 22 nt, Human
cacagaaauauugugucccuug

SEQ ID NO: 624264 - RNA, 22 nt, Human
ugaucuuuucuauuuaugguag

SEQ ID NO: 624265 - RNA, 22 nt, Human
acauauaagggaucagugacag

SEQ ID NO: 624266 - RNA, 22 nt, Human
cugguguggcggcgcccuguag

SEQ ID NO: 624267 - RNA, 22 nt, Human
gccugccucaaaaucccaguuc

SEQ ID NO: 624268 - RNA, 22 nt, Human
gagguggguguaucacagguca

SEQ ID NO: 624269 - RNA, 22 nt, Human
ucuucaguuguaaaaguguugg

SEQ ID NO: 624270 - RNA, 22 nt, Human
ugagaaguacuacaagagaggg

SEQ ID NO: 624271 - RNA, 22 nt, Human
cucuggaauggguguuucuaac

SEQ ID NO: 624272 - RNA, 22 nt, Human
auaaaaaggacagauguggucu

SEQ ID NO: 624273 - RNA, 21 nt, Human
ugaguuaaggauccaauucug

SEQ ID NO: 624274 - RNA, 22 nt, Human
uguuuaauucaccaucauguuc

SEQ ID NO: 624275 - RNA, 22 nt, Human
ucauuccuuauccguaucuuuu

SEQ ID NO: 624276 - RNA, 22 nt, Human
ugaacgcagguccacauggcuc

SEQ ID NO: 624277 - RNA, 22 nt, Human
caagaugaaacuacagggagga

SEQ ID NO: 624278 - RNA, 22 nt, Human
augugagcaggugcuggcugcu

SEQ ID NO: 624279 - RNA, 22 nt, Human
gaagacaucguguggacuaaca

SEQ ID NO: 624280 - RNA, 17 nt, Human
aucugcuucacccagca

SEQ ID NO: 624281 - RNA, 22 nt, Human
gcuuacaaacaacagaaauuaa

SEQ ID NO: 624282 - RNA, 22 nt, Human
cagcuggacuuuugauagaagu

SEQ ID NO: 624283 - RNA, 22 nt, Human
ugcaggaggcuuuauucaggau

SEQ ID NO: 624284 - RNA, 22 nt, Human
gcgcacauguucagauguguga

SEQ ID NO: 624285 - RNA, 22 nt, Human
uucagaaguagcuaagcaguca

SEQ ID NO: 624286 - RNA, 22 nt, Human
uggcagccuggaaucucucagc

SEQ ID NO: 624287 - RNA, 22 nt, Human
ggaaagagcccagcagugcuug

SEQ ID NO: 624288 - RNA, 22 nt, Human
cccuccaugagugugcugcugg

SEQ ID NO: 624289 - RNA, 22 nt, Human
gugggaagaacuucaaguggcu

SEQ ID NO: 624290 - RNA, 22 nt, Human
ggcacaagguuuaaauaacauc

SEQ ID NO: 624291 - RNA, 22 nt, Human
auuuccaggagaaaggauuuua

SEQ ID NO: 624292 - RNA, 22 nt, Human
uuauccuggauuauauauguga

SEQ ID NO: 624293 - RNA, 22 nt, Human
ugggcugcugucugcacaugcu

SEQ ID NO: 624294 - RNA, 22 nt, Human
auugagaaauauaaucuggaaa

SEQ ID NO: 624295 - RNA, 22 nt, Human
cucagaaacggagcugccauuu

SEQ ID NO: 624296 - RNA, 22 nt, Human
gaauguuuaaaaggugcaguuu

SEQ ID NO: 624297 - RNA, 22 nt, Human
ggcugccauaacugauaccaua

SEQ ID NO: 624298 - RNA, 22 nt, Human
accaggacuuuguauucagcuu

SEQ ID NO: 624299 - RNA, 22 nt, Human
aagcccugucacccugacuuca

SEQ ID NO: 624300 - RNA, 22 nt, Human
ccaggccuggacggguggccug

SEQ ID NO: 624301 - RNA, 22 nt, Human
uggccacagccucugccaguuc

SEQ ID NO: 624302 - RNA, 22 nt, Human
acacugugagcugaagggcugc

SEQ ID NO: 624303 - RNA, 22 nt, Human
acugagguggggucugcuugga

SEQ ID NO: 624304 - RNA, 22 nt, Human
cuugccuguggcuaguuggcuc

SEQ ID NO: 624305 - RNA, 22 nt, Human
agccucugcuuaugcaaaggua

SEQ ID NO: 624306 - RNA, 23 nt, Human
uucagaagaaaugaguacaggag

SEQ ID NO: 624307 - RNA, 22 nt, Human
cuuuagaaaucuggauguauuu

SEQ ID NO: 624308 - RNA, 22 nt, Human
agauucauugcuuuaggcauug

SEQ ID NO: 624309 - RNA, 22 nt, Human
uucucuggggacuugguuggag

SEQ ID NO: 624310 - RNA, 22 nt, Human
guucucucaaacuuuguguuug

SEQ ID NO: 624311 - RNA, 22 nt, Human
acuuuggguaagccaggugcua

SEQ ID NO: 624312 - RNA, 22 nt, Human
gcguaaggccucuggucucgga

SEQ ID NO: 624313 - RNA, 22 nt, Human
cuggccuuguuccuccccaagu

SEQ ID NO: 624314 - RNA, 22 nt, Human
aggaaaauuaucaugagagcca

SEQ ID NO: 624315 - RNA, 22 nt, Human
acaguuuauugcacagguaacc

SEQ ID NO: 624316 - RNA, 22 nt, Human
gucaacuguaccuaaagaaagu

SEQ ID NO: 624317 - RNA, 22 nt, Human
gccugaaguuucaugccucuau

SEQ ID NO: 624318 - RNA, 17 nt, Human
gauuuccugaaguucuu

SEQ ID NO: 624319 - RNA, 23 nt, Human
ggucacaugugagauuaaacuug

SEQ ID NO: 624320 - RNA, 22 nt, Human
acaagcuccuuauucagcuggg

SEQ ID NO: 624321 - RNA, 21 nt, Human
ucuuuucucugcaggauuccu

SEQ ID NO: 624322 - RNA, 22 nt, Human
ucuuuggcuaugauuuacuguu

SEQ ID NO: 624323 - RNA, 22 nt, Human
auuguuuacacuaacuucauaa

SEQ ID NO: 624324 - RNA, 22 nt, Human
uggaaugacaaguuguucagag

SEQ ID NO: 624325 - RNA, 19 nt, Human
gcaggcagcugggguaucc

SEQ ID NO: 624326 - RNA, 22 nt, Human
ucucacuuuccagacuuuucaa

SEQ ID NO: 624327 - RNA, 22 nt, Human
ggcuuuaugcacagcagauggu

SEQ ID NO: 624328 - RNA, 22 nt, Human
gaauucuuuucuuucugaaagu

SEQ ID NO: 624329 - RNA, 22 nt, Human
gagcuggccgcagagagggcag

SEQ ID NO: 624330 - RNA, 21 nt, Human
uuuagcaagaguauagugcau

SEQ ID NO: 624331 - RNA, 16 nt, Human
ggugggguaguuagaa

SEQ ID NO: 624332 - RNA, 22 nt, Human
agaaacuauccugaguagcaaa

SEQ ID NO: 624333 - RNA, 22 nt, Human
aguuaaagucugaaauagagaa

SEQ ID NO: 624334 - RNA, 22 nt, Human
cuagucugugugggaccagggc

SEQ ID NO: 624335 - RNA, 22 nt, Human
augcuuuauacaaaacacuuaa

SEQ ID NO: 624336 - RNA, 22 nt, Human
cuguaauucacuagggucagcg

SEQ ID NO: 624337 - RNA, 22 nt, Human
aaauugcucuuuaaaaguacug

SEQ ID NO: 624338 - RNA, 19 nt, Human
agggcacagggacagaagg

SEQ ID NO: 624339 - RNA, 22 nt, Human
ucugugcuuucccugccuucuu

SEQ ID NO: 624340 - RNA, 22 nt, Human
augaagauaauagcauugguug

SEQ ID NO: 624341 - RNA, 22 nt, Human
augcaaaaguaguugcaguuuu

SEQ ID NO: 624342 - RNA, 22 nt, Human
ucagccacuacccaccuuaaca

SEQ ID NO: 624343 - RNA, 22 nt, Human
cugggcucaaauccuaucucca

SEQ ID NO: 624344 - RNA, 20 nt, Human
cuguggcaucuugaaggagg

SEQ ID NO: 624345 - RNA, 22 nt, Human
uggcagauuuucucuggaggag

SEQ ID NO: 624346 - RNA, 20 nt, Human
ccugucucacguuccgcccc

SEQ ID NO: 624347 - RNA, 19 nt, Human
uguccucacagagcauaac

SEQ ID NO: 624348 - RNA, 22 nt, Human
cagcuauuuugccuaucauggu

SEQ ID NO: 624349 - RNA, 22 nt, Human
cuacagaauucaacaaaugguu

SEQ ID NO: 624350 - RNA, 22 nt, Human
ugcaaauagccugaugaaagaa

SEQ ID NO: 624351 - RNA, 21 nt, Human
aauuagggugccucuuauaau

SEQ ID NO: 624352 - RNA, 22 nt, Human
ucccagugagguccuggcuguc

SEQ ID NO: 624353 - RNA, 22 nt, Human
caaugcuuuauuuccuccccuu

SEQ ID NO: 624354 - RNA, 22 nt, Human
ugagcagauuuguucuaggggu

SEQ ID NO: 624355 - RNA, 22 nt, Human
gcgccugccaccaugccaggcu

SEQ ID NO: 624356 - RNA, 22 nt, Human
agcuaaggagcaaguaggaguu

SEQ ID NO: 624357 - RNA, 22 nt, Human
aaucaggaugacugucauuuca

SEQ ID NO: 624358 - RNA, 22 nt, Human
ggagacaguauggcuuguagcu

SEQ ID NO: 624359 - RNA, 22 nt, Human
ucuucuucccaucccucaaaug

SEQ ID NO: 624360 - RNA, 22 nt, Human
gugcgugugccuaucaauaaag

SEQ ID NO: 624361 - RNA, 20 nt, Human
ugucagugccugaggcacag

SEQ ID NO: 624362 - RNA, 22 nt, Human
acaggucuccagagugagagga

SEQ ID NO: 624363 - RNA, 22 nt, Human
agguggguccuggcucugccau

SEQ ID NO: 624364 - RNA, 22 nt, Human
ucccagcgcggggggaggaucc

SEQ ID NO: 624365 - RNA, 22 nt, Human
acagaguauuggaaaggcagug

SEQ ID NO: 624366 - RNA, 17 nt, Human
uucauuaauaaaagcaa

SEQ ID NO: 624367 - RNA, 22 nt, Human
cugggacuugcagagcaggagg

SEQ ID NO: 624368 - RNA, 22 nt, Human
ccaggccccagggcuggcuuuc

SEQ ID NO: 624369 - RNA, 22 nt, Human
ccaagaggggcagagggcugca

SEQ ID NO: 624370 - RNA, 22 nt, Human
uuuuaugagugucccucugugg

SEQ ID NO: 624371 - RNA, 22 nt, Human
acacuguuuuagggaagaaaau

SEQ ID NO: 624372 - RNA, 22 nt, Human
uguuuguacucaaagccaugag

SEQ ID NO: 624373 - RNA, 22 nt, Human
uccugaagaaggcagauauuug

SEQ ID NO: 624374 - RNA, 22 nt, Human
uaccuggaaucacagaggcuga

SEQ ID NO: 624375 - RNA, 23 nt, Human
agaacagugacuaauauagagag

SEQ ID NO: 624376 - RNA, 22 nt, Human
gagugccagauggaccucuugg

SEQ ID NO: 624377 - RNA, 22 nt, Human
gaucugaagauaugaaauauuu

SEQ ID NO: 624378 - RNA, 22 nt, Human
cuucacugcagucauggcucug

SEQ ID NO: 624379 - RNA, 22 nt, Human
ucauacaauucaaucucugauu

SEQ ID NO: 624380 - RNA, 22 nt, Human
acuuuaaagcagaauggcuaug

SEQ ID NO: 624381 - RNA, 19 nt, Human
uuucuuaggccuuuggccu

SEQ ID NO: 624382 - RNA, 22 nt, Human
uugagaaaaccaucguaagaau

SEQ ID NO: 624383 - RNA, 22 nt, Human
aaaccuuuaccagacuagcaag

SEQ ID NO: 624384 - RNA, 22 nt, Human
gccaggcucuuccauuuggguc

SEQ ID NO: 624385 - RNA, 22 nt, Human
cagcaucuugaaggguaaacca

SEQ ID NO: 624386 - RNA, 22 nt, Human
uuuggucacuggauuuggcugu

SEQ ID NO: 624387 - RNA, 22 nt, Human
acacaggggaaaguggagcuga

SEQ ID NO: 624388 - RNA, 22 nt, Human
augaaaacuuuagccucauuag

SEQ ID NO: 624389 - RNA, 22 nt, Human
auacuuauacuaagaauguacu

SEQ ID NO: 624390 - RNA, 22 nt, Human
aaaaggcucuucaaaauggaag

SEQ ID NO: 624391 - RNA, 22 nt, Human
ccucuggagucagaccagcuug

SEQ ID NO: 624392 - RNA, 22 nt, Human
gccuggaggguugagguuuugu

SEQ ID NO: 624393 - RNA, 22 nt, Human
cugccagguaaacugcaggaau

SEQ ID NO: 624394 - RNA, 22 nt, Human
uggaggcugugugcaugagacc

SEQ ID NO: 624395 - RNA, 19 nt, Human
guaagggcuaauggacuau

SEQ ID NO: 624396 - RNA, 22 nt, Human
aaaagcagaccacgcuuugugg

SEQ ID NO: 624397 - RNA, 22 nt, Human
aacacugaaguagugaauacug

SEQ ID NO: 624398 - RNA, 22 nt, Human
auugagaguguauagcugaucu

SEQ ID NO: 624399 - RNA, 22 nt, Human
uacaagaaugucuuaaaagcuc

SEQ ID NO: 624400 - RNA, 21 nt, Human
cagggcuagagagaaugacaa

SEQ ID NO: 624401 - RNA, 22 nt, Human
uaagacauccguugcuuauaau

SEQ ID NO: 624402 - RNA, 22 nt, Human
agaggaggcucugggaucgucc

SEQ ID NO: 624403 - RNA, 22 nt, Human
auucuccagcucacuguccaua

SEQ ID NO: 624404 - RNA, 22 nt, Human
gaaggccucacucugcagcaua

SEQ ID NO: 624405 - RNA, 22 nt, Human
ucaaggcuauuaauucugugag

SEQ ID NO: 624406 - RNA, 22 nt, Human
agucuugucuuauuuuaauaga

SEQ ID NO: 624407 - RNA, 22 nt, Human
agcuauauagaugguguguuug

SEQ ID NO: 624408 - RNA, 22 nt, Human
uucuucagggaagcuuguuaau

SEQ ID NO: 624409 - RNA, 22 nt, Human
uuucucuggcauuagguauaaa

SEQ ID NO: 624410 - RNA, 22 nt, Human
uuagguaaguaggaucaaaaaa

SEQ ID NO: 624411 - RNA, 22 nt, Human
gcugacagagugccuggccuca

SEQ ID NO: 624412 - RNA, 21 nt, Human
ucaggaagagccaguucaugc

SEQ ID NO: 624413 - RNA, 22 nt, Human
aucuuugacugccauucuugac

SEQ ID NO: 624414 - RNA, 22 nt, Human
ugcagagagcccugccuuccuc

SEQ ID NO: 624415 - RNA, 22 nt, Human
cauuuauauaaaauguccagaa

SEQ ID NO: 624416 - RNA, 22 nt, Human
cagucucugucaucucauggga

SEQ ID NO: 624417 - RNA, 17 nt, Human
acagcaggcccggaggg

SEQ ID NO: 624418 - RNA, 22 nt, Human
ccuaaguaaguugacuuucaga

SEQ ID NO: 624419 - RNA, 22 nt, Human
guccaugacugugacucacaug

SEQ ID NO: 624420 - RNA, 22 nt, Human
gugagagcucagcugcccuggg

SEQ ID NO: 624421 - RNA, 17 nt, Human
gacagcugguuccuggc

SEQ ID NO: 624422 - RNA, 22 nt, Human
uuuaaauuauaguuaaugucug

SEQ ID NO: 624423 - RNA, 22 nt, Human
cagggucugaaacugaucacag

SEQ ID NO: 624424 - RNA, 22 nt, Human
uggaagcgagacagagaucucc

SEQ ID NO: 624425 - RNA, 22 nt, Human
aaugucugucugcacguugcuu

SEQ ID NO: 624426 - RNA, 22 nt, Human
gguagcagggcugugagucaga

SEQ ID NO: 624427 - RNA, 22 nt, Human
ggcuucuccccuuugagucuuc

SEQ ID NO: 624428 - RNA, 22 nt, Human
cuaaggaugcauauguuuuguu

SEQ ID NO: 624429 - RNA, 22 nt, Human
ggccugaggccaccagcagccc

SEQ ID NO: 624430 - RNA, 22 nt, Human
uuggcuguuuuaucuccuggug

SEQ ID NO: 624431 - RNA, 22 nt, Human
cucugaaacuccugcaccuucu

SEQ ID NO: 624432 - RNA, 22 nt, Human
uauguuaagugggauaaucaaa

SEQ ID NO: 624433 - RNA, 22 nt, Human
gaagcuucgaaagagugauuuc

SEQ ID NO: 624434 - RNA, 22 nt, Human
uacuauugaaucauugucaauc

SEQ ID NO: 624435 - RNA, 22 nt, Human
auauuaggaguuaaauguauua

SEQ ID NO: 624436 - RNA, 22 nt, Human
agguucagugccuggaacaggg

SEQ ID NO: 624437 - RNA, 22 nt, Human
agcauccaacaggagggaaggg

SEQ ID NO: 624438 - RNA, 22 nt, Human
cuucuucccagcuucccucacc

SEQ ID NO: 624439 - RNA, 22 nt, Human
acaugagauuagcucacccacu

SEQ ID NO: 624440 - RNA, 22 nt, Human
agccauggcgccacuagaggga

SEQ ID NO: 624441 - RNA, 18 nt, Human
cugccuguugcugagagg

SEQ ID NO: 624442 - RNA, 22 nt, Human
aaagccagcucugagcugcacc

SEQ ID NO: 624443 - RNA, 22 nt, Human
cccaggaggcagauguugcagu

SEQ ID NO: 624444 - RNA, 22 nt, Human
uggcuccauucuuuaugaguug

SEQ ID NO: 624445 - RNA, 22 nt, Human
ggcugcuuuaucggcugcugaa

SEQ ID NO: 624446 - RNA, 22 nt, Human
ucugggcugugccaaagcucuu

SEQ ID NO: 624447 - RNA, 22 nt, Human
cacugguguacaggagguaaaa

SEQ ID NO: 624448 - RNA, 22 nt, Human
cauggaauuuucuaggcauaaa

SEQ ID NO: 624449 - RNA, 22 nt, Human
ucagaagccggaagugcuccuc

SEQ ID NO: 624450 - RNA, 22 nt, Human
cugaagucauacacuguucuga

SEQ ID NO: 624451 - RNA, 23 nt, Human
ugagcugguauuguccaucucca

SEQ ID NO: 624452 - RNA, 22 nt, Human
uaaucacaauucagaugucuua

SEQ ID NO: 624453 - RNA, 22 nt, Human
gcaaugaggagugguagggaua

SEQ ID NO: 624454 - RNA, 22 nt, Human
agcugguauuuguuagggaguu

SEQ ID NO: 624455 - RNA, 22 nt, Human
gccaagaaagaacagcagggaa

SEQ ID NO: 624456 - RNA, 22 nt, Human
uucacauuagccaagagaugga

SEQ ID NO: 624457 - RNA, 22 nt, Human
cugggagcccugacuagccugg

SEQ ID NO: 624458 - RNA, 22 nt, Human
ugggaugagggugagccacaug

SEQ ID NO: 624459 - RNA, 22 nt, Human
auugaccugauuguuccuggaa

SEQ ID NO: 624460 - RNA, 22 nt, Human
aggcacuucauggguucaagga

SEQ ID NO: 624461 - RNA, 23 nt, Human
uccccucaggcagccagugcccu

SEQ ID NO: 624462 - RNA, 22 nt, Human
ccaggucucgggucugcucgug

SEQ ID NO: 624463 - RNA, 22 nt, Human
uuucaaaguugggaauuguaau

SEQ ID NO: 624464 - RNA, 22 nt, Human
agggagaguagauaucaggugu

SEQ ID NO: 624465 - RNA, 22 nt, Human
ugaucauuaucaaacuggucau

SEQ ID NO: 624466 - RNA, 22 nt, Human
gcugucccuuucacaagguuuu

SEQ ID NO: 624467 - RNA, 22 nt, Human
uaugucuggaauuugagguuca

SEQ ID NO: 624468 - RNA, 22 nt, Human
aaguguguuuccgugauugagg

SEQ ID NO: 624469 - RNA, 22 nt, Human
gcuugggagaggcuuccucuuu

SEQ ID NO: 624470 - RNA, 22 nt, Human
gcacaauuauuuaugcaguaug

SEQ ID NO: 624471 - RNA, 22 nt, Human
uauauguagucagucagaguaa

SEQ ID NO: 624472 - RNA, 22 nt, Human
cuauacuacuauacagauguaa

SEQ ID NO: 624473 - RNA, 22 nt, Human
ugggcuggcccaccacaccucg

SEQ ID NO: 624474 - RNA, 22 nt, Human
gagcuggggcagcuuaggagug

SEQ ID NO: 624475 - RNA, 20 nt, Human
cagcaguggaugagaguuuu

SEQ ID NO: 624476 - RNA, 22 nt, Human
ggagugaggcauuuguagcuga

SEQ ID NO: 624477 - RNA, 22 nt, Human
uaggucuguaaaugagagagac

SEQ ID NO: 624478 - RNA, 22 nt, Human
ggagggguggucgcgaagagca

SEQ ID NO: 624479 - RNA, 21 nt, Human
uguaaguuucaucugaauugg

SEQ ID NO: 624480 - RNA, 22 nt, Human
agccuggagaggcgccauacac

SEQ ID NO: 624481 - RNA, 22 nt, Human
ugggagcaggugugcuagggaa

SEQ ID NO: 624482 - RNA, 22 nt, Human
aaugucauuuaggauuauguuu

SEQ ID NO: 624483 - RNA, 22 nt, Human
cuuggcuuuugcucccagauca

SEQ ID NO: 624484 - RNA, 22 nt, Human
uucaugaauaccccuucuguaa

SEQ ID NO: 624485 - RNA, 18 nt, Human
ccucagggagauccagug

SEQ ID NO: 624486 - RNA, 22 nt, Human
uuucuuuugcccuguggguuag

SEQ ID NO: 624487 - RNA, 22 nt, Human
gaagccagcaguggagaaagga

SEQ ID NO: 624488 - RNA, 22 nt, Human
ucugccugaggacugacaccag

SEQ ID NO: 624489 - RNA, 22 nt, Human
cugcucggcgcgcauggcugcc

SEQ ID NO: 624490 - RNA, 20 nt, Human
ucuagcuuagugccugccuc

SEQ ID NO: 624491 - RNA, 20 nt, Human
ugugugcuaggacuacagug

SEQ ID NO: 624492 - RNA, 22 nt, Human
gcaggccuccccugcuggagcu

SEQ ID NO: 624493 - RNA, 22 nt, Human
cacgcacgcuggguggaggcgc

SEQ ID NO: 624494 - RNA, 23 nt, Human
uggccaggcauaaaggugggugg

SEQ ID NO: 624495 - RNA, 19 nt, Human
ccuggguccacucagacua

SEQ ID NO: 624496 - RNA, 22 nt, Human
aauaguucuagcucagaagcuc

SEQ ID NO: 624497 - RNA, 22 nt, Human
agcuggcauuacaggagcaugc

SEQ ID NO: 624498 - RNA, 22 nt, Human
cuggagccacuuuuuauccuuu

SEQ ID NO: 624499 - RNA, 22 nt, Human
gggcaagcucuucagaagcucu

SEQ ID NO: 624500 - RNA, 22 nt, Human
agaauuuuugauuaucuacucg

SEQ ID NO: 624501 - RNA, 22 nt, Human
acacugucugggacucaggagu

SEQ ID NO: 624502 - RNA, 22 nt, Human
aggcaaauugugagaaaaugaa

SEQ ID NO: 624503 - RNA, 22 nt, Human
uauauuugugugugauuuauga

SEQ ID NO: 624504 - RNA, 22 nt, Human
uuuggcauagcucuuuguuccu

SEQ ID NO: 624505 - RNA, 22 nt, Human
gaguccaguaguuaggacagag

SEQ ID NO: 624506 - RNA, 22 nt, Human
agucucuuggcauucugaaaca

SEQ ID NO: 624507 - RNA, 22 nt, Human
auaccuuuuagacauguaguug

SEQ ID NO: 624508 - RNA, 22 nt, Human
uccagccacucagcagggauug

SEQ ID NO: 624509 - RNA, 22 nt, Human
gccugaccucuucugcccuggg

SEQ ID NO: 624510 - RNA, 22 nt, Human
gcccaagccgccuuccagagac

SEQ ID NO: 624511 - RNA, 22 nt, Human
auucuagcccuggaacggcgac

SEQ ID NO: 624512 - RNA, 22 nt, Human
gaugcugaagugaagugaucuu

SEQ ID NO: 624513 - RNA, 22 nt, Human
gcugcaggagcuggagcugugg

SEQ ID NO: 624514 - RNA, 20 nt, Human
aggacuuguuugggcagagu

SEQ ID NO: 624515 - RNA, 22 nt, Human
uaaaucaguuucucuuauuggu

SEQ ID NO: 624516 - RNA, 22 nt, Human
agggaccucauguaaguggauu

SEQ ID NO: 624517 - RNA, 22 nt, Human
aaagccacugcauguguaguau

SEQ ID NO: 624518 - RNA, 22 nt, Human
cugggcugcaggaguggggcaa

SEQ ID NO: 624519 - RNA, 22 nt, Human
aagaauacguaucaacaauggu

SEQ ID NO: 624520 - RNA, 22 nt, Human
gugcaagaaggggagacugggu

SEQ ID NO: 624521 - RNA, 22 nt, Human
cucaaaagacuuaaacauaaga

SEQ ID NO: 624522 - RNA, 22 nt, Human
cacagcagucuuucacuaaaua

SEQ ID NO: 624523 - RNA, 22 nt, Human
caguuuuugccauuaagaguaa

SEQ ID NO: 624524 - RNA, 23 nt, Human
auuuuacaggucaguuccuugaa

SEQ ID NO: 624525 - RNA, 22 nt, Human
uccuuuaucugcucagaaagua

SEQ ID NO: 624526 - RNA, 22 nt, Human
cuggccuaggaaugguuuuccg

SEQ ID NO: 624527 - RNA, 22 nt, Human
ugccacagacaggacagaacag

SEQ ID NO: 624528 - RNA, 22 nt, Human
ccagggggcuuggugaggccau

SEQ ID NO: 624529 - RNA, 23 nt, Human
acauuacuuagccagagucucag

SEQ ID NO: 624530 - RNA, 22 nt, Human
uccugaggaugguugaagugca

SEQ ID NO: 624531 - RNA, 22 nt, Human
gggcuggagccagcuguggcug

SEQ ID NO: 624532 - RNA, 22 nt, Human
ucagagugcagcgggaggcugg

SEQ ID NO: 624533 - RNA, 22 nt, Human
aaugagcuucuauaaucuuguc

SEQ ID NO: 624534 - RNA, 22 nt, Human
ucccagccacagguguagcccu

SEQ ID NO: 624535 - RNA, 22 nt, Human
aaacaugcauucaagaaaaucu

SEQ ID NO: 624536 - RNA, 22 nt, Human
uaaaggaggaguuaaugagacu

SEQ ID NO: 624537 - RNA, 22 nt, Human
ugugagugaaugggucugaagu

SEQ ID NO: 624538 - RNA, 22 nt, Human
ggcacagggagccgcaguugca

SEQ ID NO: 624539 - RNA, 22 nt, Human
aacucucucuggcucccagcaa

SEQ ID NO: 624540 - RNA, 22 nt, Human
ucugcugcagggaaagacuuuc

SEQ ID NO: 624541 - RNA, 22 nt, Human
cuguauuuaguuaaaaugcuaa

SEQ ID NO: 624542 - RNA, 22 nt, Human
uuagccauggacugaauugacu

SEQ ID NO: 624543 - RNA, 22 nt, Human
gggaggcucugcucagcccccg

SEQ ID NO: 624544 - RNA, 17 nt, Human
ggcagggugcuggguau

SEQ ID NO: 624545 - RNA, 22 nt, Human
caggaugaagggcaaaggcaag

SEQ ID NO: 624546 - RNA, 18 nt, Human
ucuuggcagcaucuggca

SEQ ID NO: 624547 - RNA, 22 nt, Human
uggagagcacaguuccugcuuc

SEQ ID NO: 624548 - RNA, 22 nt, Human
uuguccuugugauaguuugcug

SEQ ID NO: 624549 - RNA, 22 nt, Human
uuccugugcuuaauucucacug

SEQ ID NO: 624550 - RNA, 22 nt, Human
acaaauagaaaaucuggauugg

SEQ ID NO: 624551 - RNA, 18 nt, Human
gccagagggaagcaggug

SEQ ID NO: 624552 - RNA, 22 nt, Human
agacagacugguuugaauuggu

SEQ ID NO: 624553 - RNA, 22 nt, Human
gacauuuguuccucuaagugac

SEQ ID NO: 624554 - RNA, 22 nt, Human
ucucaucugccauuugcaggag

SEQ ID NO: 624555 - RNA, 22 nt, Human
ccaggaguuugaggcugcagug

SEQ ID NO: 624556 - RNA, 22 nt, Human
uucuuuagcaacuuggauuuag

SEQ ID NO: 624557 - RNA, 22 nt, Human
gggcuccaucacaggcuccauc

SEQ ID NO: 624558 - RNA, 22 nt, Human
ccuuccucauccauuucucuug

SEQ ID NO: 624559 - RNA, 22 nt, Human
aagcacagacacaaaaggcuuu

SEQ ID NO: 624560 - RNA, 21 nt, Human
ggcugggcaggacccaccccu

SEQ ID NO: 624561 - RNA, 22 nt, Human
aguuuuucuccccuggcuucau

SEQ ID NO: 624562 - RNA, 22 nt, Human
cagagccucugcccugggcacu

SEQ ID NO: 624563 - RNA, 20 nt, Human
ucuggugccccuuccugaga

SEQ ID NO: 624564 - RNA, 22 nt, Human
gugacauuuuuacugaugagag

SEQ ID NO: 624565 - RNA, 22 nt, Human
cuggcugcuugggacagccaug

SEQ ID NO: 624566 - RNA, 22 nt, Human
cugggucccacagccugcuggg

SEQ ID NO: 624567 - RNA, 17 nt, Human
gcccuggagccaggcua

SEQ ID NO: 624568 - RNA, 23 nt, Human
gcaguguuugcuucaucuuaucc

SEQ ID NO: 624569 - RNA, 22 nt, Human
auaaaggccaaaauuugcauuu

SEQ ID NO: 624570 - RNA, 22 nt, Human
ccaggcagccaagugugugugu

SEQ ID NO: 624571 - RNA, 22 nt, Human
uacacauacaccaaugugguca

SEQ ID NO: 624572 - RNA, 22 nt, Human
ugacagaaugugacucucagau

SEQ ID NO: 624573 - RNA, 22 nt, Human
ucccagagcucugacaccagcu

SEQ ID NO: 624574 - RNA, 19 nt, Human
gagaaagcaggcacagcac

SEQ ID NO: 624575 - RNA, 22 nt, Human
ccagguggcccugcccuacucu

SEQ ID NO: 624576 - RNA, 22 nt, Human
uuugauucaaaaaccacuccac

SEQ ID NO: 624577 - RNA, 22 nt, Human
ugcagcagaauauggcugcagg

SEQ ID NO: 624578 - RNA, 22 nt, Human
ugggggcugugcacaggcucac

SEQ ID NO: 624579 - RNA, 22 nt, Human
caggauguugcucccauguccc

SEQ ID NO: 624580 - RNA, 22 nt, Human
aauccaggguguggccuuucca

SEQ ID NO: 624581 - RNA, 22 nt, Human
ugcaccuuuaaauucagcagua

SEQ ID NO: 624582 - RNA, 22 nt, Human
agcagcaucuucuguucuccgc

SEQ ID NO: 624583 - RNA, 20 nt, Human
cccaggugucugaagcucug

SEQ ID NO: 624584 - RNA, 21 nt, Human
gaggacugcacacucugauug

SEQ ID NO: 624585 - RNA, 22 nt, Human
gaagucagucaucuccugucuc

SEQ ID NO: 624586 - RNA, 22 nt, Human
ggcagcacgacaggaguggaag

SEQ ID NO: 624587 - RNA, 22 nt, Human
uucaucaugauguuccccucua

SEQ ID NO: 624588 - RNA, 22 nt, Human
guaggcugugugaggcuagaga

SEQ ID NO: 624589 - RNA, 20 nt, Human
aggaaggaaguuugcaugga

SEQ ID NO: 624590 - RNA, 22 nt, Human
agaacagcaggaaggccaggua

SEQ ID NO: 624591 - RNA, 22 nt, Human
guuauauaauuccugugguagu

SEQ ID NO: 624592 - RNA, 22 nt, Human
cccaggacucuucacugcagcc

SEQ ID NO: 624593 - RNA, 22 nt, Human
acacagggcggaaagcaugaga

SEQ ID NO: 624594 - RNA, 22 nt, Human
uaagaugucuaagaggagaugc

SEQ ID NO: 624595 - RNA, 22 nt, Human
uccugggaccaggcaccuacug

SEQ ID NO: 624596 - RNA, 22 nt, Human
gggugacauuucccaaugagcc

SEQ ID NO: 624597 - RNA, 22 nt, Human
aaggaggagugggguccuggaa

SEQ ID NO: 624598 - RNA, 22 nt, Human
acuggacucacguauuccugag

SEQ ID NO: 624599 - RNA, 22 nt, Human
uuucauuauacagcuucauaaa

SEQ ID NO: 624600 - RNA, 22 nt, Human
aaaaguaauugugguuuuugcu

SEQ ID NO: 624601 - RNA, 22 nt, Human
acagagcugggaucugaaccca

SEQ ID NO: 624602 - RNA, 22 nt, Human
aggccaaguagcuagcauugaa

SEQ ID NO: 624603 - RNA, 22 nt, Human
acaugcaugguguuggguugga

SEQ ID NO: 624604 - RNA, 22 nt, Human
ugcagaaggccugacauugcac

SEQ ID NO: 624605 - RNA, 22 nt, Human
uuauuugaaaagaagguuacgu

SEQ ID NO: 624606 - RNA, 22 nt, Human
ugccuggcaccccagucugcac

SEQ ID NO: 624607 - RNA, 19 nt, Human
gcagguggauguggucagc

SEQ ID NO: 624608 - RNA, 22 nt, Human
uccucuucaaaauagcucugaa

SEQ ID NO: 624609 - RNA, 22 nt, Human
ccagcaggacuuuggaaauaug

SEQ ID NO: 624610 - RNA, 20 nt, Human
gcuguuaguugggggcuccc

SEQ ID NO: 624611 - RNA, 22 nt, Human
aagcccuguucuuucucucacc

SEQ ID NO: 624612 - RNA, 22 nt, Human
cccaggaggcagagguugcagu

SEQ ID NO: 624613 - RNA, 22 nt, Human
ucagggcacauucugcaguggc

SEQ ID NO: 624614 - RNA, 22 nt, Human
gagcaacaguggcagugguggg

SEQ ID NO: 624615 - RNA, 23 nt, Human
agacacuguaaagaauugcaguu

SEQ ID NO: 624616 - RNA, 22 nt, Human
gagcuuggcagugucacuaggg

SEQ ID NO: 624617 - RNA, 22 nt, Human
uguguucaccaaaguguagaaa

SEQ ID NO: 624618 - RNA, 22 nt, Human
ggcuccagaugucuccuggcaa

SEQ ID NO: 624619 - RNA, 22 nt, Human
cuguauaacaucuuuuguuucc

SEQ ID NO: 624620 - RNA, 22 nt, Human
aauguguagauguugcauuccu

SEQ ID NO: 624621 - RNA, 22 nt, Human
ucauggcucuaaagacauagau

SEQ ID NO: 624622 - RNA, 22 nt, Human
ucagccaggccaggcauucaca

SEQ ID NO: 624623 - RNA, 22 nt, Human
acagugucaugucguguucccc

SEQ ID NO: 624624 - RNA, 22 nt, Human
ugucccuggaacuauggcucca

SEQ ID NO: 624625 - RNA, 22 nt, Human
cuguggcucucugcaggguccc

SEQ ID NO: 624626 - RNA, 22 nt, Human
aguaacuaugcuugagaaucag

SEQ ID NO: 624627 - RNA, 22 nt, Human
ucucagugcagcaaggaauuua

SEQ ID NO: 624628 - RNA, 22 nt, Human
ucugugcaguucuugucuugac

SEQ ID NO: 624629 - RNA, 22 nt, Human
uucagaguuagacgaaaagcaa

SEQ ID NO: 624630 - RNA, 23 nt, Human
aucauuacuuugauaccuuuucu

SEQ ID NO: 624631 - RNA, 22 nt, Human
ggccuggaaggacagcgugaug

SEQ ID NO: 624632 - RNA, 20 nt, Human
uuucacagucccuguuuccu

SEQ ID NO: 624633 - RNA, 22 nt, Human
ccaguccaggccauggauuuug

SEQ ID NO: 624634 - RNA, 22 nt, Human
ucauauuaggguaaugauaaga

SEQ ID NO: 624635 - RNA, 22 nt, Human
uuccagggaagagcaaggcagu

SEQ ID NO: 624636 - RNA, 22 nt, Human
cagagauggggccagcugcucc

SEQ ID NO: 624637 - RNA, 22 nt, Human
aaggcacauuccugaaaacaau

SEQ ID NO: 624638 - RNA, 22 nt, Human
cuuguguggucuggucuugcua

SEQ ID NO: 624639 - RNA, 22 nt, Human
uacagguaaaauuaucagaaac

SEQ ID NO: 624640 - RNA, 23 nt, Human
ugguccugguugaggugggcccc

SEQ ID NO: 624641 - RNA, 22 nt, Human
gacuacaggccggcaucagaga

SEQ ID NO: 624642 - RNA, 22 nt, Human
ugcaucaugcggaacuggcuuu

SEQ ID NO: 624643 - RNA, 22 nt, Human
gcuaguuucuugaauacucuaa

SEQ ID NO: 624644 - RNA, 22 nt, Human
acaggagaaaucuggucaaaag

SEQ ID NO: 624645 - RNA, 22 nt, Human
gauccugggcccuucuggguca

SEQ ID NO: 624646 - RNA, 22 nt, Human
gauauuuucauucggaugcuca

SEQ ID NO: 624647 - RNA, 22 nt, Human
uuccaaauuaaaauguacaaug

SEQ ID NO: 624648 - RNA, 22 nt, Human
uaaauucagugaguaauuucug

SEQ ID NO: 624649 - RNA, 22 nt, Human
cccugguguccacuggaggaag

SEQ ID NO: 624650 - RNA, 22 nt, Human
cuguauguuucuaugaauguga

SEQ ID NO: 624651 - RNA, 22 nt, Human
uccugguuuauagacugauggc

SEQ ID NO: 624652 - RNA, 22 nt, Human
uccugaggccucugugauguga

SEQ ID NO: 624653 - RNA, 23 nt, Human
gaauggcuaagcacauagacuug

SEQ ID NO: 624654 - RNA, 22 nt, Human
uuuuagaaggaaugcuauggug

SEQ ID NO: 624655 - RNA, 22 nt, Human
aaauugaauuugggaaacauug

SEQ ID NO: 624656 - RNA, 22 nt, Human
ucaccaggcuggaaugcagugg

SEQ ID NO: 624657 - RNA, 22 nt, Human
aauaacagagaaggguggcuuc

SEQ ID NO: 624658 - RNA, 21 nt, Human
cucagagcaguucagagggau

SEQ ID NO: 624659 - RNA, 22 nt, Human
uuccugggcucuggcuggccua

SEQ ID NO: 624660 - RNA, 22 nt, Human
auuauuuggaauaggcauugca

SEQ ID NO: 624661 - RNA, 22 nt, Human
uggcagauaaccugcugugccc

SEQ ID NO: 624662 - RNA, 22 nt, Human
aagaauaagaggauuuagaaca

SEQ ID NO: 624663 - RNA, 20 nt, Human
accagagauagcaauagugc

SEQ ID NO: 624664 - RNA, 22 nt, Human
ugacuucugauugcuucuauuu

SEQ ID NO: 624665 - RNA, 22 nt, Human
uuacuugauguaugaugaguag

SEQ ID NO: 624666 - RNA, 21 nt, Human
uggcugcuggcccucucucca

SEQ ID NO: 624667 - RNA, 22 nt, Human
uucaaauacauucuuugccacu

SEQ ID NO: 624668 - RNA, 22 nt, Human
gccaggacuagagggaggugag

SEQ ID NO: 624669 - RNA, 22 nt, Human
aagguccuuuugcagugugauc

SEQ ID NO: 624670 - RNA, 22 nt, Human
gcaaagauauuagaauagagua

SEQ ID NO: 624671 - RNA, 22 nt, Human
acauuugauaauuauaaagaca

SEQ ID NO: 624672 - RNA, 22 nt, Human
cagcuucagacccugggcugca

SEQ ID NO: 624673 - RNA, 22 nt, Human
aauacagaggaaacauuuaaua

SEQ ID NO: 624674 - RNA, 22 nt, Human
cugcaccauccuucaugcucug

SEQ ID NO: 624675 - RNA, 22 nt, Human
aggcuccagccaaugggucugu

SEQ ID NO: 624676 - RNA, 22 nt, Human
agacauuaugcugagugaaaga

SEQ ID NO: 624677 - RNA, 17 nt, Human
ucuccaggacgagcuca

SEQ ID NO: 624678 - RNA, 20 nt, Human
ugagacccgcugacaaguuc

SEQ ID NO: 624679 - RNA, 22 nt, Human
ucugggccugauggcuaaagcc

SEQ ID NO: 624680 - RNA, 23 nt, Human
caaagaugauuggaacauggcuu

SEQ ID NO: 624681 - RNA, 22 nt, Human
aauuucucucucaugcuucaug

SEQ ID NO: 624682 - RNA, 22 nt, Human
cagcuguggagauggggugcau

SEQ ID NO: 624683 - RNA, 22 nt, Human
gagcacagaacuaaaugcuggu

SEQ ID NO: 624684 - RNA, 22 nt, Human
ccagcuuucauaucaugaggua

SEQ ID NO: 624685 - RNA, 22 nt, Human
acugauacaucuguggaagugg

SEQ ID NO: 624686 - RNA, 21 nt, Human
agcacagcuuuaagccaugug

SEQ ID NO: 624687 - RNA, 22 nt, Human
guggccaagaaaauagaugcau

SEQ ID NO: 624688 - RNA, 22 nt, Human
ccucuucauccuggaagcugcu

SEQ ID NO: 624689 - RNA, 22 nt, Human
agagaaggcauagaacuugagu

SEQ ID NO: 624690 - RNA, 22 nt, Human
cacaaugcguacauauaucaaa

SEQ ID NO: 624691 - RNA, 21 nt, Human
gcaaguguuucugacaguggc

SEQ ID NO: 624692 - RNA, 22 nt, Human
ucuuuucaggaauggcucuagu

SEQ ID NO: 624693 - RNA, 22 nt, Human
aggugggcggaucacaagguca

SEQ ID NO: 624694 - RNA, 22 nt, Human
uuccaaguugagcgauuuuccu

SEQ ID NO: 624695 - RNA, 22 nt, Human
ucucaggguuuccugggggcug

SEQ ID NO: 624696 - RNA, 22 nt, Human
ucugccaggcauugugcugcuc

SEQ ID NO: 624697 - RNA, 22 nt, Human
auauagcugagggguauuauaa

SEQ ID NO: 624698 - RNA, 22 nt, Human
ucuucuuaugugccauuaucuc

SEQ ID NO: 624699 - RNA, 22 nt, Human
ccuggucccauugcggcugccu

SEQ ID NO: 624700 - RNA, 22 nt, Human
agucaagauucuggcacuagca

SEQ ID NO: 624701 - RNA, 21 nt, Human
cggcuucauuuucuucugguu

SEQ ID NO: 624702 - RNA, 22 nt, Human
cugggccacuuccucaggggaa

SEQ ID NO: 624703 - RNA, 22 nt, Human
uuucugaauuccuaggauguug

SEQ ID NO: 624704 - RNA, 22 nt, Human
cugucugaauccuaagcuuccu

SEQ ID NO: 624705 - RNA, 22 nt, Human
gaacaauacaggcuuuauuccu

SEQ ID NO: 624706 - RNA, 23 nt, Human
cuacagguuaauuuucaguggaa

SEQ ID NO: 624707 - RNA, 22 nt, Human
ugagaaaauuacuauaauuguc

SEQ ID NO: 624708 - RNA, 22 nt, Human
uuucagaaccgcuaaaauaaau

SEQ ID NO: 624709 - RNA, 22 nt, Human
acucugacuggagugagagagg

SEQ ID NO: 624710 - RNA, 22 nt, Human
cagaauaauauuggucucauag

SEQ ID NO: 624711 - RNA, 22 nt, Human
gugucccaaucuacuuuucccu

SEQ ID NO: 624712 - RNA, 22 nt, Human
ugcccuggagucaguggcuauu

SEQ ID NO: 624713 - RNA, 22 nt, Human
aaugaguuagaugagaaaauaa

SEQ ID NO: 624714 - RNA, 22 nt, Human
ucuggccccuggcaguccugga

SEQ ID NO: 624715 - RNA, 22 nt, Human
uaugcaaaucauuagauuuccu

SEQ ID NO: 624716 - RNA, 22 nt, Human
aagauucacagagugaaugaaa

SEQ ID NO: 624717 - RNA, 22 nt, Human
ccguauuauaaguuuuuccuuc

SEQ ID NO: 624718 - RNA, 22 nt, Human
aguaggaggcgggagcaugaag

SEQ ID NO: 624719 - RNA, 22 nt, Human
guuuccugugggaacucggcug

SEQ ID NO: 624720 - RNA, 22 nt, Human
guaccaugagcaucauguuuuu

SEQ ID NO: 624721 - RNA, 19 nt, Human
aucuugggaaaugguaacu

SEQ ID NO: 624722 - RNA, 22 nt, Human
uggccuggggaagaccaugggc

SEQ ID NO: 624723 - RNA, 22 nt, Human
gcacccagauagcaaggauuag

SEQ ID NO: 624724 - RNA, 22 nt, Human
ccuggcugaaccaaugaagugg

SEQ ID NO: 624725 - RNA, 22 nt, Human
uugaucuucaucgaaauauugu

SEQ ID NO: 624726 - RNA, 22 nt, Human
gcugggagcaaagccaugcaua

SEQ ID NO: 624727 - RNA, 22 nt, Human
aguggcugacaacuggguuaac

SEQ ID NO: 624728 - RNA, 22 nt, Human
caaaggaagcuccuugauggcg

SEQ ID NO: 624729 - RNA, 22 nt, Human
uguaugcuuuccaaaaaugcug

SEQ ID NO: 624730 - RNA, 22 nt, Human
ucaaaucucacucugcauuucu

SEQ ID NO: 624731 - RNA, 22 nt, Human
caaagcagcggauugggauagu

SEQ ID NO: 624732 - RNA, 22 nt, Human
ucucuaaaugauuguguacucc

SEQ ID NO: 624733 - RNA, 22 nt, Human
ucucaguguuguucugcagaug

SEQ ID NO: 624734 - RNA, 22 nt, Human
cugccuggcuaaacucaagucg

SEQ ID NO: 624735 - RNA, 22 nt, Human
aaaccuggacuuguaaugauaa

SEQ ID NO: 624736 - RNA, 22 nt, Human
cggcagagugugugcgugcaug

SEQ ID NO: 624737 - RNA, 22 nt, Human
ccagggcucugcuucugccaug

SEQ ID NO: 624738 - RNA, 17 nt, Human
cuguuccccacuacuca

SEQ ID NO: 624739 - RNA, 22 nt, Human
guggcagcugguaugcagacag

SEQ ID NO: 624740 - RNA, 22 nt, Human
aauguuugcaucuauucacaug

SEQ ID NO: 624741 - RNA, 22 nt, Human
uucuauguagauaaggcugcuc

SEQ ID NO: 624742 - RNA, 22 nt, Human
uuuauaguuauauacagauguu

SEQ ID NO: 624743 - RNA, 22 nt, Human
aggcuucagaaagaguaauugg

SEQ ID NO: 624744 - RNA, 22 nt, Human
ccucucucugcaucuggagggc

SEQ ID NO: 624745 - RNA, 22 nt, Human
ggccucugguucguggugaccu

SEQ ID NO: 624746 - RNA, 22 nt, Human
ugcaguguuccuguagccugcc

SEQ ID NO: 624747 - RNA, 22 nt, Human
cagaccugagguugaguaccag

SEQ ID NO: 624748 - RNA, 22 nt, Human
cccauggcaauaaggucacagg

SEQ ID NO: 624749 - RNA, 22 nt, Human
ucugggaacagcuuagcuccag

SEQ ID NO: 624750 - RNA, 22 nt, Human
acucuugaagguggugggagug

SEQ ID NO: 624751 - RNA, 19 nt, Human
uuccuggcucuucuguuuu

SEQ ID NO: 624752 - RNA, 22 nt, Human
uuccacuccuccugguggggug

SEQ ID NO: 624753 - RNA, 22 nt, Human
aggcaaaauaagccucuccugu

SEQ ID NO: 624754 - RNA, 22 nt, Human
ucguguguauucccucuccuuc

SEQ ID NO: 624755 - RNA, 22 nt, Human
ugcugcagcuuugucacaugca

SEQ ID NO: 624756 - RNA, 17 nt, Human
agggucaggugaaguuc

SEQ ID NO: 624757 - RNA, 21 nt, Human
ucccacagcgccagcuccugu

SEQ ID NO: 624758 - RNA, 22 nt, Human
ugguggcaaaucaggacacuuc

SEQ ID NO: 624759 - RNA, 22 nt, Human
aagugugugggcaggcaguggu

SEQ ID NO: 624760 - RNA, 22 nt, Human
aaauaaguuagcagauuccagu

SEQ ID NO: 624761 - RNA, 22 nt, Human
ucucagggcucagagcucaggc

SEQ ID NO: 624762 - RNA, 22 nt, Human
aagcauggagcaauagaaugac

SEQ ID NO: 624763 - RNA, 22 nt, Human
cccaccucucagagagccuugc

SEQ ID NO: 624764 - RNA, 22 nt, Human
ggccaaaagcauaauccucaca

SEQ ID NO: 624765 - RNA, 22 nt, Human
uguuucuagagaaaauauuuac

SEQ ID NO: 624766 - RNA, 22 nt, Human
augcaacaaaugcuacgaaucg

SEQ ID NO: 624767 - RNA, 22 nt, Human
cagggagcggagucccaugccu

SEQ ID NO: 624768 - RNA, 22 nt, Human
uuguuuccuuucuauacaggau

SEQ ID NO: 624769 - RNA, 22 nt, Human
uaagacaaauacuauuucaaga

SEQ ID NO: 624770 - RNA, 21 nt, Human
cuggcccagggaucugcauuu

SEQ ID NO: 624771 - RNA, 22 nt, Human
uaauauauuucugcuaagcuca

SEQ ID NO: 624772 - RNA, 23 nt, Human
ucucaaaucuuugcguuguaucu

SEQ ID NO: 624773 - RNA, 22 nt, Human
uaacacuggcuuuugcugaggc

SEQ ID NO: 624774 - RNA, 22 nt, Human
aagucagagaugccaaagauua

SEQ ID NO: 624775 - RNA, 22 nt, Human
uugauucugauccugucuggag

SEQ ID NO: 624776 - RNA, 22 nt, Human
augcuuuuccuaaaaugaugcc

SEQ ID NO: 624777 - RNA, 22 nt, Human
aaggcacugaaaaauugugugu

SEQ ID NO: 624778 - RNA, 22 nt, Human
agugaggggcagcugagugggc

SEQ ID NO: 624779 - RNA, 22 nt, Human
gcuggcacauggcucagggccu

SEQ ID NO: 624780 - RNA, 22 nt, Human
caggcugccaaggcuggggagg

SEQ ID NO: 624781 - RNA, 22 nt, Human
uauguguguuucaguggaaaug

SEQ ID NO: 624782 - RNA, 22 nt, Human
cccucccuauguagaugauguu

SEQ ID NO: 624783 - RNA, 22 nt, Human
aauugcuugaugacuaguaauu

SEQ ID NO: 624784 - RNA, 22 nt, Human
ugucccagcacuuugggagucu

SEQ ID NO: 624785 - RNA, 21 nt, Human
aagaugguuaugugcuaaaga

SEQ ID NO: 624786 - RNA, 22 nt, Human
cagaaauguuuauauguggugu

SEQ ID NO: 624787 - RNA, 20 nt, Human
uuuaucaggcacuuacuauu

SEQ ID NO: 624788 - RNA, 22 nt, Human
gcagagcagcaaauggaaagga

SEQ ID NO: 624789 - RNA, 20 nt, Human
ugaugguucuuuccggguug

SEQ ID NO: 624790 - RNA, 22 nt, Human
cucugggugugacagcaccugg

SEQ ID NO: 624791 - RNA, 22 nt, Human
cagcaucucugggagaagcauc

SEQ ID NO: 624792 - RNA, 22 nt, Human
ugggcagacgcuguuggaaggc

SEQ ID NO: 624793 - RNA, 22 nt, Human
agauugaagacugguggagcug

SEQ ID NO: 624794 - RNA, 22 nt, Human
cuguauuuucaugccuacguac

SEQ ID NO: 624795 - RNA, 22 nt, Human
cugcaggagcaagccugggaga

SEQ ID NO: 624796 - RNA, 18 nt, Human
caugucugcgccacaagg

SEQ ID NO: 624797 - RNA, 19 nt, Human
agcaguuauaugcauggga

SEQ ID NO: 624798 - RNA, 22 nt, Human
gaaacuguauguaguuuuuggg

SEQ ID NO: 624799 - RNA, 22 nt, Human
gaaggaagugcucauacuaguu

SEQ ID NO: 624800 - RNA, 22 nt, Human
aagucacaaagugcuguacaug

SEQ ID NO: 624801 - RNA, 23 nt, Human
aguuccagaaaaaugcucaagca

SEQ ID NO: 624802 - RNA, 22 nt, Human
ugcaguuuuaucacauauauag

SEQ ID NO: 624803 - RNA, 22 nt, Human
gaagcucucaaacucuccccuu

SEQ ID NO: 624804 - RNA, 22 nt, Human
aucagcaaucaaauugcagagu

SEQ ID NO: 624805 - RNA, 22 nt, Human
ucugcugaccuuucucugacac

SEQ ID NO: 624806 - RNA, 22 nt, Human
ugaagauuuaagcaucucaauu

SEQ ID NO: 624807 - RNA, 21 nt, Human
cccaggaggcugagaagagca

SEQ ID NO: 624808 - RNA, 22 nt, Human
uggcucuggccaccgggagggc

SEQ ID NO: 624809 - RNA, 22 nt, Human
cuucugugguaaacuuuguugu

SEQ ID NO: 624810 - RNA, 22 nt, Human
cagauaugcugagacuccugug

SEQ ID NO: 624811 - RNA, 22 nt, Human
ugugcagagcccacaggcagcu

SEQ ID NO: 624812 - RNA, 22 nt, Human
ggagccagaguuuaauguggag

SEQ ID NO: 624813 - RNA, 22 nt, Human
uuaaaggaucuuugucauuaau

SEQ ID NO: 624814 - RNA, 22 nt, Human
ucugucugcuucacuugcauuu

SEQ ID NO: 624815 - RNA, 22 nt, Human
guauacauagaugaugaacaag

SEQ ID NO: 624816 - RNA, 20 nt, Human
uuagcaguagagugugcuuc

SEQ ID NO: 624817 - RNA, 22 nt, Human
ccucagagaaaugucuauucaa

SEQ ID NO: 624818 - RNA, 22 nt, Human
ucaugcucaucauuagagugac

SEQ ID NO: 624819 - RNA, 22 nt, Human
cugaagcacagcauauaaauaa

SEQ ID NO: 624820 - RNA, 22 nt, Human
uuucaauuccaccaaagcgccc

SEQ ID NO: 624821 - RNA, 22 nt, Human
aaugcugucuuuucuacuucau

SEQ ID NO: 624822 - RNA, 22 nt, Human
ggacccugcagccacccgacau

SEQ ID NO: 624823 - RNA, 22 nt, Human
gcugacuguccgcugcucccgg

SEQ ID NO: 624824 - RNA, 22 nt, Human
caaaaaacacagaugucugugu

SEQ ID NO: 624825 - RNA, 22 nt, Human
cuacaggucaagcaguagcucu

SEQ ID NO: 624826 - RNA, 22 nt, Human
ccuuuagaauacagacuuucua

SEQ ID NO: 624827 - RNA, 19 nt, Human
agccagaacuaguguuucu

SEQ ID NO: 624828 - RNA, 22 nt, Human
aaugggaagucacuacuguuac

SEQ ID NO: 624829 - RNA, 22 nt, Human
uaaaugcaguuaguacuugcca

SEQ ID NO: 624830 - RNA, 22 nt, Human
gaggccaggagugcuguaaguu

SEQ ID NO: 624831 - RNA, 22 nt, Human
agaaacaucgcuuaguccucau

SEQ ID NO: 624832 - RNA, 23 nt, Human
uguaaagaucaagugacugauuu

SEQ ID NO: 624833 - RNA, 22 nt, Human
accaggagccacaggaggagcc

SEQ ID NO: 624834 - RNA, 23 nt, Human
accuagaaauacguuuuacaugg

SEQ ID NO: 624835 - RNA, 20 nt, Human
aauuagauguuuaaucaaua

SEQ ID NO: 624836 - RNA, 22 nt, Human
uugcuuuaagguaucuggagaa

SEQ ID NO: 624837 - RNA, 22 nt, Human
aaaauagaugaaaggaagucug

SEQ ID NO: 624838 - RNA, 22 nt, Human
gagcuggcuaauacugacuuau

SEQ ID NO: 624839 - RNA, 22 nt, Human
cuuguauugcaaacuggccagg

SEQ ID NO: 624840 - RNA, 22 nt, Human
augcugugauuguagaaauauu

SEQ ID NO: 624841 - RNA, 22 nt, Human
uuacagaaaauguguuuuaacu

SEQ ID NO: 624842 - RNA, 22 nt, Human
acaaaggacugaaacuggcugu

SEQ ID NO: 624843 - RNA, 22 nt, Human
uccacugacaggugaauggaua

SEQ ID NO: 624844 - RNA, 22 nt, Human
ugcagccuagacauucugguca

SEQ ID NO: 624845 - RNA, 22 nt, Human
agcugccuuuugagaaagcuca

SEQ ID NO: 624846 - RNA, 22 nt, Human
uaccacugcucccugccuguga

SEQ ID NO: 624847 - RNA, 22 nt, Human
aauagcauccuaaaacauacuu

SEQ ID NO: 624848 - RNA, 22 nt, Human
cacagugaauuucaaguguugu

SEQ ID NO: 624849 - RNA, 22 nt, Human
caauuucaugccauguauugcu

SEQ ID NO: 624850 - RNA, 22 nt, Human
caaguccucaaagggcucugcu

SEQ ID NO: 624851 - RNA, 22 nt, Human
auuagugucauguugaggacuu

SEQ ID NO: 624852 - RNA, 22 nt, Human
aaugucaacacaagagaaaugc

SEQ ID NO: 624853 - RNA, 22 nt, Human
caaggaaaaagcgagcucgggg

SEQ ID NO: 624854 - RNA, 21 nt, Human
acugagggccagagaggaccu

SEQ ID NO: 624855 - RNA, 22 nt, Human
uaauaugggcagucugaauaua

SEQ ID NO: 624856 - RNA, 22 nt, Human
cguuaauaggugcaagguaagg

SEQ ID NO: 624857 - RNA, 22 nt, Human
agguaaauucagcagugacauu

SEQ ID NO: 624858 - RNA, 22 nt, Human
uuucauguuggauacuguuuca

SEQ ID NO: 624859 - RNA, 22 nt, Human
ugggcagggaucucuuuugcaa

SEQ ID NO: 624860 - RNA, 22 nt, Human
uguacaugacagagagagccaa

SEQ ID NO: 624861 - RNA, 22 nt, Human
gacagaggcaagaccagaagcc

SEQ ID NO: 624862 - RNA, 22 nt, Human
agagaauuuuaaaagccuugaa

SEQ ID NO: 624863 - RNA, 22 nt, Human
gcugcccaggcaacauugacuu

SEQ ID NO: 624864 - RNA, 23 nt, Human
guaggaauuuucacuuccucuug

SEQ ID NO: 624865 - RNA, 18 nt, Human
ucauuuugucugccuuug

SEQ ID NO: 624866 - RNA, 22 nt, Human
ugcccagcuucuuacuuuuaaa

SEQ ID NO: 624867 - RNA, 22 nt, Human
uauaaagcugacucaugaaacu

SEQ ID NO: 624868 - RNA, 22 nt, Human
aacuugcuuauauuauuacauu

SEQ ID NO: 624869 - RNA, 20 nt, Human
uggguccugugggagaagaa

SEQ ID NO: 624870 - RNA, 22 nt, Human
cagggcuggcucaugaaaaguu

SEQ ID NO: 624871 - RNA, 22 nt, Human
acuggaaauugagaggucacug

SEQ ID NO: 624872 - RNA, 22 nt, Human
uaugaagugucuguuguaucug

SEQ ID NO: 624873 - RNA, 22 nt, Human
agccucugugacucacagguca

SEQ ID NO: 624874 - RNA, 22 nt, Human
ugcugccucagcuuccugggcu

SEQ ID NO: 624875 - RNA, 22 nt, Human
agaauaauacugaaaugcugaa

SEQ ID NO: 624876 - RNA, 22 nt, Human
ugaugaaaguguuuacucaccu

SEQ ID NO: 624877 - RNA, 22 nt, Human
agguucaguaaauguuaguuga

SEQ ID NO: 624878 - RNA, 22 nt, Human
gucugaagccagugguaguccg

SEQ ID NO: 624879 - RNA, 22 nt, Human
agcccagccacuauuaaauguu

SEQ ID NO: 624880 - RNA, 22 nt, Human
gaagaugugggcccacuccaga

SEQ ID NO: 624881 - RNA, 22 nt, Human
caggucagagucccccuguccu

SEQ ID NO: 624882 - RNA, 22 nt, Human
ugugcugcucucagugacagcc

SEQ ID NO: 624883 - RNA, 22 nt, Human
aauugagugcagccagcccagu

SEQ ID NO: 624884 - RNA, 22 nt, Human
aguucacucuuuaugagaaagu

SEQ ID NO: 624885 - RNA, 22 nt, Human
augcagguugggcaaguguggg

SEQ ID NO: 624886 - RNA, 22 nt, Human
auuguguaauuuucagcucaua

SEQ ID NO: 624887 - RNA, 22 nt, Human
ggaaagaauagagacuuuauca

SEQ ID NO: 624888 - RNA, 23 nt, Human
agcccagcagagaaccuaggucc

SEQ ID NO: 624889 - RNA, 22 nt, Human
gcaaaaaccacaauuacuuuua

SEQ ID NO: 624890 - RNA, 22 nt, Human
acugcuuuucuaagauucugug

SEQ ID NO: 624891 - RNA, 22 nt, Human
aauugcuuuuauuuagggccag

SEQ ID NO: 624892 - RNA, 22 nt, Human
ugcaguucuaaguagacaaguc

SEQ ID NO: 624893 - RNA, 22 nt, Human
ggcaggcacugugcuaggcgcu

SEQ ID NO: 624894 - RNA, 22 nt, Human
cagaggccucacuuccagccag

SEQ ID NO: 624895 - RNA, 22 nt, Human
aggguucugccagugucuugag

SEQ ID NO: 624896 - RNA, 16 nt, Human
uuuauuuacuaguguu

SEQ ID NO: 624897 - RNA, 22 nt, Human
gaacuuuauaacuguaaauguc

SEQ ID NO: 624898 - RNA, 22 nt, Human
gcagaccagccccuggagcugc

SEQ ID NO: 624899 - RNA, 22 nt, Human
uaacaaugauuagugacuacag

SEQ ID NO: 624900 - RNA, 22 nt, Human
acagccagguaaaggcauggca

SEQ ID NO: 624901 - RNA, 22 nt, Human
uugaagauuauucuauuaaaag

SEQ ID NO: 624902 - RNA, 22 nt, Human
caucauuuguucacuugauucc

SEQ ID NO: 624903 - RNA, 22 nt, Human
accagcugcugauugcuaaaug

SEQ ID NO: 624904 - RNA, 22 nt, Human
agggugaaucucacaacucuua

SEQ ID NO: 624905 - RNA, 22 nt, Human
ucuccagggcagagaauagcaa

SEQ ID NO: 624906 - RNA, 22 nt, Human
uuccucagcuggccugauuggg

SEQ ID NO: 624907 - RNA, 22 nt, Human
ugccaggcccugcgggguccca

SEQ ID NO: 624908 - RNA, 22 nt, Human
uccaucugucuuucccauccac

SEQ ID NO: 624909 - RNA, 22 nt, Human
gcugcagacuucucaucucauu

SEQ ID NO: 624910 - RNA, 22 nt, Human
uccagcugcugccagccaagcu

SEQ ID NO: 624911 - RNA, 22 nt, Human
auuccagauguuacugaaaggc

SEQ ID NO: 624912 - RNA, 22 nt, Human
uggcauggcuacuggaauggcg

SEQ ID NO: 624913 - RNA, 22 nt, Human
uuccacucuacacacugcuggc

SEQ ID NO: 624914 - RNA, 22 nt, Human
cugauuguguuccugggagcug

SEQ ID NO: 624915 - RNA, 22 nt, Human
cuugcagaugugacuaaauuaa

SEQ ID NO: 624916 - RNA, 22 nt, Human
guagcaauguugaacacugcgu

SEQ ID NO: 624917 - RNA, 22 nt, Human
gucauuguguggacauggagaa

SEQ ID NO: 624918 - RNA, 22 nt, Human
cacauguccuggcgcugagccc

SEQ ID NO: 624919 - RNA, 22 nt, Human
uccaaacacccuccaugcugca

SEQ ID NO: 624920 - RNA, 22 nt, Human
agacucuggcaugcuaacuagu

SEQ ID NO: 624921 - RNA, 22 nt, Human
ugagucagccagagcugccaug

SEQ ID NO: 624922 - RNA, 22 nt, Human
acccagcccagaaucuggggcc

SEQ ID NO: 624923 - RNA, 22 nt, Human
aggagguguugauagaagguuu

SEQ ID NO: 624924 - RNA, 22 nt, Human
uaaagcaggccacauaugugau

SEQ ID NO: 624925 - RNA, 22 nt, Human
ugaaaugcaacaguuauuuuug

SEQ ID NO: 624926 - RNA, 20 nt, Human
agaacuguuguuuggguccu

SEQ ID NO: 624927 - RNA, 22 nt, Human
ggcuagaguggaacuggagcgg

SEQ ID NO: 624928 - RNA, 22 nt, Human
aucagcuucauaaaguugguca

SEQ ID NO: 624929 - RNA, 22 nt, Human
ugcaagcuuggcugauguugau

SEQ ID NO: 624930 - RNA, 22 nt, Human
auucaguucuggcugccuuccu

SEQ ID NO: 624931 - RNA, 22 nt, Human
cuggcuuuggaacaaaucauag

SEQ ID NO: 624932 - RNA, 22 nt, Human
uggauuaguuaagaaauguuag

SEQ ID NO: 624933 - RNA, 19 nt, Human
uuuuuaaugggcuggagca

SEQ ID NO: 624934 - RNA, 22 nt, Human
gcuccaggagcucacagcucgc

SEQ ID NO: 624935 - RNA, 22 nt, Human
uagacauuucugguuauugaca

SEQ ID NO: 624936 - RNA, 22 nt, Human
uuaucugucuaucaagacuagc

SEQ ID NO: 624937 - RNA, 22 nt, Human
gcuguguaccuacuaacugcuu

SEQ ID NO: 624938 - RNA, 22 nt, Human
gcuggcugaggucuagcucuuu

SEQ ID NO: 624939 - RNA, 22 nt, Human
uuauaggccaucuaaguaauuu

SEQ ID NO: 624940 - RNA, 22 nt, Human
gcuuucugggcuauagaacggg

SEQ ID NO: 624941 - RNA, 22 nt, Human
aacuucaaaugugacuuugcau

SEQ ID NO: 624942 - RNA, 22 nt, Human
aucaaaucauugcauuaauguu

SEQ ID NO: 624943 - RNA, 23 nt, Human
ugcuggaauuuguacccuggcag

SEQ ID NO: 624944 - RNA, 22 nt, Human
auuguuaugaaaauaagauguu

SEQ ID NO: 624945 - RNA, 22 nt, Human
uggcagaguuauggguauuuau

SEQ ID NO: 624946 - RNA, 18 nt, Human
gaggaacauucaccuccu

SEQ ID NO: 624947 - RNA, 22 nt, Human
ugauuuccaugaagcugaaggc

SEQ ID NO: 624948 - RNA, 22 nt, Human
ucaccuugugaucucccugccu

SEQ ID NO: 624949 - RNA, 22 nt, Human
cauguauagguccauagugaau

SEQ ID NO: 624950 - RNA, 22 nt, Human
gggcaggagaagguggaugucc

SEQ ID NO: 624951 - RNA, 22 nt, Human
uaaugcuuugucagccuaaggg

SEQ ID NO: 624952 - RNA, 22 nt, Human
agcugcagccgcagcuguggcc

SEQ ID NO: 624953 - RNA, 22 nt, Human
ucugggucuaucccaugccuuu

SEQ ID NO: 624954 - RNA, 22 nt, Human
uugucccugccccugcuugcuu

SEQ ID NO: 624955 - RNA, 22 nt, Human
ugguuucucagacucuuugcag

SEQ ID NO: 624956 - RNA, 22 nt, Human
gggcaugccugcgcagugcaug

SEQ ID NO: 624957 - RNA, 22 nt, Human
aggucugagucccagggguacc

SEQ ID NO: 624958 - RNA, 22 nt, Human
auaaagcaucuagucugucacu

SEQ ID NO: 624959 - RNA, 22 nt, Human
cauaagaauauuccauccuuug

SEQ ID NO: 624960 - RNA, 22 nt, Human
acaggggaccuaggacccucgg

SEQ ID NO: 624961 - RNA, 22 nt, Human
cucaguccgucccgcuaggugc

SEQ ID NO: 624962 - RNA, 22 nt, Human
acccucaugaagcuggccugga

SEQ ID NO: 624963 - RNA, 22 nt, Human
uuggaaaauguauuucuagaag

SEQ ID NO: 624964 - RNA, 23 nt, Human
aaguucaagucacagccugucuu

SEQ ID NO: 624965 - RNA, 22 nt, Human
guuugcauaucugugaaaugga

SEQ ID NO: 624966 - RNA, 22 nt, Human
ccaggucccuggaauuuaugag

SEQ ID NO: 624967 - RNA, 22 nt, Human
gagagcuauuuggcaagcauuu

SEQ ID NO: 624968 - RNA, 22 nt, Human
aaggcuuggaguaagcuuggcu

SEQ ID NO: 624969 - RNA, 23 nt, Human
ccucucuuuuuaggugguguuug

SEQ ID NO: 624970 - RNA, 22 nt, Human
auggcauugcaagggcaggagg

SEQ ID NO: 624971 - RNA, 21 nt, Human
uguuucaugcuauuuucuugu

SEQ ID NO: 624972 - RNA, 22 nt, Human
auacucagcugcuagacagaag

SEQ ID NO: 624973 - RNA, 19 nt, Human
caggcccuggacccaucug

SEQ ID NO: 624974 - RNA, 22 nt, Human
uucuuuauguuaaugaaucuau

SEQ ID NO: 624975 - RNA, 21 nt, Human
aucauuaauugcugagugaca

SEQ ID NO: 624976 - RNA, 22 nt, Human
uuuuuccuagcgauuugucagc

SEQ ID NO: 624977 - RNA, 23 nt, Human
auguaucucauccaaggaagcuc

SEQ ID NO: 624978 - RNA, 22 nt, Human
cucccucccuacgugagcucac

SEQ ID NO: 624979 - RNA, 18 nt, Human
gagaaaccugugaaugcu

SEQ ID NO: 624980 - RNA, 23 nt, Human
cuucagcagaaacauaaauucuc

SEQ ID NO: 624981 - RNA, 22 nt, Human
gaagccaagggcugcuuuuccu

SEQ ID NO: 624982 - RNA, 22 nt, Human
uaauagaauaguggaaacauug

SEQ ID NO: 624983 - RNA, 22 nt, Human
cacuguuuuauuccaacauagg

SEQ ID NO: 624984 - RNA, 22 nt, Human
caagagcauuuaguuagcuggu

SEQ ID NO: 624985 - RNA, 22 nt, Human
cauuaaauaucaaccuagacua

SEQ ID NO: 624986 - RNA, 20 nt, Human
ugcuggaaaaagucacucau

SEQ ID NO: 624987 - RNA, 22 nt, Human
aacucauucuaaguauaccaaa

SEQ ID NO: 624988 - RNA, 22 nt, Human
auucaguuccuugugauuguag

SEQ ID NO: 624989 - RNA, 22 nt, Human
ucuccaggugacucugauguau

SEQ ID NO: 624990 - RNA, 22 nt, Human
uaagagcuccaauauuuguggc

SEQ ID NO: 624991 - RNA, 22 nt, Human
gucaggaugcuauuguuauuaa

SEQ ID NO: 624992 - RNA, 18 nt, Human
gguggcucagucaugggg

SEQ ID NO: 624993 - RNA, 22 nt, Human
agcucagagggaggugaagugg

SEQ ID NO: 624994 - RNA, 22 nt, Human
uuccagugacuaagcuucugcu

SEQ ID NO: 624995 - RNA, 22 nt, Human
ugcuugggcggccagcauggcg

SEQ ID NO: 624996 - RNA, 22 nt, Human
ggugugggggcaaguuugagau

SEQ ID NO: 624997 - RNA, 22 nt, Human
aggcacuuuaggaucagguuga

SEQ ID NO: 624998 - RNA, 22 nt, Human
ugucugccaccccaucaagcuc

SEQ ID NO: 624999 - RNA, 22 nt, Human
cucuugggugggcagugggccu

SEQ ID NO: 625000 - RNA, 23 nt, Human
ucagaauuccaguuucuuugaag

SEQ ID NO: 625001 - RNA, 22 nt, Human
guguguuuagcauuagcagggg

SEQ ID NO: 625002 - RNA, 22 nt, Human
uuucacaggggcaaccuccaug

SEQ ID NO: 625003 - RNA, 22 nt, Human
aaugacaauauuaauuuggagg

SEQ ID NO: 625004 - RNA, 22 nt, Human
uccagguacucauuggcuguua

SEQ ID NO: 625005 - RNA, 22 nt, Human
agauguuuguguuaucuccauu

SEQ ID NO: 625006 - RNA, 22 nt, Human
guucaagguuuuacagagugua

SEQ ID NO: 625007 - RNA, 22 nt, Human
agaaugcuccagagcugaaaga

SEQ ID NO: 625008 - RNA, 22 nt, Human
gcugguagaccucacugcacuc

SEQ ID NO: 625009 - RNA, 22 nt, Human
gcaggaaagguugagacuuugc

SEQ ID NO: 625010 - RNA, 22 nt, Human
cuugaaaaauaugccuugcuuc

SEQ ID NO: 625011 - RNA, 22 nt, Human
aaagguuuugguaaggcuuuaa

SEQ ID NO: 625012 - RNA, 23 nt, Human
uugcauguagcccaugaguaacu

SEQ ID NO: 625013 - RNA, 22 nt, Human
ucacagugcacagcaggcgugg

SEQ ID NO: 625014 - RNA, 22 nt, Human
uuucaugcacaaaugagcaagg

SEQ ID NO: 625015 - RNA, 22 nt, Human
aucugucuuccaccacacaucc

SEQ ID NO: 625016 - RNA, 22 nt, Human
cuggagccuucaccaggggaaa

SEQ ID NO: 625017 - RNA, 22 nt, Human
gugaggcagagaugccaaaacu

SEQ ID NO: 625018 - RNA, 22 nt, Human
caucaaaguugauauccaauua

SEQ ID NO: 625019 - RNA, 22 nt, Human
cccaaggacacgggcagggaca

SEQ ID NO: 625020 - RNA, 22 nt, Human
acacaagaauaaugaugaaggu

SEQ ID NO: 625021 - RNA, 22 nt, Human
cuaaagacacaauaaguagcuu

SEQ ID NO: 625022 - RNA, 22 nt, Human
gugcccaggggccagcugccgg

SEQ ID NO: 625023 - RNA, 22 nt, Human
cauauuguaaaagguugaaucc

SEQ ID NO: 625024 - RNA, 22 nt, Human
caguauagaaaguuuuaaauug

SEQ ID NO: 625025 - RNA, 22 nt, Human
gggggcuaccgucucuggagcu

SEQ ID NO: 625026 - RNA, 18 nt, Human
gugacagcugcuagcuca

SEQ ID NO: 625027 - RNA, 22 nt, Human
ucaggcaugcauucugcagguu

SEQ ID NO: 625028 - RNA, 22 nt, Human
guuauguacuuuuuaaaucuug

SEQ ID NO: 625029 - RNA, 22 nt, Human
gcugccugaaauguugccuagc

SEQ ID NO: 625030 - RNA, 22 nt, Human
ucccagggauccuccgggucgc

SEQ ID NO: 625031 - RNA, 22 nt, Human
uuucuuccaaaggcacguucuc

SEQ ID NO: 625032 - RNA, 22 nt, Human
uacaguauuacuguguuguuuu

SEQ ID NO: 625033 - RNA, 22 nt, Human
ugccugugucacagugauguuu

SEQ ID NO: 625034 - RNA, 22 nt, Human
uaggccaguugguggcccugga

SEQ ID NO: 625035 - RNA, 22 nt, Human
ugcuuugcaaauaauagaaugu

SEQ ID NO: 625036 - RNA, 22 nt, Human
gagcugggacauggguccucuc

SEQ ID NO: 625037 - RNA, 19 nt, Human
ugcagaagacacaguggug

SEQ ID NO: 625038 - RNA, 22 nt, Human
caccccagcuucucaggauaga

SEQ ID NO: 625039 - RNA, 22 nt, Human
uucucagagugaccaagucuuu

SEQ ID NO: 625040 - RNA, 20 nt, Human
gcuuggcauaggccacuuga

SEQ ID NO: 625041 - RNA, 22 nt, Human
ccucccugguggcucuggucua

SEQ ID NO: 625042 - RNA, 22 nt, Human
uacaguuacuguuauaugugcu

SEQ ID NO: 625043 - RNA, 22 nt, Human
ccaaaauuauuacauuuguagg

SEQ ID NO: 625044 - RNA, 18 nt, Human
agcagcugugccacacug

SEQ ID NO: 625045 - RNA, 18 nt, Human
ccuggagcuccacagcaa

SEQ ID NO: 625046 - RNA, 22 nt, Human
cacagcugaccacccugcuccc

SEQ ID NO: 625047 - RNA, 22 nt, Human
ucucuuuaaguauaaucuuaua

SEQ ID NO: 625048 - RNA, 22 nt, Human
augaagacaaacgacguugcaa

SEQ ID NO: 625049 - RNA, 22 nt, Human
ggaugaggaagauuacugagaa

SEQ ID NO: 625050 - RNA, 22 nt, Human
aucaaugcucuguacccagaau

SEQ ID NO: 625051 - RNA, 22 nt, Human
ggcuggcucaugcaaaggguga

SEQ ID NO: 625052 - RNA, 22 nt, Human
uacuguacugcaguucugcaaa

SEQ ID NO: 625053 - RNA, 19 nt, Human
cccagcuugaccaccugcu

SEQ ID NO: 625054 - RNA, 22 nt, Human
cuguggccuggggacacuaucu

SEQ ID NO: 625055 - RNA, 22 nt, Human
ggagggcagaguccccugcuga

SEQ ID NO: 625056 - RNA, 22 nt, Human
uucucuuuauguauuuaguggg

SEQ ID NO: 625057 - RNA, 22 nt, Human
gucuggcuuuugcccuguguuu

SEQ ID NO: 625058 - RNA, 22 nt, Human
ggaccuggcaauuugcaucucu

SEQ ID NO: 625059 - RNA, 22 nt, Human
aaacauugagugccuuugguau

SEQ ID NO: 625060 - RNA, 21 nt, Human
ucuagaauccuguauaagacu

SEQ ID NO: 625061 - RNA, 22 nt, Human
ucugccaggccugcuuccgggg

SEQ ID NO: 625062 - RNA, 22 nt, Human
uccugagaauagaguugcaugu

SEQ ID NO: 625063 - RNA, 22 nt, Human
agaucaaaucugggauuucuaa

SEQ ID NO: 625064 - RNA, 22 nt, Human
uauauuugcuaaaugugugcaa

SEQ ID NO: 625065 - RNA, 22 nt, Human
cuguggcucaggccuguaagcc

SEQ ID NO: 625066 - RNA, 22 nt, Human
uguccccaagguucagcccaca

SEQ ID NO: 625067 - RNA, 23 nt, Human
auucuucauuaucuucuagaaaa

SEQ ID NO: 625068 - RNA, 22 nt, Human
gcacccagaauaaggacaggac

SEQ ID NO: 625069 - RNA, 22 nt, Human
ucagagaggauuuuaauaagug

SEQ ID NO: 625070 - RNA, 22 nt, Human
gagcaggcucugccuguguguc

SEQ ID NO: 625071 - RNA, 22 nt, Human
acaguggaauggugggccugca

SEQ ID NO: 625072 - RNA, 20 nt, Human
agccaccucauuucccuacc

SEQ ID NO: 625073 - RNA, 22 nt, Human
ugcagagaaaguguagacaggc

SEQ ID NO: 625074 - RNA, 22 nt, Human
gauuucuugagcaaguugcuua

SEQ ID NO: 625075 - RNA, 22 nt, Human
gccaggaguucagaugcauguu

SEQ ID NO: 625076 - RNA, 22 nt, Human
ggcagugagcuggagggaagga

SEQ ID NO: 625077 - RNA, 22 nt, Human
ccuagacuagaggcagggagcc

SEQ ID NO: 625078 - RNA, 22 nt, Human
ccuuagcagggagucuguccag

SEQ ID NO: 625079 - RNA, 22 nt, Human
uugccaggggacaucuggagcc

SEQ ID NO: 625080 - RNA, 22 nt, Human
augaaguucucaauaaucaugu

SEQ ID NO: 625081 - RNA, 22 nt, Human
uguguaaagcuuguuccagaaa

SEQ ID NO: 625082 - RNA, 22 nt, Human
ucucaaacuaacaaugauuaua

SEQ ID NO: 625083 - RNA, 22 nt, Human
accauuuaaggaaaauguauca

SEQ ID NO: 625084 - RNA, 22 nt, Human
ugcugugagguugagaaggaag

SEQ ID NO: 625085 - RNA, 22 nt, Human
cagcaugaugcucacacaaaac

SEQ ID NO: 625086 - RNA, 22 nt, Human
ucugaaauauauuuugaguguu

SEQ ID NO: 625087 - RNA, 22 nt, Human
ggacaugauauuucaggaagac

SEQ ID NO: 625088 - RNA, 22 nt, Human
ucugauguggcagcugcaucua

SEQ ID NO: 625089 - RNA, 22 nt, Human
aauucaaauuacaauaguuguu

SEQ ID NO: 625090 - RNA, 22 nt, Human
gaaggcagguuuuucaaaacug

SEQ ID NO: 625091 - RNA, 22 nt, Human
ucugggguugagucugggucag

SEQ ID NO: 625092 - RNA, 22 nt, Human
agcugccuccauggucaaagau

SEQ ID NO: 625093 - RNA, 22 nt, Human
cccaggagauggugcguggucu

SEQ ID NO: 625094 - RNA, 22 nt, Human
cagcaggauuggauacaucuca

SEQ ID NO: 625095 - RNA, 22 nt, Human
uggaaaacuuugguggugaggg

SEQ ID NO: 625096 - RNA, 22 nt, Human
uuccuugguacagaguagcuuu

SEQ ID NO: 625097 - RNA, 22 nt, Human
acaaggcauuccggaaguaacc

SEQ ID NO: 625098 - RNA, 22 nt, Human
gucauuccuauccauuugauac

SEQ ID NO: 625099 - RNA, 22 nt, Human
agagggaacggaucccagcgcg

SEQ ID NO: 625100 - RNA, 22 nt, Human
ggaagauuuuccauuccucuuu

SEQ ID NO: 625101 - RNA, 22 nt, Human
aauucacaugcaugucugugca

SEQ ID NO: 625102 - RNA, 22 nt, Human
aaagugcugggauuacaggcuu

SEQ ID NO: 625103 - RNA, 21 nt, Human
cagcuucugaagguguaggaa

SEQ ID NO: 625104 - RNA, 22 nt, Human
aggaugggucagcuagagucca

SEQ ID NO: 625105 - RNA, 22 nt, Human
auggcaggcccagguguucauu

SEQ ID NO: 625106 - RNA, 22 nt, Human
ugcuuuauugcaucaguguggg

SEQ ID NO: 625107 - RNA, 22 nt, Human
uuuaagaguuaaacuuugaccu

SEQ ID NO: 625108 - RNA, 22 nt, Human
gcugccuggcuuuaguccacuu

SEQ ID NO: 625109 - RNA, 22 nt, Human
gaagacacuaaacuggggcuuc

SEQ ID NO: 625110 - RNA, 22 nt, Human
uuuuagacuuguauguaaagcc

SEQ ID NO: 625111 - RNA, 22 nt, Human
cauuaauaaacauuucagaaga

SEQ ID NO: 625112 - RNA, 22 nt, Human
acucuuuauuguuuguggcuag

SEQ ID NO: 625113 - RNA, 18 nt, Human
gaaaugugauucuagggc

SEQ ID NO: 625114 - RNA, 22 nt, Human
ccuuggcuuccuucccucuaga

SEQ ID NO: 625115 - RNA, 22 nt, Human
uccuucuguagucccugucccu

SEQ ID NO: 625116 - RNA, 22 nt, Human
aggggugaaagagggcccucaa

SEQ ID NO: 625117 - RNA, 22 nt, Human
aucauccuagaaggaagcuagg

SEQ ID NO: 625118 - RNA, 22 nt, Human
caucuuuaaaaugggaacaaca

SEQ ID NO: 625119 - RNA, 22 nt, Human
gagagguaauuugaagugcaaa

SEQ ID NO: 625120 - RNA, 22 nt, Human
cccaauaaaauucauuuucauu

SEQ ID NO: 625121 - RNA, 22 nt, Human
uagucagagucuucucuguugu

SEQ ID NO: 625122 - RNA, 22 nt, Human
aaguuuaguagggacagaugga

SEQ ID NO: 625123 - RNA, 22 nt, Human
acagagucuuacguggugauaa

SEQ ID NO: 625124 - RNA, 22 nt, Human
aggguccaucaaggacugcaca

SEQ ID NO: 625125 - RNA, 22 nt, Human
agcuguguaagucauguaggug

SEQ ID NO: 625126 - RNA, 22 nt, Human
uuuucugaccuaucuacauuua

SEQ ID NO: 625127 - RNA, 23 nt, Human
uuugaacauuucuagauuacaua

SEQ ID NO: 625128 - RNA, 22 nt, Human
gcuaggagccgcugcacuaggu

SEQ ID NO: 625129 - RNA, 22 nt, Human
uuuguuuugaacuagcucagaa

SEQ ID NO: 625130 - RNA, 22 nt, Human
uagguuucagaggugccgggaa

SEQ ID NO: 625131 - RNA, 22 nt, Human
cagcagcugccucagcugggga

SEQ ID NO: 625132 - RNA, 22 nt, Human
ugcugagggagggguuuuccag

SEQ ID NO: 625133 - RNA, 22 nt, Human
gaaccaaguaggauacaaggag

SEQ ID NO: 625134 - RNA, 15 nt, Human
cuccaugauuuugca

SEQ ID NO: 625135 - RNA, 22 nt, Human
ccucuucuaccauuuacauuuu

SEQ ID NO: 625136 - RNA, 22 nt, Human
ccuggccagccagggcuggggu

SEQ ID NO: 625137 - RNA, 22 nt, Human
uccaauuuuacgucuguauaaa

SEQ ID NO: 625138 - RNA, 19 nt, Human
cagaugagaaaagugaggu

SEQ ID NO: 625139 - RNA, 22 nt, Human
aaggucuggaugaugggugugc

SEQ ID NO: 625140 - RNA, 22 nt, Human
ggguuucaugguucucacaaug

SEQ ID NO: 625141 - RNA, 22 nt, Human
cugcuuccucccuguaaaggca

SEQ ID NO: 625142 - RNA, 20 nt, Human
uugaaaaugcauugugcagu

SEQ ID NO: 625143 - RNA, 22 nt, Human
uucagaaacagagugagugagu

SEQ ID NO: 625144 - RNA, 22 nt, Human
uacauucacaguuguucaucuc

SEQ ID NO: 625145 - RNA, 22 nt, Human
guggggaggccuaagcaaguug

SEQ ID NO: 625146 - RNA, 22 nt, Human
gagcugugauuggugucucacu

SEQ ID NO: 625147 - RNA, 22 nt, Human
gggggugacgauggcagcuggu

SEQ ID NO: 625148 - RNA, 22 nt, Human
cuguuguaaagcuauucauuug

SEQ ID NO: 625149 - RNA, 22 nt, Human
gauuucagaguuuauuagguua

SEQ ID NO: 625150 - RNA, 22 nt, Human
agguauauugaaugcuuacuua

SEQ ID NO: 625151 - RNA, 22 nt, Human
ggccugcuggcuccagcgcccg

SEQ ID NO: 625152 - RNA, 22 nt, Human
ugggcugagcacugaggaagga

SEQ ID NO: 625153 - RNA, 20 nt, Human
agggucugaugugguggccc

SEQ ID NO: 625154 - RNA, 22 nt, Human
acagaacuuccagggaacauac

SEQ ID NO: 625155 - RNA, 22 nt, Human
auuuauuccugauuccuggcuu

SEQ ID NO: 625156 - RNA, 22 nt, Human
ucucuggcuggcaccccaggga

SEQ ID NO: 625157 - RNA, 22 nt, Human
ucaguugcaugggaaguucaga

SEQ ID NO: 625158 - RNA, 22 nt, Human
gcuacagagcucugugaagaga

SEQ ID NO: 625159 - RNA, 22 nt, Human
aggaccaguaugagagcaucug

SEQ ID NO: 625160 - RNA, 23 nt, Human
cugcagccgcguggggacgugga

SEQ ID NO: 625161 - RNA, 22 nt, Human
ucagggcagccuaaggcaccuc

SEQ ID NO: 625162 - RNA, 22 nt, Human
acucauguuuucucuagcugga

SEQ ID NO: 625163 - RNA, 22 nt, Human
ugugaaggcagagccagugaaa

SEQ ID NO: 625164 - RNA, 22 nt, Human
agcuccccucguuucucuccau

SEQ ID NO: 625165 - RNA, 22 nt, Human
gguggagcuguggacaggaagg

SEQ ID NO: 625166 - RNA, 22 nt, Human
auacuaaaguauagaacuuagu

SEQ ID NO: 625167 - RNA, 22 nt, Human
uucagggcagcuagaaccagga

SEQ ID NO: 625168 - RNA, 22 nt, Human
uacuuacacagcuguagaaggu

SEQ ID NO: 625169 - RNA, 21 nt, Human
aggagggcacaaggccaggaa

SEQ ID NO: 625170 - RNA, 20 nt, Human
gugcagauguccuuucacac

SEQ ID NO: 625171 - RNA, 22 nt, Human
uuccaggaagcaguuagcagcc

SEQ ID NO: 625172 - RNA, 22 nt, Human
gggcaugacuuuuggaguggga

SEQ ID NO: 625173 - RNA, 22 nt, Human
aggcccugagaaaaucccugca

SEQ ID NO: 625174 - RNA, 22 nt, Human
aaugaucccauuuagaaacaga

SEQ ID NO: 625175 - RNA, 22 nt, Human
aagagucagcuucuguaugggu

SEQ ID NO: 625176 - RNA, 22 nt, Human
aaucaguuagaaggaagagaau

SEQ ID NO: 625177 - RNA, 23 nt, Human
auuuuuugucuuuguaacuagau

SEQ ID NO: 625178 - RNA, 22 nt, Human
auauacagggagaaacagcuua

SEQ ID NO: 625179 - RNA, 22 nt, Human
cacaggcaccccugacugcuca

SEQ ID NO: 625180 - RNA, 17 nt, Human
ccuuucucuuucaucuc

SEQ ID NO: 625181 - RNA, 22 nt, Human
ugcuccugagcgguuuccauga

SEQ ID NO: 625182 - RNA, 22 nt, Human
caagauuuauauuuucacacaa

SEQ ID NO: 625183 - RNA, 22 nt, Human
ucugugucacugaggccugugu

SEQ ID NO: 625184 - RNA, 22 nt, Human
agugauuugggugucagaaagu

SEQ ID NO: 625185 - RNA, 22 nt, Human
aagacaauuuugaguaugcaca

SEQ ID NO: 625186 - RNA, 22 nt, Human
guagggacaauauguuauuaga

SEQ ID NO: 625187 - RNA, 22 nt, Human
gagcucuguucucguccugcug

SEQ ID NO: 625188 - RNA, 22 nt, Human
cuugaaugaaaccaacugauga

SEQ ID NO: 625189 - RNA, 22 nt, Human
accuggagaaagccucucccug

SEQ ID NO: 625190 - RNA, 22 nt, Human
cugugucucuaccuccccaucc

SEQ ID NO: 625191 - RNA, 23 nt, Human
augcuuccacagagcuugcagcc

SEQ ID NO: 625192 - RNA, 22 nt, Human
acaggugucuaaggcagacagc

SEQ ID NO: 625193 - RNA, 22 nt, Human
gaggggcuggcacgauggcugc

SEQ ID NO: 625194 - RNA, 22 nt, Human
gcagauaggguauuaggaguaa

SEQ ID NO: 625195 - RNA, 22 nt, Human
cuggccaacuugcuuguuggca

SEQ ID NO: 625196 - RNA, 19 nt, Human
uucucuggacuagaugcug

SEQ ID NO: 625197 - RNA, 22 nt, Human
agcagcagcauugagcgcuugu

SEQ ID NO: 625198 - RNA, 22 nt, Human
gaggccuggcugggaggaggug

SEQ ID NO: 625199 - RNA, 22 nt, Human
uuagcuuucaugaaccuggucg

SEQ ID NO: 625200 - RNA, 22 nt, Human
gcugggcccugggugcccuagc

SEQ ID NO: 625201 - RNA, 19 nt, Human
augcacacauugaagagga

SEQ ID NO: 625202 - RNA, 22 nt, Human
aggaggguucucuggacagagg

SEQ ID NO: 625203 - RNA, 22 nt, Human
cugucucaagacugcaggcacu

SEQ ID NO: 625204 - RNA, 22 nt, Human
aguugaaauuagaguccuggcu

SEQ ID NO: 625205 - RNA, 22 nt, Human
ucacagcaacccugaggcgagu

SEQ ID NO: 625206 - RNA, 22 nt, Human
auggaauuucuccggcuccacc

SEQ ID NO: 625207 - RNA, 22 nt, Human
ugcuuuaguucaacaugccaaa

SEQ ID NO: 625208 - RNA, 22 nt, Human
uguauacaggcauaagagauac

SEQ ID NO: 625209 - RNA, 22 nt, Human
uuuauuuaaagucguguguuaa

SEQ ID NO: 625210 - RNA, 22 nt, Human
uuuuuauaggucagggcaaguc

SEQ ID NO: 625211 - RNA, 22 nt, Human
ugagggugggccugcaggaaga

SEQ ID NO: 625212 - RNA, 20 nt, Human
cucagcagauucuucuagaa

SEQ ID NO: 625213 - RNA, 20 nt, Human
gccugggauuauccacuggu

SEQ ID NO: 625214 - RNA, 22 nt, Human
acaugcaugcuuuggugggugu

SEQ ID NO: 625215 - RNA, 22 nt, Human
agauauuuugugugauguuuca

SEQ ID NO: 625216 - RNA, 22 nt, Human
cuguagcugggccucggcagug

SEQ ID NO: 625217 - RNA, 22 nt, Human
uagauaacagcacuggccucgc

SEQ ID NO: 625218 - RNA, 22 nt, Human
ugugugacacauugauaugugc

SEQ ID NO: 625219 - RNA, 22 nt, Human
uggaccaugagcugcagguguu

SEQ ID NO: 625220 - RNA, 22 nt, Human
agggcagagcugucuaaauggc

SEQ ID NO: 625221 - RNA, 22 nt, Human
ugaggcaggaugcuugcacagg

SEQ ID NO: 625222 - RNA, 22 nt, Human
acacacuggcaggagcuauaaa

SEQ ID NO: 625223 - RNA, 22 nt, Human
uggagcaugagagucuuuagcu

SEQ ID NO: 625224 - RNA, 22 nt, Human
ugagaucuucgcucuucacaga

SEQ ID NO: 625225 - RNA, 22 nt, Human
uugaggucuggcaguagcguug

SEQ ID NO: 625226 - RNA, 22 nt, Human
guguaugcaauugagucauaga

SEQ ID NO: 625227 - RNA, 22 nt, Human
gcccagcacaucuggccuugaa

SEQ ID NO: 625228 - RNA, 17 nt, Human
aucuggaagcuagcuga

SEQ ID NO: 625229 - RNA, 22 nt, Human
cagcaggcugcgauugcucauu

SEQ ID NO: 625230 - RNA, 20 nt, Human
gggaucaggaaaggaggcua

SEQ ID NO: 625231 - RNA, 22 nt, Human
uuucagacuccaaauucauaag

SEQ ID NO: 625232 - RNA, 19 nt, Human
ucaaaugccaaugucacag

SEQ ID NO: 625233 - RNA, 22 nt, Human
augcuuccaauauucucccuuu

SEQ ID NO: 625234 - RNA, 21 nt, Human
ugucagcaacaauacuuucuc

SEQ ID NO: 625235 - RNA, 20 nt, Human
uacagaaugcaauaaaaugg

SEQ ID NO: 625236 - RNA, 20 nt, Human
uagggcucauuaugaucucc

SEQ ID NO: 625237 - RNA, 22 nt, Human
gcacccuguuuauccugaguuc

SEQ ID NO: 625238 - RNA, 20 nt, Human
gcugaccccugcugucaugc

SEQ ID NO: 625239 - RNA, 22 nt, Human
ggagaagguggcucagcaaagg

SEQ ID NO: 625240 - RNA, 22 nt, Human
uagagugguuaacaguuuagaa

SEQ ID NO: 625241 - RNA, 22 nt, Human
cugggcccaggcggcucucgga

SEQ ID NO: 625242 - RNA, 22 nt, Human
cagcaacauauaugaaacugug

SEQ ID NO: 625243 - RNA, 22 nt, Human
agcagcaguguguggucauguu

SEQ ID NO: 625244 - RNA, 19 nt, Human
uccagggcaggaacaugua

SEQ ID NO: 625245 - RNA, 22 nt, Human
aagaaaugcacacaacugcugg

SEQ ID NO: 625246 - RNA, 22 nt, Human
auguacaggucuuggcaaaggg

SEQ ID NO: 625247 - RNA, 22 nt, Human
guggaaggaagagauggcccca

SEQ ID NO: 625248 - RNA, 22 nt, Human
ccagagaccagaacauggggau

SEQ ID NO: 625249 - RNA, 22 nt, Human
ucacagcucugucaauuuuaua

SEQ ID NO: 625250 - RNA, 22 nt, Human
acuguauaguauuuauucuuag

SEQ ID NO: 625251 - RNA, 22 nt, Human
cacuggaauguugaggagacaa

SEQ ID NO: 625252 - RNA, 22 nt, Human
uggcagugaugcuuaugguuug

SEQ ID NO: 625253 - RNA, 22 nt, Human
uacagaaguugguuuuaguuua

SEQ ID NO: 625254 - RNA, 22 nt, Human
uaauuauacaaaaaggcaugca

SEQ ID NO: 625255 - RNA, 22 nt, Human
accagcaccugauaggcaguaa

SEQ ID NO: 625256 - RNA, 22 nt, Human
aauggcaacaugguauagugag

SEQ ID NO: 625257 - RNA, 22 nt, Human
uggggccagcggggaggacuca

SEQ ID NO: 625258 - RNA, 22 nt, Human
aaagcagcagaaucucucaggg

SEQ ID NO: 625259 - RNA, 22 nt, Human
gcuucuaaccugcuuccuguag

SEQ ID NO: 625260 - RNA, 22 nt, Human
ccaggugggaggaaagcagaga

SEQ ID NO: 625261 - RNA, 22 nt, Human
agccugccaggcgcugccugga

SEQ ID NO: 625262 - RNA, 22 nt, Human
uccuccucuaucagacagugcc

SEQ ID NO: 625263 - RNA, 22 nt, Human
ccuggaguuuuuugguugacuc

SEQ ID NO: 625264 - RNA, 22 nt, Human
caggucucugcagccccucugu

SEQ ID NO: 625265 - RNA, 22 nt, Human
ugagaguagagucuucaucugu

SEQ ID NO: 625266 - RNA, 17 nt, Human
uuucaacaucacucagc

SEQ ID NO: 625267 - RNA, 22 nt, Human
cagggccagagagggcuggcug

SEQ ID NO: 625268 - RNA, 22 nt, Human
aagcaagcuguuggcaauaggg

SEQ ID NO: 625269 - RNA, 22 nt, Human
cccugcuaguugucucagugau

SEQ ID NO: 625270 - RNA, 22 nt, Human
cacucccucuaguugcauucug

SEQ ID NO: 625271 - RNA, 22 nt, Human
cagggcccauggcucagguagg

SEQ ID NO: 625272 - RNA, 22 nt, Human
uuacaagauugauuugcuuggc

SEQ ID NO: 625273 - RNA, 22 nt, Human
acaaagugugcggagcccaggg

SEQ ID NO: 625274 - RNA, 22 nt, Human
cuuggggcagugcuuggcacau

SEQ ID NO: 625275 - RNA, 22 nt, Human
aauuugugaaucugucucuuga

SEQ ID NO: 625276 - RNA, 22 nt, Human
ugcuggaagaaaauucuuuaac

SEQ ID NO: 625277 - RNA, 22 nt, Human
uggggacaggagacuuacagcu

SEQ ID NO: 625278 - RNA, 22 nt, Human
agcauauaaauggacauauuug

SEQ ID NO: 625279 - RNA, 22 nt, Human
auuugccuguaagacaaggccu

SEQ ID NO: 625280 - RNA, 22 nt, Human
ucuggcucucaacaaauauuua

SEQ ID NO: 625281 - RNA, 22 nt, Human
uuugaaaggaauuaggaugaca

SEQ ID NO: 625282 - RNA, 22 nt, Human
cuccuggcacugucuugaccca

SEQ ID NO: 625283 - RNA, 22 nt, Human
uggcgaggccaggccagggccu

SEQ ID NO: 625284 - RNA, 22 nt, Human
agagaagagucuugucaaauua

SEQ ID NO: 625285 - RNA, 22 nt, Human
aguucugcaugaaaaaggacua

SEQ ID NO: 625286 - RNA, 22 nt, Human
aggcaccuugcgguccagugaa

SEQ ID NO: 625287 - RNA, 22 nt, Human
augaagcaacagcccuccuauu

SEQ ID NO: 625288 - RNA, 22 nt, Human
agcugagcugcagaugacugua

SEQ ID NO: 625289 - RNA, 22 nt, Human
auccagaacaccuguaucacca

SEQ ID NO: 625290 - RNA, 22 nt, Human
uggagcugaacuuugaggccag

SEQ ID NO: 625291 - RNA, 22 nt, Human
ucugggagguacugggaggugu

SEQ ID NO: 625292 - RNA, 22 nt, Human
uccucagaagaaccccuagauu

SEQ ID NO: 625293 - RNA, 22 nt, Human
aaggcaaggccaagccaucagu

SEQ ID NO: 625294 - RNA, 20 nt, Human
uacaaguacauuauaguuau

SEQ ID NO: 625295 - RNA, 22 nt, Human
gcaguguucagugaagcaggag

SEQ ID NO: 625296 - RNA, 22 nt, Human
caacucaggcaccucauauaag

SEQ ID NO: 625297 - RNA, 22 nt, Human
acugagcugcaagucagggagg

SEQ ID NO: 625298 - RNA, 17 nt, Human
agguuuaugguauuuga

SEQ ID NO: 625299 - RNA, 20 nt, Human
aaguuuaggggaaagugaca

SEQ ID NO: 625300 - RNA, 22 nt, Human
ugcgauguaugcaguauuuguu

SEQ ID NO: 625301 - RNA, 17 nt, Human
cccagggaccacugcuu

SEQ ID NO: 625302 - RNA, 22 nt, Human
ugagaauuugugaacuuuucuc

SEQ ID NO: 625303 - RNA, 22 nt, Human
ccugggcuuucggcggcuuccu

SEQ ID NO: 625304 - RNA, 22 nt, Human
gcgugugugauaugccucugca

SEQ ID NO: 625305 - RNA, 22 nt, Human
uuuuaauccucuugguaucuua

SEQ ID NO: 625306 - RNA, 22 nt, Human
cauggcuugucuugucuucuga

SEQ ID NO: 625307 - RNA, 22 nt, Human
gaaggcuaaaggggcagagguu

SEQ ID NO: 625308 - RNA, 22 nt, Human
uucaaaguaccguacuuaaugg

SEQ ID NO: 625309 - RNA, 22 nt, Human
cugcaucacagcaggaggcaca

SEQ ID NO: 625310 - RNA, 22 nt, Human
caggccaagucccaagugcggg

SEQ ID NO: 625311 - RNA, 23 nt, Human
ucuggcuuugcuggaaguuuuga

SEQ ID NO: 625312 - RNA, 22 nt, Human
cccaggaaguggagguugcagu

SEQ ID NO: 625313 - RNA, 22 nt, Human
agcagcuuggggccgagauaga

SEQ ID NO: 625314 - RNA, 22 nt, Human
uccaagagaauacuggagagua

SEQ ID NO: 625315 - RNA, 22 nt, Human
gcugccuuaugucuauuaguau

SEQ ID NO: 625316 - RNA, 22 nt, Human
cuugccaaauuaacauacagaa

SEQ ID NO: 625317 - RNA, 22 nt, Human
ugggaugcccugacccucugga

SEQ ID NO: 625318 - RNA, 22 nt, Human
cuuuuucaagucaaagagggua

SEQ ID NO: 625319 - RNA, 22 nt, Human
ccccaugaaguagggucucuga

SEQ ID NO: 625320 - RNA, 22 nt, Human
ugcaggccucacaccuggcacc

SEQ ID NO: 625321 - RNA, 22 nt, Human
acuuuguuuuauagcacauaag

SEQ ID NO: 625322 - RNA, 22 nt, Human
guggcucuaggugagcauggag

SEQ ID NO: 625323 - RNA, 20 nt, Human
cucaggauacugcaaaguug

SEQ ID NO: 625324 - RNA, 22 nt, Human
aggucugguguugaugaauucc

SEQ ID NO: 625325 - RNA, 22 nt, Human
acaugauuuuaguaucauaaua

SEQ ID NO: 625326 - RNA, 23 nt, Human
uguugaaguaacuguuacauaga

SEQ ID NO: 625327 - RNA, 22 nt, Human
cucucugggcccaguuggcacc

SEQ ID NO: 625328 - RNA, 22 nt, Human
ucugaggcuucagacuguacug

SEQ ID NO: 625329 - RNA, 22 nt, Human
cucuggagugcagccugguggc

SEQ ID NO: 625330 - RNA, 22 nt, Human
ggaaggcuuuguagaagugcca

SEQ ID NO: 625331 - RNA, 22 nt, Human
ccuccugguaauuagcgaaagg

SEQ ID NO: 625332 - RNA, 22 nt, Human
gggcugcacguauucugcucac

SEQ ID NO: 625333 - RNA, 22 nt, Human
ugaggccagggauuccaucauu

SEQ ID NO: 625334 - RNA, 17 nt, Human
cucugggcagccugggg

SEQ ID NO: 625335 - RNA, 22 nt, Human
uagucaaaaggaaggauaugcu

SEQ ID NO: 625336 - RNA, 17 nt, Human
guuugcaugguguuaac

SEQ ID NO: 625337 - RNA, 22 nt, Human
cugcccuguggcucugagucau

SEQ ID NO: 625338 - RNA, 19 nt, Human
ggcuccuguggcugcagcc

SEQ ID NO: 625339 - RNA, 22 nt, Human
uguacaaucugaugauguaugg

SEQ ID NO: 625340 - RNA, 22 nt, Human
uaagaggcauuagagacauagc

SEQ ID NO: 625341 - RNA, 22 nt, Human
agcaaggggcagugaaagugug

SEQ ID NO: 625342 - RNA, 22 nt, Human
gcuucucauguuuauuuuuaca

SEQ ID NO: 625343 - RNA, 22 nt, Human
agauaucugcaauauaauuuaa

SEQ ID NO: 625344 - RNA, 22 nt, Human
auuaguguuguggcuucauggc

SEQ ID NO: 625345 - RNA, 17 nt, Human
gaggacagggaaguagg

SEQ ID NO: 625346 - RNA, 22 nt, Human
auugacuuccauagcuaccugg

SEQ ID NO: 625347 - RNA, 22 nt, Human
ugagggagcacacacugaagug

SEQ ID NO: 625348 - RNA, 22 nt, Human
uaaggcuuaugaucagaagguu

SEQ ID NO: 625349 - RNA, 22 nt, Human
agaugcuucaguguuuaauuua

SEQ ID NO: 625350 - RNA, 22 nt, Human
ugccaucugcacccaccugccc

SEQ ID NO: 625351 - RNA, 22 nt, Human
ugcaucuuacguuuugaaaggg

SEQ ID NO: 625352 - RNA, 22 nt, Human
aucacagcacaccugacaugua

SEQ ID NO: 625353 - RNA, 22 nt, Human
gcucucugguuccagucaggaa

SEQ ID NO: 625354 - RNA, 22 nt, Human
ucuuucuugcaaggaugcagga

SEQ ID NO: 625355 - RNA, 22 nt, Human
guauuuuauggccuggggccua

SEQ ID NO: 625356 - RNA, 22 nt, Human
uacccucucccgguccagcuuu

SEQ ID NO: 625357 - RNA, 22 nt, Human
acagaauaagguuuaucucucc

SEQ ID NO: 625358 - RNA, 19 nt, Human
ugucuuuggucugaguuuc

SEQ ID NO: 625359 - RNA, 20 nt, Human
ucagaagugcagcugccccu

SEQ ID NO: 625360 - RNA, 22 nt, Human
ggcuucucucuucacauggcuu

SEQ ID NO: 625361 - RNA, 22 nt, Human
cagugcuuuuaaaacaacauca

SEQ ID NO: 625362 - RNA, 22 nt, Human
ccuuuacaguagcccuuuugaa

SEQ ID NO: 625363 - RNA, 18 nt, Human
ccagguggugacagagau

SEQ ID NO: 625364 - RNA, 22 nt, Human
cugugugcucggauggacucgu

SEQ ID NO: 625365 - RNA, 22 nt, Human
gaggaaaaugcaacaggaaugc

SEQ ID NO: 625366 - RNA, 22 nt, Human
ugagccuggccugcagagacca

SEQ ID NO: 625367 - RNA, 22 nt, Human
gcagagcuccccaagacaccaa

SEQ ID NO: 625368 - RNA, 22 nt, Human
accacaggaggauggcugcugg

SEQ ID NO: 625369 - RNA, 22 nt, Human
acaguagcuaauauugcauuau

SEQ ID NO: 625370 - RNA, 18 nt, Human
gacagcuguccugagccc

SEQ ID NO: 625371 - RNA, 22 nt, Human
uagcuuaaaccaaucugaauaa

SEQ ID NO: 625372 - RNA, 22 nt, Human
ugcuuugugacagauuaguuuu

SEQ ID NO: 625373 - RNA, 22 nt, Human
agggcagcccuucugggagggc

SEQ ID NO: 625374 - RNA, 22 nt, Human
gagacauucuuaggaacaaugu

SEQ ID NO: 625375 - RNA, 22 nt, Human
agacuggaagccugccaagcaa

SEQ ID NO: 625376 - RNA, 22 nt, Human
ugcugaaacaauaacauacugg

SEQ ID NO: 625377 - RNA, 22 nt, Human
cuugcuuuccaaaugacucacu

SEQ ID NO: 625378 - RNA, 22 nt, Human
ugcaauaacccaugagauagaa

SEQ ID NO: 625379 - RNA, 22 nt, Human
aggcaguuuaggcagcgauuua

SEQ ID NO: 625380 - RNA, 22 nt, Human
gcauuuguguucuuccuagagc

SEQ ID NO: 625381 - RNA, 22 nt, Human
cucaccacagagccuguccagc

SEQ ID NO: 625382 - RNA, 22 nt, Human
gaucugguuucaucauggacuu

SEQ ID NO: 625383 - RNA, 22 nt, Human
cccacguugaaccgcuuacaga

SEQ ID NO: 625384 - RNA, 22 nt, Human
cacuggccuaagcgccucagcc

SEQ ID NO: 625385 - RNA, 22 nt, Human
caaguuuugauuuugcaguaaa

SEQ ID NO: 625386 - RNA, 22 nt, Human
uuccugugaagaucugggugcu

SEQ ID NO: 625387 - RNA, 22 nt, Human
ggagaggguagggguccugccc

SEQ ID NO: 625388 - RNA, 22 nt, Human
uuuuacuucauuccugacuuca

SEQ ID NO: 625389 - RNA, 22 nt, Human
auucaguugucuacuacugccu

SEQ ID NO: 625390 - RNA, 22 nt, Human
ucuuggaguauugggccucagg

SEQ ID NO: 625391 - RNA, 22 nt, Human
gaggggagacagggaaaucagu

SEQ ID NO: 625392 - RNA, 22 nt, Human
auggcugugugacugaguucua

SEQ ID NO: 625393 - RNA, 22 nt, Human
cuggccucucugagcagggagc

SEQ ID NO: 625394 - RNA, 22 nt, Human
ucccagagugagccaggggcag

SEQ ID NO: 625395 - RNA, 22 nt, Human
gaggcugucuguuagccuggga

SEQ ID NO: 625396 - RNA, 22 nt, Human
acucccuuuccaggaaacacaa

SEQ ID NO: 625397 - RNA, 22 nt, Human
ugcuuuauaggggauugcaggc

SEQ ID NO: 625398 - RNA, 23 nt, Human
ugucuggggcgccagaagagaga

SEQ ID NO: 625399 - RNA, 22 nt, Human
gacauuuagguagcuuccaguu

SEQ ID NO: 625400 - RNA, 22 nt, Human
ggaggccaccauggagucacuu

SEQ ID NO: 625401 - RNA, 21 nt, Human
acauuuucuguuuuaggaagu

SEQ ID NO: 625402 - RNA, 22 nt, Human
gcugcccucccagggcaagcuu

SEQ ID NO: 625403 - RNA, 22 nt, Human
ccugcagaggucaggccagaaa

SEQ ID NO: 625404 - RNA, 22 nt, Human
gcucuucuaaagaauguacagg

SEQ ID NO: 625405 - RNA, 22 nt, Human
gcagcuuuaaaggaggcucuga

SEQ ID NO: 625406 - RNA, 22 nt, Human
ugcugccuuucaauguugucau

SEQ ID NO: 625407 - RNA, 22 nt, Human
uccaggcugauccaugaagaau

SEQ ID NO: 625408 - RNA, 22 nt, Human
uauuuugcguugagucagauuu

SEQ ID NO: 625409 - RNA, 22 nt, Human
augcauugcucaacagaauaca

SEQ ID NO: 625410 - RNA, 22 nt, Human
gaagcacagauaauucaaguau

SEQ ID NO: 625411 - RNA, 22 nt, Human
gccagaagacuggagucagcug

SEQ ID NO: 625412 - RNA, 22 nt, Human
ucaucugaccccaucuauucuc

SEQ ID NO: 625413 - RNA, 17 nt, Human
gaacuuuuauuaaauuc

SEQ ID NO: 625414 - RNA, 22 nt, Human
gcugggcugagaaguuaagcaa

SEQ ID NO: 625415 - RNA, 22 nt, Human
cuguaugucuugugaauuguag

SEQ ID NO: 625416 - RNA, 22 nt, Human
cccugccuugggguccacaccg

SEQ ID NO: 625417 - RNA, 22 nt, Human
gacuguggggggcggacacaag

SEQ ID NO: 625418 - RNA, 22 nt, Human
agugcauucugucaucuugguu

SEQ ID NO: 625419 - RNA, 22 nt, Human
uagacaauauuugaaaguagug

SEQ ID NO: 625420 - RNA, 22 nt, Human
ccagcuccgggaguugcugcug

SEQ ID NO: 625421 - RNA, 22 nt, Human
cccacgucgaacuugcuccaga

SEQ ID NO: 625422 - RNA, 22 nt, Human
gcagagugagauaugaacccag

SEQ ID NO: 625423 - RNA, 22 nt, Human
gcugucuggaggcucugaggga

SEQ ID NO: 625424 - RNA, 22 nt, Human
aggaauugguucaagguuuauc

SEQ ID NO: 625425 - RNA, 22 nt, Human
cuguggaaaauuuguauguaau

SEQ ID NO: 625426 - RNA, 22 nt, Human
gucaccaggucugaugcagcca

SEQ ID NO: 625427 - RNA, 22 nt, Human
acaggacaauuuauaaugggca

SEQ ID NO: 625428 - RNA, 22 nt, Human
accagaggaagggaaucucaag

SEQ ID NO: 625429 - RNA, 22 nt, Human
cugaggccucucccacuccagc

SEQ ID NO: 625430 - RNA, 22 nt, Human
uaguauauuaauucucacgguu

SEQ ID NO: 625431 - RNA, 22 nt, Human
aacuucuaaucuguacaguuuu

SEQ ID NO: 625432 - RNA, 22 nt, Human
ccacuugaauuuuagugguuuu

SEQ ID NO: 625433 - RNA, 22 nt, Human
ucuucauguugcuguagggaga

SEQ ID NO: 625434 - RNA, 22 nt, Human
uauuuuaaagugaagggucuug

SEQ ID NO: 625435 - RNA, 22 nt, Human
ccaggcugcucacaagcugccc

SEQ ID NO: 625436 - RNA, 22 nt, Human
ucuguuuagacucaguugaaac

SEQ ID NO: 625437 - RNA, 22 nt, Human
caggaacacaaguucagggaug

SEQ ID NO: 625438 - RNA, 22 nt, Human
caaaagaagcucuuggggcuag

SEQ ID NO: 625439 - RNA, 22 nt, Human
uucugggaggcuggcugucaua

SEQ ID NO: 625440 - RNA, 22 nt, Human
guccuggaauccuagaacagug

SEQ ID NO: 625441 - RNA, 22 nt, Human
aggugaaguugaggaggcagaa

SEQ ID NO: 625442 - RNA, 22 nt, Human
cugcugacaaaauaaaaugcuc

SEQ ID NO: 625443 - RNA, 18 nt, Human
caggcccugucuggccuc

SEQ ID NO: 625444 - RNA, 22 nt, Human
agagcugaauucaagugcuggc

SEQ ID NO: 625445 - RNA, 22 nt, Human
gggcucuguuuagaucagagau

SEQ ID NO: 625446 - RNA, 22 nt, Human
ugccuugcgggcguuucuguug

SEQ ID NO: 625447 - RNA, 22 nt, Human
ucccagagcaguacuccaggag

SEQ ID NO: 625448 - RNA, 22 nt, Human
guuauauucaaaaugaggcugu

SEQ ID NO: 625449 - RNA, 22 nt, Human
caaaggcuuugcuaugaugcau

SEQ ID NO: 625450 - RNA, 22 nt, Human
ggcuagaagucagaggucaaga

SEQ ID NO: 625451 - RNA, 22 nt, Human
aagaguuaagcaacagauacca

SEQ ID NO: 625452 - RNA, 22 nt, Human
aaaggcccacagucagucuacc

SEQ ID NO: 625453 - RNA, 22 nt, Human
auuugcuuaucuccacaguugu

SEQ ID NO: 625454 - RNA, 22 nt, Human
cucagagcccaggguacacccg

SEQ ID NO: 625455 - RNA, 22 nt, Human
ggcugggcaaacaagacucuuc

SEQ ID NO: 625456 - RNA, 22 nt, Human
ugguccuguagcucucuaaguu

SEQ ID NO: 625457 - RNA, 22 nt, Human
aaggcaucuggauggaggagga

SEQ ID NO: 625458 - RNA, 22 nt, Human
caggccugguugagcccugaga

SEQ ID NO: 625459 - RNA, 22 nt, Human
ucaggcuuugcucuguugauuu

SEQ ID NO: 625460 - RNA, 22 nt, Human
cucuccucugaaguggugaccc

SEQ ID NO: 625461 - RNA, 22 nt, Human
cugagaauggacagcagggcag

SEQ ID NO: 625462 - RNA, 19 nt, Human
gcaggccucuugggaauua

SEQ ID NO: 625463 - RNA, 22 nt, Human
ggugggaaggccacugaagguu

SEQ ID NO: 625464 - RNA, 22 nt, Human
ccaggaaggaucguuugggagu

SEQ ID NO: 625465 - RNA, 22 nt, Human
cuuugcaaacugucacacuuuc

SEQ ID NO: 625466 - RNA, 19 nt, Human
gaggcgaggcgugcaggag

SEQ ID NO: 625467 - RNA, 22 nt, Human
acucauugaaacuuaagaucua

SEQ ID NO: 625468 - RNA, 22 nt, Human
ugcauuauuugcaugugccugu

SEQ ID NO: 625469 - RNA, 23 nt, Human
aucaagucaucagcaaaauacau

SEQ ID NO: 625470 - RNA, 22 nt, Human
aggucuggugagagcaggugcu

SEQ ID NO: 625471 - RNA, 22 nt, Human
cccugaggccucagguucauug

SEQ ID NO: 625472 - RNA, 22 nt, Human
agcaaaauaagguaauuuauug

SEQ ID NO: 625473 - RNA, 22 nt, Human
aguccuucuuuuaguugcuugg

SEQ ID NO: 625474 - RNA, 22 nt, Human
aggccugagcagaggaguggac

SEQ ID NO: 625475 - RNA, 22 nt, Human
uggcagagagagugcagucgac

SEQ ID NO: 625476 - RNA, 22 nt, Human
aaaggcacagaagggaaaccaa

SEQ ID NO: 625477 - RNA, 22 nt, Human
ucuggaagacagugagcccgcu

SEQ ID NO: 625478 - RNA, 20 nt, Human
uggggccuguuucugugguu

SEQ ID NO: 625479 - RNA, 22 nt, Human
ugcuuuaaaauggacuguuuug

SEQ ID NO: 625480 - RNA, 22 nt, Human
caaaucaccacuuaauggguua

SEQ ID NO: 625481 - RNA, 22 nt, Human
aguuuucuguucuacaauuuga

SEQ ID NO: 625482 - RNA, 22 nt, Human
ucacaguguggcaacucacaga

SEQ ID NO: 625483 - RNA, 22 nt, Human
ugugcaaucuugagcaauuuau

SEQ ID NO: 625484 - RNA, 20 nt, Human
aagagcugacucacaguggu

SEQ ID NO: 625485 - RNA, 22 nt, Human
uaggaaaaauacagaauuauau

SEQ ID NO: 625486 - RNA, 23 nt, Human
aggauguaggauguauggcagag

SEQ ID NO: 625487 - RNA, 22 nt, Human
ugcccuuggguaacuugcugau

SEQ ID NO: 625488 - RNA, 22 nt, Human
gcugggagacagacuuggaacc

SEQ ID NO: 625489 - RNA, 22 nt, Human
agggcgcugaaauacuaacaug

SEQ ID NO: 625490 - RNA, 22 nt, Human
ugcagaggaccauuguccugga

SEQ ID NO: 625491 - RNA, 22 nt, Human
acucagaguuuuacccagagac

SEQ ID NO: 625492 - RNA, 22 nt, Human
ggcagcuccucucagcaaaaga

SEQ ID NO: 625493 - RNA, 22 nt, Human
auaggagaucaauaugcaauuu

SEQ ID NO: 625494 - RNA, 22 nt, Human
gcagggugauagugaggcucag

SEQ ID NO: 625495 - RNA, 22 nt, Human
aauauucauuugcagaagaagu

SEQ ID NO: 625496 - RNA, 22 nt, Human
auccacagagaggaagaauagu

SEQ ID NO: 625497 - RNA, 22 nt, Human
gucuggaggaggaagaaggcac

SEQ ID NO: 625498 - RNA, 22 nt, Human
cuucuuggacuacucacuagag

SEQ ID NO: 625499 - RNA, 22 nt, Human
ucaauucaguccaacaguaauu

SEQ ID NO: 625500 - RNA, 22 nt, Human
cagccugcauuuguaucuguau

SEQ ID NO: 625501 - RNA, 22 nt, Human
cauuuucagcacccaucugaaa

SEQ ID NO: 625502 - RNA, 22 nt, Human
ucccaggauguuuauggcuggu

SEQ ID NO: 625503 - RNA, 18 nt, Human
agggucagugucacuggc

SEQ ID NO: 625504 - RNA, 22 nt, Human
aucuauacccaucaugauuuaa

SEQ ID NO: 625505 - RNA, 22 nt, Human
augcugugccuggaaagcggcu

SEQ ID NO: 625506 - RNA, 22 nt, Human
ucuaaacaguuucacucuuaau

SEQ ID NO: 625507 - RNA, 22 nt, Human
uuaucugugauccuaaaugucu

SEQ ID NO: 625508 - RNA, 22 nt, Human
aaagcaguauauugguaguugu

SEQ ID NO: 625509 - RNA, 22 nt, Human
gugcccaguccugccuugacag

SEQ ID NO: 625510 - RNA, 22 nt, Human
aagcccuggcucagcucaccag

SEQ ID NO: 625511 - RNA, 22 nt, Human
caaagcucaugcucuuagccau

SEQ ID NO: 625512 - RNA, 22 nt, Human
gaaguuacucucguuaaauaug

SEQ ID NO: 625513 - RNA, 22 nt, Human
uucacaugaaaguaggaaagga

SEQ ID NO: 625514 - RNA, 22 nt, Human
ucaggagaaucagggcuguccu

SEQ ID NO: 625515 - RNA, 22 nt, Human
aggcagccuuuuuggaaacaua

SEQ ID NO: 625516 - RNA, 22 nt, Human
acccuggguauuucccaaacuu

SEQ ID NO: 625517 - RNA, 22 nt, Human
uggaggcaccacuggcugcccg

SEQ ID NO: 625518 - RNA, 23 nt, Human
cccagcgcugagcccugcaggca

SEQ ID NO: 625519 - RNA, 23 nt, Human
gacagggcugacuuggcagcugc

SEQ ID NO: 625520 - RNA, 22 nt, Human
cugagagucaguggaguggugu

SEQ ID NO: 625521 - RNA, 22 nt, Human
cagggccugcaagagaccuggg

SEQ ID NO: 625522 - RNA, 22 nt, Human
guuguacauaugaggauaaguu

SEQ ID NO: 625523 - RNA, 22 nt, Human
agcaugcauuuuuggacugugc

SEQ ID NO: 625524 - RNA, 22 nt, Human
gagggccucugugggugcucac

SEQ ID NO: 625525 - RNA, 22 nt, Human
uccuggcccacuaugccagcau

SEQ ID NO: 625526 - RNA, 22 nt, Human
aauguguuuucacugaagauuc

SEQ ID NO: 625527 - RNA, 22 nt, Human
uauauucauuuuaaagccaucu

SEQ ID NO: 625528 - RNA, 22 nt, Human
aagaauguucaacgcuuuuuug

SEQ ID NO: 625529 - RNA, 23 nt, Human
cccuaacuaauucuagggccuaa

SEQ ID NO: 625530 - RNA, 22 nt, Human
uccugggcccuccggaucaggu

SEQ ID NO: 625531 - RNA, 22 nt, Human
uagcagcacagaaagccuggag

SEQ ID NO: 625532 - RNA, 19 nt, Human
agcugcagaccagaagugc

SEQ ID NO: 625533 - RNA, 22 nt, Human
uaaaguagcaaguuuagacuga

SEQ ID NO: 625534 - RNA, 21 nt, Human
cccagagccuagggagggcac

SEQ ID NO: 625535 - RNA, 22 nt, Human
uuguaugcugaugacaccaccu

SEQ ID NO: 625536 - RNA, 22 nt, Human
gccuuugccugcgacguggcug

SEQ ID NO: 625537 - RNA, 22 nt, Human
cuguuuucccuggaguucagca

SEQ ID NO: 625538 - RNA, 22 nt, Human
uggcugugauuugcacgagaug

SEQ ID NO: 625539 - RNA, 22 nt, Human
gauuauggagaagaacaaugaa

SEQ ID NO: 625540 - RNA, 19 nt, Human
ugugauaagcagaauucca

SEQ ID NO: 625541 - RNA, 22 nt, Human
uaaaguuuauuugaacaucucu

SEQ ID NO: 625542 - RNA, 22 nt, Human
uggagcugucacucagaaccaa

SEQ ID NO: 625543 - RNA, 22 nt, Human
uucucuuucugcugggcuggaa

SEQ ID NO: 625544 - RNA, 22 nt, Human
gggagcugagcucugagccacg

SEQ ID NO: 625545 - RNA, 22 nt, Human
uguuacacagcagaauagcaag

SEQ ID NO: 625546 - RNA, 22 nt, Human
uggugcagauagugguguagua

SEQ ID NO: 625547 - RNA, 22 nt, Human
agggagaggagggucuuguuga

SEQ ID NO: 625548 - RNA, 22 nt, Human
caauguguuugcauauuaaaau

SEQ ID NO: 625549 - RNA, 22 nt, Human
uuucacagauguuuuggagucu

SEQ ID NO: 625550 - RNA, 22 nt, Human
auugaaaaauucacaauucugg

SEQ ID NO: 625551 - RNA, 22 nt, Human
gaggcugugugucccucuggac

SEQ ID NO: 625552 - RNA, 22 nt, Human
augucauuuaaauguuuguaua

SEQ ID NO: 625553 - RNA, 22 nt, Human
acauucuagaagucuuugcaau

SEQ ID NO: 625554 - RNA, 22 nt, Human
ccuuuggugguuuucagagauc

SEQ ID NO: 625555 - RNA, 22 nt, Human
aaaauucauagaacuguacgcu

SEQ ID NO: 625556 - RNA, 22 nt, Human
uucuuucccaguagaugugaaa

SEQ ID NO: 625557 - RNA, 22 nt, Human
ccucauuaacacaaugucauuu

SEQ ID NO: 625558 - RNA, 22 nt, Human
gcuggagaacccaggaggaaga

SEQ ID NO: 625559 - RNA, 20 nt, Human
cagugaggaggugcuggggg

SEQ ID NO: 625560 - RNA, 22 nt, Human
agaagcuggaggaagacuaagc

SEQ ID NO: 625561 - RNA, 22 nt, Human
uuggaaggcagcauuuguccau

SEQ ID NO: 625562 - RNA, 22 nt, Human
acacugagcugagcauucuugu

SEQ ID NO: 625563 - RNA, 23 nt, Human
ccagggccccuacaccacugucc

SEQ ID NO: 625564 - RNA, 22 nt, Human
aggcugcagugcagguaggauu

SEQ ID NO: 625565 - RNA, 22 nt, Human
agcucaggcaacucugggcccc

SEQ ID NO: 625566 - RNA, 22 nt, Human
gagcugaggugauguggucguu

SEQ ID NO: 625567 - RNA, 22 nt, Human
agagaauuaauuaggagcacug

SEQ ID NO: 625568 - RNA, 22 nt, Human
aaaugacacuaggcuuuuugca

SEQ ID NO: 625569 - RNA, 22 nt, Human
guuuguguaacaugaugaugau

SEQ ID NO: 625570 - RNA, 22 nt, Human
aucuccaggcauuucaagagac

SEQ ID NO: 625571 - RNA, 22 nt, Human
uggccucagauuauugcacagu

SEQ ID NO: 625572 - RNA, 22 nt, Human
acugggaaucucaggaacaugg

SEQ ID NO: 625573 - RNA, 22 nt, Human
acaguuuauaaaaauaaugagg

SEQ ID NO: 625574 - RNA, 22 nt, Human
ucacacacauaaucuaagauua

SEQ ID NO: 625575 - RNA, 22 nt, Human
ugcaauuaauuuacaugcuuaa

SEQ ID NO: 625576 - RNA, 19 nt, Human
ugguggaggccccauguuc

SEQ ID NO: 625577 - RNA, 22 nt, Human
uagagcaguuggcagcuguauu

SEQ ID NO: 625578 - RNA, 22 nt, Human
uccuggauuaauagggagcugu

SEQ ID NO: 625579 - RNA, 22 nt, Human
ugcuaauguccugaccguucug

SEQ ID NO: 625580 - RNA, 22 nt, Human
gagcaccugcuaaaugacaguu

SEQ ID NO: 625581 - RNA, 22 nt, Human
guugcaggaggauggcugcaua

SEQ ID NO: 625582 - RNA, 22 nt, Human
gccaagcuuggaaggaucaugg

SEQ ID NO: 625583 - RNA, 22 nt, Human
cacaguccugccagagggccuu

SEQ ID NO: 625584 - RNA, 22 nt, Human
guggcugggcuccgagcggcuu

SEQ ID NO: 625585 - RNA, 21 nt, Human
aaagagguuaauauuguaagu

SEQ ID NO: 625586 - RNA, 20 nt, Human
uuuggagagaaagaaguagu

SEQ ID NO: 625587 - RNA, 22 nt, Human
ugacaggcuugcuaagacauag

SEQ ID NO: 625588 - RNA, 22 nt, Human
gcuggaccaggugugcacaggc

SEQ ID NO: 625589 - RNA, 22 nt, Human
cagcaggcaggugggccaaguc

SEQ ID NO: 625590 - RNA, 19 nt, Human
ucacaggcaucuccccaga

SEQ ID NO: 625591 - RNA, 22 nt, Human
gcugccucuguagcuuuggacc

SEQ ID NO: 625592 - RNA, 22 nt, Human
aggucaggaggccucugccauu

SEQ ID NO: 625593 - RNA, 22 nt, Human
uugcagcagcucuuugaauguu

SEQ ID NO: 625594 - RNA, 22 nt, Human
acacaugauuaaugccaagcau

SEQ ID NO: 625595 - RNA, 22 nt, Human
cggcuggggcuguccccaugac

SEQ ID NO: 625596 - RNA, 22 nt, Human
gugccugggacacagcagauac

SEQ ID NO: 625597 - RNA, 22 nt, Human
gguaacaaggccgauagaaaca

SEQ ID NO: 625598 - RNA, 22 nt, Human
ugcuuuauggauuuguguccug

SEQ ID NO: 625599 - RNA, 22 nt, Human
ugggaggagcccucugggaagg

SEQ ID NO: 625600 - RNA, 22 nt, Human
uuccugguaguaagacaucugg

SEQ ID NO: 625601 - RNA, 22 nt, Human
ugcugccaagcccgugcuccug

SEQ ID NO: 625602 - RNA, 22 nt, Human
cugcucuggcguacucggcauc

SEQ ID NO: 625603 - RNA, 22 nt, Human
uacagaggaggugguugggagu

SEQ ID NO: 625604 - RNA, 22 nt, Human
uauuuucaccauguaucccugu

SEQ ID NO: 625605 - RNA, 22 nt, Human
acaggggaauuuacugucauua

SEQ ID NO: 625606 - RNA, 22 nt, Human
gccaccagggggcuccagugag

SEQ ID NO: 625607 - RNA, 22 nt, Human
auugucuuuaaccucugagggg

SEQ ID NO: 625608 - RNA, 22 nt, Human
aacauguugaguugaaaguagc

SEQ ID NO: 625609 - RNA, 21 nt, Human
ugagcccuugccucagagccc

SEQ ID NO: 625610 - RNA, 21 nt, Human
aguauguguuagggauaauuu

SEQ ID NO: 625611 - RNA, 22 nt, Human
auuuccuaacagaggcaacagu

SEQ ID NO: 625612 - RNA, 22 nt, Human
guccacauaggaacccagcuuc

SEQ ID NO: 625613 - RNA, 22 nt, Human
gucuuucuaugaugaacuguug

SEQ ID NO: 625614 - RNA, 22 nt, Human
cugaaacuuuaguucugcaaca

SEQ ID NO: 625615 - RNA, 22 nt, Human
gaugaugggauccagcaaugua

SEQ ID NO: 625616 - RNA, 22 nt, Human
acugagagcguguacaaacuua

SEQ ID NO: 625617 - RNA, 22 nt, Human
accuuuccaaguaucagguggu

SEQ ID NO: 625618 - RNA, 22 nt, Human
ucuguuugcuggugcauggguu

SEQ ID NO: 625619 - RNA, 22 nt, Human
ccugggcaacauagugagaccu

SEQ ID NO: 625620 - RNA, 22 nt, Human
ucuuuguaagacauguaagucc

SEQ ID NO: 625621 - RNA, 22 nt, Human
aggcuucagggcuuuugagggu

SEQ ID NO: 625622 - RNA, 22 nt, Human
agauguggaacacuagacugcu

SEQ ID NO: 625623 - RNA, 22 nt, Human
uccagccugguugcgggcaucc

SEQ ID NO: 625624 - RNA, 23 nt, Human
gagaaaccucgguaagcaggagg

SEQ ID NO: 625625 - RNA, 22 nt, Human
ucugggaaccaaagggugcuua

SEQ ID NO: 625626 - RNA, 22 nt, Human
cccaugcugaguggccugagau

SEQ ID NO: 625627 - RNA, 22 nt, Human
caggccacagcuaaagaggauu

SEQ ID NO: 625628 - RNA, 22 nt, Human
cacaguuuugucuugguuucca

SEQ ID NO: 625629 - RNA, 22 nt, Human
ugugucucuuuguccuagagcu

SEQ ID NO: 625630 - RNA, 22 nt, Human
aaaauacacauacuaggggaaa

SEQ ID NO: 625631 - RNA, 22 nt, Human
uugauaaaaugauaucuucuuu

SEQ ID NO: 625632 - RNA, 22 nt, Human
agcauuaagccuggcucagagg

SEQ ID NO: 625633 - RNA, 22 nt, Human
aaggguccaaggcuuugcguuu

SEQ ID NO: 625634 - RNA, 22 nt, Human
aagaugcuuccacugcaguggc

SEQ ID NO: 625635 - RNA, 18 nt, Human
uggagcagguaggcauga

SEQ ID NO: 625636 - RNA, 18 nt, Human
auggucucauacugggag

SEQ ID NO: 625637 - RNA, 22 nt, Human
ugacuuugucccuuucaaaucc

SEQ ID NO: 625638 - RNA, 22 nt, Human
ugggagagaauucuggugacug

SEQ ID NO: 625639 - RNA, 22 nt, Human
gucaaguuaagauaaggucaug

SEQ ID NO: 625640 - RNA, 22 nt, Human
guuaguagcauuucaugacaug

SEQ ID NO: 625641 - RNA, 22 nt, Human
gagccugaauuugaccugcuua

SEQ ID NO: 625642 - RNA, 22 nt, Human
cauuuacuuaaaucuuuacaag

SEQ ID NO: 625643 - RNA, 22 nt, Human
ugaaaaggagccuuagguaggu

SEQ ID NO: 625644 - RNA, 22 nt, Human
ucugugagaaccagugccaggg

SEQ ID NO: 625645 - RNA, 22 nt, Human
cacaucccuggaguuacccagu

SEQ ID NO: 625646 - RNA, 22 nt, Human
agucagagugugcaggccggcu

SEQ ID NO: 625647 - RNA, 20 nt, Human
uguuaaaggacacuugcuuu

SEQ ID NO: 625648 - RNA, 19 nt, Human
ggcuucagggaguuagcau

SEQ ID NO: 625649 - RNA, 22 nt, Human
gagcaucucuauagugacugug

SEQ ID NO: 625650 - RNA, 22 nt, Human
gugcuuccugccuggugccuuu

SEQ ID NO: 625651 - RNA, 22 nt, Human
gaauuuuucuggaagcaauuau

SEQ ID NO: 625652 - RNA, 22 nt, Human
uccaguucuaggucacucucug

SEQ ID NO: 625653 - RNA, 22 nt, Human
ugauuucaguaaugaggaugaa

SEQ ID NO: 625654 - RNA, 22 nt, Human
uagucaaaccucagaauacccc

SEQ ID NO: 625655 - RNA, 22 nt, Human
acucccagaacaugcucuucuu

SEQ ID NO: 625656 - RNA, 22 nt, Human
gucacccugcuguuuguccauu

SEQ ID NO: 625657 - RNA, 22 nt, Human
uggucgaccaguuggaaaguaa

SEQ ID NO: 625658 - RNA, 22 nt, Human
ucuguaaauccugcucagcaac

SEQ ID NO: 625659 - RNA, 22 nt, Human
ucuugaggucaucaucugaaac

SEQ ID NO: 625660 - RNA, 21 nt, Human
uuuuauugaugaauggccacu

SEQ ID NO: 625661 - RNA, 22 nt, Human
ggggaagaccuggcacuacagc

SEQ ID NO: 625662 - RNA, 22 nt, Human
ugugccaggcacuugcccaggc

SEQ ID NO: 625663 - RNA, 22 nt, Human
gcugccugggcaggaggcgcug

SEQ ID NO: 625664 - RNA, 22 nt, Human
cauggcacugagcagguaugca

SEQ ID NO: 625665 - RNA, 22 nt, Human
ugugaaauugagaaacuuucac

SEQ ID NO: 625666 - RNA, 22 nt, Human
ucaaaguccuugcuuuuucugu

SEQ ID NO: 625667 - RNA, 20 nt, Human
ucaugcagguguucuagguu

SEQ ID NO: 625668 - RNA, 22 nt, Human
aggcauucuagaaguagaagua

SEQ ID NO: 625669 - RNA, 22 nt, Human
uacuucugccuuagagaacacu

SEQ ID NO: 625670 - RNA, 22 nt, Human
aggacacacugcaagagccugg

SEQ ID NO: 625671 - RNA, 22 nt, Human
ucuuugaauccuuuacaucuga

SEQ ID NO: 625672 - RNA, 22 nt, Human
ggggacucugcuucugggauca

SEQ ID NO: 625673 - RNA, 22 nt, Human
auccaggguguggagagagcuc

SEQ ID NO: 625674 - RNA, 22 nt, Human
uucucugacccccuuaaauauu

SEQ ID NO: 625675 - RNA, 22 nt, Human
cuuauuuguacuaauaaaucug

SEQ ID NO: 625676 - RNA, 22 nt, Human
aaucaauguuagucaugaauuu

SEQ ID NO: 625677 - RNA, 20 nt, Human
ugaugcuggucugaauugca

SEQ ID NO: 625678 - RNA, 22 nt, Human
uagcuguguagacacucagagc

SEQ ID NO: 625679 - RNA, 18 nt, Human
uuuguccuguggcagcug

SEQ ID NO: 625680 - RNA, 22 nt, Human
agacucugauaagcaacucuug

SEQ ID NO: 625681 - RNA, 22 nt, Human
aggcucucuagaaacugugccu

SEQ ID NO: 625682 - RNA, 22 nt, Human
agcugccugcugcacucggugc

SEQ ID NO: 625683 - RNA, 22 nt, Human
gagcaucuccuaccuacuccuu

SEQ ID NO: 625684 - RNA, 22 nt, Human
augcaacaaauugugugcaaua

SEQ ID NO: 625685 - RNA, 22 nt, Human
gccuaggaguggggauggcggu

SEQ ID NO: 625686 - RNA, 18 nt, Human
ugucuuuggaccacugaa

SEQ ID NO: 625687 - RNA, 22 nt, Human
agaguaauuucugcugaaaagg

SEQ ID NO: 625688 - RNA, 20 nt, Human
ggacagugagacauaucuca

SEQ ID NO: 625689 - RNA, 22 nt, Human
ccagucuccuaagagccccuga

SEQ ID NO: 625690 - RNA, 22 nt, Human
cauagccaucuuuagcuuccag

SEQ ID NO: 625691 - RNA, 17 nt, Human
ccagcccucgcgcuuuu

SEQ ID NO: 625692 - RNA, 22 nt, Human
caggcagcucgaugccuuguug

SEQ ID NO: 625693 - RNA, 22 nt, Human
ugagacagcagauuagcaauga

SEQ ID NO: 625694 - RNA, 22 nt, Human
aggagacucagagaccuggccg

SEQ ID NO: 625695 - RNA, 23 nt, Human
uugagcucaguagcucugcuggu

SEQ ID NO: 625696 - RNA, 22 nt, Human
uaugaagcucucacuguguguc

SEQ ID NO: 625697 - RNA, 22 nt, Human
ccaggaguuggagguugcagug

SEQ ID NO: 625698 - RNA, 22 nt, Human
auacauacguacauacguaugu

SEQ ID NO: 625699 - RNA, 22 nt, Human
gaugcuuacauagcccaagugu

SEQ ID NO: 625700 - RNA, 22 nt, Human
uuugguauugcacacugucuuc

SEQ ID NO: 625701 - RNA, 16 nt, Human
cuguggcucccagguu

SEQ ID NO: 625702 - RNA, 20 nt, Human
uugaggucaaggacuaggcc

SEQ ID NO: 625703 - RNA, 22 nt, Human
gggcaccuggcuagugacagug

SEQ ID NO: 625704 - RNA, 22 nt, Human
cugggacaguucagguagggca

SEQ ID NO: 625705 - RNA, 22 nt, Human
ucacccccuguauuaguagcua

SEQ ID NO: 625706 - RNA, 22 nt, Human
cuuucagagguuacucaggaaa

SEQ ID NO: 625707 - RNA, 22 nt, Human
aagaauuaucugaaagcugugu

SEQ ID NO: 625708 - RNA, 22 nt, Human
uugggcacggacagguggggau

SEQ ID NO: 625709 - RNA, 20 nt, Human
gcaggcuccgggcuugggag

SEQ ID NO: 625710 - RNA, 23 nt, Human
ucuccuccuagauacagucaugg

SEQ ID NO: 625711 - RNA, 22 nt, Human
ucaggcagguuggcugcagguc

SEQ ID NO: 625712 - RNA, 19 nt, Human
augucccaccgccccugag

SEQ ID NO: 625713 - RNA, 22 nt, Human
uggguggcagcuucagcauguu

SEQ ID NO: 625714 - RNA, 22 nt, Human
uccucuggcucuuucccuagga

SEQ ID NO: 625715 - RNA, 23 nt, Human
uugcugccugagccuuccucugg

SEQ ID NO: 625716 - RNA, 22 nt, Human
ugaagcacauuucuugagauga

SEQ ID NO: 625717 - RNA, 22 nt, Human
acacauaagaaacuacaaagag

SEQ ID NO: 625718 - RNA, 22 nt, Human
cacagugugacugaccuucagc

SEQ ID NO: 625719 - RNA, 22 nt, Human
gggcauggaggucugucugcag

SEQ ID NO: 625720 - RNA, 22 nt, Human
aauccugaggcaaagagaugag

SEQ ID NO: 625721 - RNA, 22 nt, Human
uucugaggccauuaccaauaaa

SEQ ID NO: 625722 - RNA, 22 nt, Human
ggagaugcaauguagaaucugg

SEQ ID NO: 625723 - RNA, 22 nt, Human
agugucugaagccucagcccga

SEQ ID NO: 625724 - RNA, 22 nt, Human
cccugccccaggcggcuucacu

SEQ ID NO: 625725 - RNA, 21 nt, Human
uguuuaauacauauuugugga

SEQ ID NO: 625726 - RNA, 19 nt, Human
guuuuguuugcagaacuua

SEQ ID NO: 625727 - RNA, 22 nt, Human
ucuccucccaggcucuuccagg

SEQ ID NO: 625728 - RNA, 22 nt, Human
uucaggauuguguuuuuccuga

SEQ ID NO: 625729 - RNA, 22 nt, Human
uccaggaggaggaaggcugcca

SEQ ID NO: 625730 - RNA, 22 nt, Human
ugcuggugauuaaauccugaag

SEQ ID NO: 625731 - RNA, 22 nt, Human
cuaaaugacagguaccauagug

SEQ ID NO: 625732 - RNA, 22 nt, Human
uaaggcauaaggccagaggcua

SEQ ID NO: 625733 - RNA, 22 nt, Human
uucuuugggauuguagcugucu

SEQ ID NO: 625734 - RNA, 22 nt, Human
aaugcacaaaggugucuauugc

SEQ ID NO: 625735 - RNA, 22 nt, Human
ucaggcugugggcacuggccau

SEQ ID NO: 625736 - RNA, 20 nt, Human
aaaaacaguaaugcugaaga

SEQ ID NO: 625737 - RNA, 22 nt, Human
uuuguaaaagcccaagcuguag

SEQ ID NO: 625738 - RNA, 23 nt, Human
cuugaaugggauggaauucacug

SEQ ID NO: 625739 - RNA, 22 nt, Human
caagaucaagguaucagcagau

SEQ ID NO: 625740 - RNA, 22 nt, Human
caagaucaaggugucagcaggu

SEQ ID NO: 625741 - RNA, 22 nt, Human
uagcagcauuaauuccauuugc

SEQ ID NO: 625742 - RNA, 22 nt, Human
ccuggcucaggcacgcauggcu

SEQ ID NO: 625743 - RNA, 22 nt, Human
agguuucuucuuaggaauaugu

SEQ ID NO: 625744 - RNA, 22 nt, Human
auguugggaaggccgcaggcac

SEQ ID NO: 625745 - RNA, 22 nt, Human
acucuccuuuugaucuucagaa

SEQ ID NO: 625746 - RNA, 22 nt, Human
uucaacaugcuuuauuucuaaa

SEQ ID NO: 625747 - RNA, 22 nt, Human
uaaguauuggccuauagcuaga

SEQ ID NO: 625748 - RNA, 22 nt, Human
auccacagucuuagccaucaaa

SEQ ID NO: 625749 - RNA, 22 nt, Human
ucuacagguggggccuggcaau

SEQ ID NO: 625750 - RNA, 22 nt, Human
uccaagcuguauguuccuagag

SEQ ID NO: 625751 - RNA, 22 nt, Human
agcagcagggcucugcccgugc

SEQ ID NO: 625752 - RNA, 22 nt, Human
ccaugcuggagucccuagcugu

SEQ ID NO: 625753 - RNA, 22 nt, Human
ggacaaagccugguggcaggug

SEQ ID NO: 625754 - RNA, 22 nt, Human
uaggaaauggcucaguuacugc

SEQ ID NO: 625755 - RNA, 22 nt, Human
aaacugcugggcauauauuucu

SEQ ID NO: 625756 - RNA, 18 nt, Human
cacaauagacaccgauaa

SEQ ID NO: 625757 - RNA, 22 nt, Human
gcauugucaaaagugguaugac

SEQ ID NO: 625758 - RNA, 22 nt, Human
ugaugagggagauuugagccca

SEQ ID NO: 625759 - RNA, 22 nt, Human
auucaguucugcugguucugcu

SEQ ID NO: 625760 - RNA, 22 nt, Human
gcucagaggagcaucauaagga

SEQ ID NO: 625761 - RNA, 21 nt, Human
ucagcagaaagcaaggucagu

SEQ ID NO: 625762 - RNA, 22 nt, Human
uccugcaggggcugaggaacca

SEQ ID NO: 625763 - RNA, 22 nt, Human
cccccugcgcccggcacgucau

SEQ ID NO: 625764 - RNA, 22 nt, Human
gcuggcuguuggagguaccugc

SEQ ID NO: 625765 - RNA, 22 nt, Human
gcugggaaccaugggaaggcag

SEQ ID NO: 625766 - RNA, 22 nt, Human
auuugugauaauuuguuacagc

SEQ ID NO: 625767 - RNA, 22 nt, Human
gagaugagugggggaucucuca

SEQ ID NO: 625768 - RNA, 19 nt, Human
ccauccauggggccagagg

SEQ ID NO: 625769 - RNA, 23 nt, Human
aaguagauaacacuguucugaga

SEQ ID NO: 625770 - RNA, 22 nt, Human
ucugccuuuucacugccacuaa

SEQ ID NO: 625771 - RNA, 22 nt, Human
ccucaggcuucuaguucaguga

SEQ ID NO: 625772 - RNA, 22 nt, Human
cucucuggaauuaaagcccaau

SEQ ID NO: 625773 - RNA, 22 nt, Human
cauuugauuacuaaagauaauu

SEQ ID NO: 625774 - RNA, 23 nt, Human
cacaacuaaucagaaucucuagg

SEQ ID NO: 625775 - RNA, 22 nt, Human
agggcucagaaaugucuacggg

SEQ ID NO: 625776 - RNA, 22 nt, Human
uggucugacuacaauaggaaga

SEQ ID NO: 625777 - RNA, 19 nt, Human
cacauacagaaaagaguaa

SEQ ID NO: 625778 - RNA, 22 nt, Human
aaauaguuagcccugcauauau

SEQ ID NO: 625779 - RNA, 22 nt, Human
gggagcuggccuacuauuagau

SEQ ID NO: 625780 - RNA, 22 nt, Human
agggcaugugggagaggagccu

SEQ ID NO: 625781 - RNA, 22 nt, Human
ggagcagaugucuucauggccu

SEQ ID NO: 625782 - RNA, 22 nt, Human
uaggaaaacgugauuuucucac

SEQ ID NO: 625783 - RNA, 22 nt, Human
accagguggccccagcgugguu

SEQ ID NO: 625784 - RNA, 22 nt, Human
ugaacacgcuucauacagaggg

SEQ ID NO: 625785 - RNA, 22 nt, Human
cuguuugugauuagcagugggu

SEQ ID NO: 625786 - RNA, 18 nt, Human
aggucugaggaagagccu

SEQ ID NO: 625787 - RNA, 20 nt, Human
uacuuugaucugauaagcaa

SEQ ID NO: 625788 - RNA, 22 nt, Human
auggcuuugaaguucagcuuuu

SEQ ID NO: 625789 - RNA, 22 nt, Human
cugacugugagagcaggaaugg

SEQ ID NO: 625790 - RNA, 22 nt, Human
ggcuggaccaugcugccccuuc

SEQ ID NO: 625791 - RNA, 22 nt, Human
agguggggaaaccagcgauccc

SEQ ID NO: 625792 - RNA, 22 nt, Human
uaacuacaagggcggucucugu

SEQ ID NO: 625793 - RNA, 22 nt, Human
guggcagcaaaauccugcauuc

SEQ ID NO: 625794 - RNA, 22 nt, Human
ggugaggggcuccucugcccgg

SEQ ID NO: 625795 - RNA, 22 nt, Human
cagaugcuaaguuaucagcagg

SEQ ID NO: 625796 - RNA, 22 nt, Human
ucauuuaauagcuuuugucuuu

SEQ ID NO: 625797 - RNA, 22 nt, Human
uuccuggggcuuagcaauggag

SEQ ID NO: 625798 - RNA, 20 nt, Human
agcccuguaaauccccugga

SEQ ID NO: 625799 - RNA, 20 nt, Human
ucauuucuugggguuccaag

SEQ ID NO: 625800 - RNA, 22 nt, Human
gcuggcagcauuagacccuggg

SEQ ID NO: 625801 - RNA, 22 nt, Human
uaaucucuagcccaugcaaaga

SEQ ID NO: 625802 - RNA, 22 nt, Human
ccucuggcuguaccacuggcac

SEQ ID NO: 625803 - RNA, 22 nt, Human
uagcaaaaacugcaguuacuuu

SEQ ID NO: 625804 - RNA, 22 nt, Human
agccucucuuaucccuucaaag

SEQ ID NO: 625805 - RNA, 22 nt, Human
acugugcauuccccaaccugug

SEQ ID NO: 625806 - RNA, 22 nt, Human
uuaguuagggcuccugaggacc

SEQ ID NO: 625807 - RNA, 22 nt, Human
acagugcugaucuagacugacc

SEQ ID NO: 625808 - RNA, 22 nt, Human
cagccccucacagagcuguccu

SEQ ID NO: 625809 - RNA, 22 nt, Human
uguuugcauuaauuagaaggua

SEQ ID NO: 625810 - RNA, 22 nt, Human
guggcagugaaggucauagcau

SEQ ID NO: 625811 - RNA, 22 nt, Human
cccagcuguaacgggucugcac

SEQ ID NO: 625812 - RNA, 22 nt, Human
uuccucagacccucauugugag

SEQ ID NO: 625813 - RNA, 22 nt, Human
cucucagaaguuuaugucagaa

SEQ ID NO: 625814 - RNA, 22 nt, Human
gcuguuucugaguagcuaggcu

SEQ ID NO: 625815 - RNA, 22 nt, Human
cugcaguugggugacccaauau

SEQ ID NO: 625816 - RNA, 22 nt, Human
ugaggguggccuuguguggacu

SEQ ID NO: 625817 - RNA, 22 nt, Human
ggagaaaauugaugaaguuggc

SEQ ID NO: 625818 - RNA, 22 nt, Human
agcaggugucggcgagggucuu

SEQ ID NO: 625819 - RNA, 22 nt, Human
ccacuggcaaccccgccucaua

SEQ ID NO: 625820 - RNA, 22 nt, Human
aggaggagguaagaaaagcaua

SEQ ID NO: 625821 - RNA, 22 nt, Human
gacacagcacuguacaaggaau

SEQ ID NO: 625822 - RNA, 22 nt, Human
uacaacauuuacguuaggcugu

SEQ ID NO: 625823 - RNA, 22 nt, Human
acaguguguuggaggagacugu

SEQ ID NO: 625824 - RNA, 22 nt, Human
acagccagggucucaggaggcg

SEQ ID NO: 625825 - RNA, 22 nt, Human
ucucuggccccauggcugagcu

SEQ ID NO: 625826 - RNA, 22 nt, Human
ggccagaaguuggaaaagagcc

SEQ ID NO: 625827 - RNA, 22 nt, Human
gagccagauuuuaugcaagaca

SEQ ID NO: 625828 - RNA, 22 nt, Human
aaguuguuguugagguggguaa

SEQ ID NO: 625829 - RNA, 22 nt, Human
uuucucuguucucuaacuguaa

SEQ ID NO: 625830 - RNA, 21 nt, Human
agggacacacaggauggggcu

SEQ ID NO: 625831 - RNA, 20 nt, Human
ucccuggggcccuacuuccu

SEQ ID NO: 625832 - RNA, 22 nt, Human
ccuuuacaaaguucuucauggg

SEQ ID NO: 625833 - RNA, 22 nt, Human
cugggcucagcccaugcugucc

SEQ ID NO: 625834 - RNA, 21 nt, Human
ggguccugggaugggauccag

SEQ ID NO: 625835 - RNA, 22 nt, Human
uccugcagccauuagaggucaa

SEQ ID NO: 625836 - RNA, 22 nt, Human
cuggcuuuaccucacuggggcu

SEQ ID NO: 625837 - RNA, 22 nt, Human
uaaccauauuuuccauuaaguu

SEQ ID NO: 625838 - RNA, 22 nt, Human
cugcccacuuggccaccuucua

SEQ ID NO: 625839 - RNA, 22 nt, Human
guggcuucuucuugggagcugc

SEQ ID NO: 625840 - RNA, 22 nt, Human
cugcccugggugcuggggaucc

SEQ ID NO: 625841 - RNA, 22 nt, Human
ggcagcaacgaggcuugauacc

SEQ ID NO: 625842 - RNA, 22 nt, Human
aaacauucacauuugcuaguaa

SEQ ID NO: 625843 - RNA, 20 nt, Human
gagauggcuaagugcugaac

SEQ ID NO: 625844 - RNA, 19 nt, Human
agugcagggagcacccuca

SEQ ID NO: 625845 - RNA, 22 nt, Human
auugguuaccacuuuaaaucuu

SEQ ID NO: 625846 - RNA, 22 nt, Human
cccaggagaccuagaucuguuu

SEQ ID NO: 625847 - RNA, 22 nt, Human
cucccucucaccggagcccugg

SEQ ID NO: 625848 - RNA, 18 nt, Human
gaucgggggcgccccaag

SEQ ID NO: 625849 - RNA, 22 nt, Human
agggcccaggacagcaucaggg

SEQ ID NO: 625850 - RNA, 22 nt, Human
cugagcagcaauugcuggccca

SEQ ID NO: 625851 - RNA, 22 nt, Human
ggagcugcuccuucagccaagu

SEQ ID NO: 625852 - RNA, 22 nt, Human
cagcccucagguccucagcagc

SEQ ID NO: 625853 - RNA, 22 nt, Human
gaggcccuccagcugucagcug

SEQ ID NO: 625854 - RNA, 22 nt, Human
gucucaguaagaaaggcuccug

SEQ ID NO: 625855 - RNA, 22 nt, Human
cuaacuuuauuugcuaaguaga

SEQ ID NO: 625856 - RNA, 22 nt, Human
cuuguuaaauuauauaagcaga

SEQ ID NO: 625857 - RNA, 22 nt, Human
uaugucugaaucuuauuuaaau

SEQ ID NO: 625858 - RNA, 22 nt, Human
aacaaugucucauccuaugugg

SEQ ID NO: 625859 - RNA, 22 nt, Human
acaaugugauaauuuaaagaua

SEQ ID NO: 625860 - RNA, 23 nt, Human
ucacacagcuggucagguacaga

SEQ ID NO: 625861 - RNA, 22 nt, Human
guggcagccgcaggcccugugu

SEQ ID NO: 625862 - RNA, 22 nt, Human
gccaggggacgcggagcgacga

SEQ ID NO: 625863 - RNA, 20 nt, Human
ggcuggaaguguggguuugg

SEQ ID NO: 625864 - RNA, 22 nt, Human
gccaggacggugaaugggcuac

SEQ ID NO: 625865 - RNA, 22 nt, Human
uggcugcagaaccuccucagga

SEQ ID NO: 625866 - RNA, 22 nt, Human
ucagauuuuauuuuccuguuac

SEQ ID NO: 625867 - RNA, 22 nt, Human
ucucagagaacaguuggugcuu

SEQ ID NO: 625868 - RNA, 19 nt, Human
ccugaccacacaggccuug

SEQ ID NO: 625869 - RNA, 22 nt, Human
auuaaauguuccuuaaauuaua

SEQ ID NO: 625870 - RNA, 22 nt, Human
caguuuaaagaaggaugggagu

SEQ ID NO: 625871 - RNA, 22 nt, Human
uuccauaaucaccuuauucuuu

SEQ ID NO: 625872 - RNA, 22 nt, Human
aaacuuuugguccucauggguu

SEQ ID NO: 625873 - RNA, 22 nt, Human
uuggcagugaugcagcuuguuc

SEQ ID NO: 625874 - RNA, 23 nt, Human
gaggagggucgugcuguguuccu

SEQ ID NO: 625875 - RNA, 22 nt, Human
ccagcuguuucugaugcuaggc

SEQ ID NO: 625876 - RNA, 19 nt, Human
ggaggccuggguauuugcc

SEQ ID NO: 625877 - RNA, 22 nt, Human
ugcccaggcuggaaugcagugg

SEQ ID NO: 625878 - RNA, 22 nt, Human
uucuuaaucccacaaaucuuca

SEQ ID NO: 625879 - RNA, 22 nt, Human
cccagcucgccgccgaugugcg

SEQ ID NO: 625880 - RNA, 22 nt, Human
cacacaaauauucuggaggcaa

SEQ ID NO: 625881 - RNA, 19 nt, Human
gcauaaauacacuauuguc

SEQ ID NO: 625882 - RNA, 22 nt, Human
accucagcuauuucaaaacaga

SEQ ID NO: 625883 - RNA, 22 nt, Human
acagacuguuggccuacugagc

SEQ ID NO: 625884 - RNA, 22 nt, Human
ucacucuuuaucuuuuaugucu

SEQ ID NO: 625885 - RNA, 22 nt, Human
auuccagaugcuuguauuuaaa

SEQ ID NO: 625886 - RNA, 21 nt, Human
ggcugguguuuagcugugaua

SEQ ID NO: 625887 - RNA, 22 nt, Human
acaggccugagauuuugcauuu

SEQ ID NO: 625888 - RNA, 23 nt, Human
ugucuggagccugagcaggugcu

SEQ ID NO: 625889 - RNA, 22 nt, Human
aucucaaacaucuuugaccaua

SEQ ID NO: 625890 - RNA, 22 nt, Human
cugagcuuaacccuguuagcaa

SEQ ID NO: 625891 - RNA, 22 nt, Human
cuccagucuaguagagccugcu

SEQ ID NO: 625892 - RNA, 22 nt, Human
ugcaguguuuuucagggcauau

SEQ ID NO: 625893 - RNA, 23 nt, Human
gaggucaaggcugcagugauugc

SEQ ID NO: 625894 - RNA, 22 nt, Human
ucugagaacaugcuuugaucau

SEQ ID NO: 625895 - RNA, 21 nt, Human
agcaagcagaauccaucuaga

SEQ ID NO: 625896 - RNA, 22 nt, Human
uaugcaaaguccuaagaaagaa

SEQ ID NO: 625897 - RNA, 22 nt, Human
cccagagagcauuuggacaaag

SEQ ID NO: 625898 - RNA, 22 nt, Human
auuauucauugguaggcaagcu

SEQ ID NO: 625899 - RNA, 18 nt, Human
uccagagagggagaagug

SEQ ID NO: 625900 - RNA, 22 nt, Human
caggguggaaaagcuaguugga

SEQ ID NO: 625901 - RNA, 22 nt, Human
augucuuuuaugauuacgggau

SEQ ID NO: 625902 - RNA, 22 nt, Human
aaaugugcuucuuacucucaau

SEQ ID NO: 625903 - RNA, 22 nt, Human
aaccuuuauuugguacuauucu

SEQ ID NO: 625904 - RNA, 22 nt, Human
ugagcauggugggugcagagca

SEQ ID NO: 625905 - RNA, 22 nt, Human
cacaugaguguaggaagaggga

SEQ ID NO: 625906 - RNA, 22 nt, Human
guacccaggcacgccuugcuga

SEQ ID NO: 625907 - RNA, 22 nt, Human
agcaaugugaccccugacagca

SEQ ID NO: 625908 - RNA, 22 nt, Human
uuauuuugccacaggugaccuu

SEQ ID NO: 625909 - RNA, 22 nt, Human
uuuaaauggcauuuucccagau

SEQ ID NO: 625910 - RNA, 22 nt, Human
aucuugugugaugaugagaaag

SEQ ID NO: 625911 - RNA, 22 nt, Human
uguguguauccauuagaggcca

SEQ ID NO: 625912 - RNA, 22 nt, Human
uccagggccuuaccucuucaga

SEQ ID NO: 625913 - RNA, 17 nt, Human
agugacuuggaaagagc

SEQ ID NO: 625914 - RNA, 22 nt, Human
agagagguuggcuaggauguuu

SEQ ID NO: 625915 - RNA, 22 nt, Human
uggcucauucuggggaagucag

SEQ ID NO: 625916 - RNA, 22 nt, Human
uugagguccagucuccacccac

SEQ ID NO: 625917 - RNA, 22 nt, Human
ccugccugucaucgccugcgcc

SEQ ID NO: 625918 - RNA, 22 nt, Human
ggagacagcaggaagaaauauc

SEQ ID NO: 625919 - RNA, 22 nt, Human
ccuggagcccaaggcagugaga

SEQ ID NO: 625920 - RNA, 22 nt, Human
ucaguucucucaugccugcccu

SEQ ID NO: 625921 - RNA, 22 nt, Human
ccaggagcagccggcccaccug

SEQ ID NO: 625922 - RNA, 20 nt, Human
uacuggaaauuucuccaccu

SEQ ID NO: 625923 - RNA, 22 nt, Human
uuccuaaaagaauacacuggau

SEQ ID NO: 625924 - RNA, 23 nt, Human
ggaggcacuuaggcagagcagag

SEQ ID NO: 625925 - RNA, 17 nt, Human
gcccacccuuaggagcu

SEQ ID NO: 625926 - RNA, 22 nt, Human
uggggucugaguaucugcauuu

SEQ ID NO: 625927 - RNA, 23 nt, Human
ucugucaccuauggcugcucuuc

SEQ ID NO: 625928 - RNA, 22 nt, Human
cugacaaaccacugcuccagcu

SEQ ID NO: 625929 - RNA, 19 nt, Human
ugucuuaauuaacucagag

SEQ ID NO: 625930 - RNA, 22 nt, Human
cgugucugggcucccauggcag

SEQ ID NO: 625931 - RNA, 22 nt, Human
aaaugcugaguguuuagagauc

SEQ ID NO: 625932 - RNA, 22 nt, Human
agacaggugcucgcccaagucc

SEQ ID NO: 625933 - RNA, 22 nt, Human
aagauauucaaagauuuauuag

SEQ ID NO: 625934 - RNA, 22 nt, Human
gagcuuggaagcagauccucac

SEQ ID NO: 625935 - RNA, 22 nt, Human
ccugggcucaagugauccuccu

SEQ ID NO: 625936 - RNA, 22 nt, Human
caaucagauaugugacauauuu

SEQ ID NO: 625937 - RNA, 22 nt, Human
auaccauaggaaaggaucagcc

SEQ ID NO: 625938 - RNA, 22 nt, Human
cccucucugcugcauagaggaa

SEQ ID NO: 625939 - RNA, 19 nt, Human
uccuccuuacuuccucuug

SEQ ID NO: 625940 - RNA, 22 nt, Human
uggaagggagugacagucagag

SEQ ID NO: 625941 - RNA, 22 nt, Human
gaugauuuugaugcaguaaaga

SEQ ID NO: 625942 - RNA, 22 nt, Human
aagaugcuuauugcuccugcag

SEQ ID NO: 625943 - RNA, 22 nt, Human
acacauguauaugcuugugugu

SEQ ID NO: 625944 - RNA, 22 nt, Human
ucuguuaucucaagucacaaga

SEQ ID NO: 625945 - RNA, 22 nt, Human
gagaaguuguguggauuuaaag

SEQ ID NO: 625946 - RNA, 22 nt, Human
caaaucuauauguugauauucu

SEQ ID NO: 625947 - RNA, 22 nt, Human
uucucuggagggcugcccggcc

SEQ ID NO: 625948 - RNA, 22 nt, Human
gaggcaggguguugauuacaga

SEQ ID NO: 625949 - RNA, 22 nt, Human
ugucugaaacuuaugauauacu

SEQ ID NO: 625950 - RNA, 22 nt, Human
cuuuccuucucgugguucucac

SEQ ID NO: 625951 - RNA, 22 nt, Human
gucugaggguugugcuggagga

SEQ ID NO: 625952 - RNA, 22 nt, Human
acagagcuuaggaugacuccca

SEQ ID NO: 625953 - RNA, 17 nt, Human
gugccuguuguccugga

SEQ ID NO: 625954 - RNA, 22 nt, Human
auauacaggugguauguguaaa

SEQ ID NO: 625955 - RNA, 22 nt, Human
ccaugccauacuggccacccgg

SEQ ID NO: 625956 - RNA, 22 nt, Human
uaggggaacuggcacagggcag

SEQ ID NO: 625957 - RNA, 22 nt, Human
acagaaaaguuuacuuuugcuc

SEQ ID NO: 625958 - RNA, 22 nt, Human
cccccaggcucugacacaggag

SEQ ID NO: 625959 - RNA, 22 nt, Human
agcaggaccaagaaggggaaaa

SEQ ID NO: 625960 - RNA, 22 nt, Human
auuugguuucaggauucucagg

SEQ ID NO: 625961 - RNA, 22 nt, Human
gcagcugccaguccccuuccag

SEQ ID NO: 625962 - RNA, 22 nt, Human
aguggcaauugacaacaaagga

SEQ ID NO: 625963 - RNA, 22 nt, Human
acauuucuaguuguucaucucc

SEQ ID NO: 625964 - RNA, 22 nt, Human
gcuuggcugugagcuuugcugu

SEQ ID NO: 625965 - RNA, 22 nt, Human
acaugcauuaaaaauacuugug

SEQ ID NO: 625966 - RNA, 22 nt, Human
acuauucaccuuucaugcagga

SEQ ID NO: 625967 - RNA, 19 nt, Human
gcuguauuaaagauacaug

SEQ ID NO: 625968 - RNA, 22 nt, Human
cgucuuccucuuacgaugcgcu

SEQ ID NO: 625969 - RNA, 21 nt, Human
uguggcugacacccuuuggga

SEQ ID NO: 625970 - RNA, 22 nt, Human
aguacauuuuucaguggggagu

SEQ ID NO: 625971 - RNA, 22 nt, Human
ccagcaggagagaacauuuccc

SEQ ID NO: 625972 - RNA, 22 nt, Human
uacaucuauuugacagauacag

SEQ ID NO: 625973 - RNA, 22 nt, Human
gcaguaagauguuucccagagc

SEQ ID NO: 625974 - RNA, 22 nt, Human
ugaggcucacgaacagaagacu

SEQ ID NO: 625975 - RNA, 22 nt, Human
ggucaacagagguaaugguaac

SEQ ID NO: 625976 - RNA, 22 nt, Human
caccagcagcggugugagggug

SEQ ID NO: 625977 - RNA, 23 nt, Human
cuggccaccaucuuucuggcuuc

SEQ ID NO: 625978 - RNA, 22 nt, Human
ucaaagacauggggaagcugag

SEQ ID NO: 625979 - RNA, 19 nt, Human
uagauacugaugaacucca

SEQ ID NO: 625980 - RNA, 22 nt, Human
caacaauaugcugaguuuuuca

SEQ ID NO: 625981 - RNA, 22 nt, Human
gaguuauucuagguccuuugua

SEQ ID NO: 625982 - RNA, 22 nt, Human
ggacaugaagcaaaaugggagg

SEQ ID NO: 625983 - RNA, 22 nt, Human
uuuucauaguaauggugcaugu

SEQ ID NO: 625984 - RNA, 22 nt, Human
aacuguuuuucacgugucucau

SEQ ID NO: 625985 - RNA, 22 nt, Human
gcuccuucuggcucccuuuugg

SEQ ID NO: 625986 - RNA, 22 nt, Human
uuugaagugggcauuagaaccu

SEQ ID NO: 625987 - RNA, 22 nt, Human
aacaguguuuugcucuuugccc

SEQ ID NO: 625988 - RNA, 22 nt, Human
uaccaaaaccaagccauuaucu

SEQ ID NO: 625989 - RNA, 22 nt, Human
gggcucagucugcggcgcgcgg

SEQ ID NO: 625990 - RNA, 22 nt, Human
aguaugaaucuuucagaccgua

SEQ ID NO: 625991 - RNA, 20 nt, Human
ugcugagguugacaugccca

SEQ ID NO: 625992 - RNA, 22 nt, Human
agccuucaaccuagcuagagca

SEQ ID NO: 625993 - RNA, 22 nt, Human
ucagggcucagcaucuggcauu

SEQ ID NO: 625994 - RNA, 21 nt, Human
uuguuacaaugcaagaguaug

SEQ ID NO: 625995 - RNA, 22 nt, Human
uuacaucagaaucacccaggaa

SEQ ID NO: 625996 - RNA, 22 nt, Human
uagaacagcauuuggcuauuaa

SEQ ID NO: 625997 - RNA, 22 nt, Human
cagagcagaagcgguccucaca

SEQ ID NO: 625998 - RNA, 22 nt, Human
uagcuguuaaguuguuuggaaa

SEQ ID NO: 625999 - RNA, 22 nt, Human
uauauuguuggugggaauauaa

SEQ ID NO: 626000 - RNA, 22 nt, Human
cggcccugaccagaccuuaguu

SEQ ID NO: 626001 - RNA, 22 nt, Human
ccuguugucauggaauaaguua

SEQ ID NO: 626002 - RNA, 22 nt, Human
auaaggcauauagucacuuuuu

SEQ ID NO: 626003 - RNA, 22 nt, Human
caggucagcacuuggaggugca

SEQ ID NO: 626004 - RNA, 22 nt, Human
ugauucugugaauuaguugggu

SEQ ID NO: 626005 - RNA, 22 nt, Human
ggauaggaauugagaugcuauu

SEQ ID NO: 626006 - RNA, 21 nt, Human
agacagaacaacugcucucca

SEQ ID NO: 626007 - RNA, 22 nt, Human
ugcagucagcauuagcaaaaua

SEQ ID NO: 626008 - RNA, 22 nt, Human
uguaaaacaaaauuuguggaga

SEQ ID NO: 626009 - RNA, 21 nt, Human
ccuguggucuggagggagcac

SEQ ID NO: 626010 - RNA, 16 nt, Human
ccccaggacuuggcac

SEQ ID NO: 626011 - RNA, 22 nt, Human
aauccuggcaugugccuuggga

SEQ ID NO: 626012 - RNA, 17 nt, Human
gugaauggcauagucgg

SEQ ID NO: 626013 - RNA, 22 nt, Human
cugcugccugauugcagaccuc

SEQ ID NO: 626014 - RNA, 22 nt, Human
ccaggaagcugugagauuccaa

SEQ ID NO: 626015 - RNA, 22 nt, Human
ccaaggcuccucagcuggucuu

SEQ ID NO: 626016 - RNA, 22 nt, Human
ucuggaguguuucuaauuacug

SEQ ID NO: 626017 - RNA, 22 nt, Human
gggcuggaagugcauugaugcu

SEQ ID NO: 626018 - RNA, 22 nt, Human
cuggagccacugggucuuguau

SEQ ID NO: 626019 - RNA, 22 nt, Human
gccucuccucuuaauaccauua

SEQ ID NO: 626020 - RNA, 22 nt, Human
cagcuguucggggcuggcaugu

SEQ ID NO: 626021 - RNA, 22 nt, Human
augguggacucuugauucaggc

SEQ ID NO: 626022 - RNA, 22 nt, Human
acagcagccuuguugguuucga

SEQ ID NO: 626023 - RNA, 22 nt, Human
uuucaaacugcccagcacaccu

SEQ ID NO: 626024 - RNA, 22 nt, Human
gcuuuagagcccagcuuggugg

SEQ ID NO: 626025 - RNA, 22 nt, Human
cuguggcugaacucugaagagg

SEQ ID NO: 626026 - RNA, 22 nt, Human
cacauacugagaaucacaccca

SEQ ID NO: 626027 - RNA, 22 nt, Human
ccaggcagcaaauuuucugaau

SEQ ID NO: 626028 - RNA, 22 nt, Human
acccaggcuagggugcaguggc

SEQ ID NO: 626029 - RNA, 22 nt, Human
uggcugaguaaguugugauaug

SEQ ID NO: 626030 - RNA, 22 nt, Human
guaaacaagucuaccauuagaa

SEQ ID NO: 626031 - RNA, 22 nt, Human
ucuccuggucaccucagaaguc

SEQ ID NO: 626032 - RNA, 22 nt, Human
guucuacaguuccuauuacuua

SEQ ID NO: 626033 - RNA, 22 nt, Human
guggucaggggcugaggugccc

SEQ ID NO: 626034 - RNA, 22 nt, Human
acacaauuuccuguccauaugu

SEQ ID NO: 626035 - RNA, 22 nt, Human
caucagagugguggccuggugu

SEQ ID NO: 626036 - RNA, 22 nt, Human
agaugaagaugccacuaagacc

SEQ ID NO: 626037 - RNA, 22 nt, Human
ggagcuguuaaaugcagaauuu

SEQ ID NO: 626038 - RNA, 22 nt, Human
ccagggaaaaucaacuucuacu

SEQ ID NO: 626039 - RNA, 22 nt, Human
acaaaugcagcauaaagugaac

SEQ ID NO: 626040 - RNA, 22 nt, Human
auugaguaccuccagauucaua

SEQ ID NO: 626041 - RNA, 22 nt, Human
caggaaugacugcagauggggc

SEQ ID NO: 626042 - RNA, 22 nt, Human
cagaaauggucuguucagcuua

SEQ ID NO: 626043 - RNA, 22 nt, Human
uguggccugauuuugcaucucu

SEQ ID NO: 626044 - RNA, 22 nt, Human
acauuuuacaccaagacuucuu

SEQ ID NO: 626045 - RNA, 22 nt, Human
augugagguagauaggaugcag

SEQ ID NO: 626046 - RNA, 22 nt, Human
uggagggaacaaaggaguccca

SEQ ID NO: 626047 - RNA, 22 nt, Human
ggcuuugggcccucaagucucc

SEQ ID NO: 626048 - RNA, 22 nt, Human
agaugcuuaaguuuucagugua

SEQ ID NO: 626049 - RNA, 22 nt, Human
ucugcuguaaccuucagaggua

SEQ ID NO: 626050 - RNA, 22 nt, Human
uggaugagggcugagcacuggg

SEQ ID NO: 626051 - RNA, 22 nt, Human
ugcccucagcagcagcuccugc

SEQ ID NO: 626052 - RNA, 22 nt, Human
caaggccacuccagagacuggu

SEQ ID NO: 626053 - RNA, 22 nt, Human
gcccacaggggaccugguggcu

SEQ ID NO: 626054 - RNA, 22 nt, Human
aggccuggcaugagaccugaga

SEQ ID NO: 626055 - RNA, 22 nt, Human
uggagcaggacggggaguggua

SEQ ID NO: 626056 - RNA, 22 nt, Human
ugaccugcguaggugguuucug

SEQ ID NO: 626057 - RNA, 16 nt, Human
uguuagcugugcauua

SEQ ID NO: 626058 - RNA, 22 nt, Human
cccugggaggcuuccaggcaga

SEQ ID NO: 626059 - RNA, 22 nt, Human
acagacugauucauugcucagg

SEQ ID NO: 626060 - RNA, 22 nt, Human
cucacauucacaggacagaagg

SEQ ID NO: 626061 - RNA, 22 nt, Human
auggaauaggcugcucuuuaaa

SEQ ID NO: 626062 - RNA, 21 nt, Human
ucaauacaggugcaugugucu

SEQ ID NO: 626063 - RNA, 22 nt, Human
auacagaugcuugcucgugacu

SEQ ID NO: 626064 - RNA, 22 nt, Human
ggcugccauaacagaguaccac

SEQ ID NO: 626065 - RNA, 22 nt, Human
aggagcugaaacuucucauaug

SEQ ID NO: 626066 - RNA, 22 nt, Human
ugaaagguagcuggccucauag

SEQ ID NO: 626067 - RNA, 22 nt, Human
cagggugccucugcucccacca

SEQ ID NO: 626068 - RNA, 22 nt, Human
ucccagaaguccagccaugggc

SEQ ID NO: 626069 - RNA, 22 nt, Human
aacacuucuguugauaauaagc

SEQ ID NO: 626070 - RNA, 22 nt, Human
aaagguaugauacugugacaug

SEQ ID NO: 626071 - RNA, 20 nt, Human
ccaccuggccaaggcugugc

SEQ ID NO: 626072 - RNA, 22 nt, Human
ccaaggcuuccugaccuacaug

SEQ ID NO: 626073 - RNA, 22 nt, Human
aaacacauuagcccuguggaaa

SEQ ID NO: 626074 - RNA, 22 nt, Human
uuccuucucagcccucgaggau

SEQ ID NO: 626075 - RNA, 22 nt, Human
uacaaugaccauauuauguaag

SEQ ID NO: 626076 - RNA, 22 nt, Human
gucaugccuggcuucuuagaca

SEQ ID NO: 626077 - RNA, 19 nt, Human
uguacaaggauuaugcagg

SEQ ID NO: 626078 - RNA, 23 nt, Human
ucagaaugcacugaauuuacccu

SEQ ID NO: 626079 - RNA, 22 nt, Human
agugggcaggcagggugcgcag

SEQ ID NO: 626080 - RNA, 22 nt, Human
auugaguaguaggaaaauaacu

SEQ ID NO: 626081 - RNA, 22 nt, Human
acccaggagacggaggugcagu

SEQ ID NO: 626082 - RNA, 22 nt, Human
aaauuaguacauugcaaagucc

SEQ ID NO: 626083 - RNA, 22 nt, Human
ugguaaugguucucuugcuaua

SEQ ID NO: 626084 - RNA, 22 nt, Human
ccucucucagcuugcugcaacu

SEQ ID NO: 626085 - RNA, 22 nt, Human
uaucuguucaauggaagaugac

SEQ ID NO: 626086 - RNA, 22 nt, Human
uccaggagaaggccauccagcg

SEQ ID NO: 626087 - RNA, 22 nt, Human
gaggcucagggaguauaugaau

SEQ ID NO: 626088 - RNA, 22 nt, Human
auuagucuacugucuaauaaau

SEQ ID NO: 626089 - RNA, 22 nt, Human
ccuguggcuuccacgaccuaau

SEQ ID NO: 626090 - RNA, 22 nt, Human
agauguuccagccaaugggaau

SEQ ID NO: 626091 - RNA, 22 nt, Human
uggcaacaugucgaagugcugu

SEQ ID NO: 626092 - RNA, 22 nt, Human
aggucaggguauucacgucugu

SEQ ID NO: 626093 - RNA, 22 nt, Human
uggagccuguucugagaagccg

SEQ ID NO: 626094 - RNA, 22 nt, Human
ucagcagaauguggcaugucac

SEQ ID NO: 626095 - RNA, 22 nt, Human
ccagucccaucucugucgcuua

SEQ ID NO: 626096 - RNA, 22 nt, Human
guggccaggucagggacuugug

SEQ ID NO: 626097 - RNA, 21 nt, Human
ugucagagcuuguaggacauu

SEQ ID NO: 626098 - RNA, 17 nt, Human
cccaugagcccacuccc

SEQ ID NO: 626099 - RNA, 22 nt, Human
uauguacacuuaaguuugagaa

SEQ ID NO: 626100 - RNA, 22 nt, Human
cucauaaacauuauucauuauu

SEQ ID NO: 626101 - RNA, 22 nt, Human
acaguuuggcgugauugauagu

SEQ ID NO: 626102 - RNA, 22 nt, Human
cucaccauaugacuuuacuaac

SEQ ID NO: 626103 - RNA, 22 nt, Human
ugaggccaggcaaaggcgaucu

SEQ ID NO: 626104 - RNA, 22 nt, Human
auauaguaagcagucuguaaau

SEQ ID NO: 626105 - RNA, 22 nt, Human
uucaaacaacucauuuaugcaa

SEQ ID NO: 626106 - RNA, 19 nt, Human
aagcauggugccucaccuc

SEQ ID NO: 626107 - RNA, 22 nt, Human
acaugcaugucuaugggcaggu

SEQ ID NO: 626108 - RNA, 22 nt, Human
cgcaugugcguugauugcagug

SEQ ID NO: 626109 - RNA, 22 nt, Human
uucaaacuuaaggagcagcaga

SEQ ID NO: 626110 - RNA, 22 nt, Human
ugaaauguuaaacaaguggcuc

SEQ ID NO: 626111 - RNA, 22 nt, Human
gaggauuugauggcuuucuccc

SEQ ID NO: 626112 - RNA, 22 nt, Human
ugaagcacaggcauacacaacc

SEQ ID NO: 626113 - RNA, 22 nt, Human
auacaacugccuuagaaggaaa

SEQ ID NO: 626114 - RNA, 22 nt, Human
ugcuucucuuuauuuguagguu

SEQ ID NO: 626115 - RNA, 22 nt, Human
uuccccuugauaaugcaguaag

SEQ ID NO: 626116 - RNA, 22 nt, Human
gcacagagugggugagaugugg

SEQ ID NO: 626117 - RNA, 22 nt, Human
aaggccacgucuccuuccagag

SEQ ID NO: 626118 - RNA, 22 nt, Human
ugcagcuccugugcugagugug

SEQ ID NO: 626119 - RNA, 19 nt, Human
agccagaguggcccagggg

SEQ ID NO: 626120 - RNA, 23 nt, Human
gguuccugagcagggaucuggaa

SEQ ID NO: 626121 - RNA, 22 nt, Human
gaagccaaguccucgaguuuca

SEQ ID NO: 626122 - RNA, 22 nt, Human
ccugagucuuucccauugcgcu

SEQ ID NO: 626123 - RNA, 22 nt, Human
cugcugggcagaggcugcauga

SEQ ID NO: 626124 - RNA, 22 nt, Human
caauacacuaaacuucucugaa

SEQ ID NO: 626125 - RNA, 22 nt, Human
ugucagcagaaguggugcacuc

SEQ ID NO: 626126 - RNA, 22 nt, Human
gcuaggaagcuggggagaaguc

SEQ ID NO: 626127 - RNA, 22 nt, Human
agacucugaagucauugcauga

SEQ ID NO: 626128 - RNA, 22 nt, Human
aacuagaaccacuuguauuucc

SEQ ID NO: 626129 - RNA, 17 nt, Human
ggcugcugugcuggugc

SEQ ID NO: 626130 - RNA, 18 nt, Human
uagauuaaaauugaauuc

SEQ ID NO: 626131 - RNA, 22 nt, Human
ggcgggagauggggccguucag

SEQ ID NO: 626132 - RNA, 18 nt, Human
ccuggaggucuucggggu

SEQ ID NO: 626133 - RNA, 22 nt, Human
aagcugugaaaucucuagugca

SEQ ID NO: 626134 - RNA, 22 nt, Human
gggagaaggaggacugugcugu

SEQ ID NO: 626135 - RNA, 22 nt, Human
aguugaauaauuagacauaucu

SEQ ID NO: 626136 - RNA, 22 nt, Human
acagcuacaucaaacucagaag

SEQ ID NO: 626137 - RNA, 22 nt, Human
gaagagguucaacguggucauc

SEQ ID NO: 626138 - RNA, 22 nt, Human
cugaggaggggccugagugaga

SEQ ID NO: 626139 - RNA, 22 nt, Human
uuauugccugauugaggucauu

SEQ ID NO: 626140 - RNA, 22 nt, Human
augacagaaggccucccugaca

SEQ ID NO: 626141 - RNA, 22 nt, Human
cuggcucuguggcuuccuucau

SEQ ID NO: 626142 - RNA, 22 nt, Human
gucugcuuuucugcccuuucau

SEQ ID NO: 626143 - RNA, 22 nt, Human
ccugugggcuugaguguagggu

SEQ ID NO: 626144 - RNA, 22 nt, Human
cugugugugucugcagcauacu

SEQ ID NO: 626145 - RNA, 22 nt, Human
aaacacuuccuguaacaugaca

SEQ ID NO: 626146 - RNA, 22 nt, Human
agcuggaauccuacuucuaaca

SEQ ID NO: 626147 - RNA, 22 nt, Human
uguagaaauuaguaagaucaac

SEQ ID NO: 626148 - RNA, 22 nt, Human
ugaggacaaucccuaacucaga

SEQ ID NO: 626149 - RNA, 22 nt, Human
agcacuuaacugacaguacuau

SEQ ID NO: 626150 - RNA, 22 nt, Human
gcugucagaaggugaaggguaa

SEQ ID NO: 626151 - RNA, 22 nt, Human
cucccucaccaugacccgcugu

SEQ ID NO: 626152 - RNA, 22 nt, Human
uuggcauaaaacucuucaaaau

SEQ ID NO: 626153 - RNA, 22 nt, Human
agaaaugacaagacugaucagg

SEQ ID NO: 626154 - RNA, 22 nt, Human
cugcauguguuauauuugguuc

SEQ ID NO: 626155 - RNA, 22 nt, Human
uguaaugauguacuuagaagga

SEQ ID NO: 626156 - RNA, 22 nt, Human
uauguguaaucauaucugauac

SEQ ID NO: 626157 - RNA, 22 nt, Human
gaugcugugcuaugucuacaga

SEQ ID NO: 626158 - RNA, 22 nt, Human
caggcuuuuucugcuguccucu

SEQ ID NO: 626159 - RNA, 22 nt, Human
gcacaguggaguguguccaggg

SEQ ID NO: 626160 - RNA, 19 nt, Human
ccugugagaggacaggugu

SEQ ID NO: 626161 - RNA, 22 nt, Human
ucuguccauuuuccauuuuggc

SEQ ID NO: 626162 - RNA, 22 nt, Human
ggcagucagugugguucauaaa

SEQ ID NO: 626163 - RNA, 22 nt, Human
gagaaagggauaauuugaagag

SEQ ID NO: 626164 - RNA, 22 nt, Human
agggacaucucacaaacaacuu

SEQ ID NO: 626165 - RNA, 22 nt, Human
cagggcucccugcagccucugu

SEQ ID NO: 626166 - RNA, 22 nt, Human
uucaauucugcucugaucuuag

SEQ ID NO: 626167 - RNA, 22 nt, Human
accuugaugccuuuccaagaug

SEQ ID NO: 626168 - RNA, 22 nt, Human
agcagauauuuguugagcacuu

SEQ ID NO: 626169 - RNA, 22 nt, Human
gcugagcuagaaaaggaccaca

SEQ ID NO: 626170 - RNA, 22 nt, Human
gcugccugcucacccggccugg

SEQ ID NO: 626171 - RNA, 19 nt, Human
uggcuccugccugccuucu

SEQ ID NO: 626172 - RNA, 22 nt, Human
cucauaaugugacuguauuuga

SEQ ID NO: 626173 - RNA, 19 nt, Human
gaauacagauaauaagcag

SEQ ID NO: 626174 - RNA, 22 nt, Human
uguguaaaaugagccuaaaguc

SEQ ID NO: 626175 - RNA, 22 nt, Human
gcuucaaggccaagacaccuua

SEQ ID NO: 626176 - RNA, 22 nt, Human
accuguuuuagucuuuaaucau

SEQ ID NO: 626177 - RNA, 22 nt, Human
accuuuuacggugugacuagca

SEQ ID NO: 626178 - RNA, 22 nt, Human
agcugccacauggugucacugu

SEQ ID NO: 626179 - RNA, 22 nt, Human
gaggccugggagccuguccucc

SEQ ID NO: 626180 - RNA, 22 nt, Human
uggcucagcagguuagaaacua

SEQ ID NO: 626181 - RNA, 22 nt, Human
uacacaaucuguuuuuccauuu

SEQ ID NO: 626182 - RNA, 22 nt, Human
gaggcucuucaauaggucaaug

SEQ ID NO: 626183 - RNA, 22 nt, Human
cccuccccacaaagcuucacac

SEQ ID NO: 626184 - RNA, 21 nt, Human
gcuucuguaucuagcaggaac

SEQ ID NO: 626185 - RNA, 22 nt, Human
ucuaauuuuaggcauuuguuca

SEQ ID NO: 626186 - RNA, 22 nt, Human
acucauguccuaggaguaaagc

SEQ ID NO: 626187 - RNA, 22 nt, Human
ugcuucuguucuuucaccuacg

SEQ ID NO: 626188 - RNA, 22 nt, Human
aaacauuuuucuaggucuuggu

SEQ ID NO: 626189 - RNA, 22 nt, Human
agggcagugggaaagccugcuc

SEQ ID NO: 626190 - RNA, 22 nt, Human
uggggcuggcuauugucucccu

SEQ ID NO: 626191 - RNA, 22 nt, Human
gcccugcuccaggagaauaccc

SEQ ID NO: 626192 - RNA, 22 nt, Human
acauucugaaaaacaguguuuu

SEQ ID NO: 626193 - RNA, 22 nt, Human
auggcugugagcaggcagcuuc

SEQ ID NO: 626194 - RNA, 22 nt, Human
cauccauagcuugaucuguucc

SEQ ID NO: 626195 - RNA, 22 nt, Human
cucaggcuugggaggaggccca

SEQ ID NO: 626196 - RNA, 22 nt, Human
uuccaaaugaguuccaucgaau

SEQ ID NO: 626197 - RNA, 22 nt, Human
ucaggaguugaaggggauccug

SEQ ID NO: 626198 - RNA, 22 nt, Human
gugugccagacaugaugcuaug

SEQ ID NO: 626199 - RNA, 19 nt, Human
cguaccugacacagaacag

SEQ ID NO: 626200 - RNA, 22 nt, Human
cuacagaaggagaaauggguaa

SEQ ID NO: 626201 - RNA, 22 nt, Human
uguaaaagguuguucuuucguu

SEQ ID NO: 626202 - RNA, 22 nt, Human
ugcugagaagagggccgaccca

SEQ ID NO: 626203 - RNA, 22 nt, Human
gcugcaggcucugcaggaauug

SEQ ID NO: 626204 - RNA, 22 nt, Human
ccugagccugaguggugcaggg

SEQ ID NO: 626205 - RNA, 22 nt, Human
cuguggcaaaugauaccuccca

SEQ ID NO: 626206 - RNA, 22 nt, Human
cacauguuuggcaugucaccaa

SEQ ID NO: 626207 - RNA, 22 nt, Human
cacugacaguaucagagcuguu

SEQ ID NO: 626208 - RNA, 22 nt, Human
gugucauuaaccaccaugcaaa

SEQ ID NO: 626209 - RNA, 22 nt, Human
uuaaacaccaagugcaaaccac

SEQ ID NO: 626210 - RNA, 22 nt, Human
ccaaugagacagaaagagccuc

SEQ ID NO: 626211 - RNA, 22 nt, Human
cucccagggucuaggcugcugg

SEQ ID NO: 626212 - RNA, 20 nt, Human
ugugaaagcaguagaaugac

SEQ ID NO: 626213 - RNA, 22 nt, Human
agacccugaaguuuucuaugau

SEQ ID NO: 626214 - RNA, 22 nt, Human
uaaggcagccucaggguagggu

SEQ ID NO: 626215 - RNA, 17 nt, Human
aggauguggagaaaauu

SEQ ID NO: 626216 - RNA, 22 nt, Human
uuggaggggccacugcagagcu

SEQ ID NO: 626217 - RNA, 22 nt, Human
uaaauucuacaacuucaaagau

SEQ ID NO: 626218 - RNA, 23 nt, Human
ucagaauaauaaccuaguaacug

SEQ ID NO: 626219 - RNA, 19 nt, Human
cacaauuaugagacacuua

SEQ ID NO: 626220 - RNA, 22 nt, Human
uugaaaggccuguuuauccagc

SEQ ID NO: 626221 - RNA, 22 nt, Human
ggacaaauucccuauuugcaug

SEQ ID NO: 626222 - RNA, 22 nt, Human
gaagaacuuuagggcagaauuu

SEQ ID NO: 626223 - RNA, 22 nt, Human
ucagaggccugaaagaauuugg

SEQ ID NO: 626224 - RNA, 22 nt, Human
uccaaaggggcaguguccagcc

SEQ ID NO: 626225 - RNA, 22 nt, Human
uuccucuuucucugugcuaugu

SEQ ID NO: 626226 - RNA, 22 nt, Human
ucaaggacuauugcaugacucc

SEQ ID NO: 626227 - RNA, 22 nt, Human
uuuacagucuauguugaauuaa

SEQ ID NO: 626228 - RNA, 22 nt, Human
uuaauacacuauaugaucacau

SEQ ID NO: 626229 - RNA, 22 nt, Human
auuuaauuuggagagagaaacc

SEQ ID NO: 626230 - RNA, 22 nt, Human
gaacuugagcaacacugaguga

SEQ ID NO: 626231 - RNA, 22 nt, Human
aaacaugaugccuguacuaaga

SEQ ID NO: 626232 - RNA, 22 nt, Human
cacaauuucaguugcaugcaac

SEQ ID NO: 626233 - RNA, 22 nt, Human
acauacaaauagagcuguagua

SEQ ID NO: 626234 - RNA, 22 nt, Human
gaaauugugcauuuagcaacac

SEQ ID NO: 626235 - RNA, 22 nt, Human
ucaggaagugcugaggcugcuu

SEQ ID NO: 626236 - RNA, 22 nt, Human
agauggaaaauauagacagaga

SEQ ID NO: 626237 - RNA, 22 nt, Human
aaucacaucacugagaaugagg

SEQ ID NO: 626238 - RNA, 22 nt, Human
ucagugugucucugcauuuggg

SEQ ID NO: 626239 - RNA, 22 nt, Human
aaguauucuggcagucauucag

SEQ ID NO: 626240 - RNA, 22 nt, Human
ucacagaaagcuguguccugac

SEQ ID NO: 626241 - RNA, 22 nt, Human
ggacacagaccuuucuguucua

SEQ ID NO: 626242 - RNA, 22 nt, Human
cagggcagccaggccccguggg

SEQ ID NO: 626243 - RNA, 22 nt, Human
auuugacauuauucucucaguc

SEQ ID NO: 626244 - RNA, 23 nt, Human
cucugggcgggcaggucagccuc

SEQ ID NO: 626245 - RNA, 22 nt, Human
ggaauguugucauuuacauuau

SEQ ID NO: 626246 - RNA, 22 nt, Human
cuccagugggggugagccuaga

SEQ ID NO: 626247 - RNA, 22 nt, Human
ggaccaguuucaaacuguacca

SEQ ID NO: 626248 - RNA, 22 nt, Human
ucaguagcagaaagcaaugagu

SEQ ID NO: 626249 - RNA, 22 nt, Human
uuggcucacaaggacgguugcu

SEQ ID NO: 626250 - RNA, 23 nt, Human
ugucuuugaaugggcuguagaca

SEQ ID NO: 626251 - RNA, 22 nt, Human
uauauuaaacccucucuguagg

SEQ ID NO: 626252 - RNA, 22 nt, Human
gccgggaccaaggccacggagc

SEQ ID NO: 626253 - RNA, 22 nt, Human
uggcuggagaacuuggggaucu

SEQ ID NO: 626254 - RNA, 22 nt, Human
ccugccagugaagcugacgggc

SEQ ID NO: 626255 - RNA, 22 nt, Human
ugagcucuaagauccccucaag

SEQ ID NO: 626256 - RNA, 22 nt, Human
aaugguuuaguuaagacugagu

SEQ ID NO: 626257 - RNA, 22 nt, Human
uuucccagagguaugaauaagu

SEQ ID NO: 626258 - RNA, 22 nt, Human
cugaccuggccuuggugggcca

SEQ ID NO: 626259 - RNA, 22 nt, Human
agagaccagaauccagcugccu

SEQ ID NO: 626260 - RNA, 22 nt, Human
cacugcuuuucagacaguuauu

SEQ ID NO: 626261 - RNA, 22 nt, Human
aucucccaaauuagccucuuga

SEQ ID NO: 626262 - RNA, 22 nt, Human
ucuugacauucaaucauguaua

SEQ ID NO: 626263 - RNA, 22 nt, Human
auggcagggaccaagcugucau

SEQ ID NO: 626264 - RNA, 22 nt, Human
ugggguacacguggggcaggau

SEQ ID NO: 626265 - RNA, 22 nt, Human
agauguaguagugggucuuuua

SEQ ID NO: 626266 - RNA, 22 nt, Human
ugucauuauuugccuacugacu

SEQ ID NO: 626267 - RNA, 22 nt, Human
ggcagauggaagaggcuggguc

SEQ ID NO: 626268 - RNA, 22 nt, Human
agcagccuggucucucgccaau

SEQ ID NO: 626269 - RNA, 22 nt, Human
uuacaacuuuccugugucaaau

SEQ ID NO: 626270 - RNA, 22 nt, Human
ggcagcuaggggcagggaauuc

SEQ ID NO: 626271 - RNA, 22 nt, Human
caguaugacuacaaacagcuuu

SEQ ID NO: 626272 - RNA, 22 nt, Human
auggacaggcugagcuuccuca

SEQ ID NO: 626273 - RNA, 22 nt, Human
uuuacugaauuugguauauucc

SEQ ID NO: 626274 - RNA, 22 nt, Human
acaaaggugagcagaagacaca

SEQ ID NO: 626275 - RNA, 22 nt, Human
auguccagccaaccacuggauu

SEQ ID NO: 626276 - RNA, 22 nt, Human
auggcuguugugaggaucaaau

SEQ ID NO: 626277 - RNA, 22 nt, Human
agaagcacaccaguagacaggg

SEQ ID NO: 626278 - RNA, 22 nt, Human
ugagagugguucagcucagaag

SEQ ID NO: 626279 - RNA, 22 nt, Human
cugaaguuauuguacaaauuug

SEQ ID NO: 626280 - RNA, 22 nt, Human
cuuguacaggaauccaugguau

SEQ ID NO: 626281 - RNA, 16 nt, Human
uugaaugacugugugc

SEQ ID NO: 626282 - RNA, 22 nt, Human
cagcaugagaaaaugaaucaga

SEQ ID NO: 626283 - RNA, 22 nt, Human
cacagggaggacaucaacagug

SEQ ID NO: 626284 - RNA, 22 nt, Human
aauugagaugacagaggaauag

SEQ ID NO: 626285 - RNA, 22 nt, Human
ggguaguguggucucugggcug

SEQ ID NO: 626286 - RNA, 22 nt, Human
gaggccagaagucugagaucag

SEQ ID NO: 626287 - RNA, 22 nt, Human
gccuuggaacaauuauugcugc

SEQ ID NO: 626288 - RNA, 22 nt, Human
uggaggacaggacuggacagcc

SEQ ID NO: 626289 - RNA, 22 nt, Human
ugggugaaaauuuugguggcac

SEQ ID NO: 626290 - RNA, 22 nt, Human
aaaccucuucucaagauuucug

SEQ ID NO: 626291 - RNA, 21 nt, Human
acagauuuuauaucucugcug

SEQ ID NO: 626292 - RNA, 22 nt, Human
uccccacacagauacagaguag

SEQ ID NO: 626293 - RNA, 22 nt, Human
guacaggaaggagggaguuuca

SEQ ID NO: 626294 - RNA, 22 nt, Human
ggcugcggccgcgggucugugc

SEQ ID NO: 626295 - RNA, 23 nt, Human
cccagagcacagccuccagaugc

SEQ ID NO: 626296 - RNA, 22 nt, Human
uaugccagacugugagcuucuu

SEQ ID NO: 626297 - RNA, 22 nt, Human
agaguggcccguuggccugaac

SEQ ID NO: 626298 - RNA, 22 nt, Human
guccagagagaucuucugauag

SEQ ID NO: 626299 - RNA, 22 nt, Human
aggguggcugaguagauggaag

SEQ ID NO: 626300 - RNA, 20 nt, Human
uuagaguuagcuguuaugca

SEQ ID NO: 626301 - RNA, 22 nt, Human
aacaggaauugaugggaguccu

SEQ ID NO: 626302 - RNA, 22 nt, Human
gaccagcuacuuguacaguuca

SEQ ID NO: 626303 - RNA, 22 nt, Human
gcaggacaggcguugguccagu

SEQ ID NO: 626304 - RNA, 22 nt, Human
ugggacuuguguggcaguauuu

SEQ ID NO: 626305 - RNA, 22 nt, Human
ucugggcugcuaugaggcagag

SEQ ID NO: 626306 - RNA, 22 nt, Human
acuaaagucagacugcauugau

SEQ ID NO: 626307 - RNA, 22 nt, Human
ccacagugacacgggcuggccc

SEQ ID NO: 626308 - RNA, 22 nt, Human
agagccaguuguuaagcacuua

SEQ ID NO: 626309 - RNA, 19 nt, Human
cuggccacaccugcugguu

SEQ ID NO: 626310 - RNA, 22 nt, Human
ccuguguuuagauaugaugcug

SEQ ID NO: 626311 - RNA, 22 nt, Human
ggcccugagcacagcuccucuc

SEQ ID NO: 626312 - RNA, 22 nt, Human
cagagcagacguugagauuaag

SEQ ID NO: 626313 - RNA, 22 nt, Human
uacaaagugugcccaugcugag

SEQ ID NO: 626314 - RNA, 22 nt, Human
acucuaaauagccucuuaaaca

SEQ ID NO: 626315 - RNA, 22 nt, Human
cucugccugugucgccaccaca

SEQ ID NO: 626316 - RNA, 22 nt, Human
ggcuccuguuauuuaaugagga

SEQ ID NO: 626317 - RNA, 22 nt, Human
acagugcauaaaaacaacuuuu

SEQ ID NO: 626318 - RNA, 22 nt, Human
uuuccuaggagauugaucacau

SEQ ID NO: 626319 - RNA, 22 nt, Human
uuaugcuaguauaguccuuaga

SEQ ID NO: 626320 - RNA, 22 nt, Human
uuauaguuaguaggucauuaaa

SEQ ID NO: 626321 - RNA, 22 nt, Human
aaguacagaaggagcgaacaau

SEQ ID NO: 626322 - RNA, 15 nt, Human
gcccucaggcgacac

SEQ ID NO: 626323 - RNA, 22 nt, Human
gacauucacagguaaacauucc

SEQ ID NO: 626324 - RNA, 22 nt, Human
aauuuauaauaaauagggcuuu

SEQ ID NO: 626325 - RNA, 17 nt, Human
uuacagagguaauuaag

SEQ ID NO: 626326 - RNA, 19 nt, Human
auagagacagaguuuaauc

SEQ ID NO: 626327 - RNA, 21 nt, Human
ugauccuuucccccauguugc

SEQ ID NO: 626328 - RNA, 21 nt, Human
ucuuccuccacagcgugccac

SEQ ID NO: 626329 - RNA, 22 nt, Human
agcucaggucucaggagguguc

SEQ ID NO: 626330 - RNA, 22 nt, Human
agaaucaacugaaaauugguga

SEQ ID NO: 626331 - RNA, 21 nt, Human
gugguucuagagaaacagaau

SEQ ID NO: 626332 - RNA, 22 nt, Human
auccacuuggcugguuguucua

SEQ ID NO: 626333 - RNA, 22 nt, Human
aaguugcuaaaggaguucuuug

SEQ ID NO: 626334 - RNA, 22 nt, Human
acaggagugaaucuggcacuua

SEQ ID NO: 626335 - RNA, 22 nt, Human
auaaauagugcugccaugagua

SEQ ID NO: 626336 - RNA, 22 nt, Human
aaggcagggaaaguggauuagg

SEQ ID NO: 626337 - RNA, 22 nt, Human
gcugcuuugucuguaaaaugga

SEQ ID NO: 626338 - RNA, 17 nt, Human
uugaaaaguaagcuccc

SEQ ID NO: 626339 - RNA, 20 nt, Human
agggugagacaugagccucc

SEQ ID NO: 626340 - RNA, 22 nt, Human
ugcuccagcuggagaugggggc

SEQ ID NO: 626341 - RNA, 22 nt, Human
aaggcacucauucaaggagaua

SEQ ID NO: 626342 - RNA, 22 nt, Human
accccagaggcggaggcugcag

SEQ ID NO: 626343 - RNA, 22 nt, Human
caugcuuuaccaaagcagugau

SEQ ID NO: 626344 - RNA, 22 nt, Human
ugcagcauuaguacaagucuca

SEQ ID NO: 626345 - RNA, 22 nt, Human
uucuacacagugcggguuaaca

SEQ ID NO: 626346 - RNA, 22 nt, Human
uuuguggcaggagcggagaccg

SEQ ID NO: 626347 - RNA, 22 nt, Human
gggcuuggccccagaagagcua

SEQ ID NO: 626348 - RNA, 22 nt, Human
uugcaaauuauuuuagucccuu

SEQ ID NO: 626349 - RNA, 22 nt, Human
ugccugggugcuggcuggucac

SEQ ID NO: 626350 - RNA, 18 nt, Human
aaggucugucugguaggu

SEQ ID NO: 626351 - RNA, 22 nt, Human
ucuaccagggucacagaggccc

SEQ ID NO: 626352 - RNA, 22 nt, Human
gggaccuggggacuccuuguuc

SEQ ID NO: 626353 - RNA, 22 nt, Human
ucaaacuugguaagagaaauac

SEQ ID NO: 626354 - RNA, 22 nt, Human
uuggcccugaggaggcagcugc

SEQ ID NO: 626355 - RNA, 22 nt, Human
ggccugaaugccugaguguggg

SEQ ID NO: 626356 - RNA, 22 nt, Human
agguggggcccaccaauuugca

SEQ ID NO: 626357 - RNA, 22 nt, Human
uuuuaagaaauguaugacuguc

SEQ ID NO: 626358 - RNA, 22 nt, Human
ucuuaaugaaagugaaauauca

SEQ ID NO: 626359 - RNA, 22 nt, Human
ugaaggcauaaaucuugggaac

SEQ ID NO: 626360 - RNA, 22 nt, Human
auccuucuucugcuagugucua

SEQ ID NO: 626361 - RNA, 22 nt, Human
cucugacauucugugacucuga

SEQ ID NO: 626362 - RNA, 22 nt, Human
cugcagaacaauuccugcuguu

SEQ ID NO: 626363 - RNA, 23 nt, Human
ccccucugguggcucagcuccug

SEQ ID NO: 626364 - RNA, 22 nt, Human
acaugaaaacugguuccuucag

SEQ ID NO: 626365 - RNA, 22 nt, Human
ggggaggaccuuuccaaggcuu

SEQ ID NO: 626366 - RNA, 22 nt, Human
agagcuuagaauuucagaugau

SEQ ID NO: 626367 - RNA, 22 nt, Human
ucuaaggagcgcuccagaaaaa

SEQ ID NO: 626368 - RNA, 22 nt, Human
gcugagaauguuccuacuggua

SEQ ID NO: 626369 - RNA, 23 nt, Human
uaacaauggacuccucuuagcua

SEQ ID NO: 626370 - RNA, 22 nt, Human
uagauucuaagauucuaagaau

SEQ ID NO: 626371 - RNA, 22 nt, Human
acuccaggaaacuuaggggaaa

SEQ ID NO: 626372 - RNA, 22 nt, Human
uguuacaagucuugagguacuu

SEQ ID NO: 626373 - RNA, 22 nt, Human
cugccuagggucugguaccaca

SEQ ID NO: 626374 - RNA, 21 nt, Human
aggaagaaagguuggagguug

SEQ ID NO: 626375 - RNA, 22 nt, Human
uuuggugauagugcagagaaau

SEQ ID NO: 626376 - RNA, 22 nt, Human
ucuccccaaaggacucacucuc

SEQ ID NO: 626377 - RNA, 22 nt, Human
cagagacuggagugcaguggcg

SEQ ID NO: 626378 - RNA, 22 nt, Human
ccagucucaguucacguuggua

SEQ ID NO: 626379 - RNA, 22 nt, Human
agacccugucaguguuaggaaa

SEQ ID NO: 626380 - RNA, 22 nt, Human
cagcccagaacucacgucucca

SEQ ID NO: 626381 - RNA, 22 nt, Human
cauccccaauuagcgcccagcu

SEQ ID NO: 626382 - RNA, 22 nt, Human
ugaagccaaucugccaggcaga

SEQ ID NO: 626383 - RNA, 22 nt, Human
cuggcuuuguucugauugcuuc

SEQ ID NO: 626384 - RNA, 17 nt, Human
cgugugcuugugugcac

SEQ ID NO: 626385 - RNA, 22 nt, Human
cuggcuucugggccagggcaga

SEQ ID NO: 626386 - RNA, 22 nt, Human
ucagcuccucaugcaggggaua

SEQ ID NO: 626387 - RNA, 22 nt, Human
uuucaguuuccagcuuugucau

SEQ ID NO: 626388 - RNA, 22 nt, Human
uguggcugaucaaagcgcucag

SEQ ID NO: 626389 - RNA, 22 nt, Human
guggcugcaucggggugaccag

SEQ ID NO: 626390 - RNA, 22 nt, Human
cccugcagugugaccucaccua

SEQ ID NO: 626391 - RNA, 22 nt, Human
uuccagggcuagguaaugggua

SEQ ID NO: 626392 - RNA, 22 nt, Human
uguucucucuccuuuugaagug

SEQ ID NO: 626393 - RNA, 23 nt, Human
uuucacaaugagcauuacagaau

SEQ ID NO: 626394 - RNA, 22 nt, Human
gaggccagauacucucuucugc

SEQ ID NO: 626395 - RNA, 22 nt, Human
gaagauuucuuuaugaaagaug

SEQ ID NO: 626396 - RNA, 22 nt, Human
aaagccagggacagugugcaug

SEQ ID NO: 626397 - RNA, 20 nt, Human
gagauuuccaaucaugccca

SEQ ID NO: 626398 - RNA, 22 nt, Human
ccagccauaaacccagaugacu

SEQ ID NO: 626399 - RNA, 22 nt, Human
ugcaaaaauugcuggaaucuuu

SEQ ID NO: 626400 - RNA, 22 nt, Human
ggucucaaggaauauaaugagu

SEQ ID NO: 626401 - RNA, 22 nt, Human
ggaaggggagcuaaaucuacug

SEQ ID NO: 626402 - RNA, 22 nt, Human
cugcauccauguugcugcaaag

SEQ ID NO: 626403 - RNA, 22 nt, Human
uagccgcuuaauuauuugguga

SEQ ID NO: 626404 - RNA, 22 nt, Human
aaguacauguugcucaacagcc

SEQ ID NO: 626405 - RNA, 22 nt, Human
ccuggcucagaguaugucaucg

SEQ ID NO: 626406 - RNA, 22 nt, Human
ucaggaaggcuucacacgagug

SEQ ID NO: 626407 - RNA, 22 nt, Human
uuuuccucaccuaacucaaggu

SEQ ID NO: 626408 - RNA, 22 nt, Human
aaaucucugaacuuaauaaugc

SEQ ID NO: 626409 - RNA, 22 nt, Human
ucauuuuucacacagggucacc

SEQ ID NO: 626410 - RNA, 22 nt, Human
uggcccugucugcacacaggau

SEQ ID NO: 626411 - RNA, 22 nt, Human
gaggagagccugcacuuugacc

SEQ ID NO: 626412 - RNA, 22 nt, Human
ucaggccugcagugccaaccca

SEQ ID NO: 626413 - RNA, 19 nt, Human
gccaggacauccuccugcu

SEQ ID NO: 626414 - RNA, 22 nt, Human
caagcuuuauccgccauguagg

SEQ ID NO: 626415 - RNA, 22 nt, Human
auuuugcacacuaugcagcuuu

SEQ ID NO: 626416 - RNA, 22 nt, Human
ccaggagacccagggaaggagc

SEQ ID NO: 626417 - RNA, 22 nt, Human
aagagacuauggugucuaugaa

SEQ ID NO: 626418 - RNA, 22 nt, Human
uacacaauuaguugcaaaguga

SEQ ID NO: 626419 - RNA, 22 nt, Human
gcauuuaaauuugaacuucaga

SEQ ID NO: 626420 - RNA, 22 nt, Human
auguuuccgugagcauccuuga

SEQ ID NO: 626421 - RNA, 22 nt, Human
ucuggaauucucaaguccugga

SEQ ID NO: 626422 - RNA, 22 nt, Human
ggucucagaucuuuauuaaggc

SEQ ID NO: 626423 - RNA, 22 nt, Human
aguguggcugcguagggcucuc

SEQ ID NO: 626424 - RNA, 22 nt, Human
gaauauauuucucuuaccuuua

SEQ ID NO: 626425 - RNA, 22 nt, Human
gaaggcauuuaggaacugcaau

SEQ ID NO: 626426 - RNA, 22 nt, Human
gcccuuggaaagccaaggcagc

SEQ ID NO: 626427 - RNA, 22 nt, Human
aguuaguggcaaagugguuuga

SEQ ID NO: 626428 - RNA, 22 nt, Human
ugccauggaaguggccagaccu

SEQ ID NO: 626429 - RNA, 22 nt, Human
aagggcaggagaagacggauau

SEQ ID NO: 626430 - RNA, 22 nt, Human
uaucauugcugaugugcugaga

SEQ ID NO: 626431 - RNA, 22 nt, Human
aaagagcacccucaaugucuga

SEQ ID NO: 626432 - RNA, 22 nt, Human
cauuauccaacagcacuuucca

SEQ ID NO: 626433 - RNA, 22 nt, Human
ucacugcucuccaauguggagu

SEQ ID NO: 626434 - RNA, 22 nt, Human
uaguggcugcuucauuggugag

SEQ ID NO: 626435 - RNA, 23 nt, Human
cagugggcuucuaacugcuccug

SEQ ID NO: 626436 - RNA, 18 nt, Human
gccugccuagagcuugcc

SEQ ID NO: 626437 - RNA, 22 nt, Human
aggcuucacgaugggugaggug

SEQ ID NO: 626438 - RNA, 22 nt, Human
cuggcucauuuuagcaucaggu

SEQ ID NO: 626439 - RNA, 22 nt, Human
agcugguugcuuaaccucucug

SEQ ID NO: 626440 - RNA, 22 nt, Human
cugggcuuucaggcccuaaggc

SEQ ID NO: 626441 - RNA, 22 nt, Human
ugucuucaguaaaauacacuau

SEQ ID NO: 626442 - RNA, 22 nt, Human
cccuguugggaagagagauggc

SEQ ID NO: 626443 - RNA, 22 nt, Human
gaguaaaauaggugagaaucaa

SEQ ID NO: 626444 - RNA, 22 nt, Human
augguacagauaauacaugcug

SEQ ID NO: 626445 - RNA, 22 nt, Human
gucuuucuucagagcuuggacu

SEQ ID NO: 626446 - RNA, 22 nt, Human
agcagagcagaaugugaaggug

SEQ ID NO: 626447 - RNA, 22 nt, Human
caaaauuagaaaugcagcuguu

SEQ ID NO: 626448 - RNA, 22 nt, Human
ccagcagguguagggcucaugg

SEQ ID NO: 626449 - RNA, 22 nt, Human
gggacagcagaaagaaggcaag

SEQ ID NO: 626450 - RNA, 20 nt, Human
acuaugaaguuagcccucca

SEQ ID NO: 626451 - RNA, 22 nt, Human
ggggagaauuaccaaaagcgcu

SEQ ID NO: 626452 - RNA, 22 nt, Human
gaauacaaauaauaccaaggug

SEQ ID NO: 626453 - RNA, 22 nt, Human
caaggcaaucucauggcuucuu

SEQ ID NO: 626454 - RNA, 22 nt, Human
aggcccugcuuuccagagcuca

SEQ ID NO: 626455 - RNA, 22 nt, Human
guagagucaggacggcaauucu

SEQ ID NO: 626456 - RNA, 22 nt, Human
cagccaagaaagcagugcucca

SEQ ID NO: 626457 - RNA, 22 nt, Human
auuucuccuuguugcaaugcag

SEQ ID NO: 626458 - RNA, 22 nt, Human
caaagugcuaggauuacaggcc

SEQ ID NO: 626459 - RNA, 22 nt, Human
aggcucugugaugugccaggca

SEQ ID NO: 626460 - RNA, 22 nt, Human
cuguccuggagggcauaggacg

SEQ ID NO: 626461 - RNA, 22 nt, Human
aaaaagacuuccaacucaggag

SEQ ID NO: 626462 - RNA, 22 nt, Human
guuccaaagucucugagcugag

SEQ ID NO: 626463 - RNA, 22 nt, Human
aaagaugucaguuugaaauaac

SEQ ID NO: 626464 - RNA, 21 nt, Human
cucagagacaaaugccauccc

SEQ ID NO: 626465 - RNA, 22 nt, Human
aaaugcuuguaaauuuuccaug

SEQ ID NO: 626466 - RNA, 22 nt, Human
ucccugcagacguccugcgggu

SEQ ID NO: 626467 - RNA, 22 nt, Human
uguaacugguuauaauuuuuga

SEQ ID NO: 626468 - RNA, 21 nt, Human
agucuguuaggaugacucuga

SEQ ID NO: 626469 - RNA, 22 nt, Human
aguguuaaugguguauauuagg

SEQ ID NO: 626470 - RNA, 22 nt, Human
uuuauuucacucuccggauacu

SEQ ID NO: 626471 - RNA, 21 nt, Human
agggagcauguuagcuuucga

SEQ ID NO: 626472 - RNA, 18 nt, Human
cugggacucaaugcuacu

SEQ ID NO: 626473 - RNA, 22 nt, Human
uggcccuuguucaaauauguca

SEQ ID NO: 626474 - RNA, 19 nt, Human
acugccugcagguguuggg

SEQ ID NO: 626475 - RNA, 22 nt, Human
uagccaugagcagaucacuaua

SEQ ID NO: 626476 - RNA, 22 nt, Human
gggcuguguuaggugcgguuac

SEQ ID NO: 626477 - RNA, 22 nt, Human
augccaaguacaggcacugcuc

SEQ ID NO: 626478 - RNA, 22 nt, Human
cugggugguucuaacuguugau

SEQ ID NO: 626479 - RNA, 22 nt, Human
gaguagggaugcuggugacucc

SEQ ID NO: 626480 - RNA, 22 nt, Human
gcucuggacuggggccugagaa

SEQ ID NO: 626481 - RNA, 22 nt, Human
acuuuacacaucuuuucucauu

SEQ ID NO: 626482 - RNA, 22 nt, Human
guuuacagagacagaaaguagu

SEQ ID NO: 626483 - RNA, 22 nt, Human
caauacuuccuuguuagaggca

SEQ ID NO: 626484 - RNA, 22 nt, Human
cagcuccuagaucggcgaagug

SEQ ID NO: 626485 - RNA, 19 nt, Human
ugcccaggccucccaaaag

SEQ ID NO: 626486 - RNA, 22 nt, Human
uggccacuccucccugcaggcu

SEQ ID NO: 626487 - RNA, 22 nt, Human
cugagcagaccauggcagaggu

SEQ ID NO: 626488 - RNA, 22 nt, Human
ugagaaacauaugagagauuug

SEQ ID NO: 626489 - RNA, 22 nt, Human
agcuccuugaagggcucuggga

SEQ ID NO: 626490 - RNA, 22 nt, Human
gcuguugcaaucaaggccaugg

SEQ ID NO: 626491 - RNA, 22 nt, Human
uaaacuguguaauaugaugucu

SEQ ID NO: 626492 - RNA, 22 nt, Human
ucucccuacugacuccaggacc

SEQ ID NO: 626493 - RNA, 22 nt, Human
ucaguuuccugguugugauauu

SEQ ID NO: 626494 - RNA, 22 nt, Human
gucucagauaacauguauucua

SEQ ID NO: 626495 - RNA, 22 nt, Human
cacaggagaacccacagauucu

SEQ ID NO: 626496 - RNA, 22 nt, Human
agcugaaauuuuacugaguaua

SEQ ID NO: 626497 - RNA, 20 nt, Human
cagcccuccaguggaggcag

SEQ ID NO: 626498 - RNA, 22 nt, Human
uaucuuguaauagguccacuug

SEQ ID NO: 626499 - RNA, 22 nt, Human
uuucaguggguuuauuucaugu

SEQ ID NO: 626500 - RNA, 22 nt, Human
uagcugugaaacagcagaagag

SEQ ID NO: 626501 - RNA, 22 nt, Human
cuaaacaucuugcaaugcacag

SEQ ID NO: 626502 - RNA, 22 nt, Human
cacaagcuccuuauguggagaa

SEQ ID NO: 626503 - RNA, 22 nt, Human
uggcagagacaaggccgggccu

SEQ ID NO: 626504 - RNA, 22 nt, Human
aguaaacauaauuuaccuguag

SEQ ID NO: 626505 - RNA, 22 nt, Human
gaacauaacuauugugaauagu

SEQ ID NO: 626506 - RNA, 22 nt, Human
acaguguccccagcucugugag

SEQ ID NO: 626507 - RNA, 22 nt, Human
aauuucaaagcucacuggcaua

SEQ ID NO: 626508 - RNA, 22 nt, Human
aagggcugccagggggugccag

SEQ ID NO: 626509 - RNA, 22 nt, Human
caaggcaguuccccagagggcu

SEQ ID NO: 626510 - RNA, 21 nt, Human
agcagacugaauacauucuua

SEQ ID NO: 626511 - RNA, 19 nt, Human
uuugcagugguuccuuugu

SEQ ID NO: 626512 - RNA, 22 nt, Human
aagccagaguuuuugagaacuu

SEQ ID NO: 626513 - RNA, 22 nt, Human
ccuggaaguuggagguugcagu

SEQ ID NO: 626514 - RNA, 22 nt, Human
uauuccuaauuugcagggcaug

SEQ ID NO: 626515 - RNA, 22 nt, Human
cugaggccucacuguagucccu

SEQ ID NO: 626516 - RNA, 22 nt, Human
aaggacaggagaaaacgggauc

SEQ ID NO: 626517 - RNA, 22 nt, Human
aaaagugaugggauggcacuuc

SEQ ID NO: 626518 - RNA, 22 nt, Human
aaguauuucagcgguucuuugu

SEQ ID NO: 626519 - RNA, 22 nt, Human
ugccagucucacccuggguccu

SEQ ID NO: 626520 - RNA, 20 nt, Human
ugcaguguccucacuuguca

SEQ ID NO: 626521 - RNA, 22 nt, Human
uuuucuuggaguggcuguccuu

SEQ ID NO: 626522 - RNA, 22 nt, Human
aaggaggaauaaagagguggug

SEQ ID NO: 626523 - RNA, 22 nt, Human
aggagaaggaggccccucacac

SEQ ID NO: 626524 - RNA, 22 nt, Human
cugggagcugaggcugacgcug

SEQ ID NO: 626525 - RNA, 22 nt, Human
ugacugccgauuguccuucucu

SEQ ID NO: 626526 - RNA, 22 nt, Human
aagauagaugucaucagcauau

SEQ ID NO: 626527 - RNA, 20 nt, Human
uggaaccuaggcagagcugg

SEQ ID NO: 626528 - RNA, 22 nt, Human
cauuuccacuucugaaaacugg

SEQ ID NO: 626529 - RNA, 22 nt, Human
agaggaauaaauuucuguagug

SEQ ID NO: 626530 - RNA, 22 nt, Human
aauuuucuaaggugaugaucug

SEQ ID NO: 626531 - RNA, 22 nt, Human
ucucugaguaagugacaguuca

SEQ ID NO: 626532 - RNA, 22 nt, Human
cugucuguuucugauucaaccu

SEQ ID NO: 626533 - RNA, 22 nt, Human
gucuucuuuucagucugcuugu

SEQ ID NO: 626534 - RNA, 22 nt, Human
uucagaguaggauacuagcuua

SEQ ID NO: 626535 - RNA, 22 nt, Human
uggcagugaugcggcaggacau

SEQ ID NO: 626536 - RNA, 22 nt, Human
uauguuuuuaagagaaugcauu

SEQ ID NO: 626537 - RNA, 22 nt, Human
uugauucuagaaucuucccucu

SEQ ID NO: 626538 - RNA, 22 nt, Human
aacacuucccaucagagggaca

SEQ ID NO: 626539 - RNA, 22 nt, Human
gcuucuacccacgagaugcaaa

SEQ ID NO: 626540 - RNA, 22 nt, Human
auccuguggggcggcugcaggg

SEQ ID NO: 626541 - RNA, 22 nt, Human
guccucugagggggcugcacgc

SEQ ID NO: 626542 - RNA, 22 nt, Human
ugguuucuuuccacucuccacc

SEQ ID NO: 626543 - RNA, 22 nt, Human
uucagagauggaaggcagaaug

SEQ ID NO: 626544 - RNA, 22 nt, Human
cugcuccaccuccgggucaggc

SEQ ID NO: 626545 - RNA, 22 nt, Human
ggcgcccaucggugcagagggc

SEQ ID NO: 626546 - RNA, 22 nt, Human
aguugaaaauuaagugaauuuc

SEQ ID NO: 626547 - RNA, 22 nt, Human
gaagggggagcucuuccuaauu

SEQ ID NO: 626548 - RNA, 22 nt, Human
uaucagaaggcacauggagucu

SEQ ID NO: 626549 - RNA, 22 nt, Human
acauguggucaaucuguguagg

SEQ ID NO: 626550 - RNA, 22 nt, Human
ccaggugcacucaagaccugcu

SEQ ID NO: 626551 - RNA, 22 nt, Human
cugaggcaguuuaauuuuugaa

SEQ ID NO: 626552 - RNA, 22 nt, Human
ugcugggcuagaagcugaggcc

SEQ ID NO: 626553 - RNA, 22 nt, Human
acacccagagcgccagugccga

SEQ ID NO: 626554 - RNA, 22 nt, Human
uggccucuuaaggaugacacaa

SEQ ID NO: 626555 - RNA, 22 nt, Human
uagaagaaagugaagcugggga

SEQ ID NO: 626556 - RNA, 22 nt, Human
gaaauauuacaguggaggggau

SEQ ID NO: 626557 - RNA, 19 nt, Human
uggcuguggggaaaugcuu

SEQ ID NO: 626558 - RNA, 22 nt, Human
ucuugcagacagcuuccagccu

SEQ ID NO: 626559 - RNA, 22 nt, Human
uggauugcagcagcuccugugg

SEQ ID NO: 626560 - RNA, 22 nt, Human
cugacuguaauucuguucuuaa

SEQ ID NO: 626561 - RNA, 22 nt, Human
uuuaggaagaucugaaggaaga

SEQ ID NO: 626562 - RNA, 22 nt, Human
cuguuucucccauguccaagug

SEQ ID NO: 626563 - RNA, 22 nt, Human
gccagcugcuucuccagaauuu

SEQ ID NO: 626564 - RNA, 22 nt, Human
ucaggaggcgugcugggguaca

SEQ ID NO: 626565 - RNA, 22 nt, Human
cucuggaauuaaggaagccugu

SEQ ID NO: 626566 - RNA, 22 nt, Human
aaacaagagucuugcuccaccu

SEQ ID NO: 626567 - RNA, 22 nt, Human
aaucacaauuacuuuugcacca

SEQ ID NO: 626568 - RNA, 22 nt, Human
uggcucugucacugugagcuau

SEQ ID NO: 626569 - RNA, 22 nt, Human
aucucauucucccgugccaugg

SEQ ID NO: 626570 - RNA, 22 nt, Human
cuaaacaugaacuacauuuagg

SEQ ID NO: 626571 - RNA, 17 nt, Human
gucuggaguggccuuca

SEQ ID NO: 626572 - RNA, 22 nt, Human
gagcuucagcugccaugacugu

SEQ ID NO: 626573 - RNA, 19 nt, Human
ggccagcugucuccugcua

SEQ ID NO: 626574 - RNA, 23 nt, Human
aguguguauugcugagggcagcu

SEQ ID NO: 626575 - RNA, 22 nt, Human
uucuguauuuaguuugaggaca

SEQ ID NO: 626576 - RNA, 22 nt, Human
cucuucaggaauaugucaguca

SEQ ID NO: 626577 - RNA, 19 nt, Human
uccuucuccggccaccccg

SEQ ID NO: 626578 - RNA, 22 nt, Human
ucuagagacuauaauguguccu

SEQ ID NO: 626579 - RNA, 18 nt, Human
ggcagugcagucucaggg

SEQ ID NO: 626580 - RNA, 22 nt, Human
cucugccaccaugcuuccugac

SEQ ID NO: 626581 - RNA, 22 nt, Human
aucagcauucccaaaugaugug

SEQ ID NO: 626582 - RNA, 23 nt, Human
gccagaggaacgcagagcuuucu

SEQ ID NO: 626583 - RNA, 22 nt, Human
auuucaaggcuacagaaaccuu

SEQ ID NO: 626584 - RNA, 22 nt, Human
uccuucaggccucauucucaua

SEQ ID NO: 626585 - RNA, 22 nt, Human
uggucugauuucuuucuggagu

SEQ ID NO: 626586 - RNA, 22 nt, Human
ucagcuugggaaauugagcaag

SEQ ID NO: 626587 - RNA, 22 nt, Human
acagggagaugggugaaagcgg

SEQ ID NO: 626588 - RNA, 22 nt, Human
acacagcucacaacgugugcau

SEQ ID NO: 626589 - RNA, 22 nt, Human
agaggaugauuuuaaggacacu

SEQ ID NO: 626590 - RNA, 22 nt, Human
cucugggcuuaccugcuuccug

SEQ ID NO: 626591 - RNA, 22 nt, Human
acuuauuucauggaucauaaug

SEQ ID NO: 626592 - RNA, 22 nt, Human
ccucuuugacuauaguaguuaa

SEQ ID NO: 626593 - RNA, 22 nt, Human
agcuggcauugcagggagcugc

SEQ ID NO: 626594 - RNA, 22 nt, Human
ggcggcacgcaggcugcugucg

SEQ ID NO: 626595 - RNA, 22 nt, Human
aacuucauuuauaaugucauua

SEQ ID NO: 626596 - RNA, 22 nt, Human
gcaacaggcaguuugcucaugu

SEQ ID NO: 626597 - RNA, 22 nt, Human
uguaaauaauuccuaggcuuuu

SEQ ID NO: 626598 - RNA, 22 nt, Human
agagagcaggacuucacugagc

SEQ ID NO: 626599 - RNA, 22 nt, Human
ucagcaauccucccacaggugg

SEQ ID NO: 626600 - RNA, 21 nt, Human
gccugcccucugugauggcca

SEQ ID NO: 626601 - RNA, 22 nt, Human
guuuccacgucucaguuccaaa

SEQ ID NO: 626602 - RNA, 22 nt, Human
ggcagccaugucccagggcuuc

SEQ ID NO: 626603 - RNA, 22 nt, Human
auuucacucucccugccacuua

SEQ ID NO: 626604 - RNA, 22 nt, Human
gagacacaagacgcaacucugu

SEQ ID NO: 626605 - RNA, 22 nt, Human
uagucuaagaaaucuuuacuuu

SEQ ID NO: 626606 - RNA, 18 nt, Human
gggauauaucagugaaga

SEQ ID NO: 626607 - RNA, 22 nt, Human
uugcuagcugguguaugcauug

SEQ ID NO: 626608 - RNA, 22 nt, Human
aagcuggacauuguagggggga

SEQ ID NO: 626609 - RNA, 22 nt, Human
auuuauuggaugcuuacuuggg

SEQ ID NO: 626610 - RNA, 22 nt, Human
cugggcugccagguaggcacac

SEQ ID NO: 626611 - RNA, 22 nt, Human
ccagggaagaauaggugugguu

SEQ ID NO: 626612 - RNA, 22 nt, Human
agagcugagcaccaagcauggu

SEQ ID NO: 626613 - RNA, 22 nt, Human
aacacauauuuuugcugagcau

SEQ ID NO: 626614 - RNA, 22 nt, Human
accugccuaguugguucugccc

SEQ ID NO: 626615 - RNA, 22 nt, Human
gaugauuuuaugucuugucauu

SEQ ID NO: 626616 - RNA, 22 nt, Human
auuacacuaaugugacaacaau

SEQ ID NO: 626617 - RNA, 22 nt, Human
uagaaacagaaaacuguaauag

SEQ ID NO: 626618 - RNA, 22 nt, Human
cguucuuuucauauuuacaugg

SEQ ID NO: 626619 - RNA, 22 nt, Human
ucacaguauucaugaacaugga

SEQ ID NO: 626620 - RNA, 22 nt, Human
ucacaggaaccaucagagaaau

SEQ ID NO: 626621 - RNA, 22 nt, Human
uccaagaguaagaggacucuuu

SEQ ID NO: 626622 - RNA, 22 nt, Human
ugcacuauuucgccaugguugu

SEQ ID NO: 626623 - RNA, 21 nt, Human
ugggagagcguugcuguccuc

SEQ ID NO: 626624 - RNA, 22 nt, Human
ucacucuguguuucccugggac

SEQ ID NO: 626625 - RNA, 22 nt, Human
acauuucucauaggagagccac

SEQ ID NO: 626626 - RNA, 22 nt, Human
auggagcagcagaaggggcuug

SEQ ID NO: 626627 - RNA, 22 nt, Human
augauguugauaaauuacuuua

SEQ ID NO: 626628 - RNA, 22 nt, Human
gauucuuuacaucucugcugac

SEQ ID NO: 626629 - RNA, 22 nt, Human
ugccuuuaaggaaucauucuug

SEQ ID NO: 626630 - RNA, 22 nt, Human
aacgcccgugguugccaaggua

SEQ ID NO: 626631 - RNA, 22 nt, Human
cagaguuuuauguaugcaugua

SEQ ID NO: 626632 - RNA, 22 nt, Human
ucugggaaaguaaauguaaagg

SEQ ID NO: 626633 - RNA, 20 nt, Human
ugacauagcucuuggggugc

SEQ ID NO: 626634 - RNA, 22 nt, Human
ccacagaguccgcauuugaggc

SEQ ID NO: 626635 - RNA, 21 nt, Human
agguuuauuucaacuucagga

SEQ ID NO: 626636 - RNA, 22 nt, Human
ggcaguggcauguggguagugg

SEQ ID NO: 626637 - RNA, 22 nt, Human
gauuuuaucuuugugugcagua

SEQ ID NO: 626638 - RNA, 22 nt, Human
augcacuguuggauauauuugu

SEQ ID NO: 626639 - RNA, 22 nt, Human
uaaaguguguauauacauaugg

SEQ ID NO: 626640 - RNA, 22 nt, Human
cuuguagcugcuucuucugaag

SEQ ID NO: 626641 - RNA, 22 nt, Human
auuaguguucuuaucuucuagg

SEQ ID NO: 626642 - RNA, 22 nt, Human
cauccaguggucagggaaguug

SEQ ID NO: 626643 - RNA, 22 nt, Human
ugugugcacugccuuuugugga

SEQ ID NO: 626644 - RNA, 22 nt, Human
gugaggucaccggccguugcca

SEQ ID NO: 626645 - RNA, 22 nt, Human
ugcugcugaugcauagucugcu

SEQ ID NO: 626646 - RNA, 22 nt, Human
guguguggacgucugagcccag

SEQ ID NO: 626647 - RNA, 22 nt, Human
uccuggcuuccacuccucuguu

SEQ ID NO: 626648 - RNA, 22 nt, Human
uuuuccuuugauucccagaugu

SEQ ID NO: 626649 - RNA, 22 nt, Human
cuggcugaguuacuccacugag

SEQ ID NO: 626650 - RNA, 22 nt, Human
gucuucaacaauaacuaccacu

SEQ ID NO: 626651 - RNA, 22 nt, Human
gaacuuuaaucccuugggcuua

SEQ ID NO: 626652 - RNA, 22 nt, Human
aguucauggaagauucaaugga

SEQ ID NO: 626653 - RNA, 22 nt, Human
ugguccuggagaucaauaugca

SEQ ID NO: 626654 - RNA, 22 nt, Human
aauagaaaggaggggcucuugu

SEQ ID NO: 626655 - RNA, 21 nt, Human
guacacacagguggaugggcu

SEQ ID NO: 626656 - RNA, 22 nt, Human
gguucaguggaauguguugacc

SEQ ID NO: 626657 - RNA, 22 nt, Human
gaaagugcuuuugagugugugc

SEQ ID NO: 626658 - RNA, 22 nt, Human
auucaaaccucauuuauuguuc

SEQ ID NO: 626659 - RNA, 22 nt, Human
cccuccugugccugaggccagc

SEQ ID NO: 626660 - RNA, 22 nt, Human
aggccagcaccagagucaagaa

SEQ ID NO: 626661 - RNA, 18 nt, Human
agaauugcugcuucuucu

SEQ ID NO: 626662 - RNA, 22 nt, Human
caggcagagacgucaguguagg

SEQ ID NO: 626663 - RNA, 22 nt, Human
agcugagccagcagcaacagga

SEQ ID NO: 626664 - RNA, 22 nt, Human
agagccugggaauuugcauguu

SEQ ID NO: 626665 - RNA, 22 nt, Human
uuggcuuucucuguaucugaau

SEQ ID NO: 626666 - RNA, 22 nt, Human
caggcugcagaggccuuucaug

SEQ ID NO: 626667 - RNA, 19 nt, Human
ugagacugggugcaguacu

SEQ ID NO: 626668 - RNA, 22 nt, Human
augcuaaagggguaggccuccu

SEQ ID NO: 626669 - RNA, 21 nt, Human
gaagacacauaaccucucucc

SEQ ID NO: 626670 - RNA, 22 nt, Human
uguggccuuucaaggauggaau

SEQ ID NO: 626671 - RNA, 22 nt, Human
ucaggaguuuggccuacagagg

SEQ ID NO: 626672 - RNA, 22 nt, Human
acugcugaccucaggucauccu

SEQ ID NO: 626673 - RNA, 22 nt, Human
augugucugauggcccugaauu

SEQ ID NO: 626674 - RNA, 22 nt, Human
ucuggcagggguucugcacuug

SEQ ID NO: 626675 - RNA, 22 nt, Human
ugcaggagcagagauggcugga

SEQ ID NO: 626676 - RNA, 22 nt, Human
guuuccuaggcuuauacagcug

SEQ ID NO: 626677 - RNA, 20 nt, Human
agguccugguucucugggau

SEQ ID NO: 626678 - RNA, 22 nt, Human
ggguggcugacuguuuugugga

SEQ ID NO: 626679 - RNA, 22 nt, Human
uccaggcugggcugaagggugc

SEQ ID NO: 626680 - RNA, 22 nt, Human
caggagcagaggguggucagca

SEQ ID NO: 626681 - RNA, 22 nt, Human
cugggcuguucugccccugggu

SEQ ID NO: 626682 - RNA, 22 nt, Human
acacugagcaucucuagaggca

SEQ ID NO: 626683 - RNA, 22 nt, Human
aaacauuguaauuuuagcaugg

SEQ ID NO: 626684 - RNA, 22 nt, Human
uuucacauuggcuucuauuucu

SEQ ID NO: 626685 - RNA, 22 nt, Human
guauuugauacaugaaauggug

SEQ ID NO: 626686 - RNA, 22 nt, Human
ucucuuccauguuucagcccca

SEQ ID NO: 626687 - RNA, 22 nt, Human
aagaaaccuagucuggagcagc

SEQ ID NO: 626688 - RNA, 22 nt, Human
aucuguaacugcuaucaucucc

SEQ ID NO: 626689 - RNA, 22 nt, Human
uaggagaggugaauggcacacu

SEQ ID NO: 626690 - RNA, 20 nt, Human
acaguuuauccaguuagcag

SEQ ID NO: 626691 - RNA, 22 nt, Human
uuacaacaaaggcacgugcaug

SEQ ID NO: 626692 - RNA, 22 nt, Human
uguggggaagaguaugacuugg

SEQ ID NO: 626693 - RNA, 22 nt, Human
gcaggagccacuucagggaugc

SEQ ID NO: 626694 - RNA, 22 nt, Human
gcagcuuucuuuuugcaugucu

SEQ ID NO: 626695 - RNA, 22 nt, Human
uggugugaggcgggaguguagu

SEQ ID NO: 626696 - RNA, 22 nt, Human
uggccugccucccggcuucuuu

SEQ ID NO: 626697 - RNA, 22 nt, Human
cuggagaagagguaguauguag

SEQ ID NO: 626698 - RNA, 22 nt, Human
gcccuuggggugucuguaauaa

SEQ ID NO: 626699 - RNA, 22 nt, Human
agcagguguuuguaucauaagg

SEQ ID NO: 626700 - RNA, 22 nt, Human
ugagcuuacgugggaacagacu

SEQ ID NO: 626701 - RNA, 22 nt, Human
ucuucaaauccuacagugucug

SEQ ID NO: 626702 - RNA, 22 nt, Human
aaagcaugacucaagaauuacu

SEQ ID NO: 626703 - RNA, 22 nt, Human
ugaggcaggaaguuauauaaug

SEQ ID NO: 626704 - RNA, 22 nt, Human
gccuggagugcaguggcgugau

SEQ ID NO: 626705 - RNA, 22 nt, Human
uucacagcuuaauaaggcucag

SEQ ID NO: 626706 - RNA, 22 nt, Human
gaaccacaagauucaaaggggu

SEQ ID NO: 626707 - RNA, 22 nt, Human
cagaguguuucuuugggugggu

SEQ ID NO: 626708 - RNA, 22 nt, Human
uucaggauucucucccauuuac

SEQ ID NO: 626709 - RNA, 22 nt, Human
gaugaagcuaaaucuaagguuu

SEQ ID NO: 626710 - RNA, 22 nt, Human
aggauucauggugcagacaaag

SEQ ID NO: 626711 - RNA, 22 nt, Human
acgaugagauggggcuggaagg

SEQ ID NO: 626712 - RNA, 22 nt, Human
agaagccacaggccucgucugg

SEQ ID NO: 626713 - RNA, 22 nt, Human
uauuuaugucucugcagagaau

SEQ ID NO: 626714 - RNA, 22 nt, Human
ugcuaaauucauuauugauuua

SEQ ID NO: 626715 - RNA, 22 nt, Human
agagccaggaugucuucugggg

SEQ ID NO: 626716 - RNA, 22 nt, Human
gggagcuggggcauuuauaccc

SEQ ID NO: 626717 - RNA, 22 nt, Human
caggccacgccccggcguguga

SEQ ID NO: 626718 - RNA, 22 nt, Human
cugacauuuacugagcacuuac

SEQ ID NO: 626719 - RNA, 22 nt, Human
uucaauaggaugcaugauauaa

SEQ ID NO: 626720 - RNA, 22 nt, Human
agcaggagagcagugcgugguc

SEQ ID NO: 626721 - RNA, 22 nt, Human
ugcagaaaggaggggugggaau

SEQ ID NO: 626722 - RNA, 22 nt, Human
guagaucucagacuuugaaauu

SEQ ID NO: 626723 - RNA, 22 nt, Human
guggccauuuggaaggcaagua

SEQ ID NO: 626724 - RNA, 22 nt, Human
auaggaauuucuucagcacuga

SEQ ID NO: 626725 - RNA, 22 nt, Human
aacaucuaguuccuauauaaua

SEQ ID NO: 626726 - RNA, 22 nt, Human
agccagcugccuuucacaucug

SEQ ID NO: 626727 - RNA, 22 nt, Human
gaggcucauugcauugugcauu

SEQ ID NO: 626728 - RNA, 23 nt, Human
cugggacaugguaggggcacaac

SEQ ID NO: 626729 - RNA, 22 nt, Human
acuuugugcccaacagaaagaa

SEQ ID NO: 626730 - RNA, 22 nt, Human
gcagggcuguggacacuuuggu

SEQ ID NO: 626731 - RNA, 22 nt, Human
uucuggacuugccuugcugaug

SEQ ID NO: 626732 - RNA, 22 nt, Human
aagcagcagaccugauuuugaa

SEQ ID NO: 626733 - RNA, 22 nt, Human
ugugggaaaugggaguggaaga

SEQ ID NO: 626734 - RNA, 22 nt, Human
auucaguuauuuacuuugcuau

SEQ ID NO: 626735 - RNA, 22 nt, Human
acauuauaguugcuacagagua

SEQ ID NO: 626736 - RNA, 22 nt, Human
ucaucucucaggauaccagcag

SEQ ID NO: 626737 - RNA, 22 nt, Human
gcaauauaaccaguugucaugc

SEQ ID NO: 626738 - RNA, 22 nt, Human
agucugugaaaagauaggaagu

SEQ ID NO: 626739 - RNA, 22 nt, Human
caacagaaggaagcagggucag

SEQ ID NO: 626740 - RNA, 22 nt, Human
cagugagcuccugucugucccu

SEQ ID NO: 626741 - RNA, 22 nt, Human
agagacugcgugucagcgcugg

SEQ ID NO: 626742 - RNA, 22 nt, Human
aacauuucagcaccugauuccu

SEQ ID NO: 626743 - RNA, 22 nt, Human
agaccauagggaccucagguug

SEQ ID NO: 626744 - RNA, 22 nt, Human
cagcccugagcaaggcuuuuaa

SEQ ID NO: 626745 - RNA, 22 nt, Human
auuauuuccuugcuuugaggaa

SEQ ID NO: 626746 - RNA, 22 nt, Human
uuaaagcuggcguuacaguuug

SEQ ID NO: 626747 - RNA, 22 nt, Human
auagcaauuugcccaauuaccu

SEQ ID NO: 626748 - RNA, 17 nt, Human
uguagcuucuccuucuc

SEQ ID NO: 626749 - RNA, 22 nt, Human
acagggcauuuccucuaugugu

SEQ ID NO: 626750 - RNA, 19 nt, Human
aggaaggaaccugagucug

SEQ ID NO: 626751 - RNA, 22 nt, Human
agggaagaaaauccaucgcugc

SEQ ID NO: 626752 - RNA, 22 nt, Human
cccuggcucugccucagagccc

SEQ ID NO: 626753 - RNA, 22 nt, Human
ugauggaaauuugggaagcuuu

SEQ ID NO: 626754 - RNA, 22 nt, Human
caaaugauacuguuuuuagucu

SEQ ID NO: 626755 - RNA, 22 nt, Human
ucagcugccccgggcacugccc

SEQ ID NO: 626756 - RNA, 22 nt, Human
gcucaaaucccagcgggcuccu

SEQ ID NO: 626757 - RNA, 22 nt, Human
auggcuguguuguuccucugaa

SEQ ID NO: 626758 - RNA, 22 nt, Human
cuggggcccaucgagggcugag

SEQ ID NO: 626759 - RNA, 18 nt, Human
uucuccagaaaacauagc

SEQ ID NO: 626760 - RNA, 22 nt, Human
cugugagauaugcauaugcucu

SEQ ID NO: 626761 - RNA, 22 nt, Human
caaguucacuugucuacaaggg

SEQ ID NO: 626762 - RNA, 22 nt, Human
cuggagggugagccucaucucu

SEQ ID NO: 626763 - RNA, 22 nt, Human
cucacucagacauccagugcag

SEQ ID NO: 626764 - RNA, 22 nt, Human
aaggaaagacauauaaaugacu

SEQ ID NO: 626765 - RNA, 22 nt, Human
ucagccucucugaguccagacc

SEQ ID NO: 626766 - RNA, 22 nt, Human
agaugucuguaauucuaagcau

SEQ ID NO: 626767 - RNA, 22 nt, Human
gguguuggaacauggugagauu

SEQ ID NO: 626768 - RNA, 22 nt, Human
guggcugcagagggcacagcau

SEQ ID NO: 626769 - RNA, 19 nt, Human
gcucagugaugccagacca

SEQ ID NO: 626770 - RNA, 22 nt, Human
guucacaauggcuuuaccuaag

SEQ ID NO: 626771 - RNA, 22 nt, Human
ucucugguggcuccaucaguag

SEQ ID NO: 626772 - RNA, 22 nt, Human
uacauguauguguuaauaucug

SEQ ID NO: 626773 - RNA, 22 nt, Human
agaucuuuagugaagcuaaauc

SEQ ID NO: 626774 - RNA, 22 nt, Human
cuacagaaacacuggacaugug

SEQ ID NO: 626775 - RNA, 22 nt, Human
cacugagaggucucauuuccaa

SEQ ID NO: 626776 - RNA, 22 nt, Human
uccacauucucuguuacagaua

SEQ ID NO: 626777 - RNA, 21 nt, Human
uguaugcacgcacaugcacac

SEQ ID NO: 626778 - RNA, 22 nt, Human
uucuaugugcuggagaauauuu

SEQ ID NO: 626779 - RNA, 22 nt, Human
cacauucaucaguguuguacug

SEQ ID NO: 626780 - RNA, 18 nt, Human
gaggcagcuagcaauuuu

SEQ ID NO: 626781 - RNA, 22 nt, Human
ggcuuuggggugugcagagaug

SEQ ID NO: 626782 - RNA, 16 nt, Human
ugccugcucugaucuc

SEQ ID NO: 626783 - RNA, 22 nt, Human
agcugcagagguuugugcaaca

SEQ ID NO: 626784 - RNA, 22 nt, Human
caggcagaggaagucugggucu

SEQ ID NO: 626785 - RNA, 22 nt, Human
ggacauuuuucuuccuacaaug

SEQ ID NO: 626786 - RNA, 22 nt, Human
agagggcuuugauucucaguuc

SEQ ID NO: 626787 - RNA, 22 nt, Human
augucaggacccuacugcauug

SEQ ID NO: 626788 - RNA, 22 nt, Human
acagaauugggguucuugggga

SEQ ID NO: 626789 - RNA, 22 nt, Human
cggagcagagccacucgggccg

SEQ ID NO: 626790 - RNA, 22 nt, Human
ccaggccuuucuucuuggucug

SEQ ID NO: 626791 - RNA, 22 nt, Human
uugcauuugcucauuugauaug

SEQ ID NO: 626792 - RNA, 22 nt, Human
aaacaucuacuguaggcuggag

SEQ ID NO: 626793 - RNA, 22 nt, Human
gaucauuggccuuucugcagug

SEQ ID NO: 626794 - RNA, 22 nt, Human
ucugugugggauaguuugagga

SEQ ID NO: 626795 - RNA, 22 nt, Human
uaaccugggaucugacgggaug

SEQ ID NO: 626796 - RNA, 22 nt, Human
cagcccuuccaggcagaauucu

SEQ ID NO: 626797 - RNA, 22 nt, Human
ucaagugcuugugagguauuug

SEQ ID NO: 626798 - RNA, 22 nt, Human
agccuggaggccaggagacagu

SEQ ID NO: 626799 - RNA, 22 nt, Human
ugugguggcuauucuggucuca

SEQ ID NO: 626800 - RNA, 22 nt, Human
acauauugagcucuaaaaguac

SEQ ID NO: 626801 - RNA, 17 nt, Human
gucagcagcuugcuugu

SEQ ID NO: 626802 - RNA, 22 nt, Human
aggccugaaguguggagugggg

SEQ ID NO: 626803 - RNA, 22 nt, Human
uaagaaacccaggaauuucuua

SEQ ID NO: 626804 - RNA, 22 nt, Human
gugcgugaggccccugagcgaa

SEQ ID NO: 626805 - RNA, 22 nt, Human
caggaacaaucuuacuacuauu

SEQ ID NO: 626806 - RNA, 22 nt, Human
ugugccauuucuauucugcagc

SEQ ID NO: 626807 - RNA, 22 nt, Human
uuuguacauccuaauucugagu

SEQ ID NO: 626808 - RNA, 20 nt, Human
ucuuuaguuccuggcccuuu

SEQ ID NO: 626809 - RNA, 22 nt, Human
gcugagaguccaggaaaacauc

SEQ ID NO: 626810 - RNA, 22 nt, Human
cuuuugcagccauuauugcugc

SEQ ID NO: 626811 - RNA, 22 nt, Human
gcauccauucacucaacuuaga

SEQ ID NO: 626812 - RNA, 22 nt, Human
ccccuuccacagugcuuccuaa

SEQ ID NO: 626813 - RNA, 22 nt, Human
guugguuaggucaggauucaga

SEQ ID NO: 626814 - RNA, 22 nt, Human
ucucauguuuuaccuguccuca

SEQ ID NO: 626815 - RNA, 22 nt, Human
augaaauaucuugaagaaauuc

SEQ ID NO: 626816 - RNA, 22 nt, Human
agcugcccucgcuggggccaga

SEQ ID NO: 626817 - RNA, 22 nt, Human
agcccagauaaaguacaaccau

SEQ ID NO: 626818 - RNA, 22 nt, Human
aguaucaaggaucuccagcacc

SEQ ID NO: 626819 - RNA, 22 nt, Human
aggccagaguuaaggagaacag

SEQ ID NO: 626820 - RNA, 22 nt, Human
uguuuaacuaguuuucacacuu

SEQ ID NO: 626821 - RNA, 22 nt, Human
uccucacaagcauccugucuca

SEQ ID NO: 626822 - RNA, 22 nt, Human
acuccagggcugaacgaggccc

SEQ ID NO: 626823 - RNA, 22 nt, Human
ucuggggaugaggaccuagaug

SEQ ID NO: 626824 - RNA, 22 nt, Human
caggaugguggcaugaucagaa

SEQ ID NO: 626825 - RNA, 22 nt, Human
cauguacaaggaugcucagagu

SEQ ID NO: 626826 - RNA, 22 nt, Human
gagguauuugauccucugcagu

SEQ ID NO: 626827 - RNA, 22 nt, Human
uauuauuaaauggcagaauuuu

SEQ ID NO: 626828 - RNA, 22 nt, Human
uugaauaaaugagcagugaauu

SEQ ID NO: 626829 - RNA, 22 nt, Human
uuucuucauucaccuucacccc

SEQ ID NO: 626830 - RNA, 22 nt, Human
ugagcagcaacuguccauggca

SEQ ID NO: 626831 - RNA, 19 nt, Human
gccuuggcauucucugcuu

SEQ ID NO: 626832 - RNA, 22 nt, Human
cggcuucaugagaaaugacaga

SEQ ID NO: 626833 - RNA, 22 nt, Human
cccacugagccuauacaaacag

SEQ ID NO: 626834 - RNA, 22 nt, Human
ugcaagggguuuaugcagauga

SEQ ID NO: 626835 - RNA, 22 nt, Human
acauguuagaaaugcagaaucu

SEQ ID NO: 626836 - RNA, 22 nt, Human
aguuucuuuagauagaaaguuc

SEQ ID NO: 626837 - RNA, 22 nt, Human
aagacacaaagcuucccuuuuc

SEQ ID NO: 626838 - RNA, 22 nt, Human
gccaccugccaacuugcuggaa

SEQ ID NO: 626839 - RNA, 22 nt, Human
aaacagaugaguuauaauagcc

SEQ ID NO: 626840 - RNA, 22 nt, Human
gcuuccuggaacaacuguugcu

SEQ ID NO: 626841 - RNA, 22 nt, Human
ucagagaaguaagguggggugc

SEQ ID NO: 626842 - RNA, 22 nt, Human
ucgauagaauauacuagcugug

SEQ ID NO: 626843 - RNA, 22 nt, Human
caaggcagcuauugucuccaua

SEQ ID NO: 626844 - RNA, 22 nt, Human
acagauuuaggacuguagcgau

SEQ ID NO: 626845 - RNA, 22 nt, Human
auucacaaguugauggauauuu

SEQ ID NO: 626846 - RNA, 22 nt, Human
ggcaggcagccuccauccacag

SEQ ID NO: 626847 - RNA, 22 nt, Human
ucaggagauggucuuuauaggc

SEQ ID NO: 626848 - RNA, 22 nt, Human
uuugcagucaaauuugcuaaau

SEQ ID NO: 626849 - RNA, 22 nt, Human
aaaguugaguuuuauguguuac

SEQ ID NO: 626850 - RNA, 23 nt, Human
acuccccagucucuucuugccaa

SEQ ID NO: 626851 - RNA, 22 nt, Human
gcagaauguaggccuucagugu

SEQ ID NO: 626852 - RNA, 22 nt, Human
ucugagcuuuagcugggauuuu

SEQ ID NO: 626853 - RNA, 22 nt, Human
uagggcugaggcaacaagggag

SEQ ID NO: 626854 - RNA, 22 nt, Human
uccugcagccacugcaggcaga

SEQ ID NO: 626855 - RNA, 22 nt, Human
auauuguuaguaauauuucgaa

SEQ ID NO: 626856 - RNA, 22 nt, Human
caggguucagugggcccucuug

SEQ ID NO: 626857 - RNA, 22 nt, Human
augcugagacuggagcagcugg

SEQ ID NO: 626858 - RNA, 22 nt, Human
uugaugaguuauccauuugacu

SEQ ID NO: 626859 - RNA, 22 nt, Human
auacaaaauauauacuggagac

SEQ ID NO: 626860 - RNA, 22 nt, Human
uugaaguuuaaugguagauucc

SEQ ID NO: 626861 - RNA, 20 nt, Human
ucuucuguugccuuguucug

SEQ ID NO: 626862 - RNA, 22 nt, Human
ucaugcaggaccaccccagcau

SEQ ID NO: 626863 - RNA, 22 nt, Human
acagagccuccaggagugcugg

SEQ ID NO: 626864 - RNA, 22 nt, Human
gaaugcaguggugagaucuugg

SEQ ID NO: 626865 - RNA, 22 nt, Human
cauguauauuucuguaugugca

SEQ ID NO: 626866 - RNA, 22 nt, Human
ccaaaucaccagcacgaucauu

SEQ ID NO: 626867 - RNA, 22 nt, Human
ucuacaaauaaauuacuaugua

SEQ ID NO: 626868 - RNA, 22 nt, Human
aagcccagggaauggucgggag

SEQ ID NO: 626869 - RNA, 22 nt, Human
uuugagaacccuguauuuuaag

SEQ ID NO: 626870 - RNA, 22 nt, Human
ugagauggguggggagcucagg

SEQ ID NO: 626871 - RNA, 22 nt, Human
ggaugggcugaaagguagcccc

SEQ ID NO: 626872 - RNA, 22 nt, Human
auuguuaauaacuauuacauug

SEQ ID NO: 626873 - RNA, 22 nt, Human
acagcucugagauauuacuauu

SEQ ID NO: 626874 - RNA, 23 nt, Human
aaagccaagucagucuacuggaa

SEQ ID NO: 626875 - RNA, 21 nt, Human
agaugcaguuaugagaugcag

SEQ ID NO: 626876 - RNA, 22 nt, Human
gaaauucaaauaagauauguag

SEQ ID NO: 626877 - RNA, 22 nt, Human
uuagggcuuuucugaauaggcc

SEQ ID NO: 626878 - RNA, 22 nt, Human
cagagacauucuccccauugga

SEQ ID NO: 626879 - RNA, 22 nt, Human
gaugagcugugauuaauaagua

SEQ ID NO: 626880 - RNA, 22 nt, Human
agaauccugaugaaaaggagag

SEQ ID NO: 626881 - RNA, 22 nt, Human
aaccucaaacucuugggcuuaa

SEQ ID NO: 626882 - RNA, 22 nt, Human
ggaggccaggaugggaacucaa

SEQ ID NO: 626883 - RNA, 22 nt, Human
agcacaggacguagagcuugga

SEQ ID NO: 626884 - RNA, 22 nt, Human
aacacugacgacgugaacuaaa

SEQ ID NO: 626885 - RNA, 22 nt, Human
gccuggcugcugguucugagga

SEQ ID NO: 626886 - RNA, 22 nt, Human
guguguauuauugcauacacau

SEQ ID NO: 626887 - RNA, 22 nt, Human
acuggcagcagcagcccuuggg

SEQ ID NO: 626888 - RNA, 22 nt, Human
gucugcuguucagagauguugc

SEQ ID NO: 626889 - RNA, 22 nt, Human
agauucauuauuaaugugaucu

SEQ ID NO: 626890 - RNA, 22 nt, Human
aucagaaauugcccagcuguuu

SEQ ID NO: 626891 - RNA, 22 nt, Human
cuccugagucuccacgccccgu

SEQ ID NO: 626892 - RNA, 22 nt, Human
aaagccauuacaaaauuucaua

SEQ ID NO: 626893 - RNA, 22 nt, Human
auugccuugucagauuucuuuu

SEQ ID NO: 626894 - RNA, 22 nt, Human
ucccagcacgucugcuguuucu

SEQ ID NO: 626895 - RNA, 22 nt, Human
agccucugauggcucccaagga

SEQ ID NO: 626896 - RNA, 22 nt, Human
ucucaagcuuguugguauguuu

SEQ ID NO: 626897 - RNA, 22 nt, Human
uaggcugggcauucuggccagg

SEQ ID NO: 626898 - RNA, 22 nt, Human
cacauauaccucuucuugaguu

SEQ ID NO: 626899 - RNA, 22 nt, Human
guuugcauguauuaagucaaua

SEQ ID NO: 626900 - RNA, 22 nt, Human
agcaccuucacaggcucucagg

SEQ ID NO: 626901 - RNA, 22 nt, Human
uguauuuaagcuuuaccuaaaa

SEQ ID NO: 626902 - RNA, 22 nt, Human
cguggccacccaguggugcgug

SEQ ID NO: 626903 - RNA, 22 nt, Human
uggagcagcacaagaaagggga

SEQ ID NO: 626904 - RNA, 22 nt, Human
cacagcuucuccuugauaucgc

SEQ ID NO: 626905 - RNA, 22 nt, Human
cuggccacugguggucauaggc

SEQ ID NO: 626906 - RNA, 22 nt, Human
ccagaggcuggcagccagcuga

SEQ ID NO: 626907 - RNA, 19 nt, Human
uguguucaaacuccaucuc

SEQ ID NO: 626908 - RNA, 21 nt, Human
auaugaguuucagauguugcu

SEQ ID NO: 626909 - RNA, 22 nt, Human
caaugucugaccguuuugccca

SEQ ID NO: 626910 - RNA, 22 nt, Human
aaucuucacucuuaacugugca

SEQ ID NO: 626911 - RNA, 21 nt, Human
gcagcaaaugacaacagugag

SEQ ID NO: 626912 - RNA, 22 nt, Human
aacagaacuguuguucuggagg

SEQ ID NO: 626913 - RNA, 21 nt, Human
ggccugaaaaagugaaugcuu

SEQ ID NO: 626914 - RNA, 22 nt, Human
cauuuguacagaacagcuuuau

SEQ ID NO: 626915 - RNA, 22 nt, Human
acaggaguuaaccaugggaagu

SEQ ID NO: 626916 - RNA, 22 nt, Human
cuggggcugcagcgaucuucau

SEQ ID NO: 626917 - RNA, 22 nt, Human
cggggaggcuucggauuaaagc

SEQ ID NO: 626918 - RNA, 22 nt, Human
gcucagggaaugagaagauguu

SEQ ID NO: 626919 - RNA, 22 nt, Human
gagccaggaagaaggccuuacu

SEQ ID NO: 626920 - RNA, 19 nt, Human
gagcagcuuccuaucuggu

SEQ ID NO: 626921 - RNA, 22 nt, Human
aaaauauuuuagggccaggaga

SEQ ID NO: 626922 - RNA, 22 nt, Human
cccagaggcugaguugggagca

SEQ ID NO: 626923 - RNA, 22 nt, Human
cuuucucuguguuucacaugcu

SEQ ID NO: 626924 - RNA, 22 nt, Human
agcagauaggacauuucauucu

SEQ ID NO: 626925 - RNA, 22 nt, Human
ucagaucuggugaaguuauagu

SEQ ID NO: 626926 - RNA, 22 nt, Human
gccucaguaaccuuaggggaua

SEQ ID NO: 626927 - RNA, 22 nt, Human
agucauauguggcauuuucuaa

SEQ ID NO: 626928 - RNA, 21 nt, Human
cugcucuggggaccggcugug

SEQ ID NO: 626929 - RNA, 22 nt, Human
gcaggaguaugcagcuaugguu

SEQ ID NO: 626930 - RNA, 22 nt, Human
gacugcuuauauguuaaagaua

SEQ ID NO: 626931 - RNA, 19 nt, Human
cugaggugcaguaagaggc

SEQ ID NO: 626932 - RNA, 22 nt, Human
ggucugagugccagggagagaa

SEQ ID NO: 626933 - RNA, 22 nt, Human
gucugcugcuucuguugaagca

SEQ ID NO: 626934 - RNA, 22 nt, Human
gcucuugucaaaaauuaguuga

SEQ ID NO: 626935 - RNA, 22 nt, Human
uucaagaugacccagucacacg

SEQ ID NO: 626936 - RNA, 22 nt, Human
cccaaaaugugcauguucgaau

SEQ ID NO: 626937 - RNA, 22 nt, Human
cuacugaguccuucagcugcca

SEQ ID NO: 626938 - RNA, 22 nt, Human
ugcagcuccucuggcugccuga

SEQ ID NO: 626939 - RNA, 22 nt, Human
cucuccaggacuuuggcccaau

SEQ ID NO: 626940 - RNA, 22 nt, Human
acacauaugucauugaaaaauc

SEQ ID NO: 626941 - RNA, 22 nt, Human
cuuuccugaggaguauggcugu

SEQ ID NO: 626942 - RNA, 22 nt, Human
auggcuguguuagaugcuaagu

SEQ ID NO: 626943 - RNA, 22 nt, Human
caaugacagguucaugacuccu

SEQ ID NO: 626944 - RNA, 22 nt, Human
aucauuaaauauaagcuucaca

SEQ ID NO: 626945 - RNA, 22 nt, Human
aaguaugucuuuggguauuauu

SEQ ID NO: 626946 - RNA, 22 nt, Human
agcagacaauugccuggaugga

SEQ ID NO: 626947 - RNA, 22 nt, Human
uggcaccaggcgggguggcugu

SEQ ID NO: 626948 - RNA, 22 nt, Human
uuuuucucuaaguagucccaaa

SEQ ID NO: 626949 - RNA, 22 nt, Human
ucuuuuguggaugaagaaaugg

SEQ ID NO: 626950 - RNA, 22 nt, Human
ugagccaagaucaugccguugu

SEQ ID NO: 626951 - RNA, 22 nt, Human
uuggcuucucuuaacccuaaag

SEQ ID NO: 626952 - RNA, 21 nt, Human
gagagggcauuauaggaagug

SEQ ID NO: 626953 - RNA, 22 nt, Human
acaggugugagaacaugccuug

SEQ ID NO: 626954 - RNA, 22 nt, Human
cuuugaauuaacgacacaagug

SEQ ID NO: 626955 - RNA, 22 nt, Human
auauucuuccaaaacaucauuu

SEQ ID NO: 626956 - RNA, 22 nt, Human
auuauugugauaggugucagug

SEQ ID NO: 626957 - RNA, 22 nt, Human
acagagaccaguuacagcgucc

SEQ ID NO: 626958 - RNA, 22 nt, Human
agucuugcucuugcaucugcuu

SEQ ID NO: 626959 - RNA, 22 nt, Human
uauauauucuuaaguaguguag

SEQ ID NO: 626960 - RNA, 22 nt, Human
ucuaggaguaaugagcuagcac

SEQ ID NO: 626961 - RNA, 22 nt, Human
gggcagugaauauuggugggaa

SEQ ID NO: 626962 - RNA, 22 nt, Human
gacacaggaaaagcuccagccc

SEQ ID NO: 626963 - RNA, 22 nt, Human
ccugagugaauucccucacugu

SEQ ID NO: 626964 - RNA, 22 nt, Human
acuugaaaggaagcucuaaaac

SEQ ID NO: 626965 - RNA, 23 nt, Human
aaauaggaguaucuggaucauga

SEQ ID NO: 626966 - RNA, 22 nt, Human
ggcucuugagaggcacagguuu

SEQ ID NO: 626967 - RNA, 21 nt, Human
aaacugaccuugccugagaca

SEQ ID NO: 626968 - RNA, 17 nt, Human
ggccauggugcaagguu

SEQ ID NO: 626969 - RNA, 22 nt, Human
gugagcaguugugagccccaaa

SEQ ID NO: 626970 - RNA, 22 nt, Human
uagaaacaagggagaggauucu

SEQ ID NO: 626971 - RNA, 17 nt, Human
acacaagcaccuugagg

SEQ ID NO: 626972 - RNA, 22 nt, Human
auauuuucacagaacuugcaaa

SEQ ID NO: 626973 - RNA, 22 nt, Human
ccacagcaggacuggagccgcc

SEQ ID NO: 626974 - RNA, 20 nt, Human
ggcuuggcugccuggggagg

SEQ ID NO: 626975 - RNA, 22 nt, Human
aggucagaaaaggagagcauug

SEQ ID NO: 626976 - RNA, 22 nt, Human
aaagaugucacaagaugugaug

SEQ ID NO: 626977 - RNA, 22 nt, Human
agucuccagaaauauagcagug

SEQ ID NO: 626978 - RNA, 22 nt, Human
gggcagcucucacagcagccaa

SEQ ID NO: 626979 - RNA, 22 nt, Human
guggcagcucauguuguuuuaa

SEQ ID NO: 626980 - RNA, 21 nt, Human
agaaucauuuuucccuucucu

SEQ ID NO: 626981 - RNA, 21 nt, Human
gccauguuuccuuacuaagag

SEQ ID NO: 626982 - RNA, 22 nt, Human
uucuauugcacacaaauaauua

SEQ ID NO: 626983 - RNA, 22 nt, Human
uaacaguauugaagauaaacua

SEQ ID NO: 626984 - RNA, 22 nt, Human
ccuggaaggugaugguacagca

SEQ ID NO: 626985 - RNA, 20 nt, Human
uuggggcauccaccgaaugg

SEQ ID NO: 626986 - RNA, 18 nt, Human
gucagaggauggggaaau

SEQ ID NO: 626987 - RNA, 18 nt, Human
gcagcuuuugauucaccc

SEQ ID NO: 626988 - RNA, 22 nt, Human
cagcccuguccagcagagggug

SEQ ID NO: 626989 - RNA, 22 nt, Human
gggcuguaggagcuggaauggg

SEQ ID NO: 626990 - RNA, 22 nt, Human
gacagcuucuugggccgggccu

SEQ ID NO: 626991 - RNA, 22 nt, Human
aacaugaaaaccuccacagcaa

SEQ ID NO: 626992 - RNA, 22 nt, Human
gccagcucccaagugagccccu

SEQ ID NO: 626993 - RNA, 22 nt, Human
gugugcagggggccagcgcagc

SEQ ID NO: 626994 - RNA, 21 nt, Human
gcaugaaaacagccugugcuc

SEQ ID NO: 626995 - RNA, 22 nt, Human
gcugcuguugauuuaguccaau

SEQ ID NO: 626996 - RNA, 22 nt, Human
cccagggguucugagcagcagc

SEQ ID NO: 626997 - RNA, 22 nt, Human
uuaaaugaacgagauaugcaac

SEQ ID NO: 626998 - RNA, 22 nt, Human
acaaguaccaaaugcucaagua

SEQ ID NO: 626999 - RNA, 22 nt, Human
aaacucuuuugcauauuagagg

SEQ ID NO: 627000 - RNA, 23 nt, Human
uggucugacuuguagcugugaga

SEQ ID NO: 627001 - RNA, 22 nt, Human
uccagaaacuuuuccagucuca

SEQ ID NO: 627002 - RNA, 22 nt, Human
aggggaugccugaggaucugua

SEQ ID NO: 627003 - RNA, 22 nt, Human
uccugagcuacaguaguaugau

SEQ ID NO: 627004 - RNA, 22 nt, Human
gucuaaagcccuuagaauagua

SEQ ID NO: 627005 - RNA, 22 nt, Human
aggcucuuugagacuaccugga

SEQ ID NO: 627006 - RNA, 22 nt, Human
uacauuccaaaggaaacuggcu

SEQ ID NO: 627007 - RNA, 20 nt, Human
uccuggaguauuccaugcuu

SEQ ID NO: 627008 - RNA, 22 nt, Human
gccugguguccagaggcgagug

SEQ ID NO: 627009 - RNA, 22 nt, Human
ugguuccuacgcacauugaauu

SEQ ID NO: 627010 - RNA, 22 nt, Human
agguccagaguugagauacaga

SEQ ID NO: 627011 - RNA, 22 nt, Human
uugacaguugaggguugucuaa

SEQ ID NO: 627012 - RNA, 22 nt, Human
ggcaauaguuguggguucuuua

SEQ ID NO: 627013 - RNA, 22 nt, Human
cuucccugauaagagccucaga

SEQ ID NO: 627014 - RNA, 22 nt, Human
gcauguguggaggagaugugcu

SEQ ID NO: 627015 - RNA, 21 nt, Human
uagcaggagcgaauuuugaug

SEQ ID NO: 627016 - RNA, 17 nt, Human
aaacaaugcagacaagc

SEQ ID NO: 627017 - RNA, 22 nt, Human
uuacaaacaagaucuuauucuu

SEQ ID NO: 627018 - RNA, 22 nt, Human
uaaagaugcccacauugcaggu

SEQ ID NO: 627019 - RNA, 22 nt, Human
ucccuaggagaauugccgcagc

SEQ ID NO: 627020 - RNA, 22 nt, Human
auuuaugauuagccuauuguug

SEQ ID NO: 627021 - RNA, 22 nt, Human
ugaguguguauuauguaucagg

SEQ ID NO: 627022 - RNA, 22 nt, Human
uccagggcuccccaacauccag

SEQ ID NO: 627023 - RNA, 22 nt, Human
cacugcccaggaccugccaccc

SEQ ID NO: 627024 - RNA, 19 nt, Human
gcacacaguagggcuggca

SEQ ID NO: 627025 - RNA, 22 nt, Human
ucugggaacauggcuuggaauc

SEQ ID NO: 627026 - RNA, 22 nt, Human
cuguuccagaucaggacaccgu

SEQ ID NO: 627027 - RNA, 22 nt, Human
uggguccuugcuaacuucuaug

SEQ ID NO: 627028 - RNA, 22 nt, Human
aauaguguuguucacucaggag

SEQ ID NO: 627029 - RNA, 22 nt, Human
auuuugugaacccucaagcaau

SEQ ID NO: 627030 - RNA, 22 nt, Human
uggcuucugcauauuuuuagag

SEQ ID NO: 627031 - RNA, 22 nt, Human
gaugguuuggaaugaaguagcu

SEQ ID NO: 627032 - RNA, 22 nt, Human
uuuccucuucuucccaugucau

SEQ ID NO: 627033 - RNA, 22 nt, Human
ggggaaggauugaguugaccca

SEQ ID NO: 627034 - RNA, 22 nt, Human
aaaaguaauugcaguuuucgcc

SEQ ID NO: 627035 - RNA, 22 nt, Human
ugcugccacaaauucagcugcc

SEQ ID NO: 627036 - RNA, 18 nt, Human
ucaggcugggccuccuuc

SEQ ID NO: 627037 - RNA, 22 nt, Human
uuagcauucugccuccuauauc

SEQ ID NO: 627038 - RNA, 22 nt, Human
aaagguuuauuuaaucagggag

SEQ ID NO: 627039 - RNA, 22 nt, Human
guuauucugccaaacuuccaca

SEQ ID NO: 627040 - RNA, 22 nt, Human
aggggccauguaaguguaucac

SEQ ID NO: 627041 - RNA, 20 nt, Human
ccugucugcaauggagguca

SEQ ID NO: 627042 - RNA, 22 nt, Human
gcugggcucuuuaccccuguac

SEQ ID NO: 627043 - RNA, 22 nt, Human
guuaacuuucaggugcauguuu

SEQ ID NO: 627044 - RNA, 22 nt, Human
gcaggcggaucacuggaaguca

SEQ ID NO: 627045 - RNA, 22 nt, Human
ugcuuccugcuaaggcugccug

SEQ ID NO: 627046 - RNA, 22 nt, Human
caggcugggcugguguuagagu

SEQ ID NO: 627047 - RNA, 18 nt, Human
cugauagggguggcagcu

SEQ ID NO: 627048 - RNA, 22 nt, Human
agugucuuaguccauuugggcu

SEQ ID NO: 627049 - RNA, 22 nt, Human
agagugcccugcucugagcucu

SEQ ID NO: 627050 - RNA, 22 nt, Human
aaaucaguuguuauauuaaaga

SEQ ID NO: 627051 - RNA, 22 nt, Human
augcaggagaccaauuggaugg

SEQ ID NO: 627052 - RNA, 23 nt, Human
cugggcugcuugagucccuggcu

SEQ ID NO: 627053 - RNA, 22 nt, Human
ugaggcaguugagcuuccugag

SEQ ID NO: 627054 - RNA, 22 nt, Human
guuauucuugguggcccugcug

SEQ ID NO: 627055 - RNA, 22 nt, Human
ucucaguguguugagaggucug

SEQ ID NO: 627056 - RNA, 22 nt, Human
ugagucagugacaugaacuugu

SEQ ID NO: 627057 - RNA, 22 nt, Human
cggucugagagcaggagaaggg

SEQ ID NO: 627058 - RNA, 22 nt, Human
ugugccuggaucucugugacaa

SEQ ID NO: 627059 - RNA, 22 nt, Human
cuucacagccaacaugggcaca

SEQ ID NO: 627060 - RNA, 22 nt, Human
uucagagaaacugagguuuaga

SEQ ID NO: 627061 - RNA, 22 nt, Human
uucacacagaaucugaggagcu

SEQ ID NO: 627062 - RNA, 22 nt, Human
acagucuggaagcagggggcaa

SEQ ID NO: 627063 - RNA, 22 nt, Human
aucgcuuuacagccugcuuccu

SEQ ID NO: 627064 - RNA, 22 nt, Human
ugagcccuggcucuuucacuua

SEQ ID NO: 627065 - RNA, 22 nt, Human
agcuuuguggcuuugcaagacu

SEQ ID NO: 627066 - RNA, 23 nt, Human
aaguuguuuuuggccagggaaag

SEQ ID NO: 627067 - RNA, 22 nt, Human
acaggggcaggcaggacccuuu

SEQ ID NO: 627068 - RNA, 22 nt, Human
uggcagagaaccugggcuuugu

SEQ ID NO: 627069 - RNA, 22 nt, Human
caggcuggucccagagcauugc

SEQ ID NO: 627070 - RNA, 19 nt, Human
ucccagagucuagagguug

SEQ ID NO: 627071 - RNA, 22 nt, Human
cucaggaugcaggucacaggac

SEQ ID NO: 627072 - RNA, 21 nt, Human
uauuaauaugucuaagcugau

SEQ ID NO: 627073 - RNA, 22 nt, Human
agaguucagaaagugcagguuu

SEQ ID NO: 627074 - RNA, 22 nt, Human
cagacugugagcuccuugaggg

SEQ ID NO: 627075 - RNA, 22 nt, Human
ugcaggcuauaucuuauuugac

SEQ ID NO: 627076 - RNA, 23 nt, Human
uuacagaaaguaugcuuuuguuu

SEQ ID NO: 627077 - RNA, 22 nt, Human
cagccuugauggaugaggaagu

SEQ ID NO: 627078 - RNA, 22 nt, Human
acaauuagugaucagugaugcc

SEQ ID NO: 627079 - RNA, 22 nt, Human
ugggcucagucugcuugguccu

SEQ ID NO: 627080 - RNA, 22 nt, Human
uugggguaaaaugucguaagag

SEQ ID NO: 627081 - RNA, 20 nt, Human
cuguccccgaggucaccagg

SEQ ID NO: 627082 - RNA, 22 nt, Human
agccuggcuuagcucucucacu

SEQ ID NO: 627083 - RNA, 22 nt, Human
ccuuggcuugugggcugcagcc

SEQ ID NO: 627084 - RNA, 22 nt, Human
uggcucuguggucuuagcaugc

SEQ ID NO: 627085 - RNA, 23 nt, Human
uaagaacagacaagcauuuacau

SEQ ID NO: 627086 - RNA, 22 nt, Human
aggaaccagacagaacugaaug

SEQ ID NO: 627087 - RNA, 22 nt, Human
ucucauuugugugcaauucaga

SEQ ID NO: 627088 - RNA, 18 nt, Human
uccugggaacuugcuagc

SEQ ID NO: 627089 - RNA, 22 nt, Human
cauggcuuuguucuguuagaug

SEQ ID NO: 627090 - RNA, 22 nt, Human
acugugugaggcugggugaguc

SEQ ID NO: 627091 - RNA, 21 nt, Human
ugggccugauucccaggguca

SEQ ID NO: 627092 - RNA, 22 nt, Human
ugcuggguagaaguauuagucu

SEQ ID NO: 627093 - RNA, 22 nt, Human
ccuuucucauuuuaagcauuag

SEQ ID NO: 627094 - RNA, 22 nt, Human
uucugggcauguuacauucugu

SEQ ID NO: 627095 - RNA, 22 nt, Human
aaguucuagagguugauuuggu

SEQ ID NO: 627096 - RNA, 22 nt, Human
uggcucagaguucaucuuuuag

SEQ ID NO: 627097 - RNA, 22 nt, Human
uaaagugcgacccaguccccag

SEQ ID NO: 627098 - RNA, 22 nt, Human
aguuucucuagagucuuugaaa

SEQ ID NO: 627099 - RNA, 22 nt, Human
aagcaucuauauuccacuguga

SEQ ID NO: 627100 - RNA, 22 nt, Human
gcugcugcaugaacagcgguca

SEQ ID NO: 627101 - RNA, 22 nt, Human
caaaccugacuggggaugggcg

SEQ ID NO: 627102 - RNA, 20 nt, Human
aucagacuugcauuucagga

SEQ ID NO: 627103 - RNA, 22 nt, Human
aucaggaugacuauaaggcugc

SEQ ID NO: 627104 - RNA, 22 nt, Human
ucauucucagacucuuggccuc

SEQ ID NO: 627105 - RNA, 22 nt, Human
agacagacuuugaucuggaugu

SEQ ID NO: 627106 - RNA, 22 nt, Human
uugaagcauuguggcuuguauu

SEQ ID NO: 627107 - RNA, 22 nt, Human
ucucaggggccuggaguccugg

SEQ ID NO: 627108 - RNA, 22 nt, Human
agaauugguuggggaaugugga

SEQ ID NO: 627109 - RNA, 22 nt, Human
ucacaugaaaugcuguaaagaa

SEQ ID NO: 627110 - RNA, 22 nt, Human
uggaagaauguuugccuuauaa

SEQ ID NO: 627111 - RNA, 22 nt, Human
ugcccaagccgagcucucuguu

SEQ ID NO: 627112 - RNA, 23 nt, Human
auugaacagagagaaaaacaucc

SEQ ID NO: 627113 - RNA, 22 nt, Human
ucacaguaucacacaaggauua

SEQ ID NO: 627114 - RNA, 22 nt, Human
caaagccucugauuucacuugu

SEQ ID NO: 627115 - RNA, 22 nt, Human
ugaggcagauauuuauuggguu

SEQ ID NO: 627116 - RNA, 22 nt, Human
uucuaguugagggagacaaaua

SEQ ID NO: 627117 - RNA, 22 nt, Human
cucuuugaaauccaucacugcu

SEQ ID NO: 627118 - RNA, 22 nt, Human
ggcugagaguuuccucuggggc

SEQ ID NO: 627119 - RNA, 22 nt, Human
aggcacagccucccccaacucc

SEQ ID NO: 627120 - RNA, 22 nt, Human
ggucacaugagaugcugcccuc

SEQ ID NO: 627121 - RNA, 22 nt, Human
caguaaaugugauuuuucuugu

SEQ ID NO: 627122 - RNA, 22 nt, Human
ugcugccauggucgcugguguc

SEQ ID NO: 627123 - RNA, 22 nt, Human
cacauugaaaugacccaauaau

SEQ ID NO: 627124 - RNA, 19 nt, Human
uggaggccaggacacaggu

SEQ ID NO: 627125 - RNA, 22 nt, Human
uugcauuuccuguacuguuuga

SEQ ID NO: 627126 - RNA, 22 nt, Human
aaugcauugauugcuggaaaua

SEQ ID NO: 627127 - RNA, 22 nt, Human
ugugcucuguggaucugagcaa

SEQ ID NO: 627128 - RNA, 22 nt, Human
agcaaagacagggacgaccaag

SEQ ID NO: 627129 - RNA, 22 nt, Human
uccugccaucugcuguugaucu

SEQ ID NO: 627130 - RNA, 22 nt, Human
aucaaguuuucuuaguugacug

SEQ ID NO: 627131 - RNA, 20 nt, Human
ucugauaaaaacuacuccau

SEQ ID NO: 627132 - RNA, 22 nt, Human
uaaggaauaucauaagaaguag

SEQ ID NO: 627133 - RNA, 22 nt, Human
ucucugauguauaucagagaac

SEQ ID NO: 627134 - RNA, 22 nt, Human
caguccugucuuuaugacuuca

SEQ ID NO: 627135 - RNA, 22 nt, Human
gucaggacaagguggucuccag

SEQ ID NO: 627136 - RNA, 22 nt, Human
cacauguacagaagcaggcugg

SEQ ID NO: 627137 - RNA, 22 nt, Human
agcaggcagccauuuggaaggc

SEQ ID NO: 627138 - RNA, 23 nt, Human
auaaacugucaaaagccagcccu

SEQ ID NO: 627139 - RNA, 21 nt, Human
auuacagcaguggccaaaugc

SEQ ID NO: 627140 - RNA, 22 nt, Human
agcccucugcaaacaccugaua

SEQ ID NO: 627141 - RNA, 17 nt, Human
gcugaacaaggaaaaua

SEQ ID NO: 627142 - RNA, 21 nt, Human
aauucguuugcaacacugaua

SEQ ID NO: 627143 - RNA, 22 nt, Human
uccaggcagcccuuccugacuc

SEQ ID NO: 627144 - RNA, 22 nt, Human
gccauuuggcaaaacugacuuc

SEQ ID NO: 627145 - RNA, 22 nt, Human
agagccaggcaggcaauguuga

SEQ ID NO: 627146 - RNA, 22 nt, Human
acagcagccagccacugugagc

SEQ ID NO: 627147 - RNA, 22 nt, Human
agggaugauggaaagaagcagg

SEQ ID NO: 627148 - RNA, 22 nt, Human
ucuaggaggcggagauugcagu

SEQ ID NO: 627149 - RNA, 22 nt, Human
agucucugcaugaugcagcaca

SEQ ID NO: 627150 - RNA, 22 nt, Human
gggcaaggcagaagaguuggag

SEQ ID NO: 627151 - RNA, 22 nt, Human
uuucuagagugggcaugucuua

SEQ ID NO: 627152 - RNA, 22 nt, Human
cucaggccagguuucucccaca

SEQ ID NO: 627153 - RNA, 22 nt, Human
ugggcucauguuuauacauauc

SEQ ID NO: 627154 - RNA, 22 nt, Human
ccugagcuggcagugaccugga

SEQ ID NO: 627155 - RNA, 22 nt, Human
aaugaccucagagcacccagaa

SEQ ID NO: 627156 - RNA, 22 nt, Human
auguuuucuagaguuuaaaauc

SEQ ID NO: 627157 - RNA, 23 nt, Human
gauaggcugguuaguguaucugu

SEQ ID NO: 627158 - RNA, 22 nt, Human
uuuguguuuucccauacuauug

SEQ ID NO: 627159 - RNA, 22 nt, Human
uugcauuuuuacaaguagccag

SEQ ID NO: 627160 - RNA, 22 nt, Human
uugcugccuuggagaagcuccu

SEQ ID NO: 627161 - RNA, 22 nt, Human
uuauucuggaggaagcaaaugg

SEQ ID NO: 627162 - RNA, 22 nt, Human
ugaggcacuccaggaugcuguu

SEQ ID NO: 627163 - RNA, 23 nt, Human
gugcugugagccccuuggccucc

SEQ ID NO: 627164 - RNA, 22 nt, Human
gcaggacuugaauccaggcagu

SEQ ID NO: 627165 - RNA, 22 nt, Human
acagaugaaaaagcuuguggau

SEQ ID NO: 627166 - RNA, 21 nt, Human
ccuggacugggagcagcacug

SEQ ID NO: 627167 - RNA, 22 nt, Human
uuuucuguuacaaaguacagcg

SEQ ID NO: 627168 - RNA, 22 nt, Human
gaugaggaauuugagguuagaa

SEQ ID NO: 627169 - RNA, 22 nt, Human
cucucaguuuccucaacuguaa

SEQ ID NO: 627170 - RNA, 22 nt, Human
ugucacauguguggcauuuuuc

SEQ ID NO: 627171 - RNA, 22 nt, Human
agcagcagaagguuugcaccca

SEQ ID NO: 627172 - RNA, 21 nt, Human
ucagaggcacugagagcaaug

SEQ ID NO: 627173 - RNA, 22 nt, Human
uacaaagccugguagauaucug

SEQ ID NO: 627174 - RNA, 22 nt, Human
cuguggcucucagaggcugcug

SEQ ID NO: 627175 - RNA, 23 nt, Human
acaagcagcccagugcucugccu

SEQ ID NO: 627176 - RNA, 22 nt, Human
uauacacauaucuucuaggccu

SEQ ID NO: 627177 - RNA, 22 nt, Human
auuauucuuugauaaauggcag

SEQ ID NO: 627178 - RNA, 22 nt, Human
accugccagaauccaagccaca

SEQ ID NO: 627179 - RNA, 19 nt, Human
auucuucucuuccugcugu

SEQ ID NO: 627180 - RNA, 22 nt, Human
cucauggagggagugcucuucc

SEQ ID NO: 627181 - RNA, 22 nt, Human
uggucaaaagcuacuaugaaug

SEQ ID NO: 627182 - RNA, 22 nt, Human
cuccagagguccccgcggcacu

SEQ ID NO: 627183 - RNA, 22 nt, Human
uuauugaaggaacugaaauaaa

SEQ ID NO: 627184 - RNA, 22 nt, Human
aaccuagaguugccuuuuuuaa

SEQ ID NO: 627185 - RNA, 22 nt, Human
gcaguuuuauuaugauggaaau

SEQ ID NO: 627186 - RNA, 22 nt, Human
ucuggcuccacuuucuucauuu

SEQ ID NO: 627187 - RNA, 19 nt, Human
aggagccuugagcagugag

SEQ ID NO: 627188 - RNA, 22 nt, Human
uuaauuaacuagccaaccacua

SEQ ID NO: 627189 - RNA, 22 nt, Human
ucaucugaacaugcagccugug

SEQ ID NO: 627190 - RNA, 22 nt, Human
cuaauaacaugaacuacuuucu

SEQ ID NO: 627191 - RNA, 22 nt, Human
gagaggcuggcagugccagguu

SEQ ID NO: 627192 - RNA, 22 nt, Human
gcucugaggcugggagcacucu

SEQ ID NO: 627193 - RNA, 22 nt, Human
cuggcugugcugcaggcuuugg

SEQ ID NO: 627194 - RNA, 22 nt, Human
ccucccuuggccauagccagcc

SEQ ID NO: 627195 - RNA, 22 nt, Human
ccuggcugggccugauuucuca

SEQ ID NO: 627196 - RNA, 22 nt, Human
ggugagaguuaugauuccaauu

SEQ ID NO: 627197 - RNA, 22 nt, Human
aacaaauggaacacaaaucuuu

SEQ ID NO: 627198 - RNA, 22 nt, Human
gacacaaaguuugucagaaauu

SEQ ID NO: 627199 - RNA, 22 nt, Human
augaggccagggugccaugaaa

SEQ ID NO: 627200 - RNA, 22 nt, Human
ucucuuuagugcuuagacgucu

SEQ ID NO: 627201 - RNA, 22 nt, Human
uuagaucaauacuaaagaaguu

SEQ ID NO: 627202 - RNA, 22 nt, Human
agagcugugaaaaugagguuug

SEQ ID NO: 627203 - RNA, 22 nt, Human
uauuuucuguggaggaccagau

SEQ ID NO: 627204 - RNA, 22 nt, Human
cacauauuguaguucaccagga

SEQ ID NO: 627205 - RNA, 22 nt, Human
ugagccagcuccuugccuguca

SEQ ID NO: 627206 - RNA, 22 nt, Human
gccuuccuuacaccugcucagc

SEQ ID NO: 627207 - RNA, 22 nt, Human
ucuaaagauguuuauugacaua

SEQ ID NO: 627208 - RNA, 22 nt, Human
cuuucucuggaggggagugguu

SEQ ID NO: 627209 - RNA, 22 nt, Human
aucuggagcucugcacaccugg

SEQ ID NO: 627210 - RNA, 22 nt, Human
aagcagaauuucccacuaguug

SEQ ID NO: 627211 - RNA, 22 nt, Human
acuggcccgggagcagaggccu

SEQ ID NO: 627212 - RNA, 22 nt, Human
gagcgggaggaacggcucgggc

SEQ ID NO: 627213 - RNA, 22 nt, Human
uaaugcuaacaucauaucacug

SEQ ID NO: 627214 - RNA, 22 nt, Human
agcuuccuacaaccaucucaga

SEQ ID NO: 627215 - RNA, 22 nt, Human
gcagagguggaugcaauugggg

SEQ ID NO: 627216 - RNA, 22 nt, Human
cuggaucugaacaucgguauca

SEQ ID NO: 627217 - RNA, 22 nt, Human
uggagacagagauagccaauug

SEQ ID NO: 627218 - RNA, 22 nt, Human
gccuccuaccacacccucaguc

SEQ ID NO: 627219 - RNA, 22 nt, Human
agcagacaggcugccacagugc

SEQ ID NO: 627220 - RNA, 22 nt, Human
ggacagugugggccaucucacu

SEQ ID NO: 627221 - RNA, 20 nt, Human
ugcuuccuggccacugcggg

SEQ ID NO: 627222 - RNA, 22 nt, Human
acugaaaguccagcaugguaca

SEQ ID NO: 627223 - RNA, 22 nt, Human
ugucaucugcggguggcacugc

SEQ ID NO: 627224 - RNA, 16 nt, Human
augaggcauaggcugc

SEQ ID NO: 627225 - RNA, 22 nt, Human
ugagcuccuggucacaauuauc

SEQ ID NO: 627226 - RNA, 22 nt, Human
acaugcaaaaauauauuuauga

SEQ ID NO: 627227 - RNA, 22 nt, Human
ggcccaaaccaaguaccucaaa

SEQ ID NO: 627228 - RNA, 22 nt, Human
auagccagcauauagcagggag

SEQ ID NO: 627229 - RNA, 22 nt, Human
cucagaagaacaaaggcucuac

SEQ ID NO: 627230 - RNA, 22 nt, Human
ggcuucugccacgagagggaag

SEQ ID NO: 627231 - RNA, 19 nt, Human
aguguauuuuuuucuguag

SEQ ID NO: 627232 - RNA, 22 nt, Human
uguggccuggaaggggcugcuc

SEQ ID NO: 627233 - RNA, 22 nt, Human
ggggagcagaagcagcaacaac

SEQ ID NO: 627234 - RNA, 22 nt, Human
ugcauccuuccauggguuucaa

SEQ ID NO: 627235 - RNA, 22 nt, Human
ucauaaagauacuaagugaguu

SEQ ID NO: 627236 - RNA, 22 nt, Human
uggacaaauagcaugacacuug

SEQ ID NO: 627237 - RNA, 23 nt, Human
aaacuguugcuucaauguauccu

SEQ ID NO: 627238 - RNA, 22 nt, Human
uagaaaccaucucacugcucag

SEQ ID NO: 627239 - RNA, 22 nt, Human
ucuguggaguugaggaagguug

SEQ ID NO: 627240 - RNA, 22 nt, Human
agaccaugggcuccugggacau

SEQ ID NO: 627241 - RNA, 22 nt, Human
gcuucugggguucuggcaugcu

SEQ ID NO: 627242 - RNA, 22 nt, Human
ucaccaggauuccuaucaguag

SEQ ID NO: 627243 - RNA, 22 nt, Human
guccaggaaucaaaagauggaa

SEQ ID NO: 627244 - RNA, 22 nt, Human
cuuuccagaccuccuuguagcu

SEQ ID NO: 627245 - RNA, 22 nt, Human
auuccacaagaccauaaauuag

SEQ ID NO: 627246 - RNA, 20 nt, Human
uaaaugcaucuguucaacug

SEQ ID NO: 627247 - RNA, 22 nt, Human
ggcuagggaucuagaccaggac

SEQ ID NO: 627248 - RNA, 20 nt, Human
uuuaccaacucaccaguauc

SEQ ID NO: 627249 - RNA, 22 nt, Human
aagggaggccagagguuuugca

SEQ ID NO: 627250 - RNA, 22 nt, Human
cagcugaauucuucagacucca

SEQ ID NO: 627251 - RNA, 22 nt, Human
gaggagcugagccacguccugg

SEQ ID NO: 627252 - RNA, 22 nt, Human
gugggaagagccaauuggggua

SEQ ID NO: 627253 - RNA, 22 nt, Human
uucaaagauuagcauacgcaau

SEQ ID NO: 627254 - RNA, 22 nt, Human
acuggcuuggcaggaggaagau

SEQ ID NO: 627255 - RNA, 22 nt, Human
uggcacaggagcacugcccugg

SEQ ID NO: 627256 - RNA, 22 nt, Human
cagugagggaagaucucagcac

SEQ ID NO: 627257 - RNA, 22 nt, Human
agcacagaugugaguggaggcu

SEQ ID NO: 627258 - RNA, 19 nt, Human
aggagaagacucucucccc

SEQ ID NO: 627259 - RNA, 22 nt, Human
aaaugcagcagcuaauugaaaa

SEQ ID NO: 627260 - RNA, 22 nt, Human
ucccacagguggagcuugcagu

SEQ ID NO: 627261 - RNA, 21 nt, Human
ucugauguguuuaaugguggg

SEQ ID NO: 627262 - RNA, 22 nt, Human
cgcccagggcaggaggccgcuc

SEQ ID NO: 627263 - RNA, 17 nt, Human
aaauaugaccucaaagu

SEQ ID NO: 627264 - RNA, 22 nt, Human
ggccauggaccccgagcugacc

SEQ ID NO: 627265 - RNA, 22 nt, Human
guuacagugcuuggcaauaagu

SEQ ID NO: 627266 - RNA, 22 nt, Human
aggagggcaggcuggcugccua

SEQ ID NO: 627267 - RNA, 22 nt, Human
uaaagcuagccaaccacugucu

SEQ ID NO: 627268 - RNA, 22 nt, Human
agcagcagagcucuggucugca

SEQ ID NO: 627269 - RNA, 22 nt, Human
cugcuucuagcaccaagucccu

SEQ ID NO: 627270 - RNA, 22 nt, Human
ugccagagaggagaaagcauuu

SEQ ID NO: 627271 - RNA, 22 nt, Human
uucccugguuaaccauuuucug

SEQ ID NO: 627272 - RNA, 22 nt, Human
ugcauugcaguuaacucaguau

SEQ ID NO: 627273 - RNA, 22 nt, Human
acagaagaccaagaaagcuucc

SEQ ID NO: 627274 - RNA, 19 nt, Human
uugaaaauauggaucugag

SEQ ID NO: 627275 - RNA, 22 nt, Human
ggguccagguuuagucauuugu

SEQ ID NO: 627276 - RNA, 22 nt, Human
caucauuuaauuauaggggcug

SEQ ID NO: 627277 - RNA, 22 nt, Human
auuuucuucucucccuggcugc

SEQ ID NO: 627278 - RNA, 22 nt, Human
cacccaguaagcaugaggcccu

SEQ ID NO: 627279 - RNA, 22 nt, Human
cugccagguuggcgcucgcucu

SEQ ID NO: 627280 - RNA, 22 nt, Human
aauguaugaagguuccaguuuc

SEQ ID NO: 627281 - RNA, 22 nt, Human
uagugaauuccuaauaggaaga

SEQ ID NO: 627282 - RNA, 22 nt, Human
ucaaauucuauucuauacucag

SEQ ID NO: 627283 - RNA, 22 nt, Human
auucuccacacauccagaccuu

SEQ ID NO: 627284 - RNA, 22 nt, Human
cuaaacauguagcuuuuguggu

SEQ ID NO: 627285 - RNA, 22 nt, Human
uccuuuaacuugauuauuuuca

SEQ ID NO: 627286 - RNA, 22 nt, Human
uuuauuccaugugucuaugacc

SEQ ID NO: 627287 - RNA, 22 nt, Human
acacugugacaaaggcuguucu

SEQ ID NO: 627288 - RNA, 21 nt, Human
gccucuccaaauccugccuuc

SEQ ID NO: 627289 - RNA, 22 nt, Human
gaguucucaagcaaucaaagag

SEQ ID NO: 627290 - RNA, 22 nt, Human
ggugccagugggucucaggaua

SEQ ID NO: 627291 - RNA, 22 nt, Human
ucagcuugugggucagccucug

SEQ ID NO: 627292 - RNA, 22 nt, Human
cuguguaugacuccagagggua

SEQ ID NO: 627293 - RNA, 21 nt, Human
auggacaauugagugucuguc

SEQ ID NO: 627294 - RNA, 22 nt, Human
uccugagcuucaaaacacuuug

SEQ ID NO: 627295 - RNA, 23 nt, Human
gagcugaguguagggagacuagg

SEQ ID NO: 627296 - RNA, 22 nt, Human
ccuuuuaagggagacuagagau

SEQ ID NO: 627297 - RNA, 22 nt, Human
agggggugcauuugugaaugaa

SEQ ID NO: 627298 - RNA, 22 nt, Human
ggcuccagauguccccuggcaa

SEQ ID NO: 627299 - RNA, 22 nt, Human
uccuggcccaaucugcccauga

SEQ ID NO: 627300 - RNA, 22 nt, Human
gcccagaguuugaagauacagu

SEQ ID NO: 627301 - RNA, 22 nt, Human
acucacugggucccggaagccc

SEQ ID NO: 627302 - RNA, 20 nt, Human
cuuuaguuacacguuuccuc

SEQ ID NO: 627303 - RNA, 22 nt, Human
ggcugucucugugacugccacc

SEQ ID NO: 627304 - RNA, 19 nt, Human
gcucugagaggggcauggg

SEQ ID NO: 627305 - RNA, 22 nt, Human
cauuagggacugaggaauaagg

SEQ ID NO: 627306 - RNA, 22 nt, Human
ccacuguauuuuggaagcagau

SEQ ID NO: 627307 - RNA, 22 nt, Human
uuguauuucuccacuuucuguu

SEQ ID NO: 627308 - RNA, 22 nt, Human
uacugucuauacacuugauuac

SEQ ID NO: 627309 - RNA, 22 nt, Human
gcccagaaagacugccuaacag

SEQ ID NO: 627310 - RNA, 22 nt, Human
gaggacagagccgccuggcaag

SEQ ID NO: 627311 - RNA, 22 nt, Human
cugaggccucguuggcuggaac

SEQ ID NO: 627312 - RNA, 22 nt, Human
aacacugaagaccagguaauuu

SEQ ID NO: 627313 - RNA, 22 nt, Human
ucuccagaaauggggcugggga

SEQ ID NO: 627314 - RNA, 22 nt, Human
cugagauggccacugggucuca

SEQ ID NO: 627315 - RNA, 22 nt, Human
caaugaaagcaacugccuauaa

SEQ ID NO: 627316 - RNA, 22 nt, Human
uacugaaacuuuucuucaacug

SEQ ID NO: 627317 - RNA, 22 nt, Human
ggcaagaaggcuucagguagcu

SEQ ID NO: 627318 - RNA, 22 nt, Human
cucugcaggcacccaggguggg

SEQ ID NO: 627319 - RNA, 22 nt, Human
ugccugccucuggagcccaucc

SEQ ID NO: 627320 - RNA, 22 nt, Human
acccuggcagccuucuguccug

SEQ ID NO: 627321 - RNA, 22 nt, Human
ucuaacuaacuacaguaagagg

SEQ ID NO: 627322 - RNA, 22 nt, Human
uacauccaaaguugaggugccu

SEQ ID NO: 627323 - RNA, 22 nt, Human
aagagcuggucacagguccauu

SEQ ID NO: 627324 - RNA, 18 nt, Human
aagaggaggaaacccagg

SEQ ID NO: 627325 - RNA, 22 nt, Human
auucaguagaaguuagcuauua

SEQ ID NO: 627326 - RNA, 22 nt, Human
uccucuuccuucuguccaaaug

SEQ ID NO: 627327 - RNA, 22 nt, Human
uuuuauucucaagacaauggga

SEQ ID NO: 627328 - RNA, 21 nt, Human
gcagcuggucucagagcuugc

SEQ ID NO: 627329 - RNA, 22 nt, Human
gaucugaaucaauagaauaacu

SEQ ID NO: 627330 - RNA, 22 nt, Human
gggaucugaguaggcagaagcu

SEQ ID NO: 627331 - RNA, 22 nt, Human
aaacacugaaaauuuuggucau

SEQ ID NO: 627332 - RNA, 20 nt, Human
ugauuuucugaaacagcaca

SEQ ID NO: 627333 - RNA, 21 nt, Human
gcaaauguucaggaaaaaaga

SEQ ID NO: 627334 - RNA, 21 nt, Human
aagaaguuuggauuuuguccu

SEQ ID NO: 627335 - RNA, 22 nt, Human
guccugaaugccuuuaggcaga

SEQ ID NO: 627336 - RNA, 22 nt, Human
uuuagaguugguccccugugag

SEQ ID NO: 627337 - RNA, 22 nt, Human
gggcgagggcgaaagcgagagc

SEQ ID NO: 627338 - RNA, 22 nt, Human
cauucauacaaguuuguuucau

SEQ ID NO: 627339 - RNA, 22 nt, Human
gaaaacuauuggccuagaacaa

SEQ ID NO: 627340 - RNA, 22 nt, Human
gagcucugaaaaagcuugccuu

SEQ ID NO: 627341 - RNA, 22 nt, Human
aucaagaguauugacaagacca

SEQ ID NO: 627342 - RNA, 21 nt, Human
gcaggggauagaaauggucug

SEQ ID NO: 627343 - RNA, 22 nt, Human
ccugcccagcuucccgagugca

SEQ ID NO: 627344 - RNA, 22 nt, Human
gggcauggggcggaccugguuc

SEQ ID NO: 627345 - RNA, 22 nt, Human
ucaaaaccuaggcucucugcuu

SEQ ID NO: 627346 - RNA, 22 nt, Human
gcaugcagagaauaccugugau

SEQ ID NO: 627347 - RNA, 22 nt, Human
gcuugccuaucugguggucguu

SEQ ID NO: 627348 - RNA, 22 nt, Human
caggugggagcgaggagcuacu

SEQ ID NO: 627349 - RNA, 22 nt, Human
ggccugagcuugggcagcguau

SEQ ID NO: 627350 - RNA, 22 nt, Human
uguauguguccuaauucaagca

SEQ ID NO: 627351 - RNA, 22 nt, Human
cuguuauuuuauaauucaagaa

SEQ ID NO: 627352 - RNA, 22 nt, Human
aaacugucaccuaauguauuuu

SEQ ID NO: 627353 - RNA, 22 nt, Human
ucccuacuguuagggacucagc

SEQ ID NO: 627354 - RNA, 22 nt, Human
gggcugcugcccaggaggcacc

SEQ ID NO: 627355 - RNA, 22 nt, Human
uuugacagagcucuuagucucu

SEQ ID NO: 627356 - RNA, 22 nt, Human
uccuucaguuaucacaguacug

SEQ ID NO: 627357 - RNA, 22 nt, Human
agaugcugccaggccccucagu

SEQ ID NO: 627358 - RNA, 22 nt, Human
auuucagcccaguaugagcccc

SEQ ID NO: 627359 - RNA, 22 nt, Human
ucuggcuugcuggcuugguccc

SEQ ID NO: 627360 - RNA, 22 nt, Human
augacuucugcaaggucauuug

SEQ ID NO: 627361 - RNA, 22 nt, Human
cuuccaaagcacuuuauggacc

SEQ ID NO: 627362 - RNA, 22 nt, Human
agaaauguuguggguuuuguua

SEQ ID NO: 627363 - RNA, 22 nt, Human
gaggaagaaucaggguggugag

SEQ ID NO: 627364 - RNA, 22 nt, Human
aaaauugaagugaucaggaacu

SEQ ID NO: 627365 - RNA, 22 nt, Human
gagagguagaggcucugcuuaa

SEQ ID NO: 627366 - RNA, 22 nt, Human
aguuuggaagaauuuggucugu

SEQ ID NO: 627367 - RNA, 22 nt, Human
caugccaguuuugagaugcacc

SEQ ID NO: 627368 - RNA, 22 nt, Human
gcugcccuguuuagccaggguu

SEQ ID NO: 627369 - RNA, 22 nt, Human
aucagacaauuguugaguacug

SEQ ID NO: 627370 - RNA, 22 nt, Human
gggcacugugcuaggugcugag

SEQ ID NO: 627371 - RNA, 22 nt, Human
agagauggagagcacuggggcu

SEQ ID NO: 627372 - RNA, 22 nt, Human
ugcaggugguccuuccucugcu

SEQ ID NO: 627373 - RNA, 22 nt, Human
aauccagcugugucacagguga

SEQ ID NO: 627374 - RNA, 22 nt, Human
ugcuauuagaagccaugcuguu

SEQ ID NO: 627375 - RNA, 22 nt, Human
ugcagccuuuagaaguucagau

SEQ ID NO: 627376 - RNA, 22 nt, Human
aggucugaucaugggcccacuu

SEQ ID NO: 627377 - RNA, 22 nt, Human
guggaauuuuuaccuaugaaug

SEQ ID NO: 627378 - RNA, 22 nt, Human
gccacugucauacccuggcaau

SEQ ID NO: 627379 - RNA, 22 nt, Human
ugacuuuaagcuaucugauucu

SEQ ID NO: 627380 - RNA, 22 nt, Human
ugcuucuggcagauugagugag

SEQ ID NO: 627381 - RNA, 22 nt, Human
ugaaaauauaguuuuccagacu

SEQ ID NO: 627382 - RNA, 22 nt, Human
cagggagaaaucuccaggaggu

SEQ ID NO: 627383 - RNA, 22 nt, Human
gugggugugagugacggcgucc

SEQ ID NO: 627384 - RNA, 22 nt, Human
cuugaugacucaggaggaggag

SEQ ID NO: 627385 - RNA, 22 nt, Human
ccagcaggcagucauauccuuu

SEQ ID NO: 627386 - RNA, 22 nt, Human
acagaggccccgugggagagcc

SEQ ID NO: 627387 - RNA, 22 nt, Human
gcugggucuggcugugagccgg

SEQ ID NO: 627388 - RNA, 22 nt, Human
augauguugguuuaauuugagu

SEQ ID NO: 627389 - RNA, 22 nt, Human
caggcauguggcccagggguga

SEQ ID NO: 627390 - RNA, 22 nt, Human
uaaaacuuaacuauccagauua

SEQ ID NO: 627391 - RNA, 22 nt, Human
guaaaugugcuucuuuuaacuu

SEQ ID NO: 627392 - RNA, 22 nt, Human
caucaaaguugguauauuugca

SEQ ID NO: 627393 - RNA, 23 nt, Human
gagagcugacugucaagacuguu

SEQ ID NO: 627394 - RNA, 22 nt, Human
uauucucugcagcugaauguuu

SEQ ID NO: 627395 - RNA, 22 nt, Human
uucaacuuuggagauuuaauaa

SEQ ID NO: 627396 - RNA, 21 nt, Human
uuacaugguuuaucauaugga

SEQ ID NO: 627397 - RNA, 22 nt, Human
gugugugugccugcacacacac

SEQ ID NO: 627398 - RNA, 22 nt, Human
gcugucugcugugcacugagca

SEQ ID NO: 627399 - RNA, 22 nt, Human
acauucuagauauguuauauuu

SEQ ID NO: 627400 - RNA, 22 nt, Human
caucuguaaaguaggaauauug

SEQ ID NO: 627401 - RNA, 22 nt, Human
auccugggcagugugucacucu

SEQ ID NO: 627402 - RNA, 22 nt, Human
ccccaccaccaaggcucaguuu

SEQ ID NO: 627403 - RNA, 22 nt, Human
aaauuagucgguuuaggaauuu

SEQ ID NO: 627404 - RNA, 22 nt, Human
uaacuuugauaagaaucaggga

SEQ ID NO: 627405 - RNA, 22 nt, Human
ugcagaggcuggcucgccgggu

SEQ ID NO: 627406 - RNA, 22 nt, Human
ugggagaagacguacuuuagac

SEQ ID NO: 627407 - RNA, 22 nt, Human
gcccagaguucaaggcugcagu

SEQ ID NO: 627408 - RNA, 22 nt, Human
gcuuauacucuggagaauaaga

SEQ ID NO: 627409 - RNA, 22 nt, Human
guuuacacauaacuccuaucaa

SEQ ID NO: 627410 - RNA, 21 nt, Human
aagcuguguuccacugauagc

SEQ ID NO: 627411 - RNA, 22 nt, Human
augugucucuaccaaugcaauu

SEQ ID NO: 627412 - RNA, 22 nt, Human
ugggggugugccagggaccucc

SEQ ID NO: 627413 - RNA, 22 nt, Human
gccuccaggguagaggaggaag

SEQ ID NO: 627414 - RNA, 22 nt, Human
gccuguggccgacugagagccu

SEQ ID NO: 627415 - RNA, 22 nt, Human
cugcugugugcuuacuuggguu

SEQ ID NO: 627416 - RNA, 22 nt, Human
ugagagaguaauugagugguaa

SEQ ID NO: 627417 - RNA, 22 nt, Human
cuccaggaccagggcuccugga

SEQ ID NO: 627418 - RNA, 22 nt, Human
gaggaggcacuugagcagaugu

SEQ ID NO: 627419 - RNA, 22 nt, Human
cacagcuucuuccauuccacuc

SEQ ID NO: 627420 - RNA, 18 nt, Human
ccucagggagagagacgc

SEQ ID NO: 627421 - RNA, 23 nt, Human
aguguuccaguugguugagagug

SEQ ID NO: 627422 - RNA, 22 nt, Human
uggaagagcaggcagacaaugc

SEQ ID NO: 627423 - RNA, 22 nt, Human
gcuggaggcaguucagacacca

SEQ ID NO: 627424 - RNA, 22 nt, Human
ucccagagcccaaguuggagag

SEQ ID NO: 627425 - RNA, 22 nt, Human
uucuauguggauauagaacugc

SEQ ID NO: 627426 - RNA, 22 nt, Human
agauggggcucaguguggaggc

SEQ ID NO: 627427 - RNA, 20 nt, Human
cugcaggguuagaggcucca

SEQ ID NO: 627428 - RNA, 22 nt, Human
cugggcuacguguugacagcau

SEQ ID NO: 627429 - RNA, 22 nt, Human
uuuaucugcauucugaccaucu

SEQ ID NO: 627430 - RNA, 22 nt, Human
gugaccagcccauagagaggcg

SEQ ID NO: 627431 - RNA, 22 nt, Human
gcaggcacaugggcgggucugg

SEQ ID NO: 627432 - RNA, 22 nt, Human
ugguuccucaagcgcuggcggc

SEQ ID NO: 627433 - RNA, 22 nt, Human
agcacacaggacuugauucaug

SEQ ID NO: 627434 - RNA, 17 nt, Human
aacaauaggauguguau

SEQ ID NO: 627435 - RNA, 22 nt, Human
cagcuuuguggccuugaccucg

SEQ ID NO: 627436 - RNA, 22 nt, Human
gccaggcaggccacgcuguguu

SEQ ID NO: 627437 - RNA, 22 nt, Human
cucuggccagagccugcgggaa

SEQ ID NO: 627438 - RNA, 22 nt, Human
agacaccagaaucuguugagca

SEQ ID NO: 627439 - RNA, 21 nt, Human
gcaggcacucuagaggagcug

SEQ ID NO: 627440 - RNA, 22 nt, Human
aagagcaggcugucaauggggc

SEQ ID NO: 627441 - RNA, 22 nt, Human
aaaacaggugucagcaaacuau

SEQ ID NO: 627442 - RNA, 22 nt, Human
cauuugcaagagauaaauguuu

SEQ ID NO: 627443 - RNA, 22 nt, Human
acacauauguggcaacuguaga

SEQ ID NO: 627444 - RNA, 22 nt, Human
augcauauucuuagccccuccu

SEQ ID NO: 627445 - RNA, 21 nt, Human
acagucuccccagaucucucc

SEQ ID NO: 627446 - RNA, 21 nt, Human
ugcauggaggaaaguuauaga

SEQ ID NO: 627447 - RNA, 22 nt, Human
accccaggucuccaggcucugg

SEQ ID NO: 627448 - RNA, 22 nt, Human
auguguacacuggacuucugau

SEQ ID NO: 627449 - RNA, 22 nt, Human
auuucuguugcuuauaaauuac

SEQ ID NO: 627450 - RNA, 22 nt, Human
cggccgcguccagggccgccag

SEQ ID NO: 627451 - RNA, 22 nt, Human
uuccacucuaugauagaagggu

SEQ ID NO: 627452 - RNA, 22 nt, Human
uuucagaaauuguuauuauucu

SEQ ID NO: 627453 - RNA, 22 nt, Human
uggcccuguccucauuucaucu

SEQ ID NO: 627454 - RNA, 22 nt, Human
uccugccuagcaggugaccuau

SEQ ID NO: 627455 - RNA, 22 nt, Human
gcagcugagcgugaggaagagu

SEQ ID NO: 627456 - RNA, 22 nt, Human
ucagaggcaaagaacuuuauua

SEQ ID NO: 627457 - RNA, 22 nt, Human
cccaugaacugucuugcuguag

SEQ ID NO: 627458 - RNA, 22 nt, Human
gacacagaccaccaggcccugg

SEQ ID NO: 627459 - RNA, 22 nt, Human
gccaccagugggggccugggca

SEQ ID NO: 627460 - RNA, 22 nt, Human
ucugagguuauugucugccauu

SEQ ID NO: 627461 - RNA, 22 nt, Human
uaauccugcuucuucucccuuu

SEQ ID NO: 627462 - RNA, 22 nt, Human
ugugugucauuuaggguggagc

SEQ ID NO: 627463 - RNA, 22 nt, Human
guggcagguuccguagacagca

SEQ ID NO: 627464 - RNA, 22 nt, Human
aucuguuaacaaagaagacagc

SEQ ID NO: 627465 - RNA, 22 nt, Human
agccaggguuagaagauaguca

SEQ ID NO: 627466 - RNA, 22 nt, Human
cucccugaaauucagaugccuc

SEQ ID NO: 627467 - RNA, 22 nt, Human
cccaaccccaacuuccuauguu

SEQ ID NO: 627468 - RNA, 21 nt, Human
ugugugggcauaucugcugca

SEQ ID NO: 627469 - RNA, 22 nt, Human
uguauguguggauagauguaua

SEQ ID NO: 627470 - RNA, 22 nt, Human
uuucaaagguuuugucaugucu

SEQ ID NO: 627471 - RNA, 22 nt, Human
gagcaguugggcucuaggaagu

SEQ ID NO: 627472 - RNA, 22 nt, Human
aucuucuggucaaauuuuugca

SEQ ID NO: 627473 - RNA, 22 nt, Human
ggaggccaugaggcucuaggug

SEQ ID NO: 627474 - RNA, 22 nt, Human
cugcuggaaguuugcuguggau

SEQ ID NO: 627475 - RNA, 22 nt, Human
uggagguguauaagguagcuuc

SEQ ID NO: 627476 - RNA, 21 nt, Human
uugaaaguaaauucagcagcu

SEQ ID NO: 627477 - RNA, 21 nt, Human
cucugcccagggccuccugcc

SEQ ID NO: 627478 - RNA, 22 nt, Human
uagcuuuaccauagaagaguau

SEQ ID NO: 627479 - RNA, 22 nt, Human
agaugagggguagaaaggacuu

SEQ ID NO: 627480 - RNA, 19 nt, Human
accagcccacucccaguuu

SEQ ID NO: 627481 - RNA, 22 nt, Human
gacugcagugaaggcacauggg

SEQ ID NO: 627482 - RNA, 22 nt, Human
ccuuagugugccugaggcagau

SEQ ID NO: 627483 - RNA, 22 nt, Human
ggaggugggagacauaggcggc

SEQ ID NO: 627484 - RNA, 22 nt, Human
ccugugugaagguuaggcaggu

SEQ ID NO: 627485 - RNA, 22 nt, Human
cucuuccuuaagacuauaaaga

SEQ ID NO: 627486 - RNA, 22 nt, Human
ggcagcucgaugacuucugcau

SEQ ID NO: 627487 - RNA, 22 nt, Human
aggaggccgggauucuggagau

SEQ ID NO: 627488 - RNA, 22 nt, Human
ugcauuuguucagugaaauguu

SEQ ID NO: 627489 - RNA, 22 nt, Human
acaugcacggcaccaucuucug

SEQ ID NO: 627490 - RNA, 22 nt, Human
caugaguaugauuauacccagu

SEQ ID NO: 627491 - RNA, 22 nt, Human
ugcaugcaaagugucugcuuug

SEQ ID NO: 627492 - RNA, 22 nt, Human
uagaaguugcucaauaaauguu

SEQ ID NO: 627493 - RNA, 22 nt, Human
aaggcuuuaaauaaccguaaag

SEQ ID NO: 627494 - RNA, 22 nt, Human
guuccacagagucucacuauga

SEQ ID NO: 627495 - RNA, 21 nt, Human
ggagaaggacaauguugagua

SEQ ID NO: 627496 - RNA, 22 nt, Human
cagggccauaucuugugcacca

SEQ ID NO: 627497 - RNA, 22 nt, Human
gcuucucccuacagaugucagu

SEQ ID NO: 627498 - RNA, 22 nt, Human
cccucugcaggcuggaccugcc

SEQ ID NO: 627499 - RNA, 22 nt, Human
ucagaaaagaccacauuauucu

SEQ ID NO: 627500 - RNA, 22 nt, Human
ugcuccugagguuggagaucca

SEQ ID NO: 627501 - RNA, 22 nt, Human
uuucaaggcuaauccacaguau

SEQ ID NO: 627502 - RNA, 22 nt, Human
acugggccuguacagagaaaac

SEQ ID NO: 627503 - RNA, 22 nt, Human
augcauauuuucuguuggugac

SEQ ID NO: 627504 - RNA, 17 nt, Human
agucauauugugcaguu

SEQ ID NO: 627505 - RNA, 22 nt, Human
ggggauggauuccgggucccug

SEQ ID NO: 627506 - RNA, 22 nt, Human
uccugagagcagcugcuuugga

SEQ ID NO: 627507 - RNA, 22 nt, Human
cugugcguugugaaauguuuag

SEQ ID NO: 627508 - RNA, 22 nt, Human
gcugggccagccagacauguga

SEQ ID NO: 627509 - RNA, 22 nt, Human
aaacagcuaaguacauucaagg

SEQ ID NO: 627510 - RNA, 22 nt, Human
uugacuuuaaagcuuugucucu

SEQ ID NO: 627511 - RNA, 21 nt, Human
cugcuuuacuucagaggaucu

SEQ ID NO: 627512 - RNA, 22 nt, Human
uucauugcauuccagccugggu

SEQ ID NO: 627513 - RNA, 22 nt, Human
uccagccccuuuuacucauuca

SEQ ID NO: 627514 - RNA, 22 nt, Human
aggcccagggcugcucucugaa

SEQ ID NO: 627515 - RNA, 22 nt, Human
gcacacaugcaugcacaggagu

SEQ ID NO: 627516 - RNA, 22 nt, Human
ucauaaaaugcuccugauauug

SEQ ID NO: 627517 - RNA, 22 nt, Human
acugagguauaauugacauaac

SEQ ID NO: 627518 - RNA, 22 nt, Human
caaaauagauguuaaccuggaa

SEQ ID NO: 627519 - RNA, 22 nt, Human
cugagaguagcuggagaacauu

SEQ ID NO: 627520 - RNA, 23 nt, Human
uguaggcuaagucccauaaauca

SEQ ID NO: 627521 - RNA, 22 nt, Human
acagcaguuacugaaauaaagu

SEQ ID NO: 627522 - RNA, 22 nt, Human
caauacugaguuuacauucauc

SEQ ID NO: 627523 - RNA, 22 nt, Human
agcaccaggauauuguuggaga

SEQ ID NO: 627524 - RNA, 22 nt, Human
aggcuggaaaucacuagauucc

SEQ ID NO: 627525 - RNA, 18 nt, Human
aggugcagccucugaggc

SEQ ID NO: 627526 - RNA, 23 nt, Human
uuuaaccuuggucaagaauuucc

SEQ ID NO: 627527 - RNA, 22 nt, Human
agccucuccagagccuggcaga

SEQ ID NO: 627528 - RNA, 22 nt, Human
uagauaaauuagaaaguuuacu

SEQ ID NO: 627529 - RNA, 20 nt, Human
ccugggcucaaagcauccuc

SEQ ID NO: 627530 - RNA, 22 nt, Human
caucugcuguaauuaacaagcc

SEQ ID NO: 627531 - RNA, 22 nt, Human
uauguauccguguguguacaga

SEQ ID NO: 627532 - RNA, 22 nt, Human
cagagcuguugcggggcuuggc

SEQ ID NO: 627533 - RNA, 22 nt, Human
uuuaucugagcugauagauagu

SEQ ID NO: 627534 - RNA, 22 nt, Human
ggucagagccguuagcauucag

SEQ ID NO: 627535 - RNA, 22 nt, Human
uucuguucugauacuuguuucu

SEQ ID NO: 627536 - RNA, 22 nt, Human
ggucuuucuuugauaguggaga

SEQ ID NO: 627537 - RNA, 23 nt, Human
ugaguguggggacagugguuugc

SEQ ID NO: 627538 - RNA, 22 nt, Human
gcuccagcucguggcucccagc

SEQ ID NO: 627539 - RNA, 22 nt, Human
cugaagcuuuacuucaaauaca

SEQ ID NO: 627540 - RNA, 22 nt, Human
ucuguauauauuaaugaaauuc

SEQ ID NO: 627541 - RNA, 22 nt, Human
cucagaagccuucagucuuggc

SEQ ID NO: 627542 - RNA, 22 nt, Human
ccugagagcagcuuccugcuua

SEQ ID NO: 627543 - RNA, 22 nt, Human
aggugccagaugcacagcugaa

SEQ ID NO: 627544 - RNA, 22 nt, Human
ugacauuuaucaaagaaauggu

SEQ ID NO: 627545 - RNA, 22 nt, Human
acaggacuuaagucauuuauaa

SEQ ID NO: 627546 - RNA, 22 nt, Human
cggaagcguucucagcaggggc

SEQ ID NO: 627547 - RNA, 22 nt, Human
acauuucuuucuauucaguagc

SEQ ID NO: 627548 - RNA, 22 nt, Human
uuaaacacuggggguuaaugca

SEQ ID NO: 627549 - RNA, 22 nt, Human
cccaaaggcuguacuuguaacc

SEQ ID NO: 627550 - RNA, 22 nt, Human
ccuggcucccggaacagggucu

SEQ ID NO: 627551 - RNA, 22 nt, Human
uacaucuuugucuaugaccagc

SEQ ID NO: 627552 - RNA, 22 nt, Human
acgggugguaaugagaaaagga

SEQ ID NO: 627553 - RNA, 22 nt, Human
uguucuuuagcagaccauguug

SEQ ID NO: 627554 - RNA, 22 nt, Human
cucccugaccuggauuccaggc

SEQ ID NO: 627555 - RNA, 22 nt, Human
cccaggaggcagagauagcagu

SEQ ID NO: 627556 - RNA, 18 nt, Human
ugagaaacugacacaugg

SEQ ID NO: 627557 - RNA, 22 nt, Human
ucacagaagaugcuggauguug

SEQ ID NO: 627558 - RNA, 22 nt, Human
guccucugauuucuagguauau

SEQ ID NO: 627559 - RNA, 22 nt, Human
aaacugcugguugcuggccagc

SEQ ID NO: 627560 - RNA, 22 nt, Human
uccucugacucacagccugggg

SEQ ID NO: 627561 - RNA, 22 nt, Human
gagcugggaguuauagcauguu

SEQ ID NO: 627562 - RNA, 22 nt, Human
acaggaacgaauguacauuguu

SEQ ID NO: 627563 - RNA, 20 nt, Human
auuauucauacaugugugac

SEQ ID NO: 627564 - RNA, 22 nt, Human
cuuuacugaagugaagaccugg

SEQ ID NO: 627565 - RNA, 22 nt, Human
uaaggcaagagcagggucuuug

SEQ ID NO: 627566 - RNA, 22 nt, Human
agcagggguaacagaaggaaag

SEQ ID NO: 627567 - RNA, 22 nt, Human
ugggcaagggacaggccuggcu

SEQ ID NO: 627568 - RNA, 22 nt, Human
gaagauuuauaggagccuauua

SEQ ID NO: 627569 - RNA, 22 nt, Human
acaguuuuuucaacauuggaau

SEQ ID NO: 627570 - RNA, 22 nt, Human
gugguaauuuaauccuacacug

SEQ ID NO: 627571 - RNA, 22 nt, Human
uggguccugcacugcaagcacc

SEQ ID NO: 627572 - RNA, 22 nt, Human
gcugugugccaggggaaggcug

SEQ ID NO: 627573 - RNA, 21 nt, Human
ugaggcaggggugcuuuuguc

SEQ ID NO: 627574 - RNA, 22 nt, Human
cuuuggcaaugucauuuucaau

SEQ ID NO: 627575 - RNA, 22 nt, Human
uuugauaagagcugcugaaacu

SEQ ID NO: 627576 - RNA, 22 nt, Human
uuuaaacaaauaggauugccua

SEQ ID NO: 627577 - RNA, 22 nt, Human
gccagagaaugaaaaucagauu

SEQ ID NO: 627578 - RNA, 22 nt, Human
aaggagugcaugacucagagua

SEQ ID NO: 627579 - RNA, 22 nt, Human
uagaaaggcaagcgugaaauau

SEQ ID NO: 627580 - RNA, 23 nt, Human
uuccagaguccacaucugccacc

SEQ ID NO: 627581 - RNA, 22 nt, Human
agcaucuggugagggccuaguu

SEQ ID NO: 627582 - RNA, 22 nt, Human
cucuggaauugaccugggaggg

SEQ ID NO: 627583 - RNA, 22 nt, Human
uaugaguacaaggacucugucu

SEQ ID NO: 627584 - RNA, 22 nt, Human
gcuggccugcgagggcaggcug

SEQ ID NO: 627585 - RNA, 22 nt, Human
gugcugagauuacaggugugag

SEQ ID NO: 627586 - RNA, 22 nt, Human
gaggggagcaugaucuagauug

SEQ ID NO: 627587 - RNA, 22 nt, Human
gagauguuaacuacauagcuac

SEQ ID NO: 627588 - RNA, 22 nt, Human
guggcccuuggaguugugaccu

SEQ ID NO: 627589 - RNA, 22 nt, Human
ugggugugcccagauggugucc

SEQ ID NO: 627590 - RNA, 22 nt, Human
uacagugcauagaggcaugaua

SEQ ID NO: 627591 - RNA, 22 nt, Human
uaguuuccuaggcuguauuguu

SEQ ID NO: 627592 - RNA, 22 nt, Human
caguacuucuuggaaacuggau

SEQ ID NO: 627593 - RNA, 22 nt, Human
augacaaacccaggauguaaca

SEQ ID NO: 627594 - RNA, 22 nt, Human
aggucauuccagccauuccccu

SEQ ID NO: 627595 - RNA, 22 nt, Human
uuugaagucaggcuuucuaccc

SEQ ID NO: 627596 - RNA, 21 nt, Human
cagacccucuagaggccaccu

SEQ ID NO: 627597 - RNA, 22 nt, Human
agcagaugagccucaugacugg

SEQ ID NO: 627598 - RNA, 22 nt, Human
cucuguuuuucaauaguucuug

SEQ ID NO: 627599 - RNA, 22 nt, Human
cacauuuaagugcuuguucaga

SEQ ID NO: 627600 - RNA, 22 nt, Human
ugcacacaguucucaggaaaga

SEQ ID NO: 627601 - RNA, 22 nt, Human
acaggcagagucagguuggguu

SEQ ID NO: 627602 - RNA, 19 nt, Human
auacaagacuagcauuuac

SEQ ID NO: 627603 - RNA, 18 nt, Human
cucucugggugaggacaa

SEQ ID NO: 627604 - RNA, 22 nt, Human
agcucagaaccuccucauccca

SEQ ID NO: 627605 - RNA, 22 nt, Human
gaccugggguaagcuuggcaac

SEQ ID NO: 627606 - RNA, 22 nt, Human
aaaguuuguugcuuacaaagaa

SEQ ID NO: 627607 - RNA, 22 nt, Human
accaggcacucuuguggcagug

SEQ ID NO: 627608 - RNA, 22 nt, Human
uucccucccuggcugccauuuc

SEQ ID NO: 627609 - RNA, 22 nt, Human
cuuuaauucagauuugaaggga

SEQ ID NO: 627610 - RNA, 22 nt, Human
aauggcuuagugcuucacuucu

SEQ ID NO: 627611 - RNA, 22 nt, Human
aagcugccagauucagucugcu

SEQ ID NO: 627612 - RNA, 22 nt, Human
guccugggaacuggacagcuaa

SEQ ID NO: 627613 - RNA, 22 nt, Human
uauagcuaaggucagacuguuu

SEQ ID NO: 627614 - RNA, 22 nt, Human
acagagcuaauguugcauaggc

SEQ ID NO: 627615 - RNA, 22 nt, Human
gcaggcaccgcggcggcagguu

SEQ ID NO: 627616 - RNA, 22 nt, Human
ggaaacacaugaucagacaucu

SEQ ID NO: 627617 - RNA, 22 nt, Human
uuuaagcuguggcauuaauucu

SEQ ID NO: 627618 - RNA, 22 nt, Human
agaguuucuugugagcacugac

SEQ ID NO: 627619 - RNA, 22 nt, Human
acguguguuggucagggggccc

SEQ ID NO: 627620 - RNA, 22 nt, Human
uaagaacaagauguuccuguuu

SEQ ID NO: 627621 - RNA, 22 nt, Human
agcaaagcuaucucuauggaga

SEQ ID NO: 627622 - RNA, 22 nt, Human
caggagaagucucuagggggug

SEQ ID NO: 627623 - RNA, 22 nt, Human
uaccuucucuagaucuuuauuc

SEQ ID NO: 627624 - RNA, 22 nt, Human
ccucucccagggagagccugag

SEQ ID NO: 627625 - RNA, 22 nt, Human
agagcuuuucuguaauaacauc

SEQ ID NO: 627626 - RNA, 22 nt, Human
uacugcagauggccuuguucuu

SEQ ID NO: 627627 - RNA, 22 nt, Human
ucuuuaagaguucauuugcaug

SEQ ID NO: 627628 - RNA, 22 nt, Human
agagguaugugucagugcuuau

SEQ ID NO: 627629 - RNA, 22 nt, Human
accacaggggaggaaugaugcc

SEQ ID NO: 627630 - RNA, 22 nt, Human
augguuuauccuuuaccagucg

SEQ ID NO: 627631 - RNA, 16 nt, Human
cagaguguaaacagga

SEQ ID NO: 627632 - RNA, 20 nt, Human
ggcagcucacuacuuucugu

SEQ ID NO: 627633 - RNA, 22 nt, Human
uuccuggucugugccauucaga

SEQ ID NO: 627634 - RNA, 22 nt, Human
cagggcucuuccggagcaggga

SEQ ID NO: 627635 - RNA, 22 nt, Human
gguucacacuaagcuuaagugg

SEQ ID NO: 627636 - RNA, 22 nt, Human
uuguaguggccaaagaacucuu

SEQ ID NO: 627637 - RNA, 22 nt, Human
gcaacuuuagaaaaaucuauaa

SEQ ID NO: 627638 - RNA, 22 nt, Human
auugaacugauauuugguguag

SEQ ID NO: 627639 - RNA, 17 nt, Human
uucucugagcuguauug

SEQ ID NO: 627640 - RNA, 22 nt, Human
ucaggaagcauccugagguguc

SEQ ID NO: 627641 - RNA, 22 nt, Human
uugggucuacguagaaagaaca

SEQ ID NO: 627642 - RNA, 22 nt, Human
ccccagccuuccaugggaauug

SEQ ID NO: 627643 - RNA, 19 nt, Human
gccaggcucuuauucugug

SEQ ID NO: 627644 - RNA, 20 nt, Human
guauuagguguuccucuuuc

SEQ ID NO: 627645 - RNA, 22 nt, Human
uacuuaaaaauuaucaaagugg

SEQ ID NO: 627646 - RNA, 22 nt, Human
gcucuuuggauuccuuuacaaa

SEQ ID NO: 627647 - RNA, 22 nt, Human
cauggaucauaaaugugcuaaa

SEQ ID NO: 627648 - RNA, 22 nt, Human
agcccaggaaucugcaucuuga

SEQ ID NO: 627649 - RNA, 22 nt, Human
gcugagauuacgggcaugagcc

SEQ ID NO: 627650 - RNA, 22 nt, Human
ugggauucaccaugggcuucag

SEQ ID NO: 627651 - RNA, 22 nt, Human
auugagaaugcaaucuacuaug

SEQ ID NO: 627652 - RNA, 22 nt, Human
cagaugcugguaugggggaggu

SEQ ID NO: 627653 - RNA, 22 nt, Human
ggcaggucagguccaugaccaa

SEQ ID NO: 627654 - RNA, 22 nt, Human
uaugugaauacagcaguggaug

SEQ ID NO: 627655 - RNA, 22 nt, Human
cucccugugucuucacuuggcc

SEQ ID NO: 627656 - RNA, 22 nt, Human
uaaauguguuguggaugaaguu

SEQ ID NO: 627657 - RNA, 22 nt, Human
ugcuuuauucgacaucugguag

SEQ ID NO: 627658 - RNA, 22 nt, Human
aggcuacagauacagaggcuac

SEQ ID NO: 627659 - RNA, 22 nt, Human
ucaguguuaaucagugguaccu

SEQ ID NO: 627660 - RNA, 22 nt, Human
ucugcaugaugaacaaaugagc

SEQ ID NO: 627661 - RNA, 22 nt, Human
ucaggacaacaagacuuguuua

SEQ ID NO: 627662 - RNA, 22 nt, Human
cccucugagacagguagcucac

SEQ ID NO: 627663 - RNA, 22 nt, Human
ucugucaccccuguuucuggcu

SEQ ID NO: 627664 - RNA, 22 nt, Human
aggggagcuugccuggucaccc

SEQ ID NO: 627665 - RNA, 22 nt, Human
cugggccaucucucugcaagug

SEQ ID NO: 627666 - RNA, 18 nt, Human
cugucccauccucagguu

SEQ ID NO: 627667 - RNA, 22 nt, Human
guggggugggcugaguuaggcc

SEQ ID NO: 627668 - RNA, 22 nt, Human
augaaugaagaacaucugugcc

SEQ ID NO: 627669 - RNA, 22 nt, Human
aaacucagacacaguaucuguu

SEQ ID NO: 627670 - RNA, 22 nt, Human
auagccuugacucacagcucuu

SEQ ID NO: 627671 - RNA, 22 nt, Human
ucuagcugccccgaggcagggu

SEQ ID NO: 627672 - RNA, 23 nt, Human
ggguccagagacaggcaugggug

SEQ ID NO: 627673 - RNA, 22 nt, Human
caggccggugauucuggaugua

SEQ ID NO: 627674 - RNA, 22 nt, Human
uccaggcugcaaggccacaggg

SEQ ID NO: 627675 - RNA, 22 nt, Human
cucagcacacucccaucuaauu

SEQ ID NO: 627676 - RNA, 22 nt, Human
ccaaagugugggagaagaggua

SEQ ID NO: 627677 - RNA, 22 nt, Human
gcuggcauuacaggagagaacc

SEQ ID NO: 627678 - RNA, 22 nt, Human
ucucuggcagacaccucccuga

SEQ ID NO: 627679 - RNA, 22 nt, Human
uuggcccugagguuaucaucua

SEQ ID NO: 627680 - RNA, 18 nt, Human
ugcucuguuuaaugauuu

SEQ ID NO: 627681 - RNA, 22 nt, Human
auuacuguuggcaaagucuuau

SEQ ID NO: 627682 - RNA, 22 nt, Human
ccacugaguacccgauggcugc

SEQ ID NO: 627683 - RNA, 22 nt, Human
ggccuuggggaggauggugucc

SEQ ID NO: 627684 - RNA, 22 nt, Human
agcauaaaauaaauaguuugca

SEQ ID NO: 627685 - RNA, 22 nt, Human
cuggcagagucugcugucugca

SEQ ID NO: 627686 - RNA, 22 nt, Human
gacccaggccuggggcuuaagg

SEQ ID NO: 627687 - RNA, 22 nt, Human
ugggccagcucccugccccugg

SEQ ID NO: 627688 - RNA, 22 nt, Human
cagcaggcccaggugcugguga

SEQ ID NO: 627689 - RNA, 22 nt, Human
ugggacugcucuugcugggguc

SEQ ID NO: 627690 - RNA, 22 nt, Human
uugucugcaugauucuaggcag

SEQ ID NO: 627691 - RNA, 22 nt, Human
gugcuuuaauaagauuucacuu

SEQ ID NO: 627692 - RNA, 22 nt, Human
agccaugcaccuuacucuugcu

SEQ ID NO: 627693 - RNA, 22 nt, Human
agaaaaacacaaucgggccucc

SEQ ID NO: 627694 - RNA, 22 nt, Human
gguggggcccaggcaucugaug

SEQ ID NO: 627695 - RNA, 22 nt, Human
ugagaaauuacuucagugaugg

SEQ ID NO: 627696 - RNA, 22 nt, Human
uugugcuccugugagaaucuag

SEQ ID NO: 627697 - RNA, 22 nt, Human
cacuguuuucagucaguucuau

SEQ ID NO: 627698 - RNA, 19 nt, Human
uggcuuccaucucucucau

SEQ ID NO: 627699 - RNA, 22 nt, Human
cagggccaccguguuugcugcu

SEQ ID NO: 627700 - RNA, 22 nt, Human
ccugcugcuaugaaggugacag

SEQ ID NO: 627701 - RNA, 22 nt, Human
gcagggcggcccagagcaggcc

SEQ ID NO: 627702 - RNA, 22 nt, Human
gaacacaugauuauaaaugcua

SEQ ID NO: 627703 - RNA, 22 nt, Human
uccucccuguaccauuccucug

SEQ ID NO: 627704 - RNA, 22 nt, Human
gucugggcaggaaucugcauuc

SEQ ID NO: 627705 - RNA, 22 nt, Human
aauaaaucaauccuauugguag

SEQ ID NO: 627706 - RNA, 22 nt, Human
aaaaacugcaauuacuuuuguc

SEQ ID NO: 627707 - RNA, 22 nt, Human
uccuggagccaugauuccccuc

SEQ ID NO: 627708 - RNA, 22 nt, Human
gaauacacgcacgacacggggg

SEQ ID NO: 627709 - RNA, 22 nt, Human
aaggcugacguuuguguuuauu

SEQ ID NO: 627710 - RNA, 22 nt, Human
uuuuaaacuauagcuggaugcu

SEQ ID NO: 627711 - RNA, 22 nt, Human
ugaggccucauuuagggagagg

SEQ ID NO: 627712 - RNA, 22 nt, Human
cccuguccuuggcugugaggcu

SEQ ID NO: 627713 - RNA, 22 nt, Human
cuggcuguggauuaucacaggc

SEQ ID NO: 627714 - RNA, 22 nt, Human
ucaagaauuuggauaagaaaug

SEQ ID NO: 627715 - RNA, 22 nt, Human
gcagacagggcuacagagguac

SEQ ID NO: 627716 - RNA, 22 nt, Human
aagaguuuucuauaaucuuggc

SEQ ID NO: 627717 - RNA, 22 nt, Human
uuuuuagauuacucagccacca

SEQ ID NO: 627718 - RNA, 22 nt, Human
guguaacuugcuggaaaaacua

SEQ ID NO: 627719 - RNA, 18 nt, Human
gguccugggccuggcuca

SEQ ID NO: 627720 - RNA, 22 nt, Human
uauuucagggagaauaaauuug

SEQ ID NO: 627721 - RNA, 22 nt, Human
gccacagcuccagucaggugac

SEQ ID NO: 627722 - RNA, 22 nt, Human
uaauagucauuguauaccuugg

SEQ ID NO: 627723 - RNA, 22 nt, Human
cccacacauuuuucacuuaccg

SEQ ID NO: 627724 - RNA, 22 nt, Human
auugcagugaugguugcauaau

SEQ ID NO: 627725 - RNA, 23 nt, Human
caucagagguugccacucccugg

SEQ ID NO: 627726 - RNA, 22 nt, Human
gguggcagaggugcaucagccc

SEQ ID NO: 627727 - RNA, 22 nt, Human
gcugcagagacagcugccgaug

SEQ ID NO: 627728 - RNA, 22 nt, Human
uguuguuuucucauggagaaua

SEQ ID NO: 627729 - RNA, 22 nt, Human
uucaucaccuugguagcacucc

SEQ ID NO: 627730 - RNA, 19 nt, Human
gccacuccugaugcugccc

SEQ ID NO: 627731 - RNA, 22 nt, Human
gaagucagaaaagaauuaggga

SEQ ID NO: 627732 - RNA, 23 nt, Human
aggaaggagguccuaacaguauc

SEQ ID NO: 627733 - RNA, 22 nt, Human
uuccugaaaauacagggagaga

SEQ ID NO: 627734 - RNA, 22 nt, Human
aagucagaaauaucugccauca

SEQ ID NO: 627735 - RNA, 22 nt, Human
cagagccaggguugcaccccug

SEQ ID NO: 627736 - RNA, 22 nt, Human
ucucagaagugaucaggauguu

SEQ ID NO: 627737 - RNA, 17 nt, Human
uucugugcuuccuggcu

SEQ ID NO: 627738 - RNA, 22 nt, Human
cugagguacaagaaaggcaccu

SEQ ID NO: 627739 - RNA, 22 nt, Human
ugccugccugcauagucccacg

SEQ ID NO: 627740 - RNA, 22 nt, Human
uuugauuuacuggauauucuca

SEQ ID NO: 627741 - RNA, 22 nt, Human
caucucaugggcaugccaagcu

SEQ ID NO: 627742 - RNA, 21 nt, Human
uccaagcucaacucccuuccu

SEQ ID NO: 627743 - RNA, 22 nt, Human
gcauggcaaauaucgagggcag

SEQ ID NO: 627744 - RNA, 22 nt, Human
uccuuggagcccaggaguagca

SEQ ID NO: 627745 - RNA, 22 nt, Human
uucuuacagauuuggugaauga

SEQ ID NO: 627746 - RNA, 22 nt, Human
ucccagccuuucuuuucugcug

SEQ ID NO: 627747 - RNA, 20 nt, Human
ucauuguguugccaauuccc

SEQ ID NO: 627748 - RNA, 22 nt, Human
gagccagcugagcugcacuguc

SEQ ID NO: 627749 - RNA, 22 nt, Human
augcuaaauggccaguaccaaa

SEQ ID NO: 627750 - RNA, 22 nt, Human
uaggcugggagccugaggcuag

SEQ ID NO: 627751 - RNA, 22 nt, Human
cugcuuggcauugguaaagaau

SEQ ID NO: 627752 - RNA, 22 nt, Human
cuggagcuccagggucuccucu

SEQ ID NO: 627753 - RNA, 17 nt, Human
uuuucuccugcccauuc

SEQ ID NO: 627754 - RNA, 22 nt, Human
cuggcugaggcagagccugggg

SEQ ID NO: 627755 - RNA, 22 nt, Human
acagcuggccgaggcucaggga

SEQ ID NO: 627756 - RNA, 22 nt, Human
acugccaccuggugguccugga

SEQ ID NO: 627757 - RNA, 22 nt, Human
uggcucucuuguaagguaguag

SEQ ID NO: 627758 - RNA, 22 nt, Human
gugugaaaaugugcacaauaug

SEQ ID NO: 627759 - RNA, 22 nt, Human
uagauucagauauuuaggacaa

SEQ ID NO: 627760 - RNA, 22 nt, Human
cuggcaccuccagcucauggcc

SEQ ID NO: 627761 - RNA, 22 nt, Human
aggggagaguuaaugugaaugu

SEQ ID NO: 627762 - RNA, 20 nt, Human
ugagaaggggucagcuguac

SEQ ID NO: 627763 - RNA, 21 nt, Human
aguaguuuagcacaggguuug

SEQ ID NO: 627764 - RNA, 22 nt, Human
gugggcagccuguccggagacc

SEQ ID NO: 627765 - RNA, 22 nt, Human
aagauucuuugaggauuuuacu

SEQ ID NO: 627766 - RNA, 22 nt, Human
gaauauuuucaguacagauggu

SEQ ID NO: 627767 - RNA, 20 nt, Human
uaacuuucuaugcuuucagc

SEQ ID NO: 627768 - RNA, 22 nt, Human
gcugaggugaggcuggaaagga

SEQ ID NO: 627769 - RNA, 22 nt, Human
ugucccauggacacaacuucuu

SEQ ID NO: 627770 - RNA, 22 nt, Human
aacucucauuuuagguguaagg

SEQ ID NO: 627771 - RNA, 22 nt, Human
acagauguggaguuugcaugau

SEQ ID NO: 627772 - RNA, 22 nt, Human
ucuguacaccaggggccauucu

SEQ ID NO: 627773 - RNA, 20 nt, Human
gcucugugcuggcggaggcu

SEQ ID NO: 627774 - RNA, 22 nt, Human
ggaggugguuugauuucuauau

SEQ ID NO: 627775 - RNA, 22 nt, Human
ugcccuggggucuggagcagca

SEQ ID NO: 627776 - RNA, 22 nt, Human
gaugggcagcacagcuggccaa

SEQ ID NO: 627777 - RNA, 19 nt, Human
ucucacaagcaacauuguu

SEQ ID NO: 627778 - RNA, 23 nt, Human
ugcaggugugcagagggcucuug

SEQ ID NO: 627779 - RNA, 22 nt, Human
ggagggggaauucagccccagc

SEQ ID NO: 627780 - RNA, 22 nt, Human
acuucauguuguuuacaacuua

SEQ ID NO: 627781 - RNA, 22 nt, Human
aggaguggugcaggaccugcca

SEQ ID NO: 627782 - RNA, 22 nt, Human
gacacuuuaggccaccaugcaa

SEQ ID NO: 627783 - RNA, 20 nt, Human
gggcuggauaauucuuugcu

SEQ ID NO: 627784 - RNA, 22 nt, Human
acugggccuggauuggcguguc

SEQ ID NO: 627785 - RNA, 22 nt, Human
ugugggcucuaauggcagcaga

SEQ ID NO: 627786 - RNA, 22 nt, Human
ucccucagagaccguggugcag

SEQ ID NO: 627787 - RNA, 22 nt, Human
auggcugccuuaauucuucagc

SEQ ID NO: 627788 - RNA, 22 nt, Human
uccugggcuucacagacucugu

SEQ ID NO: 627789 - RNA, 22 nt, Human
ccacaugugcacugcuguaugg

SEQ ID NO: 627790 - RNA, 22 nt, Human
uuuaaaccuccugauucagcua

SEQ ID NO: 627791 - RNA, 22 nt, Human
caugccuguauuucugaucuau

SEQ ID NO: 627792 - RNA, 22 nt, Human
gugacagauuugcugcgcaugg

SEQ ID NO: 627793 - RNA, 22 nt, Human
ggcccuguccccuucaguuuug

SEQ ID NO: 627794 - RNA, 22 nt, Human
ucugggcugggagcguguggac

SEQ ID NO: 627795 - RNA, 22 nt, Human
cagaugcuucgugggugagcac

SEQ ID NO: 627796 - RNA, 22 nt, Human
gugggagccauuuccaguaugc

SEQ ID NO: 627797 - RNA, 22 nt, Human
uccauguggcaauaggagacag

SEQ ID NO: 627798 - RNA, 22 nt, Human
uguaggccuauguccagcaauu

SEQ ID NO: 627799 - RNA, 22 nt, Human
guguguaaugcuuauugugcuu

SEQ ID NO: 627800 - RNA, 22 nt, Human
uugcagcugugagcuuuacacg

SEQ ID NO: 627801 - RNA, 22 nt, Human
uccagcucuucaguucugcaaa

SEQ ID NO: 627802 - RNA, 22 nt, Human
gcuggcagguccaagauagagc

SEQ ID NO: 627803 - RNA, 22 nt, Human
ggucugagauauuuguucagcu

SEQ ID NO: 627804 - RNA, 22 nt, Human
uuugugaagggaacagaagugu

SEQ ID NO: 627805 - RNA, 22 nt, Human
aagaugcgguugaccauggugu

SEQ ID NO: 627806 - RNA, 22 nt, Human
gauucauaccguuucuucucca

SEQ ID NO: 627807 - RNA, 22 nt, Human
aggagagagaacacuugggucc

SEQ ID NO: 627808 - RNA, 22 nt, Human
gggcuauagcacuauguauggg

SEQ ID NO: 627809 - RNA, 22 nt, Human
uugaguucuggucuuuuaaaag

SEQ ID NO: 627810 - RNA, 20 nt, Human
aauguauauuuuaugccagg

SEQ ID NO: 627811 - RNA, 22 nt, Human
cucugcuuggaacagggguuug

SEQ ID NO: 627812 - RNA, 22 nt, Human
gcugcccaggagagguggggcu

SEQ ID NO: 627813 - RNA, 22 nt, Human
gcugcuuugacagugggaacag

SEQ ID NO: 627814 - RNA, 22 nt, Human
ggcucagaggccagcagguaga

SEQ ID NO: 627815 - RNA, 19 nt, Human
aaggaauggcuuuaaguag

SEQ ID NO: 627816 - RNA, 22 nt, Human
aagcuguuuuggccuuaguuga

SEQ ID NO: 627817 - RNA, 22 nt, Human
aggcagccaaucagaggcugac

SEQ ID NO: 627818 - RNA, 22 nt, Human
ugggccaggucugcggucauuu

SEQ ID NO: 627819 - RNA, 22 nt, Human
ccagggcuuaacuuuucaggag

SEQ ID NO: 627820 - RNA, 22 nt, Human
gcugucccaugguugcaagaug

SEQ ID NO: 627821 - RNA, 22 nt, Human
ugggucuccaguucagggcagg

SEQ ID NO: 627822 - RNA, 22 nt, Human
uuacgaguuugcaauuuuaaau

SEQ ID NO: 627823 - RNA, 22 nt, Human
uuggaucauggaaugucugcuu

SEQ ID NO: 627824 - RNA, 22 nt, Human
agacucugcauuucuaauaagc

SEQ ID NO: 627825 - RNA, 22 nt, Human
cauacagagaaggauaauaaag

SEQ ID NO: 627826 - RNA, 22 nt, Human
gcacggcuaauuuuuguauuuu

SEQ ID NO: 627827 - RNA, 22 nt, Human
agcugcagcccuccugcauggc

SEQ ID NO: 627828 - RNA, 22 nt, Human
caggauauuuacguucugcuac

SEQ ID NO: 627829 - RNA, 22 nt, Human
caguggcuuaaauaagauuagg

SEQ ID NO: 627830 - RNA, 22 nt, Human
agggaucaguagggacggcagc

SEQ ID NO: 627831 - RNA, 22 nt, Human
ugcauuaagcacacuuuugaau

SEQ ID NO: 627832 - RNA, 22 nt, Human
aagagcuggcucuugcagcagc

SEQ ID NO: 627833 - RNA, 22 nt, Human
uacagaagcuuuugaaaagaug

SEQ ID NO: 627834 - RNA, 22 nt, Human
ucuuauacagaagauguuuaau

SEQ ID NO: 627835 - RNA, 22 nt, Human
aggagggauagaaaaauacuug

SEQ ID NO: 627836 - RNA, 22 nt, Human
gcaucuucacacaaagccagug

SEQ ID NO: 627837 - RNA, 22 nt, Human
ucagagcuuaucucuugcugga

SEQ ID NO: 627838 - RNA, 22 nt, Human
augaaaagggagugauauuugu

SEQ ID NO: 627839 - RNA, 22 nt, Human
cugcuuccauaaauaaugugcu

SEQ ID NO: 627840 - RNA, 22 nt, Human
aucuuucuccauauacaucuuu

SEQ ID NO: 627841 - RNA, 22 nt, Human
ccucugcucccuggugucugag

SEQ ID NO: 627842 - RNA, 19 nt, Human
ucuguggcaccugggaggg

SEQ ID NO: 627843 - RNA, 22 nt, Human
uuuaagagcuaguaugucauuu

SEQ ID NO: 627844 - RNA, 22 nt, Human
uuuauuguuguuagucauaagu

SEQ ID NO: 627845 - RNA, 19 nt, Human
cgcaggagccgaggugacc

SEQ ID NO: 627846 - RNA, 22 nt, Human
ugugcugguacaugugaggaug

SEQ ID NO: 627847 - RNA, 22 nt, Human
gccaggccacucccggguccug

SEQ ID NO: 627848 - RNA, 20 nt, Human
ugcagcuucucaucuucaaa

SEQ ID NO: 627849 - RNA, 22 nt, Human
gcucagggaguuucacagugua

SEQ ID NO: 627850 - RNA, 22 nt, Human
caggccagcguccagaacaagc

SEQ ID NO: 627851 - RNA, 22 nt, Human
aucugacaaccuauugacuuga

SEQ ID NO: 627852 - RNA, 22 nt, Human
auuuuucaacuuuggaaauggc

SEQ ID NO: 627853 - RNA, 22 nt, Human
agggugggcuagacucuucccc

SEQ ID NO: 627854 - RNA, 22 nt, Human
guccuguuggugaauggcucuu

SEQ ID NO: 627855 - RNA, 21 nt, Human
acaugucucuaaucucaguga

SEQ ID NO: 627856 - RNA, 22 nt, Human
agugggcaaaacagcucagagc

SEQ ID NO: 627857 - RNA, 22 nt, Human
ggccaaggaugguggcucuggu

SEQ ID NO: 627858 - RNA, 22 nt, Human
gcucagcuacuuacagguggcu

SEQ ID NO: 627859 - RNA, 16 nt, Human
cagcccugaggaagaa

SEQ ID NO: 627860 - RNA, 21 nt, Human
ccagcugcuccuugagguucc

SEQ ID NO: 627861 - RNA, 22 nt, Human
uguacagaaauuccuacuacau

SEQ ID NO: 627862 - RNA, 22 nt, Human
cagaagaaaguggggagacaag

SEQ ID NO: 627863 - RNA, 22 nt, Human
ccuggagcuuggucacgcugcg

SEQ ID NO: 627864 - RNA, 22 nt, Human
ggcgggugcacagacccuuccc

SEQ ID NO: 627865 - RNA, 22 nt, Human
gugcugccggcauagcagugaa

SEQ ID NO: 627866 - RNA, 22 nt, Human
aguuggguuugugucaguugca

SEQ ID NO: 627867 - RNA, 22 nt, Human
cuguuuuugugcugugucuccc

SEQ ID NO: 627868 - RNA, 22 nt, Human
aggcucugcagugcuggaggac

SEQ ID NO: 627869 - RNA, 22 nt, Human
ugaaguuagaacuaugaggaua

SEQ ID NO: 627870 - RNA, 22 nt, Human
accacaggaauugcucuguggu

SEQ ID NO: 627871 - RNA, 22 nt, Human
gaggugaguggaucacgagguc

SEQ ID NO: 627872 - RNA, 22 nt, Human
gggaccugccauugcucacagg

SEQ ID NO: 627873 - RNA, 22 nt, Human
accccagggcugccagccuccu

SEQ ID NO: 627874 - RNA, 22 nt, Human
gacuacaacaauaagaacagcu

SEQ ID NO: 627875 - RNA, 22 nt, Human
uaacugugugaacgugaucauu

SEQ ID NO: 627876 - RNA, 22 nt, Human
gagaaguuuggagugaagguuu

SEQ ID NO: 627877 - RNA, 22 nt, Human
agacauuuggaagauacacaua

SEQ ID NO: 627878 - RNA, 22 nt, Human
cuggcugcaaaaucuauucacu

SEQ ID NO: 627879 - RNA, 22 nt, Human
cuggucagggcucuuugggagc

SEQ ID NO: 627880 - RNA, 22 nt, Human
aagaugugaaauugucucuggg

SEQ ID NO: 627881 - RNA, 19 nt, Human
acacugggagaagacugcu

SEQ ID NO: 627882 - RNA, 22 nt, Human
uggggagugaugccucggauaa

SEQ ID NO: 627883 - RNA, 22 nt, Human
ggcugcuucucacucauuugca

SEQ ID NO: 627884 - RNA, 22 nt, Human
ggacuuuagcagcuggagagga

SEQ ID NO: 627885 - RNA, 22 nt, Human
aggcagagcuaggaagaauugu

SEQ ID NO: 627886 - RNA, 22 nt, Human
ggugccaggcuguagucagggu

SEQ ID NO: 627887 - RNA, 22 nt, Human
auuccacagugccuuccgugaa

SEQ ID NO: 627888 - RNA, 22 nt, Human
aagguagauucuggaucgaagg

SEQ ID NO: 627889 - RNA, 22 nt, Human
gggaucugggacaacagguggu

SEQ ID NO: 627890 - RNA, 20 nt, Human
uuugcaggaaggaaauaggu

SEQ ID NO: 627891 - RNA, 22 nt, Human
ggagggcucgucauccaccacu

SEQ ID NO: 627892 - RNA, 22 nt, Human
ccugcaccaggcccagcauggu

SEQ ID NO: 627893 - RNA, 22 nt, Human
uacaagaaaguccaguggguuu

SEQ ID NO: 627894 - RNA, 22 nt, Human
cagcugcaggagaaacagaggc

SEQ ID NO: 627895 - RNA, 22 nt, Human
auaaauuaugaauggcccuuuu

SEQ ID NO: 627896 - RNA, 22 nt, Human
aagggccuccuggggagccugg

SEQ ID NO: 627897 - RNA, 22 nt, Human
gcuggcucccauugguccuucc

SEQ ID NO: 627898 - RNA, 22 nt, Human
uucuaauuguguuugcauaucu

SEQ ID NO: 627899 - RNA, 22 nt, Human
gcguuggggaccccgaagcugg

SEQ ID NO: 627900 - RNA, 22 nt, Human
uguagaggaggaaacugaggcu

SEQ ID NO: 627901 - RNA, 22 nt, Human
uacaucuagccuuacaauuauu

SEQ ID NO: 627902 - RNA, 19 nt, Human
auacacauacguaaacuga

SEQ ID NO: 627903 - RNA, 22 nt, Human
cacagaauggaccaguuuuaga

SEQ ID NO: 627904 - RNA, 22 nt, Human
auauauuuugcggucacguggc

SEQ ID NO: 627905 - RNA, 22 nt, Human
aaguggcucauguggcuucugc

SEQ ID NO: 627906 - RNA, 21 nt, Human
ucagggaagugugcagaaggg

SEQ ID NO: 627907 - RNA, 22 nt, Human
ucugaggucagugcugcaguua

SEQ ID NO: 627908 - RNA, 22 nt, Human
acagugaauaagacaugugcuu

SEQ ID NO: 627909 - RNA, 22 nt, Human
auugacaaucuacuauguucug

SEQ ID NO: 627910 - RNA, 19 nt, Human
agcauccagucaugggauc

SEQ ID NO: 627911 - RNA, 18 nt, Human
agcagaauucuaggguuc

SEQ ID NO: 627912 - RNA, 22 nt, Human
aagcaagacagaaguuacugcc

SEQ ID NO: 627913 - RNA, 22 nt, Human
gaacaacuccaagggacaucau

SEQ ID NO: 627914 - RNA, 22 nt, Human
cuuggucuagugagugagcaua

SEQ ID NO: 627915 - RNA, 22 nt, Human
uguuuacagcugaucaggcauc

SEQ ID NO: 627916 - RNA, 22 nt, Human
uucuuuuggacucaaagagaac

SEQ ID NO: 627917 - RNA, 23 nt, Human
agucugugcugaagaaguuacaa

SEQ ID NO: 627918 - RNA, 22 nt, Human
aaguguguugacugaauugggg

SEQ ID NO: 627919 - RNA, 22 nt, Human
ugucaaacugugacuucuaaug

SEQ ID NO: 627920 - RNA, 22 nt, Human
agcugcccugggcuggagaugg

SEQ ID NO: 627921 - RNA, 22 nt, Human
auuauguaacugugguucagca

SEQ ID NO: 627922 - RNA, 22 nt, Human
caauacuuuaguaaaauggccc

SEQ ID NO: 627923 - RNA, 22 nt, Human
acaugcuuuaacuuauuuugau

SEQ ID NO: 627924 - RNA, 22 nt, Human
uacaaaugaguuguaugaacca

SEQ ID NO: 627925 - RNA, 22 nt, Human
gaggccaugaauggauguuccu

SEQ ID NO: 627926 - RNA, 22 nt, Human
acugggaaaaacugcuuugagg

SEQ ID NO: 627927 - RNA, 22 nt, Human
auacagguaggggacauacauc

SEQ ID NO: 627928 - RNA, 22 nt, Human
ugggagcaagcuacuuagggaa

SEQ ID NO: 627929 - RNA, 21 nt, Human
cagggcacacagaggauggua

SEQ ID NO: 627930 - RNA, 22 nt, Human
aguguuagugaaagguguuuau

SEQ ID NO: 627931 - RNA, 23 nt, Human
accagcaaaaaugacagcccagg

SEQ ID NO: 627932 - RNA, 22 nt, Human
ccugaacucuaaauagagcagu

SEQ ID NO: 627933 - RNA, 22 nt, Human
ggguaggcaaagcaaugacguu

SEQ ID NO: 627934 - RNA, 22 nt, Human
cugcuuuguggaaucacacugg

SEQ ID NO: 627935 - RNA, 22 nt, Human
cugauuagaguguuaaugagga

SEQ ID NO: 627936 - RNA, 22 nt, Human
acuguaaaauacauaaguauug

SEQ ID NO: 627937 - RNA, 20 nt, Human
cuagccuggccuugcucugg

SEQ ID NO: 627938 - RNA, 22 nt, Human
ucagauuuuugagaugucuguu

SEQ ID NO: 627939 - RNA, 22 nt, Human
uucuuucccagaagauauguuu

SEQ ID NO: 627940 - RNA, 22 nt, Human
gccaggguucgaauccguaugg

SEQ ID NO: 627941 - RNA, 21 nt, Human
gacuggagagaggaagucugg

SEQ ID NO: 627942 - RNA, 22 nt, Human
agauaacauuuauugaauguaa

SEQ ID NO: 627943 - RNA, 22 nt, Human
gauaaauuaucagggguuuaaa

SEQ ID NO: 627944 - RNA, 22 nt, Human
cacugaaggcugcagcucagcc

SEQ ID NO: 627945 - RNA, 22 nt, Human
uuuuauacacaugaacaugcag

SEQ ID NO: 627946 - RNA, 22 nt, Human
aaggugucaccagauuggcagg

SEQ ID NO: 627947 - RNA, 22 nt, Human
ccagcugcugugcagggaggcu

SEQ ID NO: 627948 - RNA, 22 nt, Human
gacccuggcuggagcuggccug

SEQ ID NO: 627949 - RNA, 22 nt, Human
ucugcaaacuuaaguugaaaua

SEQ ID NO: 627950 - RNA, 22 nt, Human
ugccagcccaccuuggggccuc

SEQ ID NO: 627951 - RNA, 22 nt, Human
uggcucugcaccucaguguacc

SEQ ID NO: 627952 - RNA, 22 nt, Human
uuggcgcccaggacgccgccgc

SEQ ID NO: 627953 - RNA, 22 nt, Human
ugcaaccugacccagccagccc

SEQ ID NO: 627954 - RNA, 22 nt, Human
uagaaauaaaucugcagcuggg

SEQ ID NO: 627955 - RNA, 22 nt, Human
cuucuccagccacgcccacucc

SEQ ID NO: 627956 - RNA, 22 nt, Human
gaagcauacuuucuauacugcu

SEQ ID NO: 627957 - RNA, 22 nt, Human
ugccaccaucuggcuguguuga

SEQ ID NO: 627958 - RNA, 22 nt, Human
ucagcauguucuuaggucacag

SEQ ID NO: 627959 - RNA, 22 nt, Human
aggguaggaacugaguggaagg

SEQ ID NO: 627960 - RNA, 22 nt, Human
aaagcaugguuaaagacagugg

SEQ ID NO: 627961 - RNA, 22 nt, Human
acagcaaaagacaagaacuuaa

SEQ ID NO: 627962 - RNA, 22 nt, Human
gaggggcucuuuaauaguaaca

SEQ ID NO: 627963 - RNA, 22 nt, Human
aacaugauguauuuucuugucu

SEQ ID NO: 627964 - RNA, 22 nt, Human
gaggccuggaauuccagccugg

SEQ ID NO: 627965 - RNA, 22 nt, Human
caggaaugacccaacaguuuca

SEQ ID NO: 627966 - RNA, 23 nt, Human
cugcuuucccacuccaugcucuu

SEQ ID NO: 627967 - RNA, 22 nt, Human
agcugccacaugcccaagggca

SEQ ID NO: 627968 - RNA, 22 nt, Human
uguccaccguucagcaccagag

SEQ ID NO: 627969 - RNA, 22 nt, Human
agguccuguguccaggggccug

SEQ ID NO: 627970 - RNA, 22 nt, Human
auuuccuagccucucuugcagu

SEQ ID NO: 627971 - RNA, 23 nt, Human
agaagcaaugcuuuuuuuccucu

SEQ ID NO: 627972 - RNA, 22 nt, Human
uccugauuagguuuccauagcu

SEQ ID NO: 627973 - RNA, 22 nt, Human
caucacauguaggcagcaucac

SEQ ID NO: 627974 - RNA, 22 nt, Human
gcugauguuucaaguauagcuu

SEQ ID NO: 627975 - RNA, 22 nt, Human
ugcuggaaagaauuuucuguua

SEQ ID NO: 627976 - RNA, 22 nt, Human
agauguggaaagaaguuagaag

SEQ ID NO: 627977 - RNA, 22 nt, Human
gaggcaguguugaaaaggagag

SEQ ID NO: 627978 - RNA, 22 nt, Human
aauggcuuagcagaguuagaag

SEQ ID NO: 627979 - RNA, 18 nt, Human
aggacuccugggaguugg

SEQ ID NO: 627980 - RNA, 22 nt, Human
gagcacaggcuuugguggacac

SEQ ID NO: 627981 - RNA, 22 nt, Human
uuuguauuacaaagucacagua

SEQ ID NO: 627982 - RNA, 22 nt, Human
auccauuuguaaauguuagagu

SEQ ID NO: 627983 - RNA, 17 nt, Human
agacagugagugccuug

SEQ ID NO: 627984 - RNA, 22 nt, Human
aauucaaauuugaguuugugau

SEQ ID NO: 627985 - RNA, 22 nt, Human
acuuagcagguacuuucauauu

SEQ ID NO: 627986 - RNA, 20 nt, Human
gaagugucuuguuucuggau

SEQ ID NO: 627987 - RNA, 22 nt, Human
auacaguauguaggcuuuucag

SEQ ID NO: 627988 - RNA, 21 nt, Human
auauuguagguaaagugcagg

SEQ ID NO: 627989 - RNA, 22 nt, Human
uuugaagacuacugggagugaa

SEQ ID NO: 627990 - RNA, 18 nt, Human
uucucugguggauguuau

SEQ ID NO: 627991 - RNA, 22 nt, Human
aauuuggagcuuuguuucuaga

SEQ ID NO: 627992 - RNA, 22 nt, Human
cucaggagcuuccucagcccau

SEQ ID NO: 627993 - RNA, 22 nt, Human
ucaguuacucugauguccugug

SEQ ID NO: 627994 - RNA, 22 nt, Human
uuagcaucugcuguaagcuuau

SEQ ID NO: 627995 - RNA, 22 nt, Human
gaguccuggaacccugaaugcu

SEQ ID NO: 627996 - RNA, 22 nt, Human
ugcaauaaguuguguuaucacu

SEQ ID NO: 627997 - RNA, 22 nt, Human
gccagcagggcggagccaucua

SEQ ID NO: 627998 - RNA, 22 nt, Human
gaccuggaauuuguguguguuc

SEQ ID NO: 627999 - RNA, 22 nt, Human
uccagcucuaaggcugauagcc

SEQ ID NO: 628000 - RNA, 22 nt, Human
aggugacugguuuaucuggcag

SEQ ID NO: 628001 - RNA, 23 nt, Human
ccagugauugccuggaaggaggu

SEQ ID NO: 628002 - RNA, 22 nt, Human
gcuguacauucugcacaggccc

SEQ ID NO: 628003 - RNA, 22 nt, Human
ucaggaagugccuaggcuggcc

SEQ ID NO: 628004 - RNA, 22 nt, Human
ugggugguugcugaggcuccuu

SEQ ID NO: 628005 - RNA, 22 nt, Human
ugcagcauuauucacaguagcc

SEQ ID NO: 628006 - RNA, 22 nt, Human
gcuugcaugauuggagugggug

SEQ ID NO: 628007 - RNA, 20 nt, Human
uugcauuggaugugcaggug

SEQ ID NO: 628008 - RNA, 19 nt, Human
aggugcaggucacagggga

SEQ ID NO: 628009 - RNA, 20 nt, Human
cacaacuguccacaugcucc

SEQ ID NO: 628010 - RNA, 22 nt, Human
uggcagggccugcucaucaucc

SEQ ID NO: 628011 - RNA, 22 nt, Human
aaauguguauaugaaacaugau

SEQ ID NO: 628012 - RNA, 22 nt, Human
gggugcugacuggggccugaaa

SEQ ID NO: 628013 - RNA, 22 nt, Human
aagggcagccugacucacgguc

SEQ ID NO: 628014 - RNA, 22 nt, Human
aaagucaucuaggagcagauuu

SEQ ID NO: 628015 - RNA, 22 nt, Human
gcccaggaaaugccccguggug

SEQ ID NO: 628016 - RNA, 22 nt, Human
auuucccagauaaacagcugga

SEQ ID NO: 628017 - RNA, 22 nt, Human
agugggcauaugaagucucaag

SEQ ID NO: 628018 - RNA, 22 nt, Human
gucugagcuacuuaggauauaa

SEQ ID NO: 628019 - RNA, 22 nt, Human
gcugcccugacaagcuacuccc

SEQ ID NO: 628020 - RNA, 15 nt, Human
cugaacucuaaacca

SEQ ID NO: 628021 - RNA, 22 nt, Human
caucuuaacaggucucugaggg

SEQ ID NO: 628022 - RNA, 22 nt, Human
agggucugacugaauggaaaag

SEQ ID NO: 628023 - RNA, 22 nt, Human
cuggguguuggguacugaccgu

SEQ ID NO: 628024 - RNA, 21 nt, Human
agaaggcaaaagcagacaucu

SEQ ID NO: 628025 - RNA, 22 nt, Human
aaaugaacucaaugaucuccca

SEQ ID NO: 628026 - RNA, 22 nt, Human
gggggcuggaauauccaucaac

SEQ ID NO: 628027 - RNA, 22 nt, Human
aggacuggugugugaucagcau

SEQ ID NO: 628028 - RNA, 22 nt, Human
uggaggccuagguugaugugug

SEQ ID NO: 628029 - RNA, 22 nt, Human
cagcagagcugggaauaaaauu

SEQ ID NO: 628030 - RNA, 22 nt, Human
aaucuguuuguuuacaccuuuu

SEQ ID NO: 628031 - RNA, 22 nt, Human
agcuggaacgucacaggagcag

SEQ ID NO: 628032 - RNA, 22 nt, Human
cacacagaugguaagggaggga

SEQ ID NO: 628033 - RNA, 22 nt, Human
ucacacagggucggaaagagug

SEQ ID NO: 628034 - RNA, 22 nt, Human
ucagggcaccaaaaaagaugcc

SEQ ID NO: 628035 - RNA, 22 nt, Human
uggcuggcgccgggcuagccac

SEQ ID NO: 628036 - RNA, 22 nt, Human
uggcuucucagaauacucugga

SEQ ID NO: 628037 - RNA, 22 nt, Human
gaggcugcccaacuggagugga

SEQ ID NO: 628038 - RNA, 22 nt, Human
cagagacaaccugguagagaaa

SEQ ID NO: 628039 - RNA, 22 nt, Human
ugcuccaggugugccucucaug

SEQ ID NO: 628040 - RNA, 22 nt, Human
acuaaaaacuacugccaauagc

SEQ ID NO: 628041 - RNA, 22 nt, Human
caguagcagggauuauuuuagg

SEQ ID NO: 628042 - RNA, 22 nt, Human
auguuauuucugaaagaucauu

SEQ ID NO: 628043 - RNA, 22 nt, Human
ccagcagcuguggcuuugccuc

SEQ ID NO: 628044 - RNA, 22 nt, Human
aacagucuuacagaaguagcca

SEQ ID NO: 628045 - RNA, 22 nt, Human
uccugagguuuuaaaacuauuc

SEQ ID NO: 628046 - RNA, 22 nt, Human
agugcuguuagguuaauauagu

SEQ ID NO: 628047 - RNA, 22 nt, Human
acugccugugcacuggucuuuu

SEQ ID NO: 628048 - RNA, 18 nt, Human
acuccccacaggcucugu

SEQ ID NO: 628049 - RNA, 22 nt, Human
aagcacagccagguuaggggcu

SEQ ID NO: 628050 - RNA, 22 nt, Human
auggcugcaguccgugcccugg

SEQ ID NO: 628051 - RNA, 22 nt, Human
aggaauguuuagaaugucagaa

SEQ ID NO: 628052 - RNA, 22 nt, Human
ggccuaguuuuuucugguaggu

SEQ ID NO: 628053 - RNA, 22 nt, Human
uggccaccccuuucucugcacu

SEQ ID NO: 628054 - RNA, 22 nt, Human
acuguuauaguucacuuuuccc

SEQ ID NO: 628055 - RNA, 20 nt, Human
acaugcaguggucauuucag

SEQ ID NO: 628056 - RNA, 18 nt, Human
ccugagcccugcuuacuu

SEQ ID NO: 628057 - RNA, 20 nt, Human
aggggucuagcagcagugcu

SEQ ID NO: 628058 - RNA, 22 nt, Human
auuauucuuaaugcagggauua

SEQ ID NO: 628059 - RNA, 22 nt, Human
caucuuuguucuguaaacuuuu

SEQ ID NO: 628060 - RNA, 22 nt, Human
ccugcccugucacuggcuaggg

SEQ ID NO: 628061 - RNA, 22 nt, Human
cuguccugaggcagguggccug

SEQ ID NO: 628062 - RNA, 22 nt, Human
acccugagucacugucugucug

SEQ ID NO: 628063 - RNA, 22 nt, Human
guggcuguauagccaagucaga

SEQ ID NO: 628064 - RNA, 22 nt, Human
aggcuuggugccaaggagccug

SEQ ID NO: 628065 - RNA, 22 nt, Human
acagaaagaagguguauuugag

SEQ ID NO: 628066 - RNA, 22 nt, Human
uagucaaaagcuucacucggaa

SEQ ID NO: 628067 - RNA, 22 nt, Human
agaguuuggauuuuaggacauc

SEQ ID NO: 628068 - RNA, 22 nt, Human
cccaaggcugcagugagcauga

SEQ ID NO: 628069 - RNA, 22 nt, Human
uguacaagaauaauuuuauaua

SEQ ID NO: 628070 - RNA, 22 nt, Human
cugagcauuugugcagcuucuc

SEQ ID NO: 628071 - RNA, 20 nt, Human
gugugugcuccaugcaugcu

SEQ ID NO: 628072 - RNA, 22 nt, Human
cugccuguggucugugaucuaa

SEQ ID NO: 628073 - RNA, 22 nt, Human
agcugggcaaaaugugagguug

SEQ ID NO: 628074 - RNA, 22 nt, Human
ugcaauauuuuauauccaacaa

SEQ ID NO: 628075 - RNA, 20 nt, Human
uggagccacagucagguucc

SEQ ID NO: 628076 - RNA, 22 nt, Human
uuauacuaaaacgcauugaauu

SEQ ID NO: 628077 - RNA, 22 nt, Human
gaggccuggaccagccacagag

SEQ ID NO: 628078 - RNA, 22 nt, Human
aaggugugaacugauucauugg

SEQ ID NO: 628079 - RNA, 22 nt, Human
cucaggacccgguccagguggg

SEQ ID NO: 628080 - RNA, 22 nt, Human
uuuuaguaccaaccagaagaug

SEQ ID NO: 628081 - RNA, 22 nt, Human
gcucaguguuucugguagaaaa

SEQ ID NO: 628082 - RNA, 22 nt, Human
cagcacuuggugccauugagug

SEQ ID NO: 628083 - RNA, 22 nt, Human
gagugaguggccaggaggcaga

SEQ ID NO: 628084 - RNA, 22 nt, Human
gugugggcuaugugcgugggca

SEQ ID NO: 628085 - RNA, 22 nt, Human
cuccauggaaaaggcuguuguu

SEQ ID NO: 628086 - RNA, 22 nt, Human
aauucaguuauauguccacuuc

SEQ ID NO: 628087 - RNA, 22 nt, Human
cugcacacaucgcacugcccgu

SEQ ID NO: 628088 - RNA, 22 nt, Human
uccaggggagugcuacgcacag

SEQ ID NO: 628089 - RNA, 22 nt, Human
cuucuccuuauaugucccguuc

SEQ ID NO: 628090 - RNA, 22 nt, Human
aagcccagcugaaagcauuuuu

SEQ ID NO: 628091 - RNA, 22 nt, Human
auggcagggcccuuggcuccca

SEQ ID NO: 628092 - RNA, 22 nt, Human
gauuugugcucauuuuccauua

SEQ ID NO: 628093 - RNA, 22 nt, Human
agauuuagacugccuuaaucau

SEQ ID NO: 628094 - RNA, 22 nt, Human
gcaguguuaccuugggcugguu

SEQ ID NO: 628095 - RNA, 22 nt, Human
ccagcuccggugugcuuauuuc

SEQ ID NO: 628096 - RNA, 22 nt, Human
ccagugcgcaggcgccaccugu

SEQ ID NO: 628097 - RNA, 22 nt, Human
cugaggcugggcuugccuucuu

SEQ ID NO: 628098 - RNA, 22 nt, Human
uuuuagaaagaucccuggcagg

SEQ ID NO: 628099 - RNA, 22 nt, Human
ucuuugaaacacccuaaccuuu

SEQ ID NO: 628100 - RNA, 22 nt, Human
acaaauuguugcuucaugaaug

SEQ ID NO: 628101 - RNA, 22 nt, Human
uccucccuugggguuucguuau

SEQ ID NO: 628102 - RNA, 22 nt, Human
ucagaaagugaacuguugacau

SEQ ID NO: 628103 - RNA, 22 nt, Human
augaccagacucucaguggggu

SEQ ID NO: 628104 - RNA, 22 nt, Human
ggagaagcagcuucuugaugaa

SEQ ID NO: 628105 - RNA, 22 nt, Human
aagcauguacaaugagugucuc

SEQ ID NO: 628106 - RNA, 22 nt, Human
uggccugcaagcuaaaaaucua

SEQ ID NO: 628107 - RNA, 22 nt, Human
acacauuuucaacacugucaag

SEQ ID NO: 628108 - RNA, 22 nt, Human
uggguucagaucccagcucugu

SEQ ID NO: 628109 - RNA, 22 nt, Human
gaacuguggguaauauauuaga

SEQ ID NO: 628110 - RNA, 22 nt, Human
aagcaacauucucuguggcauu

SEQ ID NO: 628111 - RNA, 22 nt, Human
gggcuccagcuguuugccauga

SEQ ID NO: 628112 - RNA, 22 nt, Human
ugugagcacuauggcuaggcuc

SEQ ID NO: 628113 - RNA, 22 nt, Human
ggcccucuguggcugccaugga

SEQ ID NO: 628114 - RNA, 22 nt, Human
cuacagcuguaaaaggaauguc

SEQ ID NO: 628115 - RNA, 22 nt, Human
uguauuuugaguccaaucuccu

SEQ ID NO: 628116 - RNA, 22 nt, Human
auuuccaugccuuagcuuaagg

SEQ ID NO: 628117 - RNA, 22 nt, Human
caguccuggggaccaggcugag

SEQ ID NO: 628118 - RNA, 22 nt, Human
acagauguuagcaaugaugaug

SEQ ID NO: 628119 - RNA, 17 nt, Human
cugaggauuaugguugu

SEQ ID NO: 628120 - RNA, 22 nt, Human
gcuggcuugucccaggacaaag

SEQ ID NO: 628121 - RNA, 23 nt, Human
augcaaagugcugucauguagac

SEQ ID NO: 628122 - RNA, 22 nt, Human
uacacaugcucagauuccugug

SEQ ID NO: 628123 - RNA, 22 nt, Human
augucuuuuauggagaugucau

SEQ ID NO: 628124 - RNA, 22 nt, Human
ccaccccaaaugaagaccucuc

SEQ ID NO: 628125 - RNA, 22 nt, Human
ucuuccagaaucucagagggcu

SEQ ID NO: 628126 - RNA, 22 nt, Human
ugaauucuuuuagaauucagug

SEQ ID NO: 628127 - RNA, 22 nt, Human
agcuauggaacagaguggcugu

SEQ ID NO: 628128 - RNA, 22 nt, Human
caguccuuggcuucauccgagu

SEQ ID NO: 628129 - RNA, 22 nt, Human
cugagagugcucuuugauguca

SEQ ID NO: 628130 - RNA, 22 nt, Human
cagcaacuccuguagcuuaugc

SEQ ID NO: 628131 - RNA, 22 nt, Human
ggagauccaggcaaggccgcag

SEQ ID NO: 628132 - RNA, 22 nt, Human
ccauaaucguguguuaaauaau

SEQ ID NO: 628133 - RNA, 17 nt, Human
uuccuggaagucauucc

SEQ ID NO: 628134 - RNA, 22 nt, Human
uuuguucaaggaauaguaaaug

SEQ ID NO: 628135 - RNA, 22 nt, Human
uccugauggaggggucaucuuu

SEQ ID NO: 628136 - RNA, 22 nt, Human
aaagccaguuucuggaaguacc

SEQ ID NO: 628137 - RNA, 21 nt, Human
agcaucugaggcaguuuccua

SEQ ID NO: 628138 - RNA, 22 nt, Human
aguccagaacuucagcuaguuu

SEQ ID NO: 628139 - RNA, 22 nt, Human
acagucauuagauacaaugucu

SEQ ID NO: 628140 - RNA, 22 nt, Human
acuagauuuuggccauuauaca

SEQ ID NO: 628141 - RNA, 22 nt, Human
caggaugagaggcccagggaag

SEQ ID NO: 628142 - RNA, 22 nt, Human
acucaugguagcacaggcugug

SEQ ID NO: 628143 - RNA, 22 nt, Human
ucuuccagcccuucuaauggua

SEQ ID NO: 628144 - RNA, 22 nt, Human
gcaaauaauauacuuugaucuc

SEQ ID NO: 628145 - RNA, 22 nt, Human
cggcccugcugagcuugucugg

SEQ ID NO: 628146 - RNA, 22 nt, Human
ggccaggagcugcacagggcuc

SEQ ID NO: 628147 - RNA, 22 nt, Human
uuugaaagaaaccagugaguga

SEQ ID NO: 628148 - RNA, 22 nt, Human
aggggcucaaagugugcaggga

SEQ ID NO: 628149 - RNA, 22 nt, Human
ucuguuaacaggagagaaugau

SEQ ID NO: 628150 - RNA, 22 nt, Human
aaccauuagucaaucagcaaga

SEQ ID NO: 628151 - RNA, 22 nt, Human
ugcugcugaucauuuauagucu

SEQ ID NO: 628152 - RNA, 22 nt, Human
cuacagaauggagggucagaga

SEQ ID NO: 628153 - RNA, 22 nt, Human
acaugacaaaaugcacaggauu

SEQ ID NO: 628154 - RNA, 22 nt, Human
ccuccuucuggggccuucugcu

SEQ ID NO: 628155 - RNA, 22 nt, Human
caggcaggucagugaagaagga

SEQ ID NO: 628156 - RNA, 22 nt, Human
ugcacccucaucagucaaaugg

SEQ ID NO: 628157 - RNA, 22 nt, Human
agaaggcuggcccuggguggcc

SEQ ID NO: 628158 - RNA, 22 nt, Human
agagaagugagcuuguucacuc

SEQ ID NO: 628159 - RNA, 22 nt, Human
aaacuaaggugcuguggacuga

SEQ ID NO: 628160 - RNA, 22 nt, Human
uucugagguccaugcaguacug

SEQ ID NO: 628161 - RNA, 22 nt, Human
ugucauuuugucucacugcuau

SEQ ID NO: 628162 - RNA, 22 nt, Human
auggcugccuagaggugagaug

SEQ ID NO: 628163 - RNA, 22 nt, Human
uucuuuuaaaagagagcagaaa

SEQ ID NO: 628164 - RNA, 22 nt, Human
acauuucuauagugcaucuguu

SEQ ID NO: 628165 - RNA, 22 nt, Human
gaagcagcuggugagauggagc

SEQ ID NO: 628166 - RNA, 22 nt, Human
uucacagcuccuuuuacucaac

SEQ ID NO: 628167 - RNA, 22 nt, Human
gccugcucugacauccauccca

SEQ ID NO: 628168 - RNA, 22 nt, Human
auucuaauuaguucuacauguu

SEQ ID NO: 628169 - RNA, 22 nt, Human
uaugaagaaguucugugaaaug

SEQ ID NO: 628170 - RNA, 22 nt, Human
uauuuuguauuuaugcaagaaa

SEQ ID NO: 628171 - RNA, 22 nt, Human
uggagggcgcuuagauggaggg

SEQ ID NO: 628172 - RNA, 22 nt, Human
aggaugugagccagccuggccu

SEQ ID NO: 628173 - RNA, 22 nt, Human
acaguuuacagggauuugagcu

SEQ ID NO: 628174 - RNA, 22 nt, Human
guaguguguaggcacugugcuc

SEQ ID NO: 628175 - RNA, 23 nt, Human
uuuauagcagcaugauuuauagu

SEQ ID NO: 628176 - RNA, 20 nt, Human
cugcauguuggagguguacc

SEQ ID NO: 628177 - RNA, 22 nt, Human
agcucaagaguaguucgagggg

SEQ ID NO: 628178 - RNA, 19 nt, Human
agacaugagacacaggaug

SEQ ID NO: 628179 - RNA, 22 nt, Human
uguuaaauguuccuuuacugga

SEQ ID NO: 628180 - RNA, 22 nt, Human
augcuugguuccuacuucuggc

SEQ ID NO: 628181 - RNA, 22 nt, Human
acuggcagaauugaauaguugu

SEQ ID NO: 628182 - RNA, 22 nt, Human
uuuggacaaaugucugacuuuc

SEQ ID NO: 628183 - RNA, 21 nt, Human
acugccuggggugcuggccaa

SEQ ID NO: 628184 - RNA, 23 nt, Human
cugggcauggagcuucagaggcu

SEQ ID NO: 628185 - RNA, 22 nt, Human
aaagucaggcuguguaccuaac

SEQ ID NO: 628186 - RNA, 22 nt, Human
uuuggagagcagcuaggcccuu

SEQ ID NO: 628187 - RNA, 22 nt, Human
caaggccugccucuggcagaaa

SEQ ID NO: 628188 - RNA, 19 nt, Human
acacauguguguuaugugc

SEQ ID NO: 628189 - RNA, 22 nt, Human
uguggcugccacccugaagccg

SEQ ID NO: 628190 - RNA, 22 nt, Human
augcaauaaauacuuuccagcu

SEQ ID NO: 628191 - RNA, 22 nt, Human
gaggcaguuccugagugacaag

SEQ ID NO: 628192 - RNA, 22 nt, Human
ugucauuccuucaauguagaua

SEQ ID NO: 628193 - RNA, 22 nt, Human
gaaggcugagcagacaggccaa

SEQ ID NO: 628194 - RNA, 22 nt, Human
ccaggggggcguagaugcuggg

SEQ ID NO: 628195 - RNA, 22 nt, Human
agacccucuccucauggacaug

SEQ ID NO: 628196 - RNA, 22 nt, Human
cuucacaaauggccuagaguuc

SEQ ID NO: 628197 - RNA, 22 nt, Human
cugggccucacacccaccaaau

SEQ ID NO: 628198 - RNA, 22 nt, Human
agcagcuguggaaaaguaacua

SEQ ID NO: 628199 - RNA, 22 nt, Human
agcaucuggcagaaagucagaa

SEQ ID NO: 628200 - RNA, 22 nt, Human
ucagaggagaugguuaccaggg

SEQ ID NO: 628201 - RNA, 22 nt, Human
ugaagcugccugcucacagcca

SEQ ID NO: 628202 - RNA, 22 nt, Human
ugcuccaggcaagcugagaguu

SEQ ID NO: 628203 - RNA, 22 nt, Human
uggccugcccagagcagcucug

SEQ ID NO: 628204 - RNA, 22 nt, Human
agaaacauuuagauuauauguc

SEQ ID NO: 628205 - RNA, 22 nt, Human
uauaauuaguaaauggcagauu

SEQ ID NO: 628206 - RNA, 22 nt, Human
uucuccuggagugcuuguuggg

SEQ ID NO: 628207 - RNA, 22 nt, Human
aagugauuuagucuuauaaagg

SEQ ID NO: 628208 - RNA, 22 nt, Human
gcugagacuuccacugccaucu

SEQ ID NO: 628209 - RNA, 22 nt, Human
cauugaaaccuaacauaggcug

SEQ ID NO: 628210 - RNA, 22 nt, Human
aacuuuaucggaacagguacuc

SEQ ID NO: 628211 - RNA, 22 nt, Human
ugaaggcccagccacagaaugg

SEQ ID NO: 628212 - RNA, 23 nt, Human
auuugagaaaguauuuuuaagac

SEQ ID NO: 628213 - RNA, 22 nt, Human
aaauaugaaugauaagaguuau

SEQ ID NO: 628214 - RNA, 22 nt, Human
uuuuaugauugagcuggcuaca

SEQ ID NO: 628215 - RNA, 22 nt, Human
gcuggagguuucaccugaguuu

SEQ ID NO: 628216 - RNA, 22 nt, Human
aguguuuagggaaucaaggggu

SEQ ID NO: 628217 - RNA, 22 nt, Human
ucauaaagagugcuguuguuuu

SEQ ID NO: 628218 - RNA, 22 nt, Human
uucccucuccaggagcccugag

SEQ ID NO: 628219 - RNA, 22 nt, Human
acugaggcuuaaagagauuagg

SEQ ID NO: 628220 - RNA, 22 nt, Human
gcaggcuguagacaccaaacua

SEQ ID NO: 628221 - RNA, 23 nt, Human
ugcuucucugcuugacaguucug

SEQ ID NO: 628222 - RNA, 22 nt, Human
ccagguacuugguaugcauuca

SEQ ID NO: 628223 - RNA, 22 nt, Human
gcuggcucgggaagcaggggau

SEQ ID NO: 628224 - RNA, 20 nt, Human
ucaaagcaaagggagaugau

SEQ ID NO: 628225 - RNA, 17 nt, Human
ucaggcugugccuggua

SEQ ID NO: 628226 - RNA, 22 nt, Human
ugaggggagguuggggcacauc

SEQ ID NO: 628227 - RNA, 22 nt, Human
aacacaguuucugcauugguag

SEQ ID NO: 628228 - RNA, 22 nt, Human
cuuaagauugucagcuucagcc

SEQ ID NO: 628229 - RNA, 22 nt, Human
ucagcaggcagaaaucugcaga

SEQ ID NO: 628230 - RNA, 22 nt, Human
cugcagccacgagucacagccc

SEQ ID NO: 628231 - RNA, 22 nt, Human
ugacacugcaaauauaaauauu

SEQ ID NO: 628232 - RNA, 22 nt, Human
uuuagcagagcauaugauaucc

SEQ ID NO: 628233 - RNA, 22 nt, Human
uuuccuuugaggguccuacacu

SEQ ID NO: 628234 - RNA, 22 nt, Human
ugggcaccugaggccuggcagg

SEQ ID NO: 628235 - RNA, 22 nt, Human
aaacauucccuaauguguccgu

SEQ ID NO: 628236 - RNA, 21 nt, Human
cucuggaguuugaaggcuggg

SEQ ID NO: 628237 - RNA, 22 nt, Human
uauuuugagguauuuuugagcu

SEQ ID NO: 628238 - RNA, 22 nt, Human
aauuagggagagguagcuaggu

SEQ ID NO: 628239 - RNA, 22 nt, Human
uaaaggcucacuggcuuggggu

SEQ ID NO: 628240 - RNA, 23 nt, Human
uucauugauugcaaggagauugg

SEQ ID NO: 628241 - RNA, 22 nt, Human
ugaggcagggaguuuaauuguc

SEQ ID NO: 628242 - RNA, 22 nt, Human
acacuuauuuuuguccacuucc

SEQ ID NO: 628243 - RNA, 22 nt, Human
ucccaggacaugggcucugcuc

SEQ ID NO: 628244 - RNA, 22 nt, Human
ucagaaauacuaucagcuuuug

SEQ ID NO: 628245 - RNA, 22 nt, Human
ugucaucugauauuacuuauag

SEQ ID NO: 628246 - RNA, 23 nt, Human
cagaggugucagugcccaguguc

SEQ ID NO: 628247 - RNA, 22 nt, Human
ugauucaacuuucuugaaugca

SEQ ID NO: 628248 - RNA, 22 nt, Human
uccagcugcuagcuagaugcaa

SEQ ID NO: 628249 - RNA, 22 nt, Human
ucaugcaaauacuguuccagaa

SEQ ID NO: 628250 - RNA, 22 nt, Human
ugcugaggaauaauuguuccug

SEQ ID NO: 628251 - RNA, 22 nt, Human
cugugaauugcaacaauugcaa

SEQ ID NO: 628252 - RNA, 22 nt, Human
acacaggcaaugugagugggag

SEQ ID NO: 628253 - RNA, 18 nt, Human
uagggcucuagggaguga

SEQ ID NO: 628254 - RNA, 21 nt, Human
acauacauaccuuaccaccuu

SEQ ID NO: 628255 - RNA, 22 nt, Human
uuugaggaagaucggagggaaa

SEQ ID NO: 628256 - RNA, 22 nt, Human
ggaguggcagagaggguauacu

SEQ ID NO: 628257 - RNA, 22 nt, Human
uggcacagacagcacagcaaug

SEQ ID NO: 628258 - RNA, 22 nt, Human
auggacagugugaagcagauag

SEQ ID NO: 628259 - RNA, 22 nt, Human
ucuccucugcgcggcagugccc

SEQ ID NO: 628260 - RNA, 22 nt, Human
ccuuucucuuggauaccgauug

SEQ ID NO: 628261 - RNA, 22 nt, Human
cuuuuacauuuguugaagagua

SEQ ID NO: 628262 - RNA, 22 nt, Human
gucagcaauucaagagcucuua

SEQ ID NO: 628263 - RNA, 21 nt, Human
cgggugaguugagcaggacac

SEQ ID NO: 628264 - RNA, 22 nt, Human
uagcaucugcauuuguaacuag

SEQ ID NO: 628265 - RNA, 22 nt, Human
uaaucacagaaacagacuguuu

SEQ ID NO: 628266 - RNA, 22 nt, Human
auguaucaauuaucugucugca

SEQ ID NO: 628267 - RNA, 22 nt, Human
ccagauguauguaugagugcau

SEQ ID NO: 628268 - RNA, 17 nt, Human
agguguggucaagggag

SEQ ID NO: 628269 - RNA, 22 nt, Human
gagcccagguucugcuuccagc

SEQ ID NO: 628270 - RNA, 22 nt, Human
acugucuuuauuagaaucuuau

SEQ ID NO: 628271 - RNA, 22 nt, Human
ucugguuucccaguuccuccgu

SEQ ID NO: 628272 - RNA, 22 nt, Human
uauuaugagguauuuggacuuu

SEQ ID NO: 628273 - RNA, 22 nt, Human
cucuuuccaggguaccccaggu

SEQ ID NO: 628274 - RNA, 22 nt, Human
gaguguguucuuuaugcuguga

SEQ ID NO: 628275 - RNA, 22 nt, Human
uuucugcauauguauguaugga

SEQ ID NO: 628276 - RNA, 21 nt, Human
auggccacuauggugcagcag

SEQ ID NO: 628277 - RNA, 22 nt, Human
uuucuacagguugauggguuug

SEQ ID NO: 628278 - RNA, 22 nt, Human
agggucuguggaugcaucuggg

SEQ ID NO: 628279 - RNA, 22 nt, Human
gcuggaguccaguggcaugauc

SEQ ID NO: 628280 - RNA, 22 nt, Human
auucuuguuuaauuugcauccc

SEQ ID NO: 628281 - RNA, 21 nt, Human
uguuuucuaaagggcggauca

SEQ ID NO: 628282 - RNA, 22 nt, Human
aaaagcaaguugccuagguuga

SEQ ID NO: 628283 - RNA, 22 nt, Human
acagcagcuaaaggugucuccu

SEQ ID NO: 628284 - RNA, 22 nt, Human
acacuguguggucucucucgga

SEQ ID NO: 628285 - RNA, 22 nt, Human
acagggcucugacaccaaggua

SEQ ID NO: 628286 - RNA, 21 nt, Human
acugagagauguuggaucaua

SEQ ID NO: 628287 - RNA, 22 nt, Human
agcuccagauuaauuguaggag

SEQ ID NO: 628288 - RNA, 22 nt, Human
uccugagggcauuuuggugacu

SEQ ID NO: 628289 - RNA, 22 nt, Human
cccagagaauuccacauagagg

SEQ ID NO: 628290 - RNA, 22 nt, Human
gagcccugaacaacagcaggaa

SEQ ID NO: 628291 - RNA, 22 nt, Human
ucucuucugaccuagccuugga

SEQ ID NO: 628292 - RNA, 22 nt, Human
cugcauccuggaaauagcuaag

SEQ ID NO: 628293 - RNA, 22 nt, Human
cuuuccccaguauaucauugcc

SEQ ID NO: 628294 - RNA, 22 nt, Human
ugguuggcugagcagagucacu

SEQ ID NO: 628295 - RNA, 22 nt, Human
cuggcagcuuauuagaaaugca

SEQ ID NO: 628296 - RNA, 22 nt, Human
caggaacacaaugagucucaaa

SEQ ID NO: 628297 - RNA, 21 nt, Human
uguuaugugcuucaagaagug

SEQ ID NO: 628298 - RNA, 22 nt, Human
gcuaaauaaucuucuucugaca

SEQ ID NO: 628299 - RNA, 22 nt, Human
ucagcagucacauguuguccca

SEQ ID NO: 628300 - RNA, 22 nt, Human
ccuccuuuccuguuuuccugag

SEQ ID NO: 628301 - RNA, 22 nt, Human
gugaaggaggggccacagauau

SEQ ID NO: 628302 - RNA, 22 nt, Human
ccucuggccagagaaaggccag

SEQ ID NO: 628303 - RNA, 22 nt, Human
agggaggaaggauguuccaaag

SEQ ID NO: 628304 - RNA, 22 nt, Human
accagcaagauuuugcuuugca

SEQ ID NO: 628305 - RNA, 22 nt, Human
caucacauuuaauuaaaauguc

SEQ ID NO: 628306 - RNA, 18 nt, Human
ugaucuuugaguauaaug

SEQ ID NO: 628307 - RNA, 22 nt, Human
cauguaaugcugggagcugggc

SEQ ID NO: 628308 - RNA, 21 nt, Human
aaauacagaaacuuguuuuca

SEQ ID NO: 628309 - RNA, 22 nt, Human
gugaggugguacaauauuaacu

SEQ ID NO: 628310 - RNA, 22 nt, Human
gcauauuuucacaagcucuugg

SEQ ID NO: 628311 - RNA, 22 nt, Human
ugucuacuccugugcuagcucc

SEQ ID NO: 628312 - RNA, 22 nt, Human
uaugcacacaucgcagcaggaa

SEQ ID NO: 628313 - RNA, 22 nt, Human
gacagcuucuagaggaauuggu

SEQ ID NO: 628314 - RNA, 22 nt, Human
cguggucucccacagaaagaag

SEQ ID NO: 628315 - RNA, 20 nt, Human
ccuucuccagcuuguucuug

SEQ ID NO: 628316 - RNA, 22 nt, Human
ggucccagcugcucaagaggcu

SEQ ID NO: 628317 - RNA, 22 nt, Human
aaugaacacuuagccuuucuau

SEQ ID NO: 628318 - RNA, 22 nt, Human
ucauuucuccgaccugcugucc

SEQ ID NO: 628319 - RNA, 22 nt, Human
ugaaauguugccaugaggucuc

SEQ ID NO: 628320 - RNA, 22 nt, Human
gaccagggucacucacagggcu

SEQ ID NO: 628321 - RNA, 22 nt, Human
uacaguguauguauuuguaggu

SEQ ID NO: 628322 - RNA, 22 nt, Human
caguuuauagcucuagcagcuu

SEQ ID NO: 628323 - RNA, 22 nt, Human
uuuauaaacaguaccacggugc

SEQ ID NO: 628324 - RNA, 22 nt, Human
cuggcuguuucaggcagugucc

SEQ ID NO: 628325 - RNA, 22 nt, Human
ucagcagcagcucagcauguuu

SEQ ID NO: 628326 - RNA, 22 nt, Human
ucagagugaccuuacauggucu

SEQ ID NO: 628327 - RNA, 22 nt, Human
uauguugcaccaaccuaauaau

SEQ ID NO: 628328 - RNA, 22 nt, Human
auucugaguuagagucagccag

SEQ ID NO: 628329 - RNA, 22 nt, Human
auuuccuuugcaaagacugugc

SEQ ID NO: 628330 - RNA, 22 nt, Human
cagcagcaggcgcacggccguc

SEQ ID NO: 628331 - RNA, 22 nt, Human
aagcccagaaucaagucuacug

SEQ ID NO: 628332 - RNA, 22 nt, Human
aggcugagacugugcauuagug

SEQ ID NO: 628333 - RNA, 22 nt, Human
ggcucugggaaauggucuuccu

SEQ ID NO: 628334 - RNA, 22 nt, Human
cuggaagacucaauggccugcc

SEQ ID NO: 628335 - RNA, 21 nt, Human
ugugcaguccaaugugcuagc

SEQ ID NO: 628336 - RNA, 22 nt, Human
ccaaaaagcucagagauauguu

SEQ ID NO: 628337 - RNA, 22 nt, Human
aaauuacagccuuggguagcuu

SEQ ID NO: 628338 - RNA, 22 nt, Human
uauagagcuuuggcauugauua

SEQ ID NO: 628339 - RNA, 22 nt, Human
ugaagaaacagaccaagaggau

SEQ ID NO: 628340 - RNA, 22 nt, Human
uuucccaagaaaaauaauugga

SEQ ID NO: 628341 - RNA, 22 nt, Human
ccagcagccaccuucucgaaau

SEQ ID NO: 628342 - RNA, 22 nt, Human
uuggcugguuucaagaaggcau

SEQ ID NO: 628343 - RNA, 22 nt, Human
cagacaggguccuguccgucac

SEQ ID NO: 628344 - RNA, 22 nt, Human
uggcagagucucuccuuuccag

SEQ ID NO: 628345 - RNA, 22 nt, Human
ggccugggccuuuguguuuuga

SEQ ID NO: 628346 - RNA, 22 nt, Human
guacauuuacugaugaaaagua

SEQ ID NO: 628347 - RNA, 22 nt, Human
uguaaacauaccagagccaagu

SEQ ID NO: 628348 - RNA, 22 nt, Human
uacauagauuuugaaacuggac

SEQ ID NO: 628349 - RNA, 22 nt, Human
aguccagccuucaaucuuagug

SEQ ID NO: 628350 - RNA, 22 nt, Human
ucacagaagcuugaagauuuuc

SEQ ID NO: 628351 - RNA, 22 nt, Human
agcagccccucggcgggugcgc

SEQ ID NO: 628352 - RNA, 22 nt, Human
ugcauacacacauagguauggg

SEQ ID NO: 628353 - RNA, 22 nt, Human
ggucccagguugacagggagac

SEQ ID NO: 628354 - RNA, 22 nt, Human
cucagggcuugaguguccagga

SEQ ID NO: 628355 - RNA, 22 nt, Human
agcagcccgaggaucauguguc

SEQ ID NO: 628356 - RNA, 22 nt, Human
acaugacuuuucucuuccagag

SEQ ID NO: 628357 - RNA, 22 nt, Human
aguauauugguguuauuccuca

SEQ ID NO: 628358 - RNA, 22 nt, Human
gcacccuagaguugccugagga

SEQ ID NO: 628359 - RNA, 22 nt, Human
ccuggccacagggcucugcauu

SEQ ID NO: 628360 - RNA, 18 nt, Human
aguuccuuaaauuggugu

SEQ ID NO: 628361 - RNA, 22 nt, Human
uuuuggcuccagugguuugugc

SEQ ID NO: 628362 - RNA, 22 nt, Human
uagguucucuauugcccccaaa

SEQ ID NO: 628363 - RNA, 22 nt, Human
acagagucauucacugaugaag

SEQ ID NO: 628364 - RNA, 19 nt, Human
cacauuuugagucugagau

SEQ ID NO: 628365 - RNA, 23 nt, Human
aguaugaauucauuguuuuaguu

SEQ ID NO: 628366 - RNA, 22 nt, Human
ucacagaaggaccuuguuucau

SEQ ID NO: 628367 - RNA, 22 nt, Human
aauuagagaucaguucuuugac

SEQ ID NO: 628368 - RNA, 22 nt, Human
ugccuggcucuaucaguggugg

SEQ ID NO: 628369 - RNA, 18 nt, Human
uccaggacucugcguggc

SEQ ID NO: 628370 - RNA, 21 nt, Human
ugggcagauggcaguguggcu

SEQ ID NO: 628371 - RNA, 22 nt, Human
aaacaauguacauuuauaaugc

SEQ ID NO: 628372 - RNA, 22 nt, Human
guccucuguuagaaaugugcuu

SEQ ID NO: 628373 - RNA, 22 nt, Human
ugugagugacaguucccuuggu

SEQ ID NO: 628374 - RNA, 22 nt, Human
uuauugcuauggugagagggau

SEQ ID NO: 628375 - RNA, 22 nt, Human
gcccaagggcaucaaguucuac

SEQ ID NO: 628376 - RNA, 22 nt, Human
uaaauagagaaucagcuuggag

SEQ ID NO: 628377 - RNA, 18 nt, Human
gagguagauaagauuuuc

SEQ ID NO: 628378 - RNA, 23 nt, Human
uuuagucaguugacagccauaua

SEQ ID NO: 628379 - RNA, 22 nt, Human
cccuggaguagcacugggucgc

SEQ ID NO: 628380 - RNA, 20 nt, Human
ggguacagauaugcagugaa

SEQ ID NO: 628381 - RNA, 22 nt, Human
ucagcccagcccagcaagugca

SEQ ID NO: 628382 - RNA, 22 nt, Human
gagcacaggcugcugugaacug

SEQ ID NO: 628383 - RNA, 22 nt, Human
cagcuuggcuuccgcuuuacug

SEQ ID NO: 628384 - RNA, 23 nt, Human
uccugaggguuucccagccuugg

SEQ ID NO: 628385 - RNA, 22 nt, Human
cuggauuuugaugagcaguuuu

SEQ ID NO: 628386 - RNA, 22 nt, Human
cagccagaucagggcagggguu

SEQ ID NO: 628387 - RNA, 22 nt, Human
gucuacuuuugucaucauugca

SEQ ID NO: 628388 - RNA, 17 nt, Human
ugcugucugcuucccua

SEQ ID NO: 628389 - RNA, 22 nt, Human
cagacaggaaguucagaagaaa

SEQ ID NO: 628390 - RNA, 22 nt, Human
uuggccagcagcucuggcuuag

SEQ ID NO: 628391 - RNA, 22 nt, Human
uccucagucguuugagccaaaa

SEQ ID NO: 628392 - RNA, 22 nt, Human
uagguucacugucuugaggagc

SEQ ID NO: 628393 - RNA, 22 nt, Human
aaggccacagagccucagagag

SEQ ID NO: 628394 - RNA, 22 nt, Human
acccaggacaugggcacccgug

SEQ ID NO: 628395 - RNA, 22 nt, Human
acagcuggugaauguucucugu

SEQ ID NO: 628396 - RNA, 21 nt, Human
uggaccuguccuucucgcugu

SEQ ID NO: 628397 - RNA, 22 nt, Human
ggguaggagaggugucugugug

SEQ ID NO: 628398 - RNA, 22 nt, Human
gguuggggcgagcuggaggccc

SEQ ID NO: 628399 - RNA, 22 nt, Human
gcugcccugucugcagcaggac

SEQ ID NO: 628400 - RNA, 22 nt, Human
aaaugcacagguuuuaaauccu

SEQ ID NO: 628401 - RNA, 22 nt, Human
ccugccuggcccaccuugccac

SEQ ID NO: 628402 - RNA, 21 nt, Human
acagcagacaggcuuaggacc

SEQ ID NO: 628403 - RNA, 22 nt, Human
acauuugguaacacuugagcau

SEQ ID NO: 628404 - RNA, 22 nt, Human
uauguguauaccuauacaugug

SEQ ID NO: 628405 - RNA, 22 nt, Human
gaucaguaagugaauaaugagu

SEQ ID NO: 628406 - RNA, 22 nt, Human
acacauacauggggaagaugag

SEQ ID NO: 628407 - RNA, 22 nt, Human
uugauuugcagaagguguagag

SEQ ID NO: 628408 - RNA, 22 nt, Human
uagaaacaaugacaugcuugua

SEQ ID NO: 628409 - RNA, 21 nt, Human
acagcagggcuggcaugacag

SEQ ID NO: 628410 - RNA, 22 nt, Human
acacugugcaugcauauacaca

SEQ ID NO: 628411 - RNA, 22 nt, Human
augccacuguacucaacaauag

SEQ ID NO: 628412 - RNA, 22 nt, Human
aguggcugcuaugaucaggaca

SEQ ID NO: 628413 - RNA, 22 nt, Human
uaaguauguuagaaaaucaagu

SEQ ID NO: 628414 - RNA, 22 nt, Human
ucucugggcuaaaaucaaggug

SEQ ID NO: 628415 - RNA, 22 nt, Human
aaugucugaaaaucagacugca

SEQ ID NO: 628416 - RNA, 22 nt, Human
guacaguuuucaguguucacug

SEQ ID NO: 628417 - RNA, 22 nt, Human
gagggagggaaaguuuaacacu

SEQ ID NO: 628418 - RNA, 22 nt, Human
cugccuccaggcucaccuugac

SEQ ID NO: 628419 - RNA, 22 nt, Human
cuggagguuggguccaggccag

SEQ ID NO: 628420 - RNA, 22 nt, Human
uucuggaaccagccugccuggg

SEQ ID NO: 628421 - RNA, 22 nt, Human
aggagucauaaaugugaacaaa

SEQ ID NO: 628422 - RNA, 23 nt, Human
uucagacugccuucagcauuguc

SEQ ID NO: 628423 - RNA, 22 nt, Human
auguuccugauccucguucuau

SEQ ID NO: 628424 - RNA, 22 nt, Human
uaggugaguuuggggaagauag

SEQ ID NO: 628425 - RNA, 22 nt, Human
uuuacacauaaauguguagaca

SEQ ID NO: 628426 - RNA, 22 nt, Human
uagcaaagcuccguaguuauuu

SEQ ID NO: 628427 - RNA, 22 nt, Human
agaguggggaagguguugagaa

SEQ ID NO: 628428 - RNA, 22 nt, Human
gcuuggggagcucaguguccuu

SEQ ID NO: 628429 - RNA, 22 nt, Human
uugaggcacagauuuuaguggc

SEQ ID NO: 628430 - RNA, 22 nt, Human
aggcccugaagucggccccuca

SEQ ID NO: 628431 - RNA, 22 nt, Human
aucuuucaaucaggaaaaaucu

SEQ ID NO: 628432 - RNA, 22 nt, Human
aggcuccugagaggcagaggcu

SEQ ID NO: 628433 - RNA, 22 nt, Human
ggaguugauuuuggauauauua

SEQ ID NO: 628434 - RNA, 22 nt, Human
uggaagccaaggucagaaggag

SEQ ID NO: 628435 - RNA, 21 nt, Human
accuucaguguucucagcugc

SEQ ID NO: 628436 - RNA, 22 nt, Human
aaauugcuaaauuguaagaggg

SEQ ID NO: 628437 - RNA, 22 nt, Human
ugaggauuggcaaaacucaggg

SEQ ID NO: 628438 - RNA, 22 nt, Human
aguuuacacuuuugauucuuau

SEQ ID NO: 628439 - RNA, 22 nt, Human
gcugccugauguccagcaggac

SEQ ID NO: 628440 - RNA, 22 nt, Human
uugcaucaaauauguaccacag

SEQ ID NO: 628441 - RNA, 22 nt, Human
ucagcacuauacauuuugaaua

SEQ ID NO: 628442 - RNA, 22 nt, Human
ucuuuuuuuccugugcagagcu

SEQ ID NO: 628443 - RNA, 22 nt, Human
cucccucucuaaggcaaagaga

SEQ ID NO: 628444 - RNA, 22 nt, Human
guugggcucauuacagccugcu

SEQ ID NO: 628445 - RNA, 23 nt, Human
aaagacucuccagagggaaguag

SEQ ID NO: 628446 - RNA, 22 nt, Human
gggcacagucuaaaguugggcc

SEQ ID NO: 628447 - RNA, 22 nt, Human
uggugaggucauagagaacugu

SEQ ID NO: 628448 - RNA, 22 nt, Human
gugauaauugcagagaaaggag

SEQ ID NO: 628449 - RNA, 22 nt, Human
aguggcaaugggaguggagaca

SEQ ID NO: 628450 - RNA, 23 nt, Human
aucaccagcggaagcugcagacc

SEQ ID NO: 628451 - RNA, 22 nt, Human
aguguuucugugccccaguguu

SEQ ID NO: 628452 - RNA, 21 nt, Human
cugugucgcucucgcugggag

SEQ ID NO: 628453 - RNA, 22 nt, Human
agucauauauuuuguuugugca

SEQ ID NO: 628454 - RNA, 22 nt, Human
uaacaugaaacuccaaauggua

SEQ ID NO: 628455 - RNA, 22 nt, Human
uuggccagagguuucucucaug

SEQ ID NO: 628456 - RNA, 22 nt, Human
aauucccaccuucucucuuuug

SEQ ID NO: 628457 - RNA, 22 nt, Human
ggcccucugccugugcuggcga

SEQ ID NO: 628458 - RNA, 22 nt, Human
agccaguguuaagugacugguu

SEQ ID NO: 628459 - RNA, 17 nt, Human
aaguccagaguugagca

SEQ ID NO: 628460 - RNA, 22 nt, Human
uguuggaaaggccaggcugugg

SEQ ID NO: 628461 - RNA, 22 nt, Human
ccuccccacagcccaggagacu

SEQ ID NO: 628462 - RNA, 22 nt, Human
uggucugauuccaccuaacuga

SEQ ID NO: 628463 - RNA, 22 nt, Human
uagugucucggggcccaggauu

SEQ ID NO: 628464 - RNA, 22 nt, Human
caggggacaguaugguggauga

SEQ ID NO: 628465 - RNA, 22 nt, Human
cugacucuccucaagcauaaau

SEQ ID NO: 628466 - RNA, 22 nt, Human
acagggcuggggcacuuggcug

SEQ ID NO: 628467 - RNA, 20 nt, Human
uccuggucauguggcugggc

SEQ ID NO: 628468 - RNA, 22 nt, Human
ugaguauauacccagaagugga

SEQ ID NO: 628469 - RNA, 22 nt, Human
uuuauuauguacaggcacuaua

SEQ ID NO: 628470 - RNA, 22 nt, Human
ugaaggccagcagagugaaggc

SEQ ID NO: 628471 - RNA, 22 nt, Human
agcccccaaaagugcuuaugau

SEQ ID NO: 628472 - RNA, 22 nt, Human
cagucacugguucuauaggccc

SEQ ID NO: 628473 - RNA, 20 nt, Human
ucucuucuggggagauaaaa

SEQ ID NO: 628474 - RNA, 22 nt, Human
cugcucuguuucuuagcugggu

SEQ ID NO: 628475 - RNA, 22 nt, Human
aaguguauuuuuguacuaacau

SEQ ID NO: 628476 - RNA, 22 nt, Human
augaaauuaaucaacacauaca

SEQ ID NO: 628477 - RNA, 22 nt, Human
acauuuauauuuaguggggaau

SEQ ID NO: 628478 - RNA, 22 nt, Human
uacaaugagcugagccagaggc

SEQ ID NO: 628479 - RNA, 22 nt, Human
auuaaugucuaccaguugugug

SEQ ID NO: 628480 - RNA, 22 nt, Human
ccugggacucggccaggacaga

SEQ ID NO: 628481 - RNA, 22 nt, Human
gcagcauccuuggccuccaccc

SEQ ID NO: 628482 - RNA, 22 nt, Human
ccugagcuggaagagcuugugc

SEQ ID NO: 628483 - RNA, 22 nt, Human
uggggcugugagacuacaggau

SEQ ID NO: 628484 - RNA, 22 nt, Human
agggagacaaaagcagcugcca

SEQ ID NO: 628485 - RNA, 22 nt, Human
acucagaggcagcugcucaccc

SEQ ID NO: 628486 - RNA, 22 nt, Human
caggccgggcacugcgcuaggu

SEQ ID NO: 628487 - RNA, 22 nt, Human
agcaauauaaauguuggguaga

SEQ ID NO: 628488 - RNA, 22 nt, Human
acugcacuucacccugggugac

SEQ ID NO: 628489 - RNA, 22 nt, Human
uugcagggauuaccuuauuuuu

SEQ ID NO: 628490 - RNA, 21 nt, Human
acugagguuagaugccuugcc

SEQ ID NO: 628491 - RNA, 22 nt, Human
cagcucugugggagcguaugug

SEQ ID NO: 628492 - RNA, 23 nt, Human
uggucucagccugugagagcuga

SEQ ID NO: 628493 - RNA, 22 nt, Human
cacacauuaauaucaaaggcuc

SEQ ID NO: 628494 - RNA, 22 nt, Human
ucuguuuucauuugucuugaga

SEQ ID NO: 628495 - RNA, 22 nt, Human
accacaggacccaugagucagu

SEQ ID NO: 628496 - RNA, 20 nt, Human
cagccuccacucacucagcu

SEQ ID NO: 628497 - RNA, 22 nt, Human
gggagcugaccugcagguuccc

SEQ ID NO: 628498 - RNA, 22 nt, Human
ccacugaggcaggcaguaucua

SEQ ID NO: 628499 - RNA, 22 nt, Human
uacauugcuagaaauguauuuu

SEQ ID NO: 628500 - RNA, 22 nt, Human
ucuggcaggcaaucggcucugg

SEQ ID NO: 628501 - RNA, 22 nt, Human
acuuucuaggucucaguccuuu

SEQ ID NO: 628502 - RNA, 22 nt, Human
ugucuuauggcauguccacugg

SEQ ID NO: 628503 - RNA, 22 nt, Human
gcagcccuuucugggcagggga

SEQ ID NO: 628504 - RNA, 22 nt, Human
ggcgccagcccaggccgucgug

SEQ ID NO: 628505 - RNA, 22 nt, Human
uccuugaauggacauuacacug

SEQ ID NO: 628506 - RNA, 22 nt, Human
agccaaggagugcagguggcuu

SEQ ID NO: 628507 - RNA, 22 nt, Human
guuccuaaauuugaaggacuuu

SEQ ID NO: 628508 - RNA, 20 nt, Human
ucagugauuaucucugagug

SEQ ID NO: 628509 - RNA, 22 nt, Human
uuuccucacacagaagaucuug

SEQ ID NO: 628510 - RNA, 22 nt, Human
gauaauaagcacagcaggaugu

SEQ ID NO: 628511 - RNA, 22 nt, Human
ugaaggcuguuggauggggaag

SEQ ID NO: 628512 - RNA, 22 nt, Human
gucugugggccaaauacagccc

SEQ ID NO: 628513 - RNA, 22 nt, Human
ggcauugaugggagauggugga

SEQ ID NO: 628514 - RNA, 23 nt, Human
aggcugagcucucccagcuucag

SEQ ID NO: 628515 - RNA, 17 nt, Human
ugagagcagggcugggc

SEQ ID NO: 628516 - RNA, 22 nt, Human
cuccucagaacagccuuggcug

SEQ ID NO: 628517 - RNA, 22 nt, Human
ccugggucuauagacuucaaga

SEQ ID NO: 628518 - RNA, 22 nt, Human
acaccaugguucccaaacugug

SEQ ID NO: 628519 - RNA, 22 nt, Human
agcuccaggucagugcaccccu

SEQ ID NO: 628520 - RNA, 22 nt, Human
cauuagaagaacaguuauauua

SEQ ID NO: 628521 - RNA, 20 nt, Human
augcaaacucacaaaauacc

SEQ ID NO: 628522 - RNA, 18 nt, Human
ggaaaaggagugucuagc

SEQ ID NO: 628523 - RNA, 22 nt, Human
cuuaaacugaaagcuacaagau

SEQ ID NO: 628524 - RNA, 22 nt, Human
auuccacagccgauaccaugac

SEQ ID NO: 628525 - RNA, 22 nt, Human
gauaauccaagauugccucacu

SEQ ID NO: 628526 - RNA, 22 nt, Human
uauacugagagcaaauacauuc

SEQ ID NO: 628527 - RNA, 21 nt, Human
ugcaggaaagugcugcgaccc

SEQ ID NO: 628528 - RNA, 22 nt, Human
auccccaggggcauucaagcuu

SEQ ID NO: 628529 - RNA, 17 nt, Human
cuuugucaccaaugcca

SEQ ID NO: 628530 - RNA, 22 nt, Human
ugaccucuguccugcagucugg

SEQ ID NO: 628531 - RNA, 21 nt, Human
ugggcaaguuuggggguccuc

SEQ ID NO: 628532 - RNA, 22 nt, Human
agaucaguuagauagcuugaug

SEQ ID NO: 628533 - RNA, 22 nt, Human
agcagcucaacagugucucuau

SEQ ID NO: 628534 - RNA, 22 nt, Human
uucaguauguguaaacuacuuu

SEQ ID NO: 628535 - RNA, 22 nt, Human
aauguacagcugucuuuccucc

SEQ ID NO: 628536 - RNA, 22 nt, Human
uucaaguuaccuuuaaacagcu

SEQ ID NO: 628537 - RNA, 22 nt, Human
guuguuuguaaugacaggagac

SEQ ID NO: 628538 - RNA, 22 nt, Human
uuagccaugugggaaaaacagc

SEQ ID NO: 628539 - RNA, 22 nt, Human
ucccuggguuaccuuucaaggu

SEQ ID NO: 628540 - RNA, 22 nt, Human
cacuggcaugugaggcgguggc

SEQ ID NO: 628541 - RNA, 22 nt, Human
acagaugaguuagaauaggcag

SEQ ID NO: 628542 - RNA, 22 nt, Human
ugaaucaaugaauugcacuuca

SEQ ID NO: 628543 - RNA, 22 nt, Human
ggcaggagaauggcgugaacuc

SEQ ID NO: 628544 - RNA, 22 nt, Human
gcagcagugcgggcagcuacag

SEQ ID NO: 628545 - RNA, 20 nt, Human
aagucccuaagucucuggcc

SEQ ID NO: 628546 - RNA, 22 nt, Human
aaaauuacuauuguuccugggc

SEQ ID NO: 628547 - RNA, 22 nt, Human
uuuuuaguagagguggguuuca

SEQ ID NO: 628548 - RNA, 22 nt, Human
acacauuccugcagacaugaug

SEQ ID NO: 628549 - RNA, 22 nt, Human
acucuguuugcagguagcucag

SEQ ID NO: 628550 - RNA, 22 nt, Human
ugcuggccaagcagaggucaau

SEQ ID NO: 628551 - RNA, 22 nt, Human
ggagcugaugacgucaccaugg

SEQ ID NO: 628552 - RNA, 22 nt, Human
gggcuucaaaauuggcacucuu

SEQ ID NO: 628553 - RNA, 22 nt, Human
gacagcuugccugguacugcaa

SEQ ID NO: 628554 - RNA, 22 nt, Human
accucagagauacaaaccaugg

SEQ ID NO: 628555 - RNA, 22 nt, Human
cugugcccuuuguccucgucuc

SEQ ID NO: 628556 - RNA, 22 nt, Human
ccagauauucacuuuuacaugc

SEQ ID NO: 628557 - RNA, 21 nt, Human
agagccugagaucuuccagca

SEQ ID NO: 628558 - RNA, 22 nt, Human
cugacucccuccccaaagcugg

SEQ ID NO: 628559 - RNA, 22 nt, Human
agaccugguuuaucaccagcau

SEQ ID NO: 628560 - RNA, 22 nt, Human
uucuggagaaucaccaccaggc

SEQ ID NO: 628561 - RNA, 22 nt, Human
cugagagaugauauagcuuaau

SEQ ID NO: 628562 - RNA, 22 nt, Human
gcuguucagggcacucaugggc

SEQ ID NO: 628563 - RNA, 22 nt, Human
gaguccuuggcaucaucaguac

SEQ ID NO: 628564 - RNA, 23 nt, Human
uauacacauguggcaguauagug

SEQ ID NO: 628565 - RNA, 22 nt, Human
aggccagcaagaaagagagucu

SEQ ID NO: 628566 - RNA, 22 nt, Human
auaaaguucugcuggcauauau

SEQ ID NO: 628567 - RNA, 16 nt, Human
gcagggguggguggag

SEQ ID NO: 628568 - RNA, 22 nt, Human
ggcauggcuggguucuggugag

SEQ ID NO: 628569 - RNA, 18 nt, Human
ucaaacugucauugguga

SEQ ID NO: 628570 - RNA, 22 nt, Human
uucugugaggacuucucaagga

SEQ ID NO: 628571 - RNA, 22 nt, Human
gaauacacgaaggcaagagucc

SEQ ID NO: 628572 - RNA, 20 nt, Human
acauuugaguaucaucuacu

SEQ ID NO: 628573 - RNA, 22 nt, Human
uucaagucagagcaagccaagu

SEQ ID NO: 628574 - RNA, 22 nt, Human
agacaaauaacuuuuuaugucc

SEQ ID NO: 628575 - RNA, 22 nt, Human
uuagacagagcuccuugagggc

SEQ ID NO: 628576 - RNA, 20 nt, Human
caccucugaaaguuuccagc

SEQ ID NO: 628577 - RNA, 22 nt, Human
ccuguuugguacaaucugccaa

SEQ ID NO: 628578 - RNA, 22 nt, Human
caucuggacaaaacucugaagg

SEQ ID NO: 628579 - RNA, 22 nt, Human
aagucacaagcauauaugcauu

SEQ ID NO: 628580 - RNA, 22 nt, Human
ucuuccaggagggcauuucuuu

SEQ ID NO: 628581 - RNA, 17 nt, Human
ucugagaacuugaagca

SEQ ID NO: 628582 - RNA, 22 nt, Human
agcucccagaguccucugccca

SEQ ID NO: 628583 - RNA, 22 nt, Human
uauuguacaugguuaugcagga

SEQ ID NO: 628584 - RNA, 22 nt, Human
ggacuggccggcgcugaggccc

SEQ ID NO: 628585 - RNA, 22 nt, Human
aacauuuccggccuuuuguucu

SEQ ID NO: 628586 - RNA, 16 nt, Human
uccaagaagugccccu

SEQ ID NO: 628587 - RNA, 22 nt, Human
guggcaguugcuguggcaauaa

SEQ ID NO: 628588 - RNA, 22 nt, Human
gcuguucucuguaacaugcauu

SEQ ID NO: 628589 - RNA, 22 nt, Human
ucucaguguguuuucucucaga

SEQ ID NO: 628590 - RNA, 23 nt, Human
ccuggcuguggauuugggccugc

SEQ ID NO: 628591 - RNA, 19 nt, Human
gaaugucuccuacuucuga

SEQ ID NO: 628592 - RNA, 22 nt, Human
ccagggugcucuguggcgucgc

SEQ ID NO: 628593 - RNA, 22 nt, Human
ucuuuggggcaucugggagauu

SEQ ID NO: 628594 - RNA, 18 nt, Human
gguggcaggucagaugcc

SEQ ID NO: 628595 - RNA, 22 nt, Human
cauguuuucuaggcuuucacaa

SEQ ID NO: 628596 - RNA, 22 nt, Human
uauauuuaauccuagagccauu

SEQ ID NO: 628597 - RNA, 22 nt, Human
auuguacucccucuccugcccg

SEQ ID NO: 628598 - RNA, 22 nt, Human
acagaugcaaggaaaugauugc

SEQ ID NO: 628599 - RNA, 22 nt, Human
aauuccugucuuaacaguucug

SEQ ID NO: 628600 - RNA, 22 nt, Human
gaauuacagccagaagaaugaa

SEQ ID NO: 628601 - RNA, 22 nt, Human
cuuguuuuggcuaguaugaugu

SEQ ID NO: 628602 - RNA, 22 nt, Human
gcccagaaguugaggcugcagu

SEQ ID NO: 628603 - RNA, 22 nt, Human
ucagucuucccuccagugcaac

SEQ ID NO: 628604 - RNA, 22 nt, Human
ucucucaaccucggcacuauug

SEQ ID NO: 628605 - RNA, 22 nt, Human
ucugucacccgagcaggcgaga

SEQ ID NO: 628606 - RNA, 22 nt, Human
uuauguauggauggcugaaagu

SEQ ID NO: 628607 - RNA, 22 nt, Human
cugaaggagguagagugacaua

SEQ ID NO: 628608 - RNA, 22 nt, Human
ucauaguuauggagauuaagga

SEQ ID NO: 628609 - RNA, 22 nt, Human
uguggugagaaacugguagauu

SEQ ID NO: 628610 - RNA, 22 nt, Human
uaggcugacuuguuucauaaag

SEQ ID NO: 628611 - RNA, 22 nt, Human
auggccaggcaccucuggcuga

SEQ ID NO: 628612 - RNA, 17 nt, Human
uccugugggugcagcag

SEQ ID NO: 628613 - RNA, 22 nt, Human
cauuagggccaccauaacaaaa

SEQ ID NO: 628614 - RNA, 20 nt, Human
ccucucugcaugcucccuga

SEQ ID NO: 628615 - RNA, 22 nt, Human
ccugccugaaggucagccaccc

SEQ ID NO: 628616 - RNA, 22 nt, Human
uaaagcaauuacucaguggcuu

SEQ ID NO: 628617 - RNA, 22 nt, Human
ggcauuagcguugaauuuuauu

SEQ ID NO: 628618 - RNA, 22 nt, Human
aauuaugauuggucuaaaccag

SEQ ID NO: 628619 - RNA, 22 nt, Human
agcaggaaguccucucaggaga

SEQ ID NO: 628620 - RNA, 22 nt, Human
aggcuccugcaggugaggugcu

SEQ ID NO: 628621 - RNA, 22 nt, Human
cagagguggggaguauuucaag

SEQ ID NO: 628622 - RNA, 22 nt, Human
ggguggagccaguugacucugu

SEQ ID NO: 628623 - RNA, 22 nt, Human
gugcugggauuacaggugugag

SEQ ID NO: 628624 - RNA, 18 nt, Human
ccacagcagaguucuuac

SEQ ID NO: 628625 - RNA, 22 nt, Human
ucucuuuaaaaauagugaaaua

SEQ ID NO: 628626 - RNA, 22 nt, Human
aagucucucauggcugacagca

SEQ ID NO: 628627 - RNA, 22 nt, Human
cccaggcuccuacuguauucug

SEQ ID NO: 628628 - RNA, 17 nt, Human
ggaaaagaagaguagga

SEQ ID NO: 628629 - RNA, 21 nt, Human
cacauugaauacagagaugga

SEQ ID NO: 628630 - RNA, 22 nt, Human
cugucccagauguucucagcac

SEQ ID NO: 628631 - RNA, 22 nt, Human
acuccugggugcugaccagcgu

SEQ ID NO: 628632 - RNA, 21 nt, Human
aggguggcucugggucagaac

SEQ ID NO: 628633 - RNA, 22 nt, Human
ugcuaaggacugggaggcaggg

SEQ ID NO: 628634 - RNA, 22 nt, Human
acaagcaucagguucagcaaua

SEQ ID NO: 628635 - RNA, 22 nt, Human
guuuauuauacaacaaaagcua

SEQ ID NO: 628636 - RNA, 22 nt, Human
cuuuaguugucuccucaagggu

SEQ ID NO: 628637 - RNA, 22 nt, Human
cugcugcucgaccagucccagg

SEQ ID NO: 628638 - RNA, 18 nt, Human
aaacuggcuuggccugug

SEQ ID NO: 628639 - RNA, 22 nt, Human
uugcucuccagaggcucacagc

SEQ ID NO: 628640 - RNA, 22 nt, Human
cuagagaaaacuguguaucuug

SEQ ID NO: 628641 - RNA, 22 nt, Human
gaagccugguccagagcuccca

SEQ ID NO: 628642 - RNA, 22 nt, Human
cuguacaucccaagauauuucu

SEQ ID NO: 628643 - RNA, 22 nt, Human
gcaucucuuacccacgagccag

SEQ ID NO: 628644 - RNA, 22 nt, Human
uacagagaauaauaggacaggu

SEQ ID NO: 628645 - RNA, 22 nt, Human
uccacuccuuaugccagacggu

SEQ ID NO: 628646 - RNA, 19 nt, Human
ucuaacagcuuucauucua

SEQ ID NO: 628647 - RNA, 19 nt, Human
cagcugcaccgugaccauc

SEQ ID NO: 628648 - RNA, 22 nt, Human
aucaucugcacagauccuauuu

SEQ ID NO: 628649 - RNA, 22 nt, Human
caagcugcagcgccugcgccgg

SEQ ID NO: 628650 - RNA, 22 nt, Human
aggcgguggccaaggagcggga

SEQ ID NO: 628651 - RNA, 22 nt, Human
aaugucuuuaaagugcaauaga

SEQ ID NO: 628652 - RNA, 22 nt, Human
aaaggcaguggguauguggauc

SEQ ID NO: 628653 - RNA, 22 nt, Human
gcucugagugauuaaggagcuu

SEQ ID NO: 628654 - RNA, 19 nt, Human
ucgagucaagacacuaggc

SEQ ID NO: 628655 - RNA, 22 nt, Human
cacuuugaugcagggcucagua

SEQ ID NO: 628656 - RNA, 17 nt, Human
uuaaaccauaaagaagg

SEQ ID NO: 628657 - RNA, 22 nt, Human
cccuguuaaugucaaccugccu

SEQ ID NO: 628658 - RNA, 22 nt, Human
gauggcagcauauugacagcau

SEQ ID NO: 628659 - RNA, 23 nt, Human
ggcugagacuacaggcgcuugcc

SEQ ID NO: 628660 - RNA, 22 nt, Human
ggagaccagaaggaagcuucga

SEQ ID NO: 628661 - RNA, 22 nt, Human
cagagcaacacccuuuacaucg

SEQ ID NO: 628662 - RNA, 22 nt, Human
cagucucucagcuuucagcugu

SEQ ID NO: 628663 - RNA, 20 nt, Human
aagcagaagcugcucucagc

SEQ ID NO: 628664 - RNA, 22 nt, Human
gccucaugagggaucugcccuc

SEQ ID NO: 628665 - RNA, 22 nt, Human
acauuugugcaacguauccaca

SEQ ID NO: 628666 - RNA, 22 nt, Human
ugauuagauugagucaaccuug

SEQ ID NO: 628667 - RNA, 18 nt, Human
gucucaggaguggcacgu

SEQ ID NO: 628668 - RNA, 22 nt, Human
agaaaucuuuccugaaguguuu

SEQ ID NO: 628669 - RNA, 22 nt, Human
ggaggcucagugaggaaaugga

SEQ ID NO: 628670 - RNA, 21 nt, Human
aucagaaguuuuggucaguag

SEQ ID NO: 628671 - RNA, 22 nt, Human
ccaggaagccugugucucugga

SEQ ID NO: 628672 - RNA, 20 nt, Human
aagaagccgggaaggcaggc

SEQ ID NO: 628673 - RNA, 22 nt, Human
ccagucacuggaaaaugggaau

SEQ ID NO: 628674 - RNA, 22 nt, Human
guccugagggcccaggcauucu

SEQ ID NO: 628675 - RNA, 22 nt, Human
uucuacaauaugaauaaugaag

SEQ ID NO: 628676 - RNA, 22 nt, Human
agccccuuggaacacagggcug

SEQ ID NO: 628677 - RNA, 23 nt, Human
agcacaaaguguuuuccuuguag

SEQ ID NO: 628678 - RNA, 22 nt, Human
ugauucugagggagcauucugc

SEQ ID NO: 628679 - RNA, 22 nt, Human
uuuugguuucccuucuuauggu

SEQ ID NO: 628680 - RNA, 19 nt, Human
aagcagcccuggcaagagc

SEQ ID NO: 628681 - RNA, 22 nt, Human
cuggccuuuaaaaugaccuuau

SEQ ID NO: 628682 - RNA, 22 nt, Human
uaugucacauuguaacagugug

SEQ ID NO: 628683 - RNA, 22 nt, Human
uuccucagagggcgcuggggaa

SEQ ID NO: 628684 - RNA, 22 nt, Human
ucagggacuuacaaaccagaag

SEQ ID NO: 628685 - RNA, 22 nt, Human
ggcaggugggaacccuccccac

SEQ ID NO: 628686 - RNA, 20 nt, Human
gugccuggagaagaggcugu

SEQ ID NO: 628687 - RNA, 22 nt, Human
ccuggagcacauggcaggaggc

SEQ ID NO: 628688 - RNA, 22 nt, Human
ggucaggggcugcucuacagag

SEQ ID NO: 628689 - RNA, 22 nt, Human
cuggccagugccugugggcccc

SEQ ID NO: 628690 - RNA, 22 nt, Human
ggggggugcugaucaguggagc

SEQ ID NO: 628691 - RNA, 22 nt, Human
ccaggugggcgugucuucaccu

SEQ ID NO: 628692 - RNA, 22 nt, Human
ugagcugucugaauggugagga

SEQ ID NO: 628693 - RNA, 22 nt, Human
ugacaaugacauggacagugau

SEQ ID NO: 628694 - RNA, 20 nt, Human
uucuucucuaguuaucuuca

SEQ ID NO: 628695 - RNA, 22 nt, Human
cuggguguagauggaaguuugg

SEQ ID NO: 628696 - RNA, 22 nt, Human
aguggggcggacaggaccagga

SEQ ID NO: 628697 - RNA, 22 nt, Human
agagaguugaggaagcaacacu

SEQ ID NO: 628698 - RNA, 22 nt, Human
cucugcuuuccucuuacacacu

SEQ ID NO: 628699 - RNA, 22 nt, Human
auccucucucccauaccagucu

SEQ ID NO: 628700 - RNA, 22 nt, Human
cuguccuggugcuggggauccc

SEQ ID NO: 628701 - RNA, 22 nt, Human
uugagcaaaggaguaaaaugca

SEQ ID NO: 628702 - RNA, 22 nt, Human
cuguucugaacugccugcaugc

SEQ ID NO: 628703 - RNA, 22 nt, Human
auacagauguugaauguuauau

SEQ ID NO: 628704 - RNA, 22 nt, Human
gcagcagguccgcaucaucauc

SEQ ID NO: 628705 - RNA, 22 nt, Human
uucacauugguucuugauagcu

SEQ ID NO: 628706 - RNA, 22 nt, Human
agaggcucugccgccucaggua

SEQ ID NO: 628707 - RNA, 22 nt, Human
gauuuauaaagguugcacugga

SEQ ID NO: 628708 - RNA, 22 nt, Human
ugaaaucuuagccauucugccu

SEQ ID NO: 628709 - RNA, 22 nt, Human
ugagacaguuggugaaaucuaa

SEQ ID NO: 628710 - RNA, 22 nt, Human
aggagccugugccuggcacucc

SEQ ID NO: 628711 - RNA, 22 nt, Human
uccucagggaagaugagccuca

SEQ ID NO: 628712 - RNA, 22 nt, Human
aguguuucaauccuagggguug

SEQ ID NO: 628713 - RNA, 22 nt, Human
aggccucagugaucaucaucag

SEQ ID NO: 628714 - RNA, 22 nt, Human
ugcuuuauaucucucuucuuag

SEQ ID NO: 628715 - RNA, 15 nt, Human
ggugagaguaggauu

SEQ ID NO: 628716 - RNA, 22 nt, Human
ggacacuuugaguugaaggggu

SEQ ID NO: 628717 - RNA, 22 nt, Human
agcugucucucugguguccaua

SEQ ID NO: 628718 - RNA, 22 nt, Human
ugggaaaguguugaggugucuu

SEQ ID NO: 628719 - RNA, 22 nt, Human
ucagaggcucaucugccuugca

SEQ ID NO: 628720 - RNA, 22 nt, Human
caaaacauucagagagcucacu

SEQ ID NO: 628721 - RNA, 22 nt, Human
ugaauccagagcuauuucgucc

SEQ ID NO: 628722 - RNA, 22 nt, Human
uuacauaacgguaugaaaaaug

SEQ ID NO: 628723 - RNA, 22 nt, Human
aagcuucaguggacuguagugu

SEQ ID NO: 628724 - RNA, 22 nt, Human
uguuuauugcugcaauugugcc

SEQ ID NO: 628725 - RNA, 22 nt, Human
uagggccagauaggcuucuuga

SEQ ID NO: 628726 - RNA, 22 nt, Human
uccauuuucaucucauguauaa

SEQ ID NO: 628727 - RNA, 22 nt, Human
uucauucugcaguucucagcuc

SEQ ID NO: 628728 - RNA, 22 nt, Human
aagauguuaggguggaagggau

SEQ ID NO: 628729 - RNA, 22 nt, Human
gugccugguuuggggaguguuc

SEQ ID NO: 628730 - RNA, 21 nt, Human
ugcuaggccauauugguugcu

SEQ ID NO: 628731 - RNA, 22 nt, Human
ucuguauugagaaagccggaca

SEQ ID NO: 628732 - RNA, 22 nt, Human
uucagcaaauggacuguucagg

SEQ ID NO: 628733 - RNA, 22 nt, Human
gaauuacaaagugagacaagcu

SEQ ID NO: 628734 - RNA, 22 nt, Human
gcaguaguucgucuguguuccc

SEQ ID NO: 628735 - RNA, 22 nt, Human
gccuuccaccuaggccucugcu

SEQ ID NO: 628736 - RNA, 22 nt, Human
gggccucucccuucucacgcau

SEQ ID NO: 628737 - RNA, 22 nt, Human
cagagcagaagguccaagccug

SEQ ID NO: 628738 - RNA, 22 nt, Human
cauucagagcuuucuuaucaua

SEQ ID NO: 628739 - RNA, 21 nt, Human
uccagcugugauuaugaaugu

SEQ ID NO: 628740 - RNA, 22 nt, Human
uggcuggagcgcccuccucugc

SEQ ID NO: 628741 - RNA, 21 nt, Human
ggacuuacauagguaaggggu

SEQ ID NO: 628742 - RNA, 22 nt, Human
ugaggcaggacuugcauaaagu

SEQ ID NO: 628743 - RNA, 21 nt, Human
acacuucaguuuuuaaaggga

SEQ ID NO: 628744 - RNA, 22 nt, Human
ggaugagguagaugaacaaggg

SEQ ID NO: 628745 - RNA, 19 nt, Human
cagcugccuuuucuuugca

SEQ ID NO: 628746 - RNA, 22 nt, Human
aagguacaguuuuaagaauaag

SEQ ID NO: 628747 - RNA, 22 nt, Human
acucuguagggacgguucuccc

SEQ ID NO: 628748 - RNA, 19 nt, Human
uacaaguaggcguuuucuc

SEQ ID NO: 628749 - RNA, 22 nt, Human
agccuggauccuaggcucagcu

SEQ ID NO: 628750 - RNA, 22 nt, Human
uucugucugauggugccagaac

SEQ ID NO: 628751 - RNA, 22 nt, Human
agucucagcaagcauggcuagu

SEQ ID NO: 628752 - RNA, 22 nt, Human
ggcccucugcucacuuccuauu

SEQ ID NO: 628753 - RNA, 22 nt, Human
gcagggcugcagagggcacugu

SEQ ID NO: 628754 - RNA, 22 nt, Human
cuccucacacccacugcaacca

SEQ ID NO: 628755 - RNA, 22 nt, Human
gcccugaauaauagagugggga

SEQ ID NO: 628756 - RNA, 23 nt, Human
cauggcagcaagagcucauggcc

SEQ ID NO: 628757 - RNA, 22 nt, Human
gugcucuaugaggauauagggu

SEQ ID NO: 628758 - RNA, 21 nt, Human
gggcuggaggaugggaagccc

SEQ ID NO: 628759 - RNA, 22 nt, Human
cauggccugccuccuccuggug

SEQ ID NO: 628760 - RNA, 21 nt, Human
ucacugugcaaauguugaugg

SEQ ID NO: 628761 - RNA, 22 nt, Human
gcugcugucagcaggccuuguu

SEQ ID NO: 628762 - RNA, 22 nt, Human
aggcaaagaaguuggucaggag

SEQ ID NO: 628763 - RNA, 22 nt, Human
cuguguccuccccaucacuucu

SEQ ID NO: 628764 - RNA, 22 nt, Human
aaaggcacugaucuuauccagu

SEQ ID NO: 628765 - RNA, 22 nt, Human
ccuggccaaucuagggcuguua

SEQ ID NO: 628766 - RNA, 22 nt, Human
gcuccaggcugcucugucccau

SEQ ID NO: 628767 - RNA, 22 nt, Human
cucuucuuggcccccaugaggg

SEQ ID NO: 628768 - RNA, 22 nt, Human
guguguacaaauuucauguaaa

SEQ ID NO: 628769 - RNA, 22 nt, Human
cuggcagcucuacucagagccu

SEQ ID NO: 628770 - RNA, 22 nt, Human
ucacuugagagauauuagaagu

SEQ ID NO: 628771 - RNA, 18 nt, Human
caggugggucuccugccc

SEQ ID NO: 628772 - RNA, 22 nt, Human
ucagcaauaugauaggcuuugu

SEQ ID NO: 628773 - RNA, 22 nt, Human
cuaaggcaccgaggcaggagcg

SEQ ID NO: 628774 - RNA, 22 nt, Human
uccucauagacugacugcuugc

SEQ ID NO: 628775 - RNA, 22 nt, Human
gagugucuaaucacguuucaca

SEQ ID NO: 628776 - RNA, 22 nt, Human
ugcuuuaacgcugagggucuca

SEQ ID NO: 628777 - RNA, 22 nt, Human
acauucaaggcagcacugagug

SEQ ID NO: 628778 - RNA, 22 nt, Human
gcucugccuccccuaguguuac

SEQ ID NO: 628779 - RNA, 22 nt, Human
acauuaugagcccacuggugaa

SEQ ID NO: 628780 - RNA, 22 nt, Human
ugagccaguggaagauggcagu

SEQ ID NO: 628781 - RNA, 22 nt, Human
ccuuggagaccugggucugugc

SEQ ID NO: 628782 - RNA, 22 nt, Human
uauguuuuucagacguccuaca

SEQ ID NO: 628783 - RNA, 22 nt, Human
gagguagguguaggaggccugc

SEQ ID NO: 628784 - RNA, 22 nt, Human
ucaucuuccucauuucuccagg

SEQ ID NO: 628785 - RNA, 22 nt, Human
uuaaagcauguugcuuaacagg

SEQ ID NO: 628786 - RNA, 18 nt, Human
agaagccacgaggagucc

SEQ ID NO: 628787 - RNA, 21 nt, Human
ucuaagccuugcagauggguu

SEQ ID NO: 628788 - RNA, 22 nt, Human
uuuaccaguguuaaacaccagc

SEQ ID NO: 628789 - RNA, 22 nt, Human
gucugggcuucagaguuagaga

SEQ ID NO: 628790 - RNA, 22 nt, Human
cagcccugcagagggcgcuccu

SEQ ID NO: 628791 - RNA, 17 nt, Human
cagcucuuccucccucu

SEQ ID NO: 628792 - RNA, 22 nt, Human
uggagcagaguucagcggggag

SEQ ID NO: 628793 - RNA, 22 nt, Human
acauuuuuuagagucccacauu

SEQ ID NO: 628794 - RNA, 22 nt, Human
cugcaggcugagcgccugccgg

SEQ ID NO: 628795 - RNA, 22 nt, Human
auaacccucuggauaggacagg

SEQ ID NO: 628796 - RNA, 22 nt, Human
ucauccugcacuggcuccuccu

SEQ ID NO: 628797 - RNA, 22 nt, Human
caucacauuagucucaagagaa

SEQ ID NO: 628798 - RNA, 22 nt, Human
aggagaaauccaucgagaaugg

SEQ ID NO: 628799 - RNA, 19 nt, Human
agaauuguuuuaugucuuc

SEQ ID NO: 628800 - RNA, 22 nt, Human
ggugagaggccugagagcugga

SEQ ID NO: 628801 - RNA, 22 nt, Human
aacauguaccuacaaucagaau

SEQ ID NO: 628802 - RNA, 22 nt, Human
aaaugcauguauguaauaugcu

SEQ ID NO: 628803 - RNA, 22 nt, Human
ugaaaacacuuuaguuuagguc

SEQ ID NO: 628804 - RNA, 22 nt, Human
gcauucuucgaaguaaguagug

SEQ ID NO: 628805 - RNA, 22 nt, Human
uaugucuuaauccuuccuuagg

SEQ ID NO: 628806 - RNA, 22 nt, Human
agcugccacagagccuggccag

SEQ ID NO: 628807 - RNA, 19 nt, Human
uuuaugucauugaggucau

SEQ ID NO: 628808 - RNA, 22 nt, Human
gguccuucaguagguuccagac

SEQ ID NO: 628809 - RNA, 20 nt, Human
cagcaggcuauggggcaccc

SEQ ID NO: 628810 - RNA, 22 nt, Human
cugggcacauuuugacuagugu

SEQ ID NO: 628811 - RNA, 22 nt, Human
ugcugcaggcaauagaaaaccu

SEQ ID NO: 628812 - RNA, 22 nt, Human
acacucuacagagcaaucuacc

SEQ ID NO: 628813 - RNA, 19 nt, Human
cucuggagaacaauagugc

SEQ ID NO: 628814 - RNA, 22 nt, Human
uggcaggaggaugaggcggcua

SEQ ID NO: 628815 - RNA, 22 nt, Human
ccagagucuuuauauuccugaa

SEQ ID NO: 628816 - RNA, 22 nt, Human
aguauaaagugguuuucagcac

SEQ ID NO: 628817 - RNA, 22 nt, Human
uggcucuccagcucuaaggccu

SEQ ID NO: 628818 - RNA, 22 nt, Human
ucucugcuaagauugugucuag

SEQ ID NO: 628819 - RNA, 22 nt, Human
aaauagcaaugugaaaagagga

SEQ ID NO: 628820 - RNA, 22 nt, Human
agcugcagauucuaucuagaag

SEQ ID NO: 628821 - RNA, 22 nt, Human
aagugguagacaaagauaauug

SEQ ID NO: 628822 - RNA, 19 nt, Human
uccagccugcuguuucucu

SEQ ID NO: 628823 - RNA, 22 nt, Human
ggucacaugugauuugagccaa

SEQ ID NO: 628824 - RNA, 22 nt, Human
guucugcagacuuggaaggugg

SEQ ID NO: 628825 - RNA, 20 nt, Human
aagggagaauaaugauugua

SEQ ID NO: 628826 - RNA, 22 nt, Human
caaaggcaguuacugaaugaag

SEQ ID NO: 628827 - RNA, 22 nt, Human
agggcuccugaggcccuucugg

SEQ ID NO: 628828 - RNA, 22 nt, Human
caccugccaaauggggaugcug

SEQ ID NO: 628829 - RNA, 22 nt, Human
gugguccugccagccaggucca

SEQ ID NO: 628830 - RNA, 22 nt, Human
gcagagcauuggagggacccug

SEQ ID NO: 628831 - RNA, 22 nt, Human
cuguuucagaacuucuuaaaaa

SEQ ID NO: 628832 - RNA, 22 nt, Human
gugagacaauuccucaguagac

SEQ ID NO: 628833 - RNA, 22 nt, Human
acauuucauuugcaguauggau

SEQ ID NO: 628834 - RNA, 22 nt, Human
ucagaauauauucauguuguca

SEQ ID NO: 628835 - RNA, 22 nt, Human
uacuucccacuggggucuacca

SEQ ID NO: 628836 - RNA, 22 nt, Human
uauacagaaccgccugaagucu

SEQ ID NO: 628837 - RNA, 22 nt, Human
ggaggcaucucuguggcugucu

SEQ ID NO: 628838 - RNA, 22 nt, Human
acauuuguacauuggcaugucu

SEQ ID NO: 628839 - RNA, 22 nt, Human
aagaauacuucguaaguaggau

SEQ ID NO: 628840 - RNA, 20 nt, Human
ugagugaguuuguggcagga

SEQ ID NO: 628841 - RNA, 22 nt, Human
auugcaaaugagucuuaauaua

SEQ ID NO: 628842 - RNA, 22 nt, Human
gcuuccuuauuguugccauagu

SEQ ID NO: 628843 - RNA, 22 nt, Human
uggcugaggcuggagugcagug

SEQ ID NO: 628844 - RNA, 22 nt, Human
agugucuggugagggcucucuc

SEQ ID NO: 628845 - RNA, 22 nt, Human
ucagaggauuggacuuuuaugu

SEQ ID NO: 628846 - RNA, 22 nt, Human
agguccagugcucuuggugguu

SEQ ID NO: 628847 - RNA, 22 nt, Human
cucagauguguuggauggaaaa

SEQ ID NO: 628848 - RNA, 19 nt, Human
uuuacucuccaaggugagu

SEQ ID NO: 628849 - RNA, 22 nt, Human
cgggcagauugggaagguucau

SEQ ID NO: 628850 - RNA, 22 nt, Human
auuucauagauuguaaaucccu

SEQ ID NO: 628851 - RNA, 22 nt, Human
auuccaaaggcuggccuggagg

SEQ ID NO: 628852 - RNA, 22 nt, Human
aucauuccacauguaccacuag

SEQ ID NO: 628853 - RNA, 22 nt, Human
aguggagcuuuuccuaucagag

SEQ ID NO: 628854 - RNA, 22 nt, Human
ucuucaugucaugguauauuga

SEQ ID NO: 628855 - RNA, 22 nt, Human
agggcuagaguugagaugggga

SEQ ID NO: 628856 - RNA, 22 nt, Human
gagagggugccuggaagccagg

SEQ ID NO: 628857 - RNA, 22 nt, Human
ugcagagguguugcugagauaa

SEQ ID NO: 628858 - RNA, 22 nt, Human
uggguccuucaaagcugggucu

SEQ ID NO: 628859 - RNA, 22 nt, Human
aacugcaacuucguaaagugag

SEQ ID NO: 628860 - RNA, 22 nt, Human
ggcagcaagcagaaguucuaug

SEQ ID NO: 628861 - RNA, 22 nt, Human
gcagagcucaagguguucagcu

SEQ ID NO: 628862 - RNA, 22 nt, Human
gcaguggcuaggagucuggcgu

SEQ ID NO: 628863 - RNA, 22 nt, Human
gaguggguaaaggugcuuggcu

SEQ ID NO: 628864 - RNA, 22 nt, Human
ugcucagagcuccagcucuccu

SEQ ID NO: 628865 - RNA, 18 nt, Human
gcaguaggcgcgcaggac

SEQ ID NO: 628866 - RNA, 22 nt, Human
uuucauaauacuguacaugaaa

SEQ ID NO: 628867 - RNA, 22 nt, Human
guacaugucaaaaaaugcauaa

SEQ ID NO: 628868 - RNA, 22 nt, Human
ugucuuuuaguuugugagaucu

SEQ ID NO: 628869 - RNA, 22 nt, Human
gccuacuuaguagcugggauua

SEQ ID NO: 628870 - RNA, 21 nt, Human
ugggaccuauuucaacuggau

SEQ ID NO: 628871 - RNA, 22 nt, Human
uguccugugauuccagcucuuc

SEQ ID NO: 628872 - RNA, 22 nt, Human
ggcuugaauggauauaaucugu

SEQ ID NO: 628873 - RNA, 23 nt, Human
uuucaaauuacucugcagaugac

SEQ ID NO: 628874 - RNA, 22 nt, Human
ugaagacaaagucaggcccaga

SEQ ID NO: 628875 - RNA, 22 nt, Human
uagaggugacacugagaccaua

SEQ ID NO: 628876 - RNA, 22 nt, Human
agcccugcucaucuggaucccg

SEQ ID NO: 628877 - RNA, 17 nt, Human
agacagaccucugcauc

SEQ ID NO: 628878 - RNA, 22 nt, Human
uguguuaaggcacugauaucug

SEQ ID NO: 628879 - RNA, 22 nt, Human
uagaggcuuucagcgguagguc

SEQ ID NO: 628880 - RNA, 23 nt, Human
augcaguauaugucaguaguuua

SEQ ID NO: 628881 - RNA, 22 nt, Human
ugcugaaaaguaaauaggccua

SEQ ID NO: 628882 - RNA, 22 nt, Human
cagcuccugggccaucuccuag

SEQ ID NO: 628883 - RNA, 22 nt, Human
augugaggcagcacggagauua

SEQ ID NO: 628884 - RNA, 22 nt, Human
gggcccuucagcuuccucugca

SEQ ID NO: 628885 - RNA, 22 nt, Human
aaugagcugcugcuguuccacc

SEQ ID NO: 628886 - RNA, 22 nt, Human
cuuguacaugauaaucucacuc

SEQ ID NO: 628887 - RNA, 22 nt, Human
uggugggaguccgcugugcugc

SEQ ID NO: 628888 - RNA, 22 nt, Human
uuugaacuucuccauucugaug

SEQ ID NO: 628889 - RNA, 22 nt, Human
acaguguuucacuuaaccguuu

SEQ ID NO: 628890 - RNA, 22 nt, Human
cuaacauuuauugagcacuuag

SEQ ID NO: 628891 - RNA, 22 nt, Human
accaccaggggauuuucagaac

SEQ ID NO: 628892 - RNA, 22 nt, Human
ucucugugugggagaucuuuuu

SEQ ID NO: 628893 - RNA, 22 nt, Human
ucuucuggaucgaucacauugu

SEQ ID NO: 628894 - RNA, 22 nt, Human
ucucugggguagggcccaggac

SEQ ID NO: 628895 - RNA, 22 nt, Human
agucacaguuucccugagagag

SEQ ID NO: 628896 - RNA, 22 nt, Human
ggucccaugaaagagggaggcc

SEQ ID NO: 628897 - RNA, 22 nt, Human
aacuuggcuaccagcguuaaau

SEQ ID NO: 628898 - RNA, 22 nt, Human
auuugccuugugaauuggauau

SEQ ID NO: 628899 - RNA, 22 nt, Human
ucccacugugccuguuguaauc

SEQ ID NO: 628900 - RNA, 22 nt, Human
ccaggaggcucuugucccuggu

SEQ ID NO: 628901 - RNA, 22 nt, Human
auaaagccuuucuguuuucagg

SEQ ID NO: 628902 - RNA, 22 nt, Human
cuccagguaguuauuucaagaa

SEQ ID NO: 628903 - RNA, 22 nt, Human
uuugcuauugugaauagugcca

SEQ ID NO: 628904 - RNA, 22 nt, Human
auuaagcugguccagacaaguu

SEQ ID NO: 628905 - RNA, 23 nt, Human
agggcugaaugcagagaagcaga

SEQ ID NO: 628906 - RNA, 22 nt, Human
cugagagcaucgcuggagauag

SEQ ID NO: 628907 - RNA, 22 nt, Human
gucauaaagacagaaacauucc

SEQ ID NO: 628908 - RNA, 22 nt, Human
ucccuaaacucugaacugauuc

SEQ ID NO: 628909 - RNA, 22 nt, Human
acucaagauagggaaaguacaa

SEQ ID NO: 628910 - RNA, 22 nt, Human
auagacuugguuaguaaauuug

SEQ ID NO: 628911 - RNA, 22 nt, Human
cuagagaaaauguuaauacagu

SEQ ID NO: 628912 - RNA, 22 nt, Human
gagcaggccuggggugaggccu

SEQ ID NO: 628913 - RNA, 22 nt, Human
gggucccaggaaggagcagugu

SEQ ID NO: 628914 - RNA, 22 nt, Human
ccucacagcccuccucuagcac

SEQ ID NO: 628915 - RNA, 22 nt, Human
caggcccugggcaggaucagcc

SEQ ID NO: 628916 - RNA, 22 nt, Human
cucccuuccaaugacuaugcuu

SEQ ID NO: 628917 - RNA, 22 nt, Human
gcucagagguuguucuuggguu

SEQ ID NO: 628918 - RNA, 22 nt, Human
gauuuugucaaauuccaaaugu

SEQ ID NO: 628919 - RNA, 22 nt, Human
gaaugaauucagcacauggaau

SEQ ID NO: 628920 - RNA, 22 nt, Human
cuuccagaguugcguucucggu

SEQ ID NO: 628921 - RNA, 22 nt, Human
gagagguccauuccccugucag

SEQ ID NO: 628922 - RNA, 22 nt, Human
aacuggaaugaaauuuacgaug

SEQ ID NO: 628923 - RNA, 22 nt, Human
aaacccagagacuagaaagacc

SEQ ID NO: 628924 - RNA, 22 nt, Human
guggccuuauuauguacaaaau

SEQ ID NO: 628925 - RNA, 22 nt, Human
uggauggcuggggaagagcagg

SEQ ID NO: 628926 - RNA, 22 nt, Human
aacuuuacuugaaagaacaugu

SEQ ID NO: 628927 - RNA, 22 nt, Human
acuacugaauauuaguucugaa

SEQ ID NO: 628928 - RNA, 22 nt, Human
caaggcaggucugaggagguug

SEQ ID NO: 628929 - RNA, 23 nt, Human
ugggucucuaguacaggcaggca

SEQ ID NO: 628930 - RNA, 22 nt, Human
uguucuucuagauugccuuuua

SEQ ID NO: 628931 - RNA, 22 nt, Human
ugauaggcuuaauuuuccuguc

SEQ ID NO: 628932 - RNA, 22 nt, Human
ugaagccaucccucagauggcc

SEQ ID NO: 628933 - RNA, 22 nt, Human
cauuucucauaauauuagcacu

SEQ ID NO: 628934 - RNA, 22 nt, Human
augcaaauucuuugcuucuucu

SEQ ID NO: 628935 - RNA, 22 nt, Human
uucagggcguuguggcugacug

SEQ ID NO: 628936 - RNA, 22 nt, Human
aaauggguuugauucucagcca

SEQ ID NO: 628937 - RNA, 22 nt, Human
aguguuucuaaguagaugugaa

SEQ ID NO: 628938 - RNA, 22 nt, Human
ugaaguuguuaagguugccauu

SEQ ID NO: 628939 - RNA, 23 nt, Human
uuaugcaagcuuccuggucucag

SEQ ID NO: 628940 - RNA, 22 nt, Human
ugcucuuacauuaauucagcau

SEQ ID NO: 628941 - RNA, 22 nt, Human
cagagacaggaucucgaagacu

SEQ ID NO: 628942 - RNA, 23 nt, Human
gugagcagcccacuaggaaugcc

SEQ ID NO: 628943 - RNA, 22 nt, Human
acacagagcuucucaacuggga

SEQ ID NO: 628944 - RNA, 22 nt, Human
ugcaggugguuuggacacugcu

SEQ ID NO: 628945 - RNA, 22 nt, Human
aggcuccugauccuggggucug

SEQ ID NO: 628946 - RNA, 22 nt, Human
ucagaaucuaaauaggcuccag

SEQ ID NO: 628947 - RNA, 22 nt, Human
cacaguuuaugaucucagugaa

SEQ ID NO: 628948 - RNA, 22 nt, Human
uugcuaacgcucacccuuugcc

SEQ ID NO: 628949 - RNA, 22 nt, Human
ccagagggaacugggccucauu

SEQ ID NO: 628950 - RNA, 22 nt, Human
ucuagaaaaaaacugcugugga

SEQ ID NO: 628951 - RNA, 22 nt, Human
cuucacaugauguccgugcugu

SEQ ID NO: 628952 - RNA, 22 nt, Human
cacuguuuuuauguaaucagug

SEQ ID NO: 628953 - RNA, 22 nt, Human
ucagguggcugguugcuggcua

SEQ ID NO: 628954 - RNA, 22 nt, Human
aaaggugacugcagcagcuauu

SEQ ID NO: 628955 - RNA, 22 nt, Human
agcuucauuccagccacuguga

SEQ ID NO: 628956 - RNA, 22 nt, Human
ugcaugucaaggcacucaggau

SEQ ID NO: 628957 - RNA, 22 nt, Human
cagcaucuucaugugcaucucc

SEQ ID NO: 628958 - RNA, 22 nt, Human
uuccaaguagaagcauuugcau

SEQ ID NO: 628959 - RNA, 22 nt, Human
aagaguauuugguauagaacac

SEQ ID NO: 628960 - RNA, 20 nt, Human
uguguagcaggugcugugcc

SEQ ID NO: 628961 - RNA, 22 nt, Human
cugucagguuucccaucugcaa

SEQ ID NO: 628962 - RNA, 22 nt, Human
uagaaaugauugagcuguaaua

SEQ ID NO: 628963 - RNA, 22 nt, Human
agcuaggauaagcagagacugg

SEQ ID NO: 628964 - RNA, 22 nt, Human
cugccaaggcuggggaggacaa

SEQ ID NO: 628965 - RNA, 22 nt, Human
ugggucagagcugugcugccca

SEQ ID NO: 628966 - RNA, 22 nt, Human
uacaguuuaacacuuuggagaa

SEQ ID NO: 628967 - RNA, 22 nt, Human
agcugcccagguucauugggcc

SEQ ID NO: 628968 - RNA, 22 nt, Human
uacaaguacuguggcuuugaau

SEQ ID NO: 628969 - RNA, 22 nt, Human
uacuggagucagaaaugccuug

SEQ ID NO: 628970 - RNA, 20 nt, Human
gcuucaguuuccucacuggu

SEQ ID NO: 628971 - RNA, 19 nt, Human
ugaagguguaugugcuggg

SEQ ID NO: 628972 - RNA, 22 nt, Human
uuccuaacuggccuuuauggau

SEQ ID NO: 628973 - RNA, 22 nt, Human
cacagaauaaauugguaucaga

SEQ ID NO: 628974 - RNA, 21 nt, Human
ugguacaccuugccugucaga

SEQ ID NO: 628975 - RNA, 22 nt, Human
agcaacagcagguuugcacucc

SEQ ID NO: 628976 - RNA, 22 nt, Human
uaggcagauuccauauuuuggc

SEQ ID NO: 628977 - RNA, 22 nt, Human
uugggcagaggccaggaggaug

SEQ ID NO: 628978 - RNA, 22 nt, Human
caggccuggcccccggcacacc

SEQ ID NO: 628979 - RNA, 22 nt, Human
uuaaacacuggagcuggguguu

SEQ ID NO: 628980 - RNA, 22 nt, Human
aaguguuuaaauuauuugcagg

SEQ ID NO: 628981 - RNA, 22 nt, Human
auugaacagaaaccaucagagu

SEQ ID NO: 628982 - RNA, 22 nt, Human
ggcaggacugaucagugggaug

SEQ ID NO: 628983 - RNA, 22 nt, Human
ucagugcuccuaaagugaaugc

SEQ ID NO: 628984 - RNA, 22 nt, Human
cugagcccaggcgggagcugag

SEQ ID NO: 628985 - RNA, 22 nt, Human
caggcugggaacgccacccgcu

SEQ ID NO: 628986 - RNA, 22 nt, Human
auguaguauuuggaaauguaaa

SEQ ID NO: 628987 - RNA, 21 nt, Human
auguacauucggcaacagaua

SEQ ID NO: 628988 - RNA, 19 nt, Human
guccacuccacucggucuc

SEQ ID NO: 628989 - RNA, 22 nt, Human
auaaaucuauuggacaugugug

SEQ ID NO: 628990 - RNA, 22 nt, Human
ccacacuuugagaugacuagga

SEQ ID NO: 628991 - RNA, 22 nt, Human
gggcugacucaaccuugcaaag

SEQ ID NO: 628992 - RNA, 22 nt, Human
gagggcucugaaaggaggucac

SEQ ID NO: 628993 - RNA, 22 nt, Human
aauggcuuuaaguagucucaca

SEQ ID NO: 628994 - RNA, 22 nt, Human
uuuguguguauauccuuccaga

SEQ ID NO: 628995 - RNA, 22 nt, Human
guacagugccagacuucuaggu

SEQ ID NO: 628996 - RNA, 22 nt, Human
gcaggucucaaucugagcaggc

SEQ ID NO: 628997 - RNA, 22 nt, Human
uuuuaauugcaauuaugguccc

SEQ ID NO: 628998 - RNA, 22 nt, Human
aacuuuguuuuauucacugcug

SEQ ID NO: 628999 - RNA, 22 nt, Human
uacagaauauuucugcccugag

SEQ ID NO: 629000 - RNA, 22 nt, Human
ucagagagaaauaguuuuugac

SEQ ID NO: 629001 - RNA, 22 nt, Human
gggacgggcacggagggcccuc

SEQ ID NO: 629002 - RNA, 22 nt, Human
cagauaaauagacuuggucaga

SEQ ID NO: 629003 - RNA, 22 nt, Human
cugggcugcuguccacuagggu

SEQ ID NO: 629004 - RNA, 22 nt, Human
ggggcugagucagugggaagag

SEQ ID NO: 629005 - RNA, 22 nt, Human
uuguuauuauuacuaagucuuc

SEQ ID NO: 629006 - RNA, 22 nt, Human
guggguggagacugggugcaag

SEQ ID NO: 629007 - RNA, 22 nt, Human
uccucacagcaugaccaggcag

SEQ ID NO: 629008 - RNA, 23 nt, Human
ggcuucuugccugucuuggugcu

SEQ ID NO: 629009 - RNA, 22 nt, Human
aacaauguucuuuuagcuugaa

SEQ ID NO: 629010 - RNA, 22 nt, Human
cacauuuauuugaggcuaauug

SEQ ID NO: 629011 - RNA, 22 nt, Human
ggaggccaggguggguggaucg

SEQ ID NO: 629012 - RNA, 22 nt, Human
uuccugaaugcuguugugcugu

SEQ ID NO: 629013 - RNA, 22 nt, Human
uggcucugaucagauguccagu

SEQ ID NO: 629014 - RNA, 22 nt, Human
ucuuucuucuuucauaguguga

SEQ ID NO: 629015 - RNA, 22 nt, Human
cauuuguaucauauguaucuua

SEQ ID NO: 629016 - RNA, 22 nt, Human
cugccuuuuaaagccaguguua

SEQ ID NO: 629017 - RNA, 22 nt, Human
aaaucaguuggaacacaagcag

SEQ ID NO: 629018 - RNA, 22 nt, Human
cuggagagauccuccugaaaaa

SEQ ID NO: 629019 - RNA, 22 nt, Human
aaggcaauauugaguuucccuu

SEQ ID NO: 629020 - RNA, 22 nt, Human
cccagccuuccacccuggacua

SEQ ID NO: 629021 - RNA, 23 nt, Human
gucucuagaguguggagcaaaga

SEQ ID NO: 629022 - RNA, 21 nt, Human
cucuugcugaugucuccuuua

SEQ ID NO: 629023 - RNA, 22 nt, Human
gccugcagaacugugaggcaau

SEQ ID NO: 629024 - RNA, 22 nt, Human
ugguggccuugauggcaucugc

SEQ ID NO: 629025 - RNA, 22 nt, Human
cacauuuaauugguuuagggug

SEQ ID NO: 629026 - RNA, 22 nt, Human
auccacucccuaacaccauguu

SEQ ID NO: 629027 - RNA, 22 nt, Human
acaaaauuaugaagaggccuug

SEQ ID NO: 629028 - RNA, 23 nt, Human
ugggccaguucuguugaaagcca

SEQ ID NO: 629029 - RNA, 18 nt, Human
cagagugggccaagagac

SEQ ID NO: 629030 - RNA, 22 nt, Human
accauuuacucccauuggaagu

SEQ ID NO: 629031 - RNA, 19 nt, Human
ugcuggagguugacagggu

SEQ ID NO: 629032 - RNA, 22 nt, Human
aguuucuagcaaggauuguuga

SEQ ID NO: 629033 - RNA, 22 nt, Human
gcagagacuaguagugcagacu

SEQ ID NO: 629034 - RNA, 21 nt, Human
acauuauaauucauauuccac

SEQ ID NO: 629035 - RNA, 22 nt, Human
augcuuuacgacaaaaaacuca

SEQ ID NO: 629036 - RNA, 22 nt, Human
ccuggggcucaagauggcgccg

SEQ ID NO: 629037 - RNA, 22 nt, Human
ugcuggaggggccugaccagga

SEQ ID NO: 629038 - RNA, 20 nt, Human
cauuaugguugggcacagug

SEQ ID NO: 629039 - RNA, 20 nt, Human
auagaucagugagacuaaag

SEQ ID NO: 629040 - RNA, 22 nt, Human
agugcucccuagaguugugcaa

SEQ ID NO: 629041 - RNA, 22 nt, Human
acauuugaggauguuaagaaug

SEQ ID NO: 629042 - RNA, 22 nt, Human
ggagcuggcuacagagaacucc

SEQ ID NO: 629043 - RNA, 22 nt, Human
cugagggccuuggcuccugccc

SEQ ID NO: 629044 - RNA, 22 nt, Human
uacaagaagaggcagagcugga

SEQ ID NO: 629045 - RNA, 22 nt, Human
aggcauugcugguauuggaagu

SEQ ID NO: 629046 - RNA, 22 nt, Human
caucagcuuuucuaugugguga

SEQ ID NO: 629047 - RNA, 22 nt, Human
gcagggcuagauauuugcaagu

SEQ ID NO: 629048 - RNA, 22 nt, Human
acugaggucuaucaugagccag

SEQ ID NO: 629049 - RNA, 22 nt, Human
uauaaguguaguuucaaauguu

SEQ ID NO: 629050 - RNA, 22 nt, Human
aagauacauuuucuucagagaa

SEQ ID NO: 629051 - RNA, 22 nt, Human
aggaagcuccuggagagccagu

SEQ ID NO: 629052 - RNA, 19 nt, Human
uucuggggccuggccuugg

SEQ ID NO: 629053 - RNA, 22 nt, Human
ccucugagcuggccuguggggc

SEQ ID NO: 629054 - RNA, 22 nt, Human
aucugagucucugacagcaugu

SEQ ID NO: 629055 - RNA, 21 nt, Human
uaaaccuggcgcuguucaaag

SEQ ID NO: 629056 - RNA, 22 nt, Human
ccaggaaugaaauguagauaaa

SEQ ID NO: 629057 - RNA, 23 nt, Human
aggaagaggcaauuucucuuaga

SEQ ID NO: 629058 - RNA, 22 nt, Human
gcagguaagagaggcuggcuuc

SEQ ID NO: 629059 - RNA, 22 nt, Human
uguguuuaaagaggaagugaga

SEQ ID NO: 629060 - RNA, 22 nt, Human
uaugaguggcguagagguaggg

SEQ ID NO: 629061 - RNA, 19 nt, Human
ccugggucugcagcauuca

SEQ ID NO: 629062 - RNA, 22 nt, Human
cuggaaugagcagggcuuaugg

SEQ ID NO: 629063 - RNA, 22 nt, Human
guaacaaaggauaacuugguuu

SEQ ID NO: 629064 - RNA, 22 nt, Human
uauucaggucgagcuaacugcu

SEQ ID NO: 629065 - RNA, 22 nt, Human
accuuuuuguucuguucucagc

SEQ ID NO: 629066 - RNA, 22 nt, Human
cccucaggagaugucagcugga

SEQ ID NO: 629067 - RNA, 22 nt, Human
cugggagcaagucaggaaaggu

SEQ ID NO: 629068 - RNA, 22 nt, Human
aaacaauguagauuaccauuua

SEQ ID NO: 629069 - RNA, 22 nt, Human
ccuggagaccugauggcagcgg

SEQ ID NO: 629070 - RNA, 22 nt, Human
cagcaggauaugguggagagag

SEQ ID NO: 629071 - RNA, 22 nt, Human
agcagugaugaaaugagcaucc

SEQ ID NO: 629072 - RNA, 23 nt, Human
cccagcugagacuuccugaacuc

SEQ ID NO: 629073 - RNA, 22 nt, Human
aggcuuuaagcaagcauauugu

SEQ ID NO: 629074 - RNA, 22 nt, Human
auucagcaaacauuuauugugu

SEQ ID NO: 629075 - RNA, 22 nt, Human
auuuacucgugucuccagugcu

SEQ ID NO: 629076 - RNA, 22 nt, Human
ucagcuuuuuggauugcccaag

SEQ ID NO: 629077 - RNA, 18 nt, Human
caggucagccuggccuca

SEQ ID NO: 629078 - RNA, 22 nt, Human
gagccccuucugcagucagguu

SEQ ID NO: 629079 - RNA, 22 nt, Human
uccuagaagauggaucagagaa

SEQ ID NO: 629080 - RNA, 22 nt, Human
uuucuuccuauguaucuugcug

SEQ ID NO: 629081 - RNA, 22 nt, Human
ugggcaagcaggagggccucag

SEQ ID NO: 629082 - RNA, 22 nt, Human
aauuucacuguggagcacauuu

SEQ ID NO: 629083 - RNA, 22 nt, Human
uaaucacugucaaccuuuguuc

SEQ ID NO: 629084 - RNA, 22 nt, Human
uacuguuaauguuaaauucagg

SEQ ID NO: 629085 - RNA, 23 nt, Human
ucccuguguacagccugcaugag

SEQ ID NO: 629086 - RNA, 22 nt, Human
acaguguuauuucugaguaaug

SEQ ID NO: 629087 - RNA, 22 nt, Human
ucuccaggugagggugguuaga

SEQ ID NO: 629088 - RNA, 22 nt, Human
acacacagcgccuaccaugugc

SEQ ID NO: 629089 - RNA, 22 nt, Human
gaaacacaugcagcuccauaga

SEQ ID NO: 629090 - RNA, 22 nt, Human
aaagcagauucugaugcaguag

SEQ ID NO: 629091 - RNA, 22 nt, Human
uuccuguggcugucacuccugg

SEQ ID NO: 629092 - RNA, 22 nt, Human
gccgaagacgcugggcgugggc

SEQ ID NO: 629093 - RNA, 22 nt, Human
cccaggcacagauuaucccaau

SEQ ID NO: 629094 - RNA, 22 nt, Human
gccccaggauaaauuuguaaga

SEQ ID NO: 629095 - RNA, 22 nt, Human
ucuucaggaagggaaaucaucc

SEQ ID NO: 629096 - RNA, 22 nt, Human
cuggcaguggaggaagaaaacu

SEQ ID NO: 629097 - RNA, 22 nt, Human
uuuauauccaucuuugaaguaa

SEQ ID NO: 629098 - RNA, 22 nt, Human
cuaguccagucucaaaaugcua

SEQ ID NO: 629099 - RNA, 19 nt, Human
ucccaguggggagaggugu

SEQ ID NO: 629100 - RNA, 22 nt, Human
uuuagggaagaagcccauggcc

SEQ ID NO: 629101 - RNA, 22 nt, Human
uagguuuaggagugaaggugaa

SEQ ID NO: 629102 - RNA, 23 nt, Human
agaccugcaucugauaggcccug

SEQ ID NO: 629103 - RNA, 22 nt, Human
ccagucacagguguguuuauau

SEQ ID NO: 629104 - RNA, 23 nt, Human
aaaugucuucuagcucuugagaa

SEQ ID NO: 629105 - RNA, 22 nt, Human
uacugugugacccuggguaggu

SEQ ID NO: 629106 - RNA, 22 nt, Human
ucuaauaaauaaaugcucuagg

SEQ ID NO: 629107 - RNA, 22 nt, Human
caggcuccacuguaggcagcuc

SEQ ID NO: 629108 - RNA, 22 nt, Human
aguacaauuauauuuagauggu

SEQ ID NO: 629109 - RNA, 22 nt, Human
ucuggccuccuccaccagggaa

SEQ ID NO: 629110 - RNA, 22 nt, Human
ucugagaaggaagcucugugua

SEQ ID NO: 629111 - RNA, 22 nt, Human
ccugagcuuacaauuuaagaac

SEQ ID NO: 629112 - RNA, 22 nt, Human
cagcuggggagagacauggcag

SEQ ID NO: 629113 - RNA, 23 nt, Human
agacugaggcugccagggucaga

SEQ ID NO: 629114 - RNA, 22 nt, Human
cucugaauggacacuccagugu

SEQ ID NO: 629115 - RNA, 22 nt, Human
ugagcaguggcaccaggucacc

SEQ ID NO: 629116 - RNA, 22 nt, Human
gggucaggaagaauucugccaa

SEQ ID NO: 629117 - RNA, 22 nt, Human
agcaaaguagcugcuguucuua

SEQ ID NO: 629118 - RNA, 22 nt, Human
ugagaacauuugcagggagagu

SEQ ID NO: 629119 - RNA, 23 nt, Human
uugauucuccaguaugggcugag

SEQ ID NO: 629120 - RNA, 21 nt, Human
uccucccugagcuguggggga

SEQ ID NO: 629121 - RNA, 22 nt, Human
caagggaguuacugagggcggg

SEQ ID NO: 629122 - RNA, 22 nt, Human
aguccuuccggcagauuucacu

SEQ ID NO: 629123 - RNA, 23 nt, Human
auccuguuguaggcaguaauuag

SEQ ID NO: 629124 - RNA, 22 nt, Human
ugugagaguauaaucucucugu

SEQ ID NO: 629125 - RNA, 22 nt, Human
aguuggagaagaggucgggaau

SEQ ID NO: 629126 - RNA, 22 nt, Human
uuucugcuucucagacccugaa

SEQ ID NO: 629127 - RNA, 22 nt, Human
uccuacaucagcucucaguagc

SEQ ID NO: 629128 - RNA, 22 nt, Human
uuuccaugaucguuauagaacu

SEQ ID NO: 629129 - RNA, 22 nt, Human
gaaaugugcagaauguguuaga

SEQ ID NO: 629130 - RNA, 22 nt, Human
uacauguggagauaacugaagc

SEQ ID NO: 629131 - RNA, 22 nt, Human
gggaagauaguguugagggccc

SEQ ID NO: 629132 - RNA, 22 nt, Human
gccucuggaagugggaaggggu

SEQ ID NO: 629133 - RNA, 22 nt, Human
acugaggaacauauauaagaug

SEQ ID NO: 629134 - RNA, 22 nt, Human
ucauucauacucuuuucuauua

SEQ ID NO: 629135 - RNA, 22 nt, Human
cagcugaagguaggaaccagga

SEQ ID NO: 629136 - RNA, 22 nt, Human
ucugagagagggucagaugcua

SEQ ID NO: 629137 - RNA, 22 nt, Human
cucagaaauuacaaaagggaca

SEQ ID NO: 629138 - RNA, 22 nt, Human
ucuuccuggcauugaugcugca

SEQ ID NO: 629139 - RNA, 22 nt, Human
gagcuuggacaccuuggcaggu

SEQ ID NO: 629140 - RNA, 22 nt, Human
cugggagacgcagcuggggauc

SEQ ID NO: 629141 - RNA, 22 nt, Human
aggugggcaaugaggccugagu

SEQ ID NO: 629142 - RNA, 22 nt, Human
ucugcccauucuuagagucuag

SEQ ID NO: 629143 - RNA, 22 nt, Human
aagcaggaagcucagguccuug

SEQ ID NO: 629144 - RNA, 22 nt, Human
cugccgagugggucaugaggca

SEQ ID NO: 629145 - RNA, 22 nt, Human
acucaggaaauugagauaaugg

SEQ ID NO: 629146 - RNA, 21 nt, Human
gcagagcuggaaccaggaccc

SEQ ID NO: 629147 - RNA, 22 nt, Human
aggcugugggaguugagagucu

SEQ ID NO: 629148 - RNA, 22 nt, Human
ucuuccucccuacagagcucag

SEQ ID NO: 629149 - RNA, 23 nt, Human
gagcugggauacaggcuuacugc

SEQ ID NO: 629150 - RNA, 22 nt, Human
agaugcugugaggaagcuagga

SEQ ID NO: 629151 - RNA, 22 nt, Human
ccuggcuucuauaccaccaggu

SEQ ID NO: 629152 - RNA, 22 nt, Human
acuguggcaaagaagcaggcuc

SEQ ID NO: 629153 - RNA, 22 nt, Human
caggcaccucacguggguccca

SEQ ID NO: 629154 - RNA, 22 nt, Human
cacagcuggugcacuagcucug

SEQ ID NO: 629155 - RNA, 22 nt, Human
ugaucaaagugcuggaauuaca

SEQ ID NO: 629156 - RNA, 22 nt, Human
uccugggcagccucucuggaag

SEQ ID NO: 629157 - RNA, 22 nt, Human
uggcagaccugaagguucggcg

SEQ ID NO: 629158 - RNA, 22 nt, Human
ucugaaauggcgauggccguug

SEQ ID NO: 629159 - RNA, 22 nt, Human
cacaugcaccagaaaucaacau

SEQ ID NO: 629160 - RNA, 22 nt, Human
ggcuuugccuggaauuuccuug

SEQ ID NO: 629161 - RNA, 22 nt, Human
acaacauucuuaaauacacuga

SEQ ID NO: 629162 - RNA, 22 nt, Human
aacucuuuguggacauuaaauu

SEQ ID NO: 629163 - RNA, 22 nt, Human
uggcaggaaaaacauuggagau

SEQ ID NO: 629164 - RNA, 22 nt, Human
ucucuggaagcgcagaucuguu

SEQ ID NO: 629165 - RNA, 22 nt, Human
cuaaaguccuuaucaaguguaa

SEQ ID NO: 629166 - RNA, 21 nt, Human
uaaaucucuguauucuucagu

SEQ ID NO: 629167 - RNA, 22 nt, Human
auucuaaagcuuguggagcuua

SEQ ID NO: 629168 - RNA, 22 nt, Human
cucaggaugucggugacuauug

SEQ ID NO: 629169 - RNA, 22 nt, Human
gccuggcugcucagccacucac

SEQ ID NO: 629170 - RNA, 22 nt, Human
aaacagcuuguaagguguaauu

SEQ ID NO: 629171 - RNA, 22 nt, Human
ugauuuuauugaaacuucacuu

SEQ ID NO: 629172 - RNA, 22 nt, Human
ucguggagaggccauguggagg

SEQ ID NO: 629173 - RNA, 22 nt, Human
ggagggcucccugggaguggau

SEQ ID NO: 629174 - RNA, 22 nt, Human
agcccaggugacucauacaccc

SEQ ID NO: 629175 - RNA, 22 nt, Human
uccucugggcucccugcaacag

SEQ ID NO: 629176 - RNA, 22 nt, Human
ccccucccugaccugguugggc

SEQ ID NO: 629177 - RNA, 22 nt, Human
acuuccaggaggugucacugaa

SEQ ID NO: 629178 - RNA, 22 nt, Human
uaaaugucaaugugauuuauaa

SEQ ID NO: 629179 - RNA, 19 nt, Human
ugccuggacaaaugugggg

SEQ ID NO: 629180 - RNA, 22 nt, Human
cuggggagacgaucgauguucu

SEQ ID NO: 629181 - RNA, 22 nt, Human
gaagagcuauguccagggagca

SEQ ID NO: 629182 - RNA, 22 nt, Human
uuuuaugugcuggacuggcagu

SEQ ID NO: 629183 - RNA, 22 nt, Human
ugcauuaaaaugauggagaaau

SEQ ID NO: 629184 - RNA, 22 nt, Human
cagcaauggcaggcggagagug

SEQ ID NO: 629185 - RNA, 22 nt, Human
ugugugucacugaaagaaaucu

SEQ ID NO: 629186 - RNA, 22 nt, Human
aggcacugacaauucuggacug

SEQ ID NO: 629187 - RNA, 21 nt, Human
uucuagaaaaguaugggacug

SEQ ID NO: 629188 - RNA, 22 nt, Human
auucagaaauagaaaauuugau

SEQ ID NO: 629189 - RNA, 22 nt, Human
gccaagcuguuuuucagagacg

SEQ ID NO: 629190 - RNA, 22 nt, Human
caagagccuuugggcagaagga

SEQ ID NO: 629191 - RNA, 22 nt, Human
cagauucucacuguauucaggu

SEQ ID NO: 629192 - RNA, 19 nt, Human
aguggcugggcagaagcaa

SEQ ID NO: 629193 - RNA, 22 nt, Human
auccugaaaacuuacgaagugg

SEQ ID NO: 629194 - RNA, 22 nt, Human
cgauggaauuggaaagaggaau

SEQ ID NO: 629195 - RNA, 22 nt, Human
uccaagcuugcuuuagccacag

SEQ ID NO: 629196 - RNA, 22 nt, Human
cucauagacaagccucuuuuaa

SEQ ID NO: 629197 - RNA, 19 nt, Human
agagaugcuaagagucuuu

SEQ ID NO: 629198 - RNA, 22 nt, Human
cagcucuguugcccuggaaacg

SEQ ID NO: 629199 - RNA, 22 nt, Human
gcccucagaugggaaaggaggg

SEQ ID NO: 629200 - RNA, 22 nt, Human
caggugaccuauggucacuaca

SEQ ID NO: 629201 - RNA, 22 nt, Human
aggcuucuucucuauguacaag

SEQ ID NO: 629202 - RNA, 22 nt, Human
aaagauaauguuuccuuauucu

SEQ ID NO: 629203 - RNA, 22 nt, Human
uuggcaauggaccagccacugg

SEQ ID NO: 629204 - RNA, 22 nt, Human
caccagcuucucauugcggguc

SEQ ID NO: 629205 - RNA, 22 nt, Human
aacacuguggucuuuucaguaa

SEQ ID NO: 629206 - RNA, 22 nt, Human
ucagauuuggacacaggaacuu

SEQ ID NO: 629207 - RNA, 22 nt, Human
agaaccaguuuaagauuugggu

SEQ ID NO: 629208 - RNA, 22 nt, Human
ugaaaugaaugugauucgauag

SEQ ID NO: 629209 - RNA, 22 nt, Human
ccagugcccagcugcccaggca

SEQ ID NO: 629210 - RNA, 22 nt, Human
cccaggcagagagcuggugagc

SEQ ID NO: 629211 - RNA, 22 nt, Human
aggagcucuugaugcuugaggg

SEQ ID NO: 629212 - RNA, 22 nt, Human
cuuauuuugcugaugacccagg

SEQ ID NO: 629213 - RNA, 22 nt, Human
cacuucaacaguuauuucuuag

SEQ ID NO: 629214 - RNA, 22 nt, Human
cgggcuggcugcagcugcugga

SEQ ID NO: 629215 - RNA, 22 nt, Human
ucucagggcagcaaggaagcau

SEQ ID NO: 629216 - RNA, 22 nt, Human
acuuccuguuaugugugccucu

SEQ ID NO: 629217 - RNA, 22 nt, Human
uugggugguggggagaguucag

SEQ ID NO: 629218 - RNA, 23 nt, Human
uuuaaaaguuguaauguaggcuu

SEQ ID NO: 629219 - RNA, 22 nt, Human
ugaagaggccgugugcagguga

SEQ ID NO: 629220 - RNA, 22 nt, Human
gcccagccccuggguggacgug

SEQ ID NO: 629221 - RNA, 22 nt, Human
augcacuuucuagagauucuga

SEQ ID NO: 629222 - RNA, 22 nt, Human
ccgcccacacuaaauaugagcg

SEQ ID NO: 629223 - RNA, 22 nt, Human
cuugggccagcccagggggcau

SEQ ID NO: 629224 - RNA, 22 nt, Human
aggcauggcuuuaggcaggcgu

SEQ ID NO: 629225 - RNA, 22 nt, Human
ggcagccuugagggaggccugg

SEQ ID NO: 629226 - RNA, 22 nt, Human
ucugagcagcuuuguuuugugu

SEQ ID NO: 629227 - RNA, 22 nt, Human
acagauacaaauauacaaauac

SEQ ID NO: 629228 - RNA, 22 nt, Human
caauuucucuuuauaucucaca

SEQ ID NO: 629229 - RNA, 22 nt, Human
ccauuucauugccuguaaagug

SEQ ID NO: 629230 - RNA, 22 nt, Human
gagcagcuagauaaagcccuuc

SEQ ID NO: 629231 - RNA, 22 nt, Human
gcugcagguuugucuagucugg

SEQ ID NO: 629232 - RNA, 22 nt, Human
uucuuuggggaauauucugguu

SEQ ID NO: 629233 - RNA, 20 nt, Human
aguuuaagaaaaagcuccag

SEQ ID NO: 629234 - RNA, 22 nt, Human
ugccuggcccugacagcccugg

SEQ ID NO: 629235 - RNA, 22 nt, Human
ucaugaaaauagaucagaaauu

SEQ ID NO: 629236 - RNA, 22 nt, Human
ucaggucuuuugucuccuagaa

SEQ ID NO: 629237 - RNA, 22 nt, Human
aaaggauggcucugcauauuug

SEQ ID NO: 629238 - RNA, 22 nt, Human
acacacaugccuuuccuaagua

SEQ ID NO: 629239 - RNA, 22 nt, Human
ggaggccaugggcagaaucuuu

SEQ ID NO: 629240 - RNA, 22 nt, Human
caugcaaaugguggcuaaaugg

SEQ ID NO: 629241 - RNA, 16 nt, Human
ucucccuguucuccaa

SEQ ID NO: 629242 - RNA, 22 nt, Human
uuccagagguucucagcccugu

SEQ ID NO: 629243 - RNA, 22 nt, Human
acaagcauaagugagaugaaua

SEQ ID NO: 629244 - RNA, 22 nt, Human
aaagagcucacaguccacugga

SEQ ID NO: 629245 - RNA, 22 nt, Human
agugucacagacccaaucagga

SEQ ID NO: 629246 - RNA, 22 nt, Human
ugcagcagggcccaggcacaga

SEQ ID NO: 629247 - RNA, 19 nt, Human
uucuuacaacacccuggga

SEQ ID NO: 629248 - RNA, 22 nt, Human
ucagcucuaccugggagcuguc

SEQ ID NO: 629249 - RNA, 17 nt, Human
auacauuguuaaaguau

SEQ ID NO: 629250 - RNA, 22 nt, Human
gacuccagaaucuggacggucc

SEQ ID NO: 629251 - RNA, 22 nt, Human
gccuauggauuggagaaggagc

SEQ ID NO: 629252 - RNA, 22 nt, Human
caguggccaacuuccugccucu

SEQ ID NO: 629253 - RNA, 22 nt, Human
uuaugacaggaaaaucacagaa

SEQ ID NO: 629254 - RNA, 22 nt, Human
agucucagaguaccugagggac

SEQ ID NO: 629255 - RNA, 19 nt, Human
ggcagucacggucaggagc

SEQ ID NO: 629256 - RNA, 22 nt, Human
uauuucuaagcuguaagucuga

SEQ ID NO: 629257 - RNA, 22 nt, Human
gcuuuacauguuucccuuuaag

SEQ ID NO: 629258 - RNA, 21 nt, Human
aggauuucugucauuucagau

SEQ ID NO: 629259 - RNA, 22 nt, Human
ugauggagcaugugugcuuccu

SEQ ID NO: 629260 - RNA, 22 nt, Human
caggaagcaucuggcuagcuaa

SEQ ID NO: 629261 - RNA, 22 nt, Human
acagggcugaggcuggcuucuu

SEQ ID NO: 629262 - RNA, 22 nt, Human
agaggggcucaagcaguggucu

SEQ ID NO: 629263 - RNA, 22 nt, Human
ucugggaaccauugguggggau

SEQ ID NO: 629264 - RNA, 22 nt, Human
uugaacacuaaguuuccaggcu

SEQ ID NO: 629265 - RNA, 22 nt, Human
uagacuauagcucacagugcuu

SEQ ID NO: 629266 - RNA, 22 nt, Human
aaggggauagagcagacacucc

SEQ ID NO: 629267 - RNA, 19 nt, Human
cucucacucgccacauccu

SEQ ID NO: 629268 - RNA, 22 nt, Human
cucuccaguuaccuaggucuga

SEQ ID NO: 629269 - RNA, 22 nt, Human
ccacugccagcuuuguccuccc

SEQ ID NO: 629270 - RNA, 22 nt, Human
auugacaagcaguaugucuuag

SEQ ID NO: 629271 - RNA, 20 nt, Human
gccugagcuccgccuccugu

SEQ ID NO: 629272 - RNA, 21 nt, Human
aacugcaaaucuuagacugca

SEQ ID NO: 629273 - RNA, 21 nt, Human
caaaggacuguagcucacuga

SEQ ID NO: 629274 - RNA, 22 nt, Human
ggcucugaaauucucacuuuua

SEQ ID NO: 629275 - RNA, 22 nt, Human
gggcuacagacaugcucuaagc

SEQ ID NO: 629276 - RNA, 22 nt, Human
ccagaggugaacaggaggcugu

SEQ ID NO: 629277 - RNA, 22 nt, Human
gucugucuguuguugagaagca

SEQ ID NO: 629278 - RNA, 22 nt, Human
aauaauguuuauuuguauucuc

SEQ ID NO: 629279 - RNA, 22 nt, Human
cugggcugucaauggcccucug

SEQ ID NO: 629280 - RNA, 22 nt, Human
aggcacugagaggcuguguugc

SEQ ID NO: 629281 - RNA, 19 nt, Human
acagggcagcaauaggaua

SEQ ID NO: 629282 - RNA, 20 nt, Human
gggaggccccagaguccagg

SEQ ID NO: 629283 - RNA, 22 nt, Human
gcugucucauacaaggcccugc

SEQ ID NO: 629284 - RNA, 22 nt, Human
cagccagccucucaaccaugca

SEQ ID NO: 629285 - RNA, 22 nt, Human
uacauguaagacaugagacucu

SEQ ID NO: 629286 - RNA, 22 nt, Human
uaucaaaaggaguugaaagggg

SEQ ID NO: 629287 - RNA, 19 nt, Human
agcagcuguagauagacac

SEQ ID NO: 629288 - RNA, 22 nt, Human
guguuuauguuuguguagggga

SEQ ID NO: 629289 - RNA, 22 nt, Human
cacacuguccccuucuccccag

SEQ ID NO: 629290 - RNA, 22 nt, Human
gaaauugaaagaccaacugcau

SEQ ID NO: 629291 - RNA, 22 nt, Human
gaggccuugggaugugccacgg

SEQ ID NO: 629292 - RNA, 21 nt, Human
cagaaguaaggguaacuucuc

SEQ ID NO: 629293 - RNA, 18 nt, Human
ggucaggggcggagagaa

SEQ ID NO: 629294 - RNA, 20 nt, Human
uagaggugggauuuggguuu

SEQ ID NO: 629295 - RNA, 22 nt, Human
uugcucugaacccagggcacca

SEQ ID NO: 629296 - RNA, 22 nt, Human
cuucaucaacucuaacaaaugu

SEQ ID NO: 629297 - RNA, 22 nt, Human
ugcuccagggccuccagugggg

SEQ ID NO: 629298 - RNA, 22 nt, Human
cauuguuaauugguaucuuaca

SEQ ID NO: 629299 - RNA, 20 nt, Human
acuuuaugaguucaauuuug

SEQ ID NO: 629300 - RNA, 22 nt, Human
acagccaguaaucuaccccugu

SEQ ID NO: 629301 - RNA, 22 nt, Human
cagcagcacucugcgggucccc

SEQ ID NO: 629302 - RNA, 22 nt, Human
agucuauuuccccuucucuuga

SEQ ID NO: 629303 - RNA, 22 nt, Human
aacaguaucuacgggaacuauu

SEQ ID NO: 629304 - RNA, 22 nt, Human
gaccaaggccaggccagggcgu

SEQ ID NO: 629305 - RNA, 22 nt, Human
auuccuugcucucaucaaccuu

SEQ ID NO: 629306 - RNA, 22 nt, Human
gugacgugcagguguggccagc

SEQ ID NO: 629307 - RNA, 22 nt, Human
auuugcuuucagccuuaaggau

SEQ ID NO: 629308 - RNA, 22 nt, Human
accguauauguuugcugugccc

SEQ ID NO: 629309 - RNA, 22 nt, Human
cucagugucacguuuugccuua

SEQ ID NO: 629310 - RNA, 22 nt, Human
ugcucagagcucuggugcaggu

SEQ ID NO: 629311 - RNA, 22 nt, Human
aagacacaauguagcccagcac

SEQ ID NO: 629312 - RNA, 22 nt, Human
aggucauuuccuuagaggcaga

SEQ ID NO: 629313 - RNA, 22 nt, Human
ugcaucuguucagagcugucga

SEQ ID NO: 629314 - RNA, 22 nt, Human
auagaagcaagaacagaaugga

SEQ ID NO: 629315 - RNA, 22 nt, Human
uggcuaguaggugaguagugcu

SEQ ID NO: 629316 - RNA, 22 nt, Human
ucuucuuuuugucccacagaau

SEQ ID NO: 629317 - RNA, 21 nt, Human
uagcagagaucauuuucuccu

SEQ ID NO: 629318 - RNA, 22 nt, Human
cugugcugaacaauucugcauu

SEQ ID NO: 629319 - RNA, 22 nt, Human
aucacauugccagugauuaccc

SEQ ID NO: 629320 - RNA, 22 nt, Human
ugugaaacggagucagggaagg

SEQ ID NO: 629321 - RNA, 22 nt, Human
gcucagagaaauuauaggaauu

SEQ ID NO: 629322 - RNA, 21 nt, Human
uggcuucauuugcaacccacu

SEQ ID NO: 629323 - RNA, 22 nt, Human
gaggaggucgcugcugagcccc

SEQ ID NO: 629324 - RNA, 22 nt, Human
acagagcucccagccaucuccu

SEQ ID NO: 629325 - RNA, 22 nt, Human
auacagcuuaugcauauaucuc

SEQ ID NO: 629326 - RNA, 22 nt, Human
uugguaaauaacaaucacagug

SEQ ID NO: 629327 - RNA, 22 nt, Human
aaggcucucugauggcagcagu

SEQ ID NO: 629328 - RNA, 22 nt, Human
uauggcuuuuaacugucguaug

SEQ ID NO: 629329 - RNA, 18 nt, Human
auugcacaccagccuggg

SEQ ID NO: 629330 - RNA, 17 nt, Human
cagcugugagagccuua

SEQ ID NO: 629331 - RNA, 23 nt, Human
cccagggacacgaugacaccucc

SEQ ID NO: 629332 - RNA, 20 nt, Human
guuuuaugccaguucugugu

SEQ ID NO: 629333 - RNA, 22 nt, Human
uuucacauuuaggcgugaauug

SEQ ID NO: 629334 - RNA, 16 nt, Human
ccuggaggucacuuca

SEQ ID NO: 629335 - RNA, 22 nt, Human
augccugguaugaagcaaggaa

SEQ ID NO: 629336 - RNA, 21 nt, Human
ccaugucagaugugggcugug

SEQ ID NO: 629337 - RNA, 22 nt, Human
aacagaacccgagugugaaucu

SEQ ID NO: 629338 - RNA, 20 nt, Human
gugcuucagaagccauugcu

SEQ ID NO: 629339 - RNA, 22 nt, Human
ccucuuuguucaggcugcuggc

SEQ ID NO: 629340 - RNA, 22 nt, Human
acaaauuuguguaguuauggca

SEQ ID NO: 629341 - RNA, 22 nt, Human
ugccacugggcaugcagauguc

SEQ ID NO: 629342 - RNA, 22 nt, Human
acagacagacagagaacuauuc

SEQ ID NO: 629343 - RNA, 22 nt, Human
uuauugaaauggaagcuauaac

SEQ ID NO: 629344 - RNA, 23 nt, Human
uagugauuggaaaaacuaguuuu

SEQ ID NO: 629345 - RNA, 22 nt, Human
uccugagcaacacagcuaagug

SEQ ID NO: 629346 - RNA, 23 nt, Human
ugcaagaguuccaaacuguucaa

SEQ ID NO: 629347 - RNA, 22 nt, Human
uccugugggcucucggccucca

SEQ ID NO: 629348 - RNA, 22 nt, Human
ucuuaagcagagaagaaguuga

SEQ ID NO: 629349 - RNA, 22 nt, Human
aaagggccuccgccugggcagg

SEQ ID NO: 629350 - RNA, 19 nt, Human
cccuggggguuucugguac

SEQ ID NO: 629351 - RNA, 22 nt, Human
cuucuugugcacucucuaugua

SEQ ID NO: 629352 - RNA, 22 nt, Human
ucucuguauucugauauucacu

SEQ ID NO: 629353 - RNA, 22 nt, Human
uccuuuggacacauuuuuuaua

SEQ ID NO: 629354 - RNA, 22 nt, Human
gaagguuuucaggagccuaguc

SEQ ID NO: 629355 - RNA, 19 nt, Human
gaaugcagaagagagugga

SEQ ID NO: 629356 - RNA, 22 nt, Human
gaucuagaccagaagcuguugu

SEQ ID NO: 629357 - RNA, 22 nt, Human
gcacagccuugcccugugcccu

SEQ ID NO: 629358 - RNA, 22 nt, Human
uucagggacuuugauguaucag

SEQ ID NO: 629359 - RNA, 22 nt, Human
acaaggagaagaaauuggucau

SEQ ID NO: 629360 - RNA, 22 nt, Human
uagcagaggguagugccggggc

SEQ ID NO: 629361 - RNA, 22 nt, Human
acagauuuugguauuugcaaug

SEQ ID NO: 629362 - RNA, 22 nt, Human
caggaagagguaucaccgagca

SEQ ID NO: 629363 - RNA, 21 nt, Human
auuacaucccuggugauacau

SEQ ID NO: 629364 - RNA, 22 nt, Human
gugucauggaaaauugcaaugg

SEQ ID NO: 629365 - RNA, 22 nt, Human
agcugugugguuugggcaaauu

SEQ ID NO: 629366 - RNA, 22 nt, Human
ccagguggacaaggcuuucaca

SEQ ID NO: 629367 - RNA, 22 nt, Human
gcugcccaauuacagggccgug

SEQ ID NO: 629368 - RNA, 22 nt, Human
aauggcuucuuuuugguauaau

SEQ ID NO: 629369 - RNA, 20 nt, Human
gguagcugcugcaguuggua

SEQ ID NO: 629370 - RNA, 22 nt, Human
gagugcguguuuggggaugugg

SEQ ID NO: 629371 - RNA, 22 nt, Human
agguuagugcugaaaugacaug

SEQ ID NO: 629372 - RNA, 22 nt, Human
ugcugaaguccaucuguuugac

SEQ ID NO: 629373 - RNA, 22 nt, Human
uagcuguuuugccauaagcgcu

SEQ ID NO: 629374 - RNA, 22 nt, Human
acagugugugggaaaugugacu

SEQ ID NO: 629375 - RNA, 22 nt, Human
aguacaaauuauagcgcuugga

SEQ ID NO: 629376 - RNA, 22 nt, Human
uaauuguacucccugugggaaa

SEQ ID NO: 629377 - RNA, 23 nt, Human
agacacauaggagcagcuauugg

SEQ ID NO: 629378 - RNA, 22 nt, Human
uuuauaauuaucucuacucuua

SEQ ID NO: 629379 - RNA, 22 nt, Human
agauacaguguuacauuuuuau

SEQ ID NO: 629380 - RNA, 22 nt, Human
ucuccccagggguauggguauu

SEQ ID NO: 629381 - RNA, 22 nt, Human
acuugaaaccuuggcaaacaau

SEQ ID NO: 629382 - RNA, 21 nt, Human
gguuacaacaguuaaacagag

SEQ ID NO: 629383 - RNA, 19 nt, Human
cuccuggcucugucauuuu

SEQ ID NO: 629384 - RNA, 22 nt, Human
acugagguuuuuaguguuaaau

SEQ ID NO: 629385 - RNA, 22 nt, Human
auucugcagguggaggauggca

SEQ ID NO: 629386 - RNA, 22 nt, Human
aggcuggcccuacuggcugccu

SEQ ID NO: 629387 - RNA, 22 nt, Human
gcugggcuucaccuccagaguu

SEQ ID NO: 629388 - RNA, 23 nt, Human
uuucauaugguguggaugaagaa

SEQ ID NO: 629389 - RNA, 22 nt, Human
aggaagaaaugugacuucaaac

SEQ ID NO: 629390 - RNA, 22 nt, Human
ggucaaagugaggagucagguu

SEQ ID NO: 629391 - RNA, 22 nt, Human
uauacacaaacaagggguuaag

SEQ ID NO: 629392 - RNA, 22 nt, Human
auacugauuaguugagaaagca

SEQ ID NO: 629393 - RNA, 22 nt, Human
uucacuuauuucuugaguagca

SEQ ID NO: 629394 - RNA, 22 nt, Human
agcuggugaggguugaggggua

SEQ ID NO: 629395 - RNA, 22 nt, Human
aggccaggacacuuaaguaaga

SEQ ID NO: 629396 - RNA, 19 nt, Human
ugaaggagggggauggcca

SEQ ID NO: 629397 - RNA, 22 nt, Human
uggugccaagcaugaggacucu

SEQ ID NO: 629398 - RNA, 22 nt, Human
uucauauuaugauuugaaaugc

SEQ ID NO: 629399 - RNA, 22 nt, Human
uucuccagccuauuggccuauc

SEQ ID NO: 629400 - RNA, 21 nt, Human
aguccccuguccuuacuucua

SEQ ID NO: 629401 - RNA, 22 nt, Human
uagauuuuaggagauuuuacug

SEQ ID NO: 629402 - RNA, 22 nt, Human
uucucugaagguuguggaacua

SEQ ID NO: 629403 - RNA, 22 nt, Human
caugcauguuuacuacagugac

SEQ ID NO: 629404 - RNA, 22 nt, Human
uuuaaacauaucuguugaggga

SEQ ID NO: 629405 - RNA, 22 nt, Human
ggaaggagcauuugccaguuua

SEQ ID NO: 629406 - RNA, 22 nt, Human
uggcuuugaaauccagucauua

SEQ ID NO: 629407 - RNA, 22 nt, Human
guggucagguuaucagaucaua

SEQ ID NO: 629408 - RNA, 22 nt, Human
uuuaauuuguauuucuagaggg

SEQ ID NO: 629409 - RNA, 22 nt, Human
auugcagggaggcagguagaug

SEQ ID NO: 629410 - RNA, 22 nt, Human
uagcaauagaaacauauaaagu

SEQ ID NO: 629411 - RNA, 22 nt, Human
auguguuuguaccuuuaaauau

SEQ ID NO: 629412 - RNA, 22 nt, Human
gggcagugauuuuccuuagagg

SEQ ID NO: 629413 - RNA, 22 nt, Human
cugaggugcuauggaggauacg

SEQ ID NO: 629414 - RNA, 22 nt, Human
uuauuuccugacacagcugauu

SEQ ID NO: 629415 - RNA, 22 nt, Human
ggcaggcuccagagcccucucc

SEQ ID NO: 629416 - RNA, 22 nt, Human
aaaguguggcacaagucacauc

SEQ ID NO: 629417 - RNA, 22 nt, Human
uuuguucaugccuauauucuca

SEQ ID NO: 629418 - RNA, 22 nt, Human
uucauugucucuguuugccuuc

SEQ ID NO: 629419 - RNA, 22 nt, Human
ccaggguuuaaauucugacuau

SEQ ID NO: 629420 - RNA, 22 nt, Human
uuauguguauaauuacaggaag

SEQ ID NO: 629421 - RNA, 23 nt, Human
uauguauguauguuuguauggaa

SEQ ID NO: 629422 - RNA, 22 nt, Human
gagggcagaaaauuaugcggug

SEQ ID NO: 629423 - RNA, 22 nt, Human
agguagaagagcaaggaauaac

SEQ ID NO: 629424 - RNA, 22 nt, Human
cauaauuagucauguuaugcau

SEQ ID NO: 629425 - RNA, 22 nt, Human
gggagcugaugauguaaguccc

SEQ ID NO: 629426 - RNA, 22 nt, Human
ucaaaggcauugccaauaagua

SEQ ID NO: 629427 - RNA, 22 nt, Human
ggccucaggguugggcccauua

SEQ ID NO: 629428 - RNA, 17 nt, Human
aggaggaucagagagua

SEQ ID NO: 629429 - RNA, 22 nt, Human
cuccuggagcagcaggcgcagg

SEQ ID NO: 629430 - RNA, 22 nt, Human
aacagaauugcugcugccaaug

SEQ ID NO: 629431 - RNA, 22 nt, Human
gggcuggaugggagccuuggcc

SEQ ID NO: 629432 - RNA, 22 nt, Human
cagcuggucaacugaaugaaca

SEQ ID NO: 629433 - RNA, 22 nt, Human
uaacacauaagcugagaccaug

SEQ ID NO: 629434 - RNA, 22 nt, Human
ugaagugaccuggggcagugua

SEQ ID NO: 629435 - RNA, 22 nt, Human
uucaagaaagaguggcuauucc

SEQ ID NO: 629436 - RNA, 22 nt, Human
ggagcccaagucugcacucggc

SEQ ID NO: 629437 - RNA, 22 nt, Human
aagugauuuguacaaaaugucg

SEQ ID NO: 629438 - RNA, 22 nt, Human
uuugcuuucccuuguagaaagu

SEQ ID NO: 629439 - RNA, 22 nt, Human
aacaucucagaagugacccuga

SEQ ID NO: 629440 - RNA, 22 nt, Human
auccaguucucagugcuuacag

SEQ ID NO: 629441 - RNA, 19 nt, Human
aggcaugggaagagaaguc

SEQ ID NO: 629442 - RNA, 22 nt, Human
uaauuuugcugugaccauugaa

SEQ ID NO: 629443 - RNA, 22 nt, Human
gcugagcucccagcaguaucug

SEQ ID NO: 629444 - RNA, 22 nt, Human
ggcugaggguauagcuguccca

SEQ ID NO: 629445 - RNA, 22 nt, Human
uaggaaauuugaaauauguggg

SEQ ID NO: 629446 - RNA, 22 nt, Human
agcagaggaggauuuaguuagg

SEQ ID NO: 629447 - RNA, 22 nt, Human
gagugggcuuggggagaguuug

SEQ ID NO: 629448 - RNA, 22 nt, Human
uuuaugacuucuaaucugaagc

SEQ ID NO: 629449 - RNA, 22 nt, Human
uucaagauggcaccagugagug

SEQ ID NO: 629450 - RNA, 22 nt, Human
cccaaaggaaggacaaggcaga

SEQ ID NO: 629451 - RNA, 22 nt, Human
gcucccaccuccagccugaguu

SEQ ID NO: 629452 - RNA, 22 nt, Human
cuuggcacuugggcagugagca

SEQ ID NO: 629453 - RNA, 22 nt, Human
uucaguuucuaaaugcuccucu

SEQ ID NO: 629454 - RNA, 22 nt, Human
aagcagagcaagcguauuuauu

SEQ ID NO: 629455 - RNA, 22 nt, Human
aaaugucuacuucccaucugua

SEQ ID NO: 629456 - RNA, 22 nt, Human
aaaugcuugcaacaucccaggu

SEQ ID NO: 629457 - RNA, 22 nt, Human
cuuaagaauauugaaguugugg

SEQ ID NO: 629458 - RNA, 22 nt, Human
ugacaggaguggcuagugggag

SEQ ID NO: 629459 - RNA, 22 nt, Human
acccagagccagggucaggagc

SEQ ID NO: 629460 - RNA, 22 nt, Human
uggcacuguagccacuacugcc

SEQ ID NO: 629461 - RNA, 22 nt, Human
agauuacagaagaauaaguaga

SEQ ID NO: 629462 - RNA, 22 nt, Human
gggccacaggccuugcccgcag

SEQ ID NO: 629463 - RNA, 22 nt, Human
agggccaguaccaggugggugg

SEQ ID NO: 629464 - RNA, 22 nt, Human
gguggccucagcaaggcuggca

SEQ ID NO: 629465 - RNA, 22 nt, Human
gagcagcugcagugcagacccu

SEQ ID NO: 629466 - RNA, 22 nt, Human
uucagcacccucugaggcaucc

SEQ ID NO: 629467 - RNA, 22 nt, Human
aucuggaauuaagagaaaguga

SEQ ID NO: 629468 - RNA, 23 nt, Human
acugccugcuacuaugcccacgg

SEQ ID NO: 629469 - RNA, 22 nt, Human
ugucugaauuuuggaaucaagu

SEQ ID NO: 629470 - RNA, 22 nt, Human
ucuucaugccaaaugaguuuug

SEQ ID NO: 629471 - RNA, 21 nt, Human
ucaggcaggcgcagagggaag

SEQ ID NO: 629472 - RNA, 22 nt, Human
uuuguucuaacuucugcagaca

SEQ ID NO: 629473 - RNA, 21 nt, Human
cucugcagcccugcuuccagg

SEQ ID NO: 629474 - RNA, 19 nt, Human
agcaccugugagagccugg

SEQ ID NO: 629475 - RNA, 22 nt, Human
uggcauguauacuugaguagga

SEQ ID NO: 629476 - RNA, 22 nt, Human
auuucccacucuacuacaugcu

SEQ ID NO: 629477 - RNA, 22 nt, Human
gcugcuggcgcugggcguccgg

SEQ ID NO: 629478 - RNA, 19 nt, Human
ccagguggaacugagguag

SEQ ID NO: 629479 - RNA, 22 nt, Human
augaggauaccgcagggggcag

SEQ ID NO: 629480 - RNA, 22 nt, Human
uugaauuuagauuguauguuga

SEQ ID NO: 629481 - RNA, 22 nt, Human
uuacaugguuguuggaaaugcu

SEQ ID NO: 629482 - RNA, 22 nt, Human
gcauggcuguugaagucagcuc

SEQ ID NO: 629483 - RNA, 22 nt, Human
uggggcugaggagccucacucu

SEQ ID NO: 629484 - RNA, 22 nt, Human
gaaucuuuugucucgugaauaa

SEQ ID NO: 629485 - RNA, 21 nt, Human
ucuuucugaaaucucagucug

SEQ ID NO: 629486 - RNA, 22 nt, Human
uuccuuagauccuucaaucacg

SEQ ID NO: 629487 - RNA, 21 nt, Human
agcuccaggcuccugggguuc

SEQ ID NO: 629488 - RNA, 22 nt, Human
aauugcaauuuucuuaaggucu

SEQ ID NO: 629489 - RNA, 22 nt, Human
gugguccugcacccgcuuggcc

SEQ ID NO: 629490 - RNA, 18 nt, Human
gucaccuggaucagauua

SEQ ID NO: 629491 - RNA, 22 nt, Human
ugugcauguucucauuucuaac

SEQ ID NO: 629492 - RNA, 22 nt, Human
cugaaucaugccauuuugcuua

SEQ ID NO: 629493 - RNA, 22 nt, Human
uguuugcauuguuaauucaguc

SEQ ID NO: 629494 - RNA, 22 nt, Human
aguaagcaccgggauggucaag

SEQ ID NO: 629495 - RNA, 22 nt, Human
acauucaugucccacuucuagc

SEQ ID NO: 629496 - RNA, 22 nt, Human
uauaaaguuggggcugaaguaa

SEQ ID NO: 629497 - RNA, 22 nt, Human
ugcugucaguuggcaggaugag

SEQ ID NO: 629498 - RNA, 22 nt, Human
uggaagagggagcuggguggcc

SEQ ID NO: 629499 - RNA, 22 nt, Human
cucuuuuucaccucugucagcg

SEQ ID NO: 629500 - RNA, 22 nt, Human
ccagaagucaaugcagauguga

SEQ ID NO: 629501 - RNA, 22 nt, Human
ucugucugagugguguuagagu

SEQ ID NO: 629502 - RNA, 22 nt, Human
gaacuuuaaaacaaaguacagu

SEQ ID NO: 629503 - RNA, 22 nt, Human
uuuagacacacuuuguauauuu

SEQ ID NO: 629504 - RNA, 22 nt, Human
aaagcacauuacaagcucaguc

SEQ ID NO: 629505 - RNA, 21 nt, Human
caggucuggugaacacucuca

SEQ ID NO: 629506 - RNA, 22 nt, Human
cuggccuuucgugagagcuggg

SEQ ID NO: 629507 - RNA, 22 nt, Human
gcuggggaccagcugucucuga

SEQ ID NO: 629508 - RNA, 22 nt, Human
gcaaggcugcccacuucaaaag

SEQ ID NO: 629509 - RNA, 21 nt, Human
cacauuugaaccucacagcaa

SEQ ID NO: 629510 - RNA, 22 nt, Human
agagugaaguaauuguuaggau

SEQ ID NO: 629511 - RNA, 22 nt, Human
auauuuacugcuguggugaagg

SEQ ID NO: 629512 - RNA, 22 nt, Human
agcuuuuauuggcugucauuug

SEQ ID NO: 629513 - RNA, 22 nt, Human
ucaaauuaguggaauaauaaug

SEQ ID NO: 629514 - RNA, 22 nt, Human
aggcugaggcggguagaucacc

SEQ ID NO: 629515 - RNA, 22 nt, Human
ucucuggggguagaacucaggc

SEQ ID NO: 629516 - RNA, 22 nt, Human
cauggccacaugauaaucaagu

SEQ ID NO: 629517 - RNA, 22 nt, Human
ggguuggggcccagcagucugc

SEQ ID NO: 629518 - RNA, 22 nt, Human
agcacacagucuuccuuccucc

SEQ ID NO: 629519 - RNA, 18 nt, Human
ugaucuuucaugauucca

SEQ ID NO: 629520 - RNA, 22 nt, Human
augagugugaaguuagcucagu

SEQ ID NO: 629521 - RNA, 22 nt, Human
aaaggagacagucuuaccugga

SEQ ID NO: 629522 - RNA, 22 nt, Human
ugucuucacaugauaagccauu

SEQ ID NO: 629523 - RNA, 22 nt, Human
ccagauagggaugagagugcua

SEQ ID NO: 629524 - RNA, 22 nt, Human
aaauggucacuggugaguguca

SEQ ID NO: 629525 - RNA, 22 nt, Human
ugaguagauccaagacuguccu

SEQ ID NO: 629526 - RNA, 22 nt, Human
cugcagagguugguucuaagau

SEQ ID NO: 629527 - RNA, 19 nt, Human
agggcgugguggcacaugu

SEQ ID NO: 629528 - RNA, 22 nt, Human
aagcuuuucucaguguccuugg

SEQ ID NO: 629529 - RNA, 22 nt, Human
aauuagggaaguauuuaguagu

SEQ ID NO: 629530 - RNA, 22 nt, Human
aaaaugaugcuguaauuuggca

SEQ ID NO: 629531 - RNA, 22 nt, Human
uagacauuugucaagaaugacu

SEQ ID NO: 629532 - RNA, 22 nt, Human
uaguacuuaucucugucauugu

SEQ ID NO: 629533 - RNA, 22 nt, Human
uuggcagcauuccagccaagca

SEQ ID NO: 629534 - RNA, 22 nt, Human
aggaagagguagcugucaaggg

SEQ ID NO: 629535 - RNA, 22 nt, Human
cuccagguagcuaaguccuggg

SEQ ID NO: 629536 - RNA, 22 nt, Human
agucuggaaaaugcauguuuca

SEQ ID NO: 629537 - RNA, 22 nt, Human
auccccacgauauagccaaagc

SEQ ID NO: 629538 - RNA, 22 nt, Human
ccuguggcucucuuuggagguc

SEQ ID NO: 629539 - RNA, 22 nt, Human
ggcuugucauguugauguucuu

SEQ ID NO: 629540 - RNA, 22 nt, Human
gaacagcugcuagagaucugug

SEQ ID NO: 629541 - RNA, 20 nt, Human
ucucaggguucagcaaagua

SEQ ID NO: 629542 - RNA, 22 nt, Human
guuauauuggcagaagagaaga

SEQ ID NO: 629543 - RNA, 22 nt, Human
caggauggcagagaaaagggug

SEQ ID NO: 629544 - RNA, 22 nt, Human
ucuaaacuaggguuaaaggaaa

SEQ ID NO: 629545 - RNA, 22 nt, Human
uguggggaucuucuagcuuuuc

SEQ ID NO: 629546 - RNA, 22 nt, Human
ugagaggguucccagggguuuc

SEQ ID NO: 629547 - RNA, 19 nt, Human
guggccugcgcugggugcg

SEQ ID NO: 629548 - RNA, 22 nt, Human
gugggcaggcccuaggcgauuu

SEQ ID NO: 629549 - RNA, 22 nt, Human
caguucccuaauguguagaaga

SEQ ID NO: 629550 - RNA, 19 nt, Human
auucucccuagaauuuuga

SEQ ID NO: 629551 - RNA, 22 nt, Human
agggagagguugaaaccucagu

SEQ ID NO: 629552 - RNA, 22 nt, Human
cgagaguggacagggcgcagcu

SEQ ID NO: 629553 - RNA, 22 nt, Human
uuggcaaaauuuaaagaaguga

SEQ ID NO: 629554 - RNA, 22 nt, Human
cagacagguagggacagaacau

SEQ ID NO: 629555 - RNA, 22 nt, Human
cccguuuaauuacucgagcugu

SEQ ID NO: 629556 - RNA, 22 nt, Human
aggagagcaggccagccguccc

SEQ ID NO: 629557 - RNA, 22 nt, Human
uugcaggauuuuagagaugaca

SEQ ID NO: 629558 - RNA, 22 nt, Human
uccuggcaggucugagaggucu

SEQ ID NO: 629559 - RNA, 22 nt, Human
ugaacuccaaauacugcugauu

SEQ ID NO: 629560 - RNA, 22 nt, Human
augaaugagaaacaggugagau

SEQ ID NO: 629561 - RNA, 22 nt, Human
caggauaacagaaaauagcuga

SEQ ID NO: 629562 - RNA, 22 nt, Human
cuguggcuuugcagggcuuguu

SEQ ID NO: 629563 - RNA, 22 nt, Human
cuccagugcuucuagaaaauac

SEQ ID NO: 629564 - RNA, 22 nt, Human
cugucccucaguucugggcaaa

SEQ ID NO: 629565 - RNA, 22 nt, Human
uuggcugugagggguugcacag

SEQ ID NO: 629566 - RNA, 22 nt, Human
uuugaugcuaagauuuaauaaa

SEQ ID NO: 629567 - RNA, 22 nt, Human
caucuucugggacuucucaguu

SEQ ID NO: 629568 - RNA, 22 nt, Human
uaucacccuacauaagaaauaa

SEQ ID NO: 629569 - RNA, 22 nt, Human
cagacacuaugcuaagguacua

SEQ ID NO: 629570 - RNA, 22 nt, Human
ucacacaucucagguguuuaau

SEQ ID NO: 629571 - RNA, 22 nt, Human
aaaguucauugaugacugaggu

SEQ ID NO: 629572 - RNA, 22 nt, Human
cagugcuuugggaggcugagga

SEQ ID NO: 629573 - RNA, 22 nt, Human
guguucaucccaaugcugauag

SEQ ID NO: 629574 - RNA, 22 nt, Human
ccuuccaggagucucugcaggu

SEQ ID NO: 629575 - RNA, 22 nt, Human
ggccacauguggcugcucguau

SEQ ID NO: 629576 - RNA, 21 nt, Human
ucuuguccuugcucucccacu

SEQ ID NO: 629577 - RNA, 22 nt, Human
uucugggagagaaagggccuug

SEQ ID NO: 629578 - RNA, 23 nt, Human
ugcuggcuguguuauugccaaca

SEQ ID NO: 629579 - RNA, 22 nt, Human
ucugaaaugaacucuugaacuu

SEQ ID NO: 629580 - RNA, 22 nt, Human
uagcaaaggaugacuauguacc

SEQ ID NO: 629581 - RNA, 21 nt, Human
aggugcagagccagggaccag

SEQ ID NO: 629582 - RNA, 22 nt, Human
ccagggcauccucacaucgcag

SEQ ID NO: 629583 - RNA, 22 nt, Human
uaacacagugucuaccauuauu

SEQ ID NO: 629584 - RNA, 22 nt, Human
gccagguggagguugcagugag

SEQ ID NO: 629585 - RNA, 22 nt, Human
cucuguccugguuuauacuggc

SEQ ID NO: 629586 - RNA, 22 nt, Human
aggaggguuucaaugggaugag

SEQ ID NO: 629587 - RNA, 22 nt, Human
ggcuuuaaacacugaaauugca

SEQ ID NO: 629588 - RNA, 22 nt, Human
ugucagaacucuauugaugucc

SEQ ID NO: 629589 - RNA, 21 nt, Human
ggagauggguaucgccugggc

SEQ ID NO: 629590 - RNA, 22 nt, Human
uugcagggucccagaggccugg

SEQ ID NO: 629591 - RNA, 22 nt, Human
agggcugacacaccuuauccuc

SEQ ID NO: 629592 - RNA, 22 nt, Human
caaauacucuggauguguuugu

SEQ ID NO: 629593 - RNA, 19 nt, Human
uggcagggagaguuugaag

SEQ ID NO: 629594 - RNA, 22 nt, Human
cuggccagggugcgaucguggu

SEQ ID NO: 629595 - RNA, 17 nt, Human
cagagucugucugcauc

SEQ ID NO: 629596 - RNA, 22 nt, Human
gucuucaauugcauuugauggg

SEQ ID NO: 629597 - RNA, 22 nt, Human
ugagguggcuggaucucagccu

SEQ ID NO: 629598 - RNA, 22 nt, Human
gagagcugggaaagccguggag

SEQ ID NO: 629599 - RNA, 22 nt, Human
uuugaagauaaauauggagaaa

SEQ ID NO: 629600 - RNA, 22 nt, Human
ccccagagagcaccaugaagcc

SEQ ID NO: 629601 - RNA, 22 nt, Human
aacaguuauuaucacauuagug

SEQ ID NO: 629602 - RNA, 22 nt, Human
ugcaucuuucugcauauguaaa

SEQ ID NO: 629603 - RNA, 22 nt, Human
acaguguauauuguuuaucugg

SEQ ID NO: 629604 - RNA, 22 nt, Human
agguucaaauuguugcaguuuc

SEQ ID NO: 629605 - RNA, 22 nt, Human
gccagcugaauuuccaacuguu

SEQ ID NO: 629606 - RNA, 22 nt, Human
aacagacaacuccuguggcuca

SEQ ID NO: 629607 - RNA, 22 nt, Human
aggaaugucgucauaaacauga

SEQ ID NO: 629608 - RNA, 22 nt, Human
accagcuggucaguugaagauu

SEQ ID NO: 629609 - RNA, 22 nt, Human
caugaaacuuccaaagcugacc

SEQ ID NO: 629610 - RNA, 22 nt, Human
cagaagugcaauuuaaauuagg

SEQ ID NO: 629611 - RNA, 22 nt, Human
aaauguauugcauaggauauuu

SEQ ID NO: 629612 - RNA, 22 nt, Human
agaaggguucaggaauauguua

SEQ ID NO: 629613 - RNA, 22 nt, Human
caaacuuacuguguuuaaagag

SEQ ID NO: 629614 - RNA, 22 nt, Human
ggggcagcucccgagggcagga

SEQ ID NO: 629615 - RNA, 22 nt, Human
uuauugcagauggugugagaga

SEQ ID NO: 629616 - RNA, 22 nt, Human
guccuuggagguguggaaucug

SEQ ID NO: 629617 - RNA, 22 nt, Human
acuuuguaaauuguugugacuc

SEQ ID NO: 629618 - RNA, 18 nt, Human
cugugggaagaguuuggg

SEQ ID NO: 629619 - RNA, 22 nt, Human
uuagaaacuuuggaggauagau

SEQ ID NO: 629620 - RNA, 22 nt, Human
cacuucaagagcaagggugcca

SEQ ID NO: 629621 - RNA, 22 nt, Human
agcagaguuucucaacaucagc

SEQ ID NO: 629622 - RNA, 22 nt, Human
auuugcuggugaauguauagcu

SEQ ID NO: 629623 - RNA, 22 nt, Human
uuauucaccucuauuagacuca

SEQ ID NO: 629624 - RNA, 22 nt, Human
gcagacuguaucaaugucagua

SEQ ID NO: 629625 - RNA, 22 nt, Human
uuuguguuggaagaaaugcuac

SEQ ID NO: 629626 - RNA, 22 nt, Human
ccuggagcuuuuccaguugaca

SEQ ID NO: 629627 - RNA, 22 nt, Human
gagcugccagacaugggaauga

SEQ ID NO: 629628 - RNA, 22 nt, Human
uggcaggaaccaggaggcucuc

SEQ ID NO: 629629 - RNA, 22 nt, Human
augcgagugaugcagaguggcu

SEQ ID NO: 629630 - RNA, 22 nt, Human
uggacaugaccucgagcgagau

SEQ ID NO: 629631 - RNA, 22 nt, Human
guuauuguuuauccugcacccc

SEQ ID NO: 629632 - RNA, 22 nt, Human
ggcuggaaaagacaaagcuauu

SEQ ID NO: 629633 - RNA, 18 nt, Human
cugugacuccuagaucuc

SEQ ID NO: 629634 - RNA, 22 nt, Human
ccaggcucagcuauuaagaaac

SEQ ID NO: 629635 - RNA, 22 nt, Human
agagaauuggagcagugacagg

SEQ ID NO: 629636 - RNA, 22 nt, Human
uggaggcauaggccugggcccu

SEQ ID NO: 629637 - RNA, 22 nt, Human
uagcuaucuguguccagaucca

SEQ ID NO: 629638 - RNA, 22 nt, Human
gggagggucugccaugcucccu

SEQ ID NO: 629639 - RNA, 22 nt, Human
agaaacuucagcuauucuuuug

SEQ ID NO: 629640 - RNA, 22 nt, Human
ccacuugacauuuucauuaaga

SEQ ID NO: 629641 - RNA, 22 nt, Human
uccaggaccugacugggccugc

SEQ ID NO: 629642 - RNA, 22 nt, Human
auauuuggaaagaaaaucauug

SEQ ID NO: 629643 - RNA, 22 nt, Human
ucugacuuauuuguccuuggug

SEQ ID NO: 629644 - RNA, 22 nt, Human
ggcugagaaucaacaaccugcu

SEQ ID NO: 629645 - RNA, 22 nt, Human
caguguuuccgucaguauguga

SEQ ID NO: 629646 - RNA, 22 nt, Human
cagaauaaaaacuccuaugucu

SEQ ID NO: 629647 - RNA, 22 nt, Human
aaguuccugagcucauauagca

SEQ ID NO: 629648 - RNA, 22 nt, Human
aucugggggagcugcucaugga

SEQ ID NO: 629649 - RNA, 22 nt, Human
gcucccugcagcugagaguucc

SEQ ID NO: 629650 - RNA, 22 nt, Human
aaacaccagucccaguauacac

SEQ ID NO: 629651 - RNA, 22 nt, Human
ccucuggggucuagcaauagca

SEQ ID NO: 629652 - RNA, 22 nt, Human
aaacuugacagugagacaguuu

SEQ ID NO: 629653 - RNA, 20 nt, Human
uccagcuguugagaucugag

SEQ ID NO: 629654 - RNA, 22 nt, Human
gugcaguugaagcauggggaga

SEQ ID NO: 629655 - RNA, 22 nt, Human
aacuaguaaaagcaacaguaua

SEQ ID NO: 629656 - RNA, 20 nt, Human
uggcccuguuuucuccaggc

SEQ ID NO: 629657 - RNA, 22 nt, Human
gcuuccagccuuuucuccucug

SEQ ID NO: 629658 - RNA, 22 nt, Human
caauaagauguauugagcagag

SEQ ID NO: 629659 - RNA, 23 nt, Human
cagcugaagcagccugggcugga

SEQ ID NO: 629660 - RNA, 22 nt, Human
uccagcucacagauagcguggg

SEQ ID NO: 629661 - RNA, 22 nt, Human
gugcauauguaccugugaucau

SEQ ID NO: 629662 - RNA, 22 nt, Human
ggcuagaacuuuacacuuugca

SEQ ID NO: 629663 - RNA, 22 nt, Human
ugcagauggggaucaguggcuc

SEQ ID NO: 629664 - RNA, 22 nt, Human
ucucuuaacugguucagcaauu

SEQ ID NO: 629665 - RNA, 22 nt, Human
uccagcccugcacugauuagau

SEQ ID NO: 629666 - RNA, 22 nt, Human
cucuggcuauggcacggcgcuc

SEQ ID NO: 629667 - RNA, 22 nt, Human
aagcugccauagaacgagaggu

SEQ ID NO: 629668 - RNA, 22 nt, Human
agcauucaaugauuggacuugc

SEQ ID NO: 629669 - RNA, 22 nt, Human
uagcugcccaucuuuccuuuag

SEQ ID NO: 629670 - RNA, 22 nt, Human
uaacaauacccauucuaauuac

SEQ ID NO: 629671 - RNA, 22 nt, Human
caguugcuggaugugcagcucu

SEQ ID NO: 629672 - RNA, 22 nt, Human
ucuacuguagugaugcugcagu

SEQ ID NO: 629673 - RNA, 22 nt, Human
uagugucucuuccuguuugaaa

SEQ ID NO: 629674 - RNA, 22 nt, Human
ugaggguggcacaggcacaaag

SEQ ID NO: 629675 - RNA, 22 nt, Human
ugagagccagaagggccugagg

SEQ ID NO: 629676 - RNA, 22 nt, Human
agcgugugugcgggucuucuuu

SEQ ID NO: 629677 - RNA, 22 nt, Human
cauggauagaugaaugcuuaaa

SEQ ID NO: 629678 - RNA, 19 nt, Human
ugccugucaguagaucuca

SEQ ID NO: 629679 - RNA, 22 nt, Human
auuauuuguguccacagaauac

SEQ ID NO: 629680 - RNA, 22 nt, Human
ucggagagcucacagcuguggc

SEQ ID NO: 629681 - RNA, 22 nt, Human
ucuguuggcuugagauuuaauu

SEQ ID NO: 629682 - RNA, 22 nt, Human
cagggagcagcaugggcaaagg

SEQ ID NO: 629683 - RNA, 21 nt, Human
agugugugauaggcaggaaga

SEQ ID NO: 629684 - RNA, 22 nt, Human
uagcacaguuccugacucuuug

SEQ ID NO: 629685 - RNA, 22 nt, Human
acaacaaucuacccuagcuucu

SEQ ID NO: 629686 - RNA, 22 nt, Human
ucugaggcccaguucaacucuu

SEQ ID NO: 629687 - RNA, 22 nt, Human
ccagggcaauaggaacacuuuu

SEQ ID NO: 629688 - RNA, 22 nt, Human
aaggaacuuugcagaggugauu

SEQ ID NO: 629689 - RNA, 22 nt, Human
cagugcuggaggcuggagggaa

SEQ ID NO: 629690 - RNA, 22 nt, Human
ucaguguuauuagaugagguuu

SEQ ID NO: 629691 - RNA, 22 nt, Human
gcucaaugcucaaugcugcaaa

SEQ ID NO: 629692 - RNA, 22 nt, Human
uacaagagaacuaauguaaguc

SEQ ID NO: 629693 - RNA, 22 nt, Human
gcugucacacaugggaucucag

SEQ ID NO: 629694 - RNA, 22 nt, Human
ucaguauccacaaaugcucaaa

SEQ ID NO: 629695 - RNA, 22 nt, Human
gggcuucaggagggucagccca

SEQ ID NO: 629696 - RNA, 22 nt, Human
auuuuuucuguaaacuggccuu

SEQ ID NO: 629697 - RNA, 22 nt, Human
cugugcuuagccaucacauuca

SEQ ID NO: 629698 - RNA, 22 nt, Human
cucuguugucaguggaagcagc

SEQ ID NO: 629699 - RNA, 22 nt, Human
ugaugaauaaacuugagaguca

SEQ ID NO: 629700 - RNA, 22 nt, Human
gggcacauguaaagcuggagaa

SEQ ID NO: 629701 - RNA, 22 nt, Human
agccaccucugugcaggccucg

SEQ ID NO: 629702 - RNA, 22 nt, Human
ucagcaguccuccaggaucaag

SEQ ID NO: 629703 - RNA, 19 nt, Human
ucaaguccuaggcccacaa

SEQ ID NO: 629704 - RNA, 22 nt, Human
agaagcugugguaugaaaugug

SEQ ID NO: 629705 - RNA, 22 nt, Human
cagguccccaggguaccuaccu

SEQ ID NO: 629706 - RNA, 22 nt, Human
ggguucuuauaguaucagagcu

SEQ ID NO: 629707 - RNA, 17 nt, Human
cccucuggggagggagg

SEQ ID NO: 629708 - RNA, 22 nt, Human
cuccaggaguggccuggacacc

SEQ ID NO: 629709 - RNA, 22 nt, Human
aucauccacuggagccggcagg

SEQ ID NO: 629710 - RNA, 22 nt, Human
auccacaggucauguaaugugg

SEQ ID NO: 629711 - RNA, 22 nt, Human
uccagagcaggugucuacacag

SEQ ID NO: 629712 - RNA, 22 nt, Human
ucugaggcugaauggacuccgu

SEQ ID NO: 629713 - RNA, 22 nt, Human
acuaaagaagccaaaguuuucu

SEQ ID NO: 629714 - RNA, 22 nt, Human
agcaaagcaccauauggcaguu

SEQ ID NO: 629715 - RNA, 22 nt, Human
gaaggcaagcagcauaaauguc

SEQ ID NO: 629716 - RNA, 22 nt, Human
cacuguaucuuuuccaaagucu

SEQ ID NO: 629717 - RNA, 18 nt, Human
uaggaaccacuugcagag

SEQ ID NO: 629718 - RNA, 22 nt, Human
uuaaauuauuucuagugaggug

SEQ ID NO: 629719 - RNA, 22 nt, Human
aacaguaaaaaucauuuaguug

SEQ ID NO: 629720 - RNA, 22 nt, Human
uacaugucuacaugcauuuuug

SEQ ID NO: 629721 - RNA, 22 nt, Human
cauuuagagaagauuacaagga

SEQ ID NO: 629722 - RNA, 22 nt, Human
augaaaguaccuguaauauguu

SEQ ID NO: 629723 - RNA, 16 nt, Human
ccaggaacacacagcu

SEQ ID NO: 629724 - RNA, 22 nt, Human
guggucauggaagguccuaccu

SEQ ID NO: 629725 - RNA, 22 nt, Human
cagaaauauuccaaguacugca

SEQ ID NO: 629726 - RNA, 22 nt, Human
auagugguuggauaugucagag

SEQ ID NO: 629727 - RNA, 22 nt, Human
ucucagagauuuauggaaaacu

SEQ ID NO: 629728 - RNA, 22 nt, Human
uaaggccaauuacauauguuca

SEQ ID NO: 629729 - RNA, 22 nt, Human
aggccuggugaaugaaguaucu

SEQ ID NO: 629730 - RNA, 22 nt, Human
auuuucagaacauucauucacu

SEQ ID NO: 629731 - RNA, 22 nt, Human
agggaacagugaaaggcaucag

SEQ ID NO: 629732 - RNA, 21 nt, Human
uuccuggggacuuccguggga

SEQ ID NO: 629733 - RNA, 22 nt, Human
guguacaguaagugaaucuagg

SEQ ID NO: 629734 - RNA, 22 nt, Human
acauuucugagcagggagcugu

SEQ ID NO: 629735 - RNA, 22 nt, Human
uuuaaccucuaauuuaguucuc

SEQ ID NO: 629736 - RNA, 22 nt, Human
cagggcuucuauaccaauucau

SEQ ID NO: 629737 - RNA, 22 nt, Human
gagcucuguguagccugagggu

SEQ ID NO: 629738 - RNA, 22 nt, Human
auagcaaagaugucaauucccc

SEQ ID NO: 629739 - RNA, 22 nt, Human
uggaaggggagcuggaaagggg

SEQ ID NO: 629740 - RNA, 22 nt, Human
gcuggcuggaacuagcaguugg

SEQ ID NO: 629741 - RNA, 22 nt, Human
cugagcugggacucaguagcaa

SEQ ID NO: 629742 - RNA, 22 nt, Human
uggagcugacucacaccagcua

SEQ ID NO: 629743 - RNA, 22 nt, Human
ugcacacaaaugugaacgugcc

SEQ ID NO: 629744 - RNA, 22 nt, Human
ggugcugacugaggauggcuug

SEQ ID NO: 629745 - RNA, 22 nt, Human
uggccaccuuauggcuauugga

SEQ ID NO: 629746 - RNA, 22 nt, Human
gaggcugguucccuugaucuuu

SEQ ID NO: 629747 - RNA, 22 nt, Human
uuuuucauugcagccucucucc

SEQ ID NO: 629748 - RNA, 22 nt, Human
gcaggguggauggcagggccag

SEQ ID NO: 629749 - RNA, 22 nt, Human
uuucugcucauccuaguggagc

SEQ ID NO: 629750 - RNA, 22 nt, Human
cagagauuuuuaugcacaccaa

SEQ ID NO: 629751 - RNA, 22 nt, Human
ccuucagccucaagauccuuca

SEQ ID NO: 629752 - RNA, 22 nt, Human
aaacagugacugguacauaaua

SEQ ID NO: 629753 - RNA, 22 nt, Human
gucccucugugucccugcaguc

SEQ ID NO: 629754 - RNA, 22 nt, Human
cuggcucauagagcagcuccaa

SEQ ID NO: 629755 - RNA, 22 nt, Human
gcuucucuggcuggucugccac

SEQ ID NO: 629756 - RNA, 22 nt, Human
gcucugggaauucagaaagccu

SEQ ID NO: 629757 - RNA, 22 nt, Human
gcuuagcaucuuacaaugcuga

SEQ ID NO: 629758 - RNA, 22 nt, Human
aaggaucuuucuuuuuaccauu

SEQ ID NO: 629759 - RNA, 22 nt, Human
caucuggcuagcuaucauugug

SEQ ID NO: 629760 - RNA, 22 nt, Human
ccagcagcugcaaagccugggu

SEQ ID NO: 629761 - RNA, 22 nt, Human
gagguggccaagcgaggaaggg

SEQ ID NO: 629762 - RNA, 22 nt, Human
gaggaacagcagccacaugucc

SEQ ID NO: 629763 - RNA, 22 nt, Human
auccucucugugacagggaacg

SEQ ID NO: 629764 - RNA, 22 nt, Human
uguagaaagcucuucugaaauc

SEQ ID NO: 629765 - RNA, 21 nt, Human
aaguaaaucagagaaauaacc

SEQ ID NO: 629766 - RNA, 19 nt, Human
gcagccaccgcggcggccg

SEQ ID NO: 629767 - RNA, 22 nt, Human
agaggagguccuuuucugaugu

SEQ ID NO: 629768 - RNA, 22 nt, Human
ccaggagcuggagggugcagug

SEQ ID NO: 629769 - RNA, 22 nt, Human
gccaguggagcacauggugaag

SEQ ID NO: 629770 - RNA, 22 nt, Human
aaaaaugcuuggacuuaauaaa

SEQ ID NO: 629771 - RNA, 22 nt, Human
aauguucagugccuuuaaacau

SEQ ID NO: 629772 - RNA, 20 nt, Human
aaauccaguguguauuuuac

SEQ ID NO: 629773 - RNA, 22 nt, Human
gcagggcagaaggugcugagga

SEQ ID NO: 629774 - RNA, 22 nt, Human
auuuauaacgugcagccagggu

SEQ ID NO: 629775 - RNA, 22 nt, Human
gagcuuaggccagggacaggga

SEQ ID NO: 629776 - RNA, 22 nt, Human
agcagugggggaguguuaguuu

SEQ ID NO: 629777 - RNA, 22 nt, Human
uacagaauguuaugaagcauag

SEQ ID NO: 629778 - RNA, 22 nt, Human
gcagaggccaucaacuuugcca

SEQ ID NO: 629779 - RNA, 22 nt, Human
ggccagcuccuuggcagugccu

SEQ ID NO: 629780 - RNA, 22 nt, Human
cugaagagaaagggagcucuuc

SEQ ID NO: 629781 - RNA, 22 nt, Human
uuccucuggggccaggccaaca

SEQ ID NO: 629782 - RNA, 22 nt, Human
uaggagcuaaaauauuuuauau

SEQ ID NO: 629783 - RNA, 22 nt, Human
uguccagcucgagacacuaucu

SEQ ID NO: 629784 - RNA, 20 nt, Human
ucaaaauaggugugggcgga

SEQ ID NO: 629785 - RNA, 18 nt, Human
auguacauguacucacac

SEQ ID NO: 629786 - RNA, 22 nt, Human
ugucauuaguuucagccauucu

SEQ ID NO: 629787 - RNA, 22 nt, Human
gaagcccuguaggugcaaaggu

SEQ ID NO: 629788 - RNA, 22 nt, Human
auguuucaaugcacuuuagccu

SEQ ID NO: 629789 - RNA, 22 nt, Human
ucuucaauuagauuuaccaauu

SEQ ID NO: 629790 - RNA, 22 nt, Human
uaaguucauaagcuuauucuua

SEQ ID NO: 629791 - RNA, 22 nt, Human
auugacaagaaagauauuuuua

SEQ ID NO: 629792 - RNA, 22 nt, Human
auguggccuuaaugacagcagc

SEQ ID NO: 629793 - RNA, 22 nt, Human
uuauaacuuuggauaugacaag

SEQ ID NO: 629794 - RNA, 22 nt, Human
cucugcuguuuuguauacaggc

SEQ ID NO: 629795 - RNA, 22 nt, Human
aagugaauuucauuccaauucu

SEQ ID NO: 629796 - RNA, 22 nt, Human
aguugaaagccuuauuucucug

SEQ ID NO: 629797 - RNA, 22 nt, Human
uggcuucucccucugccugauu

SEQ ID NO: 629798 - RNA, 22 nt, Human
ccaggagcaggagcugcagcug

SEQ ID NO: 629799 - RNA, 22 nt, Human
cuggagugaagcuuauuuuuca

SEQ ID NO: 629800 - RNA, 22 nt, Human
gcaccucauuuugcagguagaa

SEQ ID NO: 629801 - RNA, 23 nt, Human
agcacagacuagaaaggucuuuc

SEQ ID NO: 629802 - RNA, 22 nt, Human
gggcacuguggggcccaugcug

SEQ ID NO: 629803 - RNA, 22 nt, Human
agcacagagauuauuuacaaga

SEQ ID NO: 629804 - RNA, 22 nt, Human
uacacugucuuagaaaggggca

SEQ ID NO: 629805 - RNA, 22 nt, Human
gaaaauuuagaacugaacuucu

SEQ ID NO: 629806 - RNA, 17 nt, Human
ugcucaaauacuuuuga

SEQ ID NO: 629807 - RNA, 22 nt, Human
gcucagggagagagggcagccg

SEQ ID NO: 629808 - RNA, 22 nt, Human
guggcacaaggcuuacacagca

SEQ ID NO: 629809 - RNA, 22 nt, Human
ugcauuguuugauaggugaauu

SEQ ID NO: 629810 - RNA, 22 nt, Human
gcauggccuccagccaacagca

SEQ ID NO: 629811 - RNA, 22 nt, Human
aagcaggcccugggccagggga

SEQ ID NO: 629812 - RNA, 22 nt, Human
gcauaggccacuagugccagga

SEQ ID NO: 629813 - RNA, 22 nt, Human
caucacagaaauaaacauaccu

SEQ ID NO: 629814 - RNA, 22 nt, Human
agcuguguuaggauguuaauaa

SEQ ID NO: 629815 - RNA, 22 nt, Human
uggcaccugaacuuagaggugu

SEQ ID NO: 629816 - RNA, 22 nt, Human
ucagagcauucgggugacaaau

SEQ ID NO: 629817 - RNA, 22 nt, Human
cauugcacagcccuguggugau

SEQ ID NO: 629818 - RNA, 22 nt, Human
aagggcaggugggcauuucugg

SEQ ID NO: 629819 - RNA, 22 nt, Human
uaagguuuggcugucucuuggu

SEQ ID NO: 629820 - RNA, 22 nt, Human
aguccaagaccaaggugucacc

SEQ ID NO: 629821 - RNA, 22 nt, Human
uuucacagcagugugcugcuuu

SEQ ID NO: 629822 - RNA, 18 nt, Human
aguggucuguuauaucau

SEQ ID NO: 629823 - RNA, 18 nt, Human
uuuuacucauagcaggcc

SEQ ID NO: 629824 - RNA, 22 nt, Human
cauaggucacuguacagguuaa

SEQ ID NO: 629825 - RNA, 22 nt, Human
cuggcagauauuugcagacaug

SEQ ID NO: 629826 - RNA, 22 nt, Human
ccaauccucauguucaacaacc

SEQ ID NO: 629827 - RNA, 22 nt, Human
cagggaggcugucuuaugccug

SEQ ID NO: 629828 - RNA, 22 nt, Human
augaggcccaggaaucuguauu

SEQ ID NO: 629829 - RNA, 22 nt, Human
ucuucauguuaguuggguuuuc

SEQ ID NO: 629830 - RNA, 22 nt, Human
ccagagguggaagauuguuuug

SEQ ID NO: 629831 - RNA, 22 nt, Human
ugaacugcaggaaucucagugg

SEQ ID NO: 629832 - RNA, 19 nt, Human
ggccagccaccucgccugg

SEQ ID NO: 629833 - RNA, 22 nt, Human
ccucuuugacucucaggucuuu

SEQ ID NO: 629834 - RNA, 22 nt, Human
uguucuuagcaggagcaucuau

SEQ ID NO: 629835 - RNA, 22 nt, Human
uacaugucuacagccaugucug

SEQ ID NO: 629836 - RNA, 22 nt, Human
cagcugcacugaagcagguuug

SEQ ID NO: 629837 - RNA, 22 nt, Human
agggcccuuacgcaggcccuuc

SEQ ID NO: 629838 - RNA, 22 nt, Human
acaucagauuaugcuuugcuua

SEQ ID NO: 629839 - RNA, 22 nt, Human
ugccacacaauuacugcugcua

SEQ ID NO: 629840 - RNA, 22 nt, Human
acacuucucauuugauacuaac

SEQ ID NO: 629841 - RNA, 22 nt, Human
agaagcagaaacugggcuugug

SEQ ID NO: 629842 - RNA, 23 nt, Human
ucaucaaaggaaguacgugucac

SEQ ID NO: 629843 - RNA, 22 nt, Human
ccucacagggccaggccccuca

SEQ ID NO: 629844 - RNA, 22 nt, Human
caggagugcagguggugaggca

SEQ ID NO: 629845 - RNA, 22 nt, Human
agcacacaucacuucugcucau

SEQ ID NO: 629846 - RNA, 22 nt, Human
aucuggaauccuuguggacaau

SEQ ID NO: 629847 - RNA, 22 nt, Human
uaguucuacucaaagugugauc

SEQ ID NO: 629848 - RNA, 22 nt, Human
gagugcaguaucuucugugucc

SEQ ID NO: 629849 - RNA, 23 nt, Human
uuuaacauuugaacauguggcca

SEQ ID NO: 629850 - RNA, 18 nt, Human
ugcaaauggcuguuugau

SEQ ID NO: 629851 - RNA, 22 nt, Human
cagagagcuuagugugcugcau

SEQ ID NO: 629852 - RNA, 22 nt, Human
uuauaugaguaucauaucacuu

SEQ ID NO: 629853 - RNA, 22 nt, Human
ucccaggaaaacacucgaggac

SEQ ID NO: 629854 - RNA, 22 nt, Human
gcacugaaauuauaugcauuug

SEQ ID NO: 629855 - RNA, 22 nt, Human
aaugugcuccaauugucuacuu

SEQ ID NO: 629856 - RNA, 22 nt, Human
ggacucuguuuuccugaucacu

SEQ ID NO: 629857 - RNA, 22 nt, Human
agucugugugaaugugggcuuu

SEQ ID NO: 629858 - RNA, 22 nt, Human
ggcugucagggugagcuggcuu

SEQ ID NO: 629859 - RNA, 22 nt, Human
auauuugugguaaagguaagaa

SEQ ID NO: 629860 - RNA, 22 nt, Human
guuauuucagccacagagugca

SEQ ID NO: 629861 - RNA, 22 nt, Human
auagcaaugaucaagacagaca

SEQ ID NO: 629862 - RNA, 20 nt, Human
ccuccaggcacacccaugug

SEQ ID NO: 629863 - RNA, 22 nt, Human
uggcucuccagagccuauggua

SEQ ID NO: 629864 - RNA, 22 nt, Human
acauucaaaaagcaucugucac

SEQ ID NO: 629865 - RNA, 22 nt, Human
agcugaggccugauuucgccgu

SEQ ID NO: 629866 - RNA, 22 nt, Human
auuugcugugugcuuuagagac

SEQ ID NO: 629867 - RNA, 21 nt, Human
acaggauaggacaguguuccu

SEQ ID NO: 629868 - RNA, 21 nt, Human
uucagcaguccucuagagaua

SEQ ID NO: 629869 - RNA, 22 nt, Human
cugggagugaaaggagggcugc

SEQ ID NO: 629870 - RNA, 22 nt, Human
uuuauuaagaugcgaaugcuga

SEQ ID NO: 629871 - RNA, 22 nt, Human
agcagccaggaaucugcagagc

SEQ ID NO: 629872 - RNA, 23 nt, Human
cucagagguguuuuucacuuacu

SEQ ID NO: 629873 - RNA, 22 nt, Human
auugcuuuuagugaaauuauau

SEQ ID NO: 629874 - RNA, 19 nt, Human
uuuauucaccuuuaccuug

SEQ ID NO: 629875 - RNA, 22 nt, Human
uggcuggaaacaggagauucag

SEQ ID NO: 629876 - RNA, 22 nt, Human
agucuucuuuguguucucucau

SEQ ID NO: 629877 - RNA, 22 nt, Human
gcacaggcuguuggccuucaga

SEQ ID NO: 629878 - RNA, 19 nt, Human
ucagggaaguucaaagcuc

SEQ ID NO: 629879 - RNA, 22 nt, Human
cugugcugcagacgcaguagcu

SEQ ID NO: 629880 - RNA, 22 nt, Human
aaccucgaaugccuuccugagg

SEQ ID NO: 629881 - RNA, 22 nt, Human
cuugaauguaaauaauguacag

SEQ ID NO: 629882 - RNA, 20 nt, Human
ugaaggccagcagcauaggg

SEQ ID NO: 629883 - RNA, 20 nt, Human
ucugagaagcaaacaauguu

SEQ ID NO: 629884 - RNA, 22 nt, Human
cacaggagugcugcuauuguug

SEQ ID NO: 629885 - RNA, 22 nt, Human
aauguuugagcaucuacaugcu

SEQ ID NO: 629886 - RNA, 22 nt, Human
ucagggagauuuggggacucaa

SEQ ID NO: 629887 - RNA, 22 nt, Human
ggcagcuccaaaaggaaacacu

SEQ ID NO: 629888 - RNA, 22 nt, Human
aagcaaggcccagagcaucagc

SEQ ID NO: 629889 - RNA, 22 nt, Human
aaaguugaccgaaagauuuuga

SEQ ID NO: 629890 - RNA, 22 nt, Human
ccucugggagacugcuacugag

SEQ ID NO: 629891 - RNA, 22 nt, Human
agcaaauaccaaaggcugaugu

SEQ ID NO: 629892 - RNA, 22 nt, Human
caaugcuaucaugucagagaua

SEQ ID NO: 629893 - RNA, 22 nt, Human
aagacauuuuagagauagggaa

SEQ ID NO: 629894 - RNA, 22 nt, Human
cuucagcaccauagcuccuucu

SEQ ID NO: 629895 - RNA, 22 nt, Human
auauauuugagaauauucauga

SEQ ID NO: 629896 - RNA, 22 nt, Human
uuugaauguaaaugcugcagcu

SEQ ID NO: 629897 - RNA, 22 nt, Human
caaaagauacuugcaucuaacu

SEQ ID NO: 629898 - RNA, 22 nt, Human
acucuggccaggugcgguaugu

SEQ ID NO: 629899 - RNA, 16 nt, Human
agcagccagcacugga

SEQ ID NO: 629900 - RNA, 22 nt, Human
guacacaaaagaggaaaccgga

SEQ ID NO: 629901 - RNA, 22 nt, Human
accucugccacuuucuaacucu

SEQ ID NO: 629902 - RNA, 22 nt, Human
acgugugugacauugggaacgu

SEQ ID NO: 629903 - RNA, 22 nt, Human
uccaagaagcucagcaaacauc

SEQ ID NO: 629904 - RNA, 22 nt, Human
ugaaacaaaaguauguagcuug

SEQ ID NO: 629905 - RNA, 22 nt, Human
aguuuccuugggcauuuguuua

SEQ ID NO: 629906 - RNA, 22 nt, Human
uuuuacagucagucaaacucag

SEQ ID NO: 629907 - RNA, 22 nt, Human
acugucgauuaugaugagucag

SEQ ID NO: 629908 - RNA, 22 nt, Human
ggggcccuuguggcugcaggcc

SEQ ID NO: 629909 - RNA, 22 nt, Human
ugcuuucagccagugucuggau

SEQ ID NO: 629910 - RNA, 22 nt, Human
uggagggcucuuucaccuggua

SEQ ID NO: 629911 - RNA, 22 nt, Human
ucagcccaccugguguggggcu

SEQ ID NO: 629912 - RNA, 22 nt, Human
cuccaggaaagucaggcuuaga

SEQ ID NO: 629913 - RNA, 22 nt, Human
aaaugucuuucaauagagaaau

SEQ ID NO: 629914 - RNA, 22 nt, Human
gagcacuuagaugcuaugaaug

SEQ ID NO: 629915 - RNA, 22 nt, Human
ccugggucacucaggcaggcgg

SEQ ID NO: 629916 - RNA, 22 nt, Human
gacccugacucuaaugcuuggc

SEQ ID NO: 629917 - RNA, 22 nt, Human
acaggacaacucagcagccagc

SEQ ID NO: 629918 - RNA, 22 nt, Human
gcaggcuccaaggccugggaga

SEQ ID NO: 629919 - RNA, 22 nt, Human
ugacaggcaggacagaggugug

SEQ ID NO: 629920 - RNA, 22 nt, Human
augcauguguguuuacaugcuu

SEQ ID NO: 629921 - RNA, 22 nt, Human
ugaaagguuaaaaguaguauug

SEQ ID NO: 629922 - RNA, 22 nt, Human
gaugaaauuguuuugauacuuu

SEQ ID NO: 629923 - RNA, 19 nt, Human
agucuuguauuuuucaagc

SEQ ID NO: 629924 - RNA, 22 nt, Human
cuauuacauuucuggacauuca

SEQ ID NO: 629925 - RNA, 22 nt, Human
agcagagguguuuauuauggga

SEQ ID NO: 629926 - RNA, 20 nt, Human
ggcagccaaucagcgugccg

SEQ ID NO: 629927 - RNA, 22 nt, Human
ugaaggcacuugccuaggggca

SEQ ID NO: 629928 - RNA, 22 nt, Human
guuuaacugggagugugggaaa

SEQ ID NO: 629929 - RNA, 22 nt, Human
ucugcucaauacugcucaugaa

SEQ ID NO: 629930 - RNA, 22 nt, Human
ucccaccaggugaccauuucau

SEQ ID NO: 629931 - RNA, 22 nt, Human
aagggccaucccagaacagaaa

SEQ ID NO: 629932 - RNA, 19 nt, Human
gagcugccuuuugaagacc

SEQ ID NO: 629933 - RNA, 22 nt, Human
acguguguaugaguguacauau

SEQ ID NO: 629934 - RNA, 22 nt, Human
aacauugccaugguuaauuuua

SEQ ID NO: 629935 - RNA, 22 nt, Human
ggcucagguuuaaagugcuuua

SEQ ID NO: 629936 - RNA, 22 nt, Human
cacagguguguccuggucuugu

SEQ ID NO: 629937 - RNA, 22 nt, Human
ccucugaggugagcccagcugg

SEQ ID NO: 629938 - RNA, 23 nt, Human
auaauaauuauggcagcaaagug

SEQ ID NO: 629939 - RNA, 22 nt, Human
ugucugugggcaacgccuccca

SEQ ID NO: 629940 - RNA, 22 nt, Human
uuuacauuucccucugucaguu

SEQ ID NO: 629941 - RNA, 22 nt, Human
ucuccaagaaaagaucucagcu

SEQ ID NO: 629942 - RNA, 22 nt, Human
caggaaugaggucguaaguguc

SEQ ID NO: 629943 - RNA, 22 nt, Human
gaagcacagaaugguuaacaug

SEQ ID NO: 629944 - RNA, 22 nt, Human
gcuggcaccuauuuggaccugg

SEQ ID NO: 629945 - RNA, 22 nt, Human
ucaguccuccacacaggcaccc

SEQ ID NO: 629946 - RNA, 22 nt, Human
caagggcugcuaucagcuacug

SEQ ID NO: 629947 - RNA, 22 nt, Human
gcccuuccaacccagagggcaa

SEQ ID NO: 629948 - RNA, 22 nt, Human
acuuuuuaguuuccucaaacau

SEQ ID NO: 629949 - RNA, 22 nt, Human
uugcuucccccuguucuaguuc

SEQ ID NO: 629950 - RNA, 22 nt, Human
aacuugaaccacagaagcugcc

SEQ ID NO: 629951 - RNA, 22 nt, Human
uugaaaaugguaagcaugauau

SEQ ID NO: 629952 - RNA, 22 nt, Human
aaggaagggaaauagugauguc

SEQ ID NO: 629953 - RNA, 22 nt, Human
uugagaggauggauuagacaaa

SEQ ID NO: 629954 - RNA, 20 nt, Human
gaaaauaggccagccaggua

SEQ ID NO: 629955 - RNA, 22 nt, Human
uacacuuuauggauccuacuuu

SEQ ID NO: 629956 - RNA, 22 nt, Human
aagagcauauuaauaguggaga

SEQ ID NO: 629957 - RNA, 22 nt, Human
uccaguggcacuggagacuaga

SEQ ID NO: 629958 - RNA, 22 nt, Human
cuuaggaagcuuuugaggacaa

SEQ ID NO: 629959 - RNA, 23 nt, Human
uguaacuugauggaaugagcuau

SEQ ID NO: 629960 - RNA, 22 nt, Human
guggccuggaaaggcuggucug

SEQ ID NO: 629961 - RNA, 22 nt, Human
ugucuauguauacauguguaua

SEQ ID NO: 629962 - RNA, 22 nt, Human
cagccagcugaauguaccauga

SEQ ID NO: 629963 - RNA, 22 nt, Human
gccaggaguguguggcuauguu

SEQ ID NO: 629964 - RNA, 22 nt, Human
ucuguuauaaaucacacugcau

SEQ ID NO: 629965 - RNA, 22 nt, Human
uagauucuucuuuugagucucu

SEQ ID NO: 629966 - RNA, 20 nt, Human
aagcagugaggugaggagug

SEQ ID NO: 629967 - RNA, 22 nt, Human
gugaccagugaugcugaggagu

SEQ ID NO: 629968 - RNA, 18 nt, Human
ucagcuggguuucugggu

SEQ ID NO: 629969 - RNA, 23 nt, Human
gcagcugguuagaagggaaggag

SEQ ID NO: 629970 - RNA, 22 nt, Human
agccaccuccugcucugcucac

SEQ ID NO: 629971 - RNA, 21 nt, Human
gaacauuuggguuguuucuac

SEQ ID NO: 629972 - RNA, 22 nt, Human
acugccagaggagguaucugaa

SEQ ID NO: 629973 - RNA, 22 nt, Human
aguggcaggcggagauguagga

SEQ ID NO: 629974 - RNA, 23 nt, Human
gguuuucauggcauuccuugccu

SEQ ID NO: 629975 - RNA, 22 nt, Human
acauacuuaugcuaaaaauaua

SEQ ID NO: 629976 - RNA, 20 nt, Human
ugcauggcgcacaucugugg

SEQ ID NO: 629977 - RNA, 22 nt, Human
augaaggcuguguggagccccc

SEQ ID NO: 629978 - RNA, 22 nt, Human
uauacaaugaguacauucuggg

SEQ ID NO: 629979 - RNA, 22 nt, Human
agcagggcugcagugugucuuu

SEQ ID NO: 629980 - RNA, 22 nt, Human
gaaggcuggaaggcaaguagga

SEQ ID NO: 629981 - RNA, 22 nt, Human
uauaggacugaucacauuuuca

SEQ ID NO: 629982 - RNA, 22 nt, Human
ucauguaaguauagaaagcagu

SEQ ID NO: 629983 - RNA, 22 nt, Human
ugcugucuguuuacuggcuaua

SEQ ID NO: 629984 - RNA, 22 nt, Human
uguaaaaccaaaucaaucuagu

SEQ ID NO: 629985 - RNA, 22 nt, Human
augcaguaaauguucuaguuug

SEQ ID NO: 629986 - RNA, 22 nt, Human
agcugugugugcuugggauuau

SEQ ID NO: 629987 - RNA, 22 nt, Human
aagagcaaguggguagugaagc

SEQ ID NO: 629988 - RNA, 22 nt, Human
aaagaauacccugggucauaaa

SEQ ID NO: 629989 - RNA, 22 nt, Human
ggacugaauggaagauauaugg

SEQ ID NO: 629990 - RNA, 22 nt, Human
uucugggcuguccagaggguga

SEQ ID NO: 629991 - RNA, 18 nt, Human
augucugugcacuggaua

SEQ ID NO: 629992 - RNA, 22 nt, Human
aaggagguuaucccaguggacu

SEQ ID NO: 629993 - RNA, 22 nt, Human
gaaagaggaaggagauguauua

SEQ ID NO: 629994 - RNA, 22 nt, Human
caggauggccccggggcugugc

SEQ ID NO: 629995 - RNA, 22 nt, Human
agugucuggaggcauucuuggu

SEQ ID NO: 629996 - RNA, 20 nt, Human
ucugguccaggucuucaugg

SEQ ID NO: 629997 - RNA, 23 nt, Human
uggcagauacaggcaugacuucu

SEQ ID NO: 629998 - RNA, 22 nt, Human
uuucuagucuucccuaccuccc

SEQ ID NO: 629999 - RNA, 22 nt, Human
cuggccugugggcugucuccgg

SEQ ID NO: 630000 - RNA, 22 nt, Human
guggcagagcaggagacaggac

SEQ ID NO: 630001 - RNA, 22 nt, Human
ggaggaccccagcagcucccca

SEQ ID NO: 630002 - RNA, 22 nt, Human
gaggugggaugugugugcuacu

SEQ ID NO: 630003 - RNA, 22 nt, Human
gauuucccagcaaaagcugguu

SEQ ID NO: 630004 - RNA, 22 nt, Human
gcucucuggaagguaucauuau

SEQ ID NO: 630005 - RNA, 22 nt, Human
aucuggcuuuuaccccacggcc

SEQ ID NO: 630006 - RNA, 22 nt, Human
ggucucugacuuagagauggau

SEQ ID NO: 630007 - RNA, 22 nt, Human
gcaaggaccuuugagcgugcca

SEQ ID NO: 630008 - RNA, 22 nt, Human
ugggccaguccugccuaaggug

SEQ ID NO: 630009 - RNA, 22 nt, Human
agcuuucagucucugaaggaac

SEQ ID NO: 630010 - RNA, 22 nt, Human
cacugugggccugucgugggug

SEQ ID NO: 630011 - RNA, 20 nt, Human
uggcaccaggugguggcccc

SEQ ID NO: 630012 - RNA, 22 nt, Human
acagcagagccuagcuuaaucu

SEQ ID NO: 630013 - RNA, 22 nt, Human
uucuccaagaugaagcugugua

SEQ ID NO: 630014 - RNA, 22 nt, Human
ugcaggugccaucgcugcucau

SEQ ID NO: 630015 - RNA, 22 nt, Human
ucuuucagccacuuaccugucu

SEQ ID NO: 630016 - RNA, 22 nt, Human
ucacagaauuuuugcuuccagu

SEQ ID NO: 630017 - RNA, 22 nt, Human
acauucagaaucuuguagcagu

SEQ ID NO: 630018 - RNA, 22 nt, Human
uagcacauaacuuagaauaguu

SEQ ID NO: 630019 - RNA, 22 nt, Human
uggcugugcggccucgggcaga

SEQ ID NO: 630020 - RNA, 22 nt, Human
ucugaaaugcaggcaauuugcu

SEQ ID NO: 630021 - RNA, 22 nt, Human
agaagccaaaggggccagauau

SEQ ID NO: 630022 - RNA, 22 nt, Human
cuuuggcaaugaaacacaagaa

SEQ ID NO: 630023 - RNA, 22 nt, Human
uuccugagaaauuuguaccugg

SEQ ID NO: 630024 - RNA, 22 nt, Human
cagugcugcaggcgccugcggu

SEQ ID NO: 630025 - RNA, 22 nt, Human
gucauugagucgucagagucuu

SEQ ID NO: 630026 - RNA, 22 nt, Human
uuuuuguggugcagacuaaagc

SEQ ID NO: 630027 - RNA, 22 nt, Human
cacauaauacauguuccacuua

SEQ ID NO: 630028 - RNA, 22 nt, Human
auauuuguuagagucuaugugu

SEQ ID NO: 630029 - RNA, 22 nt, Human
gcccaggagccuggagaugugu

SEQ ID NO: 630030 - RNA, 21 nt, Human
uguguauguccaaugcccuac

SEQ ID NO: 630031 - RNA, 20 nt, Human
cugugggccucacuuggggu

SEQ ID NO: 630032 - RNA, 20 nt, Human
auguaaaagacagggaguag

SEQ ID NO: 630033 - RNA, 22 nt, Human
aucacugagcuucagugcuggc

SEQ ID NO: 630034 - RNA, 22 nt, Human
uugaaaguaauaacuuuguuca

SEQ ID NO: 630035 - RNA, 22 nt, Human
augaacaauaaaauagaucaca

SEQ ID NO: 630036 - RNA, 22 nt, Human
uccuggaggagauccaaucuga

SEQ ID NO: 630037 - RNA, 22 nt, Human
gagguuggagggcuggccugca

SEQ ID NO: 630038 - RNA, 22 nt, Human
agccaggaaugcaugcucugcu

SEQ ID NO: 630039 - RNA, 22 nt, Human
aagcagagaccggcuaauggag

SEQ ID NO: 630040 - RNA, 22 nt, Human
agguggucuuggcccacccagg

SEQ ID NO: 630041 - RNA, 22 nt, Human
cuuuccuuaauaagcagguaua

SEQ ID NO: 630042 - RNA, 22 nt, Human
ggcaggacucuucugugggccg

SEQ ID NO: 630043 - RNA, 22 nt, Human
aagccuucccuuuuugagcuca

SEQ ID NO: 630044 - RNA, 22 nt, Human
aucucauaaacacacauauaug

SEQ ID NO: 630045 - RNA, 22 nt, Human
ucuggagaagaaacuugcucug

SEQ ID NO: 630046 - RNA, 22 nt, Human
cagugcagccaaggacaggcac

SEQ ID NO: 630047 - RNA, 22 nt, Human
auguaugauauuuccaguauca

SEQ ID NO: 630048 - RNA, 19 nt, Human
ucugcagaaggcauacaug

SEQ ID NO: 630049 - RNA, 22 nt, Human
aggcuaaggugggaggaucgcu

SEQ ID NO: 630050 - RNA, 22 nt, Human
cuauggaagggaugcaaagaaa

SEQ ID NO: 630051 - RNA, 19 nt, Human
uagaagcagggaagcugag

SEQ ID NO: 630052 - RNA, 22 nt, Human
cugccaggcagggagauggcug

SEQ ID NO: 630053 - RNA, 22 nt, Human
acagcugugauuucuaucauga

SEQ ID NO: 630054 - RNA, 22 nt, Human
cauuucaauacaguuuguaaau

SEQ ID NO: 630055 - RNA, 22 nt, Human
aguguucaggaucugaggccag

SEQ ID NO: 630056 - RNA, 22 nt, Human
ugcaugcguuaguuggcguguu

SEQ ID NO: 630057 - RNA, 20 nt, Human
agcuggugaauuaaagacug

SEQ ID NO: 630058 - RNA, 22 nt, Human
aacauguuuccaguguaaggcc

SEQ ID NO: 630059 - RNA, 22 nt, Human
gacuuugauuaaaucaagcaaa

SEQ ID NO: 630060 - RNA, 22 nt, Human
gagucugagagccuaaugaccu

SEQ ID NO: 630061 - RNA, 22 nt, Human
ucuguugcauaugcugcugggu

SEQ ID NO: 630062 - RNA, 22 nt, Human
aaagaagggacagacugccucu

SEQ ID NO: 630063 - RNA, 22 nt, Human
agcagcucacaggauuccugaa

SEQ ID NO: 630064 - RNA, 22 nt, Human
gugcugaggccaaugucagggu

SEQ ID NO: 630065 - RNA, 22 nt, Human
aacugauuucaaguucaguuuc

SEQ ID NO: 630066 - RNA, 22 nt, Human
agguccugggaguucuagugug

SEQ ID NO: 630067 - RNA, 22 nt, Human
gcagcccagguggaguaaucua

SEQ ID NO: 630068 - RNA, 22 nt, Human
gugacauguuauggacuggcua

SEQ ID NO: 630069 - RNA, 22 nt, Human
ccucuggggcaucagacaaagg

SEQ ID NO: 630070 - RNA, 22 nt, Human
guauuucuuuaucuggucagaa

SEQ ID NO: 630071 - RNA, 21 nt, Human
agaacugauuaaauaagcagu

SEQ ID NO: 630072 - RNA, 22 nt, Human
acaaaugugucuaauugugccu

SEQ ID NO: 630073 - RNA, 23 nt, Human
ucagucuucccugucaguaauag

SEQ ID NO: 630074 - RNA, 22 nt, Human
cagggcagcuuccuuuguuagg

SEQ ID NO: 630075 - RNA, 22 nt, Human
gugcauguuaaugguguacaaa

SEQ ID NO: 630076 - RNA, 22 nt, Human
uacagccaugguuaauuuaccu

SEQ ID NO: 630077 - RNA, 22 nt, Human
cagccacuucgagcuuccugau

SEQ ID NO: 630078 - RNA, 20 nt, Human
gcugaggauuccuggccccu

SEQ ID NO: 630079 - RNA, 22 nt, Human
cacucccuucaggagccuagga

SEQ ID NO: 630080 - RNA, 22 nt, Human
uugucuuaaauggauggacaau

SEQ ID NO: 630081 - RNA, 22 nt, Human
gccuugccaaggggcagcagag

SEQ ID NO: 630082 - RNA, 22 nt, Human
uucccacaguguugaauccucu

SEQ ID NO: 630083 - RNA, 22 nt, Human
ggguccagacacuccagaggaa

SEQ ID NO: 630084 - RNA, 21 nt, Human
uggcuucagccauuuucucug

SEQ ID NO: 630085 - RNA, 22 nt, Human
acagcaauaggaaauacuugca

SEQ ID NO: 630086 - RNA, 21 nt, Human
cacagagauauuggugagccu

SEQ ID NO: 630087 - RNA, 21 nt, Human
uucaguaugcgucaugcuguu

SEQ ID NO: 630088 - RNA, 22 nt, Human
uggagcagaaauuugaagccau

SEQ ID NO: 630089 - RNA, 22 nt, Human
gaucauuucaguccaguaaaua

SEQ ID NO: 630090 - RNA, 22 nt, Human
uccccucuggaggcugcagggg

SEQ ID NO: 630091 - RNA, 22 nt, Human
aagggaaaucauauggugcagu

SEQ ID NO: 630092 - RNA, 22 nt, Human
cagcaugaaacaauugagccca

SEQ ID NO: 630093 - RNA, 22 nt, Human
ggaaguagaaguaaugaaauca

SEQ ID NO: 630094 - RNA, 22 nt, Human
uuaaauguuuaaucuaacuuga

SEQ ID NO: 630095 - RNA, 22 nt, Human
cacucucacaugcccugucagu

SEQ ID NO: 630096 - RNA, 22 nt, Human
gggcaguuuauucuagaugguu

SEQ ID NO: 630097 - RNA, 22 nt, Human
aucucagagaaauuugaaugca

SEQ ID NO: 630098 - RNA, 22 nt, Human
uccaagaugguugguguggugg

SEQ ID NO: 630099 - RNA, 18 nt, Human
ccagggaugcaugguccc

SEQ ID NO: 630100 - RNA, 22 nt, Human
gcagcuuuguggagaggcccau

SEQ ID NO: 630101 - RNA, 22 nt, Human
gauuaguugauuaagagucaga

SEQ ID NO: 630102 - RNA, 22 nt, Human
cagguaguccacagugagggag

SEQ ID NO: 630103 - RNA, 22 nt, Human
ugaaugauauauugggaauaau

SEQ ID NO: 630104 - RNA, 22 nt, Human
cugcagagagugccgggcagcc

SEQ ID NO: 630105 - RNA, 22 nt, Human
cuauucaacuugacuguuucac

SEQ ID NO: 630106 - RNA, 22 nt, Human
ccuccaggaacuugagagacac

SEQ ID NO: 630107 - RNA, 22 nt, Human
gugaagaucugagcccucaggu

SEQ ID NO: 630108 - RNA, 22 nt, Human
gcucccugcacucugcagcccu

SEQ ID NO: 630109 - RNA, 18 nt, Human
ugucucugaauuccagug

SEQ ID NO: 630110 - RNA, 22 nt, Human
uuuucuguuugcuucaagacau

SEQ ID NO: 630111 - RNA, 22 nt, Human
augggaggcaaagaucgcagaa

SEQ ID NO: 630112 - RNA, 22 nt, Human
acacauguuuacagucuucagu

SEQ ID NO: 630113 - RNA, 18 nt, Human
gccagcccuccaaccucc

SEQ ID NO: 630114 - RNA, 22 nt, Human
cacugaaacagguauugcuggu

SEQ ID NO: 630115 - RNA, 22 nt, Human
gacaggugagaugaggaacacc

SEQ ID NO: 630116 - RNA, 22 nt, Human
cauggcaggugcagauucugug

SEQ ID NO: 630117 - RNA, 22 nt, Human
cuuuaaggugaugagagaugcu

SEQ ID NO: 630118 - RNA, 18 nt, Human
agcuccugaacucugugg

SEQ ID NO: 630119 - RNA, 22 nt, Human
cucuggacuuguacauacucag

SEQ ID NO: 630120 - RNA, 22 nt, Human
augauucucauuuuauaaacuu

SEQ ID NO: 630121 - RNA, 22 nt, Human
augcuguggaaguuccugaagc

SEQ ID NO: 630122 - RNA, 22 nt, Human
gagguggcugggaguagggaau

SEQ ID NO: 630123 - RNA, 22 nt, Human
ucuguuucuuccuagccaugcu

SEQ ID NO: 630124 - RNA, 20 nt, Human
ugagaggacauuuuucaugu

SEQ ID NO: 630125 - RNA, 22 nt, Human
agugggguccucaguaugguuc

SEQ ID NO: 630126 - RNA, 22 nt, Human
uuauuuauaucucugcaguuua

SEQ ID NO: 630127 - RNA, 18 nt, Human
ggguccuguucuuggaag

SEQ ID NO: 630128 - RNA, 22 nt, Human
ugaaaccauucucagguacacu

SEQ ID NO: 630129 - RNA, 22 nt, Human
cucucagggucccugcggagga

SEQ ID NO: 630130 - RNA, 22 nt, Human
gguccuggaaguguaaguggca

SEQ ID NO: 630131 - RNA, 21 nt, Human
gaacccagcagcagugcucug

SEQ ID NO: 630132 - RNA, 22 nt, Human
aaugauccuuguuguuuaacca

SEQ ID NO: 630133 - RNA, 22 nt, Human
aagccacagaucguucugucac

SEQ ID NO: 630134 - RNA, 22 nt, Human
aucuuucuaugguacuuucucc

SEQ ID NO: 630135 - RNA, 22 nt, Human
gguaggcagaucacugucuaug

SEQ ID NO: 630136 - RNA, 23 nt, Human
uguuuguuucuaugagagauagc

SEQ ID NO: 630137 - RNA, 22 nt, Human
aggcagaggagaaugaucuucc

SEQ ID NO: 630138 - RNA, 20 nt, Human
uuguuucugcuauuuucuaa

SEQ ID NO: 630139 - RNA, 21 nt, Human
gugugucuaauguaguggaaa

SEQ ID NO: 630140 - RNA, 22 nt, Human
agaguaacuuuuaacuuuacgu

SEQ ID NO: 630141 - RNA, 22 nt, Human
cuagagaagaggcucagccagc

SEQ ID NO: 630142 - RNA, 22 nt, Human
uccugcugggucuaacucuggu

SEQ ID NO: 630143 - RNA, 22 nt, Human
uuugcauugcauacaaggaacu

SEQ ID NO: 630144 - RNA, 20 nt, Human
uuggcucagauuuuuauggg

SEQ ID NO: 630145 - RNA, 20 nt, Human
caugcaugacacuggaaagg

SEQ ID NO: 630146 - RNA, 23 nt, Human
cagaggguuccauggagcauggu

SEQ ID NO: 630147 - RNA, 22 nt, Human
ggcuggcaagugucugcucaug

SEQ ID NO: 630148 - RNA, 22 nt, Human
gcagagugagccgaggcugcuc

SEQ ID NO: 630149 - RNA, 21 nt, Human
cugugacucccugggcaaucc

SEQ ID NO: 630150 - RNA, 22 nt, Human
agucucugggcaugguugugac

SEQ ID NO: 630151 - RNA, 22 nt, Human
gguacagggcuuccuggacaag

SEQ ID NO: 630152 - RNA, 22 nt, Human
aaaugcaguuuccugagaccca

SEQ ID NO: 630153 - RNA, 22 nt, Human
ccacccugaggaaugguccggc

SEQ ID NO: 630154 - RNA, 22 nt, Human
gggcagauggggcacaggcuga

SEQ ID NO: 630155 - RNA, 22 nt, Human
uagacagauuuaaaggaaugga

SEQ ID NO: 630156 - RNA, 22 nt, Human
auuacagaagauaugcucaaca

SEQ ID NO: 630157 - RNA, 22 nt, Human
uuacaguaacauuuucagucug

SEQ ID NO: 630158 - RNA, 22 nt, Human
aauauaguucugguauuguuaa

SEQ ID NO: 630159 - RNA, 22 nt, Human
ugggagaaacugucucucccac

SEQ ID NO: 630160 - RNA, 22 nt, Human
ucccugggccuccugcuaugca

SEQ ID NO: 630161 - RNA, 22 nt, Human
aguguaugugaaacuuuccaaa

SEQ ID NO: 630162 - RNA, 22 nt, Human
cugggcagugguggcccuuccc

SEQ ID NO: 630163 - RNA, 22 nt, Human
ggcuuaguguuucugcucagcc

SEQ ID NO: 630164 - RNA, 22 nt, Human
gacaccagcaaggcugugagga

SEQ ID NO: 630165 - RNA, 22 nt, Human
gcuuuacaaguggugcagauua

SEQ ID NO: 630166 - RNA, 22 nt, Human
gagcaucuuguucccaacuucu

SEQ ID NO: 630167 - RNA, 22 nt, Human
acaggcagagaguggcggacuc

SEQ ID NO: 630168 - RNA, 20 nt, Human
ugguccaggaccuggugucc

SEQ ID NO: 630169 - RNA, 19 nt, Human
aggugagugugggaaaggg

SEQ ID NO: 630170 - RNA, 22 nt, Human
ggucucugucacugaguggccc

SEQ ID NO: 630171 - RNA, 22 nt, Human
gagcucugguucaugaucuauu

SEQ ID NO: 630172 - RNA, 22 nt, Human
caggcccaagacugaugagucu

SEQ ID NO: 630173 - RNA, 22 nt, Human
acucugacauuuaaaaagcaau

SEQ ID NO: 630174 - RNA, 22 nt, Human
gacaacacauguaugccacucu

SEQ ID NO: 630175 - RNA, 22 nt, Human
gggcuggaccgcgaccccugag

SEQ ID NO: 630176 - RNA, 22 nt, Human
ucacaggagcccaggggagcug

SEQ ID NO: 630177 - RNA, 22 nt, Human
ucaguugcauauuuuguguucu

SEQ ID NO: 630178 - RNA, 16 nt, Human
auuuccagauuaugca

SEQ ID NO: 630179 - RNA, 22 nt, Human
ucaaggaagucuuauugcacag

SEQ ID NO: 630180 - RNA, 22 nt, Human
guggccagaaccaggagaauga

SEQ ID NO: 630181 - RNA, 22 nt, Human
agccaaucuacaacaaaggaua

SEQ ID NO: 630182 - RNA, 19 nt, Human
gccaggcuccauagccggc

SEQ ID NO: 630183 - RNA, 22 nt, Human
caguuugucuugauucagaaca

SEQ ID NO: 630184 - RNA, 22 nt, Human
auaaccuguuucagacauuugu

SEQ ID NO: 630185 - RNA, 22 nt, Human
gcucucuugguggcuguccugg

SEQ ID NO: 630186 - RNA, 22 nt, Human
ggaaggggugggugagccucag

SEQ ID NO: 630187 - RNA, 22 nt, Human
gcccaggaugguguguaguggu

SEQ ID NO: 630188 - RNA, 22 nt, Human
aauggaauaccuagguggccca

SEQ ID NO: 630189 - RNA, 22 nt, Human
cagagccacuuggagaugagaa

SEQ ID NO: 630190 - RNA, 22 nt, Human
ugaagacuuugcucuuaaccac

SEQ ID NO: 630191 - RNA, 22 nt, Human
ggagcaggagucucuugaauuu

SEQ ID NO: 630192 - RNA, 22 nt, Human
cagaacagucgccugcauggau

SEQ ID NO: 630193 - RNA, 22 nt, Human
acagcugggugcugcucagagc

SEQ ID NO: 630194 - RNA, 22 nt, Human
aguaaacauagaauguucuucc

SEQ ID NO: 630195 - RNA, 21 nt, Human
uccagggcuuugauucucuca

SEQ ID NO: 630196 - RNA, 22 nt, Human
uucagaggugggcugagaggau

SEQ ID NO: 630197 - RNA, 22 nt, Human
cucugagauaguuucuaucaau

SEQ ID NO: 630198 - RNA, 22 nt, Human
augcugaaggugaauugacaau

SEQ ID NO: 630199 - RNA, 22 nt, Human
uucuguuucuggggucucugac

SEQ ID NO: 630200 - RNA, 23 nt, Human
uuagagaugauuaaaaaaucuug

SEQ ID NO: 630201 - RNA, 22 nt, Human
guuaaggaucuugagaugagga

SEQ ID NO: 630202 - RNA, 22 nt, Human
acacugcagauguaauuugagu

SEQ ID NO: 630203 - RNA, 22 nt, Human
uccagagcaaaguuugcuaaca

SEQ ID NO: 630204 - RNA, 21 nt, Human
ucuccaguauccuucucugag

SEQ ID NO: 630205 - RNA, 22 nt, Human
gucaucuuaucauuguugcugu

SEQ ID NO: 630206 - RNA, 22 nt, Human
ggcuggcacccuuggggauagg

SEQ ID NO: 630207 - RNA, 22 nt, Human
gagaaacuuggaguuauucugg

SEQ ID NO: 630208 - RNA, 22 nt, Human
guacacauugucuguuuacuuc

SEQ ID NO: 630209 - RNA, 22 nt, Human
uggcccgaagauccgaggguca

SEQ ID NO: 630210 - RNA, 22 nt, Human
augagagcucuaugaucuguuu

SEQ ID NO: 630211 - RNA, 22 nt, Human
agucauaucugaggaggaaucc

SEQ ID NO: 630212 - RNA, 22 nt, Human
ucucauggcuuguaggagguga

SEQ ID NO: 630213 - RNA, 22 nt, Human
acaguacugcuguucuuguccu

SEQ ID NO: 630214 - RNA, 22 nt, Human
guaugugugcaaauguaaauau

SEQ ID NO: 630215 - RNA, 22 nt, Human
auuucagagcuuugcagcuaau

SEQ ID NO: 630216 - RNA, 22 nt, Human
ugacaguagaagaugcuguuac

SEQ ID NO: 630217 - RNA, 22 nt, Human
ggggaagagcauugcacggugu

SEQ ID NO: 630218 - RNA, 22 nt, Human
gggaaauuuuagguuugucucg

SEQ ID NO: 630219 - RNA, 22 nt, Human
agccugugugcuuuggacaggg

SEQ ID NO: 630220 - RNA, 22 nt, Human
ucaggcuggaaugcaguggggc

SEQ ID NO: 630221 - RNA, 22 nt, Human
agaggccaucugcucugugggg

SEQ ID NO: 630222 - RNA, 21 nt, Human
uggcagcacccacacccucug

SEQ ID NO: 630223 - RNA, 22 nt, Human
ggccccacgggggaguccuagu

SEQ ID NO: 630224 - RNA, 22 nt, Human
aggucaaaccacagcucuaggc

SEQ ID NO: 630225 - RNA, 21 nt, Human
ugaaggagaggaccgagugcu

SEQ ID NO: 630226 - RNA, 22 nt, Human
gugguaauagagcuccaaacua

SEQ ID NO: 630227 - RNA, 23 nt, Human
acuuuucaauuagcuaugcuuaa

SEQ ID NO: 630228 - RNA, 22 nt, Human
aaggauaaaaaccacuucuaau

SEQ ID NO: 630229 - RNA, 22 nt, Human
uaggccacagaugagacauaag

SEQ ID NO: 630230 - RNA, 22 nt, Human
ucuacagccauuuugagcagug

SEQ ID NO: 630231 - RNA, 22 nt, Human
auuucuacauugaguuuuagca

SEQ ID NO: 630232 - RNA, 22 nt, Human
aaucagaaucaguugacacagc

SEQ ID NO: 630233 - RNA, 20 nt, Human
acauuuguggaucugagaga

SEQ ID NO: 630234 - RNA, 22 nt, Human
caguguggguuugggaggagua

SEQ ID NO: 630235 - RNA, 22 nt, Human
ugccugggugcccucugcuccu

SEQ ID NO: 630236 - RNA, 22 nt, Human
uaguuuagccauuuaggaauug

SEQ ID NO: 630237 - RNA, 22 nt, Human
gagcccaguaggcaaagcugca

SEQ ID NO: 630238 - RNA, 22 nt, Human
gagcucagauucuggugucaga

SEQ ID NO: 630239 - RNA, 22 nt, Human
auggaaagccaguguuccauca

SEQ ID NO: 630240 - RNA, 22 nt, Human
gggcuuuagauugcagaggauu

SEQ ID NO: 630241 - RNA, 22 nt, Human
ucacccagacuugugaaugugu

SEQ ID NO: 630242 - RNA, 22 nt, Human
cacauguccugggaaaauaacu

SEQ ID NO: 630243 - RNA, 22 nt, Human
cugggcaguuuuacaucauugc

SEQ ID NO: 630244 - RNA, 22 nt, Human
ccagaagugucuaucaagaugu

SEQ ID NO: 630245 - RNA, 22 nt, Human
aguguggagcaucgagggcaga

SEQ ID NO: 630246 - RNA, 22 nt, Human
cccugggcaagcccuauuuucc

SEQ ID NO: 630247 - RNA, 22 nt, Human
aagccagguguuuaggccagcg

SEQ ID NO: 630248 - RNA, 22 nt, Human
ccaggcuuucccagccucucca

SEQ ID NO: 630249 - RNA, 22 nt, Human
agggggucuccuaucauggaag

SEQ ID NO: 630250 - RNA, 22 nt, Human
aggaagcugcuaagaaacaaug

SEQ ID NO: 630251 - RNA, 22 nt, Human
cugagccaugggucuaagcacu

SEQ ID NO: 630252 - RNA, 22 nt, Human
ccacagagagugucagccuuug

SEQ ID NO: 630253 - RNA, 22 nt, Human
uucucagagcacugcugacaaa

SEQ ID NO: 630254 - RNA, 22 nt, Human
gcuccaggugucccagguaaaa

SEQ ID NO: 630255 - RNA, 22 nt, Human
cagaaaauaaacauuuguggaa

SEQ ID NO: 630256 - RNA, 22 nt, Human
uauagcaaggacauaauaugcu

SEQ ID NO: 630257 - RNA, 22 nt, Human
caacagcuuuagaaacacuuuc

SEQ ID NO: 630258 - RNA, 22 nt, Human
gcuggccugaccugaggcuggg

SEQ ID NO: 630259 - RNA, 22 nt, Human
acugggaguucuccaugucccu

SEQ ID NO: 630260 - RNA, 22 nt, Human
gaaacuugauaauugaaacaga

SEQ ID NO: 630261 - RNA, 22 nt, Human
auccuuggaugugucuuuuugu

SEQ ID NO: 630262 - RNA, 22 nt, Human
aaggcugagguagggccuaaaa

SEQ ID NO: 630263 - RNA, 22 nt, Human
ugugcccugccuacaucaccuu

SEQ ID NO: 630264 - RNA, 17 nt, Human
uguaagcaggugagaga

SEQ ID NO: 630265 - RNA, 20 nt, Human
uucaaagacccucaggucca

SEQ ID NO: 630266 - RNA, 22 nt, Human
cuucuaagcugagaaugccuuu

SEQ ID NO: 630267 - RNA, 22 nt, Human
ugccccucgacgcaaugaaggg

SEQ ID NO: 630268 - RNA, 22 nt, Human
ucuuccuggauggggguugaug

SEQ ID NO: 630269 - RNA, 22 nt, Human
uuuauuccaaagcuugcacuuu

SEQ ID NO: 630270 - RNA, 22 nt, Human
uggacaugucuucuccaagaaa

SEQ ID NO: 630271 - RNA, 22 nt, Human
caugaagcacagcucucuuuuu

SEQ ID NO: 630272 - RNA, 22 nt, Human
auuugaaaucccuucuacugua

SEQ ID NO: 630273 - RNA, 22 nt, Human
gccagcucagaugcaggaagga

SEQ ID NO: 630274 - RNA, 22 nt, Human
gggccaccuggauuccaugugu

SEQ ID NO: 630275 - RNA, 22 nt, Human
aggggcucuaaagaucauggaa

SEQ ID NO: 630276 - RNA, 22 nt, Human
cauggugaggggugaagggcag

SEQ ID NO: 630277 - RNA, 21 nt, Human
gguggcuagaaagcagugaga

SEQ ID NO: 630278 - RNA, 22 nt, Human
uuaagcaacacacauuaauuau

SEQ ID NO: 630279 - RNA, 22 nt, Human
uugacauaagacuuagaguauu

SEQ ID NO: 630280 - RNA, 22 nt, Human
auugacaaggaaacuauaccag

SEQ ID NO: 630281 - RNA, 21 nt, Human
gcauuccuaggagguaagcau

SEQ ID NO: 630282 - RNA, 22 nt, Human
aguacaaaggcccuugauuacu

SEQ ID NO: 630283 - RNA, 20 nt, Human
gccagcuggucccaauuaug

SEQ ID NO: 630284 - RNA, 22 nt, Human
auaugugugaugcauggacuaa

SEQ ID NO: 630285 - RNA, 22 nt, Human
cuuguuaucuccguguccuugu

SEQ ID NO: 630286 - RNA, 22 nt, Human
aauaagauccugaagauauguu

SEQ ID NO: 630287 - RNA, 22 nt, Human
uauauacuuucuuccuggguag

SEQ ID NO: 630288 - RNA, 22 nt, Human
uaggaaacaaaguaaugcaacu

SEQ ID NO: 630289 - RNA, 22 nt, Human
aaucagaaagaucuugaugaga

SEQ ID NO: 630290 - RNA, 22 nt, Human
ucuguuucuucuucuguuauau

SEQ ID NO: 630291 - RNA, 21 nt, Human
ucaaaucagguaucacuauug

SEQ ID NO: 630292 - RNA, 22 nt, Human
aaaaauuuaugguucuucucug

SEQ ID NO: 630293 - RNA, 20 nt, Human
uugcuuuaucagacaugaua

SEQ ID NO: 630294 - RNA, 22 nt, Human
uucuuugcccauguuuccuaag

SEQ ID NO: 630295 - RNA, 22 nt, Human
auuucuuucuggccacgguuuu

SEQ ID NO: 630296 - RNA, 22 nt, Human
cucuggacccagacaaaccugg

SEQ ID NO: 630297 - RNA, 22 nt, Human
aaaguuuuagcuguccaguucc

SEQ ID NO: 630298 - RNA, 22 nt, Human
ugugccuguugguguagacaua

SEQ ID NO: 630299 - RNA, 22 nt, Human
uauuuccacccucaguaaggaa

SEQ ID NO: 630300 - RNA, 22 nt, Human
uggaacaaacauggugauggcu

SEQ ID NO: 630301 - RNA, 22 nt, Human
uuucuugaaguccuaacccuca

SEQ ID NO: 630302 - RNA, 22 nt, Human
agcaaucaccaccucuauauuu

SEQ ID NO: 630303 - RNA, 22 nt, Human
gcaauagugccuauucucuuga

SEQ ID NO: 630304 - RNA, 18 nt, Human
gggaagccgggaagccgg

SEQ ID NO: 630305 - RNA, 22 nt, Human
gcaguguggcguggggaccuaa

SEQ ID NO: 630306 - RNA, 22 nt, Human
ucuucucccagggucgcccaag

SEQ ID NO: 630307 - RNA, 22 nt, Human
uaaauacuuuacaggaugucuc

SEQ ID NO: 630308 - RNA, 22 nt, Human
ucugucuccucagaugacucca

SEQ ID NO: 630309 - RNA, 22 nt, Human
ugcaugcaacaauucuucuaua

SEQ ID NO: 630310 - RNA, 22 nt, Human
ggcaagguacucuagagcacau

SEQ ID NO: 630311 - RNA, 22 nt, Human
aaugucuuuucccuuacuuucc

SEQ ID NO: 630312 - RNA, 20 nt, Human
acagguucauucugugugac

SEQ ID NO: 630313 - RNA, 22 nt, Human
uagcuuuaagacauggugaaug

SEQ ID NO: 630314 - RNA, 22 nt, Human
agacagugugguuggugguucc

SEQ ID NO: 630315 - RNA, 22 nt, Human
cuagggaaugagagacuggauc

SEQ ID NO: 630316 - RNA, 22 nt, Human
agcugcuguggggcucggccug

SEQ ID NO: 630317 - RNA, 21 nt, Human
acagaggcauacagcuuaagg

SEQ ID NO: 630318 - RNA, 22 nt, Human
gagcugagccuggguggaccgc

SEQ ID NO: 630319 - RNA, 22 nt, Human
cugugugcaacuugcaguuuug

SEQ ID NO: 630320 - RNA, 22 nt, Human
acaacuggcuuuuuagcuuguu

SEQ ID NO: 630321 - RNA, 22 nt, Human
gcaggcccagagucgcuggccu

SEQ ID NO: 630322 - RNA, 21 nt, Human
acugaacuuguguucuagagg

SEQ ID NO: 630323 - RNA, 22 nt, Human
auauguguauuugguuagccua

SEQ ID NO: 630324 - RNA, 22 nt, Human
aggugcugggcagcagucauug

SEQ ID NO: 630325 - RNA, 22 nt, Human
uggagcagagaugguggccuuc

SEQ ID NO: 630326 - RNA, 22 nt, Human
acaggaguuaaggcugaguuga

SEQ ID NO: 630327 - RNA, 22 nt, Human
uauuucagcccuacuacuuggc

SEQ ID NO: 630328 - RNA, 22 nt, Human
gcucugggccgggcaccagccu

SEQ ID NO: 630329 - RNA, 22 nt, Human
aguguacauguacacauuagua

SEQ ID NO: 630330 - RNA, 22 nt, Human
ucagaggaaagggaacauaguc

SEQ ID NO: 630331 - RNA, 22 nt, Human
ggguggagguggguuuugagau

SEQ ID NO: 630332 - RNA, 22 nt, Human
agggcccaugugggagcacuug

SEQ ID NO: 630333 - RNA, 22 nt, Human
gccuccacuuuugcuggcuucu

SEQ ID NO: 630334 - RNA, 22 nt, Human
uuugauaacagugaauaucaug

SEQ ID NO: 630335 - RNA, 22 nt, Human
acagaguaggugcugucgacug

SEQ ID NO: 630336 - RNA, 22 nt, Human
gcucccagcaauugaggcagcc

SEQ ID NO: 630337 - RNA, 22 nt, Human
gcaggcucagagcagauuagca

SEQ ID NO: 630338 - RNA, 22 nt, Human
cugaaggauucaaaauggcagg

SEQ ID NO: 630339 - RNA, 22 nt, Human
aggggucuugaggacuccagca

SEQ ID NO: 630340 - RNA, 22 nt, Human
acagagagaggcccgaggcugc

SEQ ID NO: 630341 - RNA, 22 nt, Human
guaaacauuuucaucugugccc

SEQ ID NO: 630342 - RNA, 22 nt, Human
acagagcuuaauucaggagcuu

SEQ ID NO: 630343 - RNA, 22 nt, Human
uuggugucuuuuuuauacaugu

SEQ ID NO: 630344 - RNA, 18 nt, Human
acagggaugggguaagug

SEQ ID NO: 630345 - RNA, 22 nt, Human
gccacuguugcuccucaggaaa

SEQ ID NO: 630346 - RNA, 22 nt, Human
cuucugaggacucuaaagagga

SEQ ID NO: 630347 - RNA, 22 nt, Human
uauaaaauggcaucagcuccaa

SEQ ID NO: 630348 - RNA, 22 nt, Human
ucugcucagugcuuaucucuaa

SEQ ID NO: 630349 - RNA, 22 nt, Human
caagaauuaagaauuuugaugu

SEQ ID NO: 630350 - RNA, 22 nt, Human
gcaugcaugauguuggcagugg

SEQ ID NO: 630351 - RNA, 22 nt, Human
aaaauguguuuaugcauuucgu

SEQ ID NO: 630352 - RNA, 22 nt, Human
auucuguguuaggauagauggu

SEQ ID NO: 630353 - RNA, 22 nt, Human
uccuucagucuucugagccaua

SEQ ID NO: 630354 - RNA, 22 nt, Human
ggcacagcaggagcuaugugaa

SEQ ID NO: 630355 - RNA, 22 nt, Human
gucauuuaaagaccauuguggg

SEQ ID NO: 630356 - RNA, 22 nt, Human
guucuccacugcagagucucuc

SEQ ID NO: 630357 - RNA, 22 nt, Human
auucuucagcaggggacacuau

SEQ ID NO: 630358 - RNA, 18 nt, Human
ugaggaaggggaaguauu

SEQ ID NO: 630359 - RNA, 22 nt, Human
caguaguggucuaucacuggag

SEQ ID NO: 630360 - RNA, 22 nt, Human
uuccacaaugguuaagcucguu

SEQ ID NO: 630361 - RNA, 22 nt, Human
cacugcccaccaaguggcuggu

SEQ ID NO: 630362 - RNA, 22 nt, Human
agcagccauccuuagagaaaga

SEQ ID NO: 630363 - RNA, 22 nt, Human
acagccagaucugagagaucuu

SEQ ID NO: 630364 - RNA, 22 nt, Human
caggcucacuguaaggucagcu

SEQ ID NO: 630365 - RNA, 22 nt, Human
cagguagguuuuaggcuaaaca

SEQ ID NO: 630366 - RNA, 22 nt, Human
gccagagccuguggauuuaacc

SEQ ID NO: 630367 - RNA, 22 nt, Human
ugcugggcacugucucugggga

SEQ ID NO: 630368 - RNA, 22 nt, Human
gcagcugcaagcacuucuggca

SEQ ID NO: 630369 - RNA, 22 nt, Human
cagaucauaacagauacauaga

SEQ ID NO: 630370 - RNA, 22 nt, Human
uuccucuuccaucuucccaggg

SEQ ID NO: 630371 - RNA, 22 nt, Human
ggcugggcauccauccaugaga

SEQ ID NO: 630372 - RNA, 20 nt, Human
auuugcaucugaauaacuua

SEQ ID NO: 630373 - RNA, 22 nt, Human
augcauugucugguuucauuuu

SEQ ID NO: 630374 - RNA, 22 nt, Human
augugaaaaauuucuuauuaca

SEQ ID NO: 630375 - RNA, 22 nt, Human
uuauauaaagauaacuuuucuu

SEQ ID NO: 630376 - RNA, 22 nt, Human
aggcaucaggaguauagccaga

SEQ ID NO: 630377 - RNA, 22 nt, Human
caucagccuggaaggcagccug

SEQ ID NO: 630378 - RNA, 22 nt, Human
cuuuucucuuacauuccacugg

SEQ ID NO: 630379 - RNA, 22 nt, Human
ugagcagaugugccaaacugua

SEQ ID NO: 630380 - RNA, 22 nt, Human
agauucaaagugaagaacuuaa

SEQ ID NO: 630381 - RNA, 20 nt, Human
cagggcacacugcagccucg

SEQ ID NO: 630382 - RNA, 22 nt, Human
agagagagggaaacugcuaaac

SEQ ID NO: 630383 - RNA, 22 nt, Human
gagaggaagccuucuguacuug

SEQ ID NO: 630384 - RNA, 22 nt, Human
aauucugugcaggcagagcuau

SEQ ID NO: 630385 - RNA, 20 nt, Human
aggaaggagaaucugagcaa

SEQ ID NO: 630386 - RNA, 22 nt, Human
ccuggcagucaggggaguccuu

SEQ ID NO: 630387 - RNA, 22 nt, Human
auguuucaggaaaucagcuaga

SEQ ID NO: 630388 - RNA, 21 nt, Human
aaggacgagguuuugauuaca

SEQ ID NO: 630389 - RNA, 22 nt, Human
cugcauguuuucuuaauuguga

SEQ ID NO: 630390 - RNA, 22 nt, Human
ucacaaauauuuuaacaguagg

SEQ ID NO: 630391 - RNA, 22 nt, Human
agggcaaguugagugugcgugg

SEQ ID NO: 630392 - RNA, 22 nt, Human
cugcuguguuagcagguuuagu

SEQ ID NO: 630393 - RNA, 22 nt, Human
aaaguccuguuaacuguuaaca

SEQ ID NO: 630394 - RNA, 22 nt, Human
uauccguuagaaucaugcuggg

SEQ ID NO: 630395 - RNA, 22 nt, Human
cugagguagcugugaauguucu

SEQ ID NO: 630396 - RNA, 22 nt, Human
aauuuaaggaggccuucacucu

SEQ ID NO: 630397 - RNA, 22 nt, Human
cauuugauccucacaacaaucu

SEQ ID NO: 630398 - RNA, 22 nt, Human
uucacauaggagcaugguuuuu

SEQ ID NO: 630399 - RNA, 22 nt, Human
uuuggggcucagcaggcuguuu

SEQ ID NO: 630400 - RNA, 22 nt, Human
cugcagugcaagcccagaugga

SEQ ID NO: 630401 - RNA, 20 nt, Human
aggcagagcgcacuuuuaga

SEQ ID NO: 630402 - RNA, 18 nt, Human
aagaacugagguccuaga

SEQ ID NO: 630403 - RNA, 22 nt, Human
ugguccuggagaguguuccaua

SEQ ID NO: 630404 - RNA, 17 nt, Human
agccagcaguagcuggu

SEQ ID NO: 630405 - RNA, 22 nt, Human
agaagccagucgcucucccgca

SEQ ID NO: 630406 - RNA, 22 nt, Human
gaggaggcugaacaaugcccug

SEQ ID NO: 630407 - RNA, 22 nt, Human
ugaaagaugaaagcaggcuggu

SEQ ID NO: 630408 - RNA, 21 nt, Human
aaaguguucagaccaguucug

SEQ ID NO: 630409 - RNA, 22 nt, Human
aggauggcuugcaggaggcugu

SEQ ID NO: 630410 - RNA, 22 nt, Human
caacuuuaaauggcuaugucug

SEQ ID NO: 630411 - RNA, 22 nt, Human
gggccccugggaauucugugau

SEQ ID NO: 630412 - RNA, 22 nt, Human
gucaggggccaugggccaagga

SEQ ID NO: 630413 - RNA, 22 nt, Human
ccaaggagcucauauucuuguu

SEQ ID NO: 630414 - RNA, 22 nt, Human
gcugucugcaucucuagagcuu

SEQ ID NO: 630415 - RNA, 23 nt, Human
ugcucugugaauaguuggugacu

SEQ ID NO: 630416 - RNA, 22 nt, Human
cacccugggcugggccuguuaa

SEQ ID NO: 630417 - RNA, 22 nt, Human
gucuuauuaugagguuagacuu

SEQ ID NO: 630418 - RNA, 22 nt, Human
gccccagccaaggugacacgaa

SEQ ID NO: 630419 - RNA, 22 nt, Human
cuucugggcauggcagagccug

SEQ ID NO: 630420 - RNA, 22 nt, Human
ucagagugaggcccagcaaucu

SEQ ID NO: 630421 - RNA, 22 nt, Human
ucucagagcucacaccuccugg

SEQ ID NO: 630422 - RNA, 22 nt, Human
uuccauauuuguguggcaaaag

SEQ ID NO: 630423 - RNA, 23 nt, Human
cagaaaucugaaaucuagaaaug

SEQ ID NO: 630424 - RNA, 22 nt, Human
ugaagacucagaagcuaagaua

SEQ ID NO: 630425 - RNA, 19 nt, Human
auauaggcugaaccaugcu

SEQ ID NO: 630426 - RNA, 19 nt, Human
gaggcaaggaguuuaagcc

SEQ ID NO: 630427 - RNA, 23 nt, Human
uccagccucuugcucucacaugc

SEQ ID NO: 630428 - RNA, 22 nt, Human
ccagucugaggccuggugaggg

SEQ ID NO: 630429 - RNA, 22 nt, Human
aacaauugacacuucauuguga

SEQ ID NO: 630430 - RNA, 18 nt, Human
ggccugcagugaagcaag

SEQ ID NO: 630431 - RNA, 22 nt, Human
ugugcauagacuuucaccaccu

SEQ ID NO: 630432 - RNA, 22 nt, Human
agagugaaguucaucgugcagc

SEQ ID NO: 630433 - RNA, 22 nt, Human
acaauguaggauauguacuugu

SEQ ID NO: 630434 - RNA, 22 nt, Human
ucagaaaaugaaauggacucuc

SEQ ID NO: 630435 - RNA, 20 nt, Human
aaucugaaucccaguccuag

SEQ ID NO: 630436 - RNA, 22 nt, Human
cacauacaaggcacacuggagg

SEQ ID NO: 630437 - RNA, 19 nt, Human
gucuguguauuuguugcug

SEQ ID NO: 630438 - RNA, 22 nt, Human
gaauuucuggacccuuugagaa

SEQ ID NO: 630439 - RNA, 22 nt, Human
gggagacaguucagauaguuuc

SEQ ID NO: 630440 - RNA, 22 nt, Human
ggcuucugagugcucugcuguu

SEQ ID NO: 630441 - RNA, 22 nt, Human
gagggugcaggaggaugguagu

SEQ ID NO: 630442 - RNA, 22 nt, Human
cagcugaagagaggugcugagu

SEQ ID NO: 630443 - RNA, 22 nt, Human
uucauucaucucuaaaaugccu

SEQ ID NO: 630444 - RNA, 22 nt, Human
ugucacaacagaggaacugaau

SEQ ID NO: 630445 - RNA, 22 nt, Human
uggcagguggcucuggcauucu

SEQ ID NO: 630446 - RNA, 22 nt, Human
ucaguugcuguguaauguuuuc

SEQ ID NO: 630447 - RNA, 22 nt, Human
caggggacacuccugcuugggc

SEQ ID NO: 630448 - RNA, 22 nt, Human
acagggauuuuccaggcuaccc

SEQ ID NO: 630449 - RNA, 22 nt, Human
agaaaccagacuuggcccauuu

SEQ ID NO: 630450 - RNA, 22 nt, Human
ucuuuuggaaaugaugugcagg

SEQ ID NO: 630451 - RNA, 22 nt, Human
gaauacauuggaaaucagaaua

SEQ ID NO: 630452 - RNA, 22 nt, Human
guuaaacaauaacuggcacaca

SEQ ID NO: 630453 - RNA, 22 nt, Human
uggcuccacucuccaggaguuu

SEQ ID NO: 630454 - RNA, 20 nt, Human
ugcuugucaugcacucaggc

SEQ ID NO: 630455 - RNA, 21 nt, Human
gccuggcucucacuggccugg

SEQ ID NO: 630456 - RNA, 22 nt, Human
gcagacagaagcuaaguagaca

SEQ ID NO: 630457 - RNA, 22 nt, Human
cuggcaugcccaggguaugugg

SEQ ID NO: 630458 - RNA, 22 nt, Human
cagauccacccuuguagugaca

SEQ ID NO: 630459 - RNA, 19 nt, Human
gagcagcugcacccauuga

SEQ ID NO: 630460 - RNA, 21 nt, Human
cugccaccugcuccaucagca

SEQ ID NO: 630461 - RNA, 22 nt, Human
uguuuucauuugauguaacaaa

SEQ ID NO: 630462 - RNA, 22 nt, Human
acuucccugugggcagguagug

SEQ ID NO: 630463 - RNA, 22 nt, Human
ugcugcaggccuuggcugggaa

SEQ ID NO: 630464 - RNA, 22 nt, Human
uaaaugaaaggguuuaauuuau

SEQ ID NO: 630465 - RNA, 22 nt, Human
aagacaaugaguccugauggga

SEQ ID NO: 630466 - RNA, 22 nt, Human
ucugacaagucaagucuugacu

SEQ ID NO: 630467 - RNA, 22 nt, Human
cccugugccagagaggcaggag

SEQ ID NO: 630468 - RNA, 22 nt, Human
cagcauccuuugcugguuuccc

SEQ ID NO: 630469 - RNA, 22 nt, Human
aaucaguuucuuggcaaguuua

SEQ ID NO: 630470 - RNA, 22 nt, Human
uggcuucucccuacaacaugcc

SEQ ID NO: 630471 - RNA, 22 nt, Human
cagugagauaccacagagcaaa

SEQ ID NO: 630472 - RNA, 22 nt, Human
cacagcugugagaagggagccu

SEQ ID NO: 630473 - RNA, 22 nt, Human
uacuacauacagaauuuagaga

SEQ ID NO: 630474 - RNA, 22 nt, Human
ugggggauuguuuuaaugaaua

SEQ ID NO: 630475 - RNA, 19 nt, Human
cuucugugauacaucaguc

SEQ ID NO: 630476 - RNA, 22 nt, Human
caccagggccccaggcugugcc

SEQ ID NO: 630477 - RNA, 22 nt, Human
acagcuggaguguuggugaggu

SEQ ID NO: 630478 - RNA, 22 nt, Human
cuuugcugccagaacccagcag

SEQ ID NO: 630479 - RNA, 22 nt, Human
caugaguucaucugcuucucuu

SEQ ID NO: 630480 - RNA, 22 nt, Human
uuucucauggacccuucaugau

SEQ ID NO: 630481 - RNA, 21 nt, Human
gcugcaucaaucuacccaggg

SEQ ID NO: 630482 - RNA, 22 nt, Human
auaacuucaucaaauaggcaca

SEQ ID NO: 630483 - RNA, 18 nt, Human
ccuucugacgcuugagaa

SEQ ID NO: 630484 - RNA, 23 nt, Human
uucuggcuccgagcuccaucuuc

SEQ ID NO: 630485 - RNA, 22 nt, Human
gaggccuggucuaugagauguu

SEQ ID NO: 630486 - RNA, 22 nt, Human
auuguuaaacugaagcauuacu

SEQ ID NO: 630487 - RNA, 23 nt, Human
uccagcugcagugggauggggaa

SEQ ID NO: 630488 - RNA, 22 nt, Human
ccccacccaccuaagagaaacu

SEQ ID NO: 630489 - RNA, 22 nt, Human
agacuguaauugacaugucagc

SEQ ID NO: 630490 - RNA, 22 nt, Human
cuccaggauguuagacguccag

SEQ ID NO: 630491 - RNA, 22 nt, Human
gaggggaugcagagaggcuuau

SEQ ID NO: 630492 - RNA, 22 nt, Human
uauucaugggaggucacaacuu

SEQ ID NO: 630493 - RNA, 22 nt, Human
aguucagaggcaggagaaggcu

SEQ ID NO: 630494 - RNA, 22 nt, Human
gcagggagguuugcugaccugg

SEQ ID NO: 630495 - RNA, 22 nt, Human
gugagaguguuuggaaauagaa

SEQ ID NO: 630496 - RNA, 22 nt, Human
uuaauuaauuaguuaagcaugu

SEQ ID NO: 630497 - RNA, 22 nt, Human
aacaguuuaucaaguuuuuaca

SEQ ID NO: 630498 - RNA, 19 nt, Human
ggugagcccucgccugccu

SEQ ID NO: 630499 - RNA, 22 nt, Human
agcuguuguuaauuaacucauu

SEQ ID NO: 630500 - RNA, 22 nt, Human
aggcuccuagccuguggcuggu

SEQ ID NO: 630501 - RNA, 22 nt, Human
ugaagauuuagaccucuuugcc

SEQ ID NO: 630502 - RNA, 22 nt, Human
auucagugccaaggagaacuug

SEQ ID NO: 630503 - RNA, 22 nt, Human
aagccaggugugcccaggaucc

SEQ ID NO: 630504 - RNA, 22 nt, Human
aguugcucuaggugaggucuuu

SEQ ID NO: 630505 - RNA, 22 nt, Human
uguguuucugagaaucccaccu

SEQ ID NO: 630506 - RNA, 19 nt, Human
cugcugggugcugagggag

SEQ ID NO: 630507 - RNA, 22 nt, Human
cucaucuguauauagugaauga

SEQ ID NO: 630508 - RNA, 22 nt, Human
aguauauuuguuaagauuauuc

SEQ ID NO: 630509 - RNA, 18 nt, Human
gcucaggcccuagucagu

SEQ ID NO: 630510 - RNA, 22 nt, Human
agcaggggcuccuccacagcca

SEQ ID NO: 630511 - RNA, 22 nt, Human
aaugaauucugaagucuuccaa

SEQ ID NO: 630512 - RNA, 23 nt, Human
aagcaucuuuuccuagcuccauc

SEQ ID NO: 630513 - RNA, 22 nt, Human
acugggagucaugaggaaggag

SEQ ID NO: 630514 - RNA, 22 nt, Human
uaguucucaggacgucaagguu

SEQ ID NO: 630515 - RNA, 22 nt, Human
uagaaagaucuguaggcaagag

SEQ ID NO: 630516 - RNA, 22 nt, Human
uaaaucccuacaucuguguuuu

SEQ ID NO: 630517 - RNA, 22 nt, Human
aggacacacagaauacaaaucc

SEQ ID NO: 630518 - RNA, 22 nt, Human
ucacaugauguuuccucugugc

SEQ ID NO: 630519 - RNA, 22 nt, Human
ggcaugugccugaggucacaca

SEQ ID NO: 630520 - RNA, 22 nt, Human
uggcaggaaaaagggccagagg

SEQ ID NO: 630521 - RNA, 22 nt, Human
ugcagaaaccaauucaaguaag

SEQ ID NO: 630522 - RNA, 22 nt, Human
ccuggacagagggcagcggcca

SEQ ID NO: 630523 - RNA, 22 nt, Human
uaagaaacuaaugcaauaagag

SEQ ID NO: 630524 - RNA, 22 nt, Human
ccaggaggcagaaguugcagug

SEQ ID NO: 630525 - RNA, 22 nt, Human
gaggugccuggcgaugucucug

SEQ ID NO: 630526 - RNA, 22 nt, Human
agcugggaugauaaccucaguc

SEQ ID NO: 630527 - RNA, 22 nt, Human
acagcauggauaacaaggcacu

SEQ ID NO: 630528 - RNA, 18 nt, Human
ugcuuggagcauuuacca

SEQ ID NO: 630529 - RNA, 22 nt, Human
uuuacuacuugugauaacugaa

SEQ ID NO: 630530 - RNA, 22 nt, Human
gcugccugcucggcuccuggga

SEQ ID NO: 630531 - RNA, 23 nt, Human
aguguuuauguucagugacccuc

SEQ ID NO: 630532 - RNA, 21 nt, Human
aggggcccuugccaggacgcc

SEQ ID NO: 630533 - RNA, 22 nt, Human
cuggcccaggcuccuggggcac

SEQ ID NO: 630534 - RNA, 22 nt, Human
uuuggggagacauggccagcug

SEQ ID NO: 630535 - RNA, 22 nt, Human
uuuccucacucaugucaucagu

SEQ ID NO: 630536 - RNA, 20 nt, Human
accagagcucucaguaugug

SEQ ID NO: 630537 - RNA, 22 nt, Human
uacaaggcuucagcucagcuau

SEQ ID NO: 630538 - RNA, 22 nt, Human
aggcuggucuauacggagacga

SEQ ID NO: 630539 - RNA, 22 nt, Human
ucagcaucuucagcauggggaa

SEQ ID NO: 630540 - RNA, 22 nt, Human
ugucuauagccugauuuguugg

SEQ ID NO: 630541 - RNA, 22 nt, Human
aggccacacaacucuuagagau

SEQ ID NO: 630542 - RNA, 22 nt, Human
uugaacuuugaaccauuccuau

SEQ ID NO: 630543 - RNA, 22 nt, Human
cagggugcugcaccaucccuca

SEQ ID NO: 630544 - RNA, 22 nt, Human
uaauacacaagggccagcucuu

SEQ ID NO: 630545 - RNA, 22 nt, Human
aacaugauuucaugcauuuaga

SEQ ID NO: 630546 - RNA, 22 nt, Human
cuuuaugaaggaacaaugcucc

SEQ ID NO: 630547 - RNA, 19 nt, Human
aguagcagaaagugcagug

SEQ ID NO: 630548 - RNA, 22 nt, Human
cccuggcaaaaucccugguaca

SEQ ID NO: 630549 - RNA, 22 nt, Human
uaauaguuaugguugguucuca

SEQ ID NO: 630550 - RNA, 22 nt, Human
cucucucaguguaauacaggau

SEQ ID NO: 630551 - RNA, 22 nt, Human
aggcugcuuccuuacguggcug

SEQ ID NO: 630552 - RNA, 22 nt, Human
uuauguaccugaauuaguaaag

SEQ ID NO: 630553 - RNA, 22 nt, Human
cccagcucuuccugggagcuaa

SEQ ID NO: 630554 - RNA, 22 nt, Human
accacccccuuggguguggaag

SEQ ID NO: 630555 - RNA, 22 nt, Human
cugaggcugaagagggccuacg

SEQ ID NO: 630556 - RNA, 22 nt, Human
ucucuauuaauugacaauggcu

SEQ ID NO: 630557 - RNA, 22 nt, Human
ccuuggcauguggcauguggcu

SEQ ID NO: 630558 - RNA, 22 nt, Human
aacagaaucuuggguucuuuuc

SEQ ID NO: 630559 - RNA, 23 nt, Human
uggagggcagaauaacagacuac

SEQ ID NO: 630560 - RNA, 22 nt, Human
cacagcugccauggcugcacuu

SEQ ID NO: 630561 - RNA, 22 nt, Human
acuggcccuugauugcaucagc

SEQ ID NO: 630562 - RNA, 20 nt, Human
gacaugucuuucucacacaa

SEQ ID NO: 630563 - RNA, 22 nt, Human
aagcacaggagacgcacagcca

SEQ ID NO: 630564 - RNA, 22 nt, Human
guccugugcccagacccucugu

SEQ ID NO: 630565 - RNA, 22 nt, Human
uacacauuucucuuagagacac

SEQ ID NO: 630566 - RNA, 22 nt, Human
agcucauggugcuaucucaggg

SEQ ID NO: 630567 - RNA, 22 nt, Human
cagcuggcgggcagagccgcca

SEQ ID NO: 630568 - RNA, 22 nt, Human
ggcuuaagauauuucugauucc

SEQ ID NO: 630569 - RNA, 23 nt, Human
uggaaucagccuuuuuuccaagg

SEQ ID NO: 630570 - RNA, 22 nt, Human
gccaccucggcuuucucugcuc

SEQ ID NO: 630571 - RNA, 22 nt, Human
cugagggagaagugaucucuac

SEQ ID NO: 630572 - RNA, 22 nt, Human
guuucacagauggggagacacg

SEQ ID NO: 630573 - RNA, 22 nt, Human
cuuuacaaacuauaaagugcgg

SEQ ID NO: 630574 - RNA, 22 nt, Human
ugugcuuuucucugcuccugga

SEQ ID NO: 630575 - RNA, 22 nt, Human
ggccugcucuguuuagaggggg

SEQ ID NO: 630576 - RNA, 22 nt, Human
cagggcucgcugccagcuucag

SEQ ID NO: 630577 - RNA, 23 nt, Human
uggcagcagaucuuaaagugacc

SEQ ID NO: 630578 - RNA, 22 nt, Human
aggugcuagguguguaguggag

SEQ ID NO: 630579 - RNA, 22 nt, Human
aaacuguauguugagaugacag

SEQ ID NO: 630580 - RNA, 19 nt, Human
cuggcagccugucuguguc

SEQ ID NO: 630581 - RNA, 22 nt, Human
auuugcaaagucguaucuguga

SEQ ID NO: 630582 - RNA, 22 nt, Human
cuggcuuuaaaaugcuccugga

SEQ ID NO: 630583 - RNA, 22 nt, Human
uaaaaugacuuccuccaacauc

SEQ ID NO: 630584 - RNA, 22 nt, Human
agaauaagccugacgaaaccua

SEQ ID NO: 630585 - RNA, 22 nt, Human
ccacuugaaucaaauucuuagg

SEQ ID NO: 630586 - RNA, 22 nt, Human
caggacacuacagaugggaggg

SEQ ID NO: 630587 - RNA, 22 nt, Human
uggaagcucaaggcagggugag

SEQ ID NO: 630588 - RNA, 22 nt, Human
ugcuugucaggauaagcucugg

SEQ ID NO: 630589 - RNA, 21 nt, Human
agacagcuuuaaagacacagg

SEQ ID NO: 630590 - RNA, 22 nt, Human
cccugggcagucugcacuucag

SEQ ID NO: 630591 - RNA, 22 nt, Human
acuacacuccaauuuucuaggu

SEQ ID NO: 630592 - RNA, 22 nt, Human
uauuuccaaaagccuauuauga

SEQ ID NO: 630593 - RNA, 20 nt, Human
caacagaggggucuggagua

SEQ ID NO: 630594 - RNA, 22 nt, Human
agucccuguacuuuccacugcc

SEQ ID NO: 630595 - RNA, 22 nt, Human
ucugggcuuggauuggcucugc

SEQ ID NO: 630596 - RNA, 22 nt, Human
ggaaauauugauugcucuguau

SEQ ID NO: 630597 - RNA, 22 nt, Human
ggcaucuguccaucucuccagc

SEQ ID NO: 630598 - RNA, 22 nt, Human
acuuugggcacagugaggccag

SEQ ID NO: 630599 - RNA, 22 nt, Human
uggaggugacggggccucguug

SEQ ID NO: 630600 - RNA, 22 nt, Human
cuucagccucguuacuccugcg

SEQ ID NO: 630601 - RNA, 22 nt, Human
cagggaugagagauggcacaga

SEQ ID NO: 630602 - RNA, 22 nt, Human
cagcagggggcagcgcagauca

SEQ ID NO: 630603 - RNA, 20 nt, Human
uaagaacaagacuaggaagc

SEQ ID NO: 630604 - RNA, 22 nt, Human
augacaggaggcagcugggcag

SEQ ID NO: 630605 - RNA, 22 nt, Human
ccugggcuggaguacagcagug

SEQ ID NO: 630606 - RNA, 22 nt, Human
gguggcauucagaagagcuggc

SEQ ID NO: 630607 - RNA, 22 nt, Human
acaguguucacuuaacaaugga

SEQ ID NO: 630608 - RNA, 22 nt, Human
aggcugggcuccgcccaacucc

SEQ ID NO: 630609 - RNA, 22 nt, Human
cugggagauaugaggaucugga

SEQ ID NO: 630610 - RNA, 22 nt, Human
gauauguaugaggaguauguau

SEQ ID NO: 630611 - RNA, 22 nt, Human
auacagugccccuuuucacaug

SEQ ID NO: 630612 - RNA, 22 nt, Human
ucccagauuguugauggcuuaa

SEQ ID NO: 630613 - RNA, 22 nt, Human
guccugugugacuucccaaaug

SEQ ID NO: 630614 - RNA, 17 nt, Human
gcuaggagagggaggag

SEQ ID NO: 630615 - RNA, 22 nt, Human
uguuuuuaaauaaugauagaaa

SEQ ID NO: 630616 - RNA, 22 nt, Human
uggaggcagucaaaugacugac

SEQ ID NO: 630617 - RNA, 22 nt, Human
gccuuuaucuuccugauucaga

SEQ ID NO: 630618 - RNA, 22 nt, Human
ccucaggcuugugagccuucag

SEQ ID NO: 630619 - RNA, 22 nt, Human
aucaucuuaagguaucucaagc

SEQ ID NO: 630620 - RNA, 20 nt, Human
aggcuccuguaccugaggaa

SEQ ID NO: 630621 - RNA, 20 nt, Human
gcacaugcaacuuuuauuua

SEQ ID NO: 630622 - RNA, 21 nt, Human
ccuuuuugcuuauggacagac

SEQ ID NO: 630623 - RNA, 22 nt, Human
uuugaaaggguuaugagacuga

SEQ ID NO: 630624 - RNA, 22 nt, Human
aacacuaacauauagucagugg

SEQ ID NO: 630625 - RNA, 22 nt, Human
caguguguggauccucccagga

SEQ ID NO: 630626 - RNA, 21 nt, Human
agcugccuuuagagagaacca

SEQ ID NO: 630627 - RNA, 19 nt, Human
ggucagagagauccaggcu

SEQ ID NO: 630628 - RNA, 22 nt, Human
gcucagugcagccuuucuguau

SEQ ID NO: 630629 - RNA, 22 nt, Human
ccucagaaggacaagagacaaa

SEQ ID NO: 630630 - RNA, 22 nt, Human
acauugaaccaguagacacaaa

SEQ ID NO: 630631 - RNA, 22 nt, Human
aggcugagccugggcguggugg

SEQ ID NO: 630632 - RNA, 17 nt, Human
aagacagaagccaugag

SEQ ID NO: 630633 - RNA, 22 nt, Human
gaaccugagcgggcagcaagcg

SEQ ID NO: 630634 - RNA, 22 nt, Human
uaaaguucuggugagagguaag

SEQ ID NO: 630635 - RNA, 22 nt, Human
aggcuccguccagucucaggcc

SEQ ID NO: 630636 - RNA, 22 nt, Human
ccugcuguucuguuuagugaac

SEQ ID NO: 630637 - RNA, 22 nt, Human
agucugaaccagauggcaaggu

SEQ ID NO: 630638 - RNA, 22 nt, Human
agcagggaggucuagcacgugg

SEQ ID NO: 630639 - RNA, 22 nt, Human
gcucuggguagccacugccugg

SEQ ID NO: 630640 - RNA, 22 nt, Human
gcaauagagcagcuaauggaaa

SEQ ID NO: 630641 - RNA, 23 nt, Human
uuucaguugagaaugcacggacc

SEQ ID NO: 630642 - RNA, 22 nt, Human
uuguaaacuggauagaccuauu

SEQ ID NO: 630643 - RNA, 22 nt, Human
uaaagcacgucuauuuaaugau

SEQ ID NO: 630644 - RNA, 22 nt, Human
cugaagcaggccuacuucauug

SEQ ID NO: 630645 - RNA, 19 nt, Human
ugaggggaggagaggccug

SEQ ID NO: 630646 - RNA, 22 nt, Human
uaauccuucuuguguucauuag

SEQ ID NO: 630647 - RNA, 22 nt, Human
gcacagaaaugucuacacaugu

SEQ ID NO: 630648 - RNA, 22 nt, Human
ucacagcauugucacaaggcug

SEQ ID NO: 630649 - RNA, 21 nt, Human
augugaaauaucaucagagca

SEQ ID NO: 630650 - RNA, 18 nt, Human
gcagcuagccaggggggc

SEQ ID NO: 630651 - RNA, 22 nt, Human
ggucccuggaaggccaagcuug

SEQ ID NO: 630652 - RNA, 22 nt, Human
cuggagaauucuaugaaauauu

SEQ ID NO: 630653 - RNA, 20 nt, Human
ucuguuauugcauguacaua

SEQ ID NO: 630654 - RNA, 22 nt, Human
uagcacaaagagucuuucagag

SEQ ID NO: 630655 - RNA, 20 nt, Human
gcucuuuguaagggaauuug

SEQ ID NO: 630656 - RNA, 22 nt, Human
caggcaagauuagagaugagca

SEQ ID NO: 630657 - RNA, 22 nt, Human
cccaggaaugaggggcggaggc

SEQ ID NO: 630658 - RNA, 22 nt, Human
cauuucuauggcaaugggaaaa

SEQ ID NO: 630659 - RNA, 22 nt, Human
gcacccaggccggcgacugcag

SEQ ID NO: 630660 - RNA, 22 nt, Human
cagcacuggggggauucggagc

SEQ ID NO: 630661 - RNA, 22 nt, Human
ccagccuggguguuagaagaca

SEQ ID NO: 630662 - RNA, 22 nt, Human
uuaauuaugcaaaaggccccau

SEQ ID NO: 630663 - RNA, 22 nt, Human
ccugccaggagcuggugcugca

SEQ ID NO: 630664 - RNA, 22 nt, Human
guggucuggggucaggccugag

SEQ ID NO: 630665 - RNA, 22 nt, Human
ugagggaguuggguguauagga

SEQ ID NO: 630666 - RNA, 22 nt, Human
ucauuuacuugguuuuaaucuu

SEQ ID NO: 630667 - RNA, 22 nt, Human
uguucuugagccuuuagaccua

SEQ ID NO: 630668 - RNA, 22 nt, Human
acaugcuaauugcaaagucuug

SEQ ID NO: 630669 - RNA, 22 nt, Human
aggcugugcauuuuggagggcc

SEQ ID NO: 630670 - RNA, 22 nt, Human
gcccagcuuuuugaggcaggca

SEQ ID NO: 630671 - RNA, 22 nt, Human
agugcugaacauagaauggaca

SEQ ID NO: 630672 - RNA, 22 nt, Human
augugugugugcgcgcgcagga

SEQ ID NO: 630673 - RNA, 22 nt, Human
gaggcuccauggaggaguaugg

SEQ ID NO: 630674 - RNA, 22 nt, Human
augcguguaggaacagugucua

SEQ ID NO: 630675 - RNA, 22 nt, Human
ccucugggcugccugcacgggu

SEQ ID NO: 630676 - RNA, 22 nt, Human
aacaaugcugaacugaggaaag

SEQ ID NO: 630677 - RNA, 22 nt, Human
agcagcuccccucaugcuccac

SEQ ID NO: 630678 - RNA, 22 nt, Human
uccagcugcaaggggcacagcu

SEQ ID NO: 630679 - RNA, 22 nt, Human
ugcaggagacauaauagggacu

SEQ ID NO: 630680 - RNA, 22 nt, Human
gaggaggggcacuugucuccua

SEQ ID NO: 630681 - RNA, 22 nt, Human
accuggacuugaauccugacuu

SEQ ID NO: 630682 - RNA, 22 nt, Human
auguauuuacugagaaggaaac

SEQ ID NO: 630683 - RNA, 22 nt, Human
agacaggcuuugcuguauauca

SEQ ID NO: 630684 - RNA, 22 nt, Human
ccuggggaagucacuucucuuu

SEQ ID NO: 630685 - RNA, 22 nt, Human
gagaacuaaucaugcauggagu

SEQ ID NO: 630686 - RNA, 22 nt, Human
auguccuucuccucuuaccugc

SEQ ID NO: 630687 - RNA, 17 nt, Human
auuuagcaaguagacag

SEQ ID NO: 630688 - RNA, 19 nt, Human
ugguggaggugcaccugac

SEQ ID NO: 630689 - RNA, 20 nt, Human
agaacaaguacuaaaggaga

SEQ ID NO: 630690 - RNA, 21 nt, Human
cucugaauccugcuucucagu

SEQ ID NO: 630691 - RNA, 22 nt, Human
uguguccuuuggaggaucagcg

SEQ ID NO: 630692 - RNA, 22 nt, Human
uccccaccccagaacuacuagg

SEQ ID NO: 630693 - RNA, 22 nt, Human
ucagcccaggagguugagacua

SEQ ID NO: 630694 - RNA, 22 nt, Human
ggucuagaggauguuccuuucc

SEQ ID NO: 630695 - RNA, 22 nt, Human
agaaagggagagccagcacacg

SEQ ID NO: 630696 - RNA, 22 nt, Human
uaaaccuucaugauggucauua

SEQ ID NO: 630697 - RNA, 22 nt, Human
acucuaaaccccacucugcugg

SEQ ID NO: 630698 - RNA, 22 nt, Human
cauucuaaaguguuuuauaccu

SEQ ID NO: 630699 - RNA, 22 nt, Human
uucucuggccauagcuggcuag

SEQ ID NO: 630700 - RNA, 22 nt, Human
ugugaauauacuuaaugccacu

SEQ ID NO: 630701 - RNA, 19 nt, Human
auccaggucauguaguucu

SEQ ID NO: 630702 - RNA, 22 nt, Human
ucuggcagcuauccucuggcca

SEQ ID NO: 630703 - RNA, 22 nt, Human
caaugcuucugagggaauuaca

SEQ ID NO: 630704 - RNA, 22 nt, Human
uauauuaaccauaggguucuag

SEQ ID NO: 630705 - RNA, 21 nt, Human
ggcugcugucaccgcugucac

SEQ ID NO: 630706 - RNA, 22 nt, Human
acugccugccucugauucugca

SEQ ID NO: 630707 - RNA, 19 nt, Human
uccugggcguugacuuugg

SEQ ID NO: 630708 - RNA, 21 nt, Human
cuggacugaggagacagucgc

SEQ ID NO: 630709 - RNA, 22 nt, Human
caagggcucacggucugcuggg

SEQ ID NO: 630710 - RNA, 22 nt, Human
guggaauugcuggauaauauca

SEQ ID NO: 630711 - RNA, 22 nt, Human
cauuacuucucaugcuucaugc

SEQ ID NO: 630712 - RNA, 22 nt, Human
ccugucauaauguccgauguca

SEQ ID NO: 630713 - RNA, 22 nt, Human
uuauuaauaaaguggcauagcc

SEQ ID NO: 630714 - RNA, 22 nt, Human
agcuguggcagcagccguggca

SEQ ID NO: 630715 - RNA, 22 nt, Human
cuguuaauucuagauggugagu

SEQ ID NO: 630716 - RNA, 22 nt, Human
cacagcagaaauaugaaggcag

SEQ ID NO: 630717 - RNA, 22 nt, Human
uuugcauugcauuaaguauucu

SEQ ID NO: 630718 - RNA, 22 nt, Human
acugaaguccacacauguagga

SEQ ID NO: 630719 - RNA, 22 nt, Human
acaauacaggcuucuggacuua

SEQ ID NO: 630720 - RNA, 22 nt, Human
ccuggccuuaagggcagggagc

SEQ ID NO: 630721 - RNA, 22 nt, Human
uguguugugacauucuuggaug

SEQ ID NO: 630722 - RNA, 22 nt, Human
uacugucucugcccuggccagg

SEQ ID NO: 630723 - RNA, 22 nt, Human
aggguccaguaacagaugccag

SEQ ID NO: 630724 - RNA, 19 nt, Human
uguagcaguuuaaaacaac

SEQ ID NO: 630725 - RNA, 22 nt, Human
uuaauugauauaaagaacuuca

SEQ ID NO: 630726 - RNA, 22 nt, Human
uccucacauggugagccacaca

SEQ ID NO: 630727 - RNA, 20 nt, Human
aauggcuuauagcaugcuac

SEQ ID NO: 630728 - RNA, 22 nt, Human
cagauuuaagauauuuguauug

SEQ ID NO: 630729 - RNA, 22 nt, Human
agaguauaauuagugucuucua

SEQ ID NO: 630730 - RNA, 22 nt, Human
uggaaacacucaagcuuauauu

SEQ ID NO: 630731 - RNA, 16 nt, Human
cagcuuuaugucagug

SEQ ID NO: 630732 - RNA, 22 nt, Human
ugcugggccugccccugucagc

SEQ ID NO: 630733 - RNA, 22 nt, Human
ucuguacacuucagcaugcauc

SEQ ID NO: 630734 - RNA, 20 nt, Human
auagauccugguucuuugca

SEQ ID NO: 630735 - RNA, 22 nt, Human
ugauuuuuaaaauucuccuugc

SEQ ID NO: 630736 - RNA, 20 nt, Human
aaagcaguaugcaaguagag

SEQ ID NO: 630737 - RNA, 22 nt, Human
ggcaagaguugaagcuccagga

SEQ ID NO: 630738 - RNA, 21 nt, Human
cacugcagccuugaccugggc

SEQ ID NO: 630739 - RNA, 22 nt, Human
agggccugugaauucucccugc

SEQ ID NO: 630740 - RNA, 22 nt, Human
aaaguucugggggagaagaacg

SEQ ID NO: 630741 - RNA, 22 nt, Human
ucuuccagaugcagaugcuucu

SEQ ID NO: 630742 - RNA, 22 nt, Human
aagcagaauagaggcccuuccc

SEQ ID NO: 630743 - RNA, 22 nt, Human
ugaugccuaugaauuguaaugu

SEQ ID NO: 630744 - RNA, 22 nt, Human
caaaguuuaaaguagauuucag

SEQ ID NO: 630745 - RNA, 22 nt, Human
caaagcagugauccuuaaagga

SEQ ID NO: 630746 - RNA, 22 nt, Human
aggccuggccugggcggcauug

SEQ ID NO: 630747 - RNA, 20 nt, Human
gcaaauggaucccacaagcc

SEQ ID NO: 630748 - RNA, 22 nt, Human
uagcagggaaggugugcugagc

SEQ ID NO: 630749 - RNA, 22 nt, Human
auuacacaggcuggcucuuuga

SEQ ID NO: 630750 - RNA, 20 nt, Human
ugagcaccaagaaucaagaa

SEQ ID NO: 630751 - RNA, 22 nt, Human
aggcuccaccagucaggugcau

SEQ ID NO: 630752 - RNA, 22 nt, Human
uaucauuauacagacguauaca

SEQ ID NO: 630753 - RNA, 23 nt, Human
aucuaaaguguuaaauagcuggg

SEQ ID NO: 630754 - RNA, 22 nt, Human
aaaguacaaauguucuagccau

SEQ ID NO: 630755 - RNA, 22 nt, Human
gaagacacuaaggcccagggag

SEQ ID NO: 630756 - RNA, 22 nt, Human
acuuccuggcguagcugacauu

SEQ ID NO: 630757 - RNA, 22 nt, Human
ucugcaggacugaggccuguuu

SEQ ID NO: 630758 - RNA, 22 nt, Human
auugaacauuguucuaggaggc

SEQ ID NO: 630759 - RNA, 22 nt, Human
aaguaaaauucaaucuucacug

SEQ ID NO: 630760 - RNA, 22 nt, Human
uuggagggacugagcuucaguc

SEQ ID NO: 630761 - RNA, 22 nt, Human
ugaaugauguauaauauugaga

SEQ ID NO: 630762 - RNA, 22 nt, Human
gccagccugugcuuggccaggc

SEQ ID NO: 630763 - RNA, 22 nt, Human
cacuucacuuggaugccuuuuc

SEQ ID NO: 630764 - RNA, 21 nt, Human
ugacaguguggcauggaaggu

SEQ ID NO: 630765 - RNA, 22 nt, Human
auagaacuccaucccucugacc

SEQ ID NO: 630766 - RNA, 22 nt, Human
uugcuugacuuuguguaccugu

SEQ ID NO: 630767 - RNA, 22 nt, Human
gggucagcucccuccccagggc

SEQ ID NO: 630768 - RNA, 22 nt, Human
gcaaggaacaaaugcucugcuu

SEQ ID NO: 630769 - RNA, 22 nt, Human
cccuuagcucaauuucuugccc

SEQ ID NO: 630770 - RNA, 22 nt, Human
uccugguuagagcucucugggg

SEQ ID NO: 630771 - RNA, 22 nt, Human
agcacacaguauuagccauugu

SEQ ID NO: 630772 - RNA, 22 nt, Human
augugcacacagugucaugcaa

SEQ ID NO: 630773 - RNA, 21 nt, Human
agaguuacugucauccuaggu

SEQ ID NO: 630774 - RNA, 22 nt, Human
ugcauuuacgguacaacagcag

SEQ ID NO: 630775 - RNA, 20 nt, Human
ucucugagcuucucuugggg

SEQ ID NO: 630776 - RNA, 22 nt, Human
uagcaaagaaccugauacccca

SEQ ID NO: 630777 - RNA, 22 nt, Human
acugaaggguaaugugggagcc

SEQ ID NO: 630778 - RNA, 22 nt, Human
cagggagucaacaaacagauca

SEQ ID NO: 630779 - RNA, 22 nt, Human
ucagcaggcccauccuccaggc

SEQ ID NO: 630780 - RNA, 22 nt, Human
accuguguuuucccucaguuuc

SEQ ID NO: 630781 - RNA, 22 nt, Human
gggcacugaacacccucuucgc

SEQ ID NO: 630782 - RNA, 22 nt, Human
ggugaggcguccccaccauggg

SEQ ID NO: 630783 - RNA, 22 nt, Human
cagcuguucagcaacucgcaga

SEQ ID NO: 630784 - RNA, 22 nt, Human
aaguuuaacuugaauucuuucu

SEQ ID NO: 630785 - RNA, 22 nt, Human
agaaagugaccuugaaaacugg

SEQ ID NO: 630786 - RNA, 22 nt, Human
ugggugagcggcugcacacccg

SEQ ID NO: 630787 - RNA, 22 nt, Human
uguuaaacuguauugcauaagg

SEQ ID NO: 630788 - RNA, 22 nt, Human
uucaggagcuggcugcgaagga

SEQ ID NO: 630789 - RNA, 22 nt, Human
gguggggcugcaagcaguucgg

SEQ ID NO: 630790 - RNA, 17 nt, Human
ugggugguagggagagg

SEQ ID NO: 630791 - RNA, 22 nt, Human
acagaauagguacagucaguca

SEQ ID NO: 630792 - RNA, 21 nt, Human
uguauacacacauauauguac

SEQ ID NO: 630793 - RNA, 22 nt, Human
acaguagacccuggauaaacau

SEQ ID NO: 630794 - RNA, 19 nt, Human
ucuuggcuuugucuacugu

SEQ ID NO: 630795 - RNA, 22 nt, Human
aauuucagcuuaaguuguuugg

SEQ ID NO: 630796 - RNA, 22 nt, Human
gcagaugggagccccaggggag

SEQ ID NO: 630797 - RNA, 22 nt, Human
auacaauuauucugcagauauu

SEQ ID NO: 630798 - RNA, 22 nt, Human
aauguacaaaagucagccaacu

SEQ ID NO: 630799 - RNA, 22 nt, Human
cuuuuuaucucuuaaugauguu

SEQ ID NO: 630800 - RNA, 19 nt, Human
uccagcugguaugcccaga

SEQ ID NO: 630801 - RNA, 21 nt, Human
gcugccaggauuuugcaggaa

SEQ ID NO: 630802 - RNA, 22 nt, Human
aaugcuuauaccuaaugaucuu

SEQ ID NO: 630803 - RNA, 22 nt, Human
ugaacauuccugaaugaagcau

SEQ ID NO: 630804 - RNA, 20 nt, Human
acugggagcuaacggagauu

SEQ ID NO: 630805 - RNA, 19 nt, Human
aggcucugagcuccuggag

SEQ ID NO: 630806 - RNA, 22 nt, Human
uucuuggagauaaauucuuaca

SEQ ID NO: 630807 - RNA, 22 nt, Human
ggagaugguggaagcuggugca

SEQ ID NO: 630808 - RNA, 22 nt, Human
cuggccuguccugacccagccu

SEQ ID NO: 630809 - RNA, 22 nt, Human
uuagugcuucuguccaaauaua

SEQ ID NO: 630810 - RNA, 22 nt, Human
gcccuuggaagcggcagguagc

SEQ ID NO: 630811 - RNA, 22 nt, Human
cucuuaaauaacaucauugcuu

SEQ ID NO: 630812 - RNA, 22 nt, Human
gccccagaaaguucaaggcaca

SEQ ID NO: 630813 - RNA, 21 nt, Human
ucugucucuccacugcccugc

SEQ ID NO: 630814 - RNA, 22 nt, Human
agcuguuccaggccucauugcu

SEQ ID NO: 630815 - RNA, 22 nt, Human
guggagaggaacccagcucugu

SEQ ID NO: 630816 - RNA, 22 nt, Human
uuuguagauagaaaaaugauua

SEQ ID NO: 630817 - RNA, 22 nt, Human
gcagggcucaacaggacacccc

SEQ ID NO: 630818 - RNA, 23 nt, Human
uucaaagaucuucugaaaucugu

SEQ ID NO: 630819 - RNA, 22 nt, Human
cagaagagaugaaauaguauua

SEQ ID NO: 630820 - RNA, 22 nt, Human
cugcuucauauuucauagugau

SEQ ID NO: 630821 - RNA, 22 nt, Human
gcucagaguggccuggcuaggg

SEQ ID NO: 630822 - RNA, 22 nt, Human
auuuuaauaagauccauuuggu

SEQ ID NO: 630823 - RNA, 22 nt, Human
aaggacugucuaaggccuccaa

SEQ ID NO: 630824 - RNA, 20 nt, Human
ccugaggguuuguguucuuu

SEQ ID NO: 630825 - RNA, 21 nt, Human
ggaagcaguggcggcaacucc

SEQ ID NO: 630826 - RNA, 22 nt, Human
gaaagguuguaacaagacucuu

SEQ ID NO: 630827 - RNA, 22 nt, Human
uuuuagacuccaucugauucag

SEQ ID NO: 630828 - RNA, 22 nt, Human
cacugcugauuucauaggcagg

SEQ ID NO: 630829 - RNA, 22 nt, Human
ugaggcaggacugagcgggaug

SEQ ID NO: 630830 - RNA, 22 nt, Human
gcagaaagcuccuugcgaucug

SEQ ID NO: 630831 - RNA, 22 nt, Human
aacaguaaugugguguuggguu

SEQ ID NO: 630832 - RNA, 22 nt, Human
uaacagaaaggcucaggugcuc

SEQ ID NO: 630833 - RNA, 22 nt, Human
cugggcagaguccggaagaugg

SEQ ID NO: 630834 - RNA, 22 nt, Human
acugggccugauugggucggag

SEQ ID NO: 630835 - RNA, 22 nt, Human
ucaaaauuagugaccaaaggca

SEQ ID NO: 630836 - RNA, 22 nt, Human
gccuggcuaagcagaaggaccc

SEQ ID NO: 630837 - RNA, 21 nt, Human
uucuccuccaaguugcuccug

SEQ ID NO: 630838 - RNA, 22 nt, Human
gcacaguguaccacagucccua

SEQ ID NO: 630839 - RNA, 22 nt, Human
ucacuuuacagcuaagguuguu

SEQ ID NO: 630840 - RNA, 22 nt, Human
auacaaugaaguauagaugaaa

SEQ ID NO: 630841 - RNA, 22 nt, Human
acaauguaguugucaugagaca

SEQ ID NO: 630842 - RNA, 22 nt, Human
gcugugagcugccugugucaca

SEQ ID NO: 630843 - RNA, 22 nt, Human
uaaaguguuguacaaauguaug

SEQ ID NO: 630844 - RNA, 22 nt, Human
uaaaugaagcucaugggccaca

SEQ ID NO: 630845 - RNA, 22 nt, Human
gcugagggccgcauagggucau

SEQ ID NO: 630846 - RNA, 20 nt, Human
ugagaagcuccugucuccuc

SEQ ID NO: 630847 - RNA, 22 nt, Human
aaggcaguuugggccaccaucu

SEQ ID NO: 630848 - RNA, 22 nt, Human
uccguucucuaggagaaacuuc

SEQ ID NO: 630849 - RNA, 22 nt, Human
ggcaaagcggcccuguggccag

SEQ ID NO: 630850 - RNA, 22 nt, Human
aaagaaaccuaucagccacaug

SEQ ID NO: 630851 - RNA, 22 nt, Human
guagucugaacaguaauuuugu

SEQ ID NO: 630852 - RNA, 22 nt, Human
ggcccagccuggcaacaaugac

SEQ ID NO: 630853 - RNA, 22 nt, Human
uggguagagugcugacaaugcc

SEQ ID NO: 630854 - RNA, 22 nt, Human
ggcaccagccaccuauuucuag

SEQ ID NO: 630855 - RNA, 22 nt, Human
cagggaagagccgaugcugcag

SEQ ID NO: 630856 - RNA, 22 nt, Human
guauuucugguuaaaugugcua

SEQ ID NO: 630857 - RNA, 22 nt, Human
ggcagggcaggaaagucaggaa

SEQ ID NO: 630858 - RNA, 22 nt, Human
guauuuguaguagcauagaauu

SEQ ID NO: 630859 - RNA, 22 nt, Human
ggucuggaugcugagguuccca

SEQ ID NO: 630860 - RNA, 22 nt, Human
cauucauuagaauagauaugua

SEQ ID NO: 630861 - RNA, 22 nt, Human
augucacugugaggcagcuguc

SEQ ID NO: 630862 - RNA, 21 nt, Human
ccaggaaggacugagcucccu

SEQ ID NO: 630863 - RNA, 19 nt, Human
ucagggggcugauaggagg

SEQ ID NO: 630864 - RNA, 22 nt, Human
caagugucuucaaaggcuaaaa

SEQ ID NO: 630865 - RNA, 22 nt, Human
agcaugcuuggcauuugucaga

SEQ ID NO: 630866 - RNA, 20 nt, Human
guggccucucacauucugag

SEQ ID NO: 630867 - RNA, 22 nt, Human
guuuagauuucaugaagacacu

SEQ ID NO: 630868 - RNA, 22 nt, Human
cuacagaaaccuuuuucauaca

SEQ ID NO: 630869 - RNA, 20 nt, Human
auauagagucaaaauggcuu

SEQ ID NO: 630870 - RNA, 22 nt, Human
ucauugcagacuaacaaucuca

SEQ ID NO: 630871 - RNA, 21 nt, Human
accugugaauagccacugcac

SEQ ID NO: 630872 - RNA, 22 nt, Human
acauuuacagugcuagacaauc

SEQ ID NO: 630873 - RNA, 22 nt, Human
cuggcagucugguggaaggccu

SEQ ID NO: 630874 - RNA, 22 nt, Human
uuugggaagugggagcaaggug

SEQ ID NO: 630875 - RNA, 22 nt, Human
aguguuggaccgagguggagcc

SEQ ID NO: 630876 - RNA, 22 nt, Human
aggcccaguccucugccgucug

SEQ ID NO: 630877 - RNA, 22 nt, Human
caggagccagcugucccaacca

SEQ ID NO: 630878 - RNA, 22 nt, Human
gccagcagccacagaagucacu

SEQ ID NO: 630879 - RNA, 22 nt, Human
caggaguggugugagggacucc

SEQ ID NO: 630880 - RNA, 21 nt, Human
auuggcacaccuuuuauugga

SEQ ID NO: 630881 - RNA, 22 nt, Human
ugcaggagauaauggugcuuag

SEQ ID NO: 630882 - RNA, 22 nt, Human
agggaguuagaaauccaggaua

SEQ ID NO: 630883 - RNA, 22 nt, Human
uagacuuuacuaaggcucauuu

SEQ ID NO: 630884 - RNA, 22 nt, Human
augacuuuuaaaagcugguacu

SEQ ID NO: 630885 - RNA, 22 nt, Human
aaacagcugucauuguuuuaaa

SEQ ID NO: 630886 - RNA, 22 nt, Human
guagcuuccagaaagugucuuu

SEQ ID NO: 630887 - RNA, 22 nt, Human
ugacaaagaccuucaacaagau

SEQ ID NO: 630888 - RNA, 20 nt, Human
cccagagccauagccagaca

SEQ ID NO: 630889 - RNA, 22 nt, Human
aaauauguuuuccaguugucau

SEQ ID NO: 630890 - RNA, 22 nt, Human
aaagcaauuacaaaagggauaa

SEQ ID NO: 630891 - RNA, 22 nt, Human
aaaugcuguagaucagugaguu

SEQ ID NO: 630892 - RNA, 22 nt, Human
gagugcaguuggggugagggga

SEQ ID NO: 630893 - RNA, 23 nt, Human
ugugcgugaugcuuuguugaagg

SEQ ID NO: 630894 - RNA, 21 nt, Human
ugcauauauaagugcauacac

SEQ ID NO: 630895 - RNA, 22 nt, Human
ucacugaaaaccauacuucuuu

SEQ ID NO: 630896 - RNA, 22 nt, Human
uaaacauguugacaucuuaccu

SEQ ID NO: 630897 - RNA, 22 nt, Human
ggccaggcugcccugggagcag

SEQ ID NO: 630898 - RNA, 17 nt, Human
ucucaggcacguguggc

SEQ ID NO: 630899 - RNA, 19 nt, Human
uuucuaauguguuuuucuu

SEQ ID NO: 630900 - RNA, 22 nt, Human
ucuguacaguaccagauaguaa

SEQ ID NO: 630901 - RNA, 22 nt, Human
uucaguguuaaauucaaagagu

SEQ ID NO: 630902 - RNA, 18 nt, Human
ggcaugugagugcugagg

SEQ ID NO: 630903 - RNA, 22 nt, Human
gaacacauuucucugacuguag

SEQ ID NO: 630904 - RNA, 22 nt, Human
caggucuggcaucagcugugug

SEQ ID NO: 630905 - RNA, 21 nt, Human
ucuucccucaggauguccugc

SEQ ID NO: 630906 - RNA, 22 nt, Human
agcacugugagcaccagcacgc

SEQ ID NO: 630907 - RNA, 22 nt, Human
aggcuccaggcccuucaccagc

SEQ ID NO: 630908 - RNA, 22 nt, Human
guagcagagggcccagguaacu

SEQ ID NO: 630909 - RNA, 22 nt, Human
gccgaagcugccgucugguccu

SEQ ID NO: 630910 - RNA, 22 nt, Human
agucagagcuauguuguuauau

SEQ ID NO: 630911 - RNA, 22 nt, Human
gccgaacuugagggccaggcgg

SEQ ID NO: 630912 - RNA, 22 nt, Human
ccagagcccgggaccuggacuu

SEQ ID NO: 630913 - RNA, 22 nt, Human
uagcuggcuuauauaaaagggc

SEQ ID NO: 630914 - RNA, 22 nt, Human
uccaggagacacccuugugugu

SEQ ID NO: 630915 - RNA, 18 nt, Human
uaggcugggggcuguagu

SEQ ID NO: 630916 - RNA, 22 nt, Human
gccuggcaggggccugggagug

SEQ ID NO: 630917 - RNA, 22 nt, Human
gaaggaggucugauacaauaug

SEQ ID NO: 630918 - RNA, 22 nt, Human
cugaggugagcuucccugggcu

SEQ ID NO: 630919 - RNA, 23 nt, Human
ucguugaauagcaauagcacaac

SEQ ID NO: 630920 - RNA, 22 nt, Human
caaaccuguccuuuugucuccu

SEQ ID NO: 630921 - RNA, 22 nt, Human
cagaugaaguuugccuagagcu

SEQ ID NO: 630922 - RNA, 22 nt, Human
uccaggagguugagacugcagu

SEQ ID NO: 630923 - RNA, 22 nt, Human
uguuagcaaggauaauuaugau

SEQ ID NO: 630924 - RNA, 22 nt, Human
ccuuuugaagguguuguuaagu

SEQ ID NO: 630925 - RNA, 22 nt, Human
aagucagugaaaaggcaucauc

SEQ ID NO: 630926 - RNA, 22 nt, Human
acagccaguccucccacagggu

SEQ ID NO: 630927 - RNA, 22 nt, Human
accauugauauaacucagucuc

SEQ ID NO: 630928 - RNA, 22 nt, Human
uaccucaaguuccaggaaagcg

SEQ ID NO: 630929 - RNA, 23 nt, Human
agucagagcagaagggcugcuug

SEQ ID NO: 630930 - RNA, 22 nt, Human
gagagcagacucucaaagcugg

SEQ ID NO: 630931 - RNA, 22 nt, Human
gagcugaguaucccacugaagu

SEQ ID NO: 630932 - RNA, 22 nt, Human
uuacagguggagaaguaaggcu

SEQ ID NO: 630933 - RNA, 22 nt, Human
ugggggagccuucacaguagcu

SEQ ID NO: 630934 - RNA, 22 nt, Human
acauauaugugcacaugugcag

SEQ ID NO: 630935 - RNA, 22 nt, Human
gggcuguguaucaguuaucuau

SEQ ID NO: 630936 - RNA, 22 nt, Human
cuuggcucuguguugaugggac

SEQ ID NO: 630937 - RNA, 22 nt, Human
gccagcuccgcaggauggcgcg

SEQ ID NO: 630938 - RNA, 22 nt, Human
aguacuucagaggcugcccagg

SEQ ID NO: 630939 - RNA, 22 nt, Human
accaugucauuuauuggccaaa

SEQ ID NO: 630940 - RNA, 22 nt, Human
gguggguggaaacagcauguac

SEQ ID NO: 630941 - RNA, 22 nt, Human
uagaaaagccccagcuggaggg

SEQ ID NO: 630942 - RNA, 22 nt, Human
aguucuggcggcugucggcacu

SEQ ID NO: 630943 - RNA, 22 nt, Human
uguuuacauaguagcugcccug

SEQ ID NO: 630944 - RNA, 22 nt, Human
ugagcuguauauuguuuuaaua

SEQ ID NO: 630945 - RNA, 22 nt, Human
acauagcaagugcucaauaaau

SEQ ID NO: 630946 - RNA, 22 nt, Human
ccagaacagaccugccugaccu

SEQ ID NO: 630947 - RNA, 22 nt, Human
cuucuucaagagaaugggagac

SEQ ID NO: 630948 - RNA, 22 nt, Human
cacaggaacaaagaagacaauu

SEQ ID NO: 630949 - RNA, 22 nt, Human
cuggaauugcauaauauguccu

SEQ ID NO: 630950 - RNA, 22 nt, Human
cacagagcuggaaaggcugggc

SEQ ID NO: 630951 - RNA, 22 nt, Human
cagagcugugauaaauagauau

SEQ ID NO: 630952 - RNA, 22 nt, Human
gccaggccugcaagugcuggug

SEQ ID NO: 630953 - RNA, 22 nt, Human
agguuaaaaaggauucaguuaa

SEQ ID NO: 630954 - RNA, 22 nt, Human
caguuuuagggcaaugugaaga

SEQ ID NO: 630955 - RNA, 22 nt, Human
gcaacacagaucuucuuuguug

SEQ ID NO: 630956 - RNA, 22 nt, Human
guugaaaguagaugcuauuugg

SEQ ID NO: 630957 - RNA, 22 nt, Human
ugccugggagugaccaagacuc

SEQ ID NO: 630958 - RNA, 22 nt, Human
ugcuugugagaguuuuuucaga

SEQ ID NO: 630959 - RNA, 22 nt, Human
agaccugcagggccaggccugc

SEQ ID NO: 630960 - RNA, 22 nt, Human
gugggcaggguugcuuucuccg

SEQ ID NO: 630961 - RNA, 20 nt, Human
gcucugucuggccuacuuuu

SEQ ID NO: 630962 - RNA, 22 nt, Human
uagcaguacugggcauguguuu

SEQ ID NO: 630963 - RNA, 22 nt, Human
aagagagaacucccuucgccag

SEQ ID NO: 630964 - RNA, 22 nt, Human
cccaggaggugugcccaacucg

SEQ ID NO: 630965 - RNA, 22 nt, Human
ccagagacgucggucagggcgc

SEQ ID NO: 630966 - RNA, 20 nt, Human
ucagaugggagugagccauc

SEQ ID NO: 630967 - RNA, 22 nt, Human
guguuuccaguucagaaagcaa

SEQ ID NO: 630968 - RNA, 22 nt, Human
uauaaccuggauucuggcacua

SEQ ID NO: 630969 - RNA, 22 nt, Human
uucuuucugggaagaguucaga

SEQ ID NO: 630970 - RNA, 23 nt, Human
cuucagugugggacugcagcgug

SEQ ID NO: 630971 - RNA, 22 nt, Human
acagaaagauaggcacaagguc

SEQ ID NO: 630972 - RNA, 22 nt, Human
uucaugaaauucucguguaccu

SEQ ID NO: 630973 - RNA, 22 nt, Human
aaaguuuggauuagcaguuaga

SEQ ID NO: 630974 - RNA, 22 nt, Human
gccuugcuaauuucuccucaac

SEQ ID NO: 630975 - RNA, 22 nt, Human
ggccagagggagggcacaaauc

SEQ ID NO: 630976 - RNA, 22 nt, Human
acuugaaaagcucagcaguagu

SEQ ID NO: 630977 - RNA, 22 nt, Human
cagcugcugcccuuggcugcag

SEQ ID NO: 630978 - RNA, 22 nt, Human
uuuccucacuucaugagaguuu

SEQ ID NO: 630979 - RNA, 22 nt, Human
uccuguuuuuguaaucgacucu

SEQ ID NO: 630980 - RNA, 22 nt, Human
agucaaauaucuuaaaaggcua

SEQ ID NO: 630981 - RNA, 22 nt, Human
auacaguaauugcccugcaaug

SEQ ID NO: 630982 - RNA, 22 nt, Human
ugcaugaugacuaaggugguga

SEQ ID NO: 630983 - RNA, 22 nt, Human
cauaagaaauuuaacagaacuu

SEQ ID NO: 630984 - RNA, 22 nt, Human
aggcuguggugaugauuggguc

SEQ ID NO: 630985 - RNA, 22 nt, Human
uuagggaaguguuauucucagg

SEQ ID NO: 630986 - RNA, 22 nt, Human
gcuccaggccacggcuucuugg

SEQ ID NO: 630987 - RNA, 22 nt, Human
acuuucuucuuaugcauuaagg

SEQ ID NO: 630988 - RNA, 22 nt, Human
gaaaucauuagcaaagauaugu

SEQ ID NO: 630989 - RNA, 22 nt, Human
aguccuggcucuacgggcuuca

SEQ ID NO: 630990 - RNA, 22 nt, Human
ccugggcauucuuugaguucuc

SEQ ID NO: 630991 - RNA, 22 nt, Human
uguaugaauauguauuuucaua

SEQ ID NO: 630992 - RNA, 22 nt, Human
cugggcuuugaagccaggcugc

SEQ ID NO: 630993 - RNA, 22 nt, Human
cuuucucaguguuaauuacuuu

SEQ ID NO: 630994 - RNA, 22 nt, Human
gaguuauuaauggcugaguuug

SEQ ID NO: 630995 - RNA, 22 nt, Human
acagaaguuggaauuagauacu

SEQ ID NO: 630996 - RNA, 22 nt, Human
uguguaaauggcaucucucagc

SEQ ID NO: 630997 - RNA, 19 nt, Human
gagacauguagauagaaga

SEQ ID NO: 630998 - RNA, 22 nt, Human
cacugaacaacaaauagugaau

SEQ ID NO: 630999 - RNA, 22 nt, Human
cuuuaucagaaaacacauuagg

SEQ ID NO: 631000 - RNA, 22 nt, Human
ucuggcuccacaccucacugca

SEQ ID NO: 631001 - RNA, 22 nt, Human
gaaguuuauuucaaucuauuca

SEQ ID NO: 631002 - RNA, 22 nt, Human
ugucuacugcugacacuaacag

SEQ ID NO: 631003 - RNA, 23 nt, Human
aaggguccauagcuaucauuaca

SEQ ID NO: 631004 - RNA, 22 nt, Human
ugggccuccgcauggcccagcg

SEQ ID NO: 631005 - RNA, 22 nt, Human
agaggaggauuuguaaaggucu

SEQ ID NO: 631006 - RNA, 22 nt, Human
aucugcuuguugcaugucuguu

SEQ ID NO: 631007 - RNA, 22 nt, Human
caucacccggaacugugucugc

SEQ ID NO: 631008 - RNA, 22 nt, Human
gcaggagaaaugaagauugggu

SEQ ID NO: 631009 - RNA, 22 nt, Human
uuuaggcagcagugaggaugaa

SEQ ID NO: 631010 - RNA, 22 nt, Human
acauguguaaaaguggauaaaa

SEQ ID NO: 631011 - RNA, 20 nt, Human
ccugaagaguuucucuuucu

SEQ ID NO: 631012 - RNA, 22 nt, Human
uaccagccuuuuaacaugggcc

SEQ ID NO: 631013 - RNA, 22 nt, Human
ccauuuaacacagaguuuucca

SEQ ID NO: 631014 - RNA, 22 nt, Human
accaggaaauuuggcaacaaag

SEQ ID NO: 631015 - RNA, 22 nt, Human
ucagucaacauaaauccaaggu

SEQ ID NO: 631016 - RNA, 22 nt, Human
agcuuuauuugucauucacggc

SEQ ID NO: 631017 - RNA, 23 nt, Human
ucuuccugaacuaucaggcacau

SEQ ID NO: 631018 - RNA, 22 nt, Human
gucccagaggacagggucacau

SEQ ID NO: 631019 - RNA, 22 nt, Human
agccagcacggauuucccagga

SEQ ID NO: 631020 - RNA, 22 nt, Human
uaacaucaaacugcauuuucua

SEQ ID NO: 631021 - RNA, 22 nt, Human
uuauuuccaaacuggauauacc

SEQ ID NO: 631022 - RNA, 22 nt, Human
ggcagaagacaggcaaaucaug

SEQ ID NO: 631023 - RNA, 22 nt, Human
acaaagauguuuaaagcauuua

SEQ ID NO: 631024 - RNA, 22 nt, Human
guguccugcaggccaggaaugg

SEQ ID NO: 631025 - RNA, 19 nt, Human
agcuccugggcucugggcc

SEQ ID NO: 631026 - RNA, 22 nt, Human
caaaguccauaguuuacaauag

SEQ ID NO: 631027 - RNA, 22 nt, Human
ccugagagugguguacaggaga

SEQ ID NO: 631028 - RNA, 19 nt, Human
auuuuucuuccucugugca

SEQ ID NO: 631029 - RNA, 22 nt, Human
cucugaaaguuagagaaaauag

SEQ ID NO: 631030 - RNA, 22 nt, Human
aaucauucucaugccaguuucc

SEQ ID NO: 631031 - RNA, 17 nt, Human
ggcuggagcagcucccc

SEQ ID NO: 631032 - RNA, 22 nt, Human
ugggcagagaucuggaucaaac

SEQ ID NO: 631033 - RNA, 22 nt, Human
ucacaugaguauuauuuuccaa

SEQ ID NO: 631034 - RNA, 22 nt, Human
ccugugccugccugugaguucu

SEQ ID NO: 631035 - RNA, 22 nt, Human
ccucugugccucaguuucaugu

SEQ ID NO: 631036 - RNA, 22 nt, Human
aggaccuguaccucagcaucua

SEQ ID NO: 631037 - RNA, 22 nt, Human
ccaaaauaacagcccaauucac

SEQ ID NO: 631038 - RNA, 22 nt, Human
aaagugcaucaaaugacuuccc

SEQ ID NO: 631039 - RNA, 22 nt, Human
cacaggaaagucagccagaaga

SEQ ID NO: 631040 - RNA, 22 nt, Human
gacuacagauagccaauuaagu

SEQ ID NO: 631041 - RNA, 22 nt, Human
gcuucaugccaggagguuuaag

SEQ ID NO: 631042 - RNA, 22 nt, Human
cuccuggggccauggaaggaac

SEQ ID NO: 631043 - RNA, 23 nt, Human
uugacaguaggugguuuucauug

SEQ ID NO: 631044 - RNA, 21 nt, Human
agcagacacuugugaccuucc

SEQ ID NO: 631045 - RNA, 22 nt, Human
acagucugccucucagagcagc

SEQ ID NO: 631046 - RNA, 22 nt, Human
gcugcucugaaaaugacuguug

SEQ ID NO: 631047 - RNA, 22 nt, Human
uaucugucaccuguaggguagg

SEQ ID NO: 631048 - RNA, 22 nt, Human
uuucauauuguccagucagcgc

SEQ ID NO: 631049 - RNA, 22 nt, Human
ggaagccaggcugggggaucug

SEQ ID NO: 631050 - RNA, 22 nt, Human
acuucccaggugguguggaguu

SEQ ID NO: 631051 - RNA, 22 nt, Human
aagaaaacaugaucuaauuuaa

SEQ ID NO: 631052 - RNA, 22 nt, Human
ugccuggcaacuguggugggcu

SEQ ID NO: 631053 - RNA, 22 nt, Human
uaagagcagagguugaauaaau

SEQ ID NO: 631054 - RNA, 22 nt, Human
uccccucccuuccaacagagcu

SEQ ID NO: 631055 - RNA, 22 nt, Human
uggggugguaauacaccguucu

SEQ ID NO: 631056 - RNA, 22 nt, Human
ugccaggcaacugcccagccau

SEQ ID NO: 631057 - RNA, 22 nt, Human
gucaggaucaaauugaaguuau

SEQ ID NO: 631058 - RNA, 22 nt, Human
uucaagaugcacaguggcauuc

SEQ ID NO: 631059 - RNA, 20 nt, Human
gcugucccaggccaaagggc

SEQ ID NO: 631060 - RNA, 22 nt, Human
gcaggggcaggagaucucaggc

SEQ ID NO: 631061 - RNA, 21 nt, Human
caggccgggugagcaggcagc

SEQ ID NO: 631062 - RNA, 22 nt, Human
auuacauauguuggcaacauuu

SEQ ID NO: 631063 - RNA, 22 nt, Human
auugagaagaaaaucuaauaua

SEQ ID NO: 631064 - RNA, 22 nt, Human
ccucccaccguaucucaguggc

SEQ ID NO: 631065 - RNA, 22 nt, Human
cugugaggcggguggaguggag

SEQ ID NO: 631066 - RNA, 22 nt, Human
ucuucuguggcucucaccaccc

SEQ ID NO: 631067 - RNA, 22 nt, Human
cugacccuggucaaguugccuc

SEQ ID NO: 631068 - RNA, 22 nt, Human
uuucaggauuuuaugagauagu

SEQ ID NO: 631069 - RNA, 22 nt, Human
uuggaagggaaccgaguuugcu

SEQ ID NO: 631070 - RNA, 22 nt, Human
acuucaugaacauguggccugu

SEQ ID NO: 631071 - RNA, 22 nt, Human
uagcagagcgggugcgaggcgg

SEQ ID NO: 631072 - RNA, 22 nt, Human
cucuccaaguuaucaagaugaa

SEQ ID NO: 631073 - RNA, 22 nt, Human
uagaauaugugguaggaucugg

SEQ ID NO: 631074 - RNA, 21 nt, Human
ggcagaaguagcauggacggg

SEQ ID NO: 631075 - RNA, 22 nt, Human
gaggucaggcucaagcugggcc

SEQ ID NO: 631076 - RNA, 22 nt, Human
ugugacagccaguaaaguaagc

SEQ ID NO: 631077 - RNA, 20 nt, Human
ggcaugagaugugagggagg

SEQ ID NO: 631078 - RNA, 22 nt, Human
ccagcaagccaggucuguggcu

SEQ ID NO: 631079 - RNA, 22 nt, Human
uugggcuggcccuugucucugg

SEQ ID NO: 631080 - RNA, 22 nt, Human
ugagcagcaggaucuucuggua

SEQ ID NO: 631081 - RNA, 22 nt, Human
gccugagaaggauaggaagcga

SEQ ID NO: 631082 - RNA, 22 nt, Human
guggggcugcuuaggcugcgca

SEQ ID NO: 631083 - RNA, 22 nt, Human
cagggugccucccgcucgccgg

SEQ ID NO: 631084 - RNA, 22 nt, Human
agcaccuguugcacuucauaau

SEQ ID NO: 631085 - RNA, 22 nt, Human
gcuucuauuauuuggagcugag

SEQ ID NO: 631086 - RNA, 22 nt, Human
agcuggccuccgggugccuggg

SEQ ID NO: 631087 - RNA, 22 nt, Human
ucccacagucucacaaugcaua

SEQ ID NO: 631088 - RNA, 22 nt, Human
ccaguguuuacaguugaacaaa

SEQ ID NO: 631089 - RNA, 22 nt, Human
uugcuucagaaguucugcuugu

SEQ ID NO: 631090 - RNA, 22 nt, Human
aaacagaaauuuccucaugcuc

SEQ ID NO: 631091 - RNA, 22 nt, Human
auaguggugagcugcauuuaug

SEQ ID NO: 631092 - RNA, 22 nt, Human
cagaaacuucuggugucaaaua

SEQ ID NO: 631093 - RNA, 22 nt, Human
acaauuccugagaauacuuguu

SEQ ID NO: 631094 - RNA, 21 nt, Human
caugcagauucuggagccaga

SEQ ID NO: 631095 - RNA, 22 nt, Human
gcaucccucugaggggccaggc

SEQ ID NO: 631096 - RNA, 22 nt, Human
uaguucuguguagcucaagagu

SEQ ID NO: 631097 - RNA, 22 nt, Human
ucagacagagaaguacaaugag

SEQ ID NO: 631098 - RNA, 22 nt, Human
auagaacagaaacagaugcaca

SEQ ID NO: 631099 - RNA, 22 nt, Human
ugcauuggucauuugaaaauau

SEQ ID NO: 631100 - RNA, 22 nt, Human
gaauggcugaaugucuuaaauu

SEQ ID NO: 631101 - RNA, 22 nt, Human
gccuucaggaaaucaguccuug

SEQ ID NO: 631102 - RNA, 22 nt, Human
auccaaacauguaccacacuaa

SEQ ID NO: 631103 - RNA, 22 nt, Human
aacaggcaggagaauucugccu

SEQ ID NO: 631104 - RNA, 22 nt, Human
caggaaauucccagaaggacug

SEQ ID NO: 631105 - RNA, 22 nt, Human
auuauucauggucuuccacaau

SEQ ID NO: 631106 - RNA, 22 nt, Human
cagccagugugaccgaggagga

SEQ ID NO: 631107 - RNA, 22 nt, Human
acacaguuuaaacgauuaguac

SEQ ID NO: 631108 - RNA, 22 nt, Human
ucagacaaguaaaauaauguaa

SEQ ID NO: 631109 - RNA, 22 nt, Human
caggaacaaggccuaugggacu

SEQ ID NO: 631110 - RNA, 22 nt, Human
agucaaaggguauuuggauuga

SEQ ID NO: 631111 - RNA, 22 nt, Human
gggccggagcugggucccgcgc

SEQ ID NO: 631112 - RNA, 20 nt, Human
aucagaggauagggaagugg

SEQ ID NO: 631113 - RNA, 22 nt, Human
agccagagauugagaugcaggc

SEQ ID NO: 631114 - RNA, 22 nt, Human
auucuuugaacaguuuuccugu

SEQ ID NO: 631115 - RNA, 22 nt, Human
cagaauaugacaagauuuuccu

SEQ ID NO: 631116 - RNA, 22 nt, Human
cucccugggcagauguggcucu

SEQ ID NO: 631117 - RNA, 17 nt, Human
gggcugacaguggccuc

SEQ ID NO: 631118 - RNA, 22 nt, Human
gcugccugcaguguuuucccag

SEQ ID NO: 631119 - RNA, 22 nt, Human
gcuguggguaaacgcugagggu

SEQ ID NO: 631120 - RNA, 22 nt, Human
ucugcuugcguucugcucccuc

SEQ ID NO: 631121 - RNA, 22 nt, Human
cuggcagguggagguugcagug

SEQ ID NO: 631122 - RNA, 22 nt, Human
ccagaagcuucaaggagauucu

SEQ ID NO: 631123 - RNA, 22 nt, Human
uggcacuuccacuguggcugcu

SEQ ID NO: 631124 - RNA, 21 nt, Human
aauagcugaggucacccagcc

SEQ ID NO: 631125 - RNA, 22 nt, Human
gaaauguaauucucuugaagau

SEQ ID NO: 631126 - RNA, 22 nt, Human
aaaugcauuuuuaauuagaccc

SEQ ID NO: 631127 - RNA, 22 nt, Human
gaugagggccugguggcugugc

SEQ ID NO: 631128 - RNA, 22 nt, Human
ugucaccuugcagggcuggggc

SEQ ID NO: 631129 - RNA, 22 nt, Human
gucugcagagggaaggcuucag

SEQ ID NO: 631130 - RNA, 22 nt, Human
acaauucaagaagagagaugaa

SEQ ID NO: 631131 - RNA, 22 nt, Human
acugcugugaucugauguaauu

SEQ ID NO: 631132 - RNA, 22 nt, Human
ucuggcagugaagucaugaggu

SEQ ID NO: 631133 - RNA, 22 nt, Human
uuugucuucauccuucgagcug

SEQ ID NO: 631134 - RNA, 22 nt, Human
guccucugucccuggggcacgg

SEQ ID NO: 631135 - RNA, 22 nt, Human
gagcugaacaucauggaaaggc

SEQ ID NO: 631136 - RNA, 22 nt, Human
gcaucuaagguggauaacuucu

SEQ ID NO: 631137 - RNA, 22 nt, Human
gugauccuauaaagugagcaca

SEQ ID NO: 631138 - RNA, 22 nt, Human
uuagaguguagcaggaagaggc

SEQ ID NO: 631139 - RNA, 20 nt, Human
aggagggaccuggauuggcg

SEQ ID NO: 631140 - RNA, 22 nt, Human
ucauuuaauugguuuugcucgu

SEQ ID NO: 631141 - RNA, 18 nt, Human
agcaccagucacuaacag

SEQ ID NO: 631142 - RNA, 22 nt, Human
cucugcuagaaggucaaucucu

SEQ ID NO: 631143 - RNA, 17 nt, Human
gcuccaggcgugaguga

SEQ ID NO: 631144 - RNA, 22 nt, Human
cugcccagaagccagaugggca

SEQ ID NO: 631145 - RNA, 22 nt, Human
agcccuggcucccagcagcgcu

SEQ ID NO: 631146 - RNA, 22 nt, Human
uuuagacagcggcucugaacca

SEQ ID NO: 631147 - RNA, 22 nt, Human
augcaguacugauacaugccac

SEQ ID NO: 631148 - RNA, 22 nt, Human
aaaguccuuuuugccaugcaag

SEQ ID NO: 631149 - RNA, 22 nt, Human
uuucugcucgcucucaaucagg

SEQ ID NO: 631150 - RNA, 22 nt, Human
uauuaacacguauaaaguguuu

SEQ ID NO: 631151 - RNA, 22 nt, Human
ucuguggcuaucauacugaagg

SEQ ID NO: 631152 - RNA, 22 nt, Human
uagcacacgcauuagcaaauca

SEQ ID NO: 631153 - RNA, 22 nt, Human
uaccaggcagcugcacagaggc

SEQ ID NO: 631154 - RNA, 22 nt, Human
uugcagcuguugcaaagucucu

SEQ ID NO: 631155 - RNA, 22 nt, Human
ugagcucuguuagggcuggaac

SEQ ID NO: 631156 - RNA, 22 nt, Human
cagaugcuuggaggacacuugg

SEQ ID NO: 631157 - RNA, 22 nt, Human
ugucucuuggcucuaucacuua

SEQ ID NO: 631158 - RNA, 22 nt, Human
uuuagcauguuccuuucauaga

SEQ ID NO: 631159 - RNA, 22 nt, Human
caucauuuuuguaagcugguag

SEQ ID NO: 631160 - RNA, 22 nt, Human
ugucugaagcagccagugcugu

SEQ ID NO: 631161 - RNA, 22 nt, Human
uacagaauagaauagggacagg

SEQ ID NO: 631162 - RNA, 22 nt, Human
gcaccacaucaaugaggggagc

SEQ ID NO: 631163 - RNA, 22 nt, Human
uaaguucugaagaggcgaggua

SEQ ID NO: 631164 - RNA, 23 nt, Human
auugaccuguuuagucucucccu

SEQ ID NO: 631165 - RNA, 22 nt, Human
caccuuugaccuugcagcgcac

SEQ ID NO: 631166 - RNA, 20 nt, Human
caucagugccugacaggucc

SEQ ID NO: 631167 - RNA, 22 nt, Human
aaacacagcauguccuugggga

SEQ ID NO: 631168 - RNA, 22 nt, Human
agaguuaucacuccaugcagcu

SEQ ID NO: 631169 - RNA, 22 nt, Human
gggcuccaggagcccuaagaga

SEQ ID NO: 631170 - RNA, 23 nt, Human
ugguggcagaaguagcagaugac

SEQ ID NO: 631171 - RNA, 22 nt, Human
aggucugguauuuuucuauacu

SEQ ID NO: 631172 - RNA, 22 nt, Human
cugcugagguccuugcucagac

SEQ ID NO: 631173 - RNA, 22 nt, Human
caccaggggcagagaccaaagu

SEQ ID NO: 631174 - RNA, 22 nt, Human
aguaucauguuggaauuaauca

SEQ ID NO: 631175 - RNA, 22 nt, Human
aggucagguaucagcagguauu

SEQ ID NO: 631176 - RNA, 22 nt, Human
uggcuggcccugggagugcaga

SEQ ID NO: 631177 - RNA, 22 nt, Human
gggaaagaccuuccuggggugu

SEQ ID NO: 631178 - RNA, 22 nt, Human
aggcaccuggaucuuggaauuc

SEQ ID NO: 631179 - RNA, 22 nt, Human
uggcucagaugcucuuccagug

SEQ ID NO: 631180 - RNA, 22 nt, Human
ugauuauauuaacuauguuccu

SEQ ID NO: 631181 - RNA, 22 nt, Human
cuucuucugguuuauguggcaa

SEQ ID NO: 631182 - RNA, 22 nt, Human
gaguccagacaccauaccugau

SEQ ID NO: 631183 - RNA, 22 nt, Human
aggccucuguagggcccugaag

SEQ ID NO: 631184 - RNA, 22 nt, Human
uucucacuauguauguagauug

SEQ ID NO: 631185 - RNA, 22 nt, Human
ugugacagaucucuauacauga

SEQ ID NO: 631186 - RNA, 22 nt, Human
uuccaaguccagccaggccaaa

SEQ ID NO: 631187 - RNA, 22 nt, Human
ucuagggagaagcucugucugu

SEQ ID NO: 631188 - RNA, 22 nt, Human
gcacagagagggaagguaacuu

SEQ ID NO: 631189 - RNA, 22 nt, Human
uggaggggcaauggagcgcgga

SEQ ID NO: 631190 - RNA, 22 nt, Human
gcgcgccucugcccgguguucc

SEQ ID NO: 631191 - RNA, 22 nt, Human
cuucagcuguggucuccaaggc

SEQ ID NO: 631192 - RNA, 22 nt, Human
ucaggaaauggugauuugguug

SEQ ID NO: 631193 - RNA, 22 nt, Human
uguucacaucgauggauuuugc

SEQ ID NO: 631194 - RNA, 22 nt, Human
ucugcucugggccagcuauuaa

SEQ ID NO: 631195 - RNA, 22 nt, Human
ugagaaugccauaagagcuauu

SEQ ID NO: 631196 - RNA, 22 nt, Human
gaggaaggaaugcaguguaugc

SEQ ID NO: 631197 - RNA, 22 nt, Human
ucuggagaguccugcucacguc

SEQ ID NO: 631198 - RNA, 22 nt, Human
agcaccaguuucgucgugacaa

SEQ ID NO: 631199 - RNA, 22 nt, Human
ucuguagcaagugagaggcauu

SEQ ID NO: 631200 - RNA, 20 nt, Human
uagcaaugaguguuccauuu

SEQ ID NO: 631201 - RNA, 22 nt, Human
uucugcugaagccagggagcaa

SEQ ID NO: 631202 - RNA, 22 nt, Human
uaggcagcugcaaacuucgguc

SEQ ID NO: 631203 - RNA, 22 nt, Human
uugcugggugcuauuaugaaca

SEQ ID NO: 631204 - RNA, 22 nt, Human
cuggcucccucgcugaggugcu

SEQ ID NO: 631205 - RNA, 22 nt, Human
ugagcuggagucgugagcaaag

SEQ ID NO: 631206 - RNA, 22 nt, Human
uggaaacuaggauggaagaaau

SEQ ID NO: 631207 - RNA, 22 nt, Human
ucagcuaugagguggugguucu

SEQ ID NO: 631208 - RNA, 22 nt, Human
ucucugggaguugagcagcagc

SEQ ID NO: 631209 - RNA, 22 nt, Human
ccaguccuagaagaggagucga

SEQ ID NO: 631210 - RNA, 22 nt, Human
ggcugaaauucagaguaaauuc

SEQ ID NO: 631211 - RNA, 22 nt, Human
cugcuuugggcagcuuuguggc

SEQ ID NO: 631212 - RNA, 22 nt, Human
acaguggugagugacugauagg

SEQ ID NO: 631213 - RNA, 22 nt, Human
ugcaggaguccaaucaggagac

SEQ ID NO: 631214 - RNA, 22 nt, Human
gguccagaagcugguaggguag

SEQ ID NO: 631215 - RNA, 21 nt, Human
ggaagggcucugaggacggcu

SEQ ID NO: 631216 - RNA, 22 nt, Human
gggccaaggggagcuggaaggg

SEQ ID NO: 631217 - RNA, 22 nt, Human
uucaucuugauggcuuccuaau

SEQ ID NO: 631218 - RNA, 22 nt, Human
uggcccugccacucacugcuga

SEQ ID NO: 631219 - RNA, 22 nt, Human
caauauauaaugaguacuuucc

SEQ ID NO: 631220 - RNA, 22 nt, Human
ugauaugugaagcuauuaguuc

SEQ ID NO: 631221 - RNA, 22 nt, Human
gcccucccuacagccuauuucu

SEQ ID NO: 631222 - RNA, 23 nt, Human
ccucccaggcugcgagucccgag

SEQ ID NO: 631223 - RNA, 23 nt, Human
agacuucuccaacaagcuuggcu

SEQ ID NO: 631224 - RNA, 22 nt, Human
cagcaccuuccuuaacuccagg

SEQ ID NO: 631225 - RNA, 17 nt, Human
aauagcugcucagagag

SEQ ID NO: 631226 - RNA, 22 nt, Human
uuuucaggugcaguaaucauau

SEQ ID NO: 631227 - RNA, 22 nt, Human
agcuggugugccacuguugggg

SEQ ID NO: 631228 - RNA, 21 nt, Human
gaaggagaaagcaagugcugc

SEQ ID NO: 631229 - RNA, 22 nt, Human
uuccaggaagacaucucaggaa

SEQ ID NO: 631230 - RNA, 22 nt, Human
gccuccucuugagggucaggga

SEQ ID NO: 631231 - RNA, 22 nt, Human
gaaagcacaguucaugagacaa

SEQ ID NO: 631232 - RNA, 22 nt, Human
ccauaagguuuggggccaugca

SEQ ID NO: 631233 - RNA, 22 nt, Human
uccuguguuacugccuggagcg

SEQ ID NO: 631234 - RNA, 22 nt, Human
ccagcugaggcagccacacagg

SEQ ID NO: 631235 - RNA, 22 nt, Human
gauauuuuugcagacaccuggg

SEQ ID NO: 631236 - RNA, 22 nt, Human
cagcccucaucucagcuucuuu

SEQ ID NO: 631237 - RNA, 23 nt, Human
uuucuucagaagccuugcgaggc

SEQ ID NO: 631238 - RNA, 22 nt, Human
aaacugaggcucccgagggugu

SEQ ID NO: 631239 - RNA, 22 nt, Human
aaauucuuuggccuacuuugaa

SEQ ID NO: 631240 - RNA, 22 nt, Human
guggcuagaaaaauaugggugc

SEQ ID NO: 631241 - RNA, 22 nt, Human
auuucagauucgagaggaagug

SEQ ID NO: 631242 - RNA, 19 nt, Human
accuucugggaaacauucc

SEQ ID NO: 631243 - RNA, 22 nt, Human
ugcccugccaagacugaguggu

SEQ ID NO: 631244 - RNA, 22 nt, Human
agggcagagaaauguaguugag

SEQ ID NO: 631245 - RNA, 22 nt, Human
uggagaguguagacuucagagu

SEQ ID NO: 631246 - RNA, 22 nt, Human
cugggaagcauggugaugguau

SEQ ID NO: 631247 - RNA, 22 nt, Human
acagggcuggggaaagaggcua

SEQ ID NO: 631248 - RNA, 22 nt, Human
agaggaaguaaucaggaccugc

SEQ ID NO: 631249 - RNA, 22 nt, Human
agguccugugguuuggguaaaa

SEQ ID NO: 631250 - RNA, 22 nt, Human
gagccagcuauguagcaagagg

SEQ ID NO: 631251 - RNA, 22 nt, Human
cagccacugaacuccuggcuau

SEQ ID NO: 631252 - RNA, 22 nt, Human
acuguugaagugccagcuugau

SEQ ID NO: 631253 - RNA, 22 nt, Human
cucuggcuguuugcagcucaag

SEQ ID NO: 631254 - RNA, 22 nt, Human
uggcagguagucagaggcgaca

SEQ ID NO: 631255 - RNA, 21 nt, Human
uucugccuuccccuagcuggg

SEQ ID NO: 631256 - RNA, 22 nt, Human
auaucaaagcuaguggaaauuu

SEQ ID NO: 631257 - RNA, 22 nt, Human
caaauacaaauacgggcagcuu

SEQ ID NO: 631258 - RNA, 22 nt, Human
aguauuucuaguugguucuacu

SEQ ID NO: 631259 - RNA, 22 nt, Human
uccugggaggcugugccuggcu

SEQ ID NO: 631260 - RNA, 22 nt, Human
guacaaguguauuuggcuugau

SEQ ID NO: 631261 - RNA, 22 nt, Human
ccagggcuggguuugucggugu

SEQ ID NO: 631262 - RNA, 22 nt, Human
aaugaaacuguauauagacugu

SEQ ID NO: 631263 - RNA, 22 nt, Human
uagauucaaguauucaguuugg

SEQ ID NO: 631264 - RNA, 22 nt, Human
gggcaugccugagccugccacu

SEQ ID NO: 631265 - RNA, 22 nt, Human
gggagggaaagcuugaucuguc

SEQ ID NO: 631266 - RNA, 21 nt, Human
ggcagccucuguggaagggga

SEQ ID NO: 631267 - RNA, 21 nt, Human
cugaggcagcacagcuaguca

SEQ ID NO: 631268 - RNA, 22 nt, Human
ggccaugcaggucagagguggg

SEQ ID NO: 631269 - RNA, 22 nt, Human
gcggcaggaagagcgcagcccc

SEQ ID NO: 631270 - RNA, 22 nt, Human
aaaaguauggugguccuuuuua

SEQ ID NO: 631271 - RNA, 22 nt, Human
aagcaccugcaguugacaaaaa

SEQ ID NO: 631272 - RNA, 22 nt, Human
agcugccucucuugagguuacg

SEQ ID NO: 631273 - RNA, 18 nt, Human
auuaaucauaaaaugcug

SEQ ID NO: 631274 - RNA, 22 nt, Human
ugaguuauauauacuggcucug

SEQ ID NO: 631275 - RNA, 22 nt, Human
ccugaugguauauuguugggag

SEQ ID NO: 631276 - RNA, 22 nt, Human
aaaucccuugcucucucagacc

SEQ ID NO: 631277 - RNA, 22 nt, Human
uuuccuuucugguuuggucaua

SEQ ID NO: 631278 - RNA, 22 nt, Human
caucuugaagguuucuuuagcu

SEQ ID NO: 631279 - RNA, 22 nt, Human
uuugacuccugccuucuccugu

SEQ ID NO: 631280 - RNA, 22 nt, Human
uccccagguccugucggcuccu

SEQ ID NO: 631281 - RNA, 22 nt, Human
gucucagauucagacaucuaca

SEQ ID NO: 631282 - RNA, 22 nt, Human
gucccagagagcacuaguccau

SEQ ID NO: 631283 - RNA, 22 nt, Human
uuccccaguaacauacauguga

SEQ ID NO: 631284 - RNA, 22 nt, Human
guucccacuuggugcacuauga

SEQ ID NO: 631285 - RNA, 22 nt, Human
ugggcagauuaaugcaguggcu

SEQ ID NO: 631286 - RNA, 22 nt, Human
ucucugaagagcucagacuagu

SEQ ID NO: 631287 - RNA, 22 nt, Human
agauacaacuguuuaaacauua

SEQ ID NO: 631288 - RNA, 22 nt, Human
uaacacugguauuucauuuagu

SEQ ID NO: 631289 - RNA, 22 nt, Human
cuauuugaaaccaagaaugccg

SEQ ID NO: 631290 - RNA, 22 nt, Human
aucuggcugagcgaggcccaca

SEQ ID NO: 631291 - RNA, 22 nt, Human
uaguuuuacuugcgaugauaau

SEQ ID NO: 631292 - RNA, 22 nt, Human
uagaaaguaaacacgaagucuc

SEQ ID NO: 631293 - RNA, 22 nt, Human
uauauggauagugaucauaaga

SEQ ID NO: 631294 - RNA, 22 nt, Human
uauggagauucaaaagcaucuu

SEQ ID NO: 631295 - RNA, 22 nt, Human
caggccucgaggagacagcuac

SEQ ID NO: 631296 - RNA, 22 nt, Human
ccacagcuucgcagucugcugc

SEQ ID NO: 631297 - RNA, 22 nt, Human
ccaguaaaccaaguguuuacua

SEQ ID NO: 631298 - RNA, 22 nt, Human
cuguuuauaaaccaccaguuua

SEQ ID NO: 631299 - RNA, 22 nt, Human
aguacauacuucaaauguacuu

SEQ ID NO: 631300 - RNA, 22 nt, Human
agggccugcaucaggagcuugg

SEQ ID NO: 631301 - RNA, 22 nt, Human
agaucuggaaaaucacaggugc

SEQ ID NO: 631302 - RNA, 22 nt, Human
uuauuugccagaauuucucuug

SEQ ID NO: 631303 - RNA, 22 nt, Human
gcucagugaauuuuugcccaug

SEQ ID NO: 631304 - RNA, 22 nt, Human
ugucagcagaaaucuggucugc

SEQ ID NO: 631305 - RNA, 22 nt, Human
ggguggcacugauaaugagacg

SEQ ID NO: 631306 - RNA, 22 nt, Human
ucugauguugugacaucacuuc

SEQ ID NO: 631307 - RNA, 22 nt, Human
uucuucuugucugcccucacau

SEQ ID NO: 631308 - RNA, 22 nt, Human
aaaaugacauuccagugauauu

SEQ ID NO: 631309 - RNA, 22 nt, Human
ggaaggcagaggugucgugggg

SEQ ID NO: 631310 - RNA, 16 nt, Human
ccagguggggcuguga

SEQ ID NO: 631311 - RNA, 22 nt, Human
agcugucugucuccugaggaga

SEQ ID NO: 631312 - RNA, 19 nt, Human
gggagcugucugcccgugg

SEQ ID NO: 631313 - RNA, 22 nt, Human
uaauugucccugcaguuaggau

SEQ ID NO: 631314 - RNA, 22 nt, Human
ccagccagucccgcaugaccgc

SEQ ID NO: 631315 - RNA, 22 nt, Human
acauaacaaucauaggacauag

SEQ ID NO: 631316 - RNA, 22 nt, Human
aggcaauccucuuacagauggg

SEQ ID NO: 631317 - RNA, 23 nt, Human
agcugaaagcuugcaacgaggca

SEQ ID NO: 631318 - RNA, 22 nt, Human
cagggcagggauguugcggcag

SEQ ID NO: 631319 - RNA, 22 nt, Human
acagaugaaacccagcuaguug

SEQ ID NO: 631320 - RNA, 22 nt, Human
caucugaaaucugccuacaagc

SEQ ID NO: 631321 - RNA, 22 nt, Human
auguuacagaaagcaaagauga

SEQ ID NO: 631322 - RNA, 22 nt, Human
auugagaaugaagggacauuuu

SEQ ID NO: 631323 - RNA, 22 nt, Human
uuaaaacugcaaauccuacuga

SEQ ID NO: 631324 - RNA, 22 nt, Human
caggccugugacaccgugucug

SEQ ID NO: 631325 - RNA, 22 nt, Human
agguacaguagacagacaguua

SEQ ID NO: 631326 - RNA, 22 nt, Human
agaggcagcagucauacuacag

SEQ ID NO: 631327 - RNA, 22 nt, Human
agagacugcaaaucauaagaau

SEQ ID NO: 631328 - RNA, 22 nt, Human
ugucugaaggccugaccuacau

SEQ ID NO: 631329 - RNA, 22 nt, Human
acugucugcccugagaugccag

SEQ ID NO: 631330 - RNA, 22 nt, Human
ucuggcauuucaggcaucuaua

SEQ ID NO: 631331 - RNA, 22 nt, Human
acagcaucccugaagauaacca

SEQ ID NO: 631332 - RNA, 21 nt, Human
ugaagccugaggcauagcccc

SEQ ID NO: 631333 - RNA, 19 nt, Human
ugaguguguguuucucuaa

SEQ ID NO: 631334 - RNA, 22 nt, Human
cggagccugcuuguugcagcug

SEQ ID NO: 631335 - RNA, 22 nt, Human
acugcccagugauuggugguua

SEQ ID NO: 631336 - RNA, 22 nt, Human
aaggagucucagcugggccuga

SEQ ID NO: 631337 - RNA, 22 nt, Human
agcagacaacccagaugaccca

SEQ ID NO: 631338 - RNA, 22 nt, Human
auucaguuuuugaagggaaauu

SEQ ID NO: 631339 - RNA, 22 nt, Human
ucugaggcagcuugccacucua

SEQ ID NO: 631340 - RNA, 22 nt, Human
uaaaucaguaaggcauauucuc

SEQ ID NO: 631341 - RNA, 22 nt, Human
uuggaauuuuccagguacagug

SEQ ID NO: 631342 - RNA, 22 nt, Human
uuauuucauguaaaauuuaugu

SEQ ID NO: 631343 - RNA, 22 nt, Human
ucacuuugaugacauuguagcu

SEQ ID NO: 631344 - RNA, 22 nt, Human
cgagaggcuggacagggcuggg

SEQ ID NO: 631345 - RNA, 22 nt, Human
cugaggaguuggugaauaagcc

SEQ ID NO: 631346 - RNA, 22 nt, Human
gggcuggaguugggaagacaaa

SEQ ID NO: 631347 - RNA, 22 nt, Human
gcagcagagcuuuguccuggcu

SEQ ID NO: 631348 - RNA, 22 nt, Human
aacugcauuguacuaaacuugu

SEQ ID NO: 631349 - RNA, 20 nt, Human
cagcuuggaugagaggcuga

SEQ ID NO: 631350 - RNA, 22 nt, Human
ggcccagguccagcgaguaccu

SEQ ID NO: 631351 - RNA, 22 nt, Human
uauuuggacaccaaguagaagu

SEQ ID NO: 631352 - RNA, 22 nt, Human
uucuuucugggguccuucggcu

SEQ ID NO: 631353 - RNA, 22 nt, Human
ucuuccuaguuacauaugcaca

SEQ ID NO: 631354 - RNA, 22 nt, Human
ucaguuuaauacccagaugccu

SEQ ID NO: 631355 - RNA, 22 nt, Human
cacccacccacugcucauuggc

SEQ ID NO: 631356 - RNA, 22 nt, Human
caguguuuagaucaagaaggcc

SEQ ID NO: 631357 - RNA, 22 nt, Human
ugcuccagccuaugcucuccgg

SEQ ID NO: 631358 - RNA, 22 nt, Human
agcagcaaaguauugggcaaga

SEQ ID NO: 631359 - RNA, 20 nt, Human
uccagcugacauucucuuuc

SEQ ID NO: 631360 - RNA, 22 nt, Human
aguguggggucaccggcccagg

SEQ ID NO: 631361 - RNA, 22 nt, Human
uuaauccggggugaauuuaauu

SEQ ID NO: 631362 - RNA, 22 nt, Human
cuguuuaucuaggaguugcagg

SEQ ID NO: 631363 - RNA, 22 nt, Human
gcuggggcugggcugaggaaga

SEQ ID NO: 631364 - RNA, 18 nt, Human
cugugggcuggugcauga

SEQ ID NO: 631365 - RNA, 22 nt, Human
aacaaugcuugccaagugugau

SEQ ID NO: 631366 - RNA, 22 nt, Human
cuggugcuuugcucauuugaua

SEQ ID NO: 631367 - RNA, 22 nt, Human
aauguuuuguaugccucugagc

SEQ ID NO: 631368 - RNA, 22 nt, Human
ugggcugcggauaggccucgga

SEQ ID NO: 631369 - RNA, 23 nt, Human
aaugacagugugugauugaagaa

SEQ ID NO: 631370 - RNA, 22 nt, Human
ggugaguuucaugguuguuuac

SEQ ID NO: 631371 - RNA, 22 nt, Human
cagcucuggguaggaggaaucu

SEQ ID NO: 631372 - RNA, 22 nt, Human
ucugaggcccuacccugagccu

SEQ ID NO: 631373 - RNA, 22 nt, Human
aaauguggguaaugggacugga

SEQ ID NO: 631374 - RNA, 21 nt, Human
uagcaggaggccccugcuugc

SEQ ID NO: 631375 - RNA, 22 nt, Human
cauuuauucauuugcuagggcu

SEQ ID NO: 631376 - RNA, 22 nt, Human
augcagaagcagaacuuacaca

SEQ ID NO: 631377 - RNA, 22 nt, Human
uccuguggggaaaagccuaucu

SEQ ID NO: 631378 - RNA, 22 nt, Human
cuucucugcaccccacuuuugc

SEQ ID NO: 631379 - RNA, 22 nt, Human
uacuguguugugcugaaaggga

SEQ ID NO: 631380 - RNA, 22 nt, Human
uagcaacagcaauagugguauu

SEQ ID NO: 631381 - RNA, 22 nt, Human
ggcugcagagcugggugggccu

SEQ ID NO: 631382 - RNA, 22 nt, Human
uaaaggcaugcaggugaaugua

SEQ ID NO: 631383 - RNA, 22 nt, Human
ggcagcugcugcauuacguugu

SEQ ID NO: 631384 - RNA, 17 nt, Human
cuggagccuccaacucc

SEQ ID NO: 631385 - RNA, 22 nt, Human
ugggaugaggccucuguuguga

SEQ ID NO: 631386 - RNA, 22 nt, Human
cuccuccacagaguccuugcca

SEQ ID NO: 631387 - RNA, 18 nt, Human
ggcugccuguuccugaag

SEQ ID NO: 631388 - RNA, 22 nt, Human
ucaguucugcuagaaaaacagu

SEQ ID NO: 631389 - RNA, 22 nt, Human
aacagugucugugguuaaaggu

SEQ ID NO: 631390 - RNA, 22 nt, Human
uggccuggcagagcaaggccug

SEQ ID NO: 631391 - RNA, 22 nt, Human
ccuccuggaaaaauucccuggc

SEQ ID NO: 631392 - RNA, 22 nt, Human
uaugacauuauaaaggauuauu

SEQ ID NO: 631393 - RNA, 21 nt, Human
gggcucagcgcucggcuccuc

SEQ ID NO: 631394 - RNA, 22 nt, Human
gcagagcccuggggguauggug

SEQ ID NO: 631395 - RNA, 22 nt, Human
agaaagcacagcggguccauuu

SEQ ID NO: 631396 - RNA, 22 nt, Human
gcuuccauuugcuaggggauuu

SEQ ID NO: 631397 - RNA, 22 nt, Human
ucaguggagcuaagcaugagau

SEQ ID NO: 631398 - RNA, 20 nt, Human
cugcucugcuuugcaggugg

SEQ ID NO: 631399 - RNA, 22 nt, Human
agugucugccagcugccaggug

SEQ ID NO: 631400 - RNA, 22 nt, Human
ugggaaagacucaggacaggag

SEQ ID NO: 631401 - RNA, 22 nt, Human
caggaggcagagguugcaguga

SEQ ID NO: 631402 - RNA, 22 nt, Human
aggcagcagagguugaggaaag

SEQ ID NO: 631403 - RNA, 22 nt, Human
aaagaaggaccuggaggaggau

SEQ ID NO: 631404 - RNA, 22 nt, Human
gagauccuguaggcagcuaaga

SEQ ID NO: 631405 - RNA, 20 nt, Human
cccacacccuucccacuugg

SEQ ID NO: 631406 - RNA, 20 nt, Human
gaggccucagccucagcucc

SEQ ID NO: 631407 - RNA, 22 nt, Human
aauagucucucccacaccaucc

SEQ ID NO: 631408 - RNA, 22 nt, Human
uuauaagaguauauaguguacu

SEQ ID NO: 631409 - RNA, 22 nt, Human
uauacuuaugcuaaaaaauguu

SEQ ID NO: 631410 - RNA, 22 nt, Human
uuuaugcagccucaguaucaga

SEQ ID NO: 631411 - RNA, 22 nt, Human
aaaguaacaauaagguucuauu

SEQ ID NO: 631412 - RNA, 22 nt, Human
gagccagcagccggcaccacca

SEQ ID NO: 631413 - RNA, 22 nt, Human
cugagguaccuggagcaggucc

SEQ ID NO: 631414 - RNA, 22 nt, Human
uccaggcugugcaugaguuuag

SEQ ID NO: 631415 - RNA, 22 nt, Human
uggcccaguauguauaaucuua

SEQ ID NO: 631416 - RNA, 22 nt, Human
ggcggugguugagaggacggcg

SEQ ID NO: 631417 - RNA, 22 nt, Human
acauauuuccaugcagcauguc

SEQ ID NO: 631418 - RNA, 22 nt, Human
uucuaguguccuuggacuugcu

SEQ ID NO: 631419 - RNA, 22 nt, Human
agcagcuucuuucacuccugga

SEQ ID NO: 631420 - RNA, 22 nt, Human
ccucccuuuguugcaagggaaa

SEQ ID NO: 631421 - RNA, 22 nt, Human
acauuccucagugccaguugag

SEQ ID NO: 631422 - RNA, 22 nt, Human
cugggaaguggugagggccuga

SEQ ID NO: 631423 - RNA, 22 nt, Human
agcucagggcgaucugucucgg

SEQ ID NO: 631424 - RNA, 22 nt, Human
uucagggcccugagagggcagu

SEQ ID NO: 631425 - RNA, 22 nt, Human
uuugcauuauauuuauagaaga

SEQ ID NO: 631426 - RNA, 22 nt, Human
aggagcugauagucuauggaga

SEQ ID NO: 631427 - RNA, 22 nt, Human
aucugcuugaaugagcaacagg

SEQ ID NO: 631428 - RNA, 22 nt, Human
gagccuggauagccuuguucca

SEQ ID NO: 631429 - RNA, 22 nt, Human
uggaugaggcuggguuaggcag

SEQ ID NO: 631430 - RNA, 22 nt, Human
gcugaggccaggccccaccgga

SEQ ID NO: 631431 - RNA, 22 nt, Human
cagguggcaugacugccuacaa

SEQ ID NO: 631432 - RNA, 22 nt, Human
ucucagcugacugcuuuccucg

SEQ ID NO: 631433 - RNA, 22 nt, Human
gguggcucagggcuccaagcau

SEQ ID NO: 631434 - RNA, 22 nt, Human
aggcacuuuccuugaggaguuu

SEQ ID NO: 631435 - RNA, 22 nt, Human
gggcugcugcugccagcgacac

SEQ ID NO: 631436 - RNA, 22 nt, Human
gggagcuggaucgcgcgcccgg

SEQ ID NO: 631437 - RNA, 22 nt, Human
ugcaaggauauuuagucuagug

SEQ ID NO: 631438 - RNA, 21 nt, Human
gcaaguacuaucaucauuauc

SEQ ID NO: 631439 - RNA, 22 nt, Human
gugugcauauguguggcucucc

SEQ ID NO: 631440 - RNA, 22 nt, Human
uuguguccugauuugacacaau

SEQ ID NO: 631441 - RNA, 22 nt, Human
aaguuauaucaucucauugacg

SEQ ID NO: 631442 - RNA, 22 nt, Human
uccuggggcucuuugaugugau

SEQ ID NO: 631443 - RNA, 22 nt, Human
gcagucagacaggaggagcucc

SEQ ID NO: 631444 - RNA, 19 nt, Human
ucugaagaauuagagagca

SEQ ID NO: 631445 - RNA, 22 nt, Human
augcagcaguuuacaaagcaau

SEQ ID NO: 631446 - RNA, 22 nt, Human
aaacaguccucuuuauuuaguc

SEQ ID NO: 631447 - RNA, 22 nt, Human
acucaucugaaaaaugaggaga

SEQ ID NO: 631448 - RNA, 22 nt, Human
cuaaacaagauacuaaugaggu

SEQ ID NO: 631449 - RNA, 22 nt, Human
cgcgcggcucucgcgagaugug

SEQ ID NO: 631450 - RNA, 22 nt, Human
uccugcagaccucagucagguc

SEQ ID NO: 631451 - RNA, 22 nt, Human
aaguggcagccuuagaaggaga

SEQ ID NO: 631452 - RNA, 22 nt, Human
guggcaucaagauuuagauuca

SEQ ID NO: 631453 - RNA, 20 nt, Human
agcauuuuaugguaggaaac

SEQ ID NO: 631454 - RNA, 22 nt, Human
uuagaaaugucacagaucugau

SEQ ID NO: 631455 - RNA, 22 nt, Human
gaguuauuuguagggauuauau

SEQ ID NO: 631456 - RNA, 22 nt, Human
uacagaauaaagcgugaagcuu

SEQ ID NO: 631457 - RNA, 22 nt, Human
uucaaugucuauguacauuuua

SEQ ID NO: 631458 - RNA, 22 nt, Human
gucucucugcuaggccuccagu

SEQ ID NO: 631459 - RNA, 22 nt, Human
ggaaaucucuacuuugucauuu

SEQ ID NO: 631460 - RNA, 19 nt, Human
accaggaguaucagagcug

SEQ ID NO: 631461 - RNA, 20 nt, Human
cuuucucuaauuuauaagua

SEQ ID NO: 631462 - RNA, 22 nt, Human
uaauuucacaguucaacgcaca

SEQ ID NO: 631463 - RNA, 22 nt, Human
auguuacaugaaacggccuacu

SEQ ID NO: 631464 - RNA, 22 nt, Human
uccaagaagucaucuaaacugu

SEQ ID NO: 631465 - RNA, 22 nt, Human
gcuccaggcagcauaguggaug

SEQ ID NO: 631466 - RNA, 22 nt, Human
ucacacguccuugcuacuccuc

SEQ ID NO: 631467 - RNA, 23 nt, Human
ucacacuaugaaguguguuaucc

SEQ ID NO: 631468 - RNA, 22 nt, Human
auggcuuucuguguuuccguag

SEQ ID NO: 631469 - RNA, 22 nt, Human
guaggguuggagagcacaacca

SEQ ID NO: 631470 - RNA, 22 nt, Human
agugcuccucagaagaguugga

SEQ ID NO: 631471 - RNA, 21 nt, Human
aggcagccagucaugcucccu

SEQ ID NO: 631472 - RNA, 22 nt, Human
acacuuugggcuggauaauuau

SEQ ID NO: 631473 - RNA, 22 nt, Human
uuccucuauucuaacaaaagua

SEQ ID NO: 631474 - RNA, 22 nt, Human
ucagcaggucugaggcggggcc

SEQ ID NO: 631475 - RNA, 20 nt, Human
ugaacacugggguguuucag

SEQ ID NO: 631476 - RNA, 22 nt, Human
auacagauugcuauacuuacaa

SEQ ID NO: 631477 - RNA, 22 nt, Human
gggugugcaggucauggcgucu

SEQ ID NO: 631478 - RNA, 22 nt, Human
uucugagcuacauaguacuggg

SEQ ID NO: 631479 - RNA, 22 nt, Human
ugaagaaacgcagagagguagg

SEQ ID NO: 631480 - RNA, 22 nt, Human
acagucuaggccuaggucaaaa

SEQ ID NO: 631481 - RNA, 19 nt, Human
ccucugcuccaguuuccuu

SEQ ID NO: 631482 - RNA, 22 nt, Human
gagccuggguccuucccuggga

SEQ ID NO: 631483 - RNA, 22 nt, Human
aaagaucagaggauagcugagu

SEQ ID NO: 631484 - RNA, 22 nt, Human
accacccauucagaaacacuga

SEQ ID NO: 631485 - RNA, 22 nt, Human
cugaaugucgaucagcuugggu

SEQ ID NO: 631486 - RNA, 22 nt, Human
gugccaaaagcuauaauuuggu

SEQ ID NO: 631487 - RNA, 18 nt, Human
gcagcaaagggcccgggg

SEQ ID NO: 631488 - RNA, 22 nt, Human
ugccuggcaucuagcccuggga

SEQ ID NO: 631489 - RNA, 22 nt, Human
ggcuauggaagauaaggcugaa

SEQ ID NO: 631490 - RNA, 22 nt, Human
uuggaaggagccuaaaagagac

SEQ ID NO: 631491 - RNA, 22 nt, Human
cagggaugagcagauggagcaa

SEQ ID NO: 631492 - RNA, 22 nt, Human
cacugcaaccuccgccucuugg

SEQ ID NO: 631493 - RNA, 22 nt, Human
aaugauauuuauugaauagaug

SEQ ID NO: 631494 - RNA, 22 nt, Human
aaggcaauguuagcaacauaau

SEQ ID NO: 631495 - RNA, 22 nt, Human
gagcugggauuugaaccuggga

SEQ ID NO: 631496 - RNA, 18 nt, Human
agccugggcucugccugg

SEQ ID NO: 631497 - RNA, 23 nt, Human
aggcacugaaugugucagugagu

SEQ ID NO: 631498 - RNA, 22 nt, Human
aagcagguuaugaaauauagaa

SEQ ID NO: 631499 - RNA, 22 nt, Human
gugggguagaucuuucucagga

SEQ ID NO: 631500 - RNA, 19 nt, Human
uguaccugggucauggugc

SEQ ID NO: 631501 - RNA, 22 nt, Human
aaugaugggaaggagaaaagca

SEQ ID NO: 631502 - RNA, 22 nt, Human
aguugcucaauguggcugugga

SEQ ID NO: 631503 - RNA, 22 nt, Human
agacagaccauggcuauucaga

SEQ ID NO: 631504 - RNA, 22 nt, Human
augucugcggcccaggccaggg

SEQ ID NO: 631505 - RNA, 22 nt, Human
caguccuucauuccuccuuuga

SEQ ID NO: 631506 - RNA, 22 nt, Human
aaaggucagacuuaggcugggc

SEQ ID NO: 631507 - RNA, 22 nt, Human
cugcagauuggccugauguuca

SEQ ID NO: 631508 - RNA, 22 nt, Human
acccagucuggagugcagugac

SEQ ID NO: 631509 - RNA, 22 nt, Human
ucucuggcagggauaucuggcu

SEQ ID NO: 631510 - RNA, 22 nt, Human
uuggaagcccugugauaggcca

SEQ ID NO: 631511 - RNA, 22 nt, Human
aggaagggauacauaggauagu

SEQ ID NO: 631512 - RNA, 22 nt, Human
aaaugugauacuguucuuuuua

SEQ ID NO: 631513 - RNA, 22 nt, Human
uucugugaauggccaugacaag

SEQ ID NO: 631514 - RNA, 22 nt, Human
cuccaggccaagauuaaguaau

SEQ ID NO: 631515 - RNA, 22 nt, Human
cacugaacuccuuguuuguccu

SEQ ID NO: 631516 - RNA, 22 nt, Human
gcuggcuuuauggggcuugugg

SEQ ID NO: 631517 - RNA, 22 nt, Human
caccuuugcaaaccaaaucuga

SEQ ID NO: 631518 - RNA, 22 nt, Human
augcuuccuuuuucccuuaagg

SEQ ID NO: 631519 - RNA, 16 nt, Human
guucucucacuguacc

SEQ ID NO: 631520 - RNA, 22 nt, Human
gcucaccucgcugcaggugggu

SEQ ID NO: 631521 - RNA, 19 nt, Human
cuagggcuuggcagcaggc

SEQ ID NO: 631522 - RNA, 22 nt, Human
cuggggcccgagccuugggcca

SEQ ID NO: 631523 - RNA, 22 nt, Human
uacaugaagaaaauuaagcagu

SEQ ID NO: 631524 - RNA, 22 nt, Human
ugaucuuugguaguacgauaau

SEQ ID NO: 631525 - RNA, 22 nt, Human
ugauuuaaaagaaacauugucu

SEQ ID NO: 631526 - RNA, 22 nt, Human
agcacagggacaaugccaggug

SEQ ID NO: 631527 - RNA, 22 nt, Human
aaagcagguugcaauuacagug

SEQ ID NO: 631528 - RNA, 22 nt, Human
ucccacagugaaguucaugaua

SEQ ID NO: 631529 - RNA, 22 nt, Human
uggcaaggccacaggugcaguu

SEQ ID NO: 631530 - RNA, 16 nt, Human
ccucugggccugcaag

SEQ ID NO: 631531 - RNA, 22 nt, Human
auguuauggcucaaacauuugg

SEQ ID NO: 631532 - RNA, 22 nt, Human
uauucugugugauauguaaaug

SEQ ID NO: 631533 - RNA, 23 nt, Human
aaagcaaggaauuggcaacagag

SEQ ID NO: 631534 - RNA, 22 nt, Human
acccagcaugacaccugcacau

SEQ ID NO: 631535 - RNA, 22 nt, Human
uaugagauaauagauguguaaa

SEQ ID NO: 631536 - RNA, 22 nt, Human
acucugugcuggggaccucauc

SEQ ID NO: 631537 - RNA, 22 nt, Human
ucucagaacacccuucuauggu

SEQ ID NO: 631538 - RNA, 22 nt, Human
gugcucuguggauugaguugaa

SEQ ID NO: 631539 - RNA, 22 nt, Human
ucccugcacagccgagccaugc

SEQ ID NO: 631540 - RNA, 22 nt, Human
aauuaugagguagauaucacau

SEQ ID NO: 631541 - RNA, 22 nt, Human
gcagcugucgcuaggagcugug

SEQ ID NO: 631542 - RNA, 22 nt, Human
gguucauucugaagucuucagc

SEQ ID NO: 631543 - RNA, 20 nt, Human
uucaugcuggaggggcuggc

SEQ ID NO: 631544 - RNA, 22 nt, Human
ucucagugacacucuucauaca

SEQ ID NO: 631545 - RNA, 22 nt, Human
cagaaggcaaggccugccacgc

SEQ ID NO: 631546 - RNA, 22 nt, Human
ggaggaaauccuuaguaaggca

SEQ ID NO: 631547 - RNA, 22 nt, Human
uucauuaaguauaaaauguggu

SEQ ID NO: 631548 - RNA, 22 nt, Human
aaggucauggcaaauuacuuuu

SEQ ID NO: 631549 - RNA, 22 nt, Human
uggcagagugcagaagaggcau

SEQ ID NO: 631550 - RNA, 22 nt, Human
uauguacacauacacuuguaau

SEQ ID NO: 631551 - RNA, 22 nt, Human
gaacaguaucaguagugccagu

SEQ ID NO: 631552 - RNA, 22 nt, Human
agauuuccaucuuuuucaugug

SEQ ID NO: 631553 - RNA, 19 nt, Human
aaaguuuuauucucauuug

SEQ ID NO: 631554 - RNA, 22 nt, Human
caaucuuaguggcuuacaaaga

SEQ ID NO: 631555 - RNA, 21 nt, Human
gcaguuuauguaauaugcacu

SEQ ID NO: 631556 - RNA, 22 nt, Human
acaggcauauuucuagauuaca

SEQ ID NO: 631557 - RNA, 22 nt, Human
ggcaggcugggugucauggagu

SEQ ID NO: 631558 - RNA, 22 nt, Human
gaggccugguuuccagcauccu

SEQ ID NO: 631559 - RNA, 22 nt, Human
auauuacacacgguaucacggg

SEQ ID NO: 631560 - RNA, 22 nt, Human
uugaguguacuuuagucaucug

SEQ ID NO: 631561 - RNA, 22 nt, Human
gggcuccagcagaggcagccgg

SEQ ID NO: 631562 - RNA, 22 nt, Human
agggagagacauuuccuucuug

SEQ ID NO: 631563 - RNA, 22 nt, Human
aaaguggccauccucugcaucg

SEQ ID NO: 631564 - RNA, 23 nt, Human
ucucccugagguuguuagcauua

SEQ ID NO: 631565 - RNA, 22 nt, Human
ucaggacauuugucagcaggag

SEQ ID NO: 631566 - RNA, 22 nt, Human
auugcacaaagagggaaacuga

SEQ ID NO: 631567 - RNA, 22 nt, Human
gcccugugcuuggauggcagau

SEQ ID NO: 631568 - RNA, 22 nt, Human
uuacaugacaaagcuuuggcuc

SEQ ID NO: 631569 - RNA, 22 nt, Human
cgcaggggaggaagguacaccu

SEQ ID NO: 631570 - RNA, 22 nt, Human
ugcugaggucacggcggccaga

SEQ ID NO: 631571 - RNA, 22 nt, Human
ugcugaggacaccuagccuucu

SEQ ID NO: 631572 - RNA, 22 nt, Human
agguucagacgcauaauaggca

SEQ ID NO: 631573 - RNA, 22 nt, Human
ggcuugcuucuuguccaggaau

SEQ ID NO: 631574 - RNA, 23 nt, Human
ugucuggcucauggugggucuca

SEQ ID NO: 631575 - RNA, 22 nt, Human
uucacaaugccuuguugauggu

SEQ ID NO: 631576 - RNA, 22 nt, Human
ucugaaaacuccaugagcucgu

SEQ ID NO: 631577 - RNA, 22 nt, Human
cugaauaauuuuauaguugcug

SEQ ID NO: 631578 - RNA, 22 nt, Human
aaagagucuggcguuuuaaugg

SEQ ID NO: 631579 - RNA, 22 nt, Human
cagccugggcuccagagucccu

SEQ ID NO: 631580 - RNA, 22 nt, Human
gaucuguuauaaucucuuuuau

SEQ ID NO: 631581 - RNA, 19 nt, Human
uccagguggagagacaccc

SEQ ID NO: 631582 - RNA, 22 nt, Human
ugcaaggcuugcaauggugauc

SEQ ID NO: 631583 - RNA, 23 nt, Human
gagcagagcgggcggggguccug

SEQ ID NO: 631584 - RNA, 22 nt, Human
uagcagggucucaggagucagg

SEQ ID NO: 631585 - RNA, 22 nt, Human
uuauuaaugaguacaaguuauu

SEQ ID NO: 631586 - RNA, 22 nt, Human
gaucauuaacaaccuuacccuu

SEQ ID NO: 631587 - RNA, 22 nt, Human
gaaugcauucucuuagcaucua

SEQ ID NO: 631588 - RNA, 22 nt, Human
uccaccauguaacaagcucugu

SEQ ID NO: 631589 - RNA, 22 nt, Human
aaaggccuugagcugggugcca

SEQ ID NO: 631590 - RNA, 22 nt, Human
cugagcugugcuaagugaaaug

SEQ ID NO: 631591 - RNA, 22 nt, Human
uucacagauguauuggaacucc

SEQ ID NO: 631592 - RNA, 22 nt, Human
ugucucuucagcccauggcuuc

SEQ ID NO: 631593 - RNA, 22 nt, Human
ucaggcucagguuaggggccaa

SEQ ID NO: 631594 - RNA, 22 nt, Human
aaaugucauauuuaaguaggaa

SEQ ID NO: 631595 - RNA, 22 nt, Human
caugccaugugugaggagagga

SEQ ID NO: 631596 - RNA, 22 nt, Human
uugagaaauacuuuuguagccu

SEQ ID NO: 631597 - RNA, 22 nt, Human
agcugaggaauaauaacaaggu

SEQ ID NO: 631598 - RNA, 21 nt, Human
augguagguggagcaggugau

SEQ ID NO: 631599 - RNA, 22 nt, Human
ucuuugcagaauuuaacuuugc

SEQ ID NO: 631600 - RNA, 22 nt, Human
acaguguccuuguggucccugu

SEQ ID NO: 631601 - RNA, 20 nt, Human
auacacuugcccagcuugug

SEQ ID NO: 631602 - RNA, 22 nt, Human
aaacaaauagugcaugggaauu

SEQ ID NO: 631603 - RNA, 20 nt, Human
uuacacuuuguagcauuuuu

SEQ ID NO: 631604 - RNA, 22 nt, Human
agacagugauguaagcaggagu

SEQ ID NO: 631605 - RNA, 22 nt, Human
aaggucauuuaacaauuuauga

SEQ ID NO: 631606 - RNA, 22 nt, Human
auuuucuauguuguaauuguua

SEQ ID NO: 631607 - RNA, 22 nt, Human
ugacagagagaugggaaagggc

SEQ ID NO: 631608 - RNA, 22 nt, Human
gcagagccgugaauggauuuca

SEQ ID NO: 631609 - RNA, 22 nt, Human
gccaccucccaggacgaggcug

SEQ ID NO: 631610 - RNA, 22 nt, Human
uuucaucugugcugccaagacu

SEQ ID NO: 631611 - RNA, 22 nt, Human
uggcccugcuggccaaaggcua

SEQ ID NO: 631612 - RNA, 21 nt, Human
acccuggguucuccauacccu

SEQ ID NO: 631613 - RNA, 22 nt, Human
cuucccacuaaagcccuuguug

SEQ ID NO: 631614 - RNA, 22 nt, Human
aagucauuaucucuucuaaucu

SEQ ID NO: 631615 - RNA, 22 nt, Human
cagccacuguggaauagccccc

SEQ ID NO: 631616 - RNA, 22 nt, Human
ggcagagcugcaugagcacuca

SEQ ID NO: 631617 - RNA, 22 nt, Human
uaaagugugcauggucaaauau

SEQ ID NO: 631618 - RNA, 22 nt, Human
uuucucagucacaugaaccaau

SEQ ID NO: 631619 - RNA, 22 nt, Human
ucuguuuuagauaagaaaggcu

SEQ ID NO: 631620 - RNA, 22 nt, Human
uucugauuguuggaggaugcuu

SEQ ID NO: 631621 - RNA, 22 nt, Human
uuauuguuuacuaguuugcaga

SEQ ID NO: 631622 - RNA, 22 nt, Human
agcagcuggugcaacucuaaga

SEQ ID NO: 631623 - RNA, 22 nt, Human
caacuaauccuuugaaaagaag

SEQ ID NO: 631624 - RNA, 22 nt, Human
gaagcagagccuaaggcagaca

SEQ ID NO: 631625 - RNA, 21 nt, Human
gugcggaugccgucauuguca

SEQ ID NO: 631626 - RNA, 23 nt, Human
aagcuuccuugacuggccccuag

SEQ ID NO: 631627 - RNA, 22 nt, Human
aaucacauuugcccccauauuc

SEQ ID NO: 631628 - RNA, 22 nt, Human
uuuaacacuaguuucuuuaacu

SEQ ID NO: 631629 - RNA, 22 nt, Human
uucaggaaauuggaguccuucu

SEQ ID NO: 631630 - RNA, 22 nt, Human
acaguugguuaacacaaauauu

SEQ ID NO: 631631 - RNA, 22 nt, Human
cuccagauguauacuuuccaag

SEQ ID NO: 631632 - RNA, 22 nt, Human
ccugaggucagcgguucccaca

SEQ ID NO: 631633 - RNA, 22 nt, Human
augggcugacaagacaugcaua

SEQ ID NO: 631634 - RNA, 22 nt, Human
ucugaauaguauauugaaagca

SEQ ID NO: 631635 - RNA, 19 nt, Human
acuccagggaugacagaag

SEQ ID NO: 631636 - RNA, 22 nt, Human
gagauggagucuuuuucuguca

SEQ ID NO: 631637 - RNA, 21 nt, Human
aaaaucaccuuaggucacugg

SEQ ID NO: 631638 - RNA, 22 nt, Human
uuagagucaagcugcauguucu

SEQ ID NO: 631639 - RNA, 22 nt, Human
acaggaguagggcugguggaga

SEQ ID NO: 631640 - RNA, 22 nt, Human
aagguaaugaaacagcagcuaa

SEQ ID NO: 631641 - RNA, 21 nt, Human
agcuggcucucucuggagaga

SEQ ID NO: 631642 - RNA, 20 nt, Human
ugggcugaggaucaggugcc

SEQ ID NO: 631643 - RNA, 22 nt, Human
ggauucugccuuguugcuucaa

SEQ ID NO: 631644 - RNA, 22 nt, Human
ugaggacauugagacuggagac

SEQ ID NO: 631645 - RNA, 22 nt, Human
auuacuuucagaugugcuguaa

SEQ ID NO: 631646 - RNA, 22 nt, Human
auaaugcgccucagaaaacaga

SEQ ID NO: 631647 - RNA, 22 nt, Human
uggcugaauaaaauaugguguu

SEQ ID NO: 631648 - RNA, 22 nt, Human
uccaggaguccugggagugauu

SEQ ID NO: 631649 - RNA, 22 nt, Human
ccuucaaucagcagucuagcuu

SEQ ID NO: 631650 - RNA, 22 nt, Human
gccaguuccuguggagucagag

SEQ ID NO: 631651 - RNA, 22 nt, Human
cuucaaauacaaguagauuaug

SEQ ID NO: 631652 - RNA, 22 nt, Human
aagauacaucaaagcaaauugg

SEQ ID NO: 631653 - RNA, 22 nt, Human
agcagccacagucugggacagg

SEQ ID NO: 631654 - RNA, 22 nt, Human
cugggcugugguguggcccaaa

SEQ ID NO: 631655 - RNA, 21 nt, Human
ggccacaguuagggcucagga

SEQ ID NO: 631656 - RNA, 22 nt, Human
auacuagacuguucuguuauca

SEQ ID NO: 631657 - RNA, 22 nt, Human
cucucuggcuuggcacggagau

SEQ ID NO: 631658 - RNA, 21 nt, Human
uucugcuccagcuccucuggg

SEQ ID NO: 631659 - RNA, 21 nt, Human
uuucuucacuuugccccaugu

SEQ ID NO: 631660 - RNA, 22 nt, Human
uaaugcuuaauuuucacaagcc

SEQ ID NO: 631661 - RNA, 22 nt, Human
aaggcugaggcuggagaauuac

SEQ ID NO: 631662 - RNA, 17 nt, Human
caggugaccuggugaug

SEQ ID NO: 631663 - RNA, 22 nt, Human
ucagugugaauucauuuuagau

SEQ ID NO: 631664 - RNA, 18 nt, Human
agucucagcggaggagua

SEQ ID NO: 631665 - RNA, 22 nt, Human
aagaguucucagaaacgugggu

SEQ ID NO: 631666 - RNA, 22 nt, Human
cuguuuaugaagcugugguuua

SEQ ID NO: 631667 - RNA, 22 nt, Human
uacacaacugacaaccauucug

SEQ ID NO: 631668 - RNA, 22 nt, Human
ggcaggugaucuagagucaaua

SEQ ID NO: 631669 - RNA, 21 nt, Human
uuuguucaggcaaguuacagu

SEQ ID NO: 631670 - RNA, 20 nt, Human
aucuugggauugagauugcc

SEQ ID NO: 631671 - RNA, 22 nt, Human
caggcagccugcggucugcaca

SEQ ID NO: 631672 - RNA, 22 nt, Human
ucaaacaugaaagcuugauuuu

SEQ ID NO: 631673 - RNA, 22 nt, Human
agcauagaguccugagggcagg

SEQ ID NO: 631674 - RNA, 22 nt, Human
cugucagcacucuacuacagau

SEQ ID NO: 631675 - RNA, 22 nt, Human
uagugcuuaacacaaagugauu

SEQ ID NO: 631676 - RNA, 22 nt, Human
gggaaggcugccugagggaugg

SEQ ID NO: 631677 - RNA, 22 nt, Human
gugugugugcauauaacauaua

SEQ ID NO: 631678 - RNA, 19 nt, Human
cagagccucagagcuagaa

SEQ ID NO: 631679 - RNA, 22 nt, Human
aagacaucagugaugacauuug

SEQ ID NO: 631680 - RNA, 22 nt, Human
agacugaaacaaucugcaggca

SEQ ID NO: 631681 - RNA, 22 nt, Human
guccuggugcuggucauugucg

SEQ ID NO: 631682 - RNA, 22 nt, Human
gcuuccuugguccuggucuaag

SEQ ID NO: 631683 - RNA, 22 nt, Human
guaggcagguggaggagugaag

SEQ ID NO: 631684 - RNA, 22 nt, Human
uccagaaacugcugagauaaga

SEQ ID NO: 631685 - RNA, 22 nt, Human
cauuauguucaguagcuuaaaa

SEQ ID NO: 631686 - RNA, 22 nt, Human
gcaguguggccccaguaucacg

SEQ ID NO: 631687 - RNA, 21 nt, Human
cagugccagccacaggacgcc

SEQ ID NO: 631688 - RNA, 22 nt, Human
gaggugauuuucaaaagaacuu

SEQ ID NO: 631689 - RNA, 22 nt, Human
gauacacauuuuagcuuugucu

SEQ ID NO: 631690 - RNA, 19 nt, Human
guggcucauguagugggcc

SEQ ID NO: 631691 - RNA, 22 nt, Human
agcaggucuugcucucaacagg

SEQ ID NO: 631692 - RNA, 22 nt, Human
auauggaaguuaccugacuuca

SEQ ID NO: 631693 - RNA, 22 nt, Human
gugacucugcauuuuauggauc

SEQ ID NO: 631694 - RNA, 22 nt, Human
gcugccugggcuggcauuccca

SEQ ID NO: 631695 - RNA, 22 nt, Human
guuuaugaaauuucaggcauuu

SEQ ID NO: 631696 - RNA, 22 nt, Human
uguuacaaacuguuguuucuau

SEQ ID NO: 631697 - RNA, 18 nt, Human
cugaggcuuagagagguu

SEQ ID NO: 631698 - RNA, 22 nt, Human
cugggaggugaacagaaaaacu

SEQ ID NO: 631699 - RNA, 22 nt, Human
ccugccagugccucccacuggu

SEQ ID NO: 631700 - RNA, 22 nt, Human
aagaugugucucaucagggugu

SEQ ID NO: 631701 - RNA, 22 nt, Human
cuguagcagcugaccuggcuaa

SEQ ID NO: 631702 - RNA, 22 nt, Human
ucacaggaggacugaaagauau

SEQ ID NO: 631703 - RNA, 22 nt, Human
aagacaauuugauacuaguugc

SEQ ID NO: 631704 - RNA, 22 nt, Human
uccaggaguccuggguggcccc

SEQ ID NO: 631705 - RNA, 19 nt, Human
ugccccugcagucuaccca

SEQ ID NO: 631706 - RNA, 22 nt, Human
gaggauggauccgaccccuucc

SEQ ID NO: 631707 - RNA, 22 nt, Human
ucccagccggugccuggguccc

SEQ ID NO: 631708 - RNA, 22 nt, Human
auuggccauuugcauguauuau

SEQ ID NO: 631709 - RNA, 22 nt, Human
ggcuccugagaaugggccauca

SEQ ID NO: 631710 - RNA, 22 nt, Human
uuacuuugaugaucaaugagcg

SEQ ID NO: 631711 - RNA, 21 nt, Human
aacauuucugggagaacucac

SEQ ID NO: 631712 - RNA, 22 nt, Human
uauaggaaguaauuguugccug

SEQ ID NO: 631713 - RNA, 22 nt, Human
ucuguguccugcuagcugucuu

SEQ ID NO: 631714 - RNA, 21 nt, Human
agauuacaggugugauccacc

SEQ ID NO: 631715 - RNA, 22 nt, Human
aaggaagaagacucuuuacucc

SEQ ID NO: 631716 - RNA, 22 nt, Human
ccucuuugagauucaguuuucc

SEQ ID NO: 631717 - RNA, 22 nt, Human
gggauuugugggauggccagug

SEQ ID NO: 631718 - RNA, 22 nt, Human
cagcuuugccaaguaaggucuu

SEQ ID NO: 631719 - RNA, 22 nt, Human
aaggcaauaguauuaaacugga

SEQ ID NO: 631720 - RNA, 22 nt, Human
acugcugauuuuaggacuguua

SEQ ID NO: 631721 - RNA, 22 nt, Human
gggcacugcuuugcucugucac

SEQ ID NO: 631722 - RNA, 22 nt, Human
ucuuccagcuguaggaccuagg

SEQ ID NO: 631723 - RNA, 22 nt, Human
uucuucuccgaggagggcuggu

SEQ ID NO: 631724 - RNA, 22 nt, Human
agaagcugagaaugaauuaaga

SEQ ID NO: 631725 - RNA, 22 nt, Human
uuaugcuucccugaggaucuua

SEQ ID NO: 631726 - RNA, 22 nt, Human
acagcauccuucuaaaguagcu

SEQ ID NO: 631727 - RNA, 22 nt, Human
ugcauuugcaauggguacacaa

SEQ ID NO: 631728 - RNA, 21 nt, Human
uucacaguggauaacuuucug

SEQ ID NO: 631729 - RNA, 22 nt, Human
ugcccacugugucaaagaaaua

SEQ ID NO: 631730 - RNA, 22 nt, Human
ccaggccagcgcuggcuggagg

SEQ ID NO: 631731 - RNA, 22 nt, Human
ucacaucucucauugccucugc

SEQ ID NO: 631732 - RNA, 22 nt, Human
ugcuucagcacuuugagagccu

SEQ ID NO: 631733 - RNA, 22 nt, Human
gggagcuccacugccucucauu

SEQ ID NO: 631734 - RNA, 22 nt, Human
aagggcugcuguagaagcagag

SEQ ID NO: 631735 - RNA, 22 nt, Human
aauuuguggccacauuguggaa

SEQ ID NO: 631736 - RNA, 22 nt, Human
cccuggagucagguuggccugg

SEQ ID NO: 631737 - RNA, 22 nt, Human
ccaggcuggagugcaguagugu

SEQ ID NO: 631738 - RNA, 21 nt, Human
gcugccugccccucgggggcu

SEQ ID NO: 631739 - RNA, 22 nt, Human
ccagaggucucucuauacuggg

SEQ ID NO: 631740 - RNA, 22 nt, Human
augcagcugugggcaagaaaug

SEQ ID NO: 631741 - RNA, 22 nt, Human
uaaugucagcauaguuuauuuu

SEQ ID NO: 631742 - RNA, 22 nt, Human
auggcucagcgccuuucugugg

SEQ ID NO: 631743 - RNA, 22 nt, Human
gaguauauuucucucucuuaag

SEQ ID NO: 631744 - RNA, 22 nt, Human
gcagggaccugccacugcuguc

SEQ ID NO: 631745 - RNA, 22 nt, Human
augcuuccagauugguaggggu

SEQ ID NO: 631746 - RNA, 22 nt, Human
cagagcccugugugccauguga

SEQ ID NO: 631747 - RNA, 19 nt, Human
uugcagcaaaguuaggacc

SEQ ID NO: 631748 - RNA, 22 nt, Human
caacugaaaagauucuacgcag

SEQ ID NO: 631749 - RNA, 22 nt, Human
agcuguggaguaggggguugga

SEQ ID NO: 631750 - RNA, 22 nt, Human
uugcauaugaagcugacuuaaa

SEQ ID NO: 631751 - RNA, 22 nt, Human
uuucugacacaucaguuguaaa

SEQ ID NO: 631752 - RNA, 22 nt, Human
gagggugcaggcaagagcaaaa

SEQ ID NO: 631753 - RNA, 22 nt, Human
gggucuccuaauggaggaugac

SEQ ID NO: 631754 - RNA, 22 nt, Human
cucucccuaugccucccaggag

SEQ ID NO: 631755 - RNA, 22 nt, Human
accagagaugucuaauaggggc

SEQ ID NO: 631756 - RNA, 22 nt, Human
gacaguguuacaauuuaaugga

SEQ ID NO: 631757 - RNA, 22 nt, Human
uucucuggccugaggcgaggcc

SEQ ID NO: 631758 - RNA, 22 nt, Human
uuuauucucuaguuggucagau

SEQ ID NO: 631759 - RNA, 22 nt, Human
cuggagaaguacugagacauuu

SEQ ID NO: 631760 - RNA, 22 nt, Human
ucugggaaacacugcaucccca

SEQ ID NO: 631761 - RNA, 22 nt, Human
gcucccagggacacuggccacu

SEQ ID NO: 631762 - RNA, 22 nt, Human
agguagggaagaaggcaugaaa

SEQ ID NO: 631763 - RNA, 22 nt, Human
ucauauuuauauguuggcacag

SEQ ID NO: 631764 - RNA, 22 nt, Human
cucagggagguccugugcugaa

SEQ ID NO: 631765 - RNA, 22 nt, Human
cagucuccugggggcuguuguu

SEQ ID NO: 631766 - RNA, 22 nt, Human
cacuagaaagguacagauuaug

SEQ ID NO: 631767 - RNA, 22 nt, Human
gggcuccaaaauccuguagccu

SEQ ID NO: 631768 - RNA, 22 nt, Human
ugccaucucuuccucgugcugc

SEQ ID NO: 631769 - RNA, 22 nt, Human
gaugggguccuugaccuggcca

SEQ ID NO: 631770 - RNA, 22 nt, Human
augggcugggaauacacagggg

SEQ ID NO: 631771 - RNA, 22 nt, Human
uucauucuugucuuuguauagu

SEQ ID NO: 631772 - RNA, 22 nt, Human
ucacauuuuccuugguaucugu

SEQ ID NO: 631773 - RNA, 22 nt, Human
ucugcaggaaaaaagugccugg

SEQ ID NO: 631774 - RNA, 22 nt, Human
ugaggauuuaaugggacucauu

SEQ ID NO: 631775 - RNA, 22 nt, Human
agcagcaucuucuaaguaaggc

SEQ ID NO: 631776 - RNA, 22 nt, Human
ggagcuggcagcgcaacccaga

SEQ ID NO: 631777 - RNA, 22 nt, Human
aguggcucuccaagaagucaca

SEQ ID NO: 631778 - RNA, 22 nt, Human
aagucacacuagacaacugagg

SEQ ID NO: 631779 - RNA, 22 nt, Human
ccuggcugcugucacugaccau

SEQ ID NO: 631780 - RNA, 23 nt, Human
gcccugcugggaccuccugcuac

SEQ ID NO: 631781 - RNA, 22 nt, Human
ccucagaccccugcugagcuuc

SEQ ID NO: 631782 - RNA, 22 nt, Human
ucucagcaacgauccggaguaa

SEQ ID NO: 631783 - RNA, 20 nt, Human
ugugugaauuagggcauguu

SEQ ID NO: 631784 - RNA, 22 nt, Human
ggagauaguccaggugaaggga

SEQ ID NO: 631785 - RNA, 22 nt, Human
cuugagaacaggguuagguaac

SEQ ID NO: 631786 - RNA, 22 nt, Human
aagcucugcucagcagacuagg

SEQ ID NO: 631787 - RNA, 22 nt, Human
uugcuuuaccauuugaucucua

SEQ ID NO: 631788 - RNA, 22 nt, Human
guggagcccugccuugcucaug

SEQ ID NO: 631789 - RNA, 22 nt, Human
cucuccagguuagagcacuuau

SEQ ID NO: 631790 - RNA, 22 nt, Human
gugagcagcucaggguggucuc

SEQ ID NO: 631791 - RNA, 22 nt, Human
cugagggucaacuugauuguau

SEQ ID NO: 631792 - RNA, 22 nt, Human
agaaggggagaagcuaccagga

SEQ ID NO: 631793 - RNA, 22 nt, Human
uucaaaugguuagacuguuagc

SEQ ID NO: 631794 - RNA, 20 nt, Human
uacaggaccuucuuuguauc

SEQ ID NO: 631795 - RNA, 22 nt, Human
auguuucaggcgaacuaacaug

SEQ ID NO: 631796 - RNA, 22 nt, Human
gccuguuggguaacagaguuca

SEQ ID NO: 631797 - RNA, 23 nt, Human
uccaagaaguagggccuggacuu

SEQ ID NO: 631798 - RNA, 22 nt, Human
aaaucaguucucccuuucuuca

SEQ ID NO: 631799 - RNA, 22 nt, Human
cuguguucagugcuacugaguu

SEQ ID NO: 631800 - RNA, 22 nt, Human
caagaagcuuucccugcuugca

SEQ ID NO: 631801 - RNA, 22 nt, Human
auaaaggauaauccauuagacu

SEQ ID NO: 631802 - RNA, 22 nt, Human
ugggcucucuggcaggaaggcu

SEQ ID NO: 631803 - RNA, 22 nt, Human
ggagagguuauccguguuaugu

SEQ ID NO: 631804 - RNA, 22 nt, Human
caaguuacauuagaaaucaugc

SEQ ID NO: 631805 - RNA, 22 nt, Human
cugcuuuaacagaugauggugu

SEQ ID NO: 631806 - RNA, 22 nt, Human
uuuccuaguucuaagaaaugua

SEQ ID NO: 631807 - RNA, 22 nt, Human
cuggcagcauuaacagagagca

SEQ ID NO: 631808 - RNA, 22 nt, Human
ucugcugaauggagccaaccuc

SEQ ID NO: 631809 - RNA, 22 nt, Human
acugcagccuagggaccacagu

SEQ ID NO: 631810 - RNA, 22 nt, Human
cugaggcaggauggccuggcug

SEQ ID NO: 631811 - RNA, 21 nt, Human
ccagaugcaaaugcagacauu

SEQ ID NO: 631812 - RNA, 22 nt, Human
uaccauuucauucuuuccucau

SEQ ID NO: 631813 - RNA, 22 nt, Human
uaauuucuaauucauuuucagu

SEQ ID NO: 631814 - RNA, 22 nt, Human
ggacagcauaucagcagggcag

SEQ ID NO: 631815 - RNA, 20 nt, Human
cugggcagguguuugaucuc

SEQ ID NO: 631816 - RNA, 22 nt, Human
cuguggcuguauuuggccagag

SEQ ID NO: 631817 - RNA, 22 nt, Human
gggagaaggagcuaguucuuga

SEQ ID NO: 631818 - RNA, 20 nt, Human
cccugcagccaugggagugg

SEQ ID NO: 631819 - RNA, 22 nt, Human
cagucacuuacaaaaauauaau

SEQ ID NO: 631820 - RNA, 22 nt, Human
ucugggcucugcgaagcccuuc

SEQ ID NO: 631821 - RNA, 22 nt, Human
uagugcuuauuacugugcuguc

SEQ ID NO: 631822 - RNA, 22 nt, Human
aauuucaaugcacucaugguug

SEQ ID NO: 631823 - RNA, 22 nt, Human
augcacuucaagcaucucucug

SEQ ID NO: 631824 - RNA, 19 nt, Human
uugagcagugcuuagcacc

SEQ ID NO: 631825 - RNA, 22 nt, Human
aagauucugucaguuaggagga

SEQ ID NO: 631826 - RNA, 22 nt, Human
aggcaugaugugcaguggcaaa

SEQ ID NO: 631827 - RNA, 22 nt, Human
gcugugugcuaggauauguuuu

SEQ ID NO: 631828 - RNA, 22 nt, Human
uccuguuuccaauuuguugggu

SEQ ID NO: 631829 - RNA, 22 nt, Human
uucuucugagagaaaaagcuca

SEQ ID NO: 631830 - RNA, 22 nt, Human
uuucagacuguacuuugggguu

SEQ ID NO: 631831 - RNA, 22 nt, Human
ugggaggcccaggccuggcagg

SEQ ID NO: 631832 - RNA, 22 nt, Human
uuugacaugaaguagcuuauaa

SEQ ID NO: 631833 - RNA, 22 nt, Human
cagcacaggccugucuuugucu

SEQ ID NO: 631834 - RNA, 22 nt, Human
cagcauggacccaucgcugagu

SEQ ID NO: 631835 - RNA, 22 nt, Human
aauauggcuccauuccuuuagg

SEQ ID NO: 631836 - RNA, 22 nt, Human
uguguucaaucaccaaagguau

SEQ ID NO: 631837 - RNA, 22 nt, Human
uauggguauaaacagguccuaa

SEQ ID NO: 631838 - RNA, 22 nt, Human
ugucuccauagaguagcuugau

SEQ ID NO: 631839 - RNA, 22 nt, Human
guguuuaacaucugguuuauac

SEQ ID NO: 631840 - RNA, 22 nt, Human
ugucccuggagcuucugucccc

SEQ ID NO: 631841 - RNA, 22 nt, Human
uacaugcacaugaacaugugug

SEQ ID NO: 631842 - RNA, 22 nt, Human
cucuuugugcuauuaugauccu

SEQ ID NO: 631843 - RNA, 22 nt, Human
uaagauaaggaacauucuguga

SEQ ID NO: 631844 - RNA, 22 nt, Human
uggcuggauaucaggcaagggg

SEQ ID NO: 631845 - RNA, 23 nt, Human
uuccaagugcuuuacuuaauccu

SEQ ID NO: 631846 - RNA, 22 nt, Human
cacccacauggaaauucacagu

SEQ ID NO: 631847 - RNA, 22 nt, Human
cuucacugaguagucuagacuc

SEQ ID NO: 631848 - RNA, 22 nt, Human
cuucugggauuaauuuuuccug

SEQ ID NO: 631849 - RNA, 22 nt, Human
aaacauugaccucauccuggca

SEQ ID NO: 631850 - RNA, 22 nt, Human
ucaauagauuagguauuagauu

SEQ ID NO: 631851 - RNA, 22 nt, Human
ucagugaaguaauggugagaga

SEQ ID NO: 631852 - RNA, 22 nt, Human
ucugaggaaagagagugggaug

SEQ ID NO: 631853 - RNA, 22 nt, Human
agucagaguucuuggggagaca

SEQ ID NO: 631854 - RNA, 22 nt, Human
cacccauguuucccucugucuu

SEQ ID NO: 631855 - RNA, 22 nt, Human
uauacacaaggugugcauuugu

SEQ ID NO: 631856 - RNA, 22 nt, Human
uuagcuuuugagaaugauuucu

SEQ ID NO: 631857 - RNA, 18 nt, Human
cccagcuuagcgccccuc

SEQ ID NO: 631858 - RNA, 22 nt, Human
uugucugaaagaucauuacauu

SEQ ID NO: 631859 - RNA, 22 nt, Human
guucuucagauuccauuucagu

SEQ ID NO: 631860 - RNA, 22 nt, Human
uccuggcccacuccuagcuucu

SEQ ID NO: 631861 - RNA, 22 nt, Human
auccuugagaaaauaaaugacc

SEQ ID NO: 631862 - RNA, 22 nt, Human
cacuuuaugggaagcaaaaauu

SEQ ID NO: 631863 - RNA, 20 nt, Human
accuggcucucaggagcaac

SEQ ID NO: 631864 - RNA, 22 nt, Human
ccugccuucccagcuuggcuuu

SEQ ID NO: 631865 - RNA, 22 nt, Human
gcccagagagaugcuguagacc

SEQ ID NO: 631866 - RNA, 22 nt, Human
ucaagcaggguagcaagcuggu

SEQ ID NO: 631867 - RNA, 22 nt, Human
gucugaaacgcauuguuaucga

SEQ ID NO: 631868 - RNA, 22 nt, Human
aacuguucuucauuuucaguau

SEQ ID NO: 631869 - RNA, 22 nt, Human
acagagcauauaaagugcuuug

SEQ ID NO: 631870 - RNA, 22 nt, Human
auauagaaggugcuauuuacau

SEQ ID NO: 631871 - RNA, 22 nt, Human
ugugggcaggcccgggucugag

SEQ ID NO: 631872 - RNA, 22 nt, Human
accugguaaccugccugacuaa

SEQ ID NO: 631873 - RNA, 22 nt, Human
gagggcaguagccucguacccu

SEQ ID NO: 631874 - RNA, 22 nt, Human
uuucaguuacugcuauaucauu

SEQ ID NO: 631875 - RNA, 22 nt, Human
uuugcaauuugugcugcaaaug

SEQ ID NO: 631876 - RNA, 22 nt, Human
ccugcagcuuugccuccugaac

SEQ ID NO: 631877 - RNA, 22 nt, Human
gcaggccacugucuccucuggg

SEQ ID NO: 631878 - RNA, 22 nt, Human
agcaggagcauuuccaugauuc

SEQ ID NO: 631879 - RNA, 22 nt, Human
augaccaguguugcuggccccg

SEQ ID NO: 631880 - RNA, 22 nt, Human
gcagauggcucagacacugggg

SEQ ID NO: 631881 - RNA, 22 nt, Human
uaccuuggaggccaagcaguuu

SEQ ID NO: 631882 - RNA, 18 nt, Human
ugagcagaguaaggcuuu

SEQ ID NO: 631883 - RNA, 22 nt, Human
acuuauuuauucauucagcuca

SEQ ID NO: 631884 - RNA, 22 nt, Human
gggcaguggguggcugcagccu

SEQ ID NO: 631885 - RNA, 23 nt, Human
aggcauggcauggaugguggcuc

SEQ ID NO: 631886 - RNA, 22 nt, Human
aacaaaacauuugucuuguuuc

SEQ ID NO: 631887 - RNA, 22 nt, Human
uaggacaugcuacauaaauagg

SEQ ID NO: 631888 - RNA, 22 nt, Human
augaacaagagagggaagauuc

SEQ ID NO: 631889 - RNA, 22 nt, Human
aggaaucccgcaccagcugcug

SEQ ID NO: 631890 - RNA, 22 nt, Human
cagcaucuuucucuucuggagu

SEQ ID NO: 631891 - RNA, 22 nt, Human
caggcuccuuaucuuacaacuu

SEQ ID NO: 631892 - RNA, 23 nt, Human
gggagaauaugaggaugauggug

SEQ ID NO: 631893 - RNA, 22 nt, Human
gcagcagggugccagcuuugca

SEQ ID NO: 631894 - RNA, 22 nt, Human
acaaagugcacaagaugagaac

SEQ ID NO: 631895 - RNA, 22 nt, Human
acagagggucugggcacaggac

SEQ ID NO: 631896 - RNA, 22 nt, Human
ugucugggauguuggcagccac

SEQ ID NO: 631897 - RNA, 22 nt, Human
cugggccagauccagccucaca

SEQ ID NO: 631898 - RNA, 22 nt, Human
cagcaauaacucaaagccauuu

SEQ ID NO: 631899 - RNA, 22 nt, Human
ugucauuuauucucuuauucua

SEQ ID NO: 631900 - RNA, 22 nt, Human
gaguccaggcucagaaacccgu

SEQ ID NO: 631901 - RNA, 22 nt, Human
gcaccagccugagccucuugca

SEQ ID NO: 631902 - RNA, 22 nt, Human
uugcuuccuugagcuggucuga

SEQ ID NO: 631903 - RNA, 22 nt, Human
aagacagagacucugcaacagg

SEQ ID NO: 631904 - RNA, 22 nt, Human
aagcuggcaaacaagcaucauu

SEQ ID NO: 631905 - RNA, 23 nt, Human
gaguggggagaaauugguuaaac

SEQ ID NO: 631906 - RNA, 22 nt, Human
guguccugcauuggcucugccc

SEQ ID NO: 631907 - RNA, 18 nt, Human
guucccagauggugcuga

SEQ ID NO: 631908 - RNA, 22 nt, Human
agccagugacauacgauuggga

SEQ ID NO: 631909 - RNA, 22 nt, Human
uggggguccuccucugcuuaag

SEQ ID NO: 631910 - RNA, 22 nt, Human
ucaaaggaaacacaagcuucug

SEQ ID NO: 631911 - RNA, 22 nt, Human
uagggcuuugcucauccuaggu

SEQ ID NO: 631912 - RNA, 22 nt, Human
gcaggggcggcuggguuuccag

SEQ ID NO: 631913 - RNA, 22 nt, Human
uuuuacaagcugagucguuaaa

SEQ ID NO: 631914 - RNA, 22 nt, Human
uuaacaaaguaacgggaaaaga

SEQ ID NO: 631915 - RNA, 22 nt, Human
cucagagagugaauuccugccu

SEQ ID NO: 631916 - RNA, 19 nt, Human
aaauacagcagcuguuucc

SEQ ID NO: 631917 - RNA, 22 nt, Human
ucuuuacaguccucugucaauc

SEQ ID NO: 631918 - RNA, 22 nt, Human
uccaagggcagccauagaacuu

SEQ ID NO: 631919 - RNA, 22 nt, Human
ucagucucuggggcuucuguuu

SEQ ID NO: 631920 - RNA, 22 nt, Human
cacagaacaccaaagaaccuuc

SEQ ID NO: 631921 - RNA, 22 nt, Human
cauugcugcuuccaggcacagg

SEQ ID NO: 631922 - RNA, 22 nt, Human
ccugggagugucagacuugcuu

SEQ ID NO: 631923 - RNA, 22 nt, Human
ccucuggacuugggacagugag

SEQ ID NO: 631924 - RNA, 22 nt, Human
aagagcauuuuguaaaauccuu

SEQ ID NO: 631925 - RNA, 22 nt, Human
uuugagaagauaggggaauacu

SEQ ID NO: 631926 - RNA, 22 nt, Human
ucagguccuuuugguguauauu

SEQ ID NO: 631927 - RNA, 22 nt, Human
uagagcuggaaaacugcaggua

SEQ ID NO: 631928 - RNA, 22 nt, Human
gcagucaguaaggcagccagaa

SEQ ID NO: 631929 - RNA, 21 nt, Human
guccagagagccggcuccuga

SEQ ID NO: 631930 - RNA, 22 nt, Human
ugugugucagcccaagggccuu

SEQ ID NO: 631931 - RNA, 22 nt, Human
uuguacaaguuuugagcuuaag

SEQ ID NO: 631932 - RNA, 20 nt, Human
gaggaugcagacagagggca

SEQ ID NO: 631933 - RNA, 22 nt, Human
uucaucugcuucuuccuauucc

SEQ ID NO: 631934 - RNA, 18 nt, Human
cacauuuaccuggcuccc

SEQ ID NO: 631935 - RNA, 22 nt, Human
gugccucccgggaccaugcacu

SEQ ID NO: 631936 - RNA, 22 nt, Human
caggaaaaucugcccacacaag

SEQ ID NO: 631937 - RNA, 22 nt, Human
caucuuuugguaggagccgggc

SEQ ID NO: 631938 - RNA, 22 nt, Human
cuugugcaauugacauugaauc

SEQ ID NO: 631939 - RNA, 22 nt, Human
guacaauaacuagucuuauagu

SEQ ID NO: 631940 - RNA, 22 nt, Human
gugggccagcuuuucuccuggg

SEQ ID NO: 631941 - RNA, 22 nt, Human
auaucauuauguuaugagcaca

SEQ ID NO: 631942 - RNA, 22 nt, Human
aggucuggaaacagcagggaga

SEQ ID NO: 631943 - RNA, 22 nt, Human
agggauguaaauucuucuucuu

SEQ ID NO: 631944 - RNA, 22 nt, Human
uuucuucagccuucacaaccug

SEQ ID NO: 631945 - RNA, 22 nt, Human
guggcagggugcucaucaugca

SEQ ID NO: 631946 - RNA, 22 nt, Human
gucuuuggaggcacuguugagu

SEQ ID NO: 631947 - RNA, 22 nt, Human
ugcagcauugcaaagcagucuu

SEQ ID NO: 631948 - RNA, 22 nt, Human
aggcccugggcaguucuguagc

SEQ ID NO: 631949 - RNA, 22 nt, Human
aacacagucaguuccuggauca

SEQ ID NO: 631950 - RNA, 20 nt, Human
ggagggcagcugagaguugg

SEQ ID NO: 631951 - RNA, 22 nt, Human
augcaaucauauggcauacagc

SEQ ID NO: 631952 - RNA, 22 nt, Human
auucugggucugggugugauca

SEQ ID NO: 631953 - RNA, 20 nt, Human
gccuggaggcagagauaaag

SEQ ID NO: 631954 - RNA, 22 nt, Human
uggagcugagcaccuccagggc

SEQ ID NO: 631955 - RNA, 22 nt, Human
agccaucacuugagaaucuauu

SEQ ID NO: 631956 - RNA, 22 nt, Human
uaaugucaaggugauagauuug

SEQ ID NO: 631957 - RNA, 22 nt, Human
aagguaauauuuuucucucuaa

SEQ ID NO: 631958 - RNA, 20 nt, Human
ugcugcaguuucaugggacu

SEQ ID NO: 631959 - RNA, 22 nt, Human
ucuuagaaaaaugguauguuuu

SEQ ID NO: 631960 - RNA, 22 nt, Human
gccuggggcaugcagcugauac

SEQ ID NO: 631961 - RNA, 22 nt, Human
ucauucagguugggcaaguguc

SEQ ID NO: 631962 - RNA, 20 nt, Human
ccuccuggucaggugugcag

SEQ ID NO: 631963 - RNA, 22 nt, Human
uucuguuuugcacagacuugaa

SEQ ID NO: 631964 - RNA, 22 nt, Human
aagccaauguugccuggguuuc

SEQ ID NO: 631965 - RNA, 22 nt, Human
ccuuuuucaauauagaauugca

SEQ ID NO: 631966 - RNA, 22 nt, Human
agaagauuuagguugacgcuau

SEQ ID NO: 631967 - RNA, 20 nt, Human
caccagcagcagcugccacc

SEQ ID NO: 631968 - RNA, 21 nt, Human
ugauuuccagaaaauuggccc

SEQ ID NO: 631969 - RNA, 22 nt, Human
ugucaugguagcugaaggaugu

SEQ ID NO: 631970 - RNA, 18 nt, Human
ugcaucauuuauggguca

SEQ ID NO: 631971 - RNA, 22 nt, Human
uacauacaguggaugcuuuagg

SEQ ID NO: 631972 - RNA, 22 nt, Human
cuccugggggacagcggcaggg

SEQ ID NO: 631973 - RNA, 22 nt, Human
gcuguggcugaccaccaggggg

SEQ ID NO: 631974 - RNA, 22 nt, Human
aggguggcaccuggaagggaug

SEQ ID NO: 631975 - RNA, 22 nt, Human
uagcaaauacaugauguaauuu

SEQ ID NO: 631976 - RNA, 22 nt, Human
gagcacugaggaaagcugguua

SEQ ID NO: 631977 - RNA, 22 nt, Human
ccaggccauucccagaguugcu

SEQ ID NO: 631978 - RNA, 22 nt, Human
gguccccagcaguggcugcuuc

SEQ ID NO: 631979 - RNA, 22 nt, Human
cagagccucagaauccugugga

SEQ ID NO: 631980 - RNA, 22 nt, Human
ucaaaaauggucuuugagcugc

SEQ ID NO: 631981 - RNA, 22 nt, Human
ugccacagaggugaagcccacu

SEQ ID NO: 631982 - RNA, 22 nt, Human
ugaguauccuauaugguguaag

SEQ ID NO: 631983 - RNA, 22 nt, Human
uguuccugacggccaaagaggu

SEQ ID NO: 631984 - RNA, 22 nt, Human
aaggccacugaagaaaucacaa

SEQ ID NO: 631985 - RNA, 22 nt, Human
augugcuucauaaucuucucau

SEQ ID NO: 631986 - RNA, 22 nt, Human
ccacagggacuguuaaaacccu

SEQ ID NO: 631987 - RNA, 22 nt, Human
agaugaagauaucugcaggggc

SEQ ID NO: 631988 - RNA, 22 nt, Human
guguccuuuugaggguccacag

SEQ ID NO: 631989 - RNA, 22 nt, Human
agcauacuugacacuucucuau

SEQ ID NO: 631990 - RNA, 22 nt, Human
accugagggcccaaacuuggua

SEQ ID NO: 631991 - RNA, 19 nt, Human
aguguguacugaaagcacu

SEQ ID NO: 631992 - RNA, 22 nt, Human
gggcagugacaaaggggaugaa

SEQ ID NO: 631993 - RNA, 22 nt, Human
ucugcucugagagggccaucag

SEQ ID NO: 631994 - RNA, 22 nt, Human
ugcauugaucauauccuuccug

SEQ ID NO: 631995 - RNA, 22 nt, Human
acuggcuguggccacggcugcu

SEQ ID NO: 631996 - RNA, 22 nt, Human
cugucaccugccagcauaccca

SEQ ID NO: 631997 - RNA, 22 nt, Human
acucuggcagcagaaccagugu

SEQ ID NO: 631998 - RNA, 22 nt, Human
gcucccaggaagagaagggcca

SEQ ID NO: 631999 - RNA, 22 nt, Human
uugggaaggcguggaagcagaa

SEQ ID NO: 632000 - RNA, 22 nt, Human
agagcuccucacuucggguuca

SEQ ID NO: 632001 - RNA, 22 nt, Human
uuccuuaggcuguuugcagugc

SEQ ID NO: 632002 - RNA, 19 nt, Human
ccugugcuaggagcugacc

SEQ ID NO: 632003 - RNA, 22 nt, Human
agacuccaggagggaggcugcu

SEQ ID NO: 632004 - RNA, 22 nt, Human
gagcuggaagucuguggucaga

SEQ ID NO: 632005 - RNA, 22 nt, Human
gaaccucuuuagugcauccuuc

SEQ ID NO: 632006 - RNA, 22 nt, Human
ggcccagaauacuuuguaaaau

SEQ ID NO: 632007 - RNA, 22 nt, Human
ggaggggagauguuugggcuca

SEQ ID NO: 632008 - RNA, 22 nt, Human
uucucugaaggccaugcucacu

SEQ ID NO: 632009 - RNA, 22 nt, Human
ucccuggcuguguucaggugcg

SEQ ID NO: 632010 - RNA, 22 nt, Human
cagucacauggaugauggauag

SEQ ID NO: 632011 - RNA, 22 nt, Human
acaggcaagaggaaagcaagua

SEQ ID NO: 632012 - RNA, 22 nt, Human
acugagguaauugugaggauua

SEQ ID NO: 632013 - RNA, 22 nt, Human
guggccagaggucccauguguc

SEQ ID NO: 632014 - RNA, 22 nt, Human
cauccauaugaggcacauuggu

SEQ ID NO: 632015 - RNA, 22 nt, Human
gaguggcuguguacaugcccag

SEQ ID NO: 632016 - RNA, 22 nt, Human
ucugccugugguggaggaaguu

SEQ ID NO: 632017 - RNA, 19 nt, Human
ggacuugguuuccaggcuc

SEQ ID NO: 632018 - RNA, 22 nt, Human
uugucugcuccucccagccuca

SEQ ID NO: 632019 - RNA, 22 nt, Human
gaaggcugucagagaggagggc

SEQ ID NO: 632020 - RNA, 22 nt, Human
caugucuuccuugcacacacac

SEQ ID NO: 632021 - RNA, 22 nt, Human
gcagcagaaggccaaggggagc

SEQ ID NO: 632022 - RNA, 23 nt, Human
cugcagagaacugagggacagcc

SEQ ID NO: 632023 - RNA, 18 nt, Human
acaggcuauugcaggaga

SEQ ID NO: 632024 - RNA, 22 nt, Human
uccagccaggauggcccaggga

SEQ ID NO: 632025 - RNA, 17 nt, Human
ggcuggaggggacccgg

SEQ ID NO: 632026 - RNA, 22 nt, Human
uguggcaggcuaggcuuuuugg

SEQ ID NO: 632027 - RNA, 22 nt, Human
ggcauguuucaucacaucaaga

SEQ ID NO: 632028 - RNA, 22 nt, Human
cuacauuuuucaccgagccucu

SEQ ID NO: 632029 - RNA, 22 nt, Human
cugugcuugcggguguggagcc

SEQ ID NO: 632030 - RNA, 22 nt, Human
uuacaacagacacauauucuaa

SEQ ID NO: 632031 - RNA, 22 nt, Human
accagacacugugaagacaggc

SEQ ID NO: 632032 - RNA, 22 nt, Human
augaaacacacacgcgcauacu

SEQ ID NO: 632033 - RNA, 22 nt, Human
ggcaccugguaagugcucagua

SEQ ID NO: 632034 - RNA, 21 nt, Human
ugcauuccuccauccaacagg

SEQ ID NO: 632035 - RNA, 22 nt, Human
agaacaggaggaagccagcucc

SEQ ID NO: 632036 - RNA, 22 nt, Human
cuguccugaguucuuggagguc

SEQ ID NO: 632037 - RNA, 22 nt, Human
cugcagcuauauuuucccacag

SEQ ID NO: 632038 - RNA, 22 nt, Human
acagcugugacuuagagaaguu

SEQ ID NO: 632039 - RNA, 22 nt, Human
ugcugucccuaagucucuucaa

SEQ ID NO: 632040 - RNA, 22 nt, Human
cuguuacacggaccuucaaauc

SEQ ID NO: 632041 - RNA, 22 nt, Human
uuugcagaugagaaaacugugg

SEQ ID NO: 632042 - RNA, 22 nt, Human
agccaccuucuccaaggccuag

SEQ ID NO: 632043 - RNA, 22 nt, Human
ugagggugcauuuagcauguag

SEQ ID NO: 632044 - RNA, 22 nt, Human
uugcuguuuaaugaugucuuau

SEQ ID NO: 632045 - RNA, 21 nt, Human
uuuguucaggggcaaaguuaa

SEQ ID NO: 632046 - RNA, 22 nt, Human
gcagaugccacuaggugaagug

SEQ ID NO: 632047 - RNA, 22 nt, Human
ucuggagcuggagggcaaggca

SEQ ID NO: 632048 - RNA, 22 nt, Human
ucuuugcaugugcuucuuggcc

SEQ ID NO: 632049 - RNA, 22 nt, Human
gaaauguacuuuaaagccaucc

SEQ ID NO: 632050 - RNA, 22 nt, Human
uuuagaaauucaucuauggccu

SEQ ID NO: 632051 - RNA, 22 nt, Human
uuuguauuccauaucaugccau

SEQ ID NO: 632052 - RNA, 22 nt, Human
gcuccuggugcuguagagauuu

SEQ ID NO: 632053 - RNA, 22 nt, Human
uugcuuuacuuugccauucguu

SEQ ID NO: 632054 - RNA, 22 nt, Human
cugagcuguuacucuguccucg

SEQ ID NO: 632055 - RNA, 22 nt, Human
ugguaaaguugauuggugcucu

SEQ ID NO: 632056 - RNA, 18 nt, Human
ucauuauuguuucuggag

SEQ ID NO: 632057 - RNA, 22 nt, Human
auucacaaugauacauaagcga

SEQ ID NO: 632058 - RNA, 22 nt, Human
cacaugagguggagaugaauga

SEQ ID NO: 632059 - RNA, 22 nt, Human
cugggacuuguagucucggcgc

SEQ ID NO: 632060 - RNA, 22 nt, Human
caguacaauuuuacaaaggacg

SEQ ID NO: 632061 - RNA, 22 nt, Human
ugugaggcgaggccagugagcu

SEQ ID NO: 632062 - RNA, 22 nt, Human
gagcagacgcugcagucuuggg

SEQ ID NO: 632063 - RNA, 22 nt, Human
acauccauuugucagcucuuga

SEQ ID NO: 632064 - RNA, 22 nt, Human
aagcugcagacccccugucuca

SEQ ID NO: 632065 - RNA, 22 nt, Human
gggcacagagaagguuuuagug

SEQ ID NO: 632066 - RNA, 22 nt, Human
guggcagaacuaugugauugcu

SEQ ID NO: 632067 - RNA, 22 nt, Human
cucagcaacccacacacggucu

SEQ ID NO: 632068 - RNA, 22 nt, Human
gcauguuuugcaacaagugacc

SEQ ID NO: 632069 - RNA, 22 nt, Human
cgaggcggcggaagugcccgua

SEQ ID NO: 632070 - RNA, 20 nt, Human
acuguuggaaguggagaaug

SEQ ID NO: 632071 - RNA, 22 nt, Human
gauggcuucacuuacauggcug

SEQ ID NO: 632072 - RNA, 22 nt, Human
auccugggcugcacccucagcc

SEQ ID NO: 632073 - RNA, 22 nt, Human
aaauacuagaauucagaguuga

SEQ ID NO: 632074 - RNA, 21 nt, Human
accaaaaccuauacuuucugu

SEQ ID NO: 632075 - RNA, 22 nt, Human
ucagugcuuauauucugagccu

SEQ ID NO: 632076 - RNA, 22 nt, Human
accuggccauccagcuggcauc

SEQ ID NO: 632077 - RNA, 22 nt, Human
cagcuuugugcaaugcagucuc

SEQ ID NO: 632078 - RNA, 22 nt, Human
ugauucaucagaauaggaguuu

SEQ ID NO: 632079 - RNA, 22 nt, Human
uugauguaaagugauucauggg

SEQ ID NO: 632080 - RNA, 22 nt, Human
uuugugugcuugguauugaaga

SEQ ID NO: 632081 - RNA, 22 nt, Human
ugcuuaaacauccagacaguau

SEQ ID NO: 632082 - RNA, 22 nt, Human
ccuggcugcauuuugcuggaug

SEQ ID NO: 632083 - RNA, 22 nt, Human
gguggagcuggaccaggagagg

SEQ ID NO: 632084 - RNA, 22 nt, Human
aagcaaggccggaaggaaacuc

SEQ ID NO: 632085 - RNA, 22 nt, Human
agagcacagccaccauuuacaa

SEQ ID NO: 632086 - RNA, 22 nt, Human
ccagagcagggcagcagggcuc

SEQ ID NO: 632087 - RNA, 22 nt, Human
aauaucucaccaugacaaagca

SEQ ID NO: 632088 - RNA, 22 nt, Human
auuugucauguauguaaaguug

SEQ ID NO: 632089 - RNA, 22 nt, Human
agaggugacauaggagaggcuc

SEQ ID NO: 632090 - RNA, 22 nt, Human
gaggcuccccaugaggccccag

SEQ ID NO: 632091 - RNA, 20 nt, Human
cacguuuuuccacuagcaaa

SEQ ID NO: 632092 - RNA, 22 nt, Human
augaauuguaaauuccuugaaa

SEQ ID NO: 632093 - RNA, 20 nt, Human
ucacaauaugagcucauaca

SEQ ID NO: 632094 - RNA, 22 nt, Human
ugggagcagcuuugcgagggag

SEQ ID NO: 632095 - RNA, 22 nt, Human
gcucugagagugggugauucug

SEQ ID NO: 632096 - RNA, 22 nt, Human
auggaauuaauaggggaauacu

SEQ ID NO: 632097 - RNA, 22 nt, Human
aagcacaugaaaaugugaagcu

SEQ ID NO: 632098 - RNA, 22 nt, Human
gacaggaagucugaaggaggga

SEQ ID NO: 632099 - RNA, 22 nt, Human
cccagcacaggcaauuccauac

SEQ ID NO: 632100 - RNA, 22 nt, Human
aucuguguaugaaaguauaacu

SEQ ID NO: 632101 - RNA, 22 nt, Human
agcucugacaaggauuuucugc

SEQ ID NO: 632102 - RNA, 22 nt, Human
cugccacuuuggagugcucaga

SEQ ID NO: 632103 - RNA, 22 nt, Human
aagaacuuccuaauauauuuuc

SEQ ID NO: 632104 - RNA, 22 nt, Human
ggccaccucugcccuaccgagu

SEQ ID NO: 632105 - RNA, 22 nt, Human
aaucucuuuggcucaaggaucc

SEQ ID NO: 632106 - RNA, 22 nt, Human
guccuucuuuucaucccugguu

SEQ ID NO: 632107 - RNA, 22 nt, Human
uggccacaguguccagcagcag

SEQ ID NO: 632108 - RNA, 22 nt, Human
ggagugggaacaaugacauggu

SEQ ID NO: 632109 - RNA, 22 nt, Human
cugccugugauuuuucucuagu

SEQ ID NO: 632110 - RNA, 22 nt, Human
uugaauaggacucagcagugau

SEQ ID NO: 632111 - RNA, 22 nt, Human
gaccuggccugcacagcccuua

SEQ ID NO: 632112 - RNA, 22 nt, Human
acacuacaaucucagaacuaua

SEQ ID NO: 632113 - RNA, 22 nt, Human
cagcucuguaaauuccuucauc

SEQ ID NO: 632114 - RNA, 22 nt, Human
uguuaugugccacacuugaggg

SEQ ID NO: 632115 - RNA, 22 nt, Human
ucagggagaggugagagccugu

SEQ ID NO: 632116 - RNA, 19 nt, Human
uggagacugagagugagca

SEQ ID NO: 632117 - RNA, 22 nt, Human
uguauacaagucguguaaacuu

SEQ ID NO: 632118 - RNA, 22 nt, Human
ccaggguugguauucaccugga

SEQ ID NO: 632119 - RNA, 22 nt, Human
aaaacccuucugcagacucuga

SEQ ID NO: 632120 - RNA, 22 nt, Human
uugcaaauauuguuuaccuuuc

SEQ ID NO: 632121 - RNA, 22 nt, Human
acugagaggugauagugacauu

SEQ ID NO: 632122 - RNA, 22 nt, Human
ccugagcagggcucugcagggc

SEQ ID NO: 632123 - RNA, 22 nt, Human
uucuucaggauacgucauccag

SEQ ID NO: 632124 - RNA, 22 nt, Human
aaauuccauuuugugacuauuc

SEQ ID NO: 632125 - RNA, 22 nt, Human
acaaagucuuuuacaacaguca

SEQ ID NO: 632126 - RNA, 22 nt, Human
uugaggccccauggaugagaac

SEQ ID NO: 632127 - RNA, 22 nt, Human
gaggcucacuuucauccucuuc

SEQ ID NO: 632128 - RNA, 22 nt, Human
cagauaaauagauagauaaacu

SEQ ID NO: 632129 - RNA, 22 nt, Human
ccugccacuguaggugacaguu

SEQ ID NO: 632130 - RNA, 18 nt, Human
ucccuucucccuugccuc

SEQ ID NO: 632131 - RNA, 22 nt, Human
gccugugguuugauuaagcauu

SEQ ID NO: 632132 - RNA, 22 nt, Human
gcucugcugagauaucugggag

SEQ ID NO: 632133 - RNA, 21 nt, Human
uggacuggugaguuuaggcug

SEQ ID NO: 632134 - RNA, 22 nt, Human
agaguccacccuggggucaggc

SEQ ID NO: 632135 - RNA, 22 nt, Human
ugggacuucaaugcaaugaggu

SEQ ID NO: 632136 - RNA, 22 nt, Human
auguuuuuggaaaugggaacau

SEQ ID NO: 632137 - RNA, 22 nt, Human
cagucuguuucugagaaacaga

SEQ ID NO: 632138 - RNA, 20 nt, Human
cagagaccaggccagguguc

SEQ ID NO: 632139 - RNA, 22 nt, Human
uagucaccuuuggcaccugcaa

SEQ ID NO: 632140 - RNA, 22 nt, Human
agcagcauccccggccuccacc

SEQ ID NO: 632141 - RNA, 22 nt, Human
accagagauggggcuucucugu

SEQ ID NO: 632142 - RNA, 16 nt, Human
guaaaggcagggaauu

SEQ ID NO: 632143 - RNA, 19 nt, Human
uuuuggaaaugugaacagc

SEQ ID NO: 632144 - RNA, 22 nt, Human
ggcuugaagggaggaaagcagg

SEQ ID NO: 632145 - RNA, 21 nt, Human
auuagaagguauuuagggccu

SEQ ID NO: 632146 - RNA, 22 nt, Human
agccacagagcaggagaccuuu

SEQ ID NO: 632147 - RNA, 22 nt, Human
ggggagcaauugcccccuuaga

SEQ ID NO: 632148 - RNA, 22 nt, Human
aacacaugccuuaagaauaagu

SEQ ID NO: 632149 - RNA, 22 nt, Human
auagacaaucccccauccuacc

SEQ ID NO: 632150 - RNA, 22 nt, Human
ucacuggauccuagcugagccu

SEQ ID NO: 632151 - RNA, 22 nt, Human
guggagagcaaauaauuggaau

SEQ ID NO: 632152 - RNA, 22 nt, Human
uuucuuaguccuagagugauuu

SEQ ID NO: 632153 - RNA, 22 nt, Human
cccagcccagcguucgaggggu

SEQ ID NO: 632154 - RNA, 22 nt, Human
ugagcagggacuuuggagucug

SEQ ID NO: 632155 - RNA, 23 nt, Human
gggugcugccuguagucaugcug

SEQ ID NO: 632156 - RNA, 22 nt, Human
cuccuccagacuuacugaaucc

SEQ ID NO: 632157 - RNA, 22 nt, Human
cagaauucgaaugagcagaauc

SEQ ID NO: 632158 - RNA, 22 nt, Human
cugaggcuaguauaaagagcau

SEQ ID NO: 632159 - RNA, 22 nt, Human
ccugccugcaccuucucugggg

SEQ ID NO: 632160 - RNA, 22 nt, Human
acagcagugucugguacugagu

SEQ ID NO: 632161 - RNA, 22 nt, Human
cagcgucucguugugggccucg

SEQ ID NO: 632162 - RNA, 22 nt, Human
aauguacaauaagacaaagagg

SEQ ID NO: 632163 - RNA, 22 nt, Human
gagcugugagggacacauugcu

SEQ ID NO: 632164 - RNA, 22 nt, Human
uauuccuggguuccagcccaga

SEQ ID NO: 632165 - RNA, 22 nt, Human
caaggcugugcaggguccauau

SEQ ID NO: 632166 - RNA, 22 nt, Human
cauucaaauuaagauuuuguua

SEQ ID NO: 632167 - RNA, 22 nt, Human
ccagcugagaaguguaaaguga

SEQ ID NO: 632168 - RNA, 22 nt, Human
gaguuaaauagcuuaggauuca

SEQ ID NO: 632169 - RNA, 19 nt, Human
ugagugggagcccagguau

SEQ ID NO: 632170 - RNA, 21 nt, Human
uuuggcuucucugcugcagcc

SEQ ID NO: 632171 - RNA, 19 nt, Human
cucuuuccauuguauuugc

SEQ ID NO: 632172 - RNA, 22 nt, Human
aggaagcuuggggcagggcuac

SEQ ID NO: 632173 - RNA, 22 nt, Human
uuccaugcaagaaguauggcuc

SEQ ID NO: 632174 - RNA, 22 nt, Human
ccaggcaccauguucuuaggac

SEQ ID NO: 632175 - RNA, 22 nt, Human
cugagaaaagcuuucuuauaca

SEQ ID NO: 632176 - RNA, 22 nt, Human
uggcagccacaucucguggauu

SEQ ID NO: 632177 - RNA, 22 nt, Human
gucugggcaccuggccugggaa

SEQ ID NO: 632178 - RNA, 22 nt, Human
ucacugaugcuuaugaaagugu

SEQ ID NO: 632179 - RNA, 22 nt, Human
uccaggcagagcaacaaaauau

SEQ ID NO: 632180 - RNA, 22 nt, Human
gagagcugaggggccuggcacu

SEQ ID NO: 632181 - RNA, 22 nt, Human
ccugggauuuccugagcacucu

SEQ ID NO: 632182 - RNA, 22 nt, Human
uuacaacagcgauuuaccuguc

SEQ ID NO: 632183 - RNA, 22 nt, Human
gauuucuugauaaguaguguga

SEQ ID NO: 632184 - RNA, 22 nt, Human
uuggaauucaaguuguagcuua

SEQ ID NO: 632185 - RNA, 22 nt, Human
cuaaaugauggauuuaaacuuu

SEQ ID NO: 632186 - RNA, 22 nt, Human
gcugggaggaucucucccuguc

SEQ ID NO: 632187 - RNA, 17 nt, Human
uucaaugauuaaugcau

SEQ ID NO: 632188 - RNA, 22 nt, Human
gacagggacucccugguuagaa

SEQ ID NO: 632189 - RNA, 22 nt, Human
aggcagaugggagcuggaaguu

SEQ ID NO: 632190 - RNA, 17 nt, Human
agaaagaggauccacag

SEQ ID NO: 632191 - RNA, 22 nt, Human
augaggcaguacacacaaagcc

SEQ ID NO: 632192 - RNA, 22 nt, Human
ggcagggaaacagcugauccca

SEQ ID NO: 632193 - RNA, 22 nt, Human
uugcauaaaagaguauaucuua

SEQ ID NO: 632194 - RNA, 22 nt, Human
uggaauguuguguauaggucag

SEQ ID NO: 632195 - RNA, 22 nt, Human
cagcagcucccauccgcugagc

SEQ ID NO: 632196 - RNA, 22 nt, Human
ucccacagugguacagcccuga

SEQ ID NO: 632197 - RNA, 20 nt, Human
acagucagggaauagaaaaa

SEQ ID NO: 632198 - RNA, 22 nt, Human
ggcuggucaggaaacuaggcuc

SEQ ID NO: 632199 - RNA, 22 nt, Human
uuguuacuguucuacauacagu

SEQ ID NO: 632200 - RNA, 22 nt, Human
auauuugucaauucacuguuca

SEQ ID NO: 632201 - RNA, 22 nt, Human
cucagggcggcgggcagcccag

SEQ ID NO: 632202 - RNA, 19 nt, Human
uuugaugagaauuuaagca

SEQ ID NO: 632203 - RNA, 22 nt, Human
auuaaggaacaaagccuuuuga

SEQ ID NO: 632204 - RNA, 22 nt, Human
gccugcaggcuguaguuuguga

SEQ ID NO: 632205 - RNA, 22 nt, Human
ucaggagcucaggcugauggaa

SEQ ID NO: 632206 - RNA, 22 nt, Human
ucacacacauuugcugucugau

SEQ ID NO: 632207 - RNA, 22 nt, Human
cuuuccuaguuggucccagcac

SEQ ID NO: 632208 - RNA, 22 nt, Human
uccugugugggcaggaugagaa

SEQ ID NO: 632209 - RNA, 22 nt, Human
guccugugcccuggguggcgcu

SEQ ID NO: 632210 - RNA, 22 nt, Human
aaggcagucugguuucaaagca

SEQ ID NO: 632211 - RNA, 22 nt, Human
ucagacauggggagagagaccu

SEQ ID NO: 632212 - RNA, 22 nt, Human
gugaacauugaggcagaaagga

SEQ ID NO: 632213 - RNA, 19 nt, Human
ucugggaagccgggcucca

SEQ ID NO: 632214 - RNA, 19 nt, Human
cugugucacauuuaugaaa

SEQ ID NO: 632215 - RNA, 22 nt, Human
gagagaacacaaagggccagcu

SEQ ID NO: 632216 - RNA, 22 nt, Human
uuugcaaaguuauuuagacuca

SEQ ID NO: 632217 - RNA, 22 nt, Human
uucuucugccucccaccugaua

SEQ ID NO: 632218 - RNA, 22 nt, Human
gguccagggaacuuugaaggau

SEQ ID NO: 632219 - RNA, 22 nt, Human
cgaggccaugcaugcugaggac

SEQ ID NO: 632220 - RNA, 22 nt, Human
agucuggaccugcugggucucc

SEQ ID NO: 632221 - RNA, 21 nt, Human
accuucaagccagaggugguc

SEQ ID NO: 632222 - RNA, 22 nt, Human
uuguguacuguugguugauauu

SEQ ID NO: 632223 - RNA, 22 nt, Human
guugccguuuguucuaccagac

SEQ ID NO: 632224 - RNA, 22 nt, Human
aaucagaaccuugggucauaac

SEQ ID NO: 632225 - RNA, 22 nt, Human
cuggaagaggaagccagcugga

SEQ ID NO: 632226 - RNA, 22 nt, Human
aaggcuggcaauauauuuguua

SEQ ID NO: 632227 - RNA, 22 nt, Human
auagcacuuauagauuuggucu

SEQ ID NO: 632228 - RNA, 22 nt, Human
aaguaucucaaaaacaguaauc

SEQ ID NO: 632229 - RNA, 22 nt, Human
uuggccuuugucaucaagauca

SEQ ID NO: 632230 - RNA, 18 nt, Human
cuggauuaagacagugcu

SEQ ID NO: 632231 - RNA, 22 nt, Human
caugcagaggugccacgaggcu

SEQ ID NO: 632232 - RNA, 18 nt, Human
gaacuuuuggcuuugugu

SEQ ID NO: 632233 - RNA, 22 nt, Human
uuucucauggaacauagcuccu

SEQ ID NO: 632234 - RNA, 22 nt, Human
gcacugggugggagaucugaau

SEQ ID NO: 632235 - RNA, 22 nt, Human
acagcaggauuuggcgauguug

SEQ ID NO: 632236 - RNA, 22 nt, Human
gaacucuugcagugaaagcuua

SEQ ID NO: 632237 - RNA, 22 nt, Human
uccacugcuacaaccucccaga

SEQ ID NO: 632238 - RNA, 22 nt, Human
aacaugugucuggcuagauugu

SEQ ID NO: 632239 - RNA, 22 nt, Human
ccagaucuaaguccaaaguacu

SEQ ID NO: 632240 - RNA, 22 nt, Human
uggcugugggauaugugacuga

SEQ ID NO: 632241 - RNA, 22 nt, Human
aaucauaauucaaauaagcuua

SEQ ID NO: 632242 - RNA, 20 nt, Human
ucagacagucgcaguucugg

SEQ ID NO: 632243 - RNA, 20 nt, Human
gcuucucagggcuucucuga

SEQ ID NO: 632244 - RNA, 21 nt, Human
cccuugccugcacuccucggc

SEQ ID NO: 632245 - RNA, 17 nt, Human
aagacaagacaaaugca

SEQ ID NO: 632246 - RNA, 22 nt, Human
cacaucagguagaccuacagag

SEQ ID NO: 632247 - RNA, 22 nt, Human
gccugagauucugcauuucuaa

SEQ ID NO: 632248 - RNA, 22 nt, Human
cacugaaccugaaccaauacuc

SEQ ID NO: 632249 - RNA, 22 nt, Human
gacccagaaggagugcccuaga

SEQ ID NO: 632250 - RNA, 22 nt, Human
aaacuagaaaucagcaagauag

SEQ ID NO: 632251 - RNA, 22 nt, Human
ggaaaaggccauuguuucucug

SEQ ID NO: 632252 - RNA, 22 nt, Human
ucagaggauugccucagcgagc

SEQ ID NO: 632253 - RNA, 22 nt, Human
guuacagucaggagauauuuug

SEQ ID NO: 632254 - RNA, 22 nt, Human
uucugucucccugauguagagc

SEQ ID NO: 632255 - RNA, 22 nt, Human
guguuaaacauguucacagcau

SEQ ID NO: 632256 - RNA, 22 nt, Human
caggagugaaaugaggcccagg

SEQ ID NO: 632257 - RNA, 22 nt, Human
aaacagcaggaacaucuugcca

SEQ ID NO: 632258 - RNA, 22 nt, Human
uccuggccaaguagauguggcg

SEQ ID NO: 632259 - RNA, 22 nt, Human
uuccugguuggauucugauuaa

SEQ ID NO: 632260 - RNA, 22 nt, Human
gcacucaggacucucaucagua

SEQ ID NO: 632261 - RNA, 22 nt, Human
gaaacagcacguuuggagagau

SEQ ID NO: 632262 - RNA, 22 nt, Human
ugcugugcuggcggcagaggcc

SEQ ID NO: 632263 - RNA, 22 nt, Human
gccuagugcacuggcagggcuc

SEQ ID NO: 632264 - RNA, 22 nt, Human
ugagccaggguuuccggcugcu

SEQ ID NO: 632265 - RNA, 22 nt, Human
auuacaauaauacaugcucauu

SEQ ID NO: 632266 - RNA, 22 nt, Human
cacagaugagcugaauagcuuu

SEQ ID NO: 632267 - RNA, 22 nt, Human
ccucagggucucucacagcacc

SEQ ID NO: 632268 - RNA, 22 nt, Human
gccugcagccucagagaauuuu

SEQ ID NO: 632269 - RNA, 22 nt, Human
cagcacagggcuugagaggugu

SEQ ID NO: 632270 - RNA, 22 nt, Human
cuggccucacagaggcuaagcc

SEQ ID NO: 632271 - RNA, 21 nt, Human
uucugggaaaugagcuggggc

SEQ ID NO: 632272 - RNA, 22 nt, Human
cagcuucucagaaagcugaggu

SEQ ID NO: 632273 - RNA, 22 nt, Human
augaaugauuuuauguaaauga

SEQ ID NO: 632274 - RNA, 22 nt, Human
guccugguagcuggcuugguca

SEQ ID NO: 632275 - RNA, 22 nt, Human
guggaggucccgggcaggagca

SEQ ID NO: 632276 - RNA, 22 nt, Human
uaggucuggcagaagaaaaaug

SEQ ID NO: 632277 - RNA, 23 nt, Human
augaagacccgugguguccccac

SEQ ID NO: 632278 - RNA, 22 nt, Human
ccugcccagcuucaccucaggc

SEQ ID NO: 632279 - RNA, 22 nt, Human
uuaguuagagcccuauguuagg

SEQ ID NO: 632280 - RNA, 22 nt, Human
aacacuuuuuauauauuguauc

SEQ ID NO: 632281 - RNA, 22 nt, Human
ggggacagucgaucuagugauu

SEQ ID NO: 632282 - RNA, 22 nt, Human
gcuccagaguguggcaucuggg

SEQ ID NO: 632283 - RNA, 22 nt, Human
guuauaaaaugcacaguuguuu

SEQ ID NO: 632284 - RNA, 23 nt, Human
cugaggucugcaauucuaguagu

SEQ ID NO: 632285 - RNA, 22 nt, Human
cuuauaaaguccaucugaacaa

SEQ ID NO: 632286 - RNA, 22 nt, Human
aauaacuuguaugguuauucca

SEQ ID NO: 632287 - RNA, 22 nt, Human
aagcacuggguauagcaaugau

SEQ ID NO: 632288 - RNA, 22 nt, Human
acauuguugugcaauuauaguu

SEQ ID NO: 632289 - RNA, 22 nt, Human
aguccuggcauauagguccuca

SEQ ID NO: 632290 - RNA, 23 nt, Human
augacaaacaggacaucuugugc

SEQ ID NO: 632291 - RNA, 22 nt, Human
uuacuuaaacagaaaugcagaa

SEQ ID NO: 632292 - RNA, 22 nt, Human
uggcuucagagacagaaucuau

SEQ ID NO: 632293 - RNA, 22 nt, Human
uccagcagaccaucaaggcuca

SEQ ID NO: 632294 - RNA, 22 nt, Human
gguccaccuccaagcuggggac

SEQ ID NO: 632295 - RNA, 22 nt, Human
gaaccucuauauuugugacauc

SEQ ID NO: 632296 - RNA, 22 nt, Human
gcagggcucauugccaggcauu

SEQ ID NO: 632297 - RNA, 22 nt, Human
gaaccuuuuuccaaguaaacaa

SEQ ID NO: 632298 - RNA, 22 nt, Human
cuggcagggugggcuuugcuuu

SEQ ID NO: 632299 - RNA, 22 nt, Human
ccauggcuuuugagucucaaga

SEQ ID NO: 632300 - RNA, 22 nt, Human
guuccugacuguggaguuuggu

SEQ ID NO: 632301 - RNA, 22 nt, Human
cuggcuuugaaggucuuuccua

SEQ ID NO: 632302 - RNA, 22 nt, Human
aucuacagcugucugcacagua

SEQ ID NO: 632303 - RNA, 19 nt, Human
acaaagcugugagcagcuu

SEQ ID NO: 632304 - RNA, 22 nt, Human
cccuggaggcggauguugcagu

SEQ ID NO: 632305 - RNA, 22 nt, Human
ucagcugugauccaucuaucua

SEQ ID NO: 632306 - RNA, 22 nt, Human
gcugucacucuccggccuuccc

SEQ ID NO: 632307 - RNA, 22 nt, Human
uugugaaacauucauggauuug

SEQ ID NO: 632308 - RNA, 19 nt, Human
uccagaagucccugagcgg

SEQ ID NO: 632309 - RNA, 22 nt, Human
agacagacuugaaaauguucuu

SEQ ID NO: 632310 - RNA, 22 nt, Human
uuguuuucuccacugcaucuua

SEQ ID NO: 632311 - RNA, 22 nt, Human
agucucugcugguugugccuau

SEQ ID NO: 632312 - RNA, 22 nt, Human
ugcagcucaggauucucagggc

SEQ ID NO: 632313 - RNA, 15 nt, Human
aaucuggcggcaagu

SEQ ID NO: 632314 - RNA, 22 nt, Human
cagcaguggcugcaggcagcug

SEQ ID NO: 632315 - RNA, 22 nt, Human
ugcagaagauggucugagcacc

SEQ ID NO: 632316 - RNA, 22 nt, Human
aagagcccugguugaaaauaac

SEQ ID NO: 632317 - RNA, 22 nt, Human
uucugacaguaaucaguuugcu

SEQ ID NO: 632318 - RNA, 22 nt, Human
uccagaccaugugagaggcgca

SEQ ID NO: 632319 - RNA, 22 nt, Human
agcacgagaucgaugugccuuu

SEQ ID NO: 632320 - RNA, 22 nt, Human
ccugagaucagugcauuuggug

SEQ ID NO: 632321 - RNA, 22 nt, Human
uggcucaggcuugaaaauagau

SEQ ID NO: 632322 - RNA, 19 nt, Human
ucucugccgaucagggccc

SEQ ID NO: 632323 - RNA, 22 nt, Human
auauaacauacauacagaaaag

SEQ ID NO: 632324 - RNA, 22 nt, Human
ucuuggcuacuuuccugucugc

SEQ ID NO: 632325 - RNA, 22 nt, Human
aaauguguuucuuugugaaugg

SEQ ID NO: 632326 - RNA, 22 nt, Human
accagcugaguaggggagggcc

SEQ ID NO: 632327 - RNA, 22 nt, Human
uuucgagggauuagcuaggacu

SEQ ID NO: 632328 - RNA, 22 nt, Human
acuguaaaacagguuucaucau

SEQ ID NO: 632329 - RNA, 22 nt, Human
aacaucuagguucucaucgaua

SEQ ID NO: 632330 - RNA, 22 nt, Human
uugcuuauagagaguuucauac

SEQ ID NO: 632331 - RNA, 22 nt, Human
ugugagcacuggcugggaaagu

SEQ ID NO: 632332 - RNA, 22 nt, Human
agcuguccugugggagggagug

SEQ ID NO: 632333 - RNA, 22 nt, Human
aggagccaaaagcugaacaaga

SEQ ID NO: 632334 - RNA, 22 nt, Human
aggaauuuucacaguuggguau

SEQ ID NO: 632335 - RNA, 21 nt, Human
ggguagcagaggaggccgugg

SEQ ID NO: 632336 - RNA, 22 nt, Human
gccuggagggauagaaugcaag

SEQ ID NO: 632337 - RNA, 22 nt, Human
gcugaacuacaugaaguugccg

SEQ ID NO: 632338 - RNA, 22 nt, Human
acccaggcuggaaugcaguggu

SEQ ID NO: 632339 - RNA, 22 nt, Human
acagccaggaggaacucaguga

SEQ ID NO: 632340 - RNA, 18 nt, Human
ucugaaagcccuuuucca

SEQ ID NO: 632341 - RNA, 19 nt, Human
aggcacaauucugagaagc

SEQ ID NO: 632342 - RNA, 22 nt, Human
guggaagaggcaagauagcucu

SEQ ID NO: 632343 - RNA, 22 nt, Human
cccccaccugaggacagucuua

SEQ ID NO: 632344 - RNA, 22 nt, Human
gucugaauacguacuugugaag

SEQ ID NO: 632345 - RNA, 22 nt, Human
cuaagcaagaaugagugcaaca

SEQ ID NO: 632346 - RNA, 22 nt, Human
gccacacugcuucuuugagccu

SEQ ID NO: 632347 - RNA, 22 nt, Human
uggcuggcaguuaucuuuggau

SEQ ID NO: 632348 - RNA, 22 nt, Human
augcaucauggaaaacucaguu

SEQ ID NO: 632349 - RNA, 22 nt, Human
ugggaaggacgugucaguggca

SEQ ID NO: 632350 - RNA, 22 nt, Human
gaggcucccuuuagguccagau

SEQ ID NO: 632351 - RNA, 22 nt, Human
agcauauuguaugucuauaugu

SEQ ID NO: 632352 - RNA, 22 nt, Human
agcaguguucuaaucuggcuag

SEQ ID NO: 632353 - RNA, 21 nt, Human
uggagcugccacuugagcugc

SEQ ID NO: 632354 - RNA, 22 nt, Human
uaggaaaugaaugcaggcuccc

SEQ ID NO: 632355 - RNA, 22 nt, Human
gaguggggucugggcaucaguc

SEQ ID NO: 632356 - RNA, 22 nt, Human
uuuccacacucacugcacucau

SEQ ID NO: 632357 - RNA, 21 nt, Human
uuucuuaggcucuaaaaugac

SEQ ID NO: 632358 - RNA, 22 nt, Human
uuucuagacauuucuauguaca

SEQ ID NO: 632359 - RNA, 22 nt, Human
cagaagaugcagugucugagaa

SEQ ID NO: 632360 - RNA, 22 nt, Human
aaagugccacaacuggacaacc

SEQ ID NO: 632361 - RNA, 22 nt, Human
cuauucaguaagccaaaaccau

SEQ ID NO: 632362 - RNA, 22 nt, Human
gacacagauaucucugagauua

SEQ ID NO: 632363 - RNA, 22 nt, Human
caguggcuucucaugucauuca

SEQ ID NO: 632364 - RNA, 22 nt, Human
ucucaguguggugcuuaggaua

SEQ ID NO: 632365 - RNA, 22 nt, Human
ucauuuaaaauguaccaggauu

SEQ ID NO: 632366 - RNA, 22 nt, Human
caaaguaacugccuuuccaauu

SEQ ID NO: 632367 - RNA, 22 nt, Human
uuugacaaaggaaaaaugcaca

SEQ ID NO: 632368 - RNA, 22 nt, Human
ccugggugaugugcugcccucg

SEQ ID NO: 632369 - RNA, 22 nt, Human
cagcccauuucugggaccugag

SEQ ID NO: 632370 - RNA, 21 nt, Human
cucagggcuugguguccucau

SEQ ID NO: 632371 - RNA, 22 nt, Human
ucagaaacacucuucuucuguc

SEQ ID NO: 632372 - RNA, 22 nt, Human
cagcccugcucuuagugucucc

SEQ ID NO: 632373 - RNA, 22 nt, Human
gagcuguuuuuccaaacuauug

SEQ ID NO: 632374 - RNA, 21 nt, Human
agaggucauugggcugguucu

SEQ ID NO: 632375 - RNA, 22 nt, Human
cugagcuggucuauggacuugg

SEQ ID NO: 632376 - RNA, 22 nt, Human
ugugcagcucuagagccaagcc

SEQ ID NO: 632377 - RNA, 22 nt, Human
ccaggcauugugagugggcagg

SEQ ID NO: 632378 - RNA, 22 nt, Human
uagaaaguagggaagguaggau

SEQ ID NO: 632379 - RNA, 22 nt, Human
ugcaggcucaccugccagggcc

SEQ ID NO: 632380 - RNA, 22 nt, Human
aguguaugcagguuuucaaugu

SEQ ID NO: 632381 - RNA, 22 nt, Human
uuccucucucuugccagaaugu

SEQ ID NO: 632382 - RNA, 22 nt, Human
gugacugugaacuguuucugau

SEQ ID NO: 632383 - RNA, 22 nt, Human
gcaguguugcuaggugcgguga

SEQ ID NO: 632384 - RNA, 22 nt, Human
gagccuggggacccuccugagu

SEQ ID NO: 632385 - RNA, 22 nt, Human
agcagggcaaagucaggcuaac

SEQ ID NO: 632386 - RNA, 19 nt, Human
aggcugugagggaggacuc

SEQ ID NO: 632387 - RNA, 22 nt, Human
gaggcugaggguuagagaguca

SEQ ID NO: 632388 - RNA, 22 nt, Human
gcaguguuggcaggauggggcu

SEQ ID NO: 632389 - RNA, 22 nt, Human
cuggugaccggaccucaguuuu

SEQ ID NO: 632390 - RNA, 22 nt, Human
cuuuccccaagcaccacagugc

SEQ ID NO: 632391 - RNA, 22 nt, Human
gguaugaauucacuacuuccaa

SEQ ID NO: 632392 - RNA, 22 nt, Human
uggcaaagcuagacauucccuc

SEQ ID NO: 632393 - RNA, 22 nt, Human
uuaacuucaacacucucuugua

SEQ ID NO: 632394 - RNA, 21 nt, Human
ucccacagaaacugcgaaauu

SEQ ID NO: 632395 - RNA, 22 nt, Human
gagcuucagaauuuaacagacu

SEQ ID NO: 632396 - RNA, 22 nt, Human
uuucuaagucugagggaguaua

SEQ ID NO: 632397 - RNA, 22 nt, Human
agauggcuagauugcaagaacu

SEQ ID NO: 632398 - RNA, 21 nt, Human
gagccuucccucugcccuuuc

SEQ ID NO: 632399 - RNA, 22 nt, Human
cucuggaguaagagcuaugaaa

SEQ ID NO: 632400 - RNA, 22 nt, Human
guauucuguuuacagugagcaa

SEQ ID NO: 632401 - RNA, 22 nt, Human
cuaaauuauuugcacauuagag

SEQ ID NO: 632402 - RNA, 22 nt, Human
uguggcugcucaggugcagacc

SEQ ID NO: 632403 - RNA, 22 nt, Human
uacaugugguagggagggcagu

SEQ ID NO: 632404 - RNA, 22 nt, Human
gccagcugaagggaagcuccug

SEQ ID NO: 632405 - RNA, 22 nt, Human
uggagaggagcaccauggccau

SEQ ID NO: 632406 - RNA, 23 nt, Human
aagcauucgccuucacccuccuc

SEQ ID NO: 632407 - RNA, 21 nt, Human
agauccuggggucuggggagg

SEQ ID NO: 632408 - RNA, 19 nt, Human
cuggcuucaagcaguccuc

SEQ ID NO: 632409 - RNA, 22 nt, Human
ucauuuauaaggaugcaauuaa

SEQ ID NO: 632410 - RNA, 22 nt, Human
uccugguggugccagcugcagg

SEQ ID NO: 632411 - RNA, 19 nt, Human
acccucuccccacuggguc

SEQ ID NO: 632412 - RNA, 20 nt, Human
ugagcuucagauaucgugca

SEQ ID NO: 632413 - RNA, 17 nt, Human
ggcucugggugucacau

SEQ ID NO: 632414 - RNA, 22 nt, Human
aaggcccuaauagagcacauau

SEQ ID NO: 632415 - RNA, 22 nt, Human
gaggcaccucgcgggaggaggc

SEQ ID NO: 632416 - RNA, 22 nt, Human
agcaggcuugguccccagccuc

SEQ ID NO: 632417 - RNA, 22 nt, Human
ucaaaccaccuuguuacugggg

SEQ ID NO: 632418 - RNA, 22 nt, Human
guggucauguuaauuaugaucc

SEQ ID NO: 632419 - RNA, 16 nt, Human
agacucagugcacuuu

SEQ ID NO: 632420 - RNA, 22 nt, Human
ccugaggcucgcgcgccccugg

SEQ ID NO: 632421 - RNA, 22 nt, Human
aauguacaccguggguuuuuua

SEQ ID NO: 632422 - RNA, 22 nt, Human
gugugcaugcauagacaccaca

SEQ ID NO: 632423 - RNA, 22 nt, Human
cagggagccccaauuccaugcc

SEQ ID NO: 632424 - RNA, 22 nt, Human
uugaaucucuugaaucucuguu

SEQ ID NO: 632425 - RNA, 22 nt, Human
uccaggaggguuuucugccuuc

SEQ ID NO: 632426 - RNA, 22 nt, Human
aucuggcucuuccuggaguucc

SEQ ID NO: 632427 - RNA, 22 nt, Human
acacaucagccucagcuuuggg

SEQ ID NO: 632428 - RNA, 22 nt, Human
uccuccagcuacuaggcaaaua

SEQ ID NO: 632429 - RNA, 22 nt, Human
cugucuguaucccuguugguaa

SEQ ID NO: 632430 - RNA, 22 nt, Human
uuaggaguccagaugucuuggg

SEQ ID NO: 632431 - RNA, 22 nt, Human
gagagaagaauguuccgaggcc

SEQ ID NO: 632432 - RNA, 22 nt, Human
agaggccucccucccagcuggu

SEQ ID NO: 632433 - RNA, 22 nt, Human
aaggcugguuuccuugauguuu

SEQ ID NO: 632434 - RNA, 22 nt, Human
ugcauaaacagauacuucaugu

SEQ ID NO: 632435 - RNA, 22 nt, Human
acugucauuaaugaauguaaua

SEQ ID NO: 632436 - RNA, 22 nt, Human
augcacacugggauucaacugg

SEQ ID NO: 632437 - RNA, 22 nt, Human
agccagaaccacuggaacggug

SEQ ID NO: 632438 - RNA, 22 nt, Human
aaaguuuggauccagcaaaaga

SEQ ID NO: 632439 - RNA, 19 nt, Human
ggcagaagguguaggggga

SEQ ID NO: 632440 - RNA, 22 nt, Human
ggcacaggagcuagucaaagcc

SEQ ID NO: 632441 - RNA, 22 nt, Human
cugucccucucacaccucacca

SEQ ID NO: 632442 - RNA, 22 nt, Human
cucugggucuauaaugcagcug

SEQ ID NO: 632443 - RNA, 22 nt, Human
agcagggggccacagucacagc

SEQ ID NO: 632444 - RNA, 22 nt, Human
ucaggccugcaggcuuccugga

SEQ ID NO: 632445 - RNA, 17 nt, Human
gcaguggagggguaguu

SEQ ID NO: 632446 - RNA, 22 nt, Human
gccuccuguuaugccaugugcc

SEQ ID NO: 632447 - RNA, 22 nt, Human
ucagagguaaaaacucacugua

SEQ ID NO: 632448 - RNA, 22 nt, Human
agacacugauguucagcucaau

SEQ ID NO: 632449 - RNA, 22 nt, Human
acagaguacauucagagacuau

SEQ ID NO: 632450 - RNA, 22 nt, Human
auguauaaugcuaauuagcuag

SEQ ID NO: 632451 - RNA, 22 nt, Human
uguuacaguggcuuuuuaaaca

SEQ ID NO: 632452 - RNA, 22 nt, Human
acaggcacaacugaguagacuc

SEQ ID NO: 632453 - RNA, 22 nt, Human
uuucagaugugugucucugaag

SEQ ID NO: 632454 - RNA, 22 nt, Human
uccagccaugcaugacaaucac

SEQ ID NO: 632455 - RNA, 22 nt, Human
cagcagcugaggcgcuggcgug

SEQ ID NO: 632456 - RNA, 22 nt, Human
cuggcucucugagauauugagu

SEQ ID NO: 632457 - RNA, 22 nt, Human
uuacacagacauggcaucauga

SEQ ID NO: 632458 - RNA, 22 nt, Human
accagcucuuucuuuucacuau

SEQ ID NO: 632459 - RNA, 22 nt, Human
gcuggccaguguggugaccacc

SEQ ID NO: 632460 - RNA, 22 nt, Human
ucuugaaguccuuacauuugau

SEQ ID NO: 632461 - RNA, 22 nt, Human
cccugagcacaccuggcagaca

SEQ ID NO: 632462 - RNA, 22 nt, Human
ugcuccugacaguuuuaggcuc

SEQ ID NO: 632463 - RNA, 22 nt, Human
cucuccacuguccuuugcuggu

SEQ ID NO: 632464 - RNA, 22 nt, Human
ugucugaacgaaguagguccac

SEQ ID NO: 632465 - RNA, 19 nt, Human
gaguccugugcuccuuguu

SEQ ID NO: 632466 - RNA, 22 nt, Human
acugccugccuuccagguacug

SEQ ID NO: 632467 - RNA, 22 nt, Human
aaguuuaagguggaaguggugg

SEQ ID NO: 632468 - RNA, 22 nt, Human
uuguggcugugcaccgcugccu

SEQ ID NO: 632469 - RNA, 19 nt, Human
agcuccugauugugccucg

SEQ ID NO: 632470 - RNA, 22 nt, Human
auuacaguucugcagguaguuu

SEQ ID NO: 632471 - RNA, 22 nt, Human
uuacaauaccacaucaccucau

SEQ ID NO: 632472 - RNA, 22 nt, Human
uggguccuuuuuggacuucuuc

SEQ ID NO: 632473 - RNA, 20 nt, Human
aggcuuggcuuggcaggaac

SEQ ID NO: 632474 - RNA, 22 nt, Human
ccugucaguugcugucagggau

SEQ ID NO: 632475 - RNA, 22 nt, Human
ugauucagaccugucagacuuc

SEQ ID NO: 632476 - RNA, 22 nt, Human
uuacagaaaggaaggacugacu

SEQ ID NO: 632477 - RNA, 22 nt, Human
ccugccaggacauugcuugaag

SEQ ID NO: 632478 - RNA, 22 nt, Human
cugaguccagggacagaggcgu

SEQ ID NO: 632479 - RNA, 22 nt, Human
ucagaggaagccuuggugggag

SEQ ID NO: 632480 - RNA, 22 nt, Human
ggugugggaacuacagguuuuu

SEQ ID NO: 632481 - RNA, 22 nt, Human
uccagggaugccagccauguug

SEQ ID NO: 632482 - RNA, 22 nt, Human
uuugaaagucaaccuuccaguu

SEQ ID NO: 632483 - RNA, 22 nt, Human
gcagauggaaagugcuugaggg

SEQ ID NO: 632484 - RNA, 22 nt, Human
uggcaaaggaaccuauuuuaaa

SEQ ID NO: 632485 - RNA, 22 nt, Human
agccucucauguucucccccag

SEQ ID NO: 632486 - RNA, 22 nt, Human
agcugccaucagccuuuggaug

SEQ ID NO: 632487 - RNA, 22 nt, Human
uugggccaaagauguccuuguu

SEQ ID NO: 632488 - RNA, 22 nt, Human
cccagcuugcgggcggcaggag

SEQ ID NO: 632489 - RNA, 22 nt, Human
ugauacauaaaccaucauuuug

SEQ ID NO: 632490 - RNA, 22 nt, Human
aaguugaaugcguacgugacau

SEQ ID NO: 632491 - RNA, 22 nt, Human
uaagcuauuccugaagaagguu

SEQ ID NO: 632492 - RNA, 17 nt, Human
ucugucugugguccacu

SEQ ID NO: 632493 - RNA, 22 nt, Human
ccauuugaaaugaauguuuuua

SEQ ID NO: 632494 - RNA, 22 nt, Human
aauuuacaggugcacucgccau

SEQ ID NO: 632495 - RNA, 21 nt, Human
ucugucuuccucagccuaagg

SEQ ID NO: 632496 - RNA, 22 nt, Human
ggaugaggaaaccacagugucc

SEQ ID NO: 632497 - RNA, 22 nt, Human
acauucaacauggcuggucuag

SEQ ID NO: 632498 - RNA, 22 nt, Human
caucugccuaaguggcccuguu

SEQ ID NO: 632499 - RNA, 22 nt, Human
guuagacaugagugugcuuaca

SEQ ID NO: 632500 - RNA, 22 nt, Human
gauuaagagaaguuucuuaucg

SEQ ID NO: 632501 - RNA, 22 nt, Human
gcaagggugugaaccaaugaga

SEQ ID NO: 632502 - RNA, 22 nt, Human
gggaugauggaaaagucuguua

SEQ ID NO: 632503 - RNA, 22 nt, Human
cugcaguuggauaaagauacuu

SEQ ID NO: 632504 - RNA, 22 nt, Human
ugugugucagagucuccauggu

SEQ ID NO: 632505 - RNA, 22 nt, Human
aagggggcccagcacuaaguug

SEQ ID NO: 632506 - RNA, 22 nt, Human
ccuggcucugguucccucagcu

SEQ ID NO: 632507 - RNA, 22 nt, Human
uaaugagaucauaucuucugag

SEQ ID NO: 632508 - RNA, 22 nt, Human
ucagggcaggacaguguaggcc

SEQ ID NO: 632509 - RNA, 22 nt, Human
aaauucaguuccucagccacau

SEQ ID NO: 632510 - RNA, 22 nt, Human
agcugcccugggucuugcugcu

SEQ ID NO: 632511 - RNA, 22 nt, Human
cagcuucuuagucuuuccuugu

SEQ ID NO: 632512 - RNA, 22 nt, Human
ugaagcccugugucagcuucca

SEQ ID NO: 632513 - RNA, 22 nt, Human
ucaggaaggcacuugguguguu

SEQ ID NO: 632514 - RNA, 22 nt, Human
ucaguguaaguuauguagaugu

SEQ ID NO: 632515 - RNA, 22 nt, Human
aaaauagccucacauaauugcu

SEQ ID NO: 632516 - RNA, 22 nt, Human
aguuuugaaaugaaauguaguu

SEQ ID NO: 632517 - RNA, 22 nt, Human
agcaucccaugacucuggagga

SEQ ID NO: 632518 - RNA, 22 nt, Human
cugggaagggacgccagugccu

SEQ ID NO: 632519 - RNA, 22 nt, Human
gggcucagaggaguggccuggg

SEQ ID NO: 632520 - RNA, 22 nt, Human
guguaaacacccuuacuguggc

SEQ ID NO: 632521 - RNA, 22 nt, Human
auaaagcaugcuuguuuggaga

SEQ ID NO: 632522 - RNA, 22 nt, Human
aucuacccacugaacacaauau

SEQ ID NO: 632523 - RNA, 22 nt, Human
aaagccuugcccgucacuggga

SEQ ID NO: 632524 - RNA, 22 nt, Human
gggagcuggcggauuccccagg

SEQ ID NO: 632525 - RNA, 22 nt, Human
ccagcucucuguccuccccaca

SEQ ID NO: 632526 - RNA, 22 nt, Human
uuuguaacauuauggacugcuu

SEQ ID NO: 632527 - RNA, 22 nt, Human
gaaaaucugcuuauauuauuuu

SEQ ID NO: 632528 - RNA, 22 nt, Human
gcugugugcucuggucuuucuu

SEQ ID NO: 632529 - RNA, 22 nt, Human
gccugagugcaucugcagacau

SEQ ID NO: 632530 - RNA, 22 nt, Human
gggcaugcaggacuguggcaga

SEQ ID NO: 632531 - RNA, 22 nt, Human
aagauggcuuagaguccuggug

SEQ ID NO: 632532 - RNA, 22 nt, Human
cagaggccuugucuucuuugcu

SEQ ID NO: 632533 - RNA, 22 nt, Human
uccaggcaaagugcugggcugc

SEQ ID NO: 632534 - RNA, 22 nt, Human
ggaaagggcagaggccuuggag

SEQ ID NO: 632535 - RNA, 22 nt, Human
accaggagaggcacuugcaaug

SEQ ID NO: 632536 - RNA, 22 nt, Human
cuuguggcagguggauggugcc

SEQ ID NO: 632537 - RNA, 19 nt, Human
aucacaugucaagagcagg

SEQ ID NO: 632538 - RNA, 22 nt, Human
agacugaaguaagaaugcagcu

SEQ ID NO: 632539 - RNA, 22 nt, Human
gagggagaaggacuaucaggcu

SEQ ID NO: 632540 - RNA, 22 nt, Human
gcucagggaaagagcuccuguc

SEQ ID NO: 632541 - RNA, 18 nt, Human
uaaaugcauguuaauaac

SEQ ID NO: 632542 - RNA, 20 nt, Human
uccuccaaccagcugcuaau

SEQ ID NO: 632543 - RNA, 22 nt, Human
ugggcaggaugcguugauucuu

SEQ ID NO: 632544 - RNA, 22 nt, Human
gcugggcucugucaugccuucc

SEQ ID NO: 632545 - RNA, 19 nt, Human
cucucuggcggugucugcg

SEQ ID NO: 632546 - RNA, 22 nt, Human
gggauggggagcuggaaagggg

SEQ ID NO: 632547 - RNA, 22 nt, Human
cagcaggacauggaggaguaaa

SEQ ID NO: 632548 - RNA, 22 nt, Human
ccagcugcccacuauguguucu

SEQ ID NO: 632549 - RNA, 22 nt, Human
uacagcgaaaauuuagcuugau

SEQ ID NO: 632550 - RNA, 19 nt, Human
ggccaggcugacugugguc

SEQ ID NO: 632551 - RNA, 21 nt, Human
ccaggucuugguccuuggacu

SEQ ID NO: 632552 - RNA, 22 nt, Human
aaagcaauugugguuuuugcca

SEQ ID NO: 632553 - RNA, 22 nt, Human
ugaggggagcccgcccuggacg

SEQ ID NO: 632554 - RNA, 22 nt, Human
agcagguaugacauagauaugu

SEQ ID NO: 632555 - RNA, 22 nt, Human
ugauucuuuggagagcuauaua

SEQ ID NO: 632556 - RNA, 22 nt, Human
ccauuuaguaaggaagaacagc

SEQ ID NO: 632557 - RNA, 22 nt, Human
cucugaggcuuguucuauguau

SEQ ID NO: 632558 - RNA, 22 nt, Human
aucauugagauuuuuuacaacu

SEQ ID NO: 632559 - RNA, 22 nt, Human
accugucaacccaucaccuagg

SEQ ID NO: 632560 - RNA, 22 nt, Human
ggcagcuggggcagugcccugu

SEQ ID NO: 632561 - RNA, 22 nt, Human
acgaagacgccguucuugccga

SEQ ID NO: 632562 - RNA, 22 nt, Human
aucaccaggcaaaaugucagag

SEQ ID NO: 632563 - RNA, 22 nt, Human
ugccacaguuucauggauucug

SEQ ID NO: 632564 - RNA, 22 nt, Human
uacacacagaggccaugggauu

SEQ ID NO: 632565 - RNA, 22 nt, Human
ugugugucuuugccuccucuca

SEQ ID NO: 632566 - RNA, 22 nt, Human
gaaguguuguaucuuuuuaaua

SEQ ID NO: 632567 - RNA, 22 nt, Human
ggcuugcacacagccucaguuu

SEQ ID NO: 632568 - RNA, 21 nt, Human
cagaggguuucucagguguuu

SEQ ID NO: 632569 - RNA, 22 nt, Human
aggccagaugucgggcuagaag

SEQ ID NO: 632570 - RNA, 22 nt, Human
uuuggagagaguuaaauauguu

SEQ ID NO: 632571 - RNA, 22 nt, Human
uaagaaacaugauacuuuuccu

SEQ ID NO: 632572 - RNA, 22 nt, Human
uauuucuaagagauaucuguac

SEQ ID NO: 632573 - RNA, 22 nt, Human
aggcccuguuguagcauuuugg

SEQ ID NO: 632574 - RNA, 19 nt, Human
agaaucaggucaggugaca

SEQ ID NO: 632575 - RNA, 22 nt, Human
gagagggccgggggccagcucc

SEQ ID NO: 632576 - RNA, 21 nt, Human
agaaaauggcguuuuagauuu

SEQ ID NO: 632577 - RNA, 22 nt, Human
uuggcugcugaaauauguucug

SEQ ID NO: 632578 - RNA, 22 nt, Human
cuccagacagaucuucuagcag

SEQ ID NO: 632579 - RNA, 22 nt, Human
gcccaagccggagcugggagag

SEQ ID NO: 632580 - RNA, 22 nt, Human
gccugggaacucugaucuccug

SEQ ID NO: 632581 - RNA, 22 nt, Human
augcuucuugagauagaaacac

SEQ ID NO: 632582 - RNA, 22 nt, Human
ggcucugcccagguggacagca

SEQ ID NO: 632583 - RNA, 22 nt, Human
cuccucagaagaggguaacaca

SEQ ID NO: 632584 - RNA, 22 nt, Human
ucuacaaagguugaggugcccu

SEQ ID NO: 632585 - RNA, 18 nt, Human
acagacacuuaguaugag

SEQ ID NO: 632586 - RNA, 22 nt, Human
acaaauucuacaaucauaugau

SEQ ID NO: 632587 - RNA, 22 nt, Human
uauccuguguacugucuaguac

SEQ ID NO: 632588 - RNA, 22 nt, Human
cugcauaugagaauaggagaaa

SEQ ID NO: 632589 - RNA, 22 nt, Human
cuuaggaaaguuucugcuuaug

SEQ ID NO: 632590 - RNA, 22 nt, Human
ggacuuggcuucuuucagagac

SEQ ID NO: 632591 - RNA, 23 nt, Human
agugagcagcuguagggcaagga

SEQ ID NO: 632592 - RNA, 22 nt, Human
aagcaucucuauguggagagug

SEQ ID NO: 632593 - RNA, 22 nt, Human
gauuuaguggcccuugguacac

SEQ ID NO: 632594 - RNA, 22 nt, Human
acaggcuucagauguauuaacu

SEQ ID NO: 632595 - RNA, 22 nt, Human
aacagucuuccuacggccauua

SEQ ID NO: 632596 - RNA, 22 nt, Human
cagcugccuucugcgggaaguc

SEQ ID NO: 632597 - RNA, 22 nt, Human
aguggcugcugacuuuaauaca

SEQ ID NO: 632598 - RNA, 22 nt, Human
gcaugcauuuguacuugauuuu

SEQ ID NO: 632599 - RNA, 22 nt, Human
agggggaguuucaguuagaaag

SEQ ID NO: 632600 - RNA, 22 nt, Human
ggaagagaaaugagucaagacu

SEQ ID NO: 632601 - RNA, 22 nt, Human
acccagccauguucaguucucu

SEQ ID NO: 632602 - RNA, 18 nt, Human
aggcaggcuggagugacu

SEQ ID NO: 632603 - RNA, 22 nt, Human
ccugcucaccugauguggcaac

SEQ ID NO: 632604 - RNA, 19 nt, Human
ucaguauauaauuacacca

SEQ ID NO: 632605 - RNA, 22 nt, Human
ucuggcucuuugggugauugua

SEQ ID NO: 632606 - RNA, 22 nt, Human
acuuguuugaaucucucuagag

SEQ ID NO: 632607 - RNA, 20 nt, Human
uccagguaacaucucucugg

SEQ ID NO: 632608 - RNA, 22 nt, Human
guauuuucaugauuucagacca

SEQ ID NO: 632609 - RNA, 22 nt, Human
ggaggccaaggugggcggauca

SEQ ID NO: 632610 - RNA, 22 nt, Human
cucugugugcuggugggguccu

SEQ ID NO: 632611 - RNA, 22 nt, Human
cuuuucucuguaccguauaucu

SEQ ID NO: 632612 - RNA, 22 nt, Human
uaggaugaucuuguagagagau

SEQ ID NO: 632613 - RNA, 22 nt, Human
auggaugggauauugcuugcca

SEQ ID NO: 632614 - RNA, 22 nt, Human
uguacaaggccaucuacaugcu

SEQ ID NO: 632615 - RNA, 21 nt, Human
gcugagagguugggaaguuca

SEQ ID NO: 632616 - RNA, 22 nt, Human
aaaucacagggucucuaaguau

SEQ ID NO: 632617 - RNA, 22 nt, Human
cccuggagcuagucugagcaga

SEQ ID NO: 632618 - RNA, 18 nt, Human
gaugaagcugcuggggau

SEQ ID NO: 632619 - RNA, 22 nt, Human
ggcuuucaacacaggcuuuccu

SEQ ID NO: 632620 - RNA, 21 nt, Human
agaucccugaggagagcaucc

SEQ ID NO: 632621 - RNA, 22 nt, Human
gcagggccagggcucaggcugu

SEQ ID NO: 632622 - RNA, 22 nt, Human
ccagaagaccggggagucaggg

SEQ ID NO: 632623 - RNA, 23 nt, Human
cagcaggagggugccugggcugc

SEQ ID NO: 632624 - RNA, 23 nt, Human
uccaauucaauugggucaggaag

SEQ ID NO: 632625 - RNA, 21 nt, Human
augcauguuacaguauaugcc

SEQ ID NO: 632626 - RNA, 22 nt, Human
ucggccacgggguuuccuccaa

SEQ ID NO: 632627 - RNA, 22 nt, Human
acugggcuccaaggaccuggag

SEQ ID NO: 632628 - RNA, 22 nt, Human
ccucucaaaagcacaacauuga

SEQ ID NO: 632629 - RNA, 22 nt, Human
aguguuucacagcacuuuuucu

SEQ ID NO: 632630 - RNA, 22 nt, Human
gucaagaugagaauucuuuuua

SEQ ID NO: 632631 - RNA, 22 nt, Human
agggaagccccgaggaggcacc

SEQ ID NO: 632632 - RNA, 19 nt, Human
caggugguaaucugagccu

SEQ ID NO: 632633 - RNA, 22 nt, Human
gagcugcccugagcuuugcaug

SEQ ID NO: 632634 - RNA, 22 nt, Human
uggccagcccuucagccaugcc

SEQ ID NO: 632635 - RNA, 22 nt, Human
agcuguggaaaucaggcaauga

SEQ ID NO: 632636 - RNA, 22 nt, Human
uggcuaggacucauccuguuuc

SEQ ID NO: 632637 - RNA, 22 nt, Human
ccucaagucaauucugucucgc

SEQ ID NO: 632638 - RNA, 22 nt, Human
cuggcuggccauguagagauga

SEQ ID NO: 632639 - RNA, 22 nt, Human
acaguguagaauccuguacuua

SEQ ID NO: 632640 - RNA, 22 nt, Human
uuuuguuuucuuagaaaccugg

SEQ ID NO: 632641 - RNA, 22 nt, Human
aguguuuaaugccuuuuccagc

SEQ ID NO: 632642 - RNA, 22 nt, Human
aaagcugaugucuacuagagaa

SEQ ID NO: 632643 - RNA, 19 nt, Human
aaaaggaauauucuuuggg

SEQ ID NO: 632644 - RNA, 22 nt, Human
cacccagagccugagagggaua

SEQ ID NO: 632645 - RNA, 22 nt, Human
acuuuccuggcccuguccucug

SEQ ID NO: 632646 - RNA, 22 nt, Human
cgccugggaguccacaccugcu

SEQ ID NO: 632647 - RNA, 22 nt, Human
aggagccccucuucaguccugg

SEQ ID NO: 632648 - RNA, 22 nt, Human
uauaggcuuuugccugaagcua

SEQ ID NO: 632649 - RNA, 22 nt, Human
cacagguucaccucagguaggu

SEQ ID NO: 632650 - RNA, 22 nt, Human
uaggaaaauaucucuuauuggg

SEQ ID NO: 632651 - RNA, 22 nt, Human
uucuuucacucaagaaggaucu

SEQ ID NO: 632652 - RNA, 22 nt, Human
ggccacugcugcucugguggag

SEQ ID NO: 632653 - RNA, 22 nt, Human
ucuggguggcugccaaucugcc

SEQ ID NO: 632654 - RNA, 22 nt, Human
uguuauugagguuacuuauaag

SEQ ID NO: 632655 - RNA, 22 nt, Human
caaaccacacucagcguaucgg

SEQ ID NO: 632656 - RNA, 22 nt, Human
uucauauuuucugcuugcucac

SEQ ID NO: 632657 - RNA, 22 nt, Human
uucuagcaugccuuuuagcaca

SEQ ID NO: 632658 - RNA, 22 nt, Human
cagggcuucuuggcauuugcug

SEQ ID NO: 632659 - RNA, 20 nt, Human
ccuucucuggaauugccucc

SEQ ID NO: 632660 - RNA, 22 nt, Human
cagguccacagcccaucacugc

SEQ ID NO: 632661 - RNA, 22 nt, Human
auuguacauaaaauguaugucu

SEQ ID NO: 632662 - RNA, 22 nt, Human
ccuuccaggugcaggcaagccu

SEQ ID NO: 632663 - RNA, 21 nt, Human
ccagggaagaaaugagggcag

SEQ ID NO: 632664 - RNA, 22 nt, Human
agcccagggacagggcggaugu

SEQ ID NO: 632665 - RNA, 22 nt, Human
ugagguggaaggauccuuugaa

SEQ ID NO: 632666 - RNA, 22 nt, Human
caaugauggcuaggcagcugcu

SEQ ID NO: 632667 - RNA, 22 nt, Human
ugcuuuuugcacccuuugccgu

SEQ ID NO: 632668 - RNA, 22 nt, Human
uuauaggcuuaguucugugugu

SEQ ID NO: 632669 - RNA, 22 nt, Human
acccuggacuggggcugaggcu

SEQ ID NO: 632670 - RNA, 22 nt, Human
acucaguacaucuggaguuggc

SEQ ID NO: 632671 - RNA, 22 nt, Human
uggaugcuguaggacacgcucu

SEQ ID NO: 632672 - RNA, 19 nt, Human
uccagggcuuuauggcuuu

SEQ ID NO: 632673 - RNA, 20 nt, Human
uggcuccuggcuccucccuc

SEQ ID NO: 632674 - RNA, 22 nt, Human
ugucuggggaacugugcaucca

SEQ ID NO: 632675 - RNA, 22 nt, Human
cagggcuuugugugccugggga

SEQ ID NO: 632676 - RNA, 22 nt, Human
uacacauguccaaggugucacc

SEQ ID NO: 632677 - RNA, 22 nt, Human
auggagaguucacuucuaaguu

SEQ ID NO: 632678 - RNA, 22 nt, Human
cagcaggauuugaaaggaagag

SEQ ID NO: 632679 - RNA, 22 nt, Human
ccaggugcucuugccagggcug

SEQ ID NO: 632680 - RNA, 22 nt, Human
acauuucuccuacuuguuauuu

SEQ ID NO: 632681 - RNA, 17 nt, Human
gcuccugcaggucagga

SEQ ID NO: 632682 - RNA, 23 nt, Human
uuaaaggcagauguugaguauua

SEQ ID NO: 632683 - RNA, 22 nt, Human
gaacaaggauucccaaagaaga

SEQ ID NO: 632684 - RNA, 22 nt, Human
aggacagcccccaacagcaaca

SEQ ID NO: 632685 - RNA, 22 nt, Human
uaacuuuaggaauagguaaucu

SEQ ID NO: 632686 - RNA, 22 nt, Human
uagauguuuuaacucuugguua

SEQ ID NO: 632687 - RNA, 21 nt, Human
ccagcccagcugugucccagc

SEQ ID NO: 632688 - RNA, 22 nt, Human
augaguguuuagaaaacacugg

SEQ ID NO: 632689 - RNA, 22 nt, Human
cggcagagcccugagucagccu

SEQ ID NO: 632690 - RNA, 22 nt, Human
auuuucugagcacgugacagca

SEQ ID NO: 632691 - RNA, 22 nt, Human
aaguacagaaauagcaggugca

SEQ ID NO: 632692 - RNA, 22 nt, Human
aggaauaaccucauugcuuuuu

SEQ ID NO: 632693 - RNA, 22 nt, Human
aguguuccugcucucaggaagc

SEQ ID NO: 632694 - RNA, 22 nt, Human
aaugaagcaguccaucugcucu

SEQ ID NO: 632695 - RNA, 22 nt, Human
ucagaggcucacugucuacuuu

SEQ ID NO: 632696 - RNA, 22 nt, Human
ucacguuuuacugagugagaua

SEQ ID NO: 632697 - RNA, 22 nt, Human
acacacaugguauuguucagaa

SEQ ID NO: 632698 - RNA, 22 nt, Human
ccaggagugcagggaugguauc

SEQ ID NO: 632699 - RNA, 22 nt, Human
uccaggccaggguaagaggaga

SEQ ID NO: 632700 - RNA, 22 nt, Human
gcaguguguuuggauaacacac

SEQ ID NO: 632701 - RNA, 22 nt, Human
auggccaagaaguauuccugac

SEQ ID NO: 632702 - RNA, 22 nt, Human
agccacagcaacaagugcaauu

SEQ ID NO: 632703 - RNA, 21 nt, Human
augugugcuagaggacuacug

SEQ ID NO: 632704 - RNA, 22 nt, Human
auaaacagcuccauuuagugcc

SEQ ID NO: 632705 - RNA, 22 nt, Human
uagauucuguuuccucugguuu

SEQ ID NO: 632706 - RNA, 22 nt, Human
guuucauacagauuauucaugg

SEQ ID NO: 632707 - RNA, 22 nt, Human
caaggcaggaagccugucuuau

SEQ ID NO: 632708 - RNA, 22 nt, Human
ugaggaaacuuacaaggcagaa

SEQ ID NO: 632709 - RNA, 22 nt, Human
uuuaauuaggaaaugggcaggg

SEQ ID NO: 632710 - RNA, 22 nt, Human
gcagggacaacugugcaccuga

SEQ ID NO: 632711 - RNA, 20 nt, Human
cauuggcauucacagaagcu

SEQ ID NO: 632712 - RNA, 22 nt, Human
gggcaaagugguggaggcaguu

SEQ ID NO: 632713 - RNA, 22 nt, Human
augaaacaugagaaauggagag

SEQ ID NO: 632714 - RNA, 23 nt, Human
ugcuggaacccagggccuaacac

SEQ ID NO: 632715 - RNA, 22 nt, Human
uggaggaaaaaaccaggcagag

SEQ ID NO: 632716 - RNA, 22 nt, Human
gccagguggucuggcuccagag

SEQ ID NO: 632717 - RNA, 22 nt, Human
aaggagcgcuuagggggcagaa

SEQ ID NO: 632718 - RNA, 22 nt, Human
ccagugcaggugagcaccaggu

SEQ ID NO: 632719 - RNA, 22 nt, Human
ugcuuccuugagcucuccaauc

SEQ ID NO: 632720 - RNA, 22 nt, Human
cagagcaguggagaguaggucu

SEQ ID NO: 632721 - RNA, 22 nt, Human
aggucccaggcauagcuggucu

SEQ ID NO: 632722 - RNA, 22 nt, Human
ucuguucuuccuacauucacau

SEQ ID NO: 632723 - RNA, 22 nt, Human
ccaggaguuggaagcugccaug

SEQ ID NO: 632724 - RNA, 22 nt, Human
ccuuagugugaggggauacccc

SEQ ID NO: 632725 - RNA, 22 nt, Human
gugacaauauuagcucaggggc

SEQ ID NO: 632726 - RNA, 22 nt, Human
accucaggauguggacacagaa

SEQ ID NO: 632727 - RNA, 23 nt, Human
cugaagcaguucccucucugccc

SEQ ID NO: 632728 - RNA, 22 nt, Human
aacacugucuuauacuucaaug

SEQ ID NO: 632729 - RNA, 22 nt, Human
gcucagaaaagugaggcucagu

SEQ ID NO: 632730 - RNA, 22 nt, Human
agagacaggaguucuguuucca

SEQ ID NO: 632731 - RNA, 22 nt, Human
cacuguacugugaauaaggagg

SEQ ID NO: 632732 - RNA, 22 nt, Human
ugcaauuuuuaucaauucagca

SEQ ID NO: 632733 - RNA, 22 nt, Human
ggcaggcaucauguggucauua

SEQ ID NO: 632734 - RNA, 22 nt, Human
aauuccauccauuuguuucaac

SEQ ID NO: 632735 - RNA, 22 nt, Human
agugugagcccuggaguggugc

SEQ ID NO: 632736 - RNA, 22 nt, Human
cccaggacucggcacucuccuu

SEQ ID NO: 632737 - RNA, 22 nt, Human
uuuuuguugcagagaggccacu

SEQ ID NO: 632738 - RNA, 22 nt, Human
ucacauuugcaauugcauuguu

SEQ ID NO: 632739 - RNA, 22 nt, Human
uggccuggggaccugugagacc

SEQ ID NO: 632740 - RNA, 22 nt, Human
gacucuuucaaacagaaagcca

SEQ ID NO: 632741 - RNA, 23 nt, Human
acuagacuucaucgaagguuacc

SEQ ID NO: 632742 - RNA, 22 nt, Human
auuuuuucccaguuagccagga

SEQ ID NO: 632743 - RNA, 22 nt, Human
caggaacagcaccaggagcuag

SEQ ID NO: 632744 - RNA, 22 nt, Human
aucuuuaguagaggaauauauu

SEQ ID NO: 632745 - RNA, 15 nt, Human
ugaagacauaaggug

SEQ ID NO: 632746 - RNA, 22 nt, Human
gucaggucuuggaagauaggcu

SEQ ID NO: 632747 - RNA, 19 nt, Human
ucccaggcaaaggcuucuc

SEQ ID NO: 632748 - RNA, 22 nt, Human
gaaacucucgcauccugggaac

SEQ ID NO: 632749 - RNA, 22 nt, Human
agcagagaccauauagcccaga

SEQ ID NO: 632750 - RNA, 22 nt, Human
guccucugggagccuugagccu

SEQ ID NO: 632751 - RNA, 22 nt, Human
gauuuauuuuuaaucagcaggg

SEQ ID NO: 632752 - RNA, 22 nt, Human
caugauguuaucuaaaucuggu

SEQ ID NO: 632753 - RNA, 22 nt, Human
cuggcugucuucugggagcugu

SEQ ID NO: 632754 - RNA, 22 nt, Human
auaaucauucacauaaggugcu

SEQ ID NO: 632755 - RNA, 22 nt, Human
uagugugguaaauaaauguuuu

SEQ ID NO: 632756 - RNA, 22 nt, Human
ggcuuggaaauugcaggacaca

SEQ ID NO: 632757 - RNA, 22 nt, Human
auacaaugagugagugaauggg

SEQ ID NO: 632758 - RNA, 22 nt, Human
aaugucuuucuguucuaugaga

SEQ ID NO: 632759 - RNA, 22 nt, Human
caggcccacgaggcacacagag

SEQ ID NO: 632760 - RNA, 22 nt, Human
uuggcuuucagaaucccuaucu

SEQ ID NO: 632761 - RNA, 22 nt, Human
aacauagaauuguuauauuuuc

SEQ ID NO: 632762 - RNA, 22 nt, Human
auagcacaauauuaccuuuaug

SEQ ID NO: 632763 - RNA, 22 nt, Human
uuuaucucuuuugaccaagauu

SEQ ID NO: 632764 - RNA, 22 nt, Human
gcagugaaacaauaggaucaaa

SEQ ID NO: 632765 - RNA, 22 nt, Human
uccuggcucuaaguccugagug

SEQ ID NO: 632766 - RNA, 22 nt, Human
cagcugcccaagccccagaugu

SEQ ID NO: 632767 - RNA, 22 nt, Human
agccacugugagaggaccaggg

SEQ ID NO: 632768 - RNA, 22 nt, Human
cagggugagccucuggagcccu

SEQ ID NO: 632769 - RNA, 21 nt, Human
ucucuguguacagucucaccc

SEQ ID NO: 632770 - RNA, 22 nt, Human
uaggccaggacagagcuuccag

SEQ ID NO: 632771 - RNA, 22 nt, Human
aagacauuggcauugacuguaa

SEQ ID NO: 632772 - RNA, 22 nt, Human
gcaguguguguccccacacugg

SEQ ID NO: 632773 - RNA, 22 nt, Human
aguaggcauugugaaacugcau

SEQ ID NO: 632774 - RNA, 20 nt, Human
gcucagggccugggucugga

SEQ ID NO: 632775 - RNA, 22 nt, Human
uagcccagagucccaauuccag

SEQ ID NO: 632776 - RNA, 22 nt, Human
ggcucugggccagaguuggcuu

SEQ ID NO: 632777 - RNA, 20 nt, Human
cucuuaaauguaaaguaggc

SEQ ID NO: 632778 - RNA, 22 nt, Human
ugucuccauuuucaaguagcag

SEQ ID NO: 632779 - RNA, 22 nt, Human
aaugcacagcuaaagugguucc

SEQ ID NO: 632780 - RNA, 22 nt, Human
acuuguguaacacagaaagaac

SEQ ID NO: 632781 - RNA, 22 nt, Human
aaggcagucaaagcagacuucu

SEQ ID NO: 632782 - RNA, 22 nt, Human
cugggcucuaggaaccauuccu

SEQ ID NO: 632783 - RNA, 22 nt, Human
ucacaguaucuagaaaugaggg

SEQ ID NO: 632784 - RNA, 22 nt, Human
gcucugccaaggacccauucuc

SEQ ID NO: 632785 - RNA, 22 nt, Human
agccucugcacuucuuacaggu

SEQ ID NO: 632786 - RNA, 22 nt, Human
auccugucuaugaguagauaau

SEQ ID NO: 632787 - RNA, 22 nt, Human
ggcagccuucucucauagguga

SEQ ID NO: 632788 - RNA, 22 nt, Human
uucauugagugguuuauucuaa

SEQ ID NO: 632789 - RNA, 21 nt, Human
aggguccuacagggcucagga

SEQ ID NO: 632790 - RNA, 22 nt, Human
aaaugucuuucuucugcuacgu

SEQ ID NO: 632791 - RNA, 22 nt, Human
cagagcucuauguucauggagg

SEQ ID NO: 632792 - RNA, 22 nt, Human
ugggagugcaccugggacacga

SEQ ID NO: 632793 - RNA, 22 nt, Human
cagguacauucguagacccauu

SEQ ID NO: 632794 - RNA, 22 nt, Human
acagaacaagaccugcuuauug

SEQ ID NO: 632795 - RNA, 22 nt, Human
aaauaaagguccacuuuagggc

SEQ ID NO: 632796 - RNA, 22 nt, Human
gagagaaaugugcaguuugggc

SEQ ID NO: 632797 - RNA, 22 nt, Human
caaauacugaguuuauuuucaa

SEQ ID NO: 632798 - RNA, 22 nt, Human
uugcacuccagcccgagcaaca

SEQ ID NO: 632799 - RNA, 22 nt, Human
guccuucaucuggagccugguc

SEQ ID NO: 632800 - RNA, 19 nt, Human
cuccucagucccagagguc

SEQ ID NO: 632801 - RNA, 22 nt, Human
gaacuuuugggaagccguguga

SEQ ID NO: 632802 - RNA, 22 nt, Human
acuacuacaagugaguacaaag

SEQ ID NO: 632803 - RNA, 22 nt, Human
aaagcagcuguuugacuuucca

SEQ ID NO: 632804 - RNA, 22 nt, Human
gcaaagcaaaugccugaaggcg

SEQ ID NO: 632805 - RNA, 22 nt, Human
ugguggaccuggcauugaaccu

SEQ ID NO: 632806 - RNA, 21 nt, Human
cuugggcuuguagauggugga

SEQ ID NO: 632807 - RNA, 22 nt, Human
gaaaacuaacggaaaaguuagg

SEQ ID NO: 632808 - RNA, 22 nt, Human
ggggguaggcagacaaggacau

SEQ ID NO: 632809 - RNA, 22 nt, Human
ucagauggguuuugaaggaugu

SEQ ID NO: 632810 - RNA, 22 nt, Human
auucuguauggaaaagcacuau

SEQ ID NO: 632811 - RNA, 22 nt, Human
cccaguggcccagcauguggug

SEQ ID NO: 632812 - RNA, 22 nt, Human
guggagcaggacuagcugagaa

SEQ ID NO: 632813 - RNA, 22 nt, Human
aaagccagugguaugagagaaa

SEQ ID NO: 632814 - RNA, 22 nt, Human
agggcugcuauguugauucaga

SEQ ID NO: 632815 - RNA, 22 nt, Human
cugggaagaaauugugggaggc

SEQ ID NO: 632816 - RNA, 22 nt, Human
cagaggcuguguaggcagacug

SEQ ID NO: 632817 - RNA, 22 nt, Human
cccaggacccuucaauggcucc

SEQ ID NO: 632818 - RNA, 22 nt, Human
uuccauaauuaaguggagagaa

SEQ ID NO: 632819 - RNA, 22 nt, Human
uaguuuuuucaacaaauggugc

SEQ ID NO: 632820 - RNA, 19 nt, Human
gagggcucauuugaacaau

SEQ ID NO: 632821 - RNA, 21 nt, Human
auugcucuguugugucuagaa

SEQ ID NO: 632822 - RNA, 22 nt, Human
ccccucuuguacuagacaguuu

SEQ ID NO: 632823 - RNA, 22 nt, Human
ggccagagucuauaugcagaca

SEQ ID NO: 632824 - RNA, 22 nt, Human
uacuguuuucuauaauggcugu

SEQ ID NO: 632825 - RNA, 22 nt, Human
auuuucugguugagguuuaaca

SEQ ID NO: 632826 - RNA, 22 nt, Human
agcaauuuuugauuuucagugu

SEQ ID NO: 632827 - RNA, 22 nt, Human
ucaggccucaagcugcuuuaag

SEQ ID NO: 632828 - RNA, 22 nt, Human
aggccagcucacccuggcuccu

SEQ ID NO: 632829 - RNA, 22 nt, Human
ugaaauaucauuuucaucuccc

SEQ ID NO: 632830 - RNA, 22 nt, Human
ggagagaauucagcuuaagauu

SEQ ID NO: 632831 - RNA, 22 nt, Human
ugggggcauggaccagccuggc

SEQ ID NO: 632832 - RNA, 22 nt, Human
augucacagcucccauuccucc

SEQ ID NO: 632833 - RNA, 22 nt, Human
uuuccucuccaccaggaggucu

SEQ ID NO: 632834 - RNA, 23 nt, Human
gugugcaggauuauuugcagaca

SEQ ID NO: 632835 - RNA, 22 nt, Human
gccagccagaguccaucugaga

SEQ ID NO: 632836 - RNA, 22 nt, Human
ugcagagaccacugugccuucc

SEQ ID NO: 632837 - RNA, 22 nt, Human
uccagcucugauucucacuagc

SEQ ID NO: 632838 - RNA, 22 nt, Human
uucaacaagucuuuuuucacug

SEQ ID NO: 632839 - RNA, 22 nt, Human
ggccuugguuccaaagcaggca

SEQ ID NO: 632840 - RNA, 22 nt, Human
ucuggccccuggucucuggugu

SEQ ID NO: 632841 - RNA, 22 nt, Human
aagagugacuuuucagcuguga

SEQ ID NO: 632842 - RNA, 22 nt, Human
aagcaucuauagguucuaggag

SEQ ID NO: 632843 - RNA, 22 nt, Human
uggugggacaucugaggagagg

SEQ ID NO: 632844 - RNA, 22 nt, Human
ugcuggcugggcugcuggagac

SEQ ID NO: 632845 - RNA, 22 nt, Human
gaguccuggcguccaauuuccu

SEQ ID NO: 632846 - RNA, 22 nt, Human
ucucaggaagugauauugagac

SEQ ID NO: 632847 - RNA, 22 nt, Human
auucagauugguuuaagcuagu

SEQ ID NO: 632848 - RNA, 22 nt, Human
aggaaagguucagugauugaaa

SEQ ID NO: 632849 - RNA, 22 nt, Human
cauaacauuauuuucugaagau

SEQ ID NO: 632850 - RNA, 22 nt, Human
ggcagcuuuuaucccugacaga

SEQ ID NO: 632851 - RNA, 22 nt, Human
aggguuaauugguguccugagg

SEQ ID NO: 632852 - RNA, 19 nt, Human
ucucacaguuuccuugccu

SEQ ID NO: 632853 - RNA, 22 nt, Human
uuccuuucucuggacugcagcc

SEQ ID NO: 632854 - RNA, 22 nt, Human
ccagcaggagaugccugugucu

SEQ ID NO: 632855 - RNA, 22 nt, Human
aaacuguuccuuuuucagcaac

SEQ ID NO: 632856 - RNA, 22 nt, Human
acagggaagcucaggggcucug

SEQ ID NO: 632857 - RNA, 19 nt, Human
acaaugaauguguucucuu

SEQ ID NO: 632858 - RNA, 22 nt, Human
uggagccaaggccaguucucag

SEQ ID NO: 632859 - RNA, 17 nt, Human
ggcagcugugugcaugc

SEQ ID NO: 632860 - RNA, 19 nt, Human
ugcagggcugcgccugggg

SEQ ID NO: 632861 - RNA, 22 nt, Human
cauguauugaagugugcaucug

SEQ ID NO: 632862 - RNA, 22 nt, Human
guggagagagugacagcaucuu

SEQ ID NO: 632863 - RNA, 22 nt, Human
ucaggaugguguggaggaaaua

SEQ ID NO: 632864 - RNA, 22 nt, Human
ccaagagguaauacgagauauc

SEQ ID NO: 632865 - RNA, 22 nt, Human
gaagacauuuuaugcauacucu

SEQ ID NO: 632866 - RNA, 22 nt, Human
aacaguuugccugaaauguauu

SEQ ID NO: 632867 - RNA, 22 nt, Human
gucuguaucagaggagugaaug

SEQ ID NO: 632868 - RNA, 22 nt, Human
ugugggaaucagccaggggggc

SEQ ID NO: 632869 - RNA, 22 nt, Human
ggcaggcuugauauggggggac

SEQ ID NO: 632870 - RNA, 21 nt, Human
uccugcaggaggccugagagg

SEQ ID NO: 632871 - RNA, 22 nt, Human
ugggaagaugaggugccauggg

SEQ ID NO: 632872 - RNA, 22 nt, Human
aaguacauaaaggaauuagcca

SEQ ID NO: 632873 - RNA, 21 nt, Human
agcuuccagagcacauuccau

SEQ ID NO: 632874 - RNA, 22 nt, Human
auuucccaauacgcuaagugga

SEQ ID NO: 632875 - RNA, 22 nt, Human
gaggagcacaugaggcugaggg

SEQ ID NO: 632876 - RNA, 21 nt, Human
uaagcuaaacauucaguuaac

SEQ ID NO: 632877 - RNA, 22 nt, Human
guggccuagaggugcaaggaac

SEQ ID NO: 632878 - RNA, 22 nt, Human
gcugcuguguuggccacugcuu

SEQ ID NO: 632879 - RNA, 19 nt, Human
acugggaaaaaggcacugg

SEQ ID NO: 632880 - RNA, 22 nt, Human
gggcuucucucaggggcaugag

SEQ ID NO: 632881 - RNA, 22 nt, Human
caggcccugccuuggcaugugu

SEQ ID NO: 632882 - RNA, 23 nt, Human
acacaaggguaacugccagccau

SEQ ID NO: 632883 - RNA, 22 nt, Human
gagaggcugugugccauuguug

SEQ ID NO: 632884 - RNA, 22 nt, Human
aacagcaucaccccauaacauu

SEQ ID NO: 632885 - RNA, 21 nt, Human
aguuugaugcaauuucugaga

SEQ ID NO: 632886 - RNA, 22 nt, Human
aucaaaaugcuccagugauggu

SEQ ID NO: 632887 - RNA, 22 nt, Human
ugcucugggauucagcagccug

SEQ ID NO: 632888 - RNA, 22 nt, Human
gcccuggccuucaucucagaca

SEQ ID NO: 632889 - RNA, 22 nt, Human
uagacaggguggcuuagaaaca

SEQ ID NO: 632890 - RNA, 22 nt, Human
cugcugggucccccugcugauu

SEQ ID NO: 632891 - RNA, 22 nt, Human
aaauuggauuuuaaacuguugg

SEQ ID NO: 632892 - RNA, 22 nt, Human
aauggccauaucauugcagagc

SEQ ID NO: 632893 - RNA, 22 nt, Human
cauguguguggacgagcguggc

SEQ ID NO: 632894 - RNA, 22 nt, Human
aaaaguauuuuggaucucagau

SEQ ID NO: 632895 - RNA, 22 nt, Human
ccuuuacacauggaaugggucu

SEQ ID NO: 632896 - RNA, 22 nt, Human
uaagcaaauaaugcaucaaggg

SEQ ID NO: 632897 - RNA, 21 nt, Human
aaagaacaggcagauguucuu

SEQ ID NO: 632898 - RNA, 22 nt, Human
cacagucaauguagaaauauga

SEQ ID NO: 632899 - RNA, 22 nt, Human
uuucucaacuguauuaugcaga

SEQ ID NO: 632900 - RNA, 22 nt, Human
uaaagucaagguacuguuucac

SEQ ID NO: 632901 - RNA, 22 nt, Human
aagcacauuaaggaacauugaa

SEQ ID NO: 632902 - RNA, 21 nt, Human
ucaguccuguuagccuuuggg

SEQ ID NO: 632903 - RNA, 17 nt, Human
aggccagaugaggcaag

SEQ ID NO: 632904 - RNA, 22 nt, Human
ucaaauaccagcuuuuccagaa

SEQ ID NO: 632905 - RNA, 23 nt, Human
acagacuguauucaaaguaggac

SEQ ID NO: 632906 - RNA, 22 nt, Human
uccaggcugcagucuugcccuc

SEQ ID NO: 632907 - RNA, 17 nt, Human
uggcacagaggugcuau

SEQ ID NO: 632908 - RNA, 22 nt, Human
agggugcagggacaggugugca

SEQ ID NO: 632909 - RNA, 22 nt, Human
ucugggaauuuauuggcacuuu

SEQ ID NO: 632910 - RNA, 22 nt, Human
uaaugugaagacauaaaucaga

SEQ ID NO: 632911 - RNA, 20 nt, Human
uggaccacccuccucuuugc

SEQ ID NO: 632912 - RNA, 22 nt, Human
agagacagacacaucgggcugc

SEQ ID NO: 632913 - RNA, 22 nt, Human
ccagcaccuugaucuuggaguu

SEQ ID NO: 632914 - RNA, 22 nt, Human
aucagagauuguaguaugugca

SEQ ID NO: 632915 - RNA, 20 nt, Human
caccuggauaugacccagcu

SEQ ID NO: 632916 - RNA, 19 nt, Human
ggcugagcgccuuggcugc

SEQ ID NO: 632917 - RNA, 22 nt, Human
ggcuucaccugugcacucuacc

SEQ ID NO: 632918 - RNA, 22 nt, Human
gcaggcugaugacuggaguugg

SEQ ID NO: 632919 - RNA, 22 nt, Human
cuuuaacaguuccauucaauuu

SEQ ID NO: 632920 - RNA, 22 nt, Human
uuacgcagcugcuccaggaagc

SEQ ID NO: 632921 - RNA, 22 nt, Human
uuugaacaggaguaucuauagu

SEQ ID NO: 632922 - RNA, 22 nt, Human
cucacaggcgguaauucaggga

SEQ ID NO: 632923 - RNA, 22 nt, Human
ucaucacauguguagucauccc

SEQ ID NO: 632924 - RNA, 22 nt, Human
uuugacucauugauuuucucug

SEQ ID NO: 632925 - RNA, 22 nt, Human
aucaccaaggcuuuaggaauuu

SEQ ID NO: 632926 - RNA, 22 nt, Human
gaggcucacugggcaaagacuc

SEQ ID NO: 632927 - RNA, 22 nt, Human
cauaaacucuugagauucuugu

SEQ ID NO: 632928 - RNA, 22 nt, Human
guaauugaguuaccuggaccag

SEQ ID NO: 632929 - RNA, 22 nt, Human
uuugugugcaacgcauggaguc

SEQ ID NO: 632930 - RNA, 19 nt, Human
agcaacaccguuuauuucc

SEQ ID NO: 632931 - RNA, 22 nt, Human
ccaggaagggcucuuuaaagac

SEQ ID NO: 632932 - RNA, 22 nt, Human
uucagggcuuagggaaauagug

SEQ ID NO: 632933 - RNA, 22 nt, Human
agacagacauucuagagccacc

SEQ ID NO: 632934 - RNA, 22 nt, Human
acugucuuguguuaaagaacca

SEQ ID NO: 632935 - RNA, 22 nt, Human
auaaacuuuagcggaaggagga

SEQ ID NO: 632936 - RNA, 22 nt, Human
uuguuucaugaguguaaaggga

SEQ ID NO: 632937 - RNA, 22 nt, Human
acaugcacaccuauauacaugu

SEQ ID NO: 632938 - RNA, 22 nt, Human
auggagugggccaauuuuagug

SEQ ID NO: 632939 - RNA, 22 nt, Human
aucauguuaaauauuucaaucu

SEQ ID NO: 632940 - RNA, 22 nt, Human
augguagguacaacagcaggca

SEQ ID NO: 632941 - RNA, 23 nt, Human
ucucuuucaagagcuuaaugugc

SEQ ID NO: 632942 - RNA, 22 nt, Human
caauucaaaugcauaguucaca

SEQ ID NO: 632943 - RNA, 22 nt, Human
accagcugauuuaagaauaaag

SEQ ID NO: 632944 - RNA, 22 nt, Human
aaccucucugugcccugacuuu

SEQ ID NO: 632945 - RNA, 22 nt, Human
caugaaggcugccagcaggcau

SEQ ID NO: 632946 - RNA, 22 nt, Human
gagagggccagggugagaacua

SEQ ID NO: 632947 - RNA, 22 nt, Human
gucacaguggggucacagugug

SEQ ID NO: 632948 - RNA, 22 nt, Human
uagggaccuuagaauuguaugu

SEQ ID NO: 632949 - RNA, 19 nt, Human
ccaugccaucauuuuaaag

SEQ ID NO: 632950 - RNA, 22 nt, Human
cccagggcuguagaauguccaa

SEQ ID NO: 632951 - RNA, 22 nt, Human
gcccaggaguuugcauuuuaac

SEQ ID NO: 632952 - RNA, 22 nt, Human
cccagggauuauaaaggugaaa

SEQ ID NO: 632953 - RNA, 22 nt, Human
guucagcagcagugauuuugug

SEQ ID NO: 632954 - RNA, 22 nt, Human
agcuucuuggcucagcacuugg

SEQ ID NO: 632955 - RNA, 22 nt, Human
ucugauaagugguguauacugu

SEQ ID NO: 632956 - RNA, 22 nt, Human
ugcagcaggcacaggacggaag

SEQ ID NO: 632957 - RNA, 22 nt, Human
ccaagaugaucuuuacaguguu

SEQ ID NO: 632958 - RNA, 22 nt, Human
agugcauuccuggggaagaagc

SEQ ID NO: 632959 - RNA, 22 nt, Human
aggagcagaauuuaaugugcag

SEQ ID NO: 632960 - RNA, 22 nt, Human
auuucuaaagagggugguuugg

SEQ ID NO: 632961 - RNA, 22 nt, Human
uaaccugaggagaacagugcuu

SEQ ID NO: 632962 - RNA, 22 nt, Human
cugcaguaguuuuugacucuag

SEQ ID NO: 632963 - RNA, 22 nt, Human
aaggcccuggaugguuuugaga

SEQ ID NO: 632964 - RNA, 21 nt, Human
ucagugcaauucuauggggaa

SEQ ID NO: 632965 - RNA, 22 nt, Human
ucuuggaaguagaacacagucu

SEQ ID NO: 632966 - RNA, 22 nt, Human
gcagagcugguacuugagccug

SEQ ID NO: 632967 - RNA, 21 nt, Human
gaggcccaugggacaggggcu

SEQ ID NO: 632968 - RNA, 21 nt, Human
uuggccuuugucucagacacu

SEQ ID NO: 632969 - RNA, 22 nt, Human
ucaggacacuuggcacaagguc

SEQ ID NO: 632970 - RNA, 22 nt, Human
aggaggaaaaaggccacagcaa

SEQ ID NO: 632971 - RNA, 22 nt, Human
augcugggaaguccuaaccaca

SEQ ID NO: 632972 - RNA, 22 nt, Human
aaacccugcucuuauggaacuu

SEQ ID NO: 632973 - RNA, 22 nt, Human
uuacagagcucauuucuaaggg

SEQ ID NO: 632974 - RNA, 22 nt, Human
gggagcugcggucuugcgaaga

SEQ ID NO: 632975 - RNA, 22 nt, Human
agugggugagcuuggucuagau

SEQ ID NO: 632976 - RNA, 22 nt, Human
ucccugcauuugggagaguguc

SEQ ID NO: 632977 - RNA, 22 nt, Human
gaaauguuguccugucucuuga

SEQ ID NO: 632978 - RNA, 22 nt, Human
gaaaugaaacaggcuuuuaagg

SEQ ID NO: 632979 - RNA, 22 nt, Human
acaugcacccaguuacacucuc

SEQ ID NO: 632980 - RNA, 22 nt, Human
cuauuuuucuguacccuaauuu

SEQ ID NO: 632981 - RNA, 22 nt, Human
uggcccugacagguccugggca

SEQ ID NO: 632982 - RNA, 22 nt, Human
uuguuauuuaggucuggguuag

SEQ ID NO: 632983 - RNA, 22 nt, Human
agcccugcccugccauguggca

SEQ ID NO: 632984 - RNA, 22 nt, Human
uucuucauggguucuuuuagga

SEQ ID NO: 632985 - RNA, 22 nt, Human
ucucaucuccauuauagcauca

SEQ ID NO: 632986 - RNA, 22 nt, Human
gauauguaccaccucuuaaaag

SEQ ID NO: 632987 - RNA, 23 nt, Human
uggaagacuccucucuuggcugc

SEQ ID NO: 632988 - RNA, 22 nt, Human
aggacacacuucugaggucuuu

SEQ ID NO: 632989 - RNA, 22 nt, Human
gcugcagguugggcaacagagu

SEQ ID NO: 632990 - RNA, 22 nt, Human
cugaaggauuagagagcacuua

SEQ ID NO: 632991 - RNA, 22 nt, Human
aaauacacguacauguguaaaa

SEQ ID NO: 632992 - RNA, 22 nt, Human
gcagcuuucugggacagaaagg

SEQ ID NO: 632993 - RNA, 22 nt, Human
aguccauaguuuacauuacagc

SEQ ID NO: 632994 - RNA, 23 nt, Human
agaaaagcuuggacacauggccu

SEQ ID NO: 632995 - RNA, 22 nt, Human
cuggguguagcccaguaugagg

SEQ ID NO: 632996 - RNA, 22 nt, Human
uuggcauugaaguuucauuggu

SEQ ID NO: 632997 - RNA, 22 nt, Human
uccaggcaaggauaauaaacau

SEQ ID NO: 632998 - RNA, 22 nt, Human
caugcagggagugcuccuauua

SEQ ID NO: 632999 - RNA, 22 nt, Human
cagcacaguuucuggcccgccg

SEQ ID NO: 633000 - RNA, 20 nt, Human
aggcagacaaggagucuguu

SEQ ID NO: 633001 - RNA, 22 nt, Human
cucugcaguguaacagcgcuug

SEQ ID NO: 633002 - RNA, 22 nt, Human
uugcuuuagggcaaauauuuca

SEQ ID NO: 633003 - RNA, 22 nt, Human
ucugagaaugaguguuuucuua

SEQ ID NO: 633004 - RNA, 22 nt, Human
cuccaggcgggaggcgguucca

SEQ ID NO: 633005 - RNA, 22 nt, Human
ugagggcagagcacuggggagc

SEQ ID NO: 633006 - RNA, 22 nt, Human
gcaggugggagccgcugccuga

SEQ ID NO: 633007 - RNA, 22 nt, Human
cugaggaagagguaccauuugu

SEQ ID NO: 633008 - RNA, 22 nt, Human
ucauucucugggaugcaguuug

SEQ ID NO: 633009 - RNA, 22 nt, Human
aguguccucaggcuuuguuccu

SEQ ID NO: 633010 - RNA, 22 nt, Human
ucauaaauuagcugucuuugaa

SEQ ID NO: 633011 - RNA, 22 nt, Human
ggaauugguuucaagggaaagu

SEQ ID NO: 633012 - RNA, 22 nt, Human
gacaagacagcuugcagacaac

SEQ ID NO: 633013 - RNA, 22 nt, Human
ggcuuuaucaaaugagacccug

SEQ ID NO: 633014 - RNA, 22 nt, Human
aggacacagcugcucugcagag

SEQ ID NO: 633015 - RNA, 22 nt, Human
uaguggcugcagggcuguuuga

SEQ ID NO: 633016 - RNA, 22 nt, Human
ccagcucccgcaggcugcacag

SEQ ID NO: 633017 - RNA, 22 nt, Human
ugguccuggaagguccugaggg

SEQ ID NO: 633018 - RNA, 19 nt, Human
ugaggcacaugauaagaac

SEQ ID NO: 633019 - RNA, 22 nt, Human
aaaacaguuauaaacagaguca

SEQ ID NO: 633020 - RNA, 22 nt, Human
uguuuuuuccuuaugcaaucug

SEQ ID NO: 633021 - RNA, 22 nt, Human
acccugggucauauacagugug

SEQ ID NO: 633022 - RNA, 22 nt, Human
uauaguacauggaaucuucaua

SEQ ID NO: 633023 - RNA, 21 nt, Human
agaaaaguagaguuuucagag

SEQ ID NO: 633024 - RNA, 16 nt, Human
ggcaccagugaacaca

SEQ ID NO: 633025 - RNA, 22 nt, Human
agcugggaugaggagcauccuu

SEQ ID NO: 633026 - RNA, 22 nt, Human
uucuuuuuaucuucccauaaga

SEQ ID NO: 633027 - RNA, 21 nt, Human
acugugggucugaccaccugg

SEQ ID NO: 633028 - RNA, 22 nt, Human
guuuugaaucacugcgcuucac

SEQ ID NO: 633029 - RNA, 22 nt, Human
acuuuuuacaggguguauacca

SEQ ID NO: 633030 - RNA, 22 nt, Human
aguguguagcacaugguaagca

SEQ ID NO: 633031 - RNA, 22 nt, Human
uugcugaugguauuaugcuagu

SEQ ID NO: 633032 - RNA, 22 nt, Human
acucacagcaugagcuuggcag

SEQ ID NO: 633033 - RNA, 22 nt, Human
cagaggcuuggcauuaucaugc

SEQ ID NO: 633034 - RNA, 22 nt, Human
acaucugauuacaugagaauau

SEQ ID NO: 633035 - RNA, 22 nt, Human
uggcccagcccugcucuagggc

SEQ ID NO: 633036 - RNA, 22 nt, Human
uggagcugggguuugaaucugg

SEQ ID NO: 633037 - RNA, 22 nt, Human
gaauuucaaagagguuaagagg

SEQ ID NO: 633038 - RNA, 22 nt, Human
agggagaagagaacaaagcccu

SEQ ID NO: 633039 - RNA, 22 nt, Human
gaggccuccucugagacaucug

SEQ ID NO: 633040 - RNA, 22 nt, Human
cugagcccauugggugcuguua

SEQ ID NO: 633041 - RNA, 20 nt, Human
gacacaggcaguccucagag

SEQ ID NO: 633042 - RNA, 22 nt, Human
agucgcagacaugguccccuuu

SEQ ID NO: 633043 - RNA, 20 nt, Human
uccugagauuuaagggguuc

SEQ ID NO: 633044 - RNA, 22 nt, Human
auuuacacuugguuuacuagag

SEQ ID NO: 633045 - RNA, 22 nt, Human
cauugcuuaucuaguucacaua

SEQ ID NO: 633046 - RNA, 22 nt, Human
aaccuggaggacugcaauccau

SEQ ID NO: 633047 - RNA, 22 nt, Human
uguugaguauauaccuacaagu

SEQ ID NO: 633048 - RNA, 20 nt, Human
uggaccauaaacaccaggua

SEQ ID NO: 633049 - RNA, 22 nt, Human
uugcccugucuuaagcuggcaa

SEQ ID NO: 633050 - RNA, 22 nt, Human
auggccagaugaaauaauagag

SEQ ID NO: 633051 - RNA, 22 nt, Human
auuauucuuaugucaucauggc

SEQ ID NO: 633052 - RNA, 22 nt, Human
ccucaguguuaggauaagagaa

SEQ ID NO: 633053 - RNA, 22 nt, Human
augucccagcugagagacaacu

SEQ ID NO: 633054 - RNA, 19 nt, Human
agggccugagcagauguug

SEQ ID NO: 633055 - RNA, 22 nt, Human
gggcucucgauuagacccuggg

SEQ ID NO: 633056 - RNA, 22 nt, Human
cagagagaaucuuggcagcuga

SEQ ID NO: 633057 - RNA, 22 nt, Human
cccuucagcugagugggacagc

SEQ ID NO: 633058 - RNA, 22 nt, Human
acaguucuguccuagacuucgu

SEQ ID NO: 633059 - RNA, 22 nt, Human
uuaauguggaaagcucuugagu

SEQ ID NO: 633060 - RNA, 22 nt, Human
uggaauguaaacucugugaggg

SEQ ID NO: 633061 - RNA, 22 nt, Human
cagcagcagauucagcgucugg

SEQ ID NO: 633062 - RNA, 22 nt, Human
gugcagccugucgccaguggau

SEQ ID NO: 633063 - RNA, 22 nt, Human
aaauugucaguuaucugggaua

SEQ ID NO: 633064 - RNA, 22 nt, Human
aucacagagauugcuuuuaaaa

SEQ ID NO: 633065 - RNA, 22 nt, Human
agcugaggcauggacaggcugc

SEQ ID NO: 633066 - RNA, 22 nt, Human
cccagcaguuugcuuagaguga

SEQ ID NO: 633067 - RNA, 22 nt, Human
cuuccagcugauuggcauccag

SEQ ID NO: 633068 - RNA, 22 nt, Human
gaacacaucacauuuuacagug

SEQ ID NO: 633069 - RNA, 22 nt, Human
agcccugagcuggccugggcuu

SEQ ID NO: 633070 - RNA, 22 nt, Human
aaaugcaaggccaugugaagga

SEQ ID NO: 633071 - RNA, 22 nt, Human
cuggcaggaagaggaaagguca

SEQ ID NO: 633072 - RNA, 22 nt, Human
gcacacacaugugaguacaugc

SEQ ID NO: 633073 - RNA, 22 nt, Human
cuugggugugaccuuggcauug

SEQ ID NO: 633074 - RNA, 22 nt, Human
ggcaggguuuacaauagcaaua

SEQ ID NO: 633075 - RNA, 22 nt, Human
caggucugaagagucacaugcc

SEQ ID NO: 633076 - RNA, 22 nt, Human
aaauuaagaguaacucuguaga

SEQ ID NO: 633077 - RNA, 22 nt, Human
cuggagccuagguugaccuggg
